United States Patent Application Publication US 2011/0191912 A1 - sequence listing, part 24

SEQ ID NO: 90208 - DNA, 7 bp, Unknown
  misc_feature (1)..( 7): Result.001 file - promoters60/1009834
aaaaatt

SEQ ID NO: 90209 - DNA, 9 bp, Unknown
  misc_feature (1)..( 9): Result.001 file - promoters60/1009834
aaaaagagt

SEQ ID NO: 90210 - DNA, 9 bp, Unknown
  misc_feature (1)..( 9): Result.001 file - promoters60/1009834
aaaaaaagt

SEQ ID NO: 90211 - DNA, 7 bp, Unknown
  misc_feature (1)..( 7): Result.001 file - promoters60/1009834
gaaacaa

SEQ ID NO: 90212 - DNA, 7 bp, Unknown
  misc_feature (1)..( 7): Result.001 file - promoters60/1009834
gaaacaa

SEQ ID NO: 90213 - DNA, 8 bp, Unknown
  misc_feature (1)..( 8): Result.001 file - promoters60/1009834
ttacaata

SEQ ID NO: 90214 - DNA, 8 bp, Unknown
  misc_feature (1)..( 8): Result.001 file - promoters60/1009834
ttagaata

SEQ ID NO: 90215 - DNA, 9 bp, Unknown
  misc_feature (1)..( 9): Result.001 file - promoters60/1009834
atttgtttt

SEQ ID NO: 90216 - DNA, 9 bp, Unknown
  misc_feature (1)..( 9): Result.001 file - promoters60/1009834
attcgtttt

SEQ ID NO: 90217 - DNA, 7 bp, Unknown
  misc_feature (1)..( 7): Result.001 file - promoters60/1009834
tccgatt

SEQ ID NO: 90218 - DNA, 7 bp, Unknown
  misc_feature (1)..( 7): Result.001 file - promoters60/1009834
tcccatt

SEQ ID NO: 90219 - DNA, 7 bp, Unknown
  misc_feature (1)..( 7): Result.001 file - promoters60/1009834
attgttt

SEQ ID NO: 90220 - DNA, 7 bp, Unknown
  misc_feature (1)..( 7): Result.001 file - promoters60/1009834
atttttt

SEQ ID NO: 90221 - DNA, 6 bp, Unknown
  misc_feature (1)..( 6): Result.001 file - promoters60/1009834
tattaa

SEQ ID NO: 90222 - DNA, 6 bp, Unknown
  misc_feature (1)..( 6): Result.001 file - promoters60/1009834
tattaa

SEQ ID NO: 90223 - DNA, 6 bp, Unknown
  misc_feature (1)..( 6): Result.001 file - promoters60/1009834
taatat

SEQ ID NO: 90224 - DNA, 6 bp, Unknown
  misc_feature (1)..( 6): Result.001 file - promoters60/1009854
taatat

SEQ ID NO: 90225 - DNA, 13 bp, Unknown
  misc_feature (1)..( 13): Result.001 file - promoters60/1009854
attcattaacaaa

SEQ ID NO: 90226 - DNA, 13 bp, Unknown
  misc_feature (1)..( 13): Result.001 file - promoters60/1009854
attcataaaaaaa

SEQ ID NO: 90227 - DNA, 13 bp, Unknown
  misc_feature (1)..( 13): Result.001 file - promoters60/1009854
atttataaagaaa

SEQ ID NO: 90228 - DNA, 13 bp, Unknown
  misc_feature (1)..( 13): Result.001 file - promoters60/1009854
cagaaaaaagaaa

SEQ ID NO: 90229 - DNA, 8 bp, Unknown
  misc_feature (1)..( 8): Result.001 file - promoters60/1009854
taacaaat

SEQ ID NO: 90230 - DNA, 8 bp, Unknown
  misc_feature (1)..( 8): Result.001 file - promoters60/1009854
taaaaaaa

SEQ ID NO: 90231 - DNA, 8 bp, Unknown
  misc_feature (1)..( 8): Result.001 file - promoters60/1009854
gaaccaat

SEQ ID NO: 90232 - DNA, 8 bp, Unknown
  misc_feature (1)..( 8): Result.001 file - promoters60/1009854
gaaaaaag

SEQ ID NO: 90233 - DNA, 12 bp, Unknown
  misc_feature (1)..( 12): Result.001 file - promoters60/1009854
aactaattcaat

SEQ ID NO: 90234 - DNA, 12 bp, Unknown
  misc_feature (1)..( 12): Result.001 file - promoters60/1009854
gactaatgcaat

SEQ ID NO: 90235 - DNA, 12 bp, Unknown
  misc_feature (1)..( 12): Result.001 file - promoters60/1009854
aaccaatggttg

SEQ ID NO: 90236 - DNA, 13 bp, Unknown
  misc_feature (1)..( 13): Result.001 file - promoters60/1009854
atttctacaaaac

SEQ ID NO: 90237 - DNA, 13 bp, Unknown
  misc_feature (1)..( 13): Result.001 file - promoters60/1009854
attcctaaaaaat

SEQ ID NO: 90238 - DNA, 13 bp, Unknown
  misc_feature (1)..( 13): Result.001 file - promoters60/1009854
atggtcaaaaaag

SEQ ID NO: 90239 - DNA, 13 bp, Unknown
  misc_feature (1)..( 13): Result.001 file - promoters60/1009854
taaaataaatata

SEQ ID NO: 90240 - DNA, 10 bp, Unknown
  misc_feature (1)..( 10): Result.001 file - promoters60/1009854
aaataaaaca

SEQ ID NO: 90241 - DNA, 10 bp, Unknown
  misc_feature (1)..( 10): Result.001 file - promoters60/1009854
aaagaaaaca

SEQ ID NO: 90242 - DNA, 10 bp, Unknown
  misc_feature (1)..( 10): Result.001 file - promoters60/1009854
aaagaaagaa

SEQ ID NO: 90243 - DNA, 10 bp, Unknown
  misc_feature (1)..( 10): Result.001 file - promoters60/1009854
aaaaaaatct

SEQ ID NO: 90244 - DNA, 9 bp, Unknown
  misc_feature (1)..( 9): Result.001 file - promoters60/1009854
caaaacaaa

SEQ ID NO: 90245 - DNA, 9 bp, Unknown
  misc_feature (1)..( 9): Result.001 file - promoters60/1009854
caaatcaaa

SEQ ID NO: 90246 - DNA, 9 bp, Unknown
  misc_feature (1)..( 9): Result.001 file - promoters60/1009854
taaaacaat

SEQ ID NO: 90247 - DNA, 7 bp, Unknown
  misc_feature (1)..( 7): Result.001 file - promoters60/1009854
tattttg

SEQ ID NO: 90248 - DNA, 7 bp, Unknown
  misc_feature (1)..( 7): Result.001 file - promoters60/1009854
aattttg

SEQ ID NO: 90249 - DNA, 7 bp, Unknown
  misc_feature (1)..( 7): Result.001 file - promoters60/1009854
aatcttg

SEQ ID NO: 90250 - DNA, 9 bp, Unknown
  misc_feature (1)..( 9): Result.001 file - promoters60/1009854
tcatgttta

SEQ ID NO: 90251 - DNA, 9 bp, Unknown
  misc_feature (1)..( 9): Result.001 file - promoters60/1009854
ttttgttta

SEQ ID NO: 90252 - DNA, 9 bp, Unknown
  misc_feature (1)..( 9): Result.001 file - promoters60/1009854
ttttgtttc

SEQ ID NO: 90253 - DNA, 9 bp, Unknown
  misc_feature (1)..( 9): Result.001 file - promoters60/1009854
ctttgatta

SEQ ID NO: 90254 - DNA, 8 bp, Unknown
  misc_feature (1)..( 8): Result.001 file - promoters60/1009854
ttgaaatc

SEQ ID NO: 90255 - DNA, 8 bp, Unknown
  misc_feature (1)..( 8): Result.001 file - promoters60/1009854
ttgagatc

SEQ ID NO: 90256 - DNA, 8 bp, Unknown
  misc_feature (1)..( 8): Result.001 file - promoters60/1009854
atgagatg

SEQ ID NO: 90257 - DNA, 9 bp, Unknown
  misc_feature (1)..( 9): Result.001 file - promoters60/1009854
gaaatgatg

SEQ ID NO: 90258 - DNA, 9 bp, Unknown
  misc_feature (1)..( 9): Result.001 file - promoters60/1009854
gaaatgaag

SEQ ID NO: 90259 - DNA, 9 bp, Unknown
  misc_feature (1)..( 9): Result.001 file - promoters60/1009854
ctaatcaag

SEQ ID NO: 90260 - DNA, 8 bp, Unknown
  misc_feature (1)..( 8): Result.001 file - promoters60/1009854
aaacatat

SEQ ID NO: 90261 - DNA, 8 bp, Unknown
  misc_feature (1)..( 8): Result.001 file - promoters60/1009854
aaatatat

SEQ ID NO: 90262 - DNA, 8 bp, Unknown
  misc_feature (1)..( 8): Result.001 file - promoters60/1009854
aaaaatag

SEQ ID NO: 90263 - DNA, 12 bp, Unknown
  misc_feature (1)..( 12): Result.001 file - promoters60/1009854
tcatattacaat

SEQ ID NO: 90264 - DNA, 12 bp, Unknown
  misc_feature (1)..( 12): Result.001 file - promoters60/1009854
ttttattaaaat

SEQ ID NO: 90265 - DNA, 12 bp, Unknown
  misc_feature (1)..( 12): Result.001 file - promoters60/1009854
ttttcttaagtc

SEQ ID NO: 90266 - DNA, 9 bp, Unknown
  misc_feature (1)..( 9): Result.001 file - promoters60/1009854
ctttcacaa

SEQ ID NO: 90267 - DNA, 9 bp, Unknown
  misc_feature (1)..( 9): Result.001 file - promoters60/1009854
ttttgacaa

SEQ ID NO: 90268 - DNA, 9 bp, Unknown
  misc_feature (1)..( 9): Result.001 file - promoters60/1009854
ctttcataa

SEQ ID NO: 90269 - DNA, 9 bp, Unknown
  misc_feature (1)..( 9): Result.001 file - promoters60/1009854
aaataaatt

SEQ ID NO: 90270 - DNA, 9 bp, Unknown
  misc_feature (1)..( 9): Result.001 file - promoters60/1009854
aaaaaaaag

SEQ ID NO: 90271 - DNA, 10 bp, Unknown
  misc_feature (1)..( 10): Result.001 file - promoters60/1009854
aaattaaatt

SEQ ID NO: 90272 - DNA, 7 bp, Unknown
  misc_feature (1)..( 7): Result.001 file - promoters60/1009854
atataaa

SEQ ID NO: 90273 - DNA, 7 bp, Unknown
  misc_feature (1)..( 7): Result.001 file - promoters60/1009854
ctataaa

SEQ ID NO: 90274 - DNA, 7 bp, Unknown
  misc_feature (1)..( 7): Result.001 file - promoters60/1009861
ctataag

SEQ ID NO: 90275 - DNA, 6 bp, Unknown
  misc_feature (1)..( 6): Result.001 file - promoters60/1009861
aaagaa

SEQ ID NO: 90276 - DNA, 6 bp, Unknown
  misc_feature (1)..( 6): Result.001 file - promoters60/1009861
aaagaa

SEQ ID NO: 90277 - DNA, 8 bp, Unknown
  misc_feature (1)..( 8): Result.001 file - promoters60/1009861
attttaat

SEQ ID NO: 90278 - DNA, 8 bp, Unknown
  misc_feature (1)..( 8): Result.001 file - promoters60/1009861
attataat

SEQ ID NO: 90279 - DNA, 8 bp, Unknown
  misc_feature (1)..( 8): Result.001 file - promoters60/1009861
cttttaat

SEQ ID NO: 90280 - DNA, 6 bp, Unknown
  misc_feature (1)..( 6): Result.001 file - promoters60/1009861
aaccaa

SEQ ID NO: 90281 - DNA, 6 bp, Unknown
  misc_feature (1)..( 6): Result.001 file - promoters60/1009861
aaccaa

SEQ ID NO: 90282 - DNA, 6 bp, Unknown
  misc_feature (1)..( 6): Result.001 file - promoters60/1009861
aaaatt

SEQ ID NO: 90283 - DNA, 6 bp, Unknown
  misc_feature (1)..( 6): Result.001 file - promoters60/1009861
aaaatt

SEQ ID NO: 90284 - DNA, 6 bp, Unknown
  misc_feature (1)..( 6): Result.001 file - promoters60/1009861
aaaatt

SEQ ID NO: 90285 - DNA, 9 bp, Unknown
  misc_feature (1)..( 9): Result.001 file - promoters60/1009861
ttcaaattc

SEQ ID NO: 90286 - DNA, 9 bp, Unknown
  misc_feature (1)..( 9): Result.001 file - promoters60/1009861
ttcaaattt

SEQ ID NO: 90287 - DNA, 9 bp, Unknown
  misc_feature (1)..( 9): Result.001 file - promoters60/1009861
ttcaatttc

SEQ ID NO: 90288 - DNA, 8 bp, Unknown
  misc_feature (1)..( 8): Result.001 file - promoters60/1009861
ttagttgg

SEQ ID NO: 90289 - DNA, 8 bp, Unknown
  misc_feature (1)..( 8): Result.001 file - promoters60/1009861
ttagctgg

SEQ ID NO: 90290 - DNA, 9 bp, Unknown
  misc_feature (1)..( 9): Result.001 file - promoters60/1009861
agtaaaatg

SEQ ID NO: 90291 - DNA, 9 bp, Unknown
  misc_feature (1)..( 9): Result.001 file - promoters60/1009861
agtacaatg

SEQ ID NO: 90292 - DNA, 9 bp, Unknown
  misc_feature (1)..( 9): Result.001 file - promoters60/1009861
agtccaacc

SEQ ID NO: 90293 - DNA, 6 bp, Unknown
  misc_feature (1)..( 6): Result.001 file - promoters60/1009861
gaacat

SEQ ID NO: 90294 - DNA, 6 bp, Unknown
  misc_feature (1)..( 6): Result.001 file - promoters60/1009861
gaacat

SEQ ID NO: 90295 - DNA, 6 bp, Unknown
  misc_feature (1)..( 6): Result.001 file - promoters60/1009861
ttattt

SEQ ID NO: 90296 - DNA, 6 bp, Unknown
  misc_feature (1)..( 6): Result.001 file - promoters60/1009861
ttattt

SEQ ID NO: 90297 - DNA, 6 bp, Unknown
  misc_feature (1)..( 6): Result.001 file - promoters60/1009861
tctttt

SEQ ID NO: 90298 - DNA, 6 bp, Unknown
  misc_feature (1)..( 6): Result.001 file - promoters60/1009861
tctttt

SEQ ID NO: 90299 - DNA, 10 bp, Unknown
  misc_feature (1)..( 10): Result.001 file - promoters60/1009861
ttttcattca

SEQ ID NO: 90300 - DNA, 10 bp, Unknown
  misc_feature (1)..( 10): Result.001 file - promoters60/1009861
ttttaattaa

SEQ ID NO: 90301 - DNA, 10 bp, Unknown
  misc_feature (1)..( 10): Result.001 file - promoters60/1009861
acataattaa

SEQ ID NO: 90302 - DNA, 6 bp, Unknown
  misc_feature (1)..( 6): Result.001 file - promoters60/1009861
aatttc

SEQ ID NO: 90303 - DNA, 6 bp, Unknown
  misc_feature (1)..( 6): Result.001 file - promoters60/1009861
aatttc

SEQ ID NO: 90304 - DNA, 8 bp, Unknown
  misc_feature (1)..( 8): Result.001 file - promoters60/1009861
aaaatttc

SEQ ID NO: 90305 - DNA, 8 bp, Unknown
  misc_feature (1)..( 8): Result.001 file - promoters60/1009861
caaatttt

SEQ ID NO: 90306 - DNA, 7 bp, Unknown
  misc_feature (1)..( 7): Result.001 file - promoters60/1009861
tttaata

SEQ ID NO: 90307 - DNA, 7 bp, Unknown
  misc_feature (1)..( 7): Result.001 file - promoters60/1009861
tttaata

SEQ ID NO: 90308 - DNA, 7 bp, Unknown
  misc_feature (1)..( 7): Result.001 file - promoters60/1009861
caaaaac

SEQ ID NO: 90309 - DNA, 7 bp, Unknown
  misc_feature (1)..( 7): Result.001 file - promoters60/1009861
caaaaac

SEQ ID NO: 90310 - DNA, 8 bp, Unknown
  misc_feature (1)..( 8): Result.001 file - promoters60/1009861
aaaagcgc

SEQ ID NO: 90311 - DNA, 8 bp, Unknown
  misc_feature (1)..( 8): Result.001 file - promoters60/1009861
aaacgcgc

SEQ ID NO: 90312 - DNA, 8 bp, Unknown
  misc_feature (1)..( 8): Result.001 file - promoters60/1009861
tatacata

SEQ ID NO: 90313 - DNA, 8 bp, Unknown
  misc_feature (1)..( 8): Result.001 file - promoters60/1009861
tatatata

SEQ ID NO: 90314 - DNA, 7 bp, Unknown
  misc_feature (1)..( 7): Result.001 file - promoters60/1009861
aactgaa

SEQ ID NO: 90315 - DNA, 7 bp, Unknown
  misc_feature (1)..( 7): Result.001 file - promoters60/1009861
aaccgaa

SEQ ID NO: 90316 - DNA, 6 bp, Unknown
  misc_feature (1)..( 6): Result.001 file - promoters60/1009861
aatttt

SEQ ID NO: 90317 - DNA, 6 bp, Unknown
  misc_feature (1)..( 6): Result.001 file - promoters60/1009861
aatttt

SEQ ID NO: 90318 - DNA, 7 bp, Unknown
  misc_feature (1)..( 7): Result.001 file - promoters60/1009861
cataaac

SEQ ID NO: 90319 - DNA, 7 bp, Unknown
  misc_feature (1)..( 7): Result.001 file - promoters60/1009861
cataaac

SEQ ID NO: 90320 - DNA, 6 bp, Unknown
  misc_feature (1)..( 6): Result.001 file - promoters60/1009861
ctcctt

SEQ ID NO: 90321 - DNA, 6 bp, Unknown
  misc_feature (1)..( 6): Result.001 file - promoters60/1009861
ctcctt

SEQ ID NO: 90322 - DNA, 9 bp, Unknown
  misc_feature (1)..( 9): Result.001 file - promoters60/1009861
tttcaattt

SEQ ID NO: 90323 - DNA, 9 bp, Unknown
  misc_feature (1)..( 9): Result.001 file - promoters60/1009861
tttcatttt

SEQ ID NO: 90324 - DNA, 7 bp, Unknown
  misc_feature (1)..( 7): Result.001 file - promoters60/1009861
tttctct

SEQ ID NO: 90325 - DNA, 7 bp, Unknown
  misc_feature (1)..( 7): Result.001 file - promoters60/1009861
tttgtct

SEQ ID NO: 90326 - DNA, 6 bp, Unknown
  misc_feature (1)..( 6): Result.001 file - promoters60/1009861
taacat

SEQ ID NO: 90327 - DNA, 6 bp, Unknown
  misc_feature (1)..( 6): Result.001 file - promoters60/1009861
taacat

SEQ ID NO: 90328 - DNA, 6 bp, Unknown
  misc_feature (1)..( 6): Result.001 file - promoters60/1009861
ttttta

SEQ ID NO: 90329 - DNA, 6 bp, Unknown
  misc_feature (1)..( 6): Result.001 file - promoters60/1009861
ttttta

SEQ ID NO: 90330 - DNA, 6 bp, Unknown
  misc_feature (1)..( 6): Result.001 file - promoters60/1009861
ataata

SEQ ID NO: 90331 - DNA, 6 bp, Unknown
  misc_feature (1)..( 6): Result.001 file - promoters60/1009861
ataata

SEQ ID NO: 90332 - DNA, 8 bp, Unknown
  misc_feature (1)..( 8): Result.001 file - promoters60/1009861
catatata

SEQ ID NO: 90333 - DNA, 8 bp, Unknown
  misc_feature (1)..( 8): Result.001 file - promoters60/1009930
catatata

SEQ ID NO: 90334 - DNA, 9 bp, Unknown
  misc_feature (1)..( 9): Result.001 file - promoters60/1009930
ccatttctg

SEQ ID NO: 90335 - DNA, 9 bp, Unknown
  misc_feature (1)..( 9): Result.001 file - promoters60/1009930
tcatatctg

SEQ ID NO: 90336 - DNA, 9 bp, Unknown
  misc_feature (1)..( 9): Result.001 file - promoters60/1009930
tcatattta

SEQ ID NO: 90337 - DNA, 8 bp, Unknown
  misc_feature (1)..( 8): Result.001 file - promoters60/1009930
tttaaatt

SEQ ID NO: 90338 - DNA, 8 bp, Unknown
  misc_feature (1)..( 8): Result.001 file - promoters60/1009930
tttacatt

SEQ ID NO: 90339 - DNA, 8 bp, Unknown
  misc_feature (1)..( 8): Result.001 file - promoters60/1009930
tttcaatc

SEQ ID NO: 90340 - DNA, 9 bp, Unknown
  misc_feature (1)..( 9): Result.001 file - promoters60/1009930
aatttattt

SEQ ID NO: 90341 - DNA, 9 bp, Unknown
  misc_feature (1)..( 9): Result.001 file - promoters60/1009930
aatctattg

SEQ ID NO: 90342 - DNA, 9 bp, Unknown
  misc_feature (1)..( 9): Result.001 file - promoters60/1009930
ttcttattt

SEQ ID NO: 90343 - DNA, 9 bp, Unknown
  misc_feature (1)..( 9): Result.001 file - promoters60/1009930
ttacattag

SEQ ID NO: 90344 - DNA, 9 bp, Unknown
  misc_feature (1)..( 9): Result.001 file - promoters60/1009930
ttatatttt

SEQ ID NO: 90345 - DNA, 9 bp, Unknown
  misc_feature (1)..( 9): Result.001 file - promoters60/1009930
taacattag

SEQ ID NO: 90346 - DNA, 8 bp, Unknown
  misc_feature (1)..( 8): Result.001 file - promoters60/1009930
ttatgatc

SEQ ID NO: 90347 - DNA, 8 bp, Unknown
  misc_feature (1)..( 8): Result.001 file - promoters60/1009930
atatcatc

SEQ ID NO: 90348 - DNA, 8 bp, Unknown
  misc_feature (1)..( 8): Result.001 file - promoters60/1009930
ttatgaac

SEQ ID NO: 90349 - DNA, 7 bp, Unknown
  misc_feature (1)..( 7): Result.001 file - promoters60/1009930
taacact

SEQ ID NO: 90350 - DNA, 7 bp, Unknown
  misc_feature (1)..( 7): Result.001 file - promoters60/1009930
aaacact

SEQ ID NO: 90351 - DNA, 7 bp, Unknown
  misc_feature (1)..( 7): Result.001 file - promoters60/1009930
aaacact

SEQ ID NO: 90352 - DNA, 9 bp, Unknown
  misc_feature (1)..( 9): Result.001 file - promoters60/1009930
caaataatt

SEQ ID NO: 90353 - DNA, 9 bp, Unknown
  misc_feature (1)..( 9): Result.001 file - promoters60/1009930
tcaataata

SEQ ID NO: 90354 - DNA, 9 bp, Unknown
  misc_feature (1)..( 9): Result.001 file - promoters60/1009941
caaataatt

SEQ ID NO: 90355 - DNA, 10 bp, Unknown
  misc_feature (1)..( 10): Result.001 file - promoters60/1009941
ttcttttttc

SEQ ID NO: 90356 - DNA, 10 bp, Unknown
  misc_feature (1)..( 10): Result.001 file - promoters60/1009941
atcttcttta

SEQ ID NO: 90357 - DNA, 10 bp, Unknown
  misc_feature (1)..( 10): Result.001 file - promoters60/1009941
gtcttctttg

SEQ ID NO: 90358 - DNA, 10 bp, Unknown
  misc_feature (1)..( 10): Result.001 file - promoters60/1009941
ttcttttttt

SEQ ID NO: 90359 - DNA, 10 bp, Unknown
  misc_feature (1)..( 10): Result.001 file - promoters60/1009941
atctttttga

SEQ ID NO: 90360 - DNA, 10 bp, Unknown
  misc_feature (1)..( 10): Result.001 file - promoters60/1009941
ttcatcttca

SEQ ID NO: 90361 - DNA, 10 bp, Unknown
  misc_feature (1)..( 10): Result.001 file - promoters60/1009941
ctcttattta

SEQ ID NO: 90362 - DNA, 14 bp, Unknown
  misc_feature (1)..( 14): Result.001 file - promoters60/1009941
aaaagtatttatat

SEQ ID NO: 90363 - DNA, 14 bp, Unknown
  misc_feature (1)..( 14): Result.001 file - promoters60/1009941
catggtatatatat

SEQ ID NO: 90364 - DNA, 14 bp, Unknown
  misc_feature (1)..( 14): Result.001 file - promoters60/1009941
aaaaatatttgtat

SEQ ID NO: 90365 - DNA, 14 bp, Unknown
  misc_feature (1)..( 14): Result.001 file - promoters60/1009941
cgacctatatataa

SEQ ID NO: 90366 - DNA, 14 bp, Unknown
  misc_feature (1)..( 14): Result.001 file - promoters60/1009941
ctcagtatataaat

SEQ ID NO: 90367 - DNA, 14 bp, Unknown
  misc_feature (1)..( 14): Result.001 file - promoters60/1009941
cgtataatataaag

SEQ ID NO: 90368 - DNA, 10 bp, Unknown
  misc_feature (1)..( 10): Result.001 file - promoters60/1009941
acatatatat

SEQ ID NO: 90369 - DNA, 10 bp, Unknown
  misc_feature (1)..( 10): Result.001 file - promoters60/1009941
cagtatataa

SEQ ID NO: 90370 - DNA, 10 bp, Unknown
  misc_feature (1)..( 10): Result.001 file - promoters60/1009941
tcttatttat

SEQ ID NO: 90371 - DNA, 10 bp, Unknown
  misc_feature (1)..( 10): Result.001 file - promoters60/1009941
tagtatttat

SEQ ID NO: 90372 - DNA, 10 bp, Unknown
  misc_feature (1)..( 10): Result.001 file - promoters60/1009941
tactatatac

SEQ ID NO: 90373 - DNA, 10 bp, Unknown
  misc_feature (1)..( 10): Result.001 file - promoters60/1009941
tcttctttag

SEQ ID NO: 90374 - DNA, 10 bp, Unknown
  misc_feature (1)..( 10): Result.001 file - promoters60/1009941
taaagtgtat

SEQ ID NO: 90375 - DNA, 10 bp, Unknown
  misc_feature (1)..( 10): Result.001 file - promoters60/1009941
agtttttcgt

SEQ ID NO: 90376 - DNA, 10 bp, Unknown
  misc_feature (1)..( 10): Result.001 file - promoters60/1009941
gttttctcgt

SEQ ID NO: 90377 - DNA, 10 bp, Unknown
  misc_feature (1)..( 10): Result.001 file - promoters60/1009941
catttttcta

SEQ ID NO: 90378 - DNA, 10 bp, Unknown
  misc_feature (1)..( 10): Result.001 file - promoters60/1009941
ttgttttcta

SEQ ID NO: 90379 - DNA, 10 bp, Unknown
  misc_feature (1)..( 10): Result.001 file - promoters60/1009941
gattttttgc

SEQ ID NO: 90380 - DNA, 10 bp, Unknown
  misc_feature (1)..( 10): Result.001 file - promoters60/1009941
aattgttcta

SEQ ID NO: 90381 - DNA, 12 bp, Unknown
  misc_feature (1)..( 12): Result.001 file - promoters60/1009941
taaaataatttt

SEQ ID NO: 90382 - DNA, 12 bp, Unknown
  misc_feature (1)..( 12): Result.001 file - promoters60/1009941
agaaataacaaa

SEQ ID NO: 90383 - DNA, 12 bp, Unknown
  misc_feature (1)..( 12): Result.001 file - promoters60/1009941
aaaaattatttt

SEQ ID NO: 90384 - DNA, 12 bp, Unknown
  misc_feature (1)..( 12): Result.001 file - promoters60/1009941
agaaattaaagg

SEQ ID NO: 90385 - DNA, 13 bp, Unknown
  misc_feature (1)..( 13): Result.001 file - promoters60/1009941
gaaagattaataa

SEQ ID NO: 90386 - DNA, 13 bp, Unknown
  misc_feature (1)..( 13): Result.001 file - promoters60/1009941
caaaaatttataa

SEQ ID NO: 90387 - DNA, 16 bp, Unknown
  misc_feature (1)..( 16): Result.001 file - promoters60/1009941
agtaaagattattgat

SEQ ID NO: 90388 - DNA, 16 bp, Unknown
  misc_feature (1)..( 16): Result.001 file - promoters60/1009941
atgaaagactatttgc

SEQ ID NO: 90389 - DNA, 16 bp, Unknown
  misc_feature (1)..( 16): Result.001 file - promoters60/1009941
ttaaaagtttaaaatg

SEQ ID NO: 90390 - DNA, 16 bp, Unknown
  misc_feature (1)..( 16): Result.001 file - promoters60/1009941
tttaatgaagcagctg

SEQ ID NO: 90391 - DNA, 16 bp, Unknown
  misc_feature (1)..( 16): Result.001 file - promoters60/1009941
aagtaagactttggct

SEQ ID NO: 90392 - DNA, 16 bp, Unknown
  misc_feature (1)..( 16): Result.001 file - promoters60/1009941
tttttgttctatatgc

SEQ ID NO: 90393 - DNA, 16 bp, Unknown
  misc_feature (1)..( 16): Result.001 file - promoters60/1009999
tttaatcgatcatcat

SEQ ID NO: 90394 - DNA, 6 bp, Unknown
  misc_feature (1)..( 6): Result.001 file - promoters60/1009999
ttgttt

SEQ ID NO: 90395 - DNA, 6 bp, Unknown
  misc_feature (1)..( 6): Result.001 file - promoters60/1009999
ttgttt

SEQ ID NO: 90396 - DNA, 6 bp, Unknown
  misc_feature (1)..( 6): Result.001 file - promoters60/1009999
tatttt

SEQ ID NO: 90397 - DNA, 6 bp, Unknown
  misc_feature (1)..( 6): Result.001 file - promoters60/1009999
tatttt

SEQ ID NO: 90398 - DNA, 7 bp, Unknown
  misc_feature (1)..( 7): Result.001 file - promoters60/1009999
tttgctt

SEQ ID NO: 90399 - DNA, 7 bp, Unknown
  misc_feature (1)..( 7): Result.001 file - promoters60/1009999
tttactt

SEQ ID NO: 90400 - DNA, 6 bp, Unknown
  misc_feature (1)..( 6): Result.001 file - promoters60/1009999
aaaaga

SEQ ID NO: 90401 - DNA, 6 bp, Unknown
  misc_feature (1)..( 6): Result.001 file - promoters60/1009999
aaaaga

SEQ ID NO: 90402 - DNA, 6 bp, Unknown
  misc_feature (1)..( 6): Result.001 file - promoters60/1009999
aataaa

SEQ ID NO: 90403 - DNA, 6 bp, Unknown
  misc_feature (1)..( 6): Result.001 file - promoters60/1009999
aataaa

SEQ ID NO: 90404 - DNA, 7 bp, Unknown
  misc_feature (1)..( 7): Result.001 file - promoters60/1009999
ttcttcc

SEQ ID NO: 90405 - DNA, 7 bp, Unknown
  misc_feature (1)..( 7): Result.001 file - promoters60/1009999
ttcctcc

SEQ ID NO: 90406 - DNA, 10 bp, Unknown
  misc_feature (1)..( 10): Result.001 file - promoters60/1009999
gtacaaagta

SEQ ID NO: 90407 - DNA, 10 bp, Unknown
  misc_feature (1)..( 10): Result.001 file - promoters60/1009999
gtaaaaattt

SEQ ID NO: 90408 - DNA, 10 bp, Unknown
  misc_feature (1)..( 10): Result.001 file - promoters60/1009999
ctaaatattt

SEQ ID NO: 90409 - DNA, 7 bp, Unknown
  misc_feature (1)..( 7): Result.001 file - promoters60/1009999
ttggtca

SEQ ID NO: 90410 - DNA, 7 bp, Unknown
  misc_feature (1)..( 7): Result.001 file - promoters60/1009999
ttgctca

SEQ ID NO: 90411 - DNA, 7 bp, Unknown
  misc_feature (1)..( 7): Result.001 file - promoters60/1009999
ccactaa

SEQ ID NO: 90412 - DNA, 7 bp, Unknown
  misc_feature (1)..( 7): Result.001 file - promoters60/1009999
ccattaa

SEQ ID NO: 90413 - DNA, 6 bp, Unknown
  misc_feature (1)..( 6): Result.001 file - promoters60/1009999
ataaaa

SEQ ID NO: 90414 - DNA, 6 bp, Unknown
  misc_feature (1)..( 6): Result.001 file - promoters60/1009999
ataaaa

SEQ ID NO: 90415 - DNA, 8 bp, Unknown
  misc_feature (1)..( 8): Result.001 file - promoters60/1009999
tttatttt

SEQ ID NO: 90416 - DNA, 8 bp, Unknown
  misc_feature (1)..( 8): Result.001 file - promoters60/1009999
tttctttt

SEQ ID NO: 90417 - DNA, 6 bp, Unknown
  misc_feature (1)..( 6): Result.001 file - promoters60/1009999
tttact

SEQ ID NO: 90418 - DNA, 6 bp, Unknown
  misc_feature (1)..( 6): Result.001 file - promoters60/1009999
tttact

SEQ ID NO: 90419 - DNA, 9 bp, Unknown
  misc_feature (1)..( 9): Result.001 file - promoters60/1009999
cttattttt

SEQ ID NO: 90420 - DNA, 9 bp, Unknown
  misc_feature (1)..( 9): Result.001 file - promoters60/1009999
cttagtttt

SEQ ID NO: 90421 - DNA, 8 bp, Unknown
  misc_feature (1)..( 8): Result.001 file - promoters60/1009999
tttgtttg

SEQ ID NO: 90422 - DNA, 8 bp, Unknown
  misc_feature (1)..( 8): Result.001 file - promoters60/1009999
tttgtttg

SEQ ID NO: 90423 - DNA, 6 bp, Unknown
  misc_feature (1)..( 6): Result.001 file - promoters60/1009999
aagttt

SEQ ID NO: 90424 - DNA, 6 bp, Unknown
  misc_feature (1)..( 6): Result.001 file - promoters60/1009999
aagttt

SEQ ID NO: 90425 - DNA, 10 bp, Unknown
  misc_feature (1)..( 10): Result.001 file - promoters60/1009999
caaagtaatt

SEQ ID NO: 90426 - DNA, 10 bp, Unknown
  misc_feature (1)..( 10): Result.001 file - promoters60/1009999
caaactaatt

SEQ ID NO: 90427 - DNA, 7 bp, Unknown
  misc_feature (1)..( 7): Result.001 file - promoters60/1009999
attggaa

SEQ ID NO: 90428 - DNA, 7 bp, Unknown
  misc_feature (1)..( 7): Result.001 file - promoters60/1009999
attagaa

SEQ ID NO: 90429 - DNA, 8 bp, Unknown
  misc_feature (1)..( 8): Result.001 file - promoters60/1009999
aacaaaat

SEQ ID NO: 90430 - DNA, 8 bp, Unknown
  misc_feature (1)..( 8): Result.001 file - promoters60/1010019
aactaaat

SEQ ID NO: 90431 - DNA, 7 bp, Unknown
  misc_feature (1)..( 7): Result.001 file - promoters60/1010019
caagaac

SEQ ID NO: 90432 - DNA, 7 bp, Unknown
  misc_feature (1)..( 7): Result.001 file - promoters60/1010019
caaaaac

SEQ ID NO: 90433 - DNA, 7 bp, Unknown
  misc_feature (1)..( 7): Result.001 file - promoters60/1010025
caaaaag

SEQ ID NO: 90434 - DNA, 9 bp, Unknown
  misc_feature (1)..( 9): Result.001 file - promoters60/1010025
agattttct

SEQ ID NO: 90435 - DNA, 9 bp, Unknown
  misc_feature (1)..( 9): Result.001 file - promoters60/1010025
tcattatct

SEQ ID NO: 90436 - DNA, 9 bp, Unknown
  misc_feature (1)..( 9): Result.001 file - promoters60/1010025
agattttaa

SEQ ID NO: 90437 - DNA, 6 bp, Unknown
  misc_feature (1)..( 6): Result.001 file - promoters60/1010025
aaaaac

SEQ ID NO: 90438 - DNA, 6 bp, Unknown
  misc_feature (1)..( 6): Result.001 file - promoters60/1010025
aaaaac

SEQ ID NO: 90439 - DNA, 6 bp, Unknown
  misc_feature (1)..( 6): Result.001 file - promoters60/1010025
aaaaac

SEQ ID NO: 90440 - DNA, 9 bp, Unknown
  misc_feature (1)..( 9): Result.001 file - promoters60/1010025
tgaaaaagt

SEQ ID NO: 90441 - DNA, 9 bp, Unknown
  misc_feature (1)..( 9): Result.001 file - promoters60/1010025
tgaaaaaaa

SEQ ID NO: 90442 - DNA, 9 bp, Unknown
  misc_feature (1)..( 9): Result.001 file - promoters60/1010025
ttaaaaaaa

SEQ ID NO: 90443 - DNA, 11 bp, Unknown
  misc_feature (1)..( 11): Result.001 file - promoters60/1010025
gtttacttgct

SEQ ID NO: 90444 - DNA, 11 bp, Unknown
  misc_feature (1)..( 11): Result.001 file - promoters60/1010025
atttatttgtg

SEQ ID NO: 90445 - DNA, 11 bp, Unknown
  misc_feature (1)..( 11): Result.001 file - promoters60/1010025
atttattagtg

SEQ ID NO: 90446 - DNA, 8 bp, Unknown
  misc_feature (1)..( 8): Result.001 file - promoters60/1010025
tagtacta

SEQ ID NO: 90447 - DNA, 8 bp, Unknown
  misc_feature (1)..( 8): Result.001 file - promoters60/1010025
atgtacta

SEQ ID NO: 90448 - DNA, 8 bp, Unknown
  misc_feature (1)..( 8): Result.001 file - promoters60/1010025
atgaactc

SEQ ID NO: 90449 - DNA, 9 bp, Unknown
  misc_feature (1)..( 9): Result.001 file - promoters60/1010025
aaaatttgt

SEQ ID NO: 90450 - DNA, 9 bp, Unknown
  misc_feature (1)..( 9): Result.001 file - promoters60/1010025
aaaatgtgt

SEQ ID NO: 90451 - DNA, 9 bp, Unknown
  misc_feature (1)..( 9): Result.001 file - promoters60/1010055
aaaatttga

SEQ ID NO: 90452 - DNA, 10 bp, Unknown
  misc_feature (1)..( 10): Result.001 file - promoters60/1010055
gaaaaacaaa

SEQ ID NO: 90453 - DNA, 10 bp, Unknown
  misc_feature (1)..( 10): Result.001 file - promoters60/1010055
ggaaaaaaaa

SEQ ID NO: 90454 - DNA, 10 bp, Unknown
  misc_feature (1)..( 10): Result.001 file - promoters60/1010055
gtcaaacaaa

SEQ ID NO: 90455 - DNA, 10 bp, Unknown
  misc_feature (1)..( 10): Result.001 file - promoters60/1010055
tttaaaaaaa

SEQ ID NO: 90456 - DNA, 10 bp, Unknown
  misc_feature (1)..( 10): Result.001 file - promoters60/1010055
gtgaaacaaa

SEQ ID NO: 90457 - DNA, 10 bp, Unknown
  misc_feature (1)..( 10): Result.001 file - promoters60/1010055
tataagaaaa

SEQ ID NO: 90458 - DNA, 10 bp, Unknown
  misc_feature (1)..( 10): Result.001 file - promoters60/1010055
tatgagaaat

SEQ ID NO: 90459 - DNA, 14 bp, Unknown
  misc_feature (1)..( 14): Result.001 file - promoters60/1010055
atattattagtagg

SEQ ID NO: 90460 - DNA, 14 bp, Unknown
  misc_feature (1)..( 14): Result.001 file - promoters60/1010055
ttattatattgaga

SEQ ID NO: 90461 - DNA, 14 bp, Unknown
  misc_feature (1)..( 14): Result.001 file - promoters60/1010055
atataattattttg

SEQ ID NO: 90462 - DNA, 14 bp, Unknown
  misc_feature (1)..( 14): Result.001 file - promoters60/1010055
aaattatttacaaa

SEQ ID NO: 90463 - DNA, 14 bp, Unknown
  misc_feature (1)..( 14): Result.001 file - promoters60/1010055
gattaattcttttc

SEQ ID NO: 90464 - DNA, 14 bp, Unknown
  misc_feature (1)..( 14): Result.001 file - promoters60/1010055
ttttaatgattttg

SEQ ID NO: 90465 - DNA, 14 bp, Unknown
  misc_feature (1)..( 14): Result.001 file - promoters60/1010055
agaaaatatacatt

SEQ ID NO: 90466 - DNA, 9 bp, Unknown
  misc_feature (1)..( 9): Result.001 file - promoters60/1010055
aatgaaaaa

SEQ ID NO: 90467 - DNA, 9 bp, Unknown
  misc_feature (1)..( 9): Result.001 file - promoters60/1010055
aatgaaatt

SEQ ID NO: 90468 - DNA, 10 bp, Unknown
  misc_feature (1)..( 10): Result.001 file - promoters60/1010055
tatgagaaat

SEQ ID NO: 90469 - DNA, 10 bp, Unknown
  misc_feature (1)..( 10): Result.001 file - promoters60/1010055
aatgatattc

SEQ ID NO: 90470 - DNA, 10 bp, Unknown
  misc_feature (1)..( 10): Result.001 file - promoters60/1010055
aatgttattt

SEQ ID NO: 90471 - DNA, 10 bp, Unknown
  misc_feature (1)..( 10): Result.001 file - promoters60/1010055
ctatttattt

SEQ ID NO: 90472 - DNA, 11 bp, Unknown
  misc_feature (1)..( 11): Result.001 file - promoters60/1010055
atgaaaaacaa

SEQ ID NO: 90473 - DNA, 11 bp, Unknown
  misc_feature (1)..( 11): Result.001 file - promoters60/1010055
aagaaaaaata

SEQ ID NO: 90474 - DNA, 11 bp, Unknown
  misc_feature (1)..( 11): Result.001 file - promoters60/1010055
atgagaaatca

SEQ ID NO: 90475 - DNA, 11 bp, Unknown
  misc_feature (1)..( 11): Result.001 file - promoters60/1010055
gggaaaaaaaa

SEQ ID NO: 90476 - DNA, 11 bp, Unknown
  misc_feature (1)..( 11): Result.001 file - promoters60/1010055
aagaaaatata

SEQ ID NO: 90477 - DNA, 11 bp, Unknown
  misc_feature (1)..( 11): Result.001 file - promoters60/1010055
aacaaattatt

SEQ ID NO: 90478 - DNA, 8 bp, Unknown
  misc_feature (1)..( 8): Result.001 file - promoters60/1010055
atttattt

SEQ ID NO: 90479 - DNA, 8 bp, Unknown
  misc_feature (1)..( 8): Result.001 file - promoters60/1010055
attcattt

SEQ ID NO: 90480 - DNA, 8 bp, Unknown
  misc_feature (1)..( 8): Result.001 file - promoters60/1010055
ttttattc

SEQ ID NO: 90481 - DNA, 8 bp, Unknown
  misc_feature (1)..( 8): Result.001 file - promoters60/1010055
attttttt

SEQ ID NO: 90482 - DNA, 8 bp, Unknown
  misc_feature (1)..( 8): Result.001 file - promoters60/1010055
ttttcttt

SEQ ID NO: 90483 - DNA, 8 bp, Unknown
  misc_feature (1)..( 8): Result.001 file - promoters60/1010055
tttcattt

SEQ ID NO: 90484 - DNA, 8 bp, Unknown
  misc_feature (1)..( 8): Result.001 file - promoters60/1010065
atttttag

SEQ ID NO: 90485 - DNA, 8 bp, Unknown
  misc_feature (1)..( 8): Result.001 file - promoters60/1010065
tatacata

SEQ ID NO: 90486 - DNA, 8 bp, Unknown
  misc_feature (1)..( 8): Result.001 file - promoters60/1010065
tattcata

SEQ ID NO: 90487 - DNA, 9 bp, Unknown
  misc_feature (1)..( 9): Result.001 file - promoters60/1010065
tcgaagtag

SEQ ID NO: 90488 - DNA, 9 bp, Unknown
  misc_feature (1)..( 9): Result.001 file - promoters60/1010065
tcgaaatag

SEQ ID NO: 90489 - DNA, 9 bp, Unknown
  misc_feature (1)..( 9): Result.001 file - promoters60/1010065
gcgcaatta

SEQ ID NO: 90490 - DNA, 9 bp, Unknown
  misc_feature (1)..( 9): Result.001 file - promoters60/1010065
gcgcaatta

SEQ ID NO: 90491 - DNA, 6 bp, Unknown
  misc_feature (1)..( 6): Result.001 file - promoters60/1010065
taaaca

SEQ ID NO: 90492 - DNA, 6 bp, Unknown
  misc_feature (1)..( 6): Result.001 file - promoters60/1010065
taaaca

SEQ ID NO: 90493 - DNA, 8 bp, Unknown
  misc_feature (1)..( 8): Result.001 file - promoters60/1010065
attattta

SEQ ID NO: 90494 - DNA, 8 bp, Unknown
  misc_feature (1)..( 8): Result.001 file - promoters60/1010065
atttttta

SEQ ID NO: 90495 - DNA, 6 bp, Unknown
  misc_feature (1)..( 6): Result.001 file - promoters60/1010065
tttctc

SEQ ID NO: 90496 - DNA, 6 bp, Unknown
  misc_feature (1)..( 6): Result.001 file - promoters60/1010065
tttctc

SEQ ID NO: 90497 - DNA, 6 bp, Unknown
  misc_feature (1)..( 6): Result.001 file - promoters60/1010065
aatttt

SEQ ID NO: 90498 - DNA, 6 bp, Unknown
  misc_feature (1)..( 6): Result.001 file - promoters60/1010065
aatttt

SEQ ID NO: 90499 - DNA, 7 bp, Unknown
  misc_feature (1)..( 7): Result.001 file - promoters60/1010065
atatata

SEQ ID NO: 90500 - DNA, 7 bp, Unknown
  misc_feature (1)..( 7): Result.001 file - promoters60/1010065
atacata

SEQ ID NO: 90501 - DNA, 8 bp, Unknown
  misc_feature (1)..( 8): Result.001 file - promoters60/1010065
acatgcat

SEQ ID NO: 90502 - DNA, 8 bp, Unknown
  misc_feature (1)..( 8): Result.001 file - promoters60/1010065
acatacat

SEQ ID NO: 90503 - DNA, 7 bp, Unknown
  misc_feature (1)..( 7): Result.001 file - promoters60/1010065
atagtag

SEQ ID NO: 90504 - DNA, 7 bp, Unknown
  misc_feature (1)..( 7): Result.001 file - promoters60/1010065
atactag

SEQ ID NO: 90505 - DNA, 7 bp, Unknown
  misc_feature (1)..( 7): Result.001 file - promoters60/1010065
catttat

SEQ ID NO: 90506 - DNA, 7 bp, Unknown
  misc_feature (1)..( 7): Result.001 file - promoters60/1010065
catctat

SEQ ID NO: 90507 - DNA, 7 bp, Unknown
  misc_feature (1)..( 7): Result.001 file - promoters60/1010065
acatttc

SEQ ID NO: 90508 - DNA, 7 bp, Unknown
  misc_feature (1)..( 7): Result.001 file - promoters60/1010065
acatttc

SEQ ID NO: 90509 - DNA, 7 bp, Unknown
  misc_feature (1)..( 7): Result.001 file - promoters60/1010065
tcacata

SEQ ID NO: 90510 - DNA, 7 bp, Unknown
  misc_feature (1)..( 7): Result.001 file - promoters60/1010065
tcatata

SEQ ID NO: 90511 - DNA, 6 bp, Unknown
  misc_feature (1)..( 6): Result.001 file - promoters60/1010065
atttat

SEQ ID NO: 90512 - DNA, 6 bp, Unknown
  misc_feature (1)..( 6): Result.001 file - promoters60/1010065
atttat

SEQ ID NO: 90513 - DNA, 6 bp, Unknown
  misc_feature (1)..( 6): Result.001 file - promoters60/1010065
taataa

SEQ ID NO: 90514 - DNA, 6 bp, Unknown
  misc_feature (1)..( 6): Result.001 file - promoters60/1010065
taataa

SEQ ID NO: 90515 - DNA, 6 bp, Unknown
  misc_feature (1)..( 6): Result.001 file - promoters60/1010065
tcgatc

SEQ ID NO: 90516 - DNA, 6 bp, Unknown
  misc_feature (1)..( 6): Result.001 file - promoters60/1010065
tcgatc

SEQ ID NO: 90517 - DNA, 6 bp, Unknown
  misc_feature (1)..( 6): Result.001 file - promoters60/1010065
tagatt

SEQ ID NO: 90518 - DNA, 6 bp, Unknown
  misc_feature (1)..( 6): Result.001 file - promoters60/1010115
tagatt

SEQ ID NO: 90519 - DNA, 6 bp, Unknown
  misc_feature (1)..( 6): Result.001 file - promoters60/1010115
tttttt

SEQ ID NO: 90520 - DNA, 6 bp, Unknown
  misc_feature (1)..( 6): Result.001 file - promoters60/1010115
tttttt

SEQ ID NO: 90521 - DNA, 6 bp, Unknown
  misc_feature (1)..( 6): Result.001 file - promoters60/1010115
tttttt

SEQ ID NO: 90522 - DNA, 7 bp, Unknown
  misc_feature (1)..( 7): Result.001 file - promoters60/1010115
tttgttt

SEQ ID NO: 90523 - DNA, 7 bp, Unknown
  misc_feature (1)..( 7): Result.001 file - promoters60/1010115
tttgtta

SEQ ID NO: 90524 - DNA, 10 bp, Unknown
  misc_feature (1)..( 10): Result.001 file - promoters60/1010115
tcgagaatac

SEQ ID NO: 90525 - DNA, 10 bp, Unknown
  misc_feature (1)..( 10): Result.001 file - promoters60/1010115
ttgagattac

SEQ ID NO: 90526 - DNA, 10 bp, Unknown
  misc_feature (1)..( 10): Result.001 file - promoters60/1010115
tcgataattg

SEQ ID NO: 90527 - DNA, 10 bp, Unknown
  misc_feature (1)..( 10): Result.001 file - promoters60/1010115
tgaataattt

SEQ ID NO: 90528 - DNA, 10 bp, Unknown
  misc_feature (1)..( 10): Result.001 file - promoters60/1010140
tgtataattt

SEQ ID NO: 90529 - DNA, 6 bp, Unknown
  misc_feature (1)..( 6): Result.001 file - promoters60/1010140
atagaa

SEQ ID NO: 90530 - DNA, 6 bp, Unknown
  misc_feature (1)..( 6): Result.001 file - promoters60/1010140
atagaa

SEQ ID NO: 90531 - DNA, 7 bp, Unknown
  misc_feature (1)..( 7): Result.001 file - promoters60/1010140
aacaaca

SEQ ID NO: 90532 - DNA, 7 bp, Unknown
  misc_feature (1)..( 7): Result.001 file - promoters60/1010140
aacaaca

SEQ ID NO: 90533 - DNA, 6 bp, Unknown
  misc_feature (1)..( 6): Result.001 file - promoters60/1010140
ttgaat

SEQ ID NO: 90534 - DNA, 6 bp, Unknown
  misc_feature (1)..( 6): Result.001 file - promoters60/1010140
ttgaat

SEQ ID NO: 90535 - DNA, 6 bp, Unknown
  misc_feature (1)..( 6): Result.001 file - promoters60/1010140
acaaag

SEQ ID NO: 90536 - DNA, 6 bp, Unknown
  misc_feature (1)..( 6): Result.001 file - promoters60/1010140
acaaag

SEQ ID NO: 90537 - DNA, 7 bp, Unknown
  misc_feature (1)..( 7): Result.001 file - promoters60/1010140
ctgattc

SEQ ID NO: 90538 - DNA, 7 bp, Unknown
  misc_feature (1)..( 7): Result.001 file - promoters60/1010140
ctgtttc

SEQ ID NO: 90539 - DNA, 9 bp, Unknown
  misc_feature (1)..( 9): Result.001 file - promoters60/1010140
ttttttttt

SEQ ID NO: 90540 - DNA, 9 bp, Unknown
  misc_feature (1)..( 9): Result.001 file - promoters60/1010140
ttttttttt

SEQ ID NO: 90541 - DNA, 9 bp, Unknown
  misc_feature (1)..( 9): Result.001 file - promoters60/1010140
gaagaaaat

SEQ ID NO: 90542 - DNA, 9 bp, Unknown
  misc_feature (1)..( 9): Result.001 file - promoters60/1010140
gaagcaaat

SEQ ID NO: 90543 - DNA, 8 bp, Unknown
  misc_feature (1)..( 8): Result.001 file - promoters60/1010140
aaaggttt

SEQ ID NO: 90544 - DNA, 8 bp, Unknown
  misc_feature (1)..( 8): Result.001 file - promoters60/1010140
aaaagttt

SEQ ID NO: 90545 - DNA, 8 bp, Unknown
  misc_feature (1)..( 8): Result.001 file - promoters60/1010140
atttaaca

SEQ ID NO: 90546 - DNA, 8 bp, Unknown
  misc_feature (1)..( 8): Result.001 file - promoters60/1010140
attgaaca

SEQ ID NO: 90547 - DNA, 6 bp, Unknown
  misc_feature (1)..( 6): Result.001 file - promoters60/1010140
accaac

SEQ ID NO: 90548 - DNA, 6 bp, Unknown
  misc_feature (1)..( 6): Result.001 file - promoters60/1010140
accaac

SEQ ID NO: 90549 - DNA, 6 bp, Unknown
  misc_feature (1)..( 6): Result.001 file - promoters60/1010140
ataatc

SEQ ID NO: 90550 - DNA, 6 bp, Unknown
  misc_feature (1)..( 6): Result.001 file - promoters60/1010140
ataatc

SEQ ID NO: 90551 - DNA, 6 bp, Unknown
  misc_feature (1)..( 6): Result.001 file - promoters60/1010140
actaac

SEQ ID NO: 90552 - DNA, 6 bp, Unknown
  misc_feature (1)..( 6): Result.001 file - promoters60/1010140
actaac

SEQ ID NO: 90553 - DNA, 8 bp, Unknown
  misc_feature (1)..( 8): Result.001 file - promoters60/1010140
ataactct

SEQ ID NO: 90554 - DNA, 8 bp, Unknown
  misc_feature (1)..( 8): Result.001 file - promoters60/1010140
ataactct

SEQ ID NO: 90555 - DNA, 7 bp, Unknown
  misc_feature (1)..( 7): Result.001 file - promoters60/1010140
aaataca

SEQ ID NO: 90556 - DNA, 7 bp, Unknown
  misc_feature (1)..( 7): Result.001 file - promoters60/1010140
aaacaca

SEQ ID NO: 90557 - DNA, 10 bp, Unknown
  misc_feature (1)..( 10): Result.001 file - promoters60/1010140
aatgaacata

SEQ ID NO: 90558 - DNA, 10 bp, Unknown
  misc_feature (1)..( 10): Result.001 file - promoters60/1010140
aatgaagata

SEQ ID NO: 90559 - DNA, 6 bp, Unknown
  misc_feature (1)..( 6): Result.001 file - promoters60/1010140
atataa

SEQ ID NO: 90560 - DNA, 6 bp, Unknown
  misc_feature (1)..( 6): Result.001 file - promoters60/1010140
atataa

SEQ ID NO: 90561 - DNA, 8 bp, Unknown
  misc_feature (1)..( 8): Result.001 file - promoters60/1010140
agttttaa

SEQ ID NO: 90562 - DNA, 8 bp, Unknown
  misc_feature (1)..( 8): Result.001 file - promoters60/1010140
agtattaa

SEQ ID NO: 90563 - DNA, 6 bp, Unknown
  misc_feature (1)..( 6): Result.001 file - promoters60/1010140
tcatta

SEQ ID NO: 90564 - DNA, 6 bp, Unknown
  misc_feature (1)..( 6): Result.001 file - promoters60/1010140
tcatta

SEQ ID NO: 90565 - DNA, 8 bp, Unknown
  misc_feature (1)..( 8): Result.001 file - promoters60/1010140
ttttaaat

SEQ ID NO: 90566 - DNA, 8 bp, Unknown
  misc_feature (1)..( 8): Result.001 file - promoters60/1010140
tttcaaat

SEQ ID NO: 90567 - DNA, 8 bp, Unknown
  misc_feature (1)..( 8): Result.001 file - promoters60/1010140
gttatttt

SEQ ID NO: 90568 - DNA, 8 bp, Unknown
  misc_feature (1)..( 8): Result.001 file - promoters60/1010140
gttgtttt

SEQ ID NO: 90569 - DNA, 7 bp, Unknown
  misc_feature (1)..( 7): Result.001 file - promoters60/1010140
actcaat

SEQ ID NO: 90570 - DNA, 7 bp, Unknown
  misc_feature (1)..( 7): Result.001 file - promoters60/1010140
actcaat

SEQ ID NO: 90571 - DNA, 8 bp, Unknown
  misc_feature (1)..( 8): Result.001 file - promoters60/1010140
tttttaaa

SEQ ID NO: 90572 - DNA, 8 bp, Unknown
  misc_feature (1)..( 8): Result.001 file - promoters60/1010209
tttataaa

SEQ ID NO: 90573 - DNA, 11 bp, Unknown
  misc_feature (1)..( 11): Result.001 file - promoters60/1010209
cacacacatgc

SEQ ID NO: 90574 - DNA, 11 bp, Unknown
  misc_feature (1)..( 11): Result.001 file - promoters60/1010209
gcaacaaatgc

SEQ ID NO: 90575 - DNA, 11 bp, Unknown
  misc_feature (1)..( 11): Result.001 file - promoters60/1010209
cacacccatac

SEQ ID NO: 90576 - DNA, 13 bp, Unknown
  misc_feature (1)..( 13): Result.001 file - promoters60/1010209
taggaaatgtatt

SEQ ID NO: 90577 - DNA, 13 bp, Unknown
  misc_feature (1)..( 13): Result.001 file - promoters60/1010209
aaataaatttatt

SEQ ID NO: 90578 - DNA, 13 bp, Unknown
  misc_feature (1)..( 13): Result.001 file - promoters60/1010346
aaacaaattaggg

SEQ ID NO: 90579 - DNA, 8 bp, Unknown
  misc_feature (1)..( 8): Result.001 file - promoters60/1010346
ctttttac

SEQ ID NO: 90580 - DNA, 8 bp, Unknown
  misc_feature (1)..( 8): Result.001 file - promoters60/1010346
ctttttat

SEQ ID NO: 90581 - DNA, 8 bp, Unknown
  misc_feature (1)..( 8): Result.001 file - promoters60/1010346
atttttaa

SEQ ID NO: 90582 - DNA, 8 bp, Unknown
  misc_feature (1)..( 8): Result.001 file - promoters60/1010346
atttgtac

SEQ ID NO: 90583 - DNA, 8 bp, Unknown
  misc_feature (1)..( 8): Result.001 file - promoters60/1010346
tttaccag

SEQ ID NO: 90584 - DNA, 8 bp, Unknown
  misc_feature (1)..( 8): Result.001 file - promoters60/1010346
tttgccag

SEQ ID NO: 90585 - DNA, 8 bp, Unknown
  misc_feature (1)..( 8): Result.001 file - promoters60/1010346
tttgtacg

SEQ ID NO: 90586 - DNA, 10 bp, Unknown
  misc_feature (1)..( 10): Result.001 file - promoters60/1010346
ggaaaaaaat

SEQ ID NO: 90587 - DNA, 10 bp, Unknown
  misc_feature (1)..( 10): Result.001 file - promoters60/1010346
tataaaaaat

SEQ ID NO: 90588 - DNA, 10 bp, Unknown
  misc_feature (1)..( 10): Result.001 file - promoters60/1010346
tatacaaaag

SEQ ID NO: 90589 - DNA, 7 bp, Unknown
  misc_feature (1)..( 7): Result.001 file - promoters60/1010346
cataaaa

SEQ ID NO: 90590 - DNA, 7 bp, Unknown
  misc_feature (1)..( 7): Result.001 file - promoters60/1010346
tataaaa

SEQ ID NO: 90591 - DNA, 7 bp, Unknown
  misc_feature (1)..( 7): Result.001 file - promoters60/1010346
tatcaaa

SEQ ID NO: 90592 - DNA, 7 bp, Unknown
  misc_feature (1)..( 7): Result.001 file - promoters60/1010346
ccaaatt

SEQ ID NO: 90593 - DNA, 7 bp, Unknown
  misc_feature (1)..( 7): Result.001 file - promoters60/1010346
tcaaatt

SEQ ID NO: 90594 - DNA, 7 bp, Unknown
  misc_feature (1)..( 7): Result.001 file - promoters60/1010346
ccatatt

SEQ ID NO: 90595 - DNA, 8 bp, Unknown
  misc_feature (1)..( 8): Result.001 file - promoters60/1010346
tattttaa

SEQ ID NO: 90596 - DNA, 8 bp, Unknown
  misc_feature (1)..( 8): Result.001 file - promoters60/1010346
tattttaa

SEQ ID NO: 90597 - DNA, 8 bp, Unknown
  misc_feature (1)..( 8): Result.001 file - promoters60/1010346
tatattat

SEQ ID NO: 90598 - DNA, 10 bp, Unknown
  misc_feature (1)..( 10): Result.001 file - promoters60/1010346
gttgactttg

SEQ ID NO: 90599 - DNA, 10 bp, Unknown
  misc_feature (1)..( 10): Result.001 file - promoters60/1010346
attgaatttg

SEQ ID NO: 90600 - DNA, 10 bp, Unknown
  misc_feature (1)..( 10): Result.001 file - promoters60/1010367
attgaagttt

SEQ ID NO: 90601 - DNA, 9 bp, Unknown
  misc_feature (1)..( 9): Result.001 file - promoters60/1010367
gaaaatatt

SEQ ID NO: 90602 - DNA, 9 bp, Unknown
  misc_feature (1)..( 9): Result.001 file - promoters60/1010367
aaaaataag

SEQ ID NO: 90603 - DNA, 9 bp, Unknown
  misc_feature (1)..( 9): Result.001 file - promoters60/1010367
aaaaattaa

SEQ ID NO: 90604 - DNA, 9 bp, Unknown
  misc_feature (1)..( 9): Result.001 file - promoters60/1010367
taaagtata

SEQ ID NO: 90605 - DNA, 9 bp, Unknown
  misc_feature (1)..( 9): Result.001 file - promoters60/1010367
aaagattta

SEQ ID NO: 90606 - DNA, 9 bp, Unknown
  misc_feature (1)..( 9): Result.001 file - promoters60/1010367
taaaatttc

SEQ ID NO: 90607 - DNA, 9 bp, Unknown
  misc_feature (1)..( 9): Result.001 file - promoters60/1010367
caaaattga

SEQ ID NO: 90608 - DNA, 10 bp, Unknown
  misc_feature (1)..( 10): Result.001 file - promoters60/1010367
aaaacaaacg

SEQ ID NO: 90609 - DNA, 10 bp, Unknown
  misc_feature (1)..( 10): Result.001 file - promoters60/1010367
aaaaaaaaga

SEQ ID NO: 90610 - DNA, 10 bp, Unknown
  misc_feature (1)..( 10): Result.001 file - promoters60/1010367
taaataaatt

SEQ ID NO: 90611 - DNA, 10 bp, Unknown
  misc_feature (1)..( 10): Result.001 file - promoters60/1010367
caaacaaatg

SEQ ID NO: 90612 - DNA, 10 bp, Unknown
  misc_feature (1)..( 10): Result.001 file - promoters60/1010367
gaaacaaatt

SEQ ID NO: 90613 - DNA, 10 bp, Unknown
  misc_feature (1)..( 10): Result.001 file - promoters60/1010367
ataatgaatt

SEQ ID NO: 90614 - DNA, 10 bp, Unknown
  misc_feature (1)..( 10): Result.001 file - promoters60/1010367
taaattaatt

SEQ ID NO: 90615 - DNA, 10 bp, Unknown
  misc_feature (1)..( 10): Result.001 file - promoters60/1010367
gaaatgaatt

SEQ ID NO: 90616 - DNA, 13 bp, Unknown
  misc_feature (1)..( 13): Result.001 file - promoters60/1010367
aattgggactaaa

SEQ ID NO: 90617 - DNA, 13 bp, Unknown
  misc_feature (1)..( 13): Result.001 file - promoters60/1010367
tatttggataaaa

SEQ ID NO: 90618 - DNA, 13 bp, Unknown
  misc_feature (1)..( 13): Result.001 file - promoters60/1010367
cctttgaataaaa

SEQ ID NO: 90619 - DNA, 13 bp, Unknown
  misc_feature (1)..( 13): Result.001 file - promoters60/1010367
aattaaaaaggaa

SEQ ID NO: 90620 - DNA, 13 bp, Unknown
  misc_feature (1)..( 13): Result.001 file - promoters60/1010367
caataaatataaa

SEQ ID NO: 90621 - DNA, 13 bp, Unknown
  misc_feature (1)..( 13): Result.001 file - promoters60/1010367
tcttcgaaggtaa

SEQ ID NO: 90622 - DNA, 11 bp, Unknown
  misc_feature (1)..( 11): Result.001 file - promoters60/1010367
aattacaaaac

SEQ ID NO: 90623 - DNA, 11 bp, Unknown
  misc_feature (1)..( 11): Result.001 file - promoters60/1010367
gtatacaaaaa

SEQ ID NO: 90624 - DNA, 11 bp, Unknown
  misc_feature (1)..( 11): Result.001 file - promoters60/1010367
caatactatct

SEQ ID NO: 90625 - DNA, 11 bp, Unknown
  misc_feature (1)..( 11): Result.001 file - promoters60/1010367
tcatacaaaca

SEQ ID NO: 90626 - DNA, 11 bp, Unknown
  misc_feature (1)..( 11): Result.001 file - promoters60/1010367
actcccaaaaa

SEQ ID NO: 90627 - DNA, 11 bp, Unknown
  misc_feature (1)..( 11): Result.001 file - promoters60/1010367
aattcctaaaa

SEQ ID NO: 90628 - DNA, 11 bp, Unknown
  misc_feature (1)..( 11): Result.001 file - promoters60/1010367
taacccaaaat

SEQ ID NO: 90629 - DNA, 11 bp, Unknown
  misc_feature (1)..( 11): Result.001 file - promoters60/1010367
atatacaagaa

SEQ ID NO: 90630 - DNA, 11 bp, Unknown
  misc_feature (1)..( 11): Result.001 file - promoters60/1010367
aaaatgaaaaa

SEQ ID NO: 90631 - DNA, 11 bp, Unknown
  misc_feature (1)..( 11): Result.001 file - promoters60/1010367
ataatgaatta

SEQ ID NO: 90632 - DNA, 11 bp, Unknown
  misc_feature (1)..( 11): Result.001 file - promoters60/1010367
taaataaattt

SEQ ID NO: 90633 - DNA, 11 bp, Unknown
  misc_feature (1)..( 11): Result.001 file - promoters60/1010367
taaattaatta

SEQ ID NO: 90634 - DNA, 11 bp, Unknown
  misc_feature (1)..( 11): Result.001 file - promoters60/1010367
gaaatgaattt

SEQ ID NO: 90635 - DNA, 11 bp, Unknown
  misc_feature (1)..( 11): Result.001 file - promoters60/1010367
caaattattta

SEQ ID NO: 90636 - DNA, 8 bp, Unknown
  misc_feature (1)..( 8): Result.001 file - promoters60/1010367
tatatata

SEQ ID NO: 90637 - DNA, 8 bp, Unknown
  misc_feature (1)..( 8): Result.001 file - promoters60/1010367
tatataaa

SEQ ID NO: 90638 - DNA, 8 bp, Unknown
  misc_feature (1)..( 8): Result.001 file - promoters60/1010367
tatatata

SEQ ID NO: 90639 - DNA, 8 bp, Unknown
  misc_feature (1)..( 8): Result.001 file - promoters60/1010367
tataaata

SEQ ID NO: 90640 - DNA, 8 bp, Unknown
  misc_feature (1)..( 8): Result.001 file - promoters60/1010367
gatataat

SEQ ID NO: 90641 - DNA, 8 bp, Unknown
  misc_feature (1)..( 8): Result.001 file - promoters60/1010367
tataaaca

SEQ ID NO: 90642 - DNA, 10 bp, Unknown
  misc_feature (1)..( 10): Result.001 file - promoters60/1010367
atttatttcg

SEQ ID NO: 90643 - DNA, 10 bp, Unknown
  misc_feature (1)..( 10): Result.001 file - promoters60/1010367
atttatgtcg

SEQ ID NO: 90644 - DNA, 10 bp, Unknown
  misc_feature (1)..( 10): Result.001 file - promoters60/1010367
ttttattcta

SEQ ID NO: 90645 - DNA, 10 bp, Unknown
  misc_feature (1)..( 10): Result.001 file - promoters60/1010367
ttttcttttc

SEQ ID NO: 90646 - DNA, 10 bp, Unknown
  misc_feature (1)..( 10): Result.001 file - promoters60/1010367
atttatggac

SEQ ID NO: 90647 - DNA, 11 bp, Unknown
  misc_feature (1)..( 11): Result.001 file - promoters60/1010367
atttcatttcc

SEQ ID NO: 90648 - DNA, 7 bp, Unknown
  misc_feature (1)..( 7): Result.001 file - promoters60/1010367
taagatt

SEQ ID NO: 90649 - DNA, 7 bp, Unknown
  misc_feature (1)..( 7): Result.001 file - promoters60/1010367
taaaatt

SEQ ID NO: 90650 - DNA, 7 bp, Unknown
  misc_feature (1)..( 7): Result.001 file - promoters60/1010367
aaaaatt

SEQ ID NO: 90651 - DNA, 7 bp, Unknown
  misc_feature (1)..( 7): Result.001 file - promoters60/1010367
caaaatt

SEQ ID NO: 90652 - DNA, 7 bp, Unknown
  misc_feature (1)..( 7): Result.001 file - promoters60/1010367
caaaatt

SEQ ID NO: 90653 - DNA, 7 bp, Unknown
  misc_feature (1)..( 7): Result.001 file - promoters60/1010373
aaaaatt

SEQ ID NO: 90654 - DNA, 8 bp, Unknown
  misc_feature (1)..( 8): Result.001 file - promoters60/1010373
cttttttt

SEQ ID NO: 90655 - DNA, 8 bp, Unknown
  misc_feature (1)..( 8): Result.001 file - promoters60/1010373
ctttttta

SEQ ID NO: 90656 - DNA, 8 bp, Unknown
  misc_feature (1)..( 8): Result.001 file - promoters60/1010373
cttctttg

SEQ ID NO: 90657 - DNA, 8 bp, Unknown
  misc_feature (1)..( 8): Result.001 file - promoters60/1010373
gttttttt

SEQ ID NO: 90658 - DNA, 10 bp, Unknown
  misc_feature (1)..( 10): Result.001 file - promoters60/1010373
ttaatttaca

SEQ ID NO: 90659 - DNA, 10 bp, Unknown
  misc_feature (1)..( 10): Result.001 file - promoters60/1010373
ataatttaca

SEQ ID NO: 90660 - DNA, 10 bp, Unknown
  misc_feature (1)..( 10): Result.001 file - promoters60/1010373
aaaatataca

SEQ ID NO: 90661 - DNA, 10 bp, Unknown
  misc_feature (1)..( 10): Result.001 file - promoters60/1010373
ttaattagat

SEQ ID NO: 90662 - DNA, 12 bp, Unknown
  misc_feature (1)..( 12): Result.001 file - promoters60/1010373
cttcttcttttt

SEQ ID NO: 90663 - DNA, 12 bp, Unknown
  misc_feature (1)..( 12): Result.001 file - promoters60/1010373
cttctttgcaaa

SEQ ID NO: 90664 - DNA, 12 bp, Unknown
  misc_feature (1)..( 12): Result.001 file - promoters60/1010373
cttattcttttt

SEQ ID NO: 90665 - DNA, 12 bp, Unknown
  misc_feature (1)..( 12): Result.001 file - promoters60/1010373
ttttttaaagtt

SEQ ID NO: 90666 - DNA, 12 bp, Unknown
  misc_feature (1)..( 12): Result.001 file - promoters60/1010373
ttttataatata

SEQ ID NO: 90667 - DNA, 9 bp, Unknown
  misc_feature (1)..( 9): Result.001 file - promoters60/1010373
attttttaa

SEQ ID NO: 90668 - DNA, 9 bp, Unknown
  misc_feature (1)..( 9): Result.001 file - promoters60/1010373
attttataa

SEQ ID NO: 90669 - DNA, 9 bp, Unknown
  misc_feature (1)..( 9): Result.001 file - promoters60/1010373
tctttttaa

SEQ ID NO: 90670 - DNA, 9 bp, Unknown
  misc_feature (1)..( 9): Result.001 file - promoters60/1010385
attttattg

SEQ ID NO: 90671 - DNA, 10 bp, Unknown
  misc_feature (1)..( 10): Result.001 file - promoters60/1010385
cctaagttta

SEQ ID NO: 90672 - DNA, 10 bp, Unknown
  misc_feature (1)..( 10): Result.001 file - promoters60/1010385
gtaaagatta

SEQ ID NO: 90673 - DNA, 10 bp, Unknown
  misc_feature (1)..( 10): Result.001 file - promoters60/1010385
ctgaagtttc

SEQ ID NO: 90674 - DNA, 10 bp, Unknown
  misc_feature (1)..( 10): Result.001 file - promoters60/1010385
cagaattttt

SEQ ID NO: 90675 - DNA, 10 bp, Unknown
  misc_feature (1)..( 10): Result.001 file - promoters60/1010385
tcagagtttt

SEQ ID NO: 90676 - DNA, 10 bp, Unknown
  misc_feature (1)..( 10): Result.001 file - promoters60/1010385
ataaaaattc

SEQ ID NO: 90677 - DNA, 16 bp, Unknown
  misc_feature (1)..( 16): Result.001 file - promoters60/1010385
caatgggctgggccta

SEQ ID NO: 90678 - DNA, 16 bp, Unknown
  misc_feature (1)..( 16): Result.001 file - promoters60/1010385
aaataggcccaacaaa

SEQ ID NO: 90679 - DNA, 16 bp, Unknown
  misc_feature (1)..( 16): Result.001 file - promoters60/1010385
tgttgggcttttaatg

SEQ ID NO: 90680 - DNA, 16 bp, Unknown
  misc_feature (1)..( 16): Result.001 file - promoters60/1010385
aattgggctttttaag

SEQ ID NO: 90681 - DNA, 16 bp, Unknown
  misc_feature (1)..( 16): Result.001 file - promoters60/1010385
aaaaaggcccattata

SEQ ID NO: 90682 - DNA, 16 bp, Unknown
  misc_feature (1)..( 16): Result.001 file - promoters60/1010411
aataaagcccattata

SEQ ID NO: 90683 - DNA, 8 bp, Unknown
  misc_feature (1)..( 8): Result.001 file - promoters60/1010411
aataattg

SEQ ID NO: 90684 - DNA, 8 bp, Unknown
  misc_feature (1)..( 8): Result.001 file - promoters60/1010411
catacttg

SEQ ID NO: 90685 - DNA, 8 bp, Unknown
  misc_feature (1)..( 8): Result.001 file - promoters60/1010411
aattattt

SEQ ID NO: 90686 - DNA, 9 bp, Unknown
  misc_feature (1)..( 9): Result.001 file - promoters60/1010411
tatgtttgc

SEQ ID NO: 90687 - DNA, 9 bp, Unknown
  misc_feature (1)..( 9): Result.001 file - promoters60/1010411
ggtgtttgc

SEQ ID NO: 90688 - DNA, 9 bp, Unknown
  misc_feature (1)..( 9): Result.001 file - promoters60/1010411
tatattttt

SEQ ID NO: 90689 - DNA, 10 bp, Unknown
  misc_feature (1)..( 10): Result.001 file - promoters60/1010411
gtaatcgatg

SEQ ID NO: 90690 - DNA, 10 bp, Unknown
  misc_feature (1)..( 10): Result.001 file - promoters60/1010411
gtaattgatg

SEQ ID NO: 90691 - DNA, 10 bp, Unknown
  misc_feature (1)..( 10): Result.001 file - promoters60/1010411
ggacttgatg

SEQ ID NO: 90692 - DNA, 8 bp, Unknown
  misc_feature (1)..( 8): Result.001 file - promoters60/1010411
aaaatgag

SEQ ID NO: 90693 - DNA, 8 bp, Unknown
  misc_feature (1)..( 8): Result.001 file - promoters60/1010411
aaagtgaa

SEQ ID NO: 90694 - DNA, 8 bp, Unknown
  misc_feature (1)..( 8): Result.001 file - promoters60/1010411
gaagagaa

SEQ ID NO: 90695 - DNA, 14 bp, Unknown
  misc_feature (1)..( 14): Result.001 file - promoters60/1010411
ctacttattctttt

SEQ ID NO: 90696 - DNA, 14 bp, Unknown
  misc_feature (1)..( 14): Result.001 file - promoters60/1010411
ttaacaattttttt

SEQ ID NO: 90697 - DNA, 14 bp, Unknown
  misc_feature (1)..( 14): Result.001 file - promoters60/1010411
ttaataatttattt

SEQ ID NO: 90698 - DNA, 12 bp, Unknown
  misc_feature (1)..( 12): Result.001 file - promoters60/1010411
gctacttattct

SEQ ID NO: 90699 - DNA, 12 bp, Unknown
  misc_feature (1)..( 12): Result.001 file - promoters60/1010411
attactaatttt

SEQ ID NO: 90700 - DNA, 12 bp, Unknown
  misc_feature (1)..( 12): Result.001 file - promoters60/1010411
tagatttattaa

SEQ ID NO: 90701 - DNA, 6 bp, Unknown
  misc_feature (1)..( 6): Result.001 file - promoters60/1010411
tatttt

SEQ ID NO: 90702 - DNA, 6 bp, Unknown
  misc_feature (1)..( 6): Result.001 file - promoters60/1010411
tatttt

SEQ ID NO: 90703 - DNA, 6 bp, Unknown
  misc_feature (1)..( 6): Result.001 file - promoters60/1010418
tatttt

SEQ ID NO: 90704 - DNA, 11 bp, Unknown
  misc_feature (1)..( 11): Result.001 file - promoters60/1010418
ccagaagagaa

SEQ ID NO: 90705 - DNA, 11 bp, Unknown
  misc_feature (1)..( 11): Result.001 file - promoters60/1010418
ccaaaagaaat

SEQ ID NO: 90706 - DNA, 11 bp, Unknown
  misc_feature (1)..( 11): Result.001 file - promoters60/1010418
tgggaagtgaa

SEQ ID NO: 90707 - DNA, 8 bp, Unknown
  misc_feature (1)..( 8): Result.001 file - promoters60/1010418
ggatagat

SEQ ID NO: 90708 - DNA, 8 bp, Unknown
  misc_feature (1)..( 8): Result.001 file - promoters60/1010418
ggaaagaa

SEQ ID NO: 90709 - DNA, 8 bp, Unknown
  misc_feature (1)..( 8): Result.001 file - promoters60/1010418
tgaaagaa

SEQ ID NO: 90710 - DNA, 7 bp, Unknown
  misc_feature (1)..( 7): Result.001 file - promoters60/1010418
gagtgat

SEQ ID NO: 90711 - DNA, 7 bp, Unknown
  misc_feature (1)..( 7): Result.001 file - promoters60/1010418
tagtgat

SEQ ID NO: 90712 - DNA, 7 bp, Unknown
  misc_feature (1)..( 7): Result.001 file - promoters60/1010418
tagcgat

SEQ ID NO: 90713 - DNA, 8 bp, Unknown
  misc_feature (1)..( 8): Result.001 file - promoters60/1010418
ggcctaaa

SEQ ID NO: 90714 - DNA, 8 bp, Unknown
  misc_feature (1)..( 8): Result.001 file - promoters60/1010418
ggcctaat

SEQ ID NO: 90715 - DNA, 8 bp, Unknown
  misc_feature (1)..( 8): Result.001 file - promoters60/1010421
ggcctaat

SEQ ID NO: 90716 - DNA, 6 bp, Unknown
  misc_feature (1)..( 6): Result.001 file - promoters60/1010421
tgtggt

SEQ ID NO: 90717 - DNA, 6 bp, Unknown
  misc_feature (1)..( 6): Result.001 file - promoters60/1010421
tgtggt

SEQ ID NO: 90718 - DNA, 11 bp, Unknown
  misc_feature (1)..( 11): Result.001 file - promoters60/1010421
cttgaataaat

SEQ ID NO: 90719 - DNA, 11 bp, Unknown
  misc_feature (1)..( 11): Result.001 file - promoters60/1010421
cttaaatcaat

SEQ ID NO: 90720 - DNA, 6 bp, Unknown
  misc_feature (1)..( 6): Result.001 file - promoters60/1010421
caagat

SEQ ID NO: 90721 - DNA, 6 bp, Unknown
  misc_feature (1)..( 6): Result.001 file - promoters60/1010421
caagat

SEQ ID NO: 90722 - DNA, 7 bp, Unknown
  misc_feature (1)..( 7): Result.001 file - promoters60/1010421
aatgttt

SEQ ID NO: 90723 - DNA, 7 bp, Unknown
  misc_feature (1)..( 7): Result.001 file - promoters60/1010421
aatattt

SEQ ID NO: 90724 - DNA, 9 bp, Unknown
  misc_feature (1)..( 9): Result.001 file - promoters60/1010421
ataataaaa

SEQ ID NO: 90725 - DNA, 9 bp, Unknown
  misc_feature (1)..( 9): Result.001 file - promoters60/1010421
ataacaaaa

SEQ ID NO: 90726 - DNA, 7 bp, Unknown
  misc_feature (1)..( 7): Result.001 file - promoters60/1010421
ccacaaa

SEQ ID NO: 90727 - DNA, 7 bp, Unknown
  misc_feature (1)..( 7): Result.001 file - promoters60/1010421
ccaaaaa

SEQ ID NO: 90728 - DNA, 13 bp, Unknown
  misc_feature (1)..( 13): Result.001 file - promoters60/1010421
tgttcagtgatcc

SEQ ID NO: 90729 - DNA, 13 bp, Unknown
  misc_feature (1)..( 13): Result.001 file - promoters60/1010421
aataacgtggtcc

SEQ ID NO: 90730 - DNA, 13 bp, Unknown
  misc_feature (1)..( 13): Result.001 file - promoters60/1010421
aataacgtggtcc

SEQ ID NO: 90731 - DNA, 7 bp, Unknown
  misc_feature (1)..( 7): Result.001 file - promoters60/1010421
attcaaa

SEQ ID NO: 90732 - DNA, 7 bp, Unknown
  misc_feature (1)..( 7): Result.001 file - promoters60/1010421
atttaaa

SEQ ID NO: 90733 - DNA, 8 bp, Unknown
  misc_feature (1)..( 8): Result.001 file - promoters60/1010421
tgataatc

SEQ ID NO: 90734 - DNA, 8 bp, Unknown
  misc_feature (1)..( 8): Result.001 file - promoters60/1010421
tgattatc

SEQ ID NO: 90735 - DNA, 6 bp, Unknown
  misc_feature (1)..( 6): Result.001 file - promoters60/1010421
atatat

SEQ ID NO: 90736 - DNA, 6 bp, Unknown
  misc_feature (1)..( 6): Result.001 file - promoters60/1010421
atatat

SEQ ID NO: 90737 - DNA, 7 bp, Unknown
  misc_feature (1)..( 7): Result.001 file - promoters60/1010421
ttacttt

SEQ ID NO: 90738 - DNA, 7 bp, Unknown
  misc_feature (1)..( 7): Result.001 file - promoters60/1010421
ttagttt

SEQ ID NO: 90739 - DNA, 6 bp, Unknown
  misc_feature (1)..( 6): Result.001 file - promoters60/1010421
atttta

SEQ ID NO: 90740 - DNA, 6 bp, Unknown
  misc_feature (1)..( 6): Result.001 file - promoters60/1010421
atttta

SEQ ID NO: 90741 - DNA, 7 bp, Unknown
  misc_feature (1)..( 7): Result.001 file - promoters60/1010421
atatata

SEQ ID NO: 90742 - DNA, 7 bp, Unknown
  misc_feature (1)..( 7): Result.001 file - promoters60/1010421
atatata

SEQ ID NO: 90743 - DNA, 7 bp, Unknown
  misc_feature (1)..( 7): Result.001 file - promoters60/1010421
attcttt

SEQ ID NO: 90744 - DNA, 7 bp, Unknown
  misc_feature (1)..( 7): Result.001 file - promoters60/1010421
attattt

SEQ ID NO: 90745 - DNA, 7 bp, Unknown
  misc_feature (1)..( 7): Result.001 file - promoters60/1010421
tatttat

SEQ ID NO: 90746 - DNA, 7 bp, Unknown
  misc_feature (1)..( 7): Result.001 file - promoters60/1010421
tatgtat

SEQ ID NO: 90747 - DNA, 7 bp, Unknown
  misc_feature (1)..( 7): Result.001 file - promoters60/1010421
attcata

SEQ ID NO: 90748 - DNA, 7 bp, Unknown
  misc_feature (1)..( 7): Result.001 file - promoters60/1010421
attaata

SEQ ID NO: 90749 - DNA, 7 bp, Unknown
  misc_feature (1)..( 7): Result.001 file - promoters60/1010421
aaggatg

SEQ ID NO: 90750 - DNA, 7 bp, Unknown
  misc_feature (1)..( 7): Result.001 file - promoters60/1010421
aaggatg

SEQ ID NO: 90751 - DNA, 6 bp, Unknown
  misc_feature (1)..( 6): Result.001 file - promoters60/1010421
ccaact

SEQ ID NO: 90752 - DNA, 6 bp, Unknown
  misc_feature (1)..( 6): Result.001 file - promoters60/1010421
ccaact

SEQ ID NO: 90753 - DNA, 7 bp, Unknown
  misc_feature (1)..( 7): Result.001 file - promoters60/1010421
tataatt

SEQ ID NO: 90754 - DNA, 7 bp, Unknown
  misc_feature (1)..( 7): Result.001 file - promoters60/1010425
tatcatt

SEQ ID NO: 90755 - DNA, 8 bp, Unknown
  misc_feature (1)..( 8): Result.001 file - promoters60/1010425
gaaataca

SEQ ID NO: 90756 - DNA, 8 bp, Unknown
  misc_feature (1)..( 8): Result.001 file - promoters60/1010425
gaaaaaca

SEQ ID NO: 90757 - DNA, 8 bp, Unknown
  misc_feature (1)..( 8): Result.001 file - promoters60/1010425
gaaaaatt

SEQ ID NO: 90758 - DNA, 8 bp, Unknown
  misc_feature (1)..( 8): Result.001 file - promoters60/1010425
taatcagg

SEQ ID NO: 90759 - DNA, 8 bp, Unknown
  misc_feature (1)..( 8): Result.001 file - promoters60/1010425
aaattagg

SEQ ID NO: 90760 - DNA, 8 bp, Unknown
  misc_feature (1)..( 8): Result.001 file - promoters60/1010425
aaattaaa

SEQ ID NO: 90761 - DNA, 8 bp, Unknown
  misc_feature (1)..( 8): Result.001 file - promoters60/1010425
gaaagccc

SEQ ID NO: 90762 - DNA, 8 bp, Unknown
  misc_feature (1)..( 8): Result.001 file - promoters60/1010425
aaaaaccc

SEQ ID NO: 90763 - DNA, 8 bp, Unknown
  misc_feature (1)..( 8): Result.001 file - promoters60/1010429
aaaaacgt

SEQ ID NO: 90764 - DNA, 13 bp, Unknown
  misc_feature (1)..( 13): Result.001 file - promoters60/1010429
cgaaaaataaata

SEQ ID NO: 90765 - DNA, 13 bp, Unknown
  misc_feature (1)..( 13): Result.001 file - promoters60/1010429
ttaaacatatagt

SEQ ID NO: 90766 - DNA, 13 bp, Unknown
  misc_feature (1)..( 13): Result.001 file - promoters60/1010429
gaaaacaaaacta

SEQ ID NO: 90767 - DNA, 13 bp, Unknown
  misc_feature (1)..( 13): Result.001 file - promoters60/1010429
tataaaatacagt

SEQ ID NO: 90768 - DNA, 13 bp, Unknown
  misc_feature (1)..( 13): Result.001 file - promoters60/1010429
aaaaacaaaattt

SEQ ID NO: 90769 - DNA, 13 bp, Unknown
  misc_feature (1)..( 13): Result.001 file - promoters60/1010429
tgtcacaaaattt

SEQ ID NO: 90770 - DNA, 11 bp, Unknown
  misc_feature (1)..( 11): Result.001 file - promoters60/1010429
taaataaaagc

SEQ ID NO: 90771 - DNA, 11 bp, Unknown
  misc_feature (1)..( 11): Result.001 file - promoters60/1010429
taattaaacat

SEQ ID NO: 90772 - DNA, 11 bp, Unknown
  misc_feature (1)..( 11): Result.001 file - promoters60/1010429
aaaacaaaact

SEQ ID NO: 90773 - DNA, 11 bp, Unknown
  misc_feature (1)..( 11): Result.001 file - promoters60/1010429
attataaaata

SEQ ID NO: 90774 - DNA, 11 bp, Unknown
  misc_feature (1)..( 11): Result.001 file - promoters60/1010429
gaatgaaacat

SEQ ID NO: 90775 - DNA, 11 bp, Unknown
  misc_feature (1)..( 11): Result.001 file - promoters60/1010429
gcatcaagact

SEQ ID NO: 90776 - DNA, 10 bp, Unknown
  misc_feature (1)..( 10): Result.001 file - promoters60/1010429
tttgtttaac

SEQ ID NO: 90777 - DNA, 10 bp, Unknown
  misc_feature (1)..( 10): Result.001 file - promoters60/1010429
tttatttact

SEQ ID NO: 90778 - DNA, 10 bp, Unknown
  misc_feature (1)..( 10): Result.001 file - promoters60/1010429
cttgtttgag

SEQ ID NO: 90779 - DNA, 10 bp, Unknown
  misc_feature (1)..( 10): Result.001 file - promoters60/1010429
tttgtttctg

SEQ ID NO: 90780 - DNA, 10 bp, Unknown
  misc_feature (1)..( 10): Result.001 file - promoters60/1010429
tttattataa

SEQ ID NO: 90781 - DNA, 10 bp, Unknown
  misc_feature (1)..( 10): Result.001 file - promoters60/1010429
gttattaatt

SEQ ID NO: 90782 - DNA, 10 bp, Unknown
  misc_feature (1)..( 10): Result.001 file - promoters60/1010429
gttcttatga

SEQ ID NO: 90783 - DNA, 19 bp, Unknown
  misc_feature (1)..( 19): Result.001 file - promoters60/1010429
tccaatatgtttttcttaa

SEQ ID NO: 90784 - DNA, 19 bp, Unknown
  misc_feature (1)..( 19): Result.001 file - promoters60/1010429
cactttttgttttctatta

SEQ ID NO: 90785 - DNA, 19 bp, Unknown
  misc_feature (1)..( 19): Result.001 file - promoters60/1010429
aataagttgttctagtagt

SEQ ID NO: 90786 - DNA, 19 bp, Unknown
  misc_feature (1)..( 19): Result.001 file - promoters60/1010429
tacacttccttttgtgttc

SEQ ID NO: 90787 - DNA, 19 bp, Unknown
  misc_feature (1)..( 19): Result.001 file - promoters60/1010429
taaaacgtgttcaaggctt

SEQ ID NO: 90788 - DNA, 19 bp, Unknown
  misc_feature (1)..( 19): Result.001 file - promoters60/1010429
atttagttgtcaccagcaa

SEQ ID NO: 90789 - DNA, 16 bp, Unknown
  misc_feature (1)..( 16): Result.001 file - promoters60/1010429
atatgtttttcttaaa

SEQ ID NO: 90790 - DNA, 16 bp, Unknown
  misc_feature (1)..( 16): Result.001 file - promoters60/1010429
tttttgttttctatta

SEQ ID NO: 90791 - DNA, 17 bp, Unknown
  misc_feature (1)..( 17): Result.001 file - promoters60/1010429
aataagttgttctagta

SEQ ID NO: 90792 - DNA, 17 bp, Unknown
  misc_feature (1)..( 17): Result.001 file - promoters60/1010429
cacttccttttgtgttc

SEQ ID NO: 90793 - DNA, 17 bp, Unknown
  misc_feature (1)..( 17): Result.001 file - promoters60/1010429
taaaacgtgttcaaggc

SEQ ID NO: 90794 - DNA, 17 bp, Unknown
  misc_feature (1)..( 17): Result.001 file - promoters60/1010429
atttagttgtcaccagc

SEQ ID NO: 90795 - DNA, 10 bp, Unknown
  misc_feature (1)..( 10): Result.001 file - promoters60/1010429
ttatatatag

SEQ ID NO: 90796 - DNA, 10 bp, Unknown
  misc_feature (1)..( 10): Result.001 file - promoters60/1010429
gtatataaat

SEQ ID NO: 90797 - DNA, 10 bp, Unknown
  misc_feature (1)..( 10): Result.001 file - promoters60/1010429
atataaataa

SEQ ID NO: 90798 - DNA, 10 bp, Unknown
  misc_feature (1)..( 10): Result.001 file - promoters60/1010429
ttatacaaat

SEQ ID NO: 90799 - DNA, 10 bp, Unknown
  misc_feature (1)..( 10): Result.001 file - promoters60/1010429
ctataaaata

SEQ ID NO: 90800 - DNA, 10 bp, Unknown
  misc_feature (1)..( 10): Result.001 file - promoters60/1010429
ctatttaaac

SEQ ID NO: 90801 - DNA, 10 bp, Unknown
  misc_feature (1)..( 10): Result.001 file - promoters60/1010431
ctatttaagt

SEQ ID NO: 90802 - DNA, 9 bp, Unknown
  misc_feature (1)..( 9): Result.001 file - promoters60/1010431
gacacgtgg

SEQ ID NO: 90803 - DNA, 9 bp, Unknown
  misc_feature (1)..( 9): Result.001 file - promoters60/1010431
gccacgtgg

SEQ ID NO: 90804 - DNA, 9 bp, Unknown
  misc_feature (1)..( 9): Result.001 file - promoters60/1010431
gacacgtgg

SEQ ID NO: 90805 - DNA, 9 bp, Unknown
  misc_feature (1)..( 9): Result.001 file - promoters60/1010435
gcctcgttc

SEQ ID NO: 90806 - DNA, 8 bp, Unknown
  misc_feature (1)..( 8): Result.001 file - promoters60/1010435
tcttcttc

SEQ ID NO: 90807 - DNA, 8 bp, Unknown
  misc_feature (1)..( 8): Result.001 file - promoters60/1010435
cctttttc

SEQ ID NO: 90808 - DNA, 8 bp, Unknown
  misc_feature (1)..( 8): Result.001 file - promoters60/1010435
tcttctta

SEQ ID NO: 90809 - DNA, 10 bp, Unknown
  misc_feature (1)..( 10): Result.001 file - promoters60/1010435
attttcaaag

SEQ ID NO: 90810 - DNA, 10 bp, Unknown
  misc_feature (1)..( 10): Result.001 file - promoters60/1010435
attatcaaag

SEQ ID NO: 90811 - DNA, 10 bp, Unknown
  misc_feature (1)..( 10): Result.001 file - promoters60/1010435
attatccttg

SEQ ID NO: 90812 - DNA, 10 bp, Unknown
  misc_feature (1)..( 10): Result.001 file - promoters60/1010435
aatctgaatc

SEQ ID NO: 90813 - DNA, 10 bp, Unknown
  misc_feature (1)..( 10): Result.001 file - promoters60/1010435
actctgcatc

SEQ ID NO: 90814 - DNA, 10 bp, Unknown
  misc_feature (1)..( 10): Result.001 file - promoters60/1010449
aatttgattt

SEQ ID NO: 90815 - DNA, 9 bp, Unknown
  misc_feature (1)..( 9): Result.001 file - promoters60/1010449
agtgtgttt

SEQ ID NO: 90816 - DNA, 9 bp, Unknown
  misc_feature (1)..( 9): Result.001 file - promoters60/1010449
cttgtgttt

SEQ ID NO: 90817 - DNA, 9 bp, Unknown
  misc_feature (1)..( 9): Result.001 file - promoters60/1010449
attgtattt

SEQ ID NO: 90818 - DNA, 9 bp, Unknown
  misc_feature (1)..( 9): Result.001 file - promoters60/1010449
attctattt

SEQ ID NO: 90819 - DNA, 8 bp, Unknown
  misc_feature (1)..( 8): Result.001 file - promoters60/1010449
cacaataa

SEQ ID NO: 90820 - DNA, 8 bp, Unknown
  misc_feature (1)..( 8): Result.001 file - promoters60/1010449
tacaatat

SEQ ID NO: 90821 - DNA, 8 bp, Unknown
  misc_feature (1)..( 8): Result.001 file - promoters60/1010449
caaaatta

SEQ ID NO: 90822 - DNA, 8 bp, Unknown
  misc_feature (1)..( 8): Result.001 file - promoters60/1010491
atcaatat

SEQ ID NO: 90823 - DNA, 11 bp, Unknown
  misc_feature (1)..( 11): Result.001 file - promoters60/1010491
tttaaagaaat

SEQ ID NO: 90824 - DNA, 11 bp, Unknown
  misc_feature (1)..( 11): Result.001 file - promoters60/1010491
aataaagaaaa

SEQ ID NO: 90825 - DNA, 11 bp, Unknown
  misc_feature (1)..( 11): Result.001 file - promoters60/1010491
ttttaagttat

SEQ ID NO: 90826 - DNA, 11 bp, Unknown
  misc_feature (1)..( 11): Result.001 file - promoters60/1010524
taagaagtaaa

SEQ ID NO: 90827 - DNA, 7 bp, Unknown
  misc_feature (1)..( 7): Result.001 file - promoters60/1010524
taacata

SEQ ID NO: 90828 - DNA, 7 bp, Unknown
  misc_feature (1)..( 7): Result.001 file - promoters60/1010524
taaaata

SEQ ID NO: 90829 - DNA, 6 bp, Unknown
  misc_feature (1)..( 6): Result.001 file - promoters60/1010524
atcaaa

SEQ ID NO: 90830 - DNA, 6 bp, Unknown
  misc_feature (1)..( 6): Result.001 file - promoters60/1010524
atcaaa

SEQ ID NO: 90831 - DNA, 7 bp, Unknown
  misc_feature (1)..( 7): Result.001 file - promoters60/1010524
aacaaat

SEQ ID NO: 90832 - DNA, 7 bp, Unknown
  misc_feature (1)..( 7): Result.001 file - promoters60/1010524
aacaaag

SEQ ID NO: 90833 - DNA, 7 bp, Unknown
  misc_feature (1)..( 7): Result.001 file - promoters60/1010524
aactaat

SEQ ID NO: 90834 - DNA, 10 bp, Unknown
  misc_feature (1)..( 10): Result.001 file - promoters60/1010524
tattttgaaa

SEQ ID NO: 90835 - DNA, 10 bp, Unknown
  misc_feature (1)..( 10): Result.001 file - promoters60/1010524
tattttgttg

SEQ ID NO: 90836 - DNA, 10 bp, Unknown
  misc_feature (1)..( 10): Result.001 file - promoters60/1010524
ccttttgaaa

SEQ ID NO: 90837 - DNA, 10 bp, Unknown
  misc_feature (1)..( 10): Result.001 file - promoters60/1010524
gaatattttt

SEQ ID NO: 90838 - DNA, 10 bp, Unknown
  misc_feature (1)..( 10): Result.001 file - promoters60/1010524
gaatattttt

SEQ ID NO: 90839 - DNA, 10 bp, Unknown
  misc_feature (1)..( 10): Result.001 file - promoters60/1010524
ttatatattt

SEQ ID NO: 90840 - DNA, 7 bp, Unknown
  misc_feature (1)..( 7): Result.001 file - promoters60/1010524
attattt

SEQ ID NO: 90841 - DNA, 7 bp, Unknown
  misc_feature (1)..( 7): Result.001 file - promoters60/1010524
attcttt

SEQ ID NO: 90842 - DNA, 6 bp, Unknown
  misc_feature (1)..( 6): Result.001 file - promoters60/1010524
atttgg

SEQ ID NO: 90843 - DNA, 6 bp, Unknown
  misc_feature (1)..( 6): Result.001 file - promoters60/1010524
atttgg

SEQ ID NO: 90844 - DNA, 6 bp, Unknown
  misc_feature (1)..( 6): Result.001 file - promoters60/1010524
tttggt

SEQ ID NO: 90845 - DNA, 6 bp, Unknown
  misc_feature (1)..( 6): Result.001 file - promoters60/1010524
tttggt

SEQ ID NO: 90846 - DNA, 8 bp, Unknown
  misc_feature (1)..( 8): Result.001 file - promoters60/1010524
aaaagccc

SEQ ID NO: 90847 - DNA, 8 bp, Unknown
  misc_feature (1)..( 8): Result.001 file - promoters60/1010524
aaaacccc

SEQ ID NO: 90848 - DNA, 6 bp, Unknown
  misc_feature (1)..( 6): Result.001 file - promoters60/1010524
actttt

SEQ ID NO: 90849 - DNA, 6 bp, Unknown
  misc_feature (1)..( 6): Result.001 file - promoters60/1010524
actttt

SEQ ID NO: 90850 - DNA, 6 bp, Unknown
  misc_feature (1)..( 6): Result.001 file - promoters60/1010524
atcaaa

SEQ ID NO: 90851 - DNA, 6 bp, Unknown
  misc_feature (1)..( 6): Result.001 file - promoters60/1010524
atcaaa

SEQ ID NO: 90852 - DNA, 9 bp, Unknown
  misc_feature (1)..( 9): Result.001 file - promoters60/1010524
acaaacata

SEQ ID NO: 90853 - DNA, 9 bp, Unknown
  misc_feature (1)..( 9): Result.001 file - promoters60/1010524
acaaacgtt

SEQ ID NO: 90854 - DNA, 9 bp, Unknown
  misc_feature (1)..( 9): Result.001 file - promoters60/1010524
tcaagcgtt

SEQ ID NO: 90855 - DNA, 8 bp, Unknown
  misc_feature (1)..( 8): Result.001 file - promoters60/1010524
cgtagcta

SEQ ID NO: 90856 - DNA, 8 bp, Unknown
  misc_feature (1)..( 8): Result.001 file - promoters60/1010524
cgttgcta

SEQ ID NO: 90857 - DNA, 7 bp, Unknown
  misc_feature (1)..( 7): Result.001 file - promoters60/1010524
tccattt

SEQ ID NO: 90858 - DNA, 7 bp, Unknown
  misc_feature (1)..( 7): Result.001 file - promoters60/1010524
tcccttt

SEQ ID NO: 90859 - DNA, 8 bp, Unknown
  misc_feature (1)..( 8): Result.001 file - promoters60/1010524
atattttg

SEQ ID NO: 90860 - DNA, 8 bp, Unknown
  misc_feature (1)..( 8): Result.001 file - promoters60/1010524
atatttag

SEQ ID NO: 90861 - DNA, 8 bp, Unknown
  misc_feature (1)..( 8): Result.001 file - promoters60/1010524
atattttt

SEQ ID NO: 90862 - DNA, 6 bp, Unknown
  misc_feature (1)..( 6): Result.001 file - promoters60/1010524
ttttac

SEQ ID NO: 90863 - DNA, 6 bp, Unknown
  misc_feature (1)..( 6): Result.001 file - promoters60/1010524
ttttac

SEQ ID NO: 90864 - DNA, 12 bp, Unknown
  misc_feature (1)..( 12): Result.001 file - promoters60/1010524
tacattttatat

SEQ ID NO: 90865 - DNA, 12 bp, Unknown
  misc_feature (1)..( 12): Result.001 file - promoters60/1010524
tacatattatat

SEQ ID NO: 90866 - DNA, 7 bp, Unknown
  misc_feature (1)..( 7): Result.001 file - promoters60/1010524
ttctttt

SEQ ID NO: 90867 - DNA, 7 bp, Unknown
  misc_feature (1)..( 7): Result.001 file - promoters60/1010524
ttcgttt

SEQ ID NO: 90868 - DNA, 6 bp, Unknown
  misc_feature (1)..( 6): Result.001 file - promoters60/1010524
tacttg

SEQ ID NO: 90869 - DNA, 6 bp, Unknown
  misc_feature (1)..( 6): Result.001 file - promoters60/1010524
tacttg

SEQ ID NO: 90870 - DNA, 6 bp, Unknown
  misc_feature (1)..( 6): Result.001 file - promoters60/1010524
gaaaag

SEQ ID NO: 90871 - DNA, 6 bp, Unknown
  misc_feature (1)..( 6): Result.001 file - promoters60/1010536
gaaaag

SEQ ID NO: 90872 - DNA, 8 bp, Unknown
  misc_feature (1)..( 8): Result.001 file - promoters60/1010536
gtgtctga

SEQ ID NO: 90873 - DNA, 8 bp, Unknown
  misc_feature (1)..( 8): Result.001 file - promoters60/1010536
gtgtgtga

SEQ ID NO: 90874 - DNA, 7 bp, Unknown
  misc_feature (1)..( 7): Result.001 file - promoters60/1010536
tccgaaa

SEQ ID NO: 90875 - DNA, 7 bp, Unknown
  misc_feature (1)..( 7): Result.001 file - promoters60/1010536
tccaaaa

SEQ ID NO: 90876 - DNA, 6 bp, Unknown
  misc_feature (1)..( 6): Result.001 file - promoters60/1010536
ctccat

SEQ ID NO: 90877 - DNA, 6 bp, Unknown
  misc_feature (1)..( 6): Result.001 file - promoters60/1010536
ctccat

SEQ ID NO: 90878 - DNA, 6 bp, Unknown
  misc_feature (1)..( 6): Result.001 file - promoters60/1010536
tagaga

SEQ ID NO: 90879 - DNA, 6 bp, Unknown
  misc_feature (1)..( 6): Result.001 file - promoters60/1010536
tagaga

SEQ ID NO: 90880 - DNA, 8 bp, Unknown
  misc_feature (1)..( 8): Result.001 file - promoters60/1010536
ggcaaaac

SEQ ID NO: 90881 - DNA, 8 bp, Unknown
  misc_feature (1)..( 8): Result.001 file - promoters60/1010536
ggcaaaac

SEQ ID NO: 90882 - DNA, 6 bp, Unknown
  misc_feature (1)..( 6): Result.001 file - promoters60/1010536
aatctc

SEQ ID NO: 90883 - DNA, 6 bp, Unknown
  misc_feature (1)..( 6): Result.001 file - promoters60/1010536
aatctc

SEQ ID NO: 90884 - DNA, 8 bp, Unknown
  misc_feature (1)..( 8): Result.001 file - promoters60/1010536
tttgatta

SEQ ID NO: 90885 - DNA, 8 bp, Unknown
  misc_feature (1)..( 8): Result.001 file - promoters60/1010536
tttaatta

SEQ ID NO: 90886 - DNA, 7 bp, Unknown
  misc_feature (1)..( 7): Result.001 file - promoters60/1010536
taatatt

SEQ ID NO: 90887 - DNA, 7 bp, Unknown
  misc_feature (1)..( 7): Result.001 file - promoters60/1010536
taacatt

SEQ ID NO: 90888 - DNA, 6 bp, Unknown
  misc_feature (1)..( 6): Result.001 file - promoters60/1010536
aaaata

SEQ ID NO: 90889 - DNA, 6 bp, Unknown
  misc_feature (1)..( 6): Result.001 file - promoters60/1010536
aaaata

SEQ ID NO: 90890 - DNA, 7 bp, Unknown
  misc_feature (1)..( 7): Result.001 file - promoters60/1010536
caaattt

SEQ ID NO: 90891 - DNA, 7 bp, Unknown
  misc_feature (1)..( 7): Result.001 file - promoters60/1010536
caatttt

SEQ ID NO: 90892 - DNA, 6 bp, Unknown
  misc_feature (1)..( 6): Result.001 file - promoters60/1010536
aaaata

SEQ ID NO: 90893 - DNA, 6 bp, Unknown
  misc_feature (1)..( 6): Result.001 file - promoters60/1010536
aaaata

SEQ ID NO: 90894 - DNA, 7 bp, Unknown
  misc_feature (1)..( 7): Result.001 file - promoters60/1010536
tatgtaa

SEQ ID NO: 90895 - DNA, 7 bp, Unknown
  misc_feature (1)..( 7): Result.001 file - promoters60/1010536
tatttaa

SEQ ID NO: 90896 - DNA, 8 bp, Unknown
  misc_feature (1)..( 8): Result.001 file - promoters60/1010536
aatattta

SEQ ID NO: 90897 - DNA, 8 bp, Unknown
  misc_feature (1)..( 8): Result.001 file - promoters60/1010536
aataatta

SEQ ID NO: 90898 - DNA, 7 bp, Unknown
  misc_feature (1)..( 7): Result.001 file - promoters60/1010536
attcaat

SEQ ID NO: 90899 - DNA, 7 bp, Unknown
  misc_feature (1)..( 7): Result.001 file - promoters60/1010536
atttaat

SEQ ID NO: 90900 - DNA, 6 bp, Unknown
  misc_feature (1)..( 6): Result.001 file - promoters60/1010536
ttaata

SEQ ID NO: 90901 - DNA, 6 bp, Unknown
  misc_feature (1)..( 6): Result.001 file - promoters60/1010536
ttaata

SEQ ID NO: 90902 - DNA, 6 bp, Unknown
  misc_feature (1)..( 6): Result.001 file - promoters60/1010536
aaatag

SEQ ID NO: 90903 - DNA, 6 bp, Unknown
  misc_feature (1)..( 6): Result.001 file - promoters60/1010536
aaatag

SEQ ID NO: 90904 - DNA, 8 bp, Unknown
  misc_feature (1)..( 8): Result.001 file - promoters60/1010536
ttaatttt

SEQ ID NO: 90905 - DNA, 8 bp, Unknown
  misc_feature (1)..( 8): Result.001 file - promoters60/1010536
ttattttt

SEQ ID NO: 90906 - DNA, 6 bp, Unknown
  misc_feature (1)..( 6): Result.001 file - promoters60/1010536
gacaaa

SEQ ID NO: 90907 - DNA, 6 bp, Unknown
  misc_feature (1)..( 6): Result.001 file - promoters60/1010536
gacaaa

SEQ ID NO: 90908 - DNA, 6 bp, Unknown
  misc_feature (1)..( 6): Result.001 file - promoters60/1010536
aaaaaa

SEQ ID NO: 90909 - DNA, 6 bp, Unknown
  misc_feature (1)..( 6): Result.001 file - promoters60/1010536
aaaaaa

SEQ ID NO: 90910 - DNA, 9 bp, Unknown
  misc_feature (1)..( 9): Result.001 file - promoters60/1010536
agtactctt

SEQ ID NO: 90911 - DNA, 9 bp, Unknown
  misc_feature (1)..( 9): Result.001 file - promoters60/1010536
agtattctt

SEQ ID NO: 90912 - DNA, 6 bp, Unknown
  misc_feature (1)..( 6): Result.001 file - promoters60/1010536
aaagat

SEQ ID NO: 90913 - DNA, 6 bp, Unknown
  misc_feature (1)..( 6): Result.001 file - promoters60/1010536
aaagat

SEQ ID NO: 90914 - DNA, 9 bp, Unknown
  misc_feature (1)..( 9): Result.001 file - promoters60/1010536
ttaataatt

SEQ ID NO: 90915 - DNA, 9 bp, Unknown
  misc_feature (1)..( 9): Result.001 file - promoters60/1010536
ttaattatt

SEQ ID NO: 90916 - DNA, 6 bp, Unknown
  misc_feature (1)..( 6): Result.001 file - promoters60/1010536
ttttaa

SEQ ID NO: 90917 - DNA, 6 bp, Unknown
  misc_feature (1)..( 6): Result.001 file - promoters60/1010536
ttttaa

SEQ ID NO: 90918 - DNA, 6 bp, Unknown
  misc_feature (1)..( 6): Result.001 file - promoters60/1010536
gaaaat

SEQ ID NO: 90919 - DNA, 6 bp, Unknown
  misc_feature (1)..( 6): Result.001 file - promoters60/1010562
gaaaat

SEQ ID NO: 90920 - DNA, 7 bp, Unknown
  misc_feature (1)..( 7): Result.001 file - promoters60/1010562
aaagaaa

SEQ ID NO: 90921 - DNA, 7 bp, Unknown
  misc_feature (1)..( 7): Result.001 file - promoters60/1010562
aaataaa

SEQ ID NO: 90922 - DNA, 7 bp, Unknown
  misc_feature (1)..( 7): Result.001 file - promoters60/1010562
atataat

SEQ ID NO: 90923 - DNA, 6 bp, Unknown
  misc_feature (1)..( 6): Result.001 file - promoters60/1010562
aattag

SEQ ID NO: 90924 - DNA, 6 bp, Unknown
  misc_feature (1)..( 6): Result.001 file - promoters60/1010562
aattag

SEQ ID NO: 90925 - DNA, 8 bp, Unknown
  misc_feature (1)..( 8): Result.001 file - promoters60/1010562
tatctttc

SEQ ID NO: 90926 - DNA, 8 bp, Unknown
  misc_feature (1)..( 8): Result.001 file - promoters60/1010562
tatttttt

SEQ ID NO: 90927 - DNA, 8 bp, Unknown
  misc_feature (1)..( 8): Result.001 file - promoters60/1010562
catcattc

SEQ ID NO: 90928 - DNA, 7 bp, Unknown
  misc_feature (1)..( 7): Result.001 file - promoters60/1010562
aaagatg

SEQ ID NO: 90929 - DNA, 7 bp, Unknown
  misc_feature (1)..( 7): Result.001 file - promoters60/1010562
aaatatg

SEQ ID NO: 90930 - DNA, 7 bp, Unknown
  misc_feature (1)..( 7): Result.001 file - promoters60/1010562
caagtga

SEQ ID NO: 90931 - DNA, 7 bp, Unknown
  misc_feature (1)..( 7): Result.001 file - promoters60/1010562
caattga

SEQ ID NO: 90932 - DNA, 6 bp, Unknown
  misc_feature (1)..( 6): Result.001 file - promoters60/1010562
aatcat

SEQ ID NO: 90933 - DNA, 6 bp, Unknown
  misc_feature (1)..( 6): Result.001 file - promoters60/1010562
aatcat

SEQ ID NO: 90934 - DNA, 6 bp, Unknown
  misc_feature (1)..( 6): Result.001 file - promoters60/1010562
cattat

SEQ ID NO: 90935 - DNA, 6 bp, Unknown
  misc_feature (1)..( 6): Result.001 file - promoters60/1010562
cattat

SEQ ID NO: 90936 - DNA, 7 bp, Unknown
  misc_feature (1)..( 7): Result.001 file - promoters60/1010562
tcagatc

SEQ ID NO: 90937 - DNA, 7 bp, Unknown
  misc_feature (1)..( 7): Result.001 file - promoters60/1010562
tcatatc

SEQ ID NO: 90938 - DNA, 7 bp, Unknown
  misc_feature (1)..( 7): Result.001 file - promoters60/1010562
caaaatc

SEQ ID NO: 90939 - DNA, 7 bp, Unknown
  misc_feature (1)..( 7): Result.001 file - promoters60/1010562
caagatc

SEQ ID NO: 90940 - DNA, 9 bp, Unknown
  misc_feature (1)..( 9): Result.001 file - promoters60/1010562
ccaagaaat

SEQ ID NO: 90941 - DNA, 9 bp, Unknown
  misc_feature (1)..( 9): Result.001 file - promoters60/1010562
ccaataaat

SEQ ID NO: 90942 - DNA, 8 bp, Unknown
  misc_feature (1)..( 8): Result.001 file - promoters60/1010562
tttctttt

SEQ ID NO: 90943 - DNA, 8 bp, Unknown
  misc_feature (1)..( 8): Result.001 file - promoters60/1010562
tttgtttt

SEQ ID NO: 90944 - DNA, 6 bp, Unknown
  misc_feature (1)..( 6): Result.001 file - promoters60/1010562
tttgtt

SEQ ID NO: 90945 - DNA, 6 bp, Unknown
  misc_feature (1)..( 6): Result.001 file - promoters60/1010562
tttgtt

SEQ ID NO: 90946 - DNA, 8 bp, Unknown
  misc_feature (1)..( 8): Result.001 file - promoters60/1010562
tattataa

SEQ ID NO: 90947 - DNA, 8 bp, Unknown
  misc_feature (1)..( 8): Result.001 file - promoters60/1010562
tattataa

SEQ ID NO: 90948 - DNA, 7 bp, Unknown
  misc_feature (1)..( 7): Result.001 file - promoters60/1010562
ctcgcat

SEQ ID NO: 90949 - DNA, 7 bp, Unknown
  misc_feature (1)..( 7): Result.001 file - promoters60/1010562
ctcgcat

SEQ ID NO: 90950 - DNA, 6 bp, Unknown
  misc_feature (1)..( 6): Result.001 file - promoters60/1010562
cattct

SEQ ID NO: 90951 - DNA, 6 bp, Unknown
  misc_feature (1)..( 6): Result.001 file - promoters60/1010562
cattct

SEQ ID NO: 90952 - DNA, 7 bp, Unknown
  misc_feature (1)..( 7): Result.001 file - promoters60/1010562
tattgat

SEQ ID NO: 90953 - DNA, 7 bp, Unknown
  misc_feature (1)..( 7): Result.001 file - promoters60/1010562
tatggat

SEQ ID NO: 90954 - DNA, 9 bp, Unknown
  misc_feature (1)..( 9): Result.001 file - promoters60/1010562
ttagtatgg

SEQ ID NO: 90955 - DNA, 9 bp, Unknown
  misc_feature (1)..( 9): Result.001 file - promoters60/1010562
ttagtttgg

SEQ ID NO: 90956 - DNA, 7 bp, Unknown
  misc_feature (1)..( 7): Result.001 file - promoters60/1010562
tttttac

SEQ ID NO: 90957 - DNA, 7 bp, Unknown
  misc_feature (1)..( 7): Result.001 file - promoters60/1010562
tttctac

SEQ ID NO: 90958 - DNA, 8 bp, Unknown
  misc_feature (1)..( 8): Result.001 file - promoters60/1010562
ctatagaa

SEQ ID NO: 90959 - DNA, 8 bp, Unknown
  misc_feature (1)..( 8): Result.001 file - promoters60/1010562
ctaaagaa

SEQ ID NO: 90960 - DNA, 6 bp, Unknown
  misc_feature (1)..( 6): Result.001 file - promoters60/1010562
cccacc

SEQ ID NO: 90961 - DNA, 6 bp, Unknown
  misc_feature (1)..( 6): Result.001 file - promoters60/1010571
cccacc

SEQ ID NO: 90962 - DNA, 11 bp, Unknown
  misc_feature (1)..( 11): Result.001 file - promoters60/1010571
ttaaatcaata

SEQ ID NO: 90963 - DNA, 11 bp, Unknown
  misc_feature (1)..( 11): Result.001 file - promoters60/1010571
ctaaattaata

SEQ ID NO: 90964 - DNA, 11 bp, Unknown
  misc_feature (1)..( 11): Result.001 file - promoters60/1010571
ctacatttgga

SEQ ID NO: 90965 - DNA, 8 bp, Unknown
  misc_feature (1)..( 8): Result.001 file - promoters60/1010571
aatatata

SEQ ID NO: 90966 - DNA, 8 bp, Unknown
  misc_feature (1)..( 8): Result.001 file - promoters60/1010571
aatttata

SEQ ID NO: 90967 - DNA, 8 bp, Unknown
  misc_feature (1)..( 8): Result.001 file - promoters60/1010571
tatacctt

SEQ ID NO: 90968 - DNA, 8 bp, Unknown
  misc_feature (1)..( 8): Result.001 file - promoters60/1010571
tataactt

SEQ ID NO: 90969 - DNA, 10 bp, Unknown
  misc_feature (1)..( 10): Result.001 file - promoters60/1010571
ttaccaattg

SEQ ID NO: 90970 - DNA, 10 bp, Unknown
  misc_feature (1)..( 10): Result.001 file - promoters60/1010571
ttatcaatca

SEQ ID NO: 90971 - DNA, 10 bp, Unknown
  misc_feature (1)..( 10): Result.001 file - promoters60/1010571
aaaccatttg

SEQ ID NO: 90972 - DNA, 6 bp, Unknown
  misc_feature (1)..( 6): Result.001 file - promoters60/1010571
aaatat

SEQ ID NO: 90973 - DNA, 6 bp, Unknown
  misc_feature (1)..( 6): Result.001 file - promoters60/1010571
aaatat

SEQ ID NO: 90974 - DNA, 6 bp, Unknown
  misc_feature (1)..( 6): Result.001 file - promoters60/1010571
ataatt

SEQ ID NO: 90975 - DNA, 6 bp, Unknown
  misc_feature (1)..( 6): Result.001 file - promoters60/1010571
ataatt

SEQ ID NO: 90976 - DNA, 15 bp, Unknown
  misc_feature (1)..( 15): Result.001 file - promoters60/1010571
aaggatgatggacca

SEQ ID NO: 90977 - DNA, 15 bp, Unknown
  misc_feature (1)..( 15): Result.001 file - promoters60/1010571
aaggatgatggacca

SEQ ID NO: 90978 - DNA, 15 bp, Unknown
  misc_feature (1)..( 15): Result.001 file - promoters60/1010571
tacacattaataacg

SEQ ID NO: 90979 - DNA, 15 bp, Unknown
  misc_feature (1)..( 15): Result.001 file - promoters60/1010571
tacacattaataacg

SEQ ID NO: 90980 - DNA, 39 bp, Unknown
  misc_feature (1)..( 39): Result.001 file - promoters60/1010571
tttatcaaataaagaaaataaatttctatgacccaataa

SEQ ID NO: 90981 - DNA, 39 bp, Unknown
  misc_feature (1)..( 39): Result.001 file - promoters60/1010571
tttaccaaatcaagaaaatacatttctatgatccactaa

SEQ ID NO: 90982 - DNA, 39 bp, Unknown
  misc_feature (1)..( 39): Result.001 file - promoters60/1010571
gccattggtagcaaggtataaatttaatagcaatctgaa

SEQ ID NO: 90983 - DNA, 6 bp, Unknown
  misc_feature (1)..( 6): Result.001 file - promoters60/1010571
tggttt

SEQ ID NO: 90984 - DNA, 6 bp, Unknown
  misc_feature (1)..( 6): Result.001 file - promoters60/1010571
tggttt

SEQ ID NO: 90985 - DNA, 6 bp, Unknown
  misc_feature (1)..( 6): Result.001 file - promoters60/1010571
caaaac

SEQ ID NO: 90986 - DNA, 6 bp, Unknown
  misc_feature (1)..( 6): Result.001 file - promoters60/1010571
caaaac

SEQ ID NO: 90987 - DNA, 11 bp, Unknown
  misc_feature (1)..( 11): Result.001 file - promoters60/1010571
attcttttatt

SEQ ID NO: 90988 - DNA, 11 bp, Unknown
  misc_feature (1)..( 11): Result.001 file - promoters60/1010571
attctcttatt

SEQ ID NO: 90989 - DNA, 6 bp, Unknown
  misc_feature (1)..( 6): Result.001 file - promoters60/1010571
tgtttt

SEQ ID NO: 90990 - DNA, 6 bp, Unknown
  misc_feature (1)..( 6): Result.001 file - promoters60/1010571
tgtttt

SEQ ID NO: 90991 - DNA, 7 bp, Unknown
  misc_feature (1)..( 7): Result.001 file - promoters60/1010571
caaaaaa

SEQ ID NO: 90992 - DNA, 7 bp, Unknown
  misc_feature (1)..( 7): Result.001 file - promoters60/1010571
caacaaa

SEQ ID NO: 90993 - DNA, 7 bp, Unknown
  misc_feature (1)..( 7): Result.001 file - promoters60/1010571
aattttt

SEQ ID NO: 90994 - DNA, 7 bp, Unknown
  misc_feature (1)..( 7): Result.001 file - promoters60/1010571
aatgttt

SEQ ID NO: 90995 - DNA, 6 bp, Unknown
  misc_feature (1)..( 6): Result.001 file - promoters60/1010571
ttttat

SEQ ID NO: 90996 - DNA, 6 bp, Unknown
  misc_feature (1)..( 6): Result.001 file - promoters60/1010636
ttttat

SEQ ID NO: 90997 - DNA, 8 bp, Unknown
  misc_feature (1)..( 8): Result.001 file - promoters60/1010636
gctttgat

SEQ ID NO: 90998 - DNA, 8 bp, Unknown
  misc_feature (1)..( 8): Result.001 file - promoters60/1010636
gcttggat

SEQ ID NO: 90999 - DNA, 8 bp, Unknown
  misc_feature (1)..( 8): Result.001 file - promoters60/1010636
cattggat

SEQ ID NO: 91000 - DNA, 8 bp, Unknown
  misc_feature (1)..( 8): Result.001 file - promoters60/1010636
tcaaagtt

SEQ ID NO: 91001 - DNA, 8 bp, Unknown
  misc_feature (1)..( 8): Result.001 file - promoters60/1010636
cgaaagtt

SEQ ID NO: 91002 - DNA, 8 bp, Unknown
  misc_feature (1)..( 8): Result.001 file - promoters60/1010636
cgagagta

SEQ ID NO: 91003 - DNA, 10 bp, Unknown
  misc_feature (1)..( 10): Result.001 file - promoters60/1010636
cctaaaccct

SEQ ID NO: 91004 - DNA, 10 bp, Unknown
  misc_feature (1)..( 10): Result.001 file - promoters60/1010636
ttaaaaccct

SEQ ID NO: 91005 - DNA, 10 bp, Unknown
  misc_feature (1)..( 10): Result.001 file - promoters60/1010636
tttaaaccct

SEQ ID NO: 91006 - DNA, 10 bp, Unknown
  misc_feature (1)..( 10): Result.001 file - promoters60/1010636
ttttaacggc

SEQ ID NO: 91007 - DNA, 8 bp, Unknown
  misc_feature (1)..( 8): Result.001 file - promoters60/1010636
atggaatt

SEQ ID NO: 91008 - DNA, 8 bp, Unknown
  misc_feature (1)..( 8): Result.001 file - promoters60/1010636
gtggcatt

SEQ ID NO: 91009 - DNA, 8 bp, Unknown
  misc_feature (1)..( 8): Result.001 file - promoters60/1010636
gtgtcatc

SEQ ID NO: 91010 - DNA, 7 bp, Unknown
  misc_feature (1)..( 7): Result.001 file - promoters60/1010636
ttttctt

SEQ ID NO: 91011 - DNA, 7 bp, Unknown
  misc_feature (1)..( 7): Result.001 file - promoters60/1010636
ttttcta

SEQ ID NO: 91012 - DNA, 7 bp, Unknown
  misc_feature (1)..( 7): Result.001 file - promoters60/1010693
atttcta

SEQ ID NO: 91013 - DNA, 6 bp, Unknown
  misc_feature (1)..( 6): Result.001 file - promoters60/1010693
taattc

SEQ ID NO: 91014 - DNA, 6 bp, Unknown
  misc_feature (1)..( 6): Result.001 file - promoters60/1010693
taattc

SEQ ID NO: 91015 - DNA, 9 bp, Unknown
  misc_feature (1)..( 9): Result.001 file - promoters60/1010693
gaagctttt

SEQ ID NO: 91016 - DNA, 9 bp, Unknown
  misc_feature (1)..( 9): Result.001 file - promoters60/1010693
gaaggtttt

SEQ ID NO: 91017 - DNA, 6 bp, Unknown
  misc_feature (1)..( 6): Result.001 file - promoters60/1010693
ttttaa

SEQ ID NO: 91018 - DNA, 6 bp, Unknown
  misc_feature (1)..( 6): Result.001 file - promoters60/1010693
ttttaa

SEQ ID NO: 91019 - DNA, 7 bp, Unknown
  misc_feature (1)..( 7): Result.001 file - promoters60/1010693
aatcaat

SEQ ID NO: 91020 - DNA, 7 bp, Unknown
  misc_feature (1)..( 7): Result.001 file - promoters60/1010693
aatgaat

SEQ ID NO: 91021 - DNA, 8 bp, Unknown
  misc_feature (1)..( 8): Result.001 file - promoters60/1010693
ttatatat

SEQ ID NO: 91022 - DNA, 8 bp, Unknown
  misc_feature (1)..( 8): Result.001 file - promoters60/1010693
ttaaataa

SEQ ID NO: 91023 - DNA, 8 bp, Unknown
  misc_feature (1)..( 8): Result.001 file - promoters60/1010693
ttaaatat

SEQ ID NO: 91024 - DNA, 6 bp, Unknown
  misc_feature (1)..( 6): Result.001 file - promoters60/1010693
ataaaa

SEQ ID NO: 91025 - DNA, 6 bp, Unknown
  misc_feature (1)..( 6): Result.001 file - promoters60/1010693
ataaaa

SEQ ID NO: 91026 - DNA, 7 bp, Unknown
  misc_feature (1)..( 7): Result.001 file - promoters60/1010693
tttcatt

SEQ ID NO: 91027 - DNA, 7 bp, Unknown
  misc_feature (1)..( 7): Result.001 file - promoters60/1010693
tttgatt

SEQ ID NO: 91028 - DNA, 7 bp, Unknown
  misc_feature (1)..( 7): Result.001 file - promoters60/1010693
agttggt

SEQ ID NO: 91029 - DNA, 7 bp, Unknown
  misc_feature (1)..( 7): Result.001 file - promoters60/1010693
agttggt

SEQ ID NO: 91030 - DNA, 7 bp, Unknown
  misc_feature (1)..( 7): Result.001 file - promoters60/1010693
agtaaaa

SEQ ID NO: 91031 - DNA, 7 bp, Unknown
  misc_feature (1)..( 7): Result.001 file - promoters60/1010693
agtaaaa

SEQ ID NO: 91032 - DNA, 8 bp, Unknown
  misc_feature (1)..( 8): Result.001 file - promoters60/1010693
ataatata

SEQ ID NO: 91033 - DNA, 8 bp, Unknown
  misc_feature (1)..( 8): Result.001 file - promoters60/1010693
ataatatt

SEQ ID NO: 91034 - DNA, 8 bp, Unknown
  misc_feature (1)..( 8): Result.001 file - promoters60/1010693
ttaatata

SEQ ID NO: 91035 - DNA, 6 bp, Unknown
  misc_feature (1)..( 6): Result.001 file - promoters60/1010693
aacata

SEQ ID NO: 91036 - DNA, 6 bp, Unknown
  misc_feature (1)..( 6): Result.001 file - promoters60/1010693
aacata

SEQ ID NO: 91037 - DNA, 6 bp, Unknown
  misc_feature (1)..( 6): Result.001 file - promoters60/1010693
aaaatt

SEQ ID NO: 91038 - DNA, 6 bp, Unknown
  misc_feature (1)..( 6): Result.001 file - promoters60/1010693
aaaatt

SEQ ID NO: 91039 - DNA, 7 bp, Unknown
  misc_feature (1)..( 7): Result.001 file - promoters60/1010693
tttcatt

SEQ ID NO: 91040 - DNA, 7 bp, Unknown
  misc_feature (1)..( 7): Result.001 file - promoters60/1010693
ttttatt

SEQ ID NO: 91041 - DNA, 8 bp, Unknown
  misc_feature (1)..( 8): Result.001 file - promoters60/1010693
caaattcg

SEQ ID NO: 91042 - DNA, 8 bp, Unknown
  misc_feature (1)..( 8): Result.001 file - promoters60/1010693
caaagtcg

SEQ ID NO: 91043 - DNA, 8 bp, Unknown
  misc_feature (1)..( 8): Result.001 file - promoters60/1010693
aaaatttc

SEQ ID NO: 91044 - DNA, 8 bp, Unknown
  misc_feature (1)..( 8): Result.001 file - promoters60/1010693
aaaacttc

SEQ ID NO: 91045 - DNA, 6 bp, Unknown
  misc_feature (1)..( 6): Result.001 file - promoters60/1010693
taataa

SEQ ID NO: 91046 - DNA, 6 bp, Unknown
  misc_feature (1)..( 6): Result.001 file - promoters60/1010693
taataa

SEQ ID NO: 91047 - DNA, 7 bp, Unknown
  misc_feature (1)..( 7): Result.001 file - promoters60/1010693
aaaagcg

SEQ ID NO: 91048 - DNA, 7 bp, Unknown
  misc_feature (1)..( 7): Result.001 file - promoters60/1010693
aaacgcg

SEQ ID NO: 91049 - DNA, 9 bp, Unknown
  misc_feature (1)..( 9): Result.001 file - promoters60/1010693
tcgtaaata

SEQ ID NO: 91050 - DNA, 9 bp, Unknown
  misc_feature (1)..( 9): Result.001 file - promoters60/1010693
tcgttaata

SEQ ID NO: 91051 - DNA, 7 bp, Unknown
  misc_feature (1)..( 7): Result.001 file - promoters60/1010693
caataac

SEQ ID NO: 91052 - DNA, 7 bp, Unknown
  misc_feature (1)..( 7): Result.001 file - promoters60/1010693
caaaaac

SEQ ID NO: 91053 - DNA, 6 bp, Unknown
  misc_feature (1)..( 6): Result.001 file - promoters60/1010693
atgtta

SEQ ID NO: 91054 - DNA, 6 bp, Unknown
  misc_feature (1)..( 6): Result.001 file - promoters60/1010693
atgtta

SEQ ID NO: 91055 - DNA, 9 bp, Unknown
  misc_feature (1)..( 9): Result.001 file - promoters60/1010693
aaattaaaa

SEQ ID NO: 91056 - DNA, 9 bp, Unknown
  misc_feature (1)..( 9): Result.001 file - promoters60/1010693
aaactaaaa

SEQ ID NO: 91057 - DNA, 7 bp, Unknown
  misc_feature (1)..( 7): Result.001 file - promoters60/1010693
tatacaa

SEQ ID NO: 91058 - DNA, 7 bp, Unknown
  misc_feature (1)..( 7): Result.001 file - promoters60/1010693
tatccaa

SEQ ID NO: 91059 - DNA, 8 bp, Unknown
  misc_feature (1)..( 8): Result.001 file - promoters60/1010693
attttaat

SEQ ID NO: 91060 - DNA, 8 bp, Unknown
  misc_feature (1)..( 8): Result.001 file - promoters60/1010710
attgtaat

SEQ ID NO: 91061 - DNA, 6 bp, Unknown
  misc_feature (1)..( 6): Result.001 file - promoters60/1010710
cggtaa

SEQ ID NO: 91062 - DNA, 6 bp, Unknown
  misc_feature (1)..( 6): Result.001 file - promoters60/1010710
cggtaa

SEQ ID NO: 91063 - DNA, 7 bp, Unknown
  misc_feature (1)..( 7): Result.001 file - promoters60/1010710
tttgttg

SEQ ID NO: 91064 - DNA, 7 bp, Unknown
  misc_feature (1)..( 7): Result.001 file - promoters60/1010710
tttcttg

SEQ ID NO: 91065 - DNA, 6 bp, Unknown
  misc_feature (1)..( 6): Result.001 file - promoters60/1010710
acatat

SEQ ID NO: 91066 - DNA, 6 bp, Unknown
  misc_feature (1)..( 6): Result.001 file - promoters60/1010710
acatat

SEQ ID NO: 91067 - DNA, 7 bp, Unknown
  misc_feature (1)..( 7): Result.001 file - promoters60/1010710
tttgttc

SEQ ID NO: 91068 - DNA, 7 bp, Unknown
  misc_feature (1)..( 7): Result.001 file - promoters60/1010710
ttttttc

SEQ ID NO: 91069 - DNA, 8 bp, Unknown
  misc_feature (1)..( 8): Result.001 file - promoters60/1010710
aatctaaa

SEQ ID NO: 91070 - DNA, 8 bp, Unknown
  misc_feature (1)..( 8): Result.001 file - promoters60/1010710
aatcaaaa

SEQ ID NO: 91071 - DNA, 7 bp, Unknown
  misc_feature (1)..( 7): Result.001 file - promoters60/1010710
gatcaat

SEQ ID NO: 91072 - DNA, 7 bp, Unknown
  misc_feature (1)..( 7): Result.001 file - promoters60/1010710
gataaat

SEQ ID NO: 91073 - DNA, 7 bp, Unknown
  misc_feature (1)..( 7): Result.001 file - promoters60/1010710
gaacttt

SEQ ID NO: 91074 - DNA, 7 bp, Unknown
  misc_feature (1)..( 7): Result.001 file - promoters60/1010710
gaatttt

SEQ ID NO: 91075 - DNA, 6 bp, Unknown
  misc_feature (1)..( 6): Result.001 file - promoters60/1010710
agtata

SEQ ID NO: 91076 - DNA, 6 bp, Unknown
  misc_feature (1)..( 6): Result.001 file - promoters60/1010710
agtata

SEQ ID NO: 91077 - DNA, 10 bp, Unknown
  misc_feature (1)..( 10): Result.001 file - promoters60/1010710
accggttata

SEQ ID NO: 91078 - DNA, 10 bp, Unknown
  misc_feature (1)..( 10): Result.001 file - promoters60/1010710
accgtttata

SEQ ID NO: 91079 - DNA, 9 bp, Unknown
  misc_feature (1)..( 9): Result.001 file - promoters60/1010710
tattattac

SEQ ID NO: 91080 - DNA, 9 bp, Unknown
  misc_feature (1)..( 9): Result.001 file - promoters60/1010710
aattatttt

SEQ ID NO: 91081 - DNA, 9 bp, Unknown
  misc_feature (1)..( 9): Result.001 file - promoters60/1010710
aatgatttt

SEQ ID NO: 91082 - DNA, 7 bp, Unknown
  misc_feature (1)..( 7): Result.001 file - promoters60/1010710
tttgcgg

SEQ ID NO: 91083 - DNA, 7 bp, Unknown
  misc_feature (1)..( 7): Result.001 file - promoters60/1010710
tttccgg

SEQ ID NO: 91084 - DNA, 7 bp, Unknown
  misc_feature (1)..( 7): Result.001 file - promoters60/1010710
gaacagt

SEQ ID NO: 91085 - DNA, 7 bp, Unknown
  misc_feature (1)..( 7): Result.001 file - promoters60/1010710
gaagagt

SEQ ID NO: 91086 - DNA, 7 bp, Unknown
  misc_feature (1)..( 7): Result.001 file - promoters60/1010710
cgataca

SEQ ID NO: 91087 - DNA, 7 bp, Unknown
  misc_feature (1)..( 7): Result.001 file - promoters60/1010710
cgacaca

SEQ ID NO: 91088 - DNA, 7 bp, Unknown
  misc_feature (1)..( 7): Result.001 file - promoters60/1010710
tttatat

SEQ ID NO: 91089 - DNA, 7 bp, Unknown
  misc_feature (1)..( 7): Result.001 file - promoters60/1010710
tttgtat

SEQ ID NO: 91090 - DNA, 7 bp, Unknown
  misc_feature (1)..( 7): Result.001 file - promoters60/1010710
gatttga

SEQ ID NO: 91091 - DNA, 7 bp, Unknown
  misc_feature (1)..( 7): Result.001 file - promoters60/1010770
gatgtga

SEQ ID NO: 91092 - DNA, 6 bp, Unknown
  misc_feature (1)..( 6): Result.001 file - promoters60/1010770
ttttaa

SEQ ID NO: 91093 - DNA, 6 bp, Unknown
  misc_feature (1)..( 6): Result.001 file - promoters60/1010770
ttttaa

SEQ ID NO: 91094 - DNA, 6 bp, Unknown
  misc_feature (1)..( 6): Result.001 file - promoters60/1010770
aaaagc

SEQ ID NO: 91095 - DNA, 6 bp, Unknown
  misc_feature (1)..( 6): Result.001 file - promoters60/1010770
aaaagc

SEQ ID NO: 91096 - DNA, 7 bp, Unknown
  misc_feature (1)..( 7): Result.001 file - promoters60/1010770
atttttg

SEQ ID NO: 91097 - DNA, 7 bp, Unknown
  misc_feature (1)..( 7): Result.001 file - promoters60/1010770
attattg

SEQ ID NO: 91098 - DNA, 9 bp, Unknown
  misc_feature (1)..( 9): Result.001 file - promoters60/1010770
acaaagaga

SEQ ID NO: 91099 - DNA, 9 bp, Unknown
  misc_feature (1)..( 9): Result.001 file - promoters60/1010770
acagagaga

SEQ ID NO: 91100 - DNA, 7 bp, Unknown
  misc_feature (1)..( 7): Result.001 file - promoters60/1010770
tttggac

SEQ ID NO: 91101 - DNA, 7 bp, Unknown
  misc_feature (1)..( 7): Result.001 file - promoters60/1010770
tttggac

SEQ ID NO: 91102 - DNA, 6 bp, Unknown
  misc_feature (1)..( 6): Result.001 file - promoters60/1010770
gctttt

SEQ ID NO: 91103 - DNA, 6 bp, Unknown
  misc_feature (1)..( 6): Result.001 file - promoters60/1010770
gctttt

SEQ ID NO: 91104 - DNA, 7 bp, Unknown
  misc_feature (1)..( 7): Result.001 file - promoters60/1010770
ccaattg

SEQ ID NO: 91105 - DNA, 7 bp, Unknown
  misc_feature (1)..( 7): Result.001 file - promoters60/1010770
ccaattg

SEQ ID NO: 91106 - DNA, 8 bp, Unknown
  misc_feature (1)..( 8): Result.001 file - promoters60/1010770
gattaatt

SEQ ID NO: 91107 - DNA, 8 bp, Unknown
  misc_feature (1)..( 8): Result.001 file - promoters60/1010770
gattaatt

SEQ ID NO: 91108 - DNA, 6 bp, Unknown
  misc_feature (1)..( 6): Result.001 file - promoters60/1010770
taaatt

SEQ ID NO: 91109 - DNA, 6 bp, Unknown
  misc_feature (1)..( 6): Result.001 file - promoters60/1010770
taaatt

SEQ ID NO: 91110 - DNA, 8 bp, Unknown
  misc_feature (1)..( 8): Result.001 file - promoters60/1010770
aattgcaa

SEQ ID NO: 91111 - DNA, 8 bp, Unknown
  misc_feature (1)..( 8): Result.001 file - promoters60/1010770
aatttcaa

SEQ ID NO: 91112 - DNA, 7 bp, Unknown
  misc_feature (1)..( 7): Result.001 file - promoters60/1010770
gtttttg

SEQ ID NO: 91113 - DNA, 7 bp, Unknown
  misc_feature (1)..( 7): Result.001 file - promoters60/1010770
gttattg

SEQ ID NO: 91114 - DNA, 7 bp, Unknown
  misc_feature (1)..( 7): Result.001 file - promoters60/1010770
tttagtt

SEQ ID NO: 91115 - DNA, 7 bp, Unknown
  misc_feature (1)..( 7): Result.001 file - promoters60/1010770
tttggtt

SEQ ID NO: 91116 - DNA, 9 bp, Unknown
  misc_feature (1)..( 9): Result.001 file - promoters60/1010770
aatacaaaa

SEQ ID NO: 91117 - DNA, 9 bp, Unknown
  misc_feature (1)..( 9): Result.001 file - promoters60/1010770
aattcaaaa

SEQ ID NO: 91118 - DNA, 7 bp, Unknown
  misc_feature (1)..( 7): Result.001 file - promoters60/1010770
caaaaaa

SEQ ID NO: 91119 - DNA, 7 bp, Unknown
  misc_feature (1)..( 7): Result.001 file - promoters60/1010770
caataaa

SEQ ID NO: 91120 - DNA, 10 bp, Unknown
  misc_feature (1)..( 10): Result.001 file - promoters60/1010770
tttcaacaat

SEQ ID NO: 91121 - DNA, 10 bp, Unknown
  misc_feature (1)..( 10): Result.001 file - promoters60/1010770
tttaaacaat

SEQ ID NO: 91122 - DNA, 7 bp, Unknown
  misc_feature (1)..( 7): Result.001 file - promoters60/1010770
ttagtgc

SEQ ID NO: 91123 - DNA, 7 bp, Unknown
  misc_feature (1)..( 7): Result.001 file - promoters60/1010770
ttaatgc

SEQ ID NO: 91124 - DNA, 6 bp, Unknown
  misc_feature (1)..( 6): Result.001 file - promoters60/1010770
atatac

SEQ ID NO: 91125 - DNA, 6 bp, Unknown
  misc_feature (1)..( 6): Result.001 file - promoters60/1010770
atatac

SEQ ID NO: 91126 - DNA, 8 bp, Unknown
  misc_feature (1)..( 8): Result.001 file - promoters60/1010770
cttggttt

SEQ ID NO: 91127 - DNA, 8 bp, Unknown
  misc_feature (1)..( 8): Result.001 file - promoters60/1010770
ctttgttt

SEQ ID NO: 91128 - DNA, 8 bp, Unknown
  misc_feature (1)..( 8): Result.001 file - promoters60/1010770
ccatacat

SEQ ID NO: 91129 - DNA, 8 bp, Unknown
  misc_feature (1)..( 8): Result.001 file - promoters60/1010815
ccatacat

SEQ ID NO: 91130 - DNA, 15 bp, Unknown
  misc_feature (1)..( 15): Result.001 file - promoters60/1010815
tctctcaaagatttt

SEQ ID NO: 91131 - DNA, 15 bp, Unknown
  misc_feature (1)..( 15): Result.001 file - promoters60/1010815
agtttcaaagaaaga

SEQ ID NO: 91132 - DNA, 15 bp, Unknown
  misc_feature (1)..( 15): Result.001 file - promoters60/1010815
tctttcaaaatttga

SEQ ID NO: 91133 - DNA, 15 bp, Unknown
  misc_feature (1)..( 15): Result.001 file - promoters60/1010815
acaaggaaagacttt

SEQ ID NO: 91134 - DNA, 15 bp, Unknown
  misc_feature (1)..( 15): Result.001 file - promoters60/1010815
attacgaaaaaaaat

SEQ ID NO: 91135 - DNA, 15 bp, Unknown
  misc_feature (1)..( 15): Result.001 file - promoters60/1010815
gcaagtaaaaaagta

SEQ ID NO: 91136 - DNA, 9 bp, Unknown
  misc_feature (1)..( 9): Result.001 file - promoters60/1010815
aaatattaa

SEQ ID NO: 91137 - DNA, 9 bp, Unknown
  misc_feature (1)..( 9): Result.001 file - promoters60/1010815
aaataataa

SEQ ID NO: 91138 - DNA, 10 bp, Unknown
  misc_feature (1)..( 10): Result.001 file - promoters60/1010815
aaactatccc

SEQ ID NO: 91139 - DNA, 10 bp, Unknown
  misc_feature (1)..( 10): Result.001 file - promoters60/1010815
aaaatatttt

SEQ ID NO: 91140 - DNA, 10 bp, Unknown
  misc_feature (1)..( 10): Result.001 file - promoters60/1010815
ggtttaataa

SEQ ID NO: 91141 - DNA, 10 bp, Unknown
  misc_feature (1)..( 10): Result.001 file - promoters60/1010815
aaactagaat

SEQ ID NO: 91142 - DNA, 10 bp, Unknown
  misc_feature (1)..( 10): Result.001 file - promoters60/1010815
aacacaaaaa

SEQ ID NO: 91143 - DNA, 10 bp, Unknown
  misc_feature (1)..( 10): Result.001 file - promoters60/1010815
aacacaagaa

SEQ ID NO: 91144 - DNA, 10 bp, Unknown
  misc_feature (1)..( 10): Result.001 file - promoters60/1010815
aacaaaaaaa

SEQ ID NO: 91145 - DNA, 10 bp, Unknown
  misc_feature (1)..( 10): Result.001 file - promoters60/1010815
cacacgaaaa

SEQ ID NO: 91146 - DNA, 11 bp, Unknown
  misc_feature (1)..( 11): Result.001 file - promoters60/1010815
tacgaaaaaaa

SEQ ID NO: 91147 - DNA, 11 bp, Unknown
  misc_feature (1)..( 11): Result.001 file - promoters60/1010815
aactaaaatta

SEQ ID NO: 91148 - DNA, 13 bp, Unknown
  misc_feature (1)..( 13): Result.001 file - promoters60/1010815
tatatgttaattt

SEQ ID NO: 91149 - DNA, 13 bp, Unknown
  misc_feature (1)..( 13): Result.001 file - promoters60/1010815
cttttgtaaattt

SEQ ID NO: 91150 - DNA, 13 bp, Unknown
  misc_feature (1)..( 13): Result.001 file - promoters60/1010815
aatatataaaata

SEQ ID NO: 91151 - DNA, 13 bp, Unknown
  misc_feature (1)..( 13): Result.001 file - promoters60/1010815
tgtatatatatga

SEQ ID NO: 91152 - DNA, 13 bp, Unknown
  misc_feature (1)..( 13): Result.001 file - promoters60/1010815
actatatagctta

SEQ ID NO: 91153 - DNA, 13 bp, Unknown
  misc_feature (1)..( 13): Result.001 file - promoters60/1010819
gcgatataaagcc

SEQ ID NO: 91154 - DNA, 16 bp, Unknown
  misc_feature (1)..( 16): Result.001 file - promoters60/1010819
ttcatcaccaagaatg

SEQ ID NO: 91155 - DNA, 16 bp, Unknown
  misc_feature (1)..( 16): Result.001 file - promoters60/1010819
gattagtaaaagaatc

SEQ ID NO: 91156 - DNA, 16 bp, Unknown
  misc_feature (1)..( 16): Result.001 file - promoters60/1010819
tgattctaaaagcatc

SEQ ID NO: 91157 - DNA, 16 bp, Unknown
  misc_feature (1)..( 16): Result.001 file - promoters60/1010819
atcttctaaaatctta

SEQ ID NO: 91158 - DNA, 16 bp, Unknown
  misc_feature (1)..( 16): Result.001 file - promoters60/1010819
tttttctaaaataata

SEQ ID NO: 91159 - DNA, 16 bp, Unknown
  misc_feature (1)..( 16): Result.001 file - promoters60/1010819
tttatctaacaattaa

SEQ ID NO: 91160 - DNA, 16 bp, Unknown
  misc_feature (1)..( 16): Result.001 file - promoters60/1010993
tcagtctaaattgggt

SEQ ID NO: 91161 - DNA, 10 bp, Unknown
  misc_feature (1)..( 10): Result.001 file - promoters60/1010993
ttttcttatg

SEQ ID NO: 91162 - DNA, 10 bp, Unknown
  misc_feature (1)..( 10): Result.001 file - promoters60/1010993
tttttttata

SEQ ID NO: 91163 - DNA, 10 bp, Unknown
  misc_feature (1)..( 10): Result.001 file - promoters60/1010993
cccctttata

SEQ ID NO: 91164 - DNA, 10 bp, Unknown
  misc_feature (1)..( 10): Result.001 file - promoters60/1010993
gttttttcac

SEQ ID NO: 91165 - DNA, 10 bp, Unknown
  misc_feature (1)..( 10): Result.001 file - promoters60/1010993
taataataat

SEQ ID NO: 91166 - DNA, 10 bp, Unknown
  misc_feature (1)..( 10): Result.001 file - promoters60/1010993
taatattaaa

SEQ ID NO: 91167 - DNA, 10 bp, Unknown
  misc_feature (1)..( 10): Result.001 file - promoters60/1010993
tgatttaaat

SEQ ID NO: 91168 - DNA, 10 bp, Unknown
  misc_feature (1)..( 10): Result.001 file - promoters60/1010993
tgattcaaaa

SEQ ID NO: 91169 - DNA, 9 bp, Unknown
  misc_feature (1)..( 9): Result.001 file - promoters60/1010993
aaaattaaa

SEQ ID NO: 91170 - DNA, 9 bp, Unknown
  misc_feature (1)..( 9): Result.001 file - promoters60/1010993
aaaataaaa

SEQ ID NO: 91171 - DNA, 9 bp, Unknown
  misc_feature (1)..( 9): Result.001 file - promoters60/1010993
ttaatcaaa

SEQ ID NO: 91172 - DNA, 9 bp, Unknown
  misc_feature (1)..( 9): Result.001 file - promoters60/1010993
aaaataagt

SEQ ID NO: 91173 - DNA, 11 bp, Unknown
  misc_feature (1)..( 11): Result.001 file - promoters60/1010993
gaaaaaactaa

SEQ ID NO: 91174 - DNA, 11 bp, Unknown
  misc_feature (1)..( 11): Result.001 file - promoters60/1010993
gaacaaacgcc

SEQ ID NO: 91175 - DNA, 11 bp, Unknown
  misc_feature (1)..( 11): Result.001 file - promoters60/1010993
taaaaaaactg

SEQ ID NO: 91176 - DNA, 11 bp, Unknown
  misc_feature (1)..( 11): Result.001 file - promoters60/1010993
taaataataaa

SEQ ID NO: 91177 - DNA, 8 bp, Unknown
  misc_feature (1)..( 8): Result.001 file - promoters60/1010993
aagattta

SEQ ID NO: 91178 - DNA, 8 bp, Unknown
  misc_feature (1)..( 8): Result.001 file - promoters60/1010993
aagattat

SEQ ID NO: 91179 - DNA, 8 bp, Unknown
  misc_feature (1)..( 8): Result.001 file - promoters60/1010993
gagagtat

SEQ ID NO: 91180 - DNA, 8 bp, Unknown
  misc_feature (1)..( 8): Result.001 file - promoters60/1010993
gagggtac

SEQ ID NO: 91181 - DNA, 11 bp, Unknown
  misc_feature (1)..( 11): Result.001 file - promoters60/1010993
tatagatttta

SEQ ID NO: 91182 - DNA, 11 bp, Unknown
  misc_feature (1)..( 11): Result.001 file - promoters60/1010993
tatagaatttg

SEQ ID NO: 91183 - DNA, 11 bp, Unknown
  misc_feature (1)..( 11): Result.001 file - promoters60/1010993
atgacaatttg

SEQ ID NO: 91184 - DNA, 11 bp, Unknown
  misc_feature (1)..( 11): Result.001 file - promoters60/1010993
aataaaatacc

SEQ ID NO: 91185 - DNA, 8 bp, Unknown
  misc_feature (1)..( 8): Result.001 file - promoters60/1010993
gttgaaac

SEQ ID NO: 91186 - DNA, 8 bp, Unknown
  misc_feature (1)..( 8): Result.001 file - promoters60/1010993
attgaaaa

SEQ ID NO: 91187 - DNA, 8 bp, Unknown
  misc_feature (1)..( 8): Result.001 file - promoters60/1010993
atttaaat

SEQ ID NO: 91188 - DNA, 8 bp, Unknown
  misc_feature (1)..( 8): Result.001 file - promoters60/1011041
attcaaaa

SEQ ID NO: 91189 - DNA, 8 bp, Unknown
  misc_feature (1)..( 8): Result.001 file - promoters60/1011041
cagatttt

SEQ ID NO: 91190 - DNA, 8 bp, Unknown
  misc_feature (1)..( 8): Result.001 file - promoters60/1011041
cagattac

SEQ ID NO: 91191 - DNA, 8 bp, Unknown
  misc_feature (1)..( 8): Result.001 file - promoters60/1011041
cagattga

SEQ ID NO: 91192 - DNA, 8 bp, Unknown
  misc_feature (1)..( 8): Result.001 file - promoters60/1011041
aagagtga

SEQ ID NO: 91193 - DNA, 8 bp, Unknown
  misc_feature (1)..( 8): Result.001 file - promoters60/1011041
aagaatga

SEQ ID NO: 91194 - DNA, 8 bp, Unknown
  misc_feature (1)..( 8): Result.001 file - promoters60/1011041
cagattga

SEQ ID NO: 91195 - DNA, 8 bp, Unknown
  misc_feature (1)..( 8): Result.001 file - promoters60/1011041
aagagtga

SEQ ID NO: 91196 - DNA, 8 bp, Unknown
  misc_feature (1)..( 8): Result.001 file - promoters60/1011041
cagattac

SEQ ID NO: 91197 - DNA, 10 bp, Unknown
  misc_feature (1)..( 10): Result.001 file - promoters60/1011041
aaaattgaaa

SEQ ID NO: 91198 - DNA, 10 bp, Unknown
  misc_feature (1)..( 10): Result.001 file - promoters60/1011041
tgaatttaaa

SEQ ID NO: 91199 - DNA, 10 bp, Unknown
  misc_feature (1)..( 10): Result.001 file - promoters60/1011041
caaatcgaag

SEQ ID NO: 91200 - DNA, 10 bp, Unknown
  misc_feature (1)..( 10): Result.001 file - promoters60/1011041
tgaatttgta

SEQ ID NO: 91201 - DNA, 10 bp, Unknown
  misc_feature (1)..( 10): Result.001 file - promoters60/1011212
agaattttgg

SEQ ID NO: 91202 - DNA, 6 bp, Unknown
  misc_feature (1)..( 6): Result.001 file - promoters60/1011212
tttttg

SEQ ID NO: 91203 - DNA, 6 bp, Unknown
  misc_feature (1)..( 6): Result.001 file - promoters60/1011212
tttttg

SEQ ID NO: 91204 - DNA, 7 bp, Unknown
  misc_feature (1)..( 7): Result.001 file - promoters60/1011212
gacgtgg

SEQ ID NO: 91205 - DNA, 7 bp, Unknown
  misc_feature (1)..( 7): Result.001 file - promoters60/1011212
gacatgg

SEQ ID NO: 91206 - DNA, 7 bp, Unknown
  misc_feature (1)..( 7): Result.001 file - promoters60/1011212
taggagt

SEQ ID NO: 91207 - DNA, 7 bp, Unknown
  misc_feature (1)..( 7): Result.001 file - promoters60/1011212
tagtagt

SEQ ID NO: 91208 - DNA, 8 bp, Unknown
  misc_feature (1)..( 8): Result.001 file - promoters60/1011212
ttaaaaca

SEQ ID NO: 91209 - DNA, 8 bp, Unknown
  misc_feature (1)..( 8): Result.001 file - promoters60/1011212
ttaataca

SEQ ID NO: 91210 - DNA, 13 bp, Unknown
  misc_feature (1)..( 13): Result.001 file - promoters60/1011212
acattctttctta

SEQ ID NO: 91211 - DNA, 13 bp, Unknown
  misc_feature (1)..( 13): Result.001 file - promoters60/1011212
tacatctatctta

SEQ ID NO: 91212 - DNA, 13 bp, Unknown
  misc_feature (1)..( 13): Result.001 file - promoters60/1011212
acattctttaaaa

SEQ ID NO: 91213 - DNA, 7 bp, Unknown
  misc_feature (1)..( 7): Result.001 file - promoters60/1011212
taatttt

SEQ ID NO: 91214 - DNA, 7 bp, Unknown
  misc_feature (1)..( 7): Result.001 file - promoters60/1011212
aaatttt

SEQ ID NO: 91215 - DNA, 7 bp, Unknown
  misc_feature (1)..( 7): Result.001 file - promoters60/1011212
taatttc

SEQ ID NO: 91216 - DNA, 6 bp, Unknown
  misc_feature (1)..( 6): Result.001 file - promoters60/1011212
atttta

SEQ ID NO: 91217 - DNA, 6 bp, Unknown
  misc_feature (1)..( 6): Result.001 file - promoters60/1011212
atttta

SEQ ID NO: 91218 - DNA, 6 bp, Unknown
  misc_feature (1)..( 6): Result.001 file - promoters60/1011212
aattga

SEQ ID NO: 91219 - DNA, 6 bp, Unknown
  misc_feature (1)..( 6): Result.001 file - promoters60/1011212
aattga

SEQ ID NO: 91220 - DNA, 7 bp, Unknown
  misc_feature (1)..( 7): Result.001 file - promoters60/1011212
ttaaaac

SEQ ID NO: 91221 - DNA, 7 bp, Unknown
  misc_feature (1)..( 7): Result.001 file - promoters60/1011212
ttaaaac

SEQ ID NO: 91222 - DNA, 7 bp, Unknown
  misc_feature (1)..( 7): Result.001 file - promoters60/1011212
gttaaca

SEQ ID NO: 91223 - DNA, 7 bp, Unknown
  misc_feature (1)..( 7): Result.001 file - promoters60/1011212
gtttaca

SEQ ID NO: 91224 - DNA, 8 bp, Unknown
  misc_feature (1)..( 8): Result.001 file - promoters60/1011212
ttacagaa

SEQ ID NO: 91225 - DNA, 8 bp, Unknown
  misc_feature (1)..( 8): Result.001 file - promoters60/1011212
ttaaagaa

SEQ ID NO: 91226 - DNA, 6 bp, Unknown
  misc_feature (1)..( 6): Result.001 file - promoters60/1011212
aaaaat

SEQ ID NO: 91227 - DNA, 6 bp, Unknown
  misc_feature (1)..( 6): Result.001 file - promoters60/1011212
aaaaat

SEQ ID NO: 91228 - DNA, 6 bp, Unknown
  misc_feature (1)..( 6): Result.001 file - promoters60/1011212
actaca

SEQ ID NO: 91229 - DNA, 6 bp, Unknown
  misc_feature (1)..( 6): Result.001 file - promoters60/1011212
actaca

SEQ ID NO: 91230 - DNA, 6 bp, Unknown
  misc_feature (1)..( 6): Result.001 file - promoters60/1011212
ctaact

SEQ ID NO: 91231 - DNA, 6 bp, Unknown
  misc_feature (1)..( 6): Result.001 file - promoters60/1011212
ctaact

SEQ ID NO: 91232 - DNA, 6 bp, Unknown
  misc_feature (1)..( 6): Result.001 file - promoters60/1011212
ctattt

SEQ ID NO: 91233 - DNA, 6 bp, Unknown
  misc_feature (1)..( 6): Result.001 file - promoters60/1011212
ctattt

SEQ ID NO: 91234 - DNA, 7 bp, Unknown
  misc_feature (1)..( 7): Result.001 file - promoters60/1011212
acctgat

SEQ ID NO: 91235 - DNA, 7 bp, Unknown
  misc_feature (1)..( 7): Result.001 file - promoters60/1011212
acctgat

SEQ ID NO: 91236 - DNA, 6 bp, Unknown
  misc_feature (1)..( 6): Result.001 file - promoters60/1011212
tcttag

SEQ ID NO: 91237 - DNA, 6 bp, Unknown
  misc_feature (1)..( 6): Result.001 file - promoters60/1011212
tcttag

SEQ ID NO: 91238 - DNA, 7 bp, Unknown
  misc_feature (1)..( 7): Result.001 file - promoters60/1011212
cattagt

SEQ ID NO: 91239 - DNA, 7 bp, Unknown
  misc_feature (1)..( 7): Result.001 file - promoters60/1011212
catgagt

SEQ ID NO: 91240 - DNA, 7 bp, Unknown
  misc_feature (1)..( 7): Result.001 file - promoters60/1011212
ccacggt

SEQ ID NO: 91241 - DNA, 7 bp, Unknown
  misc_feature (1)..( 7): Result.001 file - promoters60/1011258
ccatggt

SEQ ID NO: 91242 - DNA, 6 bp, Unknown
  misc_feature (1)..( 6): Result.001 file - promoters60/1011258
ttaaaa

SEQ ID NO: 91243 - DNA, 6 bp, Unknown
  misc_feature (1)..( 6): Result.001 file - promoters60/1011258
ttaaaa

SEQ ID NO: 91244 - DNA, 6 bp, Unknown
  misc_feature (1)..( 6): Result.001 file - promoters60/1011258
taaaac

SEQ ID NO: 91245 - DNA, 6 bp, Unknown
  misc_feature (1)..( 6): Result.001 file - promoters60/1011258
taaaac

SEQ ID NO: 91246 - DNA, 6 bp, Unknown
  misc_feature (1)..( 6): Result.001 file - promoters60/1011258
aaactt

SEQ ID NO: 91247 - DNA, 6 bp, Unknown
  misc_feature (1)..( 6): Result.001 file - promoters60/1011258
aaactt

SEQ ID NO: 91248 - DNA, 7 bp, Unknown
  misc_feature (1)..( 7): Result.001 file - promoters60/1011258
cacgatc

SEQ ID NO: 91249 - DNA, 7 bp, Unknown
  misc_feature (1)..( 7): Result.001 file - promoters60/1011258
cacaatc

SEQ ID NO: 91250 - DNA, 7 bp, Unknown
  misc_feature (1)..( 7): Result.001 file - promoters60/1011258
aaagcaa

SEQ ID NO: 91251 - DNA, 7 bp, Unknown
  misc_feature (1)..( 7): Result.001 file - promoters60/1011258
aaaccaa

SEQ ID NO: 91252 - DNA, 7 bp, Unknown
  misc_feature (1)..( 7): Result.001 file - promoters60/1011258
aaagcaa

SEQ ID NO: 91253 - DNA, 7 bp, Unknown
  misc_feature (1)..( 7): Result.001 file - promoters60/1011258
aaaccaa

SEQ ID NO: 91254 - DNA, 6 bp, Unknown
  misc_feature (1)..( 6): Result.001 file - promoters60/1011258
aataaa

SEQ ID NO: 91255 - DNA, 6 bp, Unknown
  misc_feature (1)..( 6): Result.001 file - promoters60/1011258
aataaa

SEQ ID NO: 91256 - DNA, 7 bp, Unknown
  misc_feature (1)..( 7): Result.001 file - promoters60/1011258
aagaaga

SEQ ID NO: 91257 - DNA, 7 bp, Unknown
  misc_feature (1)..( 7): Result.001 file - promoters60/1011258
aagaaga

SEQ ID NO: 91258 - DNA, 9 bp, Unknown
  misc_feature (1)..( 9): Result.001 file - promoters60/1011258
aaacattta

SEQ ID NO: 91259 - DNA, 9 bp, Unknown
  misc_feature (1)..( 9): Result.001 file - promoters60/1011258
ttacagtta

SEQ ID NO: 91260 - DNA, 9 bp, Unknown
  misc_feature (1)..( 9): Result.001 file - promoters60/1011258
ttatagtca

SEQ ID NO: 91261 - DNA, 6 bp, Unknown
  misc_feature (1)..( 6): Result.001 file - promoters60/1011258
cagaaa

SEQ ID NO: 91262 - DNA, 6 bp, Unknown
  misc_feature (1)..( 6): Result.001 file - promoters60/1011258
cagaaa

SEQ ID NO: 91263 - DNA, 7 bp, Unknown
  misc_feature (1)..( 7): Result.001 file - promoters60/1011258
tccgcca

SEQ ID NO: 91264 - DNA, 7 bp, Unknown
  misc_feature (1)..( 7): Result.001 file - promoters60/1011258
tccacca

SEQ ID NO: 91265 - DNA, 6 bp, Unknown
  misc_feature (1)..( 6): Result.001 file - promoters60/1011258
ttttga

SEQ ID NO: 91266 - DNA, 6 bp, Unknown
  misc_feature (1)..( 6): Result.001 file - promoters60/1011258
ttttga

SEQ ID NO: 91267 - DNA, 6 bp, Unknown
  misc_feature (1)..( 6): Result.001 file - promoters60/1011258
tcttct

SEQ ID NO: 91268 - DNA, 6 bp, Unknown
  misc_feature (1)..( 6): Result.001 file - promoters60/1011258
tcttct

SEQ ID NO: 91269 - DNA, 7 bp, Unknown
  misc_feature (1)..( 7): Result.001 file - promoters60/1011258
cacacca

SEQ ID NO: 91270 - DNA, 7 bp, Unknown
  misc_feature (1)..( 7): Result.001 file - promoters60/1011258
cacccca

SEQ ID NO: 91271 - DNA, 11 bp, Unknown
  misc_feature (1)..( 11): Result.001 file - promoters60/1011258
ctttcttgttt

SEQ ID NO: 91272 - DNA, 11 bp, Unknown
  misc_feature (1)..( 11): Result.001 file - promoters60/1011258
ctttcttcttt

SEQ ID NO: 91273 - DNA, 8 bp, Unknown
  misc_feature (1)..( 8): Result.001 file - promoters60/1011258
tttgcttc

SEQ ID NO: 91274 - DNA, 8 bp, Unknown
  misc_feature (1)..( 8): Result.001 file - promoters60/1011258
ttttcttc

SEQ ID NO: 91275 - DNA, 7 bp, Unknown
  misc_feature (1)..( 7): Result.001 file - promoters60/1011258
caagttg

SEQ ID NO: 91276 - DNA, 7 bp, Unknown
  misc_feature (1)..( 7): Result.001 file - promoters60/1011258
caatttg

SEQ ID NO: 91277 - DNA, 8 bp, Unknown
  misc_feature (1)..( 8): Result.001 file - promoters60/1011258
taaaaaaa

SEQ ID NO: 91278 - DNA, 8 bp, Unknown
  misc_feature (1)..( 8): Result.001 file - promoters60/1011258
taagaaaa

SEQ ID NO: 91279 - DNA, 8 bp, Unknown
  misc_feature (1)..( 8): Result.001 file - promoters60/1011258
caataaaa

SEQ ID NO: 91280 - DNA, 8 bp, Unknown
  misc_feature (1)..( 8): Result.001 file - promoters60/1011258
caagaaaa

SEQ ID NO: 91281 - DNA, 8 bp, Unknown
  misc_feature (1)..( 8): Result.001 file - promoters60/1011258
aagaatct

SEQ ID NO: 91282 - DNA, 8 bp, Unknown
  misc_feature (1)..( 8): Result.001 file - promoters60/1011258
aaggatct

SEQ ID NO: 91283 - DNA, 8 bp, Unknown
  misc_feature (1)..( 8): Result.001 file - promoters60/1011258
tccaccaa

SEQ ID NO: 91284 - DNA, 8 bp, Unknown
  misc_feature (1)..( 8): Result.001 file - promoters60/1011262
tccaacaa

SEQ ID NO: 91285 - DNA, 6 bp, Unknown
  misc_feature (1)..( 6): Result.001 file - promoters60/1011262
atgttt

SEQ ID NO: 91286 - DNA, 6 bp, Unknown
  misc_feature (1)..( 6): Result.001 file - promoters60/1011262
atgttt

SEQ ID NO: 91287 - DNA, 9 bp, Unknown
  misc_feature (1)..( 9): Result.001 file - promoters60/1011262
taagcatat

SEQ ID NO: 91288 - DNA, 9 bp, Unknown
  misc_feature (1)..( 9): Result.001 file - promoters60/1011262
taagtatat

SEQ ID NO: 91289 - DNA, 6 bp, Unknown
  misc_feature (1)..( 6): Result.001 file - promoters60/1011262
taatat

SEQ ID NO: 91290 - DNA, 6 bp, Unknown
  misc_feature (1)..( 6): Result.001 file - promoters60/1011262
taatat

SEQ ID NO: 91291 - DNA, 10 bp, Unknown
  misc_feature (1)..( 10): Result.001 file - promoters60/1011262
atattataat

SEQ ID NO: 91292 - DNA, 10 bp, Unknown
  misc_feature (1)..( 10): Result.001 file - promoters60/1011262
atatcataat

SEQ ID NO: 91293 - DNA, 8 bp, Unknown
  misc_feature (1)..( 8): Result.001 file - promoters60/1011262
tatagata

SEQ ID NO: 91294 - DNA, 8 bp, Unknown
  misc_feature (1)..( 8): Result.001 file - promoters60/1011262
tatacata

SEQ ID NO: 91295 - DNA, 7 bp, Unknown
  misc_feature (1)..( 7): Result.001 file - promoters60/1011262
atttaca

SEQ ID NO: 91296 - DNA, 7 bp, Unknown
  misc_feature (1)..( 7): Result.001 file - promoters60/1011262
atttaca

SEQ ID NO: 91297 - DNA, 6 bp, Unknown
  misc_feature (1)..( 6): Result.001 file - promoters60/1011262
acattt

SEQ ID NO: 91298 - DNA, 6 bp, Unknown
  misc_feature (1)..( 6): Result.001 file - promoters60/1011262
acattt

SEQ ID NO: 91299 - DNA, 6 bp, Unknown
  misc_feature (1)..( 6): Result.001 file - promoters60/1011262
atttta

SEQ ID NO: 91300 - DNA, 6 bp, Unknown
  misc_feature (1)..( 6): Result.001 file - promoters60/1011262
atttta

SEQ ID NO: 91301 - DNA, 7 bp, Unknown
  misc_feature (1)..( 7): Result.001 file - promoters60/1011262
tatatat

SEQ ID NO: 91302 - DNA, 7 bp, Unknown
  misc_feature (1)..( 7): Result.001 file - promoters60/1011262
tatttat

SEQ ID NO: 91303 - DNA, 6 bp, Unknown
  misc_feature (1)..( 6): Result.001 file - promoters60/1011262
tatatt

SEQ ID NO: 91304 - DNA, 6 bp, Unknown
  misc_feature (1)..( 6): Result.001 file - promoters60/1011262
tatatt

SEQ ID NO: 91305 - DNA, 7 bp, Unknown
  misc_feature (1)..( 7): Result.001 file - promoters60/1011262
tttattt

SEQ ID NO: 91306 - DNA, 7 bp, Unknown
  misc_feature (1)..( 7): Result.001 file - promoters60/1011262
tttcttt

SEQ ID NO: 91307 - DNA, 6 bp, Unknown
  misc_feature (1)..( 6): Result.001 file - promoters60/1011262
aaaaaa

SEQ ID NO: 91308 - DNA, 6 bp, Unknown
  misc_feature (1)..( 6): Result.001 file - promoters60/1011262
aaaaaa

SEQ ID NO: 91309 - DNA, 6 bp, Unknown
  misc_feature (1)..( 6): Result.001 file - promoters60/1011262
aaattc

SEQ ID NO: 91310 - DNA, 6 bp, Unknown
  misc_feature (1)..( 6): Result.001 file - promoters60/1011262
aaattc

SEQ ID NO: 91311 - DNA, 7 bp, Unknown
  misc_feature (1)..( 7): Result.001 file - promoters60/1011262
ccatctg

SEQ ID NO: 91312 - DNA, 7 bp, Unknown
  misc_feature (1)..( 7): Result.001 file - promoters60/1011262
ccatctg

SEQ ID NO: 91313 - DNA, 6 bp, Unknown
  misc_feature (1)..( 6): Result.001 file - promoters60/1011262
atacac

SEQ ID NO: 91314 - DNA, 6 bp, Unknown
  misc_feature (1)..( 6): Result.001 file - promoters60/1011262
atacac

SEQ ID NO: 91315 - DNA, 6 bp, Unknown
  misc_feature (1)..( 6): Result.001 file - promoters60/1011262
ttgatt

SEQ ID NO: 91316 - DNA, 6 bp, Unknown
  misc_feature (1)..( 6): Result.001 file - promoters60/1011262
ttgatt

SEQ ID NO: 91317 - DNA, 8 bp, Unknown
  misc_feature (1)..( 8): Result.001 file - promoters60/1011262
gctgcaga

SEQ ID NO: 91318 - DNA, 8 bp, Unknown
  misc_feature (1)..( 8): Result.001 file - promoters60/1011303
gctacaga

SEQ ID NO: 91319 - DNA, 7 bp, Unknown
  misc_feature (1)..( 7): Result.001 file - promoters60/1011303
tgcttaa

SEQ ID NO: 91320 - DNA, 7 bp, Unknown
  misc_feature (1)..( 7): Result.001 file - promoters60/1011303
tgcataa

SEQ ID NO: 91321 - DNA, 9 bp, Unknown
  misc_feature (1)..( 9): Result.001 file - promoters60/1011303
tcaaaaact

SEQ ID NO: 91322 - DNA, 9 bp, Unknown
  misc_feature (1)..( 9): Result.001 file - promoters60/1011303
tcataaact

SEQ ID NO: 91323 - DNA, 9 bp, Unknown
  misc_feature (1)..( 9): Result.001 file - promoters60/1011303
acaacaaca

SEQ ID NO: 91324 - DNA, 6 bp, Unknown
  misc_feature (1)..( 6): Result.001 file - promoters60/1011303
aacaaa

SEQ ID NO: 91325 - DNA, 6 bp, Unknown
  misc_feature (1)..( 6): Result.001 file - promoters60/1011303
aacaaa

SEQ ID NO: 91326 - DNA, 6 bp, Unknown
  misc_feature (1)..( 6): Result.001 file - promoters60/1011303
ttttaa

SEQ ID NO: 91327 - DNA, 6 bp, Unknown
  misc_feature (1)..( 6): Result.001 file - promoters60/1011303
ttttaa

SEQ ID NO: 91328 - DNA, 8 bp, Unknown
  misc_feature (1)..( 8): Result.001 file - promoters60/1011303
accaattc

SEQ ID NO: 91329 - DNA, 8 bp, Unknown
  misc_feature (1)..( 8): Result.001 file - promoters60/1011303
tccaattt

SEQ ID NO: 91330 - DNA, 9 bp, Unknown
  misc_feature (1)..( 9): Result.001 file - promoters60/1011303
tccaaattg

SEQ ID NO: 91331 - DNA, 9 bp, Unknown
  misc_feature (1)..( 9): Result.001 file - promoters60/1011303
tataatgaa

SEQ ID NO: 91332 - DNA, 9 bp, Unknown
  misc_feature (1)..( 9): Result.001 file - promoters60/1011303
tataatgaa

SEQ ID NO: 91333 - DNA, 7 bp, Unknown
  misc_feature (1)..( 7): Result.001 file - promoters60/1011303
gtgatca

SEQ ID NO: 91334 - DNA, 7 bp, Unknown
  misc_feature (1)..( 7): Result.001 file - promoters60/1011303
gtgatca

SEQ ID NO: 91335 - DNA, 10 bp, Unknown
  misc_feature (1)..( 10): Result.001 file - promoters60/1011303
cttacaattt

SEQ ID NO: 91336 - DNA, 10 bp, Unknown
  misc_feature (1)..( 10): Result.001 file - promoters60/1011303
cttgcaattt

SEQ ID NO: 91337 - DNA, 8 bp, Unknown
  misc_feature (1)..( 8): Result.001 file - promoters60/1011303
tttgtagc

SEQ ID NO: 91338 - DNA, 8 bp, Unknown
  misc_feature (1)..( 8): Result.001 file - promoters60/1011303
tttgtaaa

SEQ ID NO: 91339 - DNA, 8 bp, Unknown
  misc_feature (1)..( 8): Result.001 file - promoters60/1011303
tttttaaa

SEQ ID NO: 91340 - DNA, 9 bp, Unknown
  misc_feature (1)..( 9): Result.001 file - promoters60/1011303
aacaatata

SEQ ID NO: 91341 - DNA, 9 bp, Unknown
  misc_feature (1)..( 9): Result.001 file - promoters60/1011303
attaatata

SEQ ID NO: 91342 - DNA, 9 bp, Unknown
  misc_feature (1)..( 9): Result.001 file - promoters60/1011303
aaccatatt

SEQ ID NO: 91343 - DNA, 6 bp, Unknown
  misc_feature (1)..( 6): Result.001 file - promoters60/1011303
aatggt

SEQ ID NO: 91344 - DNA, 6 bp, Unknown
  misc_feature (1)..( 6): Result.001 file - promoters60/1011303
aatggt

SEQ ID NO: 91345 - DNA, 7 bp, Unknown
  misc_feature (1)..( 7): Result.001 file - promoters60/1011303
caaaatc

SEQ ID NO: 91346 - DNA, 7 bp, Unknown
  misc_feature (1)..( 7): Result.001 file - promoters60/1011303
caacatc

SEQ ID NO: 91347 - DNA, 9 bp, Unknown
  misc_feature (1)..( 9): Result.001 file - promoters60/1011303
actacaaac

SEQ ID NO: 91348 - DNA, 9 bp, Unknown
  misc_feature (1)..( 9): Result.001 file - promoters60/1011303
actccaaac

SEQ ID NO: 91349 - DNA, 6 bp, Unknown
  misc_feature (1)..( 6): Result.001 file - promoters60/1011303
aaaact

SEQ ID NO: 91350 - DNA, 6 bp, Unknown
  misc_feature (1)..( 6): Result.001 file - promoters60/1011303
aaaact

SEQ ID NO: 91351 - DNA, 8 bp, Unknown
  misc_feature (1)..( 8): Result.001 file - promoters60/1011303
aggcaaat

SEQ ID NO: 91352 - DNA, 8 bp, Unknown
  misc_feature (1)..( 8): Result.001 file - promoters60/1011303
agggaaat

SEQ ID NO: 91353 - DNA, 10 bp, Unknown
  misc_feature (1)..( 10): Result.001 file - promoters60/1011303
cagtttcgga

SEQ ID NO: 91354 - DNA, 10 bp, Unknown
  misc_feature (1)..( 10): Result.001 file - promoters60/1011303
cagtgtcgga

SEQ ID NO: 91355 - DNA, 9 bp, Unknown
  misc_feature (1)..( 9): Result.001 file - promoters60/1011303
ttttgatta

SEQ ID NO: 91356 - DNA, 9 bp, Unknown
  misc_feature (1)..( 9): Result.001 file - promoters60/1011303
ttttgttta

SEQ ID NO: 91357 - DNA, 6 bp, Unknown
  misc_feature (1)..( 6): Result.001 file - promoters60/1011303
taacta

SEQ ID NO: 91358 - DNA, 6 bp, Unknown
  misc_feature (1)..( 6): Result.001 file - promoters60/1011303
taacta

SEQ ID NO: 91359 - DNA, 6 bp, Unknown
  misc_feature (1)..( 6): Result.001 file - promoters60/1011303
attact

SEQ ID NO: 91360 - DNA, 6 bp, Unknown
  misc_feature (1)..( 6): Result.001 file - promoters60/1011303
attact

SEQ ID NO: 91361 - DNA, 6 bp, Unknown
  misc_feature (1)..( 6): Result.001 file - promoters60/1011303
gtcttt

SEQ ID NO: 91362 - DNA, 6 bp, Unknown
  misc_feature (1)..( 6): Result.001 file - promoters60/1011303
gtcttt

SEQ ID NO: 91363 - DNA, 7 bp, Unknown
  misc_feature (1)..( 7): Result.001 file - promoters60/1011303
aattaaa

SEQ ID NO: 91364 - DNA, 7 bp, Unknown
  misc_feature (1)..( 7): Result.001 file - promoters60/1011303
aataaaa

SEQ ID NO: 91365 - DNA, 6 bp, Unknown
  misc_feature (1)..( 6): Result.001 file - promoters60/1011303
gcaaaa

SEQ ID NO: 91366 - DNA, 6 bp, Unknown
  misc_feature (1)..( 6): Result.001 file - promoters60/1011303
gcaaaa

SEQ ID NO: 91367 - DNA, 6 bp, Unknown
  misc_feature (1)..( 6): Result.001 file - promoters60/1011303
aaatta

SEQ ID NO: 91368 - DNA, 6 bp, Unknown
  misc_feature (1)..( 6): Result.001 file - promoters60/1011303
aaatta

SEQ ID NO: 91369 - DNA, 8 bp, Unknown
  misc_feature (1)..( 8): Result.001 file - promoters60/1011303
tttagtcg

SEQ ID NO: 91370 - DNA, 8 bp, Unknown
  misc_feature (1)..( 8): Result.001 file - promoters60/1011303
tttggtcg

SEQ ID NO: 91371 - DNA, 6 bp, Unknown
  misc_feature (1)..( 6): Result.001 file - promoters60/1011303
attttt

SEQ ID NO: 91372 - DNA, 6 bp, Unknown
  misc_feature (1)..( 6): Result.001 file - promoters60/1011337
attttt

SEQ ID NO: 91373 - DNA, 11 bp, Unknown
  misc_feature (1)..( 11): Result.001 file - promoters60/1011337
atatttttcgt

SEQ ID NO: 91374 - DNA, 11 bp, Unknown
  misc_feature (1)..( 11): Result.001 file - promoters60/1011337
tggttttccgt

SEQ ID NO: 91375 - DNA, 11 bp, Unknown
  misc_feature (1)..( 11): Result.001 file - promoters60/1011337
atatttttaca

SEQ ID NO: 91376 - DNA, 9 bp, Unknown
  misc_feature (1)..( 9): Result.001 file - promoters60/1011337
aaaaaaatt

SEQ ID NO: 91377 - DNA, 9 bp, Unknown
  misc_feature (1)..( 9): Result.001 file - promoters60/1011337
aaaacaatt

SEQ ID NO: 91378 - DNA, 9 bp, Unknown
  misc_feature (1)..( 9): Result.001 file - promoters60/1011337
gtaaaaata

SEQ ID NO: 91379 - DNA, 8 bp, Unknown
  misc_feature (1)..( 8): Result.001 file - promoters60/1011337
aataaata

SEQ ID NO: 91380 - DNA, 8 bp, Unknown
  misc_feature (1)..( 8): Result.001 file - promoters60/1011337
aatagata

SEQ ID NO: 91381 - DNA, 8 bp, Unknown
  misc_feature (1)..( 8): Result.001 file - promoters60/1011358
aataaaaa

SEQ ID NO: 91382 - DNA, 11 bp, Unknown
  misc_feature (1)..( 11): Result.001 file - promoters60/1011358
cgatacttgtc

SEQ ID NO: 91383 - DNA, 11 bp, Unknown
  misc_feature (1)..( 11): Result.001 file - promoters60/1011358
tgattcttcga

SEQ ID NO: 91384 - DNA, 11 bp, Unknown
  misc_feature (1)..( 11): Result.001 file - promoters60/1011358
cgaaactggtc

SEQ ID NO: 91385 - DNA, 10 bp, Unknown
  misc_feature (1)..( 10): Result.001 file - promoters60/1011358
aagaactcat

SEQ ID NO: 91386 - DNA, 10 bp, Unknown
  misc_feature (1)..( 10): Result.001 file - promoters60/1011358
aagaactaga

SEQ ID NO: 91387 - DNA, 10 bp, Unknown
  misc_feature (1)..( 10): Result.001 file - promoters60/1011358
atgaagtcat

SEQ ID NO: 91388 - DNA, 12 bp, Unknown
  misc_feature (1)..( 12): Result.001 file - promoters60/1011358
ttaaatgaagat

SEQ ID NO: 91389 - DNA, 12 bp, Unknown
  misc_feature (1)..( 12): Result.001 file - promoters60/1011358
aataatgatgat

SEQ ID NO: 91390 - DNA, 12 bp, Unknown
  misc_feature (1)..( 12): Result.001 file - promoters60/1011358
ttacatgaacag

SEQ ID NO: 91391 - DNA, 7 bp, Unknown
  misc_feature (1)..( 7): Result.001 file - promoters60/1011358
acacgtc

SEQ ID NO: 91392 - DNA, 7 bp, Unknown
  misc_feature (1)..( 7): Result.001 file - promoters60/1011358
acatgtc

SEQ ID NO: 91393 - DNA, 10 bp, Unknown
  misc_feature (1)..( 10): Result.001 file - promoters60/1011358
agtgatccaa

SEQ ID NO: 91394 - DNA, 10 bp, Unknown
  misc_feature (1)..( 10): Result.001 file - promoters60/1011358
tgtggtccat

SEQ ID NO: 91395 - DNA, 10 bp, Unknown
  misc_feature (1)..( 10): Result.001 file - promoters60/1011358
tgtggttcat

SEQ ID NO: 91396 - DNA, 9 bp, Unknown
  misc_feature (1)..( 9): Result.001 file - promoters60/1011358
ttatttgga

SEQ ID NO: 91397 - DNA, 9 bp, Unknown
  misc_feature (1)..( 9): Result.001 file - promoters60/1011358
ttatgtgga

SEQ ID NO: 91398 - DNA, 7 bp, Unknown
  misc_feature (1)..( 7): Result.001 file - promoters60/1011358
agaagaa

SEQ ID NO: 91399 - DNA, 7 bp, Unknown
  misc_feature (1)..( 7): Result.001 file - promoters60/1011358
agaagaa

SEQ ID NO: 91400 - DNA, 6 bp, Unknown
  misc_feature (1)..( 6): Result.001 file - promoters60/1011358
gtgtaa

SEQ ID NO: 91401 - DNA, 6 bp, Unknown
  misc_feature (1)..( 6): Result.001 file - promoters60/1011358
gtgtaa

SEQ ID NO: 91402 - DNA, 9 bp, Unknown
  misc_feature (1)..( 9): Result.001 file - promoters60/1011358
aaacaaaaa

SEQ ID NO: 91403 - DNA, 9 bp, Unknown
  misc_feature (1)..( 9): Result.001 file - promoters60/1011358
aaagaaaaa

SEQ ID NO: 91404 - DNA, 6 bp, Unknown
  misc_feature (1)..( 6): Result.001 file - promoters60/1011358
tataaa

SEQ ID NO: 91405 - DNA, 6 bp, Unknown
  misc_feature (1)..( 6): Result.001 file - promoters60/1011358
tataaa

SEQ ID NO: 91406 - DNA, 7 bp, Unknown
  misc_feature (1)..( 7): Result.001 file - promoters60/1011358
gacctta

SEQ ID NO: 91407 - DNA, 7 bp, Unknown
  misc_feature (1)..( 7): Result.001 file - promoters60/1011358
gacttta

SEQ ID NO: 91408 - DNA, 6 bp, Unknown
  misc_feature (1)..( 6): Result.001 file - promoters60/1011358
atgaag

SEQ ID NO: 91409 - DNA, 6 bp, Unknown
  misc_feature (1)..( 6): Result.001 file - promoters60/1011358
atgaag

SEQ ID NO: 91410 - DNA, 6 bp, Unknown
  misc_feature (1)..( 6): Result.001 file - promoters60/1011358
agtaat

SEQ ID NO: 91411 - DNA, 6 bp, Unknown
  misc_feature (1)..( 6): Result.001 file - promoters60/1011358
agtaat

SEQ ID NO: 91412 - DNA, 8 bp, Unknown
  misc_feature (1)..( 8): Result.001 file - promoters60/1011358
tcaggcag

SEQ ID NO: 91413 - DNA, 8 bp, Unknown
  misc_feature (1)..( 8): Result.001 file - promoters60/1011358
tcagccag

SEQ ID NO: 91414 - DNA, 6 bp, Unknown
  misc_feature (1)..( 6): Result.001 file - promoters60/1011358
cgttga

SEQ ID NO: 91415 - DNA, 6 bp, Unknown
  misc_feature (1)..( 6): Result.001 file - promoters60/1011516
cgttga

SEQ ID NO: 91416 - DNA, 7 bp, Unknown
  misc_feature (1)..( 7): Result.001 file - promoters60/1011516
tagattt

SEQ ID NO: 91417 - DNA, 7 bp, Unknown
  misc_feature (1)..( 7): Result.001 file - promoters60/1011516
tagtttt

SEQ ID NO: 91418 - DNA, 8 bp, Unknown
  misc_feature (1)..( 8): Result.001 file - promoters60/1011516
caatgaga

SEQ ID NO: 91419 - DNA, 8 bp, Unknown
  misc_feature (1)..( 8): Result.001 file - promoters60/1011516
caaagaga

SEQ ID NO: 91420 - DNA, 8 bp, Unknown
  misc_feature (1)..( 8): Result.001 file - promoters60/1011516
gaatcaga

SEQ ID NO: 91421 - DNA, 7 bp, Unknown
  misc_feature (1)..( 7): Result.001 file - promoters60/1011516
catcatt

SEQ ID NO: 91422 - DNA, 7 bp, Unknown
  misc_feature (1)..( 7): Result.001 file - promoters60/1011516
cataatt

SEQ ID NO: 91423 - DNA, 8 bp, Unknown
  misc_feature (1)..( 8): Result.001 file - promoters60/1011516
aatccata

SEQ ID NO: 91424 - DNA, 8 bp, Unknown
  misc_feature (1)..( 8): Result.001 file - promoters60/1011516
aatcaata

SEQ ID NO: 91425 - DNA, 6 bp, Unknown
  misc_feature (1)..( 6): Result.001 file - promoters60/1011516
aagaga

SEQ ID NO: 91426 - DNA, 6 bp, Unknown
  misc_feature (1)..( 6): Result.001 file - promoters60/1011516
aagaga

SEQ ID NO: 91427 - DNA, 9 bp, Unknown
  misc_feature (1)..( 9): Result.001 file - promoters60/1011516
ataatcata

SEQ ID NO: 91428 - DNA, 9 bp, Unknown
  misc_feature (1)..( 9): Result.001 file - promoters60/1011516
ataataata

SEQ ID NO: 91429 - DNA, 7 bp, Unknown
  misc_feature (1)..( 7): Result.001 file - promoters60/1011516
tttgttc

SEQ ID NO: 91430 - DNA, 7 bp, Unknown
  misc_feature (1)..( 7): Result.001 file - promoters60/1011516
ttttttc

SEQ ID NO: 91431 - DNA, 8 bp, Unknown
  misc_feature (1)..( 8): Result.001 file - promoters60/1011516
ccactcca

SEQ ID NO: 91432 - DNA, 8 bp, Unknown
  misc_feature (1)..( 8): Result.001 file - promoters60/1011516
ccattcca

SEQ ID NO: 91433 - DNA, 8 bp, Unknown
  misc_feature (1)..( 8): Result.001 file - promoters60/1011516
taagacgt

SEQ ID NO: 91434 - DNA, 8 bp, Unknown
  misc_feature (1)..( 8): Result.001 file - promoters60/1011516
taacacgt

SEQ ID NO: 91435 - DNA, 7 bp, Unknown
  misc_feature (1)..( 7): Result.001 file - promoters60/1011516
caaaaat

SEQ ID NO: 91436 - DNA, 7 bp, Unknown
  misc_feature (1)..( 7): Result.001 file - promoters60/1011516
caacaat

SEQ ID NO: 91437 - DNA, 7 bp, Unknown
  misc_feature (1)..( 7): Result.001 file - promoters60/1011516
aaaagga

SEQ ID NO: 91438 - DNA, 7 bp, Unknown
  misc_feature (1)..( 7): Result.001 file - promoters60/1011516
aaaggga

SEQ ID NO: 91439 - DNA, 10 bp, Unknown
  misc_feature (1)..( 10): Result.001 file - promoters60/1011516
ttatcttagt

SEQ ID NO: 91440 - DNA, 10 bp, Unknown
  misc_feature (1)..( 10): Result.001 file - promoters60/1011516
ctatattaat

SEQ ID NO: 91441 - DNA, 10 bp, Unknown
  misc_feature (1)..( 10): Result.001 file - promoters60/1011516
ctataataat

SEQ ID NO: 91442 - DNA, 6 bp, Unknown
  misc_feature (1)..( 6): Result.001 file - promoters60/1011516
gatcat

SEQ ID NO: 91443 - DNA, 6 bp, Unknown
  misc_feature (1)..( 6): Result.001 file - promoters60/1011516
gatcat

SEQ ID NO: 91444 - DNA, 7 bp, Unknown
  misc_feature (1)..( 7): Result.001 file - promoters60/1011516
tcttcat

SEQ ID NO: 91445 - DNA, 7 bp, Unknown
  misc_feature (1)..( 7): Result.001 file - promoters60/1011516
tctacat

SEQ ID NO: 91446 - DNA, 7 bp, Unknown
  misc_feature (1)..( 7): Result.001 file - promoters60/1011516
ttacaaa

SEQ ID NO: 91447 - DNA, 7 bp, Unknown
  misc_feature (1)..( 7): Result.001 file - promoters60/1011516
ttagaaa

SEQ ID NO: 91448 - DNA, 8 bp, Unknown
  misc_feature (1)..( 8): Result.001 file - promoters60/1011516
taaaatta

SEQ ID NO: 91449 - DNA, 8 bp, Unknown
  misc_feature (1)..( 8): Result.001 file - promoters60/1011516
taatatta

SEQ ID NO: 91450 - DNA, 8 bp, Unknown
  misc_feature (1)..( 8): Result.001 file - promoters60/1011516
aattaata

SEQ ID NO: 91451 - DNA, 8 bp, Unknown
  misc_feature (1)..( 8): Result.001 file - promoters60/1011556
aataaata

SEQ ID NO: 91452 - DNA, 9 bp, Unknown
  misc_feature (1)..( 9): Result.001 file - promoters60/1011556
gaataaatc

SEQ ID NO: 91453 - DNA, 9 bp, Unknown
  misc_feature (1)..( 9): Result.001 file - promoters60/1011556
gaaaaaaaa

SEQ ID NO: 91454 - DNA, 9 bp, Unknown
  misc_feature (1)..( 9): Result.001 file - promoters60/1011556
gaagaaagt

SEQ ID NO: 91455 - DNA, 9 bp, Unknown
  misc_feature (1)..( 9): Result.001 file - promoters60/1011556
taaaaaaaa

SEQ ID NO: 91456 - DNA, 9 bp, Unknown
  misc_feature (1)..( 9): Result.001 file - promoters60/1011556
taaaaatac

SEQ ID NO: 91457 - DNA, 9 bp, Unknown
  misc_feature (1)..( 9): Result.001 file - promoters60/1011556
caaaaagaa

SEQ ID NO: 91458 - DNA, 15 bp, Unknown
  misc_feature (1)..( 15): Result.001 file - promoters60/1011556
aaaattaatttcgag

SEQ ID NO: 91459 - DNA, 15 bp, Unknown
  misc_feature (1)..( 15): Result.001 file - promoters60/1011556
cctattaataaaatt

SEQ ID NO: 91460 - DNA, 15 bp, Unknown
  misc_feature (1)..( 15): Result.001 file - promoters60/1011556
aaaaataatcagaat

SEQ ID NO: 91461 - DNA, 15 bp, Unknown
  misc_feature (1)..( 15): Result.001 file - promoters60/1011556
tcaattaatcttttg

SEQ ID NO: 91462 - DNA, 15 bp, Unknown
  misc_feature (1)..( 15): Result.001 file - promoters60/1011556
actatttatacataa

SEQ ID NO: 91463 - DNA, 15 bp, Unknown
  misc_feature (1)..( 15): Result.001 file - promoters60/1011556
atttttaatatatat

SEQ ID NO: 91464 - DNA, 15 bp, Unknown
  misc_feature (1)..( 15): Result.001 file - promoters60/1011556
tcatttaaaaccaag

SEQ ID NO: 91465 - DNA, 8 bp, Unknown
  misc_feature (1)..( 8): Result.001 file - promoters60/1011556
gttaattc

SEQ ID NO: 91466 - DNA, 8 bp, Unknown
  misc_feature (1)..( 8): Result.001 file - promoters60/1011556
tttaattt

SEQ ID NO: 91467 - DNA, 8 bp, Unknown
  misc_feature (1)..( 8): Result.001 file - promoters60/1011556
attatttc

SEQ ID NO: 91468 - DNA, 8 bp, Unknown
  misc_feature (1)..( 8): Result.001 file - promoters60/1011556
tttcattc

SEQ ID NO: 91469 - DNA, 8 bp, Unknown
  misc_feature (1)..( 8): Result.001 file - promoters60/1011556
tttgattt

SEQ ID NO: 91470 - DNA, 9 bp, Unknown
  misc_feature (1)..( 9): Result.001 file - promoters60/1011556
cgtgacttg

SEQ ID NO: 91471 - DNA, 9 bp, Unknown
  misc_feature (1)..( 9): Result.001 file - promoters60/1011556
cataataat

SEQ ID NO: 91472 - DNA, 9 bp, Unknown
  misc_feature (1)..( 9): Result.001 file - promoters60/1011556
attaataaa

SEQ ID NO: 91473 - DNA, 9 bp, Unknown
  misc_feature (1)..( 9): Result.001 file - promoters60/1011556
ttaaataat

SEQ ID NO: 91474 - DNA, 9 bp, Unknown
  misc_feature (1)..( 9): Result.001 file - promoters60/1011556
aaaaataat

SEQ ID NO: 91475 - DNA, 9 bp, Unknown
  misc_feature (1)..( 9): Result.001 file - promoters60/1011556
ttaaataaa

SEQ ID NO: 91476 - DNA, 9 bp, Unknown
  misc_feature (1)..( 9): Result.001 file - promoters60/1011556
ataaatatt

SEQ ID NO: 91477 - DNA, 9 bp, Unknown
  misc_feature (1)..( 9): Result.001 file - promoters60/1011556
ggaaaaaat

SEQ ID NO: 91478 - DNA, 12 bp, Unknown
  misc_feature (1)..( 12): Result.001 file - promoters60/1011556
ttgtcaaatgat

SEQ ID NO: 91479 - DNA, 12 bp, Unknown
  misc_feature (1)..( 12): Result.001 file - promoters60/1011556
gtgttaaaagac

SEQ ID NO: 91480 - DNA, 12 bp, Unknown
  misc_feature (1)..( 12): Result.001 file - promoters60/1011556
aagttaaataaa

SEQ ID NO: 91481 - DNA, 12 bp, Unknown
  misc_feature (1)..( 12): Result.001 file - promoters60/1011556
gtgataaatatt

SEQ ID NO: 91482 - DNA, 12 bp, Unknown
  misc_feature (1)..( 12): Result.001 file - promoters60/1011556
tatttaaataat

SEQ ID NO: 91483 - DNA, 12 bp, Unknown
  misc_feature (1)..( 12): Result.001 file - promoters60/1011556
atgggaaaaaat

SEQ ID NO: 91484 - DNA, 10 bp, Unknown
  misc_feature (1)..( 10): Result.001 file - promoters60/1011556
tcaatacaag

SEQ ID NO: 91485 - DNA, 10 bp, Unknown
  misc_feature (1)..( 10): Result.001 file - promoters60/1011556
acaaaacaca

SEQ ID NO: 91486 - DNA, 10 bp, Unknown
  misc_feature (1)..( 10): Result.001 file - promoters60/1011556
tcactacaaa

SEQ ID NO: 91487 - DNA, 11 bp, Unknown
  misc_feature (1)..( 11): Result.001 file - promoters60/1011556
gggttacgaaa

SEQ ID NO: 91488 - DNA, 11 bp, Unknown
  misc_feature (1)..( 11): Result.001 file - promoters60/1011556
tacataacact

SEQ ID NO: 91489 - DNA, 11 bp, Unknown
  misc_feature (1)..( 11): Result.001 file - promoters60/1011616
tcactattcac

SEQ ID NO: 91490 - DNA, 8 bp, Unknown
  misc_feature (1)..( 8): Result.001 file - promoters60/1011616
actagaag

SEQ ID NO: 91491 - DNA, 8 bp, Unknown
  misc_feature (1)..( 8): Result.001 file - promoters60/1011616
actataag

SEQ ID NO: 91492 - DNA, 6 bp, Unknown
  misc_feature (1)..( 6): Result.001 file - promoters60/1011616
tataaa

SEQ ID NO: 91493 - DNA, 6 bp, Unknown
  misc_feature (1)..( 6): Result.001 file - promoters60/1011616
tataaa

SEQ ID NO: 91494 - DNA, 9 bp, Unknown
  misc_feature (1)..( 9): Result.001 file - promoters60/1011616
atgaacaat

SEQ ID NO: 91495 - DNA, 9 bp, Unknown
  misc_feature (1)..( 9): Result.001 file - promoters60/1011616
atggacaat

SEQ ID NO: 91496 - DNA, 7 bp, Unknown
  misc_feature (1)..( 7): Result.001 file - promoters60/1011616
ggacgct

SEQ ID NO: 91497 - DNA, 7 bp, Unknown
  misc_feature (1)..( 7): Result.001 file - promoters60/1011616
ggacgct

SEQ ID NO: 91498 - DNA, 7 bp, Unknown
  misc_feature (1)..( 7): Result.001 file - promoters60/1011616
caatcaa

SEQ ID NO: 91499 - DNA, 7 bp, Unknown
  misc_feature (1)..( 7): Result.001 file - promoters60/1011616
caaccaa

SEQ ID NO: 91500 - DNA, 6 bp, Unknown
  misc_feature (1)..( 6): Result.001 file - promoters60/1011616
aataaa

SEQ ID NO: 91501 - DNA, 6 bp, Unknown
  misc_feature (1)..( 6): Result.001 file - promoters60/1011616
aataaa

SEQ ID NO: 91502 - DNA, 6 bp, Unknown
  misc_feature (1)..( 6): Result.001 file - promoters60/1011616
aaaaat

SEQ ID NO: 91503 - DNA, 6 bp, Unknown
  misc_feature (1)..( 6): Result.001 file - promoters60/1011616
aaaaat

SEQ ID NO: 91504 - DNA, 7 bp, Unknown
  misc_feature (1)..( 7): Result.001 file - promoters60/1011616
ggtcggt

SEQ ID NO: 91505 - DNA, 7 bp, Unknown
  misc_feature (1)..( 7): Result.001 file - promoters60/1011616
ggttggt

SEQ ID NO: 91506 - DNA, 6 bp, Unknown
  misc_feature (1)..( 6): Result.001 file - promoters60/1011616
taaaaa

SEQ ID NO: 91507 - DNA, 6 bp, Unknown
  misc_feature (1)..( 6): Result.001 file - promoters60/1011616
taaaaa

SEQ ID NO: 91508 - DNA, 6 bp, Unknown
  misc_feature (1)..( 6): Result.001 file - promoters60/1011616
tataaa

SEQ ID NO: 91509 - DNA, 6 bp, Unknown
  misc_feature (1)..( 6): Result.001 file - promoters60/1011780
tataaa

SEQ ID NO: 91510 - DNA, 8 bp, Unknown
  misc_feature (1)..( 8): Result.001 file - promoters60/1011780
aggcccaa

SEQ ID NO: 91511 - DNA, 8 bp, Unknown
  misc_feature (1)..( 8): Result.001 file - promoters60/1011780
aggcccaa

SEQ ID NO: 91512 - DNA, 8 bp, Unknown
  misc_feature (1)..( 8): Result.001 file - promoters60/1011780
aagcccaa

SEQ ID NO: 91513 - DNA, 8 bp, Unknown
  misc_feature (1)..( 8): Result.001 file - promoters60/1011780
cggcccac

SEQ ID NO: 91514 - DNA, 8 bp, Unknown
  misc_feature (1)..( 8): Result.001 file - promoters60/1011780
aggcccat

SEQ ID NO: 91515 - DNA, 8 bp, Unknown
  misc_feature (1)..( 8): Result.001 file - promoters60/1011900
aggcccat

SEQ ID NO: 91516 - DNA, 6 bp, Unknown
  misc_feature (1)..( 6): Result.001 file - promoters60/1011900
aaaaat

SEQ ID NO: 91517 - DNA, 6 bp, Unknown
  misc_feature (1)..( 6): Result.001 file - promoters60/1011900
aaaaat

SEQ ID NO: 91518 - DNA, 9 bp, Unknown
  misc_feature (1)..( 9): Result.001 file - promoters60/1011900
gattattgt

SEQ ID NO: 91519 - DNA, 9 bp, Unknown
  misc_feature (1)..( 9): Result.001 file - promoters60/1011900
gatttttgt

SEQ ID NO: 91520 - DNA, 6 bp, Unknown
  misc_feature (1)..( 6): Result.001 file - promoters60/1011900
catatc

SEQ ID NO: 91521 - DNA, 6 bp, Unknown
  misc_feature (1)..( 6): Result.001 file - promoters60/1011900
catatc

SEQ ID NO: 91522 - DNA, 6 bp, Unknown
  misc_feature (1)..( 6): Result.001 file - promoters60/1011900
caaggt

SEQ ID NO: 91523 - DNA, 6 bp, Unknown
  misc_feature (1)..( 6): Result.001 file - promoters60/1011900
caaggt

SEQ ID NO: 91524 - DNA, 6 bp, Unknown
  misc_feature (1)..( 6): Result.001 file - promoters60/1011900
aaatgt

SEQ ID NO: 91525 - DNA, 6 bp, Unknown
  misc_feature (1)..( 6): Result.001 file - promoters60/1011900
aaatgt

SEQ ID NO: 91526 - DNA, 7 bp, Unknown
  misc_feature (1)..( 7): Result.001 file - promoters60/1011900
tcataat

SEQ ID NO: 91527 - DNA, 7 bp, Unknown
  misc_feature (1)..( 7): Result.001 file - promoters60/1011900
tcataat

SEQ ID NO: 91528 - DNA, 7 bp, Unknown
  misc_feature (1)..( 7): Result.001 file - promoters60/1011900
atttgag

SEQ ID NO: 91529 - DNA, 7 bp, Unknown
  misc_feature (1)..( 7): Result.001 file - promoters60/1011900
atttgag

SEQ ID NO: 91530 - DNA, 6 bp, Unknown
  misc_feature (1)..( 6): Result.001 file - promoters60/1011900
cttaga

SEQ ID NO: 91531 - DNA, 6 bp, Unknown
  misc_feature (1)..( 6): Result.001 file - promoters60/1011900
cttaga

SEQ ID NO: 91532 - DNA, 6 bp, Unknown
  misc_feature (1)..( 6): Result.001 file - promoters60/1011900
actttt

SEQ ID NO: 91533 - DNA, 6 bp, Unknown
  misc_feature (1)..( 6): Result.001 file - promoters60/1011900
actttt

SEQ ID NO: 91534 - DNA, 6 bp, Unknown
  misc_feature (1)..( 6): Result.001 file - promoters60/1011900
aaattc

SEQ ID NO: 91535 - DNA, 6 bp, Unknown
  misc_feature (1)..( 6): Result.001 file - promoters60/1011900
aaattc

SEQ ID NO: 91536 - DNA, 6 bp, Unknown
  misc_feature (1)..( 6): Result.001 file - promoters60/1011900
caacca

SEQ ID NO: 91537 - DNA, 6 bp, Unknown
  misc_feature (1)..( 6): Result.001 file - promoters60/1011900
caacca

SEQ ID NO: 91538 - DNA, 7 bp, Unknown
  misc_feature (1)..( 7): Result.001 file - promoters60/1011900
agttatc

SEQ ID NO: 91539 - DNA, 7 bp, Unknown
  misc_feature (1)..( 7): Result.001 file - promoters60/1011972
agtaatc

SEQ ID NO: 91540 - DNA, 10 bp, Unknown
  misc_feature (1)..( 10): Result.001 file - promoters60/1011972
aaactttttc

SEQ ID NO: 91541 - DNA, 10 bp, Unknown
  misc_feature (1)..( 10): Result.001 file - promoters60/1011972
aaactttttt

SEQ ID NO: 91542 - DNA, 10 bp, Unknown
  misc_feature (1)..( 10): Result.001 file - promoters60/1011972
catttttttc

SEQ ID NO: 91543 - DNA, 10 bp, Unknown
  misc_feature (1)..( 10): Result.001 file - promoters60/1011972
atataaaaaa

SEQ ID NO: 91544 - DNA, 10 bp, Unknown
  misc_feature (1)..( 10): Result.001 file - promoters60/1011972
ttttaacaaa

SEQ ID NO: 91545 - DNA, 10 bp, Unknown
  misc_feature (1)..( 10): Result.001 file - promoters60/1011972
ttttaacatc

SEQ ID NO: 91546 - DNA, 8 bp, Unknown
  misc_feature (1)..( 8): Result.001 file - promoters60/1011972
tgcataat

SEQ ID NO: 91547 - DNA, 8 bp, Unknown
  misc_feature (1)..( 8): Result.001 file - promoters60/1011972
agcataag

SEQ ID NO: 91548 - DNA, 8 bp, Unknown
  misc_feature (1)..( 8): Result.001 file - promoters60/1011972
tgcatatg

SEQ ID NO: 91549 - DNA, 8 bp, Unknown
  misc_feature (1)..( 8): Result.001 file - promoters60/1011972
tccataat

SEQ ID NO: 91550 - DNA, 9 bp, Unknown
  misc_feature (1)..( 9): Result.001 file - promoters60/1011972
gaatctctt

SEQ ID NO: 91551 - DNA, 9 bp, Unknown
  misc_feature (1)..( 9): Result.001 file - promoters60/1011972
gaatctctt

SEQ ID NO: 91552 - DNA, 9 bp, Unknown
  misc_feature (1)..( 9): Result.001 file - promoters60/1011972
gaatctaag

SEQ ID NO: 91553 - DNA, 7 bp, Unknown
  misc_feature (1)..( 7): Result.001 file - promoters60/1011972
tttaaaa

SEQ ID NO: 91554 - DNA, 7 bp, Unknown
  misc_feature (1)..( 7): Result.001 file - promoters60/1011972
tttaaag

SEQ ID NO: 91555 - DNA, 7 bp, Unknown
  misc_feature (1)..( 7): Result.001 file - promoters60/1011972
attaaag

SEQ ID NO: 91556 - DNA, 11 bp, Unknown
  misc_feature (1)..( 11): Result.001 file - promoters60/1011972
atgtattttat

SEQ ID NO: 91557 - DNA, 11 bp, Unknown
  misc_feature (1)..( 11): Result.001 file - promoters60/1011972
aatctttttat

SEQ ID NO: 91558 - DNA, 11 bp, Unknown
  misc_feature (1)..( 11): Result.001 file - promoters60/1011972
aatctttttac

SEQ ID NO: 91559 - DNA, 9 bp, Unknown
  misc_feature (1)..( 9): Result.001 file - promoters60/1011972
ttctgctaa

SEQ ID NO: 91560 - DNA, 9 bp, Unknown
  misc_feature (1)..( 9): Result.001 file - promoters60/1011972
ttctgcgaa

SEQ ID NO: 91561 - DNA, 9 bp, Unknown
  misc_feature (1)..( 9): Result.001 file - promoters60/1011972
atctcctaa

SEQ ID NO: 91562 - DNA, 9 bp, Unknown
  misc_feature (1)..( 9): Result.001 file - promoters60/1011972
tcatataaa

SEQ ID NO: 91563 - DNA, 9 bp, Unknown
  misc_feature (1)..( 9): Result.001 file - promoters60/1011972
ctatataaa

SEQ ID NO: 91564 - DNA, 9 bp, Unknown
  misc_feature (1)..( 9): Result.001 file - promoters60/1011972
ctacatatc

SEQ ID NO: 91565 - DNA, 12 bp, Unknown
  misc_feature (1)..( 12): Result.001 file - promoters60/1011972
agtgtttcatat

SEQ ID NO: 91566 - DNA, 12 bp, Unknown
  misc_feature (1)..( 12): Result.001 file - promoters60/1011972
agtttttgatat

SEQ ID NO: 91567 - DNA, 12 bp, Unknown
  misc_feature (1)..( 12): Result.001 file - promoters60/1011972
gccgtttgataa

SEQ ID NO: 91568 - DNA, 12 bp, Unknown
  misc_feature (1)..( 12): Result.001 file - promoters60/1011972
tcattttgacat

SEQ ID NO: 91569 - DNA, 7 bp, Unknown
  misc_feature (1)..( 7): Result.001 file - promoters60/1011972
ttttcaa

SEQ ID NO: 91570 - DNA, 7 bp, Unknown
  misc_feature (1)..( 7): Result.001 file - promoters60/1011972
gtttcaa

SEQ ID NO: 91571 - DNA, 8 bp, Unknown
  misc_feature (1)..( 8): Result.001 file - promoters60/1011972
attgtcaa

SEQ ID NO: 91572 - DNA, 9 bp, Unknown
  misc_feature (1)..( 9): Result.001 file - promoters60/1011972
ctaattaac

SEQ ID NO: 91573 - DNA, 9 bp, Unknown
  misc_feature (1)..( 9): Result.001 file - promoters60/1011972
ctaatcaac

SEQ ID NO: 91574 - DNA, 9 bp, Unknown
  misc_feature (1)..( 9): Result.001 file - promoters60/1011972
gtcatcaat

SEQ ID NO: 91575 - DNA, 10 bp, Unknown
  misc_feature (1)..( 10): Result.001 file - promoters60/1011972
atcttcatat

SEQ ID NO: 91576 - DNA, 10 bp, Unknown
  misc_feature (1)..( 10): Result.001 file - promoters60/1011972
atctacatat

SEQ ID NO: 91577 - DNA, 10 bp, Unknown
  misc_feature (1)..( 10): Result.001 file - promoters60/1011972
tactatataa

SEQ ID NO: 91578 - DNA, 8 bp, Unknown
  misc_feature (1)..( 8): Result.001 file - promoters60/1011972
atccatat

SEQ ID NO: 91579 - DNA, 8 bp, Unknown
  misc_feature (1)..( 8): Result.001 file - promoters60/1011972
atcaatat

SEQ ID NO: 91580 - DNA, 8 bp, Unknown
  misc_feature (1)..( 8): Result.001 file - promoters60/1011972
atcaacaa

SEQ ID NO: 91581 - DNA, 7 bp, Unknown
  misc_feature (1)..( 7): Result.001 file - promoters60/1011972
tgacatc

SEQ ID NO: 91582 - DNA, 7 bp, Unknown
  misc_feature (1)..( 7): Result.001 file - promoters60/1011972
tgacatt

SEQ ID NO: 91583 - DNA, 7 bp, Unknown
  misc_feature (1)..( 7): Result.001 file - promoters60/1011972
tgatatt

SEQ ID NO: 91584 - DNA, 6 bp, Unknown
  misc_feature (1)..( 6): Result.001 file - promoters60/1011972
tttgga

SEQ ID NO: 91585 - DNA, 6 bp, Unknown
  misc_feature (1)..( 6): Result.001 file - promoters60/1011972
tttgga

SEQ ID NO: 91586 - DNA, 7 bp, Unknown
  misc_feature (1)..( 7): Result.001 file - promoters60/1012017
tttcgga

SEQ ID NO: 91587 - DNA, 8 bp, Unknown
  misc_feature (1)..( 8): Result.001 file - promoters60/1012017
aattcaac

SEQ ID NO: 91588 - DNA, 8 bp, Unknown
  misc_feature (1)..( 8): Result.001 file - promoters60/1012017
aatgcaac

SEQ ID NO: 91589 - DNA, 6 bp, Unknown
  misc_feature (1)..( 6): Result.001 file - promoters60/1012017
aaattt

SEQ ID NO: 91590 - DNA, 6 bp, Unknown
  misc_feature (1)..( 6): Result.001 file - promoters60/1012017
aaattt

SEQ ID NO: 91591 - DNA, 10 bp, Unknown
  misc_feature (1)..( 10): Result.001 file - promoters60/1012017
tgttttcact

SEQ ID NO: 91592 - DNA, 10 bp, Unknown
  misc_feature (1)..( 10): Result.001 file - promoters60/1012017
taattttact

SEQ ID NO: 91593 - DNA, 10 bp, Unknown
  misc_feature (1)..( 10): Result.001 file - promoters60/1012017
tgtattcacc

SEQ ID NO: 91594 - DNA, 7 bp, Unknown
  misc_feature (1)..( 7): Result.001 file - promoters60/1012017
gttaata

SEQ ID NO: 91595 - DNA, 7 bp, Unknown
  misc_feature (1)..( 7): Result.001 file - promoters60/1012017
gttaata

SEQ ID NO: 91596 - DNA, 9 bp, Unknown
  misc_feature (1)..( 9): Result.001 file - promoters60/1012017
aactcttta

SEQ ID NO: 91597 - DNA, 9 bp, Unknown
  misc_feature (1)..( 9): Result.001 file - promoters60/1012017
aactttttt

SEQ ID NO: 91598 - DNA, 10 bp, Unknown
  misc_feature (1)..( 10): Result.001 file - promoters60/1012017
tgttttatta

SEQ ID NO: 91599 - DNA, 6 bp, Unknown
  misc_feature (1)..( 6): Result.001 file - promoters60/1012017
caaaaa

SEQ ID NO: 91600 - DNA, 6 bp, Unknown
  misc_feature (1)..( 6): Result.001 file - promoters60/1012017
caaaaa

SEQ ID NO: 91601 - DNA, 7 bp, Unknown
  misc_feature (1)..( 7): Result.001 file - promoters60/1012017
tttattg

SEQ ID NO: 91602 - DNA, 7 bp, Unknown
  misc_feature (1)..( 7): Result.001 file - promoters60/1012017
tttatta

SEQ ID NO: 91603 - DNA, 7 bp, Unknown
  misc_feature (1)..( 7): Result.001 file - promoters60/1012017
tttttta

SEQ ID NO: 91604 - DNA, 7 bp, Unknown
  misc_feature (1)..( 7): Result.001 file - promoters60/1012017
tgaaatt

SEQ ID NO: 91605 - DNA, 7 bp, Unknown
  misc_feature (1)..( 7): Result.001 file - promoters60/1012017
tgatatt

SEQ ID NO: 91606 - DNA, 6 bp, Unknown
  misc_feature (1)..( 6): Result.001 file - promoters60/1012017
aagttg

SEQ ID NO: 91607 - DNA, 6 bp, Unknown
  misc_feature (1)..( 6): Result.001 file - promoters60/1012017
aagttg

SEQ ID NO: 91608 - DNA, 8 bp, Unknown
  misc_feature (1)..( 8): Result.001 file - promoters60/1012017
attactat

SEQ ID NO: 91609 - DNA, 8 bp, Unknown
  misc_feature (1)..( 8): Result.001 file - promoters60/1012017
attgctat

SEQ ID NO: 91610 - DNA, 6 bp, Unknown
  misc_feature (1)..( 6): Result.001 file - promoters60/1012017
taattc

SEQ ID NO: 91611 - DNA, 6 bp, Unknown
  misc_feature (1)..( 6): Result.001 file - promoters60/1012017
taattc

SEQ ID NO: 91612 - DNA, 8 bp, Unknown
  misc_feature (1)..( 8): Result.001 file - promoters60/1012017
tgtctaag

SEQ ID NO: 91613 - DNA, 8 bp, Unknown
  misc_feature (1)..( 8): Result.001 file - promoters60/1012017
tgtcaaag

SEQ ID NO: 91614 - DNA, 7 bp, Unknown
  misc_feature (1)..( 7): Result.001 file - promoters60/1012017
aaaaaaa

SEQ ID NO: 91615 - DNA, 7 bp, Unknown
  misc_feature (1)..( 7): Result.001 file - promoters60/1012017
aaacaaa

SEQ ID NO: 91616 - DNA, 6 bp, Unknown
  misc_feature (1)..( 6): Result.001 file - promoters60/1012017
tgtcga

SEQ ID NO: 91617 - DNA, 6 bp, Unknown
  misc_feature (1)..( 6): Result.001 file - promoters60/1012017
tgtcga

SEQ ID NO: 91618 - DNA, 7 bp, Unknown
  misc_feature (1)..( 7): Result.001 file - promoters60/1012017
tttactt

SEQ ID NO: 91619 - DNA, 7 bp, Unknown
  misc_feature (1)..( 7): Result.001 file - promoters60/1012017
tttgctt

SEQ ID NO: 91620 - DNA, 6 bp, Unknown
  misc_feature (1)..( 6): Result.001 file - promoters60/1012017
ttgtac

SEQ ID NO: 91621 - DNA, 6 bp, Unknown
  misc_feature (1)..( 6): Result.001 file - promoters60/1012074
ttgtac

SEQ ID NO: 91622 - DNA, 12 bp, Unknown
  misc_feature (1)..( 12): Result.001 file - promoters60/1012074
atattttcaata

SEQ ID NO: 91623 - DNA, 12 bp, Unknown
  misc_feature (1)..( 12): Result.001 file - promoters60/1012074
ttatcttcttcg

SEQ ID NO: 91624 - DNA, 12 bp, Unknown
  misc_feature (1)..( 12): Result.001 file - promoters60/1012074
ataatttgataa

SEQ ID NO: 91625 - DNA, 12 bp, Unknown
  misc_feature (1)..( 12): Result.001 file - promoters60/1012074
atattttgttaa

SEQ ID NO: 91626 - DNA, 12 bp, Unknown
  misc_feature (1)..( 12): Result.001 file - promoters60/1012074
atatttactgga

SEQ ID NO: 91627 - DNA, 9 bp, Unknown
  misc_feature (1)..( 9): Result.001 file - promoters60/1012074
tttagtttc

SEQ ID NO: 91628 - DNA, 9 bp, Unknown
  misc_feature (1)..( 9): Result.001 file - promoters60/1012074
tttagtcat

SEQ ID NO: 91629 - DNA, 9 bp, Unknown
  misc_feature (1)..( 9): Result.001 file - promoters60/1012074
ttttgttaa

SEQ ID NO: 91630 - DNA, 9 bp, Unknown
  misc_feature (1)..( 9): Result.001 file - promoters60/1012074
ttttttaaa

SEQ ID NO: 91631 - DNA, 9 bp, Unknown
  misc_feature (1)..( 9): Result.001 file - promoters60/1012074
tttcttgga

SEQ ID NO: 91632 - DNA, 12 bp, Unknown
  misc_feature (1)..( 12): Result.001 file - promoters60/1012074
ttttaataagag

SEQ ID NO: 91633 - DNA, 12 bp, Unknown
  misc_feature (1)..( 12): Result.001 file - promoters60/1012074
tttcaataaccg

SEQ ID NO: 91634 - DNA, 12 bp, Unknown
  misc_feature (1)..( 12): Result.001 file - promoters60/1012074
gtctaaaaagta

SEQ ID NO: 91635 - DNA, 12 bp, Unknown
  misc_feature (1)..( 12): Result.001 file - promoters60/1012074
actcaatatcaa

SEQ ID NO: 91636 - DNA, 12 bp, Unknown
  misc_feature (1)..( 12): Result.001 file - promoters60/1012074
atctagaaattc

SEQ ID NO: 91637 - DNA, 11 bp, Unknown
  misc_feature (1)..( 11): Result.001 file - promoters60/1012074
taattttacta

SEQ ID NO: 91638 - DNA, 11 bp, Unknown
  misc_feature (1)..( 11): Result.001 file - promoters60/1012074
taatttgataa

SEQ ID NO: 91639 - DNA, 12 bp, Unknown
  misc_feature (1)..( 12): Result.001 file - promoters60/1012074
taatgttagctg

SEQ ID NO: 91640 - DNA, 12 bp, Unknown
  misc_feature (1)..( 12): Result.001 file - promoters60/1012074
taacgttgaaga

SEQ ID NO: 91641 - DNA, 12 bp, Unknown
  misc_feature (1)..( 12): Result.001 file - promoters60/1012078
atattttgttaa

SEQ ID NO: 91642 - DNA, 6 bp, Unknown
  misc_feature (1)..( 6): Result.001 file - promoters60/1012078
agccag

SEQ ID NO: 91643 - DNA, 6 bp, Unknown
  misc_feature (1)..( 6): Result.001 file - promoters60/1012078
agccag

SEQ ID NO: 91644 - DNA, 7 bp, Unknown
  misc_feature (1)..( 7): Result.001 file - promoters60/1012078
gaagcca

SEQ ID NO: 91645 - DNA, 7 bp, Unknown
  misc_feature (1)..( 7): Result.001 file - promoters60/1012078
gaaacca

SEQ ID NO: 91646 - DNA, 7 bp, Unknown
  misc_feature (1)..( 7): Result.001 file - promoters60/1012078
ttaggat

SEQ ID NO: 91647 - DNA, 7 bp, Unknown
  misc_feature (1)..( 7): Result.001 file - promoters60/1012078
ttatgat

SEQ ID NO: 91648 - DNA, 7 bp, Unknown
  misc_feature (1)..( 7): Result.001 file - promoters60/1012078
ttcatga

SEQ ID NO: 91649 - DNA, 7 bp, Unknown
  misc_feature (1)..( 7): Result.001 file - promoters60/1012078
ttcttga

SEQ ID NO: 91650 - DNA, 6 bp, Unknown
  misc_feature (1)..( 6): Result.001 file - promoters60/1012078
aagaaa

SEQ ID NO: 91651 - DNA, 6 bp, Unknown
  misc_feature (1)..( 6): Result.001 file - promoters60/1012078
aagaaa

SEQ ID NO: 91652 - DNA, 7 bp, Unknown
  misc_feature (1)..( 7): Result.001 file - promoters60/1012078
ttcctct

SEQ ID NO: 91653 - DNA, 7 bp, Unknown
  misc_feature (1)..( 7): Result.001 file - promoters60/1012078
ttcttct

SEQ ID NO: 91654 - DNA, 13 bp, Unknown
  misc_feature (1)..( 13): Result.001 file - promoters60/1012078
gttatgatttctt

SEQ ID NO: 91655 - DNA, 13 bp, Unknown
  misc_feature (1)..( 13): Result.001 file - promoters60/1012078
gttataatttttt

SEQ ID NO: 91656 - DNA, 13 bp, Unknown
  misc_feature (1)..( 13): Result.001 file - promoters60/1012078
gttacaatttttt

SEQ ID NO: 91657 - DNA, 7 bp, Unknown
  misc_feature (1)..( 7): Result.001 file - promoters60/1012078
tgattat

SEQ ID NO: 91658 - DNA, 7 bp, Unknown
  misc_feature (1)..( 7): Result.001 file - promoters60/1012078
tgaatat

SEQ ID NO: 91659 - DNA, 8 bp, Unknown
  misc_feature (1)..( 8): Result.001 file - promoters60/1012078
atgagata

SEQ ID NO: 91660 - DNA, 8 bp, Unknown
  misc_feature (1)..( 8): Result.001 file - promoters60/1012078
ttgatata

SEQ ID NO: 91661 - DNA, 8 bp, Unknown
  misc_feature (1)..( 8): Result.001 file - promoters60/1012078
ttgttatg

SEQ ID NO: 91662 - DNA, 8 bp, Unknown
  misc_feature (1)..( 8): Result.001 file - promoters60/1012078
gatcttgt

SEQ ID NO: 91663 - DNA, 8 bp, Unknown
  misc_feature (1)..( 8): Result.001 file - promoters60/1012078
gatattgt

SEQ ID NO: 91664 - DNA, 6 bp, Unknown
  misc_feature (1)..( 6): Result.001 file - promoters60/1012078
aattca

SEQ ID NO: 91665 - DNA, 6 bp, Unknown
  misc_feature (1)..( 6): Result.001 file - promoters60/1012078
aattca

SEQ ID NO: 91666 - DNA, 8 bp, Unknown
  misc_feature (1)..( 8): Result.001 file - promoters60/1012078
aaaaaaat

SEQ ID NO: 91667 - DNA, 8 bp, Unknown
  misc_feature (1)..( 8): Result.001 file - promoters60/1012078
aaaaaaat

SEQ ID NO: 91668 - DNA, 8 bp, Unknown
  misc_feature (1)..( 8): Result.001 file - promoters60/1012078
ttttcctt

SEQ ID NO: 91669 - DNA, 8 bp, Unknown
  misc_feature (1)..( 8): Result.001 file - promoters60/1012078
ttttgctt

SEQ ID NO: 91670 - DNA, 6 bp, Unknown
  misc_feature (1)..( 6): Result.001 file - promoters60/1012078
agtgtt

SEQ ID NO: 91671 - DNA, 6 bp, Unknown
  misc_feature (1)..( 6): Result.001 file - promoters60/1012078
agtgtt

SEQ ID NO: 91672 - DNA, 8 bp, Unknown
  misc_feature (1)..( 8): Result.001 file - promoters60/1012078
tttgtttt

SEQ ID NO: 91673 - DNA, 8 bp, Unknown
  misc_feature (1)..( 8): Result.001 file - promoters60/1012078
tttgtttt

SEQ ID NO: 91674 - DNA, 7 bp, Unknown
  misc_feature (1)..( 7): Result.001 file - promoters60/1012078
aaactat

SEQ ID NO: 91675 - DNA, 7 bp, Unknown
  misc_feature (1)..( 7): Result.001 file - promoters60/1012078
aaaatat

SEQ ID NO: 91676 - DNA, 10 bp, Unknown
  misc_feature (1)..( 10): Result.001 file - promoters60/1012078
aaattagaaa

SEQ ID NO: 91677 - DNA, 10 bp, Unknown
  misc_feature (1)..( 10): Result.001 file - promoters60/1012110
aaattaaaaa

SEQ ID NO: 91678 - DNA, 8 bp, Unknown
  misc_feature (1)..( 8): Result.001 file - promoters60/1012110
aaataaaa

SEQ ID NO: 91679 - DNA, 8 bp, Unknown
  misc_feature (1)..( 8): Result.001 file - promoters60/1012110
aaatgaaa

SEQ ID NO: 91680 - DNA, 8 bp, Unknown
  misc_feature (1)..( 8): Result.001 file - promoters60/1012110
aaatgaac

SEQ ID NO: 91681 - DNA, 11 bp, Unknown
  misc_feature (1)..( 11): Result.001 file - promoters60/1012110
ccagaattaag

SEQ ID NO: 91682 - DNA, 11 bp, Unknown
  misc_feature (1)..( 11): Result.001 file - promoters60/1012110
ccataattagt

SEQ ID NO: 91683 - DNA, 11 bp, Unknown
  misc_feature (1)..( 11): Result.001 file - promoters60/1012110
atgtaattaag

SEQ ID NO: 91684 - DNA, 9 bp, Unknown
  misc_feature (1)..( 9): Result.001 file - promoters60/1012110
ctcaataaa

SEQ ID NO: 91685 - DNA, 9 bp, Unknown
  misc_feature (1)..( 9): Result.001 file - promoters60/1012110
ctcaaaaaa

SEQ ID NO: 91686 - DNA, 9 bp, Unknown
  misc_feature (1)..( 9): Result.001 file - promoters60/1012110
ttcaagaaa

SEQ ID NO: 91687 - DNA, 9 bp, Unknown
  misc_feature (1)..( 9): Result.001 file - promoters60/1012110
gtaaaaata

SEQ ID NO: 91688 - DNA, 9 bp, Unknown
  misc_feature (1)..( 9): Result.001 file - promoters60/1012110
gtaaaatta

SEQ ID NO: 91689 - DNA, 10 bp, Unknown
  misc_feature (1)..( 10): Result.001 file - promoters60/1012128
ttaagaatag

SEQ ID NO: 91690 - DNA, 15 bp, Unknown
  misc_feature (1)..( 15): Result.001 file - promoters60/1012128
taaggcccatattta

SEQ ID NO: 91691 - DNA, 15 bp, Unknown
  misc_feature (1)..( 15): Result.001 file - promoters60/1012128
taaggcccaatgttt

SEQ ID NO: 91692 - DNA, 15 bp, Unknown
  misc_feature (1)..( 15): Result.001 file - promoters60/1012128
ttcggcccaaattta

SEQ ID NO: 91693 - DNA, 15 bp, Unknown
  misc_feature (1)..( 15): Result.001 file - promoters60/1012128
ttgggcccattggtt

SEQ ID NO: 91694 - DNA, 15 bp, Unknown
  misc_feature (1)..( 15): Result.001 file - promoters60/1012128
aaaggcccaataaat

SEQ ID NO: 91695 - DNA, 15 bp, Unknown
  misc_feature (1)..( 15): Result.001 file - promoters60/1012128
ataggcccaacaaaa

SEQ ID NO: 91696 - DNA, 9 bp, Unknown
  misc_feature (1)..( 9): Result.001 file - promoters60/1012128
catataaag

SEQ ID NO: 91697 - DNA, 9 bp, Unknown
  misc_feature (1)..( 9): Result.001 file - promoters60/1012128
catatatac

SEQ ID NO: 91698 - DNA, 9 bp, Unknown
  misc_feature (1)..( 9): Result.001 file - promoters60/1012128
aataaaaag

SEQ ID NO: 91699 - DNA, 9 bp, Unknown
  misc_feature (1)..( 9): Result.001 file - promoters60/1012128
catatataa

SEQ ID NO: 91700 - DNA, 9 bp, Unknown
  misc_feature (1)..( 9): Result.001 file - promoters60/1012128
tatatataa

SEQ ID NO: 91701 - DNA, 9 bp, Unknown
  misc_feature (1)..( 9): Result.001 file - promoters60/1012128
tatagataa

SEQ ID NO: 91702 - DNA, 9 bp, Unknown
  misc_feature (1)..( 9): Result.001 file - promoters60/1012128
cacaaaaat

SEQ ID NO: 91703 - DNA, 9 bp, Unknown
  misc_feature (1)..( 9): Result.001 file - promoters60/1012128
ctcaaaaaa

SEQ ID NO: 91704 - DNA, 9 bp, Unknown
  misc_feature (1)..( 9): Result.001 file - promoters60/1012128
gagaaaaaa

SEQ ID NO: 91705 - DNA, 10 bp, Unknown
  misc_feature (1)..( 10): Result.001 file - promoters60/1012128
ctaaaagaaa

SEQ ID NO: 91706 - DNA, 10 bp, Unknown
  misc_feature (1)..( 10): Result.001 file - promoters60/1012128
ttcaaaattt

SEQ ID NO: 91707 - DNA, 10 bp, Unknown
  misc_feature (1)..( 10): Result.001 file - promoters60/1012128
ctcaaaagtt

SEQ ID NO: 91708 - DNA, 12 bp, Unknown
  misc_feature (1)..( 12): Result.001 file - promoters60/1012128
tctctcaaagat

SEQ ID NO: 91709 - DNA, 12 bp, Unknown
  misc_feature (1)..( 12): Result.001 file - promoters60/1012128
gccctcaaaaaa

SEQ ID NO: 91710 - DNA, 12 bp, Unknown
  misc_feature (1)..( 12): Result.001 file - promoters60/1012128
tctttcaaaatt

SEQ ID NO: 91711 - DNA, 12 bp, Unknown
  misc_feature (1)..( 12): Result.001 file - promoters60/1012128
aatttcacagaa

SEQ ID NO: 91712 - DNA, 12 bp, Unknown
  misc_feature (1)..( 12): Result.001 file - promoters60/1012128
gccggcaccgaa

SEQ ID NO: 91713 - DNA, 12 bp, Unknown
  misc_feature (1)..( 12): Result.001 file - promoters60/1012128
agactcaaaagt

SEQ ID NO: 91714 - DNA, 10 bp, Unknown
  misc_feature (1)..( 10): Result.001 file - promoters60/1012128
actaatctga

SEQ ID NO: 91715 - DNA, 10 bp, Unknown
  misc_feature (1)..( 10): Result.001 file - promoters60/1012128
acttatctga

SEQ ID NO: 91716 - DNA, 10 bp, Unknown
  misc_feature (1)..( 10): Result.001 file - promoters60/1012128
tgtaatctga

SEQ ID NO: 91717 - DNA, 10 bp, Unknown
  misc_feature (1)..( 10): Result.001 file - promoters60/1012128
aaggatctga

SEQ ID NO: 91718 - DNA, 10 bp, Unknown
  misc_feature (1)..( 10): Result.001 file - promoters60/1012128
gcttctcttc

SEQ ID NO: 91719 - DNA, 10 bp, Unknown
  misc_feature (1)..( 10): Result.001 file - promoters60/1012140
ttagatctgt

SEQ ID NO: 91720 - DNA, 13 bp, Unknown
  misc_feature (1)..( 13): Result.001 file - promoters60/1012140
ttgagtcatatca

SEQ ID NO: 91721 - DNA, 13 bp, Unknown
  misc_feature (1)..( 13): Result.001 file - promoters60/1012140
ttgattcaaatca

SEQ ID NO: 91722 - DNA, 6 bp, Unknown
  misc_feature (1)..( 6): Result.001 file - promoters60/1012140
aaggtt

SEQ ID NO: 91723 - DNA, 6 bp, Unknown
  misc_feature (1)..( 6): Result.001 file - promoters60/1012140
aaggtt

SEQ ID NO: 91724 - DNA, 7 bp, Unknown
  misc_feature (1)..( 7): Result.001 file - promoters60/1012140
ttgaatt

SEQ ID NO: 91725 - DNA, 7 bp, Unknown
  misc_feature (1)..( 7): Result.001 file - promoters60/1012140
ttggatt

SEQ ID NO: 91726 - DNA, 9 bp, Unknown
  misc_feature (1)..( 9): Result.001 file - promoters60/1012140
tcttgttct

SEQ ID NO: 91727 - DNA, 9 bp, Unknown
  misc_feature (1)..( 9): Result.001 file - promoters60/1012140
tcttgttct

SEQ ID NO: 91728 - DNA, 6 bp, Unknown
  misc_feature (1)..( 6): Result.001 file - promoters60/1012140
ttcttt

SEQ ID NO: 91729 - DNA, 6 bp, Unknown
  misc_feature (1)..( 6): Result.001 file - promoters60/1012140
ttcttt

SEQ ID NO: 91730 - DNA, 6 bp, Unknown
  misc_feature (1)..( 6): Result.001 file - promoters60/1012140
tttttg

SEQ ID NO: 91731 - DNA, 6 bp, Unknown
  misc_feature (1)..( 6): Result.001 file - promoters60/1012140
tttttg

SEQ ID NO: 91732 - DNA, 8 bp, Unknown
  misc_feature (1)..( 8): Result.001 file - promoters60/1012140
gcaaaatt

SEQ ID NO: 91733 - DNA, 8 bp, Unknown
  misc_feature (1)..( 8): Result.001 file - promoters60/1012140
gcaacatt

SEQ ID NO: 91734 - DNA, 7 bp, Unknown
  misc_feature (1)..( 7): Result.001 file - promoters60/1012140
acaaaaa

SEQ ID NO: 91735 - DNA, 7 bp, Unknown
  misc_feature (1)..( 7): Result.001 file - promoters60/1012140
acaaaaa

SEQ ID NO: 91736 - DNA, 6 bp, Unknown
  misc_feature (1)..( 6): Result.001 file - promoters60/1012140
tcaaac

SEQ ID NO: 91737 - DNA, 6 bp, Unknown
  misc_feature (1)..( 6): Result.001 file - promoters60/1012213
tcaaac

SEQ ID NO: 91738 - DNA, 6 bp, Unknown
  misc_feature (1)..( 6): Result.001 file - promoters60/1012213
ctttct

SEQ ID NO: 91739 - DNA, 6 bp, Unknown
  misc_feature (1)..( 6): Result.001 file - promoters60/1012213
ctttct

SEQ ID NO: 91740 - DNA, 8 bp, Unknown
  misc_feature (1)..( 8): Result.001 file - promoters60/1012213
aaattaca

SEQ ID NO: 91741 - DNA, 8 bp, Unknown
  misc_feature (1)..( 8): Result.001 file - promoters60/1012213
aaaataca

SEQ ID NO: 91742 - DNA, 6 bp, Unknown
  misc_feature (1)..( 6): Result.001 file - promoters60/1012213
tgtgtt

SEQ ID NO: 91743 - DNA, 6 bp, Unknown
  misc_feature (1)..( 6): Result.001 file - promoters60/1012213
tgtgtt

SEQ ID NO: 91744 - DNA, 7 bp, Unknown
  misc_feature (1)..( 7): Result.001 file - promoters60/1012213
tttcatg

SEQ ID NO: 91745 - DNA, 7 bp, Unknown
  misc_feature (1)..( 7): Result.001 file - promoters60/1012213
tttcatg

SEQ ID NO: 91746 - DNA, 7 bp, Unknown
  misc_feature (1)..( 7): Result.001 file - promoters60/1012213
tgtgtat

SEQ ID NO: 91747 - DNA, 7 bp, Unknown
  misc_feature (1)..( 7): Result.001 file - promoters60/1012213
tgtctat

SEQ ID NO: 91748 - DNA, 6 bp, Unknown
  misc_feature (1)..( 6): Result.001 file - promoters60/1012213
gatgta

SEQ ID NO: 91749 - DNA, 6 bp, Unknown
  misc_feature (1)..( 6): Result.001 file - promoters60/1012213
gatgta

SEQ ID NO: 91750 - DNA, 6 bp, Unknown
  misc_feature (1)..( 6): Result.001 file - promoters60/1012213
tttttt

SEQ ID NO: 91751 - DNA, 6 bp, Unknown
  misc_feature (1)..( 6): Result.001 file - promoters60/1012213
tttttt

SEQ ID NO: 91752 - DNA, 7 bp, Unknown
  misc_feature (1)..( 7): Result.001 file - promoters60/1012213
tatcatg

SEQ ID NO: 91753 - DNA, 7 bp, Unknown
  misc_feature (1)..( 7): Result.001 file - promoters60/1012213
tattatg

SEQ ID NO: 91754 - DNA, 7 bp, Unknown
  misc_feature (1)..( 7): Result.001 file - promoters60/1012213
tttttat

SEQ ID NO: 91755 - DNA, 7 bp, Unknown
  misc_feature (1)..( 7): Result.001 file - promoters60/1012213
tttgtat

SEQ ID NO: 91756 - DNA, 6 bp, Unknown
  misc_feature (1)..( 6): Result.001 file - promoters60/1012213
aacaac

SEQ ID NO: 91757 - DNA, 6 bp, Unknown
  misc_feature (1)..( 6): Result.001 file - promoters60/1012213
aacaac

SEQ ID NO: 91758 - DNA, 8 bp, Unknown
  misc_feature (1)..( 8): Result.001 file - promoters60/1012213
aaaaatct

SEQ ID NO: 91759 - DNA, 8 bp, Unknown
  misc_feature (1)..( 8): Result.001 file - promoters60/1012213
aaaattct

SEQ ID NO: 91760 - DNA, 7 bp, Unknown
  misc_feature (1)..( 7): Result.001 file - promoters60/1012213
tatattt

SEQ ID NO: 91761 - DNA, 7 bp, Unknown
  misc_feature (1)..( 7): Result.001 file - promoters60/1012213
tattttt

SEQ ID NO: 91762 - DNA, 7 bp, Unknown
  misc_feature (1)..( 7): Result.001 file - promoters60/1012213
tatgatt

SEQ ID NO: 91763 - DNA, 7 bp, Unknown
  misc_feature (1)..( 7): Result.001 file - promoters60/1012213
tattatt

SEQ ID NO: 91764 - DNA, 7 bp, Unknown
  misc_feature (1)..( 7): Result.001 file - promoters60/1012213
tttctgt

SEQ ID NO: 91765 - DNA, 7 bp, Unknown
  misc_feature (1)..( 7): Result.001 file - promoters60/1012213
tttttgt

SEQ ID NO: 91766 - DNA, 6 bp, Unknown
  misc_feature (1)..( 6): Result.001 file - promoters60/1012213
gctaat

SEQ ID NO: 91767 - DNA, 6 bp, Unknown
  misc_feature (1)..( 6): Result.001 file - promoters60/1012245
gctaat

SEQ ID NO: 91768 - DNA, 7 bp, Unknown
  misc_feature (1)..( 7): Result.001 file - promoters60/1012245
agctatt

SEQ ID NO: 91769 - DNA, 7 bp, Unknown
  misc_feature (1)..( 7): Result.001 file - promoters60/1012245
agcgatt

SEQ ID NO: 91770 - DNA, 7 bp, Unknown
  misc_feature (1)..( 7): Result.001 file - promoters60/1012245
ttttggt

SEQ ID NO: 91771 - DNA, 7 bp, Unknown
  misc_feature (1)..( 7): Result.001 file - promoters60/1012245
gtttggt

SEQ ID NO: 91772 - DNA, 7 bp, Unknown
  misc_feature (1)..( 7): Result.001 file - promoters60/1012245
ttttggt

SEQ ID NO: 91773 - DNA, 7 bp, Unknown
  misc_feature (1)..( 7): Result.001 file - promoters60/1012245
gtttctt

SEQ ID NO: 91774 - DNA, 7 bp, Unknown
  misc_feature (1)..( 7): Result.001 file - promoters60/1012245
gttcctt

SEQ ID NO: 91775 - DNA, 6 bp, Unknown
  misc_feature (1)..( 6): Result.001 file - promoters60/1012245
atttaa

SEQ ID NO: 91776 - DNA, 6 bp, Unknown
  misc_feature (1)..( 6): Result.001 file - promoters60/1012245
atttaa

SEQ ID NO: 91777 - DNA, 6 bp, Unknown
  misc_feature (1)..( 6): Result.001 file - promoters60/1012245
catttt

SEQ ID NO: 91778 - DNA, 6 bp, Unknown
  misc_feature (1)..( 6): Result.001 file - promoters60/1012245
catttt

SEQ ID NO: 91779 - DNA, 7 bp, Unknown
  misc_feature (1)..( 7): Result.001 file - promoters60/1012245
tgagtct

SEQ ID NO: 91780 - DNA, 7 bp, Unknown
  misc_feature (1)..( 7): Result.001 file - promoters60/1012245
tgaatct

SEQ ID NO: 91781 - DNA, 8 bp, Unknown
  misc_feature (1)..( 8): Result.001 file - promoters60/1012245
aagattaa

SEQ ID NO: 91782 - DNA, 8 bp, Unknown
  misc_feature (1)..( 8): Result.001 file - promoters60/1012245
aagagtaa

SEQ ID NO: 91783 - DNA, 8 bp, Unknown
  misc_feature (1)..( 8): Result.001 file - promoters60/1012245
tttactta

SEQ ID NO: 91784 - DNA, 8 bp, Unknown
  misc_feature (1)..( 8): Result.001 file - promoters60/1012245
ttttctta

SEQ ID NO: 91785 - DNA, 7 bp, Unknown
  misc_feature (1)..( 7): Result.001 file - promoters60/1012245
ttttcat

SEQ ID NO: 91786 - DNA, 7 bp, Unknown
  misc_feature (1)..( 7): Result.001 file - promoters60/1012245
ttttcat

SEQ ID NO: 91787 - DNA, 8 bp, Unknown
  misc_feature (1)..( 8): Result.001 file - promoters60/1012245
tctcaaat

SEQ ID NO: 91788 - DNA, 8 bp, Unknown
  misc_feature (1)..( 8): Result.001 file - promoters60/1012245
tctgaaat

SEQ ID NO: 91789 - DNA, 9 bp, Unknown
  misc_feature (1)..( 9): Result.001 file - promoters60/1012245
tctcaggtg

SEQ ID NO: 91790 - DNA, 9 bp, Unknown
  misc_feature (1)..( 9): Result.001 file - promoters60/1012349
tctcaagtg

SEQ ID NO: 91791 - DNA, 10 bp, Unknown
  misc_feature (1)..( 10): Result.001 file - promoters60/1012349
ctttgcttac

SEQ ID NO: 91792 - DNA, 10 bp, Unknown
  misc_feature (1)..( 10): Result.001 file - promoters60/1012349
tttttctttt

SEQ ID NO: 91793 - DNA, 10 bp, Unknown
  misc_feature (1)..( 10): Result.001 file - promoters60/1012349
agttgtttat

SEQ ID NO: 91794 - DNA, 10 bp, Unknown
  misc_feature (1)..( 10): Result.001 file - promoters60/1012349
tttttatttt

SEQ ID NO: 91795 - DNA, 10 bp, Unknown
  misc_feature (1)..( 10): Result.001 file - promoters60/1012349
tcatgtttaa

SEQ ID NO: 91796 - DNA, 10 bp, Unknown
  misc_feature (1)..( 10): Result.001 file - promoters60/1012349
gagttcataa

SEQ ID NO: 91797 - DNA, 10 bp, Unknown
  misc_feature (1)..( 10): Result.001 file - promoters60/1012349
ttctgtttgg

SEQ ID NO: 91798 - DNA, 12 bp, Unknown
  misc_feature (1)..( 12): Result.001 file - promoters60/1012349
ttaaaaatccaa

SEQ ID NO: 91799 - DNA, 12 bp, Unknown
  misc_feature (1)..( 12): Result.001 file - promoters60/1012349
ataaatatcctc

SEQ ID NO: 91800 - DNA, 12 bp, Unknown
  misc_feature (1)..( 12): Result.001 file - promoters60/1012349
aacaaaatccaa

SEQ ID NO: 91801 - DNA, 12 bp, Unknown
  misc_feature (1)..( 12): Result.001 file - promoters60/1012349
ttaaaaacaatt

SEQ ID NO: 91802 - DNA, 12 bp, Unknown
  misc_feature (1)..( 12): Result.001 file - promoters60/1012349
ttaaaaacattt

SEQ ID NO: 91803 - DNA, 12 bp, Unknown
  misc_feature (1)..( 12): Result.001 file - promoters60/1012349
aaaaaaagaata

SEQ ID NO: 91804 - DNA, 14 bp, Unknown
  misc_feature (1)..( 14): Result.001 file - promoters60/1012349
caacaatgtacaaa

SEQ ID NO: 91805 - DNA, 14 bp, Unknown
  misc_feature (1)..( 14): Result.001 file - promoters60/1012349
caataatttacatt

SEQ ID NO: 91806 - DNA, 14 bp, Unknown
  misc_feature (1)..( 14): Result.001 file - promoters60/1012349
acacaatatacaga

SEQ ID NO: 91807 - DNA, 14 bp, Unknown
  misc_feature (1)..( 14): Result.001 file - promoters60/1012349
gaataataaaatgt

SEQ ID NO: 91808 - DNA, 14 bp, Unknown
  misc_feature (1)..( 14): Result.001 file - promoters60/1012349
tgaaaatttatacg

SEQ ID NO: 91809 - DNA, 14 bp, Unknown
  misc_feature (1)..( 14): Result.001 file - promoters60/1012349
atgcaaaatacaga

SEQ ID NO: 91810 - DNA, 11 bp, Unknown
  misc_feature (1)..( 11): Result.001 file - promoters60/1012349
gaatttttgta

SEQ ID NO: 91811 - DNA, 11 bp, Unknown
  misc_feature (1)..( 11): Result.001 file - promoters60/1012349
gaaattttcat

SEQ ID NO: 91812 - DNA, 11 bp, Unknown
  misc_feature (1)..( 11): Result.001 file - promoters60/1012349
gcatttttatt

SEQ ID NO: 91813 - DNA, 11 bp, Unknown
  misc_feature (1)..( 11): Result.001 file - promoters60/1012349
tattttatatt

SEQ ID NO: 91814 - DNA, 11 bp, Unknown
  misc_feature (1)..( 11): Result.001 file - promoters60/1012349
tcatatgagtg

SEQ ID NO: 91815 - DNA, 11 bp, Unknown
  misc_feature (1)..( 11): Result.001 file - promoters60/1012388
taatattagta

SEQ ID NO: 91816 - DNA, 14 bp, Unknown
  misc_feature (1)..( 14): Result.001 file - promoters60/1012388
aaattttgattttt

SEQ ID NO: 91817 - DNA, 14 bp, Unknown
  misc_feature (1)..( 14): Result.001 file - promoters60/1012388
attagttgatttaa

SEQ ID NO: 91818 - DNA, 13 bp, Unknown
  misc_feature (1)..( 13): Result.001 file - promoters60/1012388
ccatttaattttt

SEQ ID NO: 91819 - DNA, 14 bp, Unknown
  misc_feature (1)..( 14): Result.001 file - promoters60/1012388
aaattatgattaag

SEQ ID NO: 91820 - DNA, 8 bp, Unknown
  misc_feature (1)..( 8): Result.001 file - promoters60/1012388
tttttaat

SEQ ID NO: 91821 - DNA, 8 bp, Unknown
  misc_feature (1)..( 8): Result.001 file - promoters60/1012388
gatttaat

SEQ ID NO: 91822 - DNA, 8 bp, Unknown
  misc_feature (1)..( 8): Result.001 file - promoters60/1012388
catttaat

SEQ ID NO: 91823 - DNA, 8 bp, Unknown
  misc_feature (1)..( 8): Result.001 file - promoters60/1012388
tttttaaa

SEQ ID NO: 91824 - DNA, 10 bp, Unknown
  misc_feature (1)..( 10): Result.001 file - promoters60/1012388
taatattata

SEQ ID NO: 91825 - DNA, 10 bp, Unknown
  misc_feature (1)..( 10): Result.001 file - promoters60/1012388
taataatata

SEQ ID NO: 91826 - DNA, 11 bp, Unknown
  misc_feature (1)..( 11): Result.001 file - promoters60/1012388
gtataaattta

SEQ ID NO: 91827 - DNA, 11 bp, Unknown
  misc_feature (1)..( 11): Result.001 file - promoters60/1012388
atataaatatg

SEQ ID NO: 91828 - DNA, 11 bp, Unknown
  misc_feature (1)..( 11): Result.001 file - promoters60/1012388
aaattttgatt

SEQ ID NO: 91829 - DNA, 11 bp, Unknown
  misc_feature (1)..( 11): Result.001 file - promoters60/1012388
taattttttgg

SEQ ID NO: 91830 - DNA, 11 bp, Unknown
  misc_feature (1)..( 11): Result.001 file - promoters60/1012388
aaattatgatt

SEQ ID NO: 91831 - DNA, 11 bp, Unknown
  misc_feature (1)..( 11): Result.001 file - promoters60/1012388
taattatgata

SEQ ID NO: 91832 - DNA, 11 bp, Unknown
  misc_feature (1)..( 11): Result.001 file - promoters60/1012388
tttaaaataaa

SEQ ID NO: 91833 - DNA, 11 bp, Unknown
  misc_feature (1)..( 11): Result.001 file - promoters60/1012388
gataacataga

SEQ ID NO: 91834 - DNA, 11 bp, Unknown
  misc_feature (1)..( 11): Result.001 file - promoters60/1012388
tttaaaacatg

SEQ ID NO: 91835 - DNA, 11 bp, Unknown
  misc_feature (1)..( 11): Result.001 file - promoters60/1012397
ttggacataga

SEQ ID NO: 91836 - DNA, 12 bp, Unknown
  misc_feature (1)..( 12): Result.001 file - promoters60/1012397
cctatattcata

SEQ ID NO: 91837 - DNA, 12 bp, Unknown
  misc_feature (1)..( 12): Result.001 file - promoters60/1012397
ttcgtatacatg

SEQ ID NO: 91838 - DNA, 12 bp, Unknown
  misc_feature (1)..( 12): Result.001 file - promoters60/1012397
ctggaatatatg

SEQ ID NO: 91839 - DNA, 12 bp, Unknown
  misc_feature (1)..( 12): Result.001 file - promoters60/1012397
ggattataatac

SEQ ID NO: 91840 - DNA, 14 bp, Unknown
  misc_feature (1)..( 14): Result.001 file - promoters60/1012397
aatttatcttcttt

SEQ ID NO: 91841 - DNA, 14 bp, Unknown
  misc_feature (1)..( 14): Result.001 file - promoters60/1012397
aatttattttccaa

SEQ ID NO: 91842 - DNA, 14 bp, Unknown
  misc_feature (1)..( 14): Result.001 file - promoters60/1012397
catttctctgggtt

SEQ ID NO: 91843 - DNA, 14 bp, Unknown
  misc_feature (1)..( 14): Result.001 file - promoters60/1012397
attttctctccttt

SEQ ID NO: 91844 - DNA, 14 bp, Unknown
  misc_feature (1)..( 14): Result.001 file - promoters60/1012397
aatttcttgagacg

SEQ ID NO: 91845 - DNA, 14 bp, Unknown
  misc_feature (1)..( 14): Result.001 file - promoters60/1012397
gaattattttgcta

SEQ ID NO: 91846 - DNA, 10 bp, Unknown
  misc_feature (1)..( 10): Result.001 file - promoters60/1012397
ttaatttatt

SEQ ID NO: 91847 - DNA, 10 bp, Unknown
  misc_feature (1)..( 10): Result.001 file - promoters60/1012397
ataatttaat

SEQ ID NO: 91848 - DNA, 10 bp, Unknown
  misc_feature (1)..( 10): Result.001 file - promoters60/1012397
gtaatttgtc

SEQ ID NO: 91849 - DNA, 10 bp, Unknown
  misc_feature (1)..( 10): Result.001 file - promoters60/1012397
ttaattcatt

SEQ ID NO: 91850 - DNA, 10 bp, Unknown
  misc_feature (1)..( 10): Result.001 file - promoters60/1012397
tgaatccatc

SEQ ID NO: 91851 - DNA, 10 bp, Unknown
  misc_feature (1)..( 10): Result.001 file - promoters60/1012397
aaaacttgat

SEQ ID NO: 91852 - DNA, 10 bp, Unknown
  misc_feature (1)..( 10): Result.001 file - promoters60/1012397
aaaaattggt

SEQ ID NO: 91853 - DNA, 10 bp, Unknown
  misc_feature (1)..( 10): Result.001 file - promoters60/1012397
cttactcgat

SEQ ID NO: 91854 - DNA, 10 bp, Unknown
  misc_feature (1)..( 10): Result.001 file - promoters60/1012397
ccaaattgat

SEQ ID NO: 91855 - DNA, 13 bp, Unknown
  misc_feature (1)..( 13): Result.001 file - promoters60/1012397
ttatttaattatg

SEQ ID NO: 91856 - DNA, 13 bp, Unknown
  misc_feature (1)..( 13): Result.001 file - promoters60/1012397
caattgaatccat

SEQ ID NO: 91857 - DNA, 13 bp, Unknown
  misc_feature (1)..( 13): Result.001 file - promoters60/1012397
ttacttagctata

SEQ ID NO: 91858 - DNA, 13 bp, Unknown
  misc_feature (1)..( 13): Result.001 file - promoters60/1012397
tcgcttaattcat

SEQ ID NO: 91859 - DNA, 13 bp, Unknown
  misc_feature (1)..( 13): Result.001 file - promoters60/1012397
taatttaatgcat

SEQ ID NO: 91860 - DNA, 10 bp, Unknown
  misc_feature (1)..( 10): Result.001 file - promoters60/1012397
cattcttcaa

SEQ ID NO: 91861 - DNA, 10 bp, Unknown
  misc_feature (1)..( 10): Result.001 file - promoters60/1012397
cattcttctt

SEQ ID NO: 91862 - DNA, 10 bp, Unknown
  misc_feature (1)..( 10): Result.001 file - promoters60/1012397
ttctctactt

SEQ ID NO: 91863 - DNA, 10 bp, Unknown
  misc_feature (1)..( 10): Result.001 file - promoters60/1012403
ttctctcctt

SEQ ID NO: 91864 - DNA, 8 bp, Unknown
  misc_feature (1)..( 8): Result.001 file - promoters60/1012403
ttttatta

SEQ ID NO: 91865 - DNA, 8 bp, Unknown
  misc_feature (1)..( 8): Result.001 file - promoters60/1012403
ttttttta

SEQ ID NO: 91866 - DNA, 8 bp, Unknown
  misc_feature (1)..( 8): Result.001 file - promoters60/1012403
gtttttta

SEQ ID NO: 91867 - DNA, 7 bp, Unknown
  misc_feature (1)..( 7): Result.001 file - promoters60/1012403
aaaatat

SEQ ID NO: 91868 - DNA, 7 bp, Unknown
  misc_feature (1)..( 7): Result.001 file - promoters60/1012403
aaaataa

SEQ ID NO: 91869 - DNA, 7 bp, Unknown
  misc_feature (1)..( 7): Result.001 file - promoters60/1012403
aaagtaa

SEQ ID NO: 91870 - DNA, 8 bp, Unknown
  misc_feature (1)..( 8): Result.001 file - promoters60/1012403
ttttatta

SEQ ID NO: 91871 - DNA, 8 bp, Unknown
  misc_feature (1)..( 8): Result.001 file - promoters60/1012403
ttttgtta

SEQ ID NO: 91872 - DNA, 8 bp, Unknown
  misc_feature (1)..( 8): Result.001 file - promoters60/1012403
tttggttc

SEQ ID NO: 91873 - DNA, 8 bp, Unknown
  misc_feature (1)..( 8): Result.001 file - promoters60/1012403
gaatcttt

SEQ ID NO: 91874 - DNA, 8 bp, Unknown
  misc_feature (1)..( 8): Result.001 file - promoters60/1012403
caattttt

SEQ ID NO: 91875 - DNA, 8 bp, Unknown
  misc_feature (1)..( 8): Result.001 file - promoters60/1012403
caatttga

SEQ ID NO: 91876 - DNA, 12 bp, Unknown
  misc_feature (1)..( 12): Result.001 file - promoters60/1012403
gattatttcatg

SEQ ID NO: 91877 - DNA, 12 bp, Unknown
  misc_feature (1)..( 12): Result.001 file - promoters60/1012403
ttttgtttaatg

SEQ ID NO: 91878 - DNA, 12 bp, Unknown
  misc_feature (1)..( 12): Result.001 file - promoters60/1012403
ttttttttaaaa

SEQ ID NO: 91879 - DNA, 7 bp, Unknown
  misc_feature (1)..( 7): Result.001 file - promoters60/1012403
gttgaat

SEQ ID NO: 91880 - DNA, 7 bp, Unknown
  misc_feature (1)..( 7): Result.001 file - promoters60/1012403
gttcaat

SEQ ID NO: 91881 - DNA, 7 bp, Unknown
  misc_feature (1)..( 7): Result.001 file - promoters60/1012407
tttgaat

SEQ ID NO: 91882 - DNA, 11 bp, Unknown
  misc_feature (1)..( 11): Result.001 file - promoters60/1012407
caattttgtag

SEQ ID NO: 91883 - DNA, 11 bp, Unknown
  misc_feature (1)..( 11): Result.001 file - promoters60/1012407
gtgttttttag

SEQ ID NO: 91884 - DNA, 11 bp, Unknown
  misc_feature (1)..( 11): Result.001 file - promoters60/1012407
caattttgcta

SEQ ID NO: 91885 - DNA, 11 bp, Unknown
  misc_feature (1)..( 11): Result.001 file - promoters60/1012407
aggacttgtag

SEQ ID NO: 91886 - DNA, 11 bp, Unknown
  misc_feature (1)..( 11): Result.001 file - promoters60/1012407
aagtttttcga

SEQ ID NO: 91887 - DNA, 11 bp, Unknown
  misc_feature (1)..( 11): Result.001 file - promoters60/1012407
aatatttttac

SEQ ID NO: 91888 - DNA, 17 bp, Unknown
  misc_feature (1)..( 17): Result.001 file - promoters60/1012407
ccaaccttcttttaaac

SEQ ID NO: 91889 - DNA, 17 bp, Unknown
  misc_feature (1)..( 17): Result.001 file - promoters60/1012407
tttagattctttgaaca

SEQ ID NO: 91890 - DNA, 17 bp, Unknown
  misc_feature (1)..( 17): Result.001 file - promoters60/1012407
tttacattgtttaattt

SEQ ID NO: 91891 - DNA, 17 bp, Unknown
  misc_feature (1)..( 17): Result.001 file - promoters60/1012407
ccacttgtgtttgatta

SEQ ID NO: 91892 - DNA, 17 bp, Unknown
  misc_feature (1)..( 17): Result.001 file - promoters60/1012442
ttgtatttatttatatt

SEQ ID NO: 91893 - DNA, 7 bp, Unknown
  misc_feature (1)..( 7): Result.001 file - promoters60/1012442
caataag

SEQ ID NO: 91894 - DNA, 7 bp, Unknown
  misc_feature (1)..( 7): Result.001 file - promoters60/1012442
aaataag

SEQ ID NO: 91895 - DNA, 8 bp, Unknown
  misc_feature (1)..( 8): Result.001 file - promoters60/1012442
aaactaag

SEQ ID NO: 91896 - DNA, 7 bp, Unknown
  misc_feature (1)..( 7): Result.001 file - promoters60/1012442
tcagttt

SEQ ID NO: 91897 - DNA, 7 bp, Unknown
  misc_feature (1)..( 7): Result.001 file - promoters60/1012442
tcatttt

SEQ ID NO: 91898 - DNA, 13 bp, Unknown
  misc_feature (1)..( 13): Result.001 file - promoters60/1012442
taaaatttacata

SEQ ID NO: 91899 - DNA, 13 bp, Unknown
  misc_feature (1)..( 13): Result.001 file - promoters60/1012442
taagattaattaa

SEQ ID NO: 91900 - DNA, 13 bp, Unknown
  misc_feature (1)..( 13): Result.001 file - promoters60/1012442
taagattcacata

SEQ ID NO: 91901 - DNA, 7 bp, Unknown
  misc_feature (1)..( 7): Result.001 file - promoters60/1012442
tttttaa

SEQ ID NO: 91902 - DNA, 7 bp, Unknown
  misc_feature (1)..( 7): Result.001 file - promoters60/1012442
tttttaa

SEQ ID NO: 91903 - DNA, 8 bp, Unknown
  misc_feature (1)..( 8): Result.001 file - promoters60/1012442
aagaaatt

SEQ ID NO: 91904 - DNA, 8 bp, Unknown
  misc_feature (1)..( 8): Result.001 file - promoters60/1012442
aagaaaaa

SEQ ID NO: 91905 - DNA, 8 bp, Unknown
  misc_feature (1)..( 8): Result.001 file - promoters60/1012442
aagatatt

SEQ ID NO: 91906 - DNA, 7 bp, Unknown
  misc_feature (1)..( 7): Result.001 file - promoters60/1012442
aatgttt

SEQ ID NO: 91907 - DNA, 7 bp, Unknown
  misc_feature (1)..( 7): Result.001 file - promoters60/1012442
aatattt

SEQ ID NO: 91908 - DNA, 7 bp, Unknown
  misc_feature (1)..( 7): Result.001 file - promoters60/1012442
aatatat

SEQ ID NO: 91909 - DNA, 7 bp, Unknown
  misc_feature (1)..( 7): Result.001 file - promoters60/1012442
aatgtat

SEQ ID NO: 91910 - DNA, 6 bp, Unknown
  misc_feature (1)..( 6): Result.001 file - promoters60/1012442
aaaatc

SEQ ID NO: 91911 - DNA, 6 bp, Unknown
  misc_feature (1)..( 6): Result.001 file - promoters60/1012442
aaaatc

SEQ ID NO: 91912 - DNA, 8 bp, Unknown
  misc_feature (1)..( 8): Result.001 file - promoters60/1012442
caaggcat

SEQ ID NO: 91913 - DNA, 8 bp, Unknown
  misc_feature (1)..( 8): Result.001 file - promoters60/1012442
caatgcat

SEQ ID NO: 91914 - DNA, 7 bp, Unknown
  misc_feature (1)..( 7): Result.001 file - promoters60/1012442
aataaat

SEQ ID NO: 91915 - DNA, 7 bp, Unknown
  misc_feature (1)..( 7): Result.001 file - promoters60/1012442
aataaat

SEQ ID NO: 91916 - DNA, 7 bp, Unknown
  misc_feature (1)..( 7): Result.001 file - promoters60/1012442
ttaaaat

SEQ ID NO: 91917 - DNA, 7 bp, Unknown
  misc_feature (1)..( 7): Result.001 file - promoters60/1012442
ttaaaat

SEQ ID NO: 91918 - DNA, 7 bp, Unknown
  misc_feature (1)..( 7): Result.001 file - promoters60/1012442
aatgtta

SEQ ID NO: 91919 - DNA, 7 bp, Unknown
  misc_feature (1)..( 7): Result.001 file - promoters60/1012442
aatttta

SEQ ID NO: 91920 - DNA, 6 bp, Unknown
  misc_feature (1)..( 6): Result.001 file - promoters60/1012442
agatat

SEQ ID NO: 91921 - DNA, 6 bp, Unknown
  misc_feature (1)..( 6): Result.001 file - promoters60/1012442
agatat

SEQ ID NO: 91922 - DNA, 8 bp, Unknown
  misc_feature (1)..( 8): Result.001 file - promoters60/1012442
ccaacaca

SEQ ID NO: 91923 - DNA, 8 bp, Unknown
  misc_feature (1)..( 8): Result.001 file - promoters60/1012442
ccaccaca

SEQ ID NO: 91924 - DNA, 8 bp, Unknown
  misc_feature (1)..( 8): Result.001 file - promoters60/1012442
taagttgt

SEQ ID NO: 91925 - DNA, 8 bp, Unknown
  misc_feature (1)..( 8): Result.001 file - promoters60/1012442
taaattgt

SEQ ID NO: 91926 - DNA, 6 bp, Unknown
  misc_feature (1)..( 6): Result.001 file - promoters60/1012442
atagat

SEQ ID NO: 91927 - DNA, 6 bp, Unknown
  misc_feature (1)..( 6): Result.001 file - promoters60/1012442
atagat

SEQ ID NO: 91928 - DNA, 7 bp, Unknown
  misc_feature (1)..( 7): Result.001 file - promoters60/1012442
agatata

SEQ ID NO: 91929 - DNA, 7 bp, Unknown
  misc_feature (1)..( 7): Result.001 file - promoters60/1012442
agagata

SEQ ID NO: 91930 - DNA, 6 bp, Unknown
  misc_feature (1)..( 6): Result.001 file - promoters60/1012442
ttttgg

SEQ ID NO: 91931 - DNA, 6 bp, Unknown
  misc_feature (1)..( 6): Result.001 file - promoters60/1012442
ttttgg

SEQ ID NO: 91932 - DNA, 12 bp, Unknown
  misc_feature (1)..( 12): Result.001 file - promoters60/1012442
aaaaacaaaaca

SEQ ID NO: 91933 - DNA, 12 bp, Unknown
  misc_feature (1)..( 12): Result.001 file - promoters60/1012442
aaacacaataca

SEQ ID NO: 91934 - DNA, 6 bp, Unknown
  misc_feature (1)..( 6): Result.001 file - promoters60/1012442
aaaaat

SEQ ID NO: 91935 - DNA, 6 bp, Unknown
  misc_feature (1)..( 6): Result.001 file - promoters60/1012442
aaaaat

SEQ ID NO: 91936 - DNA, 6 bp, Unknown
  misc_feature (1)..( 6): Result.001 file - promoters60/1012442
taaccc

SEQ ID NO: 91937 - DNA, 6 bp, Unknown
  misc_feature (1)..( 6): Result.001 file - promoters60/1012561
taaccc

SEQ ID NO: 91938 - DNA, 7 bp, Unknown
  misc_feature (1)..( 7): Result.001 file - promoters60/1012561
aaacaaa

SEQ ID NO: 91939 - DNA, 7 bp, Unknown
  misc_feature (1)..( 7): Result.001 file - promoters60/1012561
aaataaa

SEQ ID NO: 91940 - DNA, 7 bp, Unknown
  misc_feature (1)..( 7): Result.001 file - promoters60/1012561
gtatctt

SEQ ID NO: 91941 - DNA, 7 bp, Unknown
  misc_feature (1)..( 7): Result.001 file - promoters60/1012561
gtatctt

SEQ ID NO: 91942 - DNA, 6 bp, Unknown
  misc_feature (1)..( 6): Result.001 file - promoters60/1012561
ttatct

SEQ ID NO: 91943 - DNA, 6 bp, Unknown
  misc_feature (1)..( 6): Result.001 file - promoters60/1012561
ttatct

SEQ ID NO: 91944 - DNA, 6 bp, Unknown
  misc_feature (1)..( 6): Result.001 file - promoters60/1012561
ttatct

SEQ ID NO: 91945 - DNA, 8 bp, Unknown
  misc_feature (1)..( 8): Result.001 file - promoters60/1012561
aacaaatt

SEQ ID NO: 91946 - DNA, 8 bp, Unknown
  misc_feature (1)..( 8): Result.001 file - promoters60/1012561
aacgaatt

SEQ ID NO: 91947 - DNA, 7 bp, Unknown
  misc_feature (1)..( 7): Result.001 file - promoters60/1012561
tttgctt

SEQ ID NO: 91948 - DNA, 7 bp, Unknown
  misc_feature (1)..( 7): Result.001 file - promoters60/1012561
ttttctt

SEQ ID NO: 91949 - DNA, 10 bp, Unknown
  misc_feature (1)..( 10): Result.001 file - promoters60/1012561
atttttgtgt

SEQ ID NO: 91950 - DNA, 10 bp, Unknown
  misc_feature (1)..( 10): Result.001 file - promoters60/1012561
attattgttt

SEQ ID NO: 91951 - DNA, 10 bp, Unknown
  misc_feature (1)..( 10): Result.001 file - promoters60/1012561
gttactgttt

SEQ ID NO: 91952 - DNA, 6 bp, Unknown
  misc_feature (1)..( 6): Result.001 file - promoters60/1012561
tcagat

SEQ ID NO: 91953 - DNA, 6 bp, Unknown
  misc_feature (1)..( 6): Result.001 file - promoters60/1012561
tcagat

SEQ ID NO: 91954 - DNA, 7 bp, Unknown
  misc_feature (1)..( 7): Result.001 file - promoters60/1012561
taaataa

SEQ ID NO: 91955 - DNA, 7 bp, Unknown
  misc_feature (1)..( 7): Result.001 file - promoters60/1012561
taaataa

SEQ ID NO: 91956 - DNA, 6 bp, Unknown
  misc_feature (1)..( 6): Result.001 file - promoters60/1012561
ataaat

SEQ ID NO: 91957 - DNA, 6 bp, Unknown
  misc_feature (1)..( 6): Result.001 file - promoters60/1012561
ataaat

SEQ ID NO: 91958 - DNA, 7 bp, Unknown
  misc_feature (1)..( 7): Result.001 file - promoters60/1012561
tattttt

SEQ ID NO: 91959 - DNA, 7 bp, Unknown
  misc_feature (1)..( 7): Result.001 file - promoters60/1012561
tatgttt

SEQ ID NO: 91960 - DNA, 7 bp, Unknown
  misc_feature (1)..( 7): Result.001 file - promoters60/1012561
caaaaaa

SEQ ID NO: 91961 - DNA, 7 bp, Unknown
  misc_feature (1)..( 7): Result.001 file - promoters60/1012561
caaaaaa

SEQ ID NO: 91962 - DNA, 6 bp, Unknown
  misc_feature (1)..( 6): Result.001 file - promoters60/1012561
taaaca

SEQ ID NO: 91963 - DNA, 6 bp, Unknown
  misc_feature (1)..( 6): Result.001 file - promoters60/1012561
taaaca

SEQ ID NO: 91964 - DNA, 7 bp, Unknown
  misc_feature (1)..( 7): Result.001 file - promoters60/1012561
ttagatc

SEQ ID NO: 91965 - DNA, 7 bp, Unknown
  misc_feature (1)..( 7): Result.001 file - promoters60/1012561
ttagatc

SEQ ID NO: 91966 - DNA, 7 bp, Unknown
  misc_feature (1)..( 7): Result.001 file - promoters60/1012561
atcattt

SEQ ID NO: 91967 - DNA, 7 bp, Unknown
  misc_feature (1)..( 7): Result.001 file - promoters60/1012561
atctttt

SEQ ID NO: 91968 - DNA, 7 bp, Unknown
  misc_feature (1)..( 7): Result.001 file - promoters60/1012561
gatttat

SEQ ID NO: 91969 - DNA, 7 bp, Unknown
  misc_feature (1)..( 7): Result.001 file - promoters60/1012561
gatctat

SEQ ID NO: 91970 - DNA, 6 bp, Unknown
  misc_feature (1)..( 6): Result.001 file - promoters60/1012561
ttttca

SEQ ID NO: 91971 - DNA, 6 bp, Unknown
  misc_feature (1)..( 6): Result.001 file - promoters60/1012561
ttttca

SEQ ID NO: 91972 - DNA, 7 bp, Unknown
  misc_feature (1)..( 7): Result.001 file - promoters60/1012561
cgagcaa

SEQ ID NO: 91973 - DNA, 7 bp, Unknown
  misc_feature (1)..( 7): Result.001 file - promoters60/1012561
cgaacaa

SEQ ID NO: 91974 - DNA, 6 bp, Unknown
  misc_feature (1)..( 6): Result.001 file - promoters60/1012561
tatcta

SEQ ID NO: 91975 - DNA, 6 bp, Unknown
  misc_feature (1)..( 6): Result.001 file - promoters60/1012580
tatcta

SEQ ID NO: 91976 - DNA, 9 bp, Unknown
  misc_feature (1)..( 9): Result.001 file - promoters60/1012580
aattacaat

SEQ ID NO: 91977 - DNA, 9 bp, Unknown
  misc_feature (1)..( 9): Result.001 file - promoters60/1012580
tcttataat

SEQ ID NO: 91978 - DNA, 9 bp, Unknown
  misc_feature (1)..( 9): Result.001 file - promoters60/1012580
tcttataaa

SEQ ID NO: 91979 - DNA, 7 bp, Unknown
  misc_feature (1)..( 7): Result.001 file - promoters60/1012580
acatcaa

SEQ ID NO: 91980 - DNA, 7 bp, Unknown
  misc_feature (1)..( 7): Result.001 file - promoters60/1012580
acaccaa

SEQ ID NO: 91981 - DNA, 8 bp, Unknown
  misc_feature (1)..( 8): Result.001 file - promoters60/1012580
acttatat

SEQ ID NO: 91982 - DNA, 8 bp, Unknown
  misc_feature (1)..( 8): Result.001 file - promoters60/1012580
tcttataa

SEQ ID NO: 91983 - DNA, 8 bp, Unknown
  misc_feature (1)..( 8): Result.001 file - promoters60/1012580
tcttataa

SEQ ID NO: 91984 - DNA, 8 bp, Unknown
  misc_feature (1)..( 8): Result.001 file - promoters60/1012580
aaaacaca

SEQ ID NO: 91985 - DNA, 8 bp, Unknown
  misc_feature (1)..( 8): Result.001 file - promoters60/1012580
aaaacaca

SEQ ID NO: 91986 - DNA, 8 bp, Unknown
  misc_feature (1)..( 8): Result.001 file - promoters60/1012580
caagcttt

SEQ ID NO: 91987 - DNA, 8 bp, Unknown
  misc_feature (1)..( 8): Result.001 file - promoters60/1012580
caaacttt

SEQ ID NO: 91988 - DNA, 6 bp, Unknown
  misc_feature (1)..( 6): Result.001 file - promoters60/1012580
aatatt

SEQ ID NO: 91989 - DNA, 6 bp, Unknown
  misc_feature (1)..( 6): Result.001 file - promoters60/1012580
aatatt

SEQ ID NO: 91990 - DNA, 6 bp, Unknown
  misc_feature (1)..( 6): Result.001 file - promoters60/1012580
atcaaa

SEQ ID NO: 91991 - DNA, 6 bp, Unknown
  misc_feature (1)..( 6): Result.001 file - promoters60/1012580
atcaaa

SEQ ID NO: 91992 - DNA, 7 bp, Unknown
  misc_feature (1)..( 7): Result.001 file - promoters60/1012580
caaatcc

SEQ ID NO: 91993 - DNA, 7 bp, Unknown
  misc_feature (1)..( 7): Result.001 file - promoters60/1012580
caagtcc

SEQ ID NO: 91994 - DNA, 7 bp, Unknown
  misc_feature (1)..( 7): Result.001 file - promoters60/1012580
cacaaga

SEQ ID NO: 91995 - DNA, 7 bp, Unknown
  misc_feature (1)..( 7): Result.001 file - promoters60/1012580
cacgaga

SEQ ID NO: 91996 - DNA, 8 bp, Unknown
  misc_feature (1)..( 8): Result.001 file - promoters60/1012580
ctcgcttc

SEQ ID NO: 91997 - DNA, 8 bp, Unknown
  misc_feature (1)..( 8): Result.001 file - promoters60/1012580
ctcgcttc

SEQ ID NO: 91998 - DNA, 8 bp, Unknown
  misc_feature (1)..( 8): Result.001 file - promoters60/1012580
cttctcga

SEQ ID NO: 91999 - DNA, 8 bp, Unknown
  misc_feature (1)..( 8): Result.001 file - promoters60/1012620
cttctcga

SEQ ID NO: 92000 - DNA, 11 bp, Unknown
  misc_feature (1)..( 11): Result.001 file - promoters60/1012620
ataatttgagt

SEQ ID NO: 92001 - DNA, 11 bp, Unknown
  misc_feature (1)..( 11): Result.001 file - promoters60/1012620
atatttttagt

SEQ ID NO: 92002 - DNA, 11 bp, Unknown
  misc_feature (1)..( 11): Result.001 file - promoters60/1012620
caaatgtgatt

SEQ ID NO: 92003 - DNA, 8 bp, Unknown
  misc_feature (1)..( 8): Result.001 file - promoters60/1012620
aggaggaa

SEQ ID NO: 92004 - DNA, 8 bp, Unknown
  misc_feature (1)..( 8): Result.001 file - promoters60/1012620
aggaggaa

SEQ ID NO: 92005 - DNA, 8 bp, Unknown
  misc_feature (1)..( 8): Result.001 file - promoters60/1012620
tggaggat

SEQ ID NO: 92006 - DNA, 8 bp, Unknown
  misc_feature (1)..( 8): Result.001 file - promoters60/1012620
gttacaaa

SEQ ID NO: 92007 - DNA, 8 bp, Unknown
  misc_feature (1)..( 8): Result.001 file - promoters60/1012620
gttacaac

SEQ ID NO: 92008 - DNA, 8 bp, Unknown
  misc_feature (1)..( 8): Result.001 file - promoters60/1012620
gttataac

SEQ ID NO: 92009 - DNA, 10 bp, Unknown
  misc_feature (1)..( 10): Result.001 file - promoters60/1012620
aatatataca

SEQ ID NO: 92010 - DNA, 10 bp, Unknown
  misc_feature (1)..( 10): Result.001 file - promoters60/1012620
aatttatcaa

SEQ ID NO: 92011 - DNA, 10 bp, Unknown
  misc_feature (1)..( 10): Result.001 file - promoters60/1012620
agtttatttt

SEQ ID NO: 92012 - DNA, 11 bp, Unknown
  misc_feature (1)..( 11): Result.001 file - promoters60/1012620
agagaaaggat

SEQ ID NO: 92013 - DNA, 11 bp, Unknown
  misc_feature (1)..( 11): Result.001 file - promoters60/1012620
agaaaaattgt

SEQ ID NO: 92014 - DNA, 11 bp, Unknown
  misc_feature (1)..( 11): Result.001 file - promoters60/1012620
aaacaaagatt

SEQ ID NO: 92015 - DNA, 9 bp, Unknown
  misc_feature (1)..( 9): Result.001 file - promoters60/1012620
atctataaa

SEQ ID NO: 92016 - DNA, 9 bp, Unknown
  misc_feature (1)..( 9): Result.001 file - promoters60/1012620
atatataaa

SEQ ID NO: 92017 - DNA, 9 bp, Unknown
  misc_feature (1)..( 9): Result.001 file - promoters60/1012620
ccttataaa

SEQ ID NO: 92018 - DNA, 9 bp, Unknown
  misc_feature (1)..( 9): Result.001 file - promoters60/1012673
ccttttaaa

SEQ ID NO: 92019 - DNA, 10 bp, Unknown
  misc_feature (1)..( 10): Result.001 file - promoters60/1012673
aaattaaaaa

SEQ ID NO: 92020 - DNA, 10 bp, Unknown
  misc_feature (1)..( 10): Result.001 file - promoters60/1012673
ctatttaaac

SEQ ID NO: 92021 - DNA, 10 bp, Unknown
  misc_feature (1)..( 10): Result.001 file - promoters60/1012673
agaataaaaa

SEQ ID NO: 92022 - DNA, 10 bp, Unknown
  misc_feature (1)..( 10): Result.001 file - promoters60/1012673
ctagttactt

SEQ ID NO: 92023 - DNA, 11 bp, Unknown
  misc_feature (1)..( 11): Result.001 file - promoters60/1012673
caaatatttcc

SEQ ID NO: 92024 - DNA, 11 bp, Unknown
  misc_feature (1)..( 11): Result.001 file - promoters60/1012673
caaataatttt

SEQ ID NO: 92025 - DNA, 11 bp, Unknown
  misc_feature (1)..( 11): Result.001 file - promoters60/1012673
caagtaatttt

SEQ ID NO: 92026 - DNA, 11 bp, Unknown
  misc_feature (1)..( 11): Result.001 file - promoters60/1012673
cactgattttt

SEQ ID NO: 92027 - DNA, 9 bp, Unknown
  misc_feature (1)..( 9): Result.001 file - promoters60/1012673
tatcatttt

SEQ ID NO: 92028 - DNA, 9 bp, Unknown
  misc_feature (1)..( 9): Result.001 file - promoters60/1012673
tatcatttt

SEQ ID NO: 92029 - DNA, 7 bp, Unknown
  misc_feature (1)..( 7): Result.001 file - promoters60/1012673
ccatttt

SEQ ID NO: 92030 - DNA, 9 bp, Unknown
  misc_feature (1)..( 9): Result.001 file - promoters60/1012673
tatgattaa

SEQ ID NO: 92031 - DNA, 11 bp, Unknown
  misc_feature (1)..( 11): Result.001 file - promoters60/1012673
agaatctaaat

SEQ ID NO: 92032 - DNA, 11 bp, Unknown
  misc_feature (1)..( 11): Result.001 file - promoters60/1012673
agaatccagct

SEQ ID NO: 92033 - DNA, 11 bp, Unknown
  misc_feature (1)..( 11): Result.001 file - promoters60/1012673
agactcctgct

SEQ ID NO: 92034 - DNA, 11 bp, Unknown
  misc_feature (1)..( 11): Result.001 file - promoters60/1012673
cttctgctggg

SEQ ID NO: 92035 - DNA, 12 bp, Unknown
  misc_feature (1)..( 12): Result.001 file - promoters60/1012673
tgtcaaatattt

SEQ ID NO: 92036 - DNA, 12 bp, Unknown
  misc_feature (1)..( 12): Result.001 file - promoters60/1012673
caagtaattttt

SEQ ID NO: 92037 - DNA, 12 bp, Unknown
  misc_feature (1)..( 12): Result.001 file - promoters60/1012673
caaataatttta

SEQ ID NO: 92038 - DNA, 12 bp, Unknown
  misc_feature (1)..( 12): Result.001 file - promoters60/1012673
tcactgattttt

SEQ ID NO: 92039 - DNA, 11 bp, Unknown
  misc_feature (1)..( 11): Result.001 file - promoters60/1012673
tgatttgtttg

SEQ ID NO: 92040 - DNA, 11 bp, Unknown
  misc_feature (1)..( 11): Result.001 file - promoters60/1012673
gaatttgtttg

SEQ ID NO: 92041 - DNA, 11 bp, Unknown
  misc_feature (1)..( 11): Result.001 file - promoters60/1012673
tgaattggcac

SEQ ID NO: 92042 - DNA, 11 bp, Unknown
  misc_feature (1)..( 11): Result.001 file - promoters60/1012720
tcatttgtata

SEQ ID NO: 92043 - DNA, 8 bp, Unknown
  misc_feature (1)..( 8): Result.001 file - promoters60/1012720
ttaagcta

SEQ ID NO: 92044 - DNA, 8 bp, Unknown
  misc_feature (1)..( 8): Result.001 file - promoters60/1012720
ttatgctg

SEQ ID NO: 92045 - DNA, 8 bp, Unknown
  misc_feature (1)..( 8): Result.001 file - promoters60/1012720
ataatcta

SEQ ID NO: 92046 - DNA, 14 bp, Unknown
  misc_feature (1)..( 14): Result.001 file - promoters60/1012720
tttgattcctataa

SEQ ID NO: 92047 - DNA, 14 bp, Unknown
  misc_feature (1)..( 14): Result.001 file - promoters60/1012720
tgggcttcctttaa

SEQ ID NO: 92048 - DNA, 14 bp, Unknown
  misc_feature (1)..( 14): Result.001 file - promoters60/1012720
tttgattccttgtt

SEQ ID NO: 92049 - DNA, 8 bp, Unknown
  misc_feature (1)..( 8): Result.001 file - promoters60/1012720
tgttaaaa

SEQ ID NO: 92050 - DNA, 8 bp, Unknown
  misc_feature (1)..( 8): Result.001 file - promoters60/1012720
tgtgaaat

SEQ ID NO: 92051 - DNA, 8 bp, Unknown
  misc_feature (1)..( 8): Result.001 file - promoters60/1012720
ttttaaaa

SEQ ID NO: 92052 - DNA, 9 bp, Unknown
  misc_feature (1)..( 9): Result.001 file - promoters60/1012720
atgttttaa

SEQ ID NO: 92053 - DNA, 9 bp, Unknown
  misc_feature (1)..( 9): Result.001 file - promoters60/1012720
atgttttgc

SEQ ID NO: 92054 - DNA, 9 bp, Unknown
  misc_feature (1)..( 9): Result.001 file - promoters60/1012720
ttgttatgc

SEQ ID NO: 92055 - DNA, 7 bp, Unknown
  misc_feature (1)..( 7): Result.001 file - promoters60/1012720
aagaaaa

SEQ ID NO: 92056 - DNA, 7 bp, Unknown
  misc_feature (1)..( 7): Result.001 file - promoters60/1012720
aagaaag

SEQ ID NO: 92057 - DNA, 7 bp, Unknown
  misc_feature (1)..( 7): Result.001 file - promoters60/1012720
aaggaag

SEQ ID NO: 92058 - DNA, 8 bp, Unknown
  misc_feature (1)..( 8): Result.001 file - promoters60/1012720
aaacctgt

SEQ ID NO: 92059 - DNA, 8 bp, Unknown
  misc_feature (1)..( 8): Result.001 file - promoters60/1012720
taacttgt

SEQ ID NO: 92060 - DNA, 8 bp, Unknown
  misc_feature (1)..( 8): Result.001 file - promoters60/1012720
taaattgt

SEQ ID NO: 92061 - DNA, 9 bp, Unknown
  misc_feature (1)..( 9): Result.001 file - promoters60/1012720
tgttttaag

SEQ ID NO: 92062 - DNA, 9 bp, Unknown
  misc_feature (1)..( 9): Result.001 file - promoters60/1012720
tgttataaa

SEQ ID NO: 92063 - DNA, 9 bp, Unknown
  misc_feature (1)..( 9): Result.001 file - promoters60/1012757
tagtataaa

SEQ ID NO: 92064 - DNA, 7 bp, Unknown
  misc_feature (1)..( 7): Result.001 file - promoters60/1012757
aaaataa

SEQ ID NO: 92065 - DNA, 7 bp, Unknown
  misc_feature (1)..( 7): Result.001 file - promoters60/1012757
aaaatat

SEQ ID NO: 92066 - DNA, 7 bp, Unknown
  misc_feature (1)..( 7): Result.001 file - promoters60/1012757
aaattat

SEQ ID NO: 92067 - DNA, 9 bp, Unknown
  misc_feature (1)..( 9): Result.001 file - promoters60/1012757
tgcttaaaa

SEQ ID NO: 92068 - DNA, 9 bp, Unknown
  misc_feature (1)..( 9): Result.001 file - promoters60/1012757
aaattaaaa

SEQ ID NO: 92069 - DNA, 9 bp, Unknown
  misc_feature (1)..( 9): Result.001 file - promoters60/1012757
aaatgaaaa

SEQ ID NO: 92070 - DNA, 7 bp, Unknown
  misc_feature (1)..( 7): Result.001 file - promoters60/1012757
tctttgt

SEQ ID NO: 92071 - DNA, 7 bp, Unknown
  misc_feature (1)..( 7): Result.001 file - promoters60/1012757
tctatgt

SEQ ID NO: 92072 - DNA, 7 bp, Unknown
  misc_feature (1)..( 7): Result.001 file - promoters60/1012757
tctatat

SEQ ID NO: 92073 - DNA, 11 bp, Unknown
  misc_feature (1)..( 11): Result.001 file - promoters60/1012757
tgtttgaccat

SEQ ID NO: 92074 - DNA, 11 bp, Unknown
  misc_feature (1)..( 11): Result.001 file - promoters60/1012757
tatttgaacat

SEQ ID NO: 92075 - DNA, 11 bp, Unknown
  misc_feature (1)..( 11): Result.001 file - promoters60/1012757
tgtgtgagttc

SEQ ID NO: 92076 - DNA, 8 bp, Unknown
  misc_feature (1)..( 8): Result.001 file - promoters60/1012757
taacgaac

SEQ ID NO: 92077 - DNA, 8 bp, Unknown
  misc_feature (1)..( 8): Result.001 file - promoters60/1012757
caacgaaa

SEQ ID NO: 92078 - DNA, 8 bp, Unknown
  misc_feature (1)..( 8): Result.001 file - promoters60/1012791
caactaaa

SEQ ID NO: 92079 - DNA, 6 bp, Unknown
  misc_feature (1)..( 6): Result.001 file - promoters60/1012791
ttgttt

SEQ ID NO: 92080 - DNA, 6 bp, Unknown
  misc_feature (1)..( 6): Result.001 file - promoters60/1012791
ttgttt

SEQ ID NO: 92081 - DNA, 6 bp, Unknown
  misc_feature (1)..( 6): Result.001 file - promoters60/1012791
atatat

SEQ ID NO: 92082 - DNA, 6 bp, Unknown
  misc_feature (1)..( 6): Result.001 file - promoters60/1012791
atatat

SEQ ID NO: 92083 - DNA, 6 bp, Unknown
  misc_feature (1)..( 6): Result.001 file - promoters60/1012791
attttt

SEQ ID NO: 92084 - DNA, 6 bp, Unknown
  misc_feature (1)..( 6): Result.001 file - promoters60/1012791
attttt

SEQ ID NO: 92085 - DNA, 8 bp, Unknown
  misc_feature (1)..( 8): Result.001 file - promoters60/1012791
aaacaaaa

SEQ ID NO: 92086 - DNA, 8 bp, Unknown
  misc_feature (1)..( 8): Result.001 file - promoters60/1012791
aaacaatt

SEQ ID NO: 92087 - DNA, 8 bp, Unknown
  misc_feature (1)..( 8): Result.001 file - promoters60/1012791
aaacaaaa

SEQ ID NO: 92088 - DNA, 7 bp, Unknown
  misc_feature (1)..( 7): Result.001 file - promoters60/1012791
aataaac

SEQ ID NO: 92089 - DNA, 7 bp, Unknown
  misc_feature (1)..( 7): Result.001 file - promoters60/1012791
aattaac

SEQ ID NO: 92090 - DNA, 6 bp, Unknown
  misc_feature (1)..( 6): Result.001 file - promoters60/1012791
tttatt

SEQ ID NO: 92091 - DNA, 6 bp, Unknown
  misc_feature (1)..( 6): Result.001 file - promoters60/1012791
tttatt

SEQ ID NO: 92092 - DNA, 6 bp, Unknown
  misc_feature (1)..( 6): Result.001 file - promoters60/1012791
attaaa

SEQ ID NO: 92093 - DNA, 6 bp, Unknown
  misc_feature (1)..( 6): Result.001 file - promoters60/1012791
attaaa

SEQ ID NO: 92094 - DNA, 6 bp, Unknown
  misc_feature (1)..( 6): Result.001 file - promoters60/1012791
attaca

SEQ ID NO: 92095 - DNA, 6 bp, Unknown
  misc_feature (1)..( 6): Result.001 file - promoters60/1012791
attaca

SEQ ID NO: 92096 - DNA, 6 bp, Unknown
  misc_feature (1)..( 6): Result.001 file - promoters60/1012791
tatatt

SEQ ID NO: 92097 - DNA, 6 bp, Unknown
  misc_feature (1)..( 6): Result.001 file - promoters60/1012791
tatatt

SEQ ID NO: 92098 - DNA, 12 bp, Unknown
  misc_feature (1)..( 12): Result.001 file - promoters60/1012791
tatatatattgc

SEQ ID NO: 92099 - DNA, 12 bp, Unknown
  misc_feature (1)..( 12): Result.001 file - promoters60/1012791
tatatataatgc

SEQ ID NO: 92100 - DNA, 10 bp, Unknown
  misc_feature (1)..( 10): Result.001 file - promoters60/1012791
tttctatatt

SEQ ID NO: 92101 - DNA, 10 bp, Unknown
  misc_feature (1)..( 10): Result.001 file - promoters60/1012791
tttttatatt

SEQ ID NO: 92102 - DNA, 10 bp, Unknown
  misc_feature (1)..( 10): Result.001 file - promoters60/1012791
cttttatcat

SEQ ID NO: 92103 - DNA, 7 bp, Unknown
  misc_feature (1)..( 7): Result.001 file - promoters60/1012791
aacatta

SEQ ID NO: 92104 - DNA, 7 bp, Unknown
  misc_feature (1)..( 7): Result.001 file - promoters60/1012791
aacttta

SEQ ID NO: 92105 - DNA, 10 bp, Unknown
  misc_feature (1)..( 10): Result.001 file - promoters60/1012791
caaaataaat

SEQ ID NO: 92106 - DNA, 10 bp, Unknown
  misc_feature (1)..( 10): Result.001 file - promoters60/1012791
aaaaacaaat

SEQ ID NO: 92107 - DNA, 10 bp, Unknown
  misc_feature (1)..( 10): Result.001 file - promoters60/1012791
aaaaacaatt

SEQ ID NO: 92108 - DNA, 8 bp, Unknown
  misc_feature (1)..( 8): Result.001 file - promoters60/1012791
aaaaaaac

SEQ ID NO: 92109 - DNA, 8 bp, Unknown
  misc_feature (1)..( 8): Result.001 file - promoters60/1012791
aaagaaac

SEQ ID NO: 92110 - DNA, 7 bp, Unknown
  misc_feature (1)..( 7): Result.001 file - promoters60/1012791
accgcag

SEQ ID NO: 92111 - DNA, 7 bp, Unknown
  misc_feature (1)..( 7): Result.001 file - promoters60/1012791
accacag

SEQ ID NO: 92112 - DNA, 8 bp, Unknown
  misc_feature (1)..( 8): Result.001 file - promoters60/1012791
aaacaaaa

SEQ ID NO: 92113 - DNA, 8 bp, Unknown
  misc_feature (1)..( 8): Result.001 file - promoters60/1012791
aaaaaaaa

SEQ ID NO: 92114 - DNA, 6 bp, Unknown
  misc_feature (1)..( 6): Result.001 file - promoters60/1012791
aaaaaa

SEQ ID NO: 92115 - DNA, 6 bp, Unknown
  misc_feature (1)..( 6): Result.001 file - promoters60/1012791
aaaaaa

SEQ ID NO: 92116 - DNA, 7 bp, Unknown
  misc_feature (1)..( 7): Result.001 file - promoters60/1012791
aaagaag

SEQ ID NO: 92117 - DNA, 7 bp, Unknown
  misc_feature (1)..( 7): Result.001 file - promoters60/1012791
aaaaaag

SEQ ID NO: 92118 - DNA, 7 bp, Unknown
  misc_feature (1)..( 7): Result.001 file - promoters60/1012791
ttctttt

SEQ ID NO: 92119 - DNA, 7 bp, Unknown
  misc_feature (1)..( 7): Result.001 file - promoters60/1012791
ttctttt

SEQ ID NO: 92120 - DNA, 6 bp, Unknown
  misc_feature (1)..( 6): Result.001 file - promoters60/1012791
ataaag

SEQ ID NO: 92121 - DNA, 6 bp, Unknown
  misc_feature (1)..( 6): Result.001 file - promoters60/1012791
ataaag

SEQ ID NO: 92122 - DNA, 8 bp, Unknown
  misc_feature (1)..( 8): Result.001 file - promoters60/1012791
cttcgcaa

SEQ ID NO: 92123 - DNA, 8 bp, Unknown
  misc_feature (1)..( 8): Result.001 file - promoters60/1012791
cttctcaa

SEQ ID NO: 92124 - DNA, 8 bp, Unknown
  misc_feature (1)..( 8): Result.001 file - promoters60/1012791
tttaaaaa

SEQ ID NO: 92125 - DNA, 8 bp, Unknown
  misc_feature (1)..( 8): Result.001 file - promoters60/1012791
tttacaaa

SEQ ID NO: 92126 - DNA, 6 bp, Unknown
  misc_feature (1)..( 6): Result.001 file - promoters60/1012791
tcattt

SEQ ID NO: 92127 - DNA, 6 bp, Unknown
  misc_feature (1)..( 6): Result.001 file - promoters60/1012791
tcattt

SEQ ID NO: 92128 - DNA, 8 bp, Unknown
  misc_feature (1)..( 8): Result.001 file - promoters60/1012791
ttgtttca

SEQ ID NO: 92129 - DNA, 8 bp, Unknown
  misc_feature (1)..( 8): Result.001 file - promoters60/1012791
ttgtttca

SEQ ID NO: 92130 - DNA, 8 bp, Unknown
  misc_feature (1)..( 8): Result.001 file - promoters60/1012791
tctatata

SEQ ID NO: 92131 - DNA, 8 bp, Unknown
  misc_feature (1)..( 8): Result.001 file - promoters60/1012791
tctatata

SEQ ID NO: 92132 - DNA, 6 bp, Unknown
  misc_feature (1)..( 6): Result.001 file - promoters60/1012791
aagata

SEQ ID NO: 92133 - DNA, 6 bp, Unknown
  misc_feature (1)..( 6): Result.001 file - promoters60/1012791
aagata

SEQ ID NO: 92134 - DNA, 11 bp, Unknown
  misc_feature (1)..( 11): Result.001 file - promoters60/1012791
atccaccaccg

SEQ ID NO: 92135 - DNA, 11 bp, Unknown
  misc_feature (1)..( 11): Result.001 file - promoters60/1012883
atccaccaccg

SEQ ID NO: 92136 - DNA, 10 bp, Unknown
  misc_feature (1)..( 10): Result.001 file - promoters60/1012883
gtatatatta

SEQ ID NO: 92137 - DNA, 10 bp, Unknown
  misc_feature (1)..( 10): Result.001 file - promoters60/1012883
gtagatattt

SEQ ID NO: 92138 - DNA, 10 bp, Unknown
  misc_feature (1)..( 10): Result.001 file - promoters60/1012883
gaataaattg

SEQ ID NO: 92139 - DNA, 11 bp, Unknown
  misc_feature (1)..( 11): Result.001 file - promoters60/1012883
gcagatactta

SEQ ID NO: 92140 - DNA, 8 bp, Unknown
  misc_feature (1)..( 8): Result.001 file - promoters60/1012883
tgaagaaa

SEQ ID NO: 92141 - DNA, 8 bp, Unknown
  misc_feature (1)..( 8): Result.001 file - promoters60/1012883
tgatgaat

SEQ ID NO: 92142 - DNA, 8 bp, Unknown
  misc_feature (1)..( 8): Result.001 file - promoters60/1012883
tgatgaat

SEQ ID NO: 92143 - DNA, 8 bp, Unknown
  misc_feature (1)..( 8): Result.001 file - promoters60/1012883
ggataaat

SEQ ID NO: 92144 - DNA, 8 bp, Unknown
  misc_feature (1)..( 8): Result.001 file - promoters60/1012883
agataaaa

SEQ ID NO: 92145 - DNA, 10 bp, Unknown
  misc_feature (1)..( 10): Result.001 file - promoters60/1012883
ttacaaaaag

SEQ ID NO: 92146 - DNA, 10 bp, Unknown
  misc_feature (1)..( 10): Result.001 file - promoters60/1012883
ttagaaaaaa

SEQ ID NO: 92147 - DNA, 10 bp, Unknown
  misc_feature (1)..( 10): Result.001 file - promoters60/1012883
ttataaaaca

SEQ ID NO: 92148 - DNA, 10 bp, Unknown
  misc_feature (1)..( 10): Result.001 file - promoters60/1012883
aaggaaaaaa

SEQ ID NO: 92149 - DNA, 11 bp, Unknown
  misc_feature (1)..( 11): Result.001 file - promoters60/1012883
ccgtacacgtg

SEQ ID NO: 92150 - DNA, 11 bp, Unknown
  misc_feature (1)..( 11): Result.001 file - promoters60/1012883
aggtacacgtg

SEQ ID NO: 92151 - DNA, 11 bp, Unknown
  misc_feature (1)..( 11): Result.001 file - promoters60/1012883
cggttcacgtc

SEQ ID NO: 92152 - DNA, 11 bp, Unknown
  misc_feature (1)..( 11): Result.001 file - promoters60/1012883
cggttcggatt

SEQ ID NO: 92153 - DNA, 9 bp, Unknown
  misc_feature (1)..( 9): Result.001 file - promoters60/1012883
gaaagattg

SEQ ID NO: 92154 - DNA, 9 bp, Unknown
  misc_feature (1)..( 9): Result.001 file - promoters60/1012883
taaagcttg

SEQ ID NO: 92155 - DNA, 9 bp, Unknown
  misc_feature (1)..( 9): Result.001 file - promoters60/1012883
taaaaattt

SEQ ID NO: 92156 - DNA, 9 bp, Unknown
  misc_feature (1)..( 9): Result.001 file - promoters60/1012883
taaaaagga

SEQ ID NO: 92157 - DNA, 9 bp, Unknown
  misc_feature (1)..( 9): Result.001 file - promoters60/1012883
tcccactaa

SEQ ID NO: 92158 - DNA, 9 bp, Unknown
  misc_feature (1)..( 9): Result.001 file - promoters60/1012883
aaccattaa

SEQ ID NO: 92159 - DNA, 9 bp, Unknown
  misc_feature (1)..( 9): Result.001 file - promoters60/1012883
aactattct

SEQ ID NO: 92160 - DNA, 9 bp, Unknown
  misc_feature (1)..( 9): Result.001 file - promoters60/1012883
gtccattag

SEQ ID NO: 92161 - DNA, 8 bp, Unknown
  misc_feature (1)..( 8): Result.001 file - promoters60/1012883
cagttttc

SEQ ID NO: 92162 - DNA, 8 bp, Unknown
  misc_feature (1)..( 8): Result.001 file - promoters60/1012883
tagttttg

SEQ ID NO: 92163 - DNA, 8 bp, Unknown
  misc_feature (1)..( 8): Result.001 file - promoters60/1012883
tcgttttg

SEQ ID NO: 92164 - DNA, 8 bp, Unknown
  misc_feature (1)..( 8): Result.001 file - promoters60/1012883
tagctttg

SEQ ID NO: 92165 - DNA, 14 bp, Unknown
  misc_feature (1)..( 14): Result.001 file - promoters60/1012883
tttgaatttgatga

SEQ ID NO: 92166 - DNA, 14 bp, Unknown
  misc_feature (1)..( 14): Result.001 file - promoters60/1012883
tttaaatgggccta

SEQ ID NO: 92167 - DNA, 14 bp, Unknown
  misc_feature (1)..( 14): Result.001 file - promoters60/1012883
tctgaatatgatga

SEQ ID NO: 92168 - DNA, 14 bp, Unknown
  misc_feature (1)..( 14): Result.001 file - promoters60/1012906
tttaaaatcacatc

SEQ ID NO: 92169 - DNA, 10 bp, Unknown
  misc_feature (1)..( 10): Result.001 file - promoters60/1012906
tgaagaaaaa

SEQ ID NO: 92170 - DNA, 10 bp, Unknown
  misc_feature (1)..( 10): Result.001 file - promoters60/1012906
taaagtaaat

SEQ ID NO: 92171 - DNA, 10 bp, Unknown
  misc_feature (1)..( 10): Result.001 file - promoters60/1012906
tgaagaaaaa

SEQ ID NO: 92172 - DNA, 12 bp, Unknown
  misc_feature (1)..( 12): Result.001 file - promoters60/1012906
aaaaaaatgttt

SEQ ID NO: 92173 - DNA, 12 bp, Unknown
  misc_feature (1)..( 12): Result.001 file - promoters60/1012906
acacgaatattt

SEQ ID NO: 92174 - DNA, 12 bp, Unknown
  misc_feature (1)..( 12): Result.001 file - promoters60/1012906
aaaaacatgttg

SEQ ID NO: 92175 - DNA, 8 bp, Unknown
  misc_feature (1)..( 8): Result.001 file - promoters60/1012906
ttaaaaaa

SEQ ID NO: 92176 - DNA, 8 bp, Unknown
  misc_feature (1)..( 8): Result.001 file - promoters60/1012906
agaaaaaa

SEQ ID NO: 92177 - DNA, 8 bp, Unknown
  misc_feature (1)..( 8): Result.001 file - promoters60/1012906
ttaaaaaa

SEQ ID NO: 92178 - DNA, 8 bp, Unknown
  misc_feature (1)..( 8): Result.001 file - promoters60/1012906
ttataaat

SEQ ID NO: 92179 - DNA, 15 bp, Unknown
  misc_feature (1)..( 15): Result.001 file - promoters60/1012906
agttaaaaaatcttg

SEQ ID NO: 92180 - DNA, 15 bp, Unknown
  misc_feature (1)..( 15): Result.001 file - promoters60/1012906
agcatcttaattttg

SEQ ID NO: 92181 - DNA, 15 bp, Unknown
  misc_feature (1)..( 15): Result.001 file - promoters60/1012906
agtaaaaaaatcttg

SEQ ID NO: 92182 - DNA, 15 bp, Unknown
  misc_feature (1)..( 15): Result.001 file - promoters60/1012906
tttaaaaaaaaaaag

SEQ ID NO: 92183 - DNA, 9 bp, Unknown
  misc_feature (1)..( 9): Result.001 file - promoters60/1012906
ataatatct

SEQ ID NO: 92184 - DNA, 9 bp, Unknown
  misc_feature (1)..( 9): Result.001 file - promoters60/1012906
atattatcc

SEQ ID NO: 92185 - DNA, 9 bp, Unknown
  misc_feature (1)..( 9): Result.001 file - promoters60/1012906
aacatatct

SEQ ID NO: 92186 - DNA, 11 bp, Unknown
  misc_feature (1)..( 11): Result.001 file - promoters60/1012906
tatctgaaata

SEQ ID NO: 92187 - DNA, 11 bp, Unknown
  misc_feature (1)..( 11): Result.001 file - promoters60/1012906
gaattgatata

SEQ ID NO: 92188 - DNA, 11 bp, Unknown
  misc_feature (1)..( 11): Result.001 file - promoters60/1012906
gaatttataaa

SEQ ID NO: 92189 - DNA, 9 bp, Unknown
  misc_feature (1)..( 9): Result.001 file - promoters60/1012906
aaaatccat

SEQ ID NO: 92190 - DNA, 9 bp, Unknown
  misc_feature (1)..( 9): Result.001 file - promoters60/1012906
aaagtccaa

SEQ ID NO: 92191 - DNA, 9 bp, Unknown
  misc_feature (1)..( 9): Result.001 file - promoters60/1012906
aatatccat

SEQ ID NO: 92192 - DNA, 7 bp, Unknown
  misc_feature (1)..( 7): Result.001 file - promoters60/1012906
ctatata

SEQ ID NO: 92193 - DNA, 7 bp, Unknown
  misc_feature (1)..( 7): Result.001 file - promoters60/1012906
atatata

SEQ ID NO: 92194 - DNA, 7 bp, Unknown
  misc_feature (1)..( 7): Result.001 file - promoters60/1012906
ctatata

SEQ ID NO: 92195 - DNA, 10 bp, Unknown
  misc_feature (1)..( 10): Result.001 file - promoters60/1012906
ctgaaatatt

SEQ ID NO: 92196 - DNA, 10 bp, Unknown
  misc_feature (1)..( 10): Result.001 file - promoters60/1012906
ttgacatatt

SEQ ID NO: 92197 - DNA, 10 bp, Unknown
  misc_feature (1)..( 10): Result.001 file - promoters60/1012906
ttgacttatt

SEQ ID NO: 92198 - DNA, 9 bp, Unknown
  misc_feature (1)..( 9): Result.001 file - promoters60/1012906
atattataa

SEQ ID NO: 92199 - DNA, 9 bp, Unknown
  misc_feature (1)..( 9): Result.001 file - promoters60/1012906
aatttataa

SEQ ID NO: 92200 - DNA, 10 bp, Unknown
  misc_feature (1)..( 10): Result.001 file - promoters60/1012906
gaattgatat

SEQ ID NO: 92201 - DNA, 10 bp, Unknown
  misc_feature (1)..( 10): Result.001 file - promoters60/1012906
agaattagaa

SEQ ID NO: 92202 - DNA, 10 bp, Unknown
  misc_feature (1)..( 10): Result.001 file - promoters60/1012906
agaatttata

SEQ ID NO: 92203 - DNA, 10 bp, Unknown
  misc_feature (1)..( 10): Result.001 file - promoters60/1012906
tgaattgata

SEQ ID NO: 92204 - DNA, 9 bp, Unknown
  misc_feature (1)..( 9): Result.001 file - promoters60/1012906
tatattatt

SEQ ID NO: 92205 - DNA, 9 bp, Unknown
  misc_feature (1)..( 9): Result.001 file - promoters60/1012906
ccaattatt

SEQ ID NO: 92206 - DNA, 9 bp, Unknown
  misc_feature (1)..( 9): Result.001 file - promoters60/1012906
ccaataatt

SEQ ID NO: 92207 - DNA, 9 bp, Unknown
  misc_feature (1)..( 9): Result.001 file - promoters60/1012906
gaattgata

SEQ ID NO: 92208 - DNA, 9 bp, Unknown
  misc_feature (1)..( 9): Result.001 file - promoters60/1012906
gaagtgaag

SEQ ID NO: 92209 - DNA, 9 bp, Unknown
  misc_feature (1)..( 9): Result.001 file - promoters60/1012906
gaatttata

SEQ ID NO: 92210 - DNA, 9 bp, Unknown
  misc_feature (1)..( 9): Result.001 file - promoters60/1012906
taatcgtat

SEQ ID NO: 92211 - DNA, 9 bp, Unknown
  misc_feature (1)..( 9): Result.001 file - promoters60/1012906
aaatcatat

SEQ ID NO: 92212 - DNA, 9 bp, Unknown
  misc_feature (1)..( 9): Result.001 file - promoters60/1012912
aaataataa

SEQ ID NO: 92213 - DNA, 12 bp, Unknown
  misc_feature (1)..( 12): Result.001 file - promoters60/1012912
tttgaaaatata

SEQ ID NO: 92214 - DNA, 12 bp, Unknown
  misc_feature (1)..( 12): Result.001 file - promoters60/1012912
atgagaaagata

SEQ ID NO: 92215 - DNA, 12 bp, Unknown
  misc_feature (1)..( 12): Result.001 file - promoters60/1012912
tttgtaaataga

SEQ ID NO: 92216 - DNA, 12 bp, Unknown
  misc_feature (1)..( 12): Result.001 file - promoters60/1012912
cattgaaagaga

SEQ ID NO: 92217 - DNA, 12 bp, Unknown
  misc_feature (1)..( 12): Result.001 file - promoters60/1012912
acgaggaagatt

SEQ ID NO: 92218 - DNA, 8 bp, Unknown
  misc_feature (1)..( 8): Result.001 file - promoters60/1012912
atatcttc

SEQ ID NO: 92219 - DNA, 8 bp, Unknown
  misc_feature (1)..( 8): Result.001 file - promoters60/1012912
atatctag

SEQ ID NO: 92220 - DNA, 8 bp, Unknown
  misc_feature (1)..( 8): Result.001 file - promoters60/1012912
atatattc

SEQ ID NO: 92221 - DNA, 8 bp, Unknown
  misc_feature (1)..( 8): Result.001 file - promoters60/1012912
atagctat

SEQ ID NO: 92222 - DNA, 8 bp, Unknown
  misc_feature (1)..( 8): Result.001 file - promoters60/1012943
atagctgg

SEQ ID NO: 92223 - DNA, 12 bp, Unknown
  misc_feature (1)..( 12): Result.001 file - promoters60/1012943
ttaaaaataaat

SEQ ID NO: 92224 - DNA, 12 bp, Unknown
  misc_feature (1)..( 12): Result.001 file - promoters60/1012943
aagaaaataaat

SEQ ID NO: 92225 - DNA, 13 bp, Unknown
  misc_feature (1)..( 13): Result.001 file - promoters60/1012943
attaaagatatag

SEQ ID NO: 92226 - DNA, 13 bp, Unknown
  misc_feature (1)..( 13): Result.001 file - promoters60/1012943
aaaaaaaataaaa

SEQ ID NO: 92227 - DNA, 13 bp, Unknown
  misc_feature (1)..( 13): Result.001 file - promoters60/1012943
tataagtataaat

SEQ ID NO: 92228 - DNA, 14 bp, Unknown
  misc_feature (1)..( 14): Result.001 file - promoters60/1012943
tcaaaatgacaaaa

SEQ ID NO: 92229 - DNA, 14 bp, Unknown
  misc_feature (1)..( 14): Result.001 file - promoters60/1012943
tcacaatttagatt

SEQ ID NO: 92230 - DNA, 14 bp, Unknown
  misc_feature (1)..( 14): Result.001 file - promoters60/1012943
ccaaaatgaaaggt

SEQ ID NO: 92231 - DNA, 14 bp, Unknown
  misc_feature (1)..( 14): Result.001 file - promoters60/1012943
tgaaaaagaaaaag

SEQ ID NO: 92232 - DNA, 14 bp, Unknown
  misc_feature (1)..( 14): Result.001 file - promoters60/1012943
agaaaagaaatatg

SEQ ID NO: 92233 - DNA, 14 bp, Unknown
  misc_feature (1)..( 14): Result.001 file - promoters60/1012943
gggaaatgaaatat

SEQ ID NO: 92234 - DNA, 13 bp, Unknown
  misc_feature (1)..( 13): Result.001 file - promoters60/1012943
ataaaagataagt

SEQ ID NO: 92235 - DNA, 13 bp, Unknown
  misc_feature (1)..( 13): Result.001 file - promoters60/1012943
ttaaaatatagat

SEQ ID NO: 92236 - DNA, 13 bp, Unknown
  misc_feature (1)..( 13): Result.001 file - promoters60/1012943
atttaatataagt

SEQ ID NO: 92237 - DNA, 13 bp, Unknown
  misc_feature (1)..( 13): Result.001 file - promoters60/1012943
aaaaaaaataaaa

SEQ ID NO: 92238 - DNA, 13 bp, Unknown
  misc_feature (1)..( 13): Result.001 file - promoters60/1012943
taagaaaataaat

SEQ ID NO: 92239 - DNA, 12 bp, Unknown
  misc_feature (1)..( 12): Result.001 file - promoters60/1012943
gataagtaaagt

SEQ ID NO: 92240 - DNA, 12 bp, Unknown
  misc_feature (1)..( 12): Result.001 file - promoters60/1012943
aaaaagaaaaaa

SEQ ID NO: 92241 - DNA, 12 bp, Unknown
  misc_feature (1)..( 12): Result.001 file - promoters60/1012943
tgaaagaaaatc

SEQ ID NO: 92242 - DNA, 12 bp, Unknown
  misc_feature (1)..( 12): Result.001 file - promoters60/1012943
gaaaagaaatat

SEQ ID NO: 92243 - DNA, 12 bp, Unknown
  misc_feature (1)..( 12): Result.001 file - promoters60/1012943
gaaatgaaatat

SEQ ID NO: 92244 - DNA, 10 bp, Unknown
  misc_feature (1)..( 10): Result.001 file - promoters60/1012943
tttagataag

SEQ ID NO: 92245 - DNA, 10 bp, Unknown
  misc_feature (1)..( 10): Result.001 file - promoters60/1012943
aaaagaaaag

SEQ ID NO: 92246 - DNA, 10 bp, Unknown
  misc_feature (1)..( 10): Result.001 file - promoters60/1012943
accagaaaag

SEQ ID NO: 92247 - DNA, 10 bp, Unknown
  misc_feature (1)..( 10): Result.001 file - promoters60/1012943
aaatgaaata

SEQ ID NO: 92248 - DNA, 10 bp, Unknown
  misc_feature (1)..( 10): Result.001 file - promoters60/1012943
gaaagaaaat

SEQ ID NO: 92249 - DNA, 10 bp, Unknown
  misc_feature (1)..( 10): Result.001 file - promoters60/1012943
caccaataga

SEQ ID NO: 92250 - DNA, 10 bp, Unknown
  misc_feature (1)..( 10): Result.001 file - promoters60/1012943
caccaaaaaa

SEQ ID NO: 92251 - DNA, 10 bp, Unknown
  misc_feature (1)..( 10): Result.001 file - promoters60/1012943
caccaaaccc

SEQ ID NO: 92252 - DNA, 11 bp, Unknown
  misc_feature (1)..( 11): Result.001 file - promoters60/1012943
aaccgaaaaaa

SEQ ID NO: 92253 - DNA, 11 bp, Unknown
  misc_feature (1)..( 11): Result.001 file - promoters60/1012943
gtttgaaaaaa

SEQ ID NO: 92254 - DNA, 12 bp, Unknown
  misc_feature (1)..( 12): Result.001 file - promoters60/1012943
gtaaattcattg

SEQ ID NO: 92255 - DNA, 12 bp, Unknown
  misc_feature (1)..( 12): Result.001 file - promoters60/1012943
ttaaattatttt

SEQ ID NO: 92256 - DNA, 12 bp, Unknown
  misc_feature (1)..( 12): Result.001 file - promoters60/1012943
ccaaatgatttg

SEQ ID NO: 92257 - DNA, 12 bp, Unknown
  misc_feature (1)..( 12): Result.001 file - promoters60/1012943
ttccatgatttg

SEQ ID NO: 92258 - DNA, 12 bp, Unknown
  misc_feature (1)..( 12): Result.001 file - promoters60/1012984
ttacattttaca

SEQ ID NO: 92259 - DNA, 8 bp, Unknown
  misc_feature (1)..( 8): Result.001 file - promoters60/1012984
tttgtgaa

SEQ ID NO: 92260 - DNA, 8 bp, Unknown
  misc_feature (1)..( 8): Result.001 file - promoters60/1012984
tttttgaa

SEQ ID NO: 92261 - DNA, 12 bp, Unknown
  misc_feature (1)..( 12): Result.001 file - promoters60/1012984
aatagacataga

SEQ ID NO: 92262 - DNA, 12 bp, Unknown
  misc_feature (1)..( 12): Result.001 file - promoters60/1012984
ggtagagataga

SEQ ID NO: 92263 - DNA, 12 bp, Unknown
  misc_feature (1)..( 12): Result.001 file - promoters60/1012984
ggtggagagagg

SEQ ID NO: 92264 - DNA, 8 bp, Unknown
  misc_feature (1)..( 8): Result.001 file - promoters60/1012984
ttgatatt

SEQ ID NO: 92265 - DNA, 8 bp, Unknown
  misc_feature (1)..( 8): Result.001 file - promoters60/1012984
ttgaaatt

SEQ ID NO: 92266 - DNA, 7 bp, Unknown
  misc_feature (1)..( 7): Result.001 file - promoters60/1012984
tggattt

SEQ ID NO: 92267 - DNA, 7 bp, Unknown
  misc_feature (1)..( 7): Result.001 file - promoters60/1012984
tggtttt

SEQ ID NO: 92268 - DNA, 8 bp, Unknown
  misc_feature (1)..( 8): Result.001 file - promoters60/1012984
tgaaattt

SEQ ID NO: 92269 - DNA, 8 bp, Unknown
  misc_feature (1)..( 8): Result.001 file - promoters60/1012984
tgaaattt

SEQ ID NO: 92270 - DNA, 6 bp, Unknown
  misc_feature (1)..( 6): Result.001 file - promoters60/1012984
atacag

SEQ ID NO: 92271 - DNA, 6 bp, Unknown
  misc_feature (1)..( 6): Result.001 file - promoters60/1012984
atacag

SEQ ID NO: 92272 - DNA, 7 bp, Unknown
  misc_feature (1)..( 7): Result.001 file - promoters60/1012984
cggtttg

SEQ ID NO: 92273 - DNA, 7 bp, Unknown
  misc_feature (1)..( 7): Result.001 file - promoters60/1013121
cggtttg

SEQ ID NO: 92274 - DNA, 9 bp, Unknown
  misc_feature (1)..( 9): Result.001 file - promoters60/1013121
gaaaagaaa

SEQ ID NO: 92275 - DNA, 9 bp, Unknown
  misc_feature (1)..( 9): Result.001 file - promoters60/1013121
caaaacaaa

SEQ ID NO: 92276 - DNA, 9 bp, Unknown
  misc_feature (1)..( 9): Result.001 file - promoters60/1013121
gaaacgaaa

SEQ ID NO: 92277 - DNA, 9 bp, Unknown
  misc_feature (1)..( 9): Result.001 file - promoters60/1013121
gaaaagtct

SEQ ID NO: 92278 - DNA, 12 bp, Unknown
  misc_feature (1)..( 12): Result.001 file - promoters60/1013121
ttaaatttaaac

SEQ ID NO: 92279 - DNA, 12 bp, Unknown
  misc_feature (1)..( 12): Result.001 file - promoters60/1013121
tccaatctaaac

SEQ ID NO: 92280 - DNA, 12 bp, Unknown
  misc_feature (1)..( 12): Result.001 file - promoters60/1013121
agtaatttttgg

SEQ ID NO: 92281 - DNA, 12 bp, Unknown
  misc_feature (1)..( 12): Result.001 file - promoters60/1013121
aaatattcaaag

SEQ ID NO: 92282 - DNA, 12 bp, Unknown
  misc_feature (1)..( 12): Result.001 file - promoters60/1013121
tccaatctgcta

SEQ ID NO: 92283 - DNA, 10 bp, Unknown
  misc_feature (1)..( 10): Result.001 file - promoters60/1013121
gatttctgat

SEQ ID NO: 92284 - DNA, 10 bp, Unknown
  misc_feature (1)..( 10): Result.001 file - promoters60/1013121
gatttcagtt

SEQ ID NO: 92285 - DNA, 10 bp, Unknown
  misc_feature (1)..( 10): Result.001 file - promoters60/1013121
tatttaattt

SEQ ID NO: 92286 - DNA, 10 bp, Unknown
  misc_feature (1)..( 10): Result.001 file - promoters60/1013128
gatttaacaa

SEQ ID NO: 92287 - DNA, 9 bp, Unknown
  misc_feature (1)..( 9): Result.001 file - promoters60/1013128
gtatatata

SEQ ID NO: 92288 - DNA, 9 bp, Unknown
  misc_feature (1)..( 9): Result.001 file - promoters60/1013128
atatataaa

SEQ ID NO: 92289 - DNA, 9 bp, Unknown
  misc_feature (1)..( 9): Result.001 file - promoters60/1013128
ctataaata

SEQ ID NO: 92290 - DNA, 9 bp, Unknown
  misc_feature (1)..( 9): Result.001 file - promoters60/1013128
atataaagg

SEQ ID NO: 92291 - DNA, 13 bp, Unknown
  misc_feature (1)..( 13): Result.001 file - promoters60/1013128
gactaaaataaag

SEQ ID NO: 92292 - DNA, 13 bp, Unknown
  misc_feature (1)..( 13): Result.001 file - promoters60/1013128
tgaaaaaatagtt

SEQ ID NO: 92293 - DNA, 13 bp, Unknown
  misc_feature (1)..( 13): Result.001 file - promoters60/1013128
agagaaaaaaaag

SEQ ID NO: 92294 - DNA, 13 bp, Unknown
  misc_feature (1)..( 13): Result.001 file - promoters60/1013190
agagaaaggaaga

SEQ ID NO: 92295 - DNA, 8 bp, Unknown
  misc_feature (1)..( 8): Result.001 file - promoters60/1013190
taattaaa

SEQ ID NO: 92296 - DNA, 8 bp, Unknown
  misc_feature (1)..( 8): Result.001 file - promoters60/1013190
gaattaaa

SEQ ID NO: 92297 - DNA, 8 bp, Unknown
  misc_feature (1)..( 8): Result.001 file - promoters60/1013190
gaattacc

SEQ ID NO: 92298 - DNA, 8 bp, Unknown
  misc_feature (1)..( 8): Result.001 file - promoters60/1013190
aaaaaaaa

SEQ ID NO: 92299 - DNA, 8 bp, Unknown
  misc_feature (1)..( 8): Result.001 file - promoters60/1013190
aaaataaa

SEQ ID NO: 92300 - DNA, 7 bp, Unknown
  misc_feature (1)..( 7): Result.001 file - promoters60/1013190
attaaaa

SEQ ID NO: 92301 - DNA, 7 bp, Unknown
  misc_feature (1)..( 7): Result.001 file - promoters60/1013190
attaaaa

SEQ ID NO: 92302 - DNA, 8 bp, Unknown
  misc_feature (1)..( 8): Result.001 file - promoters60/1013190
ccaaagat

SEQ ID NO: 92303 - DNA, 8 bp, Unknown
  misc_feature (1)..( 8): Result.001 file - promoters60/1013190
ccaaagaa

SEQ ID NO: 92304 - DNA, 8 bp, Unknown
  misc_feature (1)..( 8): Result.001 file - promoters60/1013190
tgaaagaa

SEQ ID NO: 92305 - DNA, 7 bp, Unknown
  misc_feature (1)..( 7): Result.001 file - promoters60/1013190
tttattt

SEQ ID NO: 92306 - DNA, 7 bp, Unknown
  misc_feature (1)..( 7): Result.001 file - promoters60/1013190
tttattt

SEQ ID NO: 92307 - DNA, 7 bp, Unknown
  misc_feature (1)..( 7): Result.001 file - promoters60/1013190
ggtttta

SEQ ID NO: 92308 - DNA, 7 bp, Unknown
  misc_feature (1)..( 7): Result.001 file - promoters60/1013190
ggtatta

SEQ ID NO: 92309 - DNA, 6 bp, Unknown
  misc_feature (1)..( 6): Result.001 file - promoters60/1013190
taaaag

SEQ ID NO: 92310 - DNA, 6 bp, Unknown
  misc_feature (1)..( 6): Result.001 file - promoters60/1013190
taaaag

SEQ ID NO: 92311 - DNA, 6 bp, Unknown
  misc_feature (1)..( 6): Result.001 file - promoters60/1013190
aaaatt

SEQ ID NO: 92312 - DNA, 6 bp, Unknown
  misc_feature (1)..( 6): Result.001 file - promoters60/1013190
aaaatt

SEQ ID NO: 92313 - DNA, 9 bp, Unknown
  misc_feature (1)..( 9): Result.001 file - promoters60/1013190
gaatattat

SEQ ID NO: 92314 - DNA, 9 bp, Unknown
  misc_feature (1)..( 9): Result.001 file - promoters60/1013190
gaatatctt

SEQ ID NO: 92315 - DNA, 9 bp, Unknown
  misc_feature (1)..( 9): Result.001 file - promoters60/1013190
gaaaaaata

SEQ ID NO: 92316 - DNA, 6 bp, Unknown
  misc_feature (1)..( 6): Result.001 file - promoters60/1013190
tgaaat

SEQ ID NO: 92317 - DNA, 6 bp, Unknown
  misc_feature (1)..( 6): Result.001 file - promoters60/1013190
tgaaat

SEQ ID NO: 92318 - DNA, 8 bp, Unknown
  misc_feature (1)..( 8): Result.001 file - promoters60/1013190
aattatta

SEQ ID NO: 92319 - DNA, 8 bp, Unknown
  misc_feature (1)..( 8): Result.001 file - promoters60/1013190
aataatta

SEQ ID NO: 92320 - DNA, 6 bp, Unknown
  misc_feature (1)..( 6): Result.001 file - promoters60/1013190
agttct

SEQ ID NO: 92321 - DNA, 6 bp, Unknown
  misc_feature (1)..( 6): Result.001 file - promoters60/1013190
agttct

SEQ ID NO: 92322 - DNA, 7 bp, Unknown
  misc_feature (1)..( 7): Result.001 file - promoters60/1013190
tataaac

SEQ ID NO: 92323 - DNA, 7 bp, Unknown
  misc_feature (1)..( 7): Result.001 file - promoters60/1013190
tattaac

SEQ ID NO: 92324 - DNA, 6 bp, Unknown
  misc_feature (1)..( 6): Result.001 file - promoters60/1013190
aaacat

SEQ ID NO: 92325 - DNA, 6 bp, Unknown
  misc_feature (1)..( 6): Result.001 file - promoters60/1013190
aaacat

SEQ ID NO: 92326 - DNA, 8 bp, Unknown
  misc_feature (1)..( 8): Result.001 file - promoters60/1013190
tttagctt

SEQ ID NO: 92327 - DNA, 8 bp, Unknown
  misc_feature (1)..( 8): Result.001 file - promoters60/1013190
tttatctt

SEQ ID NO: 92328 - DNA, 6 bp, Unknown
  misc_feature (1)..( 6): Result.001 file - promoters60/1013190
gcggaa

SEQ ID NO: 92329 - DNA, 6 bp, Unknown
  misc_feature (1)..( 6): Result.001 file - promoters60/1013190
gcggaa

SEQ ID NO: 92330 - DNA, 7 bp, Unknown
  misc_feature (1)..( 7): Result.001 file - promoters60/1013190
tattttc

SEQ ID NO: 92331 - DNA, 7 bp, Unknown
  misc_feature (1)..( 7): Result.001 file - promoters60/1013190
tatcttc

SEQ ID NO: 92332 - DNA, 6 bp, Unknown
  misc_feature (1)..( 6): Result.001 file - promoters60/1013190
tccttg

SEQ ID NO: 92333 - DNA, 6 bp, Unknown
  misc_feature (1)..( 6): Result.001 file - promoters60/1013190
tccttg

SEQ ID NO: 92334 - DNA, 7 bp, Unknown
  misc_feature (1)..( 7): Result.001 file - promoters60/1013190
gatatat

SEQ ID NO: 92335 - DNA, 7 bp, Unknown
  misc_feature (1)..( 7): Result.001 file - promoters60/1013208
gatgtat

SEQ ID NO: 92336 - DNA, 10 bp, Unknown
  misc_feature (1)..( 10): Result.001 file - promoters60/1013208
ctttcaattg

SEQ ID NO: 92337 - DNA, 10 bp, Unknown
  misc_feature (1)..( 10): Result.001 file - promoters60/1013208
agttccattt

SEQ ID NO: 92338 - DNA, 10 bp, Unknown
  misc_feature (1)..( 10): Result.001 file - promoters60/1013208
atttaaatcc

SEQ ID NO: 92339 - DNA, 10 bp, Unknown
  misc_feature (1)..( 10): Result.001 file - promoters60/1013208
ctttcatttg

SEQ ID NO: 92340 - DNA, 10 bp, Unknown
  misc_feature (1)..( 10): Result.001 file - promoters60/1013208
gctacatttg

SEQ ID NO: 92341 - DNA, 10 bp, Unknown
  misc_feature (1)..( 10): Result.001 file - promoters60/1013208
aattaaatca

SEQ ID NO: 92342 - DNA, 10 bp, Unknown
  misc_feature (1)..( 10): Result.001 file - promoters60/1013208
aaataaatcg

SEQ ID NO: 92343 - DNA, 12 bp, Unknown
  misc_feature (1)..( 12): Result.001 file - promoters60/1013208
aaatgaaaaatg

SEQ ID NO: 92344 - DNA, 12 bp, Unknown
  misc_feature (1)..( 12): Result.001 file - promoters60/1013208
aaaagaaattat

SEQ ID NO: 92345 - DNA, 12 bp, Unknown
  misc_feature (1)..( 12): Result.001 file - promoters60/1013208
aaatcaaattta

SEQ ID NO: 92346 - DNA, 12 bp, Unknown
  misc_feature (1)..( 12): Result.001 file - promoters60/1013208
ctatcaaaatta

SEQ ID NO: 92347 - DNA, 12 bp, Unknown
  misc_feature (1)..( 12): Result.001 file - promoters60/1013208
aaatttaaaaat

SEQ ID NO: 92348 - DNA, 12 bp, Unknown
  misc_feature (1)..( 12): Result.001 file - promoters60/1013208
gattgaaatcat

SEQ ID NO: 92349 - DNA, 9 bp, Unknown
  misc_feature (1)..( 9): Result.001 file - promoters60/1013208
gaataaaaa

SEQ ID NO: 92350 - DNA, 9 bp, Unknown
  misc_feature (1)..( 9): Result.001 file - promoters60/1013208
taataaaaa

SEQ ID NO: 92351 - DNA, 9 bp, Unknown
  misc_feature (1)..( 9): Result.001 file - promoters60/1013208
taatcaaat

SEQ ID NO: 92352 - DNA, 9 bp, Unknown
  misc_feature (1)..( 9): Result.001 file - promoters60/1013208
ctatagaaa

SEQ ID NO: 92353 - DNA, 9 bp, Unknown
  misc_feature (1)..( 9): Result.001 file - promoters60/1013208
gaacaaaga

SEQ ID NO: 92354 - DNA, 9 bp, Unknown
  misc_feature (1)..( 9): Result.001 file - promoters60/1013208
tcataaaat

SEQ ID NO: 92355 - DNA, 11 bp, Unknown
  misc_feature (1)..( 11): Result.001 file - promoters60/1013208
attttaatctc

SEQ ID NO: 92356 - DNA, 11 bp, Unknown
  misc_feature (1)..( 11): Result.001 file - promoters60/1013208
tttttattcta

SEQ ID NO: 92357 - DNA, 11 bp, Unknown
  misc_feature (1)..( 11): Result.001 file - promoters60/1013208
attttatcttt

SEQ ID NO: 92358 - DNA, 11 bp, Unknown
  misc_feature (1)..( 11): Result.001 file - promoters60/1013208
gttgtattcta

SEQ ID NO: 92359 - DNA, 11 bp, Unknown
  misc_feature (1)..( 11): Result.001 file - promoters60/1013208
tctttgttcaa

SEQ ID NO: 92360 - DNA, 11 bp, Unknown
  misc_feature (1)..( 11): Result.001 file - promoters60/1013208
caattaatctc

SEQ ID NO: 92361 - DNA, 11 bp, Unknown
  misc_feature (1)..( 11): Result.001 file - promoters60/1013208
tttttacggcg

SEQ ID NO: 92362 - DNA, 9 bp, Unknown
  misc_feature (1)..( 9): Result.001 file - promoters60/1013208
tgaaaaatg

SEQ ID NO: 92363 - DNA, 9 bp, Unknown
  misc_feature (1)..( 9): Result.001 file - promoters60/1013208
ttaaaaata

SEQ ID NO: 92364 - DNA, 9 bp, Unknown
  misc_feature (1)..( 9): Result.001 file - promoters60/1013208
ttataaacc

SEQ ID NO: 92365 - DNA, 9 bp, Unknown
  misc_feature (1)..( 9): Result.001 file - promoters60/1013208
gcaaaaata

SEQ ID NO: 92366 - DNA, 9 bp, Unknown
  misc_feature (1)..( 9): Result.001 file - promoters60/1013208
ttaaaaatt

SEQ ID NO: 92367 - DNA, 9 bp, Unknown
  misc_feature (1)..( 9): Result.001 file - promoters60/1013208
atcaaaatt

SEQ ID NO: 92368 - DNA, 11 bp, Unknown
  misc_feature (1)..( 11): Result.001 file - promoters60/1013208
aggaaagtaat

SEQ ID NO: 92369 - DNA, 11 bp, Unknown
  misc_feature (1)..( 11): Result.001 file - promoters60/1013208
gttaaattaac

SEQ ID NO: 92370 - DNA, 11 bp, Unknown
  misc_feature (1)..( 11): Result.001 file - promoters60/1013208
catgaagaaat

SEQ ID NO: 92371 - DNA, 11 bp, Unknown
  misc_feature (1)..( 11): Result.001 file - promoters60/1013208
acgaaaaaaac

SEQ ID NO: 92372 - DNA, 11 bp, Unknown
  misc_feature (1)..( 11): Result.001 file - promoters60/1013208
aagaaataaat

SEQ ID NO: 92373 - DNA, 11 bp, Unknown
  misc_feature (1)..( 11): Result.001 file - promoters60/1013208
aataaattaaa

SEQ ID NO: 92374 - DNA, 11 bp, Unknown
  misc_feature (1)..( 11): Result.001 file - promoters60/1013208
aaatttgttgt

SEQ ID NO: 92375 - DNA, 11 bp, Unknown
  misc_feature (1)..( 11): Result.001 file - promoters60/1013208
ttctttgttca

SEQ ID NO: 92376 - DNA, 11 bp, Unknown
  misc_feature (1)..( 11): Result.001 file - promoters60/1013208
aaatatgttaa

SEQ ID NO: 92377 - DNA, 11 bp, Unknown
  misc_feature (1)..( 11): Result.001 file - promoters60/1013208
atttttattct

SEQ ID NO: 92378 - DNA, 11 bp, Unknown
  misc_feature (1)..( 11): Result.001 file - promoters60/1013208
tcaattaatct

SEQ ID NO: 92379 - DNA, 11 bp, Unknown
  misc_feature (1)..( 11): Result.001 file - promoters60/1013208
taaataaataa

SEQ ID NO: 92380 - DNA, 11 bp, Unknown
  misc_feature (1)..( 11): Result.001 file - promoters60/1013208
tactatgttgc

SEQ ID NO: 92381 - DNA, 9 bp, Unknown
  misc_feature (1)..( 9): Result.001 file - promoters60/1013208
atagttaag

SEQ ID NO: 92382 - DNA, 9 bp, Unknown
  misc_feature (1)..( 9): Result.001 file - promoters60/1013208
atatttagg

SEQ ID NO: 92383 - DNA, 9 bp, Unknown
  misc_feature (1)..( 9): Result.001 file - promoters60/1013208
ataattaaa

SEQ ID NO: 92384 - DNA, 9 bp, Unknown
  misc_feature (1)..( 9): Result.001 file - promoters60/1013208
gtaataaaa

SEQ ID NO: 92385 - DNA, 9 bp, Unknown
  misc_feature (1)..( 9): Result.001 file - promoters60/1013208
aaaattaaa

SEQ ID NO: 92386 - DNA, 9 bp, Unknown
  misc_feature (1)..( 9): Result.001 file - promoters60/1013208
caaataaaa

SEQ ID NO: 92387 - DNA, 8 bp, Unknown
  misc_feature (1)..( 8): Result.001 file - promoters60/1013208
caaaaaag

SEQ ID NO: 92388 - DNA, 8 bp, Unknown
  misc_feature (1)..( 8): Result.001 file - promoters60/1013208
caaaaata

SEQ ID NO: 92389 - DNA, 8 bp, Unknown
  misc_feature (1)..( 8): Result.001 file - promoters60/1013208
taaaaaac

SEQ ID NO: 92390 - DNA, 8 bp, Unknown
  misc_feature (1)..( 8): Result.001 file - promoters60/1013208
taaaaatt

SEQ ID NO: 92391 - DNA, 8 bp, Unknown
  misc_feature (1)..( 8): Result.001 file - promoters60/1013208
gaaacact

SEQ ID NO: 92392 - DNA, 8 bp, Unknown
  misc_feature (1)..( 8): Result.001 file - promoters60/1013208
tcaaaatt

SEQ ID NO: 92393 - DNA, 13 bp, Unknown
  misc_feature (1)..( 13): Result.001 file - promoters60/1013208
ttcctaaaaagtg

SEQ ID NO: 92394 - DNA, 13 bp, Unknown
  misc_feature (1)..( 13): Result.001 file - promoters60/1013208
taaataaaaaaaa

SEQ ID NO: 92395 - DNA, 14 bp, Unknown
  misc_feature (1)..( 14): Result.001 file - promoters60/1013208
ggtttaataaataa

SEQ ID NO: 92396 - DNA, 14 bp, Unknown
  misc_feature (1)..( 14): Result.001 file - promoters60/1013208
gaagaaataaataa

SEQ ID NO: 92397 - DNA, 14 bp, Unknown
  misc_feature (1)..( 14): Result.001 file - promoters60/1013208
aaagaaataaatct

SEQ ID NO: 92398 - DNA, 14 bp, Unknown
  misc_feature (1)..( 14): Result.001 file - promoters60/1013208
aacgaaacaaattc

SEQ ID NO: 92399 - DNA, 17 bp, Unknown
  misc_feature (1)..( 17): Result.001 file - promoters60/1013208
acgaaaaaaacagagct

SEQ ID NO: 92400 - DNA, 17 bp, Unknown
  misc_feature (1)..( 17): Result.001 file - promoters60/1013208
acgaaacaaattcataa

SEQ ID NO: 92401 - DNA, 17 bp, Unknown
  misc_feature (1)..( 17): Result.001 file - promoters60/1013208
taaaaaaaaactttaaa

SEQ ID NO: 92402 - DNA, 17 bp, Unknown
  misc_feature (1)..( 17): Result.001 file - promoters60/1013208
aagaaataaataatttc

SEQ ID NO: 92403 - DNA, 17 bp, Unknown
  misc_feature (1)..( 17): Result.001 file - promoters60/1013208
aagaaataaatcttttt

SEQ ID NO: 92404 - DNA, 17 bp, Unknown
  misc_feature (1)..( 17): Result.001 file - promoters60/1013242
tttttgtccatctcttt

SEQ ID NO: 92405 - DNA, 10 bp, Unknown
  misc_feature (1)..( 10): Result.001 file - promoters60/1013242
ttataagttt

SEQ ID NO: 92406 - DNA, 10 bp, Unknown
  misc_feature (1)..( 10): Result.001 file - promoters60/1013242
ttttaaattt

SEQ ID NO: 92407 - DNA, 10 bp, Unknown
  misc_feature (1)..( 10): Result.001 file - promoters60/1013242
ttttacattt

SEQ ID NO: 92408 - DNA, 10 bp, Unknown
  misc_feature (1)..( 10): Result.001 file - promoters60/1013242
gtttaacaaa

SEQ ID NO: 92409 - DNA, 10 bp, Unknown
  misc_feature (1)..( 10): Result.001 file - promoters60/1013242
ttttgacaca

SEQ ID NO: 92410 - DNA, 10 bp, Unknown
  misc_feature (1)..( 10): Result.001 file - promoters60/1013242
gtctacatta

SEQ ID NO: 92411 - DNA, 12 bp, Unknown
  misc_feature (1)..( 12): Result.001 file - promoters60/1013242
atttttaaattt

SEQ ID NO: 92412 - DNA, 12 bp, Unknown
  misc_feature (1)..( 12): Result.001 file - promoters60/1013242
ctttttaaccgt

SEQ ID NO: 92413 - DNA, 12 bp, Unknown
  misc_feature (1)..( 12): Result.001 file - promoters60/1013242
aattttacattt

SEQ ID NO: 92414 - DNA, 12 bp, Unknown
  misc_feature (1)..( 12): Result.001 file - promoters60/1013242
ttgtttaacaaa

SEQ ID NO: 92415 - DNA, 12 bp, Unknown
  misc_feature (1)..( 12): Result.001 file - promoters60/1013242
ctttttgacaca

SEQ ID NO: 92416 - DNA, 12 bp, Unknown
  misc_feature (1)..( 12): Result.001 file - promoters60/1013274
tcgtctacatta

SEQ ID NO: 92417 - DNA, 13 bp, Unknown
  misc_feature (1)..( 13): Result.001 file - promoters60/1013274
gtatatattgttt

SEQ ID NO: 92418 - DNA, 13 bp, Unknown
  misc_feature (1)..( 13): Result.001 file - promoters60/1013274
ttatctatttttt

SEQ ID NO: 92419 - DNA, 13 bp, Unknown
  misc_feature (1)..( 13): Result.001 file - promoters60/1013274
ctttctctgattt

SEQ ID NO: 92420 - DNA, 13 bp, Unknown
  misc_feature (1)..( 13): Result.001 file - promoters60/1013274
ttatatatgtttc

SEQ ID NO: 92421 - DNA, 13 bp, Unknown
  misc_feature (1)..( 13): Result.001 file - promoters60/1013274
ttgtaaatgtttc

SEQ ID NO: 92422 - DNA, 10 bp, Unknown
  misc_feature (1)..( 10): Result.001 file - promoters60/1013274
aatatataat

SEQ ID NO: 92423 - DNA, 10 bp, Unknown
  misc_feature (1)..( 10): Result.001 file - promoters60/1013274
catatattag

SEQ ID NO: 92424 - DNA, 10 bp, Unknown
  misc_feature (1)..( 10): Result.001 file - promoters60/1013274
aatataaagg

SEQ ID NO: 92425 - DNA, 10 bp, Unknown
  misc_feature (1)..( 10): Result.001 file - promoters60/1013274
actatttaaa

SEQ ID NO: 92426 - DNA, 10 bp, Unknown
  misc_feature (1)..( 10): Result.001 file - promoters60/1013274
gtgctttaaa

SEQ ID NO: 92427 - DNA, 10 bp, Unknown
  misc_feature (1)..( 10): Result.001 file - promoters60/1013274
aagataaatg

SEQ ID NO: 92428 - DNA, 10 bp, Unknown
  misc_feature (1)..( 10): Result.001 file - promoters60/1013274
acaataaata

SEQ ID NO: 92429 - DNA, 10 bp, Unknown
  misc_feature (1)..( 10): Result.001 file - promoters60/1013274
aaaagaaaaa

SEQ ID NO: 92430 - DNA, 10 bp, Unknown
  misc_feature (1)..( 10): Result.001 file - promoters60/1013274
taaagcaaat

SEQ ID NO: 92431 - DNA, 10 bp, Unknown
  misc_feature (1)..( 10): Result.001 file - promoters60/1013274
agaagaaaac

SEQ ID NO: 92432 - DNA, 10 bp, Unknown
  misc_feature (1)..( 10): Result.001 file - promoters60/1013274
tctagaaaat

SEQ ID NO: 92433 - DNA, 9 bp, Unknown
  misc_feature (1)..( 9): Result.001 file - promoters60/1013274
tgtttgttc

SEQ ID NO: 92434 - DNA, 9 bp, Unknown
  misc_feature (1)..( 9): Result.001 file - promoters60/1013274
tttttgttg

SEQ ID NO: 92435 - DNA, 9 bp, Unknown
  misc_feature (1)..( 9): Result.001 file - promoters60/1013274
tttttgttc

SEQ ID NO: 92436 - DNA, 9 bp, Unknown
  misc_feature (1)..( 9): Result.001 file - promoters60/1013274
tttttgtct

SEQ ID NO: 92437 - DNA, 9 bp, Unknown
  misc_feature (1)..( 9): Result.001 file - promoters60/1013274
tatttgttc

SEQ ID NO: 92438 - DNA, 11 bp, Unknown
  misc_feature (1)..( 11): Result.001 file - promoters60/1013274
catttttcttt

SEQ ID NO: 92439 - DNA, 11 bp, Unknown
  misc_feature (1)..( 11): Result.001 file - promoters60/1013274
gattttttttt

SEQ ID NO: 92440 - DNA, 11 bp, Unknown
  misc_feature (1)..( 11): Result.001 file - promoters60/1013274
catttttgttc

SEQ ID NO: 92441 - DNA, 11 bp, Unknown
  misc_feature (1)..( 11): Result.001 file - promoters60/1013274
actttctctga

SEQ ID NO: 92442 - DNA, 11 bp, Unknown
  misc_feature (1)..( 11): Result.001 file - promoters60/1013274
cgtttttgtct

SEQ ID NO: 92443 - DNA, 11 bp, Unknown
  misc_feature (1)..( 11): Result.001 file - promoters60/1013274
aactttaaata

SEQ ID NO: 92444 - DNA, 11 bp, Unknown
  misc_feature (1)..( 11): Result.001 file - promoters60/1013274
ggctttaacca

SEQ ID NO: 92445 - DNA, 11 bp, Unknown
  misc_feature (1)..( 11): Result.001 file - promoters60/1013274
aacttgaaatt

SEQ ID NO: 92446 - DNA, 11 bp, Unknown
  misc_feature (1)..( 11): Result.001 file - promoters60/1013274
ttttttaacaa

SEQ ID NO: 92447 - DNA, 11 bp, Unknown
  misc_feature (1)..( 11): Result.001 file - promoters60/1013298
aaaaagaaatt

SEQ ID NO: 92448 - DNA, 6 bp, Unknown
  misc_feature (1)..( 6): Result.001 file - promoters60/1013298
ctttca

SEQ ID NO: 92449 - DNA, 6 bp, Unknown
  misc_feature (1)..( 6): Result.001 file - promoters60/1013298
ctttca

SEQ ID NO: 92450 - DNA, 6 bp, Unknown
  misc_feature (1)..( 6): Result.001 file - promoters60/1013298
agacta

SEQ ID NO: 92451 - DNA, 6 bp, Unknown
  misc_feature (1)..( 6): Result.001 file - promoters60/1013298
agacta

SEQ ID NO: 92452 - DNA, 7 bp, Unknown
  misc_feature (1)..( 7): Result.001 file - promoters60/1013298
aaattta

SEQ ID NO: 92453 - DNA, 7 bp, Unknown
  misc_feature (1)..( 7): Result.001 file - promoters60/1013298
aaaatta

SEQ ID NO: 92454 - DNA, 6 bp, Unknown
  misc_feature (1)..( 6): Result.001 file - promoters60/1013298
ttgaag

SEQ ID NO: 92455 - DNA, 6 bp, Unknown
  misc_feature (1)..( 6): Result.001 file - promoters60/1013298
ttgaag

SEQ ID NO: 92456 - DNA, 7 bp, Unknown
  misc_feature (1)..( 7): Result.001 file - promoters60/1013298
tttaaat

SEQ ID NO: 92457 - DNA, 7 bp, Unknown
  misc_feature (1)..( 7): Result.001 file - promoters60/1013298
tttgaat

SEQ ID NO: 92458 - DNA, 7 bp, Unknown
  misc_feature (1)..( 7): Result.001 file - promoters60/1013298
ttttgtt

SEQ ID NO: 92459 - DNA, 7 bp, Unknown
  misc_feature (1)..( 7): Result.001 file - promoters60/1013298
ttttgtt

SEQ ID NO: 92460 - DNA, 7 bp, Unknown
  misc_feature (1)..( 7): Result.001 file - promoters60/1013298
attttaa

SEQ ID NO: 92461 - DNA, 7 bp, Unknown
  misc_feature (1)..( 7): Result.001 file - promoters60/1013298
attttaa

SEQ ID NO: 92462 - DNA, 7 bp, Unknown
  misc_feature (1)..( 7): Result.001 file - promoters60/1013298
ttaattt

SEQ ID NO: 92463 - DNA, 7 bp, Unknown
  misc_feature (1)..( 7): Result.001 file - promoters60/1013298
ttagttt

SEQ ID NO: 92464 - DNA, 8 bp, Unknown
  misc_feature (1)..( 8): Result.001 file - promoters60/1013298
gtcatttt

SEQ ID NO: 92465 - DNA, 8 bp, Unknown
  misc_feature (1)..( 8): Result.001 file - promoters60/1013298
gtcctttt

SEQ ID NO: 92466 - DNA, 8 bp, Unknown
  misc_feature (1)..( 8): Result.001 file - promoters60/1013298
ttttatgg

SEQ ID NO: 92467 - DNA, 8 bp, Unknown
  misc_feature (1)..( 8): Result.001 file - promoters60/1013298
ttttttgg

SEQ ID NO: 92468 - DNA, 6 bp, Unknown
  misc_feature (1)..( 6): Result.001 file - promoters60/1013298
atcaaa

SEQ ID NO: 92469 - DNA, 6 bp, Unknown
  misc_feature (1)..( 6): Result.001 file - promoters60/1013298
atcaaa

SEQ ID NO: 92470 - DNA, 7 bp, Unknown
  misc_feature (1)..( 7): Result.001 file - promoters60/1013298
ttaatat

SEQ ID NO: 92471 - DNA, 7 bp, Unknown
  misc_feature (1)..( 7): Result.001 file - promoters60/1013298
ttagtat

SEQ ID NO: 92472 - DNA, 8 bp, Unknown
  misc_feature (1)..( 8): Result.001 file - promoters60/1013298
ttggcttt

SEQ ID NO: 92473 - DNA, 8 bp, Unknown
  misc_feature (1)..( 8): Result.001 file - promoters60/1013298
ttggattt

SEQ ID NO: 92474 - DNA, 6 bp, Unknown
  misc_feature (1)..( 6): Result.001 file - promoters60/1013298
ttccat

SEQ ID NO: 92475 - DNA, 6 bp, Unknown
  misc_feature (1)..( 6): Result.001 file - promoters60/1013298
ttccat

SEQ ID NO: 92476 - DNA, 8 bp, Unknown
  misc_feature (1)..( 8): Result.001 file - promoters60/1013298
atgctttt

SEQ ID NO: 92477 - DNA, 8 bp, Unknown
  misc_feature (1)..( 8): Result.001 file - promoters60/1013298
atgttttt

SEQ ID NO: 92478 - DNA, 6 bp, Unknown
  misc_feature (1)..( 6): Result.001 file - promoters60/1013298
ttctca

SEQ ID NO: 92479 - DNA, 6 bp, Unknown
  misc_feature (1)..( 6): Result.001 file - promoters60/1013298
ttctca

SEQ ID NO: 92480 - DNA, 6 bp, Unknown
  misc_feature (1)..( 6): Result.001 file - promoters60/1013298
tgtctc

SEQ ID NO: 92481 - DNA, 6 bp, Unknown
  misc_feature (1)..( 6): Result.001 file - promoters60/1013298
tgtctc

SEQ ID NO: 92482 - DNA, 6 bp, Unknown
  misc_feature (1)..( 6): Result.001 file - promoters60/1013298
tatttt

SEQ ID NO: 92483 - DNA, 6 bp, Unknown
  misc_feature (1)..( 6): Result.001 file - promoters60/1013298
tatttt

SEQ ID NO: 92484 - DNA, 8 bp, Unknown
  misc_feature (1)..( 8): Result.001 file - promoters60/1013298
caattgat

SEQ ID NO: 92485 - DNA, 8 bp, Unknown
  misc_feature (1)..( 8): Result.001 file - promoters60/1013298
caattgat

SEQ ID NO: 92486 - DNA, 7 bp, Unknown
  misc_feature (1)..( 7): Result.001 file - promoters60/1013298
gaagttt

SEQ ID NO: 92487 - DNA, 7 bp, Unknown
  misc_feature (1)..( 7): Result.001 file - promoters60/1013298
gaatttt

SEQ ID NO: 92488 - DNA, 6 bp, Unknown
  misc_feature (1)..( 6): Result.001 file - promoters60/1013298
aaagtt

SEQ ID NO: 92489 - DNA, 6 bp, Unknown
  misc_feature (1)..( 6): Result.001 file - promoters60/1013298
aaagtt

SEQ ID NO: 92490 - DNA, 6 bp, Unknown
  misc_feature (1)..( 6): Result.001 file - promoters60/1013298
ttgtca

SEQ ID NO: 92491 - DNA, 6 bp, Unknown
  misc_feature (1)..( 6): Result.001 file - promoters60/1013310
ttgtca

SEQ ID NO: 92492 - DNA, 13 bp, Unknown
  misc_feature (1)..( 13): Result.001 file - promoters60/1013310
aacctctttataa

SEQ ID NO: 92493 - DNA, 13 bp, Unknown
  misc_feature (1)..( 13): Result.001 file - promoters60/1013310
ttcttttttatat

SEQ ID NO: 92494 - DNA, 13 bp, Unknown
  misc_feature (1)..( 13): Result.001 file - promoters60/1013310
tcctctcttataa

SEQ ID NO: 92495 - DNA, 13 bp, Unknown
  misc_feature (1)..( 13): Result.001 file - promoters60/1013310
ttctattttattg

SEQ ID NO: 92496 - DNA, 8 bp, Unknown
  misc_feature (1)..( 8): Result.001 file - promoters60/1013310
aattcaat

SEQ ID NO: 92497 - DNA, 8 bp, Unknown
  misc_feature (1)..( 8): Result.001 file - promoters60/1013310
aattcaaa

SEQ ID NO: 92498 - DNA, 8 bp, Unknown
  misc_feature (1)..( 8): Result.001 file - promoters60/1013310
gatttaaa

SEQ ID NO: 92499 - DNA, 9 bp, Unknown
  misc_feature (1)..( 9): Result.001 file - promoters60/1013310
tcctcttcc

SEQ ID NO: 92500 - DNA, 9 bp, Unknown
  misc_feature (1)..( 9): Result.001 file - promoters60/1013310
tccactttg

SEQ ID NO: 92501 - DNA, 9 bp, Unknown
  misc_feature (1)..( 9): Result.001 file - promoters60/1013314
tccattttg

SEQ ID NO: 92502 - DNA, 12 bp, Unknown
  misc_feature (1)..( 12): Result.001 file - promoters60/1013314
gaaaatacaaat

SEQ ID NO: 92503 - DNA, 12 bp, Unknown
  misc_feature (1)..( 12): Result.001 file - promoters60/1013314
taaaatataaat

SEQ ID NO: 92504 - DNA, 12 bp, Unknown
  misc_feature (1)..( 12): Result.001 file - promoters60/1013314
taacatacaaca

SEQ ID NO: 92505 - DNA, 12 bp, Unknown
  misc_feature (1)..( 12): Result.001 file - promoters60/1013314
taaaatgcacgt

SEQ ID NO: 92506 - DNA, 12 bp, Unknown
  misc_feature (1)..( 12): Result.001 file - promoters60/1013314
tttgataaaaga

SEQ ID NO: 92507 - DNA, 13 bp, Unknown
  misc_feature (1)..( 13): Result.001 file - promoters60/1013314
aaatatttttatg

SEQ ID NO: 92508 - DNA, 13 bp, Unknown
  misc_feature (1)..( 13): Result.001 file - promoters60/1013314
ttgaaattttatg

SEQ ID NO: 92509 - DNA, 13 bp, Unknown
  misc_feature (1)..( 13): Result.001 file - promoters60/1013314
aaatatttttaat

SEQ ID NO: 92510 - DNA, 13 bp, Unknown
  misc_feature (1)..( 13): Result.001 file - promoters60/1013314
ctttttttttaac

SEQ ID NO: 92511 - DNA, 13 bp, Unknown
  misc_feature (1)..( 13): Result.001 file - promoters60/1013314
acatatttttata

SEQ ID NO: 92512 - DNA, 13 bp, Unknown
  misc_feature (1)..( 13): Result.001 file - promoters60/1013314
caacatttttttc

SEQ ID NO: 92513 - DNA, 10 bp, Unknown
  misc_feature (1)..( 10): Result.001 file - promoters60/1013314
cttgaagaaa

SEQ ID NO: 92514 - DNA, 10 bp, Unknown
  misc_feature (1)..( 10): Result.001 file - promoters60/1013314
gataaagaaa

SEQ ID NO: 92515 - DNA, 10 bp, Unknown
  misc_feature (1)..( 10): Result.001 file - promoters60/1013314
tatatagaat

SEQ ID NO: 92516 - DNA, 10 bp, Unknown
  misc_feature (1)..( 10): Result.001 file - promoters60/1013314
tatttagaaa

SEQ ID NO: 92517 - DNA, 10 bp, Unknown
  misc_feature (1)..( 10): Result.001 file - promoters60/1013314
gatatagtca

SEQ ID NO: 92518 - DNA, 10 bp, Unknown
  misc_feature (1)..( 10): Result.001 file - promoters60/1013314
tttttataaa

SEQ ID NO: 92519 - DNA, 10 bp, Unknown
  misc_feature (1)..( 10): Result.001 file - promoters60/1013314
atttatatga

SEQ ID NO: 92520 - DNA, 10 bp, Unknown
  misc_feature (1)..( 10): Result.001 file - promoters60/1013314
atttttattt

SEQ ID NO: 92521 - DNA, 10 bp, Unknown
  misc_feature (1)..( 10): Result.001 file - promoters60/1013314
cttttttttt

SEQ ID NO: 92522 - DNA, 10 bp, Unknown
  misc_feature (1)..( 10): Result.001 file - promoters60/1013314
atttttttca

SEQ ID NO: 92523 - DNA, 10 bp, Unknown
  misc_feature (1)..( 10): Result.001 file - promoters60/1013314
atttttaata

SEQ ID NO: 92524 - DNA, 12 bp, Unknown
  misc_feature (1)..( 12): Result.001 file - promoters60/1013314
tcaaaagattta

SEQ ID NO: 92525 - DNA, 12 bp, Unknown
  misc_feature (1)..( 12): Result.001 file - promoters60/1013314
acaaaagaaaaa

SEQ ID NO: 92526 - DNA, 12 bp, Unknown
  misc_feature (1)..( 12): Result.001 file - promoters60/1013314
tcataagagaat

SEQ ID NO: 92527 - DNA, 12 bp, Unknown
  misc_feature (1)..( 12): Result.001 file - promoters60/1013314
tcaaaaaaagaa

SEQ ID NO: 92528 - DNA, 12 bp, Unknown
  misc_feature (1)..( 12): Result.001 file - promoters60/1013314
ggaaaaaaaaaa

SEQ ID NO: 92529 - DNA, 14 bp, Unknown
  misc_feature (1)..( 14): Result.001 file - promoters60/1013314
aaaataaaatttgc

SEQ ID NO: 92530 - DNA, 14 bp, Unknown
  misc_feature (1)..( 14): Result.001 file - promoters60/1013314
ttttaaaactttaa

SEQ ID NO: 92531 - DNA, 14 bp, Unknown
  misc_feature (1)..( 14): Result.001 file - promoters60/1013314
aaaagaaaataaac

SEQ ID NO: 92532 - DNA, 14 bp, Unknown
  misc_feature (1)..( 14): Result.001 file - promoters60/1013314
aaatgttaatttgg

SEQ ID NO: 92533 - DNA, 14 bp, Unknown
  misc_feature (1)..( 14): Result.001 file - promoters60/1013314
aacagaaaacgtta

SEQ ID NO: 92534 - DNA, 10 bp, Unknown
  misc_feature (1)..( 10): Result.001 file - promoters60/1013314
taattaaatg

SEQ ID NO: 92535 - DNA, 10 bp, Unknown
  misc_feature (1)..( 10): Result.001 file - promoters60/1013314
aaattaataa

SEQ ID NO: 92536 - DNA, 10 bp, Unknown
  misc_feature (1)..( 10): Result.001 file - promoters60/1013314
cgattaaatg

SEQ ID NO: 92537 - DNA, 10 bp, Unknown
  misc_feature (1)..( 10): Result.001 file - promoters60/1013314
aaaataaact

SEQ ID NO: 92538 - DNA, 10 bp, Unknown
  misc_feature (1)..( 10): Result.001 file - promoters60/1013314
aaatttagat

SEQ ID NO: 92539 - DNA, 9 bp, Unknown
  misc_feature (1)..( 9): Result.001 file - promoters60/1013314
ttataaaag

SEQ ID NO: 92540 - DNA, 9 bp, Unknown
  misc_feature (1)..( 9): Result.001 file - promoters60/1013314
ttatataag

SEQ ID NO: 92541 - DNA, 9 bp, Unknown
  misc_feature (1)..( 9): Result.001 file - promoters60/1013314
atataaact

SEQ ID NO: 92542 - DNA, 9 bp, Unknown
  misc_feature (1)..( 9): Result.001 file - promoters60/1013314
atataaaca

SEQ ID NO: 92543 - DNA, 9 bp, Unknown
  misc_feature (1)..( 9): Result.001 file - promoters60/1013314
ttatatcac

SEQ ID NO: 92544 - DNA, 12 bp, Unknown
  misc_feature (1)..( 12): Result.001 file - promoters60/1013314
aacattgtccat

SEQ ID NO: 92545 - DNA, 12 bp, Unknown
  misc_feature (1)..( 12): Result.001 file - promoters60/1013314
catattatccat

SEQ ID NO: 92546 - DNA, 12 bp, Unknown
  misc_feature (1)..( 12): Result.001 file - promoters60/1013314
ataattatccaa

SEQ ID NO: 92547 - DNA, 12 bp, Unknown
  misc_feature (1)..( 12): Result.001 file - promoters60/1013314
ttaaatattttt

SEQ ID NO: 92548 - DNA, 12 bp, Unknown
  misc_feature (1)..( 12): Result.001 file - promoters60/1013314
atcaatattctt

SEQ ID NO: 92549 - DNA, 12 bp, Unknown
  misc_feature (1)..( 12): Result.001 file - promoters60/1013314
atcaacaaataa

SEQ ID NO: 92550 - DNA, 13 bp, Unknown
  misc_feature (1)..( 13): Result.001 file - promoters60/1013314
atatttttatgtg

SEQ ID NO: 92551 - DNA, 13 bp, Unknown
  misc_feature (1)..( 13): Result.001 file - promoters60/1013314
acatttttttcac

SEQ ID NO: 92552 - DNA, 13 bp, Unknown
  misc_feature (1)..( 13): Result.001 file - promoters60/1013314
atatttttataaa

SEQ ID NO: 92553 - DNA, 13 bp, Unknown
  misc_feature (1)..( 13): Result.001 file - promoters60/1013314
atatttttatttt

SEQ ID NO: 92554 - DNA, 13 bp, Unknown
  misc_feature (1)..( 13): Result.001 file - promoters60/1013314
atatttttaatat

SEQ ID NO: 92555 - DNA, 13 bp, Unknown
  misc_feature (1)..( 13): Result.001 file - promoters60/1013314
atgtatttagaaa

SEQ ID NO: 92556 - DNA, 9 bp, Unknown
  misc_feature (1)..( 9): Result.001 file - promoters60/1013314
ttaaattat

SEQ ID NO: 92557 - DNA, 9 bp, Unknown
  misc_feature (1)..( 9): Result.001 file - promoters60/1013314
ctaaatttt

SEQ ID NO: 92558 - DNA, 9 bp, Unknown
  misc_feature (1)..( 9): Result.001 file - promoters60/1013314
ataaaatat

SEQ ID NO: 92559 - DNA, 9 bp, Unknown
  misc_feature (1)..( 9): Result.001 file - promoters60/1013314
ctaaatagg

SEQ ID NO: 92560 - DNA, 10 bp, Unknown
  misc_feature (1)..( 10): Result.001 file - promoters60/1013314
atacaatgca

SEQ ID NO: 92561 - DNA, 12 bp, Unknown
  misc_feature (1)..( 12): Result.001 file - promoters60/1013314
ttttgaaatttt

SEQ ID NO: 92562 - DNA, 12 bp, Unknown
  misc_feature (1)..( 12): Result.001 file - promoters60/1013314
attttaaataac

SEQ ID NO: 92563 - DNA, 12 bp, Unknown
  misc_feature (1)..( 12): Result.001 file - promoters60/1013314
ttttgacatcat

SEQ ID NO: 92564 - DNA, 12 bp, Unknown
  misc_feature (1)..( 12): Result.001 file - promoters60/1013314
ttttgatattgc

SEQ ID NO: 92565 - DNA, 12 bp, Unknown
  misc_feature (1)..( 12): Result.001 file - promoters60/1013314
gactgacatttt

SEQ ID NO: 92566 - DNA, 12 bp, Unknown
  misc_feature (1)..( 12): Result.001 file - promoters60/1013314
gattgacatatt

SEQ ID NO: 92567 - DNA, 11 bp, Unknown
  misc_feature (1)..( 11): Result.001 file - promoters60/1013314
gaaaaaatatt

SEQ ID NO: 92568 - DNA, 11 bp, Unknown
  misc_feature (1)..( 11): Result.001 file - promoters60/1013314
atcaaaataag

SEQ ID NO: 92569 - DNA, 11 bp, Unknown
  misc_feature (1)..( 11): Result.001 file - promoters60/1013314
aaaaaaatctt

SEQ ID NO: 92570 - DNA, 11 bp, Unknown
  misc_feature (1)..( 11): Result.001 file - promoters60/1013314
taacaaatttc

SEQ ID NO: 92571 - DNA, 11 bp, Unknown
  misc_feature (1)..( 11): Result.001 file - promoters60/1013314
agtcaaatatc

SEQ ID NO: 92572 - DNA, 14 bp, Unknown
  misc_feature (1)..( 14): Result.001 file - promoters60/1013314
agttaaagacttta

SEQ ID NO: 92573 - DNA, 14 bp, Unknown
  misc_feature (1)..( 14): Result.001 file - promoters60/1013314
cataagagaatttc

SEQ ID NO: 92574 - DNA, 14 bp, Unknown
  misc_feature (1)..( 14): Result.001 file - promoters60/1013314
aaaaaaagaattta

SEQ ID NO: 92575 - DNA, 14 bp, Unknown
  misc_feature (1)..( 14): Result.001 file - promoters60/1013314
aaaaaaaaaataca

SEQ ID NO: 92576 - DNA, 14 bp, Unknown
  misc_feature (1)..( 14): Result.001 file - promoters60/1013314
gatttaagaatatt

SEQ ID NO: 92577 - DNA, 12 bp, Unknown
  misc_feature (1)..( 12): Result.001 file - promoters60/1013314
taaaaaataaat

SEQ ID NO: 92578 - DNA, 12 bp, Unknown
  misc_feature (1)..( 12): Result.001 file - promoters60/1013314
taagaaaaaaat

SEQ ID NO: 92579 - DNA, 12 bp, Unknown
  misc_feature (1)..( 12): Result.001 file - promoters60/1013314
atccaaacaaaa

SEQ ID NO: 92580 - DNA, 12 bp, Unknown
  misc_feature (1)..( 12): Result.001 file - promoters60/1013314
gtcaaagtaaaa

SEQ ID NO: 92581 - DNA, 12 bp, Unknown
  misc_feature (1)..( 12): Result.001 file - promoters60/1013314
ttctagataaaa

SEQ ID NO: 92582 - DNA, 13 bp, Unknown
  misc_feature (1)..( 13): Result.001 file - promoters60/1013314
ttaaagctttgaa

SEQ ID NO: 92583 - DNA, 13 bp, Unknown
  misc_feature (1)..( 13): Result.001 file - promoters60/1013314
agaaatcttttta

SEQ ID NO: 92584 - DNA, 13 bp, Unknown
  misc_feature (1)..( 13): Result.001 file - promoters60/1013314
ttaaagcgaaaag

SEQ ID NO: 92585 - DNA, 13 bp, Unknown
  misc_feature (1)..( 13): Result.001 file - promoters60/1013314
atcaatcttttta

SEQ ID NO: 92586 - DNA, 13 bp, Unknown
  misc_feature (1)..( 13): Result.001 file - promoters60/1013314
ggaaaacgacaca

SEQ ID NO: 92587 - DNA, 11 bp, Unknown
  misc_feature (1)..( 11): Result.001 file - promoters60/1013314
cttttaaagtt

SEQ ID NO: 92588 - DNA, 11 bp, Unknown
  misc_feature (1)..( 11): Result.001 file - promoters60/1013314
attttaacatc

SEQ ID NO: 92589 - DNA, 11 bp, Unknown
  misc_feature (1)..( 11): Result.001 file - promoters60/1013314
tttttaacaaa

SEQ ID NO: 92590 - DNA, 11 bp, Unknown
  misc_feature (1)..( 11): Result.001 file - promoters60/1013314
atagtaaaaaa

SEQ ID NO: 92591 - DNA, 11 bp, Unknown
  misc_feature (1)..( 11): Result.001 file - promoters60/1013314
atagtcaaata

SEQ ID NO: 92592 - DNA, 8 bp, Unknown
  misc_feature (1)..( 8): Result.001 file - promoters60/1013314
taaatatt

SEQ ID NO: 92593 - DNA, 8 bp, Unknown
  misc_feature (1)..( 8): Result.001 file - promoters60/1013314
tcaatatt

SEQ ID NO: 92594 - DNA, 9 bp, Unknown
  misc_feature (1)..( 9): Result.001 file - promoters60/1013314
ataattatc

SEQ ID NO: 92595 - DNA, 9 bp, Unknown
  misc_feature (1)..( 9): Result.001 file - promoters60/1013314
atccatata

SEQ ID NO: 92596 - DNA, 9 bp, Unknown
  misc_feature (1)..( 9): Result.001 file - promoters60/1013314
ataattaaa

SEQ ID NO: 92597 - DNA, 10 bp, Unknown
  misc_feature (1)..( 10): Result.001 file - promoters60/1013314
gaataaaatc

SEQ ID NO: 92598 - DNA, 10 bp, Unknown
  misc_feature (1)..( 10): Result.001 file - promoters60/1013314
ttttaacatc

SEQ ID NO: 92599 - DNA, 10 bp, Unknown
  misc_feature (1)..( 10): Result.001 file - promoters60/1013314
taaaaaaatc

SEQ ID NO: 92600 - DNA, 10 bp, Unknown
  misc_feature (1)..( 10): Result.001 file - promoters60/1013314
ttttaacaaa

SEQ ID NO: 92601 - DNA, 11 bp, Unknown
  misc_feature (1)..( 11): Result.001 file - promoters60/1013384
agtcaaatatc

SEQ ID NO: 92602 - DNA, 8 bp, Unknown
  misc_feature (1)..( 8): Result.001 file - promoters60/1013384
aaaacaga

SEQ ID NO: 92603 - DNA, 8 bp, Unknown
  misc_feature (1)..( 8): Result.001 file - promoters60/1013384
aaaacagt

SEQ ID NO: 92604 - DNA, 8 bp, Unknown
  misc_feature (1)..( 8): Result.001 file - promoters60/1013384
aacacaaa

SEQ ID NO: 92605 - DNA, 7 bp, Unknown
  misc_feature (1)..( 7): Result.001 file - promoters60/1013384
ccaatga

SEQ ID NO: 92606 - DNA, 7 bp, Unknown
  misc_feature (1)..( 7): Result.001 file - promoters60/1013384
ccaatga

SEQ ID NO: 92607 - DNA, 8 bp, Unknown
  misc_feature (1)..( 8): Result.001 file - promoters60/1013384
gagcatga

SEQ ID NO: 92608 - DNA, 8 bp, Unknown
  misc_feature (1)..( 8): Result.001 file - promoters60/1013384
gagcctga

SEQ ID NO: 92609 - DNA, 8 bp, Unknown
  misc_feature (1)..( 8): Result.001 file - promoters60/1013384
tcctgaag

SEQ ID NO: 92610 - DNA, 8 bp, Unknown
  misc_feature (1)..( 8): Result.001 file - promoters60/1013384
tccagaag

SEQ ID NO: 92611 - DNA, 6 bp, Unknown
  misc_feature (1)..( 6): Result.001 file - promoters60/1013384
gacttg

SEQ ID NO: 92612 - DNA, 6 bp, Unknown
  misc_feature (1)..( 6): Result.001 file - promoters60/1013384
gacttg

SEQ ID NO: 92613 - DNA, 6 bp, Unknown
  misc_feature (1)..( 6): Result.001 file - promoters60/1013384
tcttct

SEQ ID NO: 92614 - DNA, 6 bp, Unknown
  misc_feature (1)..( 6): Result.001 file - promoters60/1013384
tcttct

SEQ ID NO: 92615 - DNA, 6 bp, Unknown
  misc_feature (1)..( 6): Result.001 file - promoters60/1013384
caagaa

SEQ ID NO: 92616 - DNA, 6 bp, Unknown
  misc_feature (1)..( 6): Result.001 file - promoters60/1013384
caagaa

SEQ ID NO: 92617 - DNA, 6 bp, Unknown
  misc_feature (1)..( 6): Result.001 file - promoters60/1013384
tctaaa

SEQ ID NO: 92618 - DNA, 6 bp, Unknown
  misc_feature (1)..( 6): Result.001 file - promoters60/1013384
tctaaa

SEQ ID NO: 92619 - DNA, 6 bp, Unknown
  misc_feature (1)..( 6): Result.001 file - promoters60/1013384
caaacc

SEQ ID NO: 92620 - DNA, 6 bp, Unknown
  misc_feature (1)..( 6): Result.001 file - promoters60/1013384
caaacc

SEQ ID NO: 92621 - DNA, 7 bp, Unknown
  misc_feature (1)..( 7): Result.001 file - promoters60/1013384
tttaggt

SEQ ID NO: 92622 - DNA, 7 bp, Unknown
  misc_feature (1)..( 7): Result.001 file - promoters60/1013384
ttttggt

SEQ ID NO: 92623 - DNA, 6 bp, Unknown
  misc_feature (1)..( 6): Result.001 file - promoters60/1013384
ttcagt

SEQ ID NO: 92624 - DNA, 6 bp, Unknown
  misc_feature (1)..( 6): Result.001 file - promoters60/1013413
ttcagt

SEQ ID NO: 92625 - DNA, 15 bp, Unknown
  misc_feature (1)..( 15): Result.001 file - promoters60/1013413
taataacatcaataa

SEQ ID NO: 92626 - DNA, 15 bp, Unknown
  misc_feature (1)..( 15): Result.001 file - promoters60/1013413
taaaaacattaataa

SEQ ID NO: 92627 - DNA, 15 bp, Unknown
  misc_feature (1)..( 15): Result.001 file - promoters60/1013413
aaataacaaatacaa

SEQ ID NO: 92628 - DNA, 15 bp, Unknown
  misc_feature (1)..( 15): Result.001 file - promoters60/1013413
tcaaaaaaaaaagtt

SEQ ID NO: 92629 - DNA, 15 bp, Unknown
  misc_feature (1)..( 15): Result.001 file - promoters60/1013413
taataatattttgaa

SEQ ID NO: 92630 - DNA, 15 bp, Unknown
  misc_feature (1)..( 15): Result.001 file - promoters60/1013413
gaaaaaaataactgt

SEQ ID NO: 92631 - DNA, 15 bp, Unknown
  misc_feature (1)..( 15): Result.001 file - promoters60/1013413
caattacaacttgtt

SEQ ID NO: 92632 - DNA, 11 bp, Unknown
  misc_feature (1)..( 11): Result.001 file - promoters60/1013413
ttttaataatt

SEQ ID NO: 92633 - DNA, 11 bp, Unknown
  misc_feature (1)..( 11): Result.001 file - promoters60/1013413
gtttattaaaa

SEQ ID NO: 92634 - DNA, 11 bp, Unknown
  misc_feature (1)..( 11): Result.001 file - promoters60/1013413
agctaagaata

SEQ ID NO: 92635 - DNA, 11 bp, Unknown
  misc_feature (1)..( 11): Result.001 file - promoters60/1013413
ggctaataaat

SEQ ID NO: 92636 - DNA, 11 bp, Unknown
  misc_feature (1)..( 11): Result.001 file - promoters60/1013413
ttttaatctga

SEQ ID NO: 92637 - DNA, 11 bp, Unknown
  misc_feature (1)..( 11): Result.001 file - promoters60/1013413
aaaaaagaata

SEQ ID NO: 92638 - DNA, 11 bp, Unknown
  misc_feature (1)..( 11): Result.001 file - promoters60/1013427
aattaaaaatg

SEQ ID NO: 92639 - DNA, 6 bp, Unknown
  misc_feature (1)..( 6): Result.001 file - promoters60/1013427
aattca

SEQ ID NO: 92640 - DNA, 6 bp, Unknown
  misc_feature (1)..( 6): Result.001 file - promoters60/1013427
aattca

SEQ ID NO: 92641 - DNA, 6 bp, Unknown
  misc_feature (1)..( 6): Result.001 file - promoters60/1013427
caacgg

SEQ ID NO: 92642 - DNA, 6 bp, Unknown
  misc_feature (1)..( 6): Result.001 file - promoters60/1013427
caacgg

SEQ ID NO: 92643 - DNA, 8 bp, Unknown
  misc_feature (1)..( 8): Result.001 file - promoters60/1013427
tttctctt

SEQ ID NO: 92644 - DNA, 8 bp, Unknown
  misc_feature (1)..( 8): Result.001 file - promoters60/1013427
tttttctt

SEQ ID NO: 92645 - DNA, 9 bp, Unknown
  misc_feature (1)..( 9): Result.001 file - promoters60/1013427
tttatatta

SEQ ID NO: 92646 - DNA, 9 bp, Unknown
  misc_feature (1)..( 9): Result.001 file - promoters60/1013427
cttatatta

SEQ ID NO: 92647 - DNA, 9 bp, Unknown
  misc_feature (1)..( 9): Result.001 file - promoters60/1013427
tttaaattt

SEQ ID NO: 92648 - DNA, 7 bp, Unknown
  misc_feature (1)..( 7): Result.001 file - promoters60/1013427
ttcaatt

SEQ ID NO: 92649 - DNA, 7 bp, Unknown
  misc_feature (1)..( 7): Result.001 file - promoters60/1013427
ttctatt

SEQ ID NO: 92650 - DNA, 8 bp, Unknown
  misc_feature (1)..( 8): Result.001 file - promoters60/1013427
aataattt

SEQ ID NO: 92651 - DNA, 8 bp, Unknown
  misc_feature (1)..( 8): Result.001 file - promoters60/1013427
aatatttt

SEQ ID NO: 92652 - DNA, 6 bp, Unknown
  misc_feature (1)..( 6): Result.001 file - promoters60/1013427
tctttg

SEQ ID NO: 92653 - DNA, 6 bp, Unknown
  misc_feature (1)..( 6): Result.001 file - promoters60/1013427
tctttg

SEQ ID NO: 92654 - DNA, 11 bp, Unknown
  misc_feature (1)..( 11): Result.001 file - promoters60/1013427
aatgatgattt

SEQ ID NO: 92655 - DNA, 11 bp, Unknown
  misc_feature (1)..( 11): Result.001 file - promoters60/1013427
aataatgtttt

SEQ ID NO: 92656 - DNA, 7 bp, Unknown
  misc_feature (1)..( 7): Result.001 file - promoters60/1013427
ataatta

SEQ ID NO: 92657 - DNA, 7 bp, Unknown
  misc_feature (1)..( 7): Result.001 file - promoters60/1013427
atagtta

SEQ ID NO: 92658 - DNA, 6 bp, Unknown
  misc_feature (1)..( 6): Result.001 file - promoters60/1013427
ttacaa

SEQ ID NO: 92659 - DNA, 6 bp, Unknown
  misc_feature (1)..( 6): Result.001 file - promoters60/1013427
ttacaa

SEQ ID NO: 92660 - DNA, 7 bp, Unknown
  misc_feature (1)..( 7): Result.001 file - promoters60/1013427
gaaatca

SEQ ID NO: 92661 - DNA, 7 bp, Unknown
  misc_feature (1)..( 7): Result.001 file - promoters60/1013497
gaaatca

SEQ ID NO: 92662 - DNA, 7 bp, Unknown
  misc_feature (1)..( 7): Result.001 file - promoters60/1013497
aaatgaa

SEQ ID NO: 92663 - DNA, 7 bp, Unknown
  misc_feature (1)..( 7): Result.001 file - promoters60/1013497
aaaggaa

SEQ ID NO: 92664 - DNA, 6 bp, Unknown
  misc_feature (1)..( 6): Result.001 file - promoters60/1013497
aataaa

SEQ ID NO: 92665 - DNA, 6 bp, Unknown
  misc_feature (1)..( 6): Result.001 file - promoters60/1013497
aataaa

SEQ ID NO: 92666 - DNA, 8 bp, Unknown
  misc_feature (1)..( 8): Result.001 file - promoters60/1013497
aaatgtta

SEQ ID NO: 92667 - DNA, 8 bp, Unknown
  misc_feature (1)..( 8): Result.001 file - promoters60/1013497
aaatttta

SEQ ID NO: 92668 - DNA, 8 bp, Unknown
  misc_feature (1)..( 8): Result.001 file - promoters60/1013497
aattttca

SEQ ID NO: 92669 - DNA, 8 bp, Unknown
  misc_feature (1)..( 8): Result.001 file - promoters60/1013497
aattatca

SEQ ID NO: 92670 - DNA, 6 bp, Unknown
  misc_feature (1)..( 6): Result.001 file - promoters60/1013497
aaaatg

SEQ ID NO: 92671 - DNA, 6 bp, Unknown
  misc_feature (1)..( 6): Result.001 file - promoters60/1013497
aaaatg

SEQ ID NO: 92672 - DNA, 6 bp, Unknown
  misc_feature (1)..( 6): Result.001 file - promoters60/1013497
ataaga

SEQ ID NO: 92673 - DNA, 6 bp, Unknown
  misc_feature (1)..( 6): Result.001 file - promoters60/1013497
ataaga

SEQ ID NO: 92674 - DNA, 6 bp, Unknown
  misc_feature (1)..( 6): Result.001 file - promoters60/1013497
gttgac

SEQ ID NO: 92675 - DNA, 6 bp, Unknown
  misc_feature (1)..( 6): Result.001 file - promoters60/1013497
gttgac

SEQ ID NO: 92676 - DNA, 6 bp, Unknown
  misc_feature (1)..( 6): Result.001 file - promoters60/1013497
cactca

SEQ ID NO: 92677 - DNA, 6 bp, Unknown
  misc_feature (1)..( 6): Result.001 file - promoters60/1013497
cactca

SEQ ID NO: 92678 - DNA, 6 bp, Unknown
  misc_feature (1)..( 6): Result.001 file - promoters60/1013497
ccacca

SEQ ID NO: 92679 - DNA, 6 bp, Unknown
  misc_feature (1)..( 6): Result.001 file - promoters60/1013497
ccacca

SEQ ID NO: 92680 - DNA, 6 bp, Unknown
  misc_feature (1)..( 6): Result.001 file - promoters60/1013497
cggtga

SEQ ID NO: 92681 - DNA, 6 bp, Unknown
  misc_feature (1)..( 6): Result.001 file - promoters60/1013497
cggtga

SEQ ID NO: 92682 - DNA, 9 bp, Unknown
  misc_feature (1)..( 9): Result.001 file - promoters60/1013497
gaagttcta

SEQ ID NO: 92683 - DNA, 9 bp, Unknown
  misc_feature (1)..( 9): Result.001 file - promoters60/1013497
gaagtacta

SEQ ID NO: 92684 - DNA, 6 bp, Unknown
  misc_feature (1)..( 6): Result.001 file - promoters60/1013497
ccaagt

SEQ ID NO: 92685 - DNA, 6 bp, Unknown
  misc_feature (1)..( 6): Result.001 file - promoters60/1013497
ccaagt

SEQ ID NO: 92686 - DNA, 7 bp, Unknown
  misc_feature (1)..( 7): Result.001 file - promoters60/1013497
tctaagc

SEQ ID NO: 92687 - DNA, 7 bp, Unknown
  misc_feature (1)..( 7): Result.001 file - promoters60/1013540
tctgagc

SEQ ID NO: 92688 - DNA, 13 bp, Unknown
  misc_feature (1)..( 13): Result.001 file - promoters60/1013540
atcttctatgctt

SEQ ID NO: 92689 - DNA, 13 bp, Unknown
  misc_feature (1)..( 13): Result.001 file - promoters60/1013540
gttttctatatat

SEQ ID NO: 92690 - DNA, 13 bp, Unknown
  misc_feature (1)..( 13): Result.001 file - promoters60/1013540
aacttccatgttt

SEQ ID NO: 92691 - DNA, 13 bp, Unknown
  misc_feature (1)..( 13): Result.001 file - promoters60/1013540
atcttgtatatca

SEQ ID NO: 92692 - DNA, 13 bp, Unknown
  misc_feature (1)..( 13): Result.001 file - promoters60/1013540
attgtctatgctt

SEQ ID NO: 92693 - DNA, 13 bp, Unknown
  misc_feature (1)..( 13): Result.001 file - promoters60/1013629
ctcttgtaatgaa

SEQ ID NO: 92694 - DNA, 7 bp, Unknown
  misc_feature (1)..( 7): Result.001 file - promoters60/1013629
ggtttct

SEQ ID NO: 92695 - DNA, 7 bp, Unknown
  misc_feature (1)..( 7): Result.001 file - promoters60/1013629
ggtttct

SEQ ID NO: 92696 - DNA, 7 bp, Unknown
  misc_feature (1)..( 7): Result.001 file - promoters60/1013629
tgtttct

SEQ ID NO: 92697 - DNA, 8 bp, Unknown
  misc_feature (1)..( 8): Result.001 file - promoters60/1013629
agagaaag

SEQ ID NO: 92698 - DNA, 8 bp, Unknown
  misc_feature (1)..( 8): Result.001 file - promoters60/1013629
agaggaag

SEQ ID NO: 92699 - DNA, 8 bp, Unknown
  misc_feature (1)..( 8): Result.001 file - promoters60/1013629
agaaaaaa

SEQ ID NO: 92700 - DNA, 9 bp, Unknown
  misc_feature (1)..( 9): Result.001 file - promoters60/1013629
tatctaaga

SEQ ID NO: 92701 - DNA, 9 bp, Unknown
  misc_feature (1)..( 9): Result.001 file - promoters60/1013629
tttcttaga

SEQ ID NO: 92702 - DNA, 9 bp, Unknown
  misc_feature (1)..( 9): Result.001 file - promoters60/1013629
ttttttaga

SEQ ID NO: 92703 - DNA, 8 bp, Unknown
  misc_feature (1)..( 8): Result.001 file - promoters60/1013629
ttttcttt

SEQ ID NO: 92704 - DNA, 8 bp, Unknown
  misc_feature (1)..( 8): Result.001 file - promoters60/1013629
ttttgttt

SEQ ID NO: 92705 - DNA, 8 bp, Unknown
  misc_feature (1)..( 8): Result.001 file - promoters60/1013641
tttttttt

SEQ ID NO: 92706 - DNA, 9 bp, Unknown
  misc_feature (1)..( 9): Result.001 file - promoters60/1013641
tattatcag

SEQ ID NO: 92707 - DNA, 9 bp, Unknown
  misc_feature (1)..( 9): Result.001 file - promoters60/1013641
gattatcct

SEQ ID NO: 92708 - DNA, 9 bp, Unknown
  misc_feature (1)..( 9): Result.001 file - promoters60/1013641
tattattat

SEQ ID NO: 92709 - DNA, 12 bp, Unknown
  misc_feature (1)..( 12): Result.001 file - promoters60/1013641
tttgatttttgg

SEQ ID NO: 92710 - DNA, 12 bp, Unknown
  misc_feature (1)..( 12): Result.001 file - promoters60/1013641
tttgacttttca

SEQ ID NO: 92711 - DNA, 12 bp, Unknown
  misc_feature (1)..( 12): Result.001 file - promoters60/1013641
agtctcttatca

SEQ ID NO: 92712 - DNA, 10 bp, Unknown
  misc_feature (1)..( 10): Result.001 file - promoters60/1013641
ggatttaaaa

SEQ ID NO: 92713 - DNA, 10 bp, Unknown
  misc_feature (1)..( 10): Result.001 file - promoters60/1013641
ggatttaaat

SEQ ID NO: 92714 - DNA, 11 bp, Unknown
  misc_feature (1)..( 11): Result.001 file - promoters60/1013641
tagtttcaaat

SEQ ID NO: 92715 - DNA, 9 bp, Unknown
  misc_feature (1)..( 9): Result.001 file - promoters60/1013641
tttaaaata

SEQ ID NO: 92716 - DNA, 9 bp, Unknown
  misc_feature (1)..( 9): Result.001 file - promoters60/1013641
ctaaaaata

SEQ ID NO: 92717 - DNA, 9 bp, Unknown
  misc_feature (1)..( 9): Result.001 file - promoters60/1013641
tttcaaatg

SEQ ID NO: 92718 - DNA, 11 bp, Unknown
  misc_feature (1)..( 11): Result.001 file - promoters60/1013641
agactacgtag

SEQ ID NO: 92719 - DNA, 11 bp, Unknown
  misc_feature (1)..( 11): Result.001 file - promoters60/1013641
tttctacatag

SEQ ID NO: 92720 - DNA, 11 bp, Unknown
  misc_feature (1)..( 11): Result.001 file - promoters60/1013641
tttcaacaatg

SEQ ID NO: 92721 - DNA, 10 bp, Unknown
  misc_feature (1)..( 10): Result.001 file - promoters60/1013641
tctaccttcc

SEQ ID NO: 92722 - DNA, 10 bp, Unknown
  misc_feature (1)..( 10): Result.001 file - promoters60/1013641
tctcccttct

SEQ ID NO: 92723 - DNA, 10 bp, Unknown
  misc_feature (1)..( 10): Result.001 file - promoters60/1013645
cctctcttct

SEQ ID NO: 92724 - DNA, 8 bp, Unknown
  misc_feature (1)..( 8): Result.001 file - promoters60/1013645
agcttctc

SEQ ID NO: 92725 - DNA, 8 bp, Unknown
  misc_feature (1)..( 8): Result.001 file - promoters60/1013645
agctcctc

SEQ ID NO: 92726 - DNA, 7 bp, Unknown
  misc_feature (1)..( 7): Result.001 file - promoters60/1013645
ttcgtct

SEQ ID NO: 92727 - DNA, 7 bp, Unknown
  misc_feature (1)..( 7): Result.001 file - promoters60/1013645
ttcttct

SEQ ID NO: 92728 - DNA, 6 bp, Unknown
  misc_feature (1)..( 6): Result.001 file - promoters60/1013645
ataaat

SEQ ID NO: 92729 - DNA, 6 bp, Unknown
  misc_feature (1)..( 6): Result.001 file - promoters60/1013645
ataaat

SEQ ID NO: 92730 - DNA, 6 bp, Unknown
  misc_feature (1)..( 6): Result.001 file - promoters60/1013645
atgatc

SEQ ID NO: 92731 - DNA, 6 bp, Unknown
  misc_feature (1)..( 6): Result.001 file - promoters60/1013645
atgatc

SEQ ID NO: 92732 - DNA, 7 bp, Unknown
  misc_feature (1)..( 7): Result.001 file - promoters60/1013645
agaattg

SEQ ID NO: 92733 - DNA, 7 bp, Unknown
  misc_feature (1)..( 7): Result.001 file - promoters60/1013645
agagttg

SEQ ID NO: 92734 - DNA, 7 bp, Unknown
  misc_feature (1)..( 7): Result.001 file - promoters60/1013645
tgtatat

SEQ ID NO: 92735 - DNA, 7 bp, Unknown
  misc_feature (1)..( 7): Result.001 file - promoters60/1013645
tgtctat

SEQ ID NO: 92736 - DNA, 8 bp, Unknown
  misc_feature (1)..( 8): Result.001 file - promoters60/1013645
tctggttt

SEQ ID NO: 92737 - DNA, 8 bp, Unknown
  misc_feature (1)..( 8): Result.001 file - promoters60/1013645
tctggttt

SEQ ID NO: 92738 - DNA, 7 bp, Unknown
  misc_feature (1)..( 7): Result.001 file - promoters60/1013645
tttactt

SEQ ID NO: 92739 - DNA, 7 bp, Unknown
  misc_feature (1)..( 7): Result.001 file - promoters60/1013645
tttgctt

SEQ ID NO: 92740 - DNA, 8 bp, Unknown
  misc_feature (1)..( 8): Result.001 file - promoters60/1013645
cttttctc

SEQ ID NO: 92741 - DNA, 8 bp, Unknown
  misc_feature (1)..( 8): Result.001 file - promoters60/1013645
cttgtctc

SEQ ID NO: 92742 - DNA, 7 bp, Unknown
  misc_feature (1)..( 7): Result.001 file - promoters60/1013645
ttgaagc

SEQ ID NO: 92743 - DNA, 7 bp, Unknown
  misc_feature (1)..( 7): Result.001 file - promoters60/1013645
ttgaagc

SEQ ID NO: 92744 - DNA, 6 bp, Unknown
  misc_feature (1)..( 6): Result.001 file - promoters60/1013645
cctttt

SEQ ID NO: 92745 - DNA, 6 bp, Unknown
  misc_feature (1)..( 6): Result.001 file - promoters60/1013645
cctttt

SEQ ID NO: 92746 - DNA, 7 bp, Unknown
  misc_feature (1)..( 7): Result.001 file - promoters60/1013645
ttttttt

SEQ ID NO: 92747 - DNA, 7 bp, Unknown
  misc_feature (1)..( 7): Result.001 file - promoters60/1013645
ttttttt

SEQ ID NO: 92748 - DNA, 7 bp, Unknown
  misc_feature (1)..( 7): Result.001 file - promoters60/1013645
ggcctat

SEQ ID NO: 92749 - DNA, 7 bp, Unknown
  misc_feature (1)..( 7): Result.001 file - promoters60/1013674
ggcctat

SEQ ID NO: 92750 - DNA, 8 bp, Unknown
  misc_feature (1)..( 8): Result.001 file - promoters60/1013674
ttttgttt

SEQ ID NO: 92751 - DNA, 8 bp, Unknown
  misc_feature (1)..( 8): Result.001 file - promoters60/1013674
ttttgtgg

SEQ ID NO: 92752 - DNA, 8 bp, Unknown
  misc_feature (1)..( 8): Result.001 file - promoters60/1013674
atttattt

SEQ ID NO: 92753 - DNA, 8 bp, Unknown
  misc_feature (1)..( 8): Result.001 file - promoters60/1013674
attacttt

SEQ ID NO: 92754 - DNA, 8 bp, Unknown
  misc_feature (1)..( 8): Result.001 file - promoters60/1013674
attgcttt

SEQ ID NO: 92755 - DNA, 6 bp, Unknown
  misc_feature (1)..( 6): Result.001 file - promoters60/1013674
aaacat

SEQ ID NO: 92756 - DNA, 6 bp, Unknown
  misc_feature (1)..( 6): Result.001 file - promoters60/1013674
aaacat

SEQ ID NO: 92757 - DNA, 8 bp, Unknown
  misc_feature (1)..( 8): Result.001 file - promoters60/1013674
tgagtttt

SEQ ID NO: 92758 - DNA, 8 bp, Unknown
  misc_feature (1)..( 8): Result.001 file - promoters60/1013674
tgagtttt

SEQ ID NO: 92759 - DNA, 9 bp, Unknown
  misc_feature (1)..( 9): Result.001 file - promoters60/1013674
ataagtttt

SEQ ID NO: 92760 - DNA, 9 bp, Unknown
  misc_feature (1)..( 9): Result.001 file - promoters60/1013674
ataagcttt

SEQ ID NO: 92761 - DNA, 12 bp, Unknown
  misc_feature (1)..( 12): Result.001 file - promoters60/1013674
tttttgtgtgta

SEQ ID NO: 92762 - DNA, 12 bp, Unknown
  misc_feature (1)..( 12): Result.001 file - promoters60/1013674
tttctgtttcaa

SEQ ID NO: 92763 - DNA, 12 bp, Unknown
  misc_feature (1)..( 12): Result.001 file - promoters60/1013674
tttttgttttgt

SEQ ID NO: 92764 - DNA, 6 bp, Unknown
  misc_feature (1)..( 6): Result.001 file - promoters60/1013674
atatca

SEQ ID NO: 92765 - DNA, 6 bp, Unknown
  misc_feature (1)..( 6): Result.001 file - promoters60/1013674
atatca

SEQ ID NO: 92766 - DNA, 7 bp, Unknown
  misc_feature (1)..( 7): Result.001 file - promoters60/1013674
atatttt

SEQ ID NO: 92767 - DNA, 7 bp, Unknown
  misc_feature (1)..( 7): Result.001 file - promoters60/1013674
atagttt

SEQ ID NO: 92768 - DNA, 8 bp, Unknown
  misc_feature (1)..( 8): Result.001 file - promoters60/1013674
tagcataa

SEQ ID NO: 92769 - DNA, 8 bp, Unknown
  misc_feature (1)..( 8): Result.001 file - promoters60/1013674
taggataa

SEQ ID NO: 92770 - DNA, 8 bp, Unknown
  misc_feature (1)..( 8): Result.001 file - promoters60/1013674
ttaaaaat

SEQ ID NO: 92771 - DNA, 8 bp, Unknown
  misc_feature (1)..( 8): Result.001 file - promoters60/1013674
ttataaat

SEQ ID NO: 92772 - DNA, 8 bp, Unknown
  misc_feature (1)..( 8): Result.001 file - promoters60/1013674
acaaaaat

SEQ ID NO: 92773 - DNA, 6 bp, Unknown
  misc_feature (1)..( 6): Result.001 file - promoters60/1013674
acaaaa

SEQ ID NO: 92774 - DNA, 6 bp, Unknown
  misc_feature (1)..( 6): Result.001 file - promoters60/1013674
acaaaa

SEQ ID NO: 92775 - DNA, 7 bp, Unknown
  misc_feature (1)..( 7): Result.001 file - promoters60/1013674
atatttt

SEQ ID NO: 92776 - DNA, 7 bp, Unknown
  misc_feature (1)..( 7): Result.001 file - promoters60/1013674
ataattt

SEQ ID NO: 92777 - DNA, 7 bp, Unknown
  misc_feature (1)..( 7): Result.001 file - promoters60/1013674
ttttata

SEQ ID NO: 92778 - DNA, 7 bp, Unknown
  misc_feature (1)..( 7): Result.001 file - promoters60/1013674
tttaata

SEQ ID NO: 92779 - DNA, 7 bp, Unknown
  misc_feature (1)..( 7): Result.001 file - promoters60/1013674
attaaat

SEQ ID NO: 92780 - DNA, 7 bp, Unknown
  misc_feature (1)..( 7): Result.001 file - promoters60/1013674
attaaat

SEQ ID NO: 92781 - DNA, 8 bp, Unknown
  misc_feature (1)..( 8): Result.001 file - promoters60/1013674
aaaacaat

SEQ ID NO: 92782 - DNA, 8 bp, Unknown
  misc_feature (1)..( 8): Result.001 file - promoters60/1013674
aaaacaat

SEQ ID NO: 92783 - DNA, 7 bp, Unknown
  misc_feature (1)..( 7): Result.001 file - promoters60/1013674
ataaaat

SEQ ID NO: 92784 - DNA, 7 bp, Unknown
  misc_feature (1)..( 7): Result.001 file - promoters60/1013674
atacaat

SEQ ID NO: 92785 - DNA, 7 bp, Unknown
  misc_feature (1)..( 7): Result.001 file - promoters60/1013674
taccttt

SEQ ID NO: 92786 - DNA, 7 bp, Unknown
  misc_feature (1)..( 7): Result.001 file - promoters60/1013674
taccttt

SEQ ID NO: 92787 - DNA, 7 bp, Unknown
  misc_feature (1)..( 7): Result.001 file - promoters60/1013674
tttacta

SEQ ID NO: 92788 - DNA, 7 bp, Unknown
  misc_feature (1)..( 7): Result.001 file - promoters60/1013674
ttttcta

SEQ ID NO: 92789 - DNA, 6 bp, Unknown
  misc_feature (1)..( 6): Result.001 file - promoters60/1013674
atatat

SEQ ID NO: 92790 - DNA, 6 bp, Unknown
  misc_feature (1)..( 6): Result.001 file - promoters60/1013674
atatat

SEQ ID NO: 92791 - DNA, 7 bp, Unknown
  misc_feature (1)..( 7): Result.001 file - promoters60/1013674
atattat

SEQ ID NO: 92792 - DNA, 7 bp, Unknown
  misc_feature (1)..( 7): Result.001 file - promoters60/1013674
ataatat

SEQ ID NO: 92793 - DNA, 8 bp, Unknown
  misc_feature (1)..( 8): Result.001 file - promoters60/1013674
attacaat

SEQ ID NO: 92794 - DNA, 8 bp, Unknown
  misc_feature (1)..( 8): Result.001 file - promoters60/1013674
cttataat

SEQ ID NO: 92795 - DNA, 8 bp, Unknown
  misc_feature (1)..( 8): Result.001 file - promoters60/1013674
cttaaaat

SEQ ID NO: 92796 - DNA, 6 bp, Unknown
  misc_feature (1)..( 6): Result.001 file - promoters60/1013674
tttcct

SEQ ID NO: 92797 - DNA, 6 bp, Unknown
  misc_feature (1)..( 6): Result.001 file - promoters60/1013674
tttcct

SEQ ID NO: 92798 - DNA, 6 bp, Unknown
  misc_feature (1)..( 6): Result.001 file - promoters60/1013674
attttt

SEQ ID NO: 92799 - DNA, 6 bp, Unknown
  misc_feature (1)..( 6): Result.001 file - promoters60/1013674
attttt

SEQ ID NO: 92800 - DNA, 7 bp, Unknown
  misc_feature (1)..( 7): Result.001 file - promoters60/1013674
tttgtta

SEQ ID NO: 92801 - DNA, 7 bp, Unknown
  misc_feature (1)..( 7): Result.001 file - promoters60/1013674
tttgtta

SEQ ID NO: 92802 - DNA, 6 bp, Unknown
  misc_feature (1)..( 6): Result.001 file - promoters60/1013674
atttaa

SEQ ID NO: 92803 - DNA, 6 bp, Unknown
  misc_feature (1)..( 6): Result.001 file - promoters60/1013674
atttaa

SEQ ID NO: 92804 - DNA, 6 bp, Unknown
  misc_feature (1)..( 6): Result.001 file - promoters60/1013674
aataga

SEQ ID NO: 92805 - DNA, 6 bp, Unknown
  misc_feature (1)..( 6): Result.001 file - promoters60/1013674
aataga

SEQ ID NO: 92806 - DNA, 8 bp, Unknown
  misc_feature (1)..( 8): Result.001 file - promoters60/1013674
aaagaaag

SEQ ID NO: 92807 - DNA, 8 bp, Unknown
  misc_feature (1)..( 8): Result.001 file - promoters60/1013674
aaacaaag

SEQ ID NO: 92808 - DNA, 7 bp, Unknown
  misc_feature (1)..( 7): Result.001 file - promoters60/1013674
aacaaaa

SEQ ID NO: 92809 - DNA, 7 bp, Unknown
  misc_feature (1)..( 7): Result.001 file - promoters60/1013674
aacaaaa

SEQ ID NO: 92810 - DNA, 7 bp, Unknown
  misc_feature (1)..( 7): Result.001 file - promoters60/1013674
gacaaaa

SEQ ID NO: 92811 - DNA, 6 bp, Unknown
  misc_feature (1)..( 6): Result.001 file - promoters60/1013674
tgtatt

SEQ ID NO: 92812 - DNA, 6 bp, Unknown
  misc_feature (1)..( 6): Result.001 file - promoters60/1013674
tgtatt

SEQ ID NO: 92813 - DNA, 7 bp, Unknown
  misc_feature (1)..( 7): Result.001 file - promoters60/1013674
tatctgt

SEQ ID NO: 92814 - DNA, 7 bp, Unknown
  misc_feature (1)..( 7): Result.001 file - promoters60/1013674
tatttgt

SEQ ID NO: 92815 - DNA, 7 bp, Unknown
  misc_feature (1)..( 7): Result.001 file - promoters60/1013674
attgtat

SEQ ID NO: 92816 - DNA, 7 bp, Unknown
  misc_feature (1)..( 7): Result.001 file - promoters60/1013674
attgtat

SEQ ID NO: 92817 - DNA, 11 bp, Unknown
  misc_feature (1)..( 11): Result.001 file - promoters60/1013674
aaataataatt

SEQ ID NO: 92818 - DNA, 11 bp, Unknown
  misc_feature (1)..( 11): Result.001 file - promoters60/1013690
aaataataatt

SEQ ID NO: 92819 - DNA, 7 bp, Unknown
  misc_feature (1)..( 7): Result.001 file - promoters60/1013690
ttttaga

SEQ ID NO: 92820 - DNA, 7 bp, Unknown
  misc_feature (1)..( 7): Result.001 file - promoters60/1013690
tttcaga

SEQ ID NO: 92821 - DNA, 11 bp, Unknown
  misc_feature (1)..( 11): Result.001 file - promoters60/1013690
taagaggtata

SEQ ID NO: 92822 - DNA, 11 bp, Unknown
  misc_feature (1)..( 11): Result.001 file - promoters60/1013690
taacaggtacg

SEQ ID NO: 92823 - DNA, 11 bp, Unknown
  misc_feature (1)..( 11): Result.001 file - promoters60/1013690
gtggaggtata

SEQ ID NO: 92824 - DNA, 6 bp, Unknown
  misc_feature (1)..( 6): Result.001 file - promoters60/1013690
tatgtt

SEQ ID NO: 92825 - DNA, 6 bp, Unknown
  misc_feature (1)..( 6): Result.001 file - promoters60/1013690
tatgtt

SEQ ID NO: 92826 - DNA, 6 bp, Unknown
  misc_feature (1)..( 6): Result.001 file - promoters60/1013690
caagaa

SEQ ID NO: 92827 - DNA, 6 bp, Unknown
  misc_feature (1)..( 6): Result.001 file - promoters60/1013690
caagaa

SEQ ID NO: 92828 - DNA, 8 bp, Unknown
  misc_feature (1)..( 8): Result.001 file - promoters60/1013690
attattga

SEQ ID NO: 92829 - DNA, 8 bp, Unknown
  misc_feature (1)..( 8): Result.001 file - promoters60/1013690
attactga

SEQ ID NO: 92830 - DNA, 7 bp, Unknown
  misc_feature (1)..( 7): Result.001 file - promoters60/1013690
tattata

SEQ ID NO: 92831 - DNA, 7 bp, Unknown
  misc_feature (1)..( 7): Result.001 file - promoters60/1013690
tatcata

SEQ ID NO: 92832 - DNA, 6 bp, Unknown
  misc_feature (1)..( 6): Result.001 file - promoters60/1013690
aatttg

SEQ ID NO: 92833 - DNA, 6 bp, Unknown
  misc_feature (1)..( 6): Result.001 file - promoters60/1013690
aatttg

SEQ ID NO: 92834 - DNA, 6 bp, Unknown
  misc_feature (1)..( 6): Result.001 file - promoters60/1013690
tataaa

SEQ ID NO: 92835 - DNA, 6 bp, Unknown
  misc_feature (1)..( 6): Result.001 file - promoters60/1013690
tataaa

SEQ ID NO: 92836 - DNA, 6 bp, Unknown
  misc_feature (1)..( 6): Result.001 file - promoters60/1013690
tctcaa

SEQ ID NO: 92837 - DNA, 6 bp, Unknown
  misc_feature (1)..( 6): Result.001 file - promoters60/1013690
tctcaa

SEQ ID NO: 92838 - DNA, 7 bp, Unknown
  misc_feature (1)..( 7): Result.001 file - promoters60/1013690
aaccaca

SEQ ID NO: 92839 - DNA, 7 bp, Unknown
  misc_feature (1)..( 7): Result.001 file - promoters60/1013690
aaccaca

SEQ ID NO: 92840 - DNA, 6 bp, Unknown
  misc_feature (1)..( 6): Result.001 file - promoters60/1013690
ggctga

SEQ ID NO: 92841 - DNA, 6 bp, Unknown
  misc_feature (1)..( 6): Result.001 file - promoters60/1013690
ggctga

SEQ ID NO: 92842 - DNA, 11 bp, Unknown
  misc_feature (1)..( 11): Result.001 file - promoters60/1013690
aggttctcaga

SEQ ID NO: 92843 - DNA, 11 bp, Unknown
  misc_feature (1)..( 11): Result.001 file - promoters60/1013690
agggtctgaga

SEQ ID NO: 92844 - DNA, 6 bp, Unknown
  misc_feature (1)..( 6): Result.001 file - promoters60/1013690
agattt

SEQ ID NO: 92845 - DNA, 6 bp, Unknown
  misc_feature (1)..( 6): Result.001 file - promoters60/1013710
agattt

SEQ ID NO: 92846 - DNA, 6 bp, Unknown
  misc_feature (1)..( 6): Result.001 file - promoters60/1013710
acatgt

SEQ ID NO: 92847 - DNA, 6 bp, Unknown
  misc_feature (1)..( 6): Result.001 file - promoters60/1013710
acatgt

SEQ ID NO: 92848 - DNA, 8 bp, Unknown
  misc_feature (1)..( 8): Result.001 file - promoters60/1013710
taatgagt

SEQ ID NO: 92849 - DNA, 8 bp, Unknown
  misc_feature (1)..( 8): Result.001 file - promoters60/1013710
taatgata

SEQ ID NO: 92850 - DNA, 8 bp, Unknown
  misc_feature (1)..( 8): Result.001 file - promoters60/1013710
aaatcagt

SEQ ID NO: 92851 - DNA, 6 bp, Unknown
  misc_feature (1)..( 6): Result.001 file - promoters60/1013710
ttttaa

SEQ ID NO: 92852 - DNA, 6 bp, Unknown
  misc_feature (1)..( 6): Result.001 file - promoters60/1013710
ttttaa

SEQ ID NO: 92853 - DNA, 6 bp, Unknown
  misc_feature (1)..( 6): Result.001 file - promoters60/1013710
aaaata

SEQ ID NO: 92854 - DNA, 6 bp, Unknown
  misc_feature (1)..( 6): Result.001 file - promoters60/1013710
aaaata

SEQ ID NO: 92855 - DNA, 8 bp, Unknown
  misc_feature (1)..( 8): Result.001 file - promoters60/1013710
aagcattg

SEQ ID NO: 92856 - DNA, 8 bp, Unknown
  misc_feature (1)..( 8): Result.001 file - promoters60/1013710
aagctttg

SEQ ID NO: 92857 - DNA, 6 bp, Unknown
  misc_feature (1)..( 6): Result.001 file - promoters60/1013710
tccaca

SEQ ID NO: 92858 - DNA, 6 bp, Unknown
  misc_feature (1)..( 6): Result.001 file - promoters60/1013710
tccaca

SEQ ID NO: 92859 - DNA, 7 bp, Unknown
  misc_feature (1)..( 7): Result.001 file - promoters60/1013710
ttgaaat

SEQ ID NO: 92860 - DNA, 7 bp, Unknown
  misc_feature (1)..( 7): Result.001 file - promoters60/1013710
ttggaat

SEQ ID NO: 92861 - DNA, 6 bp, Unknown
  misc_feature (1)..( 6): Result.001 file - promoters60/1013710
aagaag

SEQ ID NO: 92862 - DNA, 6 bp, Unknown
  misc_feature (1)..( 6): Result.001 file - promoters60/1013710
aagaag

SEQ ID NO: 92863 - DNA, 6 bp, Unknown
  misc_feature (1)..( 6): Result.001 file - promoters60/1013710
aataaa

SEQ ID NO: 92864 - DNA, 6 bp, Unknown
  misc_feature (1)..( 6): Result.001 file - promoters60/1013710
aataaa

SEQ ID NO: 92865 - DNA, 8 bp, Unknown
  misc_feature (1)..( 8): Result.001 file - promoters60/1013710
aaaatttt

SEQ ID NO: 92866 - DNA, 8 bp, Unknown
  misc_feature (1)..( 8): Result.001 file - promoters60/1013710
aaaacttt

SEQ ID NO: 92867 - DNA, 9 bp, Unknown
  misc_feature (1)..( 9): Result.001 file - promoters60/1013710
taaaaagag

SEQ ID NO: 92868 - DNA, 9 bp, Unknown
  misc_feature (1)..( 9): Result.001 file - promoters60/1013710
taagaagag

SEQ ID NO: 92869 - DNA, 7 bp, Unknown
  misc_feature (1)..( 7): Result.001 file - promoters60/1013710
tttcaag

SEQ ID NO: 92870 - DNA, 7 bp, Unknown
  misc_feature (1)..( 7): Result.001 file - promoters60/1013710
ttttaag

SEQ ID NO: 92871 - DNA, 8 bp, Unknown
  misc_feature (1)..( 8): Result.001 file - promoters60/1013710
agctatac

SEQ ID NO: 92872 - DNA, 8 bp, Unknown
  misc_feature (1)..( 8): Result.001 file - promoters60/1013710
agccatac

SEQ ID NO: 92873 - DNA, 10 bp, Unknown
  misc_feature (1)..( 10): Result.001 file - promoters60/1013710
cttgattaac

SEQ ID NO: 92874 - DNA, 10 bp, Unknown
  misc_feature (1)..( 10): Result.001 file - promoters60/1013710
cttgaataac

SEQ ID NO: 92875 - DNA, 9 bp, Unknown
  misc_feature (1)..( 9): Result.001 file - promoters60/1013710
taaactaaa

SEQ ID NO: 92876 - DNA, 9 bp, Unknown
  misc_feature (1)..( 9): Result.001 file - promoters60/1013714
taaacgaaa

SEQ ID NO: 92877 - DNA, 6 bp, Unknown
  misc_feature (1)..( 6): Result.001 file - promoters60/1013714
tctttt

SEQ ID NO: 92878 - DNA, 6 bp, Unknown
  misc_feature (1)..( 6): Result.001 file - promoters60/1013714
tctttt

SEQ ID NO: 92879 - DNA, 8 bp, Unknown
  misc_feature (1)..( 8): Result.001 file - promoters60/1013714
atttaaat

SEQ ID NO: 92880 - DNA, 8 bp, Unknown
  misc_feature (1)..( 8): Result.001 file - promoters60/1013714
atttcaat

SEQ ID NO: 92881 - DNA, 7 bp, Unknown
  misc_feature (1)..( 7): Result.001 file - promoters60/1013714
aaaaact

SEQ ID NO: 92882 - DNA, 7 bp, Unknown
  misc_feature (1)..( 7): Result.001 file - promoters60/1013714
aaatact

SEQ ID NO: 92883 - DNA, 10 bp, Unknown
  misc_feature (1)..( 10): Result.001 file - promoters60/1013714
aaatagttat

SEQ ID NO: 92884 - DNA, 10 bp, Unknown
  misc_feature (1)..( 10): Result.001 file - promoters60/1013714
aaataattat

SEQ ID NO: 92885 - DNA, 6 bp, Unknown
  misc_feature (1)..( 6): Result.001 file - promoters60/1013714
atgatc

SEQ ID NO: 92886 - DNA, 6 bp, Unknown
  misc_feature (1)..( 6): Result.001 file - promoters60/1013714
atgatc

SEQ ID NO: 92887 - DNA, 7 bp, Unknown
  misc_feature (1)..( 7): Result.001 file - promoters60/1013714
cacgaca

SEQ ID NO: 92888 - DNA, 7 bp, Unknown
  misc_feature (1)..( 7): Result.001 file - promoters60/1013714
cactaca

SEQ ID NO: 92889 - DNA, 7 bp, Unknown
  misc_feature (1)..( 7): Result.001 file - promoters60/1013714
ttctaaa

SEQ ID NO: 92890 - DNA, 7 bp, Unknown
  misc_feature (1)..( 7): Result.001 file - promoters60/1013714
ttcaaaa

SEQ ID NO: 92891 - DNA, 8 bp, Unknown
  misc_feature (1)..( 8): Result.001 file - promoters60/1013714
aaagtaag

SEQ ID NO: 92892 - DNA, 8 bp, Unknown
  misc_feature (1)..( 8): Result.001 file - promoters60/1013714
aaaggaag

SEQ ID NO: 92893 - DNA, 9 bp, Unknown
  misc_feature (1)..( 9): Result.001 file - promoters60/1013714
gaaaaaagt

SEQ ID NO: 92894 - DNA, 9 bp, Unknown
  misc_feature (1)..( 9): Result.001 file - promoters60/1013714
gaacaaagt

SEQ ID NO: 92895 - DNA, 11 bp, Unknown
  misc_feature (1)..( 11): Result.001 file - promoters60/1013714
tatatatccgc

SEQ ID NO: 92896 - DNA, 11 bp, Unknown
  misc_feature (1)..( 11): Result.001 file - promoters60/1013714
tatataatagt

SEQ ID NO: 92897 - DNA, 11 bp, Unknown
  misc_feature (1)..( 11): Result.001 file - promoters60/1013714
tatataaatcc

SEQ ID NO: 92898 - DNA, 9 bp, Unknown
  misc_feature (1)..( 9): Result.001 file - promoters60/1013714
gccttgaac

SEQ ID NO: 92899 - DNA, 9 bp, Unknown
  misc_feature (1)..( 9): Result.001 file - promoters60/1013714
gccatgaac

SEQ ID NO: 92900 - DNA, 8 bp, Unknown
  misc_feature (1)..( 8): Result.001 file - promoters60/1013714
cattgtca

SEQ ID NO: 92901 - DNA, 8 bp, Unknown
  misc_feature (1)..( 8): Result.001 file - promoters60/1013714
cattatca

SEQ ID NO: 92902 - DNA, 8 bp, Unknown
  misc_feature (1)..( 8): Result.001 file - promoters60/1013714
atgcaatt

SEQ ID NO: 92903 - DNA, 8 bp, Unknown
  misc_feature (1)..( 8): Result.001 file - promoters60/1013714
atgaaatt

SEQ ID NO: 92904 - DNA, 8 bp, Unknown
  misc_feature (1)..( 8): Result.001 file - promoters60/1013714
ttgtattt

SEQ ID NO: 92905 - DNA, 8 bp, Unknown
  misc_feature (1)..( 8): Result.001 file - promoters60/1013714
ttgtgttt

SEQ ID NO: 92906 - DNA, 8 bp, Unknown
  misc_feature (1)..( 8): Result.001 file - promoters60/1013714
ttattttt

SEQ ID NO: 92907 - DNA, 8 bp, Unknown
  misc_feature (1)..( 8): Result.001 file - promoters60/1013714
ttaatttt

SEQ ID NO: 92908 - DNA, 6 bp, Unknown
  misc_feature (1)..( 6): Result.001 file - promoters60/1013714
aaattt

SEQ ID NO: 92909 - DNA, 6 bp, Unknown
  misc_feature (1)..( 6): Result.001 file - promoters60/1013714
aaattt

SEQ ID NO: 92910 - DNA, 7 bp, Unknown
  misc_feature (1)..( 7): Result.001 file - promoters60/1013714
aacgtta

SEQ ID NO: 92911 - DNA, 7 bp, Unknown
  misc_feature (1)..( 7): Result.001 file - promoters60/1013714
aacctta

SEQ ID NO: 92912 - DNA, 9 bp, Unknown
  misc_feature (1)..( 9): Result.001 file - promoters60/1013714
cattctaaa

SEQ ID NO: 92913 - DNA, 9 bp, Unknown
  misc_feature (1)..( 9): Result.001 file - promoters60/1013714
cattttaaa

SEQ ID NO: 92914 - DNA, 6 bp, Unknown
  misc_feature (1)..( 6): Result.001 file - promoters60/1013714
aagcat

SEQ ID NO: 92915 - DNA, 6 bp, Unknown
  misc_feature (1)..( 6): Result.001 file - promoters60/1013714
aagcat

SEQ ID NO: 92916 - DNA, 7 bp, Unknown
  misc_feature (1)..( 7): Result.001 file - promoters60/1013714
atttttt

SEQ ID NO: 92917 - DNA, 7 bp, Unknown
  misc_feature (1)..( 7): Result.001 file - promoters60/1013714
atttttt

SEQ ID NO: 92918 - DNA, 8 bp, Unknown
  misc_feature (1)..( 8): Result.001 file - promoters60/1013714
aaattgct

SEQ ID NO: 92919 - DNA, 8 bp, Unknown
  misc_feature (1)..( 8): Result.001 file - promoters60/1013714
aaattgct

SEQ ID NO: 92920 - DNA, 8 bp, Unknown
  misc_feature (1)..( 8): Result.001 file - promoters60/1013714
aaaacatg

SEQ ID NO: 92921 - DNA, 8 bp, Unknown
  misc_feature (1)..( 8): Result.001 file - promoters60/1013714
aaaaaatg

SEQ ID NO: 92922 - DNA, 6 bp, Unknown
  misc_feature (1)..( 6): Result.001 file - promoters60/1013714
aaatat

SEQ ID NO: 92923 - DNA, 6 bp, Unknown
  misc_feature (1)..( 6): Result.001 file - promoters60/1013714
aaatat

SEQ ID NO: 92924 - DNA, 6 bp, Unknown
  misc_feature (1)..( 6): Result.001 file - promoters60/1013714
aattta

SEQ ID NO: 92925 - DNA, 6 bp, Unknown
  misc_feature (1)..( 6): Result.001 file - promoters60/1013764
aattta

SEQ ID NO: 92926 - DNA, 8 bp, Unknown
  misc_feature (1)..( 8): Result.001 file - promoters60/1013764
tattatgt

SEQ ID NO: 92927 - DNA, 8 bp, Unknown
  misc_feature (1)..( 8): Result.001 file - promoters60/1013764
tattgtgt

SEQ ID NO: 92928 - DNA, 8 bp, Unknown
  misc_feature (1)..( 8): Result.001 file - promoters60/1013764
gaccgatc

SEQ ID NO: 92929 - DNA, 8 bp, Unknown
  misc_feature (1)..( 8): Result.001 file - promoters60/1013764
taccaatc

SEQ ID NO: 92930 - DNA, 8 bp, Unknown
  misc_feature (1)..( 8): Result.001 file - promoters60/1013764
taccaaat

SEQ ID NO: 92931 - DNA, 7 bp, Unknown
  misc_feature (1)..( 7): Result.001 file - promoters60/1013764
gtatgtt

SEQ ID NO: 92932 - DNA, 7 bp, Unknown
  misc_feature (1)..( 7): Result.001 file - promoters60/1013764
gtaggtt

SEQ ID NO: 92933 - DNA, 6 bp, Unknown
  misc_feature (1)..( 6): Result.001 file - promoters60/1013764
gtttct

SEQ ID NO: 92934 - DNA, 6 bp, Unknown
  misc_feature (1)..( 6): Result.001 file - promoters60/1013764
gtttct

SEQ ID NO: 92935 - DNA, 6 bp, Unknown
  misc_feature (1)..( 6): Result.001 file - promoters60/1013764
gttttg

SEQ ID NO: 92936 - DNA, 6 bp, Unknown
  misc_feature (1)..( 6): Result.001 file - promoters60/1013764
gttttg

SEQ ID NO: 92937 - DNA, 6 bp, Unknown
  misc_feature (1)..( 6): Result.001 file - promoters60/1013764
tagtaa

SEQ ID NO: 92938 - DNA, 6 bp, Unknown
  misc_feature (1)..( 6): Result.001 file - promoters60/1013764
tagtaa

SEQ ID NO: 92939 - DNA, 7 bp, Unknown
  misc_feature (1)..( 7): Result.001 file - promoters60/1013764
atatctg

SEQ ID NO: 92940 - DNA, 7 bp, Unknown
  misc_feature (1)..( 7): Result.001 file - promoters60/1013764
atatctg

SEQ ID NO: 92941 - DNA, 8 bp, Unknown
  misc_feature (1)..( 8): Result.001 file - promoters60/1013764
gctaccat

SEQ ID NO: 92942 - DNA, 8 bp, Unknown
  misc_feature (1)..( 8): Result.001 file - promoters60/1013764
gctagcat

SEQ ID NO: 92943 - DNA, 6 bp, Unknown
  misc_feature (1)..( 6): Result.001 file - promoters60/1013764
ggtgag

SEQ ID NO: 92944 - DNA, 6 bp, Unknown
  misc_feature (1)..( 6): Result.001 file - promoters60/1013764
ggtgag

SEQ ID NO: 92945 - DNA, 11 bp, Unknown
  misc_feature (1)..( 11): Result.001 file - promoters60/1013764
tgttgtttcct

SEQ ID NO: 92946 - DNA, 11 bp, Unknown
  misc_feature (1)..( 11): Result.001 file - promoters60/1013764
acttgtctcct

SEQ ID NO: 92947 - DNA, 11 bp, Unknown
  misc_feature (1)..( 11): Result.001 file - promoters60/1013764
actcgtcgttt

SEQ ID NO: 92948 - DNA, 7 bp, Unknown
  misc_feature (1)..( 7): Result.001 file - promoters60/1013764
gtgctaa

SEQ ID NO: 92949 - DNA, 7 bp, Unknown
  misc_feature (1)..( 7): Result.001 file - promoters60/1013764
gtgttaa

SEQ ID NO: 92950 - DNA, 7 bp, Unknown
  misc_feature (1)..( 7): Result.001 file - promoters60/1013764
gatgaag

SEQ ID NO: 92951 - DNA, 7 bp, Unknown
  misc_feature (1)..( 7): Result.001 file - promoters60/1013764
gattaag

SEQ ID NO: 92952 - DNA, 7 bp, Unknown
  misc_feature (1)..( 7): Result.001 file - promoters60/1013764
tctacct

SEQ ID NO: 92953 - DNA, 7 bp, Unknown
  misc_feature (1)..( 7): Result.001 file - promoters60/1013764
tcttcct

SEQ ID NO: 92954 - DNA, 7 bp, Unknown
  misc_feature (1)..( 7): Result.001 file - promoters60/1013764
cttattg

SEQ ID NO: 92955 - DNA, 7 bp, Unknown
  misc_feature (1)..( 7): Result.001 file - promoters60/1013764
cttcttg

SEQ ID NO: 92956 - DNA, 7 bp, Unknown
  misc_feature (1)..( 7): Result.001 file - promoters60/1013764
gtttctt

SEQ ID NO: 92957 - DNA, 7 bp, Unknown
  misc_feature (1)..( 7): Result.001 file - promoters60/1013805
gttcctt

SEQ ID NO: 92958 - DNA, 9 bp, Unknown
  misc_feature (1)..( 9): Result.001 file - promoters60/1013805
attctttca

SEQ ID NO: 92959 - DNA, 9 bp, Unknown
  misc_feature (1)..( 9): Result.001 file - promoters60/1013805
cttctttgg

SEQ ID NO: 92960 - DNA, 9 bp, Unknown
  misc_feature (1)..( 9): Result.001 file - promoters60/1013805
tttcttttt

SEQ ID NO: 92961 - DNA, 9 bp, Unknown
  misc_feature (1)..( 9): Result.001 file - promoters60/1013805
attgttttc

SEQ ID NO: 92962 - DNA, 9 bp, Unknown
  misc_feature (1)..( 9): Result.001 file - promoters60/1013805
tgtcttttg

SEQ ID NO: 92963 - DNA, 9 bp, Unknown
  misc_feature (1)..( 9): Result.001 file - promoters60/1013850
agtgttttc

SEQ ID NO: 92964 - DNA, 7 bp, Unknown
  misc_feature (1)..( 7): Result.001 file - promoters60/1013850
attttaa

SEQ ID NO: 92965 - DNA, 7 bp, Unknown
  misc_feature (1)..( 7): Result.001 file - promoters60/1013850
attataa

SEQ ID NO: 92966 - DNA, 6 bp, Unknown
  misc_feature (1)..( 6): Result.001 file - promoters60/1013850
gttcta

SEQ ID NO: 92967 - DNA, 6 bp, Unknown
  misc_feature (1)..( 6): Result.001 file - promoters60/1013850
gttcta

SEQ ID NO: 92968 - DNA, 6 bp, Unknown
  misc_feature (1)..( 6): Result.001 file - promoters60/1013850
atttga

SEQ ID NO: 92969 - DNA, 6 bp, Unknown
  misc_feature (1)..( 6): Result.001 file - promoters60/1013850
atttga

SEQ ID NO: 92970 - DNA, 6 bp, Unknown
  misc_feature (1)..( 6): Result.001 file - promoters60/1013850
ttaaaa

SEQ ID NO: 92971 - DNA, 6 bp, Unknown
  misc_feature (1)..( 6): Result.001 file - promoters60/1013850
ttaaaa

SEQ ID NO: 92972 - DNA, 8 bp, Unknown
  misc_feature (1)..( 8): Result.001 file - promoters60/1013850
attttgtt

SEQ ID NO: 92973 - DNA, 8 bp, Unknown
  misc_feature (1)..( 8): Result.001 file - promoters60/1013850
attgtgtt

SEQ ID NO: 92974 - DNA, 6 bp, Unknown
  misc_feature (1)..( 6): Result.001 file - promoters60/1013850
aaaatt

SEQ ID NO: 92975 - DNA, 6 bp, Unknown
  misc_feature (1)..( 6): Result.001 file - promoters60/1013850
aaaatt

SEQ ID NO: 92976 - DNA, 6 bp, Unknown
  misc_feature (1)..( 6): Result.001 file - promoters60/1013850
tttggt

SEQ ID NO: 92977 - DNA, 6 bp, Unknown
  misc_feature (1)..( 6): Result.001 file - promoters60/1013850
tttggt

SEQ ID NO: 92978 - DNA, 6 bp, Unknown
  misc_feature (1)..( 6): Result.001 file - promoters60/1013850
aaaaaa

SEQ ID NO: 92979 - DNA, 6 bp, Unknown
  misc_feature (1)..( 6): Result.001 file - promoters60/1013850
aaaaaa

SEQ ID NO: 92980 - DNA, 8 bp, Unknown
  misc_feature (1)..( 8): Result.001 file - promoters60/1013850
gagaccca

SEQ ID NO: 92981 - DNA, 8 bp, Unknown
  misc_feature (1)..( 8): Result.001 file - promoters60/1013850
gagaacca

SEQ ID NO: 92982 - DNA, 7 bp, Unknown
  misc_feature (1)..( 7): Result.001 file - promoters60/1013850
tgaaacg

SEQ ID NO: 92983 - DNA, 7 bp, Unknown
  misc_feature (1)..( 7): Result.001 file - promoters60/1013850
tgatacg

SEQ ID NO: 92984 - DNA, 6 bp, Unknown
  misc_feature (1)..( 6): Result.001 file - promoters60/1013850
ccattt

SEQ ID NO: 92985 - DNA, 6 bp, Unknown
  misc_feature (1)..( 6): Result.001 file - promoters60/1013850
ccattt

SEQ ID NO: 92986 - DNA, 6 bp, Unknown
  misc_feature (1)..( 6): Result.001 file - promoters60/1013850
gttttt

SEQ ID NO: 92987 - DNA, 6 bp, Unknown
  misc_feature (1)..( 6): Result.001 file - promoters60/1013850
gttttt

SEQ ID NO: 92988 - DNA, 7 bp, Unknown
  misc_feature (1)..( 7): Result.001 file - promoters60/1013850
ggcttcg

SEQ ID NO: 92989 - DNA, 7 bp, Unknown
  misc_feature (1)..( 7): Result.001 file - promoters60/1013850
ggcgtcg

SEQ ID NO: 92990 - DNA, 6 bp, Unknown
  misc_feature (1)..( 6): Result.001 file - promoters60/1013850
aagccc

SEQ ID NO: 92991 - DNA, 6 bp, Unknown
  misc_feature (1)..( 6): Result.001 file - promoters60/1013850
aagccc

SEQ ID NO: 92992 - DNA, 7 bp, Unknown
  misc_feature (1)..( 7): Result.001 file - promoters60/1013850
taagaga

SEQ ID NO: 92993 - DNA, 7 bp, Unknown
  misc_feature (1)..( 7): Result.001 file - promoters60/1013870
taataga

SEQ ID NO: 92994 - DNA, 6 bp, Unknown
  misc_feature (1)..( 6): Result.001 file - promoters60/1013870
aattta

SEQ ID NO: 92995 - DNA, 6 bp, Unknown
  misc_feature (1)..( 6): Result.001 file - promoters60/1013870
aattta

SEQ ID NO: 92996 - DNA, 8 bp, Unknown
  misc_feature (1)..( 8): Result.001 file - promoters60/1013870
attaatta

SEQ ID NO: 92997 - DNA, 8 bp, Unknown
  misc_feature (1)..( 8): Result.001 file - promoters60/1013870
tataatta

SEQ ID NO: 92998 - DNA, 8 bp, Unknown
  misc_feature (1)..( 8): Result.001 file - promoters60/1013870
tatgattt

SEQ ID NO: 92999 - DNA, 10 bp, Unknown
  misc_feature (1)..( 10): Result.001 file - promoters60/1013870
aataaaaata

SEQ ID NO: 93000 - DNA, 10 bp, Unknown
  misc_feature (1)..( 10): Result.001 file - promoters60/1013870
catataaata

SEQ ID NO: 93001 - DNA, 10 bp, Unknown
  misc_feature (1)..( 10): Result.001 file - promoters60/1013870
aataaactac

SEQ ID NO: 93002 - DNA, 7 bp, Unknown
  misc_feature (1)..( 7): Result.001 file - promoters60/1013870
tggcttg

SEQ ID NO: 93003 - DNA, 7 bp, Unknown
  misc_feature (1)..( 7): Result.001 file - promoters60/1013870
tggcttg

SEQ ID NO: 93004 - DNA, 7 bp, Unknown
  misc_feature (1)..( 7): Result.001 file - promoters60/1013870
tgggttg

SEQ ID NO: 93005 - DNA, 12 bp, Unknown
  misc_feature (1)..( 12): Result.001 file - promoters60/1013870
taagtttaaaaa

SEQ ID NO: 93006 - DNA, 12 bp, Unknown
  misc_feature (1)..( 12): Result.001 file - promoters60/1013870
taattttaataa

SEQ ID NO: 93007 - DNA, 12 bp, Unknown
  misc_feature (1)..( 12): Result.001 file - promoters60/1013870
tagatttattaa

SEQ ID NO: 93008 - DNA, 8 bp, Unknown
  misc_feature (1)..( 8): Result.001 file - promoters60/1013870
aaatctat

SEQ ID NO: 93009 - DNA, 8 bp, Unknown
  misc_feature (1)..( 8): Result.001 file - promoters60/1013870
aaatgtat

SEQ ID NO: 93010 - DNA, 7 bp, Unknown
  misc_feature (1)..( 7): Result.001 file - promoters60/1013870
acaatat

SEQ ID NO: 93011 - DNA, 7 bp, Unknown
  misc_feature (1)..( 7): Result.001 file - promoters60/1013870
acaatat

SEQ ID NO: 93012 - DNA, 9 bp, Unknown
  misc_feature (1)..( 9): Result.001 file - promoters60/1013870
ttacttata

SEQ ID NO: 93013 - DNA, 9 bp, Unknown
  misc_feature (1)..( 9): Result.001 file - promoters60/1013870
ttatttata

SEQ ID NO: 93014 - DNA, 6 bp, Unknown
  misc_feature (1)..( 6): Result.001 file - promoters60/1013870
tacctt

SEQ ID NO: 93015 - DNA, 6 bp, Unknown
  misc_feature (1)..( 6): Result.001 file - promoters60/1013870
tacctt

SEQ ID NO: 93016 - DNA, 7 bp, Unknown
  misc_feature (1)..( 7): Result.001 file - promoters60/1013870
aataata

SEQ ID NO: 93017 - DNA, 7 bp, Unknown
  misc_feature (1)..( 7): Result.001 file - promoters60/1013870
aataata

SEQ ID NO: 93018 - DNA, 6 bp, Unknown
  misc_feature (1)..( 6): Result.001 file - promoters60/1013870
atattt

SEQ ID NO: 93019 - DNA, 6 bp, Unknown
  misc_feature (1)..( 6): Result.001 file - promoters60/1013870
atattt

SEQ ID NO: 93020 - DNA, 7 bp, Unknown
  misc_feature (1)..( 7): Result.001 file - promoters60/1013870
tttattt

SEQ ID NO: 93021 - DNA, 7 bp, Unknown
  misc_feature (1)..( 7): Result.001 file - promoters60/1013870
tttgttt

SEQ ID NO: 93022 - DNA, 8 bp, Unknown
  misc_feature (1)..( 8): Result.001 file - promoters60/1013870
ttttgtca

SEQ ID NO: 93023 - DNA, 8 bp, Unknown
  misc_feature (1)..( 8): Result.001 file - promoters60/1013870
ttttgtca

SEQ ID NO: 93024 - DNA, 8 bp, Unknown
  misc_feature (1)..( 8): Result.001 file - promoters60/1013870
aatttatt

SEQ ID NO: 93025 - DNA, 8 bp, Unknown
  misc_feature (1)..( 8): Result.001 file - promoters60/1013870
aattcatt

SEQ ID NO: 93026 - DNA, 7 bp, Unknown
  misc_feature (1)..( 7): Result.001 file - promoters60/1013870
aactaaa

SEQ ID NO: 93027 - DNA, 7 bp, Unknown
  misc_feature (1)..( 7): Result.001 file - promoters60/1013870
aactaaa

SEQ ID NO: 93028 - DNA, 6 bp, Unknown
  misc_feature (1)..( 6): Result.001 file - promoters60/1013870
gattta

SEQ ID NO: 93029 - DNA, 6 bp, Unknown
  misc_feature (1)..( 6): Result.001 file - promoters60/1013870
gattta

SEQ ID NO: 93030 - DNA, 12 bp, Unknown
  misc_feature (1)..( 12): Result.001 file - promoters60/1013870
tagatttattaa

SEQ ID NO: 93031 - DNA, 12 bp, Unknown
  misc_feature (1)..( 12): Result.001 file - promoters60/1013870
tagaattactaa

SEQ ID NO: 93032 - DNA, 7 bp, Unknown
  misc_feature (1)..( 7): Result.001 file - promoters60/1013870
taataat

SEQ ID NO: 93033 - DNA, 7 bp, Unknown
  misc_feature (1)..( 7): Result.001 file - promoters60/1013870
taataat

SEQ ID NO: 93034 - DNA, 9 bp, Unknown
  misc_feature (1)..( 9): Result.001 file - promoters60/1013870
aattttttt

SEQ ID NO: 93035 - DNA, 9 bp, Unknown
  misc_feature (1)..( 9): Result.001 file - promoters60/1013870
aatattttt

SEQ ID NO: 93036 - DNA, 6 bp, Unknown
  misc_feature (1)..( 6): Result.001 file - promoters60/1013870
atattt

SEQ ID NO: 93037 - DNA, 6 bp, Unknown
  misc_feature (1)..( 6): Result.001 file - promoters60/1013870
atattt

SEQ ID NO: 93038 - DNA, 7 bp, Unknown
  misc_feature (1)..( 7): Result.001 file - promoters60/1013870
tatccaa

SEQ ID NO: 93039 - DNA, 7 bp, Unknown
  misc_feature (1)..( 7): Result.001 file - promoters60/1013870
tatacaa

SEQ ID NO: 93040 - DNA, 11 bp, Unknown
  misc_feature (1)..( 11): Result.001 file - promoters60/1013870
ttttctacaat

SEQ ID NO: 93041 - DNA, 11 bp, Unknown
  misc_feature (1)..( 11): Result.001 file - promoters60/1013870
ttttctaaaat

SEQ ID NO: 93042 - DNA, 7 bp, Unknown
  misc_feature (1)..( 7): Result.001 file - promoters60/1013870
ttataat

SEQ ID NO: 93043 - DNA, 7 bp, Unknown
  misc_feature (1)..( 7): Result.001 file - promoters60/1013870
ttataat

SEQ ID NO: 93044 - DNA, 6 bp, Unknown
  misc_feature (1)..( 6): Result.001 file - promoters60/1013870
aaaaaa

SEQ ID NO: 93045 - DNA, 6 bp, Unknown
  misc_feature (1)..( 6): Result.001 file - promoters60/1013870
aaaaaa

SEQ ID NO: 93046 - DNA, 8 bp, Unknown
  misc_feature (1)..( 8): Result.001 file - promoters60/1013870
taaatttc

SEQ ID NO: 93047 - DNA, 8 bp, Unknown
  misc_feature (1)..( 8): Result.001 file - promoters60/1013870
taactttc

SEQ ID NO: 93048 - DNA, 7 bp, Unknown
  misc_feature (1)..( 7): Result.001 file - promoters60/1013870
aagagaa

SEQ ID NO: 93049 - DNA, 7 bp, Unknown
  misc_feature (1)..( 7): Result.001 file - promoters60/1013878
aagtgaa

SEQ ID NO: 93050 - DNA, 8 bp, Unknown
  misc_feature (1)..( 8): Result.001 file - promoters60/1013878
ataatatg

SEQ ID NO: 93051 - DNA, 8 bp, Unknown
  misc_feature (1)..( 8): Result.001 file - promoters60/1013878
ttaagatg

SEQ ID NO: 93052 - DNA, 8 bp, Unknown
  misc_feature (1)..( 8): Result.001 file - promoters60/1013878
ataatata

SEQ ID NO: 93053 - DNA, 8 bp, Unknown
  misc_feature (1)..( 8): Result.001 file - promoters60/1013878
aaaaaatt

SEQ ID NO: 93054 - DNA, 9 bp, Unknown
  misc_feature (1)..( 9): Result.001 file - promoters60/1013878
atttataaa

SEQ ID NO: 93055 - DNA, 9 bp, Unknown
  misc_feature (1)..( 9): Result.001 file - promoters60/1013878
atttgtaaa

SEQ ID NO: 93056 - DNA, 9 bp, Unknown
  misc_feature (1)..( 9): Result.001 file - promoters60/1013878
atttatcct

SEQ ID NO: 93057 - DNA, 9 bp, Unknown
  misc_feature (1)..( 9): Result.001 file - promoters60/1013878
atttatatt

SEQ ID NO: 93058 - DNA, 8 bp, Unknown
  misc_feature (1)..( 8): Result.001 file - promoters60/1013878
ttacaaga

SEQ ID NO: 93059 - DNA, 8 bp, Unknown
  misc_feature (1)..( 8): Result.001 file - promoters60/1013878
ctacaaga

SEQ ID NO: 93060 - DNA, 8 bp, Unknown
  misc_feature (1)..( 8): Result.001 file - promoters60/1013878
ttagaaga

SEQ ID NO: 93061 - DNA, 10 bp, Unknown
  misc_feature (1)..( 10): Result.001 file - promoters60/1013878
taatttctat

SEQ ID NO: 93062 - DNA, 10 bp, Unknown
  misc_feature (1)..( 10): Result.001 file - promoters60/1013878
taaattcttc

SEQ ID NO: 93063 - DNA, 10 bp, Unknown
  misc_feature (1)..( 10): Result.001 file - promoters60/1013878
caatttatat

SEQ ID NO: 93064 - DNA, 10 bp, Unknown
  misc_feature (1)..( 10): Result.001 file - promoters60/1013878
taaattttgt

SEQ ID NO: 93065 - DNA, 15 bp, Unknown
  misc_feature (1)..( 15): Result.001 file - promoters60/1013878
acaagagaaacttgt

SEQ ID NO: 93066 - DNA, 15 bp, Unknown
  misc_feature (1)..( 15): Result.001 file - promoters60/1013878
agaaataaaaattgg

SEQ ID NO: 93067 - DNA, 15 bp, Unknown
  misc_feature (1)..( 15): Result.001 file - promoters60/1013878
agaaaaaaaaaatgg

SEQ ID NO: 93068 - DNA, 15 bp, Unknown
  misc_feature (1)..( 15): Result.001 file - promoters60/1013878
gaaactcaaaatttt

SEQ ID NO: 93069 - DNA, 9 bp, Unknown
  misc_feature (1)..( 9): Result.001 file - promoters60/1013878
aaatataat

SEQ ID NO: 93070 - DNA, 9 bp, Unknown
  misc_feature (1)..( 9): Result.001 file - promoters60/1013878
aaatatttt

SEQ ID NO: 93071 - DNA, 9 bp, Unknown
  misc_feature (1)..( 9): Result.001 file - promoters60/1013878
gaatctaat

SEQ ID NO: 93072 - DNA, 10 bp, Unknown
  misc_feature (1)..( 10): Result.001 file - promoters60/1013878
ctgcccgaaa

SEQ ID NO: 93073 - DNA, 10 bp, Unknown
  misc_feature (1)..( 10): Result.001 file - promoters60/1013878
ttacccaaaa

SEQ ID NO: 93074 - DNA, 10 bp, Unknown
  misc_feature (1)..( 10): Result.001 file - promoters60/1013881
ttacccaaat

SEQ ID NO: 93075 - DNA, 8 bp, Unknown
  misc_feature (1)..( 8): Result.001 file - promoters60/1013881
ggacaaaa

SEQ ID NO: 93076 - DNA, 8 bp, Unknown
  misc_feature (1)..( 8): Result.001 file - promoters60/1013881
ggataaaa

SEQ ID NO: 93077 - DNA, 8 bp, Unknown
  misc_feature (1)..( 8): Result.001 file - promoters60/1013881
aaataaaa

SEQ ID NO: 93078 - DNA, 11 bp, Unknown
  misc_feature (1)..( 11): Result.001 file - promoters60/1013881
tgtttagtttt

SEQ ID NO: 93079 - DNA, 11 bp, Unknown
  misc_feature (1)..( 11): Result.001 file - promoters60/1013881
agtttattttt

SEQ ID NO: 93080 - DNA, 11 bp, Unknown
  misc_feature (1)..( 11): Result.001 file - promoters60/1013881
agtatatatat

SEQ ID NO: 93081 - DNA, 8 bp, Unknown
  misc_feature (1)..( 8): Result.001 file - promoters60/1013881
attttctt

SEQ ID NO: 93082 - DNA, 8 bp, Unknown
  misc_feature (1)..( 8): Result.001 file - promoters60/1013881
tttttctc

SEQ ID NO: 93083 - DNA, 8 bp, Unknown
  misc_feature (1)..( 8): Result.001 file - promoters60/1013881
attttctt

SEQ ID NO: 93084 - DNA, 9 bp, Unknown
  misc_feature (1)..( 9): Result.001 file - promoters60/1013881
ttttcttta

SEQ ID NO: 93085 - DNA, 9 bp, Unknown
  misc_feature (1)..( 9): Result.001 file - promoters60/1013881
ttttctcaa

SEQ ID NO: 93086 - DNA, 9 bp, Unknown
  misc_feature (1)..( 9): Result.001 file - promoters60/1013881
atttattta

SEQ ID NO: 93087 - DNA, 7 bp, Unknown
  misc_feature (1)..( 7): Result.001 file - promoters60/1013881
caatttt

SEQ ID NO: 93088 - DNA, 7 bp, Unknown
  misc_feature (1)..( 7): Result.001 file - promoters60/1013881
caatttt

SEQ ID NO: 93089 - DNA, 8 bp, Unknown
  misc_feature (1)..( 8): Result.001 file - promoters60/1013881
caatattt

SEQ ID NO: 93090 - DNA, 7 bp, Unknown
  misc_feature (1)..( 7): Result.001 file - promoters60/1013881
ttattac

SEQ ID NO: 93091 - DNA, 7 bp, Unknown
  misc_feature (1)..( 7): Result.001 file - promoters60/1013881
ttactac

SEQ ID NO: 93092 - DNA, 7 bp, Unknown
  misc_feature (1)..( 7): Result.001 file - promoters60/1013893
ttactaa

SEQ ID NO: 93093 - DNA, 12 bp, Unknown
  misc_feature (1)..( 12): Result.001 file - promoters60/1013893
catctccacaaa

SEQ ID NO: 93094 - DNA, 12 bp, Unknown
  misc_feature (1)..( 12): Result.001 file - promoters60/1013893
agaatacacaaa

SEQ ID NO: 93095 - DNA, 12 bp, Unknown
  misc_feature (1)..( 12): Result.001 file - promoters60/1013893
caagtccataaa

SEQ ID NO: 93096 - DNA, 12 bp, Unknown
  misc_feature (1)..( 12): Result.001 file - promoters60/1013893
tttctactcaaa

SEQ ID NO: 93097 - DNA, 12 bp, Unknown
  misc_feature (1)..( 12): Result.001 file - promoters60/1013893
attatacaaaaa

SEQ ID NO: 93098 - DNA, 12 bp, Unknown
  misc_feature (1)..( 12): Result.001 file - promoters60/1013893
aaagtataaaaa

SEQ ID NO: 93099 - DNA, 9 bp, Unknown
  misc_feature (1)..( 9): Result.001 file - promoters60/1013893
atttagtgg

SEQ ID NO: 93100 - DNA, 9 bp, Unknown
  misc_feature (1)..( 9): Result.001 file - promoters60/1013893
tttttgtgt

SEQ ID NO: 93101 - DNA, 9 bp, Unknown
  misc_feature (1)..( 9): Result.001 file - promoters60/1013893
atttggtgg

SEQ ID NO: 93102 - DNA, 9 bp, Unknown
  misc_feature (1)..( 9): Result.001 file - promoters60/1013893
cttttgtct

SEQ ID NO: 93103 - DNA, 9 bp, Unknown
  misc_feature (1)..( 9): Result.001 file - promoters60/1013893
attttgttt

SEQ ID NO: 93104 - DNA, 9 bp, Unknown
  misc_feature (1)..( 9): Result.001 file - promoters60/1013904
cttttgggc

SEQ ID NO: 93105 - DNA, 7 bp, Unknown
  misc_feature (1)..( 7): Result.001 file - promoters60/1013904
atataat

SEQ ID NO: 93106 - DNA, 7 bp, Unknown
  misc_feature (1)..( 7): Result.001 file - promoters60/1013904
ttataat

SEQ ID NO: 93107 - DNA, 7 bp, Unknown
  misc_feature (1)..( 7): Result.001 file - promoters60/1013904
atataac

SEQ ID NO: 93108 - DNA, 7 bp, Unknown
  misc_feature (1)..( 7): Result.001 file - promoters60/1013904
atatttt

SEQ ID NO: 93109 - DNA, 9 bp, Unknown
  misc_feature (1)..( 9): Result.001 file - promoters60/1013904
tatttaata

SEQ ID NO: 93110 - DNA, 9 bp, Unknown
  misc_feature (1)..( 9): Result.001 file - promoters60/1013904
aatttaatt

SEQ ID NO: 93111 - DNA, 9 bp, Unknown
  misc_feature (1)..( 9): Result.001 file - promoters60/1013904
tatttattt

SEQ ID NO: 93112 - DNA, 9 bp, Unknown
  misc_feature (1)..( 9): Result.001 file - promoters60/1013904
tgtttgatt

SEQ ID NO: 93113 - DNA, 10 bp, Unknown
  misc_feature (1)..( 10): Result.001 file - promoters60/1013904
tgataaaatt

SEQ ID NO: 93114 - DNA, 10 bp, Unknown
  misc_feature (1)..( 10): Result.001 file - promoters60/1013904
aaatacaatc

SEQ ID NO: 93115 - DNA, 10 bp, Unknown
  misc_feature (1)..( 10): Result.001 file - promoters60/1013904
tgatcaaatc

SEQ ID NO: 93116 - DNA, 10 bp, Unknown
  misc_feature (1)..( 10): Result.001 file - promoters60/1013904
ttataatatt

SEQ ID NO: 93117 - DNA, 8 bp, Unknown
  misc_feature (1)..( 8): Result.001 file - promoters60/1013904
aatttaat

SEQ ID NO: 93118 - DNA, 8 bp, Unknown
  misc_feature (1)..( 8): Result.001 file - promoters60/1013904
aatctaac

SEQ ID NO: 93119 - DNA, 8 bp, Unknown
  misc_feature (1)..( 8): Result.001 file - promoters60/1013904
attctaac

SEQ ID NO: 93120 - DNA, 8 bp, Unknown
  misc_feature (1)..( 8): Result.001 file - promoters60/1013904
tttctaaa

SEQ ID NO: 93121 - DNA, 9 bp, Unknown
  misc_feature (1)..( 9): Result.001 file - promoters60/1013904
caaacttat

SEQ ID NO: 93122 - DNA, 9 bp, Unknown
  misc_feature (1)..( 9): Result.001 file - promoters60/1013904
caaaattat

SEQ ID NO: 93123 - DNA, 9 bp, Unknown
  misc_feature (1)..( 9): Result.001 file - promoters60/1013904
caatatttg

SEQ ID NO: 93124 - DNA, 9 bp, Unknown
  misc_feature (1)..( 9): Result.001 file - promoters60/1013907
caatatgtg

SEQ ID NO: 93125 - DNA, 9 bp, Unknown
  misc_feature (1)..( 9): Result.001 file - promoters60/1013907
tttactttc

SEQ ID NO: 93126 - DNA, 9 bp, Unknown
  misc_feature (1)..( 9): Result.001 file - promoters60/1013907
gggactttc

SEQ ID NO: 93127 - DNA, 9 bp, Unknown
  misc_feature (1)..( 9): Result.001 file - promoters60/1013907
ttttctttg

SEQ ID NO: 93128 - DNA, 8 bp, Unknown
  misc_feature (1)..( 8): Result.001 file - promoters60/1013907
aaagattg

SEQ ID NO: 93129 - DNA, 8 bp, Unknown
  misc_feature (1)..( 8): Result.001 file - promoters60/1013907
aaagcttg

SEQ ID NO: 93130 - DNA, 8 bp, Unknown
  misc_feature (1)..( 8): Result.001 file - promoters60/1013907
aaaaattt

SEQ ID NO: 93131 - DNA, 8 bp, Unknown
  misc_feature (1)..( 8): Result.001 file - promoters60/1013907
tagttata

SEQ ID NO: 93132 - DNA, 8 bp, Unknown
  misc_feature (1)..( 8): Result.001 file - promoters60/1013907
tagatatt

SEQ ID NO: 93133 - DNA, 8 bp, Unknown
  misc_feature (1)..( 8): Result.001 file - promoters60/1013907
tggatatt

SEQ ID NO: 93134 - DNA, 7 bp, Unknown
  misc_feature (1)..( 7): Result.001 file - promoters60/1013907
ccactaa

SEQ ID NO: 93135 - DNA, 7 bp, Unknown
  misc_feature (1)..( 7): Result.001 file - promoters60/1013907
ccattaa

SEQ ID NO: 93136 - DNA, 7 bp, Unknown
  misc_feature (1)..( 7): Result.001 file - promoters60/1013907
ccattag

SEQ ID NO: 93137 - DNA, 9 bp, Unknown
  misc_feature (1)..( 9): Result.001 file - promoters60/1013907
cttaattta

SEQ ID NO: 93138 - DNA, 9 bp, Unknown
  misc_feature (1)..( 9): Result.001 file - promoters60/1013907
actaaatta

SEQ ID NO: 93139 - DNA, 9 bp, Unknown
  misc_feature (1)..( 9): Result.001 file - promoters60/1013907
actgaattc

SEQ ID NO: 93140 - DNA, 9 bp, Unknown
  misc_feature (1)..( 9): Result.001 file - promoters60/1013907
tttagaatc

SEQ ID NO: 93141 - DNA, 9 bp, Unknown
  misc_feature (1)..( 9): Result.001 file - promoters60/1013907
tttaaaatc

SEQ ID NO: 93142 - DNA, 9 bp, Unknown
  misc_feature (1)..( 9): Result.001 file - promoters60/1013923
tttaaatgg

SEQ ID NO: 93143 - DNA, 12 bp, Unknown
  misc_feature (1)..( 12): Result.001 file - promoters60/1013923
acaattttagtt

SEQ ID NO: 93144 - DNA, 11 bp, Unknown
  misc_feature (1)..( 11): Result.001 file - promoters60/1013923
aaatttttagc

SEQ ID NO: 93145 - DNA, 12 bp, Unknown
  misc_feature (1)..( 12): Result.001 file - promoters60/1013923
aagatttttgtt

SEQ ID NO: 93146 - DNA, 12 bp, Unknown
  misc_feature (1)..( 12): Result.001 file - promoters60/1013923
acaatattagaa

SEQ ID NO: 93147 - DNA, 12 bp, Unknown
  misc_feature (1)..( 12): Result.001 file - promoters60/1013923
agactttgggtg

SEQ ID NO: 93148 - DNA, 12 bp, Unknown
  misc_feature (1)..( 12): Result.001 file - promoters60/1013923
acaattttagtt

SEQ ID NO: 93149 - DNA, 12 bp, Unknown
  misc_feature (1)..( 12): Result.001 file - promoters60/1013923
aaatttttagcc

SEQ ID NO: 93150 - DNA, 12 bp, Unknown
  misc_feature (1)..( 12): Result.001 file - promoters60/1013923
aagatttttgtt

SEQ ID NO: 93151 - DNA, 12 bp, Unknown
  misc_feature (1)..( 12): Result.001 file - promoters60/1013923
acaatattagaa

SEQ ID NO: 93152 - DNA, 12 bp, Unknown
  misc_feature (1)..( 12): Result.001 file - promoters60/1013923
agactttgggtg

SEQ ID NO: 93153 - DNA, 11 bp, Unknown
  misc_feature (1)..( 11): Result.001 file - promoters60/1013923
ttttaatcgaa

SEQ ID NO: 93154 - DNA, 11 bp, Unknown
  misc_feature (1)..( 11): Result.001 file - promoters60/1013923
ttttaatcagc

SEQ ID NO: 93155 - DNA, 11 bp, Unknown
  misc_feature (1)..( 11): Result.001 file - promoters60/1013923
agttattcgaa

SEQ ID NO: 93156 - DNA, 11 bp, Unknown
  misc_feature (1)..( 11): Result.001 file - promoters60/1013923
atttattcagg

SEQ ID NO: 93157 - DNA, 10 bp, Unknown
  misc_feature (1)..( 10): Result.001 file - promoters60/1013923
ttcatctaat

SEQ ID NO: 93158 - DNA, 10 bp, Unknown
  misc_feature (1)..( 10): Result.001 file - promoters60/1013923
ttcatttaat

SEQ ID NO: 93159 - DNA, 10 bp, Unknown
  misc_feature (1)..( 10): Result.001 file - promoters60/1013923
ttcatcaagc

SEQ ID NO: 93160 - DNA, 10 bp, Unknown
  misc_feature (1)..( 10): Result.001 file - promoters60/1013923
ttcatttatt

SEQ ID NO: 93161 - DNA, 10 bp, Unknown
  misc_feature (1)..( 10): Result.001 file - promoters60/1013923
ttattgttgg

SEQ ID NO: 93162 - DNA, 8 bp, Unknown
  misc_feature (1)..( 8): Result.001 file - promoters60/1013923
tttcacaa

SEQ ID NO: 93163 - DNA, 8 bp, Unknown
  misc_feature (1)..( 8): Result.001 file - promoters60/1013923
tttcacat

SEQ ID NO: 93164 - DNA, 8 bp, Unknown
  misc_feature (1)..( 8): Result.001 file - promoters60/1013923
tttcacgg

SEQ ID NO: 93165 - DNA, 8 bp, Unknown
  misc_feature (1)..( 8): Result.001 file - promoters60/1013923
cttcccgg

SEQ ID NO: 93166 - DNA, 8 bp, Unknown
  misc_feature (1)..( 8): Result.001 file - promoters60/1013923
gataatat

SEQ ID NO: 93167 - DNA, 8 bp, Unknown
  misc_feature (1)..( 8): Result.001 file - promoters60/1013923
cataatat

SEQ ID NO: 93168 - DNA, 8 bp, Unknown
  misc_feature (1)..( 8): Result.001 file - promoters60/1013923
gataatgg

SEQ ID NO: 93169 - DNA, 8 bp, Unknown
  misc_feature (1)..( 8): Result.001 file - promoters60/1013923
gataattt

SEQ ID NO: 93170 - DNA, 9 bp, Unknown
  misc_feature (1)..( 9): Result.001 file - promoters60/1013923
acatttttt

SEQ ID NO: 93171 - DNA, 9 bp, Unknown
  misc_feature (1)..( 9): Result.001 file - promoters60/1013923
gaatttttt

SEQ ID NO: 93172 - DNA, 9 bp, Unknown
  misc_feature (1)..( 9): Result.001 file - promoters60/1013923
agatttttg

SEQ ID NO: 93173 - DNA, 9 bp, Unknown
  misc_feature (1)..( 9): Result.001 file - promoters60/1013931
agactttgg

SEQ ID NO: 93174 - DNA, 9 bp, Unknown
  misc_feature (1)..( 9): Result.001 file - promoters60/1013931
agaaacata

SEQ ID NO: 93175 - DNA, 9 bp, Unknown
  misc_feature (1)..( 9): Result.001 file - promoters60/1013931
agaagcata

SEQ ID NO: 93176 - DNA, 9 bp, Unknown
  misc_feature (1)..( 9): Result.001 file - promoters60/1013931
agaagcacc

SEQ ID NO: 93177 - DNA, 6 bp, Unknown
  misc_feature (1)..( 6): Result.001 file - promoters60/1013931
ttcagg

SEQ ID NO: 93178 - DNA, 6 bp, Unknown
  misc_feature (1)..( 6): Result.001 file - promoters60/1013931
ttcagg

SEQ ID NO: 93179 - DNA, 6 bp, Unknown
  misc_feature (1)..( 6): Result.001 file - promoters60/1013931
attggt

SEQ ID NO: 93180 - DNA, 6 bp, Unknown
  misc_feature (1)..( 6): Result.001 file - promoters60/1013931
attggt

SEQ ID NO: 93181 - DNA, 8 bp, Unknown
  misc_feature (1)..( 8): Result.001 file - promoters60/1013931
ttaaactt

SEQ ID NO: 93182 - DNA, 8 bp, Unknown
  misc_feature (1)..( 8): Result.001 file - promoters60/1013931
ttagactt

SEQ ID NO: 93183 - DNA, 8 bp, Unknown
  misc_feature (1)..( 8): Result.001 file - promoters60/1013931
atagactc

SEQ ID NO: 93184 - DNA, 8 bp, Unknown
  misc_feature (1)..( 8): Result.001 file - promoters60/1013931
ttgtgatt

SEQ ID NO: 93185 - DNA, 8 bp, Unknown
  misc_feature (1)..( 8): Result.001 file - promoters60/1013931
ttgtgatt

SEQ ID NO: 93186 - DNA, 10 bp, Unknown
  misc_feature (1)..( 10): Result.001 file - promoters60/1013931
ttctcttaga

SEQ ID NO: 93187 - DNA, 10 bp, Unknown
  misc_feature (1)..( 10): Result.001 file - promoters60/1013931
ttctcttaga

SEQ ID NO: 93188 - DNA, 8 bp, Unknown
  misc_feature (1)..( 8): Result.001 file - promoters60/1013931
aaaaattg

SEQ ID NO: 93189 - DNA, 8 bp, Unknown
  misc_feature (1)..( 8): Result.001 file - promoters60/1013931
aaaacttg

SEQ ID NO: 93190 - DNA, 6 bp, Unknown
  misc_feature (1)..( 6): Result.001 file - promoters60/1013931
cccttg

SEQ ID NO: 93191 - DNA, 6 bp, Unknown
  misc_feature (1)..( 6): Result.001 file - promoters60/1013931
cccttg

SEQ ID NO: 93192 - DNA, 10 bp, Unknown
  misc_feature (1)..( 10): Result.001 file - promoters60/1013931
atctctgctt

SEQ ID NO: 93193 - DNA, 10 bp, Unknown
  misc_feature (1)..( 10): Result.001 file - promoters60/1013931
atctctcgtg

SEQ ID NO: 93194 - DNA, 10 bp, Unknown
  misc_feature (1)..( 10): Result.001 file - promoters60/1013931
ttctctggtg

SEQ ID NO: 93195 - DNA, 7 bp, Unknown
  misc_feature (1)..( 7): Result.001 file - promoters60/1013931
tttgtat

SEQ ID NO: 93196 - DNA, 7 bp, Unknown
  misc_feature (1)..( 7): Result.001 file - promoters60/1013931
tttttat

SEQ ID NO: 93197 - DNA, 8 bp, Unknown
  misc_feature (1)..( 8): Result.001 file - promoters60/1013931
ttttattt

SEQ ID NO: 93198 - DNA, 8 bp, Unknown
  misc_feature (1)..( 8): Result.001 file - promoters60/1013931
tttgattt

SEQ ID NO: 93199 - DNA, 9 bp, Unknown
  misc_feature (1)..( 9): Result.001 file - promoters60/1013931
agttccata

SEQ ID NO: 93200 - DNA, 9 bp, Unknown
  misc_feature (1)..( 9): Result.001 file - promoters60/1013931
agtttcata

SEQ ID NO: 93201 - DNA, 7 bp, Unknown
  misc_feature (1)..( 7): Result.001 file - promoters60/1013931
tctttta

SEQ ID NO: 93202 - DNA, 7 bp, Unknown
  misc_feature (1)..( 7): Result.001 file - promoters60/1014010
tctttta

SEQ ID NO: 93203 - DNA, 14 bp, Unknown
  misc_feature (1)..( 14): Result.001 file - promoters60/1014010
gtaataaaataaga

SEQ ID NO: 93204 - DNA, 14 bp, Unknown
  misc_feature (1)..( 14): Result.001 file - promoters60/1014010
gtaataaaagggtt

SEQ ID NO: 93205 - DNA, 14 bp, Unknown
  misc_feature (1)..( 14): Result.001 file - promoters60/1014010
cccttaaaatttcg

SEQ ID NO: 93206 - DNA, 14 bp, Unknown
  misc_feature (1)..( 14): Result.001 file - promoters60/1014010
acattaaaagaaca

SEQ ID NO: 93207 - DNA, 14 bp, Unknown
  misc_feature (1)..( 14): Result.001 file - promoters60/1014010
cttcagaaaggaac

SEQ ID NO: 93208 - DNA, 7 bp, Unknown
  misc_feature (1)..( 7): Result.001 file - promoters60/1014010
aattaaa

SEQ ID NO: 93209 - DNA, 7 bp, Unknown
  misc_feature (1)..( 7): Result.001 file - promoters60/1014010
tattaaa

SEQ ID NO: 93210 - DNA, 7 bp, Unknown
  misc_feature (1)..( 7): Result.001 file - promoters60/1014010
tataaaa

SEQ ID NO: 93211 - DNA, 7 bp, Unknown
  misc_feature (1)..( 7): Result.001 file - promoters60/1014050
tataaaa

SEQ ID NO: 93212 - DNA, 12 bp, Unknown
  misc_feature (1)..( 12): Result.001 file - promoters60/1014050
ataaaatattaa

SEQ ID NO: 93213 - DNA, 12 bp, Unknown
  misc_feature (1)..( 12): Result.001 file - promoters60/1014050
cctaaataataa

SEQ ID NO: 93214 - DNA, 13 bp, Unknown
  misc_feature (1)..( 13): Result.001 file - promoters60/1014050
cccaaactatccc

SEQ ID NO: 93215 - DNA, 13 bp, Unknown
  misc_feature (1)..( 13): Result.001 file - promoters60/1014050
aaaaaaatatttt

SEQ ID NO: 93216 - DNA, 13 bp, Unknown
  misc_feature (1)..( 13): Result.001 file - promoters60/1014050
agataagtaagat

SEQ ID NO: 93217 - DNA, 13 bp, Unknown
  misc_feature (1)..( 13): Result.001 file - promoters60/1014050
agaaaagtctaaa

SEQ ID NO: 93218 - DNA, 13 bp, Unknown
  misc_feature (1)..( 13): Result.001 file - promoters60/1014125
ggaaaactagaat

SEQ ID NO: 93219 - DNA, 8 bp, Unknown
  misc_feature (1)..( 8): Result.001 file - promoters60/1014125
ccaaattt

SEQ ID NO: 93220 - DNA, 8 bp, Unknown
  misc_feature (1)..( 8): Result.001 file - promoters60/1014125
ccaatttt

SEQ ID NO: 93221 - DNA, 8 bp, Unknown
  misc_feature (1)..( 8): Result.001 file - promoters60/1014125
ataatttt

SEQ ID NO: 93222 - DNA, 10 bp, Unknown
  misc_feature (1)..( 10): Result.001 file - promoters60/1014125
ctaatgattt

SEQ ID NO: 93223 - DNA, 10 bp, Unknown
  misc_feature (1)..( 10): Result.001 file - promoters60/1014125
ctaagtttgg

SEQ ID NO: 93224 - DNA, 10 bp, Unknown
  misc_feature (1)..( 10): Result.001 file - promoters60/1014176
tatatgatta

SEQ ID NO: 93225 - DNA, 13 bp, Unknown
  misc_feature (1)..( 13): Result.001 file - promoters60/1014176
gattctattttta

SEQ ID NO: 93226 - DNA, 13 bp, Unknown
  misc_feature (1)..( 13): Result.001 file - promoters60/1014176
tttagcatttttg

SEQ ID NO: 93227 - DNA, 13 bp, Unknown
  misc_feature (1)..( 13): Result.001 file - promoters60/1014176
attctaattttct

SEQ ID NO: 93228 - DNA, 13 bp, Unknown
  misc_feature (1)..( 13): Result.001 file - promoters60/1014176
ttgccaatactat

SEQ ID NO: 93229 - DNA, 13 bp, Unknown
  misc_feature (1)..( 13): Result.001 file - promoters60/1014176
gtgttaattgtct

SEQ ID NO: 93230 - DNA, 13 bp, Unknown
  misc_feature (1)..( 13): Result.001 file - promoters60/1014180
ggaacaagtctct

SEQ ID NO: 93231 - DNA, 10 bp, Unknown
  misc_feature (1)..( 10): Result.001 file - promoters60/1014180
tttttaacat

SEQ ID NO: 93232 - DNA, 10 bp, Unknown
  misc_feature (1)..( 10): Result.001 file - promoters60/1014180
ctttgaacat

SEQ ID NO: 93233 - DNA, 11 bp, Unknown
  misc_feature (1)..( 11): Result.001 file - promoters60/1014180
ttttctaaaat

SEQ ID NO: 93234 - DNA, 11 bp, Unknown
  misc_feature (1)..( 11): Result.001 file - promoters60/1014180
tgttttaatta

SEQ ID NO: 93235 - DNA, 11 bp, Unknown
  misc_feature (1)..( 11): Result.001 file - promoters60/1014180
tcttcgaagca

SEQ ID NO: 93236 - DNA, 11 bp, Unknown
  misc_feature (1)..( 11): Result.001 file - promoters60/1014223
tgtttgattag

SEQ ID NO: 93237 - DNA, 7 bp, Unknown
  misc_feature (1)..( 7): Result.001 file - promoters60/1014223
aatctgt

SEQ ID NO: 93238 - DNA, 7 bp, Unknown
  misc_feature (1)..( 7): Result.001 file - promoters60/1014223
aatttgt

SEQ ID NO: 93239 - DNA, 7 bp, Unknown
  misc_feature (1)..( 7): Result.001 file - promoters60/1014223
cctacaa

SEQ ID NO: 93240 - DNA, 7 bp, Unknown
  misc_feature (1)..( 7): Result.001 file - promoters60/1014223
ccttcaa

SEQ ID NO: 93241 - DNA, 6 bp, Unknown
  misc_feature (1)..( 6): Result.001 file - promoters60/1014223
aagaga

SEQ ID NO: 93242 - DNA, 6 bp, Unknown
  misc_feature (1)..( 6): Result.001 file - promoters60/1014223
aagaga

SEQ ID NO: 93243 - DNA, 8 bp, Unknown
  misc_feature (1)..( 8): Result.001 file - promoters60/1014223
ttattttt

SEQ ID NO: 93244 - DNA, 8 bp, Unknown
  misc_feature (1)..( 8): Result.001 file - promoters60/1014223
ttattttt

SEQ ID NO: 93245 - DNA, 6 bp, Unknown
  misc_feature (1)..( 6): Result.001 file - promoters60/1014223
aaaaaa

SEQ ID NO: 93246 - DNA, 6 bp, Unknown
  misc_feature (1)..( 6): Result.001 file - promoters60/1014223
aaaaaa

SEQ ID NO: 93247 - DNA, 9 bp, Unknown
  misc_feature (1)..( 9): Result.001 file - promoters60/1014223
ttttgttat

SEQ ID NO: 93248 - DNA, 9 bp, Unknown
  misc_feature (1)..( 9): Result.001 file - promoters60/1014223
ttttggtat

SEQ ID NO: 93249 - DNA, 7 bp, Unknown
  misc_feature (1)..( 7): Result.001 file - promoters60/1014223
ttttatg

SEQ ID NO: 93250 - DNA, 7 bp, Unknown
  misc_feature (1)..( 7): Result.001 file - promoters60/1014223
tttaatg

SEQ ID NO: 93251 - DNA, 9 bp, Unknown
  misc_feature (1)..( 9): Result.001 file - promoters60/1014223
gtgtattgg

SEQ ID NO: 93252 - DNA, 9 bp, Unknown
  misc_feature (1)..( 9): Result.001 file - promoters60/1014223
gtgttttgg

SEQ ID NO: 93253 - DNA, 7 bp, Unknown
  misc_feature (1)..( 7): Result.001 file - promoters60/1014223
tgttgta

SEQ ID NO: 93254 - DNA, 7 bp, Unknown
  misc_feature (1)..( 7): Result.001 file - promoters60/1014223
tgttgta

SEQ ID NO: 93255 - DNA, 6 bp, Unknown
  misc_feature (1)..( 6): Result.001 file - promoters60/1014223
caagag

SEQ ID NO: 93256 - DNA, 6 bp, Unknown
  misc_feature (1)..( 6): Result.001 file - promoters60/1014223
caagag

SEQ ID NO: 93257 - DNA, 7 bp, Unknown
  misc_feature (1)..( 7): Result.001 file - promoters60/1014223
gactata

SEQ ID NO: 93258 - DNA, 7 bp, Unknown
  misc_feature (1)..( 7): Result.001 file - promoters60/1014259
gaccata

SEQ ID NO: 93259 - DNA, 8 bp, Unknown
  misc_feature (1)..( 8): Result.001 file - promoters60/1014259
gcatcaga

SEQ ID NO: 93260 - DNA, 8 bp, Unknown
  misc_feature (1)..( 8): Result.001 file - promoters60/1014259
gcaacaga

SEQ ID NO: 93261 - DNA, 8 bp, Unknown
  misc_feature (1)..( 8): Result.001 file - promoters60/1014259
atatatta

SEQ ID NO: 93262 - DNA, 8 bp, Unknown
  misc_feature (1)..( 8): Result.001 file - promoters60/1014259
atatttta

SEQ ID NO: 93263 - DNA, 10 bp, Unknown
  misc_feature (1)..( 10): Result.001 file - promoters60/1014259
taattactaa

SEQ ID NO: 93264 - DNA, 10 bp, Unknown
  misc_feature (1)..( 10): Result.001 file - promoters60/1014259
taatgactaa

SEQ ID NO: 93265 - DNA, 7 bp, Unknown
  misc_feature (1)..( 7): Result.001 file - promoters60/1014259
taatctg

SEQ ID NO: 93266 - DNA, 7 bp, Unknown
  misc_feature (1)..( 7): Result.001 file - promoters60/1014259
taatctg

SEQ ID NO: 93267 - DNA, 8 bp, Unknown
  misc_feature (1)..( 8): Result.001 file - promoters60/1014259
aatatata

SEQ ID NO: 93268 - DNA, 8 bp, Unknown
  misc_feature (1)..( 8): Result.001 file - promoters60/1014259
aatatata

SEQ ID NO: 93269 - DNA, 8 bp, Unknown
  misc_feature (1)..( 8): Result.001 file - promoters60/1014259
aatttatc

SEQ ID NO: 93270 - DNA, 8 bp, Unknown
  misc_feature (1)..( 8): Result.001 file - promoters60/1014259
tataccaa

SEQ ID NO: 93271 - DNA, 8 bp, Unknown
  misc_feature (1)..( 8): Result.001 file - promoters60/1014259
aataacaa

SEQ ID NO: 93272 - DNA, 8 bp, Unknown
  misc_feature (1)..( 8): Result.001 file - promoters60/1014259
aatgacac

SEQ ID NO: 93273 - DNA, 10 bp, Unknown
  misc_feature (1)..( 10): Result.001 file - promoters60/1014259
taaaaactaa

SEQ ID NO: 93274 - DNA, 10 bp, Unknown
  misc_feature (1)..( 10): Result.001 file - promoters60/1014259
taacaactaa

SEQ ID NO: 93275 - DNA, 6 bp, Unknown
  misc_feature (1)..( 6): Result.001 file - promoters60/1014259
ataaac

SEQ ID NO: 93276 - DNA, 6 bp, Unknown
  misc_feature (1)..( 6): Result.001 file - promoters60/1014259
ataaac

SEQ ID NO: 93277 - DNA, 8 bp, Unknown
  misc_feature (1)..( 8): Result.001 file - promoters60/1014259
aaactcta

SEQ ID NO: 93278 - DNA, 8 bp, Unknown
  misc_feature (1)..( 8): Result.001 file - promoters60/1014259
aaacccta

SEQ ID NO: 93279 - DNA, 7 bp, Unknown
  misc_feature (1)..( 7): Result.001 file - promoters60/1014259
gatcatt

SEQ ID NO: 93280 - DNA, 7 bp, Unknown
  misc_feature (1)..( 7): Result.001 file - promoters60/1014259
gattatt

SEQ ID NO: 93281 - DNA, 9 bp, Unknown
  misc_feature (1)..( 9): Result.001 file - promoters60/1014259
ttcgttttg

SEQ ID NO: 93282 - DNA, 9 bp, Unknown
  misc_feature (1)..( 9): Result.001 file - promoters60/1014259
ttcgttttc

SEQ ID NO: 93283 - DNA, 9 bp, Unknown
  misc_feature (1)..( 9): Result.001 file - promoters60/1014259
aaagttttc

SEQ ID NO: 93284 - DNA, 8 bp, Unknown
  misc_feature (1)..( 8): Result.001 file - promoters60/1014259
tctgtttg

SEQ ID NO: 93285 - DNA, 8 bp, Unknown
  misc_feature (1)..( 8): Result.001 file - promoters60/1014259
tctattta

SEQ ID NO: 93286 - DNA, 8 bp, Unknown
  misc_feature (1)..( 8): Result.001 file - promoters60/1014259
catattta

SEQ ID NO: 93287 - DNA, 7 bp, Unknown
  misc_feature (1)..( 7): Result.001 file - promoters60/1014259
taccaaa

SEQ ID NO: 93288 - DNA, 7 bp, Unknown
  misc_feature (1)..( 7): Result.001 file - promoters60/1014259
tactaaa

SEQ ID NO: 93289 - DNA, 10 bp, Unknown
  misc_feature (1)..( 10): Result.001 file - promoters60/1014259
atgtgtgtct

SEQ ID NO: 93290 - DNA, 10 bp, Unknown
  misc_feature (1)..( 10): Result.001 file - promoters60/1014259
atgtgcgtct

SEQ ID NO: 93291 - DNA, 6 bp, Unknown
  misc_feature (1)..( 6): Result.001 file - promoters60/1014259
tgaaaa

SEQ ID NO: 93292 - DNA, 6 bp, Unknown
  misc_feature (1)..( 6): Result.001 file - promoters60/1014259
tgaaaa

SEQ ID NO: 93293 - DNA, 7 bp, Unknown
  misc_feature (1)..( 7): Result.001 file - promoters60/1014259
tatctaa

SEQ ID NO: 93294 - DNA, 7 bp, Unknown
  misc_feature (1)..( 7): Result.001 file - promoters60/1014259
tatgtaa

SEQ ID NO: 93295 - DNA, 6 bp, Unknown
  misc_feature (1)..( 6): Result.001 file - promoters60/1014259
caactt

SEQ ID NO: 93296 - DNA, 6 bp, Unknown
  misc_feature (1)..( 6): Result.001 file - promoters60/1014259
caactt

SEQ ID NO: 93297 - DNA, 8 bp, Unknown
  misc_feature (1)..( 8): Result.001 file - promoters60/1014259
taattacc

SEQ ID NO: 93298 - DNA, 8 bp, Unknown
  misc_feature (1)..( 8): Result.001 file - promoters60/1014259
taataacc

SEQ ID NO: 93299 - DNA, 6 bp, Unknown
  misc_feature (1)..( 6): Result.001 file - promoters60/1014259
aatggg

SEQ ID NO: 93300 - DNA, 6 bp, Unknown
  misc_feature (1)..( 6): Result.001 file - promoters60/1014333
aatggg

SEQ ID NO: 93301 - DNA, 8 bp, Unknown
  misc_feature (1)..( 8): Result.001 file - promoters60/1014333
caatttgt

SEQ ID NO: 93302 - DNA, 8 bp, Unknown
  misc_feature (1)..( 8): Result.001 file - promoters60/1014333
caatgtgt

SEQ ID NO: 93303 - DNA, 10 bp, Unknown
  misc_feature (1)..( 10): Result.001 file - promoters60/1014333
atatcatttt

SEQ ID NO: 93304 - DNA, 10 bp, Unknown
  misc_feature (1)..( 10): Result.001 file - promoters60/1014333
atataatttt

SEQ ID NO: 93305 - DNA, 10 bp, Unknown
  misc_feature (1)..( 10): Result.001 file - promoters60/1014333
taattatagt

SEQ ID NO: 93306 - DNA, 8 bp, Unknown
  misc_feature (1)..( 8): Result.001 file - promoters60/1014333
aaaccaaa

SEQ ID NO: 93307 - DNA, 8 bp, Unknown
  misc_feature (1)..( 8): Result.001 file - promoters60/1014333
aaatcaaa

SEQ ID NO: 93308 - DNA, 7 bp, Unknown
  misc_feature (1)..( 7): Result.001 file - promoters60/1014333
tcgtcaa

SEQ ID NO: 93309 - DNA, 7 bp, Unknown
  misc_feature (1)..( 7): Result.001 file - promoters60/1014333
tcgtcaa

SEQ ID NO: 93310 - DNA, 7 bp, Unknown
  misc_feature (1)..( 7): Result.001 file - promoters60/1014333
aaagaaa

SEQ ID NO: 93311 - DNA, 7 bp, Unknown
  misc_feature (1)..( 7): Result.001 file - promoters60/1014333
aaacaaa

SEQ ID NO: 93312 - DNA, 8 bp, Unknown
  misc_feature (1)..( 8): Result.001 file - promoters60/1014333
taaatata

SEQ ID NO: 93313 - DNA, 8 bp, Unknown
  misc_feature (1)..( 8): Result.001 file - promoters60/1014333
taattata

SEQ ID NO: 93314 - DNA, 8 bp, Unknown
  misc_feature (1)..( 8): Result.001 file - promoters60/1014333
taatctta

SEQ ID NO: 93315 - DNA, 8 bp, Unknown
  misc_feature (1)..( 8): Result.001 file - promoters60/1014333
taatatta

SEQ ID NO: 93316 - DNA, 6 bp, Unknown
  misc_feature (1)..( 6): Result.001 file - promoters60/1014333
tttaaa

SEQ ID NO: 93317 - DNA, 6 bp, Unknown
  misc_feature (1)..( 6): Result.001 file - promoters60/1014333
tttaaa

SEQ ID NO: 93318 - DNA, 10 bp, Unknown
  misc_feature (1)..( 10): Result.001 file - promoters60/1014333
ttaaaaattc

SEQ ID NO: 93319 - DNA, 10 bp, Unknown
  misc_feature (1)..( 10): Result.001 file - promoters60/1014333
ttaataattc

SEQ ID NO: 93320 - DNA, 7 bp, Unknown
  misc_feature (1)..( 7): Result.001 file - promoters60/1014333
gttggtt

SEQ ID NO: 93321 - DNA, 7 bp, Unknown
  misc_feature (1)..( 7): Result.001 file - promoters60/1014333
gttggtt

SEQ ID NO: 93322 - DNA, 7 bp, Unknown
  misc_feature (1)..( 7): Result.001 file - promoters60/1014333
aaccgaa

SEQ ID NO: 93323 - DNA, 7 bp, Unknown
  misc_feature (1)..( 7): Result.001 file - promoters60/1014333
aactgaa

SEQ ID NO: 93324 - DNA, 11 bp, Unknown
  misc_feature (1)..( 11): Result.001 file - promoters60/1014333
aatccaaacac

SEQ ID NO: 93325 - DNA, 11 bp, Unknown
  misc_feature (1)..( 11): Result.001 file - promoters60/1014333
aatccaatcac

SEQ ID NO: 93326 - DNA, 9 bp, Unknown
  misc_feature (1)..( 9): Result.001 file - promoters60/1014333
tgttgcata

SEQ ID NO: 93327 - DNA, 9 bp, Unknown
  misc_feature (1)..( 9): Result.001 file - promoters60/1014333
tgtcgcata

SEQ ID NO: 93328 - DNA, 7 bp, Unknown
  misc_feature (1)..( 7): Result.001 file - promoters60/1014333
ttttttg

SEQ ID NO: 93329 - DNA, 7 bp, Unknown
  misc_feature (1)..( 7): Result.001 file - promoters60/1014362
tttattg

SEQ ID NO: 93330 - DNA, 10 bp, Unknown
  misc_feature (1)..( 10): Result.001 file - promoters60/1014362
taatgttttt

SEQ ID NO: 93331 - DNA, 10 bp, Unknown
  misc_feature (1)..( 10): Result.001 file - promoters60/1014362
tgatgatttt

SEQ ID NO: 93332 - DNA, 10 bp, Unknown
  misc_feature (1)..( 10): Result.001 file - promoters60/1014362
ccatgttttt

SEQ ID NO: 93333 - DNA, 10 bp, Unknown
  misc_feature (1)..( 10): Result.001 file - promoters60/1014362
cgcagttttt

SEQ ID NO: 93334 - DNA, 10 bp, Unknown
  misc_feature (1)..( 10): Result.001 file - promoters60/1014362
ccaagttcat

SEQ ID NO: 93335 - DNA, 11 bp, Unknown
  misc_feature (1)..( 11): Result.001 file - promoters60/1014362
agtttgtttat

SEQ ID NO: 93336 - DNA, 11 bp, Unknown
  misc_feature (1)..( 11): Result.001 file - promoters60/1014362
tttttgtttgt

SEQ ID NO: 93337 - DNA, 11 bp, Unknown
  misc_feature (1)..( 11): Result.001 file - promoters60/1014362
cgcgtgtttat

SEQ ID NO: 93338 - DNA, 11 bp, Unknown
  misc_feature (1)..( 11): Result.001 file - promoters60/1014362
tttctgttcaa

SEQ ID NO: 93339 - DNA, 11 bp, Unknown
  misc_feature (1)..( 11): Result.001 file - promoters60/1014387
cctcttttctg

SEQ ID NO: 93340 - DNA, 9 bp, Unknown
  misc_feature (1)..( 9): Result.001 file - promoters60/1014387
cctaaaatc

SEQ ID NO: 93341 - DNA, 9 bp, Unknown
  misc_feature (1)..( 9): Result.001 file - promoters60/1014387
cctaaaaaa

SEQ ID NO: 93342 - DNA, 9 bp, Unknown
  misc_feature (1)..( 9): Result.001 file - promoters60/1014387
tttaaaata

SEQ ID NO: 93343 - DNA, 9 bp, Unknown
  misc_feature (1)..( 9): Result.001 file - promoters60/1014387
attaaaata

SEQ ID NO: 93344 - DNA, 10 bp, Unknown
  misc_feature (1)..( 10): Result.001 file - promoters60/1014387
agtaacaaat

SEQ ID NO: 93345 - DNA, 10 bp, Unknown
  misc_feature (1)..( 10): Result.001 file - promoters60/1014387
cggaacaaag

SEQ ID NO: 93346 - DNA, 7 bp, Unknown
  misc_feature (1)..( 7): Result.001 file - promoters60/1014387
taaaatc

SEQ ID NO: 93347 - DNA, 7 bp, Unknown
  misc_feature (1)..( 7): Result.001 file - promoters60/1014387
aaaaatc

SEQ ID NO: 93348 - DNA, 7 bp, Unknown
  misc_feature (1)..( 7): Result.001 file - promoters60/1014387
taaaata

SEQ ID NO: 93349 - DNA, 7 bp, Unknown
  misc_feature (1)..( 7): Result.001 file - promoters60/1014387
taaaata

SEQ ID NO: 93350 - DNA, 8 bp, Unknown
  misc_feature (1)..( 8): Result.001 file - promoters60/1014387
taacaaat

SEQ ID NO: 93351 - DNA, 8 bp, Unknown
  misc_feature (1)..( 8): Result.001 file - promoters60/1014387
gaacaaag

SEQ ID NO: 93352 - DNA, 14 bp, Unknown
  misc_feature (1)..( 14): Result.001 file - promoters60/1014387
tggtaaaatttcat

SEQ ID NO: 93353 - DNA, 14 bp, Unknown
  misc_feature (1)..( 14): Result.001 file - promoters60/1014387
tcgtaaaattccca

SEQ ID NO: 93354 - DNA, 14 bp, Unknown
  misc_feature (1)..( 14): Result.001 file - promoters60/1014387
tatcaaaattaaac

SEQ ID NO: 93355 - DNA, 14 bp, Unknown
  misc_feature (1)..( 14): Result.001 file - promoters60/1014387
tgggaaatgaggag

SEQ ID NO: 93356 - DNA, 14 bp, Unknown
  misc_feature (1)..( 14): Result.001 file - promoters60/1014387
gggataaattaaaa

SEQ ID NO: 93357 - DNA, 14 bp, Unknown
  misc_feature (1)..( 14): Result.001 file - promoters60/1014387
gcgacgaattcaaa

SEQ ID NO: 93358 - DNA, 14 bp, Unknown
  misc_feature (1)..( 14): Result.001 file - promoters60/1014387
gtcctctcttcttc

SEQ ID NO: 93359 - DNA, 14 bp, Unknown
  misc_feature (1)..( 14): Result.001 file - promoters60/1014387
tgtctctctctgtt

SEQ ID NO: 93360 - DNA, 14 bp, Unknown
  misc_feature (1)..( 14): Result.001 file - promoters60/1014387
tttctctctttccc

SEQ ID NO: 93361 - DNA, 14 bp, Unknown
  misc_feature (1)..( 14): Result.001 file - promoters60/1014387
gtcgtctcctcctt

SEQ ID NO: 93362 - DNA, 14 bp, Unknown
  misc_feature (1)..( 14): Result.001 file - promoters60/1014387
ttggtctctttttc

SEQ ID NO: 93363 - DNA, 14 bp, Unknown
  misc_feature (1)..( 14): Result.001 file - promoters60/1014452
ttttccttttttat

SEQ ID NO: 93364 - DNA, 11 bp, Unknown
  misc_feature (1)..( 11): Result.001 file - promoters60/1014452
tttttattcaa

SEQ ID NO: 93365 - DNA, 11 bp, Unknown
  misc_feature (1)..( 11): Result.001 file - promoters60/1014452
tatttatttga

SEQ ID NO: 93366 - DNA, 11 bp, Unknown
  misc_feature (1)..( 11): Result.001 file - promoters60/1014452
ttgttattatt

SEQ ID NO: 93367 - DNA, 11 bp, Unknown
  misc_feature (1)..( 11): Result.001 file - promoters60/1014452
gatttctttgg

SEQ ID NO: 93368 - DNA, 8 bp, Unknown
  misc_feature (1)..( 8): Result.001 file - promoters60/1014452
tataaata

SEQ ID NO: 93369 - DNA, 8 bp, Unknown
  misc_feature (1)..( 8): Result.001 file - promoters60/1014452
tataaata

SEQ ID NO: 93370 - DNA, 8 bp, Unknown
  misc_feature (1)..( 8): Result.001 file - promoters60/1014452
tatatata

SEQ ID NO: 93371 - DNA, 8 bp, Unknown
  misc_feature (1)..( 8): Result.001 file - promoters60/1014452
tataaaaa

SEQ ID NO: 93372 - DNA, 8 bp, Unknown
  misc_feature (1)..( 8): Result.001 file - promoters60/1014452
aatatatg

SEQ ID NO: 93373 - DNA, 10 bp, Unknown
  misc_feature (1)..( 10): Result.001 file - promoters60/1014452
tcaatttttt

SEQ ID NO: 93374 - DNA, 10 bp, Unknown
  misc_feature (1)..( 10): Result.001 file - promoters60/1014452
tcaatcttta

SEQ ID NO: 93375 - DNA, 11 bp, Unknown
  misc_feature (1)..( 11): Result.001 file - promoters60/1014452
gttattattta

SEQ ID NO: 93376 - DNA, 11 bp, Unknown
  misc_feature (1)..( 11): Result.001 file - promoters60/1014452
aaatatattta

SEQ ID NO: 93377 - DNA, 9 bp, Unknown
  misc_feature (1)..( 9): Result.001 file - promoters60/1014452
caacgtaaa

SEQ ID NO: 93378 - DNA, 9 bp, Unknown
  misc_feature (1)..( 9): Result.001 file - promoters60/1014452
aaacttaaa

SEQ ID NO: 93379 - DNA, 10 bp, Unknown
  misc_feature (1)..( 10): Result.001 file - promoters60/1014452
taagcttgtc

SEQ ID NO: 93380 - DNA, 10 bp, Unknown
  misc_feature (1)..( 10): Result.001 file - promoters60/1014452
aactcttaaa

SEQ ID NO: 93381 - DNA, 19 bp, Unknown
  misc_feature (1)..( 19): Result.001 file - promoters60/1014452
ctttatcgtccaatcaatc

SEQ ID NO: 93382 - DNA, 19 bp, Unknown
  misc_feature (1)..( 19): Result.001 file - promoters60/1014452
cagtatcgtccaaacaatc

SEQ ID NO: 93383 - DNA, 19 bp, Unknown
  misc_feature (1)..( 19): Result.001 file - promoters60/1014452
ctttttcgagaatacaaag

SEQ ID NO: 93384 - DNA, 19 bp, Unknown
  misc_feature (1)..( 19): Result.001 file - promoters60/1014452
tcttacattccaatcgttc

SEQ ID NO: 93385 - DNA, 9 bp, Unknown
  misc_feature (1)..( 9): Result.001 file - promoters60/1014452
ctaaaaata

SEQ ID NO: 93386 - DNA, 9 bp, Unknown
  misc_feature (1)..( 9): Result.001 file - promoters60/1014452
tataaaata

SEQ ID NO: 93387 - DNA, 10 bp, Unknown
  misc_feature (1)..( 10): Result.001 file - promoters60/1014452
aataacaatt

SEQ ID NO: 93388 - DNA, 11 bp, Unknown
  misc_feature (1)..( 11): Result.001 file - promoters60/1014452
agtatataatt

SEQ ID NO: 93389 - DNA, 11 bp, Unknown
  misc_feature (1)..( 11): Result.001 file - promoters60/1014452
tttatataatt

SEQ ID NO: 93390 - DNA, 11 bp, Unknown
  misc_feature (1)..( 11): Result.001 file - promoters60/1014452
gattttttctc

SEQ ID NO: 93391 - DNA, 11 bp, Unknown
  misc_feature (1)..( 11): Result.001 file - promoters60/1014452
aatttttactt

SEQ ID NO: 93392 - DNA, 11 bp, Unknown
  misc_feature (1)..( 11): Result.001 file - promoters60/1014452
aatatttactg

SEQ ID NO: 93393 - DNA, 11 bp, Unknown
  misc_feature (1)..( 11): Result.001 file - promoters60/1014452
gatttgtactt

SEQ ID NO: 93394 - DNA, 9 bp, Unknown
  misc_feature (1)..( 9): Result.001 file - promoters60/1014452
taactataa

SEQ ID NO: 93395 - DNA, 9 bp, Unknown
  misc_feature (1)..( 9): Result.001 file - promoters60/1014452
taaatatat

SEQ ID NO: 93396 - DNA, 9 bp, Unknown
  misc_feature (1)..( 9): Result.001 file - promoters60/1014452
actatatat

SEQ ID NO: 93397 - DNA, 9 bp, Unknown
  misc_feature (1)..( 9): Result.001 file - promoters60/1014452
gaaatctat

SEQ ID NO: 93398 - DNA, 8 bp, Unknown
  misc_feature (1)..( 8): Result.001 file - promoters60/1014452
actaatag

SEQ ID NO: 93399 - DNA, 8 bp, Unknown
  misc_feature (1)..( 8): Result.001 file - promoters60/1014452
gctaatat

SEQ ID NO: 93400 - DNA, 8 bp, Unknown
  misc_feature (1)..( 8): Result.001 file - promoters60/1014452
actcatat

SEQ ID NO: 93401 - DNA, 8 bp, Unknown
  misc_feature (1)..( 8): Result.001 file - promoters60/1014525
attaatat

SEQ ID NO: 93402 - DNA, 10 bp, Unknown
  misc_feature (1)..( 10): Result.001 file - promoters60/1014525
taaataaaag

SEQ ID NO: 93403 - DNA, 10 bp, Unknown
  misc_feature (1)..( 10): Result.001 file - promoters60/1014525
taattaaaca

SEQ ID NO: 93404 - DNA, 10 bp, Unknown
  misc_feature (1)..( 10): Result.001 file - promoters60/1014525
attataaaat

SEQ ID NO: 93405 - DNA, 11 bp, Unknown
  misc_feature (1)..( 11): Result.001 file - promoters60/1014525
aatttacaaac

SEQ ID NO: 93406 - DNA, 11 bp, Unknown
  misc_feature (1)..( 11): Result.001 file - promoters60/1014525
ttcttagaaaa

SEQ ID NO: 93407 - DNA, 11 bp, Unknown
  misc_feature (1)..( 11): Result.001 file - promoters60/1014525
tcattaacatg

SEQ ID NO: 93408 - DNA, 9 bp, Unknown
  misc_feature (1)..( 9): Result.001 file - promoters60/1014525
gtcatatta

SEQ ID NO: 93409 - DNA, 9 bp, Unknown
  misc_feature (1)..( 9): Result.001 file - promoters60/1014525
tatatatta

SEQ ID NO: 93410 - DNA, 10 bp, Unknown
  misc_feature (1)..( 10): Result.001 file - promoters60/1014525
gatataatta

SEQ ID NO: 93411 - DNA, 10 bp, Unknown
  misc_feature (1)..( 10): Result.001 file - promoters60/1014525
gtatgtattg

SEQ ID NO: 93412 - DNA, 11 bp, Unknown
  misc_feature (1)..( 11): Result.001 file - promoters60/1014525
aatatacattc

SEQ ID NO: 93413 - DNA, 11 bp, Unknown
  misc_feature (1)..( 11): Result.001 file - promoters60/1014525
atactgtatgt

SEQ ID NO: 93414 - DNA, 12 bp, Unknown
  misc_feature (1)..( 12): Result.001 file - promoters60/1014525
ataagaatgtca

SEQ ID NO: 93415 - DNA, 12 bp, Unknown
  misc_feature (1)..( 12): Result.001 file - promoters60/1014525
ttaacaatattt

SEQ ID NO: 93416 - DNA, 12 bp, Unknown
  misc_feature (1)..( 12): Result.001 file - promoters60/1014525
ataaaaaagaga

SEQ ID NO: 93417 - DNA, 12 bp, Unknown
  misc_feature (1)..( 12): Result.001 file - promoters60/1014525
acaacaatcagt

SEQ ID NO: 93418 - DNA, 12 bp, Unknown
  misc_feature (1)..( 12): Result.001 file - promoters60/1014525
tgaacaacattt

SEQ ID NO: 93419 - DNA, 12 bp, Unknown
  misc_feature (1)..( 12): Result.001 file - promoters60/1014525
ttaacacaaaac

SEQ ID NO: 93420 - DNA, 11 bp, Unknown
  misc_feature (1)..( 11): Result.001 file - promoters60/1014525
aaattaaaatc

SEQ ID NO: 93421 - DNA, 11 bp, Unknown
  misc_feature (1)..( 11): Result.001 file - promoters60/1014525
gaatgaaaaaa

SEQ ID NO: 93422 - DNA, 11 bp, Unknown
  misc_feature (1)..( 11): Result.001 file - promoters60/1014525
aaatcaaatag

SEQ ID NO: 93423 - DNA, 11 bp, Unknown
  misc_feature (1)..( 11): Result.001 file - promoters60/1014525
gaacaaatgtt

SEQ ID NO: 93424 - DNA, 11 bp, Unknown
  misc_feature (1)..( 11): Result.001 file - promoters60/1014525
atatgaaaatg

SEQ ID NO: 93425 - DNA, 11 bp, Unknown
  misc_feature (1)..( 11): Result.001 file - promoters60/1014525
ttatgaaattt

SEQ ID NO: 93426 - DNA, 11 bp, Unknown
  misc_feature (1)..( 11): Result.001 file - promoters60/1014525
cccagaaaaaa

SEQ ID NO: 93427 - DNA, 12 bp, Unknown
  misc_feature (1)..( 12): Result.001 file - promoters60/1014525
cattatatatag

SEQ ID NO: 93428 - DNA, 12 bp, Unknown
  misc_feature (1)..( 12): Result.001 file - promoters60/1014525
ttgtatatatac

SEQ ID NO: 93429 - DNA, 12 bp, Unknown
  misc_feature (1)..( 12): Result.001 file - promoters60/1014525
ccttataaatat

SEQ ID NO: 93430 - DNA, 12 bp, Unknown
  misc_feature (1)..( 12): Result.001 file - promoters60/1014525
acatatatataa

SEQ ID NO: 93431 - DNA, 12 bp, Unknown
  misc_feature (1)..( 12): Result.001 file - promoters60/1014525
atatatttatac

SEQ ID NO: 93432 - DNA, 12 bp, Unknown
  misc_feature (1)..( 12): Result.001 file - promoters60/1014525
ccttaaaaacca

SEQ ID NO: 93433 - DNA, 12 bp, Unknown
  misc_feature (1)..( 12): Result.001 file - promoters60/1014525
ccctataaactt

SEQ ID NO: 93434 - DNA, 11 bp, Unknown
  misc_feature (1)..( 11): Result.001 file - promoters60/1014525
tctacaaattg

SEQ ID NO: 93435 - DNA, 11 bp, Unknown
  misc_feature (1)..( 11): Result.001 file - promoters60/1014525
tttacaaactt

SEQ ID NO: 93436 - DNA, 11 bp, Unknown
  misc_feature (1)..( 11): Result.001 file - promoters60/1014525
tcttcaaggag

SEQ ID NO: 93437 - DNA, 11 bp, Unknown
  misc_feature (1)..( 11): Result.001 file - promoters60/1014525
attataaaata

SEQ ID NO: 93438 - DNA, 11 bp, Unknown
  misc_feature (1)..( 11): Result.001 file - promoters60/1014525
cttagaaaaat

SEQ ID NO: 93439 - DNA, 11 bp, Unknown
  misc_feature (1)..( 11): Result.001 file - promoters60/1014573
ttaacatgttc

SEQ ID NO: 93440 - DNA, 6 bp, Unknown
  misc_feature (1)..( 6): Result.001 file - promoters60/1014573
tttagg

SEQ ID NO: 93441 - DNA, 6 bp, Unknown
  misc_feature (1)..( 6): Result.001 file - promoters60/1014573
tttagg

SEQ ID NO: 93442 - DNA, 6 bp, Unknown
  misc_feature (1)..( 6): Result.001 file - promoters60/1014573
tttttt

SEQ ID NO: 93443 - DNA, 6 bp, Unknown
  misc_feature (1)..( 6): Result.001 file - promoters60/1014573
tttttt

SEQ ID NO: 93444 - DNA, 6 bp, Unknown
  misc_feature (1)..( 6): Result.001 file - promoters60/1014573
tttttt

SEQ ID NO: 93445 - DNA, 7 bp, Unknown
  misc_feature (1)..( 7): Result.001 file - promoters60/1014573
ggtttta

SEQ ID NO: 93446 - DNA, 7 bp, Unknown
  misc_feature (1)..( 7): Result.001 file - promoters60/1014573
ggtttta

SEQ ID NO: 93447 - DNA, 9 bp, Unknown
  misc_feature (1)..( 9): Result.001 file - promoters60/1014573
tctatagca

SEQ ID NO: 93448 - DNA, 9 bp, Unknown
  misc_feature (1)..( 9): Result.001 file - promoters60/1014573
tctttagca

SEQ ID NO: 93449 - DNA, 7 bp, Unknown
  misc_feature (1)..( 7): Result.001 file - promoters60/1014573
atagttc

SEQ ID NO: 93450 - DNA, 7 bp, Unknown
  misc_feature (1)..( 7): Result.001 file - promoters60/1014573
atatttc

SEQ ID NO: 93451 - DNA, 7 bp, Unknown
  misc_feature (1)..( 7): Result.001 file - promoters60/1014573
caataaa

SEQ ID NO: 93452 - DNA, 7 bp, Unknown
  misc_feature (1)..( 7): Result.001 file - promoters60/1014573
caacaaa

SEQ ID NO: 93453 - DNA, 8 bp, Unknown
  misc_feature (1)..( 8): Result.001 file - promoters60/1014573
tataaaat

SEQ ID NO: 93454 - DNA, 8 bp, Unknown
  misc_feature (1)..( 8): Result.001 file - promoters60/1014573
tatgaaat

SEQ ID NO: 93455 - DNA, 10 bp, Unknown
  misc_feature (1)..( 10): Result.001 file - promoters60/1014573
ttaatgattc

SEQ ID NO: 93456 - DNA, 10 bp, Unknown
  misc_feature (1)..( 10): Result.001 file - promoters60/1014573
ttagtgattc

SEQ ID NO: 93457 - DNA, 8 bp, Unknown
  misc_feature (1)..( 8): Result.001 file - promoters60/1014573
aaacccaa

SEQ ID NO: 93458 - DNA, 8 bp, Unknown
  misc_feature (1)..( 8): Result.001 file - promoters60/1014573
aaacacaa

SEQ ID NO: 93459 - DNA, 8 bp, Unknown
  misc_feature (1)..( 8): Result.001 file - promoters60/1014573
tagattta

SEQ ID NO: 93460 - DNA, 8 bp, Unknown
  misc_feature (1)..( 8): Result.001 file - promoters60/1014573
aagattta

SEQ ID NO: 93461 - DNA, 8 bp, Unknown
  misc_feature (1)..( 8): Result.001 file - promoters60/1014573
aagctttt

SEQ ID NO: 93462 - DNA, 7 bp, Unknown
  misc_feature (1)..( 7): Result.001 file - promoters60/1014573
tgaatat

SEQ ID NO: 93463 - DNA, 7 bp, Unknown
  misc_feature (1)..( 7): Result.001 file - promoters60/1014573
tgaatat

SEQ ID NO: 93464 - DNA, 15 bp, Unknown
  misc_feature (1)..( 15): Result.001 file - promoters60/1014573
tatcagatatgagat

SEQ ID NO: 93465 - DNA, 15 bp, Unknown
  misc_feature (1)..( 15): Result.001 file - promoters60/1014573
tatcagatgtgagat

SEQ ID NO: 93466 - DNA, 6 bp, Unknown
  misc_feature (1)..( 6): Result.001 file - promoters60/1014573
tactgt

SEQ ID NO: 93467 - DNA, 6 bp, Unknown
  misc_feature (1)..( 6): Result.001 file - promoters60/1014573
tactgt

SEQ ID NO: 93468 - DNA, 9 bp, Unknown
  misc_feature (1)..( 9): Result.001 file - promoters60/1014573
tcaaaattt

SEQ ID NO: 93469 - DNA, 9 bp, Unknown
  misc_feature (1)..( 9): Result.001 file - promoters60/1014573
tcagaattt

SEQ ID NO: 93470 - DNA, 6 bp, Unknown
  misc_feature (1)..( 6): Result.001 file - promoters60/1014573
ttgaaa

SEQ ID NO: 93471 - DNA, 6 bp, Unknown
  misc_feature (1)..( 6): Result.001 file - promoters60/1014573
ttgaaa

SEQ ID NO: 93472 - DNA, 7 bp, Unknown
  misc_feature (1)..( 7): Result.001 file - promoters60/1014573
cttctcc

SEQ ID NO: 93473 - DNA, 7 bp, Unknown
  misc_feature (1)..( 7): Result.001 file - promoters60/1014573
cttgtcc

SEQ ID NO: 93474 - DNA, 7 bp, Unknown
  misc_feature (1)..( 7): Result.001 file - promoters60/1014573
ttcatgt

SEQ ID NO: 93475 - DNA, 7 bp, Unknown
  misc_feature (1)..( 7): Result.001 file - promoters60/1014573
ttcatgt

SEQ ID NO: 93476 - DNA, 7 bp, Unknown
  misc_feature (1)..( 7): Result.001 file - promoters60/1014573
tacctca

SEQ ID NO: 93477 - DNA, 7 bp, Unknown
  misc_feature (1)..( 7): Result.001 file - promoters60/1014573
tacctca

SEQ ID NO: 93478 - DNA, 7 bp, Unknown
  misc_feature (1)..( 7): Result.001 file - promoters60/1014573
ttttata

SEQ ID NO: 93479 - DNA, 7 bp, Unknown
  misc_feature (1)..( 7): Result.001 file - promoters60/1014573
tttgata

SEQ ID NO: 93480 - DNA, 9 bp, Unknown
  misc_feature (1)..( 9): Result.001 file - promoters60/1014573
catccttat

SEQ ID NO: 93481 - DNA, 9 bp, Unknown
  misc_feature (1)..( 9): Result.001 file - promoters60/1014649
catcattat

SEQ ID NO: 93482 - DNA, 11 bp, Unknown
  misc_feature (1)..( 11): Result.001 file - promoters60/1014649
tgctctatact

SEQ ID NO: 93483 - DNA, 11 bp, Unknown
  misc_feature (1)..( 11): Result.001 file - promoters60/1014649
tgctctttact

SEQ ID NO: 93484 - DNA, 6 bp, Unknown
  misc_feature (1)..( 6): Result.001 file - promoters60/1014649
caccac

SEQ ID NO: 93485 - DNA, 6 bp, Unknown
  misc_feature (1)..( 6): Result.001 file - promoters60/1014649
caccac

SEQ ID NO: 93486 - DNA, 9 bp, Unknown
  misc_feature (1)..( 9): Result.001 file - promoters60/1014649
attctttac

SEQ ID NO: 93487 - DNA, 9 bp, Unknown
  misc_feature (1)..( 9): Result.001 file - promoters60/1014649
tttctctac

SEQ ID NO: 93488 - DNA, 9 bp, Unknown
  misc_feature (1)..( 9): Result.001 file - promoters60/1014649
attttttgg

SEQ ID NO: 93489 - DNA, 9 bp, Unknown
  misc_feature (1)..( 9): Result.001 file - promoters60/1014649
tttgatttt

SEQ ID NO: 93490 - DNA, 9 bp, Unknown
  misc_feature (1)..( 9): Result.001 file - promoters60/1014649
tttgttttt

SEQ ID NO: 93491 - DNA, 8 bp, Unknown
  misc_feature (1)..( 8): Result.001 file - promoters60/1014649
acatatgt

SEQ ID NO: 93492 - DNA, 8 bp, Unknown
  misc_feature (1)..( 8): Result.001 file - promoters60/1014649
acatctgt

SEQ ID NO: 93493 - DNA, 8 bp, Unknown
  misc_feature (1)..( 8): Result.001 file - promoters60/1014649
atatatat

SEQ ID NO: 93494 - DNA, 7 bp, Unknown
  misc_feature (1)..( 7): Result.001 file - promoters60/1014649
ttacatt

SEQ ID NO: 93495 - DNA, 7 bp, Unknown
  misc_feature (1)..( 7): Result.001 file - promoters60/1014649
ttacatt

SEQ ID NO: 93496 - DNA, 6 bp, Unknown
  misc_feature (1)..( 6): Result.001 file - promoters60/1014649
tttata

SEQ ID NO: 93497 - DNA, 6 bp, Unknown
  misc_feature (1)..( 6): Result.001 file - promoters60/1014649
tttata

SEQ ID NO: 93498 - DNA, 6 bp, Unknown
  misc_feature (1)..( 6): Result.001 file - promoters60/1014649
tcttcg

SEQ ID NO: 93499 - DNA, 6 bp, Unknown
  misc_feature (1)..( 6): Result.001 file - promoters60/1014649
tcttcg

SEQ ID NO: 93500 - DNA, 7 bp, Unknown
  misc_feature (1)..( 7): Result.001 file - promoters60/1014649
gttatca

SEQ ID NO: 93501 - DNA, 7 bp, Unknown
  misc_feature (1)..( 7): Result.001 file - promoters60/1014649
gttttca

SEQ ID NO: 93502 - DNA, 9 bp, Unknown
  misc_feature (1)..( 9): Result.001 file - promoters60/1014649
aaaaataaa

SEQ ID NO: 93503 - DNA, 9 bp, Unknown
  misc_feature (1)..( 9): Result.001 file - promoters60/1014649
aaaaataaa

SEQ ID NO: 93504 - DNA, 6 bp, Unknown
  misc_feature (1)..( 6): Result.001 file - promoters60/1014649
taaaat

SEQ ID NO: 93505 - DNA, 6 bp, Unknown
  misc_feature (1)..( 6): Result.001 file - promoters60/1014649
taaaat

SEQ ID NO: 93506 - DNA, 9 bp, Unknown
  misc_feature (1)..( 9): Result.001 file - promoters60/1014649
aaaattaat

SEQ ID NO: 93507 - DNA, 9 bp, Unknown
  misc_feature (1)..( 9): Result.001 file - promoters60/1014649
aaaataaat

SEQ ID NO: 93508 - DNA, 9 bp, Unknown
  misc_feature (1)..( 9): Result.001 file - promoters60/1014649
atttattta

SEQ ID NO: 93509 - DNA, 9 bp, Unknown
  misc_feature (1)..( 9): Result.001 file - promoters60/1014649
atttatttt

SEQ ID NO: 93510 - DNA, 9 bp, Unknown
  misc_feature (1)..( 9): Result.001 file - promoters60/1014649
attaaatta

SEQ ID NO: 93511 - DNA, 8 bp, Unknown
  misc_feature (1)..( 8): Result.001 file - promoters60/1014649
tctatttt

SEQ ID NO: 93512 - DNA, 8 bp, Unknown
  misc_feature (1)..( 8): Result.001 file - promoters60/1014649
tctttttt

SEQ ID NO: 93513 - DNA, 8 bp, Unknown
  misc_feature (1)..( 8): Result.001 file - promoters60/1014649
tcttttgt

SEQ ID NO: 93514 - DNA, 6 bp, Unknown
  misc_feature (1)..( 6): Result.001 file - promoters60/1014649
ttttaa

SEQ ID NO: 93515 - DNA, 6 bp, Unknown
  misc_feature (1)..( 6): Result.001 file - promoters60/1014649
ttttaa

SEQ ID NO: 93516 - DNA, 8 bp, Unknown
  misc_feature (1)..( 8): Result.001 file - promoters60/1014649
aagtaata

SEQ ID NO: 93517 - DNA, 8 bp, Unknown
  misc_feature (1)..( 8): Result.001 file - promoters60/1014649
aagtaata

SEQ ID NO: 93518 - DNA, 8 bp, Unknown
  misc_feature (1)..( 8): Result.001 file - promoters60/1014649
caaccaag

SEQ ID NO: 93519 - DNA, 8 bp, Unknown
  misc_feature (1)..( 8): Result.001 file - promoters60/1014649
caaacaag

SEQ ID NO: 93520 - DNA, 6 bp, Unknown
  misc_feature (1)..( 6): Result.001 file - promoters60/1014649
actttt

SEQ ID NO: 93521 - DNA, 6 bp, Unknown
  misc_feature (1)..( 6): Result.001 file - promoters60/1014649
actttt

SEQ ID NO: 93522 - DNA, 6 bp, Unknown
  misc_feature (1)..( 6): Result.001 file - promoters60/1014649
atttgt

SEQ ID NO: 93523 - DNA, 6 bp, Unknown
  misc_feature (1)..( 6): Result.001 file - promoters60/1014649
atttgt

SEQ ID NO: 93524 - DNA, 7 bp, Unknown
  misc_feature (1)..( 7): Result.001 file - promoters60/1014649
ttctttt

SEQ ID NO: 93525 - DNA, 7 bp, Unknown
  misc_feature (1)..( 7): Result.001 file - promoters60/1014662
ttccttt

SEQ ID NO: 93526 - DNA, 10 bp, Unknown
  misc_feature (1)..( 10): Result.001 file - promoters60/1014662
taaaaatgaa

SEQ ID NO: 93527 - DNA, 10 bp, Unknown
  misc_feature (1)..( 10): Result.001 file - promoters60/1014662
taaaaagtct

SEQ ID NO: 93528 - DNA, 11 bp, Unknown
  misc_feature (1)..( 11): Result.001 file - promoters60/1014662
caaaaaaagaa

SEQ ID NO: 93529 - DNA, 11 bp, Unknown
  misc_feature (1)..( 11): Result.001 file - promoters60/1014662
ccaaaaatctt

SEQ ID NO: 93530 - DNA, 11 bp, Unknown
  misc_feature (1)..( 11): Result.001 file - promoters60/1014662
cgaaaaagggt

SEQ ID NO: 93531 - DNA, 11 bp, Unknown
  misc_feature (1)..( 11): Result.001 file - promoters60/1014662
ccaagaatctg

SEQ ID NO: 93532 - DNA, 13 bp, Unknown
  misc_feature (1)..( 13): Result.001 file - promoters60/1014662
actcataataaat

SEQ ID NO: 93533 - DNA, 13 bp, Unknown
  misc_feature (1)..( 13): Result.001 file - promoters60/1014662
tcatataatagta

SEQ ID NO: 93534 - DNA, 13 bp, Unknown
  misc_feature (1)..( 13): Result.001 file - promoters60/1014662
atttataatataa

SEQ ID NO: 93535 - DNA, 13 bp, Unknown
  misc_feature (1)..( 13): Result.001 file - promoters60/1014662
acttataatgaat

SEQ ID NO: 93536 - DNA, 13 bp, Unknown
  misc_feature (1)..( 13): Result.001 file - promoters60/1014662
gaagatagtgaac

SEQ ID NO: 93537 - DNA, 12 bp, Unknown
  misc_feature (1)..( 12): Result.001 file - promoters60/1014662
atataataaata

SEQ ID NO: 93538 - DNA, 12 bp, Unknown
  misc_feature (1)..( 12): Result.001 file - promoters60/1014662
gcataaaaaata

SEQ ID NO: 93539 - DNA, 12 bp, Unknown
  misc_feature (1)..( 12): Result.001 file - promoters60/1014662
ttattatacttc

SEQ ID NO: 93540 - DNA, 12 bp, Unknown
  misc_feature (1)..( 12): Result.001 file - promoters60/1014662
atataattatct

SEQ ID NO: 93541 - DNA, 12 bp, Unknown
  misc_feature (1)..( 12): Result.001 file - promoters60/1014662
gtttaataacaa

SEQ ID NO: 93542 - DNA, 12 bp, Unknown
  misc_feature (1)..( 12): Result.001 file - promoters60/1014662
ctaaaatataat

SEQ ID NO: 93543 - DNA, 11 bp, Unknown
  misc_feature (1)..( 11): Result.001 file - promoters60/1014662
tgtatatatat

SEQ ID NO: 93544 - DNA, 11 bp, Unknown
  misc_feature (1)..( 11): Result.001 file - promoters60/1014662
aaaataaatag

SEQ ID NO: 93545 - DNA, 11 bp, Unknown
  misc_feature (1)..( 11): Result.001 file - promoters60/1014662
aaaatatataa

SEQ ID NO: 93546 - DNA, 11 bp, Unknown
  misc_feature (1)..( 11): Result.001 file - promoters60/1014662
agaataaaaat

SEQ ID NO: 93547 - DNA, 11 bp, Unknown
  misc_feature (1)..( 11): Result.001 file - promoters60/1014662
aaaatataata

SEQ ID NO: 93548 - DNA, 12 bp, Unknown
  misc_feature (1)..( 12): Result.001 file - promoters60/1014662
tagaaattaata

SEQ ID NO: 93549 - DNA, 12 bp, Unknown
  misc_feature (1)..( 12): Result.001 file - promoters60/1014662
agataattaagt

SEQ ID NO: 93550 - DNA, 11 bp, Unknown
  misc_feature (1)..( 11): Result.001 file - promoters60/1014662
taaaatcaata

SEQ ID NO: 93551 - DNA, 11 bp, Unknown
  misc_feature (1)..( 11): Result.001 file - promoters60/1014662
tttaattatta

SEQ ID NO: 93552 - DNA, 12 bp, Unknown
  misc_feature (1)..( 12): Result.001 file - promoters60/1014662
ataacatcactt

SEQ ID NO: 93553 - DNA, 12 bp, Unknown
  misc_feature (1)..( 12): Result.001 file - promoters60/1014662
ttttatcacaag

SEQ ID NO: 93554 - DNA, 12 bp, Unknown
  misc_feature (1)..( 12): Result.001 file - promoters60/1014662
ttttgtcaacga

SEQ ID NO: 93555 - DNA, 12 bp, Unknown
  misc_feature (1)..( 12): Result.001 file - promoters60/1014662
gtataacaataa

SEQ ID NO: 93556 - DNA, 12 bp, Unknown
  misc_feature (1)..( 12): Result.001 file - promoters60/1014662
cggtgtaaacga

SEQ ID NO: 93557 - DNA, 12 bp, Unknown
  misc_feature (1)..( 12): Result.001 file - promoters60/1014662
gggtgtaatgct

SEQ ID NO: 93558 - DNA, 12 bp, Unknown
  misc_feature (1)..( 12): Result.001 file - promoters60/1014662
ttttgtatctaa

SEQ ID NO: 93559 - DNA, 8 bp, Unknown
  misc_feature (1)..( 8): Result.001 file - promoters60/1014662
aatcaaaa

SEQ ID NO: 93560 - DNA, 8 bp, Unknown
  misc_feature (1)..( 8): Result.001 file - promoters60/1014662
aatcaaat

SEQ ID NO: 93561 - DNA, 9 bp, Unknown
  misc_feature (1)..( 9): Result.001 file - promoters60/1014662
gatccaaac

SEQ ID NO: 93562 - DNA, 9 bp, Unknown
  misc_feature (1)..( 9): Result.001 file - promoters60/1014662
ctttcaaat

SEQ ID NO: 93563 - DNA, 9 bp, Unknown
  misc_feature (1)..( 9): Result.001 file - promoters60/1014662
tatcctaac

SEQ ID NO: 93564 - DNA, 11 bp, Unknown
  misc_feature (1)..( 11): Result.001 file - promoters60/1014662
aaatgaagaat

SEQ ID NO: 93565 - DNA, 11 bp, Unknown
  misc_feature (1)..( 11): Result.001 file - promoters60/1014662
agaccaagaat

SEQ ID NO: 93566 - DNA, 11 bp, Unknown
  misc_feature (1)..( 11): Result.001 file - promoters60/1014662
tgtgcaaaaat

SEQ ID NO: 93567 - DNA, 11 bp, Unknown
  misc_feature (1)..( 11): Result.001 file - promoters60/1014662
tgtccaaaaat

SEQ ID NO: 93568 - DNA, 11 bp, Unknown
  misc_feature (1)..( 11): Result.001 file - promoters60/1014662
tgaccaaaaaa

SEQ ID NO: 93569 - DNA, 11 bp, Unknown
  misc_feature (1)..( 11): Result.001 file - promoters60/1014662
tgtgcaaaaat

SEQ ID NO: 93570 - DNA, 11 bp, Unknown
  misc_feature (1)..( 11): Result.001 file - promoters60/1014662
tgaccaaaaaa

SEQ ID NO: 93571 - DNA, 11 bp, Unknown
  misc_feature (1)..( 11): Result.001 file - promoters60/1014662
agaccaagaat

SEQ ID NO: 93572 - DNA, 11 bp, Unknown
  misc_feature (1)..( 11): Result.001 file - promoters60/1014662
tgtccaaaaat

SEQ ID NO: 93573 - DNA, 11 bp, Unknown
  misc_feature (1)..( 11): Result.001 file - promoters60/1014662
agacgaaaaag

SEQ ID NO: 93574 - DNA, 10 bp, Unknown
  misc_feature (1)..( 10): Result.001 file - promoters60/1014662
aagcattttt

SEQ ID NO: 93575 - DNA, 10 bp, Unknown
  misc_feature (1)..( 10): Result.001 file - promoters60/1014662
aagcattttc

SEQ ID NO: 93576 - DNA, 10 bp, Unknown
  misc_feature (1)..( 10): Result.001 file - promoters60/1014662
agctattttt

SEQ ID NO: 93577 - DNA, 10 bp, Unknown
  misc_feature (1)..( 10): Result.001 file - promoters60/1014662
attaattttt

SEQ ID NO: 93578 - DNA, 10 bp, Unknown
  misc_feature (1)..( 10): Result.001 file - promoters60/1014678
gaaaatcttt

SEQ ID NO: 93579 - DNA, 8 bp, Unknown
  misc_feature (1)..( 8): Result.001 file - promoters60/1014678
cacgtgtc

SEQ ID NO: 93580 - DNA, 8 bp, Unknown
  misc_feature (1)..( 8): Result.001 file - promoters60/1014678
cacatgtc

SEQ ID NO: 93581 - DNA, 6 bp, Unknown
  misc_feature (1)..( 6): Result.001 file - promoters60/1014678
ttactc

SEQ ID NO: 93582 - DNA, 6 bp, Unknown
  misc_feature (1)..( 6): Result.001 file - promoters60/1014678
ttactc

SEQ ID NO: 93583 - DNA, 7 bp, Unknown
  misc_feature (1)..( 7): Result.001 file - promoters60/1014678
catgaga

SEQ ID NO: 93584 - DNA, 7 bp, Unknown
  misc_feature (1)..( 7): Result.001 file - promoters60/1014678
cataaga

SEQ ID NO: 93585 - DNA, 10 bp, Unknown
  misc_feature (1)..( 10): Result.001 file - promoters60/1014678
acaacacatc

SEQ ID NO: 93586 - DNA, 10 bp, Unknown
  misc_feature (1)..( 10): Result.001 file - promoters60/1014678
aaaacaaatc

SEQ ID NO: 93587 - DNA, 10 bp, Unknown
  misc_feature (1)..( 10): Result.001 file - promoters60/1014678
aaaacaaaat

SEQ ID NO: 93588 - DNA, 6 bp, Unknown
  misc_feature (1)..( 6): Result.001 file - promoters60/1014678
aaaact

SEQ ID NO: 93589 - DNA, 6 bp, Unknown
  misc_feature (1)..( 6): Result.001 file - promoters60/1014678
aaaact

SEQ ID NO: 93590 - DNA, 10 bp, Unknown
  misc_feature (1)..( 10): Result.001 file - promoters60/1014678
cacgatggaa

SEQ ID NO: 93591 - DNA, 10 bp, Unknown
  misc_feature (1)..( 10): Result.001 file - promoters60/1014678
cacaatggaa

SEQ ID NO: 93592 - DNA, 11 bp, Unknown
  misc_feature (1)..( 11): Result.001 file - promoters60/1014678
aaaaataaatt

SEQ ID NO: 93593 - DNA, 11 bp, Unknown
  misc_feature (1)..( 11): Result.001 file - promoters60/1014678
aaaaatcaatt

SEQ ID NO: 93594 - DNA, 7 bp, Unknown
  misc_feature (1)..( 7): Result.001 file - promoters60/1014678
atattgt

SEQ ID NO: 93595 - DNA, 7 bp, Unknown
  misc_feature (1)..( 7): Result.001 file - promoters60/1014678
atattgt

SEQ ID NO: 93596 - DNA, 6 bp, Unknown
  misc_feature (1)..( 6): Result.001 file - promoters60/1014678
cagtat

SEQ ID NO: 93597 - DNA, 6 bp, Unknown
  misc_feature (1)..( 6): Result.001 file - promoters60/1014678
cagtat

SEQ ID NO: 93598 - DNA, 8 bp, Unknown
  misc_feature (1)..( 8): Result.001 file - promoters60/1014678
aaagaaaa

SEQ ID NO: 93599 - DNA, 8 bp, Unknown
  misc_feature (1)..( 8): Result.001 file - promoters60/1014678
aaataaaa

SEQ ID NO: 93600 - DNA, 8 bp, Unknown
  misc_feature (1)..( 8): Result.001 file - promoters60/1014678
aaaatcgt

SEQ ID NO: 93601 - DNA, 8 bp, Unknown
  misc_feature (1)..( 8): Result.001 file - promoters60/1014678
aaactcga

SEQ ID NO: 93602 - DNA, 8 bp, Unknown
  misc_feature (1)..( 8): Result.001 file - promoters60/1014678
gaacacga

SEQ ID NO: 93603 - DNA, 6 bp, Unknown
  misc_feature (1)..( 6): Result.001 file - promoters60/1014678
gtcttc

SEQ ID NO: 93604 - DNA, 6 bp, Unknown
  misc_feature (1)..( 6): Result.001 file - promoters60/1014678
gtcttc

SEQ ID NO: 93605 - DNA, 6 bp, Unknown
  misc_feature (1)..( 6): Result.001 file - promoters60/1014678
accgtt

SEQ ID NO: 93606 - DNA, 6 bp, Unknown
  misc_feature (1)..( 6): Result.001 file - promoters60/1014678
accgtt

SEQ ID NO: 93607 - DNA, 7 bp, Unknown
  misc_feature (1)..( 7): Result.001 file - promoters60/1014678
catacaa

SEQ ID NO: 93608 - DNA, 7 bp, Unknown
  misc_feature (1)..( 7): Result.001 file - promoters60/1014678
cattcaa

SEQ ID NO: 93609 - DNA, 7 bp, Unknown
  misc_feature (1)..( 7): Result.001 file - promoters60/1014678
caataca

SEQ ID NO: 93610 - DNA, 7 bp, Unknown
  misc_feature (1)..( 7): Result.001 file - promoters60/1014678
caaaaca

SEQ ID NO: 93611 - DNA, 7 bp, Unknown
  misc_feature (1)..( 7): Result.001 file - promoters60/1014678
ttcttct

SEQ ID NO: 93612 - DNA, 7 bp, Unknown
  misc_feature (1)..( 7): Result.001 file - promoters60/1014693
ttcttct

SEQ ID NO: 93613 - DNA, 14 bp, Unknown
  misc_feature (1)..( 14): Result.001 file - promoters60/1014693
tttttgatagagaa

SEQ ID NO: 93614 - DNA, 14 bp, Unknown
  misc_feature (1)..( 14): Result.001 file - promoters60/1014693
ttttttataaagaa

SEQ ID NO: 93615 - DNA, 14 bp, Unknown
  misc_feature (1)..( 14): Result.001 file - promoters60/1014693
catcttaaaaaaaa

SEQ ID NO: 93616 - DNA, 14 bp, Unknown
  misc_feature (1)..( 14): Result.001 file - promoters60/1014693
ttttttagttacag

SEQ ID NO: 93617 - DNA, 11 bp, Unknown
  misc_feature (1)..( 11): Result.001 file - promoters60/1014693
tgagtctacta

SEQ ID NO: 93618 - DNA, 11 bp, Unknown
  misc_feature (1)..( 11): Result.001 file - promoters60/1014693
agattcttcta

SEQ ID NO: 93619 - DNA, 11 bp, Unknown
  misc_feature (1)..( 11): Result.001 file - promoters60/1014693
ttcgtctactt

SEQ ID NO: 93620 - DNA, 11 bp, Unknown
  misc_feature (1)..( 11): Result.001 file - promoters60/1014771
ttcatcttaaa

SEQ ID NO: 93621 - DNA, 14 bp, Unknown
  misc_feature (1)..( 14): Result.001 file - promoters60/1014771
taaaaacataattt

SEQ ID NO: 93622 - DNA, 14 bp, Unknown
  misc_feature (1)..( 14): Result.001 file - promoters60/1014771
tttaaagatagcat

SEQ ID NO: 93623 - DNA, 14 bp, Unknown
  misc_feature (1)..( 14): Result.001 file - promoters60/1014771
taacaacttaattc

SEQ ID NO: 93624 - DNA, 14 bp, Unknown
  misc_feature (1)..( 14): Result.001 file - promoters60/1014771
cataagcttagaga

SEQ ID NO: 93625 - DNA, 14 bp, Unknown
  misc_feature (1)..( 14): Result.001 file - promoters60/1014771
aagaaacaagtaat

SEQ ID NO: 93626 - DNA, 14 bp, Unknown
  misc_feature (1)..( 14): Result.001 file - promoters60/1014771
tatgttgttaaaga

SEQ ID NO: 93627 - DNA, 14 bp, Unknown
  misc_feature (1)..( 14): Result.001 file - promoters60/1014771
ttgaaagaagggat

SEQ ID NO: 93628 - DNA, 12 bp, Unknown
  misc_feature (1)..( 12): Result.001 file - promoters60/1014771
tttaacaattaa

SEQ ID NO: 93629 - DNA, 12 bp, Unknown
  misc_feature (1)..( 12): Result.001 file - promoters60/1014771
gctaacaactta

SEQ ID NO: 93630 - DNA, 12 bp, Unknown
  misc_feature (1)..( 12): Result.001 file - promoters60/1014771
agaaacaagtaa

SEQ ID NO: 93631 - DNA, 12 bp, Unknown
  misc_feature (1)..( 12): Result.001 file - promoters60/1014771
agagacaaagta

SEQ ID NO: 93632 - DNA, 12 bp, Unknown
  misc_feature (1)..( 12): Result.001 file - promoters60/1014771
gttaaagagctt

SEQ ID NO: 93633 - DNA, 12 bp, Unknown
  misc_feature (1)..( 12): Result.001 file - promoters60/1014778
tgaaagaaggga

SEQ ID NO: 93634 - DNA, 8 bp, Unknown
  misc_feature (1)..( 8): Result.001 file - promoters60/1014778
aagagaag

SEQ ID NO: 93635 - DNA, 8 bp, Unknown
  misc_feature (1)..( 8): Result.001 file - promoters60/1014778
aagggaag

SEQ ID NO: 93636 - DNA, 6 bp, Unknown
  misc_feature (1)..( 6): Result.001 file - promoters60/1014778
catgaa

SEQ ID NO: 93637 - DNA, 6 bp, Unknown
  misc_feature (1)..( 6): Result.001 file - promoters60/1014778
catgaa

SEQ ID NO: 93638 - DNA, 6 bp, Unknown
  misc_feature (1)..( 6): Result.001 file - promoters60/1014778
attctt

SEQ ID NO: 93639 - DNA, 6 bp, Unknown
  misc_feature (1)..( 6): Result.001 file - promoters60/1014778
attctt

SEQ ID NO: 93640 - DNA, 6 bp, Unknown
  misc_feature (1)..( 6): Result.001 file - promoters60/1014778
taattt

SEQ ID NO: 93641 - DNA, 6 bp, Unknown
  misc_feature (1)..( 6): Result.001 file - promoters60/1014778
taattt

SEQ ID NO: 93642 - DNA, 8 bp, Unknown
  misc_feature (1)..( 8): Result.001 file - promoters60/1014778
tagtttct

SEQ ID NO: 93643 - DNA, 8 bp, Unknown
  misc_feature (1)..( 8): Result.001 file - promoters60/1014778
tagtgtct

SEQ ID NO: 93644 - DNA, 8 bp, Unknown
  misc_feature (1)..( 8): Result.001 file - promoters60/1014778
cagaaaaa

SEQ ID NO: 93645 - DNA, 8 bp, Unknown
  misc_feature (1)..( 8): Result.001 file - promoters60/1014778
cagaaaaa

SEQ ID NO: 93646 - DNA, 8 bp, Unknown
  misc_feature (1)..( 8): Result.001 file - promoters60/1014778
tttcgaag

SEQ ID NO: 93647 - DNA, 8 bp, Unknown
  misc_feature (1)..( 8): Result.001 file - promoters60/1014778
aatcgaag

SEQ ID NO: 93648 - DNA, 8 bp, Unknown
  misc_feature (1)..( 8): Result.001 file - promoters60/1014778
tttcgaat

SEQ ID NO: 93649 - DNA, 9 bp, Unknown
  misc_feature (1)..( 9): Result.001 file - promoters60/1014778
ggcttttga

SEQ ID NO: 93650 - DNA, 9 bp, Unknown
  misc_feature (1)..( 9): Result.001 file - promoters60/1014778
ggcttatga

SEQ ID NO: 93651 - DNA, 7 bp, Unknown
  misc_feature (1)..( 7): Result.001 file - promoters60/1014778
ccaagaa

SEQ ID NO: 93652 - DNA, 7 bp, Unknown
  misc_feature (1)..( 7): Result.001 file - promoters60/1014778
acaagaa

SEQ ID NO: 93653 - DNA, 7 bp, Unknown
  misc_feature (1)..( 7): Result.001 file - promoters60/1014778
ccaagat

SEQ ID NO: 93654 - DNA, 9 bp, Unknown
  misc_feature (1)..( 9): Result.001 file - promoters60/1014778
acactacaa

SEQ ID NO: 93655 - DNA, 9 bp, Unknown
  misc_feature (1)..( 9): Result.001 file - promoters60/1014778
acaatacaa

SEQ ID NO: 93656 - DNA, 11 bp, Unknown
  misc_feature (1)..( 11): Result.001 file - promoters60/1014778
gaagaacgatg

SEQ ID NO: 93657 - DNA, 11 bp, Unknown
  misc_feature (1)..( 11): Result.001 file - promoters60/1014778
gaataacaatg

SEQ ID NO: 93658 - DNA, 8 bp, Unknown
  misc_feature (1)..( 8): Result.001 file - promoters60/1014778
gtttgtca

SEQ ID NO: 93659 - DNA, 8 bp, Unknown
  misc_feature (1)..( 8): Result.001 file - promoters60/1014778
gtttatca

SEQ ID NO: 93660 - DNA, 9 bp, Unknown
  misc_feature (1)..( 9): Result.001 file - promoters60/1014778
gagatcctc

SEQ ID NO: 93661 - DNA, 9 bp, Unknown
  misc_feature (1)..( 9): Result.001 file - promoters60/1014803
gagaacctc

SEQ ID NO: 93662 - DNA, 6 bp, Unknown
  misc_feature (1)..( 6): Result.001 file - promoters60/1014803
ttgctt

SEQ ID NO: 93663 - DNA, 6 bp, Unknown
  misc_feature (1)..( 6): Result.001 file - promoters60/1014803
ttgctt

SEQ ID NO: 93664 - DNA, 6 bp, Unknown
  misc_feature (1)..( 6): Result.001 file - promoters60/1014803
gcaatg

SEQ ID NO: 93665 - DNA, 6 bp, Unknown
  misc_feature (1)..( 6): Result.001 file - promoters60/1014803
gcaatg

SEQ ID NO: 93666 - DNA, 7 bp, Unknown
  misc_feature (1)..( 7): Result.001 file - promoters60/1014803
aatgcat

SEQ ID NO: 93667 - DNA, 7 bp, Unknown
  misc_feature (1)..( 7): Result.001 file - promoters60/1014803
aattcat

SEQ ID NO: 93668 - DNA, 7 bp, Unknown
  misc_feature (1)..( 7): Result.001 file - promoters60/1014803
tctttga

SEQ ID NO: 93669 - DNA, 7 bp, Unknown
  misc_feature (1)..( 7): Result.001 file - promoters60/1014803
tctctga

SEQ ID NO: 93670 - DNA, 6 bp, Unknown
  misc_feature (1)..( 6): Result.001 file - promoters60/1014803
taaagt

SEQ ID NO: 93671 - DNA, 6 bp, Unknown
  misc_feature (1)..( 6): Result.001 file - promoters60/1014803
taaagt

SEQ ID NO: 93672 - DNA, 6 bp, Unknown
  misc_feature (1)..( 6): Result.001 file - promoters60/1014803
tttcaa

SEQ ID NO: 93673 - DNA, 6 bp, Unknown
  misc_feature (1)..( 6): Result.001 file - promoters60/1014803
tttcaa

SEQ ID NO: 93674 - DNA, 8 bp, Unknown
  misc_feature (1)..( 8): Result.001 file - promoters60/1014803
ttcaatat

SEQ ID NO: 93675 - DNA, 8 bp, Unknown
  misc_feature (1)..( 8): Result.001 file - promoters60/1014803
ttcaatat

SEQ ID NO: 93676 - DNA, 9 bp, Unknown
  misc_feature (1)..( 9): Result.001 file - promoters60/1014803
aaattggta

SEQ ID NO: 93677 - DNA, 9 bp, Unknown
  misc_feature (1)..( 9): Result.001 file - promoters60/1014803
aaattggta

SEQ ID NO: 93678 - DNA, 6 bp, Unknown
  misc_feature (1)..( 6): Result.001 file - promoters60/1014803
aatagt

SEQ ID NO: 93679 - DNA, 6 bp, Unknown
  misc_feature (1)..( 6): Result.001 file - promoters60/1014803
aatagt

SEQ ID NO: 93680 - DNA, 6 bp, Unknown
  misc_feature (1)..( 6): Result.001 file - promoters60/1014803
ctttcg

SEQ ID NO: 93681 - DNA, 6 bp, Unknown
  misc_feature (1)..( 6): Result.001 file - promoters60/1014803
ctttcg

SEQ ID NO: 93682 - DNA, 11 bp, Unknown
  misc_feature (1)..( 11): Result.001 file - promoters60/1014803
ttcttagctac

SEQ ID NO: 93683 - DNA, 11 bp, Unknown
  misc_feature (1)..( 11): Result.001 file - promoters60/1014803
ttcctagatac

SEQ ID NO: 93684 - DNA, 6 bp, Unknown
  misc_feature (1)..( 6): Result.001 file - promoters60/1014803
ttctga

SEQ ID NO: 93685 - DNA, 6 bp, Unknown
  misc_feature (1)..( 6): Result.001 file - promoters60/1014803
ttctga

SEQ ID NO: 93686 - DNA, 8 bp, Unknown
  misc_feature (1)..( 8): Result.001 file - promoters60/1014803
ctcttgtt

SEQ ID NO: 93687 - DNA, 8 bp, Unknown
  misc_feature (1)..( 8): Result.001 file - promoters60/1014803
ctcttgtt

SEQ ID NO: 93688 - DNA, 6 bp, Unknown
  misc_feature (1)..( 6): Result.001 file - promoters60/1014803
gatatt

SEQ ID NO: 93689 - DNA, 6 bp, Unknown
  misc_feature (1)..( 6): Result.001 file - promoters60/1014803
gatatt

SEQ ID NO: 93690 - DNA, 6 bp, Unknown
  misc_feature (1)..( 6): Result.001 file - promoters60/1014803
gttcac

SEQ ID NO: 93691 - DNA, 6 bp, Unknown
  misc_feature (1)..( 6): Result.001 file - promoters60/1014885
gttcac

SEQ ID NO: 93692 - DNA, 10 bp, Unknown
  misc_feature (1)..( 10): Result.001 file - promoters60/1014885
gttttcattt

SEQ ID NO: 93693 - DNA, 10 bp, Unknown
  misc_feature (1)..( 10): Result.001 file - promoters60/1014885
gttttctgct

SEQ ID NO: 93694 - DNA, 10 bp, Unknown
  misc_feature (1)..( 10): Result.001 file - promoters60/1014885
attttgattt

SEQ ID NO: 93695 - DNA, 6 bp, Unknown
  misc_feature (1)..( 6): Result.001 file - promoters60/1014885
ttaaaa

SEQ ID NO: 93696 - DNA, 6 bp, Unknown
  misc_feature (1)..( 6): Result.001 file - promoters60/1014885
ttaaaa

SEQ ID NO: 93697 - DNA, 6 bp, Unknown
  misc_feature (1)..( 6): Result.001 file - promoters60/1014885
ttaaaa

SEQ ID NO: 93698 - DNA, 7 bp, Unknown
  misc_feature (1)..( 7): Result.001 file - promoters60/1014885
taaaagt

SEQ ID NO: 93699 - DNA, 7 bp, Unknown
  misc_feature (1)..( 7): Result.001 file - promoters60/1014885
aaaaagt

SEQ ID NO: 93700 - DNA, 7 bp, Unknown
  misc_feature (1)..( 7): Result.001 file - promoters60/1014885
aaaaagg

SEQ ID NO: 93701 - DNA, 8 bp, Unknown
  misc_feature (1)..( 8): Result.001 file - promoters60/1014885
taccctct

SEQ ID NO: 93702 - DNA, 8 bp, Unknown
  misc_feature (1)..( 8): Result.001 file - promoters60/1014885
taccctcc

SEQ ID NO: 93703 - DNA, 8 bp, Unknown
  misc_feature (1)..( 8): Result.001 file - promoters60/1014885
aaccctct

SEQ ID NO: 93704 - DNA, 9 bp, Unknown
  misc_feature (1)..( 9): Result.001 file - promoters60/1014885
aaagactga

SEQ ID NO: 93705 - DNA, 9 bp, Unknown
  misc_feature (1)..( 9): Result.001 file - promoters60/1014885
aaaaactaa

SEQ ID NO: 93706 - DNA, 9 bp, Unknown
  misc_feature (1)..( 9): Result.001 file - promoters60/1014895
aaaaagtaa

SEQ ID NO: 93707 - DNA, 11 bp, Unknown
  misc_feature (1)..( 11): Result.001 file - promoters60/1014895
aatagataact

SEQ ID NO: 93708 - DNA, 11 bp, Unknown
  misc_feature (1)..( 11): Result.001 file - promoters60/1014895
aatggatagtg

SEQ ID NO: 93709 - DNA, 11 bp, Unknown
  misc_feature (1)..( 11): Result.001 file - promoters60/1014895
ccgggaaagtg

SEQ ID NO: 93710 - DNA, 8 bp, Unknown
  misc_feature (1)..( 8): Result.001 file - promoters60/1014895
gaaaatct

SEQ ID NO: 93711 - DNA, 8 bp, Unknown
  misc_feature (1)..( 8): Result.001 file - promoters60/1014895
gaaaatga

SEQ ID NO: 93712 - DNA, 8 bp, Unknown
  misc_feature (1)..( 8): Result.001 file - promoters60/1014895
aaaactga

SEQ ID NO: 93713 - DNA, 7 bp, Unknown
  misc_feature (1)..( 7): Result.001 file - promoters60/1014895
aaatagc

SEQ ID NO: 93714 - DNA, 7 bp, Unknown
  misc_feature (1)..( 7): Result.001 file - promoters60/1014895
aaaaagc

SEQ ID NO: 93715 - DNA, 8 bp, Unknown
  misc_feature (1)..( 8): Result.001 file - promoters60/1014895
ctatcaca

SEQ ID NO: 93716 - DNA, 8 bp, Unknown
  misc_feature (1)..( 8): Result.001 file - promoters60/1014895
ctagcaca

SEQ ID NO: 93717 - DNA, 7 bp, Unknown
  misc_feature (1)..( 7): Result.001 file - promoters60/1014895
aatctct

SEQ ID NO: 93718 - DNA, 7 bp, Unknown
  misc_feature (1)..( 7): Result.001 file - promoters60/1014895
aatgtct

SEQ ID NO: 93719 - DNA, 6 bp, Unknown
  misc_feature (1)..( 6): Result.001 file - promoters60/1014895
tataaa

SEQ ID NO: 93720 - DNA, 6 bp, Unknown
  misc_feature (1)..( 6): Result.001 file - promoters60/1014895
tataaa

SEQ ID NO: 93721 - DNA, 6 bp, Unknown
  misc_feature (1)..( 6): Result.001 file - promoters60/1014895
cacaca

SEQ ID NO: 93722 - DNA, 6 bp, Unknown
  misc_feature (1)..( 6): Result.001 file - promoters60/1014895
cacaca

SEQ ID NO: 93723 - DNA, 6 bp, Unknown
  misc_feature (1)..( 6): Result.001 file - promoters60/1014895
aaggta

SEQ ID NO: 93724 - DNA, 6 bp, Unknown
  misc_feature (1)..( 6): Result.001 file - promoters60/1014895
aaggta

SEQ ID NO: 93725 - DNA, 7 bp, Unknown
  misc_feature (1)..( 7): Result.001 file - promoters60/1014895
tataatt

SEQ ID NO: 93726 - DNA, 7 bp, Unknown
  misc_feature (1)..( 7): Result.001 file - promoters60/1014895
tatgatt

SEQ ID NO: 93727 - DNA, 6 bp, Unknown
  misc_feature (1)..( 6): Result.001 file - promoters60/1014895
tcgtta

SEQ ID NO: 93728 - DNA, 6 bp, Unknown
  misc_feature (1)..( 6): Result.001 file - promoters60/1014895
tcgtta

SEQ ID NO: 93729 - DNA, 8 bp, Unknown
  misc_feature (1)..( 8): Result.001 file - promoters60/1014895
cgggaaaa

SEQ ID NO: 93730 - DNA, 8 bp, Unknown
  misc_feature (1)..( 8): Result.001 file - promoters60/1014895
cgggaaaa

SEQ ID NO: 93731 - DNA, 7 bp, Unknown
  misc_feature (1)..( 7): Result.001 file - promoters60/1014895
ggaatat

SEQ ID NO: 93732 - DNA, 7 bp, Unknown
  misc_feature (1)..( 7): Result.001 file - promoters60/1014895
ggaatat

SEQ ID NO: 93733 - DNA, 7 bp, Unknown
  misc_feature (1)..( 7): Result.001 file - promoters60/1014895
gaataaa

SEQ ID NO: 93734 - DNA, 7 bp, Unknown
  misc_feature (1)..( 7): Result.001 file - promoters60/1014895
gaaaaaa

SEQ ID NO: 93735 - DNA, 7 bp, Unknown
  misc_feature (1)..( 7): Result.001 file - promoters60/1014895
aaaaaaa

SEQ ID NO: 93736 - DNA, 7 bp, Unknown
  misc_feature (1)..( 7): Result.001 file - promoters60/1014895
aaaaaaa

SEQ ID NO: 93737 - DNA, 7 bp, Unknown
  misc_feature (1)..( 7): Result.001 file - promoters60/1014895
acaaaat

SEQ ID NO: 93738 - DNA, 7 bp, Unknown
  misc_feature (1)..( 7): Result.001 file - promoters60/1014895
acagaat

SEQ ID NO: 93739 - DNA, 6 bp, Unknown
  misc_feature (1)..( 6): Result.001 file - promoters60/1014895
aatttt

SEQ ID NO: 93740 - DNA, 6 bp, Unknown
  misc_feature (1)..( 6): Result.001 file - promoters60/1014895
aatttt

SEQ ID NO: 93741 - DNA, 8 bp, Unknown
  misc_feature (1)..( 8): Result.001 file - promoters60/1014895
gaatttgt

SEQ ID NO: 93742 - DNA, 8 bp, Unknown
  misc_feature (1)..( 8): Result.001 file - promoters60/1014895
gaaattgt

SEQ ID NO: 93743 - DNA, 7 bp, Unknown
  misc_feature (1)..( 7): Result.001 file - promoters60/1014895
ggtttgg

SEQ ID NO: 93744 - DNA, 7 bp, Unknown
  misc_feature (1)..( 7): Result.001 file - promoters60/1014899
ggtttgg

SEQ ID NO: 93745 - DNA, 6 bp, Unknown
  misc_feature (1)..( 6): Result.001 file - promoters60/1014899
cgagtc

SEQ ID NO: 93746 - DNA, 6 bp, Unknown
  misc_feature (1)..( 6): Result.001 file - promoters60/1014899
cgagtc

SEQ ID NO: 93747 - DNA, 6 bp, Unknown
  misc_feature (1)..( 6): Result.001 file - promoters60/1014899
gaaatt

SEQ ID NO: 93748 - DNA, 6 bp, Unknown
  misc_feature (1)..( 6): Result.001 file - promoters60/1014899
gaaatt

SEQ ID NO: 93749 - DNA, 7 bp, Unknown
  misc_feature (1)..( 7): Result.001 file - promoters60/1014899
gactgaa

SEQ ID NO: 93750 - DNA, 7 bp, Unknown
  misc_feature (1)..( 7): Result.001 file - promoters60/1014899
gacagaa

SEQ ID NO: 93751 - DNA, 8 bp, Unknown
  misc_feature (1)..( 8): Result.001 file - promoters60/1014899
aaagatca

SEQ ID NO: 93752 - DNA, 8 bp, Unknown
  misc_feature (1)..( 8): Result.001 file - promoters60/1014899
aaagatca

SEQ ID NO: 93753 - DNA, 6 bp, Unknown
  misc_feature (1)..( 6): Result.001 file - promoters60/1014899
tagtag

SEQ ID NO: 93754 - DNA, 6 bp, Unknown
  misc_feature (1)..( 6): Result.001 file - promoters60/1014899
tagtag

SEQ ID NO: 93755 - DNA, 6 bp, Unknown
  misc_feature (1)..( 6): Result.001 file - promoters60/1014899
cctttt

SEQ ID NO: 93756 - DNA, 6 bp, Unknown
  misc_feature (1)..( 6): Result.001 file - promoters60/1014899
cctttt

SEQ ID NO: 93757 - DNA, 6 bp, Unknown
  misc_feature (1)..( 6): Result.001 file - promoters60/1014899
tttgat

SEQ ID NO: 93758 - DNA, 6 bp, Unknown
  misc_feature (1)..( 6): Result.001 file - promoters60/1014899
tttgat

SEQ ID NO: 93759 - DNA, 8 bp, Unknown
  misc_feature (1)..( 8): Result.001 file - promoters60/1014899
tttaacta

SEQ ID NO: 93760 - DNA, 8 bp, Unknown
  misc_feature (1)..( 8): Result.001 file - promoters60/1014899
tttatcta

SEQ ID NO: 93761 - DNA, 8 bp, Unknown
  misc_feature (1)..( 8): Result.001 file - promoters60/1014899
ctattttt

SEQ ID NO: 93762 - DNA, 8 bp, Unknown
  misc_feature (1)..( 8): Result.001 file - promoters60/1014899
ctatcttt

SEQ ID NO: 93763 - DNA, 8 bp, Unknown
  misc_feature (1)..( 8): Result.001 file - promoters60/1014899
cactaacc

SEQ ID NO: 93764 - DNA, 8 bp, Unknown
  misc_feature (1)..( 8): Result.001 file - promoters60/1014899
cactaacc

SEQ ID NO: 93765 - DNA, 7 bp, Unknown
  misc_feature (1)..( 7): Result.001 file - promoters60/1014899
aatcggt

SEQ ID NO: 93766 - DNA, 7 bp, Unknown
  misc_feature (1)..( 7): Result.001 file - promoters60/1014899
aattggt

SEQ ID NO: 93767 - DNA, 6 bp, Unknown
  misc_feature (1)..( 6): Result.001 file - promoters60/1014899
gacctc

SEQ ID NO: 93768 - DNA, 6 bp, Unknown
  misc_feature (1)..( 6): Result.001 file - promoters60/1014899
gacctc

SEQ ID NO: 93769 - DNA, 8 bp, Unknown
  misc_feature (1)..( 8): Result.001 file - promoters60/1014899
ttttaata

SEQ ID NO: 93770 - DNA, 8 bp, Unknown
  misc_feature (1)..( 8): Result.001 file - promoters60/1014899
ttttaata

SEQ ID NO: 93771 - DNA, 9 bp, Unknown
  misc_feature (1)..( 9): Result.001 file - promoters60/1014899
tcttgttta

SEQ ID NO: 93772 - DNA, 9 bp, Unknown
  misc_feature (1)..( 9): Result.001 file - promoters60/1014899
tctttttta

SEQ ID NO: 93773 - DNA, 7 bp, Unknown
  misc_feature (1)..( 7): Result.001 file - promoters60/1014899
aaacata

SEQ ID NO: 93774 - DNA, 7 bp, Unknown
  misc_feature (1)..( 7): Result.001 file - promoters60/1014899
aaatata

SEQ ID NO: 93775 - DNA, 7 bp, Unknown
  misc_feature (1)..( 7): Result.001 file - promoters60/1014899
caagata

SEQ ID NO: 93776 - DNA, 7 bp, Unknown
  misc_feature (1)..( 7): Result.001 file - promoters60/1014899
caacata

SEQ ID NO: 93777 - DNA, 7 bp, Unknown
  misc_feature (1)..( 7): Result.001 file - promoters60/1014899
ttaaaaa

SEQ ID NO: 93778 - DNA, 7 bp, Unknown
  misc_feature (1)..( 7): Result.001 file - promoters60/1014899
ttacaaa

SEQ ID NO: 93779 - DNA, 8 bp, Unknown
  misc_feature (1)..( 8): Result.001 file - promoters60/1014899
gtgaaaaa

SEQ ID NO: 93780 - DNA, 8 bp, Unknown
  misc_feature (1)..( 8): Result.001 file - promoters60/1014899
gtgaaaaa

SEQ ID NO: 93781 - DNA, 8 bp, Unknown
  misc_feature (1)..( 8): Result.001 file - promoters60/1014899
tattaata

SEQ ID NO: 93782 - DNA, 8 bp, Unknown
  misc_feature (1)..( 8): Result.001 file - promoters60/1014907
tataaata

SEQ ID NO: 93783 - DNA, 11 bp, Unknown
  misc_feature (1)..( 11): Result.001 file - promoters60/1014907
ctacatatcat

SEQ ID NO: 93784 - DNA, 11 bp, Unknown
  misc_feature (1)..( 11): Result.001 file - promoters60/1014907
agacatatatg

SEQ ID NO: 93785 - DNA, 11 bp, Unknown
  misc_feature (1)..( 11): Result.001 file - promoters60/1014907
ctacatatcat

SEQ ID NO: 93786 - DNA, 7 bp, Unknown
  misc_feature (1)..( 7): Result.001 file - promoters60/1014907
ttttcta

SEQ ID NO: 93787 - DNA, 7 bp, Unknown
  misc_feature (1)..( 7): Result.001 file - promoters60/1014907
ttttcta

SEQ ID NO: 93788 - DNA, 7 bp, Unknown
  misc_feature (1)..( 7): Result.001 file - promoters60/1014907
tttttag

SEQ ID NO: 93789 - DNA, 7 bp, Unknown
  misc_feature (1)..( 7): Result.001 file - promoters60/1014907
tatttta

SEQ ID NO: 93790 - DNA, 7 bp, Unknown
  misc_feature (1)..( 7): Result.001 file - promoters60/1014907
tatttta

SEQ ID NO: 93791 - DNA, 8 bp, Unknown
  misc_feature (1)..( 8): Result.001 file - promoters60/1014907
cattcttt

SEQ ID NO: 93792 - DNA, 9 bp, Unknown
  misc_feature (1)..( 9): Result.001 file - promoters60/1014907
atttgtaat

SEQ ID NO: 93793 - DNA, 9 bp, Unknown
  misc_feature (1)..( 9): Result.001 file - promoters60/1014907
ttttttaat

SEQ ID NO: 93794 - DNA, 9 bp, Unknown
  misc_feature (1)..( 9): Result.001 file - promoters60/1014907
atttttttt

SEQ ID NO: 93795 - DNA, 9 bp, Unknown
  misc_feature (1)..( 9): Result.001 file - promoters60/1014907
caaaaaaag

SEQ ID NO: 93796 - DNA, 9 bp, Unknown
  misc_feature (1)..( 9): Result.001 file - promoters60/1014907
aaaaacaag

SEQ ID NO: 93797 - DNA, 9 bp, Unknown
  misc_feature (1)..( 9): Result.001 file - promoters60/1014907
caaaaaaaa

SEQ ID NO: 93798 - DNA, 10 bp, Unknown
  misc_feature (1)..( 10): Result.001 file - promoters60/1014907
taaaataatc

SEQ ID NO: 93799 - DNA, 10 bp, Unknown
  misc_feature (1)..( 10): Result.001 file - promoters60/1014907
gaaaatgatc

SEQ ID NO: 93800 - DNA, 10 bp, Unknown
  misc_feature (1)..( 10): Result.001 file - promoters60/1014907
taaaatgcga

SEQ ID NO: 93801 - DNA, 7 bp, Unknown
  misc_feature (1)..( 7): Result.001 file - promoters60/1014907
aaagtct

SEQ ID NO: 93802 - DNA, 7 bp, Unknown
  misc_feature (1)..( 7): Result.001 file - promoters60/1014907
aaattct

SEQ ID NO: 93803 - DNA, 7 bp, Unknown
  misc_feature (1)..( 7): Result.001 file - promoters60/1014926
aaaatct

SEQ ID NO: 93804 - DNA, 6 bp, Unknown
  misc_feature (1)..( 6): Result.001 file - promoters60/1014926
aataca

SEQ ID NO: 93805 - DNA, 6 bp, Unknown
  misc_feature (1)..( 6): Result.001 file - promoters60/1014926
aataca

SEQ ID NO: 93806 - DNA, 8 bp, Unknown
  misc_feature (1)..( 8): Result.001 file - promoters60/1014926
taagacag

SEQ ID NO: 93807 - DNA, 8 bp, Unknown
  misc_feature (1)..( 8): Result.001 file - promoters60/1014926
taacacag

SEQ ID NO: 93808 - DNA, 7 bp, Unknown
  misc_feature (1)..( 7): Result.001 file - promoters60/1014926
ctccttc

SEQ ID NO: 93809 - DNA, 7 bp, Unknown
  misc_feature (1)..( 7): Result.001 file - promoters60/1014926
ctcattc

SEQ ID NO: 93810 - DNA, 7 bp, Unknown
  misc_feature (1)..( 7): Result.001 file - promoters60/1014926
ccttcct

SEQ ID NO: 93811 - DNA, 7 bp, Unknown
  misc_feature (1)..( 7): Result.001 file - promoters60/1014926
ccttccc

SEQ ID NO: 93812 - DNA, 7 bp, Unknown
  misc_feature (1)..( 7): Result.001 file - promoters60/1014926
ctttctt

SEQ ID NO: 93813 - DNA, 8 bp, Unknown
  misc_feature (1)..( 8): Result.001 file - promoters60/1014926
ctttttta

SEQ ID NO: 93814 - DNA, 8 bp, Unknown
  misc_feature (1)..( 8): Result.001 file - promoters60/1014926
cttattta

SEQ ID NO: 93815 - DNA, 6 bp, Unknown
  misc_feature (1)..( 6): Result.001 file - promoters60/1014926
aaaagg

SEQ ID NO: 93816 - DNA, 6 bp, Unknown
  misc_feature (1)..( 6): Result.001 file - promoters60/1014926
aaaagg

SEQ ID NO: 93817 - DNA, 11 bp, Unknown
  misc_feature (1)..( 11): Result.001 file - promoters60/1014926
gttgttatagg

SEQ ID NO: 93818 - DNA, 11 bp, Unknown
  misc_feature (1)..( 11): Result.001 file - promoters60/1014926
attgttaaagg

SEQ ID NO: 93819 - DNA, 11 bp, Unknown
  misc_feature (1)..( 11): Result.001 file - promoters60/1014926
atttttattta

SEQ ID NO: 93820 - DNA, 7 bp, Unknown
  misc_feature (1)..( 7): Result.001 file - promoters60/1014926
ttacaga

SEQ ID NO: 93821 - DNA, 7 bp, Unknown
  misc_feature (1)..( 7): Result.001 file - promoters60/1014926
ttagaga

SEQ ID NO: 93822 - DNA, 7 bp, Unknown
  misc_feature (1)..( 7): Result.001 file - promoters60/1014926
ttacgtt

SEQ ID NO: 93823 - DNA, 7 bp, Unknown
  misc_feature (1)..( 7): Result.001 file - promoters60/1014926
ttatgtt

SEQ ID NO: 93824 - DNA, 8 bp, Unknown
  misc_feature (1)..( 8): Result.001 file - promoters60/1014926
taataaat

SEQ ID NO: 93825 - DNA, 8 bp, Unknown
  misc_feature (1)..( 8): Result.001 file - promoters60/1014926
taagaaat

SEQ ID NO: 93826 - DNA, 6 bp, Unknown
  misc_feature (1)..( 6): Result.001 file - promoters60/1014926
ggctca

SEQ ID NO: 93827 - DNA, 6 bp, Unknown
  misc_feature (1)..( 6): Result.001 file - promoters60/1014926
ggctca

SEQ ID NO: 93828 - DNA, 6 bp, Unknown
  misc_feature (1)..( 6): Result.001 file - promoters60/1014926
aagttg

SEQ ID NO: 93829 - DNA, 6 bp, Unknown
  misc_feature (1)..( 6): Result.001 file - promoters60/1014926
aagttg

SEQ ID NO: 93830 - DNA, 6 bp, Unknown
  misc_feature (1)..( 6): Result.001 file - promoters60/1014926
cattct

SEQ ID NO: 93831 - DNA, 6 bp, Unknown
  misc_feature (1)..( 6): Result.001 file - promoters60/1014926
cattct

SEQ ID NO: 93832 - DNA, 6 bp, Unknown
  misc_feature (1)..( 6): Result.001 file - promoters60/1014926
tctgga

SEQ ID NO: 93833 - DNA, 6 bp, Unknown
  misc_feature (1)..( 6): Result.001 file - promoters60/1014926
tctgga

SEQ ID NO: 93834 - DNA, 7 bp, Unknown
  misc_feature (1)..( 7): Result.001 file - promoters60/1014926
cctaaat

SEQ ID NO: 93835 - DNA, 7 bp, Unknown
  misc_feature (1)..( 7): Result.001 file - promoters60/1014989
cctcaat

SEQ ID NO: 93836 - DNA, 8 bp, Unknown
  misc_feature (1)..( 8): Result.001 file - promoters60/1014989
ttttcaaa

SEQ ID NO: 93837 - DNA, 8 bp, Unknown
  misc_feature (1)..( 8): Result.001 file - promoters60/1014989
ttttgaaa

SEQ ID NO: 93838 - DNA, 8 bp, Unknown
  misc_feature (1)..( 8): Result.001 file - promoters60/1014989
ttttgatg

SEQ ID NO: 93839 - DNA, 9 bp, Unknown
  misc_feature (1)..( 9): Result.001 file - promoters60/1014989
aacacatat

SEQ ID NO: 93840 - DNA, 9 bp, Unknown
  misc_feature (1)..( 9): Result.001 file - promoters60/1014989
aacaaatat

SEQ ID NO: 93841 - DNA, 7 bp, Unknown
  misc_feature (1)..( 7): Result.001 file - promoters60/1014989
atatatg

SEQ ID NO: 93842 - DNA, 7 bp, Unknown
  misc_feature (1)..( 7): Result.001 file - promoters60/1014989
atatatg

SEQ ID NO: 93843 - DNA, 6 bp, Unknown
  misc_feature (1)..( 6): Result.001 file - promoters60/1014989
aattgg

SEQ ID NO: 93844 - DNA, 6 bp, Unknown
  misc_feature (1)..( 6): Result.001 file - promoters60/1014989
aattgg

SEQ ID NO: 93845 - DNA, 6 bp, Unknown
  misc_feature (1)..( 6): Result.001 file - promoters60/1014989
gtaata

SEQ ID NO: 93846 - DNA, 6 bp, Unknown
  misc_feature (1)..( 6): Result.001 file - promoters60/1014989
gtaata

SEQ ID NO: 93847 - DNA, 8 bp, Unknown
  misc_feature (1)..( 8): Result.001 file - promoters60/1014989
aacttatt

SEQ ID NO: 93848 - DNA, 8 bp, Unknown
  misc_feature (1)..( 8): Result.001 file - promoters60/1014989
aacttatt

SEQ ID NO: 93849 - DNA, 6 bp, Unknown
  misc_feature (1)..( 6): Result.001 file - promoters60/1014989
tatttt

SEQ ID NO: 93850 - DNA, 6 bp, Unknown
  misc_feature (1)..( 6): Result.001 file - promoters60/1014989
tatttt

SEQ ID NO: 93851 - DNA, 7 bp, Unknown
  misc_feature (1)..( 7): Result.001 file - promoters60/1014989
attatat

SEQ ID NO: 93852 - DNA, 7 bp, Unknown
  misc_feature (1)..( 7): Result.001 file - promoters60/1014989
attttat

SEQ ID NO: 93853 - DNA, 7 bp, Unknown
  misc_feature (1)..( 7): Result.001 file - promoters60/1014989
agaatat

SEQ ID NO: 93854 - DNA, 7 bp, Unknown
  misc_feature (1)..( 7): Result.001 file - promoters60/1014989
agattat

SEQ ID NO: 93855 - DNA, 7 bp, Unknown
  misc_feature (1)..( 7): Result.001 file - promoters60/1014989
ttaaaac

SEQ ID NO: 93856 - DNA, 7 bp, Unknown
  misc_feature (1)..( 7): Result.001 file - promoters60/1014989
ttacaac

SEQ ID NO: 93857 - DNA, 7 bp, Unknown
  misc_feature (1)..( 7): Result.001 file - promoters60/1014989
tttcaaa

SEQ ID NO: 93858 - DNA, 7 bp, Unknown
  misc_feature (1)..( 7): Result.001 file - promoters60/1014989
tttcaaa

SEQ ID NO: 93859 - DNA, 7 bp, Unknown
  misc_feature (1)..( 7): Result.001 file - promoters60/1014989
aactatt

SEQ ID NO: 93860 - DNA, 7 bp, Unknown
  misc_feature (1)..( 7): Result.001 file - promoters60/1014989
aaccatt

SEQ ID NO: 93861 - DNA, 7 bp, Unknown
  misc_feature (1)..( 7): Result.001 file - promoters60/1014989
atgtgag

SEQ ID NO: 93862 - DNA, 7 bp, Unknown
  misc_feature (1)..( 7): Result.001 file - promoters60/1014989
atgggag

SEQ ID NO: 93863 - DNA, 8 bp, Unknown
  misc_feature (1)..( 8): Result.001 file - promoters60/1014989
caattcaa

SEQ ID NO: 93864 - DNA, 8 bp, Unknown
  misc_feature (1)..( 8): Result.001 file - promoters60/1014989
caaatcaa

SEQ ID NO: 93865 - DNA, 7 bp, Unknown
  misc_feature (1)..( 7): Result.001 file - promoters60/1014989
attcaat

SEQ ID NO: 93866 - DNA, 7 bp, Unknown
  misc_feature (1)..( 7): Result.001 file - promoters60/1014989
atttaat

SEQ ID NO: 93867 - DNA, 8 bp, Unknown
  misc_feature (1)..( 8): Result.001 file - promoters60/1014989
atatcaat

SEQ ID NO: 93868 - DNA, 8 bp, Unknown
  misc_feature (1)..( 8): Result.001 file - promoters60/1014989
atagcaat

SEQ ID NO: 93869 - DNA, 6 bp, Unknown
  misc_feature (1)..( 6): Result.001 file - promoters60/1014989
ttttat

SEQ ID NO: 93870 - DNA, 6 bp, Unknown
  misc_feature (1)..( 6): Result.001 file - promoters60/1014989
ttttat

SEQ ID NO: 93871 - DNA, 6 bp, Unknown
  misc_feature (1)..( 6): Result.001 file - promoters60/1014989
atattt

SEQ ID NO: 93872 - DNA, 6 bp, Unknown
  misc_feature (1)..( 6): Result.001 file - promoters60/1014989
atattt

SEQ ID NO: 93873 - DNA, 7 bp, Unknown
  misc_feature (1)..( 7): Result.001 file - promoters60/1014989
tttcatg

SEQ ID NO: 93874 - DNA, 7 bp, Unknown
  misc_feature (1)..( 7): Result.001 file - promoters60/1014989
tttgatg

SEQ ID NO: 93875 - DNA, 6 bp, Unknown
  misc_feature (1)..( 6): Result.001 file - promoters60/1014989
gatcat

SEQ ID NO: 93876 - DNA, 6 bp, Unknown
  misc_feature (1)..( 6): Result.001 file - promoters60/1014989
gatcat

SEQ ID NO: 93877 - DNA, 6 bp, Unknown
  misc_feature (1)..( 6): Result.001 file - promoters60/1014989
aaattt

SEQ ID NO: 93878 - DNA, 6 bp, Unknown
  misc_feature (1)..( 6): Result.001 file - promoters60/1014989
aaattt

SEQ ID NO: 93879 - DNA, 6 bp, Unknown
  misc_feature (1)..( 6): Result.001 file - promoters60/1014989
tgtttt

SEQ ID NO: 93880 - DNA, 6 bp, Unknown
  misc_feature (1)..( 6): Result.001 file - promoters60/1014989
tgtttt

SEQ ID NO: 93881 - DNA, 6 bp, Unknown
  misc_feature (1)..( 6): Result.001 file - promoters60/1014989
atgcaa

SEQ ID NO: 93882 - DNA, 6 bp, Unknown
  misc_feature (1)..( 6): Result.001 file - promoters60/1014989
atgcaa

SEQ ID NO: 93883 - DNA, 7 bp, Unknown
  misc_feature (1)..( 7): Result.001 file - promoters60/1014989
tactttt

SEQ ID NO: 93884 - DNA, 7 bp, Unknown
  misc_feature (1)..( 7): Result.001 file - promoters60/1014991
tacattt

SEQ ID NO: 93885 - DNA, 11 bp, Unknown
  misc_feature (1)..( 11): Result.001 file - promoters60/1014991
cgtgtcttctt

SEQ ID NO: 93886 - DNA, 11 bp, Unknown
  misc_feature (1)..( 11): Result.001 file - promoters60/1014991
cttgtcttttt

SEQ ID NO: 93887 - DNA, 11 bp, Unknown
  misc_feature (1)..( 11): Result.001 file - promoters60/1014991
gcagtcatctt

SEQ ID NO: 93888 - DNA, 11 bp, Unknown
  misc_feature (1)..( 11): Result.001 file - promoters60/1014991
cttgtgtttga

SEQ ID NO: 93889 - DNA, 11 bp, Unknown
  misc_feature (1)..( 11): Result.001 file - promoters60/1014991
attgtatttat

SEQ ID NO: 93890 - DNA, 11 bp, Unknown
  misc_feature (1)..( 11): Result.001 file - promoters60/1015030
attgggttttg

SEQ ID NO: 93891 - DNA, 10 bp, Unknown
  misc_feature (1)..( 10): Result.001 file - promoters60/1015030
tttttaaaaa

SEQ ID NO: 93892 - DNA, 10 bp, Unknown
  misc_feature (1)..( 10): Result.001 file - promoters60/1015030
ttttgaaaaa

SEQ ID NO: 93893 - DNA, 8 bp, Unknown
  misc_feature (1)..( 8): Result.001 file - promoters60/1015030
aaaattta

SEQ ID NO: 93894 - DNA, 8 bp, Unknown
  misc_feature (1)..( 8): Result.001 file - promoters60/1015030
aaagttta

SEQ ID NO: 93895 - DNA, 6 bp, Unknown
  misc_feature (1)..( 6): Result.001 file - promoters60/1015030
acaaaa

SEQ ID NO: 93896 - DNA, 6 bp, Unknown
  misc_feature (1)..( 6): Result.001 file - promoters60/1015030
acaaaa

SEQ ID NO: 93897 - DNA, 10 bp, Unknown
  misc_feature (1)..( 10): Result.001 file - promoters60/1015030
ttttgagcta

SEQ ID NO: 93898 - DNA, 10 bp, Unknown
  misc_feature (1)..( 10): Result.001 file - promoters60/1015030
ttttgacttg

SEQ ID NO: 93899 - DNA, 10 bp, Unknown
  misc_feature (1)..( 10): Result.001 file - promoters60/1015030
ttttgatcta

SEQ ID NO: 93900 - DNA, 8 bp, Unknown
  misc_feature (1)..( 8): Result.001 file - promoters60/1015030
aaaaataa

SEQ ID NO: 93901 - DNA, 8 bp, Unknown
  misc_feature (1)..( 8): Result.001 file - promoters60/1015030
aaaactaa

SEQ ID NO: 93902 - DNA, 7 bp, Unknown
  misc_feature (1)..( 7): Result.001 file - promoters60/1015030
tccatta

SEQ ID NO: 93903 - DNA, 7 bp, Unknown
  misc_feature (1)..( 7): Result.001 file - promoters60/1015030
tccatta

SEQ ID NO: 93904 - DNA, 7 bp, Unknown
  misc_feature (1)..( 7): Result.001 file - promoters60/1015030
ttttttc

SEQ ID NO: 93905 - DNA, 7 bp, Unknown
  misc_feature (1)..( 7): Result.001 file - promoters60/1015030
tttgttc

SEQ ID NO: 93906 - DNA, 7 bp, Unknown
  misc_feature (1)..( 7): Result.001 file - promoters60/1015030
tatatac

SEQ ID NO: 93907 - DNA, 7 bp, Unknown
  misc_feature (1)..( 7): Result.001 file - promoters60/1015030
tatttac

SEQ ID NO: 93908 - DNA, 7 bp, Unknown
  misc_feature (1)..( 7): Result.001 file - promoters60/1015030
atataaa

SEQ ID NO: 93909 - DNA, 7 bp, Unknown
  misc_feature (1)..( 7): Result.001 file - promoters60/1015030
atataaa

SEQ ID NO: 93910 - DNA, 7 bp, Unknown
  misc_feature (1)..( 7): Result.001 file - promoters60/1015030
tctttag

SEQ ID NO: 93911 - DNA, 7 bp, Unknown
  misc_feature (1)..( 7): Result.001 file - promoters60/1015030
tctttag

SEQ ID NO: 93912 - DNA, 7 bp, Unknown
  misc_feature (1)..( 7): Result.001 file - promoters60/1015030
ttttgag

SEQ ID NO: 93913 - DNA, 8 bp, Unknown
  misc_feature (1)..( 8): Result.001 file - promoters60/1015030
agattttt

SEQ ID NO: 93914 - DNA, 8 bp, Unknown
  misc_feature (1)..( 8): Result.001 file - promoters60/1015030
agatgttt

SEQ ID NO: 93915 - DNA, 6 bp, Unknown
  misc_feature (1)..( 6): Result.001 file - promoters60/1015030
agtttt

SEQ ID NO: 93916 - DNA, 6 bp, Unknown
  misc_feature (1)..( 6): Result.001 file - promoters60/1015030
agtttt

SEQ ID NO: 93917 - DNA, 11 bp, Unknown
  misc_feature (1)..( 11): Result.001 file - promoters60/1015030
tttatatcgtg

SEQ ID NO: 93918 - DNA, 11 bp, Unknown
  misc_feature (1)..( 11): Result.001 file - promoters60/1015030
cttatctcgtg

SEQ ID NO: 93919 - DNA, 11 bp, Unknown
  misc_feature (1)..( 11): Result.001 file - promoters60/1015030
cttttctttct

SEQ ID NO: 93920 - DNA, 8 bp, Unknown
  misc_feature (1)..( 8): Result.001 file - promoters60/1015030
aatatata

SEQ ID NO: 93921 - DNA, 8 bp, Unknown
  misc_feature (1)..( 8): Result.001 file - promoters60/1015030
aatttata

SEQ ID NO: 93922 - DNA, 7 bp, Unknown
  misc_feature (1)..( 7): Result.001 file - promoters60/1015030
acttaat

SEQ ID NO: 93923 - DNA, 7 bp, Unknown
  misc_feature (1)..( 7): Result.001 file - promoters60/1015030
actaaat

SEQ ID NO: 93924 - DNA, 6 bp, Unknown
  misc_feature (1)..( 6): Result.001 file - promoters60/1015030
gttcaa

SEQ ID NO: 93925 - DNA, 6 bp, Unknown
  misc_feature (1)..( 6): Result.001 file - promoters60/1015030
gttcaa

SEQ ID NO: 93926 - DNA, 6 bp, Unknown
  misc_feature (1)..( 6): Result.001 file - promoters60/1015030
tttttt

SEQ ID NO: 93927 - DNA, 6 bp, Unknown
  misc_feature (1)..( 6): Result.001 file - promoters60/1015030
tttttt

SEQ ID NO: 93928 - DNA, 6 bp, Unknown
  misc_feature (1)..( 6): Result.001 file - promoters60/1015030
actttt

SEQ ID NO: 93929 - DNA, 6 bp, Unknown
  misc_feature (1)..( 6): Result.001 file - promoters60/1015030
actttt

SEQ ID NO: 93930 - DNA, 7 bp, Unknown
  misc_feature (1)..( 7): Result.001 file - promoters60/1015030
ttttctt

SEQ ID NO: 93931 - DNA, 7 bp, Unknown
  misc_feature (1)..( 7): Result.001 file - promoters60/1015030
ttttctt

SEQ ID NO: 93932 - DNA, 8 bp, Unknown
  misc_feature (1)..( 8): Result.001 file - promoters60/1015030
tccttttt

SEQ ID NO: 93933 - DNA, 8 bp, Unknown
  misc_feature (1)..( 8): Result.001 file - promoters60/1015030
tcctcttt

SEQ ID NO: 93934 - DNA, 6 bp, Unknown
  misc_feature (1)..( 6): Result.001 file - promoters60/1015030
tgaaag

SEQ ID NO: 93935 - DNA, 6 bp, Unknown
  misc_feature (1)..( 6): Result.001 file - promoters60/1015030
tgaaag

SEQ ID NO: 93936 - DNA, 7 bp, Unknown
  misc_feature (1)..( 7): Result.001 file - promoters60/1015030
gatatac

SEQ ID NO: 93937 - DNA, 7 bp, Unknown
  misc_feature (1)..( 7): Result.001 file - promoters60/1015030
gatttac

SEQ ID NO: 93938 - DNA, 7 bp, Unknown
  misc_feature (1)..( 7): Result.001 file - promoters60/1015030
ccaaata

SEQ ID NO: 93939 - DNA, 7 bp, Unknown
  misc_feature (1)..( 7): Result.001 file - promoters60/1015064
ccaaata

SEQ ID NO: 93940 - DNA, 13 bp, Unknown
  misc_feature (1)..( 13): Result.001 file - promoters60/1015064
tagttgattcgtt

SEQ ID NO: 93941 - DNA, 13 bp, Unknown
  misc_feature (1)..( 13): Result.001 file - promoters60/1015064
atttttatttgtt

SEQ ID NO: 93942 - DNA, 13 bp, Unknown
  misc_feature (1)..( 13): Result.001 file - promoters60/1015064
tagtttattcgag

SEQ ID NO: 93943 - DNA, 14 bp, Unknown
  misc_feature (1)..( 14): Result.001 file - promoters60/1015064
tgaaatgtttagtt

SEQ ID NO: 93944 - DNA, 8 bp, Unknown
  misc_feature (1)..( 8): Result.001 file - promoters60/1015064
tattaatg

SEQ ID NO: 93945 - DNA, 8 bp, Unknown
  misc_feature (1)..( 8): Result.001 file - promoters60/1015064
tattaata

SEQ ID NO: 93946 - DNA, 8 bp, Unknown
  misc_feature (1)..( 8): Result.001 file - promoters60/1015064
agttaatg

SEQ ID NO: 93947 - DNA, 8 bp, Unknown
  misc_feature (1)..( 8): Result.001 file - promoters60/1015064
ggttaatt

SEQ ID NO: 93948 - DNA, 7 bp, Unknown
  misc_feature (1)..( 7): Result.001 file - promoters60/1015064
aatatta

SEQ ID NO: 93949 - DNA, 7 bp, Unknown
  misc_feature (1)..( 7): Result.001 file - promoters60/1015064
aatattt

SEQ ID NO: 93950 - DNA, 7 bp, Unknown
  misc_feature (1)..( 7): Result.001 file - promoters60/1015064
aatgttt

SEQ ID NO: 93951 - DNA, 7 bp, Unknown
  misc_feature (1)..( 7): Result.001 file - promoters60/1015064
aatgttt

SEQ ID NO: 93952 - DNA, 8 bp, Unknown
  misc_feature (1)..( 8): Result.001 file - promoters60/1015064
tttagtgg

SEQ ID NO: 93953 - DNA, 8 bp, Unknown
  misc_feature (1)..( 8): Result.001 file - promoters60/1015064
tttagtta

SEQ ID NO: 93954 - DNA, 8 bp, Unknown
  misc_feature (1)..( 8): Result.001 file - promoters60/1015064
tttagttt

SEQ ID NO: 93955 - DNA, 8 bp, Unknown
  misc_feature (1)..( 8): Result.001 file - promoters60/1015064
cttatttt

SEQ ID NO: 93956 - DNA, 10 bp, Unknown
  misc_feature (1)..( 10): Result.001 file - promoters60/1015064
tgaagccaaa

SEQ ID NO: 93957 - DNA, 10 bp, Unknown
  misc_feature (1)..( 10): Result.001 file - promoters60/1015064
tgaaaccaac

SEQ ID NO: 93958 - DNA, 10 bp, Unknown
  misc_feature (1)..( 10): Result.001 file - promoters60/1015064
aagaacaaac

SEQ ID NO: 93959 - DNA, 7 bp, Unknown
  misc_feature (1)..( 7): Result.001 file - promoters60/1015064
tttcgat

SEQ ID NO: 93960 - DNA, 7 bp, Unknown
  misc_feature (1)..( 7): Result.001 file - promoters60/1015064
ttttgat

SEQ ID NO: 93961 - DNA, 7 bp, Unknown
  misc_feature (1)..( 7): Result.001 file - promoters60/1015064
ttttgat

SEQ ID NO: 93962 - DNA, 9 bp, Unknown
  misc_feature (1)..( 9): Result.001 file - promoters60/1015064
aatttattt

SEQ ID NO: 93963 - DNA, 9 bp, Unknown
  misc_feature (1)..( 9): Result.001 file - promoters60/1015064
agtttattc

SEQ ID NO: 93964 - DNA, 9 bp, Unknown
  misc_feature (1)..( 9): Result.001 file - promoters60/1015064
aatatattt

SEQ ID NO: 93965 - DNA, 11 bp, Unknown
  misc_feature (1)..( 11): Result.001 file - promoters60/1015064
tacgtaacatg

SEQ ID NO: 93966 - DNA, 11 bp, Unknown
  misc_feature (1)..( 11): Result.001 file - promoters60/1015064
gtattaatatg

SEQ ID NO: 93967 - DNA, 11 bp, Unknown
  misc_feature (1)..( 11): Result.001 file - promoters60/1015092
tacgttacaat

SEQ ID NO: 93968 - DNA, 7 bp, Unknown
  misc_feature (1)..( 7): Result.001 file - promoters60/1015092
gtcgaaa

SEQ ID NO: 93969 - DNA, 7 bp, Unknown
  misc_feature (1)..( 7): Result.001 file - promoters60/1015092
gtctaaa

SEQ ID NO: 93970 - DNA, 7 bp, Unknown
  misc_feature (1)..( 7): Result.001 file - promoters60/1015092
aaacatt

SEQ ID NO: 93971 - DNA, 7 bp, Unknown
  misc_feature (1)..( 7): Result.001 file - promoters60/1015092
aaatatt

SEQ ID NO: 93972 - DNA, 10 bp, Unknown
  misc_feature (1)..( 10): Result.001 file - promoters60/1015092
taaatttgct

SEQ ID NO: 93973 - DNA, 10 bp, Unknown
  misc_feature (1)..( 10): Result.001 file - promoters60/1015092
taaatttaaa

SEQ ID NO: 93974 - DNA, 10 bp, Unknown
  misc_feature (1)..( 10): Result.001 file - promoters60/1015092
tgaatctgct

SEQ ID NO: 93975 - DNA, 9 bp, Unknown
  misc_feature (1)..( 9): Result.001 file - promoters60/1015092
tcagttaga

SEQ ID NO: 93976 - DNA, 9 bp, Unknown
  misc_feature (1)..( 9): Result.001 file - promoters60/1015092
tcagtaaga

SEQ ID NO: 93977 - DNA, 7 bp, Unknown
  misc_feature (1)..( 7): Result.001 file - promoters60/1015092
tttattg

SEQ ID NO: 93978 - DNA, 7 bp, Unknown
  misc_feature (1)..( 7): Result.001 file - promoters60/1015092
tttcttg

SEQ ID NO: 93979 - DNA, 7 bp, Unknown
  misc_feature (1)..( 7): Result.001 file - promoters60/1015092
tgaaaaa

SEQ ID NO: 93980 - DNA, 7 bp, Unknown
  misc_feature (1)..( 7): Result.001 file - promoters60/1015092
tgaaaaa

SEQ ID NO: 93981 - DNA, 6 bp, Unknown
  misc_feature (1)..( 6): Result.001 file - promoters60/1015092
aatatt

SEQ ID NO: 93982 - DNA, 6 bp, Unknown
  misc_feature (1)..( 6): Result.001 file - promoters60/1015092
aatatt

SEQ ID NO: 93983 - DNA, 12 bp, Unknown
  misc_feature (1)..( 12): Result.001 file - promoters60/1015092
ttagtttggtct

SEQ ID NO: 93984 - DNA, 12 bp, Unknown
  misc_feature (1)..( 12): Result.001 file - promoters60/1015092
ttagtttgttct

SEQ ID NO: 93985 - DNA, 6 bp, Unknown
  misc_feature (1)..( 6): Result.001 file - promoters60/1015092
ttttat

SEQ ID NO: 93986 - DNA, 6 bp, Unknown
  misc_feature (1)..( 6): Result.001 file - promoters60/1015092
ttttat

SEQ ID NO: 93987 - DNA, 9 bp, Unknown
  misc_feature (1)..( 9): Result.001 file - promoters60/1015092
attataaga

SEQ ID NO: 93988 - DNA, 9 bp, Unknown
  misc_feature (1)..( 9): Result.001 file - promoters60/1015179
attagaaga

SEQ ID NO: 93989 - DNA, 12 bp, Unknown
  misc_feature (1)..( 12): Result.001 file - promoters60/1015179
aaattcttataa

SEQ ID NO: 93990 - DNA, 12 bp, Unknown
  misc_feature (1)..( 12): Result.001 file - promoters60/1015179
aaactcttataa

SEQ ID NO: 93991 - DNA, 12 bp, Unknown
  misc_feature (1)..( 12): Result.001 file - promoters60/1015179
atactctttatc

SEQ ID NO: 93992 - DNA, 7 bp, Unknown
  misc_feature (1)..( 7): Result.001 file - promoters60/1015179
tttgaat

SEQ ID NO: 93993 - DNA, 7 bp, Unknown
  misc_feature (1)..( 7): Result.001 file - promoters60/1015179
tttgaat

SEQ ID NO: 93994 - DNA, 7 bp, Unknown
  misc_feature (1)..( 7): Result.001 file - promoters60/1015179
tttgaaa

SEQ ID NO: 93995 - DNA, 10 bp, Unknown
  misc_feature (1)..( 10): Result.001 file - promoters60/1015179
ttataataca

SEQ ID NO: 93996 - DNA, 10 bp, Unknown
  misc_feature (1)..( 10): Result.001 file - promoters60/1015179
ctattataca

SEQ ID NO: 93997 - DNA, 10 bp, Unknown
  misc_feature (1)..( 10): Result.001 file - promoters60/1015179
ttattatatc

SEQ ID NO: 93998 - DNA, 8 bp, Unknown
  misc_feature (1)..( 8): Result.001 file - promoters60/1015179
ccaaattt

SEQ ID NO: 93999 - DNA, 8 bp, Unknown
  misc_feature (1)..( 8): Result.001 file - promoters60/1015179
ccaatttt

SEQ ID NO: 94000 - DNA, 8 bp, Unknown
  misc_feature (1)..( 8): Result.001 file - promoters60/1015179
tcaaattg

SEQ ID NO: 94001 - DNA, 9 bp, Unknown
  misc_feature (1)..( 9): Result.001 file - promoters60/1015179
tttattctc

SEQ ID NO: 94002 - DNA, 9 bp, Unknown
  misc_feature (1)..( 9): Result.001 file - promoters60/1015179
tttcttctc

SEQ ID NO: 94003 - DNA, 9 bp, Unknown
  misc_feature (1)..( 9): Result.001 file - promoters60/1015210
cttcctcta

SEQ ID NO: 94004 - DNA, 8 bp, Unknown
  misc_feature (1)..( 8): Result.001 file - promoters60/1015210
ctttattt

SEQ ID NO: 94005 - DNA, 8 bp, Unknown
  misc_feature (1)..( 8): Result.001 file - promoters60/1015210
ttttatta

SEQ ID NO: 94006 - DNA, 8 bp, Unknown
  misc_feature (1)..( 8): Result.001 file - promoters60/1015210
ctttgttt

SEQ ID NO: 94007 - DNA, 8 bp, Unknown
  misc_feature (1)..( 8): Result.001 file - promoters60/1015210
ttttatgg

SEQ ID NO: 94008 - DNA, 7 bp, Unknown
  misc_feature (1)..( 7): Result.001 file - promoters60/1015210
aaataaa

SEQ ID NO: 94009 - DNA, 7 bp, Unknown
  misc_feature (1)..( 7): Result.001 file - promoters60/1015210
aaataaa

SEQ ID NO: 94010 - DNA, 7 bp, Unknown
  misc_feature (1)..( 7): Result.001 file - promoters60/1015210
aaataat

SEQ ID NO: 94011 - DNA, 7 bp, Unknown
  misc_feature (1)..( 7): Result.001 file - promoters60/1015210
atgatag

SEQ ID NO: 94012 - DNA, 7 bp, Unknown
  misc_feature (1)..( 7): Result.001 file - promoters60/1015210
atgataa

SEQ ID NO: 94013 - DNA, 7 bp, Unknown
  misc_feature (1)..( 7): Result.001 file - promoters60/1015214
atgctaa

SEQ ID NO: 94014 - DNA, 10 bp, Unknown
  misc_feature (1)..( 10): Result.001 file - promoters60/1015214
aaaacaaaac

SEQ ID NO: 94015 - DNA, 10 bp, Unknown
  misc_feature (1)..( 10): Result.001 file - promoters60/1015214
agcacacaac

SEQ ID NO: 94016 - DNA, 10 bp, Unknown
  misc_feature (1)..( 10): Result.001 file - promoters60/1015214
gaaagaaaga

SEQ ID NO: 94017 - DNA, 10 bp, Unknown
  misc_feature (1)..( 10): Result.001 file - promoters60/1015214
gaatgaaaca

SEQ ID NO: 94018 - DNA, 10 bp, Unknown
  misc_feature (1)..( 10): Result.001 file - promoters60/1015214
aagtgaatgt

SEQ ID NO: 94019 - DNA, 11 bp, Unknown
  misc_feature (1)..( 11): Result.001 file - promoters60/1015214
tttgttttcta

SEQ ID NO: 94020 - DNA, 11 bp, Unknown
  misc_feature (1)..( 11): Result.001 file - promoters60/1015214
tttctttacta

SEQ ID NO: 94021 - DNA, 11 bp, Unknown
  misc_feature (1)..( 11): Result.001 file - promoters60/1015214
tttgtgttcgt

SEQ ID NO: 94022 - DNA, 11 bp, Unknown
  misc_feature (1)..( 11): Result.001 file - promoters60/1015214
cttggtttctt

SEQ ID NO: 94023 - DNA, 11 bp, Unknown
  misc_feature (1)..( 11): Result.001 file - promoters60/1015214
ggaattttcta

SEQ ID NO: 94024 - DNA, 9 bp, Unknown
  misc_feature (1)..( 9): Result.001 file - promoters60/1015214
tctataaaa

SEQ ID NO: 94025 - DNA, 9 bp, Unknown
  misc_feature (1)..( 9): Result.001 file - promoters60/1015214
tatataaat

SEQ ID NO: 94026 - DNA, 9 bp, Unknown
  misc_feature (1)..( 9): Result.001 file - promoters60/1015214
tatttaaac

SEQ ID NO: 94027 - DNA, 9 bp, Unknown
  misc_feature (1)..( 9): Result.001 file - promoters60/1015214
tatataagc

SEQ ID NO: 94028 - DNA, 9 bp, Unknown
  misc_feature (1)..( 9): Result.001 file - promoters60/1015214
tatataaac

SEQ ID NO: 94029 - DNA, 13 bp, Unknown
  misc_feature (1)..( 13): Result.001 file - promoters60/1015214
atatatgtaaacg

SEQ ID NO: 94030 - DNA, 13 bp, Unknown
  misc_feature (1)..( 13): Result.001 file - promoters60/1015214
ctttatttaaaaa

SEQ ID NO: 94031 - DNA, 13 bp, Unknown
  misc_feature (1)..( 13): Result.001 file - promoters60/1015214
atagatgtttcat

SEQ ID NO: 94032 - DNA, 13 bp, Unknown
  misc_feature (1)..( 13): Result.001 file - promoters60/1015214
aaagagagagatg

SEQ ID NO: 94033 - DNA, 13 bp, Unknown
  misc_feature (1)..( 13): Result.001 file - promoters60/1015214
tcgtatctaagac

SEQ ID NO: 94034 - DNA, 13 bp, Unknown
  misc_feature (1)..( 13): Result.001 file - promoters60/1015214
ttagcattaaaat

SEQ ID NO: 94035 - DNA, 13 bp, Unknown
  misc_feature (1)..( 13): Result.001 file - promoters60/1015214
aattttagaaaga

SEQ ID NO: 94036 - DNA, 12 bp, Unknown
  misc_feature (1)..( 12): Result.001 file - promoters60/1015214
tgcattaatgtt

SEQ ID NO: 94037 - DNA, 12 bp, Unknown
  misc_feature (1)..( 12): Result.001 file - promoters60/1015214
ttcatttatgac

SEQ ID NO: 94038 - DNA, 12 bp, Unknown
  misc_feature (1)..( 12): Result.001 file - promoters60/1015214
agttcttatgac

SEQ ID NO: 94039 - DNA, 12 bp, Unknown
  misc_feature (1)..( 12): Result.001 file - promoters60/1015214
ttcaattaactt

SEQ ID NO: 94040 - DNA, 12 bp, Unknown
  misc_feature (1)..( 12): Result.001 file - promoters60/1015261
ttgttttatgtt

SEQ ID NO: 94041 - DNA, 11 bp, Unknown
  misc_feature (1)..( 11): Result.001 file - promoters60/1015261
gcttgtgaatt

SEQ ID NO: 94042 - DNA, 11 bp, Unknown
  misc_feature (1)..( 11): Result.001 file - promoters60/1015261
gctgctgaatt

SEQ ID NO: 94043 - DNA, 11 bp, Unknown
  misc_feature (1)..( 11): Result.001 file - promoters60/1015261
tgttgtaaatg

SEQ ID NO: 94044 - DNA, 11 bp, Unknown
  misc_feature (1)..( 11): Result.001 file - promoters60/1015261
acttgtaaatg

SEQ ID NO: 94045 - DNA, 11 bp, Unknown
  misc_feature (1)..( 11): Result.001 file - promoters60/1015261
acttataagtc

SEQ ID NO: 94046 - DNA, 11 bp, Unknown
  misc_feature (1)..( 11): Result.001 file - promoters60/1015261
actcgtactct

SEQ ID NO: 94047 - DNA, 11 bp, Unknown
  misc_feature (1)..( 11): Result.001 file - promoters60/1015261
gtatttatatt

SEQ ID NO: 94048 - DNA, 11 bp, Unknown
  misc_feature (1)..( 11): Result.001 file - promoters60/1015261
gtatatatata

SEQ ID NO: 94049 - DNA, 11 bp, Unknown
  misc_feature (1)..( 11): Result.001 file - promoters60/1015261
gactttaaatt

SEQ ID NO: 94050 - DNA, 11 bp, Unknown
  misc_feature (1)..( 11): Result.001 file - promoters60/1015261
tcatatataaa

SEQ ID NO: 94051 - DNA, 11 bp, Unknown
  misc_feature (1)..( 11): Result.001 file - promoters60/1015261
tgatatataaa

SEQ ID NO: 94052 - DNA, 11 bp, Unknown
  misc_feature (1)..( 11): Result.001 file - promoters60/1015261
acagttaaata

SEQ ID NO: 94053 - DNA, 11 bp, Unknown
  misc_feature (1)..( 11): Result.001 file - promoters60/1015261
taatataaagg

SEQ ID NO: 94054 - DNA, 10 bp, Unknown
  misc_feature (1)..( 10): Result.001 file - promoters60/1015261
gcttgtgaat

SEQ ID NO: 94055 - DNA, 10 bp, Unknown
  misc_feature (1)..( 10): Result.001 file - promoters60/1015261
tgttgtgagc

SEQ ID NO: 94056 - DNA, 10 bp, Unknown
  misc_feature (1)..( 10): Result.001 file - promoters60/1015261
acttgtaaat

SEQ ID NO: 94057 - DNA, 10 bp, Unknown
  misc_feature (1)..( 10): Result.001 file - promoters60/1015261
ccttatgagc

SEQ ID NO: 94058 - DNA, 10 bp, Unknown
  misc_feature (1)..( 10): Result.001 file - promoters60/1015261
acttataagt

SEQ ID NO: 94059 - DNA, 10 bp, Unknown
  misc_feature (1)..( 10): Result.001 file - promoters60/1015261
actcgtactc

SEQ ID NO: 94060 - DNA, 14 bp, Unknown
  misc_feature (1)..( 14): Result.001 file - promoters60/1015261
gtttgagaaatccg

SEQ ID NO: 94061 - DNA, 14 bp, Unknown
  misc_feature (1)..( 14): Result.001 file - promoters60/1015261
gctagagaaaattc

SEQ ID NO: 94062 - DNA, 14 bp, Unknown
  misc_feature (1)..( 14): Result.001 file - promoters60/1015261
atttgtgaaacaca

SEQ ID NO: 94063 - DNA, 14 bp, Unknown
  misc_feature (1)..( 14): Result.001 file - promoters60/1015261
attagtgaactttt

SEQ ID NO: 94064 - DNA, 14 bp, Unknown
  misc_feature (1)..( 14): Result.001 file - promoters60/1015261
gacccagaaaaaca

SEQ ID NO: 94065 - DNA, 14 bp, Unknown
  misc_feature (1)..( 14): Result.001 file - promoters60/1015261
atttttgaagcaca

SEQ ID NO: 94066 - DNA, 9 bp, Unknown
  misc_feature (1)..( 9): Result.001 file - promoters60/1015261
attgatata

SEQ ID NO: 94067 - DNA, 9 bp, Unknown
  misc_feature (1)..( 9): Result.001 file - promoters60/1015261
atttatatc

SEQ ID NO: 94068 - DNA, 9 bp, Unknown
  misc_feature (1)..( 9): Result.001 file - promoters60/1015261
attcataaa

SEQ ID NO: 94069 - DNA, 9 bp, Unknown
  misc_feature (1)..( 9): Result.001 file - promoters60/1015261
atttttgaa

SEQ ID NO: 94070 - DNA, 9 bp, Unknown
  misc_feature (1)..( 9): Result.001 file - promoters60/1015261
ggttttgag

SEQ ID NO: 94071 - DNA, 9 bp, Unknown
  misc_feature (1)..( 9): Result.001 file - promoters60/1015261
gtttagaat

SEQ ID NO: 94072 - DNA, 9 bp, Unknown
  misc_feature (1)..( 9): Result.001 file - promoters60/1015261
gattttaag

SEQ ID NO: 94073 - DNA, 11 bp, Unknown
  misc_feature (1)..( 11): Result.001 file - promoters60/1015261
ataattttatg

SEQ ID NO: 94074 - DNA, 11 bp, Unknown
  misc_feature (1)..( 11): Result.001 file - promoters60/1015261
ccaatttttaa

SEQ ID NO: 94075 - DNA, 11 bp, Unknown
  misc_feature (1)..( 11): Result.001 file - promoters60/1015261
ttaattttggt

SEQ ID NO: 94076 - DNA, 11 bp, Unknown
  misc_feature (1)..( 11): Result.001 file - promoters60/1015261
tatatttgtaa

SEQ ID NO: 94077 - DNA, 11 bp, Unknown
  misc_feature (1)..( 11): Result.001 file - promoters60/1015261
ccagtttgtag

SEQ ID NO: 94078 - DNA, 11 bp, Unknown
  misc_feature (1)..( 11): Result.001 file - promoters60/1015264
acaactttagg

SEQ ID NO: 94079 - DNA, 8 bp, Unknown
  misc_feature (1)..( 8): Result.001 file - promoters60/1015264
attttttt

SEQ ID NO: 94080 - DNA, 8 bp, Unknown
  misc_feature (1)..( 8): Result.001 file - promoters60/1015264
attttttt

SEQ ID NO: 94081 - DNA, 6 bp, Unknown
  misc_feature (1)..( 6): Result.001 file - promoters60/1015264
ataata

SEQ ID NO: 94082 - DNA, 6 bp, Unknown
  misc_feature (1)..( 6): Result.001 file - promoters60/1015264
ataata

SEQ ID NO: 94083 - DNA, 8 bp, Unknown
  misc_feature (1)..( 8): Result.001 file - promoters60/1015264
tgtatgaa

SEQ ID NO: 94084 - DNA, 8 bp, Unknown
  misc_feature (1)..( 8): Result.001 file - promoters60/1015264
tgtacgaa

SEQ ID NO: 94085 - DNA, 8 bp, Unknown
  misc_feature (1)..( 8): Result.001 file - promoters60/1015264
aatttaaa

SEQ ID NO: 94086 - DNA, 8 bp, Unknown
  misc_feature (1)..( 8): Result.001 file - promoters60/1015264
aattaaaa

SEQ ID NO: 94087 - DNA, 7 bp, Unknown
  misc_feature (1)..( 7): Result.001 file - promoters60/1015264
aaattta

SEQ ID NO: 94088 - DNA, 7 bp, Unknown
  misc_feature (1)..( 7): Result.001 file - promoters60/1015264
aaaatta

SEQ ID NO: 94089 - DNA, 6 bp, Unknown
  misc_feature (1)..( 6): Result.001 file - promoters60/1015264
caaggt

SEQ ID NO: 94090 - DNA, 6 bp, Unknown
  misc_feature (1)..( 6): Result.001 file - promoters60/1015264
caaggt

SEQ ID NO: 94091 - DNA, 6 bp, Unknown
  misc_feature (1)..( 6): Result.001 file - promoters60/1015264
taatta

SEQ ID NO: 94092 - DNA, 6 bp, Unknown
  misc_feature (1)..( 6): Result.001 file - promoters60/1015264
taatta

SEQ ID NO: 94093 - DNA, 8 bp, Unknown
  misc_feature (1)..( 8): Result.001 file - promoters60/1015264
tcagatta

SEQ ID NO: 94094 - DNA, 8 bp, Unknown
  misc_feature (1)..( 8): Result.001 file - promoters60/1015264
tcagatta

SEQ ID NO: 94095 - DNA, 7 bp, Unknown
  misc_feature (1)..( 7): Result.001 file - promoters60/1015264
tcggttt

SEQ ID NO: 94096 - DNA, 7 bp, Unknown
  misc_feature (1)..( 7): Result.001 file - promoters60/1015264
tcgattt

SEQ ID NO: 94097 - DNA, 6 bp, Unknown
  misc_feature (1)..( 6): Result.001 file - promoters60/1015264
attagt

SEQ ID NO: 94098 - DNA, 6 bp, Unknown
  misc_feature (1)..( 6): Result.001 file - promoters60/1015264
attagt

SEQ ID NO: 94099 - DNA, 8 bp, Unknown
  misc_feature (1)..( 8): Result.001 file - promoters60/1015264
agaacaaa

SEQ ID NO: 94100 - DNA, 8 bp, Unknown
  misc_feature (1)..( 8): Result.001 file - promoters60/1015264
agaaaaaa

SEQ ID NO: 94101 - DNA, 8 bp, Unknown
  misc_feature (1)..( 8): Result.001 file - promoters60/1015264
aaatataa

SEQ ID NO: 94102 - DNA, 8 bp, Unknown
  misc_feature (1)..( 8): Result.001 file - promoters60/1015264
aaatttaa

SEQ ID NO: 94103 - DNA, 6 bp, Unknown
  misc_feature (1)..( 6): Result.001 file - promoters60/1015264
tctgta

SEQ ID NO: 94104 - DNA, 6 bp, Unknown
  misc_feature (1)..( 6): Result.001 file - promoters60/1015264
tctgta

SEQ ID NO: 94105 - DNA, 7 bp, Unknown
  misc_feature (1)..( 7): Result.001 file - promoters60/1015264
tcatttt

SEQ ID NO: 94106 - DNA, 7 bp, Unknown
  misc_feature (1)..( 7): Result.001 file - promoters60/1015264
tcatttg

SEQ ID NO: 94107 - DNA, 7 bp, Unknown
  misc_feature (1)..( 7): Result.001 file - promoters60/1015264
ccatttg

SEQ ID NO: 94108 - DNA, 7 bp, Unknown
  misc_feature (1)..( 7): Result.001 file - promoters60/1015264
ttttaag

SEQ ID NO: 94109 - DNA, 7 bp, Unknown
  misc_feature (1)..( 7): Result.001 file - promoters60/1015264
tttgaag

SEQ ID NO: 94110 - DNA, 7 bp, Unknown
  misc_feature (1)..( 7): Result.001 file - promoters60/1015264
ttaacca

SEQ ID NO: 94111 - DNA, 7 bp, Unknown
  misc_feature (1)..( 7): Result.001 file - promoters60/1015264
ttaacca

SEQ ID NO: 94112 - DNA, 6 bp, Unknown
  misc_feature (1)..( 6): Result.001 file - promoters60/1015264
tgacat

SEQ ID NO: 94113 - DNA, 6 bp, Unknown
  misc_feature (1)..( 6): Result.001 file - promoters60/1015264
tgacat

SEQ ID NO: 94114 - DNA, 7 bp, Unknown
  misc_feature (1)..( 7): Result.001 file - promoters60/1015264
tatcatt

SEQ ID NO: 94115 - DNA, 7 bp, Unknown
  misc_feature (1)..( 7): Result.001 file - promoters60/1015264
tatgatt

SEQ ID NO: 94116 - DNA, 7 bp, Unknown
  misc_feature (1)..( 7): Result.001 file - promoters60/1015264
gaatttg

SEQ ID NO: 94117 - DNA, 7 bp, Unknown
  misc_feature (1)..( 7): Result.001 file - promoters60/1015264
gaatttg

SEQ ID NO: 94118 - DNA, 7 bp, Unknown
  misc_feature (1)..( 7): Result.001 file - promoters60/1015264
tttgatt

SEQ ID NO: 94119 - DNA, 7 bp, Unknown
  misc_feature (1)..( 7): Result.001 file - promoters60/1015264
tttgatt

SEQ ID NO: 94120 - DNA, 7 bp, Unknown
  misc_feature (1)..( 7): Result.001 file - promoters60/1015264
ttagatc

SEQ ID NO: 94121 - DNA, 7 bp, Unknown
  misc_feature (1)..( 7): Result.001 file - promoters60/1015337
ttatatc

SEQ ID NO: 94122 - DNA, 13 bp, Unknown
  misc_feature (1)..( 13): Result.001 file - promoters60/1015337
attctaatttaaa

SEQ ID NO: 94123 - DNA, 13 bp, Unknown
  misc_feature (1)..( 13): Result.001 file - promoters60/1015337
aaaaaaatttaaa

SEQ ID NO: 94124 - DNA, 13 bp, Unknown
  misc_feature (1)..( 13): Result.001 file - promoters60/1015337
aaacaaatttttg

SEQ ID NO: 94125 - DNA, 13 bp, Unknown
  misc_feature (1)..( 13): Result.001 file - promoters60/1015337
gaggaaaacataa

SEQ ID NO: 94126 - DNA, 13 bp, Unknown
  misc_feature (1)..( 13): Result.001 file - promoters60/1015337
aaagaaaaacagt

SEQ ID NO: 94127 - DNA, 13 bp, Unknown
  misc_feature (1)..( 13): Result.001 file - promoters60/1015360
catcaactttttt

SEQ ID NO: 94128 - DNA, 7 bp, Unknown
  misc_feature (1)..( 7): Result.001 file - promoters60/1015360
gttatat

SEQ ID NO: 94129 - DNA, 7 bp, Unknown
  misc_feature (1)..( 7): Result.001 file - promoters60/1015360
gttataa

SEQ ID NO: 94130 - DNA, 7 bp, Unknown
  misc_feature (1)..( 7): Result.001 file - promoters60/1015360
tttatat

SEQ ID NO: 94131 - DNA, 7 bp, Unknown
  misc_feature (1)..( 7): Result.001 file - promoters60/1015360
ctactaa

SEQ ID NO: 94132 - DNA, 7 bp, Unknown
  misc_feature (1)..( 7): Result.001 file - promoters60/1015360
ctaataa

SEQ ID NO: 94133 - DNA, 7 bp, Unknown
  misc_feature (1)..( 7): Result.001 file - promoters60/1015360
ctattaa

SEQ ID NO: 94134 - DNA, 8 bp, Unknown
  misc_feature (1)..( 8): Result.001 file - promoters60/1015360
atttcaca

SEQ ID NO: 94135 - DNA, 8 bp, Unknown
  misc_feature (1)..( 8): Result.001 file - promoters60/1015360
atttcatt

SEQ ID NO: 94136 - DNA, 8 bp, Unknown
  misc_feature (1)..( 8): Result.001 file - promoters60/1015360
atttaatt

SEQ ID NO: 94137 - DNA, 13 bp, Unknown
  misc_feature (1)..( 13): Result.001 file - promoters60/1015360
accaaaaaaatta

SEQ ID NO: 94138 - DNA, 13 bp, Unknown
  misc_feature (1)..( 13): Result.001 file - promoters60/1015360
accaaaaaagaaa

SEQ ID NO: 94139 - DNA, 13 bp, Unknown
  misc_feature (1)..( 13): Result.001 file - promoters60/1015360
tctaaaaagcaat

SEQ ID NO: 94140 - DNA, 10 bp, Unknown
  misc_feature (1)..( 10): Result.001 file - promoters60/1015360
ttaaacaaaa

SEQ ID NO: 94141 - DNA, 10 bp, Unknown
  misc_feature (1)..( 10): Result.001 file - promoters60/1015360
aaaaagaaat

SEQ ID NO: 94142 - DNA, 10 bp, Unknown
  misc_feature (1)..( 10): Result.001 file - promoters60/1015360
aaaaagcaat

SEQ ID NO: 94143 - DNA, 10 bp, Unknown
  misc_feature (1)..( 10): Result.001 file - promoters60/1015360
gaaaaataaa

SEQ ID NO: 94144 - DNA, 10 bp, Unknown
  misc_feature (1)..( 10): Result.001 file - promoters60/1015360
taaaactaaa

SEQ ID NO: 94145 - DNA, 10 bp, Unknown
  misc_feature (1)..( 10): Result.001 file - promoters60/1015475
gaaaaaaaaa

SEQ ID NO: 94146 - DNA, 9 bp, Unknown
  misc_feature (1)..( 9): Result.001 file - promoters60/1015475
gtttccttt

SEQ ID NO: 94147 - DNA, 9 bp, Unknown
  misc_feature (1)..( 9): Result.001 file - promoters60/1015475
gttaccttt

SEQ ID NO: 94148 - DNA, 9 bp, Unknown
  misc_feature (1)..( 9): Result.001 file - promoters60/1015475
gcttcgttt

SEQ ID NO: 94149 - DNA, 8 bp, Unknown
  misc_feature (1)..( 8): Result.001 file - promoters60/1015475
caccaata

SEQ ID NO: 94150 - DNA, 8 bp, Unknown
  misc_feature (1)..( 8): Result.001 file - promoters60/1015475
aaccaata

SEQ ID NO: 94151 - DNA, 8 bp, Unknown
  misc_feature (1)..( 8): Result.001 file - promoters60/1015475
aacaaata

SEQ ID NO: 94152 - DNA, 9 bp, Unknown
  misc_feature (1)..( 9): Result.001 file - promoters60/1015475
tttcctttt

SEQ ID NO: 94153 - DNA, 9 bp, Unknown
  misc_feature (1)..( 9): Result.001 file - promoters60/1015475
ttttcttaa

SEQ ID NO: 94154 - DNA, 9 bp, Unknown
  misc_feature (1)..( 9): Result.001 file - promoters60/1015524
gttcctaat

SEQ ID NO: 94155 - DNA, 12 bp, Unknown
  misc_feature (1)..( 12): Result.001 file - promoters60/1015524
acttgttttctt

SEQ ID NO: 94156 - DNA, 12 bp, Unknown
  misc_feature (1)..( 12): Result.001 file - promoters60/1015524
acttgtataatg

SEQ ID NO: 94157 - DNA, 12 bp, Unknown
  misc_feature (1)..( 12): Result.001 file - promoters60/1015524
acttgaatatta

SEQ ID NO: 94158 - DNA, 12 bp, Unknown
  misc_feature (1)..( 12): Result.001 file - promoters60/1015524
tgatgaagatta

SEQ ID NO: 94159 - DNA, 8 bp, Unknown
  misc_feature (1)..( 8): Result.001 file - promoters60/1015524
agatatac

SEQ ID NO: 94160 - DNA, 8 bp, Unknown
  misc_feature (1)..( 8): Result.001 file - promoters60/1015524
ggatttac

SEQ ID NO: 94161 - DNA, 8 bp, Unknown
  misc_feature (1)..( 8): Result.001 file - promoters60/1015524
agaaatag

SEQ ID NO: 94162 - DNA, 8 bp, Unknown
  misc_feature (1)..( 8): Result.001 file - promoters60/1015524
cggttttg

SEQ ID NO: 94163 - DNA, 10 bp, Unknown
  misc_feature (1)..( 10): Result.001 file - promoters60/1015524
atttttttct

SEQ ID NO: 94164 - DNA, 10 bp, Unknown
  misc_feature (1)..( 10): Result.001 file - promoters60/1015524
attgttttcg

SEQ ID NO: 94165 - DNA, 10 bp, Unknown
  misc_feature (1)..( 10): Result.001 file - promoters60/1015524
ttttgtttct

SEQ ID NO: 94166 - DNA, 10 bp, Unknown
  misc_feature (1)..( 10): Result.001 file - promoters60/1015537
aacgttttct

SEQ ID NO: 94167 - DNA, 12 bp, Unknown
  misc_feature (1)..( 12): Result.001 file - promoters60/1015537
caaatattatcc

SEQ ID NO: 94168 - DNA, 12 bp, Unknown
  misc_feature (1)..( 12): Result.001 file - promoters60/1015537
aaaaaattcaag

SEQ ID NO: 94169 - DNA, 12 bp, Unknown
  misc_feature (1)..( 12): Result.001 file - promoters60/1015537
aaaaaatctttg

SEQ ID NO: 94170 - DNA, 12 bp, Unknown
  misc_feature (1)..( 12): Result.001 file - promoters60/1015537
accaaatttaag

SEQ ID NO: 94171 - DNA, 12 bp, Unknown
  misc_feature (1)..( 12): Result.001 file - promoters60/1015537
ctaaaatcttcc

SEQ ID NO: 94172 - DNA, 12 bp, Unknown
  misc_feature (1)..( 12): Result.001 file - promoters60/1015537
ttctaatttatt

SEQ ID NO: 94173 - DNA, 7 bp, Unknown
  misc_feature (1)..( 7): Result.001 file - promoters60/1015537
aatcaag

SEQ ID NO: 94174 - DNA, 7 bp, Unknown
  misc_feature (1)..( 7): Result.001 file - promoters60/1015537
aatcaat

SEQ ID NO: 94175 - DNA, 7 bp, Unknown
  misc_feature (1)..( 7): Result.001 file - promoters60/1015537
tatcaat

SEQ ID NO: 94176 - DNA, 7 bp, Unknown
  misc_feature (1)..( 7): Result.001 file - promoters60/1015537
tataaat

SEQ ID NO: 94177 - DNA, 7 bp, Unknown
  misc_feature (1)..( 7): Result.001 file - promoters60/1015537
aatcaaa

SEQ ID NO: 94178 - DNA, 7 bp, Unknown
  misc_feature (1)..( 7): Result.001 file - promoters60/1015537
aatcaaa

SEQ ID NO: 94179 - DNA, 7 bp, Unknown
  misc_feature (1)..( 7): Result.001 file - promoters60/1015537
catcaaa

SEQ ID NO: 94180 - DNA, 7 bp, Unknown
  misc_feature (1)..( 7): Result.001 file - promoters60/1015537
aataaaa

SEQ ID NO: 94181 - DNA, 9 bp, Unknown
  misc_feature (1)..( 9): Result.001 file - promoters60/1015537
ttaattttg

SEQ ID NO: 94182 - DNA, 9 bp, Unknown
  misc_feature (1)..( 9): Result.001 file - promoters60/1015537
ttaattgtc

SEQ ID NO: 94183 - DNA, 9 bp, Unknown
  misc_feature (1)..( 9): Result.001 file - promoters60/1015537
ctaatttat

SEQ ID NO: 94184 - DNA, 9 bp, Unknown
  misc_feature (1)..( 9): Result.001 file - promoters60/1015537
gtaatttaa

SEQ ID NO: 94185 - DNA, 9 bp, Unknown
  misc_feature (1)..( 9): Result.001 file - promoters60/1015537
caaatttaa

SEQ ID NO: 94186 - DNA, 8 bp, Unknown
  misc_feature (1)..( 8): Result.001 file - promoters60/1015537
atataaat

SEQ ID NO: 94187 - DNA, 8 bp, Unknown
  misc_feature (1)..( 8): Result.001 file - promoters60/1015537
atataaat

SEQ ID NO: 94188 - DNA, 8 bp, Unknown
  misc_feature (1)..( 8): Result.001 file - promoters60/1015537
ttattaat

SEQ ID NO: 94189 - DNA, 8 bp, Unknown
  misc_feature (1)..( 8): Result.001 file - promoters60/1015537
atataatc

SEQ ID NO: 94190 - DNA, 11 bp, Unknown
  misc_feature (1)..( 11): Result.001 file - promoters60/1015537
ttagtttccta

SEQ ID NO: 94191 - DNA, 11 bp, Unknown
  misc_feature (1)..( 11): Result.001 file - promoters60/1015537
tccattttcta

SEQ ID NO: 94192 - DNA, 11 bp, Unknown
  misc_feature (1)..( 11): Result.001 file - promoters60/1015537
ttagtttcctc

SEQ ID NO: 94193 - DNA, 11 bp, Unknown
  misc_feature (1)..( 11): Result.001 file - promoters60/1015597
ttattttaccg

SEQ ID NO: 94194 - DNA, 10 bp, Unknown
  misc_feature (1)..( 10): Result.001 file - promoters60/1015597
tttgttgttt

SEQ ID NO: 94195 - DNA, 10 bp, Unknown
  misc_feature (1)..( 10): Result.001 file - promoters60/1015597
agggtttttt

SEQ ID NO: 94196 - DNA, 10 bp, Unknown
  misc_feature (1)..( 10): Result.001 file - promoters60/1015597
tttgttgttg

SEQ ID NO: 94197 - DNA, 10 bp, Unknown
  misc_feature (1)..( 10): Result.001 file - promoters60/1015597
gaaattgttt

SEQ ID NO: 94198 - DNA, 10 bp, Unknown
  misc_feature (1)..( 10): Result.001 file - promoters60/1015597
acagttttta

SEQ ID NO: 94199 - DNA, 10 bp, Unknown
  misc_feature (1)..( 10): Result.001 file - promoters60/1015661
gacgttcttg

SEQ ID NO: 94200 - DNA, 7 bp, Unknown
  misc_feature (1)..( 7): Result.001 file - promoters60/1015661
attaata

SEQ ID NO: 94201 - DNA, 7 bp, Unknown
  misc_feature (1)..( 7): Result.001 file - promoters60/1015661
attcata

SEQ ID NO: 94202 - DNA, 8 bp, Unknown
  misc_feature (1)..( 8): Result.001 file - promoters60/1015661
tttctaat

SEQ ID NO: 94203 - DNA, 8 bp, Unknown
  misc_feature (1)..( 8): Result.001 file - promoters60/1015661
tttataat

SEQ ID NO: 94204 - DNA, 9 bp, Unknown
  misc_feature (1)..( 9): Result.001 file - promoters60/1015661
tatattaaa

SEQ ID NO: 94205 - DNA, 9 bp, Unknown
  misc_feature (1)..( 9): Result.001 file - promoters60/1015661
tatataaaa

SEQ ID NO: 94206 - DNA, 9 bp, Unknown
  misc_feature (1)..( 9): Result.001 file - promoters60/1015661
tatatagat

SEQ ID NO: 94207 - DNA, 6 bp, Unknown
  misc_feature (1)..( 6): Result.001 file - promoters60/1015661
ttaatg

SEQ ID NO: 94208 - DNA, 6 bp, Unknown
  misc_feature (1)..( 6): Result.001 file - promoters60/1015661
ttaatg

SEQ ID NO: 94209 - DNA, 7 bp, Unknown
  misc_feature (1)..( 7): Result.001 file - promoters60/1015661
gaaatat

SEQ ID NO: 94210 - DNA, 7 bp, Unknown
  misc_feature (1)..( 7): Result.001 file - promoters60/1015661
gaattat

SEQ ID NO: 94211 - DNA, 6 bp, Unknown
  misc_feature (1)..( 6): Result.001 file - promoters60/1015661
aaatgt

SEQ ID NO: 94212 - DNA, 6 bp, Unknown
  misc_feature (1)..( 6): Result.001 file - promoters60/1015661
aaatgt

SEQ ID NO: 94213 - DNA, 7 bp, Unknown
  misc_feature (1)..( 7): Result.001 file - promoters60/1015661
tgtccac

SEQ ID NO: 94214 - DNA, 7 bp, Unknown
  misc_feature (1)..( 7): Result.001 file - promoters60/1015661
tgtacac

SEQ ID NO: 94215 - DNA, 9 bp, Unknown
  misc_feature (1)..( 9): Result.001 file - promoters60/1015661
aaatcaaat

SEQ ID NO: 94216 - DNA, 9 bp, Unknown
  misc_feature (1)..( 9): Result.001 file - promoters60/1015661
aaagcaatg

SEQ ID NO: 94217 - DNA, 9 bp, Unknown
  misc_feature (1)..( 9): Result.001 file - promoters60/1015661
aaagaaatg

SEQ ID NO: 94218 - DNA, 6 bp, Unknown
  misc_feature (1)..( 6): Result.001 file - promoters60/1015661
aaacaa

SEQ ID NO: 94219 - DNA, 6 bp, Unknown
  misc_feature (1)..( 6): Result.001 file - promoters60/1015661
aaacaa

SEQ ID NO: 94220 - DNA, 8 bp, Unknown
  misc_feature (1)..( 8): Result.001 file - promoters60/1015661
aaccaaaa

SEQ ID NO: 94221 - DNA, 8 bp, Unknown
  misc_feature (1)..( 8): Result.001 file - promoters60/1015661
aaccaaaa

SEQ ID NO: 94222 - DNA, 6 bp, Unknown
  misc_feature (1)..( 6): Result.001 file - promoters60/1015661
caaaga

SEQ ID NO: 94223 - DNA, 6 bp, Unknown
  misc_feature (1)..( 6): Result.001 file - promoters60/1015661
caaaga

SEQ ID NO: 94224 - DNA, 6 bp, Unknown
  misc_feature (1)..( 6): Result.001 file - promoters60/1015661
attatt

SEQ ID NO: 94225 - DNA, 6 bp, Unknown
  misc_feature (1)..( 6): Result.001 file - promoters60/1015661
attatt

SEQ ID NO: 94226 - DNA, 7 bp, Unknown
  misc_feature (1)..( 7): Result.001 file - promoters60/1015661
tttgtga

SEQ ID NO: 94227 - DNA, 7 bp, Unknown
  misc_feature (1)..( 7): Result.001 file - promoters60/1015661
tttgtga

SEQ ID NO: 94228 - DNA, 6 bp, Unknown
  misc_feature (1)..( 6): Result.001 file - promoters60/1015661
taaaaa

SEQ ID NO: 94229 - DNA, 6 bp, Unknown
  misc_feature (1)..( 6): Result.001 file - promoters60/1015661
taaaaa

SEQ ID NO: 94230 - DNA, 6 bp, Unknown
  misc_feature (1)..( 6): Result.001 file - promoters60/1015661
atattt

SEQ ID NO: 94231 - DNA, 6 bp, Unknown
  misc_feature (1)..( 6): Result.001 file - promoters60/1015661
atattt

SEQ ID NO: 94232 - DNA, 9 bp, Unknown
  misc_feature (1)..( 9): Result.001 file - promoters60/1015661
tagtgtaaa

SEQ ID NO: 94233 - DNA, 9 bp, Unknown
  misc_feature (1)..( 9): Result.001 file - promoters60/1015661
tagtttaaa

SEQ ID NO: 94234 - DNA, 6 bp, Unknown
  misc_feature (1)..( 6): Result.001 file - promoters60/1015661
ctaatt

SEQ ID NO: 94235 - DNA, 6 bp, Unknown
  misc_feature (1)..( 6): Result.001 file - promoters60/1015676
ctaatt

SEQ ID NO: 94236 - DNA, 8 bp, Unknown
  misc_feature (1)..( 8): Result.001 file - promoters60/1015676
ttttcaaa

SEQ ID NO: 94237 - DNA, 8 bp, Unknown
  misc_feature (1)..( 8): Result.001 file - promoters60/1015676
ttttgaaa

SEQ ID NO: 94238 - DNA, 8 bp, Unknown
  misc_feature (1)..( 8): Result.001 file - promoters60/1015676
ttttgatg

SEQ ID NO: 94239 - DNA, 8 bp, Unknown
  misc_feature (1)..( 8): Result.001 file - promoters60/1015676
aatatttt

SEQ ID NO: 94240 - DNA, 8 bp, Unknown
  misc_feature (1)..( 8): Result.001 file - promoters60/1015676
gttatttt

SEQ ID NO: 94241 - DNA, 8 bp, Unknown
  misc_feature (1)..( 8): Result.001 file - promoters60/1015676
aatatttt

SEQ ID NO: 94242 - DNA, 13 bp, Unknown
  misc_feature (1)..( 13): Result.001 file - promoters60/1015676
attatattaacat

SEQ ID NO: 94243 - DNA, 13 bp, Unknown
  misc_feature (1)..( 13): Result.001 file - promoters60/1015676
attttatcaatgg

SEQ ID NO: 94244 - DNA, 13 bp, Unknown
  misc_feature (1)..( 13): Result.001 file - promoters60/1015676
tgtatatgaacat

SEQ ID NO: 94245 - DNA, 8 bp, Unknown
  misc_feature (1)..( 8): Result.001 file - promoters60/1015676
ttaaaaca

SEQ ID NO: 94246 - DNA, 8 bp, Unknown
  misc_feature (1)..( 8): Result.001 file - promoters60/1015676
ttaaaaca

SEQ ID NO: 94247 - DNA, 8 bp, Unknown
  misc_feature (1)..( 8): Result.001 file - promoters60/1015676
ttacaact

SEQ ID NO: 94248 - DNA, 8 bp, Unknown
  misc_feature (1)..( 8): Result.001 file - promoters60/1015676
gtttcaaa

SEQ ID NO: 94249 - DNA, 8 bp, Unknown
  misc_feature (1)..( 8): Result.001 file - promoters60/1015676
gttgcaac

SEQ ID NO: 94250 - DNA, 8 bp, Unknown
  misc_feature (1)..( 8): Result.001 file - promoters60/1015748
ttttcaaa

SEQ ID NO: 94251 - DNA, 8 bp, Unknown
  misc_feature (1)..( 8): Result.001 file - promoters60/1015748
gttttaat

SEQ ID NO: 94252 - DNA, 8 bp, Unknown
  misc_feature (1)..( 8): Result.001 file - promoters60/1015748
gttgtaat

SEQ ID NO: 94253 - DNA, 8 bp, Unknown
  misc_feature (1)..( 8): Result.001 file - promoters60/1015748
tttttaat

SEQ ID NO: 94254 - DNA, 10 bp, Unknown
  misc_feature (1)..( 10): Result.001 file - promoters60/1015748
caattttgtt

SEQ ID NO: 94255 - DNA, 10 bp, Unknown
  misc_feature (1)..( 10): Result.001 file - promoters60/1015748
caattttgca

SEQ ID NO: 94256 - DNA, 10 bp, Unknown
  misc_feature (1)..( 10): Result.001 file - promoters60/1015748
aaatgttgtt

SEQ ID NO: 94257 - DNA, 8 bp, Unknown
  misc_feature (1)..( 8): Result.001 file - promoters60/1015748
ttataaac

SEQ ID NO: 94258 - DNA, 8 bp, Unknown
  misc_feature (1)..( 8): Result.001 file - promoters60/1015748
ttaaaaaa

SEQ ID NO: 94259 - DNA, 8 bp, Unknown
  misc_feature (1)..( 8): Result.001 file - promoters60/1015778
ctaaaaaa

SEQ ID NO: 94260 - DNA, 8 bp, Unknown
  misc_feature (1)..( 8): Result.001 file - promoters60/1015778
attatcca

SEQ ID NO: 94261 - DNA, 8 bp, Unknown
  misc_feature (1)..( 8): Result.001 file - promoters60/1015778
attatccc

SEQ ID NO: 94262 - DNA, 8 bp, Unknown
  misc_feature (1)..( 8): Result.001 file - promoters60/1015778
attacccc

SEQ ID NO: 94263 - DNA, 11 bp, Unknown
  misc_feature (1)..( 11): Result.001 file - promoters60/1015778
gaagatacatt

SEQ ID NO: 94264 - DNA, 11 bp, Unknown
  misc_feature (1)..( 11): Result.001 file - promoters60/1015778
tataataaatt

SEQ ID NO: 94265 - DNA, 10 bp, Unknown
  misc_feature (1)..( 10): Result.001 file - promoters60/1015778
ataataaaat

SEQ ID NO: 94266 - DNA, 11 bp, Unknown
  misc_feature (1)..( 11): Result.001 file - promoters60/1015778
tcaattaaatt

SEQ ID NO: 94267 - DNA, 12 bp, Unknown
  misc_feature (1)..( 12): Result.001 file - promoters60/1015778
aacaaaaaaaaa

SEQ ID NO: 94268 - DNA, 12 bp, Unknown
  misc_feature (1)..( 12): Result.001 file - promoters60/1015778
tacaaaaaaaaa

SEQ ID NO: 94269 - DNA, 12 bp, Unknown
  misc_feature (1)..( 12): Result.001 file - promoters60/1015778
aacaaaataaaa

SEQ ID NO: 94270 - DNA, 7 bp, Unknown
  misc_feature (1)..( 7): Result.001 file - promoters60/1015778
aaaagat

SEQ ID NO: 94271 - DNA, 7 bp, Unknown
  misc_feature (1)..( 7): Result.001 file - promoters60/1015778
aaaagat

SEQ ID NO: 94272 - DNA, 7 bp, Unknown
  misc_feature (1)..( 7): Result.001 file - promoters60/1015778
aaaaatt

SEQ ID NO: 94273 - DNA, 9 bp, Unknown
  misc_feature (1)..( 9): Result.001 file - promoters60/1015778
actctaaaa

SEQ ID NO: 94274 - DNA, 9 bp, Unknown
  misc_feature (1)..( 9): Result.001 file - promoters60/1015778
actataaaa

SEQ ID NO: 94275 - DNA, 9 bp, Unknown
  misc_feature (1)..( 9): Result.001 file - promoters60/1015778
actctaaaa

SEQ ID NO: 94276 - DNA, 8 bp, Unknown
  misc_feature (1)..( 8): Result.001 file - promoters60/1015778
tttgggcc

SEQ ID NO: 94277 - DNA, 8 bp, Unknown
  misc_feature (1)..( 8): Result.001 file - promoters60/1015778
attgggcc

SEQ ID NO: 94278 - DNA, 8 bp, Unknown
  misc_feature (1)..( 8): Result.001 file - promoters60/1015778
tttgagcc

SEQ ID NO: 94279 - DNA, 12 bp, Unknown
  misc_feature (1)..( 12): Result.001 file - promoters60/1015778
agtaagatacta

SEQ ID NO: 94280 - DNA, 12 bp, Unknown
  misc_feature (1)..( 12): Result.001 file - promoters60/1015778
aataaaatacta

SEQ ID NO: 94281 - DNA, 12 bp, Unknown
  misc_feature (1)..( 12): Result.001 file - promoters60/1015848
aattaaattata

SEQ ID NO: 94282 - DNA, 9 bp, Unknown
  misc_feature (1)..( 9): Result.001 file - promoters60/1015848
gtttccttt

SEQ ID NO: 94283 - DNA, 9 bp, Unknown
  misc_feature (1)..( 9): Result.001 file - promoters60/1015848
gttaccttt

SEQ ID NO: 94284 - DNA, 9 bp, Unknown
  misc_feature (1)..( 9): Result.001 file - promoters60/1015848
gcttcgttt

SEQ ID NO: 94285 - DNA, 8 bp, Unknown
  misc_feature (1)..( 8): Result.001 file - promoters60/1015848
caccaata

SEQ ID NO: 94286 - DNA, 8 bp, Unknown
  misc_feature (1)..( 8): Result.001 file - promoters60/1015848
aaccaata

SEQ ID NO: 94287 - DNA, 8 bp, Unknown
  misc_feature (1)..( 8): Result.001 file - promoters60/1015848
aacaaata

SEQ ID NO: 94288 - DNA, 9 bp, Unknown
  misc_feature (1)..( 9): Result.001 file - promoters60/1015848
tttcctttt

SEQ ID NO: 94289 - DNA, 9 bp, Unknown
  misc_feature (1)..( 9): Result.001 file - promoters60/1015848
ttttcttaa

SEQ ID NO: 94290 - DNA, 9 bp, Unknown
  misc_feature (1)..( 9): Result.001 file - promoters60/1016056
gttcctaat

SEQ ID NO: 94291 - DNA, 7 bp, Unknown
  misc_feature (1)..( 7): Result.001 file - promoters60/1016056
tgtattg

SEQ ID NO: 94292 - DNA, 7 bp, Unknown
  misc_feature (1)..( 7): Result.001 file - promoters60/1016056
tgttttg

SEQ ID NO: 94293 - DNA, 6 bp, Unknown
  misc_feature (1)..( 6): Result.001 file - promoters60/1016056
attaaa

SEQ ID NO: 94294 - DNA, 6 bp, Unknown
  misc_feature (1)..( 6): Result.001 file - promoters60/1016056
attaaa

SEQ ID NO: 94295 - DNA, 8 bp, Unknown
  misc_feature (1)..( 8): Result.001 file - promoters60/1016056
cagtaact

SEQ ID NO: 94296 - DNA, 8 bp, Unknown
  misc_feature (1)..( 8): Result.001 file - promoters60/1016056
cagtcact

SEQ ID NO: 94297 - DNA, 8 bp, Unknown
  misc_feature (1)..( 8): Result.001 file - promoters60/1016056
atacaagt

SEQ ID NO: 94298 - DNA, 8 bp, Unknown
  misc_feature (1)..( 8): Result.001 file - promoters60/1016056
ataaaagt

SEQ ID NO: 94299 - DNA, 11 bp, Unknown
  misc_feature (1)..( 11): Result.001 file - promoters60/1016056
tatacaataaa

SEQ ID NO: 94300 - DNA, 11 bp, Unknown
  misc_feature (1)..( 11): Result.001 file - promoters60/1016056
aataaaataaa

SEQ ID NO: 94301 - DNA, 11 bp, Unknown
  misc_feature (1)..( 11): Result.001 file - promoters60/1016056
aatgaaatatc

SEQ ID NO: 94302 - DNA, 6 bp, Unknown
  misc_feature (1)..( 6): Result.001 file - promoters60/1016056
tttatt

SEQ ID NO: 94303 - DNA, 6 bp, Unknown
  misc_feature (1)..( 6): Result.001 file - promoters60/1016056
tttatt

SEQ ID NO: 94304 - DNA, 11 bp, Unknown
  misc_feature (1)..( 11): Result.001 file - promoters60/1016056
aataaaatctt

SEQ ID NO: 94305 - DNA, 11 bp, Unknown
  misc_feature (1)..( 11): Result.001 file - promoters60/1016056
aataaaggggt

SEQ ID NO: 94306 - DNA, 11 bp, Unknown
  misc_feature (1)..( 11): Result.001 file - promoters60/1016056
aataaaaactt

SEQ ID NO: 94307 - DNA, 7 bp, Unknown
  misc_feature (1)..( 7): Result.001 file - promoters60/1016056
ttgagaa

SEQ ID NO: 94308 - DNA, 7 bp, Unknown
  misc_feature (1)..( 7): Result.001 file - promoters60/1016056
ttgagaa

SEQ ID NO: 94309 - DNA, 6 bp, Unknown
  misc_feature (1)..( 6): Result.001 file - promoters60/1016056
taaaaa

SEQ ID NO: 94310 - DNA, 6 bp, Unknown
  misc_feature (1)..( 6): Result.001 file - promoters60/1016056
taaaaa

SEQ ID NO: 94311 - DNA, 6 bp, Unknown
  misc_feature (1)..( 6): Result.001 file - promoters60/1016056
tgttat

SEQ ID NO: 94312 - DNA, 6 bp, Unknown
  misc_feature (1)..( 6): Result.001 file - promoters60/1016056
tgttat

SEQ ID NO: 94313 - DNA, 6 bp, Unknown
  misc_feature (1)..( 6): Result.001 file - promoters60/1016056
agtaaa

SEQ ID NO: 94314 - DNA, 6 bp, Unknown
  misc_feature (1)..( 6): Result.001 file - promoters60/1016056
agtaaa

SEQ ID NO: 94315 - DNA, 7 bp, Unknown
  misc_feature (1)..( 7): Result.001 file - promoters60/1016056
aatcggg

SEQ ID NO: 94316 - DNA, 7 bp, Unknown
  misc_feature (1)..( 7): Result.001 file - promoters60/1016056
aattggg

SEQ ID NO: 94317 - DNA, 8 bp, Unknown
  misc_feature (1)..( 8): Result.001 file - promoters60/1016056
gaaagaaa

SEQ ID NO: 94318 - DNA, 8 bp, Unknown
  misc_feature (1)..( 8): Result.001 file - promoters60/1016056
gaaacaaa

SEQ ID NO: 94319 - DNA, 7 bp, Unknown
  misc_feature (1)..( 7): Result.001 file - promoters60/1016056
cccacta

SEQ ID NO: 94320 - DNA, 7 bp, Unknown
  misc_feature (1)..( 7): Result.001 file - promoters60/1016056
cccacta

SEQ ID NO: 94321 - DNA, 9 bp, Unknown
  misc_feature (1)..( 9): Result.001 file - promoters60/1016056
aaagaaaag

SEQ ID NO: 94322 - DNA, 9 bp, Unknown
  misc_feature (1)..( 9): Result.001 file - promoters60/1016056
aaagtaaag

SEQ ID NO: 94323 - DNA, 7 bp, Unknown
  misc_feature (1)..( 7): Result.001 file - promoters60/1016056
gtatata

SEQ ID NO: 94324 - DNA, 7 bp, Unknown
  misc_feature (1)..( 7): Result.001 file - promoters60/1016094
gtatata

SEQ ID NO: 94325 - DNA, 15 bp, Unknown
  misc_feature (1)..( 15): Result.001 file - promoters60/1016094
cacatgtgagagtaa

SEQ ID NO: 94326 - DNA, 15 bp, Unknown
  misc_feature (1)..( 15): Result.001 file - promoters60/1016094
cacttgtgtttgatt

SEQ ID NO: 94327 - DNA, 15 bp, Unknown
  misc_feature (1)..( 15): Result.001 file - promoters60/1016094
tgattgagttttatt

SEQ ID NO: 94328 - DNA, 15 bp, Unknown
  misc_feature (1)..( 15): Result.001 file - promoters60/1016094
taattgtatttattt

SEQ ID NO: 94329 - DNA, 9 bp, Unknown
  misc_feature (1)..( 9): Result.001 file - promoters60/1016094
gaaaaaaaa

SEQ ID NO: 94330 - DNA, 9 bp, Unknown
  misc_feature (1)..( 9): Result.001 file - promoters60/1016094
gaataaaaa

SEQ ID NO: 94331 - DNA, 9 bp, Unknown
  misc_feature (1)..( 9): Result.001 file - promoters60/1016094
gaaaaaaat

SEQ ID NO: 94332 - DNA, 9 bp, Unknown
  misc_feature (1)..( 9): Result.001 file - promoters60/1016133
taaaataat

SEQ ID NO: 94333 - DNA, 7 bp, Unknown
  misc_feature (1)..( 7): Result.001 file - promoters60/1016133
aaataat

SEQ ID NO: 94334 - DNA, 7 bp, Unknown
  misc_feature (1)..( 7): Result.001 file - promoters60/1016133
aaaaaat

SEQ ID NO: 94335 - DNA, 7 bp, Unknown
  misc_feature (1)..( 7): Result.001 file - promoters60/1016133
atacaaa

SEQ ID NO: 94336 - DNA, 7 bp, Unknown
  misc_feature (1)..( 7): Result.001 file - promoters60/1016133
atacaaa

SEQ ID NO: 94337 - DNA, 7 bp, Unknown
  misc_feature (1)..( 7): Result.001 file - promoters60/1016133
aaatttt

SEQ ID NO: 94338 - DNA, 7 bp, Unknown
  misc_feature (1)..( 7): Result.001 file - promoters60/1016133
aaatttt

SEQ ID NO: 94339 - DNA, 6 bp, Unknown
  misc_feature (1)..( 6): Result.001 file - promoters60/1016133
ttttat

SEQ ID NO: 94340 - DNA, 6 bp, Unknown
  misc_feature (1)..( 6): Result.001 file - promoters60/1016133
ttttat

SEQ ID NO: 94341 - DNA, 8 bp, Unknown
  misc_feature (1)..( 8): Result.001 file - promoters60/1016133
ataacatt

SEQ ID NO: 94342 - DNA, 8 bp, Unknown
  misc_feature (1)..( 8): Result.001 file - promoters60/1016133
ataccatt

SEQ ID NO: 94343 - DNA, 8 bp, Unknown
  misc_feature (1)..( 8): Result.001 file - promoters60/1016133
gtaacatt

SEQ ID NO: 94344 - DNA, 6 bp, Unknown
  misc_feature (1)..( 6): Result.001 file - promoters60/1016133
ttaatt

SEQ ID NO: 94345 - DNA, 6 bp, Unknown
  misc_feature (1)..( 6): Result.001 file - promoters60/1016133
ttaatt

SEQ ID NO: 94346 - DNA, 10 bp, Unknown
  misc_feature (1)..( 10): Result.001 file - promoters60/1016133
gtatatcaaa

SEQ ID NO: 94347 - DNA, 10 bp, Unknown
  misc_feature (1)..( 10): Result.001 file - promoters60/1016133
aaatattaaa

SEQ ID NO: 94348 - DNA, 10 bp, Unknown
  misc_feature (1)..( 10): Result.001 file - promoters60/1016133
gtatgtcagc

SEQ ID NO: 94349 - DNA, 6 bp, Unknown
  misc_feature (1)..( 6): Result.001 file - promoters60/1016133
tttgaa

SEQ ID NO: 94350 - DNA, 6 bp, Unknown
  misc_feature (1)..( 6): Result.001 file - promoters60/1016133
tttgaa

SEQ ID NO: 94351 - DNA, 8 bp, Unknown
  misc_feature (1)..( 8): Result.001 file - promoters60/1016133
aactttca

SEQ ID NO: 94352 - DNA, 8 bp, Unknown
  misc_feature (1)..( 8): Result.001 file - promoters60/1016133
aacattca

SEQ ID NO: 94353 - DNA, 6 bp, Unknown
  misc_feature (1)..( 6): Result.001 file - promoters60/1016133
ctctat

SEQ ID NO: 94354 - DNA, 6 bp, Unknown
  misc_feature (1)..( 6): Result.001 file - promoters60/1016133
ctctat

SEQ ID NO: 94355 - DNA, 8 bp, Unknown
  misc_feature (1)..( 8): Result.001 file - promoters60/1016133
attttatg

SEQ ID NO: 94356 - DNA, 8 bp, Unknown
  misc_feature (1)..( 8): Result.001 file - promoters60/1016133
atttgatg

SEQ ID NO: 94357 - DNA, 7 bp, Unknown
  misc_feature (1)..( 7): Result.001 file - promoters60/1016133
gatgtat

SEQ ID NO: 94358 - DNA, 7 bp, Unknown
  misc_feature (1)..( 7): Result.001 file - promoters60/1016133
gatatat

SEQ ID NO: 94359 - DNA, 7 bp, Unknown
  misc_feature (1)..( 7): Result.001 file - promoters60/1016133
tatttag

SEQ ID NO: 94360 - DNA, 7 bp, Unknown
  misc_feature (1)..( 7): Result.001 file - promoters60/1016133
tatttag

SEQ ID NO: 94361 - DNA, 7 bp, Unknown
  misc_feature (1)..( 7): Result.001 file - promoters60/1016133
atcgttt

SEQ ID NO: 94362 - DNA, 7 bp, Unknown
  misc_feature (1)..( 7): Result.001 file - promoters60/1016133
atctttt

SEQ ID NO: 94363 - DNA, 6 bp, Unknown
  misc_feature (1)..( 6): Result.001 file - promoters60/1016133
atttta

SEQ ID NO: 94364 - DNA, 6 bp, Unknown
  misc_feature (1)..( 6): Result.001 file - promoters60/1016133
atttta

SEQ ID NO: 94365 - DNA, 6 bp, Unknown
  misc_feature (1)..( 6): Result.001 file - promoters60/1016133
aataat

SEQ ID NO: 94366 - DNA, 6 bp, Unknown
  misc_feature (1)..( 6): Result.001 file - promoters60/1016133
aataat

SEQ ID NO: 94367 - DNA, 8 bp, Unknown
  misc_feature (1)..( 8): Result.001 file - promoters60/1016133
atcaaata

SEQ ID NO: 94368 - DNA, 8 bp, Unknown
  misc_feature (1)..( 8): Result.001 file - promoters60/1016133
atcatata

SEQ ID NO: 94369 - DNA, 6 bp, Unknown
  misc_feature (1)..( 6): Result.001 file - promoters60/1016133
aattaa

SEQ ID NO: 94370 - DNA, 6 bp, Unknown
  misc_feature (1)..( 6): Result.001 file - promoters60/1016133
aattaa

SEQ ID NO: 94371 - DNA, 6 bp, Unknown
  misc_feature (1)..( 6): Result.001 file - promoters60/1016133
aataat

SEQ ID NO: 94372 - DNA, 6 bp, Unknown
  misc_feature (1)..( 6): Result.001 file - promoters60/1016133
aataat

SEQ ID NO: 94373 - DNA, 9 bp, Unknown
  misc_feature (1)..( 9): Result.001 file - promoters60/1016133
tagatcatt

SEQ ID NO: 94374 - DNA, 9 bp, Unknown
  misc_feature (1)..( 9): Result.001 file - promoters60/1016133
tagataatt

SEQ ID NO: 94375 - DNA, 7 bp, Unknown
  misc_feature (1)..( 7): Result.001 file - promoters60/1016133
aatatta

SEQ ID NO: 94376 - DNA, 7 bp, Unknown
  misc_feature (1)..( 7): Result.001 file - promoters60/1016133
aatttta

SEQ ID NO: 94377 - DNA, 6 bp, Unknown
  misc_feature (1)..( 6): Result.001 file - promoters60/1016133
attcta

SEQ ID NO: 94378 - DNA, 6 bp, Unknown
  misc_feature (1)..( 6): Result.001 file - promoters60/1016133
attcta

SEQ ID NO: 94379 - DNA, 6 bp, Unknown
  misc_feature (1)..( 6): Result.001 file - promoters60/1016133
atatat

SEQ ID NO: 94380 - DNA, 6 bp, Unknown
  misc_feature (1)..( 6): Result.001 file - promoters60/1016133
atatat

SEQ ID NO: 94381 - DNA, 7 bp, Unknown
  misc_feature (1)..( 7): Result.001 file - promoters60/1016133
tatgata

SEQ ID NO: 94382 - DNA, 7 bp, Unknown
  misc_feature (1)..( 7): Result.001 file - promoters60/1016133
tatcata

SEQ ID NO: 94383 - DNA, 6 bp, Unknown
  misc_feature (1)..( 6): Result.001 file - promoters60/1016133
aaagat

SEQ ID NO: 94384 - DNA, 6 bp, Unknown
  misc_feature (1)..( 6): Result.001 file - promoters60/1016133
aaagat

SEQ ID NO: 94385 - DNA, 6 bp, Unknown
  misc_feature (1)..( 6): Result.001 file - promoters60/1016133
actata

SEQ ID NO: 94386 - DNA, 6 bp, Unknown
  misc_feature (1)..( 6): Result.001 file - promoters60/1016133
actata

SEQ ID NO: 94387 - DNA, 11 bp, Unknown
  misc_feature (1)..( 11): Result.001 file - promoters60/1016133
tatactttact

SEQ ID NO: 94388 - DNA, 11 bp, Unknown
  misc_feature (1)..( 11): Result.001 file - promoters60/1016133
tattctttact

SEQ ID NO: 94389 - DNA, 7 bp, Unknown
  misc_feature (1)..( 7): Result.001 file - promoters60/1016133
attcaaa

SEQ ID NO: 94390 - DNA, 7 bp, Unknown
  misc_feature (1)..( 7): Result.001 file - promoters60/1016133
attcaaa

SEQ ID NO: 94391 - DNA, 7 bp, Unknown
  misc_feature (1)..( 7): Result.001 file - promoters60/1016133
aaactta

SEQ ID NO: 94392 - DNA, 7 bp, Unknown
  misc_feature (1)..( 7): Result.001 file - promoters60/1016133
aaaatta

SEQ ID NO: 94393 - DNA, 7 bp, Unknown
  misc_feature (1)..( 7): Result.001 file - promoters60/1016133
ctataaa

SEQ ID NO: 94394 - DNA, 7 bp, Unknown
  misc_feature (1)..( 7): Result.001 file - promoters60/1016165
ctacaaa

SEQ ID NO: 94395 - DNA, 6 bp, Unknown
  misc_feature (1)..( 6): Result.001 file - promoters60/1016165
tattat

SEQ ID NO: 94396 - DNA, 6 bp, Unknown
  misc_feature (1)..( 6): Result.001 file - promoters60/1016165
tattat

SEQ ID NO: 94397 - DNA, 10 bp, Unknown
  misc_feature (1)..( 10): Result.001 file - promoters60/1016165
gattatggat

SEQ ID NO: 94398 - DNA, 10 bp, Unknown
  misc_feature (1)..( 10): Result.001 file - promoters60/1016165
gattattgat

SEQ ID NO: 94399 - DNA, 10 bp, Unknown
  misc_feature (1)..( 10): Result.001 file - promoters60/1016165
gatgatgcag

SEQ ID NO: 94400 - DNA, 7 bp, Unknown
  misc_feature (1)..( 7): Result.001 file - promoters60/1016165
tgtattt

SEQ ID NO: 94401 - DNA, 7 bp, Unknown
  misc_feature (1)..( 7): Result.001 file - promoters60/1016165
tgttttt

SEQ ID NO: 94402 - DNA, 8 bp, Unknown
  misc_feature (1)..( 8): Result.001 file - promoters60/1016165
aaattgtg

SEQ ID NO: 94403 - DNA, 8 bp, Unknown
  misc_feature (1)..( 8): Result.001 file - promoters60/1016165
aaaatgtg

SEQ ID NO: 94404 - DNA, 10 bp, Unknown
  misc_feature (1)..( 10): Result.001 file - promoters60/1016165
tattttaatg

SEQ ID NO: 94405 - DNA, 10 bp, Unknown
  misc_feature (1)..( 10): Result.001 file - promoters60/1016165
tatttttatt

SEQ ID NO: 94406 - DNA, 10 bp, Unknown
  misc_feature (1)..( 10): Result.001 file - promoters60/1016165
cattataatg

SEQ ID NO: 94407 - DNA, 10 bp, Unknown
  misc_feature (1)..( 10): Result.001 file - promoters60/1016165
ttactaattt

SEQ ID NO: 94408 - DNA, 10 bp, Unknown
  misc_feature (1)..( 10): Result.001 file - promoters60/1016165
ttaataattt

SEQ ID NO: 94409 - DNA, 8 bp, Unknown
  misc_feature (1)..( 8): Result.001 file - promoters60/1016165
aataaaag

SEQ ID NO: 94410 - DNA, 8 bp, Unknown
  misc_feature (1)..( 8): Result.001 file - promoters60/1016165
aattaaag

SEQ ID NO: 94411 - DNA, 6 bp, Unknown
  misc_feature (1)..( 6): Result.001 file - promoters60/1016165
aaaatt

SEQ ID NO: 94412 - DNA, 6 bp, Unknown
  misc_feature (1)..( 6): Result.001 file - promoters60/1016165
aaaatt

SEQ ID NO: 94413 - DNA, 7 bp, Unknown
  misc_feature (1)..( 7): Result.001 file - promoters60/1016165
aatcaaa

SEQ ID NO: 94414 - DNA, 7 bp, Unknown
  misc_feature (1)..( 7): Result.001 file - promoters60/1016165
aattaaa

SEQ ID NO: 94415 - DNA, 6 bp, Unknown
  misc_feature (1)..( 6): Result.001 file - promoters60/1016165
ggccca

SEQ ID NO: 94416 - DNA, 6 bp, Unknown
  misc_feature (1)..( 6): Result.001 file - promoters60/1016165
ggccca

SEQ ID NO: 94417 - DNA, 8 bp, Unknown
  misc_feature (1)..( 8): Result.001 file - promoters60/1016165
agacaagt

SEQ ID NO: 94418 - DNA, 8 bp, Unknown
  misc_feature (1)..( 8): Result.001 file - promoters60/1016165
agacgagt

SEQ ID NO: 94419 - DNA, 7 bp, Unknown
  misc_feature (1)..( 7): Result.001 file - promoters60/1016165
aagctca

SEQ ID NO: 94420 - DNA, 7 bp, Unknown
  misc_feature (1)..( 7): Result.001 file - promoters60/1016165
aagatca

SEQ ID NO: 94421 - DNA, 7 bp, Unknown
  misc_feature (1)..( 7): Result.001 file - promoters60/1016165
taataaa

SEQ ID NO: 94422 - DNA, 7 bp, Unknown
  misc_feature (1)..( 7): Result.001 file - promoters60/1016165
taacaaa

SEQ ID NO: 94423 - DNA, 7 bp, Unknown
  misc_feature (1)..( 7): Result.001 file - promoters60/1016165
taatcac

SEQ ID NO: 94424 - DNA, 7 bp, Unknown
  misc_feature (1)..( 7): Result.001 file - promoters60/1016165
taatcac

SEQ ID NO: 94425 - DNA, 7 bp, Unknown
  misc_feature (1)..( 7): Result.001 file - promoters60/1016165
agttaat

SEQ ID NO: 94426 - DNA, 7 bp, Unknown
  misc_feature (1)..( 7): Result.001 file - promoters60/1016165
agtgaat

SEQ ID NO: 94427 - DNA, 7 bp, Unknown
  misc_feature (1)..( 7): Result.001 file - promoters60/1016165
ccctttt

SEQ ID NO: 94428 - DNA, 7 bp, Unknown
  misc_feature (1)..( 7): Result.001 file - promoters60/1016165
cccattt

SEQ ID NO: 94429 - DNA, 6 bp, Unknown
  misc_feature (1)..( 6): Result.001 file - promoters60/1016165
aaccaa

SEQ ID NO: 94430 - DNA, 6 bp, Unknown
  misc_feature (1)..( 6): Result.001 file - promoters60/1016165
aaccaa

SEQ ID NO: 94431 - DNA, 7 bp, Unknown
  misc_feature (1)..( 7): Result.001 file - promoters60/1016165
agggata

SEQ ID NO: 94432 - DNA, 7 bp, Unknown
  misc_feature (1)..( 7): Result.001 file - promoters60/1016165
aggtata

SEQ ID NO: 94433 - DNA, 7 bp, Unknown
  misc_feature (1)..( 7): Result.001 file - promoters60/1016165
tgatcat

SEQ ID NO: 94434 - DNA, 7 bp, Unknown
  misc_feature (1)..( 7): Result.001 file - promoters60/1016165
tgatcat

SEQ ID NO: 94435 - DNA, 6 bp, Unknown
  misc_feature (1)..( 6): Result.001 file - promoters60/1016165
taattt

SEQ ID NO: 94436 - DNA, 6 bp, Unknown
  misc_feature (1)..( 6): Result.001 file - promoters60/1016165
taattt

SEQ ID NO: 94437 - DNA, 7 bp, Unknown
  misc_feature (1)..( 7): Result.001 file - promoters60/1016165
ttccatt

SEQ ID NO: 94438 - DNA, 7 bp, Unknown
  misc_feature (1)..( 7): Result.001 file - promoters60/1016165
ttccatt

SEQ ID NO: 94439 - DNA, 8 bp, Unknown
  misc_feature (1)..( 8): Result.001 file - promoters60/1016165
ttagcaat

SEQ ID NO: 94440 - DNA, 8 bp, Unknown
  misc_feature (1)..( 8): Result.001 file - promoters60/1016176
ttaacaat

SEQ ID NO: 94441 - DNA, 13 bp, Unknown
  misc_feature (1)..( 13): Result.001 file - promoters60/1016176
agttataaatcgt

SEQ ID NO: 94442 - DNA, 13 bp, Unknown
  misc_feature (1)..( 13): Result.001 file - promoters60/1016176
agttatgaatccg

SEQ ID NO: 94443 - DNA, 13 bp, Unknown
  misc_feature (1)..( 13): Result.001 file - promoters60/1016176
tcaaataaattat

SEQ ID NO: 94444 - DNA, 13 bp, Unknown
  misc_feature (1)..( 13): Result.001 file - promoters60/1016176
gaaaatgaattct

SEQ ID NO: 94445 - DNA, 13 bp, Unknown
  misc_feature (1)..( 13): Result.001 file - promoters60/1016176
gtaactaaaatta

SEQ ID NO: 94446 - DNA, 14 bp, Unknown
  misc_feature (1)..( 14): Result.001 file - promoters60/1016176
aattttaatatttt

SEQ ID NO: 94447 - DNA, 14 bp, Unknown
  misc_feature (1)..( 14): Result.001 file - promoters60/1016176
acgaataaaataaa

SEQ ID NO: 94448 - DNA, 11 bp, Unknown
  misc_feature (1)..( 11): Result.001 file - promoters60/1016176
ataaatcgtta

SEQ ID NO: 94449 - DNA, 11 bp, Unknown
  misc_feature (1)..( 11): Result.001 file - promoters60/1016176
gagaatcatta

SEQ ID NO: 94450 - DNA, 11 bp, Unknown
  misc_feature (1)..( 11): Result.001 file - promoters60/1016176
accaatcataa

SEQ ID NO: 94451 - DNA, 11 bp, Unknown
  misc_feature (1)..( 11): Result.001 file - promoters60/1016176
accaatcaaac

SEQ ID NO: 94452 - DNA, 11 bp, Unknown
  misc_feature (1)..( 11): Result.001 file - promoters60/1016176
ataaattattt

SEQ ID NO: 94453 - DNA, 11 bp, Unknown
  misc_feature (1)..( 11): Result.001 file - promoters60/1016176
acgaataaaat

SEQ ID NO: 94454 - DNA, 13 bp, Unknown
  misc_feature (1)..( 13): Result.001 file - promoters60/1016176
cacagacaccaag

SEQ ID NO: 94455 - DNA, 13 bp, Unknown
  misc_feature (1)..( 13): Result.001 file - promoters60/1016176
gaaagaaacctga

SEQ ID NO: 94456 - DNA, 13 bp, Unknown
  misc_feature (1)..( 13): Result.001 file - promoters60/1016176
gtaagaaaaaaaa

SEQ ID NO: 94457 - DNA, 13 bp, Unknown
  misc_feature (1)..( 13): Result.001 file - promoters60/1016176
caaacaaaacata

SEQ ID NO: 94458 - DNA, 13 bp, Unknown
  misc_feature (1)..( 13): Result.001 file - promoters60/1016176
gaaacaaagactt

SEQ ID NO: 94459 - DNA, 13 bp, Unknown
  misc_feature (1)..( 13): Result.001 file - promoters60/1016176
agtagaataaaaa

SEQ ID NO: 94460 - DNA, 13 bp, Unknown
  misc_feature (1)..( 13): Result.001 file - promoters60/1016223
tttggtataatga

SEQ ID NO: 94461 - DNA, 8 bp, Unknown
  misc_feature (1)..( 8): Result.001 file - promoters60/1016223
aaaacaac

SEQ ID NO: 94462 - DNA, 8 bp, Unknown
  misc_feature (1)..( 8): Result.001 file - promoters60/1016223
aaaacaat

SEQ ID NO: 94463 - DNA, 8 bp, Unknown
  misc_feature (1)..( 8): Result.001 file - promoters60/1016223
aaaaaaac

SEQ ID NO: 94464 - DNA, 6 bp, Unknown
  misc_feature (1)..( 6): Result.001 file - promoters60/1016223
atggca

SEQ ID NO: 94465 - DNA, 6 bp, Unknown
  misc_feature (1)..( 6): Result.001 file - promoters60/1016223
atggca

SEQ ID NO: 94466 - DNA, 7 bp, Unknown
  misc_feature (1)..( 7): Result.001 file - promoters60/1016223
cgtgaaa

SEQ ID NO: 94467 - DNA, 7 bp, Unknown
  misc_feature (1)..( 7): Result.001 file - promoters60/1016223
cgttaaa

SEQ ID NO: 94468 - DNA, 8 bp, Unknown
  misc_feature (1)..( 8): Result.001 file - promoters60/1016223
agagattg

SEQ ID NO: 94469 - DNA, 8 bp, Unknown
  misc_feature (1)..( 8): Result.001 file - promoters60/1016223
agaaattg

SEQ ID NO: 94470 - DNA, 8 bp, Unknown
  misc_feature (1)..( 8): Result.001 file - promoters60/1016223
aaaacaat

SEQ ID NO: 94471 - DNA, 8 bp, Unknown
  misc_feature (1)..( 8): Result.001 file - promoters60/1016223
aaaacaat

SEQ ID NO: 94472 - DNA, 8 bp, Unknown
  misc_feature (1)..( 8): Result.001 file - promoters60/1016223
gaattaaa

SEQ ID NO: 94473 - DNA, 8 bp, Unknown
  misc_feature (1)..( 8): Result.001 file - promoters60/1016223
gaaataaa

SEQ ID NO: 94474 - DNA, 7 bp, Unknown
  misc_feature (1)..( 7): Result.001 file - promoters60/1016223
caaattt

SEQ ID NO: 94475 - DNA, 7 bp, Unknown
  misc_feature (1)..( 7): Result.001 file - promoters60/1016223
caatttt

SEQ ID NO: 94476 - DNA, 6 bp, Unknown
  misc_feature (1)..( 6): Result.001 file - promoters60/1016223
ttaaaa

SEQ ID NO: 94477 - DNA, 6 bp, Unknown
  misc_feature (1)..( 6): Result.001 file - promoters60/1016223
ttaaaa

SEQ ID NO: 94478 - DNA, 6 bp, Unknown
  misc_feature (1)..( 6): Result.001 file - promoters60/1016223
gtaacg

SEQ ID NO: 94479 - DNA, 6 bp, Unknown
  misc_feature (1)..( 6): Result.001 file - promoters60/1016223
gtaacg

SEQ ID NO: 94480 - DNA, 7 bp, Unknown
  misc_feature (1)..( 7): Result.001 file - promoters60/1016223
gtggtta

SEQ ID NO: 94481 - DNA, 7 bp, Unknown
  misc_feature (1)..( 7): Result.001 file - promoters60/1016223
gtgttta

SEQ ID NO: 94482 - DNA, 8 bp, Unknown
  misc_feature (1)..( 8): Result.001 file - promoters60/1016223
acgtgtca

SEQ ID NO: 94483 - DNA, 8 bp, Unknown
  misc_feature (1)..( 8): Result.001 file - promoters60/1016223
acgtgtca

SEQ ID NO: 94484 - DNA, 15 bp, Unknown
  misc_feature (1)..( 15): Result.001 file - promoters60/1016223
tattgcttcaccgcc

SEQ ID NO: 94485 - DNA, 15 bp, Unknown
  misc_feature (1)..( 15): Result.001 file - promoters60/1016223
tattgcttcaccgcc

SEQ ID NO: 94486 - DNA, 6 bp, Unknown
  misc_feature (1)..( 6): Result.001 file - promoters60/1016223
ctcgtc

SEQ ID NO: 94487 - DNA, 6 bp, Unknown
  misc_feature (1)..( 6): Result.001 file - promoters60/1016223
ctcgtc

SEQ ID NO: 94488 - DNA, 15 bp, Unknown
  misc_feature (1)..( 15): Result.001 file - promoters60/1016223
ttcttcttctataaa

SEQ ID NO: 94489 - DNA, 15 bp, Unknown
  misc_feature (1)..( 15): Result.001 file - promoters60/1016250
ttcttcttctataaa

SEQ ID NO: 94490 - DNA, 11 bp, Unknown
  misc_feature (1)..( 11): Result.001 file - promoters60/1016250
ctcaatcaaac

SEQ ID NO: 94491 - DNA, 11 bp, Unknown
  misc_feature (1)..( 11): Result.001 file - promoters60/1016250
gtcaaccaact

SEQ ID NO: 94492 - DNA, 11 bp, Unknown
  misc_feature (1)..( 11): Result.001 file - promoters60/1016250
accaatcacaa

SEQ ID NO: 94493 - DNA, 11 bp, Unknown
  misc_feature (1)..( 11): Result.001 file - promoters60/1016250
ctctatcaaaa

SEQ ID NO: 94494 - DNA, 11 bp, Unknown
  misc_feature (1)..( 11): Result.001 file - promoters60/1016250
aacaaacaaac

SEQ ID NO: 94495 - DNA, 11 bp, Unknown
  misc_feature (1)..( 11): Result.001 file - promoters60/1016250
atgaattacac

SEQ ID NO: 94496 - DNA, 11 bp, Unknown
  misc_feature (1)..( 11): Result.001 file - promoters60/1016250
agtgttcaaaa

SEQ ID NO: 94497 - DNA, 13 bp, Unknown
  misc_feature (1)..( 13): Result.001 file - promoters60/1016250
accactatataag

SEQ ID NO: 94498 - DNA, 13 bp, Unknown
  misc_feature (1)..( 13): Result.001 file - promoters60/1016250
tccattatatata

SEQ ID NO: 94499 - DNA, 13 bp, Unknown
  misc_feature (1)..( 13): Result.001 file - promoters60/1016250
agtgagatataat

SEQ ID NO: 94500 - DNA, 13 bp, Unknown
  misc_feature (1)..( 13): Result.001 file - promoters60/1016250
aaaattatataaa

SEQ ID NO: 94501 - DNA, 13 bp, Unknown
  misc_feature (1)..( 13): Result.001 file - promoters60/1016250
tcctttatattct

SEQ ID NO: 94502 - DNA, 13 bp, Unknown
  misc_feature (1)..( 13): Result.001 file - promoters60/1016250
atctccctataaa

SEQ ID NO: 94503 - DNA, 10 bp, Unknown
  misc_feature (1)..( 10): Result.001 file - promoters60/1016250
aaataaataa

SEQ ID NO: 94504 - DNA, 10 bp, Unknown
  misc_feature (1)..( 10): Result.001 file - promoters60/1016250
taataaagct

SEQ ID NO: 94505 - DNA, 10 bp, Unknown
  misc_feature (1)..( 10): Result.001 file - promoters60/1016250
aaataaataa

SEQ ID NO: 94506 - DNA, 10 bp, Unknown
  misc_feature (1)..( 10): Result.001 file - promoters60/1016250
aaagaaaaag

SEQ ID NO: 94507 - DNA, 10 bp, Unknown
  misc_feature (1)..( 10): Result.001 file - promoters60/1016250
ttagaaaatt

SEQ ID NO: 94508 - DNA, 10 bp, Unknown
  misc_feature (1)..( 10): Result.001 file - promoters60/1016250
gaaaaaacca

SEQ ID NO: 94509 - DNA, 12 bp, Unknown
  misc_feature (1)..( 12): Result.001 file - promoters60/1016250
aaatgaaaaaca

SEQ ID NO: 94510 - DNA, 12 bp, Unknown
  misc_feature (1)..( 12): Result.001 file - promoters60/1016250
atatgaaaatct

SEQ ID NO: 94511 - DNA, 12 bp, Unknown
  misc_feature (1)..( 12): Result.001 file - promoters60/1016250
caatcaaataaa

SEQ ID NO: 94512 - DNA, 12 bp, Unknown
  misc_feature (1)..( 12): Result.001 file - promoters60/1016250
aaaccaaaagaa

SEQ ID NO: 94513 - DNA, 12 bp, Unknown
  misc_feature (1)..( 12): Result.001 file - promoters60/1016250
gaaaaaaaagac

SEQ ID NO: 94514 - DNA, 12 bp, Unknown
  misc_feature (1)..( 12): Result.001 file - promoters60/1016278
aaatgaatttag

SEQ ID NO: 94515 - DNA, 6 bp, Unknown
  misc_feature (1)..( 6): Result.001 file - promoters60/1016278
aaaaag

SEQ ID NO: 94516 - DNA, 6 bp, Unknown
  misc_feature (1)..( 6): Result.001 file - promoters60/1016278
aaaaag

SEQ ID NO: 94517 - DNA, 9 bp, Unknown
  misc_feature (1)..( 9): Result.001 file - promoters60/1016278
gggattttt

SEQ ID NO: 94518 - DNA, 9 bp, Unknown
  misc_feature (1)..( 9): Result.001 file - promoters60/1016278
gggttttta

SEQ ID NO: 94519 - DNA, 9 bp, Unknown
  misc_feature (1)..( 9): Result.001 file - promoters60/1016278
ttgattttt

SEQ ID NO: 94520 - DNA, 8 bp, Unknown
  misc_feature (1)..( 8): Result.001 file - promoters60/1016278
tgtgtcta

SEQ ID NO: 94521 - DNA, 8 bp, Unknown
  misc_feature (1)..( 8): Result.001 file - promoters60/1016278
tgtatcta

SEQ ID NO: 94522 - DNA, 7 bp, Unknown
  misc_feature (1)..( 7): Result.001 file - promoters60/1016278
taattaa

SEQ ID NO: 94523 - DNA, 7 bp, Unknown
  misc_feature (1)..( 7): Result.001 file - promoters60/1016278
taattat

SEQ ID NO: 94524 - DNA, 7 bp, Unknown
  misc_feature (1)..( 7): Result.001 file - promoters60/1016278
taattat

SEQ ID NO: 94525 - DNA, 7 bp, Unknown
  misc_feature (1)..( 7): Result.001 file - promoters60/1016278
ttatata

SEQ ID NO: 94526 - DNA, 7 bp, Unknown
  misc_feature (1)..( 7): Result.001 file - promoters60/1016278
ttatata

SEQ ID NO: 94527 - DNA, 8 bp, Unknown
  misc_feature (1)..( 8): Result.001 file - promoters60/1016278
aacgcaag

SEQ ID NO: 94528 - DNA, 8 bp, Unknown
  misc_feature (1)..( 8): Result.001 file - promoters60/1016278
aacgtaag

SEQ ID NO: 94529 - DNA, 6 bp, Unknown
  misc_feature (1)..( 6): Result.001 file - promoters60/1016278
attttt

SEQ ID NO: 94530 - DNA, 6 bp, Unknown
  misc_feature (1)..( 6): Result.001 file - promoters60/1016278
attttt

SEQ ID NO: 94531 - DNA, 6 bp, Unknown
  misc_feature (1)..( 6): Result.001 file - promoters60/1016278
atcaac

SEQ ID NO: 94532 - DNA, 6 bp, Unknown
  misc_feature (1)..( 6): Result.001 file - promoters60/1016278
atcaac

SEQ ID NO: 94533 - DNA, 11 bp, Unknown
  misc_feature (1)..( 11): Result.001 file - promoters60/1016278
tatcatataat

SEQ ID NO: 94534 - DNA, 11 bp, Unknown
  misc_feature (1)..( 11): Result.001 file - promoters60/1016278
tataatataat

SEQ ID NO: 94535 - DNA, 6 bp, Unknown
  misc_feature (1)..( 6): Result.001 file - promoters60/1016278
aaataa

SEQ ID NO: 94536 - DNA, 6 bp, Unknown
  misc_feature (1)..( 6): Result.001 file - promoters60/1016278
aaataa

SEQ ID NO: 94537 - DNA, 10 bp, Unknown
  misc_feature (1)..( 10): Result.001 file - promoters60/1016278
aaatagataa

SEQ ID NO: 94538 - DNA, 10 bp, Unknown
  misc_feature (1)..( 10): Result.001 file - promoters60/1016278
aaatatataa

SEQ ID NO: 94539 - DNA, 6 bp, Unknown
  misc_feature (1)..( 6): Result.001 file - promoters60/1016278
aattgt

SEQ ID NO: 94540 - DNA, 6 bp, Unknown
  misc_feature (1)..( 6): Result.001 file - promoters60/1016278
aattgt

SEQ ID NO: 94541 - DNA, 6 bp, Unknown
  misc_feature (1)..( 6): Result.001 file - promoters60/1016278
gctacc

SEQ ID NO: 94542 - DNA, 6 bp, Unknown
  misc_feature (1)..( 6): Result.001 file - promoters60/1016278
gctacc

SEQ ID NO: 94543 - DNA, 6 bp, Unknown
  misc_feature (1)..( 6): Result.001 file - promoters60/1016278
tctctc

SEQ ID NO: 94544 - DNA, 6 bp, Unknown
  misc_feature (1)..( 6): Result.001 file - promoters60/1016278
tctctc

SEQ ID NO: 94545 - DNA, 7 bp, Unknown
  misc_feature (1)..( 7): Result.001 file - promoters60/1016278
tttattt

SEQ ID NO: 94546 - DNA, 7 bp, Unknown
  misc_feature (1)..( 7): Result.001 file - promoters60/1016278
tttcttt

SEQ ID NO: 94547 - DNA, 8 bp, Unknown
  misc_feature (1)..( 8): Result.001 file - promoters60/1016278
ttactgat

SEQ ID NO: 94548 - DNA, 8 bp, Unknown
  misc_feature (1)..( 8): Result.001 file - promoters60/1016278
ttattgat

SEQ ID NO: 94549 - DNA, 6 bp, Unknown
  misc_feature (1)..( 6): Result.001 file - promoters60/1016278
atttat

SEQ ID NO: 94550 - DNA, 6 bp, Unknown
  misc_feature (1)..( 6): Result.001 file - promoters60/1016278
atttat

SEQ ID NO: 94551 - DNA, 7 bp, Unknown
  misc_feature (1)..( 7): Result.001 file - promoters60/1016278
tttgttt

SEQ ID NO: 94552 - DNA, 7 bp, Unknown
  misc_feature (1)..( 7): Result.001 file - promoters60/1016278
tttattt

SEQ ID NO: 94553 - DNA, 6 bp, Unknown
  misc_feature (1)..( 6): Result.001 file - promoters60/1016278
tatctc

SEQ ID NO: 94554 - DNA, 6 bp, Unknown
  misc_feature (1)..( 6): Result.001 file - promoters60/1016278
tatctc

SEQ ID NO: 94555 - DNA, 8 bp, Unknown
  misc_feature (1)..( 8): Result.001 file - promoters60/1016278
atccaaac

SEQ ID NO: 94556 - DNA, 8 bp, Unknown
  misc_feature (1)..( 8): Result.001 file - promoters60/1016278
atcctaac

SEQ ID NO: 94557 - DNA, 7 bp, Unknown
  misc_feature (1)..( 7): Result.001 file - promoters60/1016278
ataaaaa

SEQ ID NO: 94558 - DNA, 7 bp, Unknown
  misc_feature (1)..( 7): Result.001 file - promoters60/1016278
ataaaaa

SEQ ID NO: 94559 - DNA, 7 bp, Unknown
  misc_feature (1)..( 7): Result.001 file - promoters60/1016278
gaatacg

SEQ ID NO: 94560 - DNA, 7 bp, Unknown
  misc_feature (1)..( 7): Result.001 file - promoters60/1016343
gaaaacg

SEQ ID NO: 94561 - DNA, 6 bp, Unknown
  misc_feature (1)..( 6): Result.001 file - promoters60/1016343
tttccg

SEQ ID NO: 94562 - DNA, 6 bp, Unknown
  misc_feature (1)..( 6): Result.001 file - promoters60/1016343
tttccg

SEQ ID NO: 94563 - DNA, 6 bp, Unknown
  misc_feature (1)..( 6): Result.001 file - promoters60/1016343
ttttat

SEQ ID NO: 94564 - DNA, 6 bp, Unknown
  misc_feature (1)..( 6): Result.001 file - promoters60/1016343
ttttat

SEQ ID NO: 94565 - DNA, 7 bp, Unknown
  misc_feature (1)..( 7): Result.001 file - promoters60/1016343
atttata

SEQ ID NO: 94566 - DNA, 7 bp, Unknown
  misc_feature (1)..( 7): Result.001 file - promoters60/1016343
attaata

SEQ ID NO: 94567 - DNA, 6 bp, Unknown
  misc_feature (1)..( 6): Result.001 file - promoters60/1016343
taaatt

SEQ ID NO: 94568 - DNA, 6 bp, Unknown
  misc_feature (1)..( 6): Result.001 file - promoters60/1016343
taaatt

SEQ ID NO: 94569 - DNA, 9 bp, Unknown
  misc_feature (1)..( 9): Result.001 file - promoters60/1016343
atatttttt

SEQ ID NO: 94570 - DNA, 9 bp, Unknown
  misc_feature (1)..( 9): Result.001 file - promoters60/1016343
atatttttt

SEQ ID NO: 94571 - DNA, 6 bp, Unknown
  misc_feature (1)..( 6): Result.001 file - promoters60/1016343
caatat

SEQ ID NO: 94572 - DNA, 6 bp, Unknown
  misc_feature (1)..( 6): Result.001 file - promoters60/1016343
caatat

SEQ ID NO: 94573 - DNA, 9 bp, Unknown
  misc_feature (1)..( 9): Result.001 file - promoters60/1016343
atatcatat

SEQ ID NO: 94574 - DNA, 9 bp, Unknown
  misc_feature (1)..( 9): Result.001 file - promoters60/1016343
atatcatat

SEQ ID NO: 94575 - DNA, 8 bp, Unknown
  misc_feature (1)..( 8): Result.001 file - promoters60/1016343
aaaaaaaa

SEQ ID NO: 94576 - DNA, 8 bp, Unknown
  misc_feature (1)..( 8): Result.001 file - promoters60/1016343
aaaaaaaa

SEQ ID NO: 94577 - DNA, 6 bp, Unknown
  misc_feature (1)..( 6): Result.001 file - promoters60/1016343
aatttt

SEQ ID NO: 94578 - DNA, 6 bp, Unknown
  misc_feature (1)..( 6): Result.001 file - promoters60/1016343
aatttt

SEQ ID NO: 94579 - DNA, 6 bp, Unknown
  misc_feature (1)..( 6): Result.001 file - promoters60/1016343
attttg

SEQ ID NO: 94580 - DNA, 6 bp, Unknown
  misc_feature (1)..( 6): Result.001 file - promoters60/1016343
attttg

SEQ ID NO: 94581 - DNA, 6 bp, Unknown
  misc_feature (1)..( 6): Result.001 file - promoters60/1016343
aatttt

SEQ ID NO: 94582 - DNA, 6 bp, Unknown
  misc_feature (1)..( 6): Result.001 file - promoters60/1016343
aatttt

SEQ ID NO: 94583 - DNA, 7 bp, Unknown
  misc_feature (1)..( 7): Result.001 file - promoters60/1016343
tttcata

SEQ ID NO: 94584 - DNA, 7 bp, Unknown
  misc_feature (1)..( 7): Result.001 file - promoters60/1016343
ttttata

SEQ ID NO: 94585 - DNA, 7 bp, Unknown
  misc_feature (1)..( 7): Result.001 file - promoters60/1016343
tcatatt

SEQ ID NO: 94586 - DNA, 7 bp, Unknown
  misc_feature (1)..( 7): Result.001 file - promoters60/1016343
tcacatt

SEQ ID NO: 94587 - DNA, 6 bp, Unknown
  misc_feature (1)..( 6): Result.001 file - promoters60/1016343
tgctca

SEQ ID NO: 94588 - DNA, 6 bp, Unknown
  misc_feature (1)..( 6): Result.001 file - promoters60/1016343
tgctca

SEQ ID NO: 94589 - DNA, 7 bp, Unknown
  misc_feature (1)..( 7): Result.001 file - promoters60/1016343
tgtgttc

SEQ ID NO: 94590 - DNA, 7 bp, Unknown
  misc_feature (1)..( 7): Result.001 file - promoters60/1016343
tgtgttc

SEQ ID NO: 94591 - DNA, 6 bp, Unknown
  misc_feature (1)..( 6): Result.001 file - promoters60/1016343
ttcaat

SEQ ID NO: 94592 - DNA, 6 bp, Unknown
  misc_feature (1)..( 6): Result.001 file - promoters60/1016382
ttcaat

SEQ ID NO: 94593 - DNA, 7 bp, Unknown
  misc_feature (1)..( 7): Result.001 file - promoters60/1016382
ctgattc

SEQ ID NO: 94594 - DNA, 7 bp, Unknown
  misc_feature (1)..( 7): Result.001 file - promoters60/1016382
ctgattc

SEQ ID NO: 94595 - DNA, 6 bp, Unknown
  misc_feature (1)..( 6): Result.001 file - promoters60/1016382
taggag

SEQ ID NO: 94596 - DNA, 6 bp, Unknown
  misc_feature (1)..( 6): Result.001 file - promoters60/1016382
taggag

SEQ ID NO: 94597 - DNA, 6 bp, Unknown
  misc_feature (1)..( 6): Result.001 file - promoters60/1016382
gaaaga

SEQ ID NO: 94598 - DNA, 6 bp, Unknown
  misc_feature (1)..( 6): Result.001 file - promoters60/1016382
gaaaga

SEQ ID NO: 94599 - DNA, 6 bp, Unknown
  misc_feature (1)..( 6): Result.001 file - promoters60/1016382
cttttg

SEQ ID NO: 94600 - DNA, 6 bp, Unknown
  misc_feature (1)..( 6): Result.001 file - promoters60/1016382
cttttg

SEQ ID NO: 94601 - DNA, 6 bp, Unknown
  misc_feature (1)..( 6): Result.001 file - promoters60/1016382
tttacc

SEQ ID NO: 94602 - DNA, 6 bp, Unknown
  misc_feature (1)..( 6): Result.001 file - promoters60/1016382
tttacc

SEQ ID NO: 94603 - DNA, 11 bp, Unknown
  misc_feature (1)..( 11): Result.001 file - promoters60/1016382
ttttaatatat

SEQ ID NO: 94604 - DNA, 11 bp, Unknown
  misc_feature (1)..( 11): Result.001 file - promoters60/1016382
atttcatatcc

SEQ ID NO: 94605 - DNA, 11 bp, Unknown
  misc_feature (1)..( 11): Result.001 file - promoters60/1016382
ttttaatctat

SEQ ID NO: 94606 - DNA, 6 bp, Unknown
  misc_feature (1)..( 6): Result.001 file - promoters60/1016382
gttagt

SEQ ID NO: 94607 - DNA, 6 bp, Unknown
  misc_feature (1)..( 6): Result.001 file - promoters60/1016382
gttagt

SEQ ID NO: 94608 - DNA, 6 bp, Unknown
  misc_feature (1)..( 6): Result.001 file - promoters60/1016382
taaaaa

SEQ ID NO: 94609 - DNA, 6 bp, Unknown
  misc_feature (1)..( 6): Result.001 file - promoters60/1016382
taaaaa

SEQ ID NO: 94610 - DNA, 6 bp, Unknown
  misc_feature (1)..( 6): Result.001 file - promoters60/1016382
gagtgt

SEQ ID NO: 94611 - DNA, 6 bp, Unknown
  misc_feature (1)..( 6): Result.001 file - promoters60/1016382
gagtgt

SEQ ID NO: 94612 - DNA, 7 bp, Unknown
  misc_feature (1)..( 7): Result.001 file - promoters60/1016382
tctctaa

SEQ ID NO: 94613 - DNA, 7 bp, Unknown
  misc_feature (1)..( 7): Result.001 file - promoters60/1016382
tctgtaa

SEQ ID NO: 94614 - DNA, 6 bp, Unknown
  misc_feature (1)..( 6): Result.001 file - promoters60/1016382
ttcaaa

SEQ ID NO: 94615 - DNA, 6 bp, Unknown
  misc_feature (1)..( 6): Result.001 file - promoters60/1016382
ttcaaa

SEQ ID NO: 94616 - DNA, 6 bp, Unknown
  misc_feature (1)..( 6): Result.001 file - promoters60/1016382
gtttaa

SEQ ID NO: 94617 - DNA, 6 bp, Unknown
  misc_feature (1)..( 6): Result.001 file - promoters60/1016382
gtttaa

SEQ ID NO: 94618 - DNA, 6 bp, Unknown
  misc_feature (1)..( 6): Result.001 file - promoters60/1016382
tactgt

SEQ ID NO: 94619 - DNA, 6 bp, Unknown
  misc_feature (1)..( 6): Result.001 file - promoters60/1016382
tactgt

SEQ ID NO: 94620 - DNA, 9 bp, Unknown
  misc_feature (1)..( 9): Result.001 file - promoters60/1016382
tcaaaattt

SEQ ID NO: 94621 - DNA, 9 bp, Unknown
  misc_feature (1)..( 9): Result.001 file - promoters60/1016382
tcagaattt

SEQ ID NO: 94622 - DNA, 6 bp, Unknown
  misc_feature (1)..( 6): Result.001 file - promoters60/1016382
ttgaaa

SEQ ID NO: 94623 - DNA, 6 bp, Unknown
  misc_feature (1)..( 6): Result.001 file - promoters60/1016382
ttgaaa

SEQ ID NO: 94624 - DNA, 7 bp, Unknown
  misc_feature (1)..( 7): Result.001 file - promoters60/1016382
cttctcc

SEQ ID NO: 94625 - DNA, 7 bp, Unknown
  misc_feature (1)..( 7): Result.001 file - promoters60/1016382
cttgtcc

SEQ ID NO: 94626 - DNA, 7 bp, Unknown
  misc_feature (1)..( 7): Result.001 file - promoters60/1016382
ttcatgt

SEQ ID NO: 94627 - DNA, 7 bp, Unknown
  misc_feature (1)..( 7): Result.001 file - promoters60/1016382
ttcatgt

SEQ ID NO: 94628 - DNA, 7 bp, Unknown
  misc_feature (1)..( 7): Result.001 file - promoters60/1016382
aagcttt

SEQ ID NO: 94629 - DNA, 7 bp, Unknown
  misc_feature (1)..( 7): Result.001 file - promoters60/1016382
aagattt

SEQ ID NO: 94630 - DNA, 10 bp, Unknown
  misc_feature (1)..( 10): Result.001 file - promoters60/1016382
atattttttt

SEQ ID NO: 94631 - DNA, 10 bp, Unknown
  misc_feature (1)..( 10): Result.001 file - promoters60/1016382
atattttttt

SEQ ID NO: 94632 - DNA, 7 bp, Unknown
  misc_feature (1)..( 7): Result.001 file - promoters60/1016382
tacctca

SEQ ID NO: 94633 - DNA, 7 bp, Unknown
  misc_feature (1)..( 7): Result.001 file - promoters60/1016382
tacctca

SEQ ID NO: 94634 - DNA, 7 bp, Unknown
  misc_feature (1)..( 7): Result.001 file - promoters60/1016382
ttttata

SEQ ID NO: 94635 - DNA, 7 bp, Unknown
  misc_feature (1)..( 7): Result.001 file - promoters60/1016382
tttgata

SEQ ID NO: 94636 - DNA, 9 bp, Unknown
  misc_feature (1)..( 9): Result.001 file - promoters60/1016382
catccttat

SEQ ID NO: 94637 - DNA, 9 bp, Unknown
  misc_feature (1)..( 9): Result.001 file - promoters60/1016418
catcattat

SEQ ID NO: 94638 - DNA, 8 bp, Unknown
  misc_feature (1)..( 8): Result.001 file - promoters60/1016418
taattaat

SEQ ID NO: 94639 - DNA, 8 bp, Unknown
  misc_feature (1)..( 8): Result.001 file - promoters60/1016418
taatcaat

SEQ ID NO: 94640 - DNA, 8 bp, Unknown
  misc_feature (1)..( 8): Result.001 file - promoters60/1016418
atatcaat

SEQ ID NO: 94641 - DNA, 9 bp, Unknown
  misc_feature (1)..( 9): Result.001 file - promoters60/1016418
ttatttgga

SEQ ID NO: 94642 - DNA, 9 bp, Unknown
  misc_feature (1)..( 9): Result.001 file - promoters60/1016418
atatttgtt

SEQ ID NO: 94643 - DNA, 9 bp, Unknown
  misc_feature (1)..( 9): Result.001 file - promoters60/1016418
ttatgtgga

SEQ ID NO: 94644 - DNA, 7 bp, Unknown
  misc_feature (1)..( 7): Result.001 file - promoters60/1016418
tataaat

SEQ ID NO: 94645 - DNA, 7 bp, Unknown
  misc_feature (1)..( 7): Result.001 file - promoters60/1016418
tataaat

SEQ ID NO: 94646 - DNA, 7 bp, Unknown
  misc_feature (1)..( 7): Result.001 file - promoters60/1016418
tataaaa

SEQ ID NO: 94647 - DNA, 8 bp, Unknown
  misc_feature (1)..( 8): Result.001 file - promoters60/1016418
attgatga

SEQ ID NO: 94648 - DNA, 8 bp, Unknown
  misc_feature (1)..( 8): Result.001 file - promoters60/1016418
tttgttga

SEQ ID NO: 94649 - DNA, 8 bp, Unknown
  misc_feature (1)..( 8): Result.001 file - promoters60/1016418
gtttatgt

SEQ ID NO: 94650 - DNA, 6 bp, Unknown
  misc_feature (1)..( 6): Result.001 file - promoters60/1016418
agcaat

SEQ ID NO: 94651 - DNA, 6 bp, Unknown
  misc_feature (1)..( 6): Result.001 file - promoters60/1016418
agcaat

SEQ ID NO: 94652 - DNA, 6 bp, Unknown
  misc_feature (1)..( 6): Result.001 file - promoters60/1016426
agcaat

SEQ ID NO: 94653 - DNA, 7 bp, Unknown
  misc_feature (1)..( 7): Result.001 file - promoters60/1016426
aatagga

SEQ ID NO: 94654 - DNA, 7 bp, Unknown
  misc_feature (1)..( 7): Result.001 file - promoters60/1016426
aatagga

SEQ ID NO: 94655 - DNA, 9 bp, Unknown
  misc_feature (1)..( 9): Result.001 file - promoters60/1016426
tagaaatac

SEQ ID NO: 94656 - DNA, 9 bp, Unknown
  misc_feature (1)..( 9): Result.001 file - promoters60/1016426
tagcaatac

SEQ ID NO: 94657 - DNA, 9 bp, Unknown
  misc_feature (1)..( 9): Result.001 file - promoters60/1016426
gaaagttaa

SEQ ID NO: 94658 - DNA, 9 bp, Unknown
  misc_feature (1)..( 9): Result.001 file - promoters60/1016426
gaaggtttt

SEQ ID NO: 94659 - DNA, 9 bp, Unknown
  misc_feature (1)..( 9): Result.001 file - promoters60/1016426
caaaattaa

SEQ ID NO: 94660 - DNA, 6 bp, Unknown
  misc_feature (1)..( 6): Result.001 file - promoters60/1016426
aatttt

SEQ ID NO: 94661 - DNA, 6 bp, Unknown
  misc_feature (1)..( 6): Result.001 file - promoters60/1016426
aatttt

SEQ ID NO: 94662 - DNA, 8 bp, Unknown
  misc_feature (1)..( 8): Result.001 file - promoters60/1016426
tttaaatt

SEQ ID NO: 94663 - DNA, 8 bp, Unknown
  misc_feature (1)..( 8): Result.001 file - promoters60/1016426
tttcaatt

SEQ ID NO: 94664 - DNA, 6 bp, Unknown
  misc_feature (1)..( 6): Result.001 file - promoters60/1016426
cctaaa

SEQ ID NO: 94665 - DNA, 6 bp, Unknown
  misc_feature (1)..( 6): Result.001 file - promoters60/1016426
cctaaa

SEQ ID NO: 94666 - DNA, 11 bp, Unknown
  misc_feature (1)..( 11): Result.001 file - promoters60/1016426
taaaatattga

SEQ ID NO: 94667 - DNA, 11 bp, Unknown
  misc_feature (1)..( 11): Result.001 file - promoters60/1016426
taaattattga

SEQ ID NO: 94668 - DNA, 12 bp, Unknown
  misc_feature (1)..( 12): Result.001 file - promoters60/1016426
gaaaagcaaaac

SEQ ID NO: 94669 - DNA, 12 bp, Unknown
  misc_feature (1)..( 12): Result.001 file - promoters60/1016426
gaagagcaaaac

SEQ ID NO: 94670 - DNA, 9 bp, Unknown
  misc_feature (1)..( 9): Result.001 file - promoters60/1016426
ttaaatttt

SEQ ID NO: 94671 - DNA, 9 bp, Unknown
  misc_feature (1)..( 9): Result.001 file - promoters60/1016426
ttaattttt

SEQ ID NO: 94672 - DNA, 7 bp, Unknown
  misc_feature (1)..( 7): Result.001 file - promoters60/1016426
caattgt

SEQ ID NO: 94673 - DNA, 7 bp, Unknown
  misc_feature (1)..( 7): Result.001 file - promoters60/1016426
caagtgt

SEQ ID NO: 94674 - DNA, 7 bp, Unknown
  misc_feature (1)..( 7): Result.001 file - promoters60/1016426
ctgattt

SEQ ID NO: 94675 - DNA, 7 bp, Unknown
  misc_feature (1)..( 7): Result.001 file - promoters60/1016426
ctgtttt

SEQ ID NO: 94676 - DNA, 6 bp, Unknown
  misc_feature (1)..( 6): Result.001 file - promoters60/1016426
tcttcc

SEQ ID NO: 94677 - DNA, 6 bp, Unknown
  misc_feature (1)..( 6): Result.001 file - promoters60/1016426
tcttcc

SEQ ID NO: 94678 - DNA, 8 bp, Unknown
  misc_feature (1)..( 8): Result.001 file - promoters60/1016426
ctctctcg

SEQ ID NO: 94679 - DNA, 8 bp, Unknown
  misc_feature (1)..( 8): Result.001 file - promoters60/1016468
ctctctcg

SEQ ID NO: 94680 - DNA, 10 bp, Unknown
  misc_feature (1)..( 10): Result.001 file - promoters60/1016468
ctacaacaaa

SEQ ID NO: 94681 - DNA, 10 bp, Unknown
  misc_feature (1)..( 10): Result.001 file - promoters60/1016468
gaaaaacaaa

SEQ ID NO: 94682 - DNA, 10 bp, Unknown
  misc_feature (1)..( 10): Result.001 file - promoters60/1016468
acggaacaaa

SEQ ID NO: 94683 - DNA, 10 bp, Unknown
  misc_feature (1)..( 10): Result.001 file - promoters60/1016468
gtcaaacaaa

SEQ ID NO: 94684 - DNA, 10 bp, Unknown
  misc_feature (1)..( 10): Result.001 file - promoters60/1016468
tttaaaaaaa

SEQ ID NO: 94685 - DNA, 10 bp, Unknown
  misc_feature (1)..( 10): Result.001 file - promoters60/1016468
tataagaaaa

SEQ ID NO: 94686 - DNA, 10 bp, Unknown
  misc_feature (1)..( 10): Result.001 file - promoters60/1016468
tatgagaaat

SEQ ID NO: 94687 - DNA, 11 bp, Unknown
  misc_feature (1)..( 11): Result.001 file - promoters60/1016468
ccactatataa

SEQ ID NO: 94688 - DNA, 11 bp, Unknown
  misc_feature (1)..( 11): Result.001 file - promoters60/1016468
ccattatatat

SEQ ID NO: 94689 - DNA, 11 bp, Unknown
  misc_feature (1)..( 11): Result.001 file - promoters60/1016468
caaccatataa

SEQ ID NO: 94690 - DNA, 11 bp, Unknown
  misc_feature (1)..( 11): Result.001 file - promoters60/1016468
cgcctatatat

SEQ ID NO: 94691 - DNA, 11 bp, Unknown
  misc_feature (1)..( 11): Result.001 file - promoters60/1016468
gtgagatataa

SEQ ID NO: 94692 - DNA, 11 bp, Unknown
  misc_feature (1)..( 11): Result.001 file - promoters60/1016468
cacatatatat

SEQ ID NO: 94693 - DNA, 11 bp, Unknown
  misc_feature (1)..( 11): Result.001 file - promoters60/1016468
gaattctttaa

SEQ ID NO: 94694 - DNA, 11 bp, Unknown
  misc_feature (1)..( 11): Result.001 file - promoters60/1016468
aaatccttaat

SEQ ID NO: 94695 - DNA, 11 bp, Unknown
  misc_feature (1)..( 11): Result.001 file - promoters60/1016468
taattattttg

SEQ ID NO: 94696 - DNA, 11 bp, Unknown
  misc_feature (1)..( 11): Result.001 file - promoters60/1016468
taattcttttc

SEQ ID NO: 94697 - DNA, 11 bp, Unknown
  misc_feature (1)..( 11): Result.001 file - promoters60/1016468
atattattagt

SEQ ID NO: 94698 - DNA, 11 bp, Unknown
  misc_feature (1)..( 11): Result.001 file - promoters60/1016468
taatgattttg

SEQ ID NO: 94699 - DNA, 9 bp, Unknown
  misc_feature (1)..( 9): Result.001 file - promoters60/1016468
tgtttgatt

SEQ ID NO: 94700 - DNA, 9 bp, Unknown
  misc_feature (1)..( 9): Result.001 file - promoters60/1016468
tatttcatt

SEQ ID NO: 94701 - DNA, 9 bp, Unknown
  misc_feature (1)..( 9): Result.001 file - promoters60/1016468
atttttatt

SEQ ID NO: 94702 - DNA, 9 bp, Unknown
  misc_feature (1)..( 9): Result.001 file - promoters60/1016468
tatatcaca

SEQ ID NO: 94703 - DNA, 9 bp, Unknown
  misc_feature (1)..( 9): Result.001 file - promoters60/1016468
tagtagatc

SEQ ID NO: 94704 - DNA, 9 bp, Unknown
  misc_feature (1)..( 9): Result.001 file - promoters60/1016468
ttttttaca

SEQ ID NO: 94705 - DNA, 11 bp, Unknown
  misc_feature (1)..( 11): Result.001 file - promoters60/1016468
ccttgagttta

SEQ ID NO: 94706 - DNA, 11 bp, Unknown
  misc_feature (1)..( 11): Result.001 file - promoters60/1016468
ttttgactttt

SEQ ID NO: 94707 - DNA, 11 bp, Unknown
  misc_feature (1)..( 11): Result.001 file - promoters60/1016468
tgttgaatttt

SEQ ID NO: 94708 - DNA, 11 bp, Unknown
  misc_feature (1)..( 11): Result.001 file - promoters60/1016468
cgttggcttct

SEQ ID NO: 94709 - DNA, 11 bp, Unknown
  misc_feature (1)..( 11): Result.001 file - promoters60/1016468
attctaatttt

SEQ ID NO: 94710 - DNA, 11 bp, Unknown
  misc_feature (1)..( 11): Result.001 file - promoters60/1016468
agttaactttg

SEQ ID NO: 94711 - DNA, 11 bp, Unknown
  misc_feature (1)..( 11): Result.001 file - promoters60/1016468
agtcaacttgt

SEQ ID NO: 94712 - DNA, 14 bp, Unknown
  misc_feature (1)..( 14): Result.001 file - promoters60/1016468
atattattagtagg

SEQ ID NO: 94713 - DNA, 14 bp, Unknown
  misc_feature (1)..( 14): Result.001 file - promoters60/1016468
ttattatattgaga

SEQ ID NO: 94714 - DNA, 14 bp, Unknown
  misc_feature (1)..( 14): Result.001 file - promoters60/1016468
atataattattttg

SEQ ID NO: 94715 - DNA, 14 bp, Unknown
  misc_feature (1)..( 14): Result.001 file - promoters60/1016468
ccttaattaccgat

SEQ ID NO: 94716 - DNA, 14 bp, Unknown
  misc_feature (1)..( 14): Result.001 file - promoters60/1016468
gattaattcttttc

SEQ ID NO: 94717 - DNA, 14 bp, Unknown
  misc_feature (1)..( 14): Result.001 file - promoters60/1016468
ttttaatgattttg

SEQ ID NO: 94718 - DNA, 9 bp, Unknown
  misc_feature (1)..( 9): Result.001 file - promoters60/1016468
aatgaaaaa

SEQ ID NO: 94719 - DNA, 9 bp, Unknown
  misc_feature (1)..( 9): Result.001 file - promoters60/1016468
aatgaaatt

SEQ ID NO: 94720 - DNA, 10 bp, Unknown
  misc_feature (1)..( 10): Result.001 file - promoters60/1016468
tatgagaaat

SEQ ID NO: 94721 - DNA, 10 bp, Unknown
  misc_feature (1)..( 10): Result.001 file - promoters60/1016468
aatgatattc

SEQ ID NO: 94722 - DNA, 10 bp, Unknown
  misc_feature (1)..( 10): Result.001 file - promoters60/1016468
aatgttattt

SEQ ID NO: 94723 - DNA, 10 bp, Unknown
  misc_feature (1)..( 10): Result.001 file - promoters60/1016468
ctatttattt

SEQ ID NO: 94724 - DNA, 13 bp, Unknown
  misc_feature (1)..( 13): Result.001 file - promoters60/1016468
cgttaatttttga

SEQ ID NO: 94725 - DNA, 13 bp, Unknown
  misc_feature (1)..( 13): Result.001 file - promoters60/1016468
ttctaattttcta

SEQ ID NO: 94726 - DNA, 13 bp, Unknown
  misc_feature (1)..( 13): Result.001 file - promoters60/1016468
gttgaattttttt

SEQ ID NO: 94727 - DNA, 13 bp, Unknown
  misc_feature (1)..( 13): Result.001 file - promoters60/1016468
agttaactttgta

SEQ ID NO: 94728 - DNA, 13 bp, Unknown
  misc_feature (1)..( 13): Result.001 file - promoters60/1016468
tcatcacttggta

SEQ ID NO: 94729 - DNA, 13 bp, Unknown
  misc_feature (1)..( 13): Result.001 file - promoters60/1016514
agtcaacttgtac

SEQ ID NO: 94730 - DNA, 9 bp, Unknown
  misc_feature (1)..( 9): Result.001 file - promoters60/1016514
taagaaaat

SEQ ID NO: 94731 - DNA, 9 bp, Unknown
  misc_feature (1)..( 9): Result.001 file - promoters60/1016514
taacaaaat

SEQ ID NO: 94732 - DNA, 9 bp, Unknown
  misc_feature (1)..( 9): Result.001 file - promoters60/1016514
aaagaaaaa

SEQ ID NO: 94733 - DNA, 10 bp, Unknown
  misc_feature (1)..( 10): Result.001 file - promoters60/1016514
gtagcatata

SEQ ID NO: 94734 - DNA, 10 bp, Unknown
  misc_feature (1)..( 10): Result.001 file - promoters60/1016514
gtagcaaata

SEQ ID NO: 94735 - DNA, 7 bp, Unknown
  misc_feature (1)..( 7): Result.001 file - promoters60/1016514
tttctgt

SEQ ID NO: 94736 - DNA, 7 bp, Unknown
  misc_feature (1)..( 7): Result.001 file - promoters60/1016514
tttgtgt

SEQ ID NO: 94737 - DNA, 9 bp, Unknown
  misc_feature (1)..( 9): Result.001 file - promoters60/1016514
atgttgaca

SEQ ID NO: 94738 - DNA, 9 bp, Unknown
  misc_feature (1)..( 9): Result.001 file - promoters60/1016514
atggtgaca

SEQ ID NO: 94739 - DNA, 8 bp, Unknown
  misc_feature (1)..( 8): Result.001 file - promoters60/1016514
atataaca

SEQ ID NO: 94740 - DNA, 8 bp, Unknown
  misc_feature (1)..( 8): Result.001 file - promoters60/1016514
atacaaca

SEQ ID NO: 94741 - DNA, 8 bp, Unknown
  misc_feature (1)..( 8): Result.001 file - promoters60/1016514
aaacttct

SEQ ID NO: 94742 - DNA, 8 bp, Unknown
  misc_feature (1)..( 8): Result.001 file - promoters60/1016514
aaaattct

SEQ ID NO: 94743 - DNA, 8 bp, Unknown
  misc_feature (1)..( 8): Result.001 file - promoters60/1016514
taatttta

SEQ ID NO: 94744 - DNA, 8 bp, Unknown
  misc_feature (1)..( 8): Result.001 file - promoters60/1016514
taatatta

SEQ ID NO: 94745 - DNA, 6 bp, Unknown
  misc_feature (1)..( 6): Result.001 file - promoters60/1016514
atacca

SEQ ID NO: 94746 - DNA, 6 bp, Unknown
  misc_feature (1)..( 6): Result.001 file - promoters60/1016514
atacca

SEQ ID NO: 94747 - DNA, 8 bp, Unknown
  misc_feature (1)..( 8): Result.001 file - promoters60/1016514
ttaatttt

SEQ ID NO: 94748 - DNA, 8 bp, Unknown
  misc_feature (1)..( 8): Result.001 file - promoters60/1016514
ttagtttt

SEQ ID NO: 94749 - DNA, 16 bp, Unknown
  misc_feature (1)..( 16): Result.001 file - promoters60/1016514
ttttctgaactagaag

SEQ ID NO: 94750 - DNA, 16 bp, Unknown
  misc_feature (1)..( 16): Result.001 file - promoters60/1016514
ttttccgaaatagtta

SEQ ID NO: 94751 - DNA, 16 bp, Unknown
  misc_feature (1)..( 16): Result.001 file - promoters60/1016514
ataattcaaataatta

SEQ ID NO: 94752 - DNA, 7 bp, Unknown
  misc_feature (1)..( 7): Result.001 file - promoters60/1016514
attttat

SEQ ID NO: 94753 - DNA, 7 bp, Unknown
  misc_feature (1)..( 7): Result.001 file - promoters60/1016514
attgtat

SEQ ID NO: 94754 - DNA, 6 bp, Unknown
  misc_feature (1)..( 6): Result.001 file - promoters60/1016514
tatata

SEQ ID NO: 94755 - DNA, 6 bp, Unknown
  misc_feature (1)..( 6): Result.001 file - promoters60/1016514
tatata

SEQ ID NO: 94756 - DNA, 6 bp, Unknown
  misc_feature (1)..( 6): Result.001 file - promoters60/1016514
atatat

SEQ ID NO: 94757 - DNA, 6 bp, Unknown
  misc_feature (1)..( 6): Result.001 file - promoters60/1016514
atatat

SEQ ID NO: 94758 - DNA, 7 bp, Unknown
  misc_feature (1)..( 7): Result.001 file - promoters60/1016514
atctttt

SEQ ID NO: 94759 - DNA, 7 bp, Unknown
  misc_feature (1)..( 7): Result.001 file - promoters60/1016514
atctttt

SEQ ID NO: 94760 - DNA, 9 bp, Unknown
  misc_feature (1)..( 9): Result.001 file - promoters60/1016514
tttacggtt

SEQ ID NO: 94761 - DNA, 9 bp, Unknown
  misc_feature (1)..( 9): Result.001 file - promoters60/1016514
tttaaggtt

SEQ ID NO: 94762 - DNA, 7 bp, Unknown
  misc_feature (1)..( 7): Result.001 file - promoters60/1016514
tatttgt

SEQ ID NO: 94763 - DNA, 7 bp, Unknown
  misc_feature (1)..( 7): Result.001 file - promoters60/1016514
tatatgt

SEQ ID NO: 94764 - DNA, 7 bp, Unknown
  misc_feature (1)..( 7): Result.001 file - promoters60/1016514
taatatt

SEQ ID NO: 94765 - DNA, 7 bp, Unknown
  misc_feature (1)..( 7): Result.001 file - promoters60/1016514
taaaatt

SEQ ID NO: 94766 - DNA, 8 bp, Unknown
  misc_feature (1)..( 8): Result.001 file - promoters60/1016514
ttatttta

SEQ ID NO: 94767 - DNA, 8 bp, Unknown
  misc_feature (1)..( 8): Result.001 file - promoters60/1016514
ttagttta

SEQ ID NO: 94768 - DNA, 6 bp, Unknown
  misc_feature (1)..( 6): Result.001 file - promoters60/1016514
ttaatg

SEQ ID NO: 94769 - DNA, 6 bp, Unknown
  misc_feature (1)..( 6): Result.001 file - promoters60/1016514
ttaatg

SEQ ID NO: 94770 - DNA, 11 bp, Unknown
  misc_feature (1)..( 11): Result.001 file - promoters60/1016514
atagaaatatc

SEQ ID NO: 94771 - DNA, 11 bp, Unknown
  misc_feature (1)..( 11): Result.001 file - promoters60/1016514
atagatatatc

SEQ ID NO: 94772 - DNA, 6 bp, Unknown
  misc_feature (1)..( 6): Result.001 file - promoters60/1016514
tatttg

SEQ ID NO: 94773 - DNA, 6 bp, Unknown
  misc_feature (1)..( 6): Result.001 file - promoters60/1016514
tatttg

SEQ ID NO: 94774 - DNA, 6 bp, Unknown
  misc_feature (1)..( 6): Result.001 file - promoters60/1016514
tttcaa

SEQ ID NO: 94775 - DNA, 6 bp, Unknown
  misc_feature (1)..( 6): Result.001 file - promoters60/1016514
tttcaa

SEQ ID NO: 94776 - DNA, 6 bp, Unknown
  misc_feature (1)..( 6): Result.001 file - promoters60/1016514
aacatt

SEQ ID NO: 94777 - DNA, 6 bp, Unknown
  misc_feature (1)..( 6): Result.001 file - promoters60/1016514
aacatt

SEQ ID NO: 94778 - DNA, 6 bp, Unknown
  misc_feature (1)..( 6): Result.001 file - promoters60/1016514
taaaaa

SEQ ID NO: 94779 - DNA, 6 bp, Unknown
  misc_feature (1)..( 6): Result.001 file - promoters60/1016514
taaaaa

SEQ ID NO: 94780 - DNA, 10 bp, Unknown
  misc_feature (1)..( 10): Result.001 file - promoters60/1016514
aaaattatat

SEQ ID NO: 94781 - DNA, 10 bp, Unknown
  misc_feature (1)..( 10): Result.001 file - promoters60/1016514
aaaatcatat

SEQ ID NO: 94782 - DNA, 6 bp, Unknown
  misc_feature (1)..( 6): Result.001 file - promoters60/1016514
ggaaaa

SEQ ID NO: 94783 - DNA, 6 bp, Unknown
  misc_feature (1)..( 6): Result.001 file - promoters60/1016514
ggaaaa

SEQ ID NO: 94784 - DNA, 6 bp, Unknown
  misc_feature (1)..( 6): Result.001 file - promoters60/1016514
aatttt

SEQ ID NO: 94785 - DNA, 6 bp, Unknown
  misc_feature (1)..( 6): Result.001 file - promoters60/1016514
aatttt

SEQ ID NO: 94786 - DNA, 6 bp, Unknown
  misc_feature (1)..( 6): Result.001 file - promoters60/1016514
ataatt

SEQ ID NO: 94787 - DNA, 6 bp, Unknown
  misc_feature (1)..( 6): Result.001 file - promoters60/1016514
ataatt

SEQ ID NO: 94788 - DNA, 7 bp, Unknown
  misc_feature (1)..( 7): Result.001 file - promoters60/1016514
ctataaa

SEQ ID NO: 94789 - DNA, 7 bp, Unknown
  misc_feature (1)..( 7): Result.001 file - promoters60/1016525
ctacaaa

SEQ ID NO: 94790 - DNA, 8 bp, Unknown
  misc_feature (1)..( 8): Result.001 file - promoters60/1016525
ctttttaa

SEQ ID NO: 94791 - DNA, 8 bp, Unknown
  misc_feature (1)..( 8): Result.001 file - promoters60/1016525
cttattat

SEQ ID NO: 94792 - DNA, 8 bp, Unknown
  misc_feature (1)..( 8): Result.001 file - promoters60/1016525
ttttgtaa

SEQ ID NO: 94793 - DNA, 14 bp, Unknown
  misc_feature (1)..( 14): Result.001 file - promoters60/1016525
cgataagtatctca

SEQ ID NO: 94794 - DNA, 14 bp, Unknown
  misc_feature (1)..( 14): Result.001 file - promoters60/1016525
atgaaaatatatca

SEQ ID NO: 94795 - DNA, 14 bp, Unknown
  misc_feature (1)..( 14): Result.001 file - promoters60/1016525
ttaaaaatataatt

SEQ ID NO: 94796 - DNA, 14 bp, Unknown
  misc_feature (1)..( 14): Result.001 file - promoters60/1016525
ttacaaattatcaa

SEQ ID NO: 94797 - DNA, 11 bp, Unknown
  misc_feature (1)..( 11): Result.001 file - promoters60/1016525
taaaaactaga

SEQ ID NO: 94798 - DNA, 11 bp, Unknown
  misc_feature (1)..( 11): Result.001 file - promoters60/1016525
gaaaaattagt

SEQ ID NO: 94799 - DNA, 11 bp, Unknown
  misc_feature (1)..( 11): Result.001 file - promoters60/1016525
aggctactaga

SEQ ID NO: 94800 - DNA, 11 bp, Unknown
  misc_feature (1)..( 11): Result.001 file - promoters60/1016525
taataactaat

SEQ ID NO: 94801 - DNA, 7 bp, Unknown
  misc_feature (1)..( 7): Result.001 file - promoters60/1016525
caataaa

SEQ ID NO: 94802 - DNA, 7 bp, Unknown
  misc_feature (1)..( 7): Result.001 file - promoters60/1016525
caataat

SEQ ID NO: 94803 - DNA, 7 bp, Unknown
  misc_feature (1)..( 7): Result.001 file - promoters60/1016525
caaaaaa

SEQ ID NO: 94804 - DNA, 7 bp, Unknown
  misc_feature (1)..( 7): Result.001 file - promoters60/1016525
taataaa

SEQ ID NO: 94805 - DNA, 6 bp, Unknown
  misc_feature (1)..( 6): Result.001 file - promoters60/1016525
aagata

SEQ ID NO: 94806 - DNA, 6 bp, Unknown
  misc_feature (1)..( 6): Result.001 file - promoters60/1016525
aagata

SEQ ID NO: 94807 - DNA, 6 bp, Unknown
  misc_feature (1)..( 6): Result.001 file - promoters60/1016525
aagata

SEQ ID NO: 94808 - DNA, 7 bp, Unknown
  misc_feature (1)..( 7): Result.001 file - promoters60/1016525
tttaaaa

SEQ ID NO: 94809 - DNA, 7 bp, Unknown
  misc_feature (1)..( 7): Result.001 file - promoters60/1016525
cttaaaa

SEQ ID NO: 94810 - DNA, 7 bp, Unknown
  misc_feature (1)..( 7): Result.001 file - promoters60/1016525
tttaaac

SEQ ID NO: 94811 - DNA, 7 bp, Unknown
  misc_feature (1)..( 7): Result.001 file - promoters60/1016525
aataaac

SEQ ID NO: 94812 - DNA, 7 bp, Unknown
  misc_feature (1)..( 7): Result.001 file - promoters60/1016525
tataaac

SEQ ID NO: 94813 - DNA, 7 bp, Unknown
  misc_feature (1)..( 7): Result.001 file - promoters60/1016525
aataaat

SEQ ID NO: 94814 - DNA, 8 bp, Unknown
  misc_feature (1)..( 8): Result.001 file - promoters60/1016525
agaaaaat

SEQ ID NO: 94815 - DNA, 8 bp, Unknown
  misc_feature (1)..( 8): Result.001 file - promoters60/1016525
aaaaaaat

SEQ ID NO: 94816 - DNA, 8 bp, Unknown
  misc_feature (1)..( 8): Result.001 file - promoters60/1016525
agaaaaaa

SEQ ID NO: 94817 - DNA, 9 bp, Unknown
  misc_feature (1)..( 9): Result.001 file - promoters60/1016525
attttaaaa

SEQ ID NO: 94818 - DNA, 9 bp, Unknown
  misc_feature (1)..( 9): Result.001 file - promoters60/1016525
attctaacg

SEQ ID NO: 94819 - DNA, 9 bp, Unknown
  misc_feature (1)..( 9): Result.001 file - promoters60/1016525
catttaaaa

SEQ ID NO: 94820 - DNA, 11 bp, Unknown
  misc_feature (1)..( 11): Result.001 file - promoters60/1016525
agaaaaacagg

SEQ ID NO: 94821 - DNA, 11 bp, Unknown
  misc_feature (1)..( 11): Result.001 file - promoters60/1016525
ataaaaacttt

SEQ ID NO: 94822 - DNA, 11 bp, Unknown
  misc_feature (1)..( 11): Result.001 file - promoters60/1016525
atataaacttt

SEQ ID NO: 94823 - DNA, 8 bp, Unknown
  misc_feature (1)..( 8): Result.001 file - promoters60/1016525
gctataaa

SEQ ID NO: 94824 - DNA, 8 bp, Unknown
  misc_feature (1)..( 8): Result.001 file - promoters60/1016525
tatataaa

SEQ ID NO: 94825 - DNA, 8 bp, Unknown
  misc_feature (1)..( 8): Result.001 file - promoters60/1016525
tatataat

SEQ ID NO: 94826 - DNA, 11 bp, Unknown
  misc_feature (1)..( 11): Result.001 file - promoters60/1016525
atgaaaatata

SEQ ID NO: 94827 - DNA, 11 bp, Unknown
  misc_feature (1)..( 11): Result.001 file - promoters60/1016525
ttaaaaatata

SEQ ID NO: 94828 - DNA, 11 bp, Unknown
  misc_feature (1)..( 11): Result.001 file - promoters60/1016525
ttacaaattat

SEQ ID NO: 94829 - DNA, 6 bp, Unknown
  misc_feature (1)..( 6): Result.001 file - promoters60/1016525
tttgaa

SEQ ID NO: 94830 - DNA, 6 bp, Unknown
  misc_feature (1)..( 6): Result.001 file - promoters60/1016525
tttgaa

SEQ ID NO: 94831 - DNA, 6 bp, Unknown
  misc_feature (1)..( 6): Result.001 file - promoters60/1016624
tttgaa

SEQ ID NO: 94832 - DNA, 7 bp, Unknown
  misc_feature (1)..( 7): Result.001 file - promoters60/1016624
ttgtttc

SEQ ID NO: 94833 - DNA, 7 bp, Unknown
  misc_feature (1)..( 7): Result.001 file - promoters60/1016624
ctgtttc

SEQ ID NO: 94834 - DNA, 7 bp, Unknown
  misc_feature (1)..( 7): Result.001 file - promoters60/1016624
ttgtttt

SEQ ID NO: 94835 - DNA, 8 bp, Unknown
  misc_feature (1)..( 8): Result.001 file - promoters60/1016624
gatctact

SEQ ID NO: 94836 - DNA, 8 bp, Unknown
  misc_feature (1)..( 8): Result.001 file - promoters60/1016624
tctctact

SEQ ID NO: 94837 - DNA, 8 bp, Unknown
  misc_feature (1)..( 8): Result.001 file - promoters60/1016624
gatctacc

SEQ ID NO: 94838 - DNA, 8 bp, Unknown
  misc_feature (1)..( 8): Result.001 file - promoters60/1016624
ttcaactt

SEQ ID NO: 94839 - DNA, 8 bp, Unknown
  misc_feature (1)..( 8): Result.001 file - promoters60/1016624
gtcaactt

SEQ ID NO: 94840 - DNA, 8 bp, Unknown
  misc_feature (1)..( 8): Result.001 file - promoters60/1016624
ttcaacga

SEQ ID NO: 94841 - DNA, 7 bp, Unknown
  misc_feature (1)..( 7): Result.001 file - promoters60/1016624
taatgaa

SEQ ID NO: 94842 - DNA, 7 bp, Unknown
  misc_feature (1)..( 7): Result.001 file - promoters60/1016624
aaatgaa

SEQ ID NO: 94843 - DNA, 7 bp, Unknown
  misc_feature (1)..( 7): Result.001 file - promoters60/1016624
aaaggaa

SEQ ID NO: 94844 - DNA, 8 bp, Unknown
  misc_feature (1)..( 8): Result.001 file - promoters60/1016624
tgaacatt

SEQ ID NO: 94845 - DNA, 8 bp, Unknown
  misc_feature (1)..( 8): Result.001 file - promoters60/1016624
tgaacaca

SEQ ID NO: 94846 - DNA, 8 bp, Unknown
  misc_feature (1)..( 8): Result.001 file - promoters60/1016624
ggaaaatt

SEQ ID NO: 94847 - DNA, 9 bp, Unknown
  misc_feature (1)..( 9): Result.001 file - promoters60/1016624
attctgaat

SEQ ID NO: 94848 - DNA, 9 bp, Unknown
  misc_feature (1)..( 9): Result.001 file - promoters60/1016624
cttcttaat

SEQ ID NO: 94849 - DNA, 9 bp, Unknown
  misc_feature (1)..( 9): Result.001 file - promoters60/1016624
cttcttcaa

SEQ ID NO: 94850 - DNA, 7 bp, Unknown
  misc_feature (1)..( 7): Result.001 file - promoters60/1016624
gttcttc

SEQ ID NO: 94851 - DNA, 7 bp, Unknown
  misc_feature (1)..( 7): Result.001 file - promoters60/1016624
cttcttc

SEQ ID NO: 94852 - DNA, 7 bp, Unknown
  misc_feature (1)..( 7): Result.001 file - promoters60/1016665
cttctta

SEQ ID NO: 94853 - DNA, 10 bp, Unknown
  misc_feature (1)..( 10): Result.001 file - promoters60/1016665
aatttatcat

SEQ ID NO: 94854 - DNA, 10 bp, Unknown
  misc_feature (1)..( 10): Result.001 file - promoters60/1016665
aatatatcat

SEQ ID NO: 94855 - DNA, 10 bp, Unknown
  misc_feature (1)..( 10): Result.001 file - promoters60/1016665
aatatatctc

SEQ ID NO: 94856 - DNA, 7 bp, Unknown
  misc_feature (1)..( 7): Result.001 file - promoters60/1016665
ttttgaa

SEQ ID NO: 94857 - DNA, 7 bp, Unknown
  misc_feature (1)..( 7): Result.001 file - promoters60/1016665
ttttgaa

SEQ ID NO: 94858 - DNA, 7 bp, Unknown
  misc_feature (1)..( 7): Result.001 file - promoters60/1016665
aacatat

SEQ ID NO: 94859 - DNA, 7 bp, Unknown
  misc_feature (1)..( 7): Result.001 file - promoters60/1016665
aacatat

SEQ ID NO: 94860 - DNA, 6 bp, Unknown
  misc_feature (1)..( 6): Result.001 file - promoters60/1016665
tttatt

SEQ ID NO: 94861 - DNA, 6 bp, Unknown
  misc_feature (1)..( 6): Result.001 file - promoters60/1016665
tttatt

SEQ ID NO: 94862 - DNA, 9 bp, Unknown
  misc_feature (1)..( 9): Result.001 file - promoters60/1016665
acaaccaca

SEQ ID NO: 94863 - DNA, 9 bp, Unknown
  misc_feature (1)..( 9): Result.001 file - promoters60/1016665
acaactaca

SEQ ID NO: 94864 - DNA, 7 bp, Unknown
  misc_feature (1)..( 7): Result.001 file - promoters60/1016665
tatatgt

SEQ ID NO: 94865 - DNA, 7 bp, Unknown
  misc_feature (1)..( 7): Result.001 file - promoters60/1016665
tatatgt

SEQ ID NO: 94866 - DNA, 6 bp, Unknown
  misc_feature (1)..( 6): Result.001 file - promoters60/1016665
cagaat

SEQ ID NO: 94867 - DNA, 6 bp, Unknown
  misc_feature (1)..( 6): Result.001 file - promoters60/1016665
cagaat

SEQ ID NO: 94868 - DNA, 6 bp, Unknown
  misc_feature (1)..( 6): Result.001 file - promoters60/1016665
aatttc

SEQ ID NO: 94869 - DNA, 6 bp, Unknown
  misc_feature (1)..( 6): Result.001 file - promoters60/1016665
aatttc

SEQ ID NO: 94870 - DNA, 6 bp, Unknown
  misc_feature (1)..( 6): Result.001 file - promoters60/1016665
ttttga

SEQ ID NO: 94871 - DNA, 6 bp, Unknown
  misc_feature (1)..( 6): Result.001 file - promoters60/1016665
ttttga

SEQ ID NO: 94872 - DNA, 6 bp, Unknown
  misc_feature (1)..( 6): Result.001 file - promoters60/1016665
aattaa

SEQ ID NO: 94873 - DNA, 6 bp, Unknown
  misc_feature (1)..( 6): Result.001 file - promoters60/1016665
aattaa

SEQ ID NO: 94874 - DNA, 6 bp, Unknown
  misc_feature (1)..( 6): Result.001 file - promoters60/1016665
ttgcta

SEQ ID NO: 94875 - DNA, 6 bp, Unknown
  misc_feature (1)..( 6): Result.001 file - promoters60/1016665
ttgcta

SEQ ID NO: 94876 - DNA, 10 bp, Unknown
  misc_feature (1)..( 10): Result.001 file - promoters60/1016665
tcttttactt

SEQ ID NO: 94877 - DNA, 10 bp, Unknown
  misc_feature (1)..( 10): Result.001 file - promoters60/1016665
tctttttctt

SEQ ID NO: 94878 - DNA, 7 bp, Unknown
  misc_feature (1)..( 7): Result.001 file - promoters60/1016665
tttagtg

SEQ ID NO: 94879 - DNA, 7 bp, Unknown
  misc_feature (1)..( 7): Result.001 file - promoters60/1016665
ttttgtg

SEQ ID NO: 94880 - DNA, 7 bp, Unknown
  misc_feature (1)..( 7): Result.001 file - promoters60/1016665
tgtgttc

SEQ ID NO: 94881 - DNA, 7 bp, Unknown
  misc_feature (1)..( 7): Result.001 file - promoters60/1016665
tgttttc

SEQ ID NO: 94882 - DNA, 6 bp, Unknown
  misc_feature (1)..( 6): Result.001 file - promoters60/1016665
atgttc

SEQ ID NO: 94883 - DNA, 6 bp, Unknown
  misc_feature (1)..( 6): Result.001 file - promoters60/1016665
atgttc

SEQ ID NO: 94884 - DNA, 11 bp, Unknown
  misc_feature (1)..( 11): Result.001 file - promoters60/1016665
gttttaattta

SEQ ID NO: 94885 - DNA, 11 bp, Unknown
  misc_feature (1)..( 11): Result.001 file - promoters60/1016665
gttttatttta

SEQ ID NO: 94886 - DNA, 6 bp, Unknown
  misc_feature (1)..( 6): Result.001 file - promoters60/1016665
aaaaat

SEQ ID NO: 94887 - DNA, 6 bp, Unknown
  misc_feature (1)..( 6): Result.001 file - promoters60/1016692
aaaaat

SEQ ID NO: 94888 - DNA, 11 bp, Unknown
  misc_feature (1)..( 11): Result.001 file - promoters60/1016692
aaagaatccaa

SEQ ID NO: 94889 - DNA, 11 bp, Unknown
  misc_feature (1)..( 11): Result.001 file - promoters60/1016692
acagaaaccaa

SEQ ID NO: 94890 - DNA, 11 bp, Unknown
  misc_feature (1)..( 11): Result.001 file - promoters60/1016692
aaagaaacgtc

SEQ ID NO: 94891 - DNA, 11 bp, Unknown
  misc_feature (1)..( 11): Result.001 file - promoters60/1016692
aaagaaagaaa

SEQ ID NO: 94892 - DNA, 9 bp, Unknown
  misc_feature (1)..( 9): Result.001 file - promoters60/1016692
tggtttatt

SEQ ID NO: 94893 - DNA, 9 bp, Unknown
  misc_feature (1)..( 9): Result.001 file - promoters60/1016692
ctatttatt

SEQ ID NO: 94894 - DNA, 9 bp, Unknown
  misc_feature (1)..( 9): Result.001 file - promoters60/1016692
ctaattatg

SEQ ID NO: 94895 - DNA, 9 bp, Unknown
  misc_feature (1)..( 9): Result.001 file - promoters60/1016692
gaaatgatg

SEQ ID NO: 94896 - DNA, 8 bp, Unknown
  misc_feature (1)..( 8): Result.001 file - promoters60/1016692
caaactta

SEQ ID NO: 94897 - DNA, 8 bp, Unknown
  misc_feature (1)..( 8): Result.001 file - promoters60/1016692
gaaagtta

SEQ ID NO: 94898 - DNA, 8 bp, Unknown
  misc_feature (1)..( 8): Result.001 file - promoters60/1016692
gaaagttt

SEQ ID NO: 94899 - DNA, 8 bp, Unknown
  misc_feature (1)..( 8): Result.001 file - promoters60/1016692
aaaaatta

SEQ ID NO: 94900 - DNA, 9 bp, Unknown
  misc_feature (1)..( 9): Result.001 file - promoters60/1016692
gaaacaagt

SEQ ID NO: 94901 - DNA, 9 bp, Unknown
  misc_feature (1)..( 9): Result.001 file - promoters60/1016692
aaaataaga

SEQ ID NO: 94902 - DNA, 9 bp, Unknown
  misc_feature (1)..( 9): Result.001 file - promoters60/1016692
ataattaga

SEQ ID NO: 94903 - DNA, 9 bp, Unknown
  misc_feature (1)..( 9): Result.001 file - promoters60/1016729
aaaatatct

SEQ ID NO: 94904 - DNA, 6 bp, Unknown
  misc_feature (1)..( 6): Result.001 file - promoters60/1016729
agattc

SEQ ID NO: 94905 - DNA, 6 bp, Unknown
  misc_feature (1)..( 6): Result.001 file - promoters60/1016729
agattc

SEQ ID NO: 94906 - DNA, 6 bp, Unknown
  misc_feature (1)..( 6): Result.001 file - promoters60/1016729
ttcata

SEQ ID NO: 94907 - DNA, 6 bp, Unknown
  misc_feature (1)..( 6): Result.001 file - promoters60/1016729
ttcata

SEQ ID NO: 94908 - DNA, 6 bp, Unknown
  misc_feature (1)..( 6): Result.001 file - promoters60/1016729
agcaac

SEQ ID NO: 94909 - DNA, 6 bp, Unknown
  misc_feature (1)..( 6): Result.001 file - promoters60/1016729
agcaac

SEQ ID NO: 94910 - DNA, 7 bp, Unknown
  misc_feature (1)..( 7): Result.001 file - promoters60/1016729
caaaaat

SEQ ID NO: 94911 - DNA, 7 bp, Unknown
  misc_feature (1)..( 7): Result.001 file - promoters60/1016729
caacaat

SEQ ID NO: 94912 - DNA, 6 bp, Unknown
  misc_feature (1)..( 6): Result.001 file - promoters60/1016729
attgtg

SEQ ID NO: 94913 - DNA, 6 bp, Unknown
  misc_feature (1)..( 6): Result.001 file - promoters60/1016729
attgtg

SEQ ID NO: 94914 - DNA, 11 bp, Unknown
  misc_feature (1)..( 11): Result.001 file - promoters60/1016729
gaaacgaacat

SEQ ID NO: 94915 - DNA, 11 bp, Unknown
  misc_feature (1)..( 11): Result.001 file - promoters60/1016729
gaaaccaacat

SEQ ID NO: 94916 - DNA, 6 bp, Unknown
  misc_feature (1)..( 6): Result.001 file - promoters60/1016729
gttttt

SEQ ID NO: 94917 - DNA, 6 bp, Unknown
  misc_feature (1)..( 6): Result.001 file - promoters60/1016729
gttttt

SEQ ID NO: 94918 - DNA, 7 bp, Unknown
  misc_feature (1)..( 7): Result.001 file - promoters60/1016729
cttcttg

SEQ ID NO: 94919 - DNA, 7 bp, Unknown
  misc_feature (1)..( 7): Result.001 file - promoters60/1016729
cttattg

SEQ ID NO: 94920 - DNA, 8 bp, Unknown
  misc_feature (1)..( 8): Result.001 file - promoters60/1016729
gatgcaaa

SEQ ID NO: 94921 - DNA, 8 bp, Unknown
  misc_feature (1)..( 8): Result.001 file - promoters60/1016729
gattcaaa

SEQ ID NO: 94922 - DNA, 8 bp, Unknown
  misc_feature (1)..( 8): Result.001 file - promoters60/1016729
tgtggaaa

SEQ ID NO: 94923 - DNA, 8 bp, Unknown
  misc_feature (1)..( 8): Result.001 file - promoters60/1016729
tgtggaaa

SEQ ID NO: 94924 - DNA, 7 bp, Unknown
  misc_feature (1)..( 7): Result.001 file - promoters60/1016729
ggcgtgt

SEQ ID NO: 94925 - DNA, 7 bp, Unknown
  misc_feature (1)..( 7): Result.001 file - promoters60/1016729
ggcgtgt

SEQ ID NO: 94926 - DNA, 6 bp, Unknown
  misc_feature (1)..( 6): Result.001 file - promoters60/1016729
tctatt

SEQ ID NO: 94927 - DNA, 6 bp, Unknown
  misc_feature (1)..( 6): Result.001 file - promoters60/1016729
tctatt

SEQ ID NO: 94928 - DNA, 8 bp, Unknown
  misc_feature (1)..( 8): Result.001 file - promoters60/1016729
tacctgat

SEQ ID NO: 94929 - DNA, 8 bp, Unknown
  misc_feature (1)..( 8): Result.001 file - promoters60/1016729
taccagat

SEQ ID NO: 94930 - DNA, 6 bp, Unknown
  misc_feature (1)..( 6): Result.001 file - promoters60/1016729
agatta

SEQ ID NO: 94931 - DNA, 6 bp, Unknown
  misc_feature (1)..( 6): Result.001 file - promoters60/1016771
agatta

SEQ ID NO: 94932 - DNA, 10 bp, Unknown
  misc_feature (1)..( 10): Result.001 file - promoters60/1016771
taaatcgtta

SEQ ID NO: 94933 - DNA, 10 bp, Unknown
  misc_feature (1)..( 10): Result.001 file - promoters60/1016771
taaatcttta

SEQ ID NO: 94934 - DNA, 10 bp, Unknown
  misc_feature (1)..( 10): Result.001 file - promoters60/1016771
agaatcatta

SEQ ID NO: 94935 - DNA, 10 bp, Unknown
  misc_feature (1)..( 10): Result.001 file - promoters60/1016771
gaaaccgtat

SEQ ID NO: 94936 - DNA, 10 bp, Unknown
  misc_feature (1)..( 10): Result.001 file - promoters60/1016771
gagagcatca

SEQ ID NO: 94937 - DNA, 10 bp, Unknown
  misc_feature (1)..( 10): Result.001 file - promoters60/1016771
ccaatcataa

SEQ ID NO: 94938 - DNA, 13 bp, Unknown
  misc_feature (1)..( 13): Result.001 file - promoters60/1016771
gtaatcaatccta

SEQ ID NO: 94939 - DNA, 13 bp, Unknown
  misc_feature (1)..( 13): Result.001 file - promoters60/1016771
aaaatgaattctt

SEQ ID NO: 94940 - DNA, 13 bp, Unknown
  misc_feature (1)..( 13): Result.001 file - promoters60/1016771
tgcatcaatgctt

SEQ ID NO: 94941 - DNA, 13 bp, Unknown
  misc_feature (1)..( 13): Result.001 file - promoters60/1016771
aaaacgaatggca

SEQ ID NO: 94942 - DNA, 13 bp, Unknown
  misc_feature (1)..( 13): Result.001 file - promoters60/1016771
gccattaatgttt

SEQ ID NO: 94943 - DNA, 13 bp, Unknown
  misc_feature (1)..( 13): Result.001 file - promoters60/1016814
atcattaatcctt

SEQ ID NO: 94944 - DNA, 17 bp, Unknown
  misc_feature (1)..( 17): Result.001 file - promoters60/1016814
tggtgataaatattcaa

SEQ ID NO: 94945 - DNA, 17 bp, Unknown
  misc_feature (1)..( 17): Result.001 file - promoters60/1016814
ctctggtatatatacaa

SEQ ID NO: 94946 - DNA, 17 bp, Unknown
  misc_feature (1)..( 17): Result.001 file - promoters60/1016814
atccataaaattttcca

SEQ ID NO: 94947 - DNA, 17 bp, Unknown
  misc_feature (1)..( 17): Result.001 file - promoters60/1016814
aaaatcaaaaaattatt

SEQ ID NO: 94948 - DNA, 17 bp, Unknown
  misc_feature (1)..( 17): Result.001 file - promoters60/1016814
ttgttaactatataaaa

SEQ ID NO: 94949 - DNA, 17 bp, Unknown
  misc_feature (1)..( 17): Result.001 file - promoters60/1016814
gtagagataatttttct

SEQ ID NO: 94950 - DNA, 17 bp, Unknown
  misc_feature (1)..( 17): Result.001 file - promoters60/1016814
aaaaacaaaaaataaca

SEQ ID NO: 94951 - DNA, 14 bp, Unknown
  misc_feature (1)..( 14): Result.001 file - promoters60/1016814
aggactcagaccag

SEQ ID NO: 94952 - DNA, 14 bp, Unknown
  misc_feature (1)..( 14): Result.001 file - promoters60/1016814
aggattcatcatct

SEQ ID NO: 94953 - DNA, 14 bp, Unknown
  misc_feature (1)..( 14): Result.001 file - promoters60/1016814
ctcattcatcttct

SEQ ID NO: 94954 - DNA, 14 bp, Unknown
  misc_feature (1)..( 14): Result.001 file - promoters60/1016814
ccacttctccgcct

SEQ ID NO: 94955 - DNA, 14 bp, Unknown
  misc_feature (1)..( 14): Result.001 file - promoters60/1016814
ttggatcttccctt

SEQ ID NO: 94956 - DNA, 14 bp, Unknown
  misc_feature (1)..( 14): Result.001 file - promoters60/1016814
aacatgcatttatg

SEQ ID NO: 94957 - DNA, 12 bp, Unknown
  misc_feature (1)..( 12): Result.001 file - promoters60/1016814
atacaaaaatgt

SEQ ID NO: 94958 - DNA, 12 bp, Unknown
  misc_feature (1)..( 12): Result.001 file - promoters60/1016814
gggaaaaaatca

SEQ ID NO: 94959 - DNA, 12 bp, Unknown
  misc_feature (1)..( 12): Result.001 file - promoters60/1016814
aaacaaaaaata

SEQ ID NO: 94960 - DNA, 12 bp, Unknown
  misc_feature (1)..( 12): Result.001 file - promoters60/1016814
aaagaaaagaca

SEQ ID NO: 94961 - DNA, 12 bp, Unknown
  misc_feature (1)..( 12): Result.001 file - promoters60/1016814
gtttaaaaaata

SEQ ID NO: 94962 - DNA, 12 bp, Unknown
  misc_feature (1)..( 12): Result.001 file - promoters60/1016886
atataaaaccaa

SEQ ID NO: 94963 - DNA, 11 bp, Unknown
  misc_feature (1)..( 11): Result.001 file - promoters60/1016886
gtgttgttccc

SEQ ID NO: 94964 - DNA, 11 bp, Unknown
  misc_feature (1)..( 11): Result.001 file - promoters60/1016886
ttgtttttcac

SEQ ID NO: 94965 - DNA, 11 bp, Unknown
  misc_feature (1)..( 11): Result.001 file - promoters60/1016886
acgttcttctt

SEQ ID NO: 94966 - DNA, 12 bp, Unknown
  misc_feature (1)..( 12): Result.001 file - promoters60/1016886
gcttttcttccc

SEQ ID NO: 94967 - DNA, 12 bp, Unknown
  misc_feature (1)..( 12): Result.001 file - promoters60/1016886
atgtattttaca

SEQ ID NO: 94968 - DNA, 12 bp, Unknown
  misc_feature (1)..( 12): Result.001 file - promoters60/1016915
ttacattttgct

SEQ ID NO: 94969 - DNA, 8 bp, Unknown
  misc_feature (1)..( 8): Result.001 file - promoters60/1016915
aaaataga

SEQ ID NO: 94970 - DNA, 8 bp, Unknown
  misc_feature (1)..( 8): Result.001 file - promoters60/1016915
aaaataag

SEQ ID NO: 94971 - DNA, 8 bp, Unknown
  misc_feature (1)..( 8): Result.001 file - promoters60/1016915
aaactaag

SEQ ID NO: 94972 - DNA, 12 bp, Unknown
  misc_feature (1)..( 12): Result.001 file - promoters60/1016915
ataagttagtca

SEQ ID NO: 94973 - DNA, 12 bp, Unknown
  misc_feature (1)..( 12): Result.001 file - promoters60/1016915
ataatttaatca

SEQ ID NO: 94974 - DNA, 6 bp, Unknown
  misc_feature (1)..( 6): Result.001 file - promoters60/1016915
acgaat

SEQ ID NO: 94975 - DNA, 6 bp, Unknown
  misc_feature (1)..( 6): Result.001 file - promoters60/1016915
acgaat

SEQ ID NO: 94976 - DNA, 6 bp, Unknown
  misc_feature (1)..( 6): Result.001 file - promoters60/1016915
gtacga

SEQ ID NO: 94977 - DNA, 6 bp, Unknown
  misc_feature (1)..( 6): Result.001 file - promoters60/1016915
gtacga

SEQ ID NO: 94978 - DNA, 7 bp, Unknown
  misc_feature (1)..( 7): Result.001 file - promoters60/1016915
atgaaaa

SEQ ID NO: 94979 - DNA, 7 bp, Unknown
  misc_feature (1)..( 7): Result.001 file - promoters60/1016915
atgaaaa

SEQ ID NO: 94980 - DNA, 8 bp, Unknown
  misc_feature (1)..( 8): Result.001 file - promoters60/1016915
gaatatat

SEQ ID NO: 94981 - DNA, 8 bp, Unknown
  misc_feature (1)..( 8): Result.001 file - promoters60/1016915
agatatat

SEQ ID NO: 94982 - DNA, 8 bp, Unknown
  misc_feature (1)..( 8): Result.001 file - promoters60/1016915
agagataa

SEQ ID NO: 94983 - DNA, 7 bp, Unknown
  misc_feature (1)..( 7): Result.001 file - promoters60/1016915
atgtttt

SEQ ID NO: 94984 - DNA, 7 bp, Unknown
  misc_feature (1)..( 7): Result.001 file - promoters60/1016915
atgtttt

SEQ ID NO: 94985 - DNA, 7 bp, Unknown
  misc_feature (1)..( 7): Result.001 file - promoters60/1016915
atttaat

SEQ ID NO: 94986 - DNA, 7 bp, Unknown
  misc_feature (1)..( 7): Result.001 file - promoters60/1016915
attaaat

SEQ ID NO: 94987 - DNA, 8 bp, Unknown
  misc_feature (1)..( 8): Result.001 file - promoters60/1016915
caaataat

SEQ ID NO: 94988 - DNA, 8 bp, Unknown
  misc_feature (1)..( 8): Result.001 file - promoters60/1016915
caaaaaat

SEQ ID NO: 94989 - DNA, 8 bp, Unknown
  misc_feature (1)..( 8): Result.001 file - promoters60/1016915
caattaaa

SEQ ID NO: 94990 - DNA, 6 bp, Unknown
  misc_feature (1)..( 6): Result.001 file - promoters60/1016915
aaatca

SEQ ID NO: 94991 - DNA, 6 bp, Unknown
  misc_feature (1)..( 6): Result.001 file - promoters60/1016915
aaatca

SEQ ID NO: 94992 - DNA, 7 bp, Unknown
  misc_feature (1)..( 7): Result.001 file - promoters60/1016915
caagtgt

SEQ ID NO: 94993 - DNA, 7 bp, Unknown
  misc_feature (1)..( 7): Result.001 file - promoters60/1016915
caaatgt

SEQ ID NO: 94994 - DNA, 6 bp, Unknown
  misc_feature (1)..( 6): Result.001 file - promoters60/1016915
aagatt

SEQ ID NO: 94995 - DNA, 6 bp, Unknown
  misc_feature (1)..( 6): Result.001 file - promoters60/1016915
aagatt

SEQ ID NO: 94996 - DNA, 6 bp, Unknown
  misc_feature (1)..( 6): Result.001 file - promoters60/1016915
aagaaa

SEQ ID NO: 94997 - DNA, 6 bp, Unknown
  misc_feature (1)..( 6): Result.001 file - promoters60/1016915
aagaaa

SEQ ID NO: 94998 - DNA, 6 bp, Unknown
  misc_feature (1)..( 6): Result.001 file - promoters60/1016915
aaaaag

SEQ ID NO: 94999 - DNA, 6 bp, Unknown
  misc_feature (1)..( 6): Result.001 file - promoters60/1016915
aaaaag

SEQ ID NO: 95000 - DNA, 8 bp, Unknown
  misc_feature (1)..( 8): Result.001 file - promoters60/1016915
caatcaaa

SEQ ID NO: 95001 - DNA, 8 bp, Unknown
  misc_feature (1)..( 8): Result.001 file - promoters60/1016915
caattaaa

SEQ ID NO: 95002 - DNA, 7 bp, Unknown
  misc_feature (1)..( 7): Result.001 file - promoters60/1016915
ttcgaaa

SEQ ID NO: 95003 - DNA, 7 bp, Unknown
  misc_feature (1)..( 7): Result.001 file - promoters60/1016915
ttcgaaa

SEQ ID NO: 95004 - DNA, 8 bp, Unknown
  misc_feature (1)..( 8): Result.001 file - promoters60/1016915
aaatgtcg

SEQ ID NO: 95005 - DNA, 8 bp, Unknown
  misc_feature (1)..( 8): Result.001 file - promoters60/1016915
aaatctcg

SEQ ID NO: 95006 - DNA, 6 bp, Unknown
  misc_feature (1)..( 6): Result.001 file - promoters60/1016915
tataaa

SEQ ID NO: 95007 - DNA, 6 bp, Unknown
  misc_feature (1)..( 6): Result.001 file - promoters60/1016915
tataaa

SEQ ID NO: 95008 - DNA, 8 bp, Unknown
  misc_feature (1)..( 8): Result.001 file - promoters60/1016915
taagttgt

SEQ ID NO: 95009 - DNA, 8 bp, Unknown
  misc_feature (1)..( 8): Result.001 file - promoters60/1016915
taaattgt

SEQ ID NO: 95010 - DNA, 6 bp, Unknown
  misc_feature (1)..( 6): Result.001 file - promoters60/1016915
atagat

SEQ ID NO: 95011 - DNA, 6 bp, Unknown
  misc_feature (1)..( 6): Result.001 file - promoters60/1016915
atagat

SEQ ID NO: 95012 - DNA, 6 bp, Unknown
  misc_feature (1)..( 6): Result.001 file - promoters60/1016915
ttttgg

SEQ ID NO: 95013 - DNA, 6 bp, Unknown
  misc_feature (1)..( 6): Result.001 file - promoters60/1016915
ttttgg

SEQ ID NO: 95014 - DNA, 6 bp, Unknown
  misc_feature (1)..( 6): Result.001 file - promoters60/1016915
taagat

SEQ ID NO: 95015 - DNA, 6 bp, Unknown
  misc_feature (1)..( 6): Result.001 file - promoters60/1016915
taagat

SEQ ID NO: 95016 - DNA, 6 bp, Unknown
  misc_feature (1)..( 6): Result.001 file - promoters60/1016915
aaagaa

SEQ ID NO: 95017 - DNA, 6 bp, Unknown
  misc_feature (1)..( 6): Result.001 file - promoters60/1016915
aaagaa

SEQ ID NO: 95018 - DNA, 12 bp, Unknown
  misc_feature (1)..( 12): Result.001 file - promoters60/1016915
aaaaacaaaaca

SEQ ID NO: 95019 - DNA, 12 bp, Unknown
  misc_feature (1)..( 12): Result.001 file - promoters60/1016915
aaacacaataca

SEQ ID NO: 95020 - DNA, 6 bp, Unknown
  misc_feature (1)..( 6): Result.001 file - promoters60/1016915
taaccc

SEQ ID NO: 95021 - DNA, 6 bp, Unknown
  misc_feature (1)..( 6): Result.001 file - promoters60/1016931
taaccc

SEQ ID NO: 95022 - DNA, 7 bp, Unknown
  misc_feature (1)..( 7): Result.001 file - promoters60/1016931
aaacaaa

SEQ ID NO: 95023 - DNA, 7 bp, Unknown
  misc_feature (1)..( 7): Result.001 file - promoters60/1016931
aaataaa

SEQ ID NO: 95024 - DNA, 7 bp, Unknown
  misc_feature (1)..( 7): Result.001 file - promoters60/1016931
gtatctt

SEQ ID NO: 95025 - DNA, 7 bp, Unknown
  misc_feature (1)..( 7): Result.001 file - promoters60/1016931
gtatctt

SEQ ID NO: 95026 - DNA, 6 bp, Unknown
  misc_feature (1)..( 6): Result.001 file - promoters60/1016931
ttatct

SEQ ID NO: 95027 - DNA, 6 bp, Unknown
  misc_feature (1)..( 6): Result.001 file - promoters60/1016931
ttatct

SEQ ID NO: 95028 - DNA, 6 bp, Unknown
  misc_feature (1)..( 6): Result.001 file - promoters60/1016931
ttatct

SEQ ID NO: 95029 - DNA, 8 bp, Unknown
  misc_feature (1)..( 8): Result.001 file - promoters60/1016931
aacaaatt

SEQ ID NO: 95030 - DNA, 8 bp, Unknown
  misc_feature (1)..( 8): Result.001 file - promoters60/1016931
aacgaatt

SEQ ID NO: 95031 - DNA, 7 bp, Unknown
  misc_feature (1)..( 7): Result.001 file - promoters60/1016931
tttgctt

SEQ ID NO: 95032 - DNA, 7 bp, Unknown
  misc_feature (1)..( 7): Result.001 file - promoters60/1016931
ttttctt

SEQ ID NO: 95033 - DNA, 10 bp, Unknown
  misc_feature (1)..( 10): Result.001 file - promoters60/1016931
atttttgtgt

SEQ ID NO: 95034 - DNA, 10 bp, Unknown
  misc_feature (1)..( 10): Result.001 file - promoters60/1016931
attattgttt

SEQ ID NO: 95035 - DNA, 10 bp, Unknown
  misc_feature (1)..( 10): Result.001 file - promoters60/1016931
gttactgttt

SEQ ID NO: 95036 - DNA, 6 bp, Unknown
  misc_feature (1)..( 6): Result.001 file - promoters60/1016931
tcagat

SEQ ID NO: 95037 - DNA, 6 bp, Unknown
  misc_feature (1)..( 6): Result.001 file - promoters60/1016931
tcagat

SEQ ID NO: 95038 - DNA, 7 bp, Unknown
  misc_feature (1)..( 7): Result.001 file - promoters60/1016931
taaataa

SEQ ID NO: 95039 - DNA, 7 bp, Unknown
  misc_feature (1)..( 7): Result.001 file - promoters60/1016931
taaataa

SEQ ID NO: 95040 - DNA, 6 bp, Unknown
  misc_feature (1)..( 6): Result.001 file - promoters60/1016931
ataaat

SEQ ID NO: 95041 - DNA, 6 bp, Unknown
  misc_feature (1)..( 6): Result.001 file - promoters60/1016931
ataaat

SEQ ID NO: 95042 - DNA, 7 bp, Unknown
  misc_feature (1)..( 7): Result.001 file - promoters60/1016931
tattttt

SEQ ID NO: 95043 - DNA, 7 bp, Unknown
  misc_feature (1)..( 7): Result.001 file - promoters60/1016931
tatgttt

SEQ ID NO: 95044 - DNA, 7 bp, Unknown
  misc_feature (1)..( 7): Result.001 file - promoters60/1016931
caaaaaa

SEQ ID NO: 95045 - DNA, 7 bp, Unknown
  misc_feature (1)..( 7): Result.001 file - promoters60/1016931
caaaaaa

SEQ ID NO: 95046 - DNA, 6 bp, Unknown
  misc_feature (1)..( 6): Result.001 file - promoters60/1016931
taaaca

SEQ ID NO: 95047 - DNA, 6 bp, Unknown
  misc_feature (1)..( 6): Result.001 file - promoters60/1016931
taaaca

SEQ ID NO: 95048 - DNA, 7 bp, Unknown
  misc_feature (1)..( 7): Result.001 file - promoters60/1016931
ttagatc

SEQ ID NO: 95049 - DNA, 7 bp, Unknown
  misc_feature (1)..( 7): Result.001 file - promoters60/1016931
ttagatc

SEQ ID NO: 95050 - DNA, 7 bp, Unknown
  misc_feature (1)..( 7): Result.001 file - promoters60/1016931
atcattt

SEQ ID NO: 95051 - DNA, 7 bp, Unknown
  misc_feature (1)..( 7): Result.001 file - promoters60/1016931
atctttt

SEQ ID NO: 95052 - DNA, 7 bp, Unknown
  misc_feature (1)..( 7): Result.001 file - promoters60/1016931
gatttat

SEQ ID NO: 95053 - DNA, 7 bp, Unknown
  misc_feature (1)..( 7): Result.001 file - promoters60/1016931
gatctat

SEQ ID NO: 95054 - DNA, 6 bp, Unknown
  misc_feature (1)..( 6): Result.001 file - promoters60/1016931
ttttca

SEQ ID NO: 95055 - DNA, 6 bp, Unknown
  misc_feature (1)..( 6): Result.001 file - promoters60/1016931
ttttca

SEQ ID NO: 95056 - DNA, 7 bp, Unknown
  misc_feature (1)..( 7): Result.001 file - promoters60/1016931
cgagcaa

SEQ ID NO: 95057 - DNA, 7 bp, Unknown
  misc_feature (1)..( 7): Result.001 file - promoters60/1016931
cgaacaa

SEQ ID NO: 95058 - DNA, 6 bp, Unknown
  misc_feature (1)..( 6): Result.001 file - promoters60/1016931
tatcta

SEQ ID NO: 95059 - DNA, 6 bp, Unknown
  misc_feature (1)..( 6): Result.001 file - promoters60/1016951
tatcta

SEQ ID NO: 95060 - DNA, 7 bp, Unknown
  misc_feature (1)..( 7): Result.001 file - promoters60/1016951
tgatttt

SEQ ID NO: 95061 - DNA, 7 bp, Unknown
  misc_feature (1)..( 7): Result.001 file - promoters60/1016951
agatttt

SEQ ID NO: 95062 - DNA, 7 bp, Unknown
  misc_feature (1)..( 7): Result.001 file - promoters60/1016951
agatttc

SEQ ID NO: 95063 - DNA, 7 bp, Unknown
  misc_feature (1)..( 7): Result.001 file - promoters60/1016951
caaacac

SEQ ID NO: 95064 - DNA, 7 bp, Unknown
  misc_feature (1)..( 7): Result.001 file - promoters60/1016951
caaacag

SEQ ID NO: 95065 - DNA, 7 bp, Unknown
  misc_feature (1)..( 7): Result.001 file - promoters60/1016951
aaaacac

SEQ ID NO: 95066 - DNA, 7 bp, Unknown
  misc_feature (1)..( 7): Result.001 file - promoters60/1016951
ttaaata

SEQ ID NO: 95067 - DNA, 7 bp, Unknown
  misc_feature (1)..( 7): Result.001 file - promoters60/1016951
ttatata

SEQ ID NO: 95068 - DNA, 7 bp, Unknown
  misc_feature (1)..( 7): Result.001 file - promoters60/1016951
atacata

SEQ ID NO: 95069 - DNA, 7 bp, Unknown
  misc_feature (1)..( 7): Result.001 file - promoters60/1016951
atatatt

SEQ ID NO: 95070 - DNA, 7 bp, Unknown
  misc_feature (1)..( 7): Result.001 file - promoters60/1016951
atatatc

SEQ ID NO: 95071 - DNA, 7 bp, Unknown
  misc_feature (1)..( 7): Result.001 file - promoters60/1016951
atacata

SEQ ID NO: 95072 - DNA, 6 bp, Unknown
  misc_feature (1)..( 6): Result.001 file - promoters60/1016951
aatttt

SEQ ID NO: 95073 - DNA, 6 bp, Unknown
  misc_feature (1)..( 6): Result.001 file - promoters60/1016951
aatttt

SEQ ID NO: 95074 - DNA, 7 bp, Unknown
  misc_feature (1)..( 7): Result.001 file - promoters60/1016951
aatgttt

SEQ ID NO: 95075 - DNA, 7 bp, Unknown
  misc_feature (1)..( 7): Result.001 file - promoters60/1016951
aacttaa

SEQ ID NO: 95076 - DNA, 7 bp, Unknown
  misc_feature (1)..( 7): Result.001 file - promoters60/1016951
aacgtaa

SEQ ID NO: 95077 - DNA, 7 bp, Unknown
  misc_feature (1)..( 7): Result.001 file - promoters60/1016951
aacataa

SEQ ID NO: 95078 - DNA, 8 bp, Unknown
  misc_feature (1)..( 8): Result.001 file - promoters60/1016951
atacataa

SEQ ID NO: 95079 - DNA, 8 bp, Unknown
  misc_feature (1)..( 8): Result.001 file - promoters60/1016951
ttacctaa

SEQ ID NO: 95080 - DNA, 8 bp, Unknown
  misc_feature (1)..( 8): Result.001 file - promoters60/1017020
atatatat

SEQ ID NO: 95081 - DNA, 9 bp, Unknown
  misc_feature (1)..( 9): Result.001 file - promoters60/1017020
caaaaacat

SEQ ID NO: 95082 - DNA, 9 bp, Unknown
  misc_feature (1)..( 9): Result.001 file - promoters60/1017020
gaaagacaa

SEQ ID NO: 95083 - DNA, 9 bp, Unknown
  misc_feature (1)..( 9): Result.001 file - promoters60/1017020
aaaagattt

SEQ ID NO: 95084 - DNA, 9 bp, Unknown
  misc_feature (1)..( 9): Result.001 file - promoters60/1017020
ataagattg

SEQ ID NO: 95085 - DNA, 8 bp, Unknown
  misc_feature (1)..( 8): Result.001 file - promoters60/1017020
ttaatatg

SEQ ID NO: 95086 - DNA, 8 bp, Unknown
  misc_feature (1)..( 8): Result.001 file - promoters60/1017020
ttaatagc

SEQ ID NO: 95087 - DNA, 8 bp, Unknown
  misc_feature (1)..( 8): Result.001 file - promoters60/1017020
gtaatagc

SEQ ID NO: 95088 - DNA, 14 bp, Unknown
  misc_feature (1)..( 14): Result.001 file - promoters60/1017020
tccagaaaaagttc

SEQ ID NO: 95089 - DNA, 14 bp, Unknown
  misc_feature (1)..( 14): Result.001 file - promoters60/1017020
ttgattcaaaattc

SEQ ID NO: 95090 - DNA, 14 bp, Unknown
  misc_feature (1)..( 14): Result.001 file - promoters60/1017020
ttgaatcaatattt

SEQ ID NO: 95091 - DNA, 10 bp, Unknown
  misc_feature (1)..( 10): Result.001 file - promoters60/1017020
ctatactttg

SEQ ID NO: 95092 - DNA, 10 bp, Unknown
  misc_feature (1)..( 10): Result.001 file - promoters60/1017020
caatatttta

SEQ ID NO: 95093 - DNA, 10 bp, Unknown
  misc_feature (1)..( 10): Result.001 file - promoters60/1017041
ctatgctttg

SEQ ID NO: 95094 - DNA, 8 bp, Unknown
  misc_feature (1)..( 8): Result.001 file - promoters60/1017041
caagtttc

SEQ ID NO: 95095 - DNA, 8 bp, Unknown
  misc_feature (1)..( 8): Result.001 file - promoters60/1017041
caattttt

SEQ ID NO: 95096 - DNA, 8 bp, Unknown
  misc_feature (1)..( 8): Result.001 file - promoters60/1017041
agagtttc

SEQ ID NO: 95097 - DNA, 6 bp, Unknown
  misc_feature (1)..( 6): Result.001 file - promoters60/1017041
attatg

SEQ ID NO: 95098 - DNA, 6 bp, Unknown
  misc_feature (1)..( 6): Result.001 file - promoters60/1017041
attatg

SEQ ID NO: 95099 - DNA, 7 bp, Unknown
  misc_feature (1)..( 7): Result.001 file - promoters60/1017041
attgggc

SEQ ID NO: 95100 - DNA, 7 bp, Unknown
  misc_feature (1)..( 7): Result.001 file - promoters60/1017041
attcggc

SEQ ID NO: 95101 - DNA, 9 bp, Unknown
  misc_feature (1)..( 9): Result.001 file - promoters60/1017041
ttctatgga

SEQ ID NO: 95102 - DNA, 9 bp, Unknown
  misc_feature (1)..( 9): Result.001 file - promoters60/1017041
ttccatgga

SEQ ID NO: 95103 - DNA, 6 bp, Unknown
  misc_feature (1)..( 6): Result.001 file - promoters60/1017041
aacagt

SEQ ID NO: 95104 - DNA, 6 bp, Unknown
  misc_feature (1)..( 6): Result.001 file - promoters60/1017041
aacagt

SEQ ID NO: 95105 - DNA, 8 bp, Unknown
  misc_feature (1)..( 8): Result.001 file - promoters60/1017041
cagtgatg

SEQ ID NO: 95106 - DNA, 8 bp, Unknown
  misc_feature (1)..( 8): Result.001 file - promoters60/1017041
cagagatg

SEQ ID NO: 95107 - DNA, 6 bp, Unknown
  misc_feature (1)..( 6): Result.001 file - promoters60/1017041
attaga

SEQ ID NO: 95108 - DNA, 6 bp, Unknown
  misc_feature (1)..( 6): Result.001 file - promoters60/1017041
attaga

SEQ ID NO: 95109 - DNA, 6 bp, Unknown
  misc_feature (1)..( 6): Result.001 file - promoters60/1017041
gaatca

SEQ ID NO: 95110 - DNA, 6 bp, Unknown
  misc_feature (1)..( 6): Result.001 file - promoters60/1017041
gaatca

SEQ ID NO: 95111 - DNA, 7 bp, Unknown
  misc_feature (1)..( 7): Result.001 file - promoters60/1017041
tccggtt

SEQ ID NO: 95112 - DNA, 7 bp, Unknown
  misc_feature (1)..( 7): Result.001 file - promoters60/1017041
tccagtt

SEQ ID NO: 95113 - DNA, 6 bp, Unknown
  misc_feature (1)..( 6): Result.001 file - promoters60/1017041
tttccg

SEQ ID NO: 95114 - DNA, 6 bp, Unknown
  misc_feature (1)..( 6): Result.001 file - promoters60/1017041
tttccg

SEQ ID NO: 95115 - DNA, 6 bp, Unknown
  misc_feature (1)..( 6): Result.001 file - promoters60/1017041
ataaat

SEQ ID NO: 95116 - DNA, 6 bp, Unknown
  misc_feature (1)..( 6): Result.001 file - promoters60/1017041
ataaat

SEQ ID NO: 95117 - DNA, 6 bp, Unknown
  misc_feature (1)..( 6): Result.001 file - promoters60/1017041
aaccct

SEQ ID NO: 95118 - DNA, 6 bp, Unknown
  misc_feature (1)..( 6): Result.001 file - promoters60/1017046
aaccct

SEQ ID NO: 95119 - DNA, 8 bp, Unknown
  misc_feature (1)..( 8): Result.001 file - promoters60/1017046
taatattt

SEQ ID NO: 95120 - DNA, 8 bp, Unknown
  misc_feature (1)..( 8): Result.001 file - promoters60/1017046
caattttt

SEQ ID NO: 95121 - DNA, 8 bp, Unknown
  misc_feature (1)..( 8): Result.001 file - promoters60/1017046
taatattt

SEQ ID NO: 95122 - DNA, 8 bp, Unknown
  misc_feature (1)..( 8): Result.001 file - promoters60/1017046
aatacttt

SEQ ID NO: 95123 - DNA, 8 bp, Unknown
  misc_feature (1)..( 8): Result.001 file - promoters60/1017046
attacttt

SEQ ID NO: 95124 - DNA, 8 bp, Unknown
  misc_feature (1)..( 8): Result.001 file - promoters60/1017046
aatatttt

SEQ ID NO: 95125 - DNA, 7 bp, Unknown
  misc_feature (1)..( 7): Result.001 file - promoters60/1017046
cttgaat

SEQ ID NO: 95126 - DNA, 7 bp, Unknown
  misc_feature (1)..( 7): Result.001 file - promoters60/1017046
cttgaat

SEQ ID NO: 95127 - DNA, 7 bp, Unknown
  misc_feature (1)..( 7): Result.001 file - promoters60/1017046
ttttttc

SEQ ID NO: 95128 - DNA, 7 bp, Unknown
  misc_feature (1)..( 7): Result.001 file - promoters60/1017046
tttattc

SEQ ID NO: 95129 - DNA, 6 bp, Unknown
  misc_feature (1)..( 6): Result.001 file - promoters60/1017046
ggtttt

SEQ ID NO: 95130 - DNA, 6 bp, Unknown
  misc_feature (1)..( 6): Result.001 file - promoters60/1017046
ggtttt

SEQ ID NO: 95131 - DNA, 9 bp, Unknown
  misc_feature (1)..( 9): Result.001 file - promoters60/1017046
cctttttac

SEQ ID NO: 95132 - DNA, 9 bp, Unknown
  misc_feature (1)..( 9): Result.001 file - promoters60/1017046
gttttctac

SEQ ID NO: 95133 - DNA, 9 bp, Unknown
  misc_feature (1)..( 9): Result.001 file - promoters60/1017046
cctttttct

SEQ ID NO: 95134 - DNA, 6 bp, Unknown
  misc_feature (1)..( 6): Result.001 file - promoters60/1017046
ttttaa

SEQ ID NO: 95135 - DNA, 6 bp, Unknown
  misc_feature (1)..( 6): Result.001 file - promoters60/1017046
ttttaa

SEQ ID NO: 95136 - DNA, 7 bp, Unknown
  misc_feature (1)..( 7): Result.001 file - promoters60/1017046
aaaaagt

SEQ ID NO: 95137 - DNA, 7 bp, Unknown
  misc_feature (1)..( 7): Result.001 file - promoters60/1017046
aaatagt

SEQ ID NO: 95138 - DNA, 8 bp, Unknown
  misc_feature (1)..( 8): Result.001 file - promoters60/1017046
taaattgg

SEQ ID NO: 95139 - DNA, 8 bp, Unknown
  misc_feature (1)..( 8): Result.001 file - promoters60/1017046
taaatttc

SEQ ID NO: 95140 - DNA, 8 bp, Unknown
  misc_feature (1)..( 8): Result.001 file - promoters60/1017046
taactttc

SEQ ID NO: 95141 - DNA, 7 bp, Unknown
  misc_feature (1)..( 7): Result.001 file - promoters60/1017046
agcaaca

SEQ ID NO: 95142 - DNA, 7 bp, Unknown
  misc_feature (1)..( 7): Result.001 file - promoters60/1017046
agccaca

SEQ ID NO: 95143 - DNA, 14 bp, Unknown
  misc_feature (1)..( 14): Result.001 file - promoters60/1017046
atttccgtttcttt

SEQ ID NO: 95144 - DNA, 14 bp, Unknown
  misc_feature (1)..( 14): Result.001 file - promoters60/1017046
ttaataatttattt

SEQ ID NO: 95145 - DNA, 14 bp, Unknown
  misc_feature (1)..( 14): Result.001 file - promoters60/1017046
ttaacaattttttt

SEQ ID NO: 95146 - DNA, 7 bp, Unknown
  misc_feature (1)..( 7): Result.001 file - promoters60/1017046
atatttt

SEQ ID NO: 95147 - DNA, 7 bp, Unknown
  misc_feature (1)..( 7): Result.001 file - promoters60/1017046
ataattt

SEQ ID NO: 95148 - DNA, 7 bp, Unknown
  misc_feature (1)..( 7): Result.001 file - promoters60/1017046
tttactt

SEQ ID NO: 95149 - DNA, 7 bp, Unknown
  misc_feature (1)..( 7): Result.001 file - promoters60/1017046
ttttctt

SEQ ID NO: 95150 - DNA, 7 bp, Unknown
  misc_feature (1)..( 7): Result.001 file - promoters60/1017046
aatattt

SEQ ID NO: 95151 - DNA, 7 bp, Unknown
  misc_feature (1)..( 7): Result.001 file - promoters60/1017046
aatattt

SEQ ID NO: 95152 - DNA, 7 bp, Unknown
  misc_feature (1)..( 7): Result.001 file - promoters60/1017046
ttttttt

SEQ ID NO: 95153 - DNA, 7 bp, Unknown
  misc_feature (1)..( 7): Result.001 file - promoters60/1017046
tttattt

SEQ ID NO: 95154 - DNA, 6 bp, Unknown
  misc_feature (1)..( 6): Result.001 file - promoters60/1017046
attttt

SEQ ID NO: 95155 - DNA, 6 bp, Unknown
  misc_feature (1)..( 6): Result.001 file - promoters60/1017046
attttt

SEQ ID NO: 95156 - DNA, 8 bp, Unknown
  misc_feature (1)..( 8): Result.001 file - promoters60/1017046
catttttt

SEQ ID NO: 95157 - DNA, 8 bp, Unknown
  misc_feature (1)..( 8): Result.001 file - promoters60/1017046
catctttt

SEQ ID NO: 95158 - DNA, 10 bp, Unknown
  misc_feature (1)..( 10): Result.001 file - promoters60/1017046
tcgggatgga

SEQ ID NO: 95159 - DNA, 10 bp, Unknown
  misc_feature (1)..( 10): Result.001 file - promoters60/1017046
atgggttgga

SEQ ID NO: 95160 - DNA, 10 bp, Unknown
  misc_feature (1)..( 10): Result.001 file - promoters60/1017046
atggcttgca

SEQ ID NO: 95161 - DNA, 10 bp, Unknown
  misc_feature (1)..( 10): Result.001 file - promoters60/1017046
aaacaatgga

SEQ ID NO: 95162 - DNA, 10 bp, Unknown
  misc_feature (1)..( 10): Result.001 file - promoters60/1017046
aaacaaagga

SEQ ID NO: 95163 - DNA, 12 bp, Unknown
  misc_feature (1)..( 12): Result.001 file - promoters60/1017046
tagatttattaa

SEQ ID NO: 95164 - DNA, 12 bp, Unknown
  misc_feature (1)..( 12): Result.001 file - promoters60/1017046
tagaattactaa

SEQ ID NO: 95165 - DNA, 7 bp, Unknown
  misc_feature (1)..( 7): Result.001 file - promoters60/1017046
taataat

SEQ ID NO: 95166 - DNA, 7 bp, Unknown
  misc_feature (1)..( 7): Result.001 file - promoters60/1017046
taataat

SEQ ID NO: 95167 - DNA, 6 bp, Unknown
  misc_feature (1)..( 6): Result.001 file - promoters60/1017046
atattt

SEQ ID NO: 95168 - DNA, 6 bp, Unknown
  misc_feature (1)..( 6): Result.001 file - promoters60/1017046
atattt

SEQ ID NO: 95169 - DNA, 7 bp, Unknown
  misc_feature (1)..( 7): Result.001 file - promoters60/1017046
tatccaa

SEQ ID NO: 95170 - DNA, 7 bp, Unknown
  misc_feature (1)..( 7): Result.001 file - promoters60/1017046
tatacaa

SEQ ID NO: 95171 - DNA, 7 bp, Unknown
  misc_feature (1)..( 7): Result.001 file - promoters60/1017046
tataatt

SEQ ID NO: 95172 - DNA, 7 bp, Unknown
  misc_feature (1)..( 7): Result.001 file - promoters60/1017046
tatgatt

SEQ ID NO: 95173 - DNA, 6 bp, Unknown
  misc_feature (1)..( 6): Result.001 file - promoters60/1017046
aaaaaa

SEQ ID NO: 95174 - DNA, 6 bp, Unknown
  misc_feature (1)..( 6): Result.001 file - promoters60/1017046
aaaaaa

SEQ ID NO: 95175 - DNA, 7 bp, Unknown
  misc_feature (1)..( 7): Result.001 file - promoters60/1017046
aagagaa

SEQ ID NO: 95176 - DNA, 7 bp, Unknown
  misc_feature (1)..( 7): Result.001 file - promoters60/1017050
aagtgaa

SEQ ID NO: 95177 - DNA, 7 bp, Unknown
  misc_feature (1)..( 7): Result.001 file - promoters60/1017050
ttattgt

SEQ ID NO: 95178 - DNA, 7 bp, Unknown
  misc_feature (1)..( 7): Result.001 file - promoters60/1017050
atattgt

SEQ ID NO: 95179 - DNA, 7 bp, Unknown
  misc_feature (1)..( 7): Result.001 file - promoters60/1017050
atattga

SEQ ID NO: 95180 - DNA, 7 bp, Unknown
  misc_feature (1)..( 7): Result.001 file - promoters60/1017050
agaatcg

SEQ ID NO: 95181 - DNA, 7 bp, Unknown
  misc_feature (1)..( 7): Result.001 file - promoters60/1017050
agaatcg

SEQ ID NO: 95182 - DNA, 7 bp, Unknown
  misc_feature (1)..( 7): Result.001 file - promoters60/1017050
tctaatg

SEQ ID NO: 95183 - DNA, 7 bp, Unknown
  misc_feature (1)..( 7): Result.001 file - promoters60/1017050
tctgatg

SEQ ID NO: 95184 - DNA, 12 bp, Unknown
  misc_feature (1)..( 12): Result.001 file - promoters60/1017050
atgattatatga

SEQ ID NO: 95185 - DNA, 12 bp, Unknown
  misc_feature (1)..( 12): Result.001 file - promoters60/1017050
ttgattacatga

SEQ ID NO: 95186 - DNA, 12 bp, Unknown
  misc_feature (1)..( 12): Result.001 file - promoters60/1017050
ttgatttagggt

SEQ ID NO: 95187 - DNA, 6 bp, Unknown
  misc_feature (1)..( 6): Result.001 file - promoters60/1017050
tacaca

SEQ ID NO: 95188 - DNA, 6 bp, Unknown
  misc_feature (1)..( 6): Result.001 file - promoters60/1017050
tacaca

SEQ ID NO: 95189 - DNA, 7 bp, Unknown
  misc_feature (1)..( 7): Result.001 file - promoters60/1017050
ttgaaat

SEQ ID NO: 95190 - DNA, 7 bp, Unknown
  misc_feature (1)..( 7): Result.001 file - promoters60/1017050
ttgcaat

SEQ ID NO: 95191 - DNA, 6 bp, Unknown
  misc_feature (1)..( 6): Result.001 file - promoters60/1017050
tgattt

SEQ ID NO: 95192 - DNA, 6 bp, Unknown
  misc_feature (1)..( 6): Result.001 file - promoters60/1017050
tgattt

SEQ ID NO: 95193 - DNA, 6 bp, Unknown
  misc_feature (1)..( 6): Result.001 file - promoters60/1017050
acttct

SEQ ID NO: 95194 - DNA, 6 bp, Unknown
  misc_feature (1)..( 6): Result.001 file - promoters60/1017050
acttct

SEQ ID NO: 95195 - DNA, 7 bp, Unknown
  misc_feature (1)..( 7): Result.001 file - promoters60/1017050
ttttggg

SEQ ID NO: 95196 - DNA, 7 bp, Unknown
  misc_feature (1)..( 7): Result.001 file - promoters60/1017050
tttaggg

SEQ ID NO: 95197 - DNA, 6 bp, Unknown
  misc_feature (1)..( 6): Result.001 file - promoters60/1017050
tacata

SEQ ID NO: 95198 - DNA, 6 bp, Unknown
  misc_feature (1)..( 6): Result.001 file - promoters60/1017050
tacata

SEQ ID NO: 95199 - DNA, 7 bp, Unknown
  misc_feature (1)..( 7): Result.001 file - promoters60/1017050
ttgatat

SEQ ID NO: 95200 - DNA, 7 bp, Unknown
  misc_feature (1)..( 7): Result.001 file - promoters60/1017050
ttgatat

SEQ ID NO: 95201 - DNA, 6 bp, Unknown
  misc_feature (1)..( 6): Result.001 file - promoters60/1017050
catctg

SEQ ID NO: 95202 - DNA, 6 bp, Unknown
  misc_feature (1)..( 6): Result.001 file - promoters60/1017050
catctg

SEQ ID NO: 95203 - DNA, 9 bp, Unknown
  misc_feature (1)..( 9): Result.001 file - promoters60/1017050
ttgctgtag

SEQ ID NO: 95204 - DNA, 9 bp, Unknown
  misc_feature (1)..( 9): Result.001 file - promoters60/1017050
ttgatgtag

SEQ ID NO: 95205 - DNA, 8 bp, Unknown
  misc_feature (1)..( 8): Result.001 file - promoters60/1017050
ttgagttt

SEQ ID NO: 95206 - DNA, 8 bp, Unknown
  misc_feature (1)..( 8): Result.001 file - promoters60/1017050
ttgagttt

SEQ ID NO: 95207 - DNA, 7 bp, Unknown
  misc_feature (1)..( 7): Result.001 file - promoters60/1017050
gttctgt

SEQ ID NO: 95208 - DNA, 7 bp, Unknown
  misc_feature (1)..( 7): Result.001 file - promoters60/1017094
gttttgt

SEQ ID NO: 95209 - DNA, 7 bp, Unknown
  misc_feature (1)..( 7): Result.001 file - promoters60/1017094
cgaaatt

SEQ ID NO: 95210 - DNA, 7 bp, Unknown
  misc_feature (1)..( 7): Result.001 file - promoters60/1017094
cgagatt

SEQ ID NO: 95211 - DNA, 7 bp, Unknown
  misc_feature (1)..( 7): Result.001 file - promoters60/1017094
cgatatt

SEQ ID NO: 95212 - DNA, 7 bp, Unknown
  misc_feature (1)..( 7): Result.001 file - promoters60/1017094
tgatatt

SEQ ID NO: 95213 - DNA, 8 bp, Unknown
  misc_feature (1)..( 8): Result.001 file - promoters60/1017094
aaaattaa

SEQ ID NO: 95214 - DNA, 8 bp, Unknown
  misc_feature (1)..( 8): Result.001 file - promoters60/1017094
aaaattcc

SEQ ID NO: 95215 - DNA, 8 bp, Unknown
  misc_feature (1)..( 8): Result.001 file - promoters60/1017094
aaaataat

SEQ ID NO: 95216 - DNA, 8 bp, Unknown
  misc_feature (1)..( 8): Result.001 file - promoters60/1017094
aaagttct

SEQ ID NO: 95217 - DNA, 8 bp, Unknown
  misc_feature (1)..( 8): Result.001 file - promoters60/1017094
aattatat

SEQ ID NO: 95218 - DNA, 8 bp, Unknown
  misc_feature (1)..( 8): Result.001 file - promoters60/1017094
tattgtat

SEQ ID NO: 95219 - DNA, 8 bp, Unknown
  misc_feature (1)..( 8): Result.001 file - promoters60/1017094
aattgtat

SEQ ID NO: 95220 - DNA, 8 bp, Unknown
  misc_feature (1)..( 8): Result.001 file - promoters60/1017094
tattatag

SEQ ID NO: 95221 - DNA, 13 bp, Unknown
  misc_feature (1)..( 13): Result.001 file - promoters60/1017094
ttaacagagacat

SEQ ID NO: 95222 - DNA, 13 bp, Unknown
  misc_feature (1)..( 13): Result.001 file - promoters60/1017094
ttcctagatacag

SEQ ID NO: 95223 - DNA, 13 bp, Unknown
  misc_feature (1)..( 13): Result.001 file - promoters60/1017094
gattccgatccag

SEQ ID NO: 95224 - DNA, 13 bp, Unknown
  misc_feature (1)..( 13): Result.001 file - promoters60/1017131
ttcttagctacgt

SEQ ID NO: 95225 - DNA, 10 bp, Unknown
  misc_feature (1)..( 10): Result.001 file - promoters60/1017131
attaataaag

SEQ ID NO: 95226 - DNA, 10 bp, Unknown
  misc_feature (1)..( 10): Result.001 file - promoters60/1017131
attaataaaa

SEQ ID NO: 95227 - DNA, 10 bp, Unknown
  misc_feature (1)..( 10): Result.001 file - promoters60/1017131
aacaataaaa

SEQ ID NO: 95228 - DNA, 10 bp, Unknown
  misc_feature (1)..( 10): Result.001 file - promoters60/1017131
actaaaaaaa

SEQ ID NO: 95229 - DNA, 12 bp, Unknown
  misc_feature (1)..( 12): Result.001 file - promoters60/1017131
tttggataaaac

SEQ ID NO: 95230 - DNA, 12 bp, Unknown
  misc_feature (1)..( 12): Result.001 file - promoters60/1017131
gaaaagtaaaac

SEQ ID NO: 95231 - DNA, 12 bp, Unknown
  misc_feature (1)..( 12): Result.001 file - promoters60/1017131
tttgaataaaag

SEQ ID NO: 95232 - DNA, 12 bp, Unknown
  misc_feature (1)..( 12): Result.001 file - promoters60/1017131
aagggataaaag

SEQ ID NO: 95233 - DNA, 12 bp, Unknown
  misc_feature (1)..( 12): Result.001 file - promoters60/1017131
cttggatataat

SEQ ID NO: 95234 - DNA, 10 bp, Unknown
  misc_feature (1)..( 10): Result.001 file - promoters60/1017131
ttggataaaa

SEQ ID NO: 95235 - DNA, 10 bp, Unknown
  misc_feature (1)..( 10): Result.001 file - promoters60/1017131
ttggatataa

SEQ ID NO: 95236 - DNA, 10 bp, Unknown
  misc_feature (1)..( 10): Result.001 file - promoters60/1017131
agggataaaa

SEQ ID NO: 95237 - DNA, 10 bp, Unknown
  misc_feature (1)..( 10): Result.001 file - promoters60/1017282
ttgaataaaa

SEQ ID NO: 95238 - DNA, 10 bp, Unknown
  misc_feature (1)..( 10): Result.001 file - promoters60/1017282
caatccaaag

SEQ ID NO: 95239 - DNA, 10 bp, Unknown
  misc_feature (1)..( 10): Result.001 file - promoters60/1017282
aaatcgaaat

SEQ ID NO: 95240 - DNA, 10 bp, Unknown
  misc_feature (1)..( 10): Result.001 file - promoters60/1017282
aaaaccaaag

SEQ ID NO: 95241 - DNA, 10 bp, Unknown
  misc_feature (1)..( 10): Result.001 file - promoters60/1017282
aaatcgttag

SEQ ID NO: 95242 - DNA, 10 bp, Unknown
  misc_feature (1)..( 10): Result.001 file - promoters60/1017282
gaatcgatag

SEQ ID NO: 95243 - DNA, 10 bp, Unknown
  misc_feature (1)..( 10): Result.001 file - promoters60/1017282
aaatagatat

SEQ ID NO: 95244 - DNA, 10 bp, Unknown
  misc_feature (1)..( 10): Result.001 file - promoters60/1017282
aaagagatta

SEQ ID NO: 95245 - DNA, 10 bp, Unknown
  misc_feature (1)..( 10): Result.001 file - promoters60/1017282
aaatcgttag

SEQ ID NO: 95246 - DNA, 10 bp, Unknown
  misc_feature (1)..( 10): Result.001 file - promoters60/1017282
gaatcgatag

SEQ ID NO: 95247 - DNA, 10 bp, Unknown
  misc_feature (1)..( 10): Result.001 file - promoters60/1017282
aaatcgaaat

SEQ ID NO: 95248 - DNA, 10 bp, Unknown
  misc_feature (1)..( 10): Result.001 file - promoters60/1017282
aaatagatat

SEQ ID NO: 95249 - DNA, 10 bp, Unknown
  misc_feature (1)..( 10): Result.001 file - promoters60/1017282
aaagagatta

SEQ ID NO: 95250 - DNA, 10 bp, Unknown
  misc_feature (1)..( 10): Result.001 file - promoters60/1017286
caagagaaga

SEQ ID NO: 95251 - DNA, 10 bp, Unknown
  misc_feature (1)..( 10): Result.001 file - promoters60/1017286
aaaaaaatca

SEQ ID NO: 95252 - DNA, 10 bp, Unknown
  misc_feature (1)..( 10): Result.001 file - promoters60/1017286
aaaagaatca

SEQ ID NO: 95253 - DNA, 10 bp, Unknown
  misc_feature (1)..( 10): Result.001 file - promoters60/1017286
aaaataatat

SEQ ID NO: 95254 - DNA, 10 bp, Unknown
  misc_feature (1)..( 10): Result.001 file - promoters60/1017286
aaaaaaattc

SEQ ID NO: 95255 - DNA, 8 bp, Unknown
  misc_feature (1)..( 8): Result.001 file - promoters60/1017286
taatatgc

SEQ ID NO: 95256 - DNA, 8 bp, Unknown
  misc_feature (1)..( 8): Result.001 file - promoters60/1017286
caatatgt

SEQ ID NO: 95257 - DNA, 8 bp, Unknown
  misc_feature (1)..( 8): Result.001 file - promoters60/1017286
caatattt

SEQ ID NO: 95258 - DNA, 8 bp, Unknown
  misc_feature (1)..( 8): Result.001 file - promoters60/1017286
atatatgt

SEQ ID NO: 95259 - DNA, 12 bp, Unknown
  misc_feature (1)..( 12): Result.001 file - promoters60/1017286
atcttaaacaat

SEQ ID NO: 95260 - DNA, 12 bp, Unknown
  misc_feature (1)..( 12): Result.001 file - promoters60/1017286
gaagaaaaaaat

SEQ ID NO: 95261 - DNA, 12 bp, Unknown
  misc_feature (1)..( 12): Result.001 file - promoters60/1017286
ttctaaaataat

SEQ ID NO: 95262 - DNA, 12 bp, Unknown
  misc_feature (1)..( 12): Result.001 file - promoters60/1017286
ttctaactatat

SEQ ID NO: 95263 - DNA, 10 bp, Unknown
  misc_feature (1)..( 10): Result.001 file - promoters60/1017286
acaaacttat

SEQ ID NO: 95264 - DNA, 10 bp, Unknown
  misc_feature (1)..( 10): Result.001 file - promoters60/1017286
tcaaaattat

SEQ ID NO: 95265 - DNA, 10 bp, Unknown
  misc_feature (1)..( 10): Result.001 file - promoters60/1017286
acaatatttg

SEQ ID NO: 95266 - DNA, 10 bp, Unknown
  misc_feature (1)..( 10): Result.001 file - promoters60/1017286
tcaatatgtg

SEQ ID NO: 95267 - DNA, 10 bp, Unknown
  misc_feature (1)..( 10): Result.001 file - promoters60/1017286
tcaatagatc

SEQ ID NO: 95268 - DNA, 12 bp, Unknown
  misc_feature (1)..( 12): Result.001 file - promoters60/1017286
gatcttttctcg

SEQ ID NO: 95269 - DNA, 12 bp, Unknown
  misc_feature (1)..( 12): Result.001 file - promoters60/1017286
gatttttttttt

SEQ ID NO: 95270 - DNA, 12 bp, Unknown
  misc_feature (1)..( 12): Result.001 file - promoters60/1017286
gaacttgtctcc

SEQ ID NO: 95271 - DNA, 12 bp, Unknown
  misc_feature (1)..( 12): Result.001 file - promoters60/1017286
agaaaagtctcc

SEQ ID NO: 95272 - DNA, 9 bp, Unknown
  misc_feature (1)..( 9): Result.001 file - promoters60/1017286
cttttctcg

SEQ ID NO: 95273 - DNA, 9 bp, Unknown
  misc_feature (1)..( 9): Result.001 file - promoters60/1017286
tttttttcg

SEQ ID NO: 95274 - DNA, 9 bp, Unknown
  misc_feature (1)..( 9): Result.001 file - promoters60/1017286
cttgtctcc

SEQ ID NO: 95275 - DNA, 9 bp, Unknown
  misc_feature (1)..( 9): Result.001 file - promoters60/1017316
aaagtctcc

SEQ ID NO: 95276 - DNA, 10 bp, Unknown
  misc_feature (1)..( 10): Result.001 file - promoters60/1017316
tcaatttgaa

SEQ ID NO: 95277 - DNA, 10 bp, Unknown
  misc_feature (1)..( 10): Result.001 file - promoters60/1017316
aaaatttgat

SEQ ID NO: 95278 - DNA, 10 bp, Unknown
  misc_feature (1)..( 10): Result.001 file - promoters60/1017316
ttcattttta

SEQ ID NO: 95279 - DNA, 10 bp, Unknown
  misc_feature (1)..( 10): Result.001 file - promoters60/1017316
aaaaattgat

SEQ ID NO: 95280 - DNA, 11 bp, Unknown
  misc_feature (1)..( 11): Result.001 file - promoters60/1017316
tgaaaatcatc

SEQ ID NO: 95281 - DNA, 11 bp, Unknown
  misc_feature (1)..( 11): Result.001 file - promoters60/1017316
agaaaatttga

SEQ ID NO: 95282 - DNA, 11 bp, Unknown
  misc_feature (1)..( 11): Result.001 file - promoters60/1017316
tataaattcat

SEQ ID NO: 95283 - DNA, 11 bp, Unknown
  misc_feature (1)..( 11): Result.001 file - promoters60/1017316
tgataataata

SEQ ID NO: 95284 - DNA, 10 bp, Unknown
  misc_feature (1)..( 10): Result.001 file - promoters60/1017316
tttgtgtgtt

SEQ ID NO: 95285 - DNA, 10 bp, Unknown
  misc_feature (1)..( 10): Result.001 file - promoters60/1017316
tttttgtttg

SEQ ID NO: 95286 - DNA, 10 bp, Unknown
  misc_feature (1)..( 10): Result.001 file - promoters60/1017316
tttgtctgtt

SEQ ID NO: 95287 - DNA, 12 bp, Unknown
  misc_feature (1)..( 12): Result.001 file - promoters60/1017316
aaactcttaatt

SEQ ID NO: 95288 - DNA, 12 bp, Unknown
  misc_feature (1)..( 12): Result.001 file - promoters60/1017316
ggtaaattaatt

SEQ ID NO: 95289 - DNA, 12 bp, Unknown
  misc_feature (1)..( 12): Result.001 file - promoters60/1017316
aaattcttaatg

SEQ ID NO: 95290 - DNA, 11 bp, Unknown
  misc_feature (1)..( 11): Result.001 file - promoters60/1017316
ttgggctatat

SEQ ID NO: 95291 - DNA, 11 bp, Unknown
  misc_feature (1)..( 11): Result.001 file - promoters60/1017316
atgggctttat

SEQ ID NO: 95292 - DNA, 11 bp, Unknown
  misc_feature (1)..( 11): Result.001 file - promoters60/1017316
atgggcttata

SEQ ID NO: 95293 - DNA, 11 bp, Unknown
  misc_feature (1)..( 11): Result.001 file - promoters60/1017316
atgggcaaaat

SEQ ID NO: 95294 - DNA, 9 bp, Unknown
  misc_feature (1)..( 9): Result.001 file - promoters60/1017316
tttttactt

SEQ ID NO: 95295 - DNA, 9 bp, Unknown
  misc_feature (1)..( 9): Result.001 file - promoters60/1017316
ctttgactc

SEQ ID NO: 95296 - DNA, 9 bp, Unknown
  misc_feature (1)..( 9): Result.001 file - promoters60/1017316
tttttactt

SEQ ID NO: 95297 - DNA, 7 bp, Unknown
  misc_feature (1)..( 7): Result.001 file - promoters60/1017316
ttacttt

SEQ ID NO: 95298 - DNA, 7 bp, Unknown
  misc_feature (1)..( 7): Result.001 file - promoters60/1017316
ttactta

SEQ ID NO: 95299 - DNA, 7 bp, Unknown
  misc_feature (1)..( 7): Result.001 file - promoters60/1017316
ttacttt

SEQ ID NO: 95300 - DNA, 9 bp, Unknown
  misc_feature (1)..( 9): Result.001 file - promoters60/1017316
taatttcaa

SEQ ID NO: 95301 - DNA, 9 bp, Unknown
  misc_feature (1)..( 9): Result.001 file - promoters60/1017316
atgtttcaa

SEQ ID NO: 95302 - DNA, 9 bp, Unknown
  misc_feature (1)..( 9): Result.001 file - promoters60/1017358
atgtgtcag

SEQ ID NO: 95303 - DNA, 11 bp, Unknown
  misc_feature (1)..( 11): Result.001 file - promoters60/1017358
cattatatata

SEQ ID NO: 95304 - DNA, 11 bp, Unknown
  misc_feature (1)..( 11): Result.001 file - promoters60/1017358
acatatataaa

SEQ ID NO: 95305 - DNA, 11 bp, Unknown
  misc_feature (1)..( 11): Result.001 file - promoters60/1017358
gcctatatata

SEQ ID NO: 95306 - DNA, 11 bp, Unknown
  misc_feature (1)..( 11): Result.001 file - promoters60/1017358
ccttataaata

SEQ ID NO: 95307 - DNA, 11 bp, Unknown
  misc_feature (1)..( 11): Result.001 file - promoters60/1017358
tcttatatctt

SEQ ID NO: 95308 - DNA, 11 bp, Unknown
  misc_feature (1)..( 11): Result.001 file - promoters60/1017358
tgagatataat

SEQ ID NO: 95309 - DNA, 11 bp, Unknown
  misc_feature (1)..( 11): Result.001 file - promoters60/1017434
ccttaaaaacc

SEQ ID NO: 95310 - DNA, 12 bp, Unknown
  misc_feature (1)..( 12): Result.001 file - promoters60/1017434
agaaaatacccg

SEQ ID NO: 95311 - DNA, 12 bp, Unknown
  misc_feature (1)..( 12): Result.001 file - promoters60/1017434
aaaaattactct

SEQ ID NO: 95312 - DNA, 12 bp, Unknown
  misc_feature (1)..( 12): Result.001 file - promoters60/1017434
aagaataaccgt

SEQ ID NO: 95313 - DNA, 12 bp, Unknown
  misc_feature (1)..( 12): Result.001 file - promoters60/1017434
agaaaattcttg

SEQ ID NO: 95314 - DNA, 12 bp, Unknown
  misc_feature (1)..( 12): Result.001 file - promoters60/1017434
aagaagtaaagg

SEQ ID NO: 95315 - DNA, 12 bp, Unknown
  misc_feature (1)..( 12): Result.001 file - promoters60/1017434
acaaactgttgg

SEQ ID NO: 95316 - DNA, 12 bp, Unknown
  misc_feature (1)..( 12): Result.001 file - promoters60/1017434
ggccataaaaag

SEQ ID NO: 95317 - DNA, 12 bp, Unknown
  misc_feature (1)..( 12): Result.001 file - promoters60/1017434
tttattaaaaaa

SEQ ID NO: 95318 - DNA, 12 bp, Unknown
  misc_feature (1)..( 12): Result.001 file - promoters60/1017434
tttcttaaaagc

SEQ ID NO: 95319 - DNA, 13 bp, Unknown
  misc_feature (1)..( 13): Result.001 file - promoters60/1017434
cgagctaataaag

SEQ ID NO: 95320 - DNA, 13 bp, Unknown
  misc_feature (1)..( 13): Result.001 file - promoters60/1017434
tattttaaaacaa

SEQ ID NO: 95321 - DNA, 13 bp, Unknown
  misc_feature (1)..( 13): Result.001 file - promoters60/1017476
cgtttcaataaag

SEQ ID NO: 95322 - DNA, 7 bp, Unknown
  misc_feature (1)..( 7): Result.001 file - promoters60/1017476
ttaaata

SEQ ID NO: 95323 - DNA, 7 bp, Unknown
  misc_feature (1)..( 7): Result.001 file - promoters60/1017476
ttatata

SEQ ID NO: 95324 - DNA, 12 bp, Unknown
  misc_feature (1)..( 12): Result.001 file - promoters60/1017476
ttggatttcttt

SEQ ID NO: 95325 - DNA, 12 bp, Unknown
  misc_feature (1)..( 12): Result.001 file - promoters60/1017476
aagaatttgttt

SEQ ID NO: 95326 - DNA, 12 bp, Unknown
  misc_feature (1)..( 12): Result.001 file - promoters60/1017476
agaaattgcgcc

SEQ ID NO: 95327 - DNA, 8 bp, Unknown
  misc_feature (1)..( 8): Result.001 file - promoters60/1017476
aaaaaact

SEQ ID NO: 95328 - DNA, 8 bp, Unknown
  misc_feature (1)..( 8): Result.001 file - promoters60/1017476
aaagaacg

SEQ ID NO: 95329 - DNA, 8 bp, Unknown
  misc_feature (1)..( 8): Result.001 file - promoters60/1017476
aaagaaac

SEQ ID NO: 95330 - DNA, 7 bp, Unknown
  misc_feature (1)..( 7): Result.001 file - promoters60/1017476
tttttga

SEQ ID NO: 95331 - DNA, 7 bp, Unknown
  misc_feature (1)..( 7): Result.001 file - promoters60/1017476
tttgtga

SEQ ID NO: 95332 - DNA, 6 bp, Unknown
  misc_feature (1)..( 6): Result.001 file - promoters60/1017476
gtttgg

SEQ ID NO: 95333 - DNA, 6 bp, Unknown
  misc_feature (1)..( 6): Result.001 file - promoters60/1017476
gtttgg

SEQ ID NO: 95334 - DNA, 8 bp, Unknown
  misc_feature (1)..( 8): Result.001 file - promoters60/1017476
aaggtttt

SEQ ID NO: 95335 - DNA, 8 bp, Unknown
  misc_feature (1)..( 8): Result.001 file - promoters60/1017476
aaggtttg

SEQ ID NO: 95336 - DNA, 8 bp, Unknown
  misc_feature (1)..( 8): Result.001 file - promoters60/1017476
ttggtttt

SEQ ID NO: 95337 - DNA, 9 bp, Unknown
  misc_feature (1)..( 9): Result.001 file - promoters60/1017476
ttttatttt

SEQ ID NO: 95338 - DNA, 9 bp, Unknown
  misc_feature (1)..( 9): Result.001 file - promoters60/1017476
tcatatttt

SEQ ID NO: 95339 - DNA, 9 bp, Unknown
  misc_feature (1)..( 9): Result.001 file - promoters60/1017476
tttcattta

SEQ ID NO: 95340 - DNA, 8 bp, Unknown
  misc_feature (1)..( 8): Result.001 file - promoters60/1017476
tgaaatta

SEQ ID NO: 95341 - DNA, 8 bp, Unknown
  misc_feature (1)..( 8): Result.001 file - promoters60/1017476
tgagatta

SEQ ID NO: 95342 - DNA, 6 bp, Unknown
  misc_feature (1)..( 6): Result.001 file - promoters60/1017476
gaaggt

SEQ ID NO: 95343 - DNA, 6 bp, Unknown
  misc_feature (1)..( 6): Result.001 file - promoters60/1017476
gaaggt

SEQ ID NO: 95344 - DNA, 8 bp, Unknown
  misc_feature (1)..( 8): Result.001 file - promoters60/1017476
aaaaaaaa

SEQ ID NO: 95345 - DNA, 8 bp, Unknown
  misc_feature (1)..( 8): Result.001 file - promoters60/1017476
aaaagaaa

SEQ ID NO: 95346 - DNA, 7 bp, Unknown
  misc_feature (1)..( 7): Result.001 file - promoters60/1017476
ttactct

SEQ ID NO: 95347 - DNA, 7 bp, Unknown
  misc_feature (1)..( 7): Result.001 file - promoters60/1017476
ttaatct

SEQ ID NO: 95348 - DNA, 6 bp, Unknown
  misc_feature (1)..( 6): Result.001 file - promoters60/1017476
atcaga

SEQ ID NO: 95349 - DNA, 6 bp, Unknown
  misc_feature (1)..( 6): Result.001 file - promoters60/1017476
atcaga

SEQ ID NO: 95350 - DNA, 6 bp, Unknown
  misc_feature (1)..( 6): Result.001 file - promoters60/1017476
acgaat

SEQ ID NO: 95351 - DNA, 6 bp, Unknown
  misc_feature (1)..( 6): Result.001 file - promoters60/1017476
acgaat

SEQ ID NO: 95352 - DNA, 7 bp, Unknown
  misc_feature (1)..( 7): Result.001 file - promoters60/1017476
gacatcg

SEQ ID NO: 95353 - DNA, 7 bp, Unknown
  misc_feature (1)..( 7): Result.001 file - promoters60/1017476
gacgtcg

SEQ ID NO: 95354 - DNA, 6 bp, Unknown
  misc_feature (1)..( 6): Result.001 file - promoters60/1017476
gaccat

SEQ ID NO: 95355 - DNA, 6 bp, Unknown
  misc_feature (1)..( 6): Result.001 file - promoters60/1017476
gaccat

SEQ ID NO: 95356 - DNA, 7 bp, Unknown
  misc_feature (1)..( 7): Result.001 file - promoters60/1017476
ttcgaga

SEQ ID NO: 95357 - DNA, 7 bp, Unknown
  misc_feature (1)..( 7): Result.001 file - promoters60/1017552
ttcgaga

SEQ ID NO: 95358 - DNA, 10 bp, Unknown
  misc_feature (1)..( 10): Result.001 file - promoters60/1017552
agaattataa

SEQ ID NO: 95359 - DNA, 10 bp, Unknown
  misc_feature (1)..( 10): Result.001 file - promoters60/1017552
aacattgtaa

SEQ ID NO: 95360 - DNA, 10 bp, Unknown
  misc_feature (1)..( 10): Result.001 file - promoters60/1017552
agagttatgc

SEQ ID NO: 95361 - DNA, 6 bp, Unknown
  misc_feature (1)..( 6): Result.001 file - promoters60/1017552
ggaaaa

SEQ ID NO: 95362 - DNA, 6 bp, Unknown
  misc_feature (1)..( 6): Result.001 file - promoters60/1017552
ggaaaa

SEQ ID NO: 95363 - DNA, 6 bp, Unknown
  misc_feature (1)..( 6): Result.001 file - promoters60/1017552
ggaaaa

SEQ ID NO: 95364 - DNA, 7 bp, Unknown
  misc_feature (1)..( 7): Result.001 file - promoters60/1017552
ttacaac

SEQ ID NO: 95365 - DNA, 7 bp, Unknown
  misc_feature (1)..( 7): Result.001 file - promoters60/1017552
ttagaac

SEQ ID NO: 95366 - DNA, 7 bp, Unknown
  misc_feature (1)..( 7): Result.001 file - promoters60/1017552
ttagaaa

SEQ ID NO: 95367 - DNA, 7 bp, Unknown
  misc_feature (1)..( 7): Result.001 file - promoters60/1017552
tacaaag

SEQ ID NO: 95368 - DNA, 7 bp, Unknown
  misc_feature (1)..( 7): Result.001 file - promoters60/1017552
gacaaag

SEQ ID NO: 95369 - DNA, 7 bp, Unknown
  misc_feature (1)..( 7): Result.001 file - promoters60/1017562
gacaaaa

SEQ ID NO: 95370 - DNA, 6 bp, Unknown
  misc_feature (1)..( 6): Result.001 file - promoters60/1017562
ttacta

SEQ ID NO: 95371 - DNA, 6 bp, Unknown
  misc_feature (1)..( 6): Result.001 file - promoters60/1017562
ttacta

SEQ ID NO: 95372 - DNA, 9 bp, Unknown
  misc_feature (1)..( 9): Result.001 file - promoters60/1017562
atatatatt

SEQ ID NO: 95373 - DNA, 9 bp, Unknown
  misc_feature (1)..( 9): Result.001 file - promoters60/1017562
ttatgtata

SEQ ID NO: 95374 - DNA, 9 bp, Unknown
  misc_feature (1)..( 9): Result.001 file - promoters60/1017562
atatatatt

SEQ ID NO: 95375 - DNA, 10 bp, Unknown
  misc_feature (1)..( 10): Result.001 file - promoters60/1017562
atatatatta

SEQ ID NO: 95376 - DNA, 10 bp, Unknown
  misc_feature (1)..( 10): Result.001 file - promoters60/1017562
tataatatta

SEQ ID NO: 95377 - DNA, 10 bp, Unknown
  misc_feature (1)..( 10): Result.001 file - promoters60/1017562
atatatattg

SEQ ID NO: 95378 - DNA, 7 bp, Unknown
  misc_feature (1)..( 7): Result.001 file - promoters60/1017562
tagactt

SEQ ID NO: 95379 - DNA, 7 bp, Unknown
  misc_feature (1)..( 7): Result.001 file - promoters60/1017562
tagcctt

SEQ ID NO: 95380 - DNA, 7 bp, Unknown
  misc_feature (1)..( 7): Result.001 file - promoters60/1017562
tgggtgg

SEQ ID NO: 95381 - DNA, 7 bp, Unknown
  misc_feature (1)..( 7): Result.001 file - promoters60/1017562
tggttgg

SEQ ID NO: 95382 - DNA, 9 bp, Unknown
  misc_feature (1)..( 9): Result.001 file - promoters60/1017562
aatcaaaca

SEQ ID NO: 95383 - DNA, 9 bp, Unknown
  misc_feature (1)..( 9): Result.001 file - promoters60/1017562
aatccaact

SEQ ID NO: 95384 - DNA, 9 bp, Unknown
  misc_feature (1)..( 9): Result.001 file - promoters60/1017562
aatcagaca

SEQ ID NO: 95385 - DNA, 6 bp, Unknown
  misc_feature (1)..( 6): Result.001 file - promoters60/1017562
ccaaaa

SEQ ID NO: 95386 - DNA, 6 bp, Unknown
  misc_feature (1)..( 6): Result.001 file - promoters60/1017562
ccaaaa

SEQ ID NO: 95387 - DNA, 8 bp, Unknown
  misc_feature (1)..( 8): Result.001 file - promoters60/1017562
cttagata

SEQ ID NO: 95388 - DNA, 8 bp, Unknown
  misc_feature (1)..( 8): Result.001 file - promoters60/1017562
cttagata

SEQ ID NO: 95389 - DNA, 6 bp, Unknown
  misc_feature (1)..( 6): Result.001 file - promoters60/1017562
atataa

SEQ ID NO: 95390 - DNA, 6 bp, Unknown
  misc_feature (1)..( 6): Result.001 file - promoters60/1017562
atataa

SEQ ID NO: 95391 - DNA, 9 bp, Unknown
  misc_feature (1)..( 9): Result.001 file - promoters60/1017562
ccattaaac

SEQ ID NO: 95392 - DNA, 9 bp, Unknown
  misc_feature (1)..( 9): Result.001 file - promoters60/1017562
ccatttaac

SEQ ID NO: 95393 - DNA, 8 bp, Unknown
  misc_feature (1)..( 8): Result.001 file - promoters60/1017562
caaagttt

SEQ ID NO: 95394 - DNA, 8 bp, Unknown
  misc_feature (1)..( 8): Result.001 file - promoters60/1017562
caacgttt

SEQ ID NO: 95395 - DNA, 6 bp, Unknown
  misc_feature (1)..( 6): Result.001 file - promoters60/1017562
ttgttt

SEQ ID NO: 95396 - DNA, 6 bp, Unknown
  misc_feature (1)..( 6): Result.001 file - promoters60/1017562
ttgttt

SEQ ID NO: 95397 - DNA, 9 bp, Unknown
  misc_feature (1)..( 9): Result.001 file - promoters60/1017562
aaaaagtgt

SEQ ID NO: 95398 - DNA, 9 bp, Unknown
  misc_feature (1)..( 9): Result.001 file - promoters60/1017562
aaaaactgt

SEQ ID NO: 95399 - DNA, 6 bp, Unknown
  misc_feature (1)..( 6): Result.001 file - promoters60/1017562
taacac

SEQ ID NO: 95400 - DNA, 6 bp, Unknown
  misc_feature (1)..( 6): Result.001 file - promoters60/1017562
taacac

SEQ ID NO: 95401 - DNA, 6 bp, Unknown
  misc_feature (1)..( 6): Result.001 file - promoters60/1017562
caaaaa

SEQ ID NO: 95402 - DNA, 6 bp, Unknown
  misc_feature (1)..( 6): Result.001 file - promoters60/1017562
caaaaa

SEQ ID NO: 95403 - DNA, 8 bp, Unknown
  misc_feature (1)..( 8): Result.001 file - promoters60/1017562
ataaatat

SEQ ID NO: 95404 - DNA, 8 bp, Unknown
  misc_feature (1)..( 8): Result.001 file - promoters60/1017562
atatatat

SEQ ID NO: 95405 - DNA, 7 bp, Unknown
  misc_feature (1)..( 7): Result.001 file - promoters60/1017562
aaatcag

SEQ ID NO: 95406 - DNA, 7 bp, Unknown
  misc_feature (1)..( 7): Result.001 file - promoters60/1017562
aaaccag

SEQ ID NO: 95407 - DNA, 7 bp, Unknown
  misc_feature (1)..( 7): Result.001 file - promoters60/1017562
gaataaa

SEQ ID NO: 95408 - DNA, 7 bp, Unknown
  misc_feature (1)..( 7): Result.001 file - promoters60/1017562
gaaaaaa

SEQ ID NO: 95409 - DNA, 7 bp, Unknown
  misc_feature (1)..( 7): Result.001 file - promoters60/1017562
acctcat

SEQ ID NO: 95410 - DNA, 7 bp, Unknown
  misc_feature (1)..( 7): Result.001 file - promoters60/1017562
accacat

SEQ ID NO: 95411 - DNA, 7 bp, Unknown
  misc_feature (1)..( 7): Result.001 file - promoters60/1017562
aaaagat

SEQ ID NO: 95412 - DNA, 7 bp, Unknown
  misc_feature (1)..( 7): Result.001 file - promoters60/1017618
aaatgat

SEQ ID NO: 95413 - DNA, 11 bp, Unknown
  misc_feature (1)..( 11): Result.001 file - promoters60/1017618
atatcatataa

SEQ ID NO: 95414 - DNA, 11 bp, Unknown
  misc_feature (1)..( 11): Result.001 file - promoters60/1017618
acgtcatattg

SEQ ID NO: 95415 - DNA, 11 bp, Unknown
  misc_feature (1)..( 11): Result.001 file - promoters60/1017618
atatcttattg

SEQ ID NO: 95416 - DNA, 11 bp, Unknown
  misc_feature (1)..( 11): Result.001 file - promoters60/1017618
tgataatatct

SEQ ID NO: 95417 - DNA, 13 bp, Unknown
  misc_feature (1)..( 13): Result.001 file - promoters60/1017618
tcctataataaat

SEQ ID NO: 95418 - DNA, 13 bp, Unknown
  misc_feature (1)..( 13): Result.001 file - promoters60/1017618
gcctttaaaaaag

SEQ ID NO: 95419 - DNA, 13 bp, Unknown
  misc_feature (1)..( 13): Result.001 file - promoters60/1017618
tcctataaatata

SEQ ID NO: 95420 - DNA, 13 bp, Unknown
  misc_feature (1)..( 13): Result.001 file - promoters60/1017618
aagatcaaaaagc

SEQ ID NO: 95421 - DNA, 8 bp, Unknown
  misc_feature (1)..( 8): Result.001 file - promoters60/1017618
ttaagaag

SEQ ID NO: 95422 - DNA, 8 bp, Unknown
  misc_feature (1)..( 8): Result.001 file - promoters60/1017618
ttatgaaa

SEQ ID NO: 95423 - DNA, 8 bp, Unknown
  misc_feature (1)..( 8): Result.001 file - promoters60/1017618
ctatgaac

SEQ ID NO: 95424 - DNA, 9 bp, Unknown
  misc_feature (1)..( 9): Result.001 file - promoters60/1017618
ccatgcaaa

SEQ ID NO: 95425 - DNA, 10 bp, Unknown
  misc_feature (1)..( 10): Result.001 file - promoters60/1017618
taatgtctcg

SEQ ID NO: 95426 - DNA, 10 bp, Unknown
  misc_feature (1)..( 10): Result.001 file - promoters60/1017618
taatatctca

SEQ ID NO: 95427 - DNA, 10 bp, Unknown
  misc_feature (1)..( 10): Result.001 file - promoters60/1017618
tgatggctcg

SEQ ID NO: 95428 - DNA, 10 bp, Unknown
  misc_feature (1)..( 10): Result.001 file - promoters60/1017626
taatataaaa

SEQ ID NO: 95429 - DNA, 10 bp, Unknown
  misc_feature (1)..( 10): Result.001 file - promoters60/1017626
tcagtaaaaa

SEQ ID NO: 95430 - DNA, 10 bp, Unknown
  misc_feature (1)..( 10): Result.001 file - promoters60/1017626
tcattaaaaa

SEQ ID NO: 95431 - DNA, 6 bp, Unknown
  misc_feature (1)..( 6): Result.001 file - promoters60/1017626
aaaaaa

SEQ ID NO: 95432 - DNA, 6 bp, Unknown
  misc_feature (1)..( 6): Result.001 file - promoters60/1017626
aaaaaa

SEQ ID NO: 95433 - DNA, 6 bp, Unknown
  misc_feature (1)..( 6): Result.001 file - promoters60/1017626
aattta

SEQ ID NO: 95434 - DNA, 6 bp, Unknown
  misc_feature (1)..( 6): Result.001 file - promoters60/1017626
aattta

SEQ ID NO: 95435 - DNA, 6 bp, Unknown
  misc_feature (1)..( 6): Result.001 file - promoters60/1017626
tttaat

SEQ ID NO: 95436 - DNA, 6 bp, Unknown
  misc_feature (1)..( 6): Result.001 file - promoters60/1017626
tttaat

SEQ ID NO: 95437 - DNA, 9 bp, Unknown
  misc_feature (1)..( 9): Result.001 file - promoters60/1017626
tttcataac

SEQ ID NO: 95438 - DNA, 9 bp, Unknown
  misc_feature (1)..( 9): Result.001 file - promoters60/1017626
ttttataat

SEQ ID NO: 95439 - DNA, 9 bp, Unknown
  misc_feature (1)..( 9): Result.001 file - promoters60/1017626
tattaaaat

SEQ ID NO: 95440 - DNA, 9 bp, Unknown
  misc_feature (1)..( 9): Result.001 file - promoters60/1017626
tatccggtt

SEQ ID NO: 95441 - DNA, 9 bp, Unknown
  misc_feature (1)..( 9): Result.001 file - promoters60/1017626
tatcgggtt

SEQ ID NO: 95442 - DNA, 6 bp, Unknown
  misc_feature (1)..( 6): Result.001 file - promoters60/1017626
ataagt

SEQ ID NO: 95443 - DNA, 6 bp, Unknown
  misc_feature (1)..( 6): Result.001 file - promoters60/1017626
ataagt

SEQ ID NO: 95444 - DNA, 7 bp, Unknown
  misc_feature (1)..( 7): Result.001 file - promoters60/1017626
tctctct

SEQ ID NO: 95445 - DNA, 7 bp, Unknown
  misc_feature (1)..( 7): Result.001 file - promoters60/1017626
tctctcg

SEQ ID NO: 95446 - DNA, 7 bp, Unknown
  misc_feature (1)..( 7): Result.001 file - promoters60/1017626
tctttct

SEQ ID NO: 95447 - DNA, 9 bp, Unknown
  misc_feature (1)..( 9): Result.001 file - promoters60/1017626
tcttcctct

SEQ ID NO: 95448 - DNA, 9 bp, Unknown
  misc_feature (1)..( 9): Result.001 file - promoters60/1017626
tcttcatct

SEQ ID NO: 95449 - DNA, 7 bp, Unknown
  misc_feature (1)..( 7): Result.001 file - promoters60/1017626
aaattgg

SEQ ID NO: 95450 - DNA, 7 bp, Unknown
  misc_feature (1)..( 7): Result.001 file - promoters60/1017626
aaattgg

SEQ ID NO: 95451 - DNA, 7 bp, Unknown
  misc_feature (1)..( 7): Result.001 file - promoters60/1017626
gaacaaa

SEQ ID NO: 95452 - DNA, 7 bp, Unknown
  misc_feature (1)..( 7): Result.001 file - promoters60/1017626
gaataaa

SEQ ID NO: 95453 - DNA, 7 bp, Unknown
  misc_feature (1)..( 7): Result.001 file - promoters60/1017626
atgaaat

SEQ ID NO: 95454 - DNA, 7 bp, Unknown
  misc_feature (1)..( 7): Result.001 file - promoters60/1017626
atgtaat

SEQ ID NO: 95455 - DNA, 8 bp, Unknown
  misc_feature (1)..( 8): Result.001 file - promoters60/1017626
ctttaaat

SEQ ID NO: 95456 - DNA, 8 bp, Unknown
  misc_feature (1)..( 8): Result.001 file - promoters60/1017626
cttgaaat

SEQ ID NO: 95457 - DNA, 6 bp, Unknown
  misc_feature (1)..( 6): Result.001 file - promoters60/1017626
aattag

SEQ ID NO: 95458 - DNA, 6 bp, Unknown
  misc_feature (1)..( 6): Result.001 file - promoters60/1017626
aattag

SEQ ID NO: 95459 - DNA, 7 bp, Unknown
  misc_feature (1)..( 7): Result.001 file - promoters60/1017626
ttttatc

SEQ ID NO: 95460 - DNA, 7 bp, Unknown
  misc_feature (1)..( 7): Result.001 file - promoters60/1017626
tttgatc

SEQ ID NO: 95461 - DNA, 6 bp, Unknown
  misc_feature (1)..( 6): Result.001 file - promoters60/1017626
aaatta

SEQ ID NO: 95462 - DNA, 6 bp, Unknown
  misc_feature (1)..( 6): Result.001 file - promoters60/1017626
aaatta

SEQ ID NO: 95463 - DNA, 7 bp, Unknown
  misc_feature (1)..( 7): Result.001 file - promoters60/1017626
ccatctc

SEQ ID NO: 95464 - DNA, 7 bp, Unknown
  misc_feature (1)..( 7): Result.001 file - promoters60/1017626
ccatcta

SEQ ID NO: 95465 - DNA, 7 bp, Unknown
  misc_feature (1)..( 7): Result.001 file - promoters60/1017626
ccaacta

SEQ ID NO: 95466 - DNA, 7 bp, Unknown
  misc_feature (1)..( 7): Result.001 file - promoters60/1017626
aaatcaa

SEQ ID NO: 95467 - DNA, 7 bp, Unknown
  misc_feature (1)..( 7): Result.001 file - promoters60/1017626
aaaccaa

SEQ ID NO: 95468 - DNA, 6 bp, Unknown
  misc_feature (1)..( 6): Result.001 file - promoters60/1017626
taataa

SEQ ID NO: 95469 - DNA, 6 bp, Unknown
  misc_feature (1)..( 6): Result.001 file - promoters60/1017626
taataa

SEQ ID NO: 95470 - DNA, 6 bp, Unknown
  misc_feature (1)..( 6): Result.001 file - promoters60/1017626
agttct

SEQ ID NO: 95471 - DNA, 6 bp, Unknown
  misc_feature (1)..( 6): Result.001 file - promoters60/1017626
agttct

SEQ ID NO: 95472 - DNA, 7 bp, Unknown
  misc_feature (1)..( 7): Result.001 file - promoters60/1017626
gaagact

SEQ ID NO: 95473 - DNA, 7 bp, Unknown
  misc_feature (1)..( 7): Result.001 file - promoters60/1017626
gaaaact

SEQ ID NO: 95474 - DNA, 6 bp, Unknown
  misc_feature (1)..( 6): Result.001 file - promoters60/1017626
actcat

SEQ ID NO: 95475 - DNA, 6 bp, Unknown
  misc_feature (1)..( 6): Result.001 file - promoters60/1017626
actcat

SEQ ID NO: 95476 - DNA, 7 bp, Unknown
  misc_feature (1)..( 7): Result.001 file - promoters60/1017626
gcctata

SEQ ID NO: 95477 - DNA, 7 bp, Unknown
  misc_feature (1)..( 7): Result.001 file - promoters60/1017626
gcctata

SEQ ID NO: 95478 - DNA, 7 bp, Unknown
  misc_feature (1)..( 7): Result.001 file - promoters60/1017626
tataaat

SEQ ID NO: 95479 - DNA, 7 bp, Unknown
  misc_feature (1)..( 7): Result.001 file - promoters60/1017649
tataaat

SEQ ID NO: 95480 - DNA, 6 bp, Unknown
  misc_feature (1)..( 6): Result.001 file - promoters60/1017649
caaaca

SEQ ID NO: 95481 - DNA, 6 bp, Unknown
  misc_feature (1)..( 6): Result.001 file - promoters60/1017649
caaaca

SEQ ID NO: 95482 - DNA, 8 bp, Unknown
  misc_feature (1)..( 8): Result.001 file - promoters60/1017649
caaataaa

SEQ ID NO: 95483 - DNA, 8 bp, Unknown
  misc_feature (1)..( 8): Result.001 file - promoters60/1017649
gaaagaaa

SEQ ID NO: 95484 - DNA, 8 bp, Unknown
  misc_feature (1)..( 8): Result.001 file - promoters60/1017649
caagtaat

SEQ ID NO: 95485 - DNA, 8 bp, Unknown
  misc_feature (1)..( 8): Result.001 file - promoters60/1017649
actactaa

SEQ ID NO: 95486 - DNA, 8 bp, Unknown
  misc_feature (1)..( 8): Result.001 file - promoters60/1017649
actactga

SEQ ID NO: 95487 - DNA, 8 bp, Unknown
  misc_feature (1)..( 8): Result.001 file - promoters60/1017649
actaatga

SEQ ID NO: 95488 - DNA, 7 bp, Unknown
  misc_feature (1)..( 7): Result.001 file - promoters60/1017649
ctttgaa

SEQ ID NO: 95489 - DNA, 7 bp, Unknown
  misc_feature (1)..( 7): Result.001 file - promoters60/1017649
ctttgaa

SEQ ID NO: 95490 - DNA, 9 bp, Unknown
  misc_feature (1)..( 9): Result.001 file - promoters60/1017649
taatctcta

SEQ ID NO: 95491 - DNA, 9 bp, Unknown
  misc_feature (1)..( 9): Result.001 file - promoters60/1017649
taaactcta

SEQ ID NO: 95492 - DNA, 8 bp, Unknown
  misc_feature (1)..( 8): Result.001 file - promoters60/1017649
aattttat

SEQ ID NO: 95493 - DNA, 8 bp, Unknown
  misc_feature (1)..( 8): Result.001 file - promoters60/1017649
aattttat

SEQ ID NO: 95494 - DNA, 7 bp, Unknown
  misc_feature (1)..( 7): Result.001 file - promoters60/1017649
attttag

SEQ ID NO: 95495 - DNA, 7 bp, Unknown
  misc_feature (1)..( 7): Result.001 file - promoters60/1017649
attatag

SEQ ID NO: 95496 - DNA, 7 bp, Unknown
  misc_feature (1)..( 7): Result.001 file - promoters60/1017649
atacaaa

SEQ ID NO: 95497 - DNA, 7 bp, Unknown
  misc_feature (1)..( 7): Result.001 file - promoters60/1017649
ataaaaa

SEQ ID NO: 95498 - DNA, 6 bp, Unknown
  misc_feature (1)..( 6): Result.001 file - promoters60/1017649
aaataa

SEQ ID NO: 95499 - DNA, 6 bp, Unknown
  misc_feature (1)..( 6): Result.001 file - promoters60/1017649
aaataa

SEQ ID NO: 95500 - DNA, 7 bp, Unknown
  misc_feature (1)..( 7): Result.001 file - promoters60/1017649
aacattt

SEQ ID NO: 95501 - DNA, 7 bp, Unknown
  misc_feature (1)..( 7): Result.001 file - promoters60/1017649
aactttt

SEQ ID NO: 95502 - DNA, 6 bp, Unknown
  misc_feature (1)..( 6): Result.001 file - promoters60/1017649
tttgat

SEQ ID NO: 95503 - DNA, 6 bp, Unknown
  misc_feature (1)..( 6): Result.001 file - promoters60/1017649
tttgat

SEQ ID NO: 95504 - DNA, 7 bp, Unknown
  misc_feature (1)..( 7): Result.001 file - promoters60/1017649
aaactca

SEQ ID NO: 95505 - DNA, 7 bp, Unknown
  misc_feature (1)..( 7): Result.001 file - promoters60/1017649
aaagtca

SEQ ID NO: 95506 - DNA, 8 bp, Unknown
  misc_feature (1)..( 8): Result.001 file - promoters60/1017649
aatttgat

SEQ ID NO: 95507 - DNA, 8 bp, Unknown
  misc_feature (1)..( 8): Result.001 file - promoters60/1017649
aatttgat

SEQ ID NO: 95508 - DNA, 7 bp, Unknown
  misc_feature (1)..( 7): Result.001 file - promoters60/1017649
ataagac

SEQ ID NO: 95509 - DNA, 7 bp, Unknown
  misc_feature (1)..( 7): Result.001 file - promoters60/1017649
ataggac

SEQ ID NO: 95510 - DNA, 7 bp, Unknown
  misc_feature (1)..( 7): Result.001 file - promoters60/1017649
caagaag

SEQ ID NO: 95511 - DNA, 7 bp, Unknown
  misc_feature (1)..( 7): Result.001 file - promoters60/1017649
caaaaag

SEQ ID NO: 95512 - DNA, 6 bp, Unknown
  misc_feature (1)..( 6): Result.001 file - promoters60/1017649
ttgatg

SEQ ID NO: 95513 - DNA, 6 bp, Unknown
  misc_feature (1)..( 6): Result.001 file - promoters60/1017649
ttgatg

SEQ ID NO: 95514 - DNA, 6 bp, Unknown
  misc_feature (1)..( 6): Result.001 file - promoters60/1017649
cacatc

SEQ ID NO: 95515 - DNA, 6 bp, Unknown
  misc_feature (1)..( 6): Result.001 file - promoters60/1017693
cacatc

SEQ ID NO: 95516 - DNA, 8 bp, Unknown
  misc_feature (1)..( 8): Result.001 file - promoters60/1017693
aatatagt

SEQ ID NO: 95517 - DNA, 8 bp, Unknown
  misc_feature (1)..( 8): Result.001 file - promoters60/1017693
aataaagt

SEQ ID NO: 95518 - DNA, 7 bp, Unknown
  misc_feature (1)..( 7): Result.001 file - promoters60/1017693
attggta

SEQ ID NO: 95519 - DNA, 7 bp, Unknown
  misc_feature (1)..( 7): Result.001 file - promoters60/1017693
atttgta

SEQ ID NO: 95520 - DNA, 9 bp, Unknown
  misc_feature (1)..( 9): Result.001 file - promoters60/1017693
atgtttttg

SEQ ID NO: 95521 - DNA, 9 bp, Unknown
  misc_feature (1)..( 9): Result.001 file - promoters60/1017693
atgtctttg

SEQ ID NO: 95522 - DNA, 6 bp, Unknown
  misc_feature (1)..( 6): Result.001 file - promoters60/1017693
aaaaac

SEQ ID NO: 95523 - DNA, 6 bp, Unknown
  misc_feature (1)..( 6): Result.001 file - promoters60/1017693
aaaaac

SEQ ID NO: 95524 - DNA, 6 bp, Unknown
  misc_feature (1)..( 6): Result.001 file - promoters60/1017693
tccaaa

SEQ ID NO: 95525 - DNA, 6 bp, Unknown
  misc_feature (1)..( 6): Result.001 file - promoters60/1017693
tccaaa

SEQ ID NO: 95526 - DNA, 7 bp, Unknown
  misc_feature (1)..( 7): Result.001 file - promoters60/1017693
aatctat

SEQ ID NO: 95527 - DNA, 7 bp, Unknown
  misc_feature (1)..( 7): Result.001 file - promoters60/1017693
aatctat

SEQ ID NO: 95528 - DNA, 6 bp, Unknown
  misc_feature (1)..( 6): Result.001 file - promoters60/1017693
tgtgtt

SEQ ID NO: 95529 - DNA, 6 bp, Unknown
  misc_feature (1)..( 6): Result.001 file - promoters60/1017693
tgtgtt

SEQ ID NO: 95530 - DNA, 10 bp, Unknown
  misc_feature (1)..( 10): Result.001 file - promoters60/1017693
ttttcttctc

SEQ ID NO: 95531 - DNA, 10 bp, Unknown
  misc_feature (1)..( 10): Result.001 file - promoters60/1017693
ttttcttctc

SEQ ID NO: 95532 - DNA, 6 bp, Unknown
  misc_feature (1)..( 6): Result.001 file - promoters60/1017693
tggtca

SEQ ID NO: 95533 - DNA, 6 bp, Unknown
  misc_feature (1)..( 6): Result.001 file - promoters60/1017693
tggtca

SEQ ID NO: 95534 - DNA, 6 bp, Unknown
  misc_feature (1)..( 6): Result.001 file - promoters60/1017693
tggaaa

SEQ ID NO: 95535 - DNA, 6 bp, Unknown
  misc_feature (1)..( 6): Result.001 file - promoters60/1017693
tggaaa

SEQ ID NO: 95536 - DNA, 7 bp, Unknown
  misc_feature (1)..( 7): Result.001 file - promoters60/1017693
aaccata

SEQ ID NO: 95537 - DNA, 7 bp, Unknown
  misc_feature (1)..( 7): Result.001 file - promoters60/1017693
aacgata

SEQ ID NO: 95538 - DNA, 8 bp, Unknown
  misc_feature (1)..( 8): Result.001 file - promoters60/1017693
aagccttt

SEQ ID NO: 95539 - DNA, 8 bp, Unknown
  misc_feature (1)..( 8): Result.001 file - promoters60/1017693
aagctttt

SEQ ID NO: 95540 - DNA, 7 bp, Unknown
  misc_feature (1)..( 7): Result.001 file - promoters60/1017693
caaagag

SEQ ID NO: 95541 - DNA, 7 bp, Unknown
  misc_feature (1)..( 7): Result.001 file - promoters60/1017693
caaggag

SEQ ID NO: 95542 - DNA, 10 bp, Unknown
  misc_feature (1)..( 10): Result.001 file - promoters60/1017693
ttttctgttg

SEQ ID NO: 95543 - DNA, 10 bp, Unknown
  misc_feature (1)..( 10): Result.001 file - promoters60/1017770
ttttcttttg

SEQ ID NO: 95544 - DNA, 14 bp, Unknown
  misc_feature (1)..( 14): Result.001 file - promoters60/1017770
tacttccttaaagg

SEQ ID NO: 95545 - DNA, 14 bp, Unknown
  misc_feature (1)..( 14): Result.001 file - promoters60/1017770
agcttacttcctta

SEQ ID NO: 95546 - DNA, 14 bp, Unknown
  misc_feature (1)..( 14): Result.001 file - promoters60/1017770
gacttccgcttgta

SEQ ID NO: 95547 - DNA, 14 bp, Unknown
  misc_feature (1)..( 14): Result.001 file - promoters60/1017770
tctttacttagatg

SEQ ID NO: 95548 - DNA, 14 bp, Unknown
  misc_feature (1)..( 14): Result.001 file - promoters60/1017770
tcttttcttctttc

SEQ ID NO: 95549 - DNA, 14 bp, Unknown
  misc_feature (1)..( 14): Result.001 file - promoters60/1017770
gtgtttcatctttc

SEQ ID NO: 95550 - DNA, 11 bp, Unknown
  misc_feature (1)..( 11): Result.001 file - promoters60/1017770
gcctatggtta

SEQ ID NO: 95551 - DNA, 11 bp, Unknown
  misc_feature (1)..( 11): Result.001 file - promoters60/1017770
agaaatgatta

SEQ ID NO: 95552 - DNA, 11 bp, Unknown
  misc_feature (1)..( 11): Result.001 file - promoters60/1017770
ttaaaggatta

SEQ ID NO: 95553 - DNA, 11 bp, Unknown
  misc_feature (1)..( 11): Result.001 file - promoters60/1017770
agtgatgatga

SEQ ID NO: 95554 - DNA, 11 bp, Unknown
  misc_feature (1)..( 11): Result.001 file - promoters60/1017770
ttaaaggtgtt

SEQ ID NO: 95555 - DNA, 11 bp, Unknown
  misc_feature (1)..( 11): Result.001 file - promoters60/1017770
aaaaatgtgaa

SEQ ID NO: 95556 - DNA, 11 bp, Unknown
  misc_feature (1)..( 11): Result.001 file - promoters60/1017770
caaaatgttat

SEQ ID NO: 95557 - DNA, 9 bp, Unknown
  misc_feature (1)..( 9): Result.001 file - promoters60/1017770
catatgtat

SEQ ID NO: 95558 - DNA, 9 bp, Unknown
  misc_feature (1)..( 9): Result.001 file - promoters60/1017770
gatatttat

SEQ ID NO: 95559 - DNA, 9 bp, Unknown
  misc_feature (1)..( 9): Result.001 file - promoters60/1017770
catatgtgt

SEQ ID NO: 95560 - DNA, 9 bp, Unknown
  misc_feature (1)..( 9): Result.001 file - promoters60/1017770
catatgtat

SEQ ID NO: 95561 - DNA, 9 bp, Unknown
  misc_feature (1)..( 9): Result.001 file - promoters60/1017770
tctatgtga

SEQ ID NO: 95562 - DNA, 9 bp, Unknown
  misc_feature (1)..( 9): Result.001 file - promoters60/1017777
aatctttgt

SEQ ID NO: 95563 - DNA, 14 bp, Unknown
  misc_feature (1)..( 14): Result.001 file - promoters60/1017777
aaagtgtatcctac

SEQ ID NO: 95564 - DNA, 14 bp, Unknown
  misc_feature (1)..( 14): Result.001 file - promoters60/1017777
tttttgtatccaat

SEQ ID NO: 95565 - DNA, 14 bp, Unknown
  misc_feature (1)..( 14): Result.001 file - promoters60/1017777
aaagggtatacaaa

SEQ ID NO: 95566 - DNA, 14 bp, Unknown
  misc_feature (1)..( 14): Result.001 file - promoters60/1017802
acgagatatctaat

SEQ ID NO: 95567 - DNA, 6 bp, Unknown
  misc_feature (1)..( 6): Result.001 file - promoters60/1017802
atattg

SEQ ID NO: 95568 - DNA, 6 bp, Unknown
  misc_feature (1)..( 6): Result.001 file - promoters60/1017802
atattg

SEQ ID NO: 95569 - DNA, 10 bp, Unknown
  misc_feature (1)..( 10): Result.001 file - promoters60/1017802
attacaatat

SEQ ID NO: 95570 - DNA, 10 bp, Unknown
  misc_feature (1)..( 10): Result.001 file - promoters60/1017802
attacaatat

SEQ ID NO: 95571 - DNA, 25 bp, Unknown
  misc_feature (1)..( 25): Result.001 file - promoters60/1017802
aaagttgcttcaaattatagattct

SEQ ID NO: 95572 - DNA, 25 bp, Unknown
  misc_feature (1)..( 25): Result.001 file - promoters60/1017802
aaagttgctacaaattatagattct

SEQ ID NO: 95573 - DNA, 25 bp, Unknown
  misc_feature (1)..( 25): Result.001 file - promoters60/1017802
gagtttgctagcatcaataatcaca

SEQ ID NO: 95574 - DNA, 22 bp, Unknown
  misc_feature (1)..( 22): Result.001 file - promoters60/1017802
tcttttctgattttgtttctca

SEQ ID NO: 95575 - DNA, 22 bp, Unknown
  misc_feature (1)..( 22): Result.001 file - promoters60/1017802
tcttttctgatattgtttctca

SEQ ID NO: 95576 - DNA, 22 bp, Unknown
  misc_feature (1)..( 22): Result.001 file - promoters60/1017802
atgtatcttattttgagaggtc

SEQ ID NO: 95577 - DNA, 7 bp, Unknown
  misc_feature (1)..( 7): Result.001 file - promoters60/1017802
taccaaa

SEQ ID NO: 95578 - DNA, 7 bp, Unknown
  misc_feature (1)..( 7): Result.001 file - promoters60/1017802
taccaaa

SEQ ID NO: 95579 - DNA, 8 bp, Unknown
  misc_feature (1)..( 8): Result.001 file - promoters60/1017802
caatgtga

SEQ ID NO: 95580 - DNA, 8 bp, Unknown
  misc_feature (1)..( 8): Result.001 file - promoters60/1017802
caatatga

SEQ ID NO: 95581 - DNA, 7 bp, Unknown
  misc_feature (1)..( 7): Result.001 file - promoters60/1017802
ctcaaat

SEQ ID NO: 95582 - DNA, 7 bp, Unknown
  misc_feature (1)..( 7): Result.001 file - promoters60/1017802
ctcaaat

SEQ ID NO: 95583 - DNA, 7 bp, Unknown
  misc_feature (1)..( 7): Result.001 file - promoters60/1017802
aaatata

SEQ ID NO: 95584 - DNA, 7 bp, Unknown
  misc_feature (1)..( 7): Result.001 file - promoters60/1017802
aaatata

SEQ ID NO: 95585 - DNA, 7 bp, Unknown
  misc_feature (1)..( 7): Result.001 file - promoters60/1017802
aaatata

SEQ ID NO: 95586 - DNA, 7 bp, Unknown
  misc_feature (1)..( 7): Result.001 file - promoters60/1017802
ttcaatg

SEQ ID NO: 95587 - DNA, 7 bp, Unknown
  misc_feature (1)..( 7): Result.001 file - promoters60/1017802
ttcaatg

SEQ ID NO: 95588 - DNA, 7 bp, Unknown
  misc_feature (1)..( 7): Result.001 file - promoters60/1017802
caattct

SEQ ID NO: 95589 - DNA, 7 bp, Unknown
  misc_feature (1)..( 7): Result.001 file - promoters60/1017802
caaatct

SEQ ID NO: 95590 - DNA, 7 bp, Unknown
  misc_feature (1)..( 7): Result.001 file - promoters60/1017802
aattctt

SEQ ID NO: 95591 - DNA, 7 bp, Unknown
  misc_feature (1)..( 7): Result.001 file - promoters60/1017802
aattctt

SEQ ID NO: 95592 - DNA, 8 bp, Unknown
  misc_feature (1)..( 8): Result.001 file - promoters60/1017802
tcttttct

SEQ ID NO: 95593 - DNA, 8 bp, Unknown
  misc_feature (1)..( 8): Result.001 file - promoters60/1017802
tcttttct

SEQ ID NO: 95594 - DNA, 8 bp, Unknown
  misc_feature (1)..( 8): Result.001 file - promoters60/1017802
aataaaat

SEQ ID NO: 95595 - DNA, 8 bp, Unknown
  misc_feature (1)..( 8): Result.001 file - promoters60/1017802
gataaaat

SEQ ID NO: 95596 - DNA, 8 bp, Unknown
  misc_feature (1)..( 8): Result.001 file - promoters60/1017802
gataaatt

SEQ ID NO: 95597 - DNA, 6 bp, Unknown
  misc_feature (1)..( 6): Result.001 file - promoters60/1017802
atagga

SEQ ID NO: 95598 - DNA, 6 bp, Unknown
  misc_feature (1)..( 6): Result.001 file - promoters60/1017802
atagga

SEQ ID NO: 95599 - DNA, 6 bp, Unknown
  misc_feature (1)..( 6): Result.001 file - promoters60/1017802
atagga

SEQ ID NO: 95600 - DNA, 6 bp, Unknown
  misc_feature (1)..( 6): Result.001 file - promoters60/1017802
atagga

SEQ ID NO: 95601 - DNA, 6 bp, Unknown
  misc_feature (1)..( 6): Result.001 file - promoters60/1017802
atagga

SEQ ID NO: 95602 - DNA, 8 bp, Unknown
  misc_feature (1)..( 8): Result.001 file - promoters60/1017802
ataatatt

SEQ ID NO: 95603 - DNA, 8 bp, Unknown
  misc_feature (1)..( 8): Result.001 file - promoters60/1017802
ataaaatt

SEQ ID NO: 95604 - DNA, 8 bp, Unknown
  misc_feature (1)..( 8): Result.001 file - promoters60/1017802
ataaaata

SEQ ID NO: 95605 - DNA, 6 bp, Unknown
  misc_feature (1)..( 6): Result.001 file - promoters60/1017802
aaaaaa

SEQ ID NO: 95606 - DNA, 6 bp, Unknown
  misc_feature (1)..( 6): Result.001 file - promoters60/1017802
aaaaaa

SEQ ID NO: 95607 - DNA, 12 bp, Unknown
  misc_feature (1)..( 12): Result.001 file - promoters60/1017802
aaaaaataaaaa

SEQ ID NO: 95608 - DNA, 12 bp, Unknown
  misc_feature (1)..( 12): Result.001 file - promoters60/1017802
aaaaattaaaaa

SEQ ID NO: 95609 - DNA, 12 bp, Unknown
  misc_feature (1)..( 12): Result.001 file - promoters60/1017802
ctcaaataaaat

SEQ ID NO: 95610 - DNA, 7 bp, Unknown
  misc_feature (1)..( 7): Result.001 file - promoters60/1017802
gcataaa

SEQ ID NO: 95611 - DNA, 7 bp, Unknown
  misc_feature (1)..( 7): Result.001 file - promoters60/1017802
gcacaaa

SEQ ID NO: 95612 - DNA, 6 bp, Unknown
  misc_feature (1)..( 6): Result.001 file - promoters60/1017802
ttgata

SEQ ID NO: 95613 - DNA, 6 bp, Unknown
  misc_feature (1)..( 6): Result.001 file - promoters60/1017802
ttgata

SEQ ID NO: 95614 - DNA, 7 bp, Unknown
  misc_feature (1)..( 7): Result.001 file - promoters60/1017802
tttccta

SEQ ID NO: 95615 - DNA, 7 bp, Unknown
  misc_feature (1)..( 7): Result.001 file - promoters60/1017802
tttgcta

SEQ ID NO: 95616 - DNA, 9 bp, Unknown
  misc_feature (1)..( 9): Result.001 file - promoters60/1017802
aaaaataaa

SEQ ID NO: 95617 - DNA, 9 bp, Unknown
  misc_feature (1)..( 9): Result.001 file - promoters60/1017802
aaatataaa

SEQ ID NO: 95618 - DNA, 9 bp, Unknown
  misc_feature (1)..( 9): Result.001 file - promoters60/1017802
aaataaaaa

SEQ ID NO: 95619 - DNA, 9 bp, Unknown
  misc_feature (1)..( 9): Result.001 file - promoters60/1017802
aaacaaaaa

SEQ ID NO: 95620 - DNA, 8 bp, Unknown
  misc_feature (1)..( 8): Result.001 file - promoters60/1017802
ctaaatat

SEQ ID NO: 95621 - DNA, 8 bp, Unknown
  misc_feature (1)..( 8): Result.001 file - promoters60/1017802
ctatatat

SEQ ID NO: 95622 - DNA, 6 bp, Unknown
  misc_feature (1)..( 6): Result.001 file - promoters60/1017802
aaatta

SEQ ID NO: 95623 - DNA, 6 bp, Unknown
  misc_feature (1)..( 6): Result.001 file - promoters60/1017883
aaatta

SEQ ID NO: 95624 - DNA, 7 bp, Unknown
  misc_feature (1)..( 7): Result.001 file - promoters60/1017883
caataaa

SEQ ID NO: 95625 - DNA, 7 bp, Unknown
  misc_feature (1)..( 7): Result.001 file - promoters60/1017883
caagaaa

SEQ ID NO: 95626 - DNA, 8 bp, Unknown
  misc_feature (1)..( 8): Result.001 file - promoters60/1017883
aaaggaaa

SEQ ID NO: 95627 - DNA, 8 bp, Unknown
  misc_feature (1)..( 8): Result.001 file - promoters60/1017883
tataaata

SEQ ID NO: 95628 - DNA, 8 bp, Unknown
  misc_feature (1)..( 8): Result.001 file - promoters60/1017883
tatatata

SEQ ID NO: 95629 - DNA, 8 bp, Unknown
  misc_feature (1)..( 8): Result.001 file - promoters60/1017883
tatatata

SEQ ID NO: 95630 - DNA, 8 bp, Unknown
  misc_feature (1)..( 8): Result.001 file - promoters60/1017883
aataaata

SEQ ID NO: 95631 - DNA, 13 bp, Unknown
  misc_feature (1)..( 13): Result.001 file - promoters60/1017883
gaccaagttatat

SEQ ID NO: 95632 - DNA, 13 bp, Unknown
  misc_feature (1)..( 13): Result.001 file - promoters60/1017883
aactaacttatat

SEQ ID NO: 95633 - DNA, 13 bp, Unknown
  misc_feature (1)..( 13): Result.001 file - promoters60/1017883
aacaaactgatag

SEQ ID NO: 95634 - DNA, 10 bp, Unknown
  misc_feature (1)..( 10): Result.001 file - promoters60/1017883
ctattatgtg

SEQ ID NO: 95635 - DNA, 10 bp, Unknown
  misc_feature (1)..( 10): Result.001 file - promoters60/1017883
ttattatgtg

SEQ ID NO: 95636 - DNA, 10 bp, Unknown
  misc_feature (1)..( 10): Result.001 file - promoters60/1017883
ttattatatt

SEQ ID NO: 95637 - DNA, 10 bp, Unknown
  misc_feature (1)..( 10): Result.001 file - promoters60/1017883
caaattgaca

SEQ ID NO: 95638 - DNA, 10 bp, Unknown
  misc_feature (1)..( 10): Result.001 file - promoters60/1017883
caaactgata

SEQ ID NO: 95639 - DNA, 10 bp, Unknown
  misc_feature (1)..( 10): Result.001 file - promoters60/1017883
ataactcata

SEQ ID NO: 95640 - DNA, 12 bp, Unknown
  misc_feature (1)..( 12): Result.001 file - promoters60/1017883
aaacaaatgttt

SEQ ID NO: 95641 - DNA, 12 bp, Unknown
  misc_feature (1)..( 12): Result.001 file - promoters60/1017883
aaacaattcttt

SEQ ID NO: 95642 - DNA, 12 bp, Unknown
  misc_feature (1)..( 12): Result.001 file - promoters60/1017883
aaataaattttt

SEQ ID NO: 95643 - DNA, 9 bp, Unknown
  misc_feature (1)..( 9): Result.001 file - promoters60/1017883
gaaaaagcg

SEQ ID NO: 95644 - DNA, 9 bp, Unknown
  misc_feature (1)..( 9): Result.001 file - promoters60/1017883
gaaaaacac

SEQ ID NO: 95645 - DNA, 9 bp, Unknown
  misc_feature (1)..( 9): Result.001 file - promoters60/1017883
gaaaaaaaa

SEQ ID NO: 95646 - DNA, 8 bp, Unknown
  misc_feature (1)..( 8): Result.001 file - promoters60/1017883
taatttga

SEQ ID NO: 95647 - DNA, 8 bp, Unknown
  misc_feature (1)..( 8): Result.001 file - promoters60/1017883
aaatttga

SEQ ID NO: 95648 - DNA, 8 bp, Unknown
  misc_feature (1)..( 8): Result.001 file - promoters60/1017964
aaatttac

SEQ ID NO: 95649 - DNA, 6 bp, Unknown
  misc_feature (1)..( 6): Result.001 file - promoters60/1017964
aactgt

SEQ ID NO: 95650 - DNA, 6 bp, Unknown
  misc_feature (1)..( 6): Result.001 file - promoters60/1017964
aactgt

SEQ ID NO: 95651 - DNA, 9 bp, Unknown
  misc_feature (1)..( 9): Result.001 file - promoters60/1017964
tgaaaagaa

SEQ ID NO: 95652 - DNA, 9 bp, Unknown
  misc_feature (1)..( 9): Result.001 file - promoters60/1017964
tgaacagaa

SEQ ID NO: 95653 - DNA, 7 bp, Unknown
  misc_feature (1)..( 7): Result.001 file - promoters60/1017964
tattgaa

SEQ ID NO: 95654 - DNA, 7 bp, Unknown
  misc_feature (1)..( 7): Result.001 file - promoters60/1017964
tattgaa

SEQ ID NO: 95655 - DNA, 6 bp, Unknown
  misc_feature (1)..( 6): Result.001 file - promoters60/1017964
atattc

SEQ ID NO: 95656 - DNA, 6 bp, Unknown
  misc_feature (1)..( 6): Result.001 file - promoters60/1017964
atattc

SEQ ID NO: 95657 - DNA, 6 bp, Unknown
  misc_feature (1)..( 6): Result.001 file - promoters60/1017964
tgatat

SEQ ID NO: 95658 - DNA, 6 bp, Unknown
  misc_feature (1)..( 6): Result.001 file - promoters60/1017964
tgatat

SEQ ID NO: 95659 - DNA, 7 bp, Unknown
  misc_feature (1)..( 7): Result.001 file - promoters60/1017964
ttgatga

SEQ ID NO: 95660 - DNA, 7 bp, Unknown
  misc_feature (1)..( 7): Result.001 file - promoters60/1017964
ttggtga

SEQ ID NO: 95661 - DNA, 7 bp, Unknown
  misc_feature (1)..( 7): Result.001 file - promoters60/1017964
ggaatga

SEQ ID NO: 95662 - DNA, 7 bp, Unknown
  misc_feature (1)..( 7): Result.001 file - promoters60/1017964
ggattga

SEQ ID NO: 95663 - DNA, 8 bp, Unknown
  misc_feature (1)..( 8): Result.001 file - promoters60/1017964
agtataaa

SEQ ID NO: 95664 - DNA, 8 bp, Unknown
  misc_feature (1)..( 8): Result.001 file - promoters60/1017964
agtttaaa

SEQ ID NO: 95665 - DNA, 6 bp, Unknown
  misc_feature (1)..( 6): Result.001 file - promoters60/1017964
gtcgaa

SEQ ID NO: 95666 - DNA, 6 bp, Unknown
  misc_feature (1)..( 6): Result.001 file - promoters60/1017964
gtcgaa

SEQ ID NO: 95667 - DNA, 6 bp, Unknown
  misc_feature (1)..( 6): Result.001 file - promoters60/1017964
aaaata

SEQ ID NO: 95668 - DNA, 6 bp, Unknown
  misc_feature (1)..( 6): Result.001 file - promoters60/1017964
aaaata

SEQ ID NO: 95669 - DNA, 6 bp, Unknown
  misc_feature (1)..( 6): Result.001 file - promoters60/1017964
ttgtat

SEQ ID NO: 95670 - DNA, 6 bp, Unknown
  misc_feature (1)..( 6): Result.001 file - promoters60/1017964
ttgtat

SEQ ID NO: 95671 - DNA, 7 bp, Unknown
  misc_feature (1)..( 7): Result.001 file - promoters60/1017964
cactgtc

SEQ ID NO: 95672 - DNA, 7 bp, Unknown
  misc_feature (1)..( 7): Result.001 file - promoters60/1017964
cacggtc

SEQ ID NO: 95673 - DNA, 6 bp, Unknown
  misc_feature (1)..( 6): Result.001 file - promoters60/1017964
tctgaa

SEQ ID NO: 95674 - DNA, 6 bp, Unknown
  misc_feature (1)..( 6): Result.001 file - promoters60/1017964
tctgaa

SEQ ID NO: 95675 - DNA, 6 bp, Unknown
  misc_feature (1)..( 6): Result.001 file - promoters60/1017964
ggttta

SEQ ID NO: 95676 - DNA, 6 bp, Unknown
  misc_feature (1)..( 6): Result.001 file - promoters60/1017964
ggttta

SEQ ID NO: 95677 - DNA, 6 bp, Unknown
  misc_feature (1)..( 6): Result.001 file - promoters60/1017964
ttgact

SEQ ID NO: 95678 - DNA, 6 bp, Unknown
  misc_feature (1)..( 6): Result.001 file - promoters60/1017964
ttgact

SEQ ID NO: 95679 - DNA, 6 bp, Unknown
  misc_feature (1)..( 6): Result.001 file - promoters60/1017964
ggctgt

SEQ ID NO: 95680 - DNA, 6 bp, Unknown
  misc_feature (1)..( 6): Result.001 file - promoters60/1018052
ggctgt

SEQ ID NO: 95681 - DNA, 9 bp, Unknown
  misc_feature (1)..( 9): Result.001 file - promoters60/1018052
ttcagtttc

SEQ ID NO: 95682 - DNA, 9 bp, Unknown
  misc_feature (1)..( 9): Result.001 file - promoters60/1018052
ctcagttga

SEQ ID NO: 95683 - DNA, 9 bp, Unknown
  misc_feature (1)..( 9): Result.001 file - promoters60/1018052
atcaatttt

SEQ ID NO: 95684 - DNA, 9 bp, Unknown
  misc_feature (1)..( 9): Result.001 file - promoters60/1018052
atcattttt

SEQ ID NO: 95685 - DNA, 8 bp, Unknown
  misc_feature (1)..( 8): Result.001 file - promoters60/1018052
cttgttgt

SEQ ID NO: 95686 - DNA, 8 bp, Unknown
  misc_feature (1)..( 8): Result.001 file - promoters60/1018052
attgatgt

SEQ ID NO: 95687 - DNA, 8 bp, Unknown
  misc_feature (1)..( 8): Result.001 file - promoters60/1018052
gttttttt

SEQ ID NO: 95688 - DNA, 8 bp, Unknown
  misc_feature (1)..( 8): Result.001 file - promoters60/1018052
tttgttta

SEQ ID NO: 95689 - DNA, 9 bp, Unknown
  misc_feature (1)..( 9): Result.001 file - promoters60/1018052
cttttcaaa

SEQ ID NO: 95690 - DNA, 9 bp, Unknown
  misc_feature (1)..( 9): Result.001 file - promoters60/1018052
atttccaat

SEQ ID NO: 95691 - DNA, 9 bp, Unknown
  misc_feature (1)..( 9): Result.001 file - promoters60/1018052
ttttccaat

SEQ ID NO: 95692 - DNA, 9 bp, Unknown
  misc_feature (1)..( 9): Result.001 file - promoters60/1018052
attaccaat

SEQ ID NO: 95693 - DNA, 8 bp, Unknown
  misc_feature (1)..( 8): Result.001 file - promoters60/1018052
agtgtcaa

SEQ ID NO: 95694 - DNA, 8 bp, Unknown
  misc_feature (1)..( 8): Result.001 file - promoters60/1018052
agtctcac

SEQ ID NO: 95695 - DNA, 8 bp, Unknown
  misc_feature (1)..( 8): Result.001 file - promoters60/1018052
agtttcat

SEQ ID NO: 95696 - DNA, 8 bp, Unknown
  misc_feature (1)..( 8): Result.001 file - promoters60/1018055
aatttcat

SEQ ID NO: 95697 - DNA, 6 bp, Unknown
  misc_feature (1)..( 6): Result.001 file - promoters60/1018055
tgattg

SEQ ID NO: 95698 - DNA, 6 bp, Unknown
  misc_feature (1)..( 6): Result.001 file - promoters60/1018055
tgattg

SEQ ID NO: 95699 - DNA, 7 bp, Unknown
  misc_feature (1)..( 7): Result.001 file - promoters60/1018055
ttaattt

SEQ ID NO: 95700 - DNA, 7 bp, Unknown
  misc_feature (1)..( 7): Result.001 file - promoters60/1018055
ttacttt

SEQ ID NO: 95701 - DNA, 7 bp, Unknown
  misc_feature (1)..( 7): Result.001 file - promoters60/1018055
ttttctt

SEQ ID NO: 95702 - DNA, 7 bp, Unknown
  misc_feature (1)..( 7): Result.001 file - promoters60/1018055
ttttctt

SEQ ID NO: 95703 - DNA, 7 bp, Unknown
  misc_feature (1)..( 7): Result.001 file - promoters60/1018055
ttatgtg

SEQ ID NO: 95704 - DNA, 7 bp, Unknown
  misc_feature (1)..( 7): Result.001 file - promoters60/1018055
ttatgtg

SEQ ID NO: 95705 - DNA, 6 bp, Unknown
  misc_feature (1)..( 6): Result.001 file - promoters60/1018055
tttctt

SEQ ID NO: 95706 - DNA, 6 bp, Unknown
  misc_feature (1)..( 6): Result.001 file - promoters60/1018055
tttctt

SEQ ID NO: 95707 - DNA, 8 bp, Unknown
  misc_feature (1)..( 8): Result.001 file - promoters60/1018055
aatgaatt

SEQ ID NO: 95708 - DNA, 8 bp, Unknown
  misc_feature (1)..( 8): Result.001 file - promoters60/1018055
aatcaatt

SEQ ID NO: 95709 - DNA, 6 bp, Unknown
  misc_feature (1)..( 6): Result.001 file - promoters60/1018055
ttattt

SEQ ID NO: 95710 - DNA, 6 bp, Unknown
  misc_feature (1)..( 6): Result.001 file - promoters60/1018055
ttattt

SEQ ID NO: 95711 - DNA, 11 bp, Unknown
  misc_feature (1)..( 11): Result.001 file - promoters60/1018055
aaagacaaaat

SEQ ID NO: 95712 - DNA, 11 bp, Unknown
  misc_feature (1)..( 11): Result.001 file - promoters60/1018055
aaagagaaaat

SEQ ID NO: 95713 - DNA, 8 bp, Unknown
  misc_feature (1)..( 8): Result.001 file - promoters60/1018055
gtagagaa

SEQ ID NO: 95714 - DNA, 8 bp, Unknown
  misc_feature (1)..( 8): Result.001 file - promoters60/1018055
gtagagaa

SEQ ID NO: 95715 - DNA, 6 bp, Unknown
  misc_feature (1)..( 6): Result.001 file - promoters60/1018055
agaaga

SEQ ID NO: 95716 - DNA, 6 bp, Unknown
  misc_feature (1)..( 6): Result.001 file - promoters60/1018055
agaaga

SEQ ID NO: 95717 - DNA, 6 bp, Unknown
  misc_feature (1)..( 6): Result.001 file - promoters60/1018055
gtgatt

SEQ ID NO: 95718 - DNA, 6 bp, Unknown
  misc_feature (1)..( 6): Result.001 file - promoters60/1018057
gtgatt

SEQ ID NO: 95719 - DNA, 7 bp, Unknown
  misc_feature (1)..( 7): Result.001 file - promoters60/1018057
caacgaa

SEQ ID NO: 95720 - DNA, 7 bp, Unknown
  misc_feature (1)..( 7): Result.001 file - promoters60/1018057
caatgaa

SEQ ID NO: 95721 - DNA, 8 bp, Unknown
  misc_feature (1)..( 8): Result.001 file - promoters60/1018057
aaatcgtt

SEQ ID NO: 95722 - DNA, 8 bp, Unknown
  misc_feature (1)..( 8): Result.001 file - promoters60/1018057
aaatggtt

SEQ ID NO: 95723 - DNA, 7 bp, Unknown
  misc_feature (1)..( 7): Result.001 file - promoters60/1018057
gattagc

SEQ ID NO: 95724 - DNA, 7 bp, Unknown
  misc_feature (1)..( 7): Result.001 file - promoters60/1018057
gataagc

SEQ ID NO: 95725 - DNA, 7 bp, Unknown
  misc_feature (1)..( 7): Result.001 file - promoters60/1018057
tggggac

SEQ ID NO: 95726 - DNA, 7 bp, Unknown
  misc_feature (1)..( 7): Result.001 file - promoters60/1018057
tggagac

SEQ ID NO: 95727 - DNA, 7 bp, Unknown
  misc_feature (1)..( 7): Result.001 file - promoters60/1018057
ggcgaag

SEQ ID NO: 95728 - DNA, 7 bp, Unknown
  misc_feature (1)..( 7): Result.001 file - promoters60/1018057
ggctaag

SEQ ID NO: 95729 - DNA, 7 bp, Unknown
  misc_feature (1)..( 7): Result.001 file - promoters60/1018057
aataagc

SEQ ID NO: 95730 - DNA, 7 bp, Unknown
  misc_feature (1)..( 7): Result.001 file - promoters60/1018057
aataagc

SEQ ID NO: 95731 - DNA, 13 bp, Unknown
  misc_feature (1)..( 13): Result.001 file - promoters60/1018057
caaacaggattat

SEQ ID NO: 95732 - DNA, 13 bp, Unknown
  misc_feature (1)..( 13): Result.001 file - promoters60/1018057
caaaccggagtat

SEQ ID NO: 95733 - DNA, 9 bp, Unknown
  misc_feature (1)..( 9): Result.001 file - promoters60/1018057
agttgattt

SEQ ID NO: 95734 - DNA, 9 bp, Unknown
  misc_feature (1)..( 9): Result.001 file - promoters60/1018057
agtagattt

SEQ ID NO: 95735 - DNA, 7 bp, Unknown
  misc_feature (1)..( 7): Result.001 file - promoters60/1018057
atggtat

SEQ ID NO: 95736 - DNA, 7 bp, Unknown
  misc_feature (1)..( 7): Result.001 file - promoters60/1018057
atgttat

SEQ ID NO: 95737 - DNA, 6 bp, Unknown
  misc_feature (1)..( 6): Result.001 file - promoters60/1018057
taaata

SEQ ID NO: 95738 - DNA, 6 bp, Unknown
  misc_feature (1)..( 6): Result.001 file - promoters60/1018057
taaata

SEQ ID NO: 95739 - DNA, 7 bp, Unknown
  misc_feature (1)..( 7): Result.001 file - promoters60/1018057
aacctta

SEQ ID NO: 95740 - DNA, 7 bp, Unknown
  misc_feature (1)..( 7): Result.001 file - promoters60/1018057
aacctta

SEQ ID NO: 95741 - DNA, 7 bp, Unknown
  misc_feature (1)..( 7): Result.001 file - promoters60/1018057
gaaatac

SEQ ID NO: 95742 - DNA, 7 bp, Unknown
  misc_feature (1)..( 7): Result.001 file - promoters60/1018057
gaaatac

SEQ ID NO: 95743 - DNA, 6 bp, Unknown
  misc_feature (1)..( 6): Result.001 file - promoters60/1018057
aaggag

SEQ ID NO: 95744 - DNA, 6 bp, Unknown
  misc_feature (1)..( 6): Result.001 file - promoters60/1018057
aaggag

SEQ ID NO: 95745 - DNA, 6 bp, Unknown
  misc_feature (1)..( 6): Result.001 file - promoters60/1018057
gtccca

SEQ ID NO: 95746 - DNA, 6 bp, Unknown
  misc_feature (1)..( 6): Result.001 file - promoters60/1018057
gtccca

SEQ ID NO: 95747 - DNA, 7 bp, Unknown
  misc_feature (1)..( 7): Result.001 file - promoters60/1018057
tcagttt

SEQ ID NO: 95748 - DNA, 7 bp, Unknown
  misc_feature (1)..( 7): Result.001 file - promoters60/1018057
tcagttt

SEQ ID NO: 95749 - DNA, 7 bp, Unknown
  misc_feature (1)..( 7): Result.001 file - promoters60/1018057
tttatat

SEQ ID NO: 95750 - DNA, 7 bp, Unknown
  misc_feature (1)..( 7): Result.001 file - promoters60/1018057
tttttat

SEQ ID NO: 95751 - DNA, 6 bp, Unknown
  misc_feature (1)..( 6): Result.001 file - promoters60/1018057
attatt

SEQ ID NO: 95752 - DNA, 6 bp, Unknown
  misc_feature (1)..( 6): Result.001 file - promoters60/1018159
attatt

SEQ ID NO: 95753 - DNA, 9 bp, Unknown
  misc_feature (1)..( 9): Result.001 file - promoters60/1018159
gttaaaaaa

SEQ ID NO: 95754 - DNA, 9 bp, Unknown
  misc_feature (1)..( 9): Result.001 file - promoters60/1018159
agtaagaaa

SEQ ID NO: 95755 - DNA, 9 bp, Unknown
  misc_feature (1)..( 9): Result.001 file - promoters60/1018159
agtaagaat

SEQ ID NO: 95756 - DNA, 6 bp, Unknown
  misc_feature (1)..( 6): Result.001 file - promoters60/1018159
gaaatc

SEQ ID NO: 95757 - DNA, 6 bp, Unknown
  misc_feature (1)..( 6): Result.001 file - promoters60/1018159
gaaatc

SEQ ID NO: 95758 - DNA, 7 bp, Unknown
  misc_feature (1)..( 7): Result.001 file - promoters60/1018159
tcagcct

SEQ ID NO: 95759 - DNA, 7 bp, Unknown
  misc_feature (1)..( 7): Result.001 file - promoters60/1018159
tcatcct

SEQ ID NO: 95760 - DNA, 7 bp, Unknown
  misc_feature (1)..( 7): Result.001 file - promoters60/1018159
aatatta

SEQ ID NO: 95761 - DNA, 7 bp, Unknown
  misc_feature (1)..( 7): Result.001 file - promoters60/1018159
aatttta

SEQ ID NO: 95762 - DNA, 9 bp, Unknown
  misc_feature (1)..( 9): Result.001 file - promoters60/1018159
atttaaacc

SEQ ID NO: 95763 - DNA, 9 bp, Unknown
  misc_feature (1)..( 9): Result.001 file - promoters60/1018159
atttatacc

SEQ ID NO: 95764 - DNA, 6 bp, Unknown
  misc_feature (1)..( 6): Result.001 file - promoters60/1018159
acatga

SEQ ID NO: 95765 - DNA, 6 bp, Unknown
  misc_feature (1)..( 6): Result.001 file - promoters60/1018159
acatga

SEQ ID NO: 95766 - DNA, 9 bp, Unknown
  misc_feature (1)..( 9): Result.001 file - promoters60/1018159
ggcaaggaa

SEQ ID NO: 95767 - DNA, 9 bp, Unknown
  misc_feature (1)..( 9): Result.001 file - promoters60/1018159
ggcgaggaa

SEQ ID NO: 95768 - DNA, 9 bp, Unknown
  misc_feature (1)..( 9): Result.001 file - promoters60/1018159
agaaacata

SEQ ID NO: 95769 - DNA, 9 bp, Unknown
  misc_feature (1)..( 9): Result.001 file - promoters60/1018159
agaatcata

SEQ ID NO: 95770 - DNA, 6 bp, Unknown
  misc_feature (1)..( 6): Result.001 file - promoters60/1018159
aggaag

SEQ ID NO: 95771 - DNA, 6 bp, Unknown
  misc_feature (1)..( 6): Result.001 file - promoters60/1018159
aggaag

SEQ ID NO: 95772 - DNA, 7 bp, Unknown
  misc_feature (1)..( 7): Result.001 file - promoters60/1018159
atatacc

SEQ ID NO: 95773 - DNA, 7 bp, Unknown
  misc_feature (1)..( 7): Result.001 file - promoters60/1018159
ataaacc

SEQ ID NO: 95774 - DNA, 8 bp, Unknown
  misc_feature (1)..( 8): Result.001 file - promoters60/1018159
taaggatt

SEQ ID NO: 95775 - DNA, 8 bp, Unknown
  misc_feature (1)..( 8): Result.001 file - promoters60/1018159
taaagatt

SEQ ID NO: 95776 - DNA, 6 bp, Unknown
  misc_feature (1)..( 6): Result.001 file - promoters60/1018159
attggg

SEQ ID NO: 95777 - DNA, 6 bp, Unknown
  misc_feature (1)..( 6): Result.001 file - promoters60/1018159
attggg

SEQ ID NO: 95778 - DNA, 6 bp, Unknown
  misc_feature (1)..( 6): Result.001 file - promoters60/1018159
ccattt

SEQ ID NO: 95779 - DNA, 6 bp, Unknown
  misc_feature (1)..( 6): Result.001 file - promoters60/1018159
ccattt

SEQ ID NO: 95780 - DNA, 7 bp, Unknown
  misc_feature (1)..( 7): Result.001 file - promoters60/1018159
aatggcg

SEQ ID NO: 95781 - DNA, 7 bp, Unknown
  misc_feature (1)..( 7): Result.001 file - promoters60/1018159
aatggcg

SEQ ID NO: 95782 - DNA, 6 bp, Unknown
  misc_feature (1)..( 6): Result.001 file - promoters60/1018159
aaatta

SEQ ID NO: 95783 - DNA, 6 bp, Unknown
  misc_feature (1)..( 6): Result.001 file - promoters60/1018159
aaatta

SEQ ID NO: 95784 - DNA, 6 bp, Unknown
  misc_feature (1)..( 6): Result.001 file - promoters60/1018159
taagag

SEQ ID NO: 95785 - DNA, 6 bp, Unknown
  misc_feature (1)..( 6): Result.001 file - promoters60/1018159
taagag

SEQ ID NO: 95786 - DNA, 7 bp, Unknown
  misc_feature (1)..( 7): Result.001 file - promoters60/1018159
taatttc

SEQ ID NO: 95787 - DNA, 7 bp, Unknown
  misc_feature (1)..( 7): Result.001 file - promoters60/1018159
taaattc

SEQ ID NO: 95788 - DNA, 9 bp, Unknown
  misc_feature (1)..( 9): Result.001 file - promoters60/1018159
cgattgaat

SEQ ID NO: 95789 - DNA, 9 bp, Unknown
  misc_feature (1)..( 9): Result.001 file - promoters60/1018159
cgattaaat

SEQ ID NO: 95790 - DNA, 9 bp, Unknown
  misc_feature (1)..( 9): Result.001 file - promoters60/1018159
aattttcga

SEQ ID NO: 95791 - DNA, 9 bp, Unknown
  misc_feature (1)..( 9): Result.001 file - promoters60/1018159
aatttgcga

SEQ ID NO: 95792 - DNA, 7 bp, Unknown
  misc_feature (1)..( 7): Result.001 file - promoters60/1018159
tttggaa

SEQ ID NO: 95793 - DNA, 7 bp, Unknown
  misc_feature (1)..( 7): Result.001 file - promoters60/1018159
tttagaa

SEQ ID NO: 95794 - DNA, 8 bp, Unknown
  misc_feature (1)..( 8): Result.001 file - promoters60/1018159
attttaat

SEQ ID NO: 95795 - DNA, 8 bp, Unknown
  misc_feature (1)..( 8): Result.001 file - promoters60/1018159
atttaaat

SEQ ID NO: 95796 - DNA, 12 bp, Unknown
  misc_feature (1)..( 12): Result.001 file - promoters60/1018159
tgaaatatttaa

SEQ ID NO: 95797 - DNA, 12 bp, Unknown
  misc_feature (1)..( 12): Result.001 file - promoters60/1018159
tgaaatagttaa

SEQ ID NO: 95798 - DNA, 6 bp, Unknown
  misc_feature (1)..( 6): Result.001 file - promoters60/1018159
caactt

SEQ ID NO: 95799 - DNA, 6 bp, Unknown
  misc_feature (1)..( 6): Result.001 file - promoters60/1018190
caactt

SEQ ID NO: 95800 - DNA, 10 bp, Unknown
  misc_feature (1)..( 10): Result.001 file - promoters60/1018190
atatttgttg

SEQ ID NO: 95801 - DNA, 10 bp, Unknown
  misc_feature (1)..( 10): Result.001 file - promoters60/1018190
ctgcttgttg

SEQ ID NO: 95802 - DNA, 10 bp, Unknown
  misc_feature (1)..( 10): Result.001 file - promoters60/1018190
gaatttgttt

SEQ ID NO: 95803 - DNA, 10 bp, Unknown
  misc_feature (1)..( 10): Result.001 file - promoters60/1018190
gaatttgatt

SEQ ID NO: 95804 - DNA, 9 bp, Unknown
  misc_feature (1)..( 9): Result.001 file - promoters60/1018190
attttttta

SEQ ID NO: 95805 - DNA, 9 bp, Unknown
  misc_feature (1)..( 9): Result.001 file - promoters60/1018190
atttttcag

SEQ ID NO: 95806 - DNA, 9 bp, Unknown
  misc_feature (1)..( 9): Result.001 file - promoters60/1018190
cttttttta

SEQ ID NO: 95807 - DNA, 9 bp, Unknown
  misc_feature (1)..( 9): Result.001 file - promoters60/1018190
ctttgtttg

SEQ ID NO: 95808 - DNA, 8 bp, Unknown
  misc_feature (1)..( 8): Result.001 file - promoters60/1018190
gaatctaa

SEQ ID NO: 95809 - DNA, 8 bp, Unknown
  misc_feature (1)..( 8): Result.001 file - promoters60/1018190
aaatataa

SEQ ID NO: 95810 - DNA, 9 bp, Unknown
  misc_feature (1)..( 9): Result.001 file - promoters60/1018190
taattatat

SEQ ID NO: 95811 - DNA, 9 bp, Unknown
  misc_feature (1)..( 9): Result.001 file - promoters60/1018190
acgttatat

SEQ ID NO: 95812 - DNA, 10 bp, Unknown
  misc_feature (1)..( 10): Result.001 file - promoters60/1018190
ttgttgattg

SEQ ID NO: 95813 - DNA, 10 bp, Unknown
  misc_feature (1)..( 10): Result.001 file - promoters60/1018190
tgtttgattg

SEQ ID NO: 95814 - DNA, 10 bp, Unknown
  misc_feature (1)..( 10): Result.001 file - promoters60/1018190
aatttgattt

SEQ ID NO: 95815 - DNA, 10 bp, Unknown
  misc_feature (1)..( 10): Result.001 file - promoters60/1018276
tgtttgatac

SEQ ID NO: 95816 - DNA, 14 bp, Unknown
  misc_feature (1)..( 14): Result.001 file - promoters60/1018276
tatttgttgattga

SEQ ID NO: 95817 - DNA, 14 bp, Unknown
  misc_feature (1)..( 14): Result.001 file - promoters60/1018276
caatggttggttgc

SEQ ID NO: 95818 - DNA, 14 bp, Unknown
  misc_feature (1)..( 14): Result.001 file - promoters60/1018276
aagaatttgtttga

SEQ ID NO: 95819 - DNA, 14 bp, Unknown
  misc_feature (1)..( 14): Result.001 file - promoters60/1018276
gcgaatttgatttt

SEQ ID NO: 95820 - DNA, 14 bp, Unknown
  misc_feature (1)..( 14): Result.001 file - promoters60/1018276
tgcttgttggtatg

SEQ ID NO: 95821 - DNA, 14 bp, Unknown
  misc_feature (1)..( 14): Result.001 file - promoters60/1018276
aatgtgttttactc

SEQ ID NO: 95822 - DNA, 10 bp, Unknown
  misc_feature (1)..( 10): Result.001 file - promoters60/1018276
atatttgttg

SEQ ID NO: 95823 - DNA, 10 bp, Unknown
  misc_feature (1)..( 10): Result.001 file - promoters60/1018276
ctgcttgttg

SEQ ID NO: 95824 - DNA, 10 bp, Unknown
  misc_feature (1)..( 10): Result.001 file - promoters60/1018276
gaatttgttt

SEQ ID NO: 95825 - DNA, 10 bp, Unknown
  misc_feature (1)..( 10): Result.001 file - promoters60/1018276
taatgtgttt

SEQ ID NO: 95826 - DNA, 10 bp, Unknown
  misc_feature (1)..( 10): Result.001 file - promoters60/1018276
gaatttgatt

SEQ ID NO: 95827 - DNA, 12 bp, Unknown
  misc_feature (1)..( 12): Result.001 file - promoters60/1018276
ctgattttttta

SEQ ID NO: 95828 - DNA, 12 bp, Unknown
  misc_feature (1)..( 12): Result.001 file - promoters60/1018276
aacatttttcag

SEQ ID NO: 95829 - DNA, 12 bp, Unknown
  misc_feature (1)..( 12): Result.001 file - promoters60/1018276
atccttttttta

SEQ ID NO: 95830 - DNA, 12 bp, Unknown
  misc_feature (1)..( 12): Result.001 file - promoters60/1018276
acaatttaaaaa

SEQ ID NO: 95831 - DNA, 10 bp, Unknown
  misc_feature (1)..( 10): Result.001 file - promoters60/1018276
ttgaatctaa

SEQ ID NO: 95832 - DNA, 10 bp, Unknown
  misc_feature (1)..( 10): Result.001 file - promoters60/1018276
cataatgtaa

SEQ ID NO: 95833 - DNA, 10 bp, Unknown
  misc_feature (1)..( 10): Result.001 file - promoters60/1018276
tatattgtgc

SEQ ID NO: 95834 - DNA, 10 bp, Unknown
  misc_feature (1)..( 10): Result.001 file - promoters60/1018276
tatactgttt

SEQ ID NO: 95835 - DNA, 7 bp, Unknown
  misc_feature (1)..( 7): Result.001 file - promoters60/1018276
atttgtt

SEQ ID NO: 95836 - DNA, 7 bp, Unknown
  misc_feature (1)..( 7): Result.001 file - promoters60/1018276
atttgta

SEQ ID NO: 95837 - DNA, 7 bp, Unknown
  misc_feature (1)..( 7): Result.001 file - promoters60/1018276
atttgtt

SEQ ID NO: 95838 - DNA, 7 bp, Unknown
  misc_feature (1)..( 7): Result.001 file - promoters60/1018276
atttgta

SEQ ID NO: 95839 - DNA, 13 bp, Unknown
  misc_feature (1)..( 13): Result.001 file - promoters60/1018276
gcaatggttggtt

SEQ ID NO: 95840 - DNA, 13 bp, Unknown
  misc_feature (1)..( 13): Result.001 file - promoters60/1018276
ggtatgtttgata

SEQ ID NO: 95841 - DNA, 13 bp, Unknown
  misc_feature (1)..( 13): Result.001 file - promoters60/1018276
aatttgtttgatt

SEQ ID NO: 95842 - DNA, 13 bp, Unknown
  misc_feature (1)..( 13): Result.001 file - promoters60/1018276
aatgtgttttact

SEQ ID NO: 95843 - DNA, 13 bp, Unknown
  misc_feature (1)..( 13): Result.001 file - promoters60/1018276
tttgattttcatt

SEQ ID NO: 95844 - DNA, 12 bp, Unknown
  misc_feature (1)..( 12): Result.001 file - promoters60/1018276
tgcttattacag

SEQ ID NO: 95845 - DNA, 12 bp, Unknown
  misc_feature (1)..( 12): Result.001 file - promoters60/1018276
taaatatcacag

SEQ ID NO: 95846 - DNA, 12 bp, Unknown
  misc_feature (1)..( 12): Result.001 file - promoters60/1018276
tctgtattgcag

SEQ ID NO: 95847 - DNA, 12 bp, Unknown
  misc_feature (1)..( 12): Result.001 file - promoters60/1018391
cttcaatctcat

SEQ ID NO: 95848 - DNA, 9 bp, Unknown
  misc_feature (1)..( 9): Result.001 file - promoters60/1018391
aaaagtggc

SEQ ID NO: 95849 - DNA, 9 bp, Unknown
  misc_feature (1)..( 9): Result.001 file - promoters60/1018391
aaaagttat

SEQ ID NO: 95850 - DNA, 9 bp, Unknown
  misc_feature (1)..( 9): Result.001 file - promoters60/1018391
aaaagtttc

SEQ ID NO: 95851 - DNA, 9 bp, Unknown
  misc_feature (1)..( 9): Result.001 file - promoters60/1018391
aaaagttat

SEQ ID NO: 95852 - DNA, 9 bp, Unknown
  misc_feature (1)..( 9): Result.001 file - promoters60/1018391
caaagaaag

SEQ ID NO: 95853 - DNA, 9 bp, Unknown
  misc_feature (1)..( 9): Result.001 file - promoters60/1018454
aaaattagc

SEQ ID NO: 95854 - DNA, 10 bp, Unknown
  misc_feature (1)..( 10): Result.001 file - promoters60/1018454
agaaaatggt

SEQ ID NO: 95855 - DNA, 10 bp, Unknown
  misc_feature (1)..( 10): Result.001 file - promoters60/1018454
tgaaaattat

SEQ ID NO: 95856 - DNA, 10 bp, Unknown
  misc_feature (1)..( 10): Result.001 file - promoters60/1018454
agacaataag

SEQ ID NO: 95857 - DNA, 10 bp, Unknown
  misc_feature (1)..( 10): Result.001 file - promoters60/1018454
ggaaaatttc

SEQ ID NO: 95858 - DNA, 10 bp, Unknown
  misc_feature (1)..( 10): Result.001 file - promoters60/1018454
caaaaatatt

SEQ ID NO: 95859 - DNA, 10 bp, Unknown
  misc_feature (1)..( 10): Result.001 file - promoters60/1018499
ttcaaatatg

SEQ ID NO: 95860 - DNA, 9 bp, Unknown
  misc_feature (1)..( 9): Result.001 file - promoters60/1018499
aattaaaat

SEQ ID NO: 95861 - DNA, 9 bp, Unknown
  misc_feature (1)..( 9): Result.001 file - promoters60/1018499
aataaaaat

SEQ ID NO: 95862 - DNA, 9 bp, Unknown
  misc_feature (1)..( 9): Result.001 file - promoters60/1018499
aacaaaaat

SEQ ID NO: 95863 - DNA, 7 bp, Unknown
  misc_feature (1)..( 7): Result.001 file - promoters60/1018499
cataaaa

SEQ ID NO: 95864 - DNA, 7 bp, Unknown
  misc_feature (1)..( 7): Result.001 file - promoters60/1018499
cataaac

SEQ ID NO: 95865 - DNA, 7 bp, Unknown
  misc_feature (1)..( 7): Result.001 file - promoters60/1018519
cattaac

SEQ ID NO: 95866 - DNA, 9 bp, Unknown
  misc_feature (1)..( 9): Result.001 file - promoters60/1018519
tcacaacca

SEQ ID NO: 95867 - DNA, 9 bp, Unknown
  misc_feature (1)..( 9): Result.001 file - promoters60/1018519
tcacaattg

SEQ ID NO: 95868 - DNA, 9 bp, Unknown
  misc_feature (1)..( 9): Result.001 file - promoters60/1018523
tcacatttg

SEQ ID NO: 95869 - DNA, 9 bp, Unknown
  misc_feature (1)..( 9): Result.001 file - promoters60/1018523
gaaaatatt

SEQ ID NO: 95870 - DNA, 9 bp, Unknown
  misc_feature (1)..( 9): Result.001 file - promoters60/1018523
aaaaataag

SEQ ID NO: 95871 - DNA, 9 bp, Unknown
  misc_feature (1)..( 9): Result.001 file - promoters60/1018523
aaaaattaa

SEQ ID NO: 95872 - DNA, 9 bp, Unknown
  misc_feature (1)..( 9): Result.001 file - promoters60/1018523
taaagtata

SEQ ID NO: 95873 - DNA, 9 bp, Unknown
  misc_feature (1)..( 9): Result.001 file - promoters60/1018523
aaagattta

SEQ ID NO: 95874 - DNA, 9 bp, Unknown
  misc_feature (1)..( 9): Result.001 file - promoters60/1018523
aaacatatt

SEQ ID NO: 95875 - DNA, 9 bp, Unknown
  misc_feature (1)..( 9): Result.001 file - promoters60/1018523
taaaatttc

SEQ ID NO: 95876 - DNA, 9 bp, Unknown
  misc_feature (1)..( 9): Result.001 file - promoters60/1018523
aaaataaat

SEQ ID NO: 95877 - DNA, 9 bp, Unknown
  misc_feature (1)..( 9): Result.001 file - promoters60/1018523
ttaataaag

SEQ ID NO: 95878 - DNA, 9 bp, Unknown
  misc_feature (1)..( 9): Result.001 file - promoters60/1018523
aaaattaat

SEQ ID NO: 95879 - DNA, 10 bp, Unknown
  misc_feature (1)..( 10): Result.001 file - promoters60/1018523
gaaatataag

SEQ ID NO: 95880 - DNA, 10 bp, Unknown
  misc_feature (1)..( 10): Result.001 file - promoters60/1018523
ataatatttc

SEQ ID NO: 95881 - DNA, 10 bp, Unknown
  misc_feature (1)..( 10): Result.001 file - promoters60/1018523
attataaaat

SEQ ID NO: 95882 - DNA, 10 bp, Unknown
  misc_feature (1)..( 10): Result.001 file - promoters60/1018523
aaaacaaacg

SEQ ID NO: 95883 - DNA, 10 bp, Unknown
  misc_feature (1)..( 10): Result.001 file - promoters60/1018523
aaaaaaaaga

SEQ ID NO: 95884 - DNA, 10 bp, Unknown
  misc_feature (1)..( 10): Result.001 file - promoters60/1018523
taaataaatt

SEQ ID NO: 95885 - DNA, 10 bp, Unknown
  misc_feature (1)..( 10): Result.001 file - promoters60/1018523
caaacaaatg

SEQ ID NO: 95886 - DNA, 10 bp, Unknown
  misc_feature (1)..( 10): Result.001 file - promoters60/1018523
taaaaaaaga

SEQ ID NO: 95887 - DNA, 10 bp, Unknown
  misc_feature (1)..( 10): Result.001 file - promoters60/1018523
gaaacaaatt

SEQ ID NO: 95888 - DNA, 10 bp, Unknown
  misc_feature (1)..( 10): Result.001 file - promoters60/1018523
ataatgaatt

SEQ ID NO: 95889 - DNA, 14 bp, Unknown
  misc_feature (1)..( 14): Result.001 file - promoters60/1018523
aattacaaaactac

SEQ ID NO: 95890 - DNA, 14 bp, Unknown
  misc_feature (1)..( 14): Result.001 file - promoters60/1018523
gtatacaaaaaaag

SEQ ID NO: 95891 - DNA, 14 bp, Unknown
  misc_feature (1)..( 14): Result.001 file - promoters60/1018523
caatactatctaat

SEQ ID NO: 95892 - DNA, 14 bp, Unknown
  misc_feature (1)..( 14): Result.001 file - promoters60/1018523
actcccaaaaataa

SEQ ID NO: 95893 - DNA, 14 bp, Unknown
  misc_feature (1)..( 14): Result.001 file - promoters60/1018523
aattcctaaaatca

SEQ ID NO: 95894 - DNA, 14 bp, Unknown
  misc_feature (1)..( 14): Result.001 file - promoters60/1018523
gacaaataaacata

SEQ ID NO: 95895 - DNA, 14 bp, Unknown
  misc_feature (1)..( 14): Result.001 file - promoters60/1018523
agttgcaaaaaacg

SEQ ID NO: 95896 - DNA, 14 bp, Unknown
  misc_feature (1)..( 14): Result.001 file - promoters60/1018523
atatacaagaacac

SEQ ID NO: 95897 - DNA, 13 bp, Unknown
  misc_feature (1)..( 13): Result.001 file - promoters60/1018523
aataaataaaagc

SEQ ID NO: 95898 - DNA, 13 bp, Unknown
  misc_feature (1)..( 13): Result.001 file - promoters60/1018523
aaacaataaaatt

SEQ ID NO: 95899 - DNA, 13 bp, Unknown
  misc_feature (1)..( 13): Result.001 file - promoters60/1018523
atgaaatataagt

SEQ ID NO: 95900 - DNA, 13 bp, Unknown
  misc_feature (1)..( 13): Result.001 file - promoters60/1018523
acattataaaata

SEQ ID NO: 95901 - DNA, 13 bp, Unknown
  misc_feature (1)..( 13): Result.001 file - promoters60/1018523
aaacagtaaaacc

SEQ ID NO: 95902 - DNA, 13 bp, Unknown
  misc_feature (1)..( 13): Result.001 file - promoters60/1018523
aggagataatatt

SEQ ID NO: 95903 - DNA, 10 bp, Unknown
  misc_feature (1)..( 10): Result.001 file - promoters60/1018523
atattattag

SEQ ID NO: 95904 - DNA, 10 bp, Unknown
  misc_feature (1)..( 10): Result.001 file - promoters60/1018523
atattattag

SEQ ID NO: 95905 - DNA, 10 bp, Unknown
  misc_feature (1)..( 10): Result.001 file - promoters60/1018523
ttattatatt

SEQ ID NO: 95906 - DNA, 10 bp, Unknown
  misc_feature (1)..( 10): Result.001 file - promoters60/1018523
atataattat

SEQ ID NO: 95907 - DNA, 10 bp, Unknown
  misc_feature (1)..( 10): Result.001 file - promoters60/1018523
aaattattta

SEQ ID NO: 95908 - DNA, 10 bp, Unknown
  misc_feature (1)..( 10): Result.001 file - promoters60/1018523
aactaattaa

SEQ ID NO: 95909 - DNA, 10 bp, Unknown
  misc_feature (1)..( 10): Result.001 file - promoters60/1018523
actacatatt

SEQ ID NO: 95910 - DNA, 10 bp, Unknown
  misc_feature (1)..( 10): Result.001 file - promoters60/1018523
taaacatatt

SEQ ID NO: 95911 - DNA, 10 bp, Unknown
  misc_feature (1)..( 10): Result.001 file - promoters60/1018523
tcaacatata

SEQ ID NO: 95912 - DNA, 10 bp, Unknown
  misc_feature (1)..( 10): Result.001 file - promoters60/1018523
caaaaataag

SEQ ID NO: 95913 - DNA, 10 bp, Unknown
  misc_feature (1)..( 10): Result.001 file - promoters60/1018523
caaaaaacga

SEQ ID NO: 95914 - DNA, 10 bp, Unknown
  misc_feature (1)..( 10): Result.001 file - promoters60/1018523
aaaaaaagct

SEQ ID NO: 95915 - DNA, 10 bp, Unknown
  misc_feature (1)..( 10): Result.001 file - promoters60/1018523
taaacatata

SEQ ID NO: 95916 - DNA, 11 bp, Unknown
  misc_feature (1)..( 11): Result.001 file - promoters60/1018523
atgaaaaacaa

SEQ ID NO: 95917 - DNA, 11 bp, Unknown
  misc_feature (1)..( 11): Result.001 file - promoters60/1018523
aagaaaaaata

SEQ ID NO: 95918 - DNA, 11 bp, Unknown
  misc_feature (1)..( 11): Result.001 file - promoters60/1018523
gggaaaaaaaa

SEQ ID NO: 95919 - DNA, 11 bp, Unknown
  misc_feature (1)..( 11): Result.001 file - promoters60/1018523
gttaaaaaata

SEQ ID NO: 95920 - DNA, 11 bp, Unknown
  misc_feature (1)..( 11): Result.001 file - promoters60/1018523
tttacaaacaa

SEQ ID NO: 95921 - DNA, 11 bp, Unknown
  misc_feature (1)..( 11): Result.001 file - promoters60/1018523
attaacaaact

SEQ ID NO: 95922 - DNA, 10 bp, Unknown
  misc_feature (1)..( 10): Result.001 file - promoters60/1018523
taagattagt

SEQ ID NO: 95923 - DNA, 10 bp, Unknown
  misc_feature (1)..( 10): Result.001 file - promoters60/1018523
taaaatttca

SEQ ID NO: 95924 - DNA, 10 bp, Unknown
  misc_feature (1)..( 10): Result.001 file - promoters60/1018523
aaaaattaaa

SEQ ID NO: 95925 - DNA, 11 bp, Unknown
  misc_feature (1)..( 11): Result.001 file - promoters60/1018523
taacaattcta

SEQ ID NO: 95926 - DNA, 11 bp, Unknown
  misc_feature (1)..( 11): Result.001 file - promoters60/1018523
ccaaaattcaa

SEQ ID NO: 95927 - DNA, 11 bp, Unknown
  misc_feature (1)..( 11): Result.001 file - promoters60/1018523
tgccaatacta

SEQ ID NO: 95928 - DNA, 11 bp, Unknown
  misc_feature (1)..( 11): Result.001 file - promoters60/1018529
gaacaagtctc

SEQ ID NO: 95929 - DNA, 14 bp, Unknown
  misc_feature (1)..( 14): Result.001 file - promoters60/1018529
tttttctatcctct

SEQ ID NO: 95930 - DNA, 14 bp, Unknown
  misc_feature (1)..( 14): Result.001 file - promoters60/1018529
ttcatctatcttct

SEQ ID NO: 95931 - DNA, 14 bp, Unknown
  misc_feature (1)..( 14): Result.001 file - promoters60/1018529
tttttttatcctcc

SEQ ID NO: 95932 - DNA, 14 bp, Unknown
  misc_feature (1)..( 14): Result.001 file - promoters60/1018536
gaaatttgtttttg

SEQ ID NO: 95933 - DNA, 14 bp, Unknown
  misc_feature (1)..( 14): Result.001 file - promoters60/1018536
tatttttgaagaat

SEQ ID NO: 95934 - DNA, 14 bp, Unknown
  misc_feature (1)..( 14): Result.001 file - promoters60/1018536
tatttatgacgagg

SEQ ID NO: 95935 - DNA, 14 bp, Unknown
  misc_feature (1)..( 14): Result.001 file - promoters60/1018536
caattttgatgaat

SEQ ID NO: 95936 - DNA, 14 bp, Unknown
  misc_feature (1)..( 14): Result.001 file - promoters60/1018536
tattttaattcatg

SEQ ID NO: 95937 - DNA, 14 bp, Unknown
  misc_feature (1)..( 14): Result.001 file - promoters60/1018536
tagatttgctgaat

SEQ ID NO: 95938 - DNA, 14 bp, Unknown
  misc_feature (1)..( 14): Result.001 file - promoters60/1018536
cccttgtgaatgtc

SEQ ID NO: 95939 - DNA, 10 bp, Unknown
  misc_feature (1)..( 10): Result.001 file - promoters60/1018536
aattttgaaa

SEQ ID NO: 95940 - DNA, 10 bp, Unknown
  misc_feature (1)..( 10): Result.001 file - promoters60/1018536
aatcttgaac

SEQ ID NO: 95941 - DNA, 10 bp, Unknown
  misc_feature (1)..( 10): Result.001 file - promoters60/1018536
aattttgatg

SEQ ID NO: 95942 - DNA, 12 bp, Unknown
  misc_feature (1)..( 12): Result.001 file - promoters60/1018536
gatttgctgaat

SEQ ID NO: 95943 - DNA, 9 bp, Unknown
  misc_feature (1)..( 9): Result.001 file - promoters60/1018536
aaaaagaaa

SEQ ID NO: 95944 - DNA, 9 bp, Unknown
  misc_feature (1)..( 9): Result.001 file - promoters60/1018536
aaaaagctg

SEQ ID NO: 95945 - DNA, 9 bp, Unknown
  misc_feature (1)..( 9): Result.001 file - promoters60/1018536
aaaatgcta

SEQ ID NO: 95946 - DNA, 9 bp, Unknown
  misc_feature (1)..( 9): Result.001 file - promoters60/1018536
ccaattcta

SEQ ID NO: 95947 - DNA, 8 bp, Unknown
  misc_feature (1)..( 8): Result.001 file - promoters60/1018536
atttaaaa

SEQ ID NO: 95948 - DNA, 8 bp, Unknown
  misc_feature (1)..( 8): Result.001 file - promoters60/1018536
attttaaa

SEQ ID NO: 95949 - DNA, 8 bp, Unknown
  misc_feature (1)..( 8): Result.001 file - promoters60/1018536
gtttcaaa

SEQ ID NO: 95950 - DNA, 8 bp, Unknown
  misc_feature (1)..( 8): Result.001 file - promoters60/1018536
attttaat

SEQ ID NO: 95951 - DNA, 8 bp, Unknown
  misc_feature (1)..( 8): Result.001 file - promoters60/1018536
attctaac

SEQ ID NO: 95952 - DNA, 8 bp, Unknown
  misc_feature (1)..( 8): Result.001 file - promoters60/1018536
ttttcaat

SEQ ID NO: 95953 - DNA, 8 bp, Unknown
  misc_feature (1)..( 8): Result.001 file - promoters60/1018536
attttaat

SEQ ID NO: 95954 - DNA, 8 bp, Unknown
  misc_feature (1)..( 8): Result.001 file - promoters60/1018536
attttaaa

SEQ ID NO: 95955 - DNA, 8 bp, Unknown
  misc_feature (1)..( 8): Result.001 file - promoters60/1018536
attctaac

SEQ ID NO: 95956 - DNA, 8 bp, Unknown
  misc_feature (1)..( 8): Result.001 file - promoters60/1018536
cttttaaa

SEQ ID NO: 95957 - DNA, 17 bp, Unknown
  misc_feature (1)..( 17): Result.001 file - promoters60/1018536
aaaatgttagataggaa

SEQ ID NO: 95958 - DNA, 17 bp, Unknown
  misc_feature (1)..( 17): Result.001 file - promoters60/1018536
taaattttaaaattatt

SEQ ID NO: 95959 - DNA, 17 bp, Unknown
  misc_feature (1)..( 17): Result.001 file - promoters60/1018536
taaattttgaaataatt

SEQ ID NO: 95960 - DNA, 17 bp, Unknown
  misc_feature (1)..( 17): Result.001 file - promoters60/1018536
taattgttaatcttttg

SEQ ID NO: 95961 - DNA, 10 bp, Unknown
  misc_feature (1)..( 10): Result.001 file - promoters60/1018536
tatataaaca

SEQ ID NO: 95962 - DNA, 10 bp, Unknown
  misc_feature (1)..( 10): Result.001 file - promoters60/1018536
tatataataa

SEQ ID NO: 95963 - DNA, 10 bp, Unknown
  misc_feature (1)..( 10): Result.001 file - promoters60/1018536
cctataaata

SEQ ID NO: 95964 - DNA, 10 bp, Unknown
  misc_feature (1)..( 10): Result.001 file - promoters60/1018536
acgataaata

SEQ ID NO: 95965 - DNA, 14 bp, Unknown
  misc_feature (1)..( 14): Result.001 file - promoters60/1018536
aaacttataattat

SEQ ID NO: 95966 - DNA, 14 bp, Unknown
  misc_feature (1)..( 14): Result.001 file - promoters60/1018536
atctttataagtat

SEQ ID NO: 95967 - DNA, 14 bp, Unknown
  misc_feature (1)..( 14): Result.001 file - promoters60/1018536
gctaatataagtaa

SEQ ID NO: 95968 - DNA, 14 bp, Unknown
  misc_feature (1)..( 14): Result.001 file - promoters60/1018536
aaatttgtaacttc

SEQ ID NO: 95969 - DNA, 14 bp, Unknown
  misc_feature (1)..( 14): Result.001 file - promoters60/1018536
cgttttaaaagtaa

SEQ ID NO: 95970 - DNA, 14 bp, Unknown
  misc_feature (1)..( 14): Result.001 file - promoters60/1018536
atctttatacaaaa

SEQ ID NO: 95971 - DNA, 8 bp, Unknown
  misc_feature (1)..( 8): Result.001 file - promoters60/1018536
gaaaatat

SEQ ID NO: 95972 - DNA, 8 bp, Unknown
  misc_feature (1)..( 8): Result.001 file - promoters60/1018536
caaattat

SEQ ID NO: 95973 - DNA, 8 bp, Unknown
  misc_feature (1)..( 8): Result.001 file - promoters60/1018536
aaaaatat

SEQ ID NO: 95974 - DNA, 8 bp, Unknown
  misc_feature (1)..( 8): Result.001 file - promoters60/1018536
caaattct

SEQ ID NO: 95975 - DNA, 11 bp, Unknown
  misc_feature (1)..( 11): Result.001 file - promoters60/1018536
taatataagta

SEQ ID NO: 95976 - DNA, 11 bp, Unknown
  misc_feature (1)..( 11): Result.001 file - promoters60/1018536
taatgtaattt

SEQ ID NO: 95977 - DNA, 11 bp, Unknown
  misc_feature (1)..( 11): Result.001 file - promoters60/1018536
ctttataagta

SEQ ID NO: 95978 - DNA, 11 bp, Unknown
  misc_feature (1)..( 11): Result.001 file - promoters60/1018536
gaatgtatata

SEQ ID NO: 95979 - DNA, 10 bp, Unknown
  misc_feature (1)..( 10): Result.001 file - promoters60/1018536
ttgattcatc

SEQ ID NO: 95980 - DNA, 10 bp, Unknown
  misc_feature (1)..( 10): Result.001 file - promoters60/1018536
taatttcatc

SEQ ID NO: 95981 - DNA, 10 bp, Unknown
  misc_feature (1)..( 10): Result.001 file - promoters60/1018536
attattcata

SEQ ID NO: 95982 - DNA, 10 bp, Unknown
  misc_feature (1)..( 10): Result.001 file - promoters60/1018536
attgttcatt

SEQ ID NO: 95983 - DNA, 13 bp, Unknown
  misc_feature (1)..( 13): Result.001 file - promoters60/1018536
aatataagtaaca

SEQ ID NO: 95984 - DNA, 13 bp, Unknown
  misc_feature (1)..( 13): Result.001 file - promoters60/1018536
agatgaagtcaca

SEQ ID NO: 95985 - DNA, 13 bp, Unknown
  misc_feature (1)..( 13): Result.001 file - promoters60/1018536
tttataagtataa

SEQ ID NO: 95986 - DNA, 13 bp, Unknown
  misc_feature (1)..( 13): Result.001 file - promoters60/1018536
gaaatttgtaact

SEQ ID NO: 95987 - DNA, 13 bp, Unknown
  misc_feature (1)..( 13): Result.001 file - promoters60/1018536
tttaaaagtaaga

SEQ ID NO: 95988 - DNA, 11 bp, Unknown
  misc_feature (1)..( 11): Result.001 file - promoters60/1018536
ataatattctc

SEQ ID NO: 95989 - DNA, 11 bp, Unknown
  misc_feature (1)..( 11): Result.001 file - promoters60/1018536
ataatatattt

SEQ ID NO: 95990 - DNA, 11 bp, Unknown
  misc_feature (1)..( 11): Result.001 file - promoters60/1018536
aaaatatgttt

SEQ ID NO: 95991 - DNA, 11 bp, Unknown
  misc_feature (1)..( 11): Result.001 file - promoters60/1018755
ttaacatataa

SEQ ID NO: 95992 - DNA, 13 bp, Unknown
  misc_feature (1)..( 13): Result.001 file - promoters60/1018755
gtaatcaatccta

SEQ ID NO: 95993 - DNA, 13 bp, Unknown
  misc_feature (1)..( 13): Result.001 file - promoters60/1018755
aaaatgaattctt

SEQ ID NO: 95994 - DNA, 13 bp, Unknown
  misc_feature (1)..( 13): Result.001 file - promoters60/1018755
caaatcaaatcga

SEQ ID NO: 95995 - DNA, 13 bp, Unknown
  misc_feature (1)..( 13): Result.001 file - promoters60/1018755
tgcatcaatgctt

SEQ ID NO: 95996 - DNA, 13 bp, Unknown
  misc_feature (1)..( 13): Result.001 file - promoters60/1018755
aaaacgaatggca

SEQ ID NO: 95997 - DNA, 13 bp, Unknown
  misc_feature (1)..( 13): Result.001 file - promoters60/1018755
aagacgaatctaa

SEQ ID NO: 95998 - DNA, 13 bp, Unknown
  misc_feature (1)..( 13): Result.001 file - promoters60/1018755
atcattaatcctt

SEQ ID NO: 95999 - DNA, 14 bp, Unknown
  misc_feature (1)..( 14): Result.001 file - promoters60/1018755
ggccttttagtttg

SEQ ID NO: 96000 - DNA, 14 bp, Unknown
  misc_feature (1)..( 14): Result.001 file - promoters60/1018755
gataatttagtgga

SEQ ID NO: 96001 - DNA, 14 bp, Unknown
  misc_feature (1)..( 14): Result.001 file - promoters60/1018755
taccctttcgtttg

SEQ ID NO: 96002 - DNA, 14 bp, Unknown
  misc_feature (1)..( 14): Result.001 file - promoters60/1018755
ggccttttaggatc

SEQ ID NO: 96003 - DNA, 14 bp, Unknown
  misc_feature (1)..( 14): Result.001 file - promoters60/1018755
gaaaaattattttc

SEQ ID NO: 96004 - DNA, 14 bp, Unknown
  misc_feature (1)..( 14): Result.001 file - promoters60/1018783
tcccttttgattta

SEQ ID NO: 96005 - DNA, 13 bp, Unknown
  misc_feature (1)..( 13): Result.001 file - promoters60/1018783
tgttcatactcga

SEQ ID NO: 96006 - DNA, 13 bp, Unknown
  misc_feature (1)..( 13): Result.001 file - promoters60/1018783
tgttaataattat

SEQ ID NO: 96007 - DNA, 13 bp, Unknown
  misc_feature (1)..( 13): Result.001 file - promoters60/1018783
tcttcataccaac

SEQ ID NO: 96008 - DNA, 13 bp, Unknown
  misc_feature (1)..( 13): Result.001 file - promoters60/1018783
ttataatcattat

SEQ ID NO: 96009 - DNA, 9 bp, Unknown
  misc_feature (1)..( 9): Result.001 file - promoters60/1018783
atgattaaa

SEQ ID NO: 96010 - DNA, 9 bp, Unknown
  misc_feature (1)..( 9): Result.001 file - promoters60/1018783
ccaattaaa

SEQ ID NO: 96011 - DNA, 9 bp, Unknown
  misc_feature (1)..( 9): Result.001 file - promoters60/1018783
ccacttaac

SEQ ID NO: 96012 - DNA, 10 bp, Unknown
  misc_feature (1)..( 10): Result.001 file - promoters60/1018783
attcaacgta

SEQ ID NO: 96013 - DNA, 10 bp, Unknown
  misc_feature (1)..( 10): Result.001 file - promoters60/1018783
attgaacgga

SEQ ID NO: 96014 - DNA, 10 bp, Unknown
  misc_feature (1)..( 10): Result.001 file - promoters60/1018798
gtacaaggta

SEQ ID NO: 96015 - DNA, 10 bp, Unknown
  misc_feature (1)..( 10): Result.001 file - promoters60/1018798
tcaaaatacc

SEQ ID NO: 96016 - DNA, 10 bp, Unknown
  misc_feature (1)..( 10): Result.001 file - promoters60/1018798
tcagaatctg

SEQ ID NO: 96017 - DNA, 10 bp, Unknown
  misc_feature (1)..( 10): Result.001 file - promoters60/1018798
ctaaaataat

SEQ ID NO: 96018 - DNA, 10 bp, Unknown
  misc_feature (1)..( 10): Result.001 file - promoters60/1018798
aaagaatcac

SEQ ID NO: 96019 - DNA, 10 bp, Unknown
  misc_feature (1)..( 10): Result.001 file - promoters60/1018798
ctataattgt

SEQ ID NO: 96020 - DNA, 10 bp, Unknown
  misc_feature (1)..( 10): Result.001 file - promoters60/1018798
ctataactga

SEQ ID NO: 96021 - DNA, 10 bp, Unknown
  misc_feature (1)..( 10): Result.001 file - promoters60/1018798
ttaagatagc

SEQ ID NO: 96022 - DNA, 10 bp, Unknown
  misc_feature (1)..( 10): Result.001 file - promoters60/1018798
agaaaaaaat

SEQ ID NO: 96023 - DNA, 13 bp, Unknown
  misc_feature (1)..( 13): Result.001 file - promoters60/1018798
gaatctttgatta

SEQ ID NO: 96024 - DNA, 13 bp, Unknown
  misc_feature (1)..( 13): Result.001 file - promoters60/1018798
ttaactttgaaag

SEQ ID NO: 96025 - DNA, 13 bp, Unknown
  misc_feature (1)..( 13): Result.001 file - promoters60/1018798
caatatttgtaat

SEQ ID NO: 96026 - DNA, 13 bp, Unknown
  misc_feature (1)..( 13): Result.001 file - promoters60/1018798
tagtatttataat

SEQ ID NO: 96027 - DNA, 13 bp, Unknown
  misc_feature (1)..( 13): Result.001 file - promoters60/1018798
caaaattatatcc

SEQ ID NO: 96028 - DNA, 13 bp, Unknown
  misc_feature (1)..( 13): Result.001 file - promoters60/1018831
caatatgtgcaac

SEQ ID NO: 96029 - DNA, 6 bp, Unknown
  misc_feature (1)..( 6): Result.001 file - promoters60/1018831
agaatc

SEQ ID NO: 96030 - DNA, 6 bp, Unknown
  misc_feature (1)..( 6): Result.001 file - promoters60/1018831
agaatc

SEQ ID NO: 96031 - DNA, 8 bp, Unknown
  misc_feature (1)..( 8): Result.001 file - promoters60/1018831
tccggagg

SEQ ID NO: 96032 - DNA, 8 bp, Unknown
  misc_feature (1)..( 8): Result.001 file - promoters60/1018831
tccgtagg

SEQ ID NO: 96033 - DNA, 6 bp, Unknown
  misc_feature (1)..( 6): Result.001 file - promoters60/1018831
gtactc

SEQ ID NO: 96034 - DNA, 6 bp, Unknown
  misc_feature (1)..( 6): Result.001 file - promoters60/1018831
gtactc

SEQ ID NO: 96035 - DNA, 6 bp, Unknown
  misc_feature (1)..( 6): Result.001 file - promoters60/1018831
aactct

SEQ ID NO: 96036 - DNA, 6 bp, Unknown
  misc_feature (1)..( 6): Result.001 file - promoters60/1018831
aactct

SEQ ID NO: 96037 - DNA, 10 bp, Unknown
  misc_feature (1)..( 10): Result.001 file - promoters60/1018831
gaatacattc

SEQ ID NO: 96038 - DNA, 10 bp, Unknown
  misc_feature (1)..( 10): Result.001 file - promoters60/1018831
gaaaacatac

SEQ ID NO: 96039 - DNA, 10 bp, Unknown
  misc_feature (1)..( 10): Result.001 file - promoters60/1018831
aaaaccatac

SEQ ID NO: 96040 - DNA, 7 bp, Unknown
  misc_feature (1)..( 7): Result.001 file - promoters60/1018831
caacagg

SEQ ID NO: 96041 - DNA, 7 bp, Unknown
  misc_feature (1)..( 7): Result.001 file - promoters60/1018831
caaaagg

SEQ ID NO: 96042 - DNA, 6 bp, Unknown
  misc_feature (1)..( 6): Result.001 file - promoters60/1018831
aatcat

SEQ ID NO: 96043 - DNA, 6 bp, Unknown
  misc_feature (1)..( 6): Result.001 file - promoters60/1018831
aatcat

SEQ ID NO: 96044 - DNA, 10 bp, Unknown
  misc_feature (1)..( 10): Result.001 file - promoters60/1018831
ttcacatgtt

SEQ ID NO: 96045 - DNA, 10 bp, Unknown
  misc_feature (1)..( 10): Result.001 file - promoters60/1018831
ttcacaggtt

SEQ ID NO: 96046 - DNA, 8 bp, Unknown
  misc_feature (1)..( 8): Result.001 file - promoters60/1018831
aagcaact

SEQ ID NO: 96047 - DNA, 8 bp, Unknown
  misc_feature (1)..( 8): Result.001 file - promoters60/1018831
aagcaact

SEQ ID NO: 96048 - DNA, 6 bp, Unknown
  misc_feature (1)..( 6): Result.001 file - promoters60/1018831
acaaaa

SEQ ID NO: 96049 - DNA, 6 bp, Unknown
  misc_feature (1)..( 6): Result.001 file - promoters60/1018831
acaaaa

SEQ ID NO: 96050 - DNA, 7 bp, Unknown
  misc_feature (1)..( 7): Result.001 file - promoters60/1018831
aagaaaa

SEQ ID NO: 96051 - DNA, 7 bp, Unknown
  misc_feature (1)..( 7): Result.001 file - promoters60/1018831
aaggaaa

SEQ ID NO: 96052 - DNA, 8 bp, Unknown
  misc_feature (1)..( 8): Result.001 file - promoters60/1018831
aaagtgtt

SEQ ID NO: 96053 - DNA, 8 bp, Unknown
  misc_feature (1)..( 8): Result.001 file - promoters60/1018831
aaactgtt

SEQ ID NO: 96054 - DNA, 6 bp, Unknown
  misc_feature (1)..( 6): Result.001 file - promoters60/1018831
ttggat

SEQ ID NO: 96055 - DNA, 6 bp, Unknown
  misc_feature (1)..( 6): Result.001 file - promoters60/1018831
ttggat

SEQ ID NO: 96056 - DNA, 6 bp, Unknown
  misc_feature (1)..( 6): Result.001 file - promoters60/1018831
tcaaca

SEQ ID NO: 96057 - DNA, 6 bp, Unknown
  misc_feature (1)..( 6): Result.001 file - promoters60/1018831
tcaaca

SEQ ID NO: 96058 - DNA, 6 bp, Unknown
  misc_feature (1)..( 6): Result.001 file - promoters60/1018831
gtttgt

SEQ ID NO: 96059 - DNA, 6 bp, Unknown
  misc_feature (1)..( 6): Result.001 file - promoters60/1018831
gtttgt

SEQ ID NO: 96060 - DNA, 6 bp, Unknown
  misc_feature (1)..( 6): Result.001 file - promoters60/1018831
cttcac

SEQ ID NO: 96061 - DNA, 6 bp, Unknown
  misc_feature (1)..( 6): Result.001 file - promoters60/1018835
cttcac

SEQ ID NO: 96062 - DNA, 7 bp, Unknown
  misc_feature (1)..( 7): Result.001 file - promoters60/1018835
cctttta

SEQ ID NO: 96063 - DNA, 7 bp, Unknown
  misc_feature (1)..( 7): Result.001 file - promoters60/1018835
cctttta

SEQ ID NO: 96064 - DNA, 7 bp, Unknown
  misc_feature (1)..( 7): Result.001 file - promoters60/1018835
ccttttc

SEQ ID NO: 96065 - DNA, 8 bp, Unknown
  misc_feature (1)..( 8): Result.001 file - promoters60/1018835
gttccaac

SEQ ID NO: 96066 - DNA, 8 bp, Unknown
  misc_feature (1)..( 8): Result.001 file - promoters60/1018835
gtttcaat

SEQ ID NO: 96067 - DNA, 8 bp, Unknown
  misc_feature (1)..( 8): Result.001 file - promoters60/1018835
atttaaat

SEQ ID NO: 96068 - DNA, 8 bp, Unknown
  misc_feature (1)..( 8): Result.001 file - promoters60/1018835
gaagtgcg

SEQ ID NO: 96069 - DNA, 8 bp, Unknown
  misc_feature (1)..( 8): Result.001 file - promoters60/1018835
gaaatgct

SEQ ID NO: 96070 - DNA, 8 bp, Unknown
  misc_feature (1)..( 8): Result.001 file - promoters60/1018835
ctaatgct

SEQ ID NO: 96071 - DNA, 8 bp, Unknown
  misc_feature (1)..( 8): Result.001 file - promoters60/1018835
ttgttaaa

SEQ ID NO: 96072 - DNA, 8 bp, Unknown
  misc_feature (1)..( 8): Result.001 file - promoters60/1018835
ttgttaat

SEQ ID NO: 96073 - DNA, 8 bp, Unknown
  misc_feature (1)..( 8): Result.001 file - promoters60/1018835
acgttaat

SEQ ID NO: 96074 - DNA, 10 bp, Unknown
  misc_feature (1)..( 10): Result.001 file - promoters60/1018835
tttctgaaag

SEQ ID NO: 96075 - DNA, 10 bp, Unknown
  misc_feature (1)..( 10): Result.001 file - promoters60/1018835
aggctggaag

SEQ ID NO: 96076 - DNA, 10 bp, Unknown
  misc_feature (1)..( 10): Result.001 file - promoters60/1018835
aggatggagc

SEQ ID NO: 96077 - DNA, 7 bp, Unknown
  misc_feature (1)..( 7): Result.001 file - promoters60/1018835
aaagcga

SEQ ID NO: 96078 - DNA, 7 bp, Unknown
  misc_feature (1)..( 7): Result.001 file - promoters60/1018835
gaagcga

SEQ ID NO: 96079 - DNA, 7 bp, Unknown
  misc_feature (1)..( 7): Result.001 file - promoters60/1018956
gaagcgc

SEQ ID NO: 96080 - DNA, 7 bp, Unknown
  misc_feature (1)..( 7): Result.001 file - promoters60/1018956
aatcaca

SEQ ID NO: 96081 - DNA, 7 bp, Unknown
  misc_feature (1)..( 7): Result.001 file - promoters60/1018956
aattaca

SEQ ID NO: 96082 - DNA, 10 bp, Unknown
  misc_feature (1)..( 10): Result.001 file - promoters60/1018956
ggaaaaagaa

SEQ ID NO: 96083 - DNA, 10 bp, Unknown
  misc_feature (1)..( 10): Result.001 file - promoters60/1018956
ggaaaagaaa

SEQ ID NO: 96084 - DNA, 10 bp, Unknown
  misc_feature (1)..( 10): Result.001 file - promoters60/1018956
ggaaatgaaa

SEQ ID NO: 96085 - DNA, 7 bp, Unknown
  misc_feature (1)..( 7): Result.001 file - promoters60/1018956
aaaagaa

SEQ ID NO: 96086 - DNA, 7 bp, Unknown
  misc_feature (1)..( 7): Result.001 file - promoters60/1018956
aaaagaa

SEQ ID NO: 96087 - DNA, 7 bp, Unknown
  misc_feature (1)..( 7): Result.001 file - promoters60/1018956
aaatgaa

SEQ ID NO: 96088 - DNA, 6 bp, Unknown
  misc_feature (1)..( 6): Result.001 file - promoters60/1018956
aatcaa

SEQ ID NO: 96089 - DNA, 6 bp, Unknown
  misc_feature (1)..( 6): Result.001 file - promoters60/1018956
aatcaa

SEQ ID NO: 96090 - DNA, 6 bp, Unknown
  misc_feature (1)..( 6): Result.001 file - promoters60/1018956
aactca

SEQ ID NO: 96091 - DNA, 6 bp, Unknown
  misc_feature (1)..( 6): Result.001 file - promoters60/1018956
aactca

SEQ ID NO: 96092 - DNA, 8 bp, Unknown
  misc_feature (1)..( 8): Result.001 file - promoters60/1018956
aatagcaa

SEQ ID NO: 96093 - DNA, 8 bp, Unknown
  misc_feature (1)..( 8): Result.001 file - promoters60/1018956
aattgcaa

SEQ ID NO: 96094 - DNA, 6 bp, Unknown
  misc_feature (1)..( 6): Result.001 file - promoters60/1018956
agagag

SEQ ID NO: 96095 - DNA, 6 bp, Unknown
  misc_feature (1)..( 6): Result.001 file - promoters60/1018956
agagag

SEQ ID NO: 96096 - DNA, 6 bp, Unknown
  misc_feature (1)..( 6): Result.001 file - promoters60/1018956
taaaaa

SEQ ID NO: 96097 - DNA, 6 bp, Unknown
  misc_feature (1)..( 6): Result.001 file - promoters60/1018956
taaaaa

SEQ ID NO: 96098 - DNA, 7 bp, Unknown
  misc_feature (1)..( 7): Result.001 file - promoters60/1018956
attatca

SEQ ID NO: 96099 - DNA, 7 bp, Unknown
  misc_feature (1)..( 7): Result.001 file - promoters60/1018956
attgtca

SEQ ID NO: 96100 - DNA, 6 bp, Unknown
  misc_feature (1)..( 6): Result.001 file - promoters60/1018956
agtaaa

SEQ ID NO: 96101 - DNA, 6 bp, Unknown
  misc_feature (1)..( 6): Result.001 file - promoters60/1018956
agtaaa

SEQ ID NO: 96102 - DNA, 7 bp, Unknown
  misc_feature (1)..( 7): Result.001 file - promoters60/1018956
aatcggg

SEQ ID NO: 96103 - DNA, 7 bp, Unknown
  misc_feature (1)..( 7): Result.001 file - promoters60/1018956
aattggg

SEQ ID NO: 96104 - DNA, 8 bp, Unknown
  misc_feature (1)..( 8): Result.001 file - promoters60/1018956
gaaagaaa

SEQ ID NO: 96105 - DNA, 8 bp, Unknown
  misc_feature (1)..( 8): Result.001 file - promoters60/1018956
gaaacaaa

SEQ ID NO: 96106 - DNA, 7 bp, Unknown
  misc_feature (1)..( 7): Result.001 file - promoters60/1018956
cccacta

SEQ ID NO: 96107 - DNA, 7 bp, Unknown
  misc_feature (1)..( 7): Result.001 file - promoters60/1018956
cccacta

SEQ ID NO: 96108 - DNA, 9 bp, Unknown
  misc_feature (1)..( 9): Result.001 file - promoters60/1018956
aaagaaaag

SEQ ID NO: 96109 - DNA, 9 bp, Unknown
  misc_feature (1)..( 9): Result.001 file - promoters60/1018956
aaagtaaag

SEQ ID NO: 96110 - DNA, 7 bp, Unknown
  misc_feature (1)..( 7): Result.001 file - promoters60/1018956
gtatata

SEQ ID NO: 96111 - DNA, 7 bp, Unknown
  misc_feature (1)..( 7): Result.001 file - promoters60/1018973
gtatata

SEQ ID NO: 96112 - DNA, 13 bp, Unknown
  misc_feature (1)..( 13): Result.001 file - promoters60/1018973
aaatgtttgtatt

SEQ ID NO: 96113 - DNA, 13 bp, Unknown
  misc_feature (1)..( 13): Result.001 file - promoters60/1018973
ccacaattgtatt

SEQ ID NO: 96114 - DNA, 13 bp, Unknown
  misc_feature (1)..( 13): Result.001 file - promoters60/1018973
caatctttgtatc

SEQ ID NO: 96115 - DNA, 13 bp, Unknown
  misc_feature (1)..( 13): Result.001 file - promoters60/1018973
caatctttgtttt

SEQ ID NO: 96116 - DNA, 9 bp, Unknown
  misc_feature (1)..( 9): Result.001 file - promoters60/1018973
tatttttga

SEQ ID NO: 96117 - DNA, 9 bp, Unknown
  misc_feature (1)..( 9): Result.001 file - promoters60/1018973
tatttatga

SEQ ID NO: 96118 - DNA, 9 bp, Unknown
  misc_feature (1)..( 9): Result.001 file - promoters60/1018973
tattttaat

SEQ ID NO: 96119 - DNA, 9 bp, Unknown
  misc_feature (1)..( 9): Result.001 file - promoters60/1018973
gattttaca

SEQ ID NO: 96120 - DNA, 9 bp, Unknown
  misc_feature (1)..( 9): Result.001 file - promoters60/1018973
gttcttcat

SEQ ID NO: 96121 - DNA, 9 bp, Unknown
  misc_feature (1)..( 9): Result.001 file - promoters60/1018973
attcatcac

SEQ ID NO: 96122 - DNA, 9 bp, Unknown
  misc_feature (1)..( 9): Result.001 file - promoters60/1018973
attctacat

SEQ ID NO: 96123 - DNA, 9 bp, Unknown
  misc_feature (1)..( 9): Result.001 file - promoters60/1018973
attctaaaa

SEQ ID NO: 96124 - DNA, 8 bp, Unknown
  misc_feature (1)..( 8): Result.001 file - promoters60/1018973
aaaaagaa

SEQ ID NO: 96125 - DNA, 8 bp, Unknown
  misc_feature (1)..( 8): Result.001 file - promoters60/1018973
aaaaagct

SEQ ID NO: 96126 - DNA, 8 bp, Unknown
  misc_feature (1)..( 8): Result.001 file - promoters60/1018973
aaaaaatt

SEQ ID NO: 96127 - DNA, 8 bp, Unknown
  misc_feature (1)..( 8): Result.001 file - promoters60/1018973
aaaatgct

SEQ ID NO: 96128 - DNA, 8 bp, Unknown
  misc_feature (1)..( 8): Result.001 file - promoters60/1018973
atctcttc

SEQ ID NO: 96129 - DNA, 8 bp, Unknown
  misc_feature (1)..( 8): Result.001 file - promoters60/1018973
ttctcttc

SEQ ID NO: 96130 - DNA, 8 bp, Unknown
  misc_feature (1)..( 8): Result.001 file - promoters60/1018973
ttcccttg

SEQ ID NO: 96131 - DNA, 8 bp, Unknown
  misc_feature (1)..( 8): Result.001 file - promoters60/1018973
ctcccttc

SEQ ID NO: 96132 - DNA, 11 bp, Unknown
  misc_feature (1)..( 11): Result.001 file - promoters60/1018973
ttataattatg

SEQ ID NO: 96133 - DNA, 11 bp, Unknown
  misc_feature (1)..( 11): Result.001 file - promoters60/1018973
atattattatt

SEQ ID NO: 96134 - DNA, 11 bp, Unknown
  misc_feature (1)..( 11): Result.001 file - promoters60/1018973
ttataagtata

SEQ ID NO: 96135 - DNA, 11 bp, Unknown
  misc_feature (1)..( 11): Result.001 file - promoters60/1018973
atataagtaac

SEQ ID NO: 96136 - DNA, 11 bp, Unknown
  misc_feature (1)..( 11): Result.001 file - promoters60/1018973
caatctttata

SEQ ID NO: 96137 - DNA, 10 bp, Unknown
  misc_feature (1)..( 10): Result.001 file - promoters60/1018973
tatataaaca

SEQ ID NO: 96138 - DNA, 10 bp, Unknown
  misc_feature (1)..( 10): Result.001 file - promoters60/1018973
tataaaaacc

SEQ ID NO: 96139 - DNA, 10 bp, Unknown
  misc_feature (1)..( 10): Result.001 file - promoters60/1018973
tataaatatc

SEQ ID NO: 96140 - DNA, 10 bp, Unknown
  misc_feature (1)..( 10): Result.001 file - promoters60/1018973
gataaatatc

SEQ ID NO: 96141 - DNA, 9 bp, Unknown
  misc_feature (1)..( 9): Result.001 file - promoters60/1018973
atttagttt

SEQ ID NO: 96142 - DNA, 9 bp, Unknown
  misc_feature (1)..( 9): Result.001 file - promoters60/1018973
atttagatt

SEQ ID NO: 96143 - DNA, 9 bp, Unknown
  misc_feature (1)..( 9): Result.001 file - promoters60/1018973
atataatta

SEQ ID NO: 96144 - DNA, 9 bp, Unknown
  misc_feature (1)..( 9): Result.001 file - promoters60/1019024
ctataattt

SEQ ID NO: 96145 - DNA, 9 bp, Unknown
  misc_feature (1)..( 9): Result.001 file - promoters60/1019024
acttatttg

SEQ ID NO: 96146 - DNA, 9 bp, Unknown
  misc_feature (1)..( 9): Result.001 file - promoters60/1019024
actaattta

SEQ ID NO: 96147 - DNA, 9 bp, Unknown
  misc_feature (1)..( 9): Result.001 file - promoters60/1019024
caatatttg

SEQ ID NO: 96148 - DNA, 11 bp, Unknown
  misc_feature (1)..( 11): Result.001 file - promoters60/1019024
atttaatttac

SEQ ID NO: 96149 - DNA, 11 bp, Unknown
  misc_feature (1)..( 11): Result.001 file - promoters60/1019024
atttaattctc

SEQ ID NO: 96150 - DNA, 11 bp, Unknown
  misc_feature (1)..( 11): Result.001 file - promoters60/1019024
atttatttata

SEQ ID NO: 96151 - DNA, 11 bp, Unknown
  misc_feature (1)..( 11): Result.001 file - promoters60/1019024
ttttaattaat

SEQ ID NO: 96152 - DNA, 9 bp, Unknown
  misc_feature (1)..( 9): Result.001 file - promoters60/1019024
gaaacaata

SEQ ID NO: 96153 - DNA, 9 bp, Unknown
  misc_feature (1)..( 9): Result.001 file - promoters60/1019024
gaagcaaat

SEQ ID NO: 96154 - DNA, 9 bp, Unknown
  misc_feature (1)..( 9): Result.001 file - promoters60/1019024
aaaataata

SEQ ID NO: 96155 - DNA, 12 bp, Unknown
  misc_feature (1)..( 12): Result.001 file - promoters60/1019024
ccaattttttta

SEQ ID NO: 96156 - DNA, 12 bp, Unknown
  misc_feature (1)..( 12): Result.001 file - promoters60/1019024
ataatattttta

SEQ ID NO: 96157 - DNA, 12 bp, Unknown
  misc_feature (1)..( 12): Result.001 file - promoters60/1019024
ccaatttgttat

SEQ ID NO: 96158 - DNA, 8 bp, Unknown
  misc_feature (1)..( 8): Result.001 file - promoters60/1019024
aataaata

SEQ ID NO: 96159 - DNA, 8 bp, Unknown
  misc_feature (1)..( 8): Result.001 file - promoters60/1019024
aatagata

SEQ ID NO: 96160 - DNA, 8 bp, Unknown
  misc_feature (1)..( 8): Result.001 file - promoters60/1019030
aataaaaa

SEQ ID NO: 96161 - DNA, 8 bp, Unknown
  misc_feature (1)..( 8): Result.001 file - promoters60/1019030
attttgaa

SEQ ID NO: 96162 - DNA, 8 bp, Unknown
  misc_feature (1)..( 8): Result.001 file - promoters60/1019030
attttgaa

SEQ ID NO: 96163 - DNA, 6 bp, Unknown
  misc_feature (1)..( 6): Result.001 file - promoters60/1019030
tatttt

SEQ ID NO: 96164 - DNA, 6 bp, Unknown
  misc_feature (1)..( 6): Result.001 file - promoters60/1019030
tatttt

SEQ ID NO: 96165 - DNA, 11 bp, Unknown
  misc_feature (1)..( 11): Result.001 file - promoters60/1019030
ttacaaaatta

SEQ ID NO: 96166 - DNA, 11 bp, Unknown
  misc_feature (1)..( 11): Result.001 file - promoters60/1019030
tttaaaaatta

SEQ ID NO: 96167 - DNA, 11 bp, Unknown
  misc_feature (1)..( 11): Result.001 file - promoters60/1019030
ttaccaaatat

SEQ ID NO: 96168 - DNA, 6 bp, Unknown
  misc_feature (1)..( 6): Result.001 file - promoters60/1019030
gaaaaa

SEQ ID NO: 96169 - DNA, 6 bp, Unknown
  misc_feature (1)..( 6): Result.001 file - promoters60/1019030
gaaaaa

SEQ ID NO: 96170 - DNA, 7 bp, Unknown
  misc_feature (1)..( 7): Result.001 file - promoters60/1019030
attttag

SEQ ID NO: 96171 - DNA, 7 bp, Unknown
  misc_feature (1)..( 7): Result.001 file - promoters60/1019030
tttttag

SEQ ID NO: 96172 - DNA, 7 bp, Unknown
  misc_feature (1)..( 7): Result.001 file - promoters60/1019030
attttaa

SEQ ID NO: 96173 - DNA, 7 bp, Unknown
  misc_feature (1)..( 7): Result.001 file - promoters60/1019030
tttttta

SEQ ID NO: 96174 - DNA, 7 bp, Unknown
  misc_feature (1)..( 7): Result.001 file - promoters60/1019030
tttctta

SEQ ID NO: 96175 - DNA, 7 bp, Unknown
  misc_feature (1)..( 7): Result.001 file - promoters60/1019030
ataaaaa

SEQ ID NO: 96176 - DNA, 7 bp, Unknown
  misc_feature (1)..( 7): Result.001 file - promoters60/1019030
ataaaaa

SEQ ID NO: 96177 - DNA, 7 bp, Unknown
  misc_feature (1)..( 7): Result.001 file - promoters60/1019030
ctaaaaa

SEQ ID NO: 96178 - DNA, 9 bp, Unknown
  misc_feature (1)..( 9): Result.001 file - promoters60/1019030
caaagaaaa

SEQ ID NO: 96179 - DNA, 9 bp, Unknown
  misc_feature (1)..( 9): Result.001 file - promoters60/1019030
aaaacaaaa

SEQ ID NO: 96180 - DNA, 9 bp, Unknown
  misc_feature (1)..( 9): Result.001 file - promoters60/1019030
aaaacatgt

SEQ ID NO: 96181 - DNA, 6 bp, Unknown
  misc_feature (1)..( 6): Result.001 file - promoters60/1019030
tatttt

SEQ ID NO: 96182 - DNA, 6 bp, Unknown
  misc_feature (1)..( 6): Result.001 file - promoters60/1019030
tatttt

SEQ ID NO: 96183 - DNA, 6 bp, Unknown
  misc_feature (1)..( 6): Result.001 file - promoters60/1019030
taaaaa

SEQ ID NO: 96184 - DNA, 6 bp, Unknown
  misc_feature (1)..( 6): Result.001 file - promoters60/1019030
taaaaa

SEQ ID NO: 96185 - DNA, 9 bp, Unknown
  misc_feature (1)..( 9): Result.001 file - promoters60/1019030
gaaaaatgt

SEQ ID NO: 96186 - DNA, 9 bp, Unknown
  misc_feature (1)..( 9): Result.001 file - promoters60/1019030
aaaacatgt

SEQ ID NO: 96187 - DNA, 9 bp, Unknown
  misc_feature (1)..( 9): Result.001 file - promoters60/1019030
aaaacaaaa

SEQ ID NO: 96188 - DNA, 6 bp, Unknown
  misc_feature (1)..( 6): Result.001 file - promoters60/1019030
tgtcaa

SEQ ID NO: 96189 - DNA, 6 bp, Unknown
  misc_feature (1)..( 6): Result.001 file - promoters60/1019030
tgtcaa

SEQ ID NO: 96190 - DNA, 7 bp, Unknown
  misc_feature (1)..( 7): Result.001 file - promoters60/1019030
cataaaa

SEQ ID NO: 96191 - DNA, 7 bp, Unknown
  misc_feature (1)..( 7): Result.001 file - promoters60/1019030
cattaaa

SEQ ID NO: 96192 - DNA, 8 bp, Unknown
  misc_feature (1)..( 8): Result.001 file - promoters60/1019030
aaagtatt

SEQ ID NO: 96193 - DNA, 8 bp, Unknown
  misc_feature (1)..( 8): Result.001 file - promoters60/1019030
aaagaatt

SEQ ID NO: 96194 - DNA, 6 bp, Unknown
  misc_feature (1)..( 6): Result.001 file - promoters60/1019030
attttt

SEQ ID NO: 96195 - DNA, 6 bp, Unknown
  misc_feature (1)..( 6): Result.001 file - promoters60/1019030
attttt

SEQ ID NO: 96196 - DNA, 6 bp, Unknown
  misc_feature (1)..( 6): Result.001 file - promoters60/1019030
ataaaa

SEQ ID NO: 96197 - DNA, 6 bp, Unknown
  misc_feature (1)..( 6): Result.001 file - promoters60/1019030
ataaaa

SEQ ID NO: 96198 - DNA, 7 bp, Unknown
  misc_feature (1)..( 7): Result.001 file - promoters60/1019030
tgtctaa

SEQ ID NO: 96199 - DNA, 7 bp, Unknown
  misc_feature (1)..( 7): Result.001 file - promoters60/1019030
tgtataa

SEQ ID NO: 96200 - DNA, 8 bp, Unknown
  misc_feature (1)..( 8): Result.001 file - promoters60/1019030
ctttaatt

SEQ ID NO: 96201 - DNA, 8 bp, Unknown
  misc_feature (1)..( 8): Result.001 file - promoters60/1019030
cttttatt

SEQ ID NO: 96202 - DNA, 6 bp, Unknown
  misc_feature (1)..( 6): Result.001 file - promoters60/1019030
aaaata

SEQ ID NO: 96203 - DNA, 6 bp, Unknown
  misc_feature (1)..( 6): Result.001 file - promoters60/1019030
aaaata

SEQ ID NO: 96204 - DNA, 7 bp, Unknown
  misc_feature (1)..( 7): Result.001 file - promoters60/1019030
ttcaagc

SEQ ID NO: 96205 - DNA, 7 bp, Unknown
  misc_feature (1)..( 7): Result.001 file - promoters60/1019030
ttctagc

SEQ ID NO: 96206 - DNA, 7 bp, Unknown
  misc_feature (1)..( 7): Result.001 file - promoters60/1019030
tctgttc

SEQ ID NO: 96207 - DNA, 7 bp, Unknown
  misc_feature (1)..( 7): Result.001 file - promoters60/1019105
tctcttc

SEQ ID NO: 96208 - DNA, 11 bp, Unknown
  misc_feature (1)..( 11): Result.001 file - promoters60/1019105
gctacgaaaat

SEQ ID NO: 96209 - DNA, 11 bp, Unknown
  misc_feature (1)..( 11): Result.001 file - promoters60/1019105
gcaacgaaaaa

SEQ ID NO: 96210 - DNA, 11 bp, Unknown
  misc_feature (1)..( 11): Result.001 file - promoters60/1019105
gctaccaaact

SEQ ID NO: 96211 - DNA, 11 bp, Unknown
  misc_feature (1)..( 11): Result.001 file - promoters60/1019105
ataactaaagc

SEQ ID NO: 96212 - DNA, 11 bp, Unknown
  misc_feature (1)..( 11): Result.001 file - promoters60/1019105
agtgggaaaaa

SEQ ID NO: 96213 - DNA, 11 bp, Unknown
  misc_feature (1)..( 11): Result.001 file - promoters60/1019111
ctaactagttt

SEQ ID NO: 96214 - DNA, 7 bp, Unknown
  misc_feature (1)..( 7): Result.001 file - promoters60/1019111
tatgttc

SEQ ID NO: 96215 - DNA, 7 bp, Unknown
  misc_feature (1)..( 7): Result.001 file - promoters60/1019111
tatgttc

SEQ ID NO: 96216 - DNA, 7 bp, Unknown
  misc_feature (1)..( 7): Result.001 file - promoters60/1019111
gttttag

SEQ ID NO: 96217 - DNA, 7 bp, Unknown
  misc_feature (1)..( 7): Result.001 file - promoters60/1019111
gttctag

SEQ ID NO: 96218 - DNA, 8 bp, Unknown
  misc_feature (1)..( 8): Result.001 file - promoters60/1019111
ataagata

SEQ ID NO: 96219 - DNA, 8 bp, Unknown
  misc_feature (1)..( 8): Result.001 file - promoters60/1019111
ataatata

SEQ ID NO: 96220 - DNA, 8 bp, Unknown
  misc_feature (1)..( 8): Result.001 file - promoters60/1019111
atatgatt

SEQ ID NO: 96221 - DNA, 6 bp, Unknown
  misc_feature (1)..( 6): Result.001 file - promoters60/1019111
ttttaa

SEQ ID NO: 96222 - DNA, 6 bp, Unknown
  misc_feature (1)..( 6): Result.001 file - promoters60/1019111
ttttaa

SEQ ID NO: 96223 - DNA, 8 bp, Unknown
  misc_feature (1)..( 8): Result.001 file - promoters60/1019111
aaaaaatg

SEQ ID NO: 96224 - DNA, 8 bp, Unknown
  misc_feature (1)..( 8): Result.001 file - promoters60/1019111
aaaatatg

SEQ ID NO: 96225 - DNA, 6 bp, Unknown
  misc_feature (1)..( 6): Result.001 file - promoters60/1019111
agaaat

SEQ ID NO: 96226 - DNA, 6 bp, Unknown
  misc_feature (1)..( 6): Result.001 file - promoters60/1019111
agaaat

SEQ ID NO: 96227 - DNA, 7 bp, Unknown
  misc_feature (1)..( 7): Result.001 file - promoters60/1019111
ataagat

SEQ ID NO: 96228 - DNA, 7 bp, Unknown
  misc_feature (1)..( 7): Result.001 file - promoters60/1019111
ataagat

SEQ ID NO: 96229 - DNA, 9 bp, Unknown
  misc_feature (1)..( 9): Result.001 file - promoters60/1019111
caagacaat

SEQ ID NO: 96230 - DNA, 9 bp, Unknown
  misc_feature (1)..( 9): Result.001 file - promoters60/1019111
caagataat

SEQ ID NO: 96231 - DNA, 6 bp, Unknown
  misc_feature (1)..( 6): Result.001 file - promoters60/1019111
atagta

SEQ ID NO: 96232 - DNA, 6 bp, Unknown
  misc_feature (1)..( 6): Result.001 file - promoters60/1019111
atagta

SEQ ID NO: 96233 - DNA, 6 bp, Unknown
  misc_feature (1)..( 6): Result.001 file - promoters60/1019111
gaaaaa

SEQ ID NO: 96234 - DNA, 6 bp, Unknown
  misc_feature (1)..( 6): Result.001 file - promoters60/1019111
gaaaaa

SEQ ID NO: 96235 - DNA, 8 bp, Unknown
  misc_feature (1)..( 8): Result.001 file - promoters60/1019111
tgatggtg

SEQ ID NO: 96236 - DNA, 8 bp, Unknown
  misc_feature (1)..( 8): Result.001 file - promoters60/1019111
tgaaggtg

SEQ ID NO: 96237 - DNA, 8 bp, Unknown
  misc_feature (1)..( 8): Result.001 file - promoters60/1019111
aaatgttt

SEQ ID NO: 96238 - DNA, 8 bp, Unknown
  misc_feature (1)..( 8): Result.001 file - promoters60/1019111
aaatattt

SEQ ID NO: 96239 - DNA, 9 bp, Unknown
  misc_feature (1)..( 9): Result.001 file - promoters60/1019111
caagctcta

SEQ ID NO: 96240 - DNA, 9 bp, Unknown
  misc_feature (1)..( 9): Result.001 file - promoters60/1019111
caatctcta

SEQ ID NO: 96241 - DNA, 8 bp, Unknown
  misc_feature (1)..( 8): Result.001 file - promoters60/1019111
attttcat

SEQ ID NO: 96242 - DNA, 8 bp, Unknown
  misc_feature (1)..( 8): Result.001 file - promoters60/1019111
attttcat

SEQ ID NO: 96243 - DNA, 8 bp, Unknown
  misc_feature (1)..( 8): Result.001 file - promoters60/1019111
attttttt

SEQ ID NO: 96244 - DNA, 8 bp, Unknown
  misc_feature (1)..( 8): Result.001 file - promoters60/1019111
attttttt

SEQ ID NO: 96245 - DNA, 6 bp, Unknown
  misc_feature (1)..( 6): Result.001 file - promoters60/1019111
tcatat

SEQ ID NO: 96246 - DNA, 6 bp, Unknown
  misc_feature (1)..( 6): Result.001 file - promoters60/1019111
tcatat

SEQ ID NO: 96247 - DNA, 6 bp, Unknown
  misc_feature (1)..( 6): Result.001 file - promoters60/1019111
agaaaa

SEQ ID NO: 96248 - DNA, 6 bp, Unknown
  misc_feature (1)..( 6): Result.001 file - promoters60/1019111
agaaaa

SEQ ID NO: 96249 - DNA, 6 bp, Unknown
  misc_feature (1)..( 6): Result.001 file - promoters60/1019111
tttcaa

SEQ ID NO: 96250 - DNA, 6 bp, Unknown
  misc_feature (1)..( 6): Result.001 file - promoters60/1019111
tttcaa

SEQ ID NO: 96251 - DNA, 8 bp, Unknown
  misc_feature (1)..( 8): Result.001 file - promoters60/1019111
atcaaaat

SEQ ID NO: 96252 - DNA, 8 bp, Unknown
  misc_feature (1)..( 8): Result.001 file - promoters60/1019257
atcacaat

SEQ ID NO: 96253 - DNA, 8 bp, Unknown
  misc_feature (1)..( 8): Result.001 file - promoters60/1019257
ggaatagt

SEQ ID NO: 96254 - DNA, 8 bp, Unknown
  misc_feature (1)..( 8): Result.001 file - promoters60/1019257
ggattagc

SEQ ID NO: 96255 - DNA, 8 bp, Unknown
  misc_feature (1)..( 8): Result.001 file - promoters60/1019257
agaataga

SEQ ID NO: 96256 - DNA, 8 bp, Unknown
  misc_feature (1)..( 8): Result.001 file - promoters60/1019257
tgaaaaga

SEQ ID NO: 96257 - DNA, 7 bp, Unknown
  misc_feature (1)..( 7): Result.001 file - promoters60/1019257
aaagaag

SEQ ID NO: 96258 - DNA, 7 bp, Unknown
  misc_feature (1)..( 7): Result.001 file - promoters60/1019257
aaaaaag

SEQ ID NO: 96259 - DNA, 7 bp, Unknown
  misc_feature (1)..( 7): Result.001 file - promoters60/1019257
aaataag

SEQ ID NO: 96260 - DNA, 7 bp, Unknown
  misc_feature (1)..( 7): Result.001 file - promoters60/1019257
aaaaata

SEQ ID NO: 96261 - DNA, 9 bp, Unknown
  misc_feature (1)..( 9): Result.001 file - promoters60/1019257
gttataaaa

SEQ ID NO: 96262 - DNA, 9 bp, Unknown
  misc_feature (1)..( 9): Result.001 file - promoters60/1019257
atcataaaa

SEQ ID NO: 96263 - DNA, 9 bp, Unknown
  misc_feature (1)..( 9): Result.001 file - promoters60/1019257
ttgataaaa

SEQ ID NO: 96264 - DNA, 9 bp, Unknown
  misc_feature (1)..( 9): Result.001 file - promoters60/1019257
tatataaat

SEQ ID NO: 96265 - DNA, 11 bp, Unknown
  misc_feature (1)..( 11): Result.001 file - promoters60/1019257
ttttgaatttt

SEQ ID NO: 96266 - DNA, 11 bp, Unknown
  misc_feature (1)..( 11): Result.001 file - promoters60/1019257
atttgaattaa

SEQ ID NO: 96267 - DNA, 11 bp, Unknown
  misc_feature (1)..( 11): Result.001 file - promoters60/1019257
acttgacttaa

SEQ ID NO: 96268 - DNA, 11 bp, Unknown
  misc_feature (1)..( 11): Result.001 file - promoters60/1019260
atttgagggta

SEQ ID NO: 96269 - DNA, 10 bp, Unknown
  misc_feature (1)..( 10): Result.001 file - promoters60/1019260
gttatgattt

SEQ ID NO: 96270 - DNA, 10 bp, Unknown
  misc_feature (1)..( 10): Result.001 file - promoters60/1019260
tttatgcttt

SEQ ID NO: 96271 - DNA, 10 bp, Unknown
  misc_feature (1)..( 10): Result.001 file - promoters60/1019260
gttatgctgg

SEQ ID NO: 96272 - DNA, 8 bp, Unknown
  misc_feature (1)..( 8): Result.001 file - promoters60/1019260
taaatctg

SEQ ID NO: 96273 - DNA, 8 bp, Unknown
  misc_feature (1)..( 8): Result.001 file - promoters60/1019260
aaaacctg

SEQ ID NO: 96274 - DNA, 8 bp, Unknown
  misc_feature (1)..( 8): Result.001 file - promoters60/1019278
aaaaccta

SEQ ID NO: 96275 - DNA, 7 bp, Unknown
  misc_feature (1)..( 7): Result.001 file - promoters60/1019278
gttgaga

SEQ ID NO: 96276 - DNA, 7 bp, Unknown
  misc_feature (1)..( 7): Result.001 file - promoters60/1019278
gttcaga

SEQ ID NO: 96277 - DNA, 8 bp, Unknown
  misc_feature (1)..( 8): Result.001 file - promoters60/1019278
tttttttg

SEQ ID NO: 96278 - DNA, 8 bp, Unknown
  misc_feature (1)..( 8): Result.001 file - promoters60/1019278
ttttattg

SEQ ID NO: 96279 - DNA, 6 bp, Unknown
  misc_feature (1)..( 6): Result.001 file - promoters60/1019278
ttactt

SEQ ID NO: 96280 - DNA, 6 bp, Unknown
  misc_feature (1)..( 6): Result.001 file - promoters60/1019278
ttactt

SEQ ID NO: 96281 - DNA, 11 bp, Unknown
  misc_feature (1)..( 11): Result.001 file - promoters60/1019278
aagacagaaca

SEQ ID NO: 96282 - DNA, 11 bp, Unknown
  misc_feature (1)..( 11): Result.001 file - promoters60/1019278
aagacagaaca

SEQ ID NO: 96283 - DNA, 7 bp, Unknown
  misc_feature (1)..( 7): Result.001 file - promoters60/1019278
acaaaaa

SEQ ID NO: 96284 - DNA, 7 bp, Unknown
  misc_feature (1)..( 7): Result.001 file - promoters60/1019278
acataaa

SEQ ID NO: 96285 - DNA, 9 bp, Unknown
  misc_feature (1)..( 9): Result.001 file - promoters60/1019278
aagacgaca

SEQ ID NO: 96286 - DNA, 9 bp, Unknown
  misc_feature (1)..( 9): Result.001 file - promoters60/1019278
aagaagaca

SEQ ID NO: 96287 - DNA, 7 bp, Unknown
  misc_feature (1)..( 7): Result.001 file - promoters60/1019278
atttata

SEQ ID NO: 96288 - DNA, 7 bp, Unknown
  misc_feature (1)..( 7): Result.001 file - promoters60/1019278
atttata

SEQ ID NO: 96289 - DNA, 10 bp, Unknown
  misc_feature (1)..( 10): Result.001 file - promoters60/1019278
aagctctgaa

SEQ ID NO: 96290 - DNA, 10 bp, Unknown
  misc_feature (1)..( 10): Result.001 file - promoters60/1019278
aagctgtgaa

SEQ ID NO: 96291 - DNA, 7 bp, Unknown
  misc_feature (1)..( 7): Result.001 file - promoters60/1019278
ttttgat

SEQ ID NO: 96292 - DNA, 7 bp, Unknown
  misc_feature (1)..( 7): Result.001 file - promoters60/1019278
tttggat

SEQ ID NO: 96293 - DNA, 9 bp, Unknown
  misc_feature (1)..( 9): Result.001 file - promoters60/1019278
agacagaac

SEQ ID NO: 96294 - DNA, 9 bp, Unknown
  misc_feature (1)..( 9): Result.001 file - promoters60/1019278
agacaaaac

SEQ ID NO: 96295 - DNA, 6 bp, Unknown
  misc_feature (1)..( 6): Result.001 file - promoters60/1019278
aaaaag

SEQ ID NO: 96296 - DNA, 6 bp, Unknown
  misc_feature (1)..( 6): Result.001 file - promoters60/1019278
aaaaag

SEQ ID NO: 96297 - DNA, 7 bp, Unknown
  misc_feature (1)..( 7): Result.001 file - promoters60/1019278
tgatgaa

SEQ ID NO: 96298 - DNA, 7 bp, Unknown
  misc_feature (1)..( 7): Result.001 file - promoters60/1019278
tgaagaa

SEQ ID NO: 96299 - DNA, 7 bp, Unknown
  misc_feature (1)..( 7): Result.001 file - promoters60/1019278
aactatc

SEQ ID NO: 96300 - DNA, 7 bp, Unknown
  misc_feature (1)..( 7): Result.001 file - promoters60/1019278
aactatc

SEQ ID NO: 96301 - DNA, 8 bp, Unknown
  misc_feature (1)..( 8): Result.001 file - promoters60/1019278
agagatga

SEQ ID NO: 96302 - DNA, 8 bp, Unknown
  misc_feature (1)..( 8): Result.001 file - promoters60/1019278
agacatga

SEQ ID NO: 96303 - DNA, 6 bp, Unknown
  misc_feature (1)..( 6): Result.001 file - promoters60/1019278
actttt

SEQ ID NO: 96304 - DNA, 6 bp, Unknown
  misc_feature (1)..( 6): Result.001 file - promoters60/1019278
actttt

SEQ ID NO: 96305 - DNA, 7 bp, Unknown
  misc_feature (1)..( 7): Result.001 file - promoters60/1019278
tttgatt

SEQ ID NO: 96306 - DNA, 7 bp, Unknown
  misc_feature (1)..( 7): Result.001 file - promoters60/1019278
ttttatt

SEQ ID NO: 96307 - DNA, 6 bp, Unknown
  misc_feature (1)..( 6): Result.001 file - promoters60/1019278
acaaaa

SEQ ID NO: 96308 - DNA, 6 bp, Unknown
  misc_feature (1)..( 6): Result.001 file - promoters60/1019498
acaaaa

SEQ ID NO: 96309 - DNA, 10 bp, Unknown
  misc_feature (1)..( 10): Result.001 file - promoters60/1019498
gcggtaacta

SEQ ID NO: 96310 - DNA, 10 bp, Unknown
  misc_feature (1)..( 10): Result.001 file - promoters60/1019498
gcggcaaccg

SEQ ID NO: 96311 - DNA, 10 bp, Unknown
  misc_feature (1)..( 10): Result.001 file - promoters60/1019498
caagtaccta

SEQ ID NO: 96312 - DNA, 15 bp, Unknown
  misc_feature (1)..( 15): Result.001 file - promoters60/1019498
caaagtatgaaaacg

SEQ ID NO: 96313 - DNA, 15 bp, Unknown
  misc_feature (1)..( 15): Result.001 file - promoters60/1019498
caaagtatattaaac

SEQ ID NO: 96314 - DNA, 15 bp, Unknown
  misc_feature (1)..( 15): Result.001 file - promoters60/1019498
tatagtataataaac

SEQ ID NO: 96315 - DNA, 9 bp, Unknown
  misc_feature (1)..( 9): Result.001 file - promoters60/1019498
tttattttg

SEQ ID NO: 96316 - DNA, 9 bp, Unknown
  misc_feature (1)..( 9): Result.001 file - promoters60/1019498
cttatttaa

SEQ ID NO: 96317 - DNA, 9 bp, Unknown
  misc_feature (1)..( 9): Result.001 file - promoters60/1019498
tttattata

SEQ ID NO: 96318 - DNA, 9 bp, Unknown
  misc_feature (1)..( 9): Result.001 file - promoters60/1019498
catatataa

SEQ ID NO: 96319 - DNA, 8 bp, Unknown
  misc_feature (1)..( 8): Result.001 file - promoters60/1019498
gtatatgt

SEQ ID NO: 96320 - DNA, 8 bp, Unknown
  misc_feature (1)..( 8): Result.001 file - promoters60/1019498
atatatgt

SEQ ID NO: 96321 - DNA, 8 bp, Unknown
  misc_feature (1)..( 8): Result.001 file - promoters60/1019498
atatataa

SEQ ID NO: 96322 - DNA, 10 bp, Unknown
  misc_feature (1)..( 10): Result.001 file - promoters60/1019498
tatcatatat

SEQ ID NO: 96323 - DNA, 10 bp, Unknown
  misc_feature (1)..( 10): Result.001 file - promoters60/1019498
aatcatgtat

SEQ ID NO: 96324 - DNA, 10 bp, Unknown
  misc_feature (1)..( 10): Result.001 file - promoters60/1019498
aataatgggc

SEQ ID NO: 96325 - DNA, 12 bp, Unknown
  misc_feature (1)..( 12): Result.001 file - promoters60/1019498
tttgaaattaac

SEQ ID NO: 96326 - DNA, 12 bp, Unknown
  misc_feature (1)..( 12): Result.001 file - promoters60/1019498
agtataataaac

SEQ ID NO: 96327 - DNA, 12 bp, Unknown
  misc_feature (1)..( 12): Result.001 file - promoters60/1019498
agtatattaaac

SEQ ID NO: 96328 - DNA, 8 bp, Unknown
  misc_feature (1)..( 8): Result.001 file - promoters60/1019498
atttttca

SEQ ID NO: 96329 - DNA, 8 bp, Unknown
  misc_feature (1)..( 8): Result.001 file - promoters60/1019498
ctttttca

SEQ ID NO: 96330 - DNA, 8 bp, Unknown
  misc_feature (1)..( 8): Result.001 file - promoters60/1019508
ctttttta

SEQ ID NO: 96331 - DNA, 11 bp, Unknown
  misc_feature (1)..( 11): Result.001 file - promoters60/1019508
tcattatggag

SEQ ID NO: 96332 - DNA, 11 bp, Unknown
  misc_feature (1)..( 11): Result.001 file - promoters60/1019508
tcattatgtca

SEQ ID NO: 96333 - DNA, 11 bp, Unknown
  misc_feature (1)..( 11): Result.001 file - promoters60/1019508
ggcttatgtct

SEQ ID NO: 96334 - DNA, 11 bp, Unknown
  misc_feature (1)..( 11): Result.001 file - promoters60/1019508
ttgacatgtct

SEQ ID NO: 96335 - DNA, 9 bp, Unknown
  misc_feature (1)..( 9): Result.001 file - promoters60/1019508
ttgtgtttc

SEQ ID NO: 96336 - DNA, 9 bp, Unknown
  misc_feature (1)..( 9): Result.001 file - promoters60/1019508
ttgtttttt

SEQ ID NO: 96337 - DNA, 10 bp, Unknown
  misc_feature (1)..( 10): Result.001 file - promoters60/1019508
ggatttatta

SEQ ID NO: 96338 - DNA, 7 bp, Unknown
  misc_feature (1)..( 7): Result.001 file - promoters60/1019508
gatggat

SEQ ID NO: 96339 - DNA, 7 bp, Unknown
  misc_feature (1)..( 7): Result.001 file - promoters60/1019508
gatcgat

SEQ ID NO: 96340 - DNA, 7 bp, Unknown
  misc_feature (1)..( 7): Result.001 file - promoters60/1019524
gatcgaa

SEQ ID NO: 96341 - DNA, 9 bp, Unknown
  misc_feature (1)..( 9): Result.001 file - promoters60/1019524
aaattgaaa

SEQ ID NO: 96342 - DNA, 9 bp, Unknown
  misc_feature (1)..( 9): Result.001 file - promoters60/1019524
taattgaaa

SEQ ID NO: 96343 - DNA, 9 bp, Unknown
  misc_feature (1)..( 9): Result.001 file - promoters60/1019524
gaatttaaa

SEQ ID NO: 96344 - DNA, 9 bp, Unknown
  misc_feature (1)..( 9): Result.001 file - promoters60/1019524
gaattttgg

SEQ ID NO: 96345 - DNA, 9 bp, Unknown
  misc_feature (1)..( 9): Result.001 file - promoters60/1019524
taattgtgt

SEQ ID NO: 96346 - DNA, 14 bp, Unknown
  misc_feature (1)..( 14): Result.001 file - promoters60/1019524
atggagaggaagaa

SEQ ID NO: 96347 - DNA, 14 bp, Unknown
  misc_feature (1)..( 14): Result.001 file - promoters60/1019524
gcacagatgaattt

SEQ ID NO: 96348 - DNA, 14 bp, Unknown
  misc_feature (1)..( 14): Result.001 file - promoters60/1019524
atgtagaggggctt

SEQ ID NO: 96349 - DNA, 14 bp, Unknown
  misc_feature (1)..( 14): Result.001 file - promoters60/1019524
tgagaaatgtattt

SEQ ID NO: 96350 - DNA, 14 bp, Unknown
  misc_feature (1)..( 14): Result.001 file - promoters60/1019537
gaagtcatgaatac

SEQ ID NO: 96351 - DNA, 8 bp, Unknown
  misc_feature (1)..( 8): Result.001 file - promoters60/1019537
atttttat

SEQ ID NO: 96352 - DNA, 8 bp, Unknown
  misc_feature (1)..( 8): Result.001 file - promoters60/1019537
atttttgc

SEQ ID NO: 96353 - DNA, 8 bp, Unknown
  misc_feature (1)..( 8): Result.001 file - promoters60/1019537
attttttt

SEQ ID NO: 96354 - DNA, 8 bp, Unknown
  misc_feature (1)..( 8): Result.001 file - promoters60/1019537
atttttgt

SEQ ID NO: 96355 - DNA, 8 bp, Unknown
  misc_feature (1)..( 8): Result.001 file - promoters60/1019537
attttttc

SEQ ID NO: 96356 - DNA, 8 bp, Unknown
  misc_feature (1)..( 8): Result.001 file - promoters60/1019537
gtttatgt

SEQ ID NO: 96357 - DNA, 8 bp, Unknown
  misc_feature (1)..( 8): Result.001 file - promoters60/1019537
ctttattt

SEQ ID NO: 96358 - DNA, 13 bp, Unknown
  misc_feature (1)..( 13): Result.001 file - promoters60/1019537
atatatgtaaacg

SEQ ID NO: 96359 - DNA, 13 bp, Unknown
  misc_feature (1)..( 13): Result.001 file - promoters60/1019537
ctttatttaaaaa

SEQ ID NO: 96360 - DNA, 13 bp, Unknown
  misc_feature (1)..( 13): Result.001 file - promoters60/1019537
atagatgtttcat

SEQ ID NO: 96361 - DNA, 13 bp, Unknown
  misc_feature (1)..( 13): Result.001 file - promoters60/1019537
agactagtaaaca

SEQ ID NO: 96362 - DNA, 13 bp, Unknown
  misc_feature (1)..( 13): Result.001 file - promoters60/1019537
aaagagagagatg

SEQ ID NO: 96363 - DNA, 13 bp, Unknown
  misc_feature (1)..( 13): Result.001 file - promoters60/1019537
tcgtatctaagac

SEQ ID NO: 96364 - DNA, 13 bp, Unknown
  misc_feature (1)..( 13): Result.001 file - promoters60/1019559
ttcgaaataaatg

SEQ ID NO: 96365 - DNA, 10 bp, Unknown
  misc_feature (1)..( 10): Result.001 file - promoters60/1019559
atttttcaaa

SEQ ID NO: 96366 - DNA, 10 bp, Unknown
  misc_feature (1)..( 10): Result.001 file - promoters60/1019559
aattttgaaa

SEQ ID NO: 96367 - DNA, 10 bp, Unknown
  misc_feature (1)..( 10): Result.001 file - promoters60/1019559
aattttgttg

SEQ ID NO: 96368 - DNA, 11 bp, Unknown
  misc_feature (1)..( 11): Result.001 file - promoters60/1019559
aaaagtcttca

SEQ ID NO: 96369 - DNA, 11 bp, Unknown
  misc_feature (1)..( 11): Result.001 file - promoters60/1019559
aaaagttgcag

SEQ ID NO: 96370 - DNA, 11 bp, Unknown
  misc_feature (1)..( 11): Result.001 file - promoters60/1019559
gaaatttgcag

SEQ ID NO: 96371 - DNA, 10 bp, Unknown
  misc_feature (1)..( 10): Result.001 file - promoters60/1019559
taaagtatga

SEQ ID NO: 96372 - DNA, 10 bp, Unknown
  misc_feature (1)..( 10): Result.001 file - promoters60/1019559
taaagtaaag

SEQ ID NO: 96373 - DNA, 10 bp, Unknown
  misc_feature (1)..( 10): Result.001 file - promoters60/1019559
aaaagaaaag

SEQ ID NO: 96374 - DNA, 9 bp, Unknown
  misc_feature (1)..( 9): Result.001 file - promoters60/1019559
ttcttagct

SEQ ID NO: 96375 - DNA, 9 bp, Unknown
  misc_feature (1)..( 9): Result.001 file - promoters60/1019559
ttcttatca

SEQ ID NO: 96376 - DNA, 9 bp, Unknown
  misc_feature (1)..( 9): Result.001 file - promoters60/1019559
atctgagct

SEQ ID NO: 96377 - DNA, 9 bp, Unknown
  misc_feature (1)..( 9): Result.001 file - promoters60/1019559
agaaagcgg

SEQ ID NO: 96378 - DNA, 9 bp, Unknown
  misc_feature (1)..( 9): Result.001 file - promoters60/1019559
agaaagctt

SEQ ID NO: 96379 - DNA, 9 bp, Unknown
  misc_feature (1)..( 9): Result.001 file - promoters60/1019559
tgaaacaaa

SEQ ID NO: 96380 - DNA, 8 bp, Unknown
  misc_feature (1)..( 8): Result.001 file - promoters60/1019559
gaaagatt

SEQ ID NO: 96381 - DNA, 8 bp, Unknown
  misc_feature (1)..( 8): Result.001 file - promoters60/1019559
gaaagaaa

SEQ ID NO: 96382 - DNA, 8 bp, Unknown
  misc_feature (1)..( 8): Result.001 file - promoters60/1019604
aaaacatt

SEQ ID NO: 96383 - DNA, 8 bp, Unknown
  misc_feature (1)..( 8): Result.001 file - promoters60/1019604
taaatcca

SEQ ID NO: 96384 - DNA, 8 bp, Unknown
  misc_feature (1)..( 8): Result.001 file - promoters60/1019604
taaatcca

SEQ ID NO: 96385 - DNA, 7 bp, Unknown
  misc_feature (1)..( 7): Result.001 file - promoters60/1019604
gaatgca

SEQ ID NO: 96386 - DNA, 7 bp, Unknown
  misc_feature (1)..( 7): Result.001 file - promoters60/1019604
gaaggca

SEQ ID NO: 96387 - DNA, 8 bp, Unknown
  misc_feature (1)..( 8): Result.001 file - promoters60/1019604
agggtata

SEQ ID NO: 96388 - DNA, 8 bp, Unknown
  misc_feature (1)..( 8): Result.001 file - promoters60/1019604
agggtata

SEQ ID NO: 96389 - DNA, 9 bp, Unknown
  misc_feature (1)..( 9): Result.001 file - promoters60/1019604
tttttgtaa

SEQ ID NO: 96390 - DNA, 9 bp, Unknown
  misc_feature (1)..( 9): Result.001 file - promoters60/1019604
attttataa

SEQ ID NO: 96391 - DNA, 9 bp, Unknown
  misc_feature (1)..( 9): Result.001 file - promoters60/1019604
attttacta

SEQ ID NO: 96392 - DNA, 12 bp, Unknown
  misc_feature (1)..( 12): Result.001 file - promoters60/1019604
aaagatagaaat

SEQ ID NO: 96393 - DNA, 12 bp, Unknown
  misc_feature (1)..( 12): Result.001 file - promoters60/1019604
aaagatacaaat

SEQ ID NO: 96394 - DNA, 12 bp, Unknown
  misc_feature (1)..( 12): Result.001 file - promoters60/1019604
aattctagaaac

SEQ ID NO: 96395 - DNA, 6 bp, Unknown
  misc_feature (1)..( 6): Result.001 file - promoters60/1019604
taataa

SEQ ID NO: 96396 - DNA, 6 bp, Unknown
  misc_feature (1)..( 6): Result.001 file - promoters60/1019604
taataa

SEQ ID NO: 96397 - DNA, 10 bp, Unknown
  misc_feature (1)..( 10): Result.001 file - promoters60/1019604
tgtctaaaaa

SEQ ID NO: 96398 - DNA, 10 bp, Unknown
  misc_feature (1)..( 10): Result.001 file - promoters60/1019604
tttctagaaa

SEQ ID NO: 96399 - DNA, 10 bp, Unknown
  misc_feature (1)..( 10): Result.001 file - promoters60/1019604
tgtttaaaag

SEQ ID NO: 96400 - DNA, 6 bp, Unknown
  misc_feature (1)..( 6): Result.001 file - promoters60/1019604
actaaa

SEQ ID NO: 96401 - DNA, 6 bp, Unknown
  misc_feature (1)..( 6): Result.001 file - promoters60/1019604
actaaa

SEQ ID NO: 96402 - DNA, 6 bp, Unknown
  misc_feature (1)..( 6): Result.001 file - promoters60/1019604
actaaa

SEQ ID NO: 96403 - DNA, 6 bp, Unknown
  misc_feature (1)..( 6): Result.001 file - promoters60/1019604
atataa

SEQ ID NO: 96404 - DNA, 6 bp, Unknown
  misc_feature (1)..( 6): Result.001 file - promoters60/1019604
atataa

SEQ ID NO: 96405 - DNA, 6 bp, Unknown
  misc_feature (1)..( 6): Result.001 file - promoters60/1019604
atataa

SEQ ID NO: 96406 - DNA, 10 bp, Unknown
  misc_feature (1)..( 10): Result.001 file - promoters60/1019604
ttgaattttt

SEQ ID NO: 96407 - DNA, 10 bp, Unknown
  misc_feature (1)..( 10): Result.001 file - promoters60/1019604
ttgaattttt

SEQ ID NO: 96408 - DNA, 9 bp, Unknown
  misc_feature (1)..( 9): Result.001 file - promoters60/1019604
tcaagattt

SEQ ID NO: 96409 - DNA, 9 bp, Unknown
  misc_feature (1)..( 9): Result.001 file - promoters60/1019604
tcaatattt

SEQ ID NO: 96410 - DNA, 8 bp, Unknown
  misc_feature (1)..( 8): Result.001 file - promoters60/1019604
ttgatttt

SEQ ID NO: 96411 - DNA, 8 bp, Unknown
  misc_feature (1)..( 8): Result.001 file - promoters60/1019604
ttgttttt

SEQ ID NO: 96412 - DNA, 8 bp, Unknown
  misc_feature (1)..( 8): Result.001 file - promoters60/1019604
aggtactt

SEQ ID NO: 96413 - DNA, 8 bp, Unknown
  misc_feature (1)..( 8): Result.001 file - promoters60/1019604
aggaactt

SEQ ID NO: 96414 - DNA, 6 bp, Unknown
  misc_feature (1)..( 6): Result.001 file - promoters60/1019604
tattta

SEQ ID NO: 96415 - DNA, 6 bp, Unknown
  misc_feature (1)..( 6): Result.001 file - promoters60/1019604
tattta

SEQ ID NO: 96416 - DNA, 7 bp, Unknown
  misc_feature (1)..( 7): Result.001 file - promoters60/1019604
caaaaca

SEQ ID NO: 96417 - DNA, 7 bp, Unknown
  misc_feature (1)..( 7): Result.001 file - promoters60/1019604
caagaca

SEQ ID NO: 96418 - DNA, 22 bp, Unknown
  misc_feature (1)..( 22): Result.001 file - promoters60/1019604
aaatttaaaaacctgttttctt

SEQ ID NO: 96419 - DNA, 22 bp, Unknown
  misc_feature (1)..( 22): Result.001 file - promoters60/1019604
aaatataaccaagtttgaaatc

SEQ ID NO: 96420 - DNA, 22 bp, Unknown
  misc_feature (1)..( 22): Result.001 file - promoters60/1019604
aaatataaccaactttgaaatc

SEQ ID NO: 96421 - DNA, 6 bp, Unknown
  misc_feature (1)..( 6): Result.001 file - promoters60/1019604
atgaaa

SEQ ID NO: 96422 - DNA, 6 bp, Unknown
  misc_feature (1)..( 6): Result.001 file - promoters60/1019604
atgaaa

SEQ ID NO: 96423 - DNA, 7 bp, Unknown
  misc_feature (1)..( 7): Result.001 file - promoters60/1019604
tatctat

SEQ ID NO: 96424 - DNA, 7 bp, Unknown
  misc_feature (1)..( 7): Result.001 file - promoters60/1019604
tatatat

SEQ ID NO: 96425 - DNA, 21 bp, Unknown
  misc_feature (1)..( 21): Result.001 file - promoters60/1019604
aaaaataacattcatttacta

SEQ ID NO: 96426 - DNA, 21 bp, Unknown
  misc_feature (1)..( 21): Result.001 file - promoters60/1019604
aaaaacaacattcatttacta

SEQ ID NO: 96427 - DNA, 6 bp, Unknown
  misc_feature (1)..( 6): Result.001 file - promoters60/1019604
atcatc

SEQ ID NO: 96428 - DNA, 6 bp, Unknown
  misc_feature (1)..( 6): Result.001 file - promoters60/1019604
atcatc

SEQ ID NO: 96429 - DNA, 6 bp, Unknown
  misc_feature (1)..( 6): Result.001 file - promoters60/1019604
atcatc

SEQ ID NO: 96430 - DNA, 6 bp, Unknown
  misc_feature (1)..( 6): Result.001 file - promoters60/1019648
atcatc

SEQ ID NO: 96431 - DNA, 11 bp, Unknown
  misc_feature (1)..( 11): Result.001 file - promoters60/1019648
gcctatggtta

SEQ ID NO: 96432 - DNA, 11 bp, Unknown
  misc_feature (1)..( 11): Result.001 file - promoters60/1019648
agaaatgatta

SEQ ID NO: 96433 - DNA, 11 bp, Unknown
  misc_feature (1)..( 11): Result.001 file - promoters60/1019648
ttaaaggatta

SEQ ID NO: 96434 - DNA, 11 bp, Unknown
  misc_feature (1)..( 11): Result.001 file - promoters60/1019648
gaaaaagatgg

SEQ ID NO: 96435 - DNA, 11 bp, Unknown
  misc_feature (1)..( 11): Result.001 file - promoters60/1019648
ttaaaggtgtt

SEQ ID NO: 96436 - DNA, 11 bp, Unknown
  misc_feature (1)..( 11): Result.001 file - promoters60/1019695
tagaaaaatgt

SEQ ID NO: 96437 - DNA, 6 bp, Unknown
  misc_feature (1)..( 6): Result.001 file - promoters60/1019695
gagctg

SEQ ID NO: 96438 - DNA, 6 bp, Unknown
  misc_feature (1)..( 6): Result.001 file - promoters60/1019695
gagctg

SEQ ID NO: 96439 - DNA, 6 bp, Unknown
  misc_feature (1)..( 6): Result.001 file - promoters60/1019695
gaaatc

SEQ ID NO: 96440 - DNA, 6 bp, Unknown
  misc_feature (1)..( 6): Result.001 file - promoters60/1019695
gaaatc

SEQ ID NO: 96441 - DNA, 10 bp, Unknown
  misc_feature (1)..( 10): Result.001 file - promoters60/1019695
aaaggattcc

SEQ ID NO: 96442 - DNA, 10 bp, Unknown
  misc_feature (1)..( 10): Result.001 file - promoters60/1019695
aaacgattcc

SEQ ID NO: 96443 - DNA, 7 bp, Unknown
  misc_feature (1)..( 7): Result.001 file - promoters60/1019695
attgtgt

SEQ ID NO: 96444 - DNA, 7 bp, Unknown
  misc_feature (1)..( 7): Result.001 file - promoters60/1019695
attttgt

SEQ ID NO: 96445 - DNA, 6 bp, Unknown
  misc_feature (1)..( 6): Result.001 file - promoters60/1019695
taaacc

SEQ ID NO: 96446 - DNA, 6 bp, Unknown
  misc_feature (1)..( 6): Result.001 file - promoters60/1019695
taaacc

SEQ ID NO: 96447 - DNA, 8 bp, Unknown
  misc_feature (1)..( 8): Result.001 file - promoters60/1019695
attagtta

SEQ ID NO: 96448 - DNA, 8 bp, Unknown
  misc_feature (1)..( 8): Result.001 file - promoters60/1019695
atttgtta

SEQ ID NO: 96449 - DNA, 8 bp, Unknown
  misc_feature (1)..( 8): Result.001 file - promoters60/1019695
atttttta

SEQ ID NO: 96450 - DNA, 6 bp, Unknown
  misc_feature (1)..( 6): Result.001 file - promoters60/1019695
aagacg

SEQ ID NO: 96451 - DNA, 6 bp, Unknown
  misc_feature (1)..( 6): Result.001 file - promoters60/1019695
aagacg

SEQ ID NO: 96452 - DNA, 6 bp, Unknown
  misc_feature (1)..( 6): Result.001 file - promoters60/1019695
agaaat

SEQ ID NO: 96453 - DNA, 6 bp, Unknown
  misc_feature (1)..( 6): Result.001 file - promoters60/1019695
agaaat

SEQ ID NO: 96454 - DNA, 6 bp, Unknown
  misc_feature (1)..( 6): Result.001 file - promoters60/1019695
cggttc

SEQ ID NO: 96455 - DNA, 6 bp, Unknown
  misc_feature (1)..( 6): Result.001 file - promoters60/1019695
cggttc

SEQ ID NO: 96456 - DNA, 7 bp, Unknown
  misc_feature (1)..( 7): Result.001 file - promoters60/1019695
tagggtt

SEQ ID NO: 96457 - DNA, 7 bp, Unknown
  misc_feature (1)..( 7): Result.001 file - promoters60/1019695
tagggtt

SEQ ID NO: 96458 - DNA, 9 bp, Unknown
  misc_feature (1)..( 9): Result.001 file - promoters60/1019695
tttaattaa

SEQ ID NO: 96459 - DNA, 9 bp, Unknown
  misc_feature (1)..( 9): Result.001 file - promoters60/1019695
tttacttaa

SEQ ID NO: 96460 - DNA, 6 bp, Unknown
  misc_feature (1)..( 6): Result.001 file - promoters60/1019695
gaaccc

SEQ ID NO: 96461 - DNA, 6 bp, Unknown
  misc_feature (1)..( 6): Result.001 file - promoters60/1019695
gaaccc

SEQ ID NO: 96462 - DNA, 7 bp, Unknown
  misc_feature (1)..( 7): Result.001 file - promoters60/1019695
attaata

SEQ ID NO: 96463 - DNA, 7 bp, Unknown
  misc_feature (1)..( 7): Result.001 file - promoters60/1019734
atttata

SEQ ID NO: 96464 - DNA, 8 bp, Unknown
  misc_feature (1)..( 8): Result.001 file - promoters60/1019734
attgattt

SEQ ID NO: 96465 - DNA, 8 bp, Unknown
  misc_feature (1)..( 8): Result.001 file - promoters60/1019734
atttattt

SEQ ID NO: 96466 - DNA, 10 bp, Unknown
  misc_feature (1)..( 10): Result.001 file - promoters60/1019734
attttaggat

SEQ ID NO: 96467 - DNA, 10 bp, Unknown
  misc_feature (1)..( 10): Result.001 file - promoters60/1019734
atttgaggat

SEQ ID NO: 96468 - DNA, 9 bp, Unknown
  misc_feature (1)..( 9): Result.001 file - promoters60/1019734
tttgaacat

SEQ ID NO: 96469 - DNA, 9 bp, Unknown
  misc_feature (1)..( 9): Result.001 file - promoters60/1019734
tttgaccat

SEQ ID NO: 96470 - DNA, 10 bp, Unknown
  misc_feature (1)..( 10): Result.001 file - promoters60/1019734
aaaacacgtg

SEQ ID NO: 96471 - DNA, 10 bp, Unknown
  misc_feature (1)..( 10): Result.001 file - promoters60/1019734
aaaactcgtg

SEQ ID NO: 96472 - DNA, 7 bp, Unknown
  misc_feature (1)..( 7): Result.001 file - promoters60/1019734
tctctat

SEQ ID NO: 96473 - DNA, 7 bp, Unknown
  misc_feature (1)..( 7): Result.001 file - promoters60/1019734
tctatat

SEQ ID NO: 96474 - DNA, 11 bp, Unknown
  misc_feature (1)..( 11): Result.001 file - promoters60/1019734
ataaattaatg

SEQ ID NO: 96475 - DNA, 11 bp, Unknown
  misc_feature (1)..( 11): Result.001 file - promoters60/1019734
atatattaatg

SEQ ID NO: 96476 - DNA, 9 bp, Unknown
  misc_feature (1)..( 9): Result.001 file - promoters60/1019734
actatcata

SEQ ID NO: 96477 - DNA, 9 bp, Unknown
  misc_feature (1)..( 9): Result.001 file - promoters60/1019734
tcaatcata

SEQ ID NO: 96478 - DNA, 9 bp, Unknown
  misc_feature (1)..( 9): Result.001 file - promoters60/1019734
tcaaccata

SEQ ID NO: 96479 - DNA, 9 bp, Unknown
  misc_feature (1)..( 9): Result.001 file - promoters60/1019734
aaatttcat

SEQ ID NO: 96480 - DNA, 9 bp, Unknown
  misc_feature (1)..( 9): Result.001 file - promoters60/1019734
taatttcat

SEQ ID NO: 96481 - DNA, 9 bp, Unknown
  misc_feature (1)..( 9): Result.001 file - promoters60/1019734
taatttatt

SEQ ID NO: 96482 - DNA, 7 bp, Unknown
  misc_feature (1)..( 7): Result.001 file - promoters60/1019734
taataaa

SEQ ID NO: 96483 - DNA, 7 bp, Unknown
  misc_feature (1)..( 7): Result.001 file - promoters60/1019734
taacaaa

SEQ ID NO: 96484 - DNA, 6 bp, Unknown
  misc_feature (1)..( 6): Result.001 file - promoters60/1019734
aaactc

SEQ ID NO: 96485 - DNA, 6 bp, Unknown
  misc_feature (1)..( 6): Result.001 file - promoters60/1019734
aaactc

SEQ ID NO: 96486 - DNA, 7 bp, Unknown
  misc_feature (1)..( 7): Result.001 file - promoters60/1019734
cctttat

SEQ ID NO: 96487 - DNA, 7 bp, Unknown
  misc_feature (1)..( 7): Result.001 file - promoters60/1019734
cctttat

SEQ ID NO: 96488 - DNA, 6 bp, Unknown
  misc_feature (1)..( 6): Result.001 file - promoters60/1019734
tcattt

SEQ ID NO: 96489 - DNA, 6 bp, Unknown
  misc_feature (1)..( 6): Result.001 file - promoters60/1019734
tcattt

SEQ ID NO: 96490 - DNA, 6 bp, Unknown
  misc_feature (1)..( 6): Result.001 file - promoters60/1019734
aaacat

SEQ ID NO: 96491 - DNA, 6 bp, Unknown
  misc_feature (1)..( 6): Result.001 file - promoters60/1019734
aaacat

SEQ ID NO: 96492 - DNA, 9 bp, Unknown
  misc_feature (1)..( 9): Result.001 file - promoters60/1019734
aaattaata

SEQ ID NO: 96493 - DNA, 9 bp, Unknown
  misc_feature (1)..( 9): Result.001 file - promoters60/1019734
aaaataata

SEQ ID NO: 96494 - DNA, 6 bp, Unknown
  misc_feature (1)..( 6): Result.001 file - promoters60/1019734
ataata

SEQ ID NO: 96495 - DNA, 6 bp, Unknown
  misc_feature (1)..( 6): Result.001 file - promoters60/1019734
ataata

SEQ ID NO: 96496 - DNA, 8 bp, Unknown
  misc_feature (1)..( 8): Result.001 file - promoters60/1019734
aaaaagaa

SEQ ID NO: 96497 - DNA, 8 bp, Unknown
  misc_feature (1)..( 8): Result.001 file - promoters60/1019734
aaatagaa

SEQ ID NO: 96498 - DNA, 7 bp, Unknown
  misc_feature (1)..( 7): Result.001 file - promoters60/1019734
aatttct

SEQ ID NO: 96499 - DNA, 7 bp, Unknown
  misc_feature (1)..( 7): Result.001 file - promoters60/1019734
aatatct

SEQ ID NO: 96500 - DNA, 6 bp, Unknown
  misc_feature (1)..( 6): Result.001 file - promoters60/1019734
tatttc

SEQ ID NO: 96501 - DNA, 6 bp, Unknown
  misc_feature (1)..( 6): Result.001 file - promoters60/1019776
tatttc

SEQ ID NO: 96502 - DNA, 7 bp, Unknown
  misc_feature (1)..( 7): Result.001 file - promoters60/1019776
ttcattt

SEQ ID NO: 96503 - DNA, 7 bp, Unknown
  misc_feature (1)..( 7): Result.001 file - promoters60/1019776
ttcgttt

SEQ ID NO: 96504 - DNA, 6 bp, Unknown
  misc_feature (1)..( 6): Result.001 file - promoters60/1019776
gtttca

SEQ ID NO: 96505 - DNA, 6 bp, Unknown
  misc_feature (1)..( 6): Result.001 file - promoters60/1019776
gtttca

SEQ ID NO: 96506 - DNA, 6 bp, Unknown
  misc_feature (1)..( 6): Result.001 file - promoters60/1019776
aaacat

SEQ ID NO: 96507 - DNA, 6 bp, Unknown
  misc_feature (1)..( 6): Result.001 file - promoters60/1019776
aaacat

SEQ ID NO: 96508 - DNA, 8 bp, Unknown
  misc_feature (1)..( 8): Result.001 file - promoters60/1019776
aattagta

SEQ ID NO: 96509 - DNA, 8 bp, Unknown
  misc_feature (1)..( 8): Result.001 file - promoters60/1019776
aataagta

SEQ ID NO: 96510 - DNA, 8 bp, Unknown
  misc_feature (1)..( 8): Result.001 file - promoters60/1019776
taagatcc

SEQ ID NO: 96511 - DNA, 8 bp, Unknown
  misc_feature (1)..( 8): Result.001 file - promoters60/1019776
taatatcc

SEQ ID NO: 96512 - DNA, 11 bp, Unknown
  misc_feature (1)..( 11): Result.001 file - promoters60/1019776
atactttgttt

SEQ ID NO: 96513 - DNA, 11 bp, Unknown
  misc_feature (1)..( 11): Result.001 file - promoters60/1019776
atattttcttt

SEQ ID NO: 96514 - DNA, 11 bp, Unknown
  misc_feature (1)..( 11): Result.001 file - promoters60/1019776
ccaatttgtta

SEQ ID NO: 96515 - DNA, 6 bp, Unknown
  misc_feature (1)..( 6): Result.001 file - promoters60/1019776
aaaacc

SEQ ID NO: 96516 - DNA, 6 bp, Unknown
  misc_feature (1)..( 6): Result.001 file - promoters60/1019776
aaaacc

SEQ ID NO: 96517 - DNA, 6 bp, Unknown
  misc_feature (1)..( 6): Result.001 file - promoters60/1019776
taaaaa

SEQ ID NO: 96518 - DNA, 6 bp, Unknown
  misc_feature (1)..( 6): Result.001 file - promoters60/1019776
taaaaa

SEQ ID NO: 96519 - DNA, 6 bp, Unknown
  misc_feature (1)..( 6): Result.001 file - promoters60/1019776
aaaaag

SEQ ID NO: 96520 - DNA, 6 bp, Unknown
  misc_feature (1)..( 6): Result.001 file - promoters60/1019776
aaaaag

SEQ ID NO: 96521 - DNA, 9 bp, Unknown
  misc_feature (1)..( 9): Result.001 file - promoters60/1019776
gaataaaaa

SEQ ID NO: 96522 - DNA, 9 bp, Unknown
  misc_feature (1)..( 9): Result.001 file - promoters60/1019776
gtatataaa

SEQ ID NO: 96523 - DNA, 9 bp, Unknown
  misc_feature (1)..( 9): Result.001 file - promoters60/1019776
gtatatatt

SEQ ID NO: 96524 - DNA, 6 bp, Unknown
  misc_feature (1)..( 6): Result.001 file - promoters60/1019776
aacatt

SEQ ID NO: 96525 - DNA, 6 bp, Unknown
  misc_feature (1)..( 6): Result.001 file - promoters60/1019776
aacatt

SEQ ID NO: 96526 - DNA, 8 bp, Unknown
  misc_feature (1)..( 8): Result.001 file - promoters60/1019776
ccaccaaa

SEQ ID NO: 96527 - DNA, 8 bp, Unknown
  misc_feature (1)..( 8): Result.001 file - promoters60/1019776
ccactaaa

SEQ ID NO: 96528 - DNA, 6 bp, Unknown
  misc_feature (1)..( 6): Result.001 file - promoters60/1019776
ataaaa

SEQ ID NO: 96529 - DNA, 6 bp, Unknown
  misc_feature (1)..( 6): Result.001 file - promoters60/1019776
ataaaa

SEQ ID NO: 96530 - DNA, 9 bp, Unknown
  misc_feature (1)..( 9): Result.001 file - promoters60/1019776
aaattaact

SEQ ID NO: 96531 - DNA, 9 bp, Unknown
  misc_feature (1)..( 9): Result.001 file - promoters60/1019776
aaagtaaag

SEQ ID NO: 96532 - DNA, 9 bp, Unknown
  misc_feature (1)..( 9): Result.001 file - promoters60/1019776
aaagaaaag

SEQ ID NO: 96533 - DNA, 6 bp, Unknown
  misc_feature (1)..( 6): Result.001 file - promoters60/1019776
agtaaa

SEQ ID NO: 96534 - DNA, 6 bp, Unknown
  misc_feature (1)..( 6): Result.001 file - promoters60/1019776
agtaaa

SEQ ID NO: 96535 - DNA, 7 bp, Unknown
  misc_feature (1)..( 7): Result.001 file - promoters60/1019776
aatcggg

SEQ ID NO: 96536 - DNA, 7 bp, Unknown
  misc_feature (1)..( 7): Result.001 file - promoters60/1019776
aattggg

SEQ ID NO: 96537 - DNA, 8 bp, Unknown
  misc_feature (1)..( 8): Result.001 file - promoters60/1019776
gaaagaaa

SEQ ID NO: 96538 - DNA, 8 bp, Unknown
  misc_feature (1)..( 8): Result.001 file - promoters60/1019776
gaaacaaa

SEQ ID NO: 96539 - DNA, 10 bp, Unknown
  misc_feature (1)..( 10): Result.001 file - promoters60/1019776
ggaaaagaaa

SEQ ID NO: 96540 - DNA, 10 bp, Unknown
  misc_feature (1)..( 10): Result.001 file - promoters60/1019776
ggaaatgaaa

SEQ ID NO: 96541 - DNA, 7 bp, Unknown
  misc_feature (1)..( 7): Result.001 file - promoters60/1019776
cccacta

SEQ ID NO: 96542 - DNA, 7 bp, Unknown
  misc_feature (1)..( 7): Result.001 file - promoters60/1019898
cccacta

SEQ ID NO: 96543 - DNA, 12 bp, Unknown
  misc_feature (1)..( 12): Result.001 file - promoters60/1019898
gatatgtatgca

SEQ ID NO: 96544 - DNA, 12 bp, Unknown
  misc_feature (1)..( 12): Result.001 file - promoters60/1019898
gctatggatgca

SEQ ID NO: 96545 - DNA, 12 bp, Unknown
  misc_feature (1)..( 12): Result.001 file - promoters60/1019898
cgtatagattag

SEQ ID NO: 96546 - DNA, 12 bp, Unknown
  misc_feature (1)..( 12): Result.001 file - promoters60/1019898
gaaatagatatt

SEQ ID NO: 96547 - DNA, 12 bp, Unknown
  misc_feature (1)..( 12): Result.001 file - promoters60/1019898
aatatataccgg

SEQ ID NO: 96548 - DNA, 9 bp, Unknown
  misc_feature (1)..( 9): Result.001 file - promoters60/1019898
cgtatagat

SEQ ID NO: 96549 - DNA, 9 bp, Unknown
  misc_feature (1)..( 9): Result.001 file - promoters60/1019898
aatatagag

SEQ ID NO: 96550 - DNA, 9 bp, Unknown
  misc_feature (1)..( 9): Result.001 file - promoters60/1019898
gctatggat

SEQ ID NO: 96551 - DNA, 9 bp, Unknown
  misc_feature (1)..( 9): Result.001 file - promoters60/1019898
gaaatagat

SEQ ID NO: 96552 - DNA, 9 bp, Unknown
  misc_feature (1)..( 9): Result.001 file - promoters60/1019898
aatatatac

SEQ ID NO: 96553 - DNA, 9 bp, Unknown
  misc_feature (1)..( 9): Result.001 file - promoters60/1019898
ctttttgtt

SEQ ID NO: 96554 - DNA, 9 bp, Unknown
  misc_feature (1)..( 9): Result.001 file - promoters60/1019898
ctttttttt

SEQ ID NO: 96555 - DNA, 9 bp, Unknown
  misc_feature (1)..( 9): Result.001 file - promoters60/1019898
ttttatgtt

SEQ ID NO: 96556 - DNA, 10 bp, Unknown
  misc_feature (1)..( 10): Result.001 file - promoters60/1019898
attctattaa

SEQ ID NO: 96557 - DNA, 10 bp, Unknown
  misc_feature (1)..( 10): Result.001 file - promoters60/1019898
tttctatatg

SEQ ID NO: 96558 - DNA, 8 bp, Unknown
  misc_feature (1)..( 8): Result.001 file - promoters60/1019898
ttttgttg

SEQ ID NO: 96559 - DNA, 8 bp, Unknown
  misc_feature (1)..( 8): Result.001 file - promoters60/1019898
gtttcttg

SEQ ID NO: 96560 - DNA, 9 bp, Unknown
  misc_feature (1)..( 9): Result.001 file - promoters60/1019898
tttatgttt

SEQ ID NO: 96561 - DNA, 9 bp, Unknown
  misc_feature (1)..( 9): Result.001 file - promoters60/1019898
atattctat

SEQ ID NO: 96562 - DNA, 9 bp, Unknown
  misc_feature (1)..( 9): Result.001 file - promoters60/1019898
tttttctat

SEQ ID NO: 96563 - DNA, 9 bp, Unknown
  misc_feature (1)..( 9): Result.001 file - promoters60/1019915
gttttatca

SEQ ID NO: 96564 - DNA, 7 bp, Unknown
  misc_feature (1)..( 7): Result.001 file - promoters60/1019915
aacaaga

SEQ ID NO: 96565 - DNA, 7 bp, Unknown
  misc_feature (1)..( 7): Result.001 file - promoters60/1019915
aactaga

SEQ ID NO: 96566 - DNA, 7 bp, Unknown
  misc_feature (1)..( 7): Result.001 file - promoters60/1019915
aactaga

SEQ ID NO: 96567 - DNA, 9 bp, Unknown
  misc_feature (1)..( 9): Result.001 file - promoters60/1019915
ctgcaaatt

SEQ ID NO: 96568 - DNA, 9 bp, Unknown
  misc_feature (1)..( 9): Result.001 file - promoters60/1019915
tgtcaaatt

SEQ ID NO: 96569 - DNA, 9 bp, Unknown
  misc_feature (1)..( 9): Result.001 file - promoters60/1019915
tgtcatatt

SEQ ID NO: 96570 - DNA, 10 bp, Unknown
  misc_feature (1)..( 10): Result.001 file - promoters60/1019915
gaccgaaaaa

SEQ ID NO: 96571 - DNA, 10 bp, Unknown
  misc_feature (1)..( 10): Result.001 file - promoters60/1019915
ttaagaaaaa

SEQ ID NO: 96572 - DNA, 10 bp, Unknown
  misc_feature (1)..( 10): Result.001 file - promoters60/1019915
ttaacaaaac

SEQ ID NO: 96573 - DNA, 8 bp, Unknown
  misc_feature (1)..( 8): Result.001 file - promoters60/1019915
ctaaaaac

SEQ ID NO: 96574 - DNA, 8 bp, Unknown
  misc_feature (1)..( 8): Result.001 file - promoters60/1019915
ttaaaaaa

SEQ ID NO: 96575 - DNA, 8 bp, Unknown
  misc_feature (1)..( 8): Result.001 file - promoters60/1019915
ctagaaac

SEQ ID NO: 96576 - DNA, 8 bp, Unknown
  misc_feature (1)..( 8): Result.001 file - promoters60/1019915
aaaataaa

SEQ ID NO: 96577 - DNA, 8 bp, Unknown
  misc_feature (1)..( 8): Result.001 file - promoters60/1019915
aaaacaaa

SEQ ID NO: 96578 - DNA, 8 bp, Unknown
  misc_feature (1)..( 8): Result.001 file - promoters60/1019915
aaaataaa

SEQ ID NO: 96579 - DNA, 8 bp, Unknown
  misc_feature (1)..( 8): Result.001 file - promoters60/1019915
tttctagt

SEQ ID NO: 96580 - DNA, 8 bp, Unknown
  misc_feature (1)..( 8): Result.001 file - promoters60/1019915
tttttagt

SEQ ID NO: 96581 - DNA, 8 bp, Unknown
  misc_feature (1)..( 8): Result.001 file - promoters60/1019915
attttaga

SEQ ID NO: 96582 - DNA, 12 bp, Unknown
  misc_feature (1)..( 12): Result.001 file - promoters60/1019915
ataacaccgtta

SEQ ID NO: 96583 - DNA, 12 bp, Unknown
  misc_feature (1)..( 12): Result.001 file - promoters60/1019915
ataaaaccatta

SEQ ID NO: 96584 - DNA, 12 bp, Unknown
  misc_feature (1)..( 12): Result.001 file - promoters60/1019915
attaaaccattc

SEQ ID NO: 96585 - DNA, 10 bp, Unknown
  misc_feature (1)..( 10): Result.001 file - promoters60/1019915
aaatagtgat

SEQ ID NO: 96586 - DNA, 10 bp, Unknown
  misc_feature (1)..( 10): Result.001 file - promoters60/1019915
ttatattgat

SEQ ID NO: 96587 - DNA, 10 bp, Unknown
  misc_feature (1)..( 10): Result.001 file - promoters60/1019928
ttatattgtt

SEQ ID NO: 96588 - DNA, 9 bp, Unknown
  misc_feature (1)..( 9): Result.001 file - promoters60/1019928
attagttct

SEQ ID NO: 96589 - DNA, 9 bp, Unknown
  misc_feature (1)..( 9): Result.001 file - promoters60/1019928
atttgttat

SEQ ID NO: 96590 - DNA, 9 bp, Unknown
  misc_feature (1)..( 9): Result.001 file - promoters60/1019928
attagttaa

SEQ ID NO: 96591 - DNA, 9 bp, Unknown
  misc_feature (1)..( 9): Result.001 file - promoters60/1019928
attagttaa

SEQ ID NO: 96592 - DNA, 9 bp, Unknown
  misc_feature (1)..( 9): Result.001 file - promoters60/1019928
attatttct

SEQ ID NO: 96593 - DNA, 9 bp, Unknown
  misc_feature (1)..( 9): Result.001 file - promoters60/1019928
aattgttaa

SEQ ID NO: 96594 - DNA, 14 bp, Unknown
  misc_feature (1)..( 14): Result.001 file - promoters60/1019928
aattcgaatttttc

SEQ ID NO: 96595 - DNA, 14 bp, Unknown
  misc_feature (1)..( 14): Result.001 file - promoters60/1019928
ggccggaattttag

SEQ ID NO: 96596 - DNA, 14 bp, Unknown
  misc_feature (1)..( 14): Result.001 file - promoters60/1019928
atttgaaattttca

SEQ ID NO: 96597 - DNA, 14 bp, Unknown
  misc_feature (1)..( 14): Result.001 file - promoters60/1019928
gaatgaaatctgtc

SEQ ID NO: 96598 - DNA, 14 bp, Unknown
  misc_feature (1)..( 14): Result.001 file - promoters60/1019928
cgcctaaataaaaa

SEQ ID NO: 96599 - DNA, 14 bp, Unknown
  misc_feature (1)..( 14): Result.001 file - promoters60/1019928
tttgaaaatttcat

SEQ ID NO: 96600 - DNA, 14 bp, Unknown
  misc_feature (1)..( 14): Result.001 file - promoters60/1019928
gcgctaaactttta

SEQ ID NO: 96601 - DNA, 20 bp, Unknown
  misc_feature (1)..( 20): Result.001 file - promoters60/1019928
attcgaatttttcaatattt

SEQ ID NO: 96602 - DNA, 20 bp, Unknown
  misc_feature (1)..( 20): Result.001 file - promoters60/1019928
tttagtctattttaattcgt

SEQ ID NO: 96603 - DNA, 20 bp, Unknown
  misc_feature (1)..( 20): Result.001 file - promoters60/1019928
atttgaaattttcataaact

SEQ ID NO: 96604 - DNA, 20 bp, Unknown
  misc_feature (1)..( 20): Result.001 file - promoters60/1019928
gcgctaaacttttaaaatgc

SEQ ID NO: 96605 - DNA, 20 bp, Unknown
  misc_feature (1)..( 20): Result.001 file - promoters60/1019928
ttagaaaagaatgaaatctg

SEQ ID NO: 96606 - DNA, 20 bp, Unknown
  misc_feature (1)..( 20): Result.001 file - promoters60/1019928
aaagacgcgcctaaataaaa

SEQ ID NO: 96607 - DNA, 20 bp, Unknown
  misc_feature (1)..( 20): Result.001 file - promoters60/1019928
ggcgcttatttgaaaatttc

SEQ ID NO: 96608 - DNA, 10 bp, Unknown
  misc_feature (1)..( 10): Result.001 file - promoters60/1019928
cagaaaattc

SEQ ID NO: 96609 - DNA, 10 bp, Unknown
  misc_feature (1)..( 10): Result.001 file - promoters60/1019928
tagaaaagaa

SEQ ID NO: 96610 - DNA, 10 bp, Unknown
  misc_feature (1)..( 10): Result.001 file - promoters60/1019928
ttgaaaattt

SEQ ID NO: 96611 - DNA, 10 bp, Unknown
  misc_feature (1)..( 10): Result.001 file - promoters60/1019928
tagtaaatga

SEQ ID NO: 96612 - DNA, 10 bp, Unknown
  misc_feature (1)..( 10): Result.001 file - promoters60/1019928
tttgaaattt

SEQ ID NO: 96613 - DNA, 10 bp, Unknown
  misc_feature (1)..( 10): Result.001 file - promoters60/1019928
taaaaaattg

SEQ ID NO: 96614 - DNA, 10 bp, Unknown
  misc_feature (1)..( 10): Result.001 file - promoters60/1019928
gctaaacttt

SEQ ID NO: 96615 - DNA, 12 bp, Unknown
  misc_feature (1)..( 12): Result.001 file - promoters60/1019928
tatataaacaaa

SEQ ID NO: 96616 - DNA, 12 bp, Unknown
  misc_feature (1)..( 12): Result.001 file - promoters60/1019928
tatataaatgac

SEQ ID NO: 96617 - DNA, 12 bp, Unknown
  misc_feature (1)..( 12): Result.001 file - promoters60/1019928
tatataaatgac

SEQ ID NO: 96618 - DNA, 12 bp, Unknown
  misc_feature (1)..( 12): Result.001 file - promoters60/1019928
tataaaaaccaa

SEQ ID NO: 96619 - DNA, 12 bp, Unknown
  misc_feature (1)..( 12): Result.001 file - promoters60/1019928
cctataaatatc

SEQ ID NO: 96620 - DNA, 12 bp, Unknown
  misc_feature (1)..( 12): Result.001 file - promoters60/1019928
cataaaagcagt

SEQ ID NO: 96621 - DNA, 12 bp, Unknown
  misc_feature (1)..( 12): Result.001 file - promoters60/1019928
acgataaatatc

SEQ ID NO: 96622 - DNA, 14 bp, Unknown
  misc_feature (1)..( 14): Result.001 file - promoters60/1019928
aaacttataattat

SEQ ID NO: 96623 - DNA, 14 bp, Unknown
  misc_feature (1)..( 14): Result.001 file - promoters60/1019928
aatgatattattat

SEQ ID NO: 96624 - DNA, 14 bp, Unknown
  misc_feature (1)..( 14): Result.001 file - promoters60/1019928
atctttataagtat

SEQ ID NO: 96625 - DNA, 14 bp, Unknown
  misc_feature (1)..( 14): Result.001 file - promoters60/1019928
aaatttgtaacttc

SEQ ID NO: 96626 - DNA, 14 bp, Unknown
  misc_feature (1)..( 14): Result.001 file - promoters60/1019928
atctttatacaaaa

SEQ ID NO: 96627 - DNA, 14 bp, Unknown
  misc_feature (1)..( 14): Result.001 file - promoters60/1019928
ctttatgttattag

SEQ ID NO: 96628 - DNA, 14 bp, Unknown
  misc_feature (1)..( 14): Result.001 file - promoters60/1019928
ctttatgttattag

SEQ ID NO: 96629 - DNA, 10 bp, Unknown
  misc_feature (1)..( 10): Result.001 file - promoters60/1019928
ttatgtaaat

SEQ ID NO: 96630 - DNA, 10 bp, Unknown
  misc_feature (1)..( 10): Result.001 file - promoters60/1019928
gtatttaagc

SEQ ID NO: 96631 - DNA, 10 bp, Unknown
  misc_feature (1)..( 10): Result.001 file - promoters60/1019928
ttatgttatt

SEQ ID NO: 96632 - DNA, 10 bp, Unknown
  misc_feature (1)..( 10): Result.001 file - promoters60/1019928
ttatgtattc

SEQ ID NO: 96633 - DNA, 10 bp, Unknown
  misc_feature (1)..( 10): Result.001 file - promoters60/1019928
aattgttaat

SEQ ID NO: 96634 - DNA, 10 bp, Unknown
  misc_feature (1)..( 10): Result.001 file - promoters60/1020023
ttatttactt

SEQ ID NO: 96635 - DNA, 12 bp, Unknown
  misc_feature (1)..( 12): Result.001 file - promoters60/1020023
atatttatataa

SEQ ID NO: 96636 - DNA, 12 bp, Unknown
  misc_feature (1)..( 12): Result.001 file - promoters60/1020023
caatttagataa

SEQ ID NO: 96637 - DNA, 12 bp, Unknown
  misc_feature (1)..( 12): Result.001 file - promoters60/1020023
caatttaatacc

SEQ ID NO: 96638 - DNA, 12 bp, Unknown
  misc_feature (1)..( 12): Result.001 file - promoters60/1020023
tgattaataatt

SEQ ID NO: 96639 - DNA, 12 bp, Unknown
  misc_feature (1)..( 12): Result.001 file - promoters60/1020023
gccttaatatcg

SEQ ID NO: 96640 - DNA, 12 bp, Unknown
  misc_feature (1)..( 12): Result.001 file - promoters60/1020023
tcctatatatca

SEQ ID NO: 96641 - DNA, 12 bp, Unknown
  misc_feature (1)..( 12): Result.001 file - promoters60/1020023
ttctatatatat

SEQ ID NO: 96642 - DNA, 12 bp, Unknown
  misc_feature (1)..( 12): Result.001 file - promoters60/1020023
tcctataaattg

SEQ ID NO: 96643 - DNA, 12 bp, Unknown
  misc_feature (1)..( 12): Result.001 file - promoters60/1020023
tcctataaatat

SEQ ID NO: 96644 - DNA, 12 bp, Unknown
  misc_feature (1)..( 12): Result.001 file - promoters60/1020023
aaatataaatat

SEQ ID NO: 96645 - DNA, 8 bp, Unknown
  misc_feature (1)..( 8): Result.001 file - promoters60/1020023
ataattag

SEQ ID NO: 96646 - DNA, 8 bp, Unknown
  misc_feature (1)..( 8): Result.001 file - promoters60/1020023
ctaattaa

SEQ ID NO: 96647 - DNA, 8 bp, Unknown
  misc_feature (1)..( 8): Result.001 file - promoters60/1020023
ataattag

SEQ ID NO: 96648 - DNA, 8 bp, Unknown
  misc_feature (1)..( 8): Result.001 file - promoters60/1020023
ataaataa

SEQ ID NO: 96649 - DNA, 11 bp, Unknown
  misc_feature (1)..( 11): Result.001 file - promoters60/1020023
tgatgatattc

SEQ ID NO: 96650 - DNA, 11 bp, Unknown
  misc_feature (1)..( 11): Result.001 file - promoters60/1020023
agataatagtc

SEQ ID NO: 96651 - DNA, 11 bp, Unknown
  misc_feature (1)..( 11): Result.001 file - promoters60/1020023
agaaaatttac

SEQ ID NO: 96652 - DNA, 11 bp, Unknown
  misc_feature (1)..( 11): Result.001 file - promoters60/1020023
actaaatttta

SEQ ID NO: 96653 - DNA, 11 bp, Unknown
  misc_feature (1)..( 11): Result.001 file - promoters60/1020023
attttatgcaa

SEQ ID NO: 96654 - DNA, 11 bp, Unknown
  misc_feature (1)..( 11): Result.001 file - promoters60/1020023
tttttatgtat

SEQ ID NO: 96655 - DNA, 11 bp, Unknown
  misc_feature (1)..( 11): Result.001 file - promoters60/1020023
tttttttgtat

SEQ ID NO: 96656 - DNA, 11 bp, Unknown
  misc_feature (1)..( 11): Result.001 file - promoters60/1020023
ctgttatgtct

SEQ ID NO: 96657 - DNA, 7 bp, Unknown
  misc_feature (1)..( 7): Result.001 file - promoters60/1020023
cttaatc

SEQ ID NO: 96658 - DNA, 7 bp, Unknown
  misc_feature (1)..( 7): Result.001 file - promoters60/1020023
cttaata

SEQ ID NO: 96659 - DNA, 7 bp, Unknown
  misc_feature (1)..( 7): Result.001 file - promoters60/1020023
cttaatg

SEQ ID NO: 96660 - DNA, 7 bp, Unknown
  misc_feature (1)..( 7): Result.001 file - promoters60/1020023
attaata

SEQ ID NO: 96661 - DNA, 10 bp, Unknown
  misc_feature (1)..( 10): Result.001 file - promoters60/1020023
ttaatagcct

SEQ ID NO: 96662 - DNA, 10 bp, Unknown
  misc_feature (1)..( 10): Result.001 file - promoters60/1020023
ttaataccct

SEQ ID NO: 96663 - DNA, 10 bp, Unknown
  misc_feature (1)..( 10): Result.001 file - promoters60/1020023
ttaataatta

SEQ ID NO: 96664 - DNA, 10 bp, Unknown
  misc_feature (1)..( 10): Result.001 file - promoters60/1020046
ttaatatcgg

SEQ ID NO: 96665 - DNA, 8 bp, Unknown
  misc_feature (1)..( 8): Result.001 file - promoters60/1020046
atatttat

SEQ ID NO: 96666 - DNA, 8 bp, Unknown
  misc_feature (1)..( 8): Result.001 file - promoters60/1020046
atagttat

SEQ ID NO: 96667 - DNA, 7 bp, Unknown
  misc_feature (1)..( 7): Result.001 file - promoters60/1020046
ctttttc

SEQ ID NO: 96668 - DNA, 7 bp, Unknown
  misc_feature (1)..( 7): Result.001 file - promoters60/1020046
ctttttc

SEQ ID NO: 96669 - DNA, 6 bp, Unknown
  misc_feature (1)..( 6): Result.001 file - promoters60/1020046
tttaac

SEQ ID NO: 96670 - DNA, 6 bp, Unknown
  misc_feature (1)..( 6): Result.001 file - promoters60/1020046
tttaac

SEQ ID NO: 96671 - DNA, 7 bp, Unknown
  misc_feature (1)..( 7): Result.001 file - promoters60/1020046
ttaattc

SEQ ID NO: 96672 - DNA, 7 bp, Unknown
  misc_feature (1)..( 7): Result.001 file - promoters60/1020046
ttatttc

SEQ ID NO: 96673 - DNA, 7 bp, Unknown
  misc_feature (1)..( 7): Result.001 file - promoters60/1020046
ttaatta

SEQ ID NO: 96674 - DNA, 7 bp, Unknown
  misc_feature (1)..( 7): Result.001 file - promoters60/1020046
tataaag

SEQ ID NO: 96675 - DNA, 7 bp, Unknown
  misc_feature (1)..( 7): Result.001 file - promoters60/1020046
tattaag

SEQ ID NO: 96676 - DNA, 6 bp, Unknown
  misc_feature (1)..( 6): Result.001 file - promoters60/1020046
acataa

SEQ ID NO: 96677 - DNA, 6 bp, Unknown
  misc_feature (1)..( 6): Result.001 file - promoters60/1020046
acataa

SEQ ID NO: 96678 - DNA, 13 bp, Unknown
  misc_feature (1)..( 13): Result.001 file - promoters60/1020046
aaaaagtaaagga

SEQ ID NO: 96679 - DNA, 13 bp, Unknown
  misc_feature (1)..( 13): Result.001 file - promoters60/1020046
aaaaaataaagga

SEQ ID NO: 96680 - DNA, 13 bp, Unknown
  misc_feature (1)..( 13): Result.001 file - promoters60/1020046
ggaaagtaaataa

SEQ ID NO: 96681 - DNA, 6 bp, Unknown
  misc_feature (1)..( 6): Result.001 file - promoters60/1020046
aaaata

SEQ ID NO: 96682 - DNA, 6 bp, Unknown
  misc_feature (1)..( 6): Result.001 file - promoters60/1020046
aaaata

SEQ ID NO: 96683 - DNA, 8 bp, Unknown
  misc_feature (1)..( 8): Result.001 file - promoters60/1020046
ttctctct

SEQ ID NO: 96684 - DNA, 8 bp, Unknown
  misc_feature (1)..( 8): Result.001 file - promoters60/1020046
ttctctct

SEQ ID NO: 96685 - DNA, 8 bp, Unknown
  misc_feature (1)..( 8): Result.001 file - promoters60/1020046
ctctctct

SEQ ID NO: 96686 - DNA, 8 bp, Unknown
  misc_feature (1)..( 8): Result.001 file - promoters60/1020046
taaagaca

SEQ ID NO: 96687 - DNA, 8 bp, Unknown
  misc_feature (1)..( 8): Result.001 file - promoters60/1020046
taaacaca

SEQ ID NO: 96688 - DNA, 6 bp, Unknown
  misc_feature (1)..( 6): Result.001 file - promoters60/1020046
ttataa

SEQ ID NO: 96689 - DNA, 6 bp, Unknown
  misc_feature (1)..( 6): Result.001 file - promoters60/1020046
ttataa

SEQ ID NO: 96690 - DNA, 8 bp, Unknown
  misc_feature (1)..( 8): Result.001 file - promoters60/1020046
gtatatat

SEQ ID NO: 96691 - DNA, 8 bp, Unknown
  misc_feature (1)..( 8): Result.001 file - promoters60/1020046
aaatatat

SEQ ID NO: 96692 - DNA, 8 bp, Unknown
  misc_feature (1)..( 8): Result.001 file - promoters60/1020046
aaacatat

SEQ ID NO: 96693 - DNA, 10 bp, Unknown
  misc_feature (1)..( 10): Result.001 file - promoters60/1020046
tatttttaga

SEQ ID NO: 96694 - DNA, 10 bp, Unknown
  misc_feature (1)..( 10): Result.001 file - promoters60/1020046
tatctttaat

SEQ ID NO: 96695 - DNA, 10 bp, Unknown
  misc_feature (1)..( 10): Result.001 file - promoters60/1020046
ttccttgaat

SEQ ID NO: 96696 - DNA, 19 bp, Unknown
  misc_feature (1)..( 19): Result.001 file - promoters60/1020046
ttagaaaagtcatgtttct

SEQ ID NO: 96697 - DNA, 19 bp, Unknown
  misc_feature (1)..( 19): Result.001 file - promoters60/1020046
taatcaaagacatttttct

SEQ ID NO: 96698 - DNA, 19 bp, Unknown
  misc_feature (1)..( 19): Result.001 file - promoters60/1020046
taattaaaaacaaattacc

SEQ ID NO: 96699 - DNA, 9 bp, Unknown
  misc_feature (1)..( 9): Result.001 file - promoters60/1020046
aaaattaga

SEQ ID NO: 96700 - DNA, 9 bp, Unknown
  misc_feature (1)..( 9): Result.001 file - promoters60/1020046
aaatttaga

SEQ ID NO: 96701 - DNA, 9 bp, Unknown
  misc_feature (1)..( 9): Result.001 file - promoters60/1020046
aaaattatt

SEQ ID NO: 96702 - DNA, 6 bp, Unknown
  misc_feature (1)..( 6): Result.001 file - promoters60/1020046
aaaata

SEQ ID NO: 96703 - DNA, 6 bp, Unknown
  misc_feature (1)..( 6): Result.001 file - promoters60/1020046
aaaata

SEQ ID NO: 96704 - DNA, 9 bp, Unknown
  misc_feature (1)..( 9): Result.001 file - promoters60/1020046
ttaaaagat

SEQ ID NO: 96705 - DNA, 9 bp, Unknown
  misc_feature (1)..( 9): Result.001 file - promoters60/1020046
ttacaagat

SEQ ID NO: 96706 - DNA, 8 bp, Unknown
  misc_feature (1)..( 8): Result.001 file - promoters60/1020046
taacaaaa

SEQ ID NO: 96707 - DNA, 8 bp, Unknown
  misc_feature (1)..( 8): Result.001 file - promoters60/1020046
taaaaaaa

SEQ ID NO: 96708 - DNA, 8 bp, Unknown
  misc_feature (1)..( 8): Result.001 file - promoters60/1020046
aaaacttt

SEQ ID NO: 96709 - DNA, 8 bp, Unknown
  misc_feature (1)..( 8): Result.001 file - promoters60/1020046
aaatcttt

SEQ ID NO: 96710 - DNA, 6 bp, Unknown
  misc_feature (1)..( 6): Result.001 file - promoters60/1020046
ttctat

SEQ ID NO: 96711 - DNA, 6 bp, Unknown
  misc_feature (1)..( 6): Result.001 file - promoters60/1020046
ttctat

SEQ ID NO: 96712 - DNA, 7 bp, Unknown
  misc_feature (1)..( 7): Result.001 file - promoters60/1020046
ataaatt

SEQ ID NO: 96713 - DNA, 7 bp, Unknown
  misc_feature (1)..( 7): Result.001 file - promoters60/1020046
ataaatt

SEQ ID NO: 96714 - DNA, 11 bp, Unknown
  misc_feature (1)..( 11): Result.001 file - promoters60/1020046
ttacaaattta

SEQ ID NO: 96715 - DNA, 11 bp, Unknown
  misc_feature (1)..( 11): Result.001 file - promoters60/1020046
ttataaaatta

SEQ ID NO: 96716 - DNA, 8 bp, Unknown
  misc_feature (1)..( 8): Result.001 file - promoters60/1020046
aaacatat

SEQ ID NO: 96717 - DNA, 8 bp, Unknown
  misc_feature (1)..( 8): Result.001 file - promoters60/1020046
aaaaatat

SEQ ID NO: 96718 - DNA, 6 bp, Unknown
  misc_feature (1)..( 6): Result.001 file - promoters60/1020046
caactt

SEQ ID NO: 96719 - DNA, 6 bp, Unknown
  misc_feature (1)..( 6): Result.001 file - promoters60/1020046
caactt

SEQ ID NO: 96720 - DNA, 6 bp, Unknown
  misc_feature (1)..( 6): Result.001 file - promoters60/1020046
aaataa

SEQ ID NO: 96721 - DNA, 6 bp, Unknown
  misc_feature (1)..( 6): Result.001 file - promoters60/1020046
aaataa

SEQ ID NO: 96722 - DNA, 6 bp, Unknown
  misc_feature (1)..( 6): Result.001 file - promoters60/1020046
aaaata

SEQ ID NO: 96723 - DNA, 6 bp, Unknown
  misc_feature (1)..( 6): Result.001 file - promoters60/1020046
aaaata

SEQ ID NO: 96724 - DNA, 6 bp, Unknown
  misc_feature (1)..( 6): Result.001 file - promoters60/1020046
aagatg

SEQ ID NO: 96725 - DNA, 6 bp, Unknown
  misc_feature (1)..( 6): Result.001 file - promoters60/1020046
aagatg

SEQ ID NO: 96726 - DNA, 6 bp, Unknown
  misc_feature (1)..( 6): Result.001 file - promoters60/1020046
cgcgtt

SEQ ID NO: 96727 - DNA, 6 bp, Unknown
  misc_feature (1)..( 6): Result.001 file - promoters60/1020069
cgcgtt

SEQ ID NO: 96728 - DNA, 9 bp, Unknown
  misc_feature (1)..( 9): Result.001 file - promoters60/1020069
aagaagaaa

SEQ ID NO: 96729 - DNA, 9 bp, Unknown
  misc_feature (1)..( 9): Result.001 file - promoters60/1020069
aagcagaaa

SEQ ID NO: 96730 - DNA, 9 bp, Unknown
  misc_feature (1)..( 9): Result.001 file - promoters60/1020069
aagaaaaaa

SEQ ID NO: 96731 - DNA, 9 bp, Unknown
  misc_feature (1)..( 9): Result.001 file - promoters60/1020069
aagaatttg

SEQ ID NO: 96732 - DNA, 12 bp, Unknown
  misc_feature (1)..( 12): Result.001 file - promoters60/1020069
gatcttttctcg

SEQ ID NO: 96733 - DNA, 12 bp, Unknown
  misc_feature (1)..( 12): Result.001 file - promoters60/1020069
gatttttttttt

SEQ ID NO: 96734 - DNA, 12 bp, Unknown
  misc_feature (1)..( 12): Result.001 file - promoters60/1020069
gaacttgtctcc

SEQ ID NO: 96735 - DNA, 12 bp, Unknown
  misc_feature (1)..( 12): Result.001 file - promoters60/1020069
agaaaagtctcc

SEQ ID NO: 96736 - DNA, 9 bp, Unknown
  misc_feature (1)..( 9): Result.001 file - promoters60/1020069
cttttctcg

SEQ ID NO: 96737 - DNA, 9 bp, Unknown
  misc_feature (1)..( 9): Result.001 file - promoters60/1020069
tttttttcg

SEQ ID NO: 96738 - DNA, 9 bp, Unknown
  misc_feature (1)..( 9): Result.001 file - promoters60/1020069
cttgtctcc

SEQ ID NO: 96739 - DNA, 9 bp, Unknown
  misc_feature (1)..( 9): Result.001 file - promoters60/1020223
aaagtctcc

SEQ ID NO: 96740 - DNA, 8 bp, Unknown
  misc_feature (1)..( 8): Result.001 file - promoters60/1020223
atcatatt

SEQ ID NO: 96741 - DNA, 8 bp, Unknown
  misc_feature (1)..( 8): Result.001 file - promoters60/1020223
atcatatt

SEQ ID NO: 96742 - DNA, 8 bp, Unknown
  misc_feature (1)..( 8): Result.001 file - promoters60/1020223
atcatatt

SEQ ID NO: 96743 - DNA, 9 bp, Unknown
  misc_feature (1)..( 9): Result.001 file - promoters60/1020223
tttgtagtg

SEQ ID NO: 96744 - DNA, 9 bp, Unknown
  misc_feature (1)..( 9): Result.001 file - promoters60/1020223
attgtagct

SEQ ID NO: 96745 - DNA, 9 bp, Unknown
  misc_feature (1)..( 9): Result.001 file - promoters60/1020223
tttgttgtg

SEQ ID NO: 96746 - DNA, 8 bp, Unknown
  misc_feature (1)..( 8): Result.001 file - promoters60/1020223
tgatttgt

SEQ ID NO: 96747 - DNA, 8 bp, Unknown
  misc_feature (1)..( 8): Result.001 file - promoters60/1020223
agatatgt

SEQ ID NO: 96748 - DNA, 8 bp, Unknown
  misc_feature (1)..( 8): Result.001 file - promoters60/1020223
tgatttgg

SEQ ID NO: 96749 - DNA, 6 bp, Unknown
  misc_feature (1)..( 6): Result.001 file - promoters60/1020223
atattt

SEQ ID NO: 96750 - DNA, 6 bp, Unknown
  misc_feature (1)..( 6): Result.001 file - promoters60/1020223
atattt

SEQ ID NO: 96751 - DNA, 7 bp, Unknown
  misc_feature (1)..( 7): Result.001 file - promoters60/1020223
gtttgtt

SEQ ID NO: 96752 - DNA, 7 bp, Unknown
  misc_feature (1)..( 7): Result.001 file - promoters60/1020223
gtttgtg

SEQ ID NO: 96753 - DNA, 7 bp, Unknown
  misc_feature (1)..( 7): Result.001 file - promoters60/1020223
ttttgtt

SEQ ID NO: 96754 - DNA, 6 bp, Unknown
  misc_feature (1)..( 6): Result.001 file - promoters60/1020223
tgatgt

SEQ ID NO: 96755 - DNA, 6 bp, Unknown
  misc_feature (1)..( 6): Result.001 file - promoters60/1020223
tgatgt

SEQ ID NO: 96756 - DNA, 8 bp, Unknown
  misc_feature (1)..( 8): Result.001 file - promoters60/1020223
tgtttgtt

SEQ ID NO: 96757 - DNA, 8 bp, Unknown
  misc_feature (1)..( 8): Result.001 file - promoters60/1020223
gatttgtt

SEQ ID NO: 96758 - DNA, 8 bp, Unknown
  misc_feature (1)..( 8): Result.001 file - promoters60/1020223
gatatgta

SEQ ID NO: 96759 - DNA, 7 bp, Unknown
  misc_feature (1)..( 7): Result.001 file - promoters60/1020223
gttttgt

SEQ ID NO: 96760 - DNA, 7 bp, Unknown
  misc_feature (1)..( 7): Result.001 file - promoters60/1020223
gttttgt

SEQ ID NO: 96761 - DNA, 7 bp, Unknown
  misc_feature (1)..( 7): Result.001 file - promoters60/1020223
aagaaca

SEQ ID NO: 96762 - DNA, 7 bp, Unknown
  misc_feature (1)..( 7): Result.001 file - promoters60/1020223
aagaaca

SEQ ID NO: 96763 - DNA, 6 bp, Unknown
  misc_feature (1)..( 6): Result.001 file - promoters60/1020223
tgtgat

SEQ ID NO: 96764 - DNA, 6 bp, Unknown
  misc_feature (1)..( 6): Result.001 file - promoters60/1020223
tgtgat

SEQ ID NO: 96765 - DNA, 8 bp, Unknown
  misc_feature (1)..( 8): Result.001 file - promoters60/1020223
atagtttg

SEQ ID NO: 96766 - DNA, 8 bp, Unknown
  misc_feature (1)..( 8): Result.001 file - promoters60/1020223
ataatttg

SEQ ID NO: 96767 - DNA, 8 bp, Unknown
  misc_feature (1)..( 8): Result.001 file - promoters60/1020223
agtatgtt

SEQ ID NO: 96768 - DNA, 8 bp, Unknown
  misc_feature (1)..( 8): Result.001 file - promoters60/1020223
agtttgtt

SEQ ID NO: 96769 - DNA, 6 bp, Unknown
  misc_feature (1)..( 6): Result.001 file - promoters60/1020223
tgtttg

SEQ ID NO: 96770 - DNA, 6 bp, Unknown
  misc_feature (1)..( 6): Result.001 file - promoters60/1020223
tgtttg

SEQ ID NO: 96771 - DNA, 6 bp, Unknown
  misc_feature (1)..( 6): Result.001 file - promoters60/1020223
gagttt

SEQ ID NO: 96772 - DNA, 6 bp, Unknown
  misc_feature (1)..( 6): Result.001 file - promoters60/1020223
gagttt

SEQ ID NO: 96773 - DNA, 6 bp, Unknown
  misc_feature (1)..( 6): Result.001 file - promoters60/1020223
ctgatt

SEQ ID NO: 96774 - DNA, 6 bp, Unknown
  misc_feature (1)..( 6): Result.001 file - promoters60/1020223
ctgatt

SEQ ID NO: 96775 - DNA, 6 bp, Unknown
  misc_feature (1)..( 6): Result.001 file - promoters60/1020223
ttagtt

SEQ ID NO: 96776 - DNA, 6 bp, Unknown
  misc_feature (1)..( 6): Result.001 file - promoters60/1020265
ttagtt

SEQ ID NO: 96777 - DNA, 8 bp, Unknown
  misc_feature (1)..( 8): Result.001 file - promoters60/1020265
atgactac

SEQ ID NO: 96778 - DNA, 8 bp, Unknown
  misc_feature (1)..( 8): Result.001 file - promoters60/1020265
atgactta

SEQ ID NO: 96779 - DNA, 8 bp, Unknown
  misc_feature (1)..( 8): Result.001 file - promoters60/1020265
ttgattta

SEQ ID NO: 96780 - DNA, 7 bp, Unknown
  misc_feature (1)..( 7): Result.001 file - promoters60/1020265
attgtgt

SEQ ID NO: 96781 - DNA, 7 bp, Unknown
  misc_feature (1)..( 7): Result.001 file - promoters60/1020265
attctgt

SEQ ID NO: 96782 - DNA, 7 bp, Unknown
  misc_feature (1)..( 7): Result.001 file - promoters60/1020265
tttgtgt

SEQ ID NO: 96783 - DNA, 8 bp, Unknown
  misc_feature (1)..( 8): Result.001 file - promoters60/1020265
atttttca

SEQ ID NO: 96784 - DNA, 8 bp, Unknown
  misc_feature (1)..( 8): Result.001 file - promoters60/1020265
attattct

SEQ ID NO: 96785 - DNA, 8 bp, Unknown
  misc_feature (1)..( 8): Result.001 file - promoters60/1020265
cttattct

SEQ ID NO: 96786 - DNA, 8 bp, Unknown
  misc_feature (1)..( 8): Result.001 file - promoters60/1020265
ggaataaa

SEQ ID NO: 96787 - DNA, 8 bp, Unknown
  misc_feature (1)..( 8): Result.001 file - promoters60/1020265
tgaagaaa

SEQ ID NO: 96788 - DNA, 8 bp, Unknown
  misc_feature (1)..( 8): Result.001 file - promoters60/1020313
tgaagaat

SEQ ID NO: 96789 - DNA, 13 bp, Unknown
  misc_feature (1)..( 13): Result.001 file - promoters60/1020313
tgtttattttact

SEQ ID NO: 96790 - DNA, 13 bp, Unknown
  misc_feature (1)..( 13): Result.001 file - promoters60/1020313
attttttttttag

SEQ ID NO: 96791 - DNA, 13 bp, Unknown
  misc_feature (1)..( 13): Result.001 file - promoters60/1020313
tgttaattgtctc

SEQ ID NO: 96792 - DNA, 13 bp, Unknown
  misc_feature (1)..( 13): Result.001 file - promoters60/1020313
tatttatttattt

SEQ ID NO: 96793 - DNA, 13 bp, Unknown
  misc_feature (1)..( 13): Result.001 file - promoters60/1020313
aaccaattttact

SEQ ID NO: 96794 - DNA, 13 bp, Unknown
  misc_feature (1)..( 13): Result.001 file - promoters60/1020364
tgtttattggcgt

SEQ ID NO: 96795 - DNA, 16 bp, Unknown
  misc_feature (1)..( 16): Result.001 file - promoters60/1020364
cataaaacaaaaatta

SEQ ID NO: 96796 - DNA, 16 bp, Unknown
  misc_feature (1)..( 16): Result.001 file - promoters60/1020364
aaaagaacaacaataa

SEQ ID NO: 96797 - DNA, 16 bp, Unknown
  misc_feature (1)..( 16): Result.001 file - promoters60/1020364
agtcatagaaaaatta

SEQ ID NO: 96798 - DNA, 16 bp, Unknown
  misc_feature (1)..( 16): Result.001 file - promoters60/1020364
gcttttccaaaaagta

SEQ ID NO: 96799 - DNA, 16 bp, Unknown
  misc_feature (1)..( 16): Result.001 file - promoters60/1020364
cttacgccaaaagaca

SEQ ID NO: 96800 - DNA, 16 bp, Unknown
  misc_feature (1)..( 16): Result.001 file - promoters60/1020430
cttttcccaaaagttt

SEQ ID NO: 96801 - DNA, 9 bp, Unknown
  misc_feature (1)..( 9): Result.001 file - promoters60/1020430
gcaactaac

SEQ ID NO: 96802 - DNA, 9 bp, Unknown
  misc_feature (1)..( 9): Result.001 file - promoters60/1020430
tgaactaac

SEQ ID NO: 96803 - DNA, 9 bp, Unknown
  misc_feature (1)..( 9): Result.001 file - promoters60/1020430
ctatctaac

SEQ ID NO: 96804 - DNA, 9 bp, Unknown
  misc_feature (1)..( 9): Result.001 file - promoters60/1020430
ctatttaat

SEQ ID NO: 96805 - DNA, 9 bp, Unknown
  misc_feature (1)..( 9): Result.001 file - promoters60/1020430
tcaaccaac

SEQ ID NO: 96806 - DNA, 9 bp, Unknown
  misc_feature (1)..( 9): Result.001 file - promoters60/1020430
ctaactaac

SEQ ID NO: 96807 - DNA, 9 bp, Unknown
  misc_feature (1)..( 9): Result.001 file - promoters60/1020430
ctatctaac

SEQ ID NO: 96808 - DNA, 9 bp, Unknown
  misc_feature (1)..( 9): Result.001 file - promoters60/1020430
ctatttaat

SEQ ID NO: 96809 - DNA, 9 bp, Unknown
  misc_feature (1)..( 9): Result.001 file - promoters60/1020430
atattatta

SEQ ID NO: 96810 - DNA, 9 bp, Unknown
  misc_feature (1)..( 9): Result.001 file - promoters60/1020430
atataatta

SEQ ID NO: 96811 - DNA, 9 bp, Unknown
  misc_feature (1)..( 9): Result.001 file - promoters60/1020430
ccttaatta

SEQ ID NO: 96812 - DNA, 9 bp, Unknown
  misc_feature (1)..( 9): Result.001 file - promoters60/1020442
gattaattc

SEQ ID NO: 96813 - DNA, 6 bp, Unknown
  misc_feature (1)..( 6): Result.001 file - promoters60/1020442
taatac

SEQ ID NO: 96814 - DNA, 6 bp, Unknown
  misc_feature (1)..( 6): Result.001 file - promoters60/1020442
taatac

SEQ ID NO: 96815 - DNA, 9 bp, Unknown
  misc_feature (1)..( 9): Result.001 file - promoters60/1020442
tttttattt

SEQ ID NO: 96816 - DNA, 9 bp, Unknown
  misc_feature (1)..( 9): Result.001 file - promoters60/1020442
tttttattt

SEQ ID NO: 96817 - DNA, 6 bp, Unknown
  misc_feature (1)..( 6): Result.001 file - promoters60/1020442
tcaagt

SEQ ID NO: 96818 - DNA, 6 bp, Unknown
  misc_feature (1)..( 6): Result.001 file - promoters60/1020442
tcaagt

SEQ ID NO: 96819 - DNA, 6 bp, Unknown
  misc_feature (1)..( 6): Result.001 file - promoters60/1020442
actagt

SEQ ID NO: 96820 - DNA, 6 bp, Unknown
  misc_feature (1)..( 6): Result.001 file - promoters60/1020442
actagt

SEQ ID NO: 96821 - DNA, 7 bp, Unknown
  misc_feature (1)..( 7): Result.001 file - promoters60/1020442
attattt

SEQ ID NO: 96822 - DNA, 7 bp, Unknown
  misc_feature (1)..( 7): Result.001 file - promoters60/1020442
atttttt

SEQ ID NO: 96823 - DNA, 9 bp, Unknown
  misc_feature (1)..( 9): Result.001 file - promoters60/1020442
gataataat

SEQ ID NO: 96824 - DNA, 9 bp, Unknown
  misc_feature (1)..( 9): Result.001 file - promoters60/1020442
gataacaat

SEQ ID NO: 96825 - DNA, 8 bp, Unknown
  misc_feature (1)..( 8): Result.001 file - promoters60/1020442
gcagcaac

SEQ ID NO: 96826 - DNA, 8 bp, Unknown
  misc_feature (1)..( 8): Result.001 file - promoters60/1020442
gcaacaac

SEQ ID NO: 96827 - DNA, 6 bp, Unknown
  misc_feature (1)..( 6): Result.001 file - promoters60/1020442
agcaaa

SEQ ID NO: 96828 - DNA, 6 bp, Unknown
  misc_feature (1)..( 6): Result.001 file - promoters60/1020442
agcaaa

SEQ ID NO: 96829 - DNA, 6 bp, Unknown
  misc_feature (1)..( 6): Result.001 file - promoters60/1020442
tttgaa

SEQ ID NO: 96830 - DNA, 6 bp, Unknown
  misc_feature (1)..( 6): Result.001 file - promoters60/1020442
tttgaa

SEQ ID NO: 96831 - DNA, 9 bp, Unknown
  misc_feature (1)..( 9): Result.001 file - promoters60/1020442
aaaagattt

SEQ ID NO: 96832 - DNA, 9 bp, Unknown
  misc_feature (1)..( 9): Result.001 file - promoters60/1020442
aaaagcttt

SEQ ID NO: 96833 - DNA, 7 bp, Unknown
  misc_feature (1)..( 7): Result.001 file - promoters60/1020442
gctggct

SEQ ID NO: 96834 - DNA, 7 bp, Unknown
  misc_feature (1)..( 7): Result.001 file - promoters60/1020442
gcttgct

SEQ ID NO: 96835 - DNA, 9 bp, Unknown
  misc_feature (1)..( 9): Result.001 file - promoters60/1020442
aagaagatg

SEQ ID NO: 96836 - DNA, 9 bp, Unknown
  misc_feature (1)..( 9): Result.001 file - promoters60/1020442
aagaagatg

SEQ ID NO: 96837 - DNA, 10 bp, Unknown
  misc_feature (1)..( 10): Result.001 file - promoters60/1020442
tgagaggttg

SEQ ID NO: 96838 - DNA, 10 bp, Unknown
  misc_feature (1)..( 10): Result.001 file - promoters60/1020442
tgagagattg

SEQ ID NO: 96839 - DNA, 7 bp, Unknown
  misc_feature (1)..( 7): Result.001 file - promoters60/1020442
ttgcaat

SEQ ID NO: 96840 - DNA, 7 bp, Unknown
  misc_feature (1)..( 7): Result.001 file - promoters60/1020442
ttgcaat

SEQ ID NO: 96841 - DNA, 8 bp, Unknown
  misc_feature (1)..( 8): Result.001 file - promoters60/1020442
tatatata

SEQ ID NO: 96842 - DNA, 8 bp, Unknown
  misc_feature (1)..( 8): Result.001 file - promoters60/1020460
tatatata

SEQ ID NO: 96843 - DNA, 8 bp, Unknown
  misc_feature (1)..( 8): Result.001 file - promoters60/1020460
gtatttgg

SEQ ID NO: 96844 - DNA, 8 bp, Unknown
  misc_feature (1)..( 8): Result.001 file - promoters60/1020460
gtatatgg

SEQ ID NO: 96845 - DNA, 11 bp, Unknown
  misc_feature (1)..( 11): Result.001 file - promoters60/1020460
agtgtatgtct

SEQ ID NO: 96846 - DNA, 11 bp, Unknown
  misc_feature (1)..( 11): Result.001 file - promoters60/1020460
agtgtatctct

SEQ ID NO: 96847 - DNA, 6 bp, Unknown
  misc_feature (1)..( 6): Result.001 file - promoters60/1020460
ttatga

SEQ ID NO: 96848 - DNA, 6 bp, Unknown
  misc_feature (1)..( 6): Result.001 file - promoters60/1020460
ttatga

SEQ ID NO: 96849 - DNA, 7 bp, Unknown
  misc_feature (1)..( 7): Result.001 file - promoters60/1020460
cttaata

SEQ ID NO: 96850 - DNA, 7 bp, Unknown
  misc_feature (1)..( 7): Result.001 file - promoters60/1020460
ctttata

SEQ ID NO: 96851 - DNA, 7 bp, Unknown
  misc_feature (1)..( 7): Result.001 file - promoters60/1020460
gtgtaaa

SEQ ID NO: 96852 - DNA, 7 bp, Unknown
  misc_feature (1)..( 7): Result.001 file - promoters60/1020460
gtgaaaa

SEQ ID NO: 96853 - DNA, 6 bp, Unknown
  misc_feature (1)..( 6): Result.001 file - promoters60/1020460
agacaa

SEQ ID NO: 96854 - DNA, 6 bp, Unknown
  misc_feature (1)..( 6): Result.001 file - promoters60/1020460
agacaa

SEQ ID NO: 96855 - DNA, 6 bp, Unknown
  misc_feature (1)..( 6): Result.001 file - promoters60/1020460
ttctta

SEQ ID NO: 96856 - DNA, 6 bp, Unknown
  misc_feature (1)..( 6): Result.001 file - promoters60/1020460
ttctta

SEQ ID NO: 96857 - DNA, 8 bp, Unknown
  misc_feature (1)..( 8): Result.001 file - promoters60/1020460
ataaacaa

SEQ ID NO: 96858 - DNA, 8 bp, Unknown
  misc_feature (1)..( 8): Result.001 file - promoters60/1020460
atatacaa

SEQ ID NO: 96859 - DNA, 7 bp, Unknown
  misc_feature (1)..( 7): Result.001 file - promoters60/1020460
aaatcca

SEQ ID NO: 96860 - DNA, 7 bp, Unknown
  misc_feature (1)..( 7): Result.001 file - promoters60/1020460
aaatcca

SEQ ID NO: 96861 - DNA, 6 bp, Unknown
  misc_feature (1)..( 6): Result.001 file - promoters60/1020460
tcaaac

SEQ ID NO: 96862 - DNA, 6 bp, Unknown
  misc_feature (1)..( 6): Result.001 file - promoters60/1020460
tcaaac

SEQ ID NO: 96863 - DNA, 7 bp, Unknown
  misc_feature (1)..( 7): Result.001 file - promoters60/1020460
attattc

SEQ ID NO: 96864 - DNA, 7 bp, Unknown
  misc_feature (1)..( 7): Result.001 file - promoters60/1020460
atttttc

SEQ ID NO: 96865 - DNA, 7 bp, Unknown
  misc_feature (1)..( 7): Result.001 file - promoters60/1020460
atgatat

SEQ ID NO: 96866 - DNA, 7 bp, Unknown
  misc_feature (1)..( 7): Result.001 file - promoters60/1020460
atggtat

SEQ ID NO: 96867 - DNA, 6 bp, Unknown
  misc_feature (1)..( 6): Result.001 file - promoters60/1020460
atctgg

SEQ ID NO: 96868 - DNA, 6 bp, Unknown
  misc_feature (1)..( 6): Result.001 file - promoters60/1020460
atctgg

SEQ ID NO: 96869 - DNA, 6 bp, Unknown
  misc_feature (1)..( 6): Result.001 file - promoters60/1020460
attatt

SEQ ID NO: 96870 - DNA, 6 bp, Unknown
  misc_feature (1)..( 6): Result.001 file - promoters60/1020460
attatt

SEQ ID NO: 96871 - DNA, 7 bp, Unknown
  misc_feature (1)..( 7): Result.001 file - promoters60/1020460
tctcaaa

SEQ ID NO: 96872 - DNA, 7 bp, Unknown
  misc_feature (1)..( 7): Result.001 file - promoters60/1020460
tctaaaa

SEQ ID NO: 96873 - DNA, 7 bp, Unknown
  misc_feature (1)..( 7): Result.001 file - promoters60/1020460
tgtttca

SEQ ID NO: 96874 - DNA, 7 bp, Unknown
  misc_feature (1)..( 7): Result.001 file - promoters60/1020508
tgtgtca

SEQ ID NO: 96875 - DNA, 7 bp, Unknown
  misc_feature (1)..( 7): Result.001 file - promoters60/1020508
ttaagaa

SEQ ID NO: 96876 - DNA, 7 bp, Unknown
  misc_feature (1)..( 7): Result.001 file - promoters60/1020508
ttatgaa

SEQ ID NO: 96877 - DNA, 6 bp, Unknown
  misc_feature (1)..( 6): Result.001 file - promoters60/1020508
gctaat

SEQ ID NO: 96878 - DNA, 6 bp, Unknown
  misc_feature (1)..( 6): Result.001 file - promoters60/1020508
gctaat

SEQ ID NO: 96879 - DNA, 6 bp, Unknown
  misc_feature (1)..( 6): Result.001 file - promoters60/1020508
taatga

SEQ ID NO: 96880 - DNA, 6 bp, Unknown
  misc_feature (1)..( 6): Result.001 file - promoters60/1020508
taatga

SEQ ID NO: 96881 - DNA, 9 bp, Unknown
  misc_feature (1)..( 9): Result.001 file - promoters60/1020508
acaacatta

SEQ ID NO: 96882 - DNA, 9 bp, Unknown
  misc_feature (1)..( 9): Result.001 file - promoters60/1020508
acaaaattg

SEQ ID NO: 96883 - DNA, 9 bp, Unknown
  misc_feature (1)..( 9): Result.001 file - promoters60/1020508
gatacatta

SEQ ID NO: 96884 - DNA, 6 bp, Unknown
  misc_feature (1)..( 6): Result.001 file - promoters60/1020508
tatatt

SEQ ID NO: 96885 - DNA, 6 bp, Unknown
  misc_feature (1)..( 6): Result.001 file - promoters60/1020508
tatatt

SEQ ID NO: 96886 - DNA, 11 bp, Unknown
  misc_feature (1)..( 11): Result.001 file - promoters60/1020508
tatttggattt

SEQ ID NO: 96887 - DNA, 11 bp, Unknown
  misc_feature (1)..( 11): Result.001 file - promoters60/1020508
tattttgattt

SEQ ID NO: 96888 - DNA, 6 bp, Unknown
  misc_feature (1)..( 6): Result.001 file - promoters60/1020508
ttcttc

SEQ ID NO: 96889 - DNA, 6 bp, Unknown
  misc_feature (1)..( 6): Result.001 file - promoters60/1020508
ttcttc

SEQ ID NO: 96890 - DNA, 6 bp, Unknown
  misc_feature (1)..( 6): Result.001 file - promoters60/1020508
tcattt

SEQ ID NO: 96891 - DNA, 6 bp, Unknown
  misc_feature (1)..( 6): Result.001 file - promoters60/1020508
tcattt

SEQ ID NO: 96892 - DNA, 6 bp, Unknown
  misc_feature (1)..( 6): Result.001 file - promoters60/1020508
aatgaa

SEQ ID NO: 96893 - DNA, 6 bp, Unknown
  misc_feature (1)..( 6): Result.001 file - promoters60/1020508
aatgaa

SEQ ID NO: 96894 - DNA, 7 bp, Unknown
  misc_feature (1)..( 7): Result.001 file - promoters60/1020508
caagtat

SEQ ID NO: 96895 - DNA, 7 bp, Unknown
  misc_feature (1)..( 7): Result.001 file - promoters60/1020508
caaatat

SEQ ID NO: 96896 - DNA, 7 bp, Unknown
  misc_feature (1)..( 7): Result.001 file - promoters60/1020508
tgcttac

SEQ ID NO: 96897 - DNA, 7 bp, Unknown
  misc_feature (1)..( 7): Result.001 file - promoters60/1020508
tgcatac

SEQ ID NO: 96898 - DNA, 6 bp, Unknown
  misc_feature (1)..( 6): Result.001 file - promoters60/1020508
cattat

SEQ ID NO: 96899 - DNA, 6 bp, Unknown
  misc_feature (1)..( 6): Result.001 file - promoters60/1020508
cattat

SEQ ID NO: 96900 - DNA, 8 bp, Unknown
  misc_feature (1)..( 8): Result.001 file - promoters60/1020508
ttactaca

SEQ ID NO: 96901 - DNA, 8 bp, Unknown
  misc_feature (1)..( 8): Result.001 file - promoters60/1020508
ttattaca

SEQ ID NO: 96902 - DNA, 8 bp, Unknown
  misc_feature (1)..( 8): Result.001 file - promoters60/1020508
atgttatt

SEQ ID NO: 96903 - DNA, 8 bp, Unknown
  misc_feature (1)..( 8): Result.001 file - promoters60/1020508
atgtcatt

SEQ ID NO: 96904 - DNA, 7 bp, Unknown
  misc_feature (1)..( 7): Result.001 file - promoters60/1020508
aaaagtt

SEQ ID NO: 96905 - DNA, 7 bp, Unknown
  misc_feature (1)..( 7): Result.001 file - promoters60/1020508
aaatgtt

SEQ ID NO: 96906 - DNA, 7 bp, Unknown
  misc_feature (1)..( 7): Result.001 file - promoters60/1020508
gaccctt

SEQ ID NO: 96907 - DNA, 7 bp, Unknown
  misc_feature (1)..( 7): Result.001 file - promoters60/1020508
gactctt

SEQ ID NO: 96908 - DNA, 7 bp, Unknown
  misc_feature (1)..( 7): Result.001 file - promoters60/1020508
atcgtaa

SEQ ID NO: 96909 - DNA, 7 bp, Unknown
  misc_feature (1)..( 7): Result.001 file - promoters60/1020508
atcttaa

SEQ ID NO: 96910 - DNA, 6 bp, Unknown
  misc_feature (1)..( 6): Result.001 file - promoters60/1020508
ataaat

SEQ ID NO: 96911 - DNA, 6 bp, Unknown
  misc_feature (1)..( 6): Result.001 file - promoters60/1020508
ataaat

SEQ ID NO: 96912 - DNA, 7 bp, Unknown
  misc_feature (1)..( 7): Result.001 file - promoters60/1020508
aacataa

SEQ ID NO: 96913 - DNA, 7 bp, Unknown
  misc_feature (1)..( 7): Result.001 file - promoters60/1020508
aacgtaa

SEQ ID NO: 96914 - DNA, 8 bp, Unknown
  misc_feature (1)..( 8): Result.001 file - promoters60/1020508
taaaatat

SEQ ID NO: 96915 - DNA, 8 bp, Unknown
  misc_feature (1)..( 8): Result.001 file - promoters60/1020512
taaaatat

SEQ ID NO: 96916 - DNA, 10 bp, Unknown
  misc_feature (1)..( 10): Result.001 file - promoters60/1020512
aactaatata

SEQ ID NO: 96917 - DNA, 10 bp, Unknown
  misc_feature (1)..( 10): Result.001 file - promoters60/1020512
aacaaatata

SEQ ID NO: 96918 - DNA, 10 bp, Unknown
  misc_feature (1)..( 10): Result.001 file - promoters60/1020512
ctctaatatg

SEQ ID NO: 96919 - DNA, 10 bp, Unknown
  misc_feature (1)..( 10): Result.001 file - promoters60/1020512
tgcaaagaaa

SEQ ID NO: 96920 - DNA, 10 bp, Unknown
  misc_feature (1)..( 10): Result.001 file - promoters60/1020512
taaagtcatc

SEQ ID NO: 96921 - DNA, 10 bp, Unknown
  misc_feature (1)..( 10): Result.001 file - promoters60/1020512
aaaagtctaa

SEQ ID NO: 96922 - DNA, 11 bp, Unknown
  misc_feature (1)..( 11): Result.001 file - promoters60/1020512
aaatagtttaa

SEQ ID NO: 96923 - DNA, 10 bp, Unknown
  misc_feature (1)..( 10): Result.001 file - promoters60/1020512
tattttccag

SEQ ID NO: 96924 - DNA, 10 bp, Unknown
  misc_feature (1)..( 10): Result.001 file - promoters60/1020512
tctttgccaa

SEQ ID NO: 96925 - DNA, 10 bp, Unknown
  misc_feature (1)..( 10): Result.001 file - promoters60/1020543
tatttttcag

SEQ ID NO: 96926 - DNA, 7 bp, Unknown
  misc_feature (1)..( 7): Result.001 file - promoters60/1020543
ttttttg

SEQ ID NO: 96927 - DNA, 7 bp, Unknown
  misc_feature (1)..( 7): Result.001 file - promoters60/1020543
tttgttg

SEQ ID NO: 96928 - DNA, 6 bp, Unknown
  misc_feature (1)..( 6): Result.001 file - promoters60/1020543
caaaaa

SEQ ID NO: 96929 - DNA, 6 bp, Unknown
  misc_feature (1)..( 6): Result.001 file - promoters60/1020543
caaaaa

SEQ ID NO: 96930 - DNA, 10 bp, Unknown
  misc_feature (1)..( 10): Result.001 file - promoters60/1020543
tttgaaaaga

SEQ ID NO: 96931 - DNA, 10 bp, Unknown
  misc_feature (1)..( 10): Result.001 file - promoters60/1020543
aaaaaaaaga

SEQ ID NO: 96932 - DNA, 11 bp, Unknown
  misc_feature (1)..( 11): Result.001 file - promoters60/1020543
gaagaaacaga

SEQ ID NO: 96933 - DNA, 8 bp, Unknown
  misc_feature (1)..( 8): Result.001 file - promoters60/1020543
caattatt

SEQ ID NO: 96934 - DNA, 8 bp, Unknown
  misc_feature (1)..( 8): Result.001 file - promoters60/1020543
caactatt

SEQ ID NO: 96935 - DNA, 7 bp, Unknown
  misc_feature (1)..( 7): Result.001 file - promoters60/1020543
ttttatg

SEQ ID NO: 96936 - DNA, 7 bp, Unknown
  misc_feature (1)..( 7): Result.001 file - promoters60/1020543
tttcatg

SEQ ID NO: 96937 - DNA, 6 bp, Unknown
  misc_feature (1)..( 6): Result.001 file - promoters60/1020543
taaaaa

SEQ ID NO: 96938 - DNA, 6 bp, Unknown
  misc_feature (1)..( 6): Result.001 file - promoters60/1020543
taaaaa

SEQ ID NO: 96939 - DNA, 8 bp, Unknown
  misc_feature (1)..( 8): Result.001 file - promoters60/1020543
tcgacatg

SEQ ID NO: 96940 - DNA, 8 bp, Unknown
  misc_feature (1)..( 8): Result.001 file - promoters60/1020543
tcgacatg

SEQ ID NO: 96941 - DNA, 7 bp, Unknown
  misc_feature (1)..( 7): Result.001 file - promoters60/1020543
acgtggt

SEQ ID NO: 96942 - DNA, 7 bp, Unknown
  misc_feature (1)..( 7): Result.001 file - promoters60/1020543
acgtggt

SEQ ID NO: 96943 - DNA, 6 bp, Unknown
  misc_feature (1)..( 6): Result.001 file - promoters60/1020543
ggtgga

SEQ ID NO: 96944 - DNA, 6 bp, Unknown
  misc_feature (1)..( 6): Result.001 file - promoters60/1020543
ggtgga

SEQ ID NO: 96945 - DNA, 6 bp, Unknown
  misc_feature (1)..( 6): Result.001 file - promoters60/1020543
aaagaa

SEQ ID NO: 96946 - DNA, 6 bp, Unknown
  misc_feature (1)..( 6): Result.001 file - promoters60/1020543
aaagaa

SEQ ID NO: 96947 - DNA, 6 bp, Unknown
  misc_feature (1)..( 6): Result.001 file - promoters60/1020543
acaaca

SEQ ID NO: 96948 - DNA, 6 bp, Unknown
  misc_feature (1)..( 6): Result.001 file - promoters60/1020543
acaaca

SEQ ID NO: 96949 - DNA, 12 bp, Unknown
  misc_feature (1)..( 12): Result.001 file - promoters60/1020543
tgaaaagatgaa

SEQ ID NO: 96950 - DNA, 12 bp, Unknown
  misc_feature (1)..( 12): Result.001 file - promoters60/1020543
acacaagaagaa

SEQ ID NO: 96951 - DNA, 12 bp, Unknown
  misc_feature (1)..( 12): Result.001 file - promoters60/1020543
gaaaaaaaagaa

SEQ ID NO: 96952 - DNA, 9 bp, Unknown
  misc_feature (1)..( 9): Result.001 file - promoters60/1020543
atgataaga

SEQ ID NO: 96953 - DNA, 9 bp, Unknown
  misc_feature (1)..( 9): Result.001 file - promoters60/1020543
atgatgaga

SEQ ID NO: 96954 - DNA, 6 bp, Unknown
  misc_feature (1)..( 6): Result.001 file - promoters60/1020543
aataaa

SEQ ID NO: 96955 - DNA, 6 bp, Unknown
  misc_feature (1)..( 6): Result.001 file - promoters60/1020543
aataaa

SEQ ID NO: 96956 - DNA, 6 bp, Unknown
  misc_feature (1)..( 6): Result.001 file - promoters60/1020543
aactag

SEQ ID NO: 96957 - DNA, 6 bp, Unknown
  misc_feature (1)..( 6): Result.001 file - promoters60/1020543
aactag

SEQ ID NO: 96958 - DNA, 7 bp, Unknown
  misc_feature (1)..( 7): Result.001 file - promoters60/1020543
aattttg

SEQ ID NO: 96959 - DNA, 7 bp, Unknown
  misc_feature (1)..( 7): Result.001 file - promoters60/1020543
aatgttg

SEQ ID NO: 96960 - DNA, 8 bp, Unknown
  misc_feature (1)..( 8): Result.001 file - promoters60/1020543
tggtaaag

SEQ ID NO: 96961 - DNA, 8 bp, Unknown
  misc_feature (1)..( 8): Result.001 file - promoters60/1020543
tggcaaag

SEQ ID NO: 96962 - DNA, 7 bp, Unknown
  misc_feature (1)..( 7): Result.001 file - promoters60/1020543
cgttttc

SEQ ID NO: 96963 - DNA, 7 bp, Unknown
  misc_feature (1)..( 7): Result.001 file - promoters60/1020557
cgtcttc

SEQ ID NO: 96964 - DNA, 6 bp, Unknown
  misc_feature (1)..( 6): Result.001 file - promoters60/1020557
atgaaa

SEQ ID NO: 96965 - DNA, 6 bp, Unknown
  misc_feature (1)..( 6): Result.001 file - promoters60/1020557
atgaaa

SEQ ID NO: 96966 - DNA, 6 bp, Unknown
  misc_feature (1)..( 6): Result.001 file - promoters60/1020557
atttta

SEQ ID NO: 96967 - DNA, 6 bp, Unknown
  misc_feature (1)..( 6): Result.001 file - promoters60/1020557
atttta

SEQ ID NO: 96968 - DNA, 7 bp, Unknown
  misc_feature (1)..( 7): Result.001 file - promoters60/1020557
tatctat

SEQ ID NO: 96969 - DNA, 7 bp, Unknown
  misc_feature (1)..( 7): Result.001 file - promoters60/1020557
tatatat

SEQ ID NO: 96970 - DNA, 21 bp, Unknown
  misc_feature (1)..( 21): Result.001 file - promoters60/1020557
aaaaataacattcatttacta

SEQ ID NO: 96971 - DNA, 21 bp, Unknown
  misc_feature (1)..( 21): Result.001 file - promoters60/1020557
aaaaacaacattcatttacta

SEQ ID NO: 96972 - DNA, 6 bp, Unknown
  misc_feature (1)..( 6): Result.001 file - promoters60/1020557
atcatc

SEQ ID NO: 96973 - DNA, 6 bp, Unknown
  misc_feature (1)..( 6): Result.001 file - promoters60/1020557
atcatc

SEQ ID NO: 96974 - DNA, 6 bp, Unknown
  misc_feature (1)..( 6): Result.001 file - promoters60/1020557
atcatc

SEQ ID NO: 96975 - DNA, 6 bp, Unknown
  misc_feature (1)..( 6): Result.001 file - promoters60/1020557
atcatc

SEQ ID NO: 96976 - DNA, 22 bp, Unknown
  misc_feature (1)..( 22): Result.001 file - promoters60/1020557
aaatataaccaactttgaaatc

SEQ ID NO: 96977 - DNA, 22 bp, Unknown
  misc_feature (1)..( 22): Result.001 file - promoters60/1020557
aaatataaccaagtttgaaatc

SEQ ID NO: 96978 - DNA, 15 bp, Unknown
  misc_feature (1)..( 15): Result.001 file - promoters60/1020557
tctctactatataaa

SEQ ID NO: 96979 - DNA, 15 bp, Unknown
  misc_feature (1)..( 15): Result.001 file - promoters60/1020557
tctctactatataaa

SEQ ID NO: 96980 - DNA, 15 bp, Unknown
  misc_feature (1)..( 15): Result.001 file - promoters60/1020557
tttctaatataaaac

SEQ ID NO: 96981 - DNA, 7 bp, Unknown
  misc_feature (1)..( 7): Result.001 file - promoters60/1020557
agagatc

SEQ ID NO: 96982 - DNA, 7 bp, Unknown
  misc_feature (1)..( 7): Result.001 file - promoters60/1020557
agagatc

SEQ ID NO: 96983 - DNA, 7 bp, Unknown
  misc_feature (1)..( 7): Result.001 file - promoters60/1020557
atcaaaa

SEQ ID NO: 96984 - DNA, 7 bp, Unknown
  misc_feature (1)..( 7): Result.001 file - promoters60/1020557
atccaaa

SEQ ID NO: 96985 - DNA, 6 bp, Unknown
  misc_feature (1)..( 6): Result.001 file - promoters60/1020557
tagaaa

SEQ ID NO: 96986 - DNA, 6 bp, Unknown
  misc_feature (1)..( 6): Result.001 file - promoters60/1020557
tagaaa

SEQ ID NO: 96987 - DNA, 6 bp, Unknown
  misc_feature (1)..( 6): Result.001 file - promoters60/1020557
attttt

SEQ ID NO: 96988 - DNA, 6 bp, Unknown
  misc_feature (1)..( 6): Result.001 file - promoters60/1020596
attttt

SEQ ID NO: 96989 - DNA, 10 bp, Unknown
  misc_feature (1)..( 10): Result.001 file - promoters60/1020596
tatcttacct

SEQ ID NO: 96990 - DNA, 10 bp, Unknown
  misc_feature (1)..( 10): Result.001 file - promoters60/1020596
tatcttttaa

SEQ ID NO: 96991 - DNA, 10 bp, Unknown
  misc_feature (1)..( 10): Result.001 file - promoters60/1020596
aatcttgcct

SEQ ID NO: 96992 - DNA, 10 bp, Unknown
  misc_feature (1)..( 10): Result.001 file - promoters60/1020596
aatcttttaa

SEQ ID NO: 96993 - DNA, 9 bp, Unknown
  misc_feature (1)..( 9): Result.001 file - promoters60/1020596
tatggaaag

SEQ ID NO: 96994 - DNA, 9 bp, Unknown
  misc_feature (1)..( 9): Result.001 file - promoters60/1020596
tattgaaag

SEQ ID NO: 96995 - DNA, 9 bp, Unknown
  misc_feature (1)..( 9): Result.001 file - promoters60/1020596
aatggaagt

SEQ ID NO: 96996 - DNA, 9 bp, Unknown
  misc_feature (1)..( 9): Result.001 file - promoters60/1020596
gaagaaatg

SEQ ID NO: 96997 - DNA, 9 bp, Unknown
  misc_feature (1)..( 9): Result.001 file - promoters60/1020596
gaagaattc

SEQ ID NO: 96998 - DNA, 9 bp, Unknown
  misc_feature (1)..( 9): Result.001 file - promoters60/1020596
aaagatatg

SEQ ID NO: 96999 - DNA, 8 bp, Unknown
  misc_feature (1)..( 8): Result.001 file - promoters60/1020596
ccgataaa

SEQ ID NO: 97000 - DNA, 8 bp, Unknown
  misc_feature (1)..( 8): Result.001 file - promoters60/1020596
ccgaaaaa

SEQ ID NO: 97001 - DNA, 8 bp, Unknown
  misc_feature (1)..( 8): Result.001 file - promoters60/1020619
cagaaaaa

SEQ ID NO: 97002 - DNA, 14 bp, Unknown
  misc_feature (1)..( 14): Result.001 file - promoters60/1020619
caatttaataccct

SEQ ID NO: 97003 - DNA, 14 bp, Unknown
  misc_feature (1)..( 14): Result.001 file - promoters60/1020619
gattttcataacaa

SEQ ID NO: 97004 - DNA, 14 bp, Unknown
  misc_feature (1)..( 14): Result.001 file - promoters60/1020619
aaattaaatcatct

SEQ ID NO: 97005 - DNA, 14 bp, Unknown
  misc_feature (1)..( 14): Result.001 file - promoters60/1020619
ctatttaaaagtat

SEQ ID NO: 97006 - DNA, 14 bp, Unknown
  misc_feature (1)..( 14): Result.001 file - promoters60/1020619
agagttaatagcct

SEQ ID NO: 97007 - DNA, 14 bp, Unknown
  misc_feature (1)..( 14): Result.001 file - promoters60/1020619
aaacttaatcctga

SEQ ID NO: 97008 - DNA, 14 bp, Unknown
  misc_feature (1)..( 14): Result.001 file - promoters60/1020619
agattaaaaacttt

SEQ ID NO: 97009 - DNA, 13 bp, Unknown
  misc_feature (1)..( 13): Result.001 file - promoters60/1020619
ctcctataaattg

SEQ ID NO: 97010 - DNA, 13 bp, Unknown
  misc_feature (1)..( 13): Result.001 file - promoters60/1020619
ggtgtataaattg

SEQ ID NO: 97011 - DNA, 13 bp, Unknown
  misc_feature (1)..( 13): Result.001 file - promoters60/1020619
agcctttaaaaaa

SEQ ID NO: 97012 - DNA, 13 bp, Unknown
  misc_feature (1)..( 13): Result.001 file - promoters60/1020619
ctcttatatattc

SEQ ID NO: 97013 - DNA, 13 bp, Unknown
  misc_feature (1)..( 13): Result.001 file - promoters60/1020619
ttcctatatatca

SEQ ID NO: 97014 - DNA, 13 bp, Unknown
  misc_feature (1)..( 13): Result.001 file - promoters60/1020619
cttctatatatat

SEQ ID NO: 97015 - DNA, 16 bp, Unknown
  misc_feature (1)..( 16): Result.001 file - promoters60/1020619
tctcttttttttttta

SEQ ID NO: 97016 - DNA, 16 bp, Unknown
  misc_feature (1)..( 16): Result.001 file - promoters60/1020619
tctcgtttatttactc

SEQ ID NO: 97017 - DNA, 16 bp, Unknown
  misc_feature (1)..( 16): Result.001 file - promoters60/1020619
gaaaaattattttcaa

SEQ ID NO: 97018 - DNA, 16 bp, Unknown
  misc_feature (1)..( 16): Result.001 file - promoters60/1020619
gaattggtatttacta

SEQ ID NO: 97019 - DNA, 16 bp, Unknown
  misc_feature (1)..( 16): Result.001 file - promoters60/1020619
aagtttttatttcatt

SEQ ID NO: 97020 - DNA, 16 bp, Unknown
  misc_feature (1)..( 16): Result.001 file - promoters60/1020619
gagcaatgatggctcg

SEQ ID NO: 97021 - DNA, 16 bp, Unknown
  misc_feature (1)..( 16): Result.001 file - promoters60/1020634
actctcctatggctaa

SEQ ID NO: 97022 - DNA, 10 bp, Unknown
  misc_feature (1)..( 10): Result.001 file - promoters60/1020634
taaagacttc

SEQ ID NO: 97023 - DNA, 10 bp, Unknown
  misc_feature (1)..( 10): Result.001 file - promoters60/1020634
aaaatactca

SEQ ID NO: 97024 - DNA, 10 bp, Unknown
  misc_feature (1)..( 10): Result.001 file - promoters60/1020634
attataatca

SEQ ID NO: 97025 - DNA, 10 bp, Unknown
  misc_feature (1)..( 10): Result.001 file - promoters60/1020634
aaaatagata

SEQ ID NO: 97026 - DNA, 10 bp, Unknown
  misc_feature (1)..( 10): Result.001 file - promoters60/1020634
aaaataacgc

SEQ ID NO: 97027 - DNA, 9 bp, Unknown
  misc_feature (1)..( 9): Result.001 file - promoters60/1020634
taacaaatt

SEQ ID NO: 97028 - DNA, 9 bp, Unknown
  misc_feature (1)..( 9): Result.001 file - promoters60/1020634
cgacaaatg

SEQ ID NO: 97029 - DNA, 9 bp, Unknown
  misc_feature (1)..( 9): Result.001 file - promoters60/1020634
tttcaaatt

SEQ ID NO: 97030 - DNA, 9 bp, Unknown
  misc_feature (1)..( 9): Result.001 file - promoters60/1020634
tgtcatatt

SEQ ID NO: 97031 - DNA, 9 bp, Unknown
  misc_feature (1)..( 9): Result.001 file - promoters60/1020634
gctcagatt

SEQ ID NO: 97032 - DNA, 9 bp, Unknown
  misc_feature (1)..( 9): Result.001 file - promoters60/1020634
gctcagatt

SEQ ID NO: 97033 - DNA, 9 bp, Unknown
  misc_feature (1)..( 9): Result.001 file - promoters60/1020634
cgaaaaaaa

SEQ ID NO: 97034 - DNA, 9 bp, Unknown
  misc_feature (1)..( 9): Result.001 file - promoters60/1020634
gttttaaaa

SEQ ID NO: 97035 - DNA, 9 bp, Unknown
  misc_feature (1)..( 9): Result.001 file - promoters60/1020634
cctttaaac

SEQ ID NO: 97036 - DNA, 9 bp, Unknown
  misc_feature (1)..( 9): Result.001 file - promoters60/1020634
tttttaaaa

SEQ ID NO: 97037 - DNA, 9 bp, Unknown
  misc_feature (1)..( 9): Result.001 file - promoters60/1020634
tttctaata

SEQ ID NO: 97038 - DNA, 9 bp, Unknown
  misc_feature (1)..( 9): Result.001 file - promoters60/1020634
actttaaaa

SEQ ID NO: 97039 - DNA, 14 bp, Unknown
  misc_feature (1)..( 14): Result.001 file - promoters60/1020634
gttttaaaatagta

SEQ ID NO: 97040 - DNA, 14 bp, Unknown
  misc_feature (1)..( 14): Result.001 file - promoters60/1020634
cttttcaaattgtg

SEQ ID NO: 97041 - DNA, 14 bp, Unknown
  misc_feature (1)..( 14): Result.001 file - promoters60/1020634
tgtttgaaactgat

SEQ ID NO: 97042 - DNA, 14 bp, Unknown
  misc_feature (1)..( 14): Result.001 file - promoters60/1020634
gatgtcatattcgt

SEQ ID NO: 97043 - DNA, 14 bp, Unknown
  misc_feature (1)..( 14): Result.001 file - promoters60/1020634
aagctcagattagt

SEQ ID NO: 97044 - DNA, 14 bp, Unknown
  misc_feature (1)..( 14): Result.001 file - promoters60/1020634
ggatagagataagt

SEQ ID NO: 97045 - DNA, 8 bp, Unknown
  misc_feature (1)..( 8): Result.001 file - promoters60/1020634
taaaaact

SEQ ID NO: 97046 - DNA, 8 bp, Unknown
  misc_feature (1)..( 8): Result.001 file - promoters60/1020634
taaaaatt

SEQ ID NO: 97047 - DNA, 8 bp, Unknown
  misc_feature (1)..( 8): Result.001 file - promoters60/1020634
taataatt

SEQ ID NO: 97048 - DNA, 8 bp, Unknown
  misc_feature (1)..( 8): Result.001 file - promoters60/1020634
taaacatt

SEQ ID NO: 97049 - DNA, 8 bp, Unknown
  misc_feature (1)..( 8): Result.001 file - promoters60/1020634
aaaagatt

SEQ ID NO: 97050 - DNA, 10 bp, Unknown
  misc_feature (1)..( 10): Result.001 file - promoters60/1020634
tttagaatcc

SEQ ID NO: 97051 - DNA, 10 bp, Unknown
  misc_feature (1)..( 10): Result.001 file - promoters60/1020634
aaaagattcc

SEQ ID NO: 97052 - DNA, 10 bp, Unknown
  misc_feature (1)..( 10): Result.001 file - promoters60/1020634
tttaaaatca

SEQ ID NO: 97053 - DNA, 10 bp, Unknown
  misc_feature (1)..( 10): Result.001 file - promoters60/1020634
atcgaaatca

SEQ ID NO: 97054 - DNA, 11 bp, Unknown
  misc_feature (1)..( 11): Result.001 file - promoters60/1020642
tttaaacatta

SEQ ID NO: 97055 - DNA, 6 bp, Unknown
  misc_feature (1)..( 6): Result.001 file - promoters60/1020642
ttttac

SEQ ID NO: 97056 - DNA, 6 bp, Unknown
  misc_feature (1)..( 6): Result.001 file - promoters60/1020642
ttttac

SEQ ID NO: 97057 - DNA, 9 bp, Unknown
  misc_feature (1)..( 9): Result.001 file - promoters60/1020642
aaacaaata

SEQ ID NO: 97058 - DNA, 9 bp, Unknown
  misc_feature (1)..( 9): Result.001 file - promoters60/1020642
aaataaata

SEQ ID NO: 97059 - DNA, 8 bp, Unknown
  misc_feature (1)..( 8): Result.001 file - promoters60/1020642
agagaaaa

SEQ ID NO: 97060 - DNA, 8 bp, Unknown
  misc_feature (1)..( 8): Result.001 file - promoters60/1020642
agaaaaaa

SEQ ID NO: 97061 - DNA, 8 bp, Unknown
  misc_feature (1)..( 8): Result.001 file - promoters60/1020642
aattcttg

SEQ ID NO: 97062 - DNA, 8 bp, Unknown
  misc_feature (1)..( 8): Result.001 file - promoters60/1020642
aatttttg

SEQ ID NO: 97063 - DNA, 7 bp, Unknown
  misc_feature (1)..( 7): Result.001 file - promoters60/1020642
ttgtttt

SEQ ID NO: 97064 - DNA, 7 bp, Unknown
  misc_feature (1)..( 7): Result.001 file - promoters60/1020642
ttgattt

SEQ ID NO: 97065 - DNA, 8 bp, Unknown
  misc_feature (1)..( 8): Result.001 file - promoters60/1020642
catcgtct

SEQ ID NO: 97066 - DNA, 8 bp, Unknown
  misc_feature (1)..( 8): Result.001 file - promoters60/1020642
catcttct

SEQ ID NO: 97067 - DNA, 6 bp, Unknown
  misc_feature (1)..( 6): Result.001 file - promoters60/1020642
tctaac

SEQ ID NO: 97068 - DNA, 6 bp, Unknown
  misc_feature (1)..( 6): Result.001 file - promoters60/1020642
tctaac

SEQ ID NO: 97069 - DNA, 9 bp, Unknown
  misc_feature (1)..( 9): Result.001 file - promoters60/1020642
ttttccgct

SEQ ID NO: 97070 - DNA, 9 bp, Unknown
  misc_feature (1)..( 9): Result.001 file - promoters60/1020646
ttttcagct

SEQ ID NO: 97071 - DNA, 11 bp, Unknown
  misc_feature (1)..( 11): Result.001 file - promoters60/1020646
aataatttgta

SEQ ID NO: 97072 - DNA, 11 bp, Unknown
  misc_feature (1)..( 11): Result.001 file - promoters60/1020646
aatattttagg

SEQ ID NO: 97073 - DNA, 11 bp, Unknown
  misc_feature (1)..( 11): Result.001 file - promoters60/1020646
aattattggta

SEQ ID NO: 97074 - DNA, 7 bp, Unknown
  misc_feature (1)..( 7): Result.001 file - promoters60/1020646
ttgtaac

SEQ ID NO: 97075 - DNA, 7 bp, Unknown
  misc_feature (1)..( 7): Result.001 file - promoters60/1020646
ttgtaac

SEQ ID NO: 97076 - DNA, 7 bp, Unknown
  misc_feature (1)..( 7): Result.001 file - promoters60/1020646
atagaaa

SEQ ID NO: 97077 - DNA, 7 bp, Unknown
  misc_feature (1)..( 7): Result.001 file - promoters60/1020646
atacaaa

SEQ ID NO: 97078 - DNA, 6 bp, Unknown
  misc_feature (1)..( 6): Result.001 file - promoters60/1020646
aaaaaa

SEQ ID NO: 97079 - DNA, 6 bp, Unknown
  misc_feature (1)..( 6): Result.001 file - promoters60/1020646
aaaaaa

SEQ ID NO: 97080 - DNA, 9 bp, Unknown
  misc_feature (1)..( 9): Result.001 file - promoters60/1020646
atcaatcat

SEQ ID NO: 97081 - DNA, 9 bp, Unknown
  misc_feature (1)..( 9): Result.001 file - promoters60/1020646
atctatcat

SEQ ID NO: 97082 - DNA, 8 bp, Unknown
  misc_feature (1)..( 8): Result.001 file - promoters60/1020646
ttagttta

SEQ ID NO: 97083 - DNA, 8 bp, Unknown
  misc_feature (1)..( 8): Result.001 file - promoters60/1020646
ttagttta

SEQ ID NO: 97084 - DNA, 7 bp, Unknown
  misc_feature (1)..( 7): Result.001 file - promoters60/1020646
aacagaa

SEQ ID NO: 97085 - DNA, 7 bp, Unknown
  misc_feature (1)..( 7): Result.001 file - promoters60/1020646
aacagaa

SEQ ID NO: 97086 - DNA, 6 bp, Unknown
  misc_feature (1)..( 6): Result.001 file - promoters60/1020646
ctctta

SEQ ID NO: 97087 - DNA, 6 bp, Unknown
  misc_feature (1)..( 6): Result.001 file - promoters60/1020646
ctctta

SEQ ID NO: 97088 - DNA, 6 bp, Unknown
  misc_feature (1)..( 6): Result.001 file - promoters60/1020646
atcatt

SEQ ID NO: 97089 - DNA, 6 bp, Unknown
  misc_feature (1)..( 6): Result.001 file - promoters60/1020646
atcatt

SEQ ID NO: 97090 - DNA, 6 bp, Unknown
  misc_feature (1)..( 6): Result.001 file - promoters60/1020646
cattat

SEQ ID NO: 97091 - DNA, 6 bp, Unknown
  misc_feature (1)..( 6): Result.001 file - promoters60/1020646
cattat

SEQ ID NO: 97092 - DNA, 7 bp, Unknown
  misc_feature (1)..( 7): Result.001 file - promoters60/1020646
gaacaaa

SEQ ID NO: 97093 - DNA, 7 bp, Unknown
  misc_feature (1)..( 7): Result.001 file - promoters60/1020646
gaaaaaa

SEQ ID NO: 97094 - DNA, 8 bp, Unknown
  misc_feature (1)..( 8): Result.001 file - promoters60/1020646
aacagtta

SEQ ID NO: 97095 - DNA, 8 bp, Unknown
  misc_feature (1)..( 8): Result.001 file - promoters60/1020646
aacggtta

SEQ ID NO: 97096 - DNA, 11 bp, Unknown
  misc_feature (1)..( 11): Result.001 file - promoters60/1020646
actaaccaaat

SEQ ID NO: 97097 - DNA, 11 bp, Unknown
  misc_feature (1)..( 11): Result.001 file - promoters60/1020646
actgacccaat

SEQ ID NO: 97098 - DNA, 7 bp, Unknown
  misc_feature (1)..( 7): Result.001 file - promoters60/1020646
ttattaa

SEQ ID NO: 97099 - DNA, 7 bp, Unknown
  misc_feature (1)..( 7): Result.001 file - promoters60/1020646
ttagtaa

SEQ ID NO: 97100 - DNA, 6 bp, Unknown
  misc_feature (1)..( 6): Result.001 file - promoters60/1020646
tttatt

SEQ ID NO: 97101 - DNA, 6 bp, Unknown
  misc_feature (1)..( 6): Result.001 file - promoters60/1020646
tttatt

SEQ ID NO: 97102 - DNA, 7 bp, Unknown
  misc_feature (1)..( 7): Result.001 file - promoters60/1020646
aaacaaa

SEQ ID NO: 97103 - DNA, 7 bp, Unknown
  misc_feature (1)..( 7): Result.001 file - promoters60/1020646
aaataaa

SEQ ID NO: 97104 - DNA, 6 bp, Unknown
  misc_feature (1)..( 6): Result.001 file - promoters60/1020646
catgaa

SEQ ID NO: 97105 - DNA, 6 bp, Unknown
  misc_feature (1)..( 6): Result.001 file - promoters60/1020646
catgaa

SEQ ID NO: 97106 - DNA, 6 bp, Unknown
  misc_feature (1)..( 6): Result.001 file - promoters60/1020646
tcccaa

SEQ ID NO: 97107 - DNA, 6 bp, Unknown
  misc_feature (1)..( 6): Result.001 file - promoters60/1020646
tcccaa

SEQ ID NO: 97108 - DNA, 6 bp, Unknown
  misc_feature (1)..( 6): Result.001 file - promoters60/1020646
agaaaa

SEQ ID NO: 97109 - DNA, 6 bp, Unknown
  misc_feature (1)..( 6): Result.001 file - promoters60/1020646
agaaaa

SEQ ID NO: 97110 - DNA, 8 bp, Unknown
  misc_feature (1)..( 8): Result.001 file - promoters60/1020646
gcatccaa

SEQ ID NO: 97111 - DNA, 8 bp, Unknown
  misc_feature (1)..( 8): Result.001 file - promoters60/1020666
gcattcaa

SEQ ID NO: 97112 - DNA, 10 bp, Unknown
  misc_feature (1)..( 10): Result.001 file - promoters60/1020666
agatatttag

SEQ ID NO: 97113 - DNA, 10 bp, Unknown
  misc_feature (1)..( 10): Result.001 file - promoters60/1020666
tgatctttag

SEQ ID NO: 97114 - DNA, 10 bp, Unknown
  misc_feature (1)..( 10): Result.001 file - promoters60/1020666
agaaattttt

SEQ ID NO: 97115 - DNA, 11 bp, Unknown
  misc_feature (1)..( 11): Result.001 file - promoters60/1020666
aataaatttag

SEQ ID NO: 97116 - DNA, 11 bp, Unknown
  misc_feature (1)..( 11): Result.001 file - promoters60/1020666
caaaagtttat

SEQ ID NO: 97117 - DNA, 11 bp, Unknown
  misc_feature (1)..( 11): Result.001 file - promoters60/1020666
taaaagtttta

SEQ ID NO: 97118 - DNA, 12 bp, Unknown
  misc_feature (1)..( 12): Result.001 file - promoters60/1020666
actcatagatac

SEQ ID NO: 97119 - DNA, 12 bp, Unknown
  misc_feature (1)..( 12): Result.001 file - promoters60/1020666
tatcaaagaata

SEQ ID NO: 97120 - DNA, 12 bp, Unknown
  misc_feature (1)..( 12): Result.001 file - promoters60/1020666
tataaaaacggg

SEQ ID NO: 97121 - DNA, 12 bp, Unknown
  misc_feature (1)..( 12): Result.001 file - promoters60/1020666
gcacaacgaata

SEQ ID NO: 97122 - DNA, 12 bp, Unknown
  misc_feature (1)..( 12): Result.001 file - promoters60/1020666
tattaaaatagt

SEQ ID NO: 97123 - DNA, 12 bp, Unknown
  misc_feature (1)..( 12): Result.001 file - promoters60/1020701
tatcaaaaccgt

SEQ ID NO: 97124 - DNA, 12 bp, Unknown
  misc_feature (1)..( 12): Result.001 file - promoters60/1020701
gcaataagaaat

SEQ ID NO: 97125 - DNA, 12 bp, Unknown
  misc_feature (1)..( 12): Result.001 file - promoters60/1020701
aaaatatgaaaa

SEQ ID NO: 97126 - DNA, 12 bp, Unknown
  misc_feature (1)..( 12): Result.001 file - promoters60/1020701
cgtgaaagtaat

SEQ ID NO: 97127 - DNA, 12 bp, Unknown
  misc_feature (1)..( 12): Result.001 file - promoters60/1020701
aaaacatgcact

SEQ ID NO: 97128 - DNA, 11 bp, Unknown
  misc_feature (1)..( 11): Result.001 file - promoters60/1020701
caagtctttgt

SEQ ID NO: 97129 - DNA, 11 bp, Unknown
  misc_feature (1)..( 11): Result.001 file - promoters60/1020701
caagtgttttg

SEQ ID NO: 97130 - DNA, 11 bp, Unknown
  misc_feature (1)..( 11): Result.001 file - promoters60/1020701
tgtctctatgt

SEQ ID NO: 97131 - DNA, 11 bp, Unknown
  misc_feature (1)..( 11): Result.001 file - promoters60/1020701
acattctatat

SEQ ID NO: 97132 - DNA, 10 bp, Unknown
  misc_feature (1)..( 10): Result.001 file - promoters60/1020701
atattaataa

SEQ ID NO: 97133 - DNA, 10 bp, Unknown
  misc_feature (1)..( 10): Result.001 file - promoters60/1020701
aaattaatgc

SEQ ID NO: 97134 - DNA, 10 bp, Unknown
  misc_feature (1)..( 10): Result.001 file - promoters60/1020701
atattaatgt

SEQ ID NO: 97135 - DNA, 10 bp, Unknown
  misc_feature (1)..( 10): Result.001 file - promoters60/1020701
tggttattgt

SEQ ID NO: 97136 - DNA, 10 bp, Unknown
  misc_feature (1)..( 10): Result.001 file - promoters60/1020701
aaatcatttt

SEQ ID NO: 97137 - DNA, 10 bp, Unknown
  misc_feature (1)..( 10): Result.001 file - promoters60/1020701
aaataatttt

SEQ ID NO: 97138 - DNA, 10 bp, Unknown
  misc_feature (1)..( 10): Result.001 file - promoters60/1020701
caatcatatt

SEQ ID NO: 97139 - DNA, 10 bp, Unknown
  misc_feature (1)..( 10): Result.001 file - promoters60/1020701
ctatcataat

SEQ ID NO: 97140 - DNA, 9 bp, Unknown
  misc_feature (1)..( 9): Result.001 file - promoters60/1020701
taatttatt

SEQ ID NO: 97141 - DNA, 9 bp, Unknown
  misc_feature (1)..( 9): Result.001 file - promoters60/1020701
taatttcat

SEQ ID NO: 97142 - DNA, 9 bp, Unknown
  misc_feature (1)..( 9): Result.001 file - promoters60/1020701
aaatttcat

SEQ ID NO: 97143 - DNA, 9 bp, Unknown
  misc_feature (1)..( 9): Result.001 file - promoters60/1020713
taattttca

SEQ ID NO: 97144 - DNA, 7 bp, Unknown
  misc_feature (1)..( 7): Result.001 file - promoters60/1020713
tttcttt

SEQ ID NO: 97145 - DNA, 7 bp, Unknown
  misc_feature (1)..( 7): Result.001 file - promoters60/1020713
tttattt

SEQ ID NO: 97146 - DNA, 7 bp, Unknown
  misc_feature (1)..( 7): Result.001 file - promoters60/1020713
ttattta

SEQ ID NO: 97147 - DNA, 7 bp, Unknown
  misc_feature (1)..( 7): Result.001 file - promoters60/1020713
ttagtta

SEQ ID NO: 97148 - DNA, 7 bp, Unknown
  misc_feature (1)..( 7): Result.001 file - promoters60/1020713
taattta

SEQ ID NO: 97149 - DNA, 7 bp, Unknown
  misc_feature (1)..( 7): Result.001 file - promoters60/1020713
taagtta

SEQ ID NO: 97150 - DNA, 7 bp, Unknown
  misc_feature (1)..( 7): Result.001 file - promoters60/1020713
gaagtta

SEQ ID NO: 97151 - DNA, 12 bp, Unknown
  misc_feature (1)..( 12): Result.001 file - promoters60/1020713
taaatatccgta

SEQ ID NO: 97152 - DNA, 12 bp, Unknown
  misc_feature (1)..( 12): Result.001 file - promoters60/1020713
taattatctgta

SEQ ID NO: 97153 - DNA, 6 bp, Unknown
  misc_feature (1)..( 6): Result.001 file - promoters60/1020713
gtttga

SEQ ID NO: 97154 - DNA, 6 bp, Unknown
  misc_feature (1)..( 6): Result.001 file - promoters60/1020713
gtttga

SEQ ID NO: 97155 - DNA, 7 bp, Unknown
  misc_feature (1)..( 7): Result.001 file - promoters60/1020713
gtttaat

SEQ ID NO: 97156 - DNA, 7 bp, Unknown
  misc_feature (1)..( 7): Result.001 file - promoters60/1020713
gttgaat

SEQ ID NO: 97157 - DNA, 7 bp, Unknown
  misc_feature (1)..( 7): Result.001 file - promoters60/1020713
ttcatac

SEQ ID NO: 97158 - DNA, 7 bp, Unknown
  misc_feature (1)..( 7): Result.001 file - promoters60/1020713
ttcttac

SEQ ID NO: 97159 - DNA, 7 bp, Unknown
  misc_feature (1)..( 7): Result.001 file - promoters60/1020713
taggtta

SEQ ID NO: 97160 - DNA, 7 bp, Unknown
  misc_feature (1)..( 7): Result.001 file - promoters60/1020713
tagttta

SEQ ID NO: 97161 - DNA, 7 bp, Unknown
  misc_feature (1)..( 7): Result.001 file - promoters60/1020713
ttctata

SEQ ID NO: 97162 - DNA, 7 bp, Unknown
  misc_feature (1)..( 7): Result.001 file - promoters60/1020713
ttccata

SEQ ID NO: 97163 - DNA, 7 bp, Unknown
  misc_feature (1)..( 7): Result.001 file - promoters60/1020713
atcttct

SEQ ID NO: 97164 - DNA, 7 bp, Unknown
  misc_feature (1)..( 7): Result.001 file - promoters60/1020713
atcttct

SEQ ID NO: 97165 - DNA, 8 bp, Unknown
  misc_feature (1)..( 8): Result.001 file - promoters60/1020713
taagaaaa

SEQ ID NO: 97166 - DNA, 8 bp, Unknown
  misc_feature (1)..( 8): Result.001 file - promoters60/1020713
ccagaaaa

SEQ ID NO: 97167 - DNA, 8 bp, Unknown
  misc_feature (1)..( 8): Result.001 file - promoters60/1020713
gaagaaat

SEQ ID NO: 97168 - DNA, 7 bp, Unknown
  misc_feature (1)..( 7): Result.001 file - promoters60/1020713
aaatttg

SEQ ID NO: 97169 - DNA, 7 bp, Unknown
  misc_feature (1)..( 7): Result.001 file - promoters60/1020713
aaatttc

SEQ ID NO: 97170 - DNA, 7 bp, Unknown
  misc_feature (1)..( 7): Result.001 file - promoters60/1020713
gaatttt

SEQ ID NO: 97171 - DNA, 6 bp, Unknown
  misc_feature (1)..( 6): Result.001 file - promoters60/1020713
aagctt

SEQ ID NO: 97172 - DNA, 6 bp, Unknown
  misc_feature (1)..( 6): Result.001 file - promoters60/1020713
aagctt

SEQ ID NO: 97173 - DNA, 6 bp, Unknown
  misc_feature (1)..( 6): Result.001 file - promoters60/1020713
tacgtt

SEQ ID NO: 97174 - DNA, 6 bp, Unknown
  misc_feature (1)..( 6): Result.001 file - promoters60/1020713
tacgtt

SEQ ID NO: 97175 - DNA, 8 bp, Unknown
  misc_feature (1)..( 8): Result.001 file - promoters60/1020713
atccaatt

SEQ ID NO: 97176 - DNA, 8 bp, Unknown
  misc_feature (1)..( 8): Result.001 file - promoters60/1020713
atctaatt

SEQ ID NO: 97177 - DNA, 6 bp, Unknown
  misc_feature (1)..( 6): Result.001 file - promoters60/1020713
cgtgag

SEQ ID NO: 97178 - DNA, 6 bp, Unknown
  misc_feature (1)..( 6): Result.001 file - promoters60/1020713
cgtgag

SEQ ID NO: 97179 - DNA, 7 bp, Unknown
  misc_feature (1)..( 7): Result.001 file - promoters60/1020713
atttaaa

SEQ ID NO: 97180 - DNA, 7 bp, Unknown
  misc_feature (1)..( 7): Result.001 file - promoters60/1020713
atttaaa

SEQ ID NO: 97181 - DNA, 6 bp, Unknown
  misc_feature (1)..( 6): Result.001 file - promoters60/1020713
aaaaaa

SEQ ID NO: 97182 - DNA, 6 bp, Unknown
  misc_feature (1)..( 6): Result.001 file - promoters60/1020713
aaaaaa

SEQ ID NO: 97183 - DNA, 6 bp, Unknown
  misc_feature (1)..( 6): Result.001 file - promoters60/1020713
gaacac

SEQ ID NO: 97184 - DNA, 6 bp, Unknown
  misc_feature (1)..( 6): Result.001 file - promoters60/1020713
gaacac

SEQ ID NO: 97185 - DNA, 7 bp, Unknown
  misc_feature (1)..( 7): Result.001 file - promoters60/1020713
ttttaaa

SEQ ID NO: 97186 - DNA, 7 bp, Unknown
  misc_feature (1)..( 7): Result.001 file - promoters60/1020713
ttttaaa

SEQ ID NO: 97187 - DNA, 7 bp, Unknown
  misc_feature (1)..( 7): Result.001 file - promoters60/1020713
gaaataa

SEQ ID NO: 97188 - DNA, 7 bp, Unknown
  misc_feature (1)..( 7): Result.001 file - promoters60/1020786
gaattaa

SEQ ID NO: 97189 - DNA, 10 bp, Unknown
  misc_feature (1)..( 10): Result.001 file - promoters60/1020786
caaaaataag

SEQ ID NO: 97190 - DNA, 10 bp, Unknown
  misc_feature (1)..( 10): Result.001 file - promoters60/1020786
caaaaaaagc

SEQ ID NO: 97191 - DNA, 10 bp, Unknown
  misc_feature (1)..( 10): Result.001 file - promoters60/1020786
caaaaaaggt

SEQ ID NO: 97192 - DNA, 11 bp, Unknown
  misc_feature (1)..( 11): Result.001 file - promoters60/1020786
aaaataaatat

SEQ ID NO: 97193 - DNA, 11 bp, Unknown
  misc_feature (1)..( 11): Result.001 file - promoters60/1020786
catataatata

SEQ ID NO: 97194 - DNA, 12 bp, Unknown
  misc_feature (1)..( 12): Result.001 file - promoters60/1020786
aaaacagtaaaa

SEQ ID NO: 97195 - DNA, 12 bp, Unknown
  misc_feature (1)..( 12): Result.001 file - promoters60/1020786
caaacaataaaa

SEQ ID NO: 97196 - DNA, 13 bp, Unknown
  misc_feature (1)..( 13): Result.001 file - promoters60/1020786
aaatacataaatt

SEQ ID NO: 97197 - DNA, 13 bp, Unknown
  misc_feature (1)..( 13): Result.001 file - promoters60/1020786
ttcgtcaaaaaac

SEQ ID NO: 97198 - DNA, 13 bp, Unknown
  misc_feature (1)..( 13): Result.001 file - promoters60/1020786
aattaaattaaag

SEQ ID NO: 97199 - DNA, 13 bp, Unknown
  misc_feature (1)..( 13): Result.001 file - promoters60/1020786
cgatgaaatataa

SEQ ID NO: 97200 - DNA, 13 bp, Unknown
  misc_feature (1)..( 13): Result.001 file - promoters60/1020786
cacataattatga

SEQ ID NO: 97201 - DNA, 10 bp, Unknown
  misc_feature (1)..( 10): Result.001 file - promoters60/1020786
atattaataa

SEQ ID NO: 97202 - DNA, 10 bp, Unknown
  misc_feature (1)..( 10): Result.001 file - promoters60/1020786
aaattaatat

SEQ ID NO: 97203 - DNA, 10 bp, Unknown
  misc_feature (1)..( 10): Result.001 file - promoters60/1020786
aaattaatgc

SEQ ID NO: 97204 - DNA, 10 bp, Unknown
  misc_feature (1)..( 10): Result.001 file - promoters60/1020786
atattaataa

SEQ ID NO: 97205 - DNA, 10 bp, Unknown
  misc_feature (1)..( 10): Result.001 file - promoters60/1020786
actttattat

SEQ ID NO: 97206 - DNA, 10 bp, Unknown
  misc_feature (1)..( 10): Result.001 file - promoters60/1020786
aaatttatgt

SEQ ID NO: 97207 - DNA, 10 bp, Unknown
  misc_feature (1)..( 10): Result.001 file - promoters60/1020786
ccatttatgg

SEQ ID NO: 97208 - DNA, 16 bp, Unknown
  misc_feature (1)..( 16): Result.001 file - promoters60/1020786
agaccaatcacaacat

SEQ ID NO: 97209 - DNA, 16 bp, Unknown
  misc_feature (1)..( 16): Result.001 file - promoters60/1020786
aaaccaatgtttattt

SEQ ID NO: 97210 - DNA, 16 bp, Unknown
  misc_feature (1)..( 16): Result.001 file - promoters60/1020786
aaaacaagggacaagt

SEQ ID NO: 97211 - DNA, 16 bp, Unknown
  misc_feature (1)..( 16): Result.001 file - promoters60/1020786
ccaacaacaaaaaaag

SEQ ID NO: 97212 - DNA, 16 bp, Unknown
  misc_feature (1)..( 16): Result.001 file - promoters60/1020786
tgatcaacaaaaattg

SEQ ID NO: 97213 - DNA, 8 bp, Unknown
  misc_feature (1)..( 8): Result.001 file - promoters60/1020786
aaaaataa

SEQ ID NO: 97214 - DNA, 8 bp, Unknown
  misc_feature (1)..( 8): Result.001 file - promoters60/1020786
taaaatat

SEQ ID NO: 97215 - DNA, 8 bp, Unknown
  misc_feature (1)..( 8): Result.001 file - promoters60/1020786
caaaaaag

SEQ ID NO: 97216 - DNA, 8 bp, Unknown
  misc_feature (1)..( 8): Result.001 file - promoters60/1020786
aaaaaaag

SEQ ID NO: 97217 - DNA, 8 bp, Unknown
  misc_feature (1)..( 8): Result.001 file - promoters60/1020786
taaagtat

SEQ ID NO: 97218 - DNA, 14 bp, Unknown
  misc_feature (1)..( 14): Result.001 file - promoters60/1020786
aaagacaaacggtc

SEQ ID NO: 97219 - DNA, 14 bp, Unknown
  misc_feature (1)..( 14): Result.001 file - promoters60/1020786
attaacaaactaat

SEQ ID NO: 97220 - DNA, 14 bp, Unknown
  misc_feature (1)..( 14): Result.001 file - promoters60/1020786
agttaaaaaatatt

SEQ ID NO: 97221 - DNA, 14 bp, Unknown
  misc_feature (1)..( 14): Result.001 file - promoters60/1020786
gtttaaattaatta

SEQ ID NO: 97222 - DNA, 14 bp, Unknown
  misc_feature (1)..( 14): Result.001 file - promoters60/1020786
atttaaaatcgtca

SEQ ID NO: 97223 - DNA, 14 bp, Unknown
  misc_feature (1)..( 14): Result.001 file - promoters60/1020786
tcaatcaaattaat

SEQ ID NO: 97224 - DNA, 11 bp, Unknown
  misc_feature (1)..( 11): Result.001 file - promoters60/1020786
ccaaaaacagt

SEQ ID NO: 97225 - DNA, 11 bp, Unknown
  misc_feature (1)..( 11): Result.001 file - promoters60/1020786
tcaaaaaactt

SEQ ID NO: 97226 - DNA, 12 bp, Unknown
  misc_feature (1)..( 12): Result.001 file - promoters60/1020786
acaataaaatta

SEQ ID NO: 97227 - DNA, 13 bp, Unknown
  misc_feature (1)..( 13): Result.001 file - promoters60/1020786
ataattaaattaa

SEQ ID NO: 97228 - DNA, 13 bp, Unknown
  misc_feature (1)..( 13): Result.001 file - promoters60/1020786
taaattaatgcca

SEQ ID NO: 97229 - DNA, 13 bp, Unknown
  misc_feature (1)..( 13): Result.001 file - promoters60/1020786
gcaaaaattatta

SEQ ID NO: 97230 - DNA, 13 bp, Unknown
  misc_feature (1)..( 13): Result.001 file - promoters60/1020786
ataattatgaaca

SEQ ID NO: 97231 - DNA, 10 bp, Unknown
  misc_feature (1)..( 10): Result.001 file - promoters60/1020786
taaataaatt

SEQ ID NO: 97232 - DNA, 10 bp, Unknown
  misc_feature (1)..( 10): Result.001 file - promoters60/1020786
aaaaaaaagg

SEQ ID NO: 97233 - DNA, 10 bp, Unknown
  misc_feature (1)..( 10): Result.001 file - promoters60/1020786
ataatgaatt

SEQ ID NO: 97234 - DNA, 10 bp, Unknown
  misc_feature (1)..( 10): Result.001 file - promoters60/1020786
taaattaatt

SEQ ID NO: 97235 - DNA, 10 bp, Unknown
  misc_feature (1)..( 10): Result.001 file - promoters60/1020786
taactaattt

SEQ ID NO: 97236 - DNA, 10 bp, Unknown
  misc_feature (1)..( 10): Result.001 file - promoters60/1020786
ataaaaagtt

SEQ ID NO: 97237 - DNA, 15 bp, Unknown
  misc_feature (1)..( 15): Result.001 file - promoters60/1020786
atttctttaaactat

SEQ ID NO: 97238 - DNA, 15 bp, Unknown
  misc_feature (1)..( 15): Result.001 file - promoters60/1020786
atttgtttgaactaa

SEQ ID NO: 97239 - DNA, 15 bp, Unknown
  misc_feature (1)..( 15): Result.001 file - promoters60/1020786
tgggttacaaaatat

SEQ ID NO: 97240 - DNA, 15 bp, Unknown
  misc_feature (1)..( 15): Result.001 file - promoters60/1020786
aactttttaaataca

SEQ ID NO: 97241 - DNA, 15 bp, Unknown
  misc_feature (1)..( 15): Result.001 file - promoters60/1020786
aattgtttaacgagt

SEQ ID NO: 97242 - DNA, 9 bp, Unknown
  misc_feature (1)..( 9): Result.001 file - promoters60/1020786
taaaaatta

SEQ ID NO: 97243 - DNA, 9 bp, Unknown
  misc_feature (1)..( 9): Result.001 file - promoters60/1020786
caaaaatta

SEQ ID NO: 97244 - DNA, 9 bp, Unknown
  misc_feature (1)..( 9): Result.001 file - promoters60/1020786
caaagatta

SEQ ID NO: 97245 - DNA, 9 bp, Unknown
  misc_feature (1)..( 9): Result.001 file - promoters60/1020786
atgagatta

SEQ ID NO: 97246 - DNA, 9 bp, Unknown
  misc_feature (1)..( 9): Result.001 file - promoters60/1020786
caaaaaact

SEQ ID NO: 97247 - DNA, 9 bp, Unknown
  misc_feature (1)..( 9): Result.001 file - promoters60/1020786
ctataaata

SEQ ID NO: 97248 - DNA, 9 bp, Unknown
  misc_feature (1)..( 9): Result.001 file - promoters60/1020786
atataaaca

SEQ ID NO: 97249 - DNA, 9 bp, Unknown
  misc_feature (1)..( 9): Result.001 file - promoters60/1020786
atatgaacc

SEQ ID NO: 97250 - DNA, 9 bp, Unknown
  misc_feature (1)..( 9): Result.001 file - promoters60/1020786
atataacaa

SEQ ID NO: 97251 - DNA, 9 bp, Unknown
  misc_feature (1)..( 9): Result.001 file - promoters60/1020786
tgataaaaa

SEQ ID NO: 97252 - DNA, 9 bp, Unknown
  misc_feature (1)..( 9): Result.001 file - promoters60/1020818
acaaaaagt

SEQ ID NO: 97253 - DNA, 11 bp, Unknown
  misc_feature (1)..( 11): Result.001 file - promoters60/1020818
caaaaattaag

SEQ ID NO: 97254 - DNA, 11 bp, Unknown
  misc_feature (1)..( 11): Result.001 file - promoters60/1020818
aaaacatttat

SEQ ID NO: 97255 - DNA, 11 bp, Unknown
  misc_feature (1)..( 11): Result.001 file - promoters60/1020818
caataattttt

SEQ ID NO: 97256 - DNA, 11 bp, Unknown
  misc_feature (1)..( 11): Result.001 file - promoters60/1020818
acataatgttt

SEQ ID NO: 97257 - DNA, 13 bp, Unknown
  misc_feature (1)..( 13): Result.001 file - promoters60/1020818
aactttttttctt

SEQ ID NO: 97258 - DNA, 13 bp, Unknown
  misc_feature (1)..( 13): Result.001 file - promoters60/1020818
ataatttttcctt

SEQ ID NO: 97259 - DNA, 13 bp, Unknown
  misc_feature (1)..( 13): Result.001 file - promoters60/1020818
ataatgtttgagt

SEQ ID NO: 97260 - DNA, 10 bp, Unknown
  misc_feature (1)..( 10): Result.001 file - promoters60/1020818
taaaaaagaa

SEQ ID NO: 97261 - DNA, 10 bp, Unknown
  misc_feature (1)..( 10): Result.001 file - promoters60/1020818
taaaaaaggg

SEQ ID NO: 97262 - DNA, 10 bp, Unknown
  misc_feature (1)..( 10): Result.001 file - promoters60/1020818
tataaaagaa

SEQ ID NO: 97263 - DNA, 9 bp, Unknown
  misc_feature (1)..( 9): Result.001 file - promoters60/1020818
ctcaaaaaa

SEQ ID NO: 97264 - DNA, 9 bp, Unknown
  misc_feature (1)..( 9): Result.001 file - promoters60/1020818
gtcaaaaaa

SEQ ID NO: 97265 - DNA, 9 bp, Unknown
  misc_feature (1)..( 9): Result.001 file - promoters60/1020826
gtcaaatcc

SEQ ID NO: 97266 - DNA, 6 bp, Unknown
  misc_feature (1)..( 6): Result.001 file - promoters60/1020826
acatag

SEQ ID NO: 97267 - DNA, 6 bp, Unknown
  misc_feature (1)..( 6): Result.001 file - promoters60/1020826
acatag

SEQ ID NO: 97268 - DNA, 9 bp, Unknown
  misc_feature (1)..( 9): Result.001 file - promoters60/1020826
tttatcttg

SEQ ID NO: 97269 - DNA, 9 bp, Unknown
  misc_feature (1)..( 9): Result.001 file - promoters60/1020826
tttttcttt

SEQ ID NO: 97270 - DNA, 9 bp, Unknown
  misc_feature (1)..( 9): Result.001 file - promoters60/1020826
gcttccttc

SEQ ID NO: 97271 - DNA, 6 bp, Unknown
  misc_feature (1)..( 6): Result.001 file - promoters60/1020826
tagaat

SEQ ID NO: 97272 - DNA, 6 bp, Unknown
  misc_feature (1)..( 6): Result.001 file - promoters60/1020826
tagaat

SEQ ID NO: 97273 - DNA, 6 bp, Unknown
  misc_feature (1)..( 6): Result.001 file - promoters60/1020826
attttc

SEQ ID NO: 97274 - DNA, 6 bp, Unknown
  misc_feature (1)..( 6): Result.001 file - promoters60/1020826
attttc

SEQ ID NO: 97275 - DNA, 6 bp, Unknown
  misc_feature (1)..( 6): Result.001 file - promoters60/1020826
taaatt

SEQ ID NO: 97276 - DNA, 6 bp, Unknown
  misc_feature (1)..( 6): Result.001 file - promoters60/1020826
taaatt

SEQ ID NO: 97277 - DNA, 6 bp, Unknown
  misc_feature (1)..( 6): Result.001 file - promoters60/1020826
aatata

SEQ ID NO: 97278 - DNA, 6 bp, Unknown
  misc_feature (1)..( 6): Result.001 file - promoters60/1020826
aatata

SEQ ID NO: 97279 - DNA, 8 bp, Unknown
  misc_feature (1)..( 8): Result.001 file - promoters60/1020826
gactattc

SEQ ID NO: 97280 - DNA, 8 bp, Unknown
  misc_feature (1)..( 8): Result.001 file - promoters60/1020826
gaccattg

SEQ ID NO: 97281 - DNA, 8 bp, Unknown
  misc_feature (1)..( 8): Result.001 file - promoters60/1020826
atccattg

SEQ ID NO: 97282 - DNA, 7 bp, Unknown
  misc_feature (1)..( 7): Result.001 file - promoters60/1020826
ctctaat

SEQ ID NO: 97283 - DNA, 7 bp, Unknown
  misc_feature (1)..( 7): Result.001 file - promoters60/1020826
ctcaaat

SEQ ID NO: 97284 - DNA, 7 bp, Unknown
  misc_feature (1)..( 7): Result.001 file - promoters60/1020826
ctatgtc

SEQ ID NO: 97285 - DNA, 7 bp, Unknown
  misc_feature (1)..( 7): Result.001 file - promoters60/1020826
ctacgtc

SEQ ID NO: 97286 - DNA, 7 bp, Unknown
  misc_feature (1)..( 7): Result.001 file - promoters60/1020826
gaataaa

SEQ ID NO: 97287 - DNA, 7 bp, Unknown
  misc_feature (1)..( 7): Result.001 file - promoters60/1020826
gaagaaa

SEQ ID NO: 97288 - DNA, 6 bp, Unknown
  misc_feature (1)..( 6): Result.001 file - promoters60/1020826
tttcat

SEQ ID NO: 97289 - DNA, 6 bp, Unknown
  misc_feature (1)..( 6): Result.001 file - promoters60/1020826
tttcat

SEQ ID NO: 97290 - DNA, 7 bp, Unknown
  misc_feature (1)..( 7): Result.001 file - promoters60/1020826
gtcttaa

SEQ ID NO: 97291 - DNA, 7 bp, Unknown
  misc_feature (1)..( 7): Result.001 file - promoters60/1020826
gtcataa

SEQ ID NO: 97292 - DNA, 11 bp, Unknown
  misc_feature (1)..( 11): Result.001 file - promoters60/1020826
attataacctc

SEQ ID NO: 97293 - DNA, 11 bp, Unknown
  misc_feature (1)..( 11): Result.001 file - promoters60/1020826
attattacctc

SEQ ID NO: 97294 - DNA, 6 bp, Unknown
  misc_feature (1)..( 6): Result.001 file - promoters60/1020826
aagtat

SEQ ID NO: 97295 - DNA, 6 bp, Unknown
  misc_feature (1)..( 6): Result.001 file - promoters60/1020826
aagtat

SEQ ID NO: 97296 - DNA, 6 bp, Unknown
  misc_feature (1)..( 6): Result.001 file - promoters60/1020826
tgagaa

SEQ ID NO: 97297 - DNA, 6 bp, Unknown
  misc_feature (1)..( 6): Result.001 file - promoters60/1020826
tgagaa

SEQ ID NO: 97298 - DNA, 7 bp, Unknown
  misc_feature (1)..( 7): Result.001 file - promoters60/1020826
aagaaaa

SEQ ID NO: 97299 - DNA, 7 bp, Unknown
  misc_feature (1)..( 7): Result.001 file - promoters60/1020834
aaggaaa

SEQ ID NO: 97300 - DNA, 8 bp, Unknown
  misc_feature (1)..( 8): Result.001 file - promoters60/1020834
agactacc

SEQ ID NO: 97301 - DNA, 8 bp, Unknown
  misc_feature (1)..( 8): Result.001 file - promoters60/1020834
agaatacc

SEQ ID NO: 97302 - DNA, 8 bp, Unknown
  misc_feature (1)..( 8): Result.001 file - promoters60/1020834
agaataga

SEQ ID NO: 97303 - DNA, 6 bp, Unknown
  misc_feature (1)..( 6): Result.001 file - promoters60/1020834
gcacat

SEQ ID NO: 97304 - DNA, 6 bp, Unknown
  misc_feature (1)..( 6): Result.001 file - promoters60/1020834
gcacat

SEQ ID NO: 97305 - DNA, 6 bp, Unknown
  misc_feature (1)..( 6): Result.001 file - promoters60/1020834
cagaag

SEQ ID NO: 97306 - DNA, 6 bp, Unknown
  misc_feature (1)..( 6): Result.001 file - promoters60/1020834
cagaag

SEQ ID NO: 97307 - DNA, 9 bp, Unknown
  misc_feature (1)..( 9): Result.001 file - promoters60/1020834
ttatcaaaa

SEQ ID NO: 97308 - DNA, 9 bp, Unknown
  misc_feature (1)..( 9): Result.001 file - promoters60/1020834
ttattaaaa

SEQ ID NO: 97309 - DNA, 6 bp, Unknown
  misc_feature (1)..( 6): Result.001 file - promoters60/1020834
tagatt

SEQ ID NO: 97310 - DNA, 6 bp, Unknown
  misc_feature (1)..( 6): Result.001 file - promoters60/1020834
tagatt

SEQ ID NO: 97311 - DNA, 7 bp, Unknown
  misc_feature (1)..( 7): Result.001 file - promoters60/1020834
ttgtact

SEQ ID NO: 97312 - DNA, 7 bp, Unknown
  misc_feature (1)..( 7): Result.001 file - promoters60/1020834
ttggact

SEQ ID NO: 97313 - DNA, 6 bp, Unknown
  misc_feature (1)..( 6): Result.001 file - promoters60/1020834
cactta

SEQ ID NO: 97314 - DNA, 6 bp, Unknown
  misc_feature (1)..( 6): Result.001 file - promoters60/1020834
cactta

SEQ ID NO: 97315 - DNA, 7 bp, Unknown
  misc_feature (1)..( 7): Result.001 file - promoters60/1020834
aaattca

SEQ ID NO: 97316 - DNA, 7 bp, Unknown
  misc_feature (1)..( 7): Result.001 file - promoters60/1020834
aaaatca

SEQ ID NO: 97317 - DNA, 6 bp, Unknown
  misc_feature (1)..( 6): Result.001 file - promoters60/1020834
tgagat

SEQ ID NO: 97318 - DNA, 6 bp, Unknown
  misc_feature (1)..( 6): Result.001 file - promoters60/1020834
tgagat

SEQ ID NO: 97319 - DNA, 8 bp, Unknown
  misc_feature (1)..( 8): Result.001 file - promoters60/1020834
agattttc

SEQ ID NO: 97320 - DNA, 8 bp, Unknown
  misc_feature (1)..( 8): Result.001 file - promoters60/1020834
agatcttc

SEQ ID NO: 97321 - DNA, 8 bp, Unknown
  misc_feature (1)..( 8): Result.001 file - promoters60/1020834
ttcattga

SEQ ID NO: 97322 - DNA, 8 bp, Unknown
  misc_feature (1)..( 8): Result.001 file - promoters60/1020838
ttcactga

SEQ ID NO: 97323 - DNA, 6 bp, Unknown
  misc_feature (1)..( 6): Result.001 file - promoters60/1020838
atagaa

SEQ ID NO: 97324 - DNA, 6 bp, Unknown
  misc_feature (1)..( 6): Result.001 file - promoters60/1020838
atagaa

SEQ ID NO: 97325 - DNA, 9 bp, Unknown
  misc_feature (1)..( 9): Result.001 file - promoters60/1020838
cattgcaaa

SEQ ID NO: 97326 - DNA, 9 bp, Unknown
  misc_feature (1)..( 9): Result.001 file - promoters60/1020838
cattggaaa

SEQ ID NO: 97327 - DNA, 8 bp, Unknown
  misc_feature (1)..( 8): Result.001 file - promoters60/1020838
accaacta

SEQ ID NO: 97328 - DNA, 8 bp, Unknown
  misc_feature (1)..( 8): Result.001 file - promoters60/1020838
accaccta

SEQ ID NO: 97329 - DNA, 6 bp, Unknown
  misc_feature (1)..( 6): Result.001 file - promoters60/1020838
tatata

SEQ ID NO: 97330 - DNA, 6 bp, Unknown
  misc_feature (1)..( 6): Result.001 file - promoters60/1020838
tatata

SEQ ID NO: 97331 - DNA, 9 bp, Unknown
  misc_feature (1)..( 9): Result.001 file - promoters60/1020838
aatgtcttt

SEQ ID NO: 97332 - DNA, 9 bp, Unknown
  misc_feature (1)..( 9): Result.001 file - promoters60/1020838
aatgtgttt

SEQ ID NO: 97333 - DNA, 7 bp, Unknown
  misc_feature (1)..( 7): Result.001 file - promoters60/1020838
tttgaag

SEQ ID NO: 97334 - DNA, 7 bp, Unknown
  misc_feature (1)..( 7): Result.001 file - promoters60/1020838
tttcaag

SEQ ID NO: 97335 - DNA, 6 bp, Unknown
  misc_feature (1)..( 6): Result.001 file - promoters60/1020838
gaacaa

SEQ ID NO: 97336 - DNA, 6 bp, Unknown
  misc_feature (1)..( 6): Result.001 file - promoters60/1020838
gaacaa

SEQ ID NO: 97337 - DNA, 8 bp, Unknown
  misc_feature (1)..( 8): Result.001 file - promoters60/1020838
attacatg

SEQ ID NO: 97338 - DNA, 8 bp, Unknown
  misc_feature (1)..( 8): Result.001 file - promoters60/1020838
attacatg

SEQ ID NO: 97339 - DNA, 6 bp, Unknown
  misc_feature (1)..( 6): Result.001 file - promoters60/1020838
tagatg

SEQ ID NO: 97340 - DNA, 6 bp, Unknown
  misc_feature (1)..( 6): Result.001 file - promoters60/1020838
tagatg

SEQ ID NO: 97341 - DNA, 8 bp, Unknown
  misc_feature (1)..( 8): Result.001 file - promoters60/1020838
aaaaggtt

SEQ ID NO: 97342 - DNA, 8 bp, Unknown
  misc_feature (1)..( 8): Result.001 file - promoters60/1020838
aaaacgtt

SEQ ID NO: 97343 - DNA, 7 bp, Unknown
  misc_feature (1)..( 7): Result.001 file - promoters60/1020838
caagaag

SEQ ID NO: 97344 - DNA, 7 bp, Unknown
  misc_feature (1)..( 7): Result.001 file - promoters60/1020838
caaaaag

SEQ ID NO: 97345 - DNA, 7 bp, Unknown
  misc_feature (1)..( 7): Result.001 file - promoters60/1020838
atacaag

SEQ ID NO: 97346 - DNA, 7 bp, Unknown
  misc_feature (1)..( 7): Result.001 file - promoters60/1020838
ataaaag

SEQ ID NO: 97347 - DNA, 7 bp, Unknown
  misc_feature (1)..( 7): Result.001 file - promoters60/1020838
ttgaagg

SEQ ID NO: 97348 - DNA, 7 bp, Unknown
  misc_feature (1)..( 7): Result.001 file - promoters60/1020838
ttgcagg

SEQ ID NO: 97349 - DNA, 6 bp, Unknown
  misc_feature (1)..( 6): Result.001 file - promoters60/1020838
ggagaa

SEQ ID NO: 97350 - DNA, 6 bp, Unknown
  misc_feature (1)..( 6): Result.001 file - promoters60/1020838
ggagaa

SEQ ID NO: 97351 - DNA, 7 bp, Unknown
  misc_feature (1)..( 7): Result.001 file - promoters60/1020838
gaaggaa

SEQ ID NO: 97352 - DNA, 7 bp, Unknown
  misc_feature (1)..( 7): Result.001 file - promoters60/1020838
gaaagaa

SEQ ID NO: 97353 - DNA, 8 bp, Unknown
  misc_feature (1)..( 8): Result.001 file - promoters60/1020838
cttttgaa

SEQ ID NO: 97354 - DNA, 8 bp, Unknown
  misc_feature (1)..( 8): Result.001 file - promoters60/1020838
ctttggaa

SEQ ID NO: 97355 - DNA, 6 bp, Unknown
  misc_feature (1)..( 6): Result.001 file - promoters60/1020838
aatgaa

SEQ ID NO: 97356 - DNA, 6 bp, Unknown
  misc_feature (1)..( 6): Result.001 file - promoters60/1020838
aatgaa

SEQ ID NO: 97357 - DNA, 7 bp, Unknown
  misc_feature (1)..( 7): Result.001 file - promoters60/1020838
ttcctaa

SEQ ID NO: 97358 - DNA, 7 bp, Unknown
  misc_feature (1)..( 7): Result.001 file - promoters60/1020838
ttcctaa

SEQ ID NO: 97359 - DNA, 7 bp, Unknown
  misc_feature (1)..( 7): Result.001 file - promoters60/1020838
aaatcaa

SEQ ID NO: 97360 - DNA, 7 bp, Unknown
  misc_feature (1)..( 7): Result.001 file - promoters60/1020838
aaatcaa

SEQ ID NO: 97361 - DNA, 7 bp, Unknown
  misc_feature (1)..( 7): Result.001 file - promoters60/1020838
aaggtaa

SEQ ID NO: 97362 - DNA, 7 bp, Unknown
  misc_feature (1)..( 7): Result.001 file - promoters60/1020838
aagttaa

SEQ ID NO: 97363 - DNA, 9 bp, Unknown
  misc_feature (1)..( 9): Result.001 file - promoters60/1020838
aaaaaaaaa

SEQ ID NO: 97364 - DNA, 9 bp, Unknown
  misc_feature (1)..( 9): Result.001 file - promoters60/1020838
aaaaagaaa

SEQ ID NO: 97365 - DNA, 6 bp, Unknown
  misc_feature (1)..( 6): Result.001 file - promoters60/1020838
acatag

SEQ ID NO: 97366 - DNA, 6 bp, Unknown
  misc_feature (1)..( 6): Result.001 file - promoters60/1020838
acatag

SEQ ID NO: 97367 - DNA, 8 bp, Unknown
  misc_feature (1)..( 8): Result.001 file - promoters60/1020838
acactttc

SEQ ID NO: 97368 - DNA, 8 bp, Unknown
  misc_feature (1)..( 8): Result.001 file - promoters60/1020838
acattttc

SEQ ID NO: 97369 - DNA, 6 bp, Unknown
  misc_feature (1)..( 6): Result.001 file - promoters60/1020838
tcagat

SEQ ID NO: 97370 - DNA, 6 bp, Unknown
  misc_feature (1)..( 6): Result.001 file - promoters60/1020838
tcagat

SEQ ID NO: 97371 - DNA, 7 bp, Unknown
  misc_feature (1)..( 7): Result.001 file - promoters60/1020838
tttttaa

SEQ ID NO: 97372 - DNA, 7 bp, Unknown
  misc_feature (1)..( 7): Result.001 file - promoters60/1020838
tttgtaa

SEQ ID NO: 97373 - DNA, 6 bp, Unknown
  misc_feature (1)..( 6): Result.001 file - promoters60/1020838
aataaa

SEQ ID NO: 97374 - DNA, 6 bp, Unknown
  misc_feature (1)..( 6): Result.001 file - promoters60/1020838
aataaa

SEQ ID NO: 97375 - DNA, 7 bp, Unknown
  misc_feature (1)..( 7): Result.001 file - promoters60/1020838
tttttgt

SEQ ID NO: 97376 - DNA, 7 bp, Unknown
  misc_feature (1)..( 7): Result.001 file - promoters60/1020838
tttatgt

SEQ ID NO: 97377 - DNA, 7 bp, Unknown
  misc_feature (1)..( 7): Result.001 file - promoters60/1020838
tatgtat

SEQ ID NO: 97378 - DNA, 7 bp, Unknown
  misc_feature (1)..( 7): Result.001 file - promoters60/1020838
tatttat

SEQ ID NO: 97379 - DNA, 8 bp, Unknown
  misc_feature (1)..( 8): Result.001 file - promoters60/1020838
taacaccg

SEQ ID NO: 97380 - DNA, 8 bp, Unknown
  misc_feature (1)..( 8): Result.001 file - promoters60/1020848
taaaaccg

SEQ ID NO: 97381 - DNA, 8 bp, Unknown
  misc_feature (1)..( 8): Result.001 file - promoters60/1020848
ttttcaaa

SEQ ID NO: 97382 - DNA, 8 bp, Unknown
  misc_feature (1)..( 8): Result.001 file - promoters60/1020848
ttttgaaa

SEQ ID NO: 97383 - DNA, 8 bp, Unknown
  misc_feature (1)..( 8): Result.001 file - promoters60/1020848
ttttgatg

SEQ ID NO: 97384 - DNA, 9 bp, Unknown
  misc_feature (1)..( 9): Result.001 file - promoters60/1020848
aacacatat

SEQ ID NO: 97385 - DNA, 9 bp, Unknown
  misc_feature (1)..( 9): Result.001 file - promoters60/1020848
aacaaatat

SEQ ID NO: 97386 - DNA, 7 bp, Unknown
  misc_feature (1)..( 7): Result.001 file - promoters60/1020848
atatatg

SEQ ID NO: 97387 - DNA, 7 bp, Unknown
  misc_feature (1)..( 7): Result.001 file - promoters60/1020848
atatatg

SEQ ID NO: 97388 - DNA, 6 bp, Unknown
  misc_feature (1)..( 6): Result.001 file - promoters60/1020848
aattgg

SEQ ID NO: 97389 - DNA, 6 bp, Unknown
  misc_feature (1)..( 6): Result.001 file - promoters60/1020848
aattgg

SEQ ID NO: 97390 - DNA, 6 bp, Unknown
  misc_feature (1)..( 6): Result.001 file - promoters60/1020848
gtaata

SEQ ID NO: 97391 - DNA, 6 bp, Unknown
  misc_feature (1)..( 6): Result.001 file - promoters60/1020848
gtaata

SEQ ID NO: 97392 - DNA, 8 bp, Unknown
  misc_feature (1)..( 8): Result.001 file - promoters60/1020848
aacttatt

SEQ ID NO: 97393 - DNA, 8 bp, Unknown
  misc_feature (1)..( 8): Result.001 file - promoters60/1020848
aacttatt

SEQ ID NO: 97394 - DNA, 6 bp, Unknown
  misc_feature (1)..( 6): Result.001 file - promoters60/1020848
tatttt

SEQ ID NO: 97395 - DNA, 6 bp, Unknown
  misc_feature (1)..( 6): Result.001 file - promoters60/1020848
tatttt

SEQ ID NO: 97396 - DNA, 7 bp, Unknown
  misc_feature (1)..( 7): Result.001 file - promoters60/1020848
attatat

SEQ ID NO: 97397 - DNA, 7 bp, Unknown
  misc_feature (1)..( 7): Result.001 file - promoters60/1020848
attttat

SEQ ID NO: 97398 - DNA, 7 bp, Unknown
  misc_feature (1)..( 7): Result.001 file - promoters60/1020848
agaatat

SEQ ID NO: 97399 - DNA, 7 bp, Unknown
  misc_feature (1)..( 7): Result.001 file - promoters60/1020848
agattat

SEQ ID NO: 97400 - DNA, 7 bp, Unknown
  misc_feature (1)..( 7): Result.001 file - promoters60/1020848
ttaaaac

SEQ ID NO: 97401 - DNA, 7 bp, Unknown
  misc_feature (1)..( 7): Result.001 file - promoters60/1020848
ttacaac

SEQ ID NO: 97402 - DNA, 7 bp, Unknown
  misc_feature (1)..( 7): Result.001 file - promoters60/1020848
tttcaaa

SEQ ID NO: 97403 - DNA, 7 bp, Unknown
  misc_feature (1)..( 7): Result.001 file - promoters60/1020848
tttcaaa

SEQ ID NO: 97404 - DNA, 7 bp, Unknown
  misc_feature (1)..( 7): Result.001 file - promoters60/1020848
aactatt

SEQ ID NO: 97405 - DNA, 7 bp, Unknown
  misc_feature (1)..( 7): Result.001 file - promoters60/1020848
aaccatt

SEQ ID NO: 97406 - DNA, 7 bp, Unknown
  misc_feature (1)..( 7): Result.001 file - promoters60/1020848
atgtgag

SEQ ID NO: 97407 - DNA, 7 bp, Unknown
  misc_feature (1)..( 7): Result.001 file - promoters60/1020848
atgggag

SEQ ID NO: 97408 - DNA, 8 bp, Unknown
  misc_feature (1)..( 8): Result.001 file - promoters60/1020848
caattcaa

SEQ ID NO: 97409 - DNA, 8 bp, Unknown
  misc_feature (1)..( 8): Result.001 file - promoters60/1020848
caaatcaa

SEQ ID NO: 97410 - DNA, 7 bp, Unknown
  misc_feature (1)..( 7): Result.001 file - promoters60/1020848
attcaat

SEQ ID NO: 97411 - DNA, 7 bp, Unknown
  misc_feature (1)..( 7): Result.001 file - promoters60/1020848
atttaat

SEQ ID NO: 97412 - DNA, 8 bp, Unknown
  misc_feature (1)..( 8): Result.001 file - promoters60/1020848
atatcaat

SEQ ID NO: 97413 - DNA, 8 bp, Unknown
  misc_feature (1)..( 8): Result.001 file - promoters60/1020848
atagcaat

SEQ ID NO: 97414 - DNA, 6 bp, Unknown
  misc_feature (1)..( 6): Result.001 file - promoters60/1020848
ttttat

SEQ ID NO: 97415 - DNA, 6 bp, Unknown
  misc_feature (1)..( 6): Result.001 file - promoters60/1020848
ttttat

SEQ ID NO: 97416 - DNA, 6 bp, Unknown
  misc_feature (1)..( 6): Result.001 file - promoters60/1020848
atattt

SEQ ID NO: 97417 - DNA, 6 bp, Unknown
  misc_feature (1)..( 6): Result.001 file - promoters60/1020848
atattt

SEQ ID NO: 97418 - DNA, 7 bp, Unknown
  misc_feature (1)..( 7): Result.001 file - promoters60/1020848
tttcatg

SEQ ID NO: 97419 - DNA, 7 bp, Unknown
  misc_feature (1)..( 7): Result.001 file - promoters60/1020848
tttgatg

SEQ ID NO: 97420 - DNA, 6 bp, Unknown
  misc_feature (1)..( 6): Result.001 file - promoters60/1020848
gatcat

SEQ ID NO: 97421 - DNA, 6 bp, Unknown
  misc_feature (1)..( 6): Result.001 file - promoters60/1020848
gatcat

SEQ ID NO: 97422 - DNA, 6 bp, Unknown
  misc_feature (1)..( 6): Result.001 file - promoters60/1020848
aaattt

SEQ ID NO: 97423 - DNA, 6 bp, Unknown
  misc_feature (1)..( 6): Result.001 file - promoters60/1020848
aaattt

SEQ ID NO: 97424 - DNA, 6 bp, Unknown
  misc_feature (1)..( 6): Result.001 file - promoters60/1020848
tgtttt

SEQ ID NO: 97425 - DNA, 6 bp, Unknown
  misc_feature (1)..( 6): Result.001 file - promoters60/1020848
tgtttt

SEQ ID NO: 97426 - DNA, 6 bp, Unknown
  misc_feature (1)..( 6): Result.001 file - promoters60/1020848
atgcaa

SEQ ID NO: 97427 - DNA, 6 bp, Unknown
  misc_feature (1)..( 6): Result.001 file - promoters60/1020848
atgcaa

SEQ ID NO: 97428 - DNA, 7 bp, Unknown
  misc_feature (1)..( 7): Result.001 file - promoters60/1020848
tactttt

SEQ ID NO: 97429 - DNA, 7 bp, Unknown
  misc_feature (1)..( 7): Result.001 file - promoters60/1020863
tacattt

SEQ ID NO: 97430 - DNA, 9 bp, Unknown
  misc_feature (1)..( 9): Result.001 file - promoters60/1020863
gaaaatatt

SEQ ID NO: 97431 - DNA, 9 bp, Unknown
  misc_feature (1)..( 9): Result.001 file - promoters60/1020863
aaaaataag

SEQ ID NO: 97432 - DNA, 9 bp, Unknown
  misc_feature (1)..( 9): Result.001 file - promoters60/1020863
aaaaattaa

SEQ ID NO: 97433 - DNA, 9 bp, Unknown
  misc_feature (1)..( 9): Result.001 file - promoters60/1020863
aaacatatt

SEQ ID NO: 97434 - DNA, 9 bp, Unknown
  misc_feature (1)..( 9): Result.001 file - promoters60/1020863
taaaatttc

SEQ ID NO: 97435 - DNA, 9 bp, Unknown
  misc_feature (1)..( 9): Result.001 file - promoters60/1020863
caaaattga

SEQ ID NO: 97436 - DNA, 11 bp, Unknown
  misc_feature (1)..( 11): Result.001 file - promoters60/1020863
aaaataaataa

SEQ ID NO: 97437 - DNA, 11 bp, Unknown
  misc_feature (1)..( 11): Result.001 file - promoters60/1020863
ttaataaagct

SEQ ID NO: 97438 - DNA, 11 bp, Unknown
  misc_feature (1)..( 11): Result.001 file - promoters60/1020863
aaaattaatat

SEQ ID NO: 97439 - DNA, 11 bp, Unknown
  misc_feature (1)..( 11): Result.001 file - promoters60/1020863
gagataatatt

SEQ ID NO: 97440 - DNA, 11 bp, Unknown
  misc_feature (1)..( 11): Result.001 file - promoters60/1020863
attataaaata

SEQ ID NO: 97441 - DNA, 11 bp, Unknown
  misc_feature (1)..( 11): Result.001 file - promoters60/1020863
taaattagagt

SEQ ID NO: 97442 - DNA, 8 bp, Unknown
  misc_feature (1)..( 8): Result.001 file - promoters60/1020863
aaaacaaa

SEQ ID NO: 97443 - DNA, 8 bp, Unknown
  misc_feature (1)..( 8): Result.001 file - promoters60/1020863
aaaaaaaa

SEQ ID NO: 97444 - DNA, 8 bp, Unknown
  misc_feature (1)..( 8): Result.001 file - promoters60/1020863
ggaacaaa

SEQ ID NO: 97445 - DNA, 8 bp, Unknown
  misc_feature (1)..( 8): Result.001 file - promoters60/1020863
taaataaa

SEQ ID NO: 97446 - DNA, 8 bp, Unknown
  misc_feature (1)..( 8): Result.001 file - promoters60/1020863
caaacaaa

SEQ ID NO: 97447 - DNA, 8 bp, Unknown
  misc_feature (1)..( 8): Result.001 file - promoters60/1020863
taaaaaaa

SEQ ID NO: 97448 - DNA, 8 bp, Unknown
  misc_feature (1)..( 8): Result.001 file - promoters60/1020863
aaaataaa

SEQ ID NO: 97449 - DNA, 14 bp, Unknown
  misc_feature (1)..( 14): Result.001 file - promoters60/1020863
aaattgggactaaa

SEQ ID NO: 97450 - DNA, 14 bp, Unknown
  misc_feature (1)..( 14): Result.001 file - promoters60/1020863
ttatttggataaaa

SEQ ID NO: 97451 - DNA, 14 bp, Unknown
  misc_feature (1)..( 14): Result.001 file - promoters60/1020863
tcctttgaataaaa

SEQ ID NO: 97452 - DNA, 14 bp, Unknown
  misc_feature (1)..( 14): Result.001 file - promoters60/1020863
tccgttgacacgta

SEQ ID NO: 97453 - DNA, 14 bp, Unknown
  misc_feature (1)..( 14): Result.001 file - promoters60/1020863
ccaattaaaaagga

SEQ ID NO: 97454 - DNA, 14 bp, Unknown
  misc_feature (1)..( 14): Result.001 file - promoters60/1020863
aaaggtcaataaat

SEQ ID NO: 97455 - DNA, 14 bp, Unknown
  misc_feature (1)..( 14): Result.001 file - promoters60/1020863
ataacccaataatg

SEQ ID NO: 97456 - DNA, 9 bp, Unknown
  misc_feature (1)..( 9): Result.001 file - promoters60/1020863
ttgagttta

SEQ ID NO: 97457 - DNA, 9 bp, Unknown
  misc_feature (1)..( 9): Result.001 file - promoters60/1020863
ttgactttt

SEQ ID NO: 97458 - DNA, 9 bp, Unknown
  misc_feature (1)..( 9): Result.001 file - promoters60/1020863
gatagttta

SEQ ID NO: 97459 - DNA, 9 bp, Unknown
  misc_feature (1)..( 9): Result.001 file - promoters60/1020863
ttgaatttt

SEQ ID NO: 97460 - DNA, 9 bp, Unknown
  misc_feature (1)..( 9): Result.001 file - promoters60/1020863
ttggcttct

SEQ ID NO: 97461 - DNA, 9 bp, Unknown
  misc_feature (1)..( 9): Result.001 file - promoters60/1020863
tctaatttt

SEQ ID NO: 97462 - DNA, 11 bp, Unknown
  misc_feature (1)..( 11): Result.001 file - promoters60/1020863
tacaaaactac

SEQ ID NO: 97463 - DNA, 11 bp, Unknown
  misc_feature (1)..( 11): Result.001 file - promoters60/1020863
tacaaaaaaag

SEQ ID NO: 97464 - DNA, 11 bp, Unknown
  misc_feature (1)..( 11): Result.001 file - promoters60/1020863
cccaaaaataa

SEQ ID NO: 97465 - DNA, 11 bp, Unknown
  misc_feature (1)..( 11): Result.001 file - promoters60/1020863
tcctaaaatca

SEQ ID NO: 97466 - DNA, 11 bp, Unknown
  misc_feature (1)..( 11): Result.001 file - promoters60/1020863
aaataaacata

SEQ ID NO: 97467 - DNA, 11 bp, Unknown
  misc_feature (1)..( 11): Result.001 file - promoters60/1020863
cccaaaattga

SEQ ID NO: 97468 - DNA, 13 bp, Unknown
  misc_feature (1)..( 13): Result.001 file - promoters60/1020863
aataaataaaagc

SEQ ID NO: 97469 - DNA, 13 bp, Unknown
  misc_feature (1)..( 13): Result.001 file - promoters60/1020863
aaacaataaaatt

SEQ ID NO: 97470 - DNA, 13 bp, Unknown
  misc_feature (1)..( 13): Result.001 file - promoters60/1020863
acattataaaata

SEQ ID NO: 97471 - DNA, 13 bp, Unknown
  misc_feature (1)..( 13): Result.001 file - promoters60/1020863
aaacagtaaaacc

SEQ ID NO: 97472 - DNA, 13 bp, Unknown
  misc_feature (1)..( 13): Result.001 file - promoters60/1020863
aggagataatatt

SEQ ID NO: 97473 - DNA, 13 bp, Unknown
  misc_feature (1)..( 13): Result.001 file - promoters60/1020863
ttcttagaaaaat

SEQ ID NO: 97474 - DNA, 10 bp, Unknown
  misc_feature (1)..( 10): Result.001 file - promoters60/1020863
atattattag

SEQ ID NO: 97475 - DNA, 10 bp, Unknown
  misc_feature (1)..( 10): Result.001 file - promoters60/1020863
atattattag

SEQ ID NO: 97476 - DNA, 10 bp, Unknown
  misc_feature (1)..( 10): Result.001 file - promoters60/1020863
ttattatatt

SEQ ID NO: 97477 - DNA, 10 bp, Unknown
  misc_feature (1)..( 10): Result.001 file - promoters60/1020863
atataattat

SEQ ID NO: 97478 - DNA, 10 bp, Unknown
  misc_feature (1)..( 10): Result.001 file - promoters60/1020863
ccttaattac

SEQ ID NO: 97479 - DNA, 11 bp, Unknown
  misc_feature (1)..( 11): Result.001 file - promoters60/1020863
ggattaattct

SEQ ID NO: 97480 - DNA, 10 bp, Unknown
  misc_feature (1)..( 10): Result.001 file - promoters60/1020863
gaaaaacaaa

SEQ ID NO: 97481 - DNA, 10 bp, Unknown
  misc_feature (1)..( 10): Result.001 file - promoters60/1020863
gaaaaaatag

SEQ ID NO: 97482 - DNA, 10 bp, Unknown
  misc_feature (1)..( 10): Result.001 file - promoters60/1020863
gaaaaaaaag

SEQ ID NO: 97483 - DNA, 11 bp, Unknown
  misc_feature (1)..( 11): Result.001 file - promoters60/1020863
gaacaaaaccg

SEQ ID NO: 97484 - DNA, 11 bp, Unknown
  misc_feature (1)..( 11): Result.001 file - promoters60/1020863
taaaaaatatt

SEQ ID NO: 97485 - DNA, 11 bp, Unknown
  misc_feature (1)..( 11): Result.001 file - promoters60/1020863
aagaaaatata

SEQ ID NO: 97486 - DNA, 7 bp, Unknown
  misc_feature (1)..( 7): Result.001 file - promoters60/1020863
taagatt

SEQ ID NO: 97487 - DNA, 7 bp, Unknown
  misc_feature (1)..( 7): Result.001 file - promoters60/1020863
taaaatt

SEQ ID NO: 97488 - DNA, 7 bp, Unknown
  misc_feature (1)..( 7): Result.001 file - promoters60/1020863
aaaaatt

SEQ ID NO: 97489 - DNA, 8 bp, Unknown
  misc_feature (1)..( 8): Result.001 file - promoters60/1020863
taacaatt

SEQ ID NO: 97490 - DNA, 8 bp, Unknown
  misc_feature (1)..( 8): Result.001 file - promoters60/1020863
ccaaaatt

SEQ ID NO: 97491 - DNA, 8 bp, Unknown
  misc_feature (1)..( 8): Result.001 file - promoters60/1020863
acacaatt

SEQ ID NO: 97492 - DNA, 8 bp, Unknown
  misc_feature (1)..( 8): Result.001 file - promoters60/1020863
atttattt

SEQ ID NO: 97493 - DNA, 8 bp, Unknown
  misc_feature (1)..( 8): Result.001 file - promoters60/1020863
attcattt

SEQ ID NO: 97494 - DNA, 8 bp, Unknown
  misc_feature (1)..( 8): Result.001 file - promoters60/1020863
ttttattc

SEQ ID NO: 97495 - DNA, 8 bp, Unknown
  misc_feature (1)..( 8): Result.001 file - promoters60/1020863
attttttt

SEQ ID NO: 97496 - DNA, 8 bp, Unknown
  misc_feature (1)..( 8): Result.001 file - promoters60/1020863
gttttttc

SEQ ID NO: 97497 - DNA, 8 bp, Unknown
  misc_feature (1)..( 8): Result.001 file - promoters60/1020892
tttcattt

SEQ ID NO: 97498 - DNA, 8 bp, Unknown
  misc_feature (1)..( 8): Result.001 file - promoters60/1020892
gtttcatc

SEQ ID NO: 97499 - DNA, 8 bp, Unknown
  misc_feature (1)..( 8): Result.001 file - promoters60/1020892
gtttcaca

SEQ ID NO: 97500 - DNA, 8 bp, Unknown
  misc_feature (1)..( 8): Result.001 file - promoters60/1020892
gtttcatg

SEQ ID NO: 97501 - DNA, 8 bp, Unknown
  misc_feature (1)..( 8): Result.001 file - promoters60/1020892
tttttaca

SEQ ID NO: 97502 - DNA, 9 bp, Unknown
  misc_feature (1)..( 9): Result.001 file - promoters60/1020892
gttattaaa

SEQ ID NO: 97503 - DNA, 9 bp, Unknown
  misc_feature (1)..( 9): Result.001 file - promoters60/1020892
atttttaac

SEQ ID NO: 97504 - DNA, 11 bp, Unknown
  misc_feature (1)..( 11): Result.001 file - promoters60/1020892
ttactgaaaaa

SEQ ID NO: 97505 - DNA, 11 bp, Unknown
  misc_feature (1)..( 11): Result.001 file - promoters60/1020892
gctatgaaaag

SEQ ID NO: 97506 - DNA, 12 bp, Unknown
  misc_feature (1)..( 12): Result.001 file - promoters60/1020892
ttacagaacaat

SEQ ID NO: 97507 - DNA, 12 bp, Unknown
  misc_feature (1)..( 12): Result.001 file - promoters60/1020892
ctacagacagta

SEQ ID NO: 97508 - DNA, 12 bp, Unknown
  misc_feature (1)..( 12): Result.001 file - promoters60/1020892
ttactgaagccc

SEQ ID NO: 97509 - DNA, 12 bp, Unknown
  misc_feature (1)..( 12): Result.001 file - promoters60/1020940
ctgctgcagcac

SEQ ID NO: 97510 - DNA, 8 bp, Unknown
  misc_feature (1)..( 8): Result.001 file - promoters60/1020940
taaaatgt

SEQ ID NO: 97511 - DNA, 8 bp, Unknown
  misc_feature (1)..( 8): Result.001 file - promoters60/1020940
taaaattg

SEQ ID NO: 97512 - DNA, 8 bp, Unknown
  misc_feature (1)..( 8): Result.001 file - promoters60/1020940
taacatga

SEQ ID NO: 97513 - DNA, 8 bp, Unknown
  misc_feature (1)..( 8): Result.001 file - promoters60/1020940
taagattg

SEQ ID NO: 97514 - DNA, 10 bp, Unknown
  misc_feature (1)..( 10): Result.001 file - promoters60/1020940
acaaaataga

SEQ ID NO: 97515 - DNA, 10 bp, Unknown
  misc_feature (1)..( 10): Result.001 file - promoters60/1020940
gaaaaaaaga

SEQ ID NO: 97516 - DNA, 10 bp, Unknown
  misc_feature (1)..( 10): Result.001 file - promoters60/1020940
acaaaattag

SEQ ID NO: 97517 - DNA, 10 bp, Unknown
  misc_feature (1)..( 10): Result.001 file - promoters60/1020940
gttaaataaa

SEQ ID NO: 97518 - DNA, 9 bp, Unknown
  misc_feature (1)..( 9): Result.001 file - promoters60/1020940
caacaaaat

SEQ ID NO: 97519 - DNA, 9 bp, Unknown
  misc_feature (1)..( 9): Result.001 file - promoters60/1020940
aaacaaaga

SEQ ID NO: 97520 - DNA, 9 bp, Unknown
  misc_feature (1)..( 9): Result.001 file - promoters60/1020940
atacaaaat

SEQ ID NO: 97521 - DNA, 9 bp, Unknown
  misc_feature (1)..( 9): Result.001 file - promoters60/1020940
aaataaagc

SEQ ID NO: 97522 - DNA, 7 bp, Unknown
  misc_feature (1)..( 7): Result.001 file - promoters60/1020940
aaattaa

SEQ ID NO: 97523 - DNA, 7 bp, Unknown
  misc_feature (1)..( 7): Result.001 file - promoters60/1020940
aaattat

SEQ ID NO: 97524 - DNA, 7 bp, Unknown
  misc_feature (1)..( 7): Result.001 file - promoters60/1020940
aaatatt

SEQ ID NO: 97525 - DNA, 10 bp, Unknown
  misc_feature (1)..( 10): Result.001 file - promoters60/1020940
tatatatacc

SEQ ID NO: 97526 - DNA, 10 bp, Unknown
  misc_feature (1)..( 10): Result.001 file - promoters60/1020940
tatataaacc

SEQ ID NO: 97527 - DNA, 10 bp, Unknown
  misc_feature (1)..( 10): Result.001 file - promoters60/1020940
tatataaagg

SEQ ID NO: 97528 - DNA, 10 bp, Unknown
  misc_feature (1)..( 10): Result.001 file - promoters60/1020940
tatttaaaca

SEQ ID NO: 97529 - DNA, 7 bp, Unknown
  misc_feature (1)..( 7): Result.001 file - promoters60/1020940
aaaatag

SEQ ID NO: 97530 - DNA, 7 bp, Unknown
  misc_feature (1)..( 7): Result.001 file - promoters60/1020940
aaattag

SEQ ID NO: 97531 - DNA, 7 bp, Unknown
  misc_feature (1)..( 7): Result.001 file - promoters60/1020940
aaaattg

SEQ ID NO: 97532 - DNA, 9 bp, Unknown
  misc_feature (1)..( 9): Result.001 file - promoters60/1020940
tgagtaatc

SEQ ID NO: 97533 - DNA, 9 bp, Unknown
  misc_feature (1)..( 9): Result.001 file - promoters60/1020940
tgaataatg

SEQ ID NO: 97534 - DNA, 9 bp, Unknown
  misc_feature (1)..( 9): Result.001 file - promoters60/1020940
tgtataatg

SEQ ID NO: 97535 - DNA, 10 bp, Unknown
  misc_feature (1)..( 10): Result.001 file - promoters60/1020940
atagtaaacg

SEQ ID NO: 97536 - DNA, 10 bp, Unknown
  misc_feature (1)..( 10): Result.001 file - promoters60/1020940
ataataaata

SEQ ID NO: 97537 - DNA, 10 bp, Unknown
  misc_feature (1)..( 10): Result.001 file - promoters60/1020968
aagataaata

SEQ ID NO: 97538 - DNA, 10 bp, Unknown
  misc_feature (1)..( 10): Result.001 file - promoters60/1020968
gtaatttaat

SEQ ID NO: 97539 - DNA, 10 bp, Unknown
  misc_feature (1)..( 10): Result.001 file - promoters60/1020968
gtaatttaaa

SEQ ID NO: 97540 - DNA, 10 bp, Unknown
  misc_feature (1)..( 10): Result.001 file - promoters60/1020968
atcatttaag

SEQ ID NO: 97541 - DNA, 10 bp, Unknown
  misc_feature (1)..( 10): Result.001 file - promoters60/1020968
gaaatgtaac

SEQ ID NO: 97542 - DNA, 10 bp, Unknown
  misc_feature (1)..( 10): Result.001 file - promoters60/1020968
cgaattcaaa

SEQ ID NO: 97543 - DNA, 12 bp, Unknown
  misc_feature (1)..( 12): Result.001 file - promoters60/1020968
gatattaggttt

SEQ ID NO: 97544 - DNA, 12 bp, Unknown
  misc_feature (1)..( 12): Result.001 file - promoters60/1020968
tcatttaagttt

SEQ ID NO: 97545 - DNA, 11 bp, Unknown
  misc_feature (1)..( 11): Result.001 file - promoters60/1020968
tatttgagtta

SEQ ID NO: 97546 - DNA, 12 bp, Unknown
  misc_feature (1)..( 12): Result.001 file - promoters60/1020968
attcttaaattt

SEQ ID NO: 97547 - DNA, 12 bp, Unknown
  misc_feature (1)..( 12): Result.001 file - promoters60/1020968
aattctaaaatc

SEQ ID NO: 97548 - DNA, 12 bp, Unknown
  misc_feature (1)..( 12): Result.001 file - promoters60/1020968
ttttaatttttt

SEQ ID NO: 97549 - DNA, 12 bp, Unknown
  misc_feature (1)..( 12): Result.001 file - promoters60/1020968
aggaaattttca

SEQ ID NO: 97550 - DNA, 12 bp, Unknown
  misc_feature (1)..( 12): Result.001 file - promoters60/1020968
cttaaatttaaa

SEQ ID NO: 97551 - DNA, 12 bp, Unknown
  misc_feature (1)..( 12): Result.001 file - promoters60/1020968
atataatattca

SEQ ID NO: 97552 - DNA, 12 bp, Unknown
  misc_feature (1)..( 12): Result.001 file - promoters60/1020968
attcaattaact

SEQ ID NO: 97553 - DNA, 11 bp, Unknown
  misc_feature (1)..( 11): Result.001 file - promoters60/1020968
ttttttgaaat

SEQ ID NO: 97554 - DNA, 11 bp, Unknown
  misc_feature (1)..( 11): Result.001 file - promoters60/1020968
aattttcaaat

SEQ ID NO: 97555 - DNA, 11 bp, Unknown
  misc_feature (1)..( 11): Result.001 file - promoters60/1020968
aaatttaaaaa

SEQ ID NO: 97556 - DNA, 11 bp, Unknown
  misc_feature (1)..( 11): Result.001 file - promoters60/1020968
aatattcagtt

SEQ ID NO: 97557 - DNA, 11 bp, Unknown
  misc_feature (1)..( 11): Result.001 file - promoters60/1020968
ccggttcaaac

SEQ ID NO: 97558 - DNA, 9 bp, Unknown
  misc_feature (1)..( 9): Result.001 file - promoters60/1020968
ttaaaatat

SEQ ID NO: 97559 - DNA, 9 bp, Unknown
  misc_feature (1)..( 9): Result.001 file - promoters60/1020968
ataaaatga

SEQ ID NO: 97560 - DNA, 9 bp, Unknown
  misc_feature (1)..( 9): Result.001 file - promoters60/1020968
ttaaaatat

SEQ ID NO: 97561 - DNA, 9 bp, Unknown
  misc_feature (1)..( 9): Result.001 file - promoters60/1020968
ttaatatac

SEQ ID NO: 97562 - DNA, 9 bp, Unknown
  misc_feature (1)..( 9): Result.001 file - promoters60/1020968
gtaaaattt

SEQ ID NO: 97563 - DNA, 9 bp, Unknown
  misc_feature (1)..( 9): Result.001 file - promoters60/1020968
ggaaacttt

SEQ ID NO: 97564 - DNA, 14 bp, Unknown
  misc_feature (1)..( 14): Result.001 file - promoters60/1020968
gacaaattaccttt

SEQ ID NO: 97565 - DNA, 14 bp, Unknown
  misc_feature (1)..( 14): Result.001 file - promoters60/1020968
ttataattacgctt

SEQ ID NO: 97566 - DNA, 14 bp, Unknown
  misc_feature (1)..( 14): Result.001 file - promoters60/1020968
ttatagttaatggt

SEQ ID NO: 97567 - DNA, 14 bp, Unknown
  misc_feature (1)..( 14): Result.001 file - promoters60/1020968
atatatttatatga

SEQ ID NO: 97568 - DNA, 14 bp, Unknown
  misc_feature (1)..( 14): Result.001 file - promoters60/1020968
atgtgattaaatat

SEQ ID NO: 97569 - DNA, 13 bp, Unknown
  misc_feature (1)..( 13): Result.001 file - promoters60/1020968
taggtttaaattt

SEQ ID NO: 97570 - DNA, 13 bp, Unknown
  misc_feature (1)..( 13): Result.001 file - promoters60/1020968
tgtgattaaatat

SEQ ID NO: 97571 - DNA, 13 bp, Unknown
  misc_feature (1)..( 13): Result.001 file - promoters60/1020968
aattcttaaattt

SEQ ID NO: 97572 - DNA, 13 bp, Unknown
  misc_feature (1)..( 13): Result.001 file - promoters60/1020968
atcatttaagttt

SEQ ID NO: 97573 - DNA, 13 bp, Unknown
  misc_feature (1)..( 13): Result.001 file - promoters60/1020968
aattctaaaatct

SEQ ID NO: 97574 - DNA, 8 bp, Unknown
  misc_feature (1)..( 8): Result.001 file - promoters60/1020968
aaagtaat

SEQ ID NO: 97575 - DNA, 8 bp, Unknown
  misc_feature (1)..( 8): Result.001 file - promoters60/1020968
aaaataaa

SEQ ID NO: 97576 - DNA, 8 bp, Unknown
  misc_feature (1)..( 8): Result.001 file - promoters60/1020968
aaaataaa

SEQ ID NO: 97577 - DNA, 8 bp, Unknown
  misc_feature (1)..( 8): Result.001 file - promoters60/1020968
tcaataaa

SEQ ID NO: 97578 - DNA, 8 bp, Unknown
  misc_feature (1)..( 8): Result.001 file - promoters60/1020968
tcaataaa

SEQ ID NO: 97579 - DNA, 8 bp, Unknown
  misc_feature (1)..( 8): Result.001 file - promoters60/1020968
caaataaa

SEQ ID NO: 97580 - DNA, 8 bp, Unknown
  misc_feature (1)..( 8): Result.001 file - promoters60/1021001
aaaatatt

SEQ ID NO: 97581 - DNA, 11 bp, Unknown
  misc_feature (1)..( 11): Result.001 file - promoters60/1021001
gagaaaaaaag

SEQ ID NO: 97582 - DNA, 11 bp, Unknown
  misc_feature (1)..( 11): Result.001 file - promoters60/1021001
atcaaacaaat

SEQ ID NO: 97583 - DNA, 11 bp, Unknown
  misc_feature (1)..( 11): Result.001 file - promoters60/1021001
accaaagaaag

SEQ ID NO: 97584 - DNA, 11 bp, Unknown
  misc_feature (1)..( 11): Result.001 file - promoters60/1021001
ctgaaacaaca

SEQ ID NO: 97585 - DNA, 11 bp, Unknown
  misc_feature (1)..( 11): Result.001 file - promoters60/1021001
tacaaggaaag

SEQ ID NO: 97586 - DNA, 11 bp, Unknown
  misc_feature (1)..( 11): Result.001 file - promoters60/1021047
taccaggaggt

SEQ ID NO: 97587 - DNA, 6 bp, Unknown
  misc_feature (1)..( 6): Result.001 file - promoters60/1021047
tcaatg

SEQ ID NO: 97588 - DNA, 6 bp, Unknown
  misc_feature (1)..( 6): Result.001 file - promoters60/1021047
tcaatg

SEQ ID NO: 97589 - DNA, 8 bp, Unknown
  misc_feature (1)..( 8): Result.001 file - promoters60/1021047
cacatcct

SEQ ID NO: 97590 - DNA, 8 bp, Unknown
  misc_feature (1)..( 8): Result.001 file - promoters60/1021047
cacaccct

SEQ ID NO: 97591 - DNA, 10 bp, Unknown
  misc_feature (1)..( 10): Result.001 file - promoters60/1021047
gttatattaa

SEQ ID NO: 97592 - DNA, 10 bp, Unknown
  misc_feature (1)..( 10): Result.001 file - promoters60/1021047
attattttaa

SEQ ID NO: 97593 - DNA, 11 bp, Unknown
  misc_feature (1)..( 11): Result.001 file - promoters60/1021047
tttgattttta

SEQ ID NO: 97594 - DNA, 10 bp, Unknown
  misc_feature (1)..( 10): Result.001 file - promoters60/1021047
taaaatgttg

SEQ ID NO: 97595 - DNA, 10 bp, Unknown
  misc_feature (1)..( 10): Result.001 file - promoters60/1021047
tttaattttg

SEQ ID NO: 97596 - DNA, 10 bp, Unknown
  misc_feature (1)..( 10): Result.001 file - promoters60/1021047
tttgattttt

SEQ ID NO: 97597 - DNA, 7 bp, Unknown
  misc_feature (1)..( 7): Result.001 file - promoters60/1021047
ttatgta

SEQ ID NO: 97598 - DNA, 7 bp, Unknown
  misc_feature (1)..( 7): Result.001 file - promoters60/1021047
ttaagta

SEQ ID NO: 97599 - DNA, 8 bp, Unknown
  misc_feature (1)..( 8): Result.001 file - promoters60/1021047
aaatttta

SEQ ID NO: 97600 - DNA, 8 bp, Unknown
  misc_feature (1)..( 8): Result.001 file - promoters60/1021047
aaatatta

SEQ ID NO: 97601 - DNA, 8 bp, Unknown
  misc_feature (1)..( 8): Result.001 file - promoters60/1021047
atatttta

SEQ ID NO: 97602 - DNA, 6 bp, Unknown
  misc_feature (1)..( 6): Result.001 file - promoters60/1021047
aaactt

SEQ ID NO: 97603 - DNA, 6 bp, Unknown
  misc_feature (1)..( 6): Result.001 file - promoters60/1021047
aaactt

SEQ ID NO: 97604 - DNA, 10 bp, Unknown
  misc_feature (1)..( 10): Result.001 file - promoters60/1021047
agatattttg

SEQ ID NO: 97605 - DNA, 10 bp, Unknown
  misc_feature (1)..( 10): Result.001 file - promoters60/1021047
agatattttg

SEQ ID NO: 97606 - DNA, 7 bp, Unknown
  misc_feature (1)..( 7): Result.001 file - promoters60/1021047
tttttta

SEQ ID NO: 97607 - DNA, 7 bp, Unknown
  misc_feature (1)..( 7): Result.001 file - promoters60/1021047
tttctta

SEQ ID NO: 97608 - DNA, 6 bp, Unknown
  misc_feature (1)..( 6): Result.001 file - promoters60/1021047
atatta

SEQ ID NO: 97609 - DNA, 6 bp, Unknown
  misc_feature (1)..( 6): Result.001 file - promoters60/1021047
atatta

SEQ ID NO: 97610 - DNA, 6 bp, Unknown
  misc_feature (1)..( 6): Result.001 file - promoters60/1021047
aatgtt

SEQ ID NO: 97611 - DNA, 6 bp, Unknown
  misc_feature (1)..( 6): Result.001 file - promoters60/1021047
aatgtt

SEQ ID NO: 97612 - DNA, 8 bp, Unknown
  misc_feature (1)..( 8): Result.001 file - promoters60/1021047
tatataaa

SEQ ID NO: 97613 - DNA, 8 bp, Unknown
  misc_feature (1)..( 8): Result.001 file - promoters60/1021047
tatttaaa

SEQ ID NO: 97614 - DNA, 6 bp, Unknown
  misc_feature (1)..( 6): Result.001 file - promoters60/1021047
taattt

SEQ ID NO: 97615 - DNA, 6 bp, Unknown
  misc_feature (1)..( 6): Result.001 file - promoters60/1021047
taattt

SEQ ID NO: 97616 - DNA, 7 bp, Unknown
  misc_feature (1)..( 7): Result.001 file - promoters60/1021047
tttattt

SEQ ID NO: 97617 - DNA, 7 bp, Unknown
  misc_feature (1)..( 7): Result.001 file - promoters60/1021047
tttattt

SEQ ID NO: 97618 - DNA, 6 bp, Unknown
  misc_feature (1)..( 6): Result.001 file - promoters60/1021047
tcatcc

SEQ ID NO: 97619 - DNA, 6 bp, Unknown
  misc_feature (1)..( 6): Result.001 file - promoters60/1021047
tcatcc

SEQ ID NO: 97620 - DNA, 6 bp, Unknown
  misc_feature (1)..( 6): Result.001 file - promoters60/1021047
tttttt

SEQ ID NO: 97621 - DNA, 6 bp, Unknown
  misc_feature (1)..( 6): Result.001 file - promoters60/1021047
tttttt

SEQ ID NO: 97622 - DNA, 14 bp, Unknown
  misc_feature (1)..( 14): Result.001 file - promoters60/1021047
aaaattaagttcaa

SEQ ID NO: 97623 - DNA, 14 bp, Unknown
  misc_feature (1)..( 14): Result.001 file - promoters60/1021047
aaacttaatttcaa

SEQ ID NO: 97624 - DNA, 9 bp, Unknown
  misc_feature (1)..( 9): Result.001 file - promoters60/1021047
aagaaaaaa

SEQ ID NO: 97625 - DNA, 9 bp, Unknown
  misc_feature (1)..( 9): Result.001 file - promoters60/1021047
aagagaaaa

SEQ ID NO: 97626 - DNA, 6 bp, Unknown
  misc_feature (1)..( 6): Result.001 file - promoters60/1021047
aaaaca

SEQ ID NO: 97627 - DNA, 6 bp, Unknown
  misc_feature (1)..( 6): Result.001 file - promoters60/1021047
aaaaca

SEQ ID NO: 97628 - DNA, 6 bp, Unknown
  misc_feature (1)..( 6): Result.001 file - promoters60/1021047
ctaaga

SEQ ID NO: 97629 - DNA, 6 bp, Unknown
  misc_feature (1)..( 6): Result.001 file - promoters60/1021047
ctaaga

SEQ ID NO: 97630 - DNA, 6 bp, Unknown
  misc_feature (1)..( 6): Result.001 file - promoters60/1021047
aataat

SEQ ID NO: 97631 - DNA, 6 bp, Unknown
  misc_feature (1)..( 6): Result.001 file - promoters60/1021079
aataat

SEQ ID NO: 97632 - DNA, 9 bp, Unknown
  misc_feature (1)..( 9): Result.001 file - promoters60/1021079
taaaatata

SEQ ID NO: 97633 - DNA, 9 bp, Unknown
  misc_feature (1)..( 9): Result.001 file - promoters60/1021079
taaaatatt

SEQ ID NO: 97634 - DNA, 9 bp, Unknown
  misc_feature (1)..( 9): Result.001 file - promoters60/1021079
caatttatc

SEQ ID NO: 97635 - DNA, 9 bp, Unknown
  misc_feature (1)..( 9): Result.001 file - promoters60/1021079
gaaaacata

SEQ ID NO: 97636 - DNA, 9 bp, Unknown
  misc_feature (1)..( 9): Result.001 file - promoters60/1021079
aaaaataca

SEQ ID NO: 97637 - DNA, 9 bp, Unknown
  misc_feature (1)..( 9): Result.001 file - promoters60/1021079
gtaaatacg

SEQ ID NO: 97638 - DNA, 13 bp, Unknown
  misc_feature (1)..( 13): Result.001 file - promoters60/1021079
tcatttttatttt

SEQ ID NO: 97639 - DNA, 13 bp, Unknown
  misc_feature (1)..( 13): Result.001 file - promoters60/1021079
aaaattttgtttt

SEQ ID NO: 97640 - DNA, 13 bp, Unknown
  misc_feature (1)..( 13): Result.001 file - promoters60/1021079
tggtatttgtttt

SEQ ID NO: 97641 - DNA, 13 bp, Unknown
  misc_feature (1)..( 13): Result.001 file - promoters60/1021079
gacattttttttt

SEQ ID NO: 97642 - DNA, 13 bp, Unknown
  misc_feature (1)..( 13): Result.001 file - promoters60/1021079
aaaattttgcact

SEQ ID NO: 97643 - DNA, 13 bp, Unknown
  misc_feature (1)..( 13): Result.001 file - promoters60/1021079
acaactgtgttta

SEQ ID NO: 97644 - DNA, 13 bp, Unknown
  misc_feature (1)..( 13): Result.001 file - promoters60/1021079
aaaatttatacgc

SEQ ID NO: 97645 - DNA, 12 bp, Unknown
  misc_feature (1)..( 12): Result.001 file - promoters60/1021079
taattaagttta

SEQ ID NO: 97646 - DNA, 12 bp, Unknown
  misc_feature (1)..( 12): Result.001 file - promoters60/1021079
tgcttaagatta

SEQ ID NO: 97647 - DNA, 12 bp, Unknown
  misc_feature (1)..( 12): Result.001 file - promoters60/1021079
ctattcagtgca

SEQ ID NO: 97648 - DNA, 12 bp, Unknown
  misc_feature (1)..( 12): Result.001 file - promoters60/1021079
aacttaagataa

SEQ ID NO: 97649 - DNA, 12 bp, Unknown
  misc_feature (1)..( 12): Result.001 file - promoters60/1021079
tttttaatatat

SEQ ID NO: 97650 - DNA, 12 bp, Unknown
  misc_feature (1)..( 12): Result.001 file - promoters60/1021079
tttttaatttct

SEQ ID NO: 97651 - DNA, 15 bp, Unknown
  misc_feature (1)..( 15): Result.001 file - promoters60/1021079
aaatttatagtacta

SEQ ID NO: 97652 - DNA, 15 bp, Unknown
  misc_feature (1)..( 15): Result.001 file - promoters60/1021079
atatatatagtatgg

SEQ ID NO: 97653 - DNA, 15 bp, Unknown
  misc_feature (1)..( 15): Result.001 file - promoters60/1021079
ataaaaataatattc

SEQ ID NO: 97654 - DNA, 15 bp, Unknown
  misc_feature (1)..( 15): Result.001 file - promoters60/1021079
ataaaaataatttta

SEQ ID NO: 97655 - DNA, 15 bp, Unknown
  misc_feature (1)..( 15): Result.001 file - promoters60/1021079
atttaaataatatta

SEQ ID NO: 97656 - DNA, 15 bp, Unknown
  misc_feature (1)..( 15): Result.001 file - promoters60/1021079
ctttgcttaagatta

SEQ ID NO: 97657 - DNA, 9 bp, Unknown
  misc_feature (1)..( 9): Result.001 file - promoters60/1021079
taaaaactt

SEQ ID NO: 97658 - DNA, 9 bp, Unknown
  misc_feature (1)..( 9): Result.001 file - promoters60/1021079
ttaaaacta

SEQ ID NO: 97659 - DNA, 9 bp, Unknown
  misc_feature (1)..( 9): Result.001 file - promoters60/1021079
taaaaacaa

SEQ ID NO: 97660 - DNA, 9 bp, Unknown
  misc_feature (1)..( 9): Result.001 file - promoters60/1021079
aaaatacaa

SEQ ID NO: 97661 - DNA, 9 bp, Unknown
  misc_feature (1)..( 9): Result.001 file - promoters60/1021079
taaaaagaa

SEQ ID NO: 97662 - DNA, 9 bp, Unknown
  misc_feature (1)..( 9): Result.001 file - promoters60/1021079
aaaagacat

SEQ ID NO: 97663 - DNA, 10 bp, Unknown
  misc_feature (1)..( 10): Result.001 file - promoters60/1021079
ttgaaacacc

SEQ ID NO: 97664 - DNA, 10 bp, Unknown
  misc_feature (1)..( 10): Result.001 file - promoters60/1021079
ttgaatcact

SEQ ID NO: 97665 - DNA, 10 bp, Unknown
  misc_feature (1)..( 10): Result.001 file - promoters60/1021079
ttgatacaca

SEQ ID NO: 97666 - DNA, 10 bp, Unknown
  misc_feature (1)..( 10): Result.001 file - promoters60/1021079
tgcaatcaca

SEQ ID NO: 97667 - DNA, 10 bp, Unknown
  misc_feature (1)..( 10): Result.001 file - promoters60/1021079
gagaattact

SEQ ID NO: 97668 - DNA, 10 bp, Unknown
  misc_feature (1)..( 10): Result.001 file - promoters60/1021079
tttactcatg

SEQ ID NO: 97669 - DNA, 10 bp, Unknown
  misc_feature (1)..( 10): Result.001 file - promoters60/1021079
tcataaaaac

SEQ ID NO: 97670 - DNA, 10 bp, Unknown
  misc_feature (1)..( 10): Result.001 file - promoters60/1021079
tcataaaata

SEQ ID NO: 97671 - DNA, 10 bp, Unknown
  misc_feature (1)..( 10): Result.001 file - promoters60/1021079
gtttaaaaag

SEQ ID NO: 97672 - DNA, 10 bp, Unknown
  misc_feature (1)..( 10): Result.001 file - promoters60/1021079
tagtaaaaac

SEQ ID NO: 97673 - DNA, 10 bp, Unknown
  misc_feature (1)..( 10): Result.001 file - promoters60/1021079
gattaaaact

SEQ ID NO: 97674 - DNA, 10 bp, Unknown
  misc_feature (1)..( 10): Result.001 file - promoters60/1021079
atgtaaaatg

SEQ ID NO: 97675 - DNA, 12 bp, Unknown
  misc_feature (1)..( 12): Result.001 file - promoters60/1021079
cataaaattttg

SEQ ID NO: 97676 - DNA, 12 bp, Unknown
  misc_feature (1)..( 12): Result.001 file - promoters60/1021079
cctaaaatcatg

SEQ ID NO: 97677 - DNA, 12 bp, Unknown
  misc_feature (1)..( 12): Result.001 file - promoters60/1021079
ttgaaaatttat

SEQ ID NO: 97678 - DNA, 12 bp, Unknown
  misc_feature (1)..( 12): Result.001 file - promoters60/1021079
accaaaattttg

SEQ ID NO: 97679 - DNA, 12 bp, Unknown
  misc_feature (1)..( 12): Result.001 file - promoters60/1021079
cctataatttgg

SEQ ID NO: 97680 - DNA, 12 bp, Unknown
  misc_feature (1)..( 12): Result.001 file - promoters60/1021104
ttagtaatttag

SEQ ID NO: 97681 - DNA, 11 bp, Unknown
  misc_feature (1)..( 11): Result.001 file - promoters60/1021104
gaaattcttcc

SEQ ID NO: 97682 - DNA, 11 bp, Unknown
  misc_feature (1)..( 11): Result.001 file - promoters60/1021104
tcaatccttta

SEQ ID NO: 97683 - DNA, 11 bp, Unknown
  misc_feature (1)..( 11): Result.001 file - promoters60/1021104
gaaattctggt

SEQ ID NO: 97684 - DNA, 11 bp, Unknown
  misc_feature (1)..( 11): Result.001 file - promoters60/1021104
gattttcttct

SEQ ID NO: 97685 - DNA, 11 bp, Unknown
  misc_feature (1)..( 11): Result.001 file - promoters60/1021104
catgttcctct

SEQ ID NO: 97686 - DNA, 9 bp, Unknown
  misc_feature (1)..( 9): Result.001 file - promoters60/1021104
agaattcat

SEQ ID NO: 97687 - DNA, 9 bp, Unknown
  misc_feature (1)..( 9): Result.001 file - promoters60/1021104
agaagtcaa

SEQ ID NO: 97688 - DNA, 9 bp, Unknown
  misc_feature (1)..( 9): Result.001 file - promoters60/1021104
ggaagtcat

SEQ ID NO: 97689 - DNA, 9 bp, Unknown
  misc_feature (1)..( 9): Result.001 file - promoters60/1021104
gcaattcaa

SEQ ID NO: 97690 - DNA, 9 bp, Unknown
  misc_feature (1)..( 9): Result.001 file - promoters60/1021104
tgaacaaga

SEQ ID NO: 97691 - DNA, 13 bp, Unknown
  misc_feature (1)..( 13): Result.001 file - promoters60/1021104
agttttgtaataa

SEQ ID NO: 97692 - DNA, 13 bp, Unknown
  misc_feature (1)..( 13): Result.001 file - promoters60/1021104
ccttttgtgttcg

SEQ ID NO: 97693 - DNA, 13 bp, Unknown
  misc_feature (1)..( 13): Result.001 file - promoters60/1021104
agtcttggtttct

SEQ ID NO: 97694 - DNA, 13 bp, Unknown
  misc_feature (1)..( 13): Result.001 file - promoters60/1021104
aatttcgtaataa

SEQ ID NO: 97695 - DNA, 13 bp, Unknown
  misc_feature (1)..( 13): Result.001 file - promoters60/1021136
tgattcgtaagtt

SEQ ID NO: 97696 - DNA, 7 bp, Unknown
  misc_feature (1)..( 7): Result.001 file - promoters60/1021136
aatgttt

SEQ ID NO: 97697 - DNA, 7 bp, Unknown
  misc_feature (1)..( 7): Result.001 file - promoters60/1021136
aatgttt

SEQ ID NO: 97698 - DNA, 6 bp, Unknown
  misc_feature (1)..( 6): Result.001 file - promoters60/1021136
atgttt

SEQ ID NO: 97699 - DNA, 6 bp, Unknown
  misc_feature (1)..( 6): Result.001 file - promoters60/1021136
tttgtt

SEQ ID NO: 97700 - DNA, 6 bp, Unknown
  misc_feature (1)..( 6): Result.001 file - promoters60/1021136
tttgtt

SEQ ID NO: 97701 - DNA, 6 bp, Unknown
  misc_feature (1)..( 6): Result.001 file - promoters60/1021136
ctctca

SEQ ID NO: 97702 - DNA, 6 bp, Unknown
  misc_feature (1)..( 6): Result.001 file - promoters60/1021136
ctctca

SEQ ID NO: 97703 - DNA, 6 bp, Unknown
  misc_feature (1)..( 6): Result.001 file - promoters60/1021136
ttcaat

SEQ ID NO: 97704 - DNA, 6 bp, Unknown
  misc_feature (1)..( 6): Result.001 file - promoters60/1021136
ttcaat

SEQ ID NO: 97705 - DNA, 9 bp, Unknown
  misc_feature (1)..( 9): Result.001 file - promoters60/1021136
ttgttaaaa

SEQ ID NO: 97706 - DNA, 9 bp, Unknown
  misc_feature (1)..( 9): Result.001 file - promoters60/1021136
ttgataaaa

SEQ ID NO: 97707 - DNA, 9 bp, Unknown
  misc_feature (1)..( 9): Result.001 file - promoters60/1021136
attttaaaa

SEQ ID NO: 97708 - DNA, 7 bp, Unknown
  misc_feature (1)..( 7): Result.001 file - promoters60/1021136
taatata

SEQ ID NO: 97709 - DNA, 7 bp, Unknown
  misc_feature (1)..( 7): Result.001 file - promoters60/1021136
taatatg

SEQ ID NO: 97710 - DNA, 7 bp, Unknown
  misc_feature (1)..( 7): Result.001 file - promoters60/1021136
taaaatg

SEQ ID NO: 97711 - DNA, 8 bp, Unknown
  misc_feature (1)..( 8): Result.001 file - promoters60/1021136
caagaaaa

SEQ ID NO: 97712 - DNA, 8 bp, Unknown
  misc_feature (1)..( 8): Result.001 file - promoters60/1021136
aaagaaaa

SEQ ID NO: 97713 - DNA, 8 bp, Unknown
  misc_feature (1)..( 8): Result.001 file - promoters60/1021136
aaagtaaa

SEQ ID NO: 97714 - DNA, 9 bp, Unknown
  misc_feature (1)..( 9): Result.001 file - promoters60/1021136
actgtattt

SEQ ID NO: 97715 - DNA, 9 bp, Unknown
  misc_feature (1)..( 9): Result.001 file - promoters60/1021136
actttattt

SEQ ID NO: 97716 - DNA, 9 bp, Unknown
  misc_feature (1)..( 9): Result.001 file - promoters60/1021136
ttaaaaata

SEQ ID NO: 97717 - DNA, 9 bp, Unknown
  misc_feature (1)..( 9): Result.001 file - promoters60/1021136
ataataata

SEQ ID NO: 97718 - DNA, 9 bp, Unknown
  misc_feature (1)..( 9): Result.001 file - promoters60/1021136
ttaaaaatc

SEQ ID NO: 97719 - DNA, 10 bp, Unknown
  misc_feature (1)..( 10): Result.001 file - promoters60/1021136
tatatattct

SEQ ID NO: 97720 - DNA, 10 bp, Unknown
  misc_feature (1)..( 10): Result.001 file - promoters60/1021136
tatttattct

SEQ ID NO: 97721 - DNA, 8 bp, Unknown
  misc_feature (1)..( 8): Result.001 file - promoters60/1021136
aaaaacaa

SEQ ID NO: 97722 - DNA, 8 bp, Unknown
  misc_feature (1)..( 8): Result.001 file - promoters60/1021136
aaaatcaa

SEQ ID NO: 97723 - DNA, 7 bp, Unknown
  misc_feature (1)..( 7): Result.001 file - promoters60/1021136
aatttaa

SEQ ID NO: 97724 - DNA, 7 bp, Unknown
  misc_feature (1)..( 7): Result.001 file - promoters60/1021136
aatctaa

SEQ ID NO: 97725 - DNA, 11 bp, Unknown
  misc_feature (1)..( 11): Result.001 file - promoters60/1021136
aaattaatgca

SEQ ID NO: 97726 - DNA, 11 bp, Unknown
  misc_feature (1)..( 11): Result.001 file - promoters60/1021136
aaatcaatgca

SEQ ID NO: 97727 - DNA, 6 bp, Unknown
  misc_feature (1)..( 6): Result.001 file - promoters60/1021136
taaatt

SEQ ID NO: 97728 - DNA, 6 bp, Unknown
  misc_feature (1)..( 6): Result.001 file - promoters60/1021136
taaatt

SEQ ID NO: 97729 - DNA, 6 bp, Unknown
  misc_feature (1)..( 6): Result.001 file - promoters60/1021136
aaagaa

SEQ ID NO: 97730 - DNA, 6 bp, Unknown
  misc_feature (1)..( 6): Result.001 file - promoters60/1021136
aaagaa

SEQ ID NO: 97731 - DNA, 7 bp, Unknown
  misc_feature (1)..( 7): Result.001 file - promoters60/1021136
aattgaa

SEQ ID NO: 97732 - DNA, 7 bp, Unknown
  misc_feature (1)..( 7): Result.001 file - promoters60/1021136
aatagaa

SEQ ID NO: 97733 - DNA, 8 bp, Unknown
  misc_feature (1)..( 8): Result.001 file - promoters60/1021136
atatcaga

SEQ ID NO: 97734 - DNA, 8 bp, Unknown
  misc_feature (1)..( 8): Result.001 file - promoters60/1021136
atataaga

SEQ ID NO: 97735 - DNA, 6 bp, Unknown
  misc_feature (1)..( 6): Result.001 file - promoters60/1021136
aatctt

SEQ ID NO: 97736 - DNA, 6 bp, Unknown
  misc_feature (1)..( 6): Result.001 file - promoters60/1021136
aatctt

SEQ ID NO: 97737 - DNA, 7 bp, Unknown
  misc_feature (1)..( 7): Result.001 file - promoters60/1021136
atttatt

SEQ ID NO: 97738 - DNA, 7 bp, Unknown
  misc_feature (1)..( 7): Result.001 file - promoters60/1021136
attaatt

SEQ ID NO: 97739 - DNA, 6 bp, Unknown
  misc_feature (1)..( 6): Result.001 file - promoters60/1021136
aaaaat

SEQ ID NO: 97740 - DNA, 6 bp, Unknown
  misc_feature (1)..( 6): Result.001 file - promoters60/1021136
aaaaat

SEQ ID NO: 97741 - DNA, 8 bp, Unknown
  misc_feature (1)..( 8): Result.001 file - promoters60/1021136
aaattaaa

SEQ ID NO: 97742 - DNA, 8 bp, Unknown
  misc_feature (1)..( 8): Result.001 file - promoters60/1021136
aaagtaaa

SEQ ID NO: 97743 - DNA, 7 bp, Unknown
  misc_feature (1)..( 7): Result.001 file - promoters60/1021136
atcatca

SEQ ID NO: 97744 - DNA, 7 bp, Unknown
  misc_feature (1)..( 7): Result.001 file - promoters60/1021148
atcttca

SEQ ID NO: 97745 - DNA, 10 bp, Unknown
  misc_feature (1)..( 10): Result.001 file - promoters60/1021148
ttatttaacg

SEQ ID NO: 97746 - DNA, 10 bp, Unknown
  misc_feature (1)..( 10): Result.001 file - promoters60/1021148
accttttacg

SEQ ID NO: 97747 - DNA, 10 bp, Unknown
  misc_feature (1)..( 10): Result.001 file - promoters60/1021148
ttattttact

SEQ ID NO: 97748 - DNA, 10 bp, Unknown
  misc_feature (1)..( 10): Result.001 file - promoters60/1021148
ttattttata

SEQ ID NO: 97749 - DNA, 10 bp, Unknown
  misc_feature (1)..( 10): Result.001 file - promoters60/1021148
gttatagagt

SEQ ID NO: 97750 - DNA, 10 bp, Unknown
  misc_feature (1)..( 10): Result.001 file - promoters60/1021148
cttaaagagt

SEQ ID NO: 97751 - DNA, 10 bp, Unknown
  misc_feature (1)..( 10): Result.001 file - promoters60/1021148
cctaaaatta

SEQ ID NO: 97752 - DNA, 10 bp, Unknown
  misc_feature (1)..( 10): Result.001 file - promoters60/1021218
actaaaataa

SEQ ID NO: 97753 - DNA, 13 bp, Unknown
  misc_feature (1)..( 13): Result.001 file - promoters60/1021218
agagagaaagaaa

SEQ ID NO: 97754 - DNA, 13 bp, Unknown
  misc_feature (1)..( 13): Result.001 file - promoters60/1021218
taagaaaaaccct

SEQ ID NO: 97755 - DNA, 13 bp, Unknown
  misc_feature (1)..( 13): Result.001 file - promoters60/1021218
atagaggaagtga

SEQ ID NO: 97756 - DNA, 13 bp, Unknown
  misc_feature (1)..( 13): Result.001 file - promoters60/1021218
aaagaaaaaattc

SEQ ID NO: 97757 - DNA, 13 bp, Unknown
  misc_feature (1)..( 13): Result.001 file - promoters60/1021218
aaataaaacattg

SEQ ID NO: 97758 - DNA, 13 bp, Unknown
  misc_feature (1)..( 13): Result.001 file - promoters60/1021239
ggatgatacattg

SEQ ID NO: 97759 - DNA, 9 bp, Unknown
  misc_feature (1)..( 9): Result.001 file - promoters60/1021239
taccaaaaa

SEQ ID NO: 97760 - DNA, 9 bp, Unknown
  misc_feature (1)..( 9): Result.001 file - promoters60/1021239
tactaaaaa

SEQ ID NO: 97761 - DNA, 9 bp, Unknown
  misc_feature (1)..( 9): Result.001 file - promoters60/1021239
aagaaaaat

SEQ ID NO: 97762 - DNA, 9 bp, Unknown
  misc_feature (1)..( 9): Result.001 file - promoters60/1021239
aagaagaat

SEQ ID NO: 97763 - DNA, 6 bp, Unknown
  misc_feature (1)..( 6): Result.001 file - promoters60/1021239
aaatgt

SEQ ID NO: 97764 - DNA, 6 bp, Unknown
  misc_feature (1)..( 6): Result.001 file - promoters60/1021239
aaatgt

SEQ ID NO: 97765 - DNA, 7 bp, Unknown
  misc_feature (1)..( 7): Result.001 file - promoters60/1021239
tcagttt

SEQ ID NO: 97766 - DNA, 7 bp, Unknown
  misc_feature (1)..( 7): Result.001 file - promoters60/1021239
tcagttt

SEQ ID NO: 97767 - DNA, 9 bp, Unknown
  misc_feature (1)..( 9): Result.001 file - promoters60/1021239
aaaaacaaa

SEQ ID NO: 97768 - DNA, 9 bp, Unknown
  misc_feature (1)..( 9): Result.001 file - promoters60/1021239
aaaaataaa

SEQ ID NO: 97769 - DNA, 7 bp, Unknown
  misc_feature (1)..( 7): Result.001 file - promoters60/1021239
aaaataa

SEQ ID NO: 97770 - DNA, 7 bp, Unknown
  misc_feature (1)..( 7): Result.001 file - promoters60/1021239
aaattaa

SEQ ID NO: 97771 - DNA, 7 bp, Unknown
  misc_feature (1)..( 7): Result.001 file - promoters60/1021239
gaaagtt

SEQ ID NO: 97772 - DNA, 7 bp, Unknown
  misc_feature (1)..( 7): Result.001 file - promoters60/1021239
gaaagtt

SEQ ID NO: 97773 - DNA, 8 bp, Unknown
  misc_feature (1)..( 8): Result.001 file - promoters60/1021239
agagccca

SEQ ID NO: 97774 - DNA, 8 bp, Unknown
  misc_feature (1)..( 8): Result.001 file - promoters60/1021239
agatccca

SEQ ID NO: 97775 - DNA, 7 bp, Unknown
  misc_feature (1)..( 7): Result.001 file - promoters60/1021239
cacttaa

SEQ ID NO: 97776 - DNA, 7 bp, Unknown
  misc_feature (1)..( 7): Result.001 file - promoters60/1021239
cacttaa

SEQ ID NO: 97777 - DNA, 9 bp, Unknown
  misc_feature (1)..( 9): Result.001 file - promoters60/1021239
ttaaaagaa

SEQ ID NO: 97778 - DNA, 9 bp, Unknown
  misc_feature (1)..( 9): Result.001 file - promoters60/1021239
ttaaaagaa

SEQ ID NO: 97779 - DNA, 6 bp, Unknown
  misc_feature (1)..( 6): Result.001 file - promoters60/1021239
tttttc

SEQ ID NO: 97780 - DNA, 6 bp, Unknown
  misc_feature (1)..( 6): Result.001 file - promoters60/1021239
tttttc

SEQ ID NO: 97781 - DNA, 8 bp, Unknown
  misc_feature (1)..( 8): Result.001 file - promoters60/1021239
gcaaatgg

SEQ ID NO: 97782 - DNA, 8 bp, Unknown
  misc_feature (1)..( 8): Result.001 file - promoters60/1021239
gcaagtgg

SEQ ID NO: 97783 - DNA, 6 bp, Unknown
  misc_feature (1)..( 6): Result.001 file - promoters60/1021239
agaaac

SEQ ID NO: 97784 - DNA, 6 bp, Unknown
  misc_feature (1)..( 6): Result.001 file - promoters60/1021239
agaaac

SEQ ID NO: 97785 - DNA, 8 bp, Unknown
  misc_feature (1)..( 8): Result.001 file - promoters60/1021239
ttacatca

SEQ ID NO: 97786 - DNA, 8 bp, Unknown
  misc_feature (1)..( 8): Result.001 file - promoters60/1021239
ttacctca

SEQ ID NO: 97787 - DNA, 7 bp, Unknown
  misc_feature (1)..( 7): Result.001 file - promoters60/1021239
taaccaa

SEQ ID NO: 97788 - DNA, 7 bp, Unknown
  misc_feature (1)..( 7): Result.001 file - promoters60/1021239
taaacaa

SEQ ID NO: 97789 - DNA, 7 bp, Unknown
  misc_feature (1)..( 7): Result.001 file - promoters60/1021239
tttgtta

SEQ ID NO: 97790 - DNA, 7 bp, Unknown
  misc_feature (1)..( 7): Result.001 file - promoters60/1021242
tttttta

SEQ ID NO: 97791 - DNA, 7 bp, Unknown
  misc_feature (1)..( 7): Result.001 file - promoters60/1021242
attggtt

SEQ ID NO: 97792 - DNA, 7 bp, Unknown
  misc_feature (1)..( 7): Result.001 file - promoters60/1021242
atttgtt

SEQ ID NO: 97793 - DNA, 7 bp, Unknown
  misc_feature (1)..( 7): Result.001 file - promoters60/1021242
atcgtca

SEQ ID NO: 97794 - DNA, 7 bp, Unknown
  misc_feature (1)..( 7): Result.001 file - promoters60/1021242
atcttca

SEQ ID NO: 97795 - DNA, 8 bp, Unknown
  misc_feature (1)..( 8): Result.001 file - promoters60/1021242
gattgtcc

SEQ ID NO: 97796 - DNA, 8 bp, Unknown
  misc_feature (1)..( 8): Result.001 file - promoters60/1021242
gattttcc

SEQ ID NO: 97797 - DNA, 7 bp, Unknown
  misc_feature (1)..( 7): Result.001 file - promoters60/1021242
ttaagaa

SEQ ID NO: 97798 - DNA, 7 bp, Unknown
  misc_feature (1)..( 7): Result.001 file - promoters60/1021242
ttaagaa

SEQ ID NO: 97799 - DNA, 6 bp, Unknown
  misc_feature (1)..( 6): Result.001 file - promoters60/1021242
tactgt

SEQ ID NO: 97800 - DNA, 6 bp, Unknown
  misc_feature (1)..( 6): Result.001 file - promoters60/1021242
tactgt

SEQ ID NO: 97801 - DNA, 6 bp, Unknown
  misc_feature (1)..( 6): Result.001 file - promoters60/1021242
cacaga

SEQ ID NO: 97802 - DNA, 6 bp, Unknown
  misc_feature (1)..( 6): Result.001 file - promoters60/1021242
cacaga

SEQ ID NO: 97803 - DNA, 7 bp, Unknown
  misc_feature (1)..( 7): Result.001 file - promoters60/1021242
taacaaa

SEQ ID NO: 97804 - DNA, 7 bp, Unknown
  misc_feature (1)..( 7): Result.001 file - promoters60/1021242
taaaaaa

SEQ ID NO: 97805 - DNA, 7 bp, Unknown
  misc_feature (1)..( 7): Result.001 file - promoters60/1021242
attatac

SEQ ID NO: 97806 - DNA, 7 bp, Unknown
  misc_feature (1)..( 7): Result.001 file - promoters60/1021242
attttac

SEQ ID NO: 97807 - DNA, 8 bp, Unknown
  misc_feature (1)..( 8): Result.001 file - promoters60/1021242
caaaattt

SEQ ID NO: 97808 - DNA, 8 bp, Unknown
  misc_feature (1)..( 8): Result.001 file - promoters60/1021242
caagattt

SEQ ID NO: 97809 - DNA, 7 bp, Unknown
  misc_feature (1)..( 7): Result.001 file - promoters60/1021242
caaagtc

SEQ ID NO: 97810 - DNA, 7 bp, Unknown
  misc_feature (1)..( 7): Result.001 file - promoters60/1021242
caaagtc

SEQ ID NO: 97811 - DNA, 7 bp, Unknown
  misc_feature (1)..( 7): Result.001 file - promoters60/1021242
tataaaa

SEQ ID NO: 97812 - DNA, 7 bp, Unknown
  misc_feature (1)..( 7): Result.001 file - promoters60/1021242
tataaaa

SEQ ID NO: 97813 - DNA, 7 bp, Unknown
  misc_feature (1)..( 7): Result.001 file - promoters60/1021242
gcccaaa

SEQ ID NO: 97814 - DNA, 7 bp, Unknown
  misc_feature (1)..( 7): Result.001 file - promoters60/1021246
gccgaaa

SEQ ID NO: 97815 - DNA, 6 bp, Unknown
  misc_feature (1)..( 6): Result.001 file - promoters60/1021246
ataata

SEQ ID NO: 97816 - DNA, 6 bp, Unknown
  misc_feature (1)..( 6): Result.001 file - promoters60/1021246
ataata

SEQ ID NO: 97817 - DNA, 6 bp, Unknown
  misc_feature (1)..( 6): Result.001 file - promoters60/1021246
tttgac

SEQ ID NO: 97818 - DNA, 6 bp, Unknown
  misc_feature (1)..( 6): Result.001 file - promoters60/1021246
tttgac

SEQ ID NO: 97819 - DNA, 7 bp, Unknown
  misc_feature (1)..( 7): Result.001 file - promoters60/1021246
cgaatgg

SEQ ID NO: 97820 - DNA, 7 bp, Unknown
  misc_feature (1)..( 7): Result.001 file - promoters60/1021246
cgaatgg

SEQ ID NO: 97821 - DNA, 8 bp, Unknown
  misc_feature (1)..( 8): Result.001 file - promoters60/1021246
tgccattt

SEQ ID NO: 97822 - DNA, 8 bp, Unknown
  misc_feature (1)..( 8): Result.001 file - promoters60/1021246
tgcctttt

SEQ ID NO: 97823 - DNA, 6 bp, Unknown
  misc_feature (1)..( 6): Result.001 file - promoters60/1021246
cggctc

SEQ ID NO: 97824 - DNA, 6 bp, Unknown
  misc_feature (1)..( 6): Result.001 file - promoters60/1021246
cggctc

SEQ ID NO: 97825 - DNA, 11 bp, Unknown
  misc_feature (1)..( 11): Result.001 file - promoters60/1021246
ttattttcata

SEQ ID NO: 97826 - DNA, 11 bp, Unknown
  misc_feature (1)..( 11): Result.001 file - promoters60/1021246
ttagtttcata

SEQ ID NO: 97827 - DNA, 6 bp, Unknown
  misc_feature (1)..( 6): Result.001 file - promoters60/1021246
agtatg

SEQ ID NO: 97828 - DNA, 6 bp, Unknown
  misc_feature (1)..( 6): Result.001 file - promoters60/1021246
agtatg

SEQ ID NO: 97829 - DNA, 6 bp, Unknown
  misc_feature (1)..( 6): Result.001 file - promoters60/1021246
aaaaga

SEQ ID NO: 97830 - DNA, 6 bp, Unknown
  misc_feature (1)..( 6): Result.001 file - promoters60/1021246
aaaaga

SEQ ID NO: 97831 - DNA, 6 bp, Unknown
  misc_feature (1)..( 6): Result.001 file - promoters60/1021246
agaaaa

SEQ ID NO: 97832 - DNA, 6 bp, Unknown
  misc_feature (1)..( 6): Result.001 file - promoters60/1021246
agaaaa

SEQ ID NO: 97833 - DNA, 7 bp, Unknown
  misc_feature (1)..( 7): Result.001 file - promoters60/1021246
aaagaag

SEQ ID NO: 97834 - DNA, 7 bp, Unknown
  misc_feature (1)..( 7): Result.001 file - promoters60/1021246
aaaaaag

SEQ ID NO: 97835 - DNA, 6 bp, Unknown
  misc_feature (1)..( 6): Result.001 file - promoters60/1021246
actcca

SEQ ID NO: 97836 - DNA, 6 bp, Unknown
  misc_feature (1)..( 6): Result.001 file - promoters60/1021246
actcca

SEQ ID NO: 97837 - DNA, 8 bp, Unknown
  misc_feature (1)..( 8): Result.001 file - promoters60/1021246
aagagaag

SEQ ID NO: 97838 - DNA, 8 bp, Unknown
  misc_feature (1)..( 8): Result.001 file - promoters60/1021246
aagcgaag

SEQ ID NO: 97839 - DNA, 7 bp, Unknown
  misc_feature (1)..( 7): Result.001 file - promoters60/1021246
tatcatt

SEQ ID NO: 97840 - DNA, 7 bp, Unknown
  misc_feature (1)..( 7): Result.001 file - promoters60/1021246
tatgatt

SEQ ID NO: 97841 - DNA, 7 bp, Unknown
  misc_feature (1)..( 7): Result.001 file - promoters60/1021246
gaatttg

SEQ ID NO: 97842 - DNA, 7 bp, Unknown
  misc_feature (1)..( 7): Result.001 file - promoters60/1021246
gaatttg

SEQ ID NO: 97843 - DNA, 7 bp, Unknown
  misc_feature (1)..( 7): Result.001 file - promoters60/1021246
tttgatt

SEQ ID NO: 97844 - DNA, 7 bp, Unknown
  misc_feature (1)..( 7): Result.001 file - promoters60/1021246
tttgatt

SEQ ID NO: 97845 - DNA, 7 bp, Unknown
  misc_feature (1)..( 7): Result.001 file - promoters60/1021246
ttagatc

SEQ ID NO: 97846 - DNA, 7 bp, Unknown
  misc_feature (1)..( 7): Result.001 file - promoters60/1021246
ttatatc

SEQ ID NO: 97847 - DNA, 6 bp, Unknown
  misc_feature (1)..( 6): Result.001 file - promoters60/1021246
catttg

SEQ ID NO: 97848 - DNA, 6 bp, Unknown
  misc_feature (1)..( 6): Result.001 file - promoters60/1021323
catttg

SEQ ID NO: 97849 - DNA, 6 bp, Unknown
  misc_feature (1)..( 6): Result.001 file - promoters60/1021323
taacaa

SEQ ID NO: 97850 - DNA, 6 bp, Unknown
  misc_feature (1)..( 6): Result.001 file - promoters60/1021323
taacaa

SEQ ID NO: 97851 - DNA, 6 bp, Unknown
  misc_feature (1)..( 6): Result.001 file - promoters60/1021323
tttatt

SEQ ID NO: 97852 - DNA, 6 bp, Unknown
  misc_feature (1)..( 6): Result.001 file - promoters60/1021323
tttatt

SEQ ID NO: 97853 - DNA, 7 bp, Unknown
  misc_feature (1)..( 7): Result.001 file - promoters60/1021323
attgttt

SEQ ID NO: 97854 - DNA, 7 bp, Unknown
  misc_feature (1)..( 7): Result.001 file - promoters60/1021323
atttttt

SEQ ID NO: 97855 - DNA, 9 bp, Unknown
  misc_feature (1)..( 9): Result.001 file - promoters60/1021323
tttcttaaa

SEQ ID NO: 97856 - DNA, 9 bp, Unknown
  misc_feature (1)..( 9): Result.001 file - promoters60/1021323
tttctaaaa

SEQ ID NO: 97857 - DNA, 6 bp, Unknown
  misc_feature (1)..( 6): Result.001 file - promoters60/1021323
tgttgc

SEQ ID NO: 97858 - DNA, 6 bp, Unknown
  misc_feature (1)..( 6): Result.001 file - promoters60/1021323
tgttgc

SEQ ID NO: 97859 - DNA, 6 bp, Unknown
  misc_feature (1)..( 6): Result.001 file - promoters60/1021323
gttaat

SEQ ID NO: 97860 - DNA, 6 bp, Unknown
  misc_feature (1)..( 6): Result.001 file - promoters60/1021323
gttaat

SEQ ID NO: 97861 - DNA, 6 bp, Unknown
  misc_feature (1)..( 6): Result.001 file - promoters60/1021323
atattt

SEQ ID NO: 97862 - DNA, 6 bp, Unknown
  misc_feature (1)..( 6): Result.001 file - promoters60/1021323
atattt

SEQ ID NO: 97863 - DNA, 8 bp, Unknown
  misc_feature (1)..( 8): Result.001 file - promoters60/1021323
attttgtt

SEQ ID NO: 97864 - DNA, 8 bp, Unknown
  misc_feature (1)..( 8): Result.001 file - promoters60/1021323
atttggtt

SEQ ID NO: 97865 - DNA, 7 bp, Unknown
  misc_feature (1)..( 7): Result.001 file - promoters60/1021323
aatcatg

SEQ ID NO: 97866 - DNA, 7 bp, Unknown
  misc_feature (1)..( 7): Result.001 file - promoters60/1021323
aattatg

SEQ ID NO: 97867 - DNA, 9 bp, Unknown
  misc_feature (1)..( 9): Result.001 file - promoters60/1021323
gaaacctaa

SEQ ID NO: 97868 - DNA, 9 bp, Unknown
  misc_feature (1)..( 9): Result.001 file - promoters60/1021323
gaaacgtaa

SEQ ID NO: 97869 - DNA, 6 bp, Unknown
  misc_feature (1)..( 6): Result.001 file - promoters60/1021323
taaaca

SEQ ID NO: 97870 - DNA, 6 bp, Unknown
  misc_feature (1)..( 6): Result.001 file - promoters60/1021323
taaaca

SEQ ID NO: 97871 - DNA, 6 bp, Unknown
  misc_feature (1)..( 6): Result.001 file - promoters60/1021323
aagagt

SEQ ID NO: 97872 - DNA, 6 bp, Unknown
  misc_feature (1)..( 6): Result.001 file - promoters60/1021323
aagagt

SEQ ID NO: 97873 - DNA, 8 bp, Unknown
  misc_feature (1)..( 8): Result.001 file - promoters60/1021323
acacaaag

SEQ ID NO: 97874 - DNA, 8 bp, Unknown
  misc_feature (1)..( 8): Result.001 file - promoters60/1021323
acaccaag

SEQ ID NO: 97875 - DNA, 7 bp, Unknown
  misc_feature (1)..( 7): Result.001 file - promoters60/1021323
agtcttc

SEQ ID NO: 97876 - DNA, 7 bp, Unknown
  misc_feature (1)..( 7): Result.001 file - promoters60/1021323
agttttc

SEQ ID NO: 97877 - DNA, 6 bp, Unknown
  misc_feature (1)..( 6): Result.001 file - promoters60/1021323
aaaata

SEQ ID NO: 97878 - DNA, 6 bp, Unknown
  misc_feature (1)..( 6): Result.001 file - promoters60/1021323
aaaata

SEQ ID NO: 97879 - DNA, 6 bp, Unknown
  misc_feature (1)..( 6): Result.001 file - promoters60/1021323
accgtt

SEQ ID NO: 97880 - DNA, 6 bp, Unknown
  misc_feature (1)..( 6): Result.001 file - promoters60/1021323
accgtt

SEQ ID NO: 97881 - DNA, 6 bp, Unknown
  misc_feature (1)..( 6): Result.001 file - promoters60/1021323
gaatca

SEQ ID NO: 97882 - DNA, 6 bp, Unknown
  misc_feature (1)..( 6): Result.001 file - promoters60/1021323
gaatca

SEQ ID NO: 97883 - DNA, 7 bp, Unknown
  misc_feature (1)..( 7): Result.001 file - promoters60/1021323
tccggtt

SEQ ID NO: 97884 - DNA, 7 bp, Unknown
  misc_feature (1)..( 7): Result.001 file - promoters60/1021323
tccagtt

SEQ ID NO: 97885 - DNA, 6 bp, Unknown
  misc_feature (1)..( 6): Result.001 file - promoters60/1021323
tttccg

SEQ ID NO: 97886 - DNA, 6 bp, Unknown
  misc_feature (1)..( 6): Result.001 file - promoters60/1021323
tttccg

SEQ ID NO: 97887 - DNA, 6 bp, Unknown
  misc_feature (1)..( 6): Result.001 file - promoters60/1021323
ataaat

SEQ ID NO: 97888 - DNA, 6 bp, Unknown
  misc_feature (1)..( 6): Result.001 file - promoters60/1021323
ataaat

SEQ ID NO: 97889 - DNA, 6 bp, Unknown
  misc_feature (1)..( 6): Result.001 file - promoters60/1021323
aaccct

SEQ ID NO: 97890 - DNA, 6 bp, Unknown
  misc_feature (1)..( 6): Result.001 file - promoters60/1021326
aaccct

SEQ ID NO: 97891 - DNA, 6 bp, Unknown
  misc_feature (1)..( 6): Result.001 file - promoters60/1021326
caaaat

SEQ ID NO: 97892 - DNA, 6 bp, Unknown
  misc_feature (1)..( 6): Result.001 file - promoters60/1021326
caaaat

SEQ ID NO: 97893 - DNA, 7 bp, Unknown
  misc_feature (1)..( 7): Result.001 file - promoters60/1021326
agaattc

SEQ ID NO: 97894 - DNA, 7 bp, Unknown
  misc_feature (1)..( 7): Result.001 file - promoters60/1021326
agatttc

SEQ ID NO: 97895 - DNA, 6 bp, Unknown
  misc_feature (1)..( 6): Result.001 file - promoters60/1021326
gtaatc

SEQ ID NO: 97896 - DNA, 6 bp, Unknown
  misc_feature (1)..( 6): Result.001 file - promoters60/1021326
gtaatc

SEQ ID NO: 97897 - DNA, 6 bp, Unknown
  misc_feature (1)..( 6): Result.001 file - promoters60/1021326
acaaaa

SEQ ID NO: 97898 - DNA, 6 bp, Unknown
  misc_feature (1)..( 6): Result.001 file - promoters60/1021326
acaaaa

SEQ ID NO: 97899 - DNA, 7 bp, Unknown
  misc_feature (1)..( 7): Result.001 file - promoters60/1021326
actgaat

SEQ ID NO: 97900 - DNA, 7 bp, Unknown
  misc_feature (1)..( 7): Result.001 file - promoters60/1021326
actaaat

SEQ ID NO: 97901 - DNA, 7 bp, Unknown
  misc_feature (1)..( 7): Result.001 file - promoters60/1021326
ggttgtt

SEQ ID NO: 97902 - DNA, 7 bp, Unknown
  misc_feature (1)..( 7): Result.001 file - promoters60/1021326
ggtagtt

SEQ ID NO: 97903 - DNA, 7 bp, Unknown
  misc_feature (1)..( 7): Result.001 file - promoters60/1021326
gttaatt

SEQ ID NO: 97904 - DNA, 7 bp, Unknown
  misc_feature (1)..( 7): Result.001 file - promoters60/1021326
gttgatt

SEQ ID NO: 97905 - DNA, 6 bp, Unknown
  misc_feature (1)..( 6): Result.001 file - promoters60/1021326
tattta

SEQ ID NO: 97906 - DNA, 6 bp, Unknown
  misc_feature (1)..( 6): Result.001 file - promoters60/1021419
tattta

SEQ ID NO: 97907 - DNA, 12 bp, Unknown
  misc_feature (1)..( 12): Result.001 file - promoters60/1021419
ctttttataatg

SEQ ID NO: 97908 - DNA, 12 bp, Unknown
  misc_feature (1)..( 12): Result.001 file - promoters60/1021419
atttttaaattt

SEQ ID NO: 97909 - DNA, 12 bp, Unknown
  misc_feature (1)..( 12): Result.001 file - promoters60/1021419
ctttttgacaca

SEQ ID NO: 97910 - DNA, 12 bp, Unknown
  misc_feature (1)..( 12): Result.001 file - promoters60/1021419
aattttacattt

SEQ ID NO: 97911 - DNA, 12 bp, Unknown
  misc_feature (1)..( 12): Result.001 file - promoters60/1021419
aattttaataac

SEQ ID NO: 97912 - DNA, 12 bp, Unknown
  misc_feature (1)..( 12): Result.001 file - promoters60/1021419
tcgtctacatta

SEQ ID NO: 97913 - DNA, 11 bp, Unknown
  misc_feature (1)..( 11): Result.001 file - promoters60/1021419
atttatgtgtg

SEQ ID NO: 97914 - DNA, 11 bp, Unknown
  misc_feature (1)..( 11): Result.001 file - promoters60/1021419
gtctatgtgaa

SEQ ID NO: 97915 - DNA, 11 bp, Unknown
  misc_feature (1)..( 11): Result.001 file - promoters60/1021419
gtctatatgaa

SEQ ID NO: 97916 - DNA, 11 bp, Unknown
  misc_feature (1)..( 11): Result.001 file - promoters60/1021419
atttattaaat

SEQ ID NO: 97917 - DNA, 11 bp, Unknown
  misc_feature (1)..( 11): Result.001 file - promoters60/1021419
atctttgttct

SEQ ID NO: 97918 - DNA, 11 bp, Unknown
  misc_feature (1)..( 11): Result.001 file - promoters60/1021419
aataatttaat

SEQ ID NO: 97919 - DNA, 9 bp, Unknown
  misc_feature (1)..( 9): Result.001 file - promoters60/1021419
ggtaaatgc

SEQ ID NO: 97920 - DNA, 9 bp, Unknown
  misc_feature (1)..( 9): Result.001 file - promoters60/1021419
tgtaaatct

SEQ ID NO: 97921 - DNA, 9 bp, Unknown
  misc_feature (1)..( 9): Result.001 file - promoters60/1021419
attaaatga

SEQ ID NO: 97922 - DNA, 9 bp, Unknown
  misc_feature (1)..( 9): Result.001 file - promoters60/1021419
gttaattct

SEQ ID NO: 97923 - DNA, 9 bp, Unknown
  misc_feature (1)..( 9): Result.001 file - promoters60/1021419
gggaaatga

SEQ ID NO: 97924 - DNA, 9 bp, Unknown
  misc_feature (1)..( 9): Result.001 file - promoters60/1021445
atttaatcc

SEQ ID NO: 97925 - DNA, 13 bp, Unknown
  misc_feature (1)..( 13): Result.001 file - promoters60/1021445
ctcaaaaaagctg

SEQ ID NO: 97926 - DNA, 13 bp, Unknown
  misc_feature (1)..( 13): Result.001 file - promoters60/1021445
ttttaaaaaggga

SEQ ID NO: 97927 - DNA, 13 bp, Unknown
  misc_feature (1)..( 13): Result.001 file - promoters60/1021445
cactaaaaaggtt

SEQ ID NO: 97928 - DNA, 13 bp, Unknown
  misc_feature (1)..( 13): Result.001 file - promoters60/1021445
aaacaaaaagaac

SEQ ID NO: 97929 - DNA, 13 bp, Unknown
  misc_feature (1)..( 13): Result.001 file - promoters60/1021445
ttttagaaattac

SEQ ID NO: 97930 - DNA, 13 bp, Unknown
  misc_feature (1)..( 13): Result.001 file - promoters60/1021445
aattaaaaaaaaa

SEQ ID NO: 97931 - DNA, 13 bp, Unknown
  misc_feature (1)..( 13): Result.001 file - promoters60/1021445
actacaaaagtta

SEQ ID NO: 97932 - DNA, 13 bp, Unknown
  misc_feature (1)..( 13): Result.001 file - promoters60/1021445
aatcaaacttggt

SEQ ID NO: 97933 - DNA, 13 bp, Unknown
  misc_feature (1)..( 13): Result.001 file - promoters60/1021445
agttttaaagttt

SEQ ID NO: 97934 - DNA, 13 bp, Unknown
  misc_feature (1)..( 13): Result.001 file - promoters60/1021445
agtattaaaaatg

SEQ ID NO: 97935 - DNA, 13 bp, Unknown
  misc_feature (1)..( 13): Result.001 file - promoters60/1021445
cgttttatatttc

SEQ ID NO: 97936 - DNA, 13 bp, Unknown
  misc_feature (1)..( 13): Result.001 file - promoters60/1021445
tgtttgaaatttt

SEQ ID NO: 97937 - DNA, 13 bp, Unknown
  misc_feature (1)..( 13): Result.001 file - promoters60/1021445
accattaaagctc

SEQ ID NO: 97938 - DNA, 13 bp, Unknown
  misc_feature (1)..( 13): Result.001 file - promoters60/1021445
tttattgaagact

SEQ ID NO: 97939 - DNA, 13 bp, Unknown
  misc_feature (1)..( 13): Result.001 file - promoters60/1021445
cacataaacattt

SEQ ID NO: 97940 - DNA, 13 bp, Unknown
  misc_feature (1)..( 13): Result.001 file - promoters60/1021445
ttcataaatcaca

SEQ ID NO: 97941 - DNA, 13 bp, Unknown
  misc_feature (1)..( 13): Result.001 file - promoters60/1021445
ttcttaaaagaaa

SEQ ID NO: 97942 - DNA, 13 bp, Unknown
  misc_feature (1)..( 13): Result.001 file - promoters60/1021445
caattaaaaaaaa

SEQ ID NO: 97943 - DNA, 13 bp, Unknown
  misc_feature (1)..( 13): Result.001 file - promoters60/1021445
taatcaaacttgg

SEQ ID NO: 97944 - DNA, 13 bp, Unknown
  misc_feature (1)..( 13): Result.001 file - promoters60/1021445
gaatcaaatactt

SEQ ID NO: 97945 - DNA, 8 bp, Unknown
  misc_feature (1)..( 8): Result.001 file - promoters60/1021445
tgggccga

SEQ ID NO: 97946 - DNA, 8 bp, Unknown
  misc_feature (1)..( 8): Result.001 file - promoters60/1021445
tgggcctt

SEQ ID NO: 97947 - DNA, 8 bp, Unknown
  misc_feature (1)..( 8): Result.001 file - promoters60/1021445
tgggcctg

SEQ ID NO: 97948 - DNA, 8 bp, Unknown
  misc_feature (1)..( 8): Result.001 file - promoters60/1021445
tgggcctt

SEQ ID NO: 97949 - DNA, 8 bp, Unknown
  misc_feature (1)..( 8): Result.001 file - promoters60/1021445
tggccctg

SEQ ID NO: 97950 - DNA, 8 bp, Unknown
  misc_feature (1)..( 8): Result.001 file - promoters60/1021445
tgggccta

SEQ ID NO: 97951 - DNA, 9 bp, Unknown
  misc_feature (1)..( 9): Result.001 file - promoters60/1021445
tatcaaaac

SEQ ID NO: 97952 - DNA, 9 bp, Unknown
  misc_feature (1)..( 9): Result.001 file - promoters60/1021445
tataaaaag

SEQ ID NO: 97953 - DNA, 9 bp, Unknown
  misc_feature (1)..( 9): Result.001 file - promoters60/1021445
tataaaact

SEQ ID NO: 97954 - DNA, 9 bp, Unknown
  misc_feature (1)..( 9): Result.001 file - promoters60/1021445
tatataaag

SEQ ID NO: 97955 - DNA, 9 bp, Unknown
  misc_feature (1)..( 9): Result.001 file - promoters60/1021445
tataaacgc

SEQ ID NO: 97956 - DNA, 9 bp, Unknown
  misc_feature (1)..( 9): Result.001 file - promoters60/1021445
tataaattg

SEQ ID NO: 97957 - DNA, 9 bp, Unknown
  misc_feature (1)..( 9): Result.001 file - promoters60/1021549
tataaactc

SEQ ID NO: 97958 - DNA, 14 bp, Unknown
  misc_feature (1)..( 14): Result.001 file - promoters60/1021549
acatatatacttag

SEQ ID NO: 97959 - DNA, 14 bp, Unknown
  misc_feature (1)..( 14): Result.001 file - promoters60/1021549
gtatatatataaaa

SEQ ID NO: 97960 - DNA, 14 bp, Unknown
  misc_feature (1)..( 14): Result.001 file - promoters60/1021549
atttatatagataa

SEQ ID NO: 97961 - DNA, 14 bp, Unknown
  misc_feature (1)..( 14): Result.001 file - promoters60/1021549
tggtatataaattc

SEQ ID NO: 97962 - DNA, 14 bp, Unknown
  misc_feature (1)..( 14): Result.001 file - promoters60/1021549
aaaaatatttgtat

SEQ ID NO: 97963 - DNA, 14 bp, Unknown
  misc_feature (1)..( 14): Result.001 file - promoters60/1021549
cccaataaaaagca

SEQ ID NO: 97964 - DNA, 11 bp, Unknown
  misc_feature (1)..( 11): Result.001 file - promoters60/1021549
taatcttttgg

SEQ ID NO: 97965 - DNA, 11 bp, Unknown
  misc_feature (1)..( 11): Result.001 file - promoters60/1021549
aactcttttga

SEQ ID NO: 97966 - DNA, 11 bp, Unknown
  misc_feature (1)..( 11): Result.001 file - promoters60/1021549
taatttttttc

SEQ ID NO: 97967 - DNA, 11 bp, Unknown
  misc_feature (1)..( 11): Result.001 file - promoters60/1021549
aactcttttga

SEQ ID NO: 97968 - DNA, 11 bp, Unknown
  misc_feature (1)..( 11): Result.001 file - promoters60/1021549
caatctttttt

SEQ ID NO: 97969 - DNA, 11 bp, Unknown
  misc_feature (1)..( 11): Result.001 file - promoters60/1021563
ttttttttttt

SEQ ID NO: 97970 - DNA, 7 bp, Unknown
  misc_feature (1)..( 7): Result.001 file - promoters60/1021563
ctggatc

SEQ ID NO: 97971 - DNA, 7 bp, Unknown
  misc_feature (1)..( 7): Result.001 file - promoters60/1021563
ctggata

SEQ ID NO: 97972 - DNA, 7 bp, Unknown
  misc_feature (1)..( 7): Result.001 file - promoters60/1021563
atggata

SEQ ID NO: 97973 - DNA, 9 bp, Unknown
  misc_feature (1)..( 9): Result.001 file - promoters60/1021563
catcttctt

SEQ ID NO: 97974 - DNA, 9 bp, Unknown
  misc_feature (1)..( 9): Result.001 file - promoters60/1021563
catcgtctg

SEQ ID NO: 97975 - DNA, 9 bp, Unknown
  misc_feature (1)..( 9): Result.001 file - promoters60/1021563
tgtcgactg

SEQ ID NO: 97976 - DNA, 9 bp, Unknown
  misc_feature (1)..( 9): Result.001 file - promoters60/1021563
gttttgctt

SEQ ID NO: 97977 - DNA, 9 bp, Unknown
  misc_feature (1)..( 9): Result.001 file - promoters60/1021563
gtttagctc

SEQ ID NO: 97978 - DNA, 9 bp, Unknown
  misc_feature (1)..( 9): Result.001 file - promoters60/1021563
cgctagctc

SEQ ID NO: 97979 - DNA, 10 bp, Unknown
  misc_feature (1)..( 10): Result.001 file - promoters60/1021563
agcgacggag

SEQ ID NO: 97980 - DNA, 10 bp, Unknown
  misc_feature (1)..( 10): Result.001 file - promoters60/1021563
agcggcggag

SEQ ID NO: 97981 - DNA, 10 bp, Unknown
  misc_feature (1)..( 10): Result.001 file - promoters60/1021655
gtcggcgaag

SEQ ID NO: 97982 - DNA, 11 bp, Unknown
  misc_feature (1)..( 11): Result.001 file - promoters60/1021655
ctacgaaaatg

SEQ ID NO: 97983 - DNA, 11 bp, Unknown
  misc_feature (1)..( 11): Result.001 file - promoters60/1021655
ttactaaaagt

SEQ ID NO: 97984 - DNA, 11 bp, Unknown
  misc_feature (1)..( 11): Result.001 file - promoters60/1021655
ccaggaagatg

SEQ ID NO: 97985 - DNA, 11 bp, Unknown
  misc_feature (1)..( 11): Result.001 file - promoters60/1021655
agacgaaacaa

SEQ ID NO: 97986 - DNA, 11 bp, Unknown
  misc_feature (1)..( 11): Result.001 file - promoters60/1021655
ttactaaggtg

SEQ ID NO: 97987 - DNA, 11 bp, Unknown
  misc_feature (1)..( 11): Result.001 file - promoters60/1021764
cgacgaagctc

SEQ ID NO: 97988 - DNA, 7 bp, Unknown
  misc_feature (1)..( 7): Result.001 file - promoters60/1021764
aaataat

SEQ ID NO: 97989 - DNA, 7 bp, Unknown
  misc_feature (1)..( 7): Result.001 file - promoters60/1021764
aaaaaat

SEQ ID NO: 97990 - DNA, 7 bp, Unknown
  misc_feature (1)..( 7): Result.001 file - promoters60/1021764
atacaaa

SEQ ID NO: 97991 - DNA, 7 bp, Unknown
  misc_feature (1)..( 7): Result.001 file - promoters60/1021764
atacaaa

SEQ ID NO: 97992 - DNA, 7 bp, Unknown
  misc_feature (1)..( 7): Result.001 file - promoters60/1021764
aaatttt

SEQ ID NO: 97993 - DNA, 7 bp, Unknown
  misc_feature (1)..( 7): Result.001 file - promoters60/1021764
aaatttt

SEQ ID NO: 97994 - DNA, 6 bp, Unknown
  misc_feature (1)..( 6): Result.001 file - promoters60/1021764
ttttat

SEQ ID NO: 97995 - DNA, 6 bp, Unknown
  misc_feature (1)..( 6): Result.001 file - promoters60/1021764
ttttat

SEQ ID NO: 97996 - DNA, 8 bp, Unknown
  misc_feature (1)..( 8): Result.001 file - promoters60/1021764
ataacatt

SEQ ID NO: 97997 - DNA, 8 bp, Unknown
  misc_feature (1)..( 8): Result.001 file - promoters60/1021764
ataccatt

SEQ ID NO: 97998 - DNA, 6 bp, Unknown
  misc_feature (1)..( 6): Result.001 file - promoters60/1021764
ttaatt

SEQ ID NO: 97999 - DNA, 6 bp, Unknown
  misc_feature (1)..( 6): Result.001 file - promoters60/1021764
ttaatt

SEQ ID NO: 98000 - DNA, 8 bp, Unknown
  misc_feature (1)..( 8): Result.001 file - promoters60/1021764
atatcaaa

SEQ ID NO: 98001 - DNA, 8 bp, Unknown
  misc_feature (1)..( 8): Result.001 file - promoters60/1021764
atattaaa

SEQ ID NO: 98002 - DNA, 6 bp, Unknown
  misc_feature (1)..( 6): Result.001 file - promoters60/1021764
tttgaa

SEQ ID NO: 98003 - DNA, 6 bp, Unknown
  misc_feature (1)..( 6): Result.001 file - promoters60/1021764
tttgaa

SEQ ID NO: 98004 - DNA, 8 bp, Unknown
  misc_feature (1)..( 8): Result.001 file - promoters60/1021764
aactttca

SEQ ID NO: 98005 - DNA, 8 bp, Unknown
  misc_feature (1)..( 8): Result.001 file - promoters60/1021764
aacattca

SEQ ID NO: 98006 - DNA, 6 bp, Unknown
  misc_feature (1)..( 6): Result.001 file - promoters60/1021764
ctctat

SEQ ID NO: 98007 - DNA, 6 bp, Unknown
  misc_feature (1)..( 6): Result.001 file - promoters60/1021764
ctctat

SEQ ID NO: 98008 - DNA, 8 bp, Unknown
  misc_feature (1)..( 8): Result.001 file - promoters60/1021764
atttggta

SEQ ID NO: 98009 - DNA, 8 bp, Unknown
  misc_feature (1)..( 8): Result.001 file - promoters60/1021764
atttagta

SEQ ID NO: 98010 - DNA, 7 bp, Unknown
  misc_feature (1)..( 7): Result.001 file - promoters60/1021764
taactat

SEQ ID NO: 98011 - DNA, 7 bp, Unknown
  misc_feature (1)..( 7): Result.001 file - promoters60/1021764
taaatat

SEQ ID NO: 98012 - DNA, 7 bp, Unknown
  misc_feature (1)..( 7): Result.001 file - promoters60/1021764
gtttctt

SEQ ID NO: 98013 - DNA, 7 bp, Unknown
  misc_feature (1)..( 7): Result.001 file - promoters60/1021764
gtttctt

SEQ ID NO: 98014 - DNA, 8 bp, Unknown
  misc_feature (1)..( 8): Result.001 file - promoters60/1021764
caaacaca

SEQ ID NO: 98015 - DNA, 8 bp, Unknown
  misc_feature (1)..( 8): Result.001 file - promoters60/1021764
caatcaca

SEQ ID NO: 98016 - DNA, 6 bp, Unknown
  misc_feature (1)..( 6): Result.001 file - promoters60/1021764
tatttt

SEQ ID NO: 98017 - DNA, 6 bp, Unknown
  misc_feature (1)..( 6): Result.001 file - promoters60/1021764
tatttt

SEQ ID NO: 98018 - DNA, 11 bp, Unknown
  misc_feature (1)..( 11): Result.001 file - promoters60/1021764
ttttgtctttt

SEQ ID NO: 98019 - DNA, 11 bp, Unknown
  misc_feature (1)..( 11): Result.001 file - promoters60/1021764
ttttgtatttt

SEQ ID NO: 98020 - DNA, 6 bp, Unknown
  misc_feature (1)..( 6): Result.001 file - promoters60/1021764
ttattt

SEQ ID NO: 98021 - DNA, 6 bp, Unknown
  misc_feature (1)..( 6): Result.001 file - promoters60/1021764
ttattt

SEQ ID NO: 98022 - DNA, 8 bp, Unknown
  misc_feature (1)..( 8): Result.001 file - promoters60/1021764
ctactaac

SEQ ID NO: 98023 - DNA, 8 bp, Unknown
  misc_feature (1)..( 8): Result.001 file - promoters60/1021764
ctacaaac

SEQ ID NO: 98024 - DNA, 6 bp, Unknown
  misc_feature (1)..( 6): Result.001 file - promoters60/1021764
ctaaaa

SEQ ID NO: 98025 - DNA, 6 bp, Unknown
  misc_feature (1)..( 6): Result.001 file - promoters60/1021764
ctaaaa

SEQ ID NO: 98026 - DNA, 10 bp, Unknown
  misc_feature (1)..( 10): Result.001 file - promoters60/1021764
aaaatattac

SEQ ID NO: 98027 - DNA, 10 bp, Unknown
  misc_feature (1)..( 10): Result.001 file - promoters60/1021764
aaaatattac

SEQ ID NO: 98028 - DNA, 6 bp, Unknown
  misc_feature (1)..( 6): Result.001 file - promoters60/1021764
caataa

SEQ ID NO: 98029 - DNA, 6 bp, Unknown
  misc_feature (1)..( 6): Result.001 file - promoters60/1021764
caataa

SEQ ID NO: 98030 - DNA, 7 bp, Unknown
  misc_feature (1)..( 7): Result.001 file - promoters60/1021764
ctattta

SEQ ID NO: 98031 - DNA, 7 bp, Unknown
  misc_feature (1)..( 7): Result.001 file - promoters60/1021764
ctattta

SEQ ID NO: 98032 - DNA, 7 bp, Unknown
  misc_feature (1)..( 7): Result.001 file - promoters60/1021764
aaatata

SEQ ID NO: 98033 - DNA, 7 bp, Unknown
  misc_feature (1)..( 7): Result.001 file - promoters60/1021764
aaagata

SEQ ID NO: 98034 - DNA, 7 bp, Unknown
  misc_feature (1)..( 7): Result.001 file - promoters60/1021764
ttaatag

SEQ ID NO: 98035 - DNA, 7 bp, Unknown
  misc_feature (1)..( 7): Result.001 file - promoters60/1021764
ttattag

SEQ ID NO: 98036 - DNA, 7 bp, Unknown
  misc_feature (1)..( 7): Result.001 file - promoters60/1021764
ttagttt

SEQ ID NO: 98037 - DNA, 7 bp, Unknown
  misc_feature (1)..( 7): Result.001 file - promoters60/1021764
ttatttt

SEQ ID NO: 98038 - DNA, 7 bp, Unknown
  misc_feature (1)..( 7): Result.001 file - promoters60/1021764
agattct

SEQ ID NO: 98039 - DNA, 7 bp, Unknown
  misc_feature (1)..( 7): Result.001 file - promoters60/1021764
agagtct

SEQ ID NO: 98040 - DNA, 6 bp, Unknown
  misc_feature (1)..( 6): Result.001 file - promoters60/1021764
acaaat

SEQ ID NO: 98041 - DNA, 6 bp, Unknown
  misc_feature (1)..( 6): Result.001 file - promoters60/1021764
acaaat

SEQ ID NO: 98042 - DNA, 7 bp, Unknown
  misc_feature (1)..( 7): Result.001 file - promoters60/1021764
cttcttt

SEQ ID NO: 98043 - DNA, 7 bp, Unknown
  misc_feature (1)..( 7): Result.001 file - promoters60/1021833
cttgttt

SEQ ID NO: 98044 - DNA, 7 bp, Unknown
  misc_feature (1)..( 7): Result.001 file - promoters60/1021833
taaatta

SEQ ID NO: 98045 - DNA, 7 bp, Unknown
  misc_feature (1)..( 7): Result.001 file - promoters60/1021833
aaaatta

SEQ ID NO: 98046 - DNA, 7 bp, Unknown
  misc_feature (1)..( 7): Result.001 file - promoters60/1021833
taaatta

SEQ ID NO: 98047 - DNA, 6 bp, Unknown
  misc_feature (1)..( 6): Result.001 file - promoters60/1021833
attttt

SEQ ID NO: 98048 - DNA, 6 bp, Unknown
  misc_feature (1)..( 6): Result.001 file - promoters60/1021833
attttt

SEQ ID NO: 98049 - DNA, 7 bp, Unknown
  misc_feature (1)..( 7): Result.001 file - promoters60/1021833
attgttt

SEQ ID NO: 98050 - DNA, 9 bp, Unknown
  misc_feature (1)..( 9): Result.001 file - promoters60/1021833
aaaaaaatt

SEQ ID NO: 98051 - DNA, 9 bp, Unknown
  misc_feature (1)..( 9): Result.001 file - promoters60/1021833
aaaacaatt

SEQ ID NO: 98052 - DNA, 9 bp, Unknown
  misc_feature (1)..( 9): Result.001 file - promoters60/1021833
aacgaaacc

SEQ ID NO: 98053 - DNA, 9 bp, Unknown
  misc_feature (1)..( 9): Result.001 file - promoters60/1021833
ttatgtatt

SEQ ID NO: 98054 - DNA, 9 bp, Unknown
  misc_feature (1)..( 9): Result.001 file - promoters60/1021833
ttatatata

SEQ ID NO: 98055 - DNA, 9 bp, Unknown
  misc_feature (1)..( 9): Result.001 file - promoters60/1021833
atatctatt

SEQ ID NO: 98056 - DNA, 8 bp, Unknown
  misc_feature (1)..( 8): Result.001 file - promoters60/1021833
aatttttg

SEQ ID NO: 98057 - DNA, 8 bp, Unknown
  misc_feature (1)..( 8): Result.001 file - promoters60/1021833
aattttta

SEQ ID NO: 98058 - DNA, 8 bp, Unknown
  misc_feature (1)..( 8): Result.001 file - promoters60/1021833
ggttttta

SEQ ID NO: 98059 - DNA, 10 bp, Unknown
  misc_feature (1)..( 10): Result.001 file - promoters60/1021833
gttttagttt

SEQ ID NO: 98060 - DNA, 10 bp, Unknown
  misc_feature (1)..( 10): Result.001 file - promoters60/1021833
tttttacttt

SEQ ID NO: 98061 - DNA, 10 bp, Unknown
  misc_feature (1)..( 10): Result.001 file - promoters60/1021862
tttttatttc

SEQ ID NO: 98062 - DNA, 12 bp, Unknown
  misc_feature (1)..( 12): Result.001 file - promoters60/1021862
ttttaatttttt

SEQ ID NO: 98063 - DNA, 12 bp, Unknown
  misc_feature (1)..( 12): Result.001 file - promoters60/1021862
aggaaattttca

SEQ ID NO: 98064 - DNA, 12 bp, Unknown
  misc_feature (1)..( 12): Result.001 file - promoters60/1021862
cttaaatttaaa

SEQ ID NO: 98065 - DNA, 12 bp, Unknown
  misc_feature (1)..( 12): Result.001 file - promoters60/1021862
atataatattca

SEQ ID NO: 98066 - DNA, 12 bp, Unknown
  misc_feature (1)..( 12): Result.001 file - promoters60/1021862
ataaaattagtc

SEQ ID NO: 98067 - DNA, 12 bp, Unknown
  misc_feature (1)..( 12): Result.001 file - promoters60/1021862
ttgcaatttaga

SEQ ID NO: 98068 - DNA, 9 bp, Unknown
  misc_feature (1)..( 9): Result.001 file - promoters60/1021862
tttaatttt

SEQ ID NO: 98069 - DNA, 9 bp, Unknown
  misc_feature (1)..( 9): Result.001 file - promoters60/1021862
gttaattaa

SEQ ID NO: 98070 - DNA, 10 bp, Unknown
  misc_feature (1)..( 10): Result.001 file - promoters60/1021862
cttaaattta

SEQ ID NO: 98071 - DNA, 10 bp, Unknown
  misc_feature (1)..( 10): Result.001 file - promoters60/1021862
agtaaatagt

SEQ ID NO: 98072 - DNA, 10 bp, Unknown
  misc_feature (1)..( 10): Result.001 file - promoters60/1021862
taataattag

SEQ ID NO: 98073 - DNA, 10 bp, Unknown
  misc_feature (1)..( 10): Result.001 file - promoters60/1021862
ttgcaattta

SEQ ID NO: 98074 - DNA, 15 bp, Unknown
  misc_feature (1)..( 15): Result.001 file - promoters60/1021862
gaaaaaaaaaaaaaa

SEQ ID NO: 98075 - DNA, 15 bp, Unknown
  misc_feature (1)..( 15): Result.001 file - promoters60/1021862
aaaacaaaataaaaa

SEQ ID NO: 98076 - DNA, 15 bp, Unknown
  misc_feature (1)..( 15): Result.001 file - promoters60/1021862
gaagaaagacgaagg

SEQ ID NO: 98077 - DNA, 15 bp, Unknown
  misc_feature (1)..( 15): Result.001 file - promoters60/1021862
caaataaataacagt

SEQ ID NO: 98078 - DNA, 15 bp, Unknown
  misc_feature (1)..( 15): Result.001 file - promoters60/1021862
caaattaagtacaca

SEQ ID NO: 98079 - DNA, 15 bp, Unknown
  misc_feature (1)..( 15): Result.001 file - promoters60/1021870
caaatttgagtgtta

SEQ ID NO: 98080 - DNA, 9 bp, Unknown
  misc_feature (1)..( 9): Result.001 file - promoters60/1021870
aaaatcgta

SEQ ID NO: 98081 - DNA, 9 bp, Unknown
  misc_feature (1)..( 9): Result.001 file - promoters60/1021870
aaaatctgg

SEQ ID NO: 98082 - DNA, 9 bp, Unknown
  misc_feature (1)..( 9): Result.001 file - promoters60/1021870
taaatttgg

SEQ ID NO: 98083 - DNA, 12 bp, Unknown
  misc_feature (1)..( 12): Result.001 file - promoters60/1021870
attcccaaaatc

SEQ ID NO: 98084 - DNA, 12 bp, Unknown
  misc_feature (1)..( 12): Result.001 file - promoters60/1021870
tggaccataatt

SEQ ID NO: 98085 - DNA, 12 bp, Unknown
  misc_feature (1)..( 12): Result.001 file - promoters60/1021870
atttccaaaatt

SEQ ID NO: 98086 - DNA, 12 bp, Unknown
  misc_feature (1)..( 12): Result.001 file - promoters60/1021987
ctaaaaataatt

SEQ ID NO: 98087 - DNA, 11 bp, Unknown
  misc_feature (1)..( 11): Result.001 file - promoters60/1021987
ttttgcgaaaa

SEQ ID NO: 98088 - DNA, 11 bp, Unknown
  misc_feature (1)..( 11): Result.001 file - promoters60/1021987
ttttgctaaaa

SEQ ID NO: 98089 - DNA, 11 bp, Unknown
  misc_feature (1)..( 11): Result.001 file - promoters60/1021987
atctgctaatg

SEQ ID NO: 98090 - DNA, 9 bp, Unknown
  misc_feature (1)..( 9): Result.001 file - promoters60/1021987
ttttggttt

SEQ ID NO: 98091 - DNA, 9 bp, Unknown
  misc_feature (1)..( 9): Result.001 file - promoters60/1021987
atttgattt

SEQ ID NO: 98092 - DNA, 9 bp, Unknown
  misc_feature (1)..( 9): Result.001 file - promoters60/1021987
atttaattt

SEQ ID NO: 98093 - DNA, 7 bp, Unknown
  misc_feature (1)..( 7): Result.001 file - promoters60/1021987
tattatc

SEQ ID NO: 98094 - DNA, 7 bp, Unknown
  misc_feature (1)..( 7): Result.001 file - promoters60/1021987
tattata

SEQ ID NO: 98095 - DNA, 7 bp, Unknown
  misc_feature (1)..( 7): Result.001 file - promoters60/1021987
aattata

SEQ ID NO: 98096 - DNA, 8 bp, Unknown
  misc_feature (1)..( 8): Result.001 file - promoters60/1021987
caaaccca

SEQ ID NO: 98097 - DNA, 8 bp, Unknown
  misc_feature (1)..( 8): Result.001 file - promoters60/1021987
caaacctg

SEQ ID NO: 98098 - DNA, 8 bp, Unknown
  misc_feature (1)..( 8): Result.001 file - promoters60/1021987
gaaagctg

SEQ ID NO: 98099 - DNA, 8 bp, Unknown
  misc_feature (1)..( 8): Result.001 file - promoters60/1021987
agagacat

SEQ ID NO: 98100 - DNA, 8 bp, Unknown
  misc_feature (1)..( 8): Result.001 file - promoters60/1021987
agatacag

SEQ ID NO: 98101 - DNA, 8 bp, Unknown
  misc_feature (1)..( 8): Result.001 file - promoters60/1021987
cgatccag

SEQ ID NO: 98102 - DNA, 9 bp, Unknown
  misc_feature (1)..( 9): Result.001 file - promoters60/1021987
tttaaagct

SEQ ID NO: 98103 - DNA, 9 bp, Unknown
  misc_feature (1)..( 9): Result.001 file - promoters60/1021987
tttcaagtt

SEQ ID NO: 98104 - DNA, 9 bp, Unknown
  misc_feature (1)..( 9): Result.001 file - promoters60/1022111
tctcacgtt

SEQ ID NO: 98105 - DNA, 8 bp, Unknown
  misc_feature (1)..( 8): Result.001 file - promoters60/1022111
gcggtaac

SEQ ID NO: 98106 - DNA, 8 bp, Unknown
  misc_feature (1)..( 8): Result.001 file - promoters60/1022111
gcggcaac

SEQ ID NO: 98107 - DNA, 7 bp, Unknown
  misc_feature (1)..( 7): Result.001 file - promoters60/1022111
tactttt

SEQ ID NO: 98108 - DNA, 7 bp, Unknown
  misc_feature (1)..( 7): Result.001 file - promoters60/1022111
tacattt

SEQ ID NO: 98109 - DNA, 9 bp, Unknown
  misc_feature (1)..( 9): Result.001 file - promoters60/1022111
ttattctaa

SEQ ID NO: 98110 - DNA, 9 bp, Unknown
  misc_feature (1)..( 9): Result.001 file - promoters60/1022111
ttattttaa

SEQ ID NO: 98111 - DNA, 8 bp, Unknown
  misc_feature (1)..( 8): Result.001 file - promoters60/1022111
caaagtat

SEQ ID NO: 98112 - DNA, 8 bp, Unknown
  misc_feature (1)..( 8): Result.001 file - promoters60/1022111
caaagtat

SEQ ID NO: 98113 - DNA, 8 bp, Unknown
  misc_feature (1)..( 8): Result.001 file - promoters60/1022111
ttattttg

SEQ ID NO: 98114 - DNA, 8 bp, Unknown
  misc_feature (1)..( 8): Result.001 file - promoters60/1022111
ttatttaa

SEQ ID NO: 98115 - DNA, 8 bp, Unknown
  misc_feature (1)..( 8): Result.001 file - promoters60/1022111
atatataa

SEQ ID NO: 98116 - DNA, 7 bp, Unknown
  misc_feature (1)..( 7): Result.001 file - promoters60/1022111
agagatt

SEQ ID NO: 98117 - DNA, 7 bp, Unknown
  misc_feature (1)..( 7): Result.001 file - promoters60/1022111
agaaatt

SEQ ID NO: 98118 - DNA, 7 bp, Unknown
  misc_feature (1)..( 7): Result.001 file - promoters60/1022111
tctcaaa

SEQ ID NO: 98119 - DNA, 7 bp, Unknown
  misc_feature (1)..( 7): Result.001 file - promoters60/1022111
tctaaaa

SEQ ID NO: 98120 - DNA, 6 bp, Unknown
  misc_feature (1)..( 6): Result.001 file - promoters60/1022111
ttagta

SEQ ID NO: 98121 - DNA, 6 bp, Unknown
  misc_feature (1)..( 6): Result.001 file - promoters60/1022111
ttagta

SEQ ID NO: 98122 - DNA, 9 bp, Unknown
  misc_feature (1)..( 9): Result.001 file - promoters60/1022111
atcatatat

SEQ ID NO: 98123 - DNA, 9 bp, Unknown
  misc_feature (1)..( 9): Result.001 file - promoters60/1022111
atcatgtat

SEQ ID NO: 98124 - DNA, 8 bp, Unknown
  misc_feature (1)..( 8): Result.001 file - promoters60/1022111
ttaataat

SEQ ID NO: 98125 - DNA, 8 bp, Unknown
  misc_feature (1)..( 8): Result.001 file - promoters60/1022111
ttattaat

SEQ ID NO: 98126 - DNA, 8 bp, Unknown
  misc_feature (1)..( 8): Result.001 file - promoters60/1022111
taacatat

SEQ ID NO: 98127 - DNA, 8 bp, Unknown
  misc_feature (1)..( 8): Result.001 file - promoters60/1022111
taacttat

SEQ ID NO: 98128 - DNA, 7 bp, Unknown
  misc_feature (1)..( 7): Result.001 file - promoters60/1022111
aataaac

SEQ ID NO: 98129 - DNA, 7 bp, Unknown
  misc_feature (1)..( 7): Result.001 file - promoters60/1022111
aataaac

SEQ ID NO: 98130 - DNA, 6 bp, Unknown
  misc_feature (1)..( 6): Result.001 file - promoters60/1022111
tatgca

SEQ ID NO: 98131 - DNA, 6 bp, Unknown
  misc_feature (1)..( 6): Result.001 file - promoters60/1022131
tatgca

SEQ ID NO: 98132 - DNA, 14 bp, Unknown
  misc_feature (1)..( 14): Result.001 file - promoters60/1022131
cgattagaaacaga

SEQ ID NO: 98133 - DNA, 14 bp, Unknown
  misc_feature (1)..( 14): Result.001 file - promoters60/1022131
attttaaaaaaaga

SEQ ID NO: 98134 - DNA, 14 bp, Unknown
  misc_feature (1)..( 14): Result.001 file - promoters60/1022131
tttttaaacgagtt

SEQ ID NO: 98135 - DNA, 14 bp, Unknown
  misc_feature (1)..( 14): Result.001 file - promoters60/1022131
aatttaaaagacca

SEQ ID NO: 98136 - DNA, 14 bp, Unknown
  misc_feature (1)..( 14): Result.001 file - promoters60/1022131
tacttaaaatggat

SEQ ID NO: 98137 - DNA, 10 bp, Unknown
  misc_feature (1)..( 10): Result.001 file - promoters60/1022131
taattttatt

SEQ ID NO: 98138 - DNA, 10 bp, Unknown
  misc_feature (1)..( 10): Result.001 file - promoters60/1022131
taattttcta

SEQ ID NO: 98139 - DNA, 10 bp, Unknown
  misc_feature (1)..( 10): Result.001 file - promoters60/1022131
atattttatt

SEQ ID NO: 98140 - DNA, 12 bp, Unknown
  misc_feature (1)..( 12): Result.001 file - promoters60/1022135
taatatgttagc

SEQ ID NO: 98141 - DNA, 9 bp, Unknown
  misc_feature (1)..( 9): Result.001 file - promoters60/1022135
ctcttgctg

SEQ ID NO: 98142 - DNA, 9 bp, Unknown
  misc_feature (1)..( 9): Result.001 file - promoters60/1022135
cccttactg

SEQ ID NO: 98143 - DNA, 9 bp, Unknown
  misc_feature (1)..( 9): Result.001 file - promoters60/1022135
ctctttctg

SEQ ID NO: 98144 - DNA, 8 bp, Unknown
  misc_feature (1)..( 8): Result.001 file - promoters60/1022135
agaatttc

SEQ ID NO: 98145 - DNA, 8 bp, Unknown
  misc_feature (1)..( 8): Result.001 file - promoters60/1022135
agagtttc

SEQ ID NO: 98146 - DNA, 8 bp, Unknown
  misc_feature (1)..( 8): Result.001 file - promoters60/1022170
tgagttta

SEQ ID NO: 98147 - DNA, 7 bp, Unknown
  misc_feature (1)..( 7): Result.001 file - promoters60/1022170
tgggcct

SEQ ID NO: 98148 - DNA, 7 bp, Unknown
  misc_feature (1)..( 7): Result.001 file - promoters60/1022170
tgggcct

SEQ ID NO: 98149 - DNA, 7 bp, Unknown
  misc_feature (1)..( 7): Result.001 file - promoters60/1022170
tgggcct

SEQ ID NO: 98150 - DNA, 11 bp, Unknown
  misc_feature (1)..( 11): Result.001 file - promoters60/1022170
ctacagaaaca

SEQ ID NO: 98151 - DNA, 11 bp, Unknown
  misc_feature (1)..( 11): Result.001 file - promoters60/1022170
ctaaagaaaaa

SEQ ID NO: 98152 - DNA, 10 bp, Unknown
  misc_feature (1)..( 10): Result.001 file - promoters60/1022170
tggagaaaaa

SEQ ID NO: 98153 - DNA, 9 bp, Unknown
  misc_feature (1)..( 9): Result.001 file - promoters60/1022170
cgagaaaag

SEQ ID NO: 98154 - DNA, 8 bp, Unknown
  misc_feature (1)..( 8): Result.001 file - promoters60/1022170
gagaaaaa

SEQ ID NO: 98155 - DNA, 8 bp, Unknown
  misc_feature (1)..( 8): Result.001 file - promoters60/1022170
gagaaaag

SEQ ID NO: 98156 - DNA, 8 bp, Unknown
  misc_feature (1)..( 8): Result.001 file - promoters60/1022192
aagaaaaa

SEQ ID NO: 98157 - DNA, 8 bp, Unknown
  misc_feature (1)..( 8): Result.001 file - promoters60/1022192
aaacgcat

SEQ ID NO: 98158 - DNA, 8 bp, Unknown
  misc_feature (1)..( 8): Result.001 file - promoters60/1022192
aaactcat

SEQ ID NO: 98159 - DNA, 7 bp, Unknown
  misc_feature (1)..( 7): Result.001 file - promoters60/1022192
aaaattg

SEQ ID NO: 98160 - DNA, 7 bp, Unknown
  misc_feature (1)..( 7): Result.001 file - promoters60/1022192
aaacttg

SEQ ID NO: 98161 - DNA, 7 bp, Unknown
  misc_feature (1)..( 7): Result.001 file - promoters60/1022192
aaaacta

SEQ ID NO: 98162 - DNA, 7 bp, Unknown
  misc_feature (1)..( 7): Result.001 file - promoters60/1022192
aaatcta

SEQ ID NO: 98163 - DNA, 7 bp, Unknown
  misc_feature (1)..( 7): Result.001 file - promoters60/1022192
ttgttta

SEQ ID NO: 98164 - DNA, 7 bp, Unknown
  misc_feature (1)..( 7): Result.001 file - promoters60/1022192
ttgttta

SEQ ID NO: 98165 - DNA, 6 bp, Unknown
  misc_feature (1)..( 6): Result.001 file - promoters60/1022192
aaacta

SEQ ID NO: 98166 - DNA, 6 bp, Unknown
  misc_feature (1)..( 6): Result.001 file - promoters60/1022192
aaacta

SEQ ID NO: 98167 - DNA, 6 bp, Unknown
  misc_feature (1)..( 6): Result.001 file - promoters60/1022192
taaaaa

SEQ ID NO: 98168 - DNA, 6 bp, Unknown
  misc_feature (1)..( 6): Result.001 file - promoters60/1022192
taaaaa

SEQ ID NO: 98169 - DNA, 7 bp, Unknown
  misc_feature (1)..( 7): Result.001 file - promoters60/1022192
tcatagt

SEQ ID NO: 98170 - DNA, 7 bp, Unknown
  misc_feature (1)..( 7): Result.001 file - promoters60/1022192
tcaaagt

SEQ ID NO: 98171 - DNA, 8 bp, Unknown
  misc_feature (1)..( 8): Result.001 file - promoters60/1022192
aaaatgtc

SEQ ID NO: 98172 - DNA, 8 bp, Unknown
  misc_feature (1)..( 8): Result.001 file - promoters60/1022192
aaaatgtc

SEQ ID NO: 98173 - DNA, 8 bp, Unknown
  misc_feature (1)..( 8): Result.001 file - promoters60/1022192
ttttcttc

SEQ ID NO: 98174 - DNA, 8 bp, Unknown
  misc_feature (1)..( 8): Result.001 file - promoters60/1022192
tttgcttc

SEQ ID NO: 98175 - DNA, 6 bp, Unknown
  misc_feature (1)..( 6): Result.001 file - promoters60/1022192
tattta

SEQ ID NO: 98176 - DNA, 6 bp, Unknown
  misc_feature (1)..( 6): Result.001 file - promoters60/1022192
tattta

SEQ ID NO: 98177 - DNA, 6 bp, Unknown
  misc_feature (1)..( 6): Result.001 file - promoters60/1022192
aattta

SEQ ID NO: 98178 - DNA, 6 bp, Unknown
  misc_feature (1)..( 6): Result.001 file - promoters60/1022192
aattta

SEQ ID NO: 98179 - DNA, 6 bp, Unknown
  misc_feature (1)..( 6): Result.001 file - promoters60/1022192
aactta

SEQ ID NO: 98180 - DNA, 6 bp, Unknown
  misc_feature (1)..( 6): Result.001 file - promoters60/1022192
aactta

SEQ ID NO: 98181 - DNA, 9 bp, Unknown
  misc_feature (1)..( 9): Result.001 file - promoters60/1022192
ctttttaaa

SEQ ID NO: 98182 - DNA, 9 bp, Unknown
  misc_feature (1)..( 9): Result.001 file - promoters60/1022192
cttttgaaa

SEQ ID NO: 98183 - DNA, 6 bp, Unknown
  misc_feature (1)..( 6): Result.001 file - promoters60/1022192
tatatt

SEQ ID NO: 98184 - DNA, 6 bp, Unknown
  misc_feature (1)..( 6): Result.001 file - promoters60/1022192
tatatt

SEQ ID NO: 98185 - DNA, 10 bp, Unknown
  misc_feature (1)..( 10): Result.001 file - promoters60/1022192
ttctaatcaa

SEQ ID NO: 98186 - DNA, 10 bp, Unknown
  misc_feature (1)..( 10): Result.001 file - promoters60/1022192
ttctagtcaa

SEQ ID NO: 98187 - DNA, 8 bp, Unknown
  misc_feature (1)..( 8): Result.001 file - promoters60/1022192
ctaaaaag

SEQ ID NO: 98188 - DNA, 8 bp, Unknown
  misc_feature (1)..( 8): Result.001 file - promoters60/1022245
ctaaaaag

SEQ ID NO: 98189 - DNA, 7 bp, Unknown
  misc_feature (1)..( 7): Result.001 file - promoters60/1022245
aaaatca

SEQ ID NO: 98190 - DNA, 7 bp, Unknown
  misc_feature (1)..( 7): Result.001 file - promoters60/1022245
aaattca

SEQ ID NO: 98191 - DNA, 7 bp, Unknown
  misc_feature (1)..( 7): Result.001 file - promoters60/1022245
aaaatcc

SEQ ID NO: 98192 - DNA, 7 bp, Unknown
  misc_feature (1)..( 7): Result.001 file - promoters60/1022252
aaagtca

SEQ ID NO: 98193 - DNA, 7 bp, Unknown
  misc_feature (1)..( 7): Result.001 file - promoters60/1022252
ggcactt

SEQ ID NO: 98194 - DNA, 7 bp, Unknown
  misc_feature (1)..( 7): Result.001 file - promoters60/1022252
ggctctt

SEQ ID NO: 98195 - DNA, 8 bp, Unknown
  misc_feature (1)..( 8): Result.001 file - promoters60/1022252
ttatcttt

SEQ ID NO: 98196 - DNA, 8 bp, Unknown
  misc_feature (1)..( 8): Result.001 file - promoters60/1022252
ttattttt

SEQ ID NO: 98197 - DNA, 7 bp, Unknown
  misc_feature (1)..( 7): Result.001 file - promoters60/1022252
tttgaag

SEQ ID NO: 98198 - DNA, 7 bp, Unknown
  misc_feature (1)..( 7): Result.001 file - promoters60/1022252
ttttaag

SEQ ID NO: 98199 - DNA, 8 bp, Unknown
  misc_feature (1)..( 8): Result.001 file - promoters60/1022252
taaaaatt

SEQ ID NO: 98200 - DNA, 8 bp, Unknown
  misc_feature (1)..( 8): Result.001 file - promoters60/1022252
aaaaaatt

SEQ ID NO: 98201 - DNA, 8 bp, Unknown
  misc_feature (1)..( 8): Result.001 file - promoters60/1022252
taataatt

SEQ ID NO: 98202 - DNA, 6 bp, Unknown
  misc_feature (1)..( 6): Result.001 file - promoters60/1022252
tacaaa

SEQ ID NO: 98203 - DNA, 6 bp, Unknown
  misc_feature (1)..( 6): Result.001 file - promoters60/1022252
tacaaa

SEQ ID NO: 98204 - DNA, 6 bp, Unknown
  misc_feature (1)..( 6): Result.001 file - promoters60/1022252
agaaaa

SEQ ID NO: 98205 - DNA, 6 bp, Unknown
  misc_feature (1)..( 6): Result.001 file - promoters60/1022252
agaaaa

SEQ ID NO: 98206 - DNA, 6 bp, Unknown
  misc_feature (1)..( 6): Result.001 file - promoters60/1022252
aaagta

SEQ ID NO: 98207 - DNA, 6 bp, Unknown
  misc_feature (1)..( 6): Result.001 file - promoters60/1022252
aaagta

SEQ ID NO: 98208 - DNA, 8 bp, Unknown
  misc_feature (1)..( 8): Result.001 file - promoters60/1022252
aaaaaaat

SEQ ID NO: 98209 - DNA, 8 bp, Unknown
  misc_feature (1)..( 8): Result.001 file - promoters60/1022252
aaaaaaaa

SEQ ID NO: 98210 - DNA, 8 bp, Unknown
  misc_feature (1)..( 8): Result.001 file - promoters60/1022252
aaaagatt

SEQ ID NO: 98211 - DNA, 7 bp, Unknown
  misc_feature (1)..( 7): Result.001 file - promoters60/1022252
aaaatta

SEQ ID NO: 98212 - DNA, 7 bp, Unknown
  misc_feature (1)..( 7): Result.001 file - promoters60/1022252
gaaatta

SEQ ID NO: 98213 - DNA, 7 bp, Unknown
  misc_feature (1)..( 7): Result.001 file - promoters60/1022252
aaaattt

SEQ ID NO: 98214 - DNA, 10 bp, Unknown
  misc_feature (1)..( 10): Result.001 file - promoters60/1022252
taaatgtatt

SEQ ID NO: 98215 - DNA, 10 bp, Unknown
  misc_feature (1)..( 10): Result.001 file - promoters60/1022252
taaatctatt

SEQ ID NO: 98216 - DNA, 7 bp, Unknown
  misc_feature (1)..( 7): Result.001 file - promoters60/1022252
ataaaag

SEQ ID NO: 98217 - DNA, 7 bp, Unknown
  misc_feature (1)..( 7): Result.001 file - promoters60/1022252
ataaaag

SEQ ID NO: 98218 - DNA, 6 bp, Unknown
  misc_feature (1)..( 6): Result.001 file - promoters60/1022252
aaaaag

SEQ ID NO: 98219 - DNA, 6 bp, Unknown
  misc_feature (1)..( 6): Result.001 file - promoters60/1022252
aaaaag

SEQ ID NO: 98220 - DNA, 7 bp, Unknown
  misc_feature (1)..( 7): Result.001 file - promoters60/1022252
aattatt

SEQ ID NO: 98221 - DNA, 7 bp, Unknown
  misc_feature (1)..( 7): Result.001 file - promoters60/1022252
aattatt

SEQ ID NO: 98222 - DNA, 6 bp, Unknown
  misc_feature (1)..( 6): Result.001 file - promoters60/1022252
atggaa

SEQ ID NO: 98223 - DNA, 6 bp, Unknown
  misc_feature (1)..( 6): Result.001 file - promoters60/1022252
atggaa

SEQ ID NO: 98224 - DNA, 6 bp, Unknown
  misc_feature (1)..( 6): Result.001 file - promoters60/1022252
ttattt

SEQ ID NO: 98225 - DNA, 6 bp, Unknown
  misc_feature (1)..( 6): Result.001 file - promoters60/1022252
ttattt

SEQ ID NO: 98226 - DNA, 6 bp, Unknown
  misc_feature (1)..( 6): Result.001 file - promoters60/1022252
cacaat

SEQ ID NO: 98227 - DNA, 6 bp, Unknown
  misc_feature (1)..( 6): Result.001 file - promoters60/1022252
cacaat

SEQ ID NO: 98228 - DNA, 7 bp, Unknown
  misc_feature (1)..( 7): Result.001 file - promoters60/1022252
aatcaca

SEQ ID NO: 98229 - DNA, 7 bp, Unknown
  misc_feature (1)..( 7): Result.001 file - promoters60/1022252
aattaca

SEQ ID NO: 98230 - DNA, 6 bp, Unknown
  misc_feature (1)..( 6): Result.001 file - promoters60/1022252
ttttaa

SEQ ID NO: 98231 - DNA, 6 bp, Unknown
  misc_feature (1)..( 6): Result.001 file - promoters60/1022252
ttttaa

SEQ ID NO: 98232 - DNA, 7 bp, Unknown
  misc_feature (1)..( 7): Result.001 file - promoters60/1022252
aaggttt

SEQ ID NO: 98233 - DNA, 7 bp, Unknown
  misc_feature (1)..( 7): Result.001 file - promoters60/1022252
aagattt

SEQ ID NO: 98234 - DNA, 8 bp, Unknown
  misc_feature (1)..( 8): Result.001 file - promoters60/1022252
aacttttt

SEQ ID NO: 98235 - DNA, 8 bp, Unknown
  misc_feature (1)..( 8): Result.001 file - promoters60/1022252
aacatttt

SEQ ID NO: 98236 - DNA, 11 bp, Unknown
  misc_feature (1)..( 11): Result.001 file - promoters60/1022252
atataaacaaa

SEQ ID NO: 98237 - DNA, 11 bp, Unknown
  misc_feature (1)..( 11): Result.001 file - promoters60/1022252
atataatcaaa

SEQ ID NO: 98238 - DNA, 7 bp, Unknown
  misc_feature (1)..( 7): Result.001 file - promoters60/1022252
ccaaaaa

SEQ ID NO: 98239 - DNA, 7 bp, Unknown
  misc_feature (1)..( 7): Result.001 file - promoters60/1022256
ccaaaaa

SEQ ID NO: 98240 - DNA, 7 bp, Unknown
  misc_feature (1)..( 7): Result.001 file - promoters60/1022256
aaaagaa

SEQ ID NO: 98241 - DNA, 7 bp, Unknown
  misc_feature (1)..( 7): Result.001 file - promoters60/1022256
aaaagac

SEQ ID NO: 98242 - DNA, 7 bp, Unknown
  misc_feature (1)..( 7): Result.001 file - promoters60/1022256
aaaaact

SEQ ID NO: 98243 - DNA, 11 bp, Unknown
  misc_feature (1)..( 11): Result.001 file - promoters60/1022256
aaatattaaat

SEQ ID NO: 98244 - DNA, 11 bp, Unknown
  misc_feature (1)..( 11): Result.001 file - promoters60/1022256
aaacatttaat

SEQ ID NO: 98245 - DNA, 11 bp, Unknown
  misc_feature (1)..( 11): Result.001 file - promoters60/1022256
atttattaatt

SEQ ID NO: 98246 - DNA, 10 bp, Unknown
  misc_feature (1)..( 10): Result.001 file - promoters60/1022256
agataatgag

SEQ ID NO: 98247 - DNA, 10 bp, Unknown
  misc_feature (1)..( 10): Result.001 file - promoters60/1022256
ttataaagag

SEQ ID NO: 98248 - DNA, 10 bp, Unknown
  misc_feature (1)..( 10): Result.001 file - promoters60/1022256
agataatttt

SEQ ID NO: 98249 - DNA, 8 bp, Unknown
  misc_feature (1)..( 8): Result.001 file - promoters60/1022256
ttttttca

SEQ ID NO: 98250 - DNA, 8 bp, Unknown
  misc_feature (1)..( 8): Result.001 file - promoters60/1022256
ttttatca

SEQ ID NO: 98251 - DNA, 8 bp, Unknown
  misc_feature (1)..( 8): Result.001 file - promoters60/1022256
ttttattt

SEQ ID NO: 98252 - DNA, 11 bp, Unknown
  misc_feature (1)..( 11): Result.001 file - promoters60/1022256
tatatatatac

SEQ ID NO: 98253 - DNA, 11 bp, Unknown
  misc_feature (1)..( 11): Result.001 file - promoters60/1022256
tatataaatac

SEQ ID NO: 98254 - DNA, 11 bp, Unknown
  misc_feature (1)..( 11): Result.001 file - promoters60/1022256
gttataaaacc

SEQ ID NO: 98255 - DNA, 8 bp, Unknown
  misc_feature (1)..( 8): Result.001 file - promoters60/1022256
taaattaa

SEQ ID NO: 98256 - DNA, 8 bp, Unknown
  misc_feature (1)..( 8): Result.001 file - promoters60/1022256
aaaactaa

SEQ ID NO: 98257 - DNA, 9 bp, Unknown
  misc_feature (1)..( 9): Result.001 file - promoters60/1022268
aaagactga

SEQ ID NO: 98258 - DNA, 6 bp, Unknown
  misc_feature (1)..( 6): Result.001 file - promoters60/1022268
aaacca

SEQ ID NO: 98259 - DNA, 6 bp, Unknown
  misc_feature (1)..( 6): Result.001 file - promoters60/1022268
aaacca

SEQ ID NO: 98260 - DNA, 6 bp, Unknown
  misc_feature (1)..( 6): Result.001 file - promoters60/1022268
aagatt

SEQ ID NO: 98261 - DNA, 6 bp, Unknown
  misc_feature (1)..( 6): Result.001 file - promoters60/1022268
aagatt

SEQ ID NO: 98262 - DNA, 9 bp, Unknown
  misc_feature (1)..( 9): Result.001 file - promoters60/1022268
atcctccga

SEQ ID NO: 98263 - DNA, 9 bp, Unknown
  misc_feature (1)..( 9): Result.001 file - promoters60/1022268
ctccgccga

SEQ ID NO: 98264 - DNA, 9 bp, Unknown
  misc_feature (1)..( 9): Result.001 file - promoters60/1022268
ctccggcga

SEQ ID NO: 98265 - DNA, 6 bp, Unknown
  misc_feature (1)..( 6): Result.001 file - promoters60/1022268
tcacca

SEQ ID NO: 98266 - DNA, 6 bp, Unknown
  misc_feature (1)..( 6): Result.001 file - promoters60/1022268
tcacca

SEQ ID NO: 98267 - DNA, 6 bp, Unknown
  misc_feature (1)..( 6): Result.001 file - promoters60/1022268
aaaccg

SEQ ID NO: 98268 - DNA, 6 bp, Unknown
  misc_feature (1)..( 6): Result.001 file - promoters60/1022268
aaaccg

SEQ ID NO: 98269 - DNA, 9 bp, Unknown
  misc_feature (1)..( 9): Result.001 file - promoters60/1022268
ctaaaccgg

SEQ ID NO: 98270 - DNA, 9 bp, Unknown
  misc_feature (1)..( 9): Result.001 file - promoters60/1022268
ctaaaccgg

SEQ ID NO: 98271 - DNA, 8 bp, Unknown
  misc_feature (1)..( 8): Result.001 file - promoters60/1022268
atcactgg

SEQ ID NO: 98272 - DNA, 8 bp, Unknown
  misc_feature (1)..( 8): Result.001 file - promoters60/1022268
atcgctgg

SEQ ID NO: 98273 - DNA, 6 bp, Unknown
  misc_feature (1)..( 6): Result.001 file - promoters60/1022268
tctaca

SEQ ID NO: 98274 - DNA, 6 bp, Unknown
  misc_feature (1)..( 6): Result.001 file - promoters60/1022268
tctaca

SEQ ID NO: 98275 - DNA, 6 bp, Unknown
  misc_feature (1)..( 6): Result.001 file - promoters60/1022268
tctccg

SEQ ID NO: 98276 - DNA, 6 bp, Unknown
  misc_feature (1)..( 6): Result.001 file - promoters60/1022268
tctccg

SEQ ID NO: 98277 - DNA, 7 bp, Unknown
  misc_feature (1)..( 7): Result.001 file - promoters60/1022268
gattcca

SEQ ID NO: 98278 - DNA, 7 bp, Unknown
  misc_feature (1)..( 7): Result.001 file - promoters60/1022292
gatacca

SEQ ID NO: 98279 - DNA, 7 bp, Unknown
  misc_feature (1)..( 7): Result.001 file - promoters60/1022292
gaaattt

SEQ ID NO: 98280 - DNA, 7 bp, Unknown
  misc_feature (1)..( 7): Result.001 file - promoters60/1022292
aaaattt

SEQ ID NO: 98281 - DNA, 8 bp, Unknown
  misc_feature (1)..( 8): Result.001 file - promoters60/1022292
aaagatta

SEQ ID NO: 98282 - DNA, 8 bp, Unknown
  misc_feature (1)..( 8): Result.001 file - promoters60/1022292
aaagatcc

SEQ ID NO: 98283 - DNA, 8 bp, Unknown
  misc_feature (1)..( 8): Result.001 file - promoters60/1022292
caaaattt

SEQ ID NO: 98284 - DNA, 8 bp, Unknown
  misc_feature (1)..( 8): Result.001 file - promoters60/1022292
gaaaattt

SEQ ID NO: 98285 - DNA, 13 bp, Unknown
  misc_feature (1)..( 13): Result.001 file - promoters60/1022292
tttaaaaacttct

SEQ ID NO: 98286 - DNA, 13 bp, Unknown
  misc_feature (1)..( 13): Result.001 file - promoters60/1022292
gttaaaaataaac

SEQ ID NO: 98287 - DNA, 13 bp, Unknown
  misc_feature (1)..( 13): Result.001 file - promoters60/1022292
tgtaaaaattata

SEQ ID NO: 98288 - DNA, 13 bp, Unknown
  misc_feature (1)..( 13): Result.001 file - promoters60/1022292
cttcaaacaaaac

SEQ ID NO: 98289 - DNA, 13 bp, Unknown
  misc_feature (1)..( 13): Result.001 file - promoters60/1022292
atgaaaagcttct

SEQ ID NO: 98290 - DNA, 13 bp, Unknown
  misc_feature (1)..( 13): Result.001 file - promoters60/1022296
tttaaaaacttct

SEQ ID NO: 98291 - DNA, 10 bp, Unknown
  misc_feature (1)..( 10): Result.001 file - promoters60/1022296
cagaaggaaa

SEQ ID NO: 98292 - DNA, 10 bp, Unknown
  misc_feature (1)..( 10): Result.001 file - promoters60/1022296
cagatggaat

SEQ ID NO: 98293 - DNA, 9 bp, Unknown
  misc_feature (1)..( 9): Result.001 file - promoters60/1022296
tgaatgaat

SEQ ID NO: 98294 - DNA, 10 bp, Unknown
  misc_feature (1)..( 10): Result.001 file - promoters60/1022324
acaatggaat

SEQ ID NO: 98295 - DNA, 11 bp, Unknown
  misc_feature (1)..( 11): Result.001 file - promoters60/1022324
taattctcgtt

SEQ ID NO: 98296 - DNA, 11 bp, Unknown
  misc_feature (1)..( 11): Result.001 file - promoters60/1022324
aaattctgagg

SEQ ID NO: 98297 - DNA, 11 bp, Unknown
  misc_feature (1)..( 11): Result.001 file - promoters60/1022324
cgattctgtaa

SEQ ID NO: 98298 - DNA, 11 bp, Unknown
  misc_feature (1)..( 11): Result.001 file - promoters60/1022324
gaattcttaga

SEQ ID NO: 98299 - DNA, 11 bp, Unknown
  misc_feature (1)..( 11): Result.001 file - promoters60/1022324
gaaatctccct

SEQ ID NO: 98300 - DNA, 11 bp, Unknown
  misc_feature (1)..( 11): Result.001 file - promoters60/1022383
cccttctttaa

SEQ ID NO: 98301 - DNA, 6 bp, Unknown
  misc_feature (1)..( 6): Result.001 file - promoters60/1022383
attgcc

SEQ ID NO: 98302 - DNA, 6 bp, Unknown
  misc_feature (1)..( 6): Result.001 file - promoters60/1022383
attgcc

SEQ ID NO: 98303 - DNA, 6 bp, Unknown
  misc_feature (1)..( 6): Result.001 file - promoters60/1022383
tttcaa

SEQ ID NO: 98304 - DNA, 6 bp, Unknown
  misc_feature (1)..( 6): Result.001 file - promoters60/1022383
tttcaa

SEQ ID NO: 98305 - DNA, 6 bp, Unknown
  misc_feature (1)..( 6): Result.001 file - promoters60/1022383
ctcatt

SEQ ID NO: 98306 - DNA, 6 bp, Unknown
  misc_feature (1)..( 6): Result.001 file - promoters60/1022383
ctcatt

SEQ ID NO: 98307 - DNA, 7 bp, Unknown
  misc_feature (1)..( 7): Result.001 file - promoters60/1022383
ctcttcc

SEQ ID NO: 98308 - DNA, 7 bp, Unknown
  misc_feature (1)..( 7): Result.001 file - promoters60/1022383
ctcctcc

SEQ ID NO: 98309 - DNA, 6 bp, Unknown
  misc_feature (1)..( 6): Result.001 file - promoters60/1022383
taagtt

SEQ ID NO: 98310 - DNA, 6 bp, Unknown
  misc_feature (1)..( 6): Result.001 file - promoters60/1022383
taagtt

SEQ ID NO: 98311 - DNA, 9 bp, Unknown
  misc_feature (1)..( 9): Result.001 file - promoters60/1022383
tcaaatgaa

SEQ ID NO: 98312 - DNA, 9 bp, Unknown
  misc_feature (1)..( 9): Result.001 file - promoters60/1022383
caaaatgaa

SEQ ID NO: 98313 - DNA, 9 bp, Unknown
  misc_feature (1)..( 9): Result.001 file - promoters60/1022383
caaaatgta

SEQ ID NO: 98314 - DNA, 6 bp, Unknown
  misc_feature (1)..( 6): Result.001 file - promoters60/1022383
tatcca

SEQ ID NO: 98315 - DNA, 6 bp, Unknown
  misc_feature (1)..( 6): Result.001 file - promoters60/1022383
tatcca

SEQ ID NO: 98316 - DNA, 7 bp, Unknown
  misc_feature (1)..( 7): Result.001 file - promoters60/1022383
cttgatt

SEQ ID NO: 98317 - DNA, 7 bp, Unknown
  misc_feature (1)..( 7): Result.001 file - promoters60/1022383
ctttatt

SEQ ID NO: 98318 - DNA, 7 bp, Unknown
  misc_feature (1)..( 7): Result.001 file - promoters60/1022383
cactaca

SEQ ID NO: 98319 - DNA, 7 bp, Unknown
  misc_feature (1)..( 7): Result.001 file - promoters60/1022383
caccaca

SEQ ID NO: 98320 - DNA, 7 bp, Unknown
  misc_feature (1)..( 7): Result.001 file - promoters60/1022383
agatctc

SEQ ID NO: 98321 - DNA, 7 bp, Unknown
  misc_feature (1)..( 7): Result.001 file - promoters60/1022383
agatctc

SEQ ID NO: 98322 - DNA, 6 bp, Unknown
  misc_feature (1)..( 6): Result.001 file - promoters60/1022383
aattaa

SEQ ID NO: 98323 - DNA, 6 bp, Unknown
  misc_feature (1)..( 6): Result.001 file - promoters60/1022383
aattaa

SEQ ID NO: 98324 - DNA, 6 bp, Unknown
  misc_feature (1)..( 6): Result.001 file - promoters60/1022383
tactaa

SEQ ID NO: 98325 - DNA, 6 bp, Unknown
  misc_feature (1)..( 6): Result.001 file - promoters60/1022383
tactaa

SEQ ID NO: 98326 - DNA, 6 bp, Unknown
  misc_feature (1)..( 6): Result.001 file - promoters60/1022383
aaaata

SEQ ID NO: 98327 - DNA, 6 bp, Unknown
  misc_feature (1)..( 6): Result.001 file - promoters60/1022383
aaaata

SEQ ID NO: 98328 - DNA, 8 bp, Unknown
  misc_feature (1)..( 8): Result.001 file - promoters60/1022383
ttaagttt

SEQ ID NO: 98329 - DNA, 8 bp, Unknown
  misc_feature (1)..( 8): Result.001 file - promoters60/1022383
ttaaattt

SEQ ID NO: 98330 - DNA, 8 bp, Unknown
  misc_feature (1)..( 8): Result.001 file - promoters60/1022383
ttcaaaaa

SEQ ID NO: 98331 - DNA, 8 bp, Unknown
  misc_feature (1)..( 8): Result.001 file - promoters60/1022401
ttcacaaa

SEQ ID NO: 98332 - DNA, 11 bp, Unknown
  misc_feature (1)..( 11): Result.001 file - promoters60/1022401
acatatatact

SEQ ID NO: 98333 - DNA, 11 bp, Unknown
  misc_feature (1)..( 11): Result.001 file - promoters60/1022401
gtatatatata

SEQ ID NO: 98334 - DNA, 11 bp, Unknown
  misc_feature (1)..( 11): Result.001 file - promoters60/1022401
tggtatataaa

SEQ ID NO: 98335 - DNA, 11 bp, Unknown
  misc_feature (1)..( 11): Result.001 file - promoters60/1022401
tgatatataaa

SEQ ID NO: 98336 - DNA, 11 bp, Unknown
  misc_feature (1)..( 11): Result.001 file - promoters60/1022401
cccaataaaaa

SEQ ID NO: 98337 - DNA, 11 bp, Unknown
  misc_feature (1)..( 11): Result.001 file - promoters60/1022401
taatataaagg

SEQ ID NO: 98338 - DNA, 11 bp, Unknown
  misc_feature (1)..( 11): Result.001 file - promoters60/1022401
acataaagaca

SEQ ID NO: 98339 - DNA, 11 bp, Unknown
  misc_feature (1)..( 11): Result.001 file - promoters60/1022401
tcataaatttt

SEQ ID NO: 98340 - DNA, 11 bp, Unknown
  misc_feature (1)..( 11): Result.001 file - promoters60/1022401
tcataaacatg

SEQ ID NO: 98341 - DNA, 11 bp, Unknown
  misc_feature (1)..( 11): Result.001 file - promoters60/1022401
aaataaatatc

SEQ ID NO: 98342 - DNA, 11 bp, Unknown
  misc_feature (1)..( 11): Result.001 file - promoters60/1022401
ctctaaaaaaa

SEQ ID NO: 98343 - DNA, 11 bp, Unknown
  misc_feature (1)..( 11): Result.001 file - promoters60/1022401
tcttaaagata

SEQ ID NO: 98344 - DNA, 11 bp, Unknown
  misc_feature (1)..( 11): Result.001 file - promoters60/1022401
taatcttttgg

SEQ ID NO: 98345 - DNA, 11 bp, Unknown
  misc_feature (1)..( 11): Result.001 file - promoters60/1022401
taatgtttttc

SEQ ID NO: 98346 - DNA, 11 bp, Unknown
  misc_feature (1)..( 11): Result.001 file - promoters60/1022401
atttcttttca

SEQ ID NO: 98347 - DNA, 11 bp, Unknown
  misc_feature (1)..( 11): Result.001 file - promoters60/1022401
aactcttttga

SEQ ID NO: 98348 - DNA, 11 bp, Unknown
  misc_feature (1)..( 11): Result.001 file - promoters60/1022401
ttttttttttt

SEQ ID NO: 98349 - DNA, 11 bp, Unknown
  misc_feature (1)..( 11): Result.001 file - promoters60/1022401
ggttcttcttc

SEQ ID NO: 98350 - DNA, 21 bp, Unknown
  misc_feature (1)..( 21): Result.001 file - promoters60/1022401
taattattattttaattagag

SEQ ID NO: 98351 - DNA, 21 bp, Unknown
  misc_feature (1)..( 21): Result.001 file - promoters60/1022401
taaagcccattataatgatcc

SEQ ID NO: 98352 - DNA, 21 bp, Unknown
  misc_feature (1)..( 21): Result.001 file - promoters60/1022401
tttatgggcctttatttatta

SEQ ID NO: 98353 - DNA, 21 bp, Unknown
  misc_feature (1)..( 21): Result.001 file - promoters60/1022401
taaagcccaatatactgctcg

SEQ ID NO: 98354 - DNA, 21 bp, Unknown
  misc_feature (1)..( 21): Result.001 file - promoters60/1022401
gttaaaatcgtataattcagg

SEQ ID NO: 98355 - DNA, 21 bp, Unknown
  misc_feature (1)..( 21): Result.001 file - promoters60/1022401
ccattactggtaaatttgaag

SEQ ID NO: 98356 - DNA, 21 bp, Unknown
  misc_feature (1)..( 21): Result.001 file - promoters60/1022474
agcttcgattaaaatttgggt

SEQ ID NO: 98357 - DNA, 7 bp, Unknown
  misc_feature (1)..( 7): Result.001 file - promoters60/1022474
gcacagc

SEQ ID NO: 98358 - DNA, 7 bp, Unknown
  misc_feature (1)..( 7): Result.001 file - promoters60/1022474
gcagagc

SEQ ID NO: 98359 - DNA, 8 bp, Unknown
  misc_feature (1)..( 8): Result.001 file - promoters60/1022474
aaatcggg

SEQ ID NO: 98360 - DNA, 8 bp, Unknown
  misc_feature (1)..( 8): Result.001 file - promoters60/1022474
aaattggg

SEQ ID NO: 98361 - DNA, 7 bp, Unknown
  misc_feature (1)..( 7): Result.001 file - promoters60/1022474
ttagagt

SEQ ID NO: 98362 - DNA, 7 bp, Unknown
  misc_feature (1)..( 7): Result.001 file - promoters60/1022474
ttaaagt

SEQ ID NO: 98363 - DNA, 9 bp, Unknown
  misc_feature (1)..( 9): Result.001 file - promoters60/1022474
atggctgaa

SEQ ID NO: 98364 - DNA, 9 bp, Unknown
  misc_feature (1)..( 9): Result.001 file - promoters60/1022474
atggttgaa

SEQ ID NO: 98365 - DNA, 7 bp, Unknown
  misc_feature (1)..( 7): Result.001 file - promoters60/1022474
aagtaaa

SEQ ID NO: 98366 - DNA, 7 bp, Unknown
  misc_feature (1)..( 7): Result.001 file - promoters60/1022546
aagaaaa

SEQ ID NO: 98367 - DNA, 6 bp, Unknown
  misc_feature (1)..( 6): Result.001 file - promoters60/1022546
actgtt

SEQ ID NO: 98368 - DNA, 6 bp, Unknown
  misc_feature (1)..( 6): Result.001 file - promoters60/1022546
actgtt

SEQ ID NO: 98369 - DNA, 8 bp, Unknown
  misc_feature (1)..( 8): Result.001 file - promoters60/1022546
tcgatttt

SEQ ID NO: 98370 - DNA, 8 bp, Unknown
  misc_feature (1)..( 8): Result.001 file - promoters60/1022546
aagatttt

SEQ ID NO: 98371 - DNA, 8 bp, Unknown
  misc_feature (1)..( 8): Result.001 file - promoters60/1022546
aagattta

SEQ ID NO: 98372 - DNA, 6 bp, Unknown
  misc_feature (1)..( 6): Result.001 file - promoters60/1022546
gtttag

SEQ ID NO: 98373 - DNA, 6 bp, Unknown
  misc_feature (1)..( 6): Result.001 file - promoters60/1022546
gtttag

SEQ ID NO: 98374 - DNA, 6 bp, Unknown
  misc_feature (1)..( 6): Result.001 file - promoters60/1022546
ttattt

SEQ ID NO: 98375 - DNA, 6 bp, Unknown
  misc_feature (1)..( 6): Result.001 file - promoters60/1022546
ttattt

SEQ ID NO: 98376 - DNA, 6 bp, Unknown
  misc_feature (1)..( 6): Result.001 file - promoters60/1022546
tttgac

SEQ ID NO: 98377 - DNA, 6 bp, Unknown
  misc_feature (1)..( 6): Result.001 file - promoters60/1022546
tttgac

SEQ ID NO: 98378 - DNA, 8 bp, Unknown
  misc_feature (1)..( 8): Result.001 file - promoters60/1022546
caaccaat

SEQ ID NO: 98379 - DNA, 8 bp, Unknown
  misc_feature (1)..( 8): Result.001 file - promoters60/1022546
caaccaat

SEQ ID NO: 98380 - DNA, 8 bp, Unknown
  misc_feature (1)..( 8): Result.001 file - promoters60/1022546
aaaccaaa

SEQ ID NO: 98381 - DNA, 7 bp, Unknown
  misc_feature (1)..( 7): Result.001 file - promoters60/1022546
aatttca

SEQ ID NO: 98382 - DNA, 7 bp, Unknown
  misc_feature (1)..( 7): Result.001 file - promoters60/1022546
aatttca

SEQ ID NO: 98383 - DNA, 7 bp, Unknown
  misc_feature (1)..( 7): Result.001 file - promoters60/1022546
atctcaa

SEQ ID NO: 98384 - DNA, 7 bp, Unknown
  misc_feature (1)..( 7): Result.001 file - promoters60/1022546
atctcaa

SEQ ID NO: 98385 - DNA, 6 bp, Unknown
  misc_feature (1)..( 6): Result.001 file - promoters60/1022546
ctttat

SEQ ID NO: 98386 - DNA, 6 bp, Unknown
  misc_feature (1)..( 6): Result.001 file - promoters60/1022546
ctttat

SEQ ID NO: 98387 - DNA, 7 bp, Unknown
  misc_feature (1)..( 7): Result.001 file - promoters60/1022546
ttcccac

SEQ ID NO: 98388 - DNA, 7 bp, Unknown
  misc_feature (1)..( 7): Result.001 file - promoters60/1022546
ttcacac

SEQ ID NO: 98389 - DNA, 7 bp, Unknown
  misc_feature (1)..( 7): Result.001 file - promoters60/1022546
tttccgt

SEQ ID NO: 98390 - DNA, 7 bp, Unknown
  misc_feature (1)..( 7): Result.001 file - promoters60/1022546
tttgcgt

SEQ ID NO: 98391 - DNA, 7 bp, Unknown
  misc_feature (1)..( 7): Result.001 file - promoters60/1022546
accaaaa

SEQ ID NO: 98392 - DNA, 7 bp, Unknown
  misc_feature (1)..( 7): Result.001 file - promoters60/1022546
accaaaa

SEQ ID NO: 98393 - DNA, 9 bp, Unknown
  misc_feature (1)..( 9): Result.001 file - promoters60/1022546
atttcccat

SEQ ID NO: 98394 - DNA, 9 bp, Unknown
  misc_feature (1)..( 9): Result.001 file - promoters60/1022546
atttcacat

SEQ ID NO: 98395 - DNA, 6 bp, Unknown
  misc_feature (1)..( 6): Result.001 file - promoters60/1022546
aaccac

SEQ ID NO: 98396 - DNA, 6 bp, Unknown
  misc_feature (1)..( 6): Result.001 file - promoters60/1022546
aaccac

SEQ ID NO: 98397 - DNA, 6 bp, Unknown
  misc_feature (1)..( 6): Result.001 file - promoters60/1022546
aggctt

SEQ ID NO: 98398 - DNA, 6 bp, Unknown
  misc_feature (1)..( 6): Result.001 file - promoters60/1022546
aggctt

SEQ ID NO: 98399 - DNA, 6 bp, Unknown
  misc_feature (1)..( 6): Result.001 file - promoters60/1022546
caaaaa

SEQ ID NO: 98400 - DNA, 6 bp, Unknown
  misc_feature (1)..( 6): Result.001 file - promoters60/1022546
caaaaa

SEQ ID NO: 98401 - DNA, 7 bp, Unknown
  misc_feature (1)..( 7): Result.001 file - promoters60/1022546
taacata

SEQ ID NO: 98402 - DNA, 7 bp, Unknown
  misc_feature (1)..( 7): Result.001 file - promoters60/1022546
taaaata

SEQ ID NO: 98403 - DNA, 6 bp, Unknown
  misc_feature (1)..( 6): Result.001 file - promoters60/1022546
aaaaaa

SEQ ID NO: 98404 - DNA, 6 bp, Unknown
  misc_feature (1)..( 6): Result.001 file - promoters60/1022546
aaaaaa

SEQ ID NO: 98405 - DNA, 6 bp, Unknown
  misc_feature (1)..( 6): Result.001 file - promoters60/1022546
ctctct

SEQ ID NO: 98406 - DNA, 6 bp, Unknown
  misc_feature (1)..( 6): Result.001 file - promoters60/1022546
ctctct

SEQ ID NO: 98407 - DNA, 7 bp, Unknown
  misc_feature (1)..( 7): Result.001 file - promoters60/1022546
tctcttt

SEQ ID NO: 98408 - DNA, 7 bp, Unknown
  misc_feature (1)..( 7): Result.001 file - promoters60/1022546
tctattt

SEQ ID NO: 98409 - DNA, 6 bp, Unknown
  misc_feature (1)..( 6): Result.001 file - promoters60/1022546
tttaca

SEQ ID NO: 98410 - DNA, 6 bp, Unknown
  misc_feature (1)..( 6): Result.001 file - promoters60/1022546
tttaca

SEQ ID NO: 98411 - DNA, 6 bp, Unknown
  misc_feature (1)..( 6): Result.001 file - promoters60/1022546
caaact

SEQ ID NO: 98412 - DNA, 6 bp, Unknown
  misc_feature (1)..( 6): Result.001 file - promoters60/1022546
caaact

SEQ ID NO: 98413 - DNA, 6 bp, Unknown
  misc_feature (1)..( 6): Result.001 file - promoters60/1022546
ttcaaa

SEQ ID NO: 98414 - DNA, 6 bp, Unknown
  misc_feature (1)..( 6): Result.001 file - promoters60/1022586
ttcaaa

SEQ ID NO: 98415 - DNA, 6 bp, Unknown
  misc_feature (1)..( 6): Result.001 file - promoters60/1022586
tttttg

SEQ ID NO: 98416 - DNA, 6 bp, Unknown
  misc_feature (1)..( 6): Result.001 file - promoters60/1022586
tttttg

SEQ ID NO: 98417 - DNA, 8 bp, Unknown
  misc_feature (1)..( 8): Result.001 file - promoters60/1022586
tttgtctt

SEQ ID NO: 98418 - DNA, 8 bp, Unknown
  misc_feature (1)..( 8): Result.001 file - promoters60/1022586
tttatctt

SEQ ID NO: 98419 - DNA, 6 bp, Unknown
  misc_feature (1)..( 6): Result.001 file - promoters60/1022586
ttttat

SEQ ID NO: 98420 - DNA, 6 bp, Unknown
  misc_feature (1)..( 6): Result.001 file - promoters60/1022586
ttttat

SEQ ID NO: 98421 - DNA, 6 bp, Unknown
  misc_feature (1)..( 6): Result.001 file - promoters60/1022586
atttta

SEQ ID NO: 98422 - DNA, 6 bp, Unknown
  misc_feature (1)..( 6): Result.001 file - promoters60/1022586
atttta

SEQ ID NO: 98423 - DNA, 6 bp, Unknown
  misc_feature (1)..( 6): Result.001 file - promoters60/1022586
aaattc

SEQ ID NO: 98424 - DNA, 6 bp, Unknown
  misc_feature (1)..( 6): Result.001 file - promoters60/1022586
aaattc

SEQ ID NO: 98425 - DNA, 6 bp, Unknown
  misc_feature (1)..( 6): Result.001 file - promoters60/1022586
agagag

SEQ ID NO: 98426 - DNA, 6 bp, Unknown
  misc_feature (1)..( 6): Result.001 file - promoters60/1022586
agagag

SEQ ID NO: 98427 - DNA, 7 bp, Unknown
  misc_feature (1)..( 7): Result.001 file - promoters60/1022586
acatttc

SEQ ID NO: 98428 - DNA, 7 bp, Unknown
  misc_feature (1)..( 7): Result.001 file - promoters60/1022586
acaattc

SEQ ID NO: 98429 - DNA, 9 bp, Unknown
  misc_feature (1)..( 9): Result.001 file - promoters60/1022586
ttgaataat

SEQ ID NO: 98430 - DNA, 9 bp, Unknown
  misc_feature (1)..( 9): Result.001 file - promoters60/1022586
ttgcataat

SEQ ID NO: 98431 - DNA, 8 bp, Unknown
  misc_feature (1)..( 8): Result.001 file - promoters60/1022586
aaaaatat

SEQ ID NO: 98432 - DNA, 8 bp, Unknown
  misc_feature (1)..( 8): Result.001 file - promoters60/1022586
aaaattat

SEQ ID NO: 98433 - DNA, 8 bp, Unknown
  misc_feature (1)..( 8): Result.001 file - promoters60/1022586
acgagtct

SEQ ID NO: 98434 - DNA, 8 bp, Unknown
  misc_feature (1)..( 8): Result.001 file - promoters60/1022586
acgactct

SEQ ID NO: 98435 - DNA, 6 bp, Unknown
  misc_feature (1)..( 6): Result.001 file - promoters60/1022586
tataaa

SEQ ID NO: 98436 - DNA, 6 bp, Unknown
  misc_feature (1)..( 6): Result.001 file - promoters60/1022586
tataaa

SEQ ID NO: 98437 - DNA, 7 bp, Unknown
  misc_feature (1)..( 7): Result.001 file - promoters60/1022586
tttctct

SEQ ID NO: 98438 - DNA, 7 bp, Unknown
  misc_feature (1)..( 7): Result.001 file - promoters60/1022586
tttgtct

SEQ ID NO: 98439 - DNA, 6 bp, Unknown
  misc_feature (1)..( 6): Result.001 file - promoters60/1022586
ttttct

SEQ ID NO: 98440 - DNA, 6 bp, Unknown
  misc_feature (1)..( 6): Result.001 file - promoters60/1022586
ttttct

SEQ ID NO: 98441 - DNA, 7 bp, Unknown
  misc_feature (1)..( 7): Result.001 file - promoters60/1022586
aaattcc

SEQ ID NO: 98442 - DNA, 7 bp, Unknown
  misc_feature (1)..( 7): Result.001 file - promoters60/1022586
aaaatcc

SEQ ID NO: 98443 - DNA, 6 bp, Unknown
  misc_feature (1)..( 6): Result.001 file - promoters60/1022586
atatct

SEQ ID NO: 98444 - DNA, 6 bp, Unknown
  misc_feature (1)..( 6): Result.001 file - promoters60/1022586
atatct

SEQ ID NO: 98445 - DNA, 7 bp, Unknown
  misc_feature (1)..( 7): Result.001 file - promoters60/1022586
ttacttt

SEQ ID NO: 98446 - DNA, 7 bp, Unknown
  misc_feature (1)..( 7): Result.001 file - promoters60/1022586
ttagttt

SEQ ID NO: 98447 - DNA, 7 bp, Unknown
  misc_feature (1)..( 7): Result.001 file - promoters60/1022586
aacgcaa

SEQ ID NO: 98448 - DNA, 7 bp, Unknown
  misc_feature (1)..( 7): Result.001 file - promoters60/1022586
aacccaa

SEQ ID NO: 98449 - DNA, 7 bp, Unknown
  misc_feature (1)..( 7): Result.001 file - promoters60/1022586
tttaaag

SEQ ID NO: 98450 - DNA, 7 bp, Unknown
  misc_feature (1)..( 7): Result.001 file - promoters60/1022586
ttttaag

SEQ ID NO: 98451 - DNA, 7 bp, Unknown
  misc_feature (1)..( 7): Result.001 file - promoters60/1022586
aatattt

SEQ ID NO: 98452 - DNA, 7 bp, Unknown
  misc_feature (1)..( 7): Result.001 file - promoters60/1022586
aatgttt

SEQ ID NO: 98453 - DNA, 6 bp, Unknown
  misc_feature (1)..( 6): Result.001 file - promoters60/1022586
aaaaag

SEQ ID NO: 98454 - DNA, 6 bp, Unknown
  misc_feature (1)..( 6): Result.001 file - promoters60/1022586
aaaaag

SEQ ID NO: 98455 - DNA, 6 bp, Unknown
  misc_feature (1)..( 6): Result.001 file - promoters60/1022586
tttgta

SEQ ID NO: 98456 - DNA, 6 bp, Unknown
  misc_feature (1)..( 6): Result.001 file - promoters60/1022598
tttgta

SEQ ID NO: 98457 - DNA, 8 bp, Unknown
  misc_feature (1)..( 8): Result.001 file - promoters60/1022598
caaaaatc

SEQ ID NO: 98458 - DNA, 8 bp, Unknown
  misc_feature (1)..( 8): Result.001 file - promoters60/1022598
taaatatc

SEQ ID NO: 98459 - DNA, 8 bp, Unknown
  misc_feature (1)..( 8): Result.001 file - promoters60/1022598
taagtatc

SEQ ID NO: 98460 - DNA, 11 bp, Unknown
  misc_feature (1)..( 11): Result.001 file - promoters60/1022598
tatcagtgtct

SEQ ID NO: 98461 - DNA, 11 bp, Unknown
  misc_feature (1)..( 11): Result.001 file - promoters60/1022598
gatcaatgtgg

SEQ ID NO: 98462 - DNA, 11 bp, Unknown
  misc_feature (1)..( 11): Result.001 file - promoters60/1022610
tataagtatct

SEQ ID NO: 98463 - DNA, 11 bp, Unknown
  misc_feature (1)..( 11): Result.001 file - promoters60/1022610
ttattattata

SEQ ID NO: 98464 - DNA, 11 bp, Unknown
  misc_feature (1)..( 11): Result.001 file - promoters60/1022610
taattattata

SEQ ID NO: 98465 - DNA, 11 bp, Unknown
  misc_feature (1)..( 11): Result.001 file - promoters60/1022610
atataattgca

SEQ ID NO: 98466 - DNA, 11 bp, Unknown
  misc_feature (1)..( 11): Result.001 file - promoters60/1022610
tgattatttta

SEQ ID NO: 98467 - DNA, 11 bp, Unknown
  misc_feature (1)..( 11): Result.001 file - promoters60/1022610
attttattttc

SEQ ID NO: 98468 - DNA, 13 bp, Unknown
  misc_feature (1)..( 13): Result.001 file - promoters60/1022610
caaaaatgtatat

SEQ ID NO: 98469 - DNA, 13 bp, Unknown
  misc_feature (1)..( 13): Result.001 file - promoters60/1022610
agaaagtgtcaaa

SEQ ID NO: 98470 - DNA, 13 bp, Unknown
  misc_feature (1)..( 13): Result.001 file - promoters60/1022610
aaaaaatttatat

SEQ ID NO: 98471 - DNA, 13 bp, Unknown
  misc_feature (1)..( 13): Result.001 file - promoters60/1022610
aatgaatttatta

SEQ ID NO: 98472 - DNA, 13 bp, Unknown
  misc_feature (1)..( 13): Result.001 file - promoters60/1022662
aaacaattattaa

SEQ ID NO: 98473 - DNA, 13 bp, Unknown
  misc_feature (1)..( 13): Result.001 file - promoters60/1022662
aacgttttaagat

SEQ ID NO: 98474 - DNA, 13 bp, Unknown
  misc_feature (1)..( 13): Result.001 file - promoters60/1022662
aactttttagggt

SEQ ID NO: 98475 - DNA, 13 bp, Unknown
  misc_feature (1)..( 13): Result.001 file - promoters60/1022662
ttcgttttttttt

SEQ ID NO: 98476 - DNA, 13 bp, Unknown
  misc_feature (1)..( 13): Result.001 file - promoters60/1022662
tgctttttaaccg

SEQ ID NO: 98477 - DNA, 13 bp, Unknown
  misc_feature (1)..( 13): Result.001 file - promoters60/1022662
ctctttttttttt

SEQ ID NO: 98478 - DNA, 13 bp, Unknown
  misc_feature (1)..( 13): Result.001 file - promoters60/1022662
ttggttttagttt

SEQ ID NO: 98479 - DNA, 15 bp, Unknown
  misc_feature (1)..( 15): Result.001 file - promoters60/1022662
gaaaccaaccaatca

SEQ ID NO: 98480 - DNA, 15 bp, Unknown
  misc_feature (1)..( 15): Result.001 file - promoters60/1022662
aaaatcaaccaatca

SEQ ID NO: 98481 - DNA, 15 bp, Unknown
  misc_feature (1)..( 15): Result.001 file - promoters60/1022662
ccaacaaactctagc

SEQ ID NO: 98482 - DNA, 15 bp, Unknown
  misc_feature (1)..( 15): Result.001 file - promoters60/1022662
agagccatccattgt

SEQ ID NO: 98483 - DNA, 15 bp, Unknown
  misc_feature (1)..( 15): Result.001 file - promoters60/1022662
aaaatcttcttctgc

SEQ ID NO: 98484 - DNA, 15 bp, Unknown
  misc_feature (1)..( 15): Result.001 file - promoters60/1022662
gaaatctatccacga

SEQ ID NO: 98485 - DNA, 15 bp, Unknown
  misc_feature (1)..( 15): Result.001 file - promoters60/1022687
ctaatctaatctgag

SEQ ID NO: 98486 - DNA, 7 bp, Unknown
  misc_feature (1)..( 7): Result.001 file - promoters60/1022687
ttagtaa

SEQ ID NO: 98487 - DNA, 7 bp, Unknown
  misc_feature (1)..( 7): Result.001 file - promoters60/1022687
ttaataa

SEQ ID NO: 98488 - DNA, 7 bp, Unknown
  misc_feature (1)..( 7): Result.001 file - promoters60/1022687
ttagtat

SEQ ID NO: 98489 - DNA, 11 bp, Unknown
  misc_feature (1)..( 11): Result.001 file - promoters60/1022687
aaaattattaa

SEQ ID NO: 98490 - DNA, 11 bp, Unknown
  misc_feature (1)..( 11): Result.001 file - promoters60/1022687
aaatttagtaa

SEQ ID NO: 98491 - DNA, 11 bp, Unknown
  misc_feature (1)..( 11): Result.001 file - promoters60/1022687
ataattataat

SEQ ID NO: 98492 - DNA, 11 bp, Unknown
  misc_feature (1)..( 11): Result.001 file - promoters60/1022687
aaaatactaga

SEQ ID NO: 98493 - DNA, 11 bp, Unknown
  misc_feature (1)..( 11): Result.001 file - promoters60/1022687
gaaatattaga

SEQ ID NO: 98494 - DNA, 11 bp, Unknown
  misc_feature (1)..( 11): Result.001 file - promoters60/1022687
gaaatattgat

SEQ ID NO: 98495 - DNA, 8 bp, Unknown
  misc_feature (1)..( 8): Result.001 file - promoters60/1022687
caagattc

SEQ ID NO: 98496 - DNA, 8 bp, Unknown
  misc_feature (1)..( 8): Result.001 file - promoters60/1022687
caatatta

SEQ ID NO: 98497 - DNA, 8 bp, Unknown
  misc_feature (1)..( 8): Result.001 file - promoters60/1022810
aaatctta

SEQ ID NO: 98498 - DNA, 6 bp, Unknown
  misc_feature (1)..( 6): Result.001 file - promoters60/1022810
ttttaa

SEQ ID NO: 98499 - DNA, 6 bp, Unknown
  misc_feature (1)..( 6): Result.001 file - promoters60/1022810
ttttaa

SEQ ID NO: 98500 - DNA, 6 bp, Unknown
  misc_feature (1)..( 6): Result.001 file - promoters60/1022810
taatat

SEQ ID NO: 98501 - DNA, 6 bp, Unknown
  misc_feature (1)..( 6): Result.001 file - promoters60/1022810
taatat

SEQ ID NO: 98502 - DNA, 8 bp, Unknown
  misc_feature (1)..( 8): Result.001 file - promoters60/1022810
aaagacaa

SEQ ID NO: 98503 - DNA, 8 bp, Unknown
  misc_feature (1)..( 8): Result.001 file - promoters60/1022810
aaacacaa

SEQ ID NO: 98504 - DNA, 7 bp, Unknown
  misc_feature (1)..( 7): Result.001 file - promoters60/1022810
ataacaa

SEQ ID NO: 98505 - DNA, 7 bp, Unknown
  misc_feature (1)..( 7): Result.001 file - promoters60/1022810
atatcaa

SEQ ID NO: 98506 - DNA, 7 bp, Unknown
  misc_feature (1)..( 7): Result.001 file - promoters60/1022810
tctgcga

SEQ ID NO: 98507 - DNA, 7 bp, Unknown
  misc_feature (1)..( 7): Result.001 file - promoters60/1022810
tcttcga

SEQ ID NO: 98508 - DNA, 7 bp, Unknown
  misc_feature (1)..( 7): Result.001 file - promoters60/1022810
aatcatt

SEQ ID NO: 98509 - DNA, 7 bp, Unknown
  misc_feature (1)..( 7): Result.001 file - promoters60/1022810
aatgatt

SEQ ID NO: 98510 - DNA, 7 bp, Unknown
  misc_feature (1)..( 7): Result.001 file - promoters60/1022810
ttacaat

SEQ ID NO: 98511 - DNA, 7 bp, Unknown
  misc_feature (1)..( 7): Result.001 file - promoters60/1022810
ttataat

SEQ ID NO: 98512 - DNA, 7 bp, Unknown
  misc_feature (1)..( 7): Result.001 file - promoters60/1022810
aatctgt

SEQ ID NO: 98513 - DNA, 7 bp, Unknown
  misc_feature (1)..( 7): Result.001 file - promoters60/1022824
aatctgt

SEQ ID NO: 98514 - DNA, 7 bp, Unknown
  misc_feature (1)..( 7): Result.001 file - promoters60/1022824
agaagca

SEQ ID NO: 98515 - DNA, 7 bp, Unknown
  misc_feature (1)..( 7): Result.001 file - promoters60/1022824
agaagca

SEQ ID NO: 98516 - DNA, 8 bp, Unknown
  misc_feature (1)..( 8): Result.001 file - promoters60/1022824
ttttattt

SEQ ID NO: 98517 - DNA, 8 bp, Unknown
  misc_feature (1)..( 8): Result.001 file - promoters60/1022824
tttgattt

SEQ ID NO: 98518 - DNA, 9 bp, Unknown
  misc_feature (1)..( 9): Result.001 file - promoters60/1022824
agttccata

SEQ ID NO: 98519 - DNA, 9 bp, Unknown
  misc_feature (1)..( 9): Result.001 file - promoters60/1022824
agtttcata

SEQ ID NO: 98520 - DNA, 7 bp, Unknown
  misc_feature (1)..( 7): Result.001 file - promoters60/1022824
tctttta

SEQ ID NO: 98521 - DNA, 7 bp, Unknown
  misc_feature (1)..( 7): Result.001 file - promoters60/1022824
tctttta

SEQ ID NO: 98522 - DNA, 9 bp, Unknown
  misc_feature (1)..( 9): Result.001 file - promoters60/1022824
tctctggtg

SEQ ID NO: 98523 - DNA, 9 bp, Unknown
  misc_feature (1)..( 9): Result.001 file - promoters60/1022824
tctctcgtg

SEQ ID NO: 98524 - DNA, 6 bp, Unknown
  misc_feature (1)..( 6): Result.001 file - promoters60/1022824
tagact

SEQ ID NO: 98525 - DNA, 6 bp, Unknown
  misc_feature (1)..( 6): Result.001 file - promoters60/1022824
tagact

SEQ ID NO: 98526 - DNA, 6 bp, Unknown
  misc_feature (1)..( 6): Result.001 file - promoters60/1022824
atgttg

SEQ ID NO: 98527 - DNA, 6 bp, Unknown
  misc_feature (1)..( 6): Result.001 file - promoters60/1022824
atgttg

SEQ ID NO: 98528 - DNA, 6 bp, Unknown
  misc_feature (1)..( 6): Result.001 file - promoters60/1022824
gtggtt

SEQ ID NO: 98529 - DNA, 6 bp, Unknown
  misc_feature (1)..( 6): Result.001 file - promoters60/1022824
gtggtt

SEQ ID NO: 98530 - DNA, 6 bp, Unknown
  misc_feature (1)..( 6): Result.001 file - promoters60/1022824
tacaga

SEQ ID NO: 98531 - DNA, 6 bp, Unknown
  misc_feature (1)..( 6): Result.001 file - promoters60/1022824
tacaga

SEQ ID NO: 98532 - DNA, 7 bp, Unknown
  misc_feature (1)..( 7): Result.001 file - promoters60/1022824
ataaact

SEQ ID NO: 98533 - DNA, 7 bp, Unknown
  misc_feature (1)..( 7): Result.001 file - promoters60/1022824
ataaact

SEQ ID NO: 98534 - DNA, 7 bp, Unknown
  misc_feature (1)..( 7): Result.001 file - promoters60/1022824
gagaaga

SEQ ID NO: 98535 - DNA, 7 bp, Unknown
  misc_feature (1)..( 7): Result.001 file - promoters60/1022824
gagaaga

SEQ ID NO: 98536 - DNA, 7 bp, Unknown
  misc_feature (1)..( 7): Result.001 file - promoters60/1022824
aaacagc

SEQ ID NO: 98537 - DNA, 7 bp, Unknown
  misc_feature (1)..( 7): Result.001 file - promoters60/1022824
aaatagc

SEQ ID NO: 98538 - DNA, 7 bp, Unknown
  misc_feature (1)..( 7): Result.001 file - promoters60/1022824
ttctttg

SEQ ID NO: 98539 - DNA, 7 bp, Unknown
  misc_feature (1)..( 7): Result.001 file - promoters60/1022824
ttctttg

SEQ ID NO: 98540 - DNA, 7 bp, Unknown
  misc_feature (1)..( 7): Result.001 file - promoters60/1022824
actcatt

SEQ ID NO: 98541 - DNA, 7 bp, Unknown
  misc_feature (1)..( 7): Result.001 file - promoters60/1022824
actaatt

SEQ ID NO: 98542 - DNA, 6 bp, Unknown
  misc_feature (1)..( 6): Result.001 file - promoters60/1022824
tcgttt

SEQ ID NO: 98543 - DNA, 6 bp, Unknown
  misc_feature (1)..( 6): Result.001 file - promoters60/1022932
tcgttt

SEQ ID NO: 98544 - DNA, 10 bp, Unknown
  misc_feature (1)..( 10): Result.001 file - promoters60/1022932
tttatgtagg

SEQ ID NO: 98545 - DNA, 10 bp, Unknown
  misc_feature (1)..( 10): Result.001 file - promoters60/1022932
catatttagc

SEQ ID NO: 98546 - DNA, 10 bp, Unknown
  misc_feature (1)..( 10): Result.001 file - promoters60/1022932
tatatatagt

SEQ ID NO: 98547 - DNA, 10 bp, Unknown
  misc_feature (1)..( 10): Result.001 file - promoters60/1022932
gttatgttat

SEQ ID NO: 98548 - DNA, 10 bp, Unknown
  misc_feature (1)..( 10): Result.001 file - promoters60/1022932
caaataaagt

SEQ ID NO: 98549 - DNA, 10 bp, Unknown
  misc_feature (1)..( 10): Result.001 file - promoters60/1022932
catttttatc

SEQ ID NO: 98550 - DNA, 10 bp, Unknown
  misc_feature (1)..( 10): Result.001 file - promoters60/1022932
gttgtgttct

SEQ ID NO: 98551 - DNA, 10 bp, Unknown
  misc_feature (1)..( 10): Result.001 file - promoters60/1022932
tatctaatgc

SEQ ID NO: 98552 - DNA, 10 bp, Unknown
  misc_feature (1)..( 10): Result.001 file - promoters60/1022932
tatttaatga

SEQ ID NO: 98553 - DNA, 10 bp, Unknown
  misc_feature (1)..( 10): Result.001 file - promoters60/1022932
gttctcatgg

SEQ ID NO: 98554 - DNA, 10 bp, Unknown
  misc_feature (1)..( 10): Result.001 file - promoters60/1022932
gattaaatgt

SEQ ID NO: 98555 - DNA, 10 bp, Unknown
  misc_feature (1)..( 10): Result.001 file - promoters60/1022932
gctttaatta

SEQ ID NO: 98556 - DNA, 10 bp, Unknown
  misc_feature (1)..( 10): Result.001 file - promoters60/1022983
attcgcattt

SEQ ID NO: 98557 - DNA, 11 bp, Unknown
  misc_feature (1)..( 11): Result.001 file - promoters60/1022983
aaattaaaatc

SEQ ID NO: 98558 - DNA, 11 bp, Unknown
  misc_feature (1)..( 11): Result.001 file - promoters60/1022983
ccgttaaaaat

SEQ ID NO: 98559 - DNA, 11 bp, Unknown
  misc_feature (1)..( 11): Result.001 file - promoters60/1022983
caatcaaaaaa

SEQ ID NO: 98560 - DNA, 11 bp, Unknown
  misc_feature (1)..( 11): Result.001 file - promoters60/1022983
catataaaaat

SEQ ID NO: 98561 - DNA, 11 bp, Unknown
  misc_feature (1)..( 11): Result.001 file - promoters60/1022983
cgtttaaataa

SEQ ID NO: 98562 - DNA, 11 bp, Unknown
  misc_feature (1)..( 11): Result.001 file - promoters60/1022983
ttatgaaattt

SEQ ID NO: 98563 - DNA, 10 bp, Unknown
  misc_feature (1)..( 10): Result.001 file - promoters60/1022983
aattaaaatc

SEQ ID NO: 98564 - DNA, 10 bp, Unknown
  misc_feature (1)..( 10): Result.001 file - promoters60/1022983
gttaaaaatc

SEQ ID NO: 98565 - DNA, 10 bp, Unknown
  misc_feature (1)..( 10): Result.001 file - promoters60/1022983
tataaaaatt

SEQ ID NO: 98566 - DNA, 10 bp, Unknown
  misc_feature (1)..( 10): Result.001 file - promoters60/1022983
aataagaata

SEQ ID NO: 98567 - DNA, 10 bp, Unknown
  misc_feature (1)..( 10): Result.001 file - promoters60/1022983
tcaaaaaatt

SEQ ID NO: 98568 - DNA, 10 bp, Unknown
  misc_feature (1)..( 10): Result.001 file - promoters60/1022983
tatgaaattt

SEQ ID NO: 98569 - DNA, 10 bp, Unknown
  misc_feature (1)..( 10): Result.001 file - promoters60/1022983
tataggaaat

SEQ ID NO: 98570 - DNA, 14 bp, Unknown
  misc_feature (1)..( 14): Result.001 file - promoters60/1022983
ccgatagaagccga

SEQ ID NO: 98571 - DNA, 14 bp, Unknown
  misc_feature (1)..( 14): Result.001 file - promoters60/1022983
tttatacaagaaaa

SEQ ID NO: 98572 - DNA, 14 bp, Unknown
  misc_feature (1)..( 14): Result.001 file - promoters60/1022983
taaataaaagaatt

SEQ ID NO: 98573 - DNA, 14 bp, Unknown
  misc_feature (1)..( 14): Result.001 file - promoters60/1022983
gagaaaaaaaaagt

SEQ ID NO: 98574 - DNA, 14 bp, Unknown
  misc_feature (1)..( 14): Result.001 file - promoters60/1022983
aagaaaaaaaaaaa

SEQ ID NO: 98575 - DNA, 14 bp, Unknown
  misc_feature (1)..( 14): Result.001 file - promoters60/1022983
attaaaaataaaca

SEQ ID NO: 98576 - DNA, 13 bp, Unknown
  misc_feature (1)..( 13): Result.001 file - promoters60/1022983
tatccaaaattaa

SEQ ID NO: 98577 - DNA, 13 bp, Unknown
  misc_feature (1)..( 13): Result.001 file - promoters60/1022983
atataaaaatttc

SEQ ID NO: 98578 - DNA, 13 bp, Unknown
  misc_feature (1)..( 13): Result.001 file - promoters60/1022983
tataggaaattaa

SEQ ID NO: 98579 - DNA, 13 bp, Unknown
  misc_feature (1)..( 13): Result.001 file - promoters60/1022983
tgaacaacattta

SEQ ID NO: 98580 - DNA, 13 bp, Unknown
  misc_feature (1)..( 13): Result.001 file - promoters60/1022983
atcaaaaaattaa

SEQ ID NO: 98581 - DNA, 13 bp, Unknown
  misc_feature (1)..( 13): Result.001 file - promoters60/1022983
cgttaaaaatctc

SEQ ID NO: 98582 - DNA, 13 bp, Unknown
  misc_feature (1)..( 13): Result.001 file - promoters60/1022983
cgtttaaataaga

SEQ ID NO: 98583 - DNA, 11 bp, Unknown
  misc_feature (1)..( 11): Result.001 file - promoters60/1022983
aatcaagaata

SEQ ID NO: 98584 - DNA, 11 bp, Unknown
  misc_feature (1)..( 11): Result.001 file - promoters60/1022983
aaataagaata

SEQ ID NO: 98585 - DNA, 11 bp, Unknown
  misc_feature (1)..( 11): Result.001 file - promoters60/1022983
cgttaaaaatc

SEQ ID NO: 98586 - DNA, 11 bp, Unknown
  misc_feature (1)..( 11): Result.001 file - promoters60/1022983
ctataaaaaaa

SEQ ID NO: 98587 - DNA, 11 bp, Unknown
  misc_feature (1)..( 11): Result.001 file - promoters60/1022983
atataaaaatt

SEQ ID NO: 98588 - DNA, 11 bp, Unknown
  misc_feature (1)..( 11): Result.001 file - promoters60/1022983
atataggaaat

SEQ ID NO: 98589 - DNA, 12 bp, Unknown
  misc_feature (1)..( 12): Result.001 file - promoters60/1022983
acaagaaaactc

SEQ ID NO: 98590 - DNA, 12 bp, Unknown
  misc_feature (1)..( 12): Result.001 file - promoters60/1022983
tcaaaaaaaaaa

SEQ ID NO: 98591 - DNA, 12 bp, Unknown
  misc_feature (1)..( 12): Result.001 file - promoters60/1022983
taaataaaagaa

SEQ ID NO: 98592 - DNA, 12 bp, Unknown
  misc_feature (1)..( 12): Result.001 file - promoters60/1022983
ataagaaaaaaa

SEQ ID NO: 98593 - DNA, 12 bp, Unknown
  misc_feature (1)..( 12): Result.001 file - promoters60/1022983
agaaaaaaaaag

SEQ ID NO: 98594 - DNA, 12 bp, Unknown
  misc_feature (1)..( 12): Result.001 file - promoters60/1022987
tcaaaatagaca

SEQ ID NO: 98595 - DNA, 13 bp, Unknown
  misc_feature (1)..( 13): Result.001 file - promoters60/1022987
tttgatgaagact

SEQ ID NO: 98596 - DNA, 13 bp, Unknown
  misc_feature (1)..( 13): Result.001 file - promoters60/1022987
tttaatgagctgt

SEQ ID NO: 98597 - DNA, 13 bp, Unknown
  misc_feature (1)..( 13): Result.001 file - promoters60/1022987
tttaatgagctgt

SEQ ID NO: 98598 - DNA, 13 bp, Unknown
  misc_feature (1)..( 13): Result.001 file - promoters60/1022987
attgataaagaga

SEQ ID NO: 98599 - DNA, 13 bp, Unknown
  misc_feature (1)..( 13): Result.001 file - promoters60/1022987
gaaaattagccaa

SEQ ID NO: 98600 - DNA, 13 bp, Unknown
  misc_feature (1)..( 13): Result.001 file - promoters60/1023029
gttgcaaaacaga

SEQ ID NO: 98601 - DNA, 8 bp, Unknown
  misc_feature (1)..( 8): Result.001 file - promoters60/1023029
ctttttta

SEQ ID NO: 98602 - DNA, 8 bp, Unknown
  misc_feature (1)..( 8): Result.001 file - promoters60/1023029
ctttgtta

SEQ ID NO: 98603 - DNA, 9 bp, Unknown
  misc_feature (1)..( 9): Result.001 file - promoters60/1023029
tatagcaat

SEQ ID NO: 98604 - DNA, 9 bp, Unknown
  misc_feature (1)..( 9): Result.001 file - promoters60/1023029
tataccaat

SEQ ID NO: 98605 - DNA, 6 bp, Unknown
  misc_feature (1)..( 6): Result.001 file - promoters60/1023029
ttatga

SEQ ID NO: 98606 - DNA, 6 bp, Unknown
  misc_feature (1)..( 6): Result.001 file - promoters60/1023029
ttatga

SEQ ID NO: 98607 - DNA, 7 bp, Unknown
  misc_feature (1)..( 7): Result.001 file - promoters60/1023029
aataatt

SEQ ID NO: 98608 - DNA, 7 bp, Unknown
  misc_feature (1)..( 7): Result.001 file - promoters60/1023029
aataatt

SEQ ID NO: 98609 - DNA, 8 bp, Unknown
  misc_feature (1)..( 8): Result.001 file - promoters60/1023029
aattttaa

SEQ ID NO: 98610 - DNA, 8 bp, Unknown
  misc_feature (1)..( 8): Result.001 file - promoters60/1023029
aatcttaa

SEQ ID NO: 98611 - DNA, 6 bp, Unknown
  misc_feature (1)..( 6): Result.001 file - promoters60/1023029
cgtata

SEQ ID NO: 98612 - DNA, 6 bp, Unknown
  misc_feature (1)..( 6): Result.001 file - promoters60/1023029
cgtata

SEQ ID NO: 98613 - DNA, 7 bp, Unknown
  misc_feature (1)..( 7): Result.001 file - promoters60/1023029
ataggtt

SEQ ID NO: 98614 - DNA, 7 bp, Unknown
  misc_feature (1)..( 7): Result.001 file - promoters60/1023029
atatgtt

SEQ ID NO: 98615 - DNA, 6 bp, Unknown
  misc_feature (1)..( 6): Result.001 file - promoters60/1023029
atttta

SEQ ID NO: 98616 - DNA, 6 bp, Unknown
  misc_feature (1)..( 6): Result.001 file - promoters60/1023029
atttta

SEQ ID NO: 98617 - DNA, 6 bp, Unknown
  misc_feature (1)..( 6): Result.001 file - promoters60/1023029
ccaata

SEQ ID NO: 98618 - DNA, 6 bp, Unknown
  misc_feature (1)..( 6): Result.001 file - promoters60/1023029
ccaata

SEQ ID NO: 98619 - DNA, 11 bp, Unknown
  misc_feature (1)..( 11): Result.001 file - promoters60/1023029
agaagatgagt

SEQ ID NO: 98620 - DNA, 11 bp, Unknown
  misc_feature (1)..( 11): Result.001 file - promoters60/1023029
agacgattagt

SEQ ID NO: 98621 - DNA, 8 bp, Unknown
  misc_feature (1)..( 8): Result.001 file - promoters60/1023029
tatatgaa

SEQ ID NO: 98622 - DNA, 8 bp, Unknown
  misc_feature (1)..( 8): Result.001 file - promoters60/1023029
tatatgaa

SEQ ID NO: 98623 - DNA, 8 bp, Unknown
  misc_feature (1)..( 8): Result.001 file - promoters60/1023029
attacttc

SEQ ID NO: 98624 - DNA, 8 bp, Unknown
  misc_feature (1)..( 8): Result.001 file - promoters60/1023029
attatttc

SEQ ID NO: 98625 - DNA, 9 bp, Unknown
  misc_feature (1)..( 9): Result.001 file - promoters60/1023029
caatataaa

SEQ ID NO: 98626 - DNA, 9 bp, Unknown
  misc_feature (1)..( 9): Result.001 file - promoters60/1023029
caatataaa

SEQ ID NO: 98627 - DNA, 6 bp, Unknown
  misc_feature (1)..( 6): Result.001 file - promoters60/1023029
ctcttt

SEQ ID NO: 98628 - DNA, 6 bp, Unknown
  misc_feature (1)..( 6): Result.001 file - promoters60/1023029
ctcttt

SEQ ID NO: 98629 - DNA, 7 bp, Unknown
  misc_feature (1)..( 7): Result.001 file - promoters60/1023029
actccta

SEQ ID NO: 98630 - DNA, 7 bp, Unknown
  misc_feature (1)..( 7): Result.001 file - promoters60/1023029
acttcta

SEQ ID NO: 98631 - DNA, 6 bp, Unknown
  misc_feature (1)..( 6): Result.001 file - promoters60/1023029
caactt

SEQ ID NO: 98632 - DNA, 6 bp, Unknown
  misc_feature (1)..( 6): Result.001 file - promoters60/1023029
caactt

SEQ ID NO: 98633 - DNA, 7 bp, Unknown
  misc_feature (1)..( 7): Result.001 file - promoters60/1023029
gatgctt

SEQ ID NO: 98634 - DNA, 7 bp, Unknown
  misc_feature (1)..( 7): Result.001 file - promoters60/1023029
gattctt

SEQ ID NO: 98635 - DNA, 8 bp, Unknown
  misc_feature (1)..( 8): Result.001 file - promoters60/1023029
tttatatt

SEQ ID NO: 98636 - DNA, 8 bp, Unknown
  misc_feature (1)..( 8): Result.001 file - promoters60/1023029
tttaaatt

SEQ ID NO: 98637 - DNA, 7 bp, Unknown
  misc_feature (1)..( 7): Result.001 file - promoters60/1023029
tggttca

SEQ ID NO: 98638 - DNA, 7 bp, Unknown
  misc_feature (1)..( 7): Result.001 file - promoters60/1023029
tggatca

SEQ ID NO: 98639 - DNA, 8 bp, Unknown
  misc_feature (1)..( 8): Result.001 file - promoters60/1023029
aattctta

SEQ ID NO: 98640 - DNA, 8 bp, Unknown
  misc_feature (1)..( 8): Result.001 file - promoters60/1023037
aattatta

SEQ ID NO: 98641 - DNA, 9 bp, Unknown
  misc_feature (1)..( 9): Result.001 file - promoters60/1023037
tgattcact

SEQ ID NO: 98642 - DNA, 9 bp, Unknown
  misc_feature (1)..( 9): Result.001 file - promoters60/1023037
aaattcact

SEQ ID NO: 98643 - DNA, 9 bp, Unknown
  misc_feature (1)..( 9): Result.001 file - promoters60/1023037
aaatgcacc

SEQ ID NO: 98644 - DNA, 6 bp, Unknown
  misc_feature (1)..( 6): Result.001 file - promoters60/1023037
taaaga

SEQ ID NO: 98645 - DNA, 6 bp, Unknown
  misc_feature (1)..( 6): Result.001 file - promoters60/1023037
taaaga

SEQ ID NO: 98646 - DNA, 11 bp, Unknown
  misc_feature (1)..( 11): Result.001 file - promoters60/1023037
acagtttataa

SEQ ID NO: 98647 - DNA, 11 bp, Unknown
  misc_feature (1)..( 11): Result.001 file - promoters60/1023037
acaatttataa

SEQ ID NO: 98648 - DNA, 11 bp, Unknown
  misc_feature (1)..( 11): Result.001 file - promoters60/1023037
agagtatatta

SEQ ID NO: 98649 - DNA, 7 bp, Unknown
  misc_feature (1)..( 7): Result.001 file - promoters60/1023037
gtaacta

SEQ ID NO: 98650 - DNA, 7 bp, Unknown
  misc_feature (1)..( 7): Result.001 file - promoters60/1023037
gtaacta

SEQ ID NO: 98651 - DNA, 7 bp, Unknown
  misc_feature (1)..( 7): Result.001 file - promoters60/1023037
aattttt

SEQ ID NO: 98652 - DNA, 7 bp, Unknown
  misc_feature (1)..( 7): Result.001 file - promoters60/1023037
aattttt

SEQ ID NO: 98653 - DNA, 9 bp, Unknown
  misc_feature (1)..( 9): Result.001 file - promoters60/1023037
gggcatatt

SEQ ID NO: 98654 - DNA, 9 bp, Unknown
  misc_feature (1)..( 9): Result.001 file - promoters60/1023037
gggtatata

SEQ ID NO: 98655 - DNA, 9 bp, Unknown
  misc_feature (1)..( 9): Result.001 file - promoters60/1023037
tggtagata

SEQ ID NO: 98656 - DNA, 6 bp, Unknown
  misc_feature (1)..( 6): Result.001 file - promoters60/1023037
agtaat

SEQ ID NO: 98657 - DNA, 6 bp, Unknown
  misc_feature (1)..( 6): Result.001 file - promoters60/1023037
agtaat

SEQ ID NO: 98658 - DNA, 6 bp, Unknown
  misc_feature (1)..( 6): Result.001 file - promoters60/1023037
tttata

SEQ ID NO: 98659 - DNA, 6 bp, Unknown
  misc_feature (1)..( 6): Result.001 file - promoters60/1023037
tttata

SEQ ID NO: 98660 - DNA, 6 bp, Unknown
  misc_feature (1)..( 6): Result.001 file - promoters60/1023037
ttaaaa

SEQ ID NO: 98661 - DNA, 6 bp, Unknown
  misc_feature (1)..( 6): Result.001 file - promoters60/1023037
ttaaaa

SEQ ID NO: 98662 - DNA, 8 bp, Unknown
  misc_feature (1)..( 8): Result.001 file - promoters60/1023037
ctatttat

SEQ ID NO: 98663 - DNA, 8 bp, Unknown
  misc_feature (1)..( 8): Result.001 file - promoters60/1023037
ctaattat

SEQ ID NO: 98664 - DNA, 6 bp, Unknown
  misc_feature (1)..( 6): Result.001 file - promoters60/1023037
tttact

SEQ ID NO: 98665 - DNA, 6 bp, Unknown
  misc_feature (1)..( 6): Result.001 file - promoters60/1023037
tttact

SEQ ID NO: 98666 - DNA, 9 bp, Unknown
  misc_feature (1)..( 9): Result.001 file - promoters60/1023037
gaaactatc

SEQ ID NO: 98667 - DNA, 9 bp, Unknown
  misc_feature (1)..( 9): Result.001 file - promoters60/1023037
gaaaatatc

SEQ ID NO: 98668 - DNA, 6 bp, Unknown
  misc_feature (1)..( 6): Result.001 file - promoters60/1023037
acacaa

SEQ ID NO: 98669 - DNA, 6 bp, Unknown
  misc_feature (1)..( 6): Result.001 file - promoters60/1023037
acacaa

SEQ ID NO: 98670 - DNA, 6 bp, Unknown
  misc_feature (1)..( 6): Result.001 file - promoters60/1023037
gagaga

SEQ ID NO: 98671 - DNA, 6 bp, Unknown
  misc_feature (1)..( 6): Result.001 file - promoters60/1023062
gagaga

SEQ ID NO: 98672 - DNA, 8 bp, Unknown
  misc_feature (1)..( 8): Result.001 file - promoters60/1023062
taaaaaat

SEQ ID NO: 98673 - DNA, 8 bp, Unknown
  misc_feature (1)..( 8): Result.001 file - promoters60/1023062
taaaaaaa

SEQ ID NO: 98674 - DNA, 8 bp, Unknown
  misc_feature (1)..( 8): Result.001 file - promoters60/1023062
taaagaat

SEQ ID NO: 98675 - DNA, 8 bp, Unknown
  misc_feature (1)..( 8): Result.001 file - promoters60/1023062
tgaaaaat

SEQ ID NO: 98676 - DNA, 9 bp, Unknown
  misc_feature (1)..( 9): Result.001 file - promoters60/1023062
aattccaaa

SEQ ID NO: 98677 - DNA, 9 bp, Unknown
  misc_feature (1)..( 9): Result.001 file - promoters60/1023062
aatttcaag

SEQ ID NO: 98678 - DNA, 9 bp, Unknown
  misc_feature (1)..( 9): Result.001 file - promoters60/1023062
aattcaaaa

SEQ ID NO: 98679 - DNA, 9 bp, Unknown
  misc_feature (1)..( 9): Result.001 file - promoters60/1023062
tacatgaca

SEQ ID NO: 98680 - DNA, 9 bp, Unknown
  misc_feature (1)..( 9): Result.001 file - promoters60/1023062
tttatgaca

SEQ ID NO: 98681 - DNA, 9 bp, Unknown
  misc_feature (1)..( 9): Result.001 file - promoters60/1023062
tttgtgaca

SEQ ID NO: 98682 - DNA, 10 bp, Unknown
  misc_feature (1)..( 10): Result.001 file - promoters60/1023062
tttgcatttt

SEQ ID NO: 98683 - DNA, 10 bp, Unknown
  misc_feature (1)..( 10): Result.001 file - promoters60/1023062
cttgaattca

SEQ ID NO: 98684 - DNA, 10 bp, Unknown
  misc_feature (1)..( 10): Result.001 file - promoters60/1023062
tttgaatttt

SEQ ID NO: 98685 - DNA, 8 bp, Unknown
  misc_feature (1)..( 8): Result.001 file - promoters60/1023062
aattttgg

SEQ ID NO: 98686 - DNA, 8 bp, Unknown
  misc_feature (1)..( 8): Result.001 file - promoters60/1023062
aattttat

SEQ ID NO: 98687 - DNA, 8 bp, Unknown
  misc_feature (1)..( 8): Result.001 file - promoters60/1023062
tattttat

SEQ ID NO: 98688 - DNA, 13 bp, Unknown
  misc_feature (1)..( 13): Result.001 file - promoters60/1023062
taatggatctaca

SEQ ID NO: 98689 - DNA, 13 bp, Unknown
  misc_feature (1)..( 13): Result.001 file - promoters60/1023062
taatggctctttt

SEQ ID NO: 98690 - DNA, 13 bp, Unknown
  misc_feature (1)..( 13): Result.001 file - promoters60/1023062
atcttgatgtaca

SEQ ID NO: 98691 - DNA, 10 bp, Unknown
  misc_feature (1)..( 10): Result.001 file - promoters60/1023062
taaaaaatag

SEQ ID NO: 98692 - DNA, 10 bp, Unknown
  misc_feature (1)..( 10): Result.001 file - promoters60/1023062
acaaaattag

SEQ ID NO: 98693 - DNA, 10 bp, Unknown
  misc_feature (1)..( 10): Result.001 file - promoters60/1023079
acagaatttt

SEQ ID NO: 98694 - DNA, 7 bp, Unknown
  misc_feature (1)..( 7): Result.001 file - promoters60/1023079
agttatt

SEQ ID NO: 98695 - DNA, 7 bp, Unknown
  misc_feature (1)..( 7): Result.001 file - promoters60/1023079
agtcatt

SEQ ID NO: 98696 - DNA, 6 bp, Unknown
  misc_feature (1)..( 6): Result.001 file - promoters60/1023079
tttcct

SEQ ID NO: 98697 - DNA, 6 bp, Unknown
  misc_feature (1)..( 6): Result.001 file - promoters60/1023079
tttcct

SEQ ID NO: 98698 - DNA, 6 bp, Unknown
  misc_feature (1)..( 6): Result.001 file - promoters60/1023079
agaaaa

SEQ ID NO: 98699 - DNA, 6 bp, Unknown
  misc_feature (1)..( 6): Result.001 file - promoters60/1023079
agaaaa

SEQ ID NO: 98700 - DNA, 7 bp, Unknown
  misc_feature (1)..( 7): Result.001 file - promoters60/1023079
aaagttt

SEQ ID NO: 98701 - DNA, 7 bp, Unknown
  misc_feature (1)..( 7): Result.001 file - promoters60/1023079
aaagttt

SEQ ID NO: 98702 - DNA, 8 bp, Unknown
  misc_feature (1)..( 8): Result.001 file - promoters60/1023079
ccaatctc

SEQ ID NO: 98703 - DNA, 8 bp, Unknown
  misc_feature (1)..( 8): Result.001 file - promoters60/1023079
ccaaactc

SEQ ID NO: 98704 - DNA, 6 bp, Unknown
  misc_feature (1)..( 6): Result.001 file - promoters60/1023079
atttta

SEQ ID NO: 98705 - DNA, 6 bp, Unknown
  misc_feature (1)..( 6): Result.001 file - promoters60/1023079
atttta

SEQ ID NO: 98706 - DNA, 7 bp, Unknown
  misc_feature (1)..( 7): Result.001 file - promoters60/1023079
caacttt

SEQ ID NO: 98707 - DNA, 7 bp, Unknown
  misc_feature (1)..( 7): Result.001 file - promoters60/1023079
caaattt

SEQ ID NO: 98708 - DNA, 8 bp, Unknown
  misc_feature (1)..( 8): Result.001 file - promoters60/1023079
tttgtttg

SEQ ID NO: 98709 - DNA, 8 bp, Unknown
  misc_feature (1)..( 8): Result.001 file - promoters60/1023079
tttcttta

SEQ ID NO: 98710 - DNA, 8 bp, Unknown
  misc_feature (1)..( 8): Result.001 file - promoters60/1023079
aatcttta

SEQ ID NO: 98711 - DNA, 8 bp, Unknown
  misc_feature (1)..( 8): Result.001 file - promoters60/1023079
taatgcat

SEQ ID NO: 98712 - DNA, 8 bp, Unknown
  misc_feature (1)..( 8): Result.001 file - promoters60/1023079
taatacat

SEQ ID NO: 98713 - DNA, 6 bp, Unknown
  misc_feature (1)..( 6): Result.001 file - promoters60/1023079
tttaat

SEQ ID NO: 98714 - DNA, 6 bp, Unknown
  misc_feature (1)..( 6): Result.001 file - promoters60/1023079
tttaat

SEQ ID NO: 98715 - DNA, 7 bp, Unknown
  misc_feature (1)..( 7): Result.001 file - promoters60/1023079
taaatta

SEQ ID NO: 98716 - DNA, 7 bp, Unknown
  misc_feature (1)..( 7): Result.001 file - promoters60/1023079
taattta

SEQ ID NO: 98717 - DNA, 6 bp, Unknown
  misc_feature (1)..( 6): Result.001 file - promoters60/1023079
aattag

SEQ ID NO: 98718 - DNA, 6 bp, Unknown
  misc_feature (1)..( 6): Result.001 file - promoters60/1023079
aattag

SEQ ID NO: 98719 - DNA, 9 bp, Unknown
  misc_feature (1)..( 9): Result.001 file - promoters60/1023079
ttaaataat

SEQ ID NO: 98720 - DNA, 9 bp, Unknown
  misc_feature (1)..( 9): Result.001 file - promoters60/1023079
ttatataat

SEQ ID NO: 98721 - DNA, 7 bp, Unknown
  misc_feature (1)..( 7): Result.001 file - promoters60/1023079
taaaatt

SEQ ID NO: 98722 - DNA, 7 bp, Unknown
  misc_feature (1)..( 7): Result.001 file - promoters60/1023079
taacatt

SEQ ID NO: 98723 - DNA, 7 bp, Unknown
  misc_feature (1)..( 7): Result.001 file - promoters60/1023079
ttagaat

SEQ ID NO: 98724 - DNA, 7 bp, Unknown
  misc_feature (1)..( 7): Result.001 file - promoters60/1023079
ttataat

SEQ ID NO: 98725 - DNA, 7 bp, Unknown
  misc_feature (1)..( 7): Result.001 file - promoters60/1023079
aaatata

SEQ ID NO: 98726 - DNA, 7 bp, Unknown
  misc_feature (1)..( 7): Result.001 file - promoters60/1023079
aaacata

SEQ ID NO: 98727 - DNA, 8 bp, Unknown
  misc_feature (1)..( 8): Result.001 file - promoters60/1023079
tttcttaa

SEQ ID NO: 98728 - DNA, 8 bp, Unknown
  misc_feature (1)..( 8): Result.001 file - promoters60/1023079
tttattaa

SEQ ID NO: 98729 - DNA, 6 bp, Unknown
  misc_feature (1)..( 6): Result.001 file - promoters60/1023079
ttaatt

SEQ ID NO: 98730 - DNA, 6 bp, Unknown
  misc_feature (1)..( 6): Result.001 file - promoters60/1023079
ttaatt

SEQ ID NO: 98731 - DNA, 7 bp, Unknown
  misc_feature (1)..( 7): Result.001 file - promoters60/1023079
aattctt

SEQ ID NO: 98732 - DNA, 7 bp, Unknown
  misc_feature (1)..( 7): Result.001 file - promoters60/1023089
aattctt

SEQ ID NO: 98733 - DNA, 6 bp, Unknown
  misc_feature (1)..( 6): Result.001 file - promoters60/1023089
ttctag

SEQ ID NO: 98734 - DNA, 6 bp, Unknown
  misc_feature (1)..( 6): Result.001 file - promoters60/1023089
ttctag

SEQ ID NO: 98735 - DNA, 6 bp, Unknown
  misc_feature (1)..( 6): Result.001 file - promoters60/1023089
ttcaaa

SEQ ID NO: 98736 - DNA, 6 bp, Unknown
  misc_feature (1)..( 6): Result.001 file - promoters60/1023089
ttcaaa

SEQ ID NO: 98737 - DNA, 7 bp, Unknown
  misc_feature (1)..( 7): Result.001 file - promoters60/1023089
aaaaaac

SEQ ID NO: 98738 - DNA, 7 bp, Unknown
  misc_feature (1)..( 7): Result.001 file - promoters60/1023089
aaaaaac

SEQ ID NO: 98739 - DNA, 8 bp, Unknown
  misc_feature (1)..( 8): Result.001 file - promoters60/1023089
tttctttt

SEQ ID NO: 98740 - DNA, 8 bp, Unknown
  misc_feature (1)..( 8): Result.001 file - promoters60/1023089
tttgtttt

SEQ ID NO: 98741 - DNA, 7 bp, Unknown
  misc_feature (1)..( 7): Result.001 file - promoters60/1023089
tttcttt

SEQ ID NO: 98742 - DNA, 7 bp, Unknown
  misc_feature (1)..( 7): Result.001 file - promoters60/1023089
tttgttt

SEQ ID NO: 98743 - DNA, 11 bp, Unknown
  misc_feature (1)..( 11): Result.001 file - promoters60/1023089
cacaaattctt

SEQ ID NO: 98744 - DNA, 11 bp, Unknown
  misc_feature (1)..( 11): Result.001 file - promoters60/1023089
gattaatactt

SEQ ID NO: 98745 - DNA, 11 bp, Unknown
  misc_feature (1)..( 11): Result.001 file - promoters60/1023089
gattaatacat

SEQ ID NO: 98746 - DNA, 6 bp, Unknown
  misc_feature (1)..( 6): Result.001 file - promoters60/1023089
tatttt

SEQ ID NO: 98747 - DNA, 6 bp, Unknown
  misc_feature (1)..( 6): Result.001 file - promoters60/1023089
tatttt

SEQ ID NO: 98748 - DNA, 6 bp, Unknown
  misc_feature (1)..( 6): Result.001 file - promoters60/1023089
tttgat

SEQ ID NO: 98749 - DNA, 6 bp, Unknown
  misc_feature (1)..( 6): Result.001 file - promoters60/1023089
tttgat

SEQ ID NO: 98750 - DNA, 6 bp, Unknown
  misc_feature (1)..( 6): Result.001 file - promoters60/1023089
aaattg

SEQ ID NO: 98751 - DNA, 6 bp, Unknown
  misc_feature (1)..( 6): Result.001 file - promoters60/1023089
aaattg

SEQ ID NO: 98752 - DNA, 6 bp, Unknown
  misc_feature (1)..( 6): Result.001 file - promoters60/1023089
taatta

SEQ ID NO: 98753 - DNA, 6 bp, Unknown
  misc_feature (1)..( 6): Result.001 file - promoters60/1023089
taatta

SEQ ID NO: 98754 - DNA, 9 bp, Unknown
  misc_feature (1)..( 9): Result.001 file - promoters60/1023089
tactaaaat

SEQ ID NO: 98755 - DNA, 9 bp, Unknown
  misc_feature (1)..( 9): Result.001 file - promoters60/1023124
tacaaaaat

SEQ ID NO: 98756 - DNA, 11 bp, Unknown
  misc_feature (1)..( 11): Result.001 file - promoters60/1023124
aaattttgatt

SEQ ID NO: 98757 - DNA, 11 bp, Unknown
  misc_feature (1)..( 11): Result.001 file - promoters60/1023124
aaattatgatt

SEQ ID NO: 98758 - DNA, 7 bp, Unknown
  misc_feature (1)..( 7): Result.001 file - promoters60/1023124
tttttaa

SEQ ID NO: 98759 - DNA, 7 bp, Unknown
  misc_feature (1)..( 7): Result.001 file - promoters60/1023124
tttttaa

SEQ ID NO: 98760 - DNA, 7 bp, Unknown
  misc_feature (1)..( 7): Result.001 file - promoters60/1023124
ttcctac

SEQ ID NO: 98761 - DNA, 7 bp, Unknown
  misc_feature (1)..( 7): Result.001 file - promoters60/1023124
ttcatac

SEQ ID NO: 98762 - DNA, 6 bp, Unknown
  misc_feature (1)..( 6): Result.001 file - promoters60/1023124
catgtt

SEQ ID NO: 98763 - DNA, 6 bp, Unknown
  misc_feature (1)..( 6): Result.001 file - promoters60/1023124
catgtt

SEQ ID NO: 98764 - DNA, 8 bp, Unknown
  misc_feature (1)..( 8): Result.001 file - promoters60/1023124
taaacaat

SEQ ID NO: 98765 - DNA, 8 bp, Unknown
  misc_feature (1)..( 8): Result.001 file - promoters60/1023124
taaccaat

SEQ ID NO: 98766 - DNA, 8 bp, Unknown
  misc_feature (1)..( 8): Result.001 file - promoters60/1023124
aaattatt

SEQ ID NO: 98767 - DNA, 8 bp, Unknown
  misc_feature (1)..( 8): Result.001 file - promoters60/1023124
aaataatt

SEQ ID NO: 98768 - DNA, 6 bp, Unknown
  misc_feature (1)..( 6): Result.001 file - promoters60/1023124
gtttaa

SEQ ID NO: 98769 - DNA, 6 bp, Unknown
  misc_feature (1)..( 6): Result.001 file - promoters60/1023124
gtttaa

SEQ ID NO: 98770 - DNA, 6 bp, Unknown
  misc_feature (1)..( 6): Result.001 file - promoters60/1023124
tataaa

SEQ ID NO: 98771 - DNA, 6 bp, Unknown
  misc_feature (1)..( 6): Result.001 file - promoters60/1023124
tataaa

SEQ ID NO: 98772 - DNA, 6 bp, Unknown
  misc_feature (1)..( 6): Result.001 file - promoters60/1023124
aatata

SEQ ID NO: 98773 - DNA, 6 bp, Unknown
  misc_feature (1)..( 6): Result.001 file - promoters60/1023124
aatata

SEQ ID NO: 98774 - DNA, 8 bp, Unknown
  misc_feature (1)..( 8): Result.001 file - promoters60/1023124
atgaatcc

SEQ ID NO: 98775 - DNA, 8 bp, Unknown
  misc_feature (1)..( 8): Result.001 file - promoters60/1023124
atgaatat

SEQ ID NO: 98776 - DNA, 8 bp, Unknown
  misc_feature (1)..( 8): Result.001 file - promoters60/1023124
ttgaatat

SEQ ID NO: 98777 - DNA, 6 bp, Unknown
  misc_feature (1)..( 6): Result.001 file - promoters60/1023124
ctcgtg

SEQ ID NO: 98778 - DNA, 6 bp, Unknown
  misc_feature (1)..( 6): Result.001 file - promoters60/1023124
ctcgtg

SEQ ID NO: 98779 - DNA, 7 bp, Unknown
  misc_feature (1)..( 7): Result.001 file - promoters60/1023124
ttaatat

SEQ ID NO: 98780 - DNA, 7 bp, Unknown
  misc_feature (1)..( 7): Result.001 file - promoters60/1023124
ttattat

SEQ ID NO: 98781 - DNA, 8 bp, Unknown
  misc_feature (1)..( 8): Result.001 file - promoters60/1023124
tataattt

SEQ ID NO: 98782 - DNA, 8 bp, Unknown
  misc_feature (1)..( 8): Result.001 file - promoters60/1023124
tattattt

SEQ ID NO: 98783 - DNA, 8 bp, Unknown
  misc_feature (1)..( 8): Result.001 file - promoters60/1023124
gtaaatgt

SEQ ID NO: 98784 - DNA, 8 bp, Unknown
  misc_feature (1)..( 8): Result.001 file - promoters60/1023124
gtaaatgt

SEQ ID NO: 98785 - DNA, 6 bp, Unknown
  misc_feature (1)..( 6): Result.001 file - promoters60/1023124
ctctaa

SEQ ID NO: 98786 - DNA, 6 bp, Unknown
  misc_feature (1)..( 6): Result.001 file - promoters60/1023124
ctctaa

SEQ ID NO: 98787 - DNA, 6 bp, Unknown
  misc_feature (1)..( 6): Result.001 file - promoters60/1023124
ttaaaa

SEQ ID NO: 98788 - DNA, 6 bp, Unknown
  misc_feature (1)..( 6): Result.001 file - promoters60/1023124
ttaaaa

SEQ ID NO: 98789 - DNA, 9 bp, Unknown
  misc_feature (1)..( 9): Result.001 file - promoters60/1023124
atttttttt

SEQ ID NO: 98790 - DNA, 9 bp, Unknown
  misc_feature (1)..( 9): Result.001 file - promoters60/1023124
atttttttt

SEQ ID NO: 98791 - DNA, 6 bp, Unknown
  misc_feature (1)..( 6): Result.001 file - promoters60/1023124
tgttgt

SEQ ID NO: 98792 - DNA, 6 bp, Unknown
  misc_feature (1)..( 6): Result.001 file - promoters60/1023124
tgttgt

SEQ ID NO: 98793 - DNA, 15 bp, Unknown
  misc_feature (1)..( 15): Result.001 file - promoters60/1023124
tgtcaaaaaaaaaaa

SEQ ID NO: 98794 - DNA, 15 bp, Unknown
  misc_feature (1)..( 15): Result.001 file - promoters60/1023124
ttttaaaaaaaaaaa

SEQ ID NO: 98795 - DNA, 15 bp, Unknown
  misc_feature (1)..( 15): Result.001 file - promoters60/1023124
ttttaaaacaatgaa

SEQ ID NO: 98796 - DNA, 8 bp, Unknown
  misc_feature (1)..( 8): Result.001 file - promoters60/1023124
taaataat

SEQ ID NO: 98797 - DNA, 8 bp, Unknown
  misc_feature (1)..( 8): Result.001 file - promoters60/1023124
taactaat

SEQ ID NO: 98798 - DNA, 7 bp, Unknown
  misc_feature (1)..( 7): Result.001 file - promoters60/1023124
atatata

SEQ ID NO: 98799 - DNA, 7 bp, Unknown
  misc_feature (1)..( 7): Result.001 file - promoters60/1023124
atatata

SEQ ID NO: 98800 - DNA, 6 bp, Unknown
  misc_feature (1)..( 6): Result.001 file - promoters60/1023124
tatata

SEQ ID NO: 98801 - DNA, 6 bp, Unknown
  misc_feature (1)..( 6): Result.001 file - promoters60/1023124
tatata

SEQ ID NO: 98802 - DNA, 6 bp, Unknown
  misc_feature (1)..( 6): Result.001 file - promoters60/1023124
gagaac

SEQ ID NO: 98803 - DNA, 6 bp, Unknown
  misc_feature (1)..( 6): Result.001 file - promoters60/1023124
gagaac

SEQ ID NO: 98804 - DNA, 7 bp, Unknown
  misc_feature (1)..( 7): Result.001 file - promoters60/1023124
atgttgc

SEQ ID NO: 98805 - DNA, 7 bp, Unknown
  misc_feature (1)..( 7): Result.001 file - promoters60/1023124
atgctgc

SEQ ID NO: 98806 - DNA, 6 bp, Unknown
  misc_feature (1)..( 6): Result.001 file - promoters60/1023124
tttaaa

SEQ ID NO: 98807 - DNA, 6 bp, Unknown
  misc_feature (1)..( 6): Result.001 file - promoters60/1023124
tttaaa

SEQ ID NO: 98808 - DNA, 14 bp, Unknown
  misc_feature (1)..( 14): Result.001 file - promoters60/1023124
tctaaaaaaaaaaa

SEQ ID NO: 98809 - DNA, 14 bp, Unknown
  misc_feature (1)..( 14): Result.001 file - promoters60/1023124
tctcaaaaagaaaa

SEQ ID NO: 98810 - DNA, 7 bp, Unknown
  misc_feature (1)..( 7): Result.001 file - promoters60/1023124
caatatc

SEQ ID NO: 98811 - DNA, 7 bp, Unknown
  misc_feature (1)..( 7): Result.001 file - promoters60/1023143
caaaatc

SEQ ID NO: 98812 - DNA, 7 bp, Unknown
  misc_feature (1)..( 7): Result.001 file - promoters60/1023143
tttgata

SEQ ID NO: 98813 - DNA, 7 bp, Unknown
  misc_feature (1)..( 7): Result.001 file - promoters60/1023143
ttttata

SEQ ID NO: 98814 - DNA, 8 bp, Unknown
  misc_feature (1)..( 8): Result.001 file - promoters60/1023143
ttgtaaat

SEQ ID NO: 98815 - DNA, 8 bp, Unknown
  misc_feature (1)..( 8): Result.001 file - promoters60/1023143
ttgcaaat

SEQ ID NO: 98816 - DNA, 6 bp, Unknown
  misc_feature (1)..( 6): Result.001 file - promoters60/1023143
acattg

SEQ ID NO: 98817 - DNA, 6 bp, Unknown
  misc_feature (1)..( 6): Result.001 file - promoters60/1023143
acattg

SEQ ID NO: 98818 - DNA, 8 bp, Unknown
  misc_feature (1)..( 8): Result.001 file - promoters60/1023143
tttagtat

SEQ ID NO: 98819 - DNA, 8 bp, Unknown
  misc_feature (1)..( 8): Result.001 file - promoters60/1023143
ttttgtat

SEQ ID NO: 98820 - DNA, 7 bp, Unknown
  misc_feature (1)..( 7): Result.001 file - promoters60/1023143
aattatg

SEQ ID NO: 98821 - DNA, 7 bp, Unknown
  misc_feature (1)..( 7): Result.001 file - promoters60/1023143
tattatg

SEQ ID NO: 98822 - DNA, 7 bp, Unknown
  misc_feature (1)..( 7): Result.001 file - promoters60/1023143
tattata

SEQ ID NO: 98823 - DNA, 11 bp, Unknown
  misc_feature (1)..( 11): Result.001 file - promoters60/1023143
atgaaaactgt

SEQ ID NO: 98824 - DNA, 11 bp, Unknown
  misc_feature (1)..( 11): Result.001 file - promoters60/1023143
atgaaacctgt

SEQ ID NO: 98825 - DNA, 6 bp, Unknown
  misc_feature (1)..( 6): Result.001 file - promoters60/1023143
atacca

SEQ ID NO: 98826 - DNA, 6 bp, Unknown
  misc_feature (1)..( 6): Result.001 file - promoters60/1023143
atacca

SEQ ID NO: 98827 - DNA, 7 bp, Unknown
  misc_feature (1)..( 7): Result.001 file - promoters60/1023143
atgtctt

SEQ ID NO: 98828 - DNA, 7 bp, Unknown
  misc_feature (1)..( 7): Result.001 file - promoters60/1023143
atgactt

SEQ ID NO: 98829 - DNA, 6 bp, Unknown
  misc_feature (1)..( 6): Result.001 file - promoters60/1023143
ttcata

SEQ ID NO: 98830 - DNA, 6 bp, Unknown
  misc_feature (1)..( 6): Result.001 file - promoters60/1023143
ttcata

SEQ ID NO: 98831 - DNA, 9 bp, Unknown
  misc_feature (1)..( 9): Result.001 file - promoters60/1023143
ttttcagta

SEQ ID NO: 98832 - DNA, 9 bp, Unknown
  misc_feature (1)..( 9): Result.001 file - promoters60/1023143
ttttctgta

SEQ ID NO: 98833 - DNA, 6 bp, Unknown
  misc_feature (1)..( 6): Result.001 file - promoters60/1023143
tgcaaa

SEQ ID NO: 98834 - DNA, 6 bp, Unknown
  misc_feature (1)..( 6): Result.001 file - promoters60/1023143
tgcaaa

SEQ ID NO: 98835 - DNA, 8 bp, Unknown
  misc_feature (1)..( 8): Result.001 file - promoters60/1023143
tatcaaac

SEQ ID NO: 98836 - DNA, 8 bp, Unknown
  misc_feature (1)..( 8): Result.001 file - promoters60/1023143
tatcaaac

SEQ ID NO: 98837 - DNA, 6 bp, Unknown
  misc_feature (1)..( 6): Result.001 file - promoters60/1023143
aaaata

SEQ ID NO: 98838 - DNA, 6 bp, Unknown
  misc_feature (1)..( 6): Result.001 file - promoters60/1023143
aaaata

SEQ ID NO: 98839 - DNA, 7 bp, Unknown
  misc_feature (1)..( 7): Result.001 file - promoters60/1023143
ttatcaa

SEQ ID NO: 98840 - DNA, 7 bp, Unknown
  misc_feature (1)..( 7): Result.001 file - promoters60/1023143
ttaccaa

SEQ ID NO: 98841 - DNA, 9 bp, Unknown
  misc_feature (1)..( 9): Result.001 file - promoters60/1023143
tctttttct

SEQ ID NO: 98842 - DNA, 9 bp, Unknown
  misc_feature (1)..( 9): Result.001 file - promoters60/1023143
tctttttct

SEQ ID NO: 98843 - DNA, 9 bp, Unknown
  misc_feature (1)..( 9): Result.001 file - promoters60/1023143
ataattttt

SEQ ID NO: 98844 - DNA, 9 bp, Unknown
  misc_feature (1)..( 9): Result.001 file - promoters60/1023143
ataatgttt

SEQ ID NO: 98845 - DNA, 7 bp, Unknown
  misc_feature (1)..( 7): Result.001 file - promoters60/1023143
atagata

SEQ ID NO: 98846 - DNA, 7 bp, Unknown
  misc_feature (1)..( 7): Result.001 file - promoters60/1023143
atatata

SEQ ID NO: 98847 - DNA, 7 bp, Unknown
  misc_feature (1)..( 7): Result.001 file - promoters60/1023143
atgtaat

SEQ ID NO: 98848 - DNA, 7 bp, Unknown
  misc_feature (1)..( 7): Result.002 file - promoters60/1023143
atggaat

SEQ ID NO: 98849 - DNA, 7 bp, Unknown
  misc_feature (1)..( 7): Result.002 file - promoters60/1023143
acctaat

SEQ ID NO: 98850 - DNA, 7 bp, Unknown
  misc_feature (1)..( 7): Result.002 file - promoters60/1023143
accaaat

SEQ ID NO: 98851 - DNA, 6 bp, Unknown
  misc_feature (1)..( 6): Result.002 file - promoters60/1023143
aaaaaa

SEQ ID NO: 98852 - DNA, 6 bp, Unknown
  misc_feature (1)..( 6): Result.002 file - promoters60/1023143
aaaaaa

SEQ ID NO: 98853 - DNA, 6 bp, Unknown
  misc_feature (1)..( 6): Result.002 file - promoters60/1023143
gtcaaa

SEQ ID NO: 98854 - DNA, 6 bp, Unknown
  misc_feature (1)..( 6): Result.002 file - promoters60/1023143
gtcaaa

SEQ ID NO: 98855 - DNA, 6 bp, Unknown
  misc_feature (1)..( 6): Result.002 file - promoters60/1023143
ggcgag

SEQ ID NO: 98856 - DNA, 6 bp, Unknown
  misc_feature (1)..( 6): Result.002 file - promoters60/1023143
ggcgag

SEQ ID NO: 98857 - DNA, 8 bp, Unknown
  misc_feature (1)..( 8): Result.002 file - promoters60/1023210
caataaaa

SEQ ID NO: 98858 - DNA, 8 bp, Unknown
  misc_feature (1)..( 8): Result.002 file - promoters60/1023210
caaaaaaa

SEQ ID NO: 98859 - DNA, 6 bp, Unknown
  misc_feature (1)..( 6): Result.002 file - promoters60/1023210
aaaaca

SEQ ID NO: 98860 - DNA, 6 bp, Unknown
  misc_feature (1)..( 6): Result.002 file - promoters60/1023210
aaaaca

SEQ ID NO: 98861 - DNA, 8 bp, Unknown
  misc_feature (1)..( 8): Result.002 file - promoters60/1023210
gaattaaa

SEQ ID NO: 98862 - DNA, 8 bp, Unknown
  misc_feature (1)..( 8): Result.002 file - promoters60/1023210
gaaataaa

SEQ ID NO: 98863 - DNA, 7 bp, Unknown
  misc_feature (1)..( 7): Result.002 file - promoters60/1023210
caaattt

SEQ ID NO: 98864 - DNA, 7 bp, Unknown
  misc_feature (1)..( 7): Result.002 file - promoters60/1023210
caatttt

SEQ ID NO: 98865 - DNA, 6 bp, Unknown
  misc_feature (1)..( 6): Result.002 file - promoters60/1023210
ttaaaa

SEQ ID NO: 98866 - DNA, 6 bp, Unknown
  misc_feature (1)..( 6): Result.002 file - promoters60/1023210
ttaaaa

SEQ ID NO: 98867 - DNA, 6 bp, Unknown
  misc_feature (1)..( 6): Result.002 file - promoters60/1023210
gtaacg

SEQ ID NO: 98868 - DNA, 6 bp, Unknown
  misc_feature (1)..( 6): Result.002 file - promoters60/1023210
gtaacg

SEQ ID NO: 98869 - DNA, 7 bp, Unknown
  misc_feature (1)..( 7): Result.002 file - promoters60/1023210
gtggtta

SEQ ID NO: 98870 - DNA, 7 bp, Unknown
  misc_feature (1)..( 7): Result.002 file - promoters60/1023210
gtgttta

SEQ ID NO: 98871 - DNA, 10 bp, Unknown
  misc_feature (1)..( 10): Result.002 file - promoters60/1023210
tacgtgtcaa

SEQ ID NO: 98872 - DNA, 10 bp, Unknown
  misc_feature (1)..( 10): Result.002 file - promoters60/1023210
cacgtgtcat

SEQ ID NO: 98873 - DNA, 10 bp, Unknown
  misc_feature (1)..( 10): Result.002 file - promoters60/1023210
tacgtgtcaa

SEQ ID NO: 98874 - DNA, 20 bp, Unknown
  misc_feature (1)..( 20): Result.002 file - promoters60/1023210
ttggttattgcttcaccgcc

SEQ ID NO: 98875 - DNA, 20 bp, Unknown
  misc_feature (1)..( 20): Result.002 file - promoters60/1023210
ttagctattgcttcaccgcc

SEQ ID NO: 98876 - DNA, 20 bp, Unknown
  misc_feature (1)..( 20): Result.002 file - promoters60/1023210
ttggctattgcttccacgcc

SEQ ID NO: 98877 - DNA, 22 bp, Unknown
  misc_feature (1)..( 22): Result.002 file - promoters60/1023210
tctcgtgaccgactcgtcctcg

SEQ ID NO: 98878 - DNA, 22 bp, Unknown
  misc_feature (1)..( 22): Result.002 file - promoters60/1023210
gacctagtcgtcctcgtctttt

SEQ ID NO: 98879 - DNA, 22 bp, Unknown
  misc_feature (1)..( 22): Result.002 file - promoters60/1023210
gaccgagtcgtcctcgtctttt

SEQ ID NO: 98880 - DNA, 16 bp, Unknown
  misc_feature (1)..( 16): Result.002 file - promoters60/1023210
ttcttcttctataaat

SEQ ID NO: 98881 - DNA, 16 bp, Unknown
  misc_feature (1)..( 16): Result.002 file - promoters60/1023210
ttcttcttctataaaa

SEQ ID NO: 98882 - DNA, 16 bp, Unknown
  misc_feature (1)..( 16): Result.002 file - promoters60/1023210
ttttgcttctataaat

SEQ ID NO: 98883 - DNA, 6 bp, Unknown
  misc_feature (1)..( 6): Result.002 file - promoters60/1023210
gcttct

SEQ ID NO: 98884 - DNA, 6 bp, Unknown
  misc_feature (1)..( 6): Result.002 file - promoters60/1023210
gcttct

SEQ ID NO: 98885 - DNA, 8 bp, Unknown
  misc_feature (1)..( 8): Result.002 file - promoters60/1023210
ttctggcc

SEQ ID NO: 98886 - DNA, 8 bp, Unknown
  misc_feature (1)..( 8): Result.002 file - promoters60/1023210
ttcttgcc

SEQ ID NO: 98887 - DNA, 7 bp, Unknown
  misc_feature (1)..( 7): Result.002 file - promoters60/1023210
tacatat

SEQ ID NO: 98888 - DNA, 7 bp, Unknown
  misc_feature (1)..( 7): Result.002 file - promoters60/1023210
tacttat

SEQ ID NO: 98889 - DNA, 15 bp, Unknown
  misc_feature (1)..( 15): Result.002 file - promoters60/1023210
cgccttagctttctc

SEQ ID NO: 98890 - DNA, 15 bp, Unknown
  misc_feature (1)..( 15): Result.002 file - promoters60/1023210
cgccttagctttctc

SEQ ID NO: 98891 - DNA, 15 bp, Unknown
  misc_feature (1)..( 15): Result.002 file - promoters60/1023210
cgccttagctttctc

SEQ ID NO: 98892 - DNA, 6 bp, Unknown
  misc_feature (1)..( 6): Result.002 file - promoters60/1023210
tttttt

SEQ ID NO: 98893 - DNA, 6 bp, Unknown
  misc_feature (1)..( 6): Result.002 file - promoters60/1023210
tttttt

SEQ ID NO: 98894 - DNA, 9 bp, Unknown
  misc_feature (1)..( 9): Result.002 file - promoters60/1023210
acaaaaagg

SEQ ID NO: 98895 - DNA, 9 bp, Unknown
  misc_feature (1)..( 9): Result.002 file - promoters60/1023210
acacaaagg

SEQ ID NO: 98896 - DNA, 7 bp, Unknown
  misc_feature (1)..( 7): Result.002 file - promoters60/1023210
acgaaga

SEQ ID NO: 98897 - DNA, 7 bp, Unknown
  misc_feature (1)..( 7): Result.002 file - promoters60/1023210
acgcaga

SEQ ID NO: 98898 - DNA, 6 bp, Unknown
  misc_feature (1)..( 6): Result.002 file - promoters60/1023210
gttcaa

SEQ ID NO: 98899 - DNA, 6 bp, Unknown
  misc_feature (1)..( 6): Result.002 file - promoters60/1023210
gttcaa

SEQ ID NO: 98900 - DNA, 6 bp, Unknown
  misc_feature (1)..( 6): Result.002 file - promoters60/1023210
gtatat

SEQ ID NO: 98901 - DNA, 6 bp, Unknown
  misc_feature (1)..( 6): Result.002 file - promoters60/1023210
gtatat

SEQ ID NO: 98902 - DNA, 9 bp, Unknown
  misc_feature (1)..( 9): Result.002 file - promoters60/1023210
atcttatga

SEQ ID NO: 98903 - DNA, 9 bp, Unknown
  misc_feature (1)..( 9): Result.002 file - promoters60/1023210
atctaatga

SEQ ID NO: 98904 - DNA, 6 bp, Unknown
  misc_feature (1)..( 6): Result.002 file - promoters60/1023210
tcagta

SEQ ID NO: 98905 - DNA, 6 bp, Unknown
  misc_feature (1)..( 6): Result.002 file - promoters60/1023210
tcagta

SEQ ID NO: 98906 - DNA, 10 bp, Unknown
  misc_feature (1)..( 10): Result.002 file - promoters60/1023210
tttatcaact

SEQ ID NO: 98907 - DNA, 10 bp, Unknown
  misc_feature (1)..( 10): Result.002 file - promoters60/1023210
tttaacaact

SEQ ID NO: 98908 - DNA, 15 bp, Unknown
  misc_feature (1)..( 15): Result.002 file - promoters60/1023210
aaatacttttcctca

SEQ ID NO: 98909 - DNA, 15 bp, Unknown
  misc_feature (1)..( 15): Result.002 file - promoters60/1023210
aaatacttttcctca

SEQ ID NO: 98910 - DNA, 6 bp, Unknown
  misc_feature (1)..( 6): Result.002 file - promoters60/1023210
aacaac

SEQ ID NO: 98911 - DNA, 6 bp, Unknown
  misc_feature (1)..( 6): Result.002 file - promoters60/1023210
aacaac

SEQ ID NO: 98912 - DNA, 15 bp, Unknown
  misc_feature (1)..( 15): Result.002 file - promoters60/1023210
aatacccaaagagct

SEQ ID NO: 98913 - DNA, 15 bp, Unknown
  misc_feature (1)..( 15): Result.002 file - promoters60/1023210
aatacccaaagagct

SEQ ID NO: 98914 - DNA, 15 bp, Unknown
  misc_feature (1)..( 15): Result.002 file - promoters60/1023221
aaataaaattaatgt

SEQ ID NO: 98915 - DNA, 15 bp, Unknown
  misc_feature (1)..( 15): Result.002 file - promoters60/1023221
aaacaaaaactcata

SEQ ID NO: 98916 - DNA, 15 bp, Unknown
  misc_feature (1)..( 15): Result.002 file - promoters60/1023221
ctctaaaatctaata

SEQ ID NO: 98917 - DNA, 15 bp, Unknown
  misc_feature (1)..( 15): Result.002 file - promoters60/1023221
ctataacattaccga

SEQ ID NO: 98918 - DNA, 16 bp, Unknown
  misc_feature (1)..( 16): Result.002 file - promoters60/1023221
aactacacatagtgac

SEQ ID NO: 98919 - DNA, 16 bp, Unknown
  misc_feature (1)..( 16): Result.002 file - promoters60/1023221
aacgaaacaacatata

SEQ ID NO: 98920 - DNA, 16 bp, Unknown
  misc_feature (1)..( 16): Result.002 file - promoters60/1023221
aatctaacagcattag

SEQ ID NO: 98921 - DNA, 14 bp, Unknown
  misc_feature (1)..( 14): Result.002 file - promoters60/1023221
aaacatccttaata

SEQ ID NO: 98922 - DNA, 14 bp, Unknown
  misc_feature (1)..( 14): Result.002 file - promoters60/1023221
agacattcttaaat

SEQ ID NO: 98923 - DNA, 14 bp, Unknown
  misc_feature (1)..( 14): Result.002 file - promoters60/1023221
atacagacttaaaa

SEQ ID NO: 98924 - DNA, 14 bp, Unknown
  misc_feature (1)..( 14): Result.002 file - promoters60/1023221
taacattcgtgaac

SEQ ID NO: 98925 - DNA, 14 bp, Unknown
  misc_feature (1)..( 14): Result.002 file - promoters60/1023221
taacattaccgagg

SEQ ID NO: 98926 - DNA, 14 bp, Unknown
  misc_feature (1)..( 14): Result.002 file - promoters60/1023221
cattgctctaaaat

SEQ ID NO: 98927 - DNA, 11 bp, Unknown
  misc_feature (1)..( 11): Result.002 file - promoters60/1023237
aaattttctca

SEQ ID NO: 98928 - DNA, 11 bp, Unknown
  misc_feature (1)..( 11): Result.002 file - promoters60/1023237
ttcttttttca

SEQ ID NO: 98929 - DNA, 11 bp, Unknown
  misc_feature (1)..( 11): Result.002 file - promoters60/1023237
tctatttctct

SEQ ID NO: 98930 - DNA, 11 bp, Unknown
  misc_feature (1)..( 11): Result.002 file - promoters60/1023237
aggttttctac

SEQ ID NO: 98931 - DNA, 11 bp, Unknown
  misc_feature (1)..( 11): Result.002 file - promoters60/1023237
gttgtttcttc

SEQ ID NO: 98932 - DNA, 11 bp, Unknown
  misc_feature (1)..( 11): Result.002 file - promoters60/1023237
ttctttttttg

SEQ ID NO: 98933 - DNA, 12 bp, Unknown
  misc_feature (1)..( 12): Result.002 file - promoters60/1023237
atatttattttt

SEQ ID NO: 98934 - DNA, 12 bp, Unknown
  misc_feature (1)..( 12): Result.002 file - promoters60/1023237
attatttttatt

SEQ ID NO: 98935 - DNA, 12 bp, Unknown
  misc_feature (1)..( 12): Result.002 file - promoters60/1023237
agcttttttaat

SEQ ID NO: 98936 - DNA, 12 bp, Unknown
  misc_feature (1)..( 12): Result.002 file - promoters60/1023237
attcttttttac

SEQ ID NO: 98937 - DNA, 13 bp, Unknown
  misc_feature (1)..( 13): Result.002 file - promoters60/1023237
tttgtttcttaag

SEQ ID NO: 98938 - DNA, 13 bp, Unknown
  misc_feature (1)..( 13): Result.002 file - promoters60/1023237
accttcttttaaa

SEQ ID NO: 98939 - DNA, 13 bp, Unknown
  misc_feature (1)..( 13): Result.002 file - promoters60/1023237
agatcatttgaat

SEQ ID NO: 98940 - DNA, 16 bp, Unknown
  misc_feature (1)..( 16): Result.002 file - promoters60/1023237
aaaagttttgcaagaa

SEQ ID NO: 98941 - DNA, 16 bp, Unknown
  misc_feature (1)..( 16): Result.002 file - promoters60/1023237
aaatgttttgttgttt

SEQ ID NO: 98942 - DNA, 16 bp, Unknown
  misc_feature (1)..( 16): Result.002 file - promoters60/1023237
gttgattttgaaagaa

SEQ ID NO: 98943 - DNA, 16 bp, Unknown
  misc_feature (1)..( 16): Result.002 file - promoters60/1023237
gtatggttttaaatgt

SEQ ID NO: 98944 - DNA, 16 bp, Unknown
  misc_feature (1)..( 16): Result.002 file - promoters60/1023237
tctttttttggtggac

SEQ ID NO: 98945 - DNA, 16 bp, Unknown
  misc_feature (1)..( 16): Result.002 file - promoters60/1023237
tttatttttgtaggtc

SEQ ID NO: 98946 - DNA, 16 bp, Unknown
  misc_feature (1)..( 16): Result.002 file - promoters60/1023237
tgtgtgtttctttttt

SEQ ID NO: 98947 - DNA, 16 bp, Unknown
  misc_feature (1)..( 16): Result.002 file - promoters60/1023237
ttgttgtttcttctcc

SEQ ID NO: 98948 - DNA, 16 bp, Unknown
  misc_feature (1)..( 16): Result.002 file - promoters60/1023237
tcaaggcttctttttt

SEQ ID NO: 98949 - DNA, 16 bp, Unknown
  misc_feature (1)..( 16): Result.002 file - promoters60/1023237
cataagtttctgatat

SEQ ID NO: 98950 - DNA, 16 bp, Unknown
  misc_feature (1)..( 16): Result.002 file - promoters60/1023237
ttgttgtttacgttgt

SEQ ID NO: 98951 - DNA, 16 bp, Unknown
  misc_feature (1)..( 16): Result.002 file - promoters60/1023237
cgcttggttccagaag

SEQ ID NO: 98952 - DNA, 9 bp, Unknown
  misc_feature (1)..( 9): Result.002 file - promoters60/1023278
taatattta

SEQ ID NO: 98953 - DNA, 9 bp, Unknown
  misc_feature (1)..( 9): Result.002 file - promoters60/1023278
gaatttttg

SEQ ID NO: 98954 - DNA, 9 bp, Unknown
  misc_feature (1)..( 9): Result.002 file - promoters60/1023278
gcctattta

SEQ ID NO: 98955 - DNA, 9 bp, Unknown
  misc_feature (1)..( 9): Result.002 file - promoters60/1023278
aggtttttg

SEQ ID NO: 98956 - DNA, 9 bp, Unknown
  misc_feature (1)..( 9): Result.002 file - promoters60/1023278
gaagtttct

SEQ ID NO: 98957 - DNA, 9 bp, Unknown
  misc_feature (1)..( 9): Result.002 file - promoters60/1023278
taattttat

SEQ ID NO: 98958 - DNA, 15 bp, Unknown
  misc_feature (1)..( 15): Result.002 file - promoters60/1023278
acaatgggctgggcc

SEQ ID NO: 98959 - DNA, 15 bp, Unknown
  misc_feature (1)..( 15): Result.002 file - promoters60/1023278
attttgggcttctta

SEQ ID NO: 98960 - DNA, 15 bp, Unknown
  misc_feature (1)..( 15): Result.002 file - promoters60/1023278
gaaataggcccaaca

SEQ ID NO: 98961 - DNA, 15 bp, Unknown
  misc_feature (1)..( 15): Result.002 file - promoters60/1023278
taattgggcttttta

SEQ ID NO: 98962 - DNA, 15 bp, Unknown
  misc_feature (1)..( 15): Result.002 file - promoters60/1023278
taaaaaggcccatta

SEQ ID NO: 98963 - DNA, 15 bp, Unknown
  misc_feature (1)..( 15): Result.002 file - promoters60/1023278
taaaaaatatctgaa

SEQ ID NO: 98964 - DNA, 10 bp, Unknown
  misc_feature (1)..( 10): Result.002 file - promoters60/1023299
aaataaaacg

SEQ ID NO: 98965 - DNA, 10 bp, Unknown
  misc_feature (1)..( 10): Result.002 file - promoters60/1023299
aaattaaagg

SEQ ID NO: 98966 - DNA, 10 bp, Unknown
  misc_feature (1)..( 10): Result.002 file - promoters60/1023299
gtataaaata

SEQ ID NO: 98967 - DNA, 10 bp, Unknown
  misc_feature (1)..( 10): Result.002 file - promoters60/1023299
gcttaacatt

SEQ ID NO: 98968 - DNA, 9 bp, Unknown
  misc_feature (1)..( 9): Result.002 file - promoters60/1023299
tttcatttt

SEQ ID NO: 98969 - DNA, 9 bp, Unknown
  misc_feature (1)..( 9): Result.002 file - promoters60/1023299
attcattgt

SEQ ID NO: 98970 - DNA, 9 bp, Unknown
  misc_feature (1)..( 9): Result.002 file - promoters60/1023299
tttcatctc

SEQ ID NO: 98971 - DNA, 10 bp, Unknown
  misc_feature (1)..( 10): Result.002 file - promoters60/1023299
tttccatttt

SEQ ID NO: 98972 - DNA, 9 bp, Unknown
  misc_feature (1)..( 9): Result.002 file - promoters60/1023299
acttctata

SEQ ID NO: 98973 - DNA, 9 bp, Unknown
  misc_feature (1)..( 9): Result.002 file - promoters60/1023299
ttttcaata

SEQ ID NO: 98974 - DNA, 10 bp, Unknown
  misc_feature (1)..( 10): Result.002 file - promoters60/1023299
atttacaatt

SEQ ID NO: 98975 - DNA, 10 bp, Unknown
  misc_feature (1)..( 10): Result.002 file - promoters60/1023299
atttaccgtt

SEQ ID NO: 98976 - DNA, 9 bp, Unknown
  misc_feature (1)..( 9): Result.002 file - promoters60/1023299
cattttatt

SEQ ID NO: 98977 - DNA, 9 bp, Unknown
  misc_feature (1)..( 9): Result.002 file - promoters60/1023299
cattttata

SEQ ID NO: 98978 - DNA, 9 bp, Unknown
  misc_feature (1)..( 9): Result.002 file - promoters60/1023299
cattttcca

SEQ ID NO: 98979 - DNA, 9 bp, Unknown
  misc_feature (1)..( 9): Result.002 file - promoters60/1023299
ttgtttata

SEQ ID NO: 98980 - DNA, 11 bp, Unknown
  misc_feature (1)..( 11): Result.002 file - promoters60/1023299
ctataaataca

SEQ ID NO: 98981 - DNA, 11 bp, Unknown
  misc_feature (1)..( 11): Result.002 file - promoters60/1023299
atggaaacaca

SEQ ID NO: 98982 - DNA, 11 bp, Unknown
  misc_feature (1)..( 11): Result.002 file - promoters60/1023299
ctataaatatc

SEQ ID NO: 98983 - DNA, 11 bp, Unknown
  misc_feature (1)..( 11): Result.002 file - promoters60/1023299
ctttaaatacc

SEQ ID NO: 98984 - DNA, 10 bp, Unknown
  misc_feature (1)..( 10): Result.002 file - promoters60/1023299
gtaatattac

SEQ ID NO: 98985 - DNA, 10 bp, Unknown
  misc_feature (1)..( 10): Result.002 file - promoters60/1023299
cgtttattac

SEQ ID NO: 98986 - DNA, 10 bp, Unknown
  misc_feature (1)..( 10): Result.002 file - promoters60/1023299
acaattttaa

SEQ ID NO: 98987 - DNA, 10 bp, Unknown
  misc_feature (1)..( 10): Result.002 file - promoters60/1023299
acaatttgta

SEQ ID NO: 98988 - DNA, 8 bp, Unknown
  misc_feature (1)..( 8): Result.002 file - promoters60/1023397
gattttcc

SEQ ID NO: 98989 - DNA, 8 bp, Unknown
  misc_feature (1)..( 8): Result.002 file - promoters60/1023397
aattatcc

SEQ ID NO: 98990 - DNA, 8 bp, Unknown
  misc_feature (1)..( 8): Result.002 file - promoters60/1023397
gatattcg

SEQ ID NO: 98991 - DNA, 15 bp, Unknown
  misc_feature (1)..( 15): Result.002 file - promoters60/1023397
ctttttttggttttt

SEQ ID NO: 98992 - DNA, 15 bp, Unknown
  misc_feature (1)..( 15): Result.002 file - promoters60/1023397
cttctttttggttaa

SEQ ID NO: 98993 - DNA, 15 bp, Unknown
  misc_feature (1)..( 15): Result.002 file - promoters60/1023397
ctttttttggttttt

SEQ ID NO: 98994 - DNA, 15 bp, Unknown
  misc_feature (1)..( 15): Result.002 file - promoters60/1023397
ctttttttttttggt

SEQ ID NO: 98995 - DNA, 12 bp, Unknown
  misc_feature (1)..( 12): Result.002 file - promoters60/1023397
tctgtttttgtt

SEQ ID NO: 98996 - DNA, 12 bp, Unknown
  misc_feature (1)..( 12): Result.002 file - promoters60/1023397
tctgtttatgtt

SEQ ID NO: 98997 - DNA, 12 bp, Unknown
  misc_feature (1)..( 12): Result.002 file - promoters60/1023397
tctgtttccgga

SEQ ID NO: 98998 - DNA, 15 bp, Unknown
  misc_feature (1)..( 15): Result.002 file - promoters60/1023397
tctggagagattttg

SEQ ID NO: 98999 - DNA, 15 bp, Unknown
  misc_feature (1)..( 15): Result.002 file - promoters60/1023397
tctggagagattttg

SEQ ID NO: 99000 - DNA, 15 bp, Unknown
  misc_feature (1)..( 15): Result.002 file - promoters60/1023397
tatgatctgatttta

SEQ ID NO: 99001 - DNA, 8 bp, Unknown
  misc_feature (1)..( 8): Result.002 file - promoters60/1023397
gattttga

SEQ ID NO: 99002 - DNA, 8 bp, Unknown
  misc_feature (1)..( 8): Result.002 file - promoters60/1023397
gattttcc

SEQ ID NO: 99003 - DNA, 9 bp, Unknown
  misc_feature (1)..( 9): Result.002 file - promoters60/1023397
gatgttttt

SEQ ID NO: 99004 - DNA, 15 bp, Unknown
  misc_feature (1)..( 15): Result.002 file - promoters60/1023397
tttctttttttggtt

SEQ ID NO: 99005 - DNA, 15 bp, Unknown
  misc_feature (1)..( 15): Result.002 file - promoters60/1023397
attctttcttttttt

SEQ ID NO: 99006 - DNA, 15 bp, Unknown
  misc_feature (1)..( 15): Result.002 file - promoters60/1023397
ctttttttttttggt

SEQ ID NO: 99007 - DNA, 15 bp, Unknown
  misc_feature (1)..( 15): Result.002 file - promoters60/1023397
cttctttttggttaa

SEQ ID NO: 99008 - DNA, 7 bp, Unknown
  misc_feature (1)..( 7): Result.002 file - promoters60/1023397
ttaaatt

SEQ ID NO: 99009 - DNA, 7 bp, Unknown
  misc_feature (1)..( 7): Result.002 file - promoters60/1023397
ttatatt

SEQ ID NO: 99010 - DNA, 7 bp, Unknown
  misc_feature (1)..( 7): Result.002 file - promoters60/1023397
ttaaatt

SEQ ID NO: 99011 - DNA, 12 bp, Unknown
  misc_feature (1)..( 12): Result.002 file - promoters60/1023407
caaaaatgagaa

SEQ ID NO: 99012 - DNA, 12 bp, Unknown
  misc_feature (1)..( 12): Result.002 file - promoters60/1023407
caaaaattgaag

SEQ ID NO: 99013 - DNA, 12 bp, Unknown
  misc_feature (1)..( 12): Result.002 file - promoters60/1023407
taaaaatgtgaa

SEQ ID NO: 99014 - DNA, 12 bp, Unknown
  misc_feature (1)..( 12): Result.002 file - promoters60/1023407
tcaaaattaatt

SEQ ID NO: 99015 - DNA, 12 bp, Unknown
  misc_feature (1)..( 12): Result.002 file - promoters60/1023407
aaaatattgact

SEQ ID NO: 99016 - DNA, 12 bp, Unknown
  misc_feature (1)..( 12): Result.002 file - promoters60/1023407
gaaatatctttc

SEQ ID NO: 99017 - DNA, 16 bp, Unknown
  misc_feature (1)..( 16): Result.002 file - promoters60/1023407
tgggcttaatacctaa

SEQ ID NO: 99018 - DNA, 16 bp, Unknown
  misc_feature (1)..( 16): Result.002 file - promoters60/1023407
cacttgtaatacataa

SEQ ID NO: 99019 - DNA, 16 bp, Unknown
  misc_feature (1)..( 16): Result.002 file - promoters60/1023407
ctctaataatacatca

SEQ ID NO: 99020 - DNA, 16 bp, Unknown
  misc_feature (1)..( 16): Result.002 file - promoters60/1023407
cctgaatcatatgggc

SEQ ID NO: 99021 - DNA, 16 bp, Unknown
  misc_feature (1)..( 16): Result.002 file - promoters60/1023407
ttgcgataatatacaa

SEQ ID NO: 99022 - DNA, 16 bp, Unknown
  misc_feature (1)..( 16): Result.002 file - promoters60/1023407
ttctgctaatttacca

SEQ ID NO: 99023 - DNA, 8 bp, Unknown
  misc_feature (1)..( 8): Result.002 file - promoters60/1023528
aaaacatg

SEQ ID NO: 99024 - DNA, 8 bp, Unknown
  misc_feature (1)..( 8): Result.002 file - promoters60/1023528
aaaacaga

SEQ ID NO: 99025 - DNA, 9 bp, Unknown
  misc_feature (1)..( 9): Result.002 file - promoters60/1023528
aaaatcaga

SEQ ID NO: 99026 - DNA, 9 bp, Unknown
  misc_feature (1)..( 9): Result.002 file - promoters60/1023528
aaaaactta

SEQ ID NO: 99027 - DNA, 8 bp, Unknown
  misc_feature (1)..( 8): Result.002 file - promoters60/1023528
gattaaag

SEQ ID NO: 99028 - DNA, 8 bp, Unknown
  misc_feature (1)..( 8): Result.002 file - promoters60/1023528
tattaaag

SEQ ID NO: 99029 - DNA, 8 bp, Unknown
  misc_feature (1)..( 8): Result.002 file - promoters60/1023528
gattaacg

SEQ ID NO: 99030 - DNA, 7 bp, Unknown
  misc_feature (1)..( 7): Result.002 file - promoters60/1023583
aattaga

SEQ ID NO: 99031 - DNA, 7 bp, Unknown
  misc_feature (1)..( 7): Result.002 file - promoters60/1023583
aataaga

SEQ ID NO: 99032 - DNA, 9 bp, Unknown
  misc_feature (1)..( 9): Result.002 file - promoters60/1023583
gtttttaag

SEQ ID NO: 99033 - DNA, 9 bp, Unknown
  misc_feature (1)..( 9): Result.002 file - promoters60/1023583
gtttataag

SEQ ID NO: 99034 - DNA, 10 bp, Unknown
  misc_feature (1)..( 10): Result.002 file - promoters60/1023583
acaaaacaaa

SEQ ID NO: 99035 - DNA, 10 bp, Unknown
  misc_feature (1)..( 10): Result.002 file - promoters60/1023583
tgaaaagaaa

SEQ ID NO: 99036 - DNA, 10 bp, Unknown
  misc_feature (1)..( 10): Result.002 file - promoters60/1023583
tgagaagagc

SEQ ID NO: 99037 - DNA, 10 bp, Unknown
  misc_feature (1)..( 10): Result.002 file - promoters60/1023583
tgaaaaatat

SEQ ID NO: 99038 - DNA, 10 bp, Unknown
  misc_feature (1)..( 10): Result.002 file - promoters60/1023583
tgaaaattat

SEQ ID NO: 99039 - DNA, 6 bp, Unknown
  misc_feature (1)..( 6): Result.002 file - promoters60/1023583
aatatg

SEQ ID NO: 99040 - DNA, 6 bp, Unknown
  misc_feature (1)..( 6): Result.002 file - promoters60/1023583
aatatg

SEQ ID NO: 99041 - DNA, 6 bp, Unknown
  misc_feature (1)..( 6): Result.002 file - promoters60/1023583
ttttaa

SEQ ID NO: 99042 - DNA, 6 bp, Unknown
  misc_feature (1)..( 6): Result.002 file - promoters60/1023583
ttttaa

SEQ ID NO: 99043 - DNA, 7 bp, Unknown
  misc_feature (1)..( 7): Result.002 file - promoters60/1023583
aaaactg

SEQ ID NO: 99044 - DNA, 7 bp, Unknown
  misc_feature (1)..( 7): Result.002 file - promoters60/1023583
aaagctg

SEQ ID NO: 99045 - DNA, 8 bp, Unknown
  misc_feature (1)..( 8): Result.002 file - promoters60/1023583
gtttttat

SEQ ID NO: 99046 - DNA, 8 bp, Unknown
  misc_feature (1)..( 8): Result.002 file - promoters60/1023583
gttattat

SEQ ID NO: 99047 - DNA, 6 bp, Unknown
  misc_feature (1)..( 6): Result.002 file - promoters60/1023583
cgtctt

SEQ ID NO: 99048 - DNA, 6 bp, Unknown
  misc_feature (1)..( 6): Result.002 file - promoters60/1023583
cgtctt

SEQ ID NO: 99049 - DNA, 8 bp, Unknown
  misc_feature (1)..( 8): Result.002 file - promoters60/1023583
caaatttc

SEQ ID NO: 99050 - DNA, 8 bp, Unknown
  misc_feature (1)..( 8): Result.002 file - promoters60/1023583
caagtttc

SEQ ID NO: 99051 - DNA, 6 bp, Unknown
  misc_feature (1)..( 6): Result.002 file - promoters60/1023583
tggttc

SEQ ID NO: 99052 - DNA, 6 bp, Unknown
  misc_feature (1)..( 6): Result.002 file - promoters60/1023583
tggttc

SEQ ID NO: 99053 - DNA, 6 bp, Unknown
  misc_feature (1)..( 6): Result.002 file - promoters60/1023583
attata

SEQ ID NO: 99054 - DNA, 6 bp, Unknown
  misc_feature (1)..( 6): Result.002 file - promoters60/1023583
attata

SEQ ID NO: 99055 - DNA, 9 bp, Unknown
  misc_feature (1)..( 9): Result.002 file - promoters60/1023594
caaaataat

SEQ ID NO: 99056 - DNA, 9 bp, Unknown
  misc_feature (1)..( 9): Result.002 file - promoters60/1023594
tcaaataat

SEQ ID NO: 99057 - DNA, 9 bp, Unknown
  misc_feature (1)..( 9): Result.002 file - promoters60/1023594
caaaacaat

SEQ ID NO: 99058 - DNA, 11 bp, Unknown
  misc_feature (1)..( 11): Result.002 file - promoters60/1023594
caacttgtcaa

SEQ ID NO: 99059 - DNA, 11 bp, Unknown
  misc_feature (1)..( 11): Result.002 file - promoters60/1023594
caactagtcaa

SEQ ID NO: 99060 - DNA, 11 bp, Unknown
  misc_feature (1)..( 11): Result.002 file - promoters60/1023594
aaactagaaaa

SEQ ID NO: 99061 - DNA, 9 bp, Unknown
  misc_feature (1)..( 9): Result.002 file - promoters60/1023594
taaaaaatg

SEQ ID NO: 99062 - DNA, 9 bp, Unknown
  misc_feature (1)..( 9): Result.002 file - promoters60/1023594
tgaaaaatt

SEQ ID NO: 99063 - DNA, 9 bp, Unknown
  misc_feature (1)..( 9): Result.002 file - promoters60/1023594
tgagaaatt

SEQ ID NO: 99064 - DNA, 9 bp, Unknown
  misc_feature (1)..( 9): Result.002 file - promoters60/1023594
acaaagatt

SEQ ID NO: 99065 - DNA, 10 bp, Unknown
  misc_feature (1)..( 10): Result.002 file - promoters60/1023594
ctataaatat

SEQ ID NO: 99066 - DNA, 10 bp, Unknown
  misc_feature (1)..( 10): Result.002 file - promoters60/1023594
tcatatatat

SEQ ID NO: 99067 - DNA, 10 bp, Unknown
  misc_feature (1)..( 10): Result.002 file - promoters60/1023594
ctataaaagg

SEQ ID NO: 99068 - DNA, 9 bp, Unknown
  misc_feature (1)..( 9): Result.002 file - promoters60/1023619
aattgatga

SEQ ID NO: 99069 - DNA, 9 bp, Unknown
  misc_feature (1)..( 9): Result.002 file - promoters60/1023619
aattgattc

SEQ ID NO: 99070 - DNA, 9 bp, Unknown
  misc_feature (1)..( 9): Result.002 file - promoters60/1023619
atttgattg

SEQ ID NO: 99071 - DNA, 9 bp, Unknown
  misc_feature (1)..( 9): Result.002 file - promoters60/1023619
aattgagca

SEQ ID NO: 99072 - DNA, 9 bp, Unknown
  misc_feature (1)..( 9): Result.002 file - promoters60/1023619
aatttattt

SEQ ID NO: 99073 - DNA, 9 bp, Unknown
  misc_feature (1)..( 9): Result.002 file - promoters60/1023619
ctttgattt

SEQ ID NO: 99074 - DNA, 9 bp, Unknown
  misc_feature (1)..( 9): Result.002 file - promoters60/1023619
cattggttt

SEQ ID NO: 99075 - DNA, 8 bp, Unknown
  misc_feature (1)..( 8): Result.002 file - promoters60/1023619
tttttttt

SEQ ID NO: 99076 - DNA, 8 bp, Unknown
  misc_feature (1)..( 8): Result.002 file - promoters60/1023619
gatttttt

SEQ ID NO: 99077 - DNA, 9 bp, Unknown
  misc_feature (1)..( 9): Result.002 file - promoters60/1023619
aatttattt

SEQ ID NO: 99078 - DNA, 9 bp, Unknown
  misc_feature (1)..( 9): Result.002 file - promoters60/1023619
aattgattc

SEQ ID NO: 99079 - DNA, 9 bp, Unknown
  misc_feature (1)..( 9): Result.002 file - promoters60/1023619
ctttgattt

SEQ ID NO: 99080 - DNA, 9 bp, Unknown
  misc_feature (1)..( 9): Result.002 file - promoters60/1023619
cattggttt

SEQ ID NO: 99081 - DNA, 8 bp, Unknown
  misc_feature (1)..( 8): Result.002 file - promoters60/1023619
tttaattg

SEQ ID NO: 99082 - DNA, 8 bp, Unknown
  misc_feature (1)..( 8): Result.002 file - promoters60/1023619
tttgattt

SEQ ID NO: 99083 - DNA, 8 bp, Unknown
  misc_feature (1)..( 8): Result.002 file - promoters60/1023619
tttgattg

SEQ ID NO: 99084 - DNA, 8 bp, Unknown
  misc_feature (1)..( 8): Result.002 file - promoters60/1023619
attgattc

SEQ ID NO: 99085 - DNA, 8 bp, Unknown
  misc_feature (1)..( 8): Result.002 file - promoters60/1023619
attggttt

SEQ ID NO: 99086 - DNA, 8 bp, Unknown
  misc_feature (1)..( 8): Result.002 file - promoters60/1023619
agtgattt

SEQ ID NO: 99087 - DNA, 9 bp, Unknown
  misc_feature (1)..( 9): Result.002 file - promoters60/1023634
atttgagag

SEQ ID NO: 99088 - DNA, 9 bp, Unknown
  misc_feature (1)..( 9): Result.002 file - promoters60/1023634
ttttgagtg

SEQ ID NO: 99089 - DNA, 9 bp, Unknown
  misc_feature (1)..( 9): Result.002 file - promoters60/1023634
atttgaaat

SEQ ID NO: 99090 - DNA, 9 bp, Unknown
  misc_feature (1)..( 9): Result.002 file - promoters60/1023634
acttgggag

SEQ ID NO: 99091 - DNA, 9 bp, Unknown
  misc_feature (1)..( 9): Result.002 file - promoters60/1023634
atttgattc

SEQ ID NO: 99092 - DNA, 9 bp, Unknown
  misc_feature (1)..( 9): Result.002 file - promoters60/1023634
ctttgaagc

SEQ ID NO: 99093 - DNA, 9 bp, Unknown
  misc_feature (1)..( 9): Result.002 file - promoters60/1023634
gttttagag

SEQ ID NO: 99094 - DNA, 6 bp, Unknown
  misc_feature (1)..( 6): Result.002 file - promoters60/1023698
tatttt

SEQ ID NO: 99095 - DNA, 6 bp, Unknown
  misc_feature (1)..( 6): Result.002 file - promoters60/1023698
tatttt

SEQ ID NO: 99096 - DNA, 6 bp, Unknown
  misc_feature (1)..( 6): Result.002 file - promoters60/1023698
ttttta

SEQ ID NO: 99097 - DNA, 6 bp, Unknown
  misc_feature (1)..( 6): Result.002 file - promoters60/1023698
ttttta

SEQ ID NO: 99098 - DNA, 7 bp, Unknown
  misc_feature (1)..( 7): Result.002 file - promoters60/1023698
taaaatt

SEQ ID NO: 99099 - DNA, 7 bp, Unknown
  misc_feature (1)..( 7): Result.002 file - promoters60/1023698
taaaatt

SEQ ID NO: 99100 - DNA, 8 bp, Unknown
  misc_feature (1)..( 8): Result.002 file - promoters60/1023698
tacagtat

SEQ ID NO: 99101 - DNA, 8 bp, Unknown
  misc_feature (1)..( 8): Result.002 file - promoters60/1023698
tacattat

SEQ ID NO: 99102 - DNA, 7 bp, Unknown
  misc_feature (1)..( 7): Result.002 file - promoters60/1023698
ttatttt

SEQ ID NO: 99103 - DNA, 7 bp, Unknown
  misc_feature (1)..( 7): Result.002 file - promoters60/1023698
ttatttt

SEQ ID NO: 99104 - DNA, 9 bp, Unknown
  misc_feature (1)..( 9): Result.002 file - promoters60/1023698
aagtaaaaa

SEQ ID NO: 99105 - DNA, 9 bp, Unknown
  misc_feature (1)..( 9): Result.002 file - promoters60/1023698
aagcaaaaa

SEQ ID NO: 99106 - DNA, 9 bp, Unknown
  misc_feature (1)..( 9): Result.002 file - promoters60/1023698
aagcaaaaa

SEQ ID NO: 99107 - DNA, 8 bp, Unknown
  misc_feature (1)..( 8): Result.002 file - promoters60/1023698
ctttattt

SEQ ID NO: 99108 - DNA, 8 bp, Unknown
  misc_feature (1)..( 8): Result.002 file - promoters60/1023698
ctttatag

SEQ ID NO: 99109 - DNA, 8 bp, Unknown
  misc_feature (1)..( 8): Result.002 file - promoters60/1023698
ttttattt

SEQ ID NO: 99110 - DNA, 7 bp, Unknown
  misc_feature (1)..( 7): Result.002 file - promoters60/1023698
atttttt

SEQ ID NO: 99111 - DNA, 7 bp, Unknown
  misc_feature (1)..( 7): Result.002 file - promoters60/1023698
atttttt

SEQ ID NO: 99112 - DNA, 7 bp, Unknown
  misc_feature (1)..( 7): Result.002 file - promoters60/1023698
atttttt

SEQ ID NO: 99113 - DNA, 8 bp, Unknown
  misc_feature (1)..( 8): Result.002 file - promoters60/1023698
ataaaaat

SEQ ID NO: 99114 - DNA, 8 bp, Unknown
  misc_feature (1)..( 8): Result.002 file - promoters60/1023698
atagaaat

SEQ ID NO: 99115 - DNA, 10 bp, Unknown
  misc_feature (1)..( 10): Result.002 file - promoters60/1023698
aaaaataaaa

SEQ ID NO: 99116 - DNA, 10 bp, Unknown
  misc_feature (1)..( 10): Result.002 file - promoters60/1023698
gaaattaatt

SEQ ID NO: 99117 - DNA, 10 bp, Unknown
  misc_feature (1)..( 10): Result.002 file - promoters60/1023698
taaaatataa

SEQ ID NO: 99118 - DNA, 8 bp, Unknown
  misc_feature (1)..( 8): Result.002 file - promoters60/1023698
tttcaaaa

SEQ ID NO: 99119 - DNA, 8 bp, Unknown
  misc_feature (1)..( 8): Result.002 file - promoters60/1023698
tttcgaaa

SEQ ID NO: 99120 - DNA, 9 bp, Unknown
  misc_feature (1)..( 9): Result.002 file - promoters60/1023698
tcttaatag

SEQ ID NO: 99121 - DNA, 9 bp, Unknown
  misc_feature (1)..( 9): Result.002 file - promoters60/1023698
tcttaattt

SEQ ID NO: 99122 - DNA, 9 bp, Unknown
  misc_feature (1)..( 9): Result.002 file - promoters60/1023698
ttttaattt

SEQ ID NO: 99123 - DNA, 10 bp, Unknown
  misc_feature (1)..( 10): Result.002 file - promoters60/1023698
atatttagtt

SEQ ID NO: 99124 - DNA, 10 bp, Unknown
  misc_feature (1)..( 10): Result.002 file - promoters60/1023698
taattttgtt

SEQ ID NO: 99125 - DNA, 10 bp, Unknown
  misc_feature (1)..( 10): Result.002 file - promoters60/1023698
atatttagta

SEQ ID NO: 99126 - DNA, 7 bp, Unknown
  misc_feature (1)..( 7): Result.002 file - promoters60/1023698
acattat

SEQ ID NO: 99127 - DNA, 7 bp, Unknown
  misc_feature (1)..( 7): Result.002 file - promoters60/1023698
acattat

SEQ ID NO: 99128 - DNA, 8 bp, Unknown
  misc_feature (1)..( 8): Result.002 file - promoters60/1023698
taaacaat

SEQ ID NO: 99129 - DNA, 8 bp, Unknown
  misc_feature (1)..( 8): Result.002 file - promoters60/1023698
taaagaat

SEQ ID NO: 99130 - DNA, 8 bp, Unknown
  misc_feature (1)..( 8): Result.002 file - promoters60/1023698
aagattaa

SEQ ID NO: 99131 - DNA, 8 bp, Unknown
  misc_feature (1)..( 8): Result.002 file - promoters60/1023698
aagtttaa

SEQ ID NO: 99132 - DNA, 6 bp, Unknown
  misc_feature (1)..( 6): Result.002 file - promoters60/1023698
aaaact

SEQ ID NO: 99133 - DNA, 6 bp, Unknown
  misc_feature (1)..( 6): Result.002 file - promoters60/1023698
aaaact

SEQ ID NO: 99134 - DNA, 8 bp, Unknown
  misc_feature (1)..( 8): Result.002 file - promoters60/1023698
ctatgtgg

SEQ ID NO: 99135 - DNA, 8 bp, Unknown
  misc_feature (1)..( 8): Result.002 file - promoters60/1023698
ctatgtgg

SEQ ID NO: 99136 - DNA, 15 bp, Unknown
  misc_feature (1)..( 15): Result.002 file - promoters60/1023698
ggcatgaggtgtaaa

SEQ ID NO: 99137 - DNA, 15 bp, Unknown
  misc_feature (1)..( 15): Result.002 file - promoters60/1023698
ggcatgaggtgtaaa

SEQ ID NO: 99138 - DNA, 20 bp, Unknown
  misc_feature (1)..( 20): Result.002 file - promoters60/1023698
ttttatatataagcaaaaaa

SEQ ID NO: 99139 - DNA, 20 bp, Unknown
  misc_feature (1)..( 20): Result.002 file - promoters60/1023698
ttttttatataagcaaaaaa

SEQ ID NO: 99140 - DNA, 8 bp, Unknown
  misc_feature (1)..( 8): Result.002 file - promoters60/1023698
atcatcat

SEQ ID NO: 99141 - DNA, 8 bp, Unknown
  misc_feature (1)..( 8): Result.002 file - promoters60/1023698
atcatcat

SEQ ID NO: 99142 - DNA, 8 bp, Unknown
  misc_feature (1)..( 8): Result.002 file - promoters60/1023698
aaactaat

SEQ ID NO: 99143 - DNA, 8 bp, Unknown
  misc_feature (1)..( 8): Result.002 file - promoters60/1023698
aaattaat

SEQ ID NO: 99144 - DNA, 7 bp, Unknown
  misc_feature (1)..( 7): Result.002 file - promoters60/1023698
taatttt

SEQ ID NO: 99145 - DNA, 7 bp, Unknown
  misc_feature (1)..( 7): Result.002 file - promoters60/1023698
taatttt

SEQ ID NO: 99146 - DNA, 11 bp, Unknown
  misc_feature (1)..( 11): Result.002 file - promoters60/1023698
ttattgtaaac

SEQ ID NO: 99147 - DNA, 11 bp, Unknown
  misc_feature (1)..( 11): Result.002 file - promoters60/1023698
ttattgtaaac

SEQ ID NO: 99148 - DNA, 15 bp, Unknown
  misc_feature (1)..( 15): Result.002 file - promoters60/1023698
tttgcttctactata

SEQ ID NO: 99149 - DNA, 15 bp, Unknown
  misc_feature (1)..( 15): Result.002 file - promoters60/1023698
tttgcttctactata

SEQ ID NO: 99150 - DNA, 19 bp, Unknown
  misc_feature (1)..( 19): Result.002 file - promoters60/1023698
ctcatcttgatcaaatctc

SEQ ID NO: 99151 - DNA, 19 bp, Unknown
  misc_feature (1)..( 19): Result.002 file - promoters60/1023698
ctcctcttgatcaaatctc

SEQ ID NO: 99152 - DNA, 6 bp, Unknown
  misc_feature (1)..( 6): Result.002 file - promoters60/1023698
aatttc

SEQ ID NO: 99153 - DNA, 6 bp, Unknown
  misc_feature (1)..( 6): Result.002 file - promoters60/1023698
aatttc

SEQ ID NO: 99154 - DNA, 7 bp, Unknown
  misc_feature (1)..( 7): Result.002 file - promoters60/1023698
taattta

SEQ ID NO: 99155 - DNA, 7 bp, Unknown
  misc_feature (1)..( 7): Result.002 file - promoters60/1023698
taattta

SEQ ID NO: 99156 - DNA, 6 bp, Unknown
  misc_feature (1)..( 6): Result.002 file - promoters60/1023698
aaatct

SEQ ID NO: 99157 - DNA, 6 bp, Unknown
  misc_feature (1)..( 6): Result.002 file - promoters60/1023698
aaatct

SEQ ID NO: 99158 - DNA, 12 bp, Unknown
  misc_feature (1)..( 12): Result.002 file - promoters60/1023698
tacactattttt

SEQ ID NO: 99159 - DNA, 12 bp, Unknown
  misc_feature (1)..( 12): Result.002 file - promoters60/1023698
tacattattttt

SEQ ID NO: 99160 - DNA, 10 bp, Unknown
  misc_feature (1)..( 10): Result.002 file - promoters60/1023782
aaaataatct

SEQ ID NO: 99161 - DNA, 10 bp, Unknown
  misc_feature (1)..( 10): Result.002 file - promoters60/1023782
aaaataaaat

SEQ ID NO: 99162 - DNA, 11 bp, Unknown
  misc_feature (1)..( 11): Result.002 file - promoters60/1023782
gaaatgaaata

SEQ ID NO: 99163 - DNA, 7 bp, Unknown
  misc_feature (1)..( 7): Result.002 file - promoters60/1023782
ttaaaac

SEQ ID NO: 99164 - DNA, 7 bp, Unknown
  misc_feature (1)..( 7): Result.002 file - promoters60/1023782
gtaaaac

SEQ ID NO: 99165 - DNA, 7 bp, Unknown
  misc_feature (1)..( 7): Result.002 file - promoters60/1023782
gtaaaac

SEQ ID NO: 99166 - DNA, 10 bp, Unknown
  misc_feature (1)..( 10): Result.002 file - promoters60/1023782
ataaatcaaa

SEQ ID NO: 99167 - DNA, 10 bp, Unknown
  misc_feature (1)..( 10): Result.002 file - promoters60/1023782
ggaaatgaaa

SEQ ID NO: 99168 - DNA, 10 bp, Unknown
  misc_feature (1)..( 10): Result.002 file - promoters60/1023782
ggaaaagaaa

SEQ ID NO: 99169 - DNA, 7 bp, Unknown
  misc_feature (1)..( 7): Result.002 file - promoters60/1023782
aaaccca

SEQ ID NO: 99170 - DNA, 7 bp, Unknown
  misc_feature (1)..( 7): Result.002 file - promoters60/1023782
gaaccca

SEQ ID NO: 99171 - DNA, 7 bp, Unknown
  misc_feature (1)..( 7): Result.002 file - promoters60/1023782
gaacccg

SEQ ID NO: 99172 - DNA, 10 bp, Unknown
  misc_feature (1)..( 10): Result.002 file - promoters60/1023782
gatacttaaa

SEQ ID NO: 99173 - DNA, 10 bp, Unknown
  misc_feature (1)..( 10): Result.002 file - promoters60/1023782
gatatttata

SEQ ID NO: 99174 - DNA, 10 bp, Unknown
  misc_feature (1)..( 10): Result.002 file - promoters60/1023782
ccgattaata

SEQ ID NO: 99175 - DNA, 10 bp, Unknown
  misc_feature (1)..( 10): Result.002 file - promoters60/1023782
atattttctt

SEQ ID NO: 99176 - DNA, 10 bp, Unknown
  misc_feature (1)..( 10): Result.002 file - promoters60/1023782
atatttttta

SEQ ID NO: 99177 - DNA, 10 bp, Unknown
  misc_feature (1)..( 10): Result.002 file - promoters60/1023782
caatttgtta

SEQ ID NO: 99178 - DNA, 6 bp, Unknown
  misc_feature (1)..( 6): Result.002 file - promoters60/1023891
ttatat

SEQ ID NO: 99179 - DNA, 6 bp, Unknown
  misc_feature (1)..( 6): Result.002 file - promoters60/1023891
ttatat

SEQ ID NO: 99180 - DNA, 7 bp, Unknown
  misc_feature (1)..( 7): Result.002 file - promoters60/1023891
tatactc

SEQ ID NO: 99181 - DNA, 7 bp, Unknown
  misc_feature (1)..( 7): Result.002 file - promoters60/1023891
tatcctc

SEQ ID NO: 99182 - DNA, 9 bp, Unknown
  misc_feature (1)..( 9): Result.002 file - promoters60/1023891
ttatatttt

SEQ ID NO: 99183 - DNA, 9 bp, Unknown
  misc_feature (1)..( 9): Result.002 file - promoters60/1023891
taataattt

SEQ ID NO: 99184 - DNA, 9 bp, Unknown
  misc_feature (1)..( 9): Result.002 file - promoters60/1023891
taaaaattt

SEQ ID NO: 99185 - DNA, 8 bp, Unknown
  misc_feature (1)..( 8): Result.002 file - promoters60/1023891
aaaggaaa

SEQ ID NO: 99186 - DNA, 8 bp, Unknown
  misc_feature (1)..( 8): Result.002 file - promoters60/1023891
aaaagaaa

SEQ ID NO: 99187 - DNA, 12 bp, Unknown
  misc_feature (1)..( 12): Result.002 file - promoters60/1023891
agtcaacaaaag

SEQ ID NO: 99188 - DNA, 12 bp, Unknown
  misc_feature (1)..( 12): Result.002 file - promoters60/1023891
agtcaataaaag

SEQ ID NO: 99189 - DNA, 6 bp, Unknown
  misc_feature (1)..( 6): Result.002 file - promoters60/1023891
gtaacg

SEQ ID NO: 99190 - DNA, 6 bp, Unknown
  misc_feature (1)..( 6): Result.002 file - promoters60/1023891
gtaacg

SEQ ID NO: 99191 - DNA, 9 bp, Unknown
  misc_feature (1)..( 9): Result.002 file - promoters60/1023891
ctttctata

SEQ ID NO: 99192 - DNA, 9 bp, Unknown
  misc_feature (1)..( 9): Result.002 file - promoters60/1023891
ctttatata

SEQ ID NO: 99193 - DNA, 6 bp, Unknown
  misc_feature (1)..( 6): Result.002 file - promoters60/1023891
aaaaac

SEQ ID NO: 99194 - DNA, 6 bp, Unknown
  misc_feature (1)..( 6): Result.002 file - promoters60/1023891
aaaaac

SEQ ID NO: 99195 - DNA, 7 bp, Unknown
  misc_feature (1)..( 7): Result.002 file - promoters60/1023891
aaattca

SEQ ID NO: 99196 - DNA, 7 bp, Unknown
  misc_feature (1)..( 7): Result.002 file - promoters60/1023891
aaaatca

SEQ ID NO: 99197 - DNA, 8 bp, Unknown
  misc_feature (1)..( 8): Result.002 file - promoters60/1023891
cattcaaa

SEQ ID NO: 99198 - DNA, 8 bp, Unknown
  misc_feature (1)..( 8): Result.002 file - promoters60/1023891
catttaaa

SEQ ID NO: 99199 - DNA, 7 bp, Unknown
  misc_feature (1)..( 7): Result.002 file - promoters60/1023891
attcatt

SEQ ID NO: 99200 - DNA, 7 bp, Unknown
  misc_feature (1)..( 7): Result.002 file - promoters60/1023891
atttatt

SEQ ID NO: 99201 - DNA, 6 bp, Unknown
  misc_feature (1)..( 6): Result.002 file - promoters60/1023891
actaaa

SEQ ID NO: 99202 - DNA, 6 bp, Unknown
  misc_feature (1)..( 6): Result.002 file - promoters60/1023891
actaaa

SEQ ID NO: 99203 - DNA, 10 bp, Unknown
  misc_feature (1)..( 10): Result.002 file - promoters60/1023891
aaagttttaa

SEQ ID NO: 99204 - DNA, 10 bp, Unknown
  misc_feature (1)..( 10): Result.002 file - promoters60/1023891
aaaattttaa

SEQ ID NO: 99205 - DNA, 10 bp, Unknown
  misc_feature (1)..( 10): Result.002 file - promoters60/1023891
gatattttat

SEQ ID NO: 99206 - DNA, 6 bp, Unknown
  misc_feature (1)..( 6): Result.002 file - promoters60/1023891
aatgtc

SEQ ID NO: 99207 - DNA, 6 bp, Unknown
  misc_feature (1)..( 6): Result.002 file - promoters60/1023891
aatgtc

SEQ ID NO: 99208 - DNA, 6 bp, Unknown
  misc_feature (1)..( 6): Result.002 file - promoters60/1023891
tagaat

SEQ ID NO: 99209 - DNA, 6 bp, Unknown
  misc_feature (1)..( 6): Result.002 file - promoters60/1023891
tagaat

SEQ ID NO: 99210 - DNA, 11 bp, Unknown
  misc_feature (1)..( 11): Result.002 file - promoters60/1023891
ataagagaaga

SEQ ID NO: 99211 - DNA, 11 bp, Unknown
  misc_feature (1)..( 11): Result.002 file - promoters60/1023891
ataagataaga

SEQ ID NO: 99212 - DNA, 6 bp, Unknown
  misc_feature (1)..( 6): Result.002 file - promoters60/1023891
aaaaag

SEQ ID NO: 99213 - DNA, 6 bp, Unknown
  misc_feature (1)..( 6): Result.002 file - promoters60/1023891
aaaaag

SEQ ID NO: 99214 - DNA, 6 bp, Unknown
  misc_feature (1)..( 6): Result.002 file - promoters60/1023891
acacaa

SEQ ID NO: 99215 - DNA, 6 bp, Unknown
  misc_feature (1)..( 6): Result.002 file - promoters60/1023891
acacaa

SEQ ID NO: 99216 - DNA, 6 bp, Unknown
  misc_feature (1)..( 6): Result.002 file - promoters60/1023891
tgtcac

SEQ ID NO: 99217 - DNA, 6 bp, Unknown
  misc_feature (1)..( 6): Result.002 file - promoters60/1023891
tgtcac

SEQ ID NO: 99218 - DNA, 6 bp, Unknown
  misc_feature (1)..( 6): Result.002 file - promoters60/1023891
acattt

SEQ ID NO: 99219 - DNA, 6 bp, Unknown
  misc_feature (1)..( 6): Result.002 file - promoters60/1023891
acattt

SEQ ID NO: 99220 - DNA, 8 bp, Unknown
  misc_feature (1)..( 8): Result.002 file - promoters60/1023891
agtagcca

SEQ ID NO: 99221 - DNA, 8 bp, Unknown
  misc_feature (1)..( 8): Result.002 file - promoters60/1023891
agtaacca

SEQ ID NO: 99222 - DNA, 12 bp, Unknown
  misc_feature (1)..( 12): Result.002 file - promoters60/1023963
cgctacaaataa

SEQ ID NO: 99223 - DNA, 12 bp, Unknown
  misc_feature (1)..( 12): Result.002 file - promoters60/1023963
aagaacacataa

SEQ ID NO: 99224 - DNA, 12 bp, Unknown
  misc_feature (1)..( 12): Result.002 file - promoters60/1023963
ttttacaaatgt

SEQ ID NO: 99225 - DNA, 12 bp, Unknown
  misc_feature (1)..( 12): Result.002 file - promoters60/1023963
gaaaacacataa

SEQ ID NO: 99226 - DNA, 12 bp, Unknown
  misc_feature (1)..( 12): Result.002 file - promoters60/1023963
gaagacaactat

SEQ ID NO: 99227 - DNA, 12 bp, Unknown
  misc_feature (1)..( 12): Result.002 file - promoters60/1023963
gaagactgacga

SEQ ID NO: 99228 - DNA, 12 bp, Unknown
  misc_feature (1)..( 12): Result.002 file - promoters60/1023963
acattaaaaaaa

SEQ ID NO: 99229 - DNA, 12 bp, Unknown
  misc_feature (1)..( 12): Result.002 file - promoters60/1023963
attttagaaaag

SEQ ID NO: 99230 - DNA, 12 bp, Unknown
  misc_feature (1)..( 12): Result.002 file - promoters60/1023963
acattgaaatgt

SEQ ID NO: 99231 - DNA, 12 bp, Unknown
  misc_feature (1)..( 12): Result.002 file - promoters60/1023963
agagtaaataat

SEQ ID NO: 99232 - DNA, 12 bp, Unknown
  misc_feature (1)..( 12): Result.002 file - promoters60/1023963
acagtgatcatc

SEQ ID NO: 99233 - DNA, 12 bp, Unknown
  misc_feature (1)..( 12): Result.002 file - promoters60/1023963
aacgtatatatg

SEQ ID NO: 99234 - DNA, 6 bp, Unknown
  misc_feature (1)..( 6): Result.002 file - promoters60/1024037
ttacaa

SEQ ID NO: 99235 - DNA, 6 bp, Unknown
  misc_feature (1)..( 6): Result.002 file - promoters60/1024037
ttacaa

SEQ ID NO: 99236 - DNA, 6 bp, Unknown
  misc_feature (1)..( 6): Result.002 file - promoters60/1024037
tattat

SEQ ID NO: 99237 - DNA, 6 bp, Unknown
  misc_feature (1)..( 6): Result.002 file - promoters60/1024037
tattat

SEQ ID NO: 99238 - DNA, 8 bp, Unknown
  misc_feature (1)..( 8): Result.002 file - promoters60/1024037
aaactctt

SEQ ID NO: 99239 - DNA, 8 bp, Unknown
  misc_feature (1)..( 8): Result.002 file - promoters60/1024037
aaaatctt

SEQ ID NO: 99240 - DNA, 8 bp, Unknown
  misc_feature (1)..( 8): Result.002 file - promoters60/1024037
atattatt

SEQ ID NO: 99241 - DNA, 8 bp, Unknown
  misc_feature (1)..( 8): Result.002 file - promoters60/1024037
atactatt

SEQ ID NO: 99242 - DNA, 7 bp, Unknown
  misc_feature (1)..( 7): Result.002 file - promoters60/1024037
ttaatac

SEQ ID NO: 99243 - DNA, 7 bp, Unknown
  misc_feature (1)..( 7): Result.002 file - promoters60/1024037
ttaatac

SEQ ID NO: 99244 - DNA, 7 bp, Unknown
  misc_feature (1)..( 7): Result.002 file - promoters60/1024037
attaata

SEQ ID NO: 99245 - DNA, 7 bp, Unknown
  misc_feature (1)..( 7): Result.002 file - promoters60/1024037
attgata

SEQ ID NO: 99246 - DNA, 11 bp, Unknown
  misc_feature (1)..( 11): Result.002 file - promoters60/1024037
taagtatgtat

SEQ ID NO: 99247 - DNA, 11 bp, Unknown
  misc_feature (1)..( 11): Result.002 file - promoters60/1024037
taattatatat

SEQ ID NO: 99248 - DNA, 6 bp, Unknown
  misc_feature (1)..( 6): Result.002 file - promoters60/1024037
agactt

SEQ ID NO: 99249 - DNA, 6 bp, Unknown
  misc_feature (1)..( 6): Result.002 file - promoters60/1024037
agactt

SEQ ID NO: 99250 - DNA, 6 bp, Unknown
  misc_feature (1)..( 6): Result.002 file - promoters60/1024037
aagcca

SEQ ID NO: 99251 - DNA, 6 bp, Unknown
  misc_feature (1)..( 6): Result.002 file - promoters60/1024037
aagcca

SEQ ID NO: 99252 - DNA, 7 bp, Unknown
  misc_feature (1)..( 7): Result.002 file - promoters60/1024037
acaattt

SEQ ID NO: 99253 - DNA, 7 bp, Unknown
  misc_feature (1)..( 7): Result.002 file - promoters60/1024037
acaattt

SEQ ID NO: 99254 - DNA, 7 bp, Unknown
  misc_feature (1)..( 7): Result.002 file - promoters60/1024037
atgcatg

SEQ ID NO: 99255 - DNA, 7 bp, Unknown
  misc_feature (1)..( 7): Result.002 file - promoters60/1024037
atgtatg

SEQ ID NO: 99256 - DNA, 7 bp, Unknown
  misc_feature (1)..( 7): Result.002 file - promoters60/1024037
aatttag

SEQ ID NO: 99257 - DNA, 7 bp, Unknown
  misc_feature (1)..( 7): Result.002 file - promoters60/1024037
aatttag

SEQ ID NO: 99258 - DNA, 7 bp, Unknown
  misc_feature (1)..( 7): Result.002 file - promoters60/1024037
gatttag

SEQ ID NO: 99259 - DNA, 6 bp, Unknown
  misc_feature (1)..( 6): Result.002 file - promoters60/1024037
gctgac

SEQ ID NO: 99260 - DNA, 6 bp, Unknown
  misc_feature (1)..( 6): Result.002 file - promoters60/1024037
gctgac

SEQ ID NO: 99261 - DNA, 7 bp, Unknown
  misc_feature (1)..( 7): Result.002 file - promoters60/1024037
ttcgtca

SEQ ID NO: 99262 - DNA, 7 bp, Unknown
  misc_feature (1)..( 7): Result.002 file - promoters60/1024037
ttcttca

SEQ ID NO: 99263 - DNA, 6 bp, Unknown
  misc_feature (1)..( 6): Result.002 file - promoters60/1024037
ataaca

SEQ ID NO: 99264 - DNA, 6 bp, Unknown
  misc_feature (1)..( 6): Result.002 file - promoters60/1024037
ataaca

SEQ ID NO: 99265 - DNA, 6 bp, Unknown
  misc_feature (1)..( 6): Result.002 file - promoters60/1024037
tggttg

SEQ ID NO: 99266 - DNA, 6 bp, Unknown
  misc_feature (1)..( 6): Result.002 file - promoters60/1024037
tggttg

SEQ ID NO: 99267 - DNA, 10 bp, Unknown
  misc_feature (1)..( 10): Result.002 file - promoters60/1024060
taatgataat

SEQ ID NO: 99268 - DNA, 10 bp, Unknown
  misc_feature (1)..( 10): Result.002 file - promoters60/1024060
aaattataag

SEQ ID NO: 99269 - DNA, 10 bp, Unknown
  misc_feature (1)..( 10): Result.002 file - promoters60/1024060
cccggataat

SEQ ID NO: 99270 - DNA, 10 bp, Unknown
  misc_feature (1)..( 10): Result.002 file - promoters60/1024060
aaactatata

SEQ ID NO: 99271 - DNA, 11 bp, Unknown
  misc_feature (1)..( 11): Result.002 file - promoters60/1024083
ttccttttttt

SEQ ID NO: 99272 - DNA, 11 bp, Unknown
  misc_feature (1)..( 11): Result.002 file - promoters60/1024083
ttcgttttttt

SEQ ID NO: 99273 - DNA, 11 bp, Unknown
  misc_feature (1)..( 11): Result.002 file - promoters60/1024083
tataggtttta

SEQ ID NO: 99274 - DNA, 11 bp, Unknown
  misc_feature (1)..( 11): Result.002 file - promoters60/1024083
attagattttt

SEQ ID NO: 99275 - DNA, 12 bp, Unknown
  misc_feature (1)..( 12): Result.002 file - promoters60/1024083
attcgatctttt

SEQ ID NO: 99276 - DNA, 9 bp, Unknown
  misc_feature (1)..( 9): Result.002 file - promoters60/1024083
tagactaaa

SEQ ID NO: 99277 - DNA, 9 bp, Unknown
  misc_feature (1)..( 9): Result.002 file - promoters60/1024083
tagaataaa

SEQ ID NO: 99278 - DNA, 8 bp, Unknown
  misc_feature (1)..( 8): Result.002 file - promoters60/1024083
aaaagtaa

SEQ ID NO: 99279 - DNA, 8 bp, Unknown
  misc_feature (1)..( 8): Result.002 file - promoters60/1024083
aaaattaa

SEQ ID NO: 99280 - DNA, 8 bp, Unknown
  misc_feature (1)..( 8): Result.002 file - promoters60/1024083
taaattag

SEQ ID NO: 99281 - DNA, 6 bp, Unknown
  misc_feature (1)..( 6): Result.002 file - promoters60/1024083
acattt

SEQ ID NO: 99282 - DNA, 6 bp, Unknown
  misc_feature (1)..( 6): Result.002 file - promoters60/1024083
acattt

SEQ ID NO: 99283 - DNA, 7 bp, Unknown
  misc_feature (1)..( 7): Result.002 file - promoters60/1024083
atttaca

SEQ ID NO: 99284 - DNA, 7 bp, Unknown
  misc_feature (1)..( 7): Result.002 file - promoters60/1024083
atttaca

SEQ ID NO: 99285 - DNA, 7 bp, Unknown
  misc_feature (1)..( 7): Result.002 file - promoters60/1024083
tttaaaa

SEQ ID NO: 99286 - DNA, 7 bp, Unknown
  misc_feature (1)..( 7): Result.002 file - promoters60/1024083
tttaaaa

SEQ ID NO: 99287 - DNA, 6 bp, Unknown
  misc_feature (1)..( 6): Result.002 file - promoters60/1024083
agtttg

SEQ ID NO: 99288 - DNA, 6 bp, Unknown
  misc_feature (1)..( 6): Result.002 file - promoters60/1024083
agtttg

SEQ ID NO: 99289 - DNA, 7 bp, Unknown
  misc_feature (1)..( 7): Result.002 file - promoters60/1024083
attaata

SEQ ID NO: 99290 - DNA, 7 bp, Unknown
  misc_feature (1)..( 7): Result.002 file - promoters60/1024083
attaata

SEQ ID NO: 99291 - DNA, 6 bp, Unknown
  misc_feature (1)..( 6): Result.002 file - promoters60/1024083
tctttt

SEQ ID NO: 99292 - DNA, 6 bp, Unknown
  misc_feature (1)..( 6): Result.002 file - promoters60/1024083
tctttt

SEQ ID NO: 99293 - DNA, 8 bp, Unknown
  misc_feature (1)..( 8): Result.002 file - promoters60/1024083
atattttt

SEQ ID NO: 99294 - DNA, 8 bp, Unknown
  misc_feature (1)..( 8): Result.002 file - promoters60/1024083
atattttt

SEQ ID NO: 99295 - DNA, 6 bp, Unknown
  misc_feature (1)..( 6): Result.002 file - promoters60/1024083
acaaaa

SEQ ID NO: 99296 - DNA, 6 bp, Unknown
  misc_feature (1)..( 6): Result.002 file - promoters60/1024083
acaaaa

SEQ ID NO: 99297 - DNA, 8 bp, Unknown
  misc_feature (1)..( 8): Result.002 file - promoters60/1024083
ttattctt

SEQ ID NO: 99298 - DNA, 8 bp, Unknown
  misc_feature (1)..( 8): Result.002 file - promoters60/1024083
ttatcctt

SEQ ID NO: 99299 - DNA, 7 bp, Unknown
  misc_feature (1)..( 7): Result.002 file - promoters60/1024083
attctat

SEQ ID NO: 99300 - DNA, 7 bp, Unknown
  misc_feature (1)..( 7): Result.002 file - promoters60/1024083
attttat

SEQ ID NO: 99301 - DNA, 7 bp, Unknown
  misc_feature (1)..( 7): Result.002 file - promoters60/1024083
aaaacaa

SEQ ID NO: 99302 - DNA, 7 bp, Unknown
  misc_feature (1)..( 7): Result.002 file - promoters60/1024083
aaaacaa

SEQ ID NO: 99303 - DNA, 7 bp, Unknown
  misc_feature (1)..( 7): Result.002 file - promoters60/1024083
atagtta

SEQ ID NO: 99304 - DNA, 7 bp, Unknown
  misc_feature (1)..( 7): Result.002 file - promoters60/1024083
atattta

SEQ ID NO: 99305 - DNA, 8 bp, Unknown
  misc_feature (1)..( 8): Result.002 file - promoters60/1024083
ttacttat

SEQ ID NO: 99306 - DNA, 8 bp, Unknown
  misc_feature (1)..( 8): Result.002 file - promoters60/1024083
ttacttat

SEQ ID NO: 99307 - DNA, 7 bp, Unknown
  misc_feature (1)..( 7): Result.002 file - promoters60/1024083
attagaa

SEQ ID NO: 99308 - DNA, 7 bp, Unknown
  misc_feature (1)..( 7): Result.002 file - promoters60/1024083
attagaa

SEQ ID NO: 99309 - DNA, 6 bp, Unknown
  misc_feature (1)..( 6): Result.002 file - promoters60/1024083
tttgat

SEQ ID NO: 99310 - DNA, 6 bp, Unknown
  misc_feature (1)..( 6): Result.002 file - promoters60/1024083
tttgat

SEQ ID NO: 99311 - DNA, 6 bp, Unknown
  misc_feature (1)..( 6): Result.002 file - promoters60/1024083
attttg

SEQ ID NO: 99312 - DNA, 6 bp, Unknown
  misc_feature (1)..( 6): Result.002 file - promoters60/1024083
attttg

SEQ ID NO: 99313 - DNA, 6 bp, Unknown
  misc_feature (1)..( 6): Result.002 file - promoters60/1024083
aaaaat

SEQ ID NO: 99314 - DNA, 6 bp, Unknown
  misc_feature (1)..( 6): Result.002 file - promoters60/1024083
aaaaat

SEQ ID NO: 99315 - DNA, 6 bp, Unknown
  misc_feature (1)..( 6): Result.002 file - promoters60/1024083
ggtctc

SEQ ID NO: 99316 - DNA, 6 bp, Unknown
  misc_feature (1)..( 6): Result.002 file - promoters60/1024083
ggtctc

SEQ ID NO: 99317 - DNA, 8 bp, Unknown
  misc_feature (1)..( 8): Result.002 file - promoters60/1024083
taaaatcc

SEQ ID NO: 99318 - DNA, 8 bp, Unknown
  misc_feature (1)..( 8): Result.002 file - promoters60/1024083
taaactcc

SEQ ID NO: 99319 - DNA, 12 bp, Unknown
  misc_feature (1)..( 12): Result.002 file - promoters60/1024126
taaatcactcct

SEQ ID NO: 99320 - DNA, 12 bp, Unknown
  misc_feature (1)..( 12): Result.002 file - promoters60/1024126
tcaatctctcta

SEQ ID NO: 99321 - DNA, 12 bp, Unknown
  misc_feature (1)..( 12): Result.002 file - promoters60/1024126
atgatcactggt

SEQ ID NO: 99322 - DNA, 12 bp, Unknown
  misc_feature (1)..( 12): Result.002 file - promoters60/1024126
cgtatcaatggt

SEQ ID NO: 99323 - DNA, 12 bp, Unknown
  misc_feature (1)..( 12): Result.002 file - promoters60/1024126
gtaacaaactgt

SEQ ID NO: 99324 - DNA, 12 bp, Unknown
  misc_feature (1)..( 12): Result.002 file - promoters60/1024126
ataagaaatata

SEQ ID NO: 99325 - DNA, 12 bp, Unknown
  misc_feature (1)..( 12): Result.002 file - promoters60/1024126
attatcgatgat

SEQ ID NO: 99326 - DNA, 8 bp, Unknown
  misc_feature (1)..( 8): Result.002 file - promoters60/1024126
ataaaagt

SEQ ID NO: 99327 - DNA, 8 bp, Unknown
  misc_feature (1)..( 8): Result.002 file - promoters60/1024126
ctaaaaga

SEQ ID NO: 99328 - DNA, 8 bp, Unknown
  misc_feature (1)..( 8): Result.002 file - promoters60/1024126
aaaaaagt

SEQ ID NO: 99329 - DNA, 8 bp, Unknown
  misc_feature (1)..( 8): Result.002 file - promoters60/1024126
aaaaaagc

SEQ ID NO: 99330 - DNA, 8 bp, Unknown
  misc_feature (1)..( 8): Result.002 file - promoters60/1024126
aaaaaaaa

SEQ ID NO: 99331 - DNA, 8 bp, Unknown
  misc_feature (1)..( 8): Result.002 file - promoters60/1024126
taaaaagg

SEQ ID NO: 99332 - DNA, 9 bp, Unknown
  misc_feature (1)..( 9): Result.002 file - promoters60/1024126
aaaacacat

SEQ ID NO: 99333 - DNA, 9 bp, Unknown
  misc_feature (1)..( 9): Result.002 file - promoters60/1024126
aaaacagaa

SEQ ID NO: 99334 - DNA, 9 bp, Unknown
  misc_feature (1)..( 9): Result.002 file - promoters60/1024126
aaatcacaa

SEQ ID NO: 99335 - DNA, 9 bp, Unknown
  misc_feature (1)..( 9): Result.002 file - promoters60/1024126
gaaaccgaa

SEQ ID NO: 99336 - DNA, 9 bp, Unknown
  misc_feature (1)..( 9): Result.002 file - promoters60/1024126
aaatcatgt

SEQ ID NO: 99337 - DNA, 9 bp, Unknown
  misc_feature (1)..( 9): Result.002 file - promoters60/1024126
aaatcatgt

SEQ ID NO: 99338 - DNA, 9 bp, Unknown
  misc_feature (1)..( 9): Result.002 file - promoters60/1024145
gagcgatga

SEQ ID NO: 99339 - DNA, 9 bp, Unknown
  misc_feature (1)..( 9): Result.002 file - promoters60/1024145
gagcgctga

SEQ ID NO: 99340 - DNA, 7 bp, Unknown
  misc_feature (1)..( 7): Result.002 file - promoters60/1024145
tgagaga

SEQ ID NO: 99341 - DNA, 7 bp, Unknown
  misc_feature (1)..( 7): Result.002 file - promoters60/1024145
tgaaaga

SEQ ID NO: 99342 - DNA, 8 bp, Unknown
  misc_feature (1)..( 8): Result.002 file - promoters60/1024145
aaatctaa

SEQ ID NO: 99343 - DNA, 8 bp, Unknown
  misc_feature (1)..( 8): Result.002 file - promoters60/1024145
aaatgtaa

SEQ ID NO: 99344 - DNA, 6 bp, Unknown
  misc_feature (1)..( 6): Result.002 file - promoters60/1024145
ccggtt

SEQ ID NO: 99345 - DNA, 6 bp, Unknown
  misc_feature (1)..( 6): Result.002 file - promoters60/1024145
ccggtt

SEQ ID NO: 99346 - DNA, 11 bp, Unknown
  misc_feature (1)..( 11): Result.002 file - promoters60/1024145
tctggtcaaac

SEQ ID NO: 99347 - DNA, 11 bp, Unknown
  misc_feature (1)..( 11): Result.002 file - promoters60/1024145
tctggtcaaac

SEQ ID NO: 99348 - DNA, 6 bp, Unknown
  misc_feature (1)..( 6): Result.002 file - promoters60/1024145
attatt

SEQ ID NO: 99349 - DNA, 6 bp, Unknown
  misc_feature (1)..( 6): Result.002 file - promoters60/1024145
attatt

SEQ ID NO: 99350 - DNA, 8 bp, Unknown
  misc_feature (1)..( 8): Result.002 file - promoters60/1024145
gtgtcaaa

SEQ ID NO: 99351 - DNA, 8 bp, Unknown
  misc_feature (1)..( 8): Result.002 file - promoters60/1024145
gtgacaaa

SEQ ID NO: 99352 - DNA, 7 bp, Unknown
  misc_feature (1)..( 7): Result.002 file - promoters60/1024145
attcttt

SEQ ID NO: 99353 - DNA, 7 bp, Unknown
  misc_feature (1)..( 7): Result.002 file - promoters60/1024145
atttttt

SEQ ID NO: 99354 - DNA, 8 bp, Unknown
  misc_feature (1)..( 8): Result.002 file - promoters60/1024145
gttttcct

SEQ ID NO: 99355 - DNA, 8 bp, Unknown
  misc_feature (1)..( 8): Result.002 file - promoters60/1024145
gtttccct

SEQ ID NO: 99356 - DNA, 11 bp, Unknown
  misc_feature (1)..( 11): Result.002 file - promoters60/1024166
ataacaaaaaa

SEQ ID NO: 99357 - DNA, 11 bp, Unknown
  misc_feature (1)..( 11): Result.002 file - promoters60/1024166
ttaaaaaaaaa

SEQ ID NO: 99358 - DNA, 11 bp, Unknown
  misc_feature (1)..( 11): Result.002 file - promoters60/1024166
aaaccaaaaaa

SEQ ID NO: 99359 - DNA, 11 bp, Unknown
  misc_feature (1)..( 11): Result.002 file - promoters60/1024166
ggaagaaaaaa

SEQ ID NO: 99360 - DNA, 11 bp, Unknown
  misc_feature (1)..( 11): Result.002 file - promoters60/1024166
attataaacaa

SEQ ID NO: 99361 - DNA, 11 bp, Unknown
  misc_feature (1)..( 11): Result.002 file - promoters60/1024166
gttccaaaagt

SEQ ID NO: 99362 - DNA, 10 bp, Unknown
  misc_feature (1)..( 10): Result.002 file - promoters60/1024166
aggaatgatt

SEQ ID NO: 99363 - DNA, 10 bp, Unknown
  misc_feature (1)..( 10): Result.002 file - promoters60/1024166
atgaatgaac

SEQ ID NO: 99364 - DNA, 10 bp, Unknown
  misc_feature (1)..( 10): Result.002 file - promoters60/1024166
agaaatcatt

SEQ ID NO: 99365 - DNA, 10 bp, Unknown
  misc_feature (1)..( 10): Result.002 file - promoters60/1024166
atcaataaac

SEQ ID NO: 99366 - DNA, 10 bp, Unknown
  misc_feature (1)..( 10): Result.002 file - promoters60/1024166
atctataaaa

SEQ ID NO: 99367 - DNA, 11 bp, Unknown
  misc_feature (1)..( 11): Result.002 file - promoters60/1024166
agttatgtttt

SEQ ID NO: 99368 - DNA, 11 bp, Unknown
  misc_feature (1)..( 11): Result.002 file - promoters60/1024166
agtcatgcaac

SEQ ID NO: 99369 - DNA, 11 bp, Unknown
  misc_feature (1)..( 11): Result.002 file - promoters60/1024166
atttatgtata

SEQ ID NO: 99370 - DNA, 11 bp, Unknown
  misc_feature (1)..( 11): Result.002 file - promoters60/1024166
tattatttttt

SEQ ID NO: 99371 - DNA, 11 bp, Unknown
  misc_feature (1)..( 11): Result.002 file - promoters60/1024166
taatatatatt

SEQ ID NO: 99372 - DNA, 10 bp, Unknown
  misc_feature (1)..( 10): Result.002 file - promoters60/1024189
taaaaatgaa

SEQ ID NO: 99373 - DNA, 10 bp, Unknown
  misc_feature (1)..( 10): Result.002 file - promoters60/1024189
taaaaagtct

SEQ ID NO: 99374 - DNA, 10 bp, Unknown
  misc_feature (1)..( 10): Result.002 file - promoters60/1024189
aaaaaaagaa

SEQ ID NO: 99375 - DNA, 10 bp, Unknown
  misc_feature (1)..( 10): Result.002 file - promoters60/1024189
gaaaaagggt

SEQ ID NO: 99376 - DNA, 12 bp, Unknown
  misc_feature (1)..( 12): Result.002 file - promoters60/1024189
atataataaata

SEQ ID NO: 99377 - DNA, 12 bp, Unknown
  misc_feature (1)..( 12): Result.002 file - promoters60/1024189
gcataaaaaata

SEQ ID NO: 99378 - DNA, 12 bp, Unknown
  misc_feature (1)..( 12): Result.002 file - promoters60/1024189
ttattatacttc

SEQ ID NO: 99379 - DNA, 12 bp, Unknown
  misc_feature (1)..( 12): Result.002 file - promoters60/1024189
atataattatct

SEQ ID NO: 99380 - DNA, 12 bp, Unknown
  misc_feature (1)..( 12): Result.002 file - promoters60/1024189
ctaaaatataat

SEQ ID NO: 99381 - DNA, 10 bp, Unknown
  misc_feature (1)..( 10): Result.002 file - promoters60/1024189
gtatatatat

SEQ ID NO: 99382 - DNA, 10 bp, Unknown
  misc_feature (1)..( 10): Result.002 file - promoters60/1024189
aaataaatag

SEQ ID NO: 99383 - DNA, 10 bp, Unknown
  misc_feature (1)..( 10): Result.002 file - promoters60/1024189
aaatatataa

SEQ ID NO: 99384 - DNA, 10 bp, Unknown
  misc_feature (1)..( 10): Result.002 file - promoters60/1024189
taaaatataa

SEQ ID NO: 99385 - DNA, 12 bp, Unknown
  misc_feature (1)..( 12): Result.002 file - promoters60/1024189
tagaaattaata

SEQ ID NO: 99386 - DNA, 12 bp, Unknown
  misc_feature (1)..( 12): Result.002 file - promoters60/1024189
agataattaagt

SEQ ID NO: 99387 - DNA, 11 bp, Unknown
  misc_feature (1)..( 11): Result.002 file - promoters60/1024189
taaaatcaata

SEQ ID NO: 99388 - DNA, 11 bp, Unknown
  misc_feature (1)..( 11): Result.002 file - promoters60/1024189
tttaattatta

SEQ ID NO: 99389 - DNA, 12 bp, Unknown
  misc_feature (1)..( 12): Result.002 file - promoters60/1024189
ataacatcactt

SEQ ID NO: 99390 - DNA, 6 bp, Unknown
  misc_feature (1)..( 6): Result.002 file - promoters60/1024189
aaatat

SEQ ID NO: 99391 - DNA, 6 bp, Unknown
  misc_feature (1)..( 6): Result.002 file - promoters60/1024189
aaatat

SEQ ID NO: 99392 - DNA, 6 bp, Unknown
  misc_feature (1)..( 6): Result.002 file - promoters60/1024189
aaatat

SEQ ID NO: 99393 - DNA, 7 bp, Unknown
  misc_feature (1)..( 7): Result.002 file - promoters60/1024189
aaattat

SEQ ID NO: 99394 - DNA, 12 bp, Unknown
  misc_feature (1)..( 12): Result.002 file - promoters60/1024189
ttttatcacaag

SEQ ID NO: 99395 - DNA, 12 bp, Unknown
  misc_feature (1)..( 12): Result.002 file - promoters60/1024189
ttttgtcaacga

SEQ ID NO: 99396 - DNA, 12 bp, Unknown
  misc_feature (1)..( 12): Result.002 file - promoters60/1024189
cggtgtaaacga

SEQ ID NO: 99397 - DNA, 12 bp, Unknown
  misc_feature (1)..( 12): Result.002 file - promoters60/1024189
gggtgtaatgct

SEQ ID NO: 99398 - DNA, 12 bp, Unknown
  misc_feature (1)..( 12): Result.002 file - promoters60/1024189
ttttgtatctaa

SEQ ID NO: 99399 - DNA, 8 bp, Unknown
  misc_feature (1)..( 8): Result.002 file - promoters60/1024189
atatatat

SEQ ID NO: 99400 - DNA, 8 bp, Unknown
  misc_feature (1)..( 8): Result.002 file - promoters60/1024189
atatttat

SEQ ID NO: 99401 - DNA, 8 bp, Unknown
  misc_feature (1)..( 8): Result.002 file - promoters60/1024189
caatttat

SEQ ID NO: 99402 - DNA, 8 bp, Unknown
  misc_feature (1)..( 8): Result.002 file - promoters60/1024189
taatttat

SEQ ID NO: 99403 - DNA, 8 bp, Unknown
  misc_feature (1)..( 8): Result.002 file - promoters60/1024189
aatcaaaa

SEQ ID NO: 99404 - DNA, 8 bp, Unknown
  misc_feature (1)..( 8): Result.002 file - promoters60/1024189
aatcaaat

SEQ ID NO: 99405 - DNA, 9 bp, Unknown
  misc_feature (1)..( 9): Result.002 file - promoters60/1024189
gatccaaac

SEQ ID NO: 99406 - DNA, 9 bp, Unknown
  misc_feature (1)..( 9): Result.002 file - promoters60/1024189
tatcctaac

SEQ ID NO: 99407 - DNA, 11 bp, Unknown
  misc_feature (1)..( 11): Result.002 file - promoters60/1024189
ctagacacgta

SEQ ID NO: 99408 - DNA, 11 bp, Unknown
  misc_feature (1)..( 11): Result.002 file - promoters60/1024189
atcaacacgta

SEQ ID NO: 99409 - DNA, 11 bp, Unknown
  misc_feature (1)..( 11): Result.002 file - promoters60/1024189
aaagagacgaa

SEQ ID NO: 99410 - DNA, 11 bp, Unknown
  misc_feature (1)..( 11): Result.002 file - promoters60/1024189
aaaaagaatac

SEQ ID NO: 99411 - DNA, 10 bp, Unknown
  misc_feature (1)..( 10): Result.002 file - promoters60/1024189
gtgcaaaaat

SEQ ID NO: 99412 - DNA, 10 bp, Unknown
  misc_feature (1)..( 10): Result.002 file - promoters60/1024189
gaccaaaaaa

SEQ ID NO: 99413 - DNA, 10 bp, Unknown
  misc_feature (1)..( 10): Result.002 file - promoters60/1024189
gaccaagaat

SEQ ID NO: 99414 - DNA, 10 bp, Unknown
  misc_feature (1)..( 10): Result.002 file - promoters60/1024189
gacgaaaaag

SEQ ID NO: 99415 - DNA, 8 bp, Unknown
  misc_feature (1)..( 8): Result.002 file - promoters60/1024189
ttataatg

SEQ ID NO: 99416 - DNA, 8 bp, Unknown
  misc_feature (1)..( 8): Result.002 file - promoters60/1024189
atataata

SEQ ID NO: 99417 - DNA, 8 bp, Unknown
  misc_feature (1)..( 8): Result.002 file - promoters60/1024189
ttattata

SEQ ID NO: 99418 - DNA, 8 bp, Unknown
  misc_feature (1)..( 8): Result.002 file - promoters60/1024189
ataaaatc

SEQ ID NO: 99419 - DNA, 10 bp, Unknown
  misc_feature (1)..( 10): Result.002 file - promoters60/1024199
gaggaaaaca

SEQ ID NO: 99420 - DNA, 10 bp, Unknown
  misc_feature (1)..( 10): Result.002 file - promoters60/1024199
ccacaaaaca

SEQ ID NO: 99421 - DNA, 10 bp, Unknown
  misc_feature (1)..( 10): Result.002 file - promoters60/1024199
acataaaaca

SEQ ID NO: 99422 - DNA, 10 bp, Unknown
  misc_feature (1)..( 10): Result.002 file - promoters60/1024199
agagaataca

SEQ ID NO: 99423 - DNA, 10 bp, Unknown
  misc_feature (1)..( 10): Result.002 file - promoters60/1024199
aaataaaatt

SEQ ID NO: 99424 - DNA, 10 bp, Unknown
  misc_feature (1)..( 10): Result.002 file - promoters60/1024199
ctataagaca

SEQ ID NO: 99425 - DNA, 7 bp, Unknown
  misc_feature (1)..( 7): Result.002 file - promoters60/1024203
aggggag

SEQ ID NO: 99426 - DNA, 7 bp, Unknown
  misc_feature (1)..( 7): Result.002 file - promoters60/1024203
aggagag

SEQ ID NO: 99427 - DNA, 6 bp, Unknown
  misc_feature (1)..( 6): Result.002 file - promoters60/1024203
aagaag

SEQ ID NO: 99428 - DNA, 6 bp, Unknown
  misc_feature (1)..( 6): Result.002 file - promoters60/1024203
aagaag

SEQ ID NO: 99429 - DNA, 7 bp, Unknown
  misc_feature (1)..( 7): Result.002 file - promoters60/1024203
gtgttca

SEQ ID NO: 99430 - DNA, 7 bp, Unknown
  misc_feature (1)..( 7): Result.002 file - promoters60/1024203
gtggtca

SEQ ID NO: 99431 - DNA, 9 bp, Unknown
  misc_feature (1)..( 9): Result.002 file - promoters60/1024203
agaaaagac

SEQ ID NO: 99432 - DNA, 9 bp, Unknown
  misc_feature (1)..( 9): Result.002 file - promoters60/1024203
agacaagcg

SEQ ID NO: 99433 - DNA, 9 bp, Unknown
  misc_feature (1)..( 9): Result.002 file - promoters60/1024203
gaacaggcg

SEQ ID NO: 99434 - DNA, 9 bp, Unknown
  misc_feature (1)..( 9): Result.002 file - promoters60/1024203
aacatggga

SEQ ID NO: 99435 - DNA, 9 bp, Unknown
  misc_feature (1)..( 9): Result.002 file - promoters60/1024203
aacacggga

SEQ ID NO: 99436 - DNA, 6 bp, Unknown
  misc_feature (1)..( 6): Result.002 file - promoters60/1024203
gaacac

SEQ ID NO: 99437 - DNA, 6 bp, Unknown
  misc_feature (1)..( 6): Result.002 file - promoters60/1024203
gaacac

SEQ ID NO: 99438 - DNA, 7 bp, Unknown
  misc_feature (1)..( 7): Result.002 file - promoters60/1024203
gaatgaa

SEQ ID NO: 99439 - DNA, 7 bp, Unknown
  misc_feature (1)..( 7): Result.002 file - promoters60/1024203
gaatgaa

SEQ ID NO: 99440 - DNA, 8 bp, Unknown
  misc_feature (1)..( 8): Result.002 file - promoters60/1024203
ccatatac

SEQ ID NO: 99441 - DNA, 8 bp, Unknown
  misc_feature (1)..( 8): Result.002 file - promoters60/1024203
ccatctac

SEQ ID NO: 99442 - DNA, 8 bp, Unknown
  misc_feature (1)..( 8): Result.002 file - promoters60/1024203
ctctttcg

SEQ ID NO: 99443 - DNA, 8 bp, Unknown
  misc_feature (1)..( 8): Result.002 file - promoters60/1024203
ctctctcg

SEQ ID NO: 99444 - DNA, 7 bp, Unknown
  misc_feature (1)..( 7): Result.002 file - promoters60/1024203
acaagcg

SEQ ID NO: 99445 - DNA, 7 bp, Unknown
  misc_feature (1)..( 7): Result.002 file - promoters60/1024203
acaggcg

SEQ ID NO: 99446 - DNA, 7 bp, Unknown
  misc_feature (1)..( 7): Result.002 file - promoters60/1024203
acaagcg

SEQ ID NO: 99447 - DNA, 7 bp, Unknown
  misc_feature (1)..( 7): Result.002 file - promoters60/1024203
tcgatga

SEQ ID NO: 99448 - DNA, 7 bp, Unknown
  misc_feature (1)..( 7): Result.002 file - promoters60/1024203
tcgatga

SEQ ID NO: 99449 - DNA, 7 bp, Unknown
  misc_feature (1)..( 7): Result.002 file - promoters60/1024203
tcgatga

SEQ ID NO: 99450 - DNA, 7 bp, Unknown
  misc_feature (1)..( 7): Result.002 file - promoters60/1024203
gaattca

SEQ ID NO: 99451 - DNA, 7 bp, Unknown
  misc_feature (1)..( 7): Result.002 file - promoters60/1024203
gaagtca

SEQ ID NO: 99452 - DNA, 6 bp, Unknown
  misc_feature (1)..( 6): Result.002 file - promoters60/1024203
tgttct

SEQ ID NO: 99453 - DNA, 6 bp, Unknown
  misc_feature (1)..( 6): Result.002 file - promoters60/1024203
tgttct

SEQ ID NO: 99454 - DNA, 9 bp, Unknown
  misc_feature (1)..( 9): Result.002 file - promoters60/1024214
aattgatga

SEQ ID NO: 99455 - DNA, 9 bp, Unknown
  misc_feature (1)..( 9): Result.002 file - promoters60/1024214
aattgattc

SEQ ID NO: 99456 - DNA, 9 bp, Unknown
  misc_feature (1)..( 9): Result.002 file - promoters60/1024214
aattgattt

SEQ ID NO: 99457 - DNA, 9 bp, Unknown
  misc_feature (1)..( 9): Result.002 file - promoters60/1024214
atttgattg

SEQ ID NO: 99458 - DNA, 9 bp, Unknown
  misc_feature (1)..( 9): Result.002 file - promoters60/1024214
aattgagca

SEQ ID NO: 99459 - DNA, 9 bp, Unknown
  misc_feature (1)..( 9): Result.002 file - promoters60/1024214
aatttattt

SEQ ID NO: 99460 - DNA, 9 bp, Unknown
  misc_feature (1)..( 9): Result.002 file - promoters60/1024214
ctttgattt

SEQ ID NO: 99461 - DNA, 9 bp, Unknown
  misc_feature (1)..( 9): Result.002 file - promoters60/1024214
cattggttt

SEQ ID NO: 99462 - DNA, 8 bp, Unknown
  misc_feature (1)..( 8): Result.002 file - promoters60/1024214
tttttttt

SEQ ID NO: 99463 - DNA, 8 bp, Unknown
  misc_feature (1)..( 8): Result.002 file - promoters60/1024214
gatttttt

SEQ ID NO: 99464 - DNA, 9 bp, Unknown
  misc_feature (1)..( 9): Result.002 file - promoters60/1024214
aatttattt

SEQ ID NO: 99465 - DNA, 9 bp, Unknown
  misc_feature (1)..( 9): Result.002 file - promoters60/1024214
aattgattc

SEQ ID NO: 99466 - DNA, 9 bp, Unknown
  misc_feature (1)..( 9): Result.002 file - promoters60/1024214
ctttgattt

SEQ ID NO: 99467 - DNA, 9 bp, Unknown
  misc_feature (1)..( 9): Result.002 file - promoters60/1024214
cattggttt

SEQ ID NO: 99468 - DNA, 8 bp, Unknown
  misc_feature (1)..( 8): Result.002 file - promoters60/1024214
tttaattg

SEQ ID NO: 99469 - DNA, 8 bp, Unknown
  misc_feature (1)..( 8): Result.002 file - promoters60/1024214
tttgattt

SEQ ID NO: 99470 - DNA, 8 bp, Unknown
  misc_feature (1)..( 8): Result.002 file - promoters60/1024214
tttgattg

SEQ ID NO: 99471 - DNA, 8 bp, Unknown
  misc_feature (1)..( 8): Result.002 file - promoters60/1024214
attgattc

SEQ ID NO: 99472 - DNA, 8 bp, Unknown
  misc_feature (1)..( 8): Result.002 file - promoters60/1024214
attggttt

SEQ ID NO: 99473 - DNA, 8 bp, Unknown
  misc_feature (1)..( 8): Result.002 file - promoters60/1024214
agtgattt

SEQ ID NO: 99474 - DNA, 8 bp, Unknown
  misc_feature (1)..( 8): Result.002 file - promoters60/1024214
attgattt

SEQ ID NO: 99475 - DNA, 7 bp, Unknown
  misc_feature (1)..( 7): Result.002 file - promoters60/1024234
caaaatt

SEQ ID NO: 99476 - DNA, 7 bp, Unknown
  misc_feature (1)..( 7): Result.002 file - promoters60/1024234
caaaatc

SEQ ID NO: 99477 - DNA, 7 bp, Unknown
  misc_feature (1)..( 7): Result.002 file - promoters60/1024234
aaaaatc

SEQ ID NO: 99478 - DNA, 8 bp, Unknown
  misc_feature (1)..( 8): Result.002 file - promoters60/1024234
taacaatt

SEQ ID NO: 99479 - DNA, 19 bp, Unknown
  misc_feature (1)..( 19): Result.002 file - promoters60/1024234
ataaaacaaaaattatact

SEQ ID NO: 99480 - DNA, 19 bp, Unknown
  misc_feature (1)..( 19): Result.002 file - promoters60/1024234
gaattactaaatttaaaaa

SEQ ID NO: 99481 - DNA, 19 bp, Unknown
  misc_feature (1)..( 19): Result.002 file - promoters60/1024234
cgagaccaaaaattaaact

SEQ ID NO: 99482 - DNA, 19 bp, Unknown
  misc_feature (1)..( 19): Result.002 file - promoters60/1024234
attgattcaaaattctcta

SEQ ID NO: 99483 - DNA, 19 bp, Unknown
  misc_feature (1)..( 19): Result.002 file - promoters60/1024234
ttgaatcaatattttatca

SEQ ID NO: 99484 - DNA, 9 bp, Unknown
  misc_feature (1)..( 9): Result.002 file - promoters60/1024234
ctatatagc

SEQ ID NO: 99485 - DNA, 9 bp, Unknown
  misc_feature (1)..( 9): Result.002 file - promoters60/1024234
ttatataat

SEQ ID NO: 99486 - DNA, 9 bp, Unknown
  misc_feature (1)..( 9): Result.002 file - promoters60/1024234
ttagatatg

SEQ ID NO: 99487 - DNA, 9 bp, Unknown
  misc_feature (1)..( 9): Result.002 file - promoters60/1024234
tgagagatg

SEQ ID NO: 99488 - DNA, 16 bp, Unknown
  misc_feature (1)..( 16): Result.002 file - promoters60/1024234
caatttgaatgaaact

SEQ ID NO: 99489 - DNA, 16 bp, Unknown
  misc_feature (1)..( 16): Result.002 file - promoters60/1024234
caatatgaaagaaatt

SEQ ID NO: 99490 - DNA, 16 bp, Unknown
  misc_feature (1)..( 16): Result.002 file - promoters60/1024234
aaaggcgaaagaatag

SEQ ID NO: 99491 - DNA, 16 bp, Unknown
  misc_feature (1)..( 16): Result.002 file - promoters60/1024234
ctaacagaataaaaac

SEQ ID NO: 99492 - DNA, 16 bp, Unknown
  misc_feature (1)..( 16): Result.002 file - promoters60/1024234
tgatttgagggtacac

SEQ ID NO: 99493 - DNA, 17 bp, Unknown
  misc_feature (1)..( 17): Result.002 file - promoters60/1024234
gcactaaaacagagtaa

SEQ ID NO: 99494 - DNA, 9 bp, Unknown
  misc_feature (1)..( 9): Result.002 file - promoters60/1024234
taggtgcga

SEQ ID NO: 99495 - DNA, 9 bp, Unknown
  misc_feature (1)..( 9): Result.002 file - promoters60/1024234
gtggttcga

SEQ ID NO: 99496 - DNA, 9 bp, Unknown
  misc_feature (1)..( 9): Result.002 file - promoters60/1024234
ccggttcgg

SEQ ID NO: 99497 - DNA, 9 bp, Unknown
  misc_feature (1)..( 9): Result.002 file - promoters60/1024234
ccggatcgt

SEQ ID NO: 99498 - DNA, 9 bp, Unknown
  misc_feature (1)..( 9): Result.002 file - promoters60/1024234
tgtaacagt

SEQ ID NO: 99499 - DNA, 9 bp, Unknown
  misc_feature (1)..( 9): Result.002 file - promoters60/1024234
tctaacagt

SEQ ID NO: 99500 - DNA, 9 bp, Unknown
  misc_feature (1)..( 9): Result.002 file - promoters60/1024234
tgtaacatg

SEQ ID NO: 99501 - DNA, 9 bp, Unknown
  misc_feature (1)..( 9): Result.002 file - promoters60/1024234
actaacact

SEQ ID NO: 99502 - DNA, 10 bp, Unknown
  misc_feature (1)..( 10): Result.002 file - promoters60/1024257
tttctaaatc

SEQ ID NO: 99503 - DNA, 10 bp, Unknown
  misc_feature (1)..( 10): Result.002 file - promoters60/1024257
attctaacta

SEQ ID NO: 99504 - DNA, 10 bp, Unknown
  misc_feature (1)..( 10): Result.002 file - promoters60/1024257
tttctaaaat

SEQ ID NO: 99505 - DNA, 10 bp, Unknown
  misc_feature (1)..( 10): Result.002 file - promoters60/1024257
aatctaacaa

SEQ ID NO: 99506 - DNA, 10 bp, Unknown
  misc_feature (1)..( 10): Result.002 file - promoters60/1024257
ggcctacaat

SEQ ID NO: 99507 - DNA, 9 bp, Unknown
  misc_feature (1)..( 9): Result.002 file - promoters60/1024355
ctatactct

SEQ ID NO: 99508 - DNA, 9 bp, Unknown
  misc_feature (1)..( 9): Result.002 file - promoters60/1024355
atatacttt

SEQ ID NO: 99509 - DNA, 9 bp, Unknown
  misc_feature (1)..( 9): Result.002 file - promoters60/1024355
ctatgctct

SEQ ID NO: 99510 - DNA, 6 bp, Unknown
  misc_feature (1)..( 6): Result.002 file - promoters60/1024355
tactcg

SEQ ID NO: 99511 - DNA, 6 bp, Unknown
  misc_feature (1)..( 6): Result.002 file - promoters60/1024355
tactcg

SEQ ID NO: 99512 - DNA, 7 bp, Unknown
  misc_feature (1)..( 7): Result.002 file - promoters60/1024355
tgagctc

SEQ ID NO: 99513 - DNA, 7 bp, Unknown
  misc_feature (1)..( 7): Result.002 file - promoters60/1024355
tgatctc

SEQ ID NO: 99514 - DNA, 7 bp, Unknown
  misc_feature (1)..( 7): Result.002 file - promoters60/1024355
aaagtaa

SEQ ID NO: 99515 - DNA, 7 bp, Unknown
  misc_feature (1)..( 7): Result.002 file - promoters60/1024355
aaactaa

SEQ ID NO: 99516 - DNA, 6 bp, Unknown
  misc_feature (1)..( 6): Result.002 file - promoters60/1024355
ttaatc

SEQ ID NO: 99517 - DNA, 6 bp, Unknown
  misc_feature (1)..( 6): Result.002 file - promoters60/1024355
ttaatc

SEQ ID NO: 99518 - DNA, 6 bp, Unknown
  misc_feature (1)..( 6): Result.002 file - promoters60/1024355
gattta

SEQ ID NO: 99519 - DNA, 6 bp, Unknown
  misc_feature (1)..( 6): Result.002 file - promoters60/1024355
gattta

SEQ ID NO: 99520 - DNA, 6 bp, Unknown
  misc_feature (1)..( 6): Result.002 file - promoters60/1024355
atcttt

SEQ ID NO: 99521 - DNA, 6 bp, Unknown
  misc_feature (1)..( 6): Result.002 file - promoters60/1024355
atcttt

SEQ ID NO: 99522 - DNA, 8 bp, Unknown
  misc_feature (1)..( 8): Result.002 file - promoters60/1024355
atactaaa

SEQ ID NO: 99523 - DNA, 8 bp, Unknown
  misc_feature (1)..( 8): Result.002 file - promoters60/1024355
atagtaaa

SEQ ID NO: 99524 - DNA, 6 bp, Unknown
  misc_feature (1)..( 6): Result.002 file - promoters60/1024355
aaagcg

SEQ ID NO: 99525 - DNA, 6 bp, Unknown
  misc_feature (1)..( 6): Result.002 file - promoters60/1024355
aaagcg

SEQ ID NO: 99526 - DNA, 8 bp, Unknown
  misc_feature (1)..( 8): Result.002 file - promoters60/1024355
aagaagct

SEQ ID NO: 99527 - DNA, 8 bp, Unknown
  misc_feature (1)..( 8): Result.002 file - promoters60/1024355
aagcagct

SEQ ID NO: 99528 - DNA, 6 bp, Unknown
  misc_feature (1)..( 6): Result.002 file - promoters60/1024355
acttcc

SEQ ID NO: 99529 - DNA, 6 bp, Unknown
  misc_feature (1)..( 6): Result.002 file - promoters60/1024355
acttcc

SEQ ID NO: 99530 - DNA, 7 bp, Unknown
  misc_feature (1)..( 7): Result.002 file - promoters60/1024355
cactctc

SEQ ID NO: 99531 - DNA, 7 bp, Unknown
  misc_feature (1)..( 7): Result.002 file - promoters60/1024355
caccctc

SEQ ID NO: 99532 - DNA, 6 bp, Unknown
  misc_feature (1)..( 6): Result.002 file - promoters60/1024355
gattaa

SEQ ID NO: 99533 - DNA, 6 bp, Unknown
  misc_feature (1)..( 6): Result.002 file - promoters60/1024355
gattaa

SEQ ID NO: 99534 - DNA, 6 bp, Unknown
  misc_feature (1)..( 6): Result.002 file - promoters60/1024355
tttgat

SEQ ID NO: 99535 - DNA, 6 bp, Unknown
  misc_feature (1)..( 6): Result.002 file - promoters60/1024355
tttgat

SEQ ID NO: 99536 - DNA, 8 bp, Unknown
  misc_feature (1)..( 8): Result.002 file - promoters60/1024355
cttcatat

SEQ ID NO: 99537 - DNA, 8 bp, Unknown
  misc_feature (1)..( 8): Result.002 file - promoters60/1024355
cttcttat

SEQ ID NO: 99538 - DNA, 8 bp, Unknown
  misc_feature (1)..( 8): Result.002 file - promoters60/1024355
atttttca

SEQ ID NO: 99539 - DNA, 8 bp, Unknown
  misc_feature (1)..( 8): Result.002 file - promoters60/1024355
attgttca

SEQ ID NO: 99540 - DNA, 8 bp, Unknown
  misc_feature (1)..( 8): Result.002 file - promoters60/1024355
tttgacaa

SEQ ID NO: 99541 - DNA, 8 bp, Unknown
  misc_feature (1)..( 8): Result.002 file - promoters60/1024355
tttaacaa

SEQ ID NO: 99542 - DNA, 14 bp, Unknown
  misc_feature (1)..( 14): Result.002 file - promoters60/1024367
agacaaaataaaga

SEQ ID NO: 99543 - DNA, 14 bp, Unknown
  misc_feature (1)..( 14): Result.002 file - promoters60/1024367
gttgagtctaaaga

SEQ ID NO: 99544 - DNA, 14 bp, Unknown
  misc_feature (1)..( 14): Result.002 file - promoters60/1024367
cattaaaataaaag

SEQ ID NO: 99545 - DNA, 14 bp, Unknown
  misc_feature (1)..( 14): Result.002 file - promoters60/1024367
aaaagaaataaatc

SEQ ID NO: 99546 - DNA, 14 bp, Unknown
  misc_feature (1)..( 14): Result.002 file - promoters60/1024367
taaaataataaatg

SEQ ID NO: 99547 - DNA, 15 bp, Unknown
  misc_feature (1)..( 15): Result.002 file - promoters60/1024367
gaatataatataatg

SEQ ID NO: 99548 - DNA, 12 bp, Unknown
  misc_feature (1)..( 12): Result.002 file - promoters60/1024367
ccactatataag

SEQ ID NO: 99549 - DNA, 12 bp, Unknown
  misc_feature (1)..( 12): Result.002 file - promoters60/1024367
ccattatatata

SEQ ID NO: 99550 - DNA, 12 bp, Unknown
  misc_feature (1)..( 12): Result.002 file - promoters60/1024367
cgcctatatata

SEQ ID NO: 99551 - DNA, 12 bp, Unknown
  misc_feature (1)..( 12): Result.002 file - promoters60/1024367
cttttatatata

SEQ ID NO: 99552 - DNA, 12 bp, Unknown
  misc_feature (1)..( 12): Result.002 file - promoters60/1024367
cttgtatatata

SEQ ID NO: 99553 - DNA, 12 bp, Unknown
  misc_feature (1)..( 12): Result.002 file - promoters60/1024367
gtgagatataat

SEQ ID NO: 99554 - DNA, 12 bp, Unknown
  misc_feature (1)..( 12): Result.002 file - promoters60/1024367
acaaaatataaa

SEQ ID NO: 99555 - DNA, 12 bp, Unknown
  misc_feature (1)..( 12): Result.002 file - promoters60/1024367
gcgctatttaag

SEQ ID NO: 99556 - DNA, 12 bp, Unknown
  misc_feature (1)..( 12): Result.002 file - promoters60/1024367
agacaaaataaa

SEQ ID NO: 99557 - DNA, 12 bp, Unknown
  misc_feature (1)..( 12): Result.002 file - promoters60/1024367
cattaaaataaa

SEQ ID NO: 99558 - DNA, 12 bp, Unknown
  misc_feature (1)..( 12): Result.002 file - promoters60/1024367
tcttaaaataat

SEQ ID NO: 99559 - DNA, 12 bp, Unknown
  misc_feature (1)..( 12): Result.002 file - promoters60/1024367
aaaagaaataaa

SEQ ID NO: 99560 - DNA, 12 bp, Unknown
  misc_feature (1)..( 12): Result.002 file - promoters60/1024367
atataatataat

SEQ ID NO: 99561 - DNA, 12 bp, Unknown
  misc_feature (1)..( 12): Result.002 file - promoters60/1024367
atttaaaatgct

SEQ ID NO: 99562 - DNA, 10 bp, Unknown
  misc_feature (1)..( 10): Result.002 file - promoters60/1024367
ttaactttga

SEQ ID NO: 99563 - DNA, 10 bp, Unknown
  misc_feature (1)..( 10): Result.002 file - promoters60/1024367
ataagtttca

SEQ ID NO: 99564 - DNA, 10 bp, Unknown
  misc_feature (1)..( 10): Result.002 file - promoters60/1024367
ataaatttgt

SEQ ID NO: 99565 - DNA, 10 bp, Unknown
  misc_feature (1)..( 10): Result.002 file - promoters60/1024367
tgaagtatca

SEQ ID NO: 99566 - DNA, 10 bp, Unknown
  misc_feature (1)..( 10): Result.002 file - promoters60/1024367
atatgtttat

SEQ ID NO: 99567 - DNA, 10 bp, Unknown
  misc_feature (1)..( 10): Result.002 file - promoters60/1024367
ccaaaattga

SEQ ID NO: 99568 - DNA, 10 bp, Unknown
  misc_feature (1)..( 10): Result.002 file - promoters60/1024367
ttaaacaaaa

SEQ ID NO: 99569 - DNA, 10 bp, Unknown
  misc_feature (1)..( 10): Result.002 file - promoters60/1024367
ataaacaaat

SEQ ID NO: 99570 - DNA, 10 bp, Unknown
  misc_feature (1)..( 10): Result.002 file - promoters60/1024367
taaaacaaag

SEQ ID NO: 99571 - DNA, 10 bp, Unknown
  misc_feature (1)..( 10): Result.002 file - promoters60/1024367
aaagacaaaa

SEQ ID NO: 99572 - DNA, 10 bp, Unknown
  misc_feature (1)..( 10): Result.002 file - promoters60/1024367
atagacaata

SEQ ID NO: 99573 - DNA, 10 bp, Unknown
  misc_feature (1)..( 10): Result.002 file - promoters60/1024367
tcagactata

SEQ ID NO: 99574 - DNA, 8 bp, Unknown
  misc_feature (1)..( 8): Result.002 file - promoters60/1024375
atgtaaat

SEQ ID NO: 99575 - DNA, 8 bp, Unknown
  misc_feature (1)..( 8): Result.002 file - promoters60/1024375
ctgtcaat

SEQ ID NO: 99576 - DNA, 8 bp, Unknown
  misc_feature (1)..( 8): Result.002 file - promoters60/1024375
atgtaatt

SEQ ID NO: 99577 - DNA, 9 bp, Unknown
  misc_feature (1)..( 9): Result.002 file - promoters60/1024375
cagtgaaag

SEQ ID NO: 99578 - DNA, 9 bp, Unknown
  misc_feature (1)..( 9): Result.002 file - promoters60/1024375
cagagaaga

SEQ ID NO: 99579 - DNA, 9 bp, Unknown
  misc_feature (1)..( 9): Result.002 file - promoters60/1024375
gagtgaaag

SEQ ID NO: 99580 - DNA, 9 bp, Unknown
  misc_feature (1)..( 9): Result.002 file - promoters60/1024375
ctttgaaag

SEQ ID NO: 99581 - DNA, 7 bp, Unknown
  misc_feature (1)..( 7): Result.002 file - promoters60/1024375
taaacat

SEQ ID NO: 99582 - DNA, 7 bp, Unknown
  misc_feature (1)..( 7): Result.002 file - promoters60/1024375
taaacat

SEQ ID NO: 99583 - DNA, 7 bp, Unknown
  misc_feature (1)..( 7): Result.002 file - promoters60/1024375
aaaacat

SEQ ID NO: 99584 - DNA, 7 bp, Unknown
  misc_feature (1)..( 7): Result.002 file - promoters60/1024375
aaaatat

SEQ ID NO: 99585 - DNA, 7 bp, Unknown
  misc_feature (1)..( 7): Result.002 file - promoters60/1024375
aaattat

SEQ ID NO: 99586 - DNA, 7 bp, Unknown
  misc_feature (1)..( 7): Result.002 file - promoters60/1024375
taataat

SEQ ID NO: 99587 - DNA, 11 bp, Unknown
  misc_feature (1)..( 11): Result.002 file - promoters60/1024375
agtgaaagcaa

SEQ ID NO: 99588 - DNA, 11 bp, Unknown
  misc_feature (1)..( 11): Result.002 file - promoters60/1024375
tttgaaagcaa

SEQ ID NO: 99589 - DNA, 11 bp, Unknown
  misc_feature (1)..( 11): Result.002 file - promoters60/1024375
agtgaaagata

SEQ ID NO: 99590 - DNA, 8 bp, Unknown
  misc_feature (1)..( 8): Result.002 file - promoters60/1024375
aatatgta

SEQ ID NO: 99591 - DNA, 8 bp, Unknown
  misc_feature (1)..( 8): Result.002 file - promoters60/1024375
aatttgtt

SEQ ID NO: 99592 - DNA, 8 bp, Unknown
  misc_feature (1)..( 8): Result.002 file - promoters60/1024375
ggtttgtt

SEQ ID NO: 99593 - DNA, 9 bp, Unknown
  misc_feature (1)..( 9): Result.002 file - promoters60/1024375
atatataaa

SEQ ID NO: 99594 - DNA, 9 bp, Unknown
  misc_feature (1)..( 9): Result.002 file - promoters60/1024375
ttatataaa

SEQ ID NO: 99595 - DNA, 9 bp, Unknown
  misc_feature (1)..( 9): Result.002 file - promoters60/1024375
atatattta

SEQ ID NO: 99596 - DNA, 8 bp, Unknown
  misc_feature (1)..( 8): Result.002 file - promoters60/1024375
gtgaaaca

SEQ ID NO: 99597 - DNA, 8 bp, Unknown
  misc_feature (1)..( 8): Result.002 file - promoters60/1024375
ttgaaaca

SEQ ID NO: 99598 - DNA, 8 bp, Unknown
  misc_feature (1)..( 8): Result.002 file - promoters60/1024375
ttgaaatt

SEQ ID NO: 99599 - DNA, 9 bp, Unknown
  misc_feature (1)..( 9): Result.002 file - promoters60/1024375
aagacaaaa

SEQ ID NO: 99600 - DNA, 9 bp, Unknown
  misc_feature (1)..( 9): Result.002 file - promoters60/1024375
aagaaaaaa

SEQ ID NO: 99601 - DNA, 9 bp, Unknown
  misc_feature (1)..( 9): Result.002 file - promoters60/1024375
aagaaaata

SEQ ID NO: 99602 - DNA, 8 bp, Unknown
  misc_feature (1)..( 8): Result.002 file - promoters60/1024392
gttataaa

SEQ ID NO: 99603 - DNA, 8 bp, Unknown
  misc_feature (1)..( 8): Result.002 file - promoters60/1024392
tttataat

SEQ ID NO: 99604 - DNA, 8 bp, Unknown
  misc_feature (1)..( 8): Result.002 file - promoters60/1024392
attacaaa

SEQ ID NO: 99605 - DNA, 8 bp, Unknown
  misc_feature (1)..( 8): Result.002 file - promoters60/1024392
tttttaaa

SEQ ID NO: 99606 - DNA, 8 bp, Unknown
  misc_feature (1)..( 8): Result.002 file - promoters60/1024392
tttttaac

SEQ ID NO: 99607 - DNA, 8 bp, Unknown
  misc_feature (1)..( 8): Result.002 file - promoters60/1024392
tgtttaac

SEQ ID NO: 99608 - DNA, 6 bp, Unknown
  misc_feature (1)..( 6): Result.002 file - promoters60/1024431
ttttta

SEQ ID NO: 99609 - DNA, 6 bp, Unknown
  misc_feature (1)..( 6): Result.002 file - promoters60/1024431
ttttta

SEQ ID NO: 99610 - DNA, 6 bp, Unknown
  misc_feature (1)..( 6): Result.002 file - promoters60/1024431
ataatt

SEQ ID NO: 99611 - DNA, 6 bp, Unknown
  misc_feature (1)..( 6): Result.002 file - promoters60/1024431
ataatt

SEQ ID NO: 99612 - DNA, 7 bp, Unknown
  misc_feature (1)..( 7): Result.002 file - promoters60/1024431
ttttctt

SEQ ID NO: 99613 - DNA, 7 bp, Unknown
  misc_feature (1)..( 7): Result.002 file - promoters60/1024431
tttcctt

SEQ ID NO: 99614 - DNA, 7 bp, Unknown
  misc_feature (1)..( 7): Result.002 file - promoters60/1024431
aaaagac

SEQ ID NO: 99615 - DNA, 7 bp, Unknown
  misc_feature (1)..( 7): Result.002 file - promoters60/1024431
aaaagac

SEQ ID NO: 99616 - DNA, 6 bp, Unknown
  misc_feature (1)..( 6): Result.002 file - promoters60/1024431
aaactg

SEQ ID NO: 99617 - DNA, 6 bp, Unknown
  misc_feature (1)..( 6): Result.002 file - promoters60/1024431
aaactg

SEQ ID NO: 99618 - DNA, 15 bp, Unknown
  misc_feature (1)..( 15): Result.002 file - promoters60/1024431
aattccttatttata

SEQ ID NO: 99619 - DNA, 15 bp, Unknown
  misc_feature (1)..( 15): Result.002 file - promoters60/1024431
aatacctcatttata

SEQ ID NO: 99620 - DNA, 8 bp, Unknown
  misc_feature (1)..( 8): Result.002 file - promoters60/1024431
ttcaaaac

SEQ ID NO: 99621 - DNA, 8 bp, Unknown
  misc_feature (1)..( 8): Result.002 file - promoters60/1024431
ttcataac

SEQ ID NO: 99622 - DNA, 11 bp, Unknown
  misc_feature (1)..( 11): Result.002 file - promoters60/1024431
aaataactcac

SEQ ID NO: 99623 - DNA, 11 bp, Unknown
  misc_feature (1)..( 11): Result.002 file - promoters60/1024431
aaataaatcac

SEQ ID NO: 99624 - DNA, 6 bp, Unknown
  misc_feature (1)..( 6): Result.002 file - promoters60/1024431
tactaa

SEQ ID NO: 99625 - DNA, 6 bp, Unknown
  misc_feature (1)..( 6): Result.002 file - promoters60/1024431
tactaa

SEQ ID NO: 99626 - DNA, 7 bp, Unknown
  misc_feature (1)..( 7): Result.002 file - promoters60/1024431
aaaacaa

SEQ ID NO: 99627 - DNA, 7 bp, Unknown
  misc_feature (1)..( 7): Result.002 file - promoters60/1024431
aaaccaa

SEQ ID NO: 99628 - DNA, 6 bp, Unknown
  misc_feature (1)..( 6): Result.002 file - promoters60/1024431
atattc

SEQ ID NO: 99629 - DNA, 6 bp, Unknown
  misc_feature (1)..( 6): Result.002 file - promoters60/1024431
atattc

SEQ ID NO: 99630 - DNA, 6 bp, Unknown
  misc_feature (1)..( 6): Result.002 file - promoters60/1024431
tgtaaa

SEQ ID NO: 99631 - DNA, 6 bp, Unknown
  misc_feature (1)..( 6): Result.002 file - promoters60/1024431
tgtaaa

SEQ ID NO: 99632 - DNA, 6 bp, Unknown
  misc_feature (1)..( 6): Result.002 file - promoters60/1024431
attaat

SEQ ID NO: 99633 - DNA, 6 bp, Unknown
  misc_feature (1)..( 6): Result.002 file - promoters60/1024431
attaat

SEQ ID NO: 99634 - DNA, 10 bp, Unknown
  misc_feature (1)..( 10): Result.002 file - promoters60/1024431
atttatattg

SEQ ID NO: 99635 - DNA, 10 bp, Unknown
  misc_feature (1)..( 10): Result.002 file - promoters60/1024431
attaatattg

SEQ ID NO: 99636 - DNA, 8 bp, Unknown
  misc_feature (1)..( 8): Result.002 file - promoters60/1024431
taaataaa

SEQ ID NO: 99637 - DNA, 8 bp, Unknown
  misc_feature (1)..( 8): Result.002 file - promoters60/1024431
taaaaaaa

SEQ ID NO: 99638 - DNA, 7 bp, Unknown
  misc_feature (1)..( 7): Result.002 file - promoters60/1024431
acattat

SEQ ID NO: 99639 - DNA, 7 bp, Unknown
  misc_feature (1)..( 7): Result.002 file - promoters60/1024431
acattat

SEQ ID NO: 99640 - DNA, 7 bp, Unknown
  misc_feature (1)..( 7): Result.002 file - promoters60/1024431
ttatagt

SEQ ID NO: 99641 - DNA, 7 bp, Unknown
  misc_feature (1)..( 7): Result.002 file - promoters60/1024431
ttacagt

SEQ ID NO: 99642 - DNA, 11 bp, Unknown
  misc_feature (1)..( 11): Result.002 file - promoters60/1024431
gttgttaaaaa

SEQ ID NO: 99643 - DNA, 11 bp, Unknown
  misc_feature (1)..( 11): Result.002 file - promoters60/1024431
gttattaaaaa

SEQ ID NO: 99644 - DNA, 14 bp, Unknown
  misc_feature (1)..( 14): Result.002 file - promoters60/1024499
agatatttttttta

SEQ ID NO: 99645 - DNA, 14 bp, Unknown
  misc_feature (1)..( 14): Result.002 file - promoters60/1024499
ccacattgttttta

SEQ ID NO: 99646 - DNA, 14 bp, Unknown
  misc_feature (1)..( 14): Result.002 file - promoters60/1024499
aaaaatatatttat

SEQ ID NO: 99647 - DNA, 14 bp, Unknown
  misc_feature (1)..( 14): Result.002 file - promoters60/1024499
taaaatactttatc

SEQ ID NO: 99648 - DNA, 13 bp, Unknown
  misc_feature (1)..( 13): Result.002 file - promoters60/1024499
ttcatataaataa

SEQ ID NO: 99649 - DNA, 13 bp, Unknown
  misc_feature (1)..( 13): Result.002 file - promoters60/1024499
ggtatataaataa

SEQ ID NO: 99650 - DNA, 13 bp, Unknown
  misc_feature (1)..( 13): Result.002 file - promoters60/1024499
taactataaatag

SEQ ID NO: 99651 - DNA, 13 bp, Unknown
  misc_feature (1)..( 13): Result.002 file - promoters60/1024499
tatatataaatag

SEQ ID NO: 99652 - DNA, 13 bp, Unknown
  misc_feature (1)..( 13): Result.002 file - promoters60/1024499
aatctataaaaaa

SEQ ID NO: 99653 - DNA, 10 bp, Unknown
  misc_feature (1)..( 10): Result.002 file - promoters60/1024499
aacatttcat

SEQ ID NO: 99654 - DNA, 10 bp, Unknown
  misc_feature (1)..( 10): Result.002 file - promoters60/1024499
aacattaata

SEQ ID NO: 99655 - DNA, 10 bp, Unknown
  misc_feature (1)..( 10): Result.002 file - promoters60/1024499
tacattttgt

SEQ ID NO: 99656 - DNA, 10 bp, Unknown
  misc_feature (1)..( 10): Result.002 file - promoters60/1024499
gacaataata

SEQ ID NO: 99657 - DNA, 10 bp, Unknown
  misc_feature (1)..( 10): Result.002 file - promoters60/1024562
gggccaaatt

SEQ ID NO: 99658 - DNA, 10 bp, Unknown
  misc_feature (1)..( 10): Result.002 file - promoters60/1024562
aggcccaatt

SEQ ID NO: 99659 - DNA, 10 bp, Unknown
  misc_feature (1)..( 10): Result.002 file - promoters60/1024562
aggcccaata

SEQ ID NO: 99660 - DNA, 10 bp, Unknown
  misc_feature (1)..( 10): Result.002 file - promoters60/1024562
aggaccattc

SEQ ID NO: 99661 - DNA, 10 bp, Unknown
  misc_feature (1)..( 10): Result.002 file - promoters60/1024562
taactacagt

SEQ ID NO: 99662 - DNA, 10 bp, Unknown
  misc_feature (1)..( 10): Result.002 file - promoters60/1024562
taacaacaga

SEQ ID NO: 99663 - DNA, 10 bp, Unknown
  misc_feature (1)..( 10): Result.002 file - promoters60/1024562
cttcaataga

SEQ ID NO: 99664 - DNA, 10 bp, Unknown
  misc_feature (1)..( 10): Result.002 file - promoters60/1024562
aggaaataga

SEQ ID NO: 99665 - DNA, 8 bp, Unknown
  misc_feature (1)..( 8): Result.002 file - promoters60/1024562
gaagcttg

SEQ ID NO: 99666 - DNA, 8 bp, Unknown
  misc_feature (1)..( 8): Result.002 file - promoters60/1024562
caagcttc

SEQ ID NO: 99667 - DNA, 8 bp, Unknown
  misc_feature (1)..( 8): Result.002 file - promoters60/1024562
gaatcttt

SEQ ID NO: 99668 - DNA, 8 bp, Unknown
  misc_feature (1)..( 8): Result.002 file - promoters60/1024562
aaattttt

SEQ ID NO: 99669 - DNA, 13 bp, Unknown
  misc_feature (1)..( 13): Result.002 file - promoters60/1024562
agaacaaaacaaa

SEQ ID NO: 99670 - DNA, 13 bp, Unknown
  misc_feature (1)..( 13): Result.002 file - promoters60/1024562
atctccaaacaat

SEQ ID NO: 99671 - DNA, 13 bp, Unknown
  misc_feature (1)..( 13): Result.002 file - promoters60/1024562
tagtaaaaagaaa

SEQ ID NO: 99672 - DNA, 13 bp, Unknown
  misc_feature (1)..( 13): Result.002 file - promoters60/1024562
taggaaaaagctg

SEQ ID NO: 99673 - DNA, 10 bp, Unknown
  misc_feature (1)..( 10): Result.002 file - promoters60/1024611
tcaaaatagc

SEQ ID NO: 99674 - DNA, 10 bp, Unknown
  misc_feature (1)..( 10): Result.002 file - promoters60/1024611
tcaaaagctt

SEQ ID NO: 99675 - DNA, 10 bp, Unknown
  misc_feature (1)..( 10): Result.002 file - promoters60/1024611
ccaaaagagc

SEQ ID NO: 99676 - DNA, 6 bp, Unknown
  misc_feature (1)..( 6): Result.002 file - promoters60/1024611
atgaaa

SEQ ID NO: 99677 - DNA, 6 bp, Unknown
  misc_feature (1)..( 6): Result.002 file - promoters60/1024611
atgaaa

SEQ ID NO: 99678 - DNA, 8 bp, Unknown
  misc_feature (1)..( 8): Result.002 file - promoters60/1024611
ttgaaaca

SEQ ID NO: 99679 - DNA, 8 bp, Unknown
  misc_feature (1)..( 8): Result.002 file - promoters60/1024611
ttgaaaca

SEQ ID NO: 99680 - DNA, 6 bp, Unknown
  misc_feature (1)..( 6): Result.002 file - promoters60/1024611
aagact

SEQ ID NO: 99681 - DNA, 6 bp, Unknown
  misc_feature (1)..( 6): Result.002 file - promoters60/1024611
aagact

SEQ ID NO: 99682 - DNA, 7 bp, Unknown
  misc_feature (1)..( 7): Result.002 file - promoters60/1024611
agataaa

SEQ ID NO: 99683 - DNA, 7 bp, Unknown
  misc_feature (1)..( 7): Result.002 file - promoters60/1024611
agacaaa

SEQ ID NO: 99684 - DNA, 7 bp, Unknown
  misc_feature (1)..( 7): Result.002 file - promoters60/1024611
ctaatcc

SEQ ID NO: 99685 - DNA, 7 bp, Unknown
  misc_feature (1)..( 7): Result.002 file - promoters60/1024611
ctactcc

SEQ ID NO: 99686 - DNA, 6 bp, Unknown
  misc_feature (1)..( 6): Result.002 file - promoters60/1024611
gaaagt

SEQ ID NO: 99687 - DNA, 6 bp, Unknown
  misc_feature (1)..( 6): Result.002 file - promoters60/1024611
gaaagt

SEQ ID NO: 99688 - DNA, 7 bp, Unknown
  misc_feature (1)..( 7): Result.002 file - promoters60/1024611
tacctga

SEQ ID NO: 99689 - DNA, 7 bp, Unknown
  misc_feature (1)..( 7): Result.002 file - promoters60/1024611
tacttga

SEQ ID NO: 99690 - DNA, 7 bp, Unknown
  misc_feature (1)..( 7): Result.002 file - promoters60/1024611
atgctaa

SEQ ID NO: 99691 - DNA, 7 bp, Unknown
  misc_feature (1)..( 7): Result.002 file - promoters60/1024611
atggtaa

SEQ ID NO: 99692 - DNA, 8 bp, Unknown
  misc_feature (1)..( 8): Result.002 file - promoters60/1024611
cggaaatt

SEQ ID NO: 99693 - DNA, 8 bp, Unknown
  misc_feature (1)..( 8): Result.002 file - promoters60/1024611
cggcaatt

SEQ ID NO: 99694 - DNA, 10 bp, Unknown
  misc_feature (1)..( 10): Result.002 file - promoters60/1024611
tttgttttgt

SEQ ID NO: 99695 - DNA, 10 bp, Unknown
  misc_feature (1)..( 10): Result.002 file - promoters60/1024611
tttgttttgt

SEQ ID NO: 99696 - DNA, 6 bp, Unknown
  misc_feature (1)..( 6): Result.002 file - promoters60/1024611
aaagaa

SEQ ID NO: 99697 - DNA, 6 bp, Unknown
  misc_feature (1)..( 6): Result.002 file - promoters60/1024611
aaagaa

SEQ ID NO: 99698 - DNA, 7 bp, Unknown
  misc_feature (1)..( 7): Result.002 file - promoters60/1024611
tagagaa

SEQ ID NO: 99699 - DNA, 7 bp, Unknown
  misc_feature (1)..( 7): Result.002 file - promoters60/1024611
tagagaa

SEQ ID NO: 99700 - DNA, 7 bp, Unknown
  misc_feature (1)..( 7): Result.002 file - promoters60/1024611
aaggaga

SEQ ID NO: 99701 - DNA, 7 bp, Unknown
  misc_feature (1)..( 7): Result.002 file - promoters60/1024611
aagtaga

SEQ ID NO: 99702 - DNA, 7 bp, Unknown
  misc_feature (1)..( 7): Result.002 file - promoters60/1024611
aaagaag

SEQ ID NO: 99703 - DNA, 7 bp, Unknown
  misc_feature (1)..( 7): Result.002 file - promoters60/1024611
aaagaag

SEQ ID NO: 99704 - DNA, 6 bp, Unknown
  misc_feature (1)..( 6): Result.002 file - promoters60/1024611
caacac

SEQ ID NO: 99705 - DNA, 6 bp, Unknown
  misc_feature (1)..( 6): Result.002 file - promoters60/1024611
caacac

SEQ ID NO: 99706 - DNA, 6 bp, Unknown
  misc_feature (1)..( 6): Result.002 file - promoters60/1024611
ttgaag

SEQ ID NO: 99707 - DNA, 6 bp, Unknown
  misc_feature (1)..( 6): Result.002 file - promoters60/1024611
ttgaag

SEQ ID NO: 99708 - DNA, 7 bp, Unknown
  misc_feature (1)..( 7): Result.002 file - promoters60/1024611
ctctatt

SEQ ID NO: 99709 - DNA, 7 bp, Unknown
  misc_feature (1)..( 7): Result.002 file - promoters60/1024611
ctccatt

SEQ ID NO: 99710 - DNA, 18 bp, Unknown
  misc_feature (1)..( 18): Result.002 file - promoters60/1024662
ataagaaaattgacaaaa

SEQ ID NO: 99711 - DNA, 18 bp, Unknown
  misc_feature (1)..( 18): Result.002 file - promoters60/1024662
accggaaaatttatctca

SEQ ID NO: 99712 - DNA, 18 bp, Unknown
  misc_feature (1)..( 18): Result.002 file - promoters60/1024662
ataataaaacattggatg

SEQ ID NO: 99713 - DNA, 18 bp, Unknown
  misc_feature (1)..( 18): Result.002 file - promoters60/1024662
agtataaaaacgggtcca

SEQ ID NO: 99714 - DNA, 18 bp, Unknown
  misc_feature (1)..( 18): Result.002 file - promoters60/1024662
tcaattaaattatacaaa

SEQ ID NO: 99715 - DNA, 18 bp, Unknown
  misc_feature (1)..( 18): Result.002 file - promoters60/1024662
aaacacaaattaggctat

SEQ ID NO: 99716 - DNA, 9 bp, Unknown
  misc_feature (1)..( 9): Result.002 file - promoters60/1024713
caaattttc

SEQ ID NO: 99717 - DNA, 9 bp, Unknown
  misc_feature (1)..( 9): Result.002 file - promoters60/1024713
gaaatttgc

SEQ ID NO: 99718 - DNA, 9 bp, Unknown
  misc_feature (1)..( 9): Result.002 file - promoters60/1024713
gaactttgc

SEQ ID NO: 99719 - DNA, 7 bp, Unknown
  misc_feature (1)..( 7): Result.002 file - promoters60/1024713
ttgttaa

SEQ ID NO: 99720 - DNA, 7 bp, Unknown
  misc_feature (1)..( 7): Result.002 file - promoters60/1024713
ttgataa

SEQ ID NO: 99721 - DNA, 6 bp, Unknown
  misc_feature (1)..( 6): Result.002 file - promoters60/1024713
gtatat

SEQ ID NO: 99722 - DNA, 6 bp, Unknown
  misc_feature (1)..( 6): Result.002 file - promoters60/1024713
gtatat

SEQ ID NO: 99723 - DNA, 8 bp, Unknown
  misc_feature (1)..( 8): Result.002 file - promoters60/1024713
acaaaagt

SEQ ID NO: 99724 - DNA, 8 bp, Unknown
  misc_feature (1)..( 8): Result.002 file - promoters60/1024713
acaacagt

SEQ ID NO: 99725 - DNA, 8 bp, Unknown
  misc_feature (1)..( 8): Result.002 file - promoters60/1024713
aaaacgtt

SEQ ID NO: 99726 - DNA, 8 bp, Unknown
  misc_feature (1)..( 8): Result.002 file - promoters60/1024713
aaaaggtt

SEQ ID NO: 99727 - DNA, 11 bp, Unknown
  misc_feature (1)..( 11): Result.002 file - promoters60/1024713
aaattttcctt

SEQ ID NO: 99728 - DNA, 11 bp, Unknown
  misc_feature (1)..( 11): Result.002 file - promoters60/1024713
gaactttgctt

SEQ ID NO: 99729 - DNA, 11 bp, Unknown
  misc_feature (1)..( 11): Result.002 file - promoters60/1024713
gaaatttgcag

SEQ ID NO: 99730 - DNA, 10 bp, Unknown
  misc_feature (1)..( 10): Result.002 file - promoters60/1024713
taatttgttt

SEQ ID NO: 99731 - DNA, 10 bp, Unknown
  misc_feature (1)..( 10): Result.002 file - promoters60/1024713
aaatttattt

SEQ ID NO: 99732 - DNA, 10 bp, Unknown
  misc_feature (1)..( 10): Result.002 file - promoters60/1024713
aaatttgcag

SEQ ID NO: 99733 - DNA, 6 bp, Unknown
  misc_feature (1)..( 6): Result.002 file - promoters60/1024713
accttt

SEQ ID NO: 99734 - DNA, 6 bp, Unknown
  misc_feature (1)..( 6): Result.002 file - promoters60/1024713
accttt

SEQ ID NO: 99735 - DNA, 7 bp, Unknown
  misc_feature (1)..( 7): Result.002 file - promoters60/1024713
tggttca

SEQ ID NO: 99736 - DNA, 7 bp, Unknown
  misc_feature (1)..( 7): Result.002 file - promoters60/1024713
tggatca

SEQ ID NO: 99737 - DNA, 6 bp, Unknown
  misc_feature (1)..( 6): Result.002 file - promoters60/1024713
tatttt

SEQ ID NO: 99738 - DNA, 6 bp, Unknown
  misc_feature (1)..( 6): Result.002 file - promoters60/1024713
tatttt

SEQ ID NO: 99739 - DNA, 6 bp, Unknown
  misc_feature (1)..( 6): Result.002 file - promoters60/1024713
tttggt

SEQ ID NO: 99740 - DNA, 6 bp, Unknown
  misc_feature (1)..( 6): Result.002 file - promoters60/1024713
tttggt

SEQ ID NO: 99741 - DNA, 7 bp, Unknown
  misc_feature (1)..( 7): Result.002 file - promoters60/1024713
ctgtatc

SEQ ID NO: 99742 - DNA, 7 bp, Unknown
  misc_feature (1)..( 7): Result.002 file - promoters60/1024713
ctgtatc

SEQ ID NO: 99743 - DNA, 7 bp, Unknown
  misc_feature (1)..( 7): Result.002 file - promoters60/1024713
tctttga

SEQ ID NO: 99744 - DNA, 7 bp, Unknown
  misc_feature (1)..( 7): Result.002 file - promoters60/1024713
tctctga

SEQ ID NO: 99745 - DNA, 9 bp, Unknown
  misc_feature (1)..( 9): Result.002 file - promoters60/1024713
tccatgaat

SEQ ID NO: 99746 - DNA, 9 bp, Unknown
  misc_feature (1)..( 9): Result.002 file - promoters60/1024713
tccataaat

SEQ ID NO: 99747 - DNA, 8 bp, Unknown
  misc_feature (1)..( 8): Result.002 file - promoters60/1024713
aatctgat

SEQ ID NO: 99748 - DNA, 8 bp, Unknown
  misc_feature (1)..( 8): Result.002 file - promoters60/1024713
aatttgat

SEQ ID NO: 99749 - DNA, 6 bp, Unknown
  misc_feature (1)..( 6): Result.002 file - promoters60/1024713
gaaaaa

SEQ ID NO: 99750 - DNA, 6 bp, Unknown
  misc_feature (1)..( 6): Result.002 file - promoters60/1024713
gaaaaa

SEQ ID NO: 99751 - DNA, 6 bp, Unknown
  misc_feature (1)..( 6): Result.002 file - promoters60/1024713
aacctt

SEQ ID NO: 99752 - DNA, 6 bp, Unknown
  misc_feature (1)..( 6): Result.002 file - promoters60/1024713
aacctt

SEQ ID NO: 99753 - DNA, 8 bp, Unknown
  misc_feature (1)..( 8): Result.002 file - promoters60/1024713
ggtatgaa

SEQ ID NO: 99754 - DNA, 8 bp, Unknown
  misc_feature (1)..( 8): Result.002 file - promoters60/1024713
ggtaggaa

SEQ ID NO: 99755 - DNA, 7 bp, Unknown
  misc_feature (1)..( 7): Result.002 file - promoters60/1024737
attgaaa

SEQ ID NO: 99756 - DNA, 7 bp, Unknown
  misc_feature (1)..( 7): Result.002 file - promoters60/1024737
attaaaa

SEQ ID NO: 99757 - DNA, 6 bp, Unknown
  misc_feature (1)..( 6): Result.002 file - promoters60/1024737
tattta

SEQ ID NO: 99758 - DNA, 6 bp, Unknown
  misc_feature (1)..( 6): Result.002 file - promoters60/1024737
tattta

SEQ ID NO: 99759 - DNA, 7 bp, Unknown
  misc_feature (1)..( 7): Result.002 file - promoters60/1024737
gatattc

SEQ ID NO: 99760 - DNA, 7 bp, Unknown
  misc_feature (1)..( 7): Result.002 file - promoters60/1024737
gatcttc

SEQ ID NO: 99761 - DNA, 6 bp, Unknown
  misc_feature (1)..( 6): Result.002 file - promoters60/1024737
aaaaca

SEQ ID NO: 99762 - DNA, 6 bp, Unknown
  misc_feature (1)..( 6): Result.002 file - promoters60/1024737
aaaaca

SEQ ID NO: 99763 - DNA, 10 bp, Unknown
  misc_feature (1)..( 10): Result.002 file - promoters60/1024737
agaaaacaaa

SEQ ID NO: 99764 - DNA, 10 bp, Unknown
  misc_feature (1)..( 10): Result.002 file - promoters60/1024737
agaaaaaaaa

SEQ ID NO: 99765 - DNA, 6 bp, Unknown
  misc_feature (1)..( 6): Result.002 file - promoters60/1024737
ataata

SEQ ID NO: 99766 - DNA, 6 bp, Unknown
  misc_feature (1)..( 6): Result.002 file - promoters60/1024737
ataata

SEQ ID NO: 99767 - DNA, 7 bp, Unknown
  misc_feature (1)..( 7): Result.002 file - promoters60/1024737
aaacaca

SEQ ID NO: 99768 - DNA, 7 bp, Unknown
  misc_feature (1)..( 7): Result.002 file - promoters60/1024737
aaataca

SEQ ID NO: 99769 - DNA, 7 bp, Unknown
  misc_feature (1)..( 7): Result.002 file - promoters60/1024737
actttag

SEQ ID NO: 99770 - DNA, 7 bp, Unknown
  misc_feature (1)..( 7): Result.002 file - promoters60/1024737
actatag

SEQ ID NO: 99771 - DNA, 6 bp, Unknown
  misc_feature (1)..( 6): Result.002 file - promoters60/1024737
actata

SEQ ID NO: 99772 - DNA, 6 bp, Unknown
  misc_feature (1)..( 6): Result.002 file - promoters60/1024737
actata

SEQ ID NO: 99773 - DNA, 7 bp, Unknown
  misc_feature (1)..( 7): Result.002 file - promoters60/1024737
acattta

SEQ ID NO: 99774 - DNA, 7 bp, Unknown
  misc_feature (1)..( 7): Result.002 file - promoters60/1024737
acagtta

SEQ ID NO: 99775 - DNA, 6 bp, Unknown
  misc_feature (1)..( 6): Result.002 file - promoters60/1024737
ttaatc

SEQ ID NO: 99776 - DNA, 6 bp, Unknown
  misc_feature (1)..( 6): Result.002 file - promoters60/1024737
ttaatc

SEQ ID NO: 99777 - DNA, 8 bp, Unknown
  misc_feature (1)..( 8): Result.002 file - promoters60/1024737
taccaaaa

SEQ ID NO: 99778 - DNA, 8 bp, Unknown
  misc_feature (1)..( 8): Result.002 file - promoters60/1024737
tacaaaaa

SEQ ID NO: 99779 - DNA, 6 bp, Unknown
  misc_feature (1)..( 6): Result.002 file - promoters60/1024737
aattat

SEQ ID NO: 99780 - DNA, 6 bp, Unknown
  misc_feature (1)..( 6): Result.002 file - promoters60/1024737
aattat

SEQ ID NO: 99781 - DNA, 7 bp, Unknown
  misc_feature (1)..( 7): Result.002 file - promoters60/1024737
taatcac

SEQ ID NO: 99782 - DNA, 7 bp, Unknown
  misc_feature (1)..( 7): Result.002 file - promoters60/1024737
taaacac

SEQ ID NO: 99783 - DNA, 6 bp, Unknown
  misc_feature (1)..( 6): Result.002 file - promoters60/1024737
caaaac

SEQ ID NO: 99784 - DNA, 6 bp, Unknown
  misc_feature (1)..( 6): Result.002 file - promoters60/1024737
caaaac

SEQ ID NO: 99785 - DNA, 8 bp, Unknown
  misc_feature (1)..( 8): Result.002 file - promoters60/1024737
tactattt

SEQ ID NO: 99786 - DNA, 8 bp, Unknown
  misc_feature (1)..( 8): Result.002 file - promoters60/1024737
tacaattt

SEQ ID NO: 99787 - DNA, 9 bp, Unknown
  misc_feature (1)..( 9): Result.002 file - promoters60/1024737
cagcttttt

SEQ ID NO: 99788 - DNA, 9 bp, Unknown
  misc_feature (1)..( 9): Result.002 file - promoters60/1024737
cagtttttt

SEQ ID NO: 99789 - DNA, 6 bp, Unknown
  misc_feature (1)..( 6): Result.002 file - promoters60/1024737
acaact

SEQ ID NO: 99790 - DNA, 6 bp, Unknown
  misc_feature (1)..( 6): Result.002 file - promoters60/1024737
acaact

SEQ ID NO: 99791 - DNA, 7 bp, Unknown
  misc_feature (1)..( 7): Result.002 file - promoters60/1024737
tttctaa

SEQ ID NO: 99792 - DNA, 7 bp, Unknown
  misc_feature (1)..( 7): Result.002 file - promoters60/1024737
tttctaa

SEQ ID NO: 99793 - DNA, 6 bp, Unknown
  misc_feature (1)..( 6): Result.002 file - promoters60/1024737
ctccaa

SEQ ID NO: 99794 - DNA, 6 bp, Unknown
  misc_feature (1)..( 6): Result.002 file - promoters60/1024737
ctccaa

SEQ ID NO: 99795 - DNA, 7 bp, Unknown
  misc_feature (1)..( 7): Result.002 file - promoters60/1024737
tactatt

SEQ ID NO: 99796 - DNA, 7 bp, Unknown
  misc_feature (1)..( 7): Result.002 file - promoters60/1024737
tacaatt

SEQ ID NO: 99797 - DNA, 7 bp, Unknown
  misc_feature (1)..( 7): Result.002 file - promoters60/1024737
acataaa

SEQ ID NO: 99798 - DNA, 7 bp, Unknown
  misc_feature (1)..( 7): Result.002 file - promoters60/1024737
acataaa

SEQ ID NO: 99799 - DNA, 7 bp, Unknown
  misc_feature (1)..( 7): Result.002 file - promoters60/1024737
aaatttt

SEQ ID NO: 99800 - DNA, 7 bp, Unknown
  misc_feature (1)..( 7): Result.002 file - promoters60/1024737
aaacttt

SEQ ID NO: 99801 - DNA, 6 bp, Unknown
  misc_feature (1)..( 6): Result.002 file - promoters60/1024737
taaata

SEQ ID NO: 99802 - DNA, 6 bp, Unknown
  misc_feature (1)..( 6): Result.002 file - promoters60/1024737
taaata

SEQ ID NO: 99803 - DNA, 9 bp, Unknown
  misc_feature (1)..( 9): Result.002 file - promoters60/1024756
gggattttt

SEQ ID NO: 99804 - DNA, 9 bp, Unknown
  misc_feature (1)..( 9): Result.002 file - promoters60/1024756
ataattttt

SEQ ID NO: 99805 - DNA, 9 bp, Unknown
  misc_feature (1)..( 9): Result.002 file - promoters60/1024756
ataatgttt

SEQ ID NO: 99806 - DNA, 14 bp, Unknown
  misc_feature (1)..( 14): Result.002 file - promoters60/1024756
taacagtcaaaccg

SEQ ID NO: 99807 - DNA, 14 bp, Unknown
  misc_feature (1)..( 14): Result.002 file - promoters60/1024756
gtcaggtcaaatcc

SEQ ID NO: 99808 - DNA, 14 bp, Unknown
  misc_feature (1)..( 14): Result.002 file - promoters60/1024756
taacagtcaaaaaa

SEQ ID NO: 99809 - DNA, 14 bp, Unknown
  misc_feature (1)..( 14): Result.002 file - promoters60/1024756
aaaatctcaaaaaa

SEQ ID NO: 99810 - DNA, 8 bp, Unknown
  misc_feature (1)..( 8): Result.002 file - promoters60/1024756
ttatcaag

SEQ ID NO: 99811 - DNA, 8 bp, Unknown
  misc_feature (1)..( 8): Result.002 file - promoters60/1024756
ttaccaaa

SEQ ID NO: 99812 - DNA, 9 bp, Unknown
  misc_feature (1)..( 9): Result.002 file - promoters60/1024756
acacctaat

SEQ ID NO: 99813 - DNA, 8 bp, Unknown
  misc_feature (1)..( 8): Result.002 file - promoters60/1024840
gataacat

SEQ ID NO: 99814 - DNA, 8 bp, Unknown
  misc_feature (1)..( 8): Result.002 file - promoters60/1024840
gatcacat

SEQ ID NO: 99815 - DNA, 7 bp, Unknown
  misc_feature (1)..( 7): Result.002 file - promoters60/1024840
acaactt

SEQ ID NO: 99816 - DNA, 7 bp, Unknown
  misc_feature (1)..( 7): Result.002 file - promoters60/1024840
acatctt

SEQ ID NO: 99817 - DNA, 8 bp, Unknown
  misc_feature (1)..( 8): Result.002 file - promoters60/1024840
ttcctttg

SEQ ID NO: 99818 - DNA, 8 bp, Unknown
  misc_feature (1)..( 8): Result.002 file - promoters60/1024840
ttcttttg

SEQ ID NO: 99819 - DNA, 6 bp, Unknown
  misc_feature (1)..( 6): Result.002 file - promoters60/1024840
aaaaca

SEQ ID NO: 99820 - DNA, 6 bp, Unknown
  misc_feature (1)..( 6): Result.002 file - promoters60/1024840
aaaaca

SEQ ID NO: 99821 - DNA, 7 bp, Unknown
  misc_feature (1)..( 7): Result.002 file - promoters60/1024840
cataaga

SEQ ID NO: 99822 - DNA, 7 bp, Unknown
  misc_feature (1)..( 7): Result.002 file - promoters60/1024840
cataagt

SEQ ID NO: 99823 - DNA, 7 bp, Unknown
  misc_feature (1)..( 7): Result.002 file - promoters60/1024840
tataaga

SEQ ID NO: 99824 - DNA, 11 bp, Unknown
  misc_feature (1)..( 11): Result.002 file - promoters60/1024840
gaataaagtat

SEQ ID NO: 99825 - DNA, 11 bp, Unknown
  misc_feature (1)..( 11): Result.002 file - promoters60/1024840
agatacagtat

SEQ ID NO: 99826 - DNA, 11 bp, Unknown
  misc_feature (1)..( 11): Result.002 file - promoters60/1024840
gaagaaaaaag

SEQ ID NO: 99827 - DNA, 7 bp, Unknown
  misc_feature (1)..( 7): Result.002 file - promoters60/1024840
aaaatca

SEQ ID NO: 99828 - DNA, 7 bp, Unknown
  misc_feature (1)..( 7): Result.002 file - promoters60/1024840
aaaatca

SEQ ID NO: 99829 - DNA, 7 bp, Unknown
  misc_feature (1)..( 7): Result.002 file - promoters60/1024840
gaataat

SEQ ID NO: 99830 - DNA, 7 bp, Unknown
  misc_feature (1)..( 7): Result.002 file - promoters60/1024840
taataat

SEQ ID NO: 99831 - DNA, 7 bp, Unknown
  misc_feature (1)..( 7): Result.002 file - promoters60/1024840
taaaaat

SEQ ID NO: 99832 - DNA, 10 bp, Unknown
  misc_feature (1)..( 10): Result.002 file - promoters60/1024840
tttatgcaaa

SEQ ID NO: 99833 - DNA, 10 bp, Unknown
  misc_feature (1)..( 10): Result.002 file - promoters60/1024840
tttatacaaa

SEQ ID NO: 99834 - DNA, 8 bp, Unknown
  misc_feature (1)..( 8): Result.002 file - promoters60/1024840
aaaataaa

SEQ ID NO: 99835 - DNA, 8 bp, Unknown
  misc_feature (1)..( 8): Result.002 file - promoters60/1024840
aaaataaa

SEQ ID NO: 99836 - DNA, 7 bp, Unknown
  misc_feature (1)..( 7): Result.002 file - promoters60/1024840
aatgatg

SEQ ID NO: 99837 - DNA, 7 bp, Unknown
  misc_feature (1)..( 7): Result.002 file - promoters60/1024840
aataatg

SEQ ID NO: 99838 - DNA, 7 bp, Unknown
  misc_feature (1)..( 7): Result.002 file - promoters60/1024840
taaattg

SEQ ID NO: 99839 - DNA, 7 bp, Unknown
  misc_feature (1)..( 7): Result.002 file - promoters60/1024840
taaattg

SEQ ID NO: 99840 - DNA, 7 bp, Unknown
  misc_feature (1)..( 7): Result.002 file - promoters60/1024840
ctagaaa

SEQ ID NO: 99841 - DNA, 7 bp, Unknown
  misc_feature (1)..( 7): Result.002 file - promoters60/1024840
ctaaaaa

SEQ ID NO: 99842 - DNA, 6 bp, Unknown
  misc_feature (1)..( 6): Result.002 file - promoters60/1024840
aagtaa

SEQ ID NO: 99843 - DNA, 6 bp, Unknown
  misc_feature (1)..( 6): Result.002 file - promoters60/1024840
aagtaa

SEQ ID NO: 99844 - DNA, 6 bp, Unknown
  misc_feature (1)..( 6): Result.002 file - promoters60/1024840
cattta

SEQ ID NO: 99845 - DNA, 6 bp, Unknown
  misc_feature (1)..( 6): Result.002 file - promoters60/1024840
cattta

SEQ ID NO: 99846 - DNA, 8 bp, Unknown
  misc_feature (1)..( 8): Result.002 file - promoters60/1024840
aaaatgaa

SEQ ID NO: 99847 - DNA, 8 bp, Unknown
  misc_feature (1)..( 8): Result.002 file - promoters60/1024840
aaaaagaa

SEQ ID NO: 99848 - DNA, 9 bp, Unknown
  misc_feature (1)..( 9): Result.002 file - promoters60/1024840
aagaaagat

SEQ ID NO: 99849 - DNA, 9 bp, Unknown
  misc_feature (1)..( 9): Result.002 file - promoters60/1024840
acatgaacg

SEQ ID NO: 99850 - DNA, 9 bp, Unknown
  misc_feature (1)..( 9): Result.002 file - promoters60/1024840
acatgaacg

SEQ ID NO: 99851 - DNA, 12 bp, Unknown
  misc_feature (1)..( 12): Result.002 file - promoters60/1024889
ggtagaagattt

SEQ ID NO: 99852 - DNA, 12 bp, Unknown
  misc_feature (1)..( 12): Result.002 file - promoters60/1024889
tttgaaaggttt

SEQ ID NO: 99853 - DNA, 11 bp, Unknown
  misc_feature (1)..( 11): Result.002 file - promoters60/1024889
gtataagatat

SEQ ID NO: 99854 - DNA, 11 bp, Unknown
  misc_feature (1)..( 11): Result.002 file - promoters60/1024889
tatgaaaatta

SEQ ID NO: 99855 - DNA, 12 bp, Unknown
  misc_feature (1)..( 12): Result.002 file - promoters60/1024889
gtttacatatac

SEQ ID NO: 99856 - DNA, 12 bp, Unknown
  misc_feature (1)..( 12): Result.002 file - promoters60/1024889
tgatacacatct

SEQ ID NO: 99857 - DNA, 9 bp, Unknown
  misc_feature (1)..( 9): Result.002 file - promoters60/1024889
taccaaaat

SEQ ID NO: 99858 - DNA, 9 bp, Unknown
  misc_feature (1)..( 9): Result.002 file - promoters60/1024889
gaacaaaat

SEQ ID NO: 99859 - DNA, 9 bp, Unknown
  misc_feature (1)..( 9): Result.002 file - promoters60/1024889
gaaaaaaat

SEQ ID NO: 99860 - DNA, 9 bp, Unknown
  misc_feature (1)..( 9): Result.002 file - promoters60/1024889
aaacaaaat

SEQ ID NO: 99861 - DNA, 9 bp, Unknown
  misc_feature (1)..( 9): Result.002 file - promoters60/1024889
acacacaat

SEQ ID NO: 99862 - DNA, 9 bp, Unknown
  misc_feature (1)..( 9): Result.002 file - promoters60/1024889
taacaaata

SEQ ID NO: 99863 - DNA, 15 bp, Unknown
  misc_feature (1)..( 15): Result.002 file - promoters60/1024889
gtttgtttgttactt

SEQ ID NO: 99864 - DNA, 15 bp, Unknown
  misc_feature (1)..( 15): Result.002 file - promoters60/1024889
taatgtttgagtgga

SEQ ID NO: 99865 - DNA, 15 bp, Unknown
  misc_feature (1)..( 15): Result.002 file - promoters60/1024889
atttattttccaatt

SEQ ID NO: 99866 - DNA, 15 bp, Unknown
  misc_feature (1)..( 15): Result.002 file - promoters60/1024889
ttatgtttggtgtcg

SEQ ID NO: 99867 - DNA, 15 bp, Unknown
  misc_feature (1)..( 15): Result.002 file - promoters60/1024889
ttttatttttaatta

SEQ ID NO: 99868 - DNA, 15 bp, Unknown
  misc_feature (1)..( 15): Result.002 file - promoters60/1024889
taatgttagagtgga

SEQ ID NO: 99869 - DNA, 10 bp, Unknown
  misc_feature (1)..( 10): Result.002 file - promoters60/1024889
catgtttaat

SEQ ID NO: 99870 - DNA, 10 bp, Unknown
  misc_feature (1)..( 10): Result.002 file - promoters60/1024889
gttgtttata

SEQ ID NO: 99871 - DNA, 10 bp, Unknown
  misc_feature (1)..( 10): Result.002 file - promoters60/1024889
aaagttaaat

SEQ ID NO: 99872 - DNA, 10 bp, Unknown
  misc_feature (1)..( 10): Result.002 file - promoters60/1024889
catatttagc

SEQ ID NO: 99873 - DNA, 10 bp, Unknown
  misc_feature (1)..( 10): Result.002 file - promoters60/1024889
tgagttcata

SEQ ID NO: 99874 - DNA, 10 bp, Unknown
  misc_feature (1)..( 10): Result.002 file - promoters60/1024889
caagtaaaag

SEQ ID NO: 99875 - DNA, 10 bp, Unknown
  misc_feature (1)..( 10): Result.002 file - promoters60/1024889
gaatttaaat

SEQ ID NO: 99876 - DNA, 9 bp, Unknown
  misc_feature (1)..( 9): Result.002 file - promoters60/1024889
ccaattttt

SEQ ID NO: 99877 - DNA, 9 bp, Unknown
  misc_feature (1)..( 9): Result.002 file - promoters60/1024889
gatattttt

SEQ ID NO: 99878 - DNA, 9 bp, Unknown
  misc_feature (1)..( 9): Result.002 file - promoters60/1024889
aacattttt

SEQ ID NO: 99879 - DNA, 10 bp, Unknown
  misc_feature (1)..( 10): Result.002 file - promoters60/1024889
ttaattattt

SEQ ID NO: 99880 - DNA, 10 bp, Unknown
  misc_feature (1)..( 10): Result.002 file - promoters60/1024889
ccaatatttt

SEQ ID NO: 99881 - DNA, 10 bp, Unknown
  misc_feature (1)..( 10): Result.002 file - promoters60/1024889
ccaacattct

SEQ ID NO: 99882 - DNA, 9 bp, Unknown
  misc_feature (1)..( 9): Result.002 file - promoters60/1024940
aaagtaaat

SEQ ID NO: 99883 - DNA, 9 bp, Unknown
  misc_feature (1)..( 9): Result.002 file - promoters60/1024940
caagaaaag

SEQ ID NO: 99884 - DNA, 9 bp, Unknown
  misc_feature (1)..( 9): Result.002 file - promoters60/1024940
aaattaaat

SEQ ID NO: 99885 - DNA, 8 bp, Unknown
  misc_feature (1)..( 8): Result.002 file - promoters60/1024940
aaatctat

SEQ ID NO: 99886 - DNA, 8 bp, Unknown
  misc_feature (1)..( 8): Result.002 file - promoters60/1024940
aaatatat

SEQ ID NO: 99887 - DNA, 8 bp, Unknown
  misc_feature (1)..( 8): Result.002 file - promoters60/1024940
aaatataa

SEQ ID NO: 99888 - DNA, 7 bp, Unknown
  misc_feature (1)..( 7): Result.002 file - promoters60/1024961
aaacaat

SEQ ID NO: 99889 - DNA, 7 bp, Unknown
  misc_feature (1)..( 7): Result.002 file - promoters60/1024961
gaacaat

SEQ ID NO: 99890 - DNA, 7 bp, Unknown
  misc_feature (1)..( 7): Result.002 file - promoters60/1024961
aaaaaat

SEQ ID NO: 99891 - DNA, 7 bp, Unknown
  misc_feature (1)..( 7): Result.002 file - promoters60/1024961
atatttg

SEQ ID NO: 99892 - DNA, 7 bp, Unknown
  misc_feature (1)..( 7): Result.002 file - promoters60/1024961
ataattg

SEQ ID NO: 99893 - DNA, 14 bp, Unknown
  misc_feature (1)..( 14): Result.002 file - promoters60/1024961
cttggttttgcttg

SEQ ID NO: 99894 - DNA, 14 bp, Unknown
  misc_feature (1)..( 14): Result.002 file - promoters60/1024961
cttggtcttgccgt

SEQ ID NO: 99895 - DNA, 14 bp, Unknown
  misc_feature (1)..( 14): Result.002 file - promoters60/1024961
cttgattttacttg

SEQ ID NO: 99896 - DNA, 7 bp, Unknown
  misc_feature (1)..( 7): Result.002 file - promoters60/1024961
aaaaaag

SEQ ID NO: 99897 - DNA, 7 bp, Unknown
  misc_feature (1)..( 7): Result.002 file - promoters60/1024961
aaataag

SEQ ID NO: 99898 - DNA, 7 bp, Unknown
  misc_feature (1)..( 7): Result.002 file - promoters60/1024961
aaaaaat

SEQ ID NO: 99899 - DNA, 6 bp, Unknown
  misc_feature (1)..( 6): Result.002 file - promoters60/1024961
gagttt

SEQ ID NO: 99900 - DNA, 6 bp, Unknown
  misc_feature (1)..( 6): Result.002 file - promoters60/1024961
gagttt

SEQ ID NO: 99901 - DNA, 8 bp, Unknown
  misc_feature (1)..( 8): Result.002 file - promoters60/1024961
ttctcttc

SEQ ID NO: 99902 - DNA, 8 bp, Unknown
  misc_feature (1)..( 8): Result.002 file - promoters60/1024961
ttctattc

SEQ ID NO: 99903 - DNA, 9 bp, Unknown
  misc_feature (1)..( 9): Result.002 file - promoters60/1024961
atctcactt

SEQ ID NO: 99904 - DNA, 9 bp, Unknown
  misc_feature (1)..( 9): Result.002 file - promoters60/1024961
atctcactt

SEQ ID NO: 99905 - DNA, 11 bp, Unknown
  misc_feature (1)..( 11): Result.002 file - promoters60/1024961
agagagcatct

SEQ ID NO: 99906 - DNA, 11 bp, Unknown
  misc_feature (1)..( 11): Result.002 file - promoters60/1024961
agagagtatct

SEQ ID NO: 99907 - DNA, 7 bp, Unknown
  misc_feature (1)..( 7): Result.002 file - promoters60/1024961
agagaga

SEQ ID NO: 99908 - DNA, 7 bp, Unknown
  misc_feature (1)..( 7): Result.002 file - promoters60/1024961
agagaga

SEQ ID NO: 99909 - DNA, 7 bp, Unknown
  misc_feature (1)..( 7): Result.002 file - promoters60/1024961
tgagaaa

SEQ ID NO: 99910 - DNA, 7 bp, Unknown
  misc_feature (1)..( 7): Result.002 file - promoters60/1024961
tgagaaa

SEQ ID NO: 99911 - DNA, 6 bp, Unknown
  misc_feature (1)..( 6): Result.002 file - promoters60/1024961
tttcca

SEQ ID NO: 99912 - DNA, 6 bp, Unknown
  misc_feature (1)..( 6): Result.002 file - promoters60/1024961
tttcca

SEQ ID NO: 99913 - DNA, 8 bp, Unknown
  misc_feature (1)..( 8): Result.002 file - promoters60/1024961
aaagaaat

SEQ ID NO: 99914 - DNA, 8 bp, Unknown
  misc_feature (1)..( 8): Result.002 file - promoters60/1024961
aaataaat

SEQ ID NO: 99915 - DNA, 8 bp, Unknown
  misc_feature (1)..( 8): Result.002 file - promoters60/1024961
aaataact

SEQ ID NO: 99916 - DNA, 6 bp, Unknown
  misc_feature (1)..( 6): Result.002 file - promoters60/1024961
ttaatt

SEQ ID NO: 99917 - DNA, 6 bp, Unknown
  misc_feature (1)..( 6): Result.002 file - promoters60/1024961
ttaatt

SEQ ID NO: 99918 - DNA, 6 bp, Unknown
  misc_feature (1)..( 6): Result.002 file - promoters60/1024961
aatttt

SEQ ID NO: 99919 - DNA, 6 bp, Unknown
  misc_feature (1)..( 6): Result.002 file - promoters60/1024961
aatttt

SEQ ID NO: 99920 - DNA, 6 bp, Unknown
  misc_feature (1)..( 6): Result.002 file - promoters60/1024961
ttatat

SEQ ID NO: 99921 - DNA, 6 bp, Unknown
  misc_feature (1)..( 6): Result.002 file - promoters60/1024961
ttatat

SEQ ID NO: 99922 - DNA, 7 bp, Unknown
  misc_feature (1)..( 7): Result.002 file - promoters60/1024961
aatgaaa

SEQ ID NO: 99923 - DNA, 7 bp, Unknown
  misc_feature (1)..( 7): Result.002 file - promoters60/1024961
aataaaa

SEQ ID NO: 99924 - DNA, 8 bp, Unknown
  misc_feature (1)..( 8): Result.002 file - promoters60/1024961
aattaata

SEQ ID NO: 99925 - DNA, 8 bp, Unknown
  misc_feature (1)..( 8): Result.002 file - promoters60/1024961
aataaata

SEQ ID NO: 99926 - DNA, 8 bp, Unknown
  misc_feature (1)..( 8): Result.002 file - promoters60/1024961
gaatctta

SEQ ID NO: 99927 - DNA, 8 bp, Unknown
  misc_feature (1)..( 8): Result.002 file - promoters60/1024961
gaaactta

SEQ ID NO: 99928 - DNA, 8 bp, Unknown
  misc_feature (1)..( 8): Result.002 file - promoters60/1024961
ctttatat

SEQ ID NO: 99929 - DNA, 8 bp, Unknown
  misc_feature (1)..( 8): Result.002 file - promoters60/1024961
ctttatat

SEQ ID NO: 99930 - DNA, 7 bp, Unknown
  misc_feature (1)..( 7): Result.002 file - promoters60/1024961
ttaaaat

SEQ ID NO: 99931 - DNA, 7 bp, Unknown
  misc_feature (1)..( 7): Result.002 file - promoters60/1024961
ttaaaat

SEQ ID NO: 99932 - DNA, 7 bp, Unknown
  misc_feature (1)..( 7): Result.002 file - promoters60/1024961
ttaaaat

SEQ ID NO: 99933 - DNA, 7 bp, Unknown
  misc_feature (1)..( 7): Result.002 file - promoters60/1024961
ttaaaat

SEQ ID NO: 99934 - DNA, 7 bp, Unknown
  misc_feature (1)..( 7): Result.002 file - promoters60/1024961
atatagc

SEQ ID NO: 99935 - DNA, 7 bp, Unknown
  misc_feature (1)..( 7): Result.002 file - promoters60/1024961
atatagc

SEQ ID NO: 99936 - DNA, 9 bp, Unknown
  misc_feature (1)..( 9): Result.002 file - promoters60/1024969
agaaagtag

SEQ ID NO: 99937 - DNA, 9 bp, Unknown
  misc_feature (1)..( 9): Result.002 file - promoters60/1024969
agaaagtag

SEQ ID NO: 99938 - DNA, 7 bp, Unknown
  misc_feature (1)..( 7): Result.002 file - promoters60/1024969
aaaatca

SEQ ID NO: 99939 - DNA, 7 bp, Unknown
  misc_feature (1)..( 7): Result.002 file - promoters60/1024969
aaaatca

SEQ ID NO: 99940 - DNA, 8 bp, Unknown
  misc_feature (1)..( 8): Result.002 file - promoters60/1024969
gttactta

SEQ ID NO: 99941 - DNA, 8 bp, Unknown
  misc_feature (1)..( 8): Result.002 file - promoters60/1024969
gtttctta

SEQ ID NO: 99942 - DNA, 6 bp, Unknown
  misc_feature (1)..( 6): Result.002 file - promoters60/1024969
gacttt

SEQ ID NO: 99943 - DNA, 6 bp, Unknown
  misc_feature (1)..( 6): Result.002 file - promoters60/1024969
gacttt

SEQ ID NO: 99944 - DNA, 8 bp, Unknown
  misc_feature (1)..( 8): Result.002 file - promoters60/1024969
ttaacata

SEQ ID NO: 99945 - DNA, 8 bp, Unknown
  misc_feature (1)..( 8): Result.002 file - promoters60/1024969
ttaacata

SEQ ID NO: 99946 - DNA, 8 bp, Unknown
  misc_feature (1)..( 8): Result.002 file - promoters60/1024969
gtttttaa

SEQ ID NO: 99947 - DNA, 8 bp, Unknown
  misc_feature (1)..( 8): Result.002 file - promoters60/1024969
gttcttaa

SEQ ID NO: 99948 - DNA, 7 bp, Unknown
  misc_feature (1)..( 7): Result.002 file - promoters60/1024969
atcttct

SEQ ID NO: 99949 - DNA, 7 bp, Unknown
  misc_feature (1)..( 7): Result.002 file - promoters60/1024969
atcttct

SEQ ID NO: 99950 - DNA, 8 bp, Unknown
  misc_feature (1)..( 8): Result.002 file - promoters60/1024969
aaaaatat

SEQ ID NO: 99951 - DNA, 8 bp, Unknown
  misc_feature (1)..( 8): Result.002 file - promoters60/1024969
aaaactat

SEQ ID NO: 99952 - DNA, 6 bp, Unknown
  misc_feature (1)..( 6): Result.002 file - promoters60/1024969
ggaaaa

SEQ ID NO: 99953 - DNA, 6 bp, Unknown
  misc_feature (1)..( 6): Result.002 file - promoters60/1024969
ggaaaa

SEQ ID NO: 99954 - DNA, 6 bp, Unknown
  misc_feature (1)..( 6): Result.002 file - promoters60/1024969
gatggt

SEQ ID NO: 99955 - DNA, 6 bp, Unknown
  misc_feature (1)..( 6): Result.002 file - promoters60/1024969
gatggt

SEQ ID NO: 99956 - DNA, 7 bp, Unknown
  misc_feature (1)..( 7): Result.002 file - promoters60/1024969
tctgttg

SEQ ID NO: 99957 - DNA, 7 bp, Unknown
  misc_feature (1)..( 7): Result.002 file - promoters60/1024969
tctcttg

SEQ ID NO: 99958 - DNA, 7 bp, Unknown
  misc_feature (1)..( 7): Result.002 file - promoters60/1024969
tttactc

SEQ ID NO: 99959 - DNA, 7 bp, Unknown
  misc_feature (1)..( 7): Result.002 file - promoters60/1024969
tttgctc

SEQ ID NO: 99960 - DNA, 7 bp, Unknown
  misc_feature (1)..( 7): Result.002 file - promoters60/1024969
ctgaaac

SEQ ID NO: 99961 - DNA, 7 bp, Unknown
  misc_feature (1)..( 7): Result.002 file - promoters60/1024969
ctgcaac

SEQ ID NO: 99962 - DNA, 8 bp, Unknown
  misc_feature (1)..( 8): Result.002 file - promoters60/1025087
attttgaa

SEQ ID NO: 99963 - DNA, 8 bp, Unknown
  misc_feature (1)..( 8): Result.002 file - promoters60/1025087
tttttgaa

SEQ ID NO: 99964 - DNA, 8 bp, Unknown
  misc_feature (1)..( 8): Result.002 file - promoters60/1025087
tttttggc

SEQ ID NO: 99965 - DNA, 8 bp, Unknown
  misc_feature (1)..( 8): Result.002 file - promoters60/1025087
aagttttt

SEQ ID NO: 99966 - DNA, 8 bp, Unknown
  misc_feature (1)..( 8): Result.002 file - promoters60/1025087
aagttttt

SEQ ID NO: 99967 - DNA, 8 bp, Unknown
  misc_feature (1)..( 8): Result.002 file - promoters60/1025087
aggttttt

SEQ ID NO: 99968 - DNA, 7 bp, Unknown
  misc_feature (1)..( 7): Result.002 file - promoters60/1025087
ttgtaat

SEQ ID NO: 99969 - DNA, 7 bp, Unknown
  misc_feature (1)..( 7): Result.002 file - promoters60/1025087
ttgaaat

SEQ ID NO: 99970 - DNA, 6 bp, Unknown
  misc_feature (1)..( 6): Result.002 file - promoters60/1025087
agattt

SEQ ID NO: 99971 - DNA, 6 bp, Unknown
  misc_feature (1)..( 6): Result.002 file - promoters60/1025087
agattt

SEQ ID NO: 99972 - DNA, 9 bp, Unknown
  misc_feature (1)..( 9): Result.002 file - promoters60/1025087
aaggataaa

SEQ ID NO: 99973 - DNA, 9 bp, Unknown
  misc_feature (1)..( 9): Result.002 file - promoters60/1025087
ttcgataaa

SEQ ID NO: 99974 - DNA, 9 bp, Unknown
  misc_feature (1)..( 9): Result.002 file - promoters60/1025087
ttcgataat

SEQ ID NO: 99975 - DNA, 7 bp, Unknown
  misc_feature (1)..( 7): Result.002 file - promoters60/1025087
cttagtt

SEQ ID NO: 99976 - DNA, 7 bp, Unknown
  misc_feature (1)..( 7): Result.002 file - promoters60/1025087
cttcgtt

SEQ ID NO: 99977 - DNA, 9 bp, Unknown
  misc_feature (1)..( 9): Result.002 file - promoters60/1025087
gaattaaaa

SEQ ID NO: 99978 - DNA, 9 bp, Unknown
  misc_feature (1)..( 9): Result.002 file - promoters60/1025087
gaaataaaa

SEQ ID NO: 99979 - DNA, 9 bp, Unknown
  misc_feature (1)..( 9): Result.002 file - promoters60/1025087
gaaataagc

SEQ ID NO: 99980 - DNA, 7 bp, Unknown
  misc_feature (1)..( 7): Result.002 file - promoters60/1025087
aaataaa

SEQ ID NO: 99981 - DNA, 7 bp, Unknown
  misc_feature (1)..( 7): Result.002 file - promoters60/1025087
aaataaa

SEQ ID NO: 99982 - DNA, 6 bp, Unknown
  misc_feature (1)..( 6): Result.002 file - promoters60/1025087
caattt

SEQ ID NO: 99983 - DNA, 6 bp, Unknown
  misc_feature (1)..( 6): Result.002 file - promoters60/1025087
caattt

SEQ ID NO: 99984 - DNA, 6 bp, Unknown
  misc_feature (1)..( 6): Result.002 file - promoters60/1025087
tctttt

SEQ ID NO: 99985 - DNA, 6 bp, Unknown
  misc_feature (1)..( 6): Result.002 file - promoters60/1025087
tctttt

SEQ ID NO: 99986 - DNA, 7 bp, Unknown
  misc_feature (1)..( 7): Result.002 file - promoters60/1025087
aacaatc

SEQ ID NO: 99987 - DNA, 7 bp, Unknown
  misc_feature (1)..( 7): Result.002 file - promoters60/1025087
aacaatc

SEQ ID NO: 99988 - DNA, 8 bp, Unknown
  misc_feature (1)..( 8): Result.002 file - promoters60/1025087
aatcccaa

SEQ ID NO: 99989 - DNA, 8 bp, Unknown
  misc_feature (1)..( 8): Result.002 file - promoters60/1025087
aataccaa

SEQ ID NO: 99990 - DNA, 6 bp, Unknown
  misc_feature (1)..( 6): Result.002 file - promoters60/1025087
tttttt

SEQ ID NO: 99991 - DNA, 6 bp, Unknown
  misc_feature (1)..( 6): Result.002 file - promoters60/1025087
tttttt

SEQ ID NO: 99992 - DNA, 6 bp, Unknown
  misc_feature (1)..( 6): Result.002 file - promoters60/1025087
atagaa

SEQ ID NO: 99993 - DNA, 6 bp, Unknown
  misc_feature (1)..( 6): Result.002 file - promoters60/1025087
atagaa

SEQ ID NO: 99994 - DNA, 6 bp, Unknown
  misc_feature (1)..( 6): Result.002 file - promoters60/1025087
taagta

SEQ ID NO: 99995 - DNA, 6 bp, Unknown
  misc_feature (1)..( 6): Result.002 file - promoters60/1025087
taagta

SEQ ID NO: 99996 - DNA, 9 bp, Unknown
  misc_feature (1)..( 9): Result.002 file - promoters60/1025087
aaaagaaaa

SEQ ID NO: 99997 - DNA, 9 bp, Unknown
  misc_feature (1)..( 9): Result.002 file - promoters60/1025087
aaacgaaaa

SEQ ID NO: 99998 - DNA, 6 bp, Unknown
  misc_feature (1)..( 6): Result.002 file - promoters60/1025087
aattaa

SEQ ID NO: 99999 - DNA, 6 bp, Unknown
  misc_feature (1)..( 6): Result.002 file - promoters60/1025087
aattaa

SEQ ID NO: 100000 - DNA, 7 bp, Unknown
  misc_feature (1)..( 7): Result.002 file - promoters60/1025100
caaaaat

SEQ ID NO: 100001 - DNA, 7 bp, Unknown
  misc_feature (1)..( 7): Result.002 file - promoters60/1025100
caataat

SEQ ID NO: 100002 - DNA, 13 bp, Unknown
  misc_feature (1)..( 13): Result.002 file - promoters60/1025100
gataaaaaaaata

SEQ ID NO: 100003 - DNA, 13 bp, Unknown
  misc_feature (1)..( 13): Result.002 file - promoters60/1025100
gataaaaaatata

SEQ ID NO: 100004 - DNA, 13 bp, Unknown
  misc_feature (1)..( 13): Result.002 file - promoters60/1025100
aatagaaatacaa

SEQ ID NO: 100005 - DNA, 7 bp, Unknown
  misc_feature (1)..( 7): Result.002 file - promoters60/1025100
ataatta

SEQ ID NO: 100006 - DNA, 7 bp, Unknown
  misc_feature (1)..( 7): Result.002 file - promoters60/1025100
atagtta

SEQ ID NO: 100007 - DNA, 9 bp, Unknown
  misc_feature (1)..( 9): Result.002 file - promoters60/1025100
aaattgtat

SEQ ID NO: 100008 - DNA, 9 bp, Unknown
  misc_feature (1)..( 9): Result.002 file - promoters60/1025100
aaattgtat

SEQ ID NO: 100009 - DNA, 6 bp, Unknown
  misc_feature (1)..( 6): Result.002 file - promoters60/1025100
tagttg

SEQ ID NO: 100010 - DNA, 6 bp, Unknown
  misc_feature (1)..( 6): Result.002 file - promoters60/1025100
tagttg

SEQ ID NO: 100011 - DNA, 6 bp, Unknown
  misc_feature (1)..( 6): Result.002 file - promoters60/1025100
tcaacc

SEQ ID NO: 100012 - DNA, 6 bp, Unknown
  misc_feature (1)..( 6): Result.002 file - promoters60/1025100
tcaacc

SEQ ID NO: 100013 - DNA, 6 bp, Unknown
  misc_feature (1)..( 6): Result.002 file - promoters60/1025100
aaatca

SEQ ID NO: 100014 - DNA, 6 bp, Unknown
  misc_feature (1)..( 6): Result.002 file - promoters60/1025100
aaatca

SEQ ID NO: 100015 - DNA, 9 bp, Unknown
  misc_feature (1)..( 9): Result.002 file - promoters60/1025100
tattgatca

SEQ ID NO: 100016 - DNA, 9 bp, Unknown
  misc_feature (1)..( 9): Result.002 file - promoters60/1025100
tatagatca

SEQ ID NO: 100017 - DNA, 6 bp, Unknown
  misc_feature (1)..( 6): Result.002 file - promoters60/1025100
tttgaa

SEQ ID NO: 100018 - DNA, 6 bp, Unknown
  misc_feature (1)..( 6): Result.002 file - promoters60/1025100
tttgaa

SEQ ID NO: 100019 - DNA, 9 bp, Unknown
  misc_feature (1)..( 9): Result.002 file - promoters60/1025100
atagagata

SEQ ID NO: 100020 - DNA, 9 bp, Unknown
  misc_feature (1)..( 9): Result.002 file - promoters60/1025100
atagaaata

SEQ ID NO: 100021 - DNA, 6 bp, Unknown
  misc_feature (1)..( 6): Result.002 file - promoters60/1025100
aatttt

SEQ ID NO: 100022 - DNA, 6 bp, Unknown
  misc_feature (1)..( 6): Result.002 file - promoters60/1025100
aatttt

SEQ ID NO: 100023 - DNA, 8 bp, Unknown
  misc_feature (1)..( 8): Result.002 file - promoters60/1025100
tcaatttt

SEQ ID NO: 100024 - DNA, 8 bp, Unknown
  misc_feature (1)..( 8): Result.002 file - promoters60/1025100
acaatttt

SEQ ID NO: 100025 - DNA, 8 bp, Unknown
  misc_feature (1)..( 8): Result.002 file - promoters60/1025100
acacttta

SEQ ID NO: 100026 - DNA, 7 bp, Unknown
  misc_feature (1)..( 7): Result.002 file - promoters60/1025100
ttataaa

SEQ ID NO: 100027 - DNA, 7 bp, Unknown
  misc_feature (1)..( 7): Result.002 file - promoters60/1025100
ttataaa

SEQ ID NO: 100028 - DNA, 9 bp, Unknown
  misc_feature (1)..( 9): Result.002 file - promoters60/1025100
atttattca

SEQ ID NO: 100029 - DNA, 9 bp, Unknown
  misc_feature (1)..( 9): Result.002 file - promoters60/1025100
attaattca

SEQ ID NO: 100030 - DNA, 6 bp, Unknown
  misc_feature (1)..( 6): Result.002 file - promoters60/1025100
attcga

SEQ ID NO: 100031 - DNA, 6 bp, Unknown
  misc_feature (1)..( 6): Result.002 file - promoters60/1025100
attcga

SEQ ID NO: 100032 - DNA, 7 bp, Unknown
  misc_feature (1)..( 7): Result.002 file - promoters60/1025100
atataat

SEQ ID NO: 100033 - DNA, 7 bp, Unknown
  misc_feature (1)..( 7): Result.002 file - promoters60/1025100
atacaat

SEQ ID NO: 100034 - DNA, 7 bp, Unknown
  misc_feature (1)..( 7): Result.002 file - promoters60/1025100
acacaaa

SEQ ID NO: 100035 - DNA, 7 bp, Unknown
  misc_feature (1)..( 7): Result.002 file - promoters60/1025100
acaaaaa

SEQ ID NO: 100036 - DNA, 8 bp, Unknown
  misc_feature (1)..( 8): Result.002 file - promoters60/1025117
tttattat

SEQ ID NO: 100037 - DNA, 8 bp, Unknown
  misc_feature (1)..( 8): Result.002 file - promoters60/1025117
ttttttaa

SEQ ID NO: 100038 - DNA, 8 bp, Unknown
  misc_feature (1)..( 8): Result.002 file - promoters60/1025117
tattttaa

SEQ ID NO: 100039 - DNA, 14 bp, Unknown
  misc_feature (1)..( 14): Result.002 file - promoters60/1025117
ttatttcatggcgt

SEQ ID NO: 100040 - DNA, 14 bp, Unknown
  misc_feature (1)..( 14): Result.002 file - promoters60/1025117
ttgtttaatgtttt

SEQ ID NO: 100041 - DNA, 14 bp, Unknown
  misc_feature (1)..( 14): Result.002 file - promoters60/1025117
ttgttcaatatttt

SEQ ID NO: 100042 - DNA, 9 bp, Unknown
  misc_feature (1)..( 9): Result.002 file - promoters60/1025117
atagagttt

SEQ ID NO: 100043 - DNA, 9 bp, Unknown
  misc_feature (1)..( 9): Result.002 file - promoters60/1025117
atatagttt

SEQ ID NO: 100044 - DNA, 8 bp, Unknown
  misc_feature (1)..( 8): Result.002 file - promoters60/1025117
tttggtct

SEQ ID NO: 100045 - DNA, 8 bp, Unknown
  misc_feature (1)..( 8): Result.002 file - promoters60/1025117
tttgttct

SEQ ID NO: 100046 - DNA, 6 bp, Unknown
  misc_feature (1)..( 6): Result.002 file - promoters60/1025117
agaaaa

SEQ ID NO: 100047 - DNA, 6 bp, Unknown
  misc_feature (1)..( 6): Result.002 file - promoters60/1025117
agaaaa

SEQ ID NO: 100048 - DNA, 10 bp, Unknown
  misc_feature (1)..( 10): Result.002 file - promoters60/1025117
tattaaaata

SEQ ID NO: 100049 - DNA, 10 bp, Unknown
  misc_feature (1)..( 10): Result.002 file - promoters60/1025117
tattgaaatt

SEQ ID NO: 100050 - DNA, 10 bp, Unknown
  misc_feature (1)..( 10): Result.002 file - promoters60/1025117
tgttaatata

SEQ ID NO: 100051 - DNA, 7 bp, Unknown
  misc_feature (1)..( 7): Result.002 file - promoters60/1025117
gttgaat

SEQ ID NO: 100052 - DNA, 7 bp, Unknown
  misc_feature (1)..( 7): Result.002 file - promoters60/1025117
gttcaat

SEQ ID NO: 100053 - DNA, 9 bp, Unknown
  misc_feature (1)..( 9): Result.002 file - promoters60/1025117
cttaattac

SEQ ID NO: 100054 - DNA, 9 bp, Unknown
  misc_feature (1)..( 9): Result.002 file - promoters60/1025117
cttaattac

SEQ ID NO: 100055 - DNA, 17 bp, Unknown
  misc_feature (1)..( 17): Result.002 file - promoters60/1025117
tagtagttccaaacgca

SEQ ID NO: 100056 - DNA, 17 bp, Unknown
  misc_feature (1)..( 17): Result.002 file - promoters60/1025117
tagttgttcaatatttt

SEQ ID NO: 100057 - DNA, 17 bp, Unknown
  misc_feature (1)..( 17): Result.002 file - promoters60/1025117
cttttgtttaatgtttt

SEQ ID NO: 100058 - DNA, 7 bp, Unknown
  misc_feature (1)..( 7): Result.002 file - promoters60/1025117
tttggtg

SEQ ID NO: 100059 - DNA, 7 bp, Unknown
  misc_feature (1)..( 7): Result.002 file - promoters60/1025117
ttttgtg

SEQ ID NO: 100060 - DNA, 6 bp, Unknown
  misc_feature (1)..( 6): Result.002 file - promoters60/1025117
tcttta

SEQ ID NO: 100061 - DNA, 6 bp, Unknown
  misc_feature (1)..( 6): Result.002 file - promoters60/1025117
tcttta

SEQ ID NO: 100062 - DNA, 6 bp, Unknown
  misc_feature (1)..( 6): Result.002 file - promoters60/1025117
atcaag

SEQ ID NO: 100063 - DNA, 6 bp, Unknown
  misc_feature (1)..( 6): Result.002 file - promoters60/1025117
atcaag

SEQ ID NO: 100064 - DNA, 6 bp, Unknown
  misc_feature (1)..( 6): Result.002 file - promoters60/1025117
atattt

SEQ ID NO: 100065 - DNA, 6 bp, Unknown
  misc_feature (1)..( 6): Result.002 file - promoters60/1025117
atattt

SEQ ID NO: 100066 - DNA, 6 bp, Unknown
  misc_feature (1)..( 6): Result.002 file - promoters60/1025117
ttctaa

SEQ ID NO: 100067 - DNA, 6 bp, Unknown
  misc_feature (1)..( 6): Result.002 file - promoters60/1025117
ttctaa

SEQ ID NO: 100068 - DNA, 7 bp, Unknown
  misc_feature (1)..( 7): Result.002 file - promoters60/1025117
cagtaag

SEQ ID NO: 100069 - DNA, 7 bp, Unknown
  misc_feature (1)..( 7): Result.002 file - promoters60/1025117
cagcaag

SEQ ID NO: 100070 - DNA, 6 bp, Unknown
  misc_feature (1)..( 6): Result.002 file - promoters60/1025202
atagat

SEQ ID NO: 100071 - DNA, 6 bp, Unknown
  misc_feature (1)..( 6): Result.002 file - promoters60/1025202
atagat

SEQ ID NO: 100072 - DNA, 6 bp, Unknown
  misc_feature (1)..( 6): Result.002 file - promoters60/1025202
taaaga

SEQ ID NO: 100073 - DNA, 6 bp, Unknown
  misc_feature (1)..( 6): Result.002 file - promoters60/1025202
taaaga

SEQ ID NO: 100074 - DNA, 7 bp, Unknown
  misc_feature (1)..( 7): Result.002 file - promoters60/1025202
ataattt

SEQ ID NO: 100075 - DNA, 7 bp, Unknown
  misc_feature (1)..( 7): Result.002 file - promoters60/1025202
atatttt

SEQ ID NO: 100076 - DNA, 7 bp, Unknown
  misc_feature (1)..( 7): Result.002 file - promoters60/1025202
tttgctt

SEQ ID NO: 100077 - DNA, 7 bp, Unknown
  misc_feature (1)..( 7): Result.002 file - promoters60/1025202
ttttctt

SEQ ID NO: 100078 - DNA, 8 bp, Unknown
  misc_feature (1)..( 8): Result.002 file - promoters60/1025202
atttctgt

SEQ ID NO: 100079 - DNA, 8 bp, Unknown
  misc_feature (1)..( 8): Result.002 file - promoters60/1025202
atttatgt

SEQ ID NO: 100080 - DNA, 8 bp, Unknown
  misc_feature (1)..( 8): Result.002 file - promoters60/1025202
tgttctgt

SEQ ID NO: 100081 - DNA, 8 bp, Unknown
  misc_feature (1)..( 8): Result.002 file - promoters60/1025202
tttgtctc

SEQ ID NO: 100082 - DNA, 8 bp, Unknown
  misc_feature (1)..( 8): Result.002 file - promoters60/1025202
tttctctc

SEQ ID NO: 100083 - DNA, 6 bp, Unknown
  misc_feature (1)..( 6): Result.002 file - promoters60/1025202
agaact

SEQ ID NO: 100084 - DNA, 6 bp, Unknown
  misc_feature (1)..( 6): Result.002 file - promoters60/1025202
agaact

SEQ ID NO: 100085 - DNA, 6 bp, Unknown
  misc_feature (1)..( 6): Result.002 file - promoters60/1025202
gctggt

SEQ ID NO: 100086 - DNA, 6 bp, Unknown
  misc_feature (1)..( 6): Result.002 file - promoters60/1025202
gctggt

SEQ ID NO: 100087 - DNA, 6 bp, Unknown
  misc_feature (1)..( 6): Result.002 file - promoters60/1025202
tctctg

SEQ ID NO: 100088 - DNA, 6 bp, Unknown
  misc_feature (1)..( 6): Result.002 file - promoters60/1025202
tctctg

SEQ ID NO: 100089 - DNA, 6 bp, Unknown
  misc_feature (1)..( 6): Result.002 file - promoters60/1025202
atatgg

SEQ ID NO: 100090 - DNA, 6 bp, Unknown
  misc_feature (1)..( 6): Result.002 file - promoters60/1025202
atatgg

SEQ ID NO: 100091 - DNA, 6 bp, Unknown
  misc_feature (1)..( 6): Result.002 file - promoters60/1025202
ttgttg

SEQ ID NO: 100092 - DNA, 6 bp, Unknown
  misc_feature (1)..( 6): Result.002 file - promoters60/1025202
ttgttg

SEQ ID NO: 100093 - DNA, 7 bp, Unknown
  misc_feature (1)..( 7): Result.002 file - promoters60/1025202
ttaatgt

SEQ ID NO: 100094 - DNA, 7 bp, Unknown
  misc_feature (1)..( 7): Result.002 file - promoters60/1025202
ttattgt

SEQ ID NO: 100095 - DNA, 6 bp, Unknown
  misc_feature (1)..( 6): Result.002 file - promoters60/1025202
agtaaa

SEQ ID NO: 100096 - DNA, 6 bp, Unknown
  misc_feature (1)..( 6): Result.002 file - promoters60/1025202
agtaaa

SEQ ID NO: 100097 - DNA, 7 bp, Unknown
  misc_feature (1)..( 7): Result.002 file - promoters60/1025202
aatcggg

SEQ ID NO: 100098 - DNA, 7 bp, Unknown
  misc_feature (1)..( 7): Result.002 file - promoters60/1025202
aattggg

SEQ ID NO: 100099 - DNA, 8 bp, Unknown
  misc_feature (1)..( 8): Result.002 file - promoters60/1025202
gaaagaaa

SEQ ID NO: 100100 - DNA, 8 bp, Unknown
  misc_feature (1)..( 8): Result.002 file - promoters60/1025202
gaaacaaa

SEQ ID NO: 100101 - DNA, 10 bp, Unknown
  misc_feature (1)..( 10): Result.002 file - promoters60/1025202
ggaaaagaaa

SEQ ID NO: 100102 - DNA, 10 bp, Unknown
  misc_feature (1)..( 10): Result.002 file - promoters60/1025202
ggaaatgaaa

SEQ ID NO: 100103 - DNA, 7 bp, Unknown
  misc_feature (1)..( 7): Result.002 file - promoters60/1025202
cccacta

SEQ ID NO: 100104 - DNA, 7 bp, Unknown
  misc_feature (1)..( 7): Result.002 file - promoters60/1025202
cccacta

SEQ ID NO: 100105 - DNA, 9 bp, Unknown
  misc_feature (1)..( 9): Result.002 file - promoters60/1025202
aaagaaaag

SEQ ID NO: 100106 - DNA, 9 bp, Unknown
  misc_feature (1)..( 9): Result.002 file - promoters60/1025202
aaagtaaag

SEQ ID NO: 100107 - DNA, 7 bp, Unknown
  misc_feature (1)..( 7): Result.002 file - promoters60/1025202
gtatata

SEQ ID NO: 100108 - DNA, 7 bp, Unknown
  misc_feature (1)..( 7): Result.002 file - promoters60/1025202
gtatata

SEQ ID NO: 100109 - DNA, 9 bp, Unknown
  misc_feature (1)..( 9): Result.002 file - promoters60/1025211
gaaaatatt

SEQ ID NO: 100110 - DNA, 9 bp, Unknown
  misc_feature (1)..( 9): Result.002 file - promoters60/1025211
aaaaataag

SEQ ID NO: 100111 - DNA, 9 bp, Unknown
  misc_feature (1)..( 9): Result.002 file - promoters60/1025211
aaaaattaa

SEQ ID NO: 100112 - DNA, 9 bp, Unknown
  misc_feature (1)..( 9): Result.002 file - promoters60/1025211
aaacatatt

SEQ ID NO: 100113 - DNA, 9 bp, Unknown
  misc_feature (1)..( 9): Result.002 file - promoters60/1025211
taaaatttc

SEQ ID NO: 100114 - DNA, 9 bp, Unknown
  misc_feature (1)..( 9): Result.002 file - promoters60/1025211
caaaattca

SEQ ID NO: 100115 - DNA, 11 bp, Unknown
  misc_feature (1)..( 11): Result.002 file - promoters60/1025211
aaaataaataa

SEQ ID NO: 100116 - DNA, 11 bp, Unknown
  misc_feature (1)..( 11): Result.002 file - promoters60/1025211
ttaataaagct

SEQ ID NO: 100117 - DNA, 11 bp, Unknown
  misc_feature (1)..( 11): Result.002 file - promoters60/1025211
aaaattaatat

SEQ ID NO: 100118 - DNA, 11 bp, Unknown
  misc_feature (1)..( 11): Result.002 file - promoters60/1025211
gagataatatt

SEQ ID NO: 100119 - DNA, 11 bp, Unknown
  misc_feature (1)..( 11): Result.002 file - promoters60/1025211
attataaaata

SEQ ID NO: 100120 - DNA, 12 bp, Unknown
  misc_feature (1)..( 12): Result.002 file - promoters60/1025211
aatttacaaact

SEQ ID NO: 100121 - DNA, 8 bp, Unknown
  misc_feature (1)..( 8): Result.002 file - promoters60/1025211
aaaacaaa

SEQ ID NO: 100122 - DNA, 8 bp, Unknown
  misc_feature (1)..( 8): Result.002 file - promoters60/1025211
aaaaaaaa

SEQ ID NO: 100123 - DNA, 8 bp, Unknown
  misc_feature (1)..( 8): Result.002 file - promoters60/1025211
ggaacaaa

SEQ ID NO: 100124 - DNA, 8 bp, Unknown
  misc_feature (1)..( 8): Result.002 file - promoters60/1025211
taaataaa

SEQ ID NO: 100125 - DNA, 8 bp, Unknown
  misc_feature (1)..( 8): Result.002 file - promoters60/1025211
caaacaaa

SEQ ID NO: 100126 - DNA, 8 bp, Unknown
  misc_feature (1)..( 8): Result.002 file - promoters60/1025211
taaaaaaa

SEQ ID NO: 100127 - DNA, 8 bp, Unknown
  misc_feature (1)..( 8): Result.002 file - promoters60/1025211
aaaacaat

SEQ ID NO: 100128 - DNA, 8 bp, Unknown
  misc_feature (1)..( 8): Result.002 file - promoters60/1025211
cgaacaat

SEQ ID NO: 100129 - DNA, 15 bp, Unknown
  misc_feature (1)..( 15): Result.002 file - promoters60/1025211
aaaattgggactaaa

SEQ ID NO: 100130 - DNA, 15 bp, Unknown
  misc_feature (1)..( 15): Result.002 file - promoters60/1025211
cttatttggataaaa

SEQ ID NO: 100131 - DNA, 15 bp, Unknown
  misc_feature (1)..( 15): Result.002 file - promoters60/1025211
ttcctttgaataaaa

SEQ ID NO: 100132 - DNA, 15 bp, Unknown
  misc_feature (1)..( 15): Result.002 file - promoters60/1025211
tttttttaaatgttt

SEQ ID NO: 100133 - DNA, 15 bp, Unknown
  misc_feature (1)..( 15): Result.002 file - promoters60/1025211
tccgttgacacgtaa

SEQ ID NO: 100134 - DNA, 15 bp, Unknown
  misc_feature (1)..( 15): Result.002 file - promoters60/1025211
tccaattaaaaagga

SEQ ID NO: 100135 - DNA, 13 bp, Unknown
  misc_feature (1)..( 13): Result.002 file - promoters60/1025211
aataaataaaagc

SEQ ID NO: 100136 - DNA, 13 bp, Unknown
  misc_feature (1)..( 13): Result.002 file - promoters60/1025211
aaacaataaaatt

SEQ ID NO: 100137 - DNA, 13 bp, Unknown
  misc_feature (1)..( 13): Result.002 file - promoters60/1025211
acattataaaata

SEQ ID NO: 100138 - DNA, 13 bp, Unknown
  misc_feature (1)..( 13): Result.002 file - promoters60/1025211
aaacagtaaaacc

SEQ ID NO: 100139 - DNA, 13 bp, Unknown
  misc_feature (1)..( 13): Result.002 file - promoters60/1025211
aggagataatatt

SEQ ID NO: 100140 - DNA, 14 bp, Unknown
  misc_feature (1)..( 14): Result.002 file - promoters60/1025211
aaaatttacaaact

SEQ ID NO: 100141 - DNA, 8 bp, Unknown
  misc_feature (1)..( 8): Result.002 file - promoters60/1025211
gaaaaaca

SEQ ID NO: 100142 - DNA, 8 bp, Unknown
  misc_feature (1)..( 8): Result.002 file - promoters60/1025211
gaaaaaat

SEQ ID NO: 100143 - DNA, 8 bp, Unknown
  misc_feature (1)..( 8): Result.002 file - promoters60/1025211
gaaaaaaa

SEQ ID NO: 100144 - DNA, 9 bp, Unknown
  misc_feature (1)..( 9): Result.002 file - promoters60/1025211
gaacaaaac

SEQ ID NO: 100145 - DNA, 9 bp, Unknown
  misc_feature (1)..( 9): Result.002 file - promoters60/1025211
taaaaaata

SEQ ID NO: 100146 - DNA, 9 bp, Unknown
  misc_feature (1)..( 9): Result.002 file - promoters60/1025211
aaaacaatt

SEQ ID NO: 100147 - DNA, 9 bp, Unknown
  misc_feature (1)..( 9): Result.002 file - promoters60/1025211
atttctata

SEQ ID NO: 100148 - DNA, 9 bp, Unknown
  misc_feature (1)..( 9): Result.002 file - promoters60/1025211
atttttata

SEQ ID NO: 100149 - DNA, 9 bp, Unknown
  misc_feature (1)..( 9): Result.002 file - promoters60/1025211
ttttctaaa

SEQ ID NO: 100150 - DNA, 9 bp, Unknown
  misc_feature (1)..( 9): Result.002 file - promoters60/1025211
gtttatatg

SEQ ID NO: 100151 - DNA, 9 bp, Unknown
  misc_feature (1)..( 9): Result.002 file - promoters60/1025211
aattaaatg

SEQ ID NO: 100152 - DNA, 10 bp, Unknown
  misc_feature (1)..( 10): Result.002 file - promoters60/1025211
atttcataac

SEQ ID NO: 100153 - DNA, 10 bp, Unknown
  misc_feature (1)..( 10): Result.002 file - promoters60/1025211
atttcatcgt

SEQ ID NO: 100154 - DNA, 10 bp, Unknown
  misc_feature (1)..( 10): Result.002 file - promoters60/1025340
atgagaatcc

SEQ ID NO: 100155 - DNA, 10 bp, Unknown
  misc_feature (1)..( 10): Result.002 file - promoters60/1025340
atgagaactc

SEQ ID NO: 100156 - DNA, 7 bp, Unknown
  misc_feature (1)..( 7): Result.002 file - promoters60/1025340
agaagag

SEQ ID NO: 100157 - DNA, 8 bp, Unknown
  misc_feature (1)..( 8): Result.002 file - promoters60/1025340
agaagatg

SEQ ID NO: 100158 - DNA, 8 bp, Unknown
  misc_feature (1)..( 8): Result.002 file - promoters60/1025340
cgaatatg

SEQ ID NO: 100159 - DNA, 8 bp, Unknown
  misc_feature (1)..( 8): Result.002 file - promoters60/1025340
agaagagt

SEQ ID NO: 100160 - DNA, 9 bp, Unknown
  misc_feature (1)..( 9): Result.002 file - promoters60/1025340
acattgttt

SEQ ID NO: 100161 - DNA, 9 bp, Unknown
  misc_feature (1)..( 9): Result.002 file - promoters60/1025340
cgatttttt

SEQ ID NO: 100162 - DNA, 9 bp, Unknown
  misc_feature (1)..( 9): Result.002 file - promoters60/1025340
acattgtta

SEQ ID NO: 100163 - DNA, 7 bp, Unknown
  misc_feature (1)..( 7): Result.002 file - promoters60/1025340
aaactta

SEQ ID NO: 100164 - DNA, 7 bp, Unknown
  misc_feature (1)..( 7): Result.002 file - promoters60/1025340
aaactta

SEQ ID NO: 100165 - DNA, 7 bp, Unknown
  misc_feature (1)..( 7): Result.002 file - promoters60/1025340
aaattta

SEQ ID NO: 100166 - DNA, 11 bp, Unknown
  misc_feature (1)..( 11): Result.002 file - promoters60/1025468
ttttgtagatt

SEQ ID NO: 100167 - DNA, 11 bp, Unknown
  misc_feature (1)..( 11): Result.002 file - promoters60/1025468
cattgtaggtc

SEQ ID NO: 100168 - DNA, 11 bp, Unknown
  misc_feature (1)..( 11): Result.002 file - promoters60/1025468
ttttgtggatt

SEQ ID NO: 100169 - DNA, 8 bp, Unknown
  misc_feature (1)..( 8): Result.002 file - promoters60/1025468
ttatatat

SEQ ID NO: 100170 - DNA, 8 bp, Unknown
  misc_feature (1)..( 8): Result.002 file - promoters60/1025468
gtatataa

SEQ ID NO: 100171 - DNA, 8 bp, Unknown
  misc_feature (1)..( 8): Result.002 file - promoters60/1025468
ttatgtat

SEQ ID NO: 100172 - DNA, 10 bp, Unknown
  misc_feature (1)..( 10): Result.002 file - promoters60/1025468
gataatgtat

SEQ ID NO: 100173 - DNA, 10 bp, Unknown
  misc_feature (1)..( 10): Result.002 file - promoters60/1025468
gatgatgtac

SEQ ID NO: 100174 - DNA, 10 bp, Unknown
  misc_feature (1)..( 10): Result.002 file - promoters60/1025468
ctaaatatat

SEQ ID NO: 100175 - DNA, 10 bp, Unknown
  misc_feature (1)..( 10): Result.002 file - promoters60/1025468
ttaaaaatag

SEQ ID NO: 100176 - DNA, 11 bp, Unknown
  misc_feature (1)..( 11): Result.002 file - promoters60/1025468
ctatattgcaa

SEQ ID NO: 100177 - DNA, 11 bp, Unknown
  misc_feature (1)..( 11): Result.002 file - promoters60/1025468
agatatagcaa

SEQ ID NO: 100178 - DNA, 11 bp, Unknown
  misc_feature (1)..( 11): Result.002 file - promoters60/1025468
aaatatagtat

SEQ ID NO: 100179 - DNA, 11 bp, Unknown
  misc_feature (1)..( 11): Result.002 file - promoters60/1025468
aaaaatatcca

SEQ ID NO: 100180 - DNA, 10 bp, Unknown
  misc_feature (1)..( 10): Result.002 file - promoters60/1025468
atagagaagt

SEQ ID NO: 100181 - DNA, 10 bp, Unknown
  misc_feature (1)..( 10): Result.002 file - promoters60/1025468
ttagaaaagt

SEQ ID NO: 100182 - DNA, 10 bp, Unknown
  misc_feature (1)..( 10): Result.002 file - promoters60/1025468
ttagaaatac

SEQ ID NO: 100183 - DNA, 12 bp, Unknown
  misc_feature (1)..( 12): Result.002 file - promoters60/1025468
gtagattaagta

SEQ ID NO: 100184 - DNA, 12 bp, Unknown
  misc_feature (1)..( 12): Result.002 file - promoters60/1025468
ctaggttatgta

SEQ ID NO: 100185 - DNA, 12 bp, Unknown
  misc_feature (1)..( 12): Result.002 file - promoters60/1025468
ctatgtttacac

SEQ ID NO: 100186 - DNA, 8 bp, Unknown
  misc_feature (1)..( 8): Result.002 file - promoters60/1025468
gtaaatag

SEQ ID NO: 100187 - DNA, 8 bp, Unknown
  misc_feature (1)..( 8): Result.002 file - promoters60/1025468
ataaatag

SEQ ID NO: 100188 - DNA, 8 bp, Unknown
  misc_feature (1)..( 8): Result.002 file - promoters60/1025468
gtacatac

SEQ ID NO: 100189 - DNA, 10 bp, Unknown
  misc_feature (1)..( 10): Result.002 file - promoters60/1025468
ataaaaagaa

SEQ ID NO: 100190 - DNA, 10 bp, Unknown
  misc_feature (1)..( 10): Result.002 file - promoters60/1025468
ataaaaacaa

SEQ ID NO: 100191 - DNA, 10 bp, Unknown
  misc_feature (1)..( 10): Result.002 file - promoters60/1025468
caaaaatcaa

SEQ ID NO: 100192 - DNA, 7 bp, Unknown
  misc_feature (1)..( 7): Result.002 file - promoters60/1025468
gaaacaa

SEQ ID NO: 100193 - DNA, 7 bp, Unknown
  misc_feature (1)..( 7): Result.002 file - promoters60/1025468
aaaacaa

SEQ ID NO: 100194 - DNA, 8 bp, Unknown
  misc_feature (1)..( 8): Result.002 file - promoters60/1025468
aaaatcaa

SEQ ID NO: 100195 - DNA, 9 bp, Unknown
  misc_feature (1)..( 9): Result.002 file - promoters60/1025468
taaaagatg

SEQ ID NO: 100196 - DNA, 9 bp, Unknown
  misc_feature (1)..( 9): Result.002 file - promoters60/1025468
ataaagatt

SEQ ID NO: 100197 - DNA, 9 bp, Unknown
  misc_feature (1)..( 9): Result.002 file - promoters60/1025468
taaaatatg

SEQ ID NO: 100198 - DNA, 9 bp, Unknown
  misc_feature (1)..( 9): Result.002 file - promoters60/1025468
aaccaaagc

SEQ ID NO: 100199 - DNA, 9 bp, Unknown
  misc_feature (1)..( 9): Result.002 file - promoters60/1025468
acccacagc

SEQ ID NO: 100200 - DNA, 9 bp, Unknown
  misc_feature (1)..( 9): Result.002 file - promoters60/1025468
aaccaaaga

SEQ ID NO: 100201 - DNA, 9 bp, Unknown
  misc_feature (1)..( 9): Result.002 file - promoters60/1025471
ctcgtattt

SEQ ID NO: 100202 - DNA, 9 bp, Unknown
  misc_feature (1)..( 9): Result.002 file - promoters60/1025471
gtcgtatgt

SEQ ID NO: 100203 - DNA, 9 bp, Unknown
  misc_feature (1)..( 9): Result.002 file - promoters60/1025471
aacgtatgt

SEQ ID NO: 100204 - DNA, 9 bp, Unknown
  misc_feature (1)..( 9): Result.002 file - promoters60/1025471
aacttattt

SEQ ID NO: 100205 - DNA, 9 bp, Unknown
  misc_feature (1)..( 9): Result.002 file - promoters60/1025471
cactaattc

SEQ ID NO: 100206 - DNA, 9 bp, Unknown
  misc_feature (1)..( 9): Result.002 file - promoters60/1025471
aactaatgc

SEQ ID NO: 100207 - DNA, 9 bp, Unknown
  misc_feature (1)..( 9): Result.002 file - promoters60/1025471
agactaacc

SEQ ID NO: 100208 - DNA, 9 bp, Unknown
  misc_feature (1)..( 9): Result.002 file - promoters60/1025471
cgactaaga

SEQ ID NO: 100209 - DNA, 9 bp, Unknown
  misc_feature (1)..( 9): Result.002 file - promoters60/1025471
aaactgaga

SEQ ID NO: 100210 - DNA, 9 bp, Unknown
  misc_feature (1)..( 9): Result.002 file - promoters60/1025471
tgaccaaga

SEQ ID NO: 100211 - DNA, 9 bp, Unknown
  misc_feature (1)..( 9): Result.002 file - promoters60/1025471
tgaaaaaat

SEQ ID NO: 100212 - DNA, 9 bp, Unknown
  misc_feature (1)..( 9): Result.002 file - promoters60/1025471
tcaaaaaaa

SEQ ID NO: 100213 - DNA, 10 bp, Unknown
  misc_feature (1)..( 10): Result.002 file - promoters60/1025511
ttaataataa

SEQ ID NO: 100214 - DNA, 10 bp, Unknown
  misc_feature (1)..( 10): Result.002 file - promoters60/1025511
gaaataataa

SEQ ID NO: 100215 - DNA, 10 bp, Unknown
  misc_feature (1)..( 10): Result.002 file - promoters60/1025511
agaatcatgc

SEQ ID NO: 100216 - DNA, 10 bp, Unknown
  misc_feature (1)..( 10): Result.002 file - promoters60/1025511
aaaataatca

SEQ ID NO: 100217 - DNA, 10 bp, Unknown
  misc_feature (1)..( 10): Result.002 file - promoters60/1025511
ttagtaatag

SEQ ID NO: 100218 - DNA, 10 bp, Unknown
  misc_feature (1)..( 10): Result.002 file - promoters60/1025511
gaagtaaaga

SEQ ID NO: 100219 - DNA, 10 bp, Unknown
  misc_feature (1)..( 10): Result.002 file - promoters60/1025511
acaataaaaa

SEQ ID NO: 100220 - DNA, 10 bp, Unknown
  misc_feature (1)..( 10): Result.002 file - promoters60/1025582
gagacaattg

SEQ ID NO: 100221 - DNA, 10 bp, Unknown
  misc_feature (1)..( 10): Result.002 file - promoters60/1025582
tttacatttg

SEQ ID NO: 100222 - DNA, 10 bp, Unknown
  misc_feature (1)..( 10): Result.002 file - promoters60/1025582
gagataattt

SEQ ID NO: 100223 - DNA, 10 bp, Unknown
  misc_feature (1)..( 10): Result.002 file - promoters60/1025582
gagagattct

SEQ ID NO: 100224 - DNA, 7 bp, Unknown
  misc_feature (1)..( 7): Result.002 file - promoters60/1025582
cagagac

SEQ ID NO: 100225 - DNA, 7 bp, Unknown
  misc_feature (1)..( 7): Result.002 file - promoters60/1025582
cagagat

SEQ ID NO: 100226 - DNA, 7 bp, Unknown
  misc_feature (1)..( 7): Result.002 file - promoters60/1025582
gagagat

SEQ ID NO: 100227 - DNA, 17 bp, Unknown
  misc_feature (1)..( 17): Result.002 file - promoters60/1025642
atattcagaattaatat

SEQ ID NO: 100228 - DNA, 17 bp, Unknown
  misc_feature (1)..( 17): Result.002 file - promoters60/1025642
gaaatcataattaataa

SEQ ID NO: 100229 - DNA, 17 bp, Unknown
  misc_feature (1)..( 17): Result.002 file - promoters60/1025642
tactatataatgaatat

SEQ ID NO: 100230 - DNA, 17 bp, Unknown
  misc_feature (1)..( 17): Result.002 file - promoters60/1025642
acaccatttattaacat

SEQ ID NO: 100231 - DNA, 17 bp, Unknown
  misc_feature (1)..( 17): Result.002 file - promoters60/1025642
gaaaacatacttaatcg

SEQ ID NO: 100232 - DNA, 17 bp, Unknown
  misc_feature (1)..( 17): Result.002 file - promoters60/1025642
gtatacatgatttgaat

SEQ ID NO: 100233 - DNA, 17 bp, Unknown
  misc_feature (1)..( 17): Result.002 file - promoters60/1025642
aaatattttattcaaaa

SEQ ID NO: 100234 - DNA, 17 bp, Unknown
  misc_feature (1)..( 17): Result.002 file - promoters60/1025642
atgatgatgatgaatgt

SEQ ID NO: 100235 - DNA, 10 bp, Unknown
  misc_feature (1)..( 10): Result.002 file - promoters60/1025642
ccaaatttgg

SEQ ID NO: 100236 - DNA, 10 bp, Unknown
  misc_feature (1)..( 10): Result.002 file - promoters60/1025642
ccaattttaa

SEQ ID NO: 100237 - DNA, 10 bp, Unknown
  misc_feature (1)..( 10): Result.002 file - promoters60/1025642
ataattttgc

SEQ ID NO: 100238 - DNA, 12 bp, Unknown
  misc_feature (1)..( 12): Result.002 file - promoters60/1025642
ctaatgatttag

SEQ ID NO: 100239 - DNA, 12 bp, Unknown
  misc_feature (1)..( 12): Result.002 file - promoters60/1025642
ctaagtttggtt

SEQ ID NO: 100240 - DNA, 12 bp, Unknown
  misc_feature (1)..( 12): Result.002 file - promoters60/1025642
taggagatttag

SEQ ID NO: 100241 - DNA, 12 bp, Unknown
  misc_feature (1)..( 12): Result.002 file - promoters60/1025642
accaatattcag

SEQ ID NO: 100242 - DNA, 12 bp, Unknown
  misc_feature (1)..( 12): Result.002 file - promoters60/1025642
taaaatatttta

SEQ ID NO: 100243 - DNA, 12 bp, Unknown
  misc_feature (1)..( 12): Result.002 file - promoters60/1025642
accattatcgct

SEQ ID NO: 100244 - DNA, 12 bp, Unknown
  misc_feature (1)..( 12): Result.002 file - promoters60/1025642
taaaagattcga

SEQ ID NO: 100245 - DNA, 12 bp, Unknown
  misc_feature (1)..( 12): Result.002 file - promoters60/1025642
aaaactatatat

SEQ ID NO: 100246 - DNA, 12 bp, Unknown
  misc_feature (1)..( 12): Result.002 file - promoters60/1025642
gggtagattcga

SEQ ID NO: 100247 - DNA, 18 bp, Unknown
  misc_feature (1)..( 18): Result.002 file - promoters60/1025642
tagctaacaaataatttt

SEQ ID NO: 100248 - DNA, 18 bp, Unknown
  misc_feature (1)..( 18): Result.002 file - promoters60/1025642
attttaagaaagtatata

SEQ ID NO: 100249 - DNA, 18 bp, Unknown
  misc_feature (1)..( 18): Result.002 file - promoters60/1025642
tttttaaaaaactatata

SEQ ID NO: 100250 - DNA, 18 bp, Unknown
  misc_feature (1)..( 18): Result.002 file - promoters60/1025642
ttcgataaaagctaatgt

SEQ ID NO: 100251 - DNA, 18 bp, Unknown
  misc_feature (1)..( 18): Result.002 file - promoters60/1025642
cctttaaaagattcgact

SEQ ID NO: 100252 - DNA, 18 bp, Unknown
  misc_feature (1)..( 18): Result.002 file - promoters60/1025642
tttttatctgagaaattt

SEQ ID NO: 100253 - DNA, 10 bp, Unknown
  misc_feature (1)..( 10): Result.002 file - promoters60/1025683
cctttataaa

SEQ ID NO: 100254 - DNA, 10 bp, Unknown
  misc_feature (1)..( 10): Result.002 file - promoters60/1025683
cctatatata

SEQ ID NO: 100255 - DNA, 10 bp, Unknown
  misc_feature (1)..( 10): Result.002 file - promoters60/1025683
gtcttataaa

SEQ ID NO: 100256 - DNA, 10 bp, Unknown
  misc_feature (1)..( 10): Result.002 file - promoters60/1025683
ccactataaa

SEQ ID NO: 100257 - DNA, 10 bp, Unknown
  misc_feature (1)..( 10): Result.002 file - promoters60/1025683
gttatataaa

SEQ ID NO: 100258 - DNA, 10 bp, Unknown
  misc_feature (1)..( 10): Result.002 file - promoters60/1025683
cttatttatg

SEQ ID NO: 100259 - DNA, 10 bp, Unknown
  misc_feature (1)..( 10): Result.002 file - promoters60/1025683
cccttatatt

SEQ ID NO: 100260 - DNA, 12 bp, Unknown
  misc_feature (1)..( 12): Result.002 file - promoters60/1025683
ctatttacaatg

SEQ ID NO: 100261 - DNA, 12 bp, Unknown
  misc_feature (1)..( 12): Result.002 file - promoters60/1025683
gtatttactttg

SEQ ID NO: 100262 - DNA, 12 bp, Unknown
  misc_feature (1)..( 12): Result.002 file - promoters60/1025683
aagtttaaaatg

SEQ ID NO: 100263 - DNA, 12 bp, Unknown
  misc_feature (1)..( 12): Result.002 file - promoters60/1025683
ctttttaaagtt

SEQ ID NO: 100264 - DNA, 12 bp, Unknown
  misc_feature (1)..( 12): Result.002 file - promoters60/1025683
cttattaaagct

SEQ ID NO: 100265 - DNA, 12 bp, Unknown
  misc_feature (1)..( 12): Result.002 file - promoters60/1025683
tatttcaaatga

SEQ ID NO: 100266 - DNA, 14 bp, Unknown
  misc_feature (1)..( 14): Result.002 file - promoters60/1025683
tctaatgaaatttt

SEQ ID NO: 100267 - DNA, 14 bp, Unknown
  misc_feature (1)..( 14): Result.002 file - promoters60/1025683
aaaaatgtaatttt

SEQ ID NO: 100268 - DNA, 14 bp, Unknown
  misc_feature (1)..( 14): Result.002 file - promoters60/1025683
tataatgaatttgt

SEQ ID NO: 100269 - DNA, 14 bp, Unknown
  misc_feature (1)..( 14): Result.002 file - promoters60/1025683
tggatggtagtttt

SEQ ID NO: 100270 - DNA, 14 bp, Unknown
  misc_feature (1)..( 14): Result.002 file - promoters60/1025683
tatactgatttccg

SEQ ID NO: 100271 - DNA, 14 bp, Unknown
  misc_feature (1)..( 14): Result.002 file - promoters60/1025683
gatacttattctaa

SEQ ID NO: 100272 - DNA, 14 bp, Unknown
  misc_feature (1)..( 14): Result.002 file - promoters60/1025683
agtaacttaaattt

SEQ ID NO: 100273 - DNA, 14 bp, Unknown
  misc_feature (1)..( 14): Result.002 file - promoters60/1025683
agggatttagatta

SEQ ID NO: 100274 - DNA, 14 bp, Unknown
  misc_feature (1)..( 14): Result.002 file - promoters60/1025683
gataaaataaattg

SEQ ID NO: 100275 - DNA, 14 bp, Unknown
  misc_feature (1)..( 14): Result.002 file - promoters60/1025683
agggatatagaaca

SEQ ID NO: 100276 - DNA, 14 bp, Unknown
  misc_feature (1)..( 14): Result.002 file - promoters60/1025683
aaacattgagattt

SEQ ID NO: 100277 - DNA, 14 bp, Unknown
  misc_feature (1)..( 14): Result.002 file - promoters60/1025683
gaagaaaaaaattg

SEQ ID NO: 100278 - DNA, 11 bp, Unknown
  misc_feature (1)..( 11): Result.002 file - promoters60/1025707
aatgatacaaa

SEQ ID NO: 100279 - DNA, 11 bp, Unknown
  misc_feature (1)..( 11): Result.002 file - promoters60/1025707
aatcatacaac

SEQ ID NO: 100280 - DNA, 11 bp, Unknown
  misc_feature (1)..( 11): Result.002 file - promoters60/1025707
atacatagaaa

SEQ ID NO: 100281 - DNA, 6 bp, Unknown
  misc_feature (1)..( 6): Result.002 file - promoters60/1025707
tcttga

SEQ ID NO: 100282 - DNA, 6 bp, Unknown
  misc_feature (1)..( 6): Result.002 file - promoters60/1025707
tcttga

SEQ ID NO: 100283 - DNA, 7 bp, Unknown
  misc_feature (1)..( 7): Result.002 file - promoters60/1025707
tagtata

SEQ ID NO: 100284 - DNA, 7 bp, Unknown
  misc_feature (1)..( 7): Result.002 file - promoters60/1025707
tagaata

SEQ ID NO: 100285 - DNA, 11 bp, Unknown
  misc_feature (1)..( 11): Result.002 file - promoters60/1025707
acacgttaagt

SEQ ID NO: 100286 - DNA, 11 bp, Unknown
  misc_feature (1)..( 11): Result.002 file - promoters60/1025707
acacattaagt

SEQ ID NO: 100287 - DNA, 11 bp, Unknown
  misc_feature (1)..( 11): Result.002 file - promoters60/1025707
gataattaaga

SEQ ID NO: 100288 - DNA, 7 bp, Unknown
  misc_feature (1)..( 7): Result.002 file - promoters60/1025707
caaataa

SEQ ID NO: 100289 - DNA, 7 bp, Unknown
  misc_feature (1)..( 7): Result.002 file - promoters60/1025707
caagtaa

SEQ ID NO: 100290 - DNA, 7 bp, Unknown
  misc_feature (1)..( 7): Result.002 file - promoters60/1025707
ctatata

SEQ ID NO: 100291 - DNA, 7 bp, Unknown
  misc_feature (1)..( 7): Result.002 file - promoters60/1025707
ctaaata

SEQ ID NO: 100292 - DNA, 6 bp, Unknown
  misc_feature (1)..( 6): Result.002 file - promoters60/1025707
tataaa

SEQ ID NO: 100293 - DNA, 6 bp, Unknown
  misc_feature (1)..( 6): Result.002 file - promoters60/1025707
tataaa

SEQ ID NO: 100294 - DNA, 7 bp, Unknown
  misc_feature (1)..( 7): Result.002 file - promoters60/1025707
cacacaa

SEQ ID NO: 100295 - DNA, 7 bp, Unknown
  misc_feature (1)..( 7): Result.002 file - promoters60/1025707
cacccaa

SEQ ID NO: 100296 - DNA, 7 bp, Unknown
  misc_feature (1)..( 7): Result.002 file - promoters60/1025707
aatatca

SEQ ID NO: 100297 - DNA, 7 bp, Unknown
  misc_feature (1)..( 7): Result.002 file - promoters60/1025707
aatctca

SEQ ID NO: 100298 - DNA, 8 bp, Unknown
  misc_feature (1)..( 8): Result.002 file - promoters60/1025707
atacaaat

SEQ ID NO: 100299 - DNA, 8 bp, Unknown
  misc_feature (1)..( 8): Result.002 file - promoters60/1025707
atagaaat

SEQ ID NO: 100300 - DNA, 7 bp, Unknown
  misc_feature (1)..( 7): Result.002 file - promoters60/1025707
atacata

SEQ ID NO: 100301 - DNA, 7 bp, Unknown
  misc_feature (1)..( 7): Result.002 file - promoters60/1025707
ataaata

SEQ ID NO: 100302 - DNA, 8 bp, Unknown
  misc_feature (1)..( 8): Result.002 file - promoters60/1025707
aatattaa

SEQ ID NO: 100303 - DNA, 8 bp, Unknown
  misc_feature (1)..( 8): Result.002 file - promoters60/1025707
aataataa

SEQ ID NO: 100304 - DNA, 8 bp, Unknown
  misc_feature (1)..( 8): Result.002 file - promoters60/1025707
acaagaag

SEQ ID NO: 100305 - DNA, 8 bp, Unknown
  misc_feature (1)..( 8): Result.002 file - promoters60/1025707
acaaaaag

SEQ ID NO: 100306 - DNA, 6 bp, Unknown
  misc_feature (1)..( 6): Result.002 file - promoters60/1025707
ataaac

SEQ ID NO: 100307 - DNA, 6 bp, Unknown
  misc_feature (1)..( 6): Result.002 file - promoters60/1025707
ataaac

SEQ ID NO: 100308 - DNA, 7 bp, Unknown
  misc_feature (1)..( 7): Result.002 file - promoters60/1025707
tgaacaa

SEQ ID NO: 100309 - DNA, 7 bp, Unknown
  misc_feature (1)..( 7): Result.002 file - promoters60/1025707
tgatcaa

SEQ ID NO: 100310 - DNA, 6 bp, Unknown
  misc_feature (1)..( 6): Result.002 file - promoters60/1025707
cgatta

SEQ ID NO: 100311 - DNA, 6 bp, Unknown
  misc_feature (1)..( 6): Result.002 file - promoters60/1025707
cgatta

SEQ ID NO: 100312 - DNA, 6 bp, Unknown
  misc_feature (1)..( 6): Result.002 file - promoters60/1025707
ttttga

SEQ ID NO: 100313 - DNA, 6 bp, Unknown
  misc_feature (1)..( 6): Result.002 file - promoters60/1025707
ttttga

SEQ ID NO: 100314 - DNA, 6 bp, Unknown
  misc_feature (1)..( 6): Result.002 file - promoters60/1025707
acagta

SEQ ID NO: 100315 - DNA, 6 bp, Unknown
  misc_feature (1)..( 6): Result.002 file - promoters60/1025707
acagta

SEQ ID NO: 100316 - DNA, 7 bp, Unknown
  misc_feature (1)..( 7): Result.002 file - promoters60/1025707
taaaata

SEQ ID NO: 100317 - DNA, 7 bp, Unknown
  misc_feature (1)..( 7): Result.002 file - promoters60/1025707
taatata

SEQ ID NO: 100318 - DNA, 6 bp, Unknown
  misc_feature (1)..( 6): Result.002 file - promoters60/1025707
ttgaca

SEQ ID NO: 100319 - DNA, 6 bp, Unknown
  misc_feature (1)..( 6): Result.002 file - promoters60/1025707
ttgaca

SEQ ID NO: 100320 - DNA, 7 bp, Unknown
  misc_feature (1)..( 7): Result.002 file - promoters60/1025707
aaccaag

SEQ ID NO: 100321 - DNA, 7 bp, Unknown
  misc_feature (1)..( 7): Result.002 file - promoters60/1025707
aacgaag

SEQ ID NO: 100322 - DNA, 8 bp, Unknown
  misc_feature (1)..( 8): Result.002 file - promoters60/1025707
acgatgac

SEQ ID NO: 100323 - DNA, 8 bp, Unknown
  misc_feature (1)..( 8): Result.002 file - promoters60/1025707
acgatgac

SEQ ID NO: 100324 - DNA, 12 bp, Unknown
  misc_feature (1)..( 12): Result.002 file - promoters60/1025791
ttaaccttagcg

SEQ ID NO: 100325 - DNA, 12 bp, Unknown
  misc_feature (1)..( 12): Result.002 file - promoters60/1025791
ttaatcttaatc

SEQ ID NO: 100326 - DNA, 12 bp, Unknown
  misc_feature (1)..( 12): Result.002 file - promoters60/1025791
ataagcttagag

SEQ ID NO: 100327 - DNA, 12 bp, Unknown
  misc_feature (1)..( 12): Result.002 file - promoters60/1025791
aaaattttattg

SEQ ID NO: 100328 - DNA, 12 bp, Unknown
  misc_feature (1)..( 12): Result.002 file - promoters60/1025791
cgtgacttggag

SEQ ID NO: 100329 - DNA, 12 bp, Unknown
  misc_feature (1)..( 12): Result.002 file - promoters60/1025791
tagagcctagag

SEQ ID NO: 100330 - DNA, 13 bp, Unknown
  misc_feature (1)..( 13): Result.002 file - promoters60/1025791
aattgggcccaat

SEQ ID NO: 100331 - DNA, 13 bp, Unknown
  misc_feature (1)..( 13): Result.002 file - promoters60/1025791
cattaggctttaa

SEQ ID NO: 100332 - DNA, 13 bp, Unknown
  misc_feature (1)..( 13): Result.002 file - promoters60/1025791
aaatgggcctaat

SEQ ID NO: 100333 - DNA, 13 bp, Unknown
  misc_feature (1)..( 13): Result.002 file - promoters60/1025791
aattggaaatagg

SEQ ID NO: 100334 - DNA, 13 bp, Unknown
  misc_feature (1)..( 13): Result.002 file - promoters60/1025791
tgttgggctttta

SEQ ID NO: 100335 - DNA, 13 bp, Unknown
  misc_feature (1)..( 13): Result.002 file - promoters60/1025791
cattagtggataa

SEQ ID NO: 100336 - DNA, 13 bp, Unknown
  misc_feature (1)..( 13): Result.002 file - promoters60/1025791
caatgggctgggc

SEQ ID NO: 100337 - DNA, 8 bp, Unknown
  misc_feature (1)..( 8): Result.002 file - promoters60/1026014
aatattta

SEQ ID NO: 100338 - DNA, 8 bp, Unknown
  misc_feature (1)..( 8): Result.002 file - promoters60/1026014
aatttttt

SEQ ID NO: 100339 - DNA, 8 bp, Unknown
  misc_feature (1)..( 8): Result.002 file - promoters60/1026014
gatatttt

SEQ ID NO: 100340 - DNA, 8 bp, Unknown
  misc_feature (1)..( 8): Result.002 file - promoters60/1026014
aatattat

SEQ ID NO: 100341 - DNA, 8 bp, Unknown
  misc_feature (1)..( 8): Result.002 file - promoters60/1026014
tatttttt

SEQ ID NO: 100342 - DNA, 11 bp, Unknown
  misc_feature (1)..( 11): Result.002 file - promoters60/1026014
tttataaccat

SEQ ID NO: 100343 - DNA, 11 bp, Unknown
  misc_feature (1)..( 11): Result.002 file - promoters60/1026014
tttataacaaa

SEQ ID NO: 100344 - DNA, 11 bp, Unknown
  misc_feature (1)..( 11): Result.002 file - promoters60/1026014
attagaactaa

SEQ ID NO: 100345 - DNA, 11 bp, Unknown
  misc_feature (1)..( 11): Result.002 file - promoters60/1026014
tcaataataaa

SEQ ID NO: 100346 - DNA, 9 bp, Unknown
  misc_feature (1)..( 9): Result.002 file - promoters60/1026014
taaaaaaaa

SEQ ID NO: 100347 - DNA, 9 bp, Unknown
  misc_feature (1)..( 9): Result.002 file - promoters60/1026014
caaaataaa

SEQ ID NO: 100348 - DNA, 9 bp, Unknown
  misc_feature (1)..( 9): Result.002 file - promoters60/1026014
taaaaaaac

SEQ ID NO: 100349 - DNA, 9 bp, Unknown
  misc_feature (1)..( 9): Result.002 file - promoters60/1026014
aaaaagaac

SEQ ID NO: 100350 - DNA, 13 bp, Unknown
  misc_feature (1)..( 13): Result.002 file - promoters60/1026014
actttcataaatc

SEQ ID NO: 100351 - DNA, 13 bp, Unknown
  misc_feature (1)..( 13): Result.002 file - promoters60/1026014
gattttataatat

SEQ ID NO: 100352 - DNA, 13 bp, Unknown
  misc_feature (1)..( 13): Result.002 file - promoters60/1026014
tattttataggtc

SEQ ID NO: 100353 - DNA, 13 bp, Unknown
  misc_feature (1)..( 13): Result.002 file - promoters60/1026014
gatattacagttt

SEQ ID NO: 100354 - DNA, 13 bp, Unknown
  misc_feature (1)..( 13): Result.002 file - promoters60/1026014
ggatttctaataa

SEQ ID NO: 100355 - DNA, 13 bp, Unknown
  misc_feature (1)..( 13): Result.002 file - promoters60/1026014
attcgtaaaaatt

SEQ ID NO: 100356 - DNA, 10 bp, Unknown
  misc_feature (1)..( 10): Result.002 file - promoters60/1026014
ttttatgtta

SEQ ID NO: 100357 - DNA, 10 bp, Unknown
  misc_feature (1)..( 10): Result.002 file - promoters60/1026014
atttatatta

SEQ ID NO: 100358 - DNA, 10 bp, Unknown
  misc_feature (1)..( 10): Result.002 file - promoters60/1026014
ttttatttgc

SEQ ID NO: 100359 - DNA, 10 bp, Unknown
  misc_feature (1)..( 10): Result.002 file - promoters60/1026014
atttgtttga

SEQ ID NO: 100360 - DNA, 14 bp, Unknown
  misc_feature (1)..( 14): Result.002 file - promoters60/1026014
ttttactttgataa

SEQ ID NO: 100361 - DNA, 14 bp, Unknown
  misc_feature (1)..( 14): Result.002 file - promoters60/1026014
acttattttatgaa

SEQ ID NO: 100362 - DNA, 14 bp, Unknown
  misc_feature (1)..( 14): Result.002 file - promoters60/1026014
aattattttaattt

SEQ ID NO: 100363 - DNA, 14 bp, Unknown
  misc_feature (1)..( 14): Result.002 file - promoters60/1026014
aatcattatctttc

SEQ ID NO: 100364 - DNA, 14 bp, Unknown
  misc_feature (1)..( 14): Result.002 file - promoters60/1026014
aactaatttagcgt

SEQ ID NO: 100365 - DNA, 9 bp, Unknown
  misc_feature (1)..( 9): Result.002 file - promoters60/1026014
acaatattt

SEQ ID NO: 100366 - DNA, 9 bp, Unknown
  misc_feature (1)..( 9): Result.002 file - promoters60/1026014
acaaaattg

SEQ ID NO: 100367 - DNA, 9 bp, Unknown
  misc_feature (1)..( 9): Result.002 file - promoters60/1026014
acaaaatta

SEQ ID NO: 100368 - DNA, 9 bp, Unknown
  misc_feature (1)..( 9): Result.002 file - promoters60/1026014
agcaaattg

SEQ ID NO: 100369 - DNA, 12 bp, Unknown
  misc_feature (1)..( 12): Result.002 file - promoters60/1026014
acagaaaaaaga

SEQ ID NO: 100370 - DNA, 12 bp, Unknown
  misc_feature (1)..( 12): Result.002 file - promoters60/1026014
gaagaaaaaaaa

SEQ ID NO: 100371 - DNA, 12 bp, Unknown
  misc_feature (1)..( 12): Result.002 file - promoters60/1026014
aaataaaaattg

SEQ ID NO: 100372 - DNA, 12 bp, Unknown
  misc_feature (1)..( 12): Result.002 file - promoters60/1026014
cattaataatcc

SEQ ID NO: 100373 - DNA, 12 bp, Unknown
  misc_feature (1)..( 12): Result.002 file - promoters60/1026014
actgattttgga

SEQ ID NO: 100374 - DNA, 12 bp, Unknown
  misc_feature (1)..( 12): Result.002 file - promoters60/1026014
aaagattttata

SEQ ID NO: 100375 - DNA, 12 bp, Unknown
  misc_feature (1)..( 12): Result.002 file - promoters60/1026014
aataattatata

SEQ ID NO: 100376 - DNA, 12 bp, Unknown
  misc_feature (1)..( 12): Result.002 file - promoters60/1026014
ctttattttata

SEQ ID NO: 100377 - DNA, 12 bp, Unknown
  misc_feature (1)..( 12): Result.002 file - promoters60/1026014
aaaaatttacac

SEQ ID NO: 100378 - DNA, 11 bp, Unknown
  misc_feature (1)..( 11): Result.002 file - promoters60/1026014
caaaatcattt

SEQ ID NO: 100379 - DNA, 11 bp, Unknown
  misc_feature (1)..( 11): Result.002 file - promoters60/1026014
aaaaaacattg

SEQ ID NO: 100380 - DNA, 12 bp, Unknown
  misc_feature (1)..( 12): Result.002 file - promoters60/1026014
aaataaaaattg

SEQ ID NO: 100381 - DNA, 12 bp, Unknown
  misc_feature (1)..( 12): Result.002 file - promoters60/1026014
cattaataatcc

SEQ ID NO: 100382 - DNA, 7 bp, Unknown
  misc_feature (1)..( 7): Result.002 file - promoters60/1026039
taacgtt

SEQ ID NO: 100383 - DNA, 7 bp, Unknown
  misc_feature (1)..( 7): Result.002 file - promoters60/1026039
taaggtt

SEQ ID NO: 100384 - DNA, 15 bp, Unknown
  misc_feature (1)..( 15): Result.002 file - promoters60/1026039
aaaagcatacaaata

SEQ ID NO: 100385 - DNA, 15 bp, Unknown
  misc_feature (1)..( 15): Result.002 file - promoters60/1026039
aaaagaatagcttct

SEQ ID NO: 100386 - DNA, 15 bp, Unknown
  misc_feature (1)..( 15): Result.002 file - promoters60/1026039
gaaggcatacagata

SEQ ID NO: 100387 - DNA, 6 bp, Unknown
  misc_feature (1)..( 6): Result.002 file - promoters60/1026039
tcaact

SEQ ID NO: 100388 - DNA, 6 bp, Unknown
  misc_feature (1)..( 6): Result.002 file - promoters60/1026039
tcaact

SEQ ID NO: 100389 - DNA, 7 bp, Unknown
  misc_feature (1)..( 7): Result.002 file - promoters60/1026039
aacttcg

SEQ ID NO: 100390 - DNA, 7 bp, Unknown
  misc_feature (1)..( 7): Result.002 file - promoters60/1026039
aacgtcg

SEQ ID NO: 100391 - DNA, 7 bp, Unknown
  misc_feature (1)..( 7): Result.002 file - promoters60/1026039
ctattat

SEQ ID NO: 100392 - DNA, 7 bp, Unknown
  misc_feature (1)..( 7): Result.002 file - promoters60/1026039
ctagtat

SEQ ID NO: 100393 - DNA, 7 bp, Unknown
  misc_feature (1)..( 7): Result.002 file - promoters60/1026039
ctattac

SEQ ID NO: 100394 - DNA, 8 bp, Unknown
  misc_feature (1)..( 8): Result.002 file - promoters60/1026039
attgtatt

SEQ ID NO: 100395 - DNA, 8 bp, Unknown
  misc_feature (1)..( 8): Result.002 file - promoters60/1026039
attatatt

SEQ ID NO: 100396 - DNA, 9 bp, Unknown
  misc_feature (1)..( 9): Result.002 file - promoters60/1026039
aaatatcaa

SEQ ID NO: 100397 - DNA, 9 bp, Unknown
  misc_feature (1)..( 9): Result.002 file - promoters60/1026039
aaataacaa

SEQ ID NO: 100398 - DNA, 7 bp, Unknown
  misc_feature (1)..( 7): Result.002 file - promoters60/1026039
ttaatca

SEQ ID NO: 100399 - DNA, 7 bp, Unknown
  misc_feature (1)..( 7): Result.002 file - promoters60/1026039
ttattca

SEQ ID NO: 100400 - DNA, 6 bp, Unknown
  misc_feature (1)..( 6): Result.002 file - promoters60/1026039
tttctt

SEQ ID NO: 100401 - DNA, 6 bp, Unknown
  misc_feature (1)..( 6): Result.002 file - promoters60/1026039
tttctt

SEQ ID NO: 100402 - DNA, 6 bp, Unknown
  misc_feature (1)..( 6): Result.002 file - promoters60/1026039
caagaa

SEQ ID NO: 100403 - DNA, 6 bp, Unknown
  misc_feature (1)..( 6): Result.002 file - promoters60/1026039
caagaa

SEQ ID NO: 100404 - DNA, 8 bp, Unknown
  misc_feature (1)..( 8): Result.002 file - promoters60/1026039
acgttatt

SEQ ID NO: 100405 - DNA, 8 bp, Unknown
  misc_feature (1)..( 8): Result.002 file - promoters60/1026039
tggttatt

SEQ ID NO: 100406 - DNA, 8 bp, Unknown
  misc_feature (1)..( 8): Result.002 file - promoters60/1026039
tgggtata

SEQ ID NO: 100407 - DNA, 6 bp, Unknown
  misc_feature (1)..( 6): Result.002 file - promoters60/1026039
ctttgt

SEQ ID NO: 100408 - DNA, 6 bp, Unknown
  misc_feature (1)..( 6): Result.002 file - promoters60/1026039
ctttgt

SEQ ID NO: 100409 - DNA, 7 bp, Unknown
  misc_feature (1)..( 7): Result.002 file - promoters60/1026039
tttcaac

SEQ ID NO: 100410 - DNA, 7 bp, Unknown
  misc_feature (1)..( 7): Result.002 file - promoters60/1026039
ttttaac

SEQ ID NO: 100411 - DNA, 6 bp, Unknown
  misc_feature (1)..( 6): Result.002 file - promoters60/1026039
attaaa

SEQ ID NO: 100412 - DNA, 6 bp, Unknown
  misc_feature (1)..( 6): Result.002 file - promoters60/1026039
attaaa

SEQ ID NO: 100413 - DNA, 7 bp, Unknown
  misc_feature (1)..( 7): Result.002 file - promoters60/1026039
tacgtaa

SEQ ID NO: 100414 - DNA, 7 bp, Unknown
  misc_feature (1)..( 7): Result.002 file - promoters60/1026039
tacataa

SEQ ID NO: 100415 - DNA, 6 bp, Unknown
  misc_feature (1)..( 6): Result.002 file - promoters60/1026039
gtaaaa

SEQ ID NO: 100416 - DNA, 6 bp, Unknown
  misc_feature (1)..( 6): Result.002 file - promoters60/1026039
gtaaaa

SEQ ID NO: 100417 - DNA, 9 bp, Unknown
  misc_feature (1)..( 9): Result.002 file - promoters60/1026039
aaatagtta

SEQ ID NO: 100418 - DNA, 9 bp, Unknown
  misc_feature (1)..( 9): Result.002 file - promoters60/1026039
aaatattta

SEQ ID NO: 100419 - DNA, 8 bp, Unknown
  misc_feature (1)..( 8): Result.002 file - promoters60/1026039
caatactt

SEQ ID NO: 100420 - DNA, 8 bp, Unknown
  misc_feature (1)..( 8): Result.002 file - promoters60/1026039
caaaactt

SEQ ID NO: 100421 - DNA, 6 bp, Unknown
  misc_feature (1)..( 6): Result.002 file - promoters60/1026039
gttcta

SEQ ID NO: 100422 - DNA, 6 bp, Unknown
  misc_feature (1)..( 6): Result.002 file - promoters60/1026039
gttcta

SEQ ID NO: 100423 - DNA, 7 bp, Unknown
  misc_feature (1)..( 7): Result.002 file - promoters60/1026039
atatttt

SEQ ID NO: 100424 - DNA, 7 bp, Unknown
  misc_feature (1)..( 7): Result.002 file - promoters60/1026039
atacttt

SEQ ID NO: 100425 - DNA, 16 bp, Unknown
  misc_feature (1)..( 16): Result.002 file - promoters60/1026160
gatactgcccaaactt

SEQ ID NO: 100426 - DNA, 16 bp, Unknown
  misc_feature (1)..( 16): Result.002 file - promoters60/1026160
aaataggcccaacaaa

SEQ ID NO: 100427 - DNA, 16 bp, Unknown
  misc_feature (1)..( 16): Result.002 file - promoters60/1026160
ctaaaggcccaataac

SEQ ID NO: 100428 - DNA, 16 bp, Unknown
  misc_feature (1)..( 16): Result.002 file - promoters60/1026160
aaaaaggcccattata

SEQ ID NO: 100429 - DNA, 16 bp, Unknown
  misc_feature (1)..( 16): Result.002 file - promoters60/1026160
aataaagcccattata

SEQ ID NO: 100430 - DNA, 16 bp, Unknown
  misc_feature (1)..( 16): Result.002 file - promoters60/1026160
ttttttatttaaaaaa

SEQ ID NO: 100431 - DNA, 9 bp, Unknown
  misc_feature (1)..( 9): Result.002 file - promoters60/1026160
catataaag

SEQ ID NO: 100432 - DNA, 9 bp, Unknown
  misc_feature (1)..( 9): Result.002 file - promoters60/1026160
aataaaaag

SEQ ID NO: 100433 - DNA, 9 bp, Unknown
  misc_feature (1)..( 9): Result.002 file - promoters60/1026160
tttataaaa

SEQ ID NO: 100434 - DNA, 9 bp, Unknown
  misc_feature (1)..( 9): Result.002 file - promoters60/1026160
tatataaaa

SEQ ID NO: 100435 - DNA, 10 bp, Unknown
  misc_feature (1)..( 10): Result.002 file - promoters60/1026160
actattaaag

SEQ ID NO: 100436 - DNA, 10 bp, Unknown
  misc_feature (1)..( 10): Result.002 file - promoters60/1026160
cactataaaa

SEQ ID NO: 100437 - DNA, 10 bp, Unknown
  misc_feature (1)..( 10): Result.002 file - promoters60/1026160
cactatataa

SEQ ID NO: 100438 - DNA, 6 bp, Unknown
  misc_feature (1)..( 6): Result.002 file - promoters60/1026353
ttttag

SEQ ID NO: 100439 - DNA, 6 bp, Unknown
  misc_feature (1)..( 6): Result.002 file - promoters60/1026353
ttttag

SEQ ID NO: 100440 - DNA, 6 bp, Unknown
  misc_feature (1)..( 6): Result.002 file - promoters60/1026353
agtttt

SEQ ID NO: 100441 - DNA, 6 bp, Unknown
  misc_feature (1)..( 6): Result.002 file - promoters60/1026353
agtttt

SEQ ID NO: 100442 - DNA, 10 bp, Unknown
  misc_feature (1)..( 10): Result.002 file - promoters60/1026353
ttataattta

SEQ ID NO: 100443 - DNA, 10 bp, Unknown
  misc_feature (1)..( 10): Result.002 file - promoters60/1026353
ttatatttta

SEQ ID NO: 100444 - DNA, 10 bp, Unknown
  misc_feature (1)..( 10): Result.002 file - promoters60/1026353
atgctttata

SEQ ID NO: 100445 - DNA, 10 bp, Unknown
  misc_feature (1)..( 10): Result.002 file - promoters60/1026353
atgcattata

SEQ ID NO: 100446 - DNA, 7 bp, Unknown
  misc_feature (1)..( 7): Result.002 file - promoters60/1026353
tagtatt

SEQ ID NO: 100447 - DNA, 7 bp, Unknown
  misc_feature (1)..( 7): Result.002 file - promoters60/1026353
taggatt

SEQ ID NO: 100448 - DNA, 7 bp, Unknown
  misc_feature (1)..( 7): Result.002 file - promoters60/1026353
caaatca

SEQ ID NO: 100449 - DNA, 7 bp, Unknown
  misc_feature (1)..( 7): Result.002 file - promoters60/1026353
caagtca

SEQ ID NO: 100450 - DNA, 12 bp, Unknown
  misc_feature (1)..( 12): Result.002 file - promoters60/1026353
ttccactatgtt

SEQ ID NO: 100451 - DNA, 12 bp, Unknown
  misc_feature (1)..( 12): Result.002 file - promoters60/1026353
ttccactgtgtt

SEQ ID NO: 100452 - DNA, 6 bp, Unknown
  misc_feature (1)..( 6): Result.002 file - promoters60/1026353
gataat

SEQ ID NO: 100453 - DNA, 6 bp, Unknown
  misc_feature (1)..( 6): Result.002 file - promoters60/1026353
gataat

SEQ ID NO: 100454 - DNA, 8 bp, Unknown
  misc_feature (1)..( 8): Result.002 file - promoters60/1026353
aagtgaaa

SEQ ID NO: 100455 - DNA, 8 bp, Unknown
  misc_feature (1)..( 8): Result.002 file - promoters60/1026353
aagagaaa

SEQ ID NO: 100456 - DNA, 8 bp, Unknown
  misc_feature (1)..( 8): Result.002 file - promoters60/1026353
ttttttgt

SEQ ID NO: 100457 - DNA, 8 bp, Unknown
  misc_feature (1)..( 8): Result.002 file - promoters60/1026353
tttgttgt

SEQ ID NO: 100458 - DNA, 7 bp, Unknown
  misc_feature (1)..( 7): Result.002 file - promoters60/1026353
tagtagc

SEQ ID NO: 100459 - DNA, 7 bp, Unknown
  misc_feature (1)..( 7): Result.002 file - promoters60/1026353
tagaagc

SEQ ID NO: 100460 - DNA, 8 bp, Unknown
  misc_feature (1)..( 8): Result.002 file - promoters60/1026353
gactaaat

SEQ ID NO: 100461 - DNA, 8 bp, Unknown
  misc_feature (1)..( 8): Result.002 file - promoters60/1026353
gacttaat

SEQ ID NO: 100462 - DNA, 7 bp, Unknown
  misc_feature (1)..( 7): Result.002 file - promoters60/1026353
ttttggt

SEQ ID NO: 100463 - DNA, 7 bp, Unknown
  misc_feature (1)..( 7): Result.002 file - promoters60/1026353
tttaggt

SEQ ID NO: 100464 - DNA, 8 bp, Unknown
  misc_feature (1)..( 8): Result.002 file - promoters60/1026353
cctcgttt

SEQ ID NO: 100465 - DNA, 8 bp, Unknown
  misc_feature (1)..( 8): Result.002 file - promoters60/1026353
cctctttt

SEQ ID NO: 100466 - DNA, 8 bp, Unknown
  misc_feature (1)..( 8): Result.002 file - promoters60/1026353
attcggaa

SEQ ID NO: 100467 - DNA, 8 bp, Unknown
  misc_feature (1)..( 8): Result.002 file - promoters60/1026353
attccgaa

SEQ ID NO: 100468 - DNA, 10 bp, Unknown
  misc_feature (1)..( 10): Result.002 file - promoters60/1026412
tttctttatg

SEQ ID NO: 100469 - DNA, 10 bp, Unknown
  misc_feature (1)..( 10): Result.002 file - promoters60/1026412
tttttttata

SEQ ID NO: 100470 - DNA, 10 bp, Unknown
  misc_feature (1)..( 10): Result.002 file - promoters60/1026412
atttgttata

SEQ ID NO: 100471 - DNA, 10 bp, Unknown
  misc_feature (1)..( 10): Result.002 file - promoters60/1026412
ttttgttgtg

SEQ ID NO: 100472 - DNA, 12 bp, Unknown
  misc_feature (1)..( 12): Result.002 file - promoters60/1026412
aaaattgtgcag

SEQ ID NO: 100473 - DNA, 12 bp, Unknown
  misc_feature (1)..( 12): Result.002 file - promoters60/1026412
aaatttgttata

SEQ ID NO: 100474 - DNA, 12 bp, Unknown
  misc_feature (1)..( 12): Result.002 file - promoters60/1026412
agtttttttata

SEQ ID NO: 100475 - DNA, 12 bp, Unknown
  misc_feature (1)..( 12): Result.002 file - promoters60/1026412
tattttgttgtg

SEQ ID NO: 100476 - DNA, 7 bp, Unknown
  misc_feature (1)..( 7): Result.002 file - promoters60/1026419
aatgttt

SEQ ID NO: 100477 - DNA, 7 bp, Unknown
  misc_feature (1)..( 7): Result.002 file - promoters60/1026419
aatcttt

SEQ ID NO: 100478 - DNA, 10 bp, Unknown
  misc_feature (1)..( 10): Result.002 file - promoters60/1026419
gaaacaagta

SEQ ID NO: 100479 - DNA, 10 bp, Unknown
  misc_feature (1)..( 10): Result.002 file - promoters60/1026419
aaaataagta

SEQ ID NO: 100480 - DNA, 10 bp, Unknown
  misc_feature (1)..( 10): Result.002 file - promoters60/1026419
gaaagaagta

SEQ ID NO: 100481 - DNA, 6 bp, Unknown
  misc_feature (1)..( 6): Result.002 file - promoters60/1026419
tttatc

SEQ ID NO: 100482 - DNA, 6 bp, Unknown
  misc_feature (1)..( 6): Result.002 file - promoters60/1026419
tttatc

SEQ ID NO: 100483 - DNA, 7 bp, Unknown
  misc_feature (1)..( 7): Result.002 file - promoters60/1026419
atcgttt

SEQ ID NO: 100484 - DNA, 7 bp, Unknown
  misc_feature (1)..( 7): Result.002 file - promoters60/1026419
atcattt

SEQ ID NO: 100485 - DNA, 6 bp, Unknown
  misc_feature (1)..( 6): Result.002 file - promoters60/1026419
gcatgg

SEQ ID NO: 100486 - DNA, 6 bp, Unknown
  misc_feature (1)..( 6): Result.002 file - promoters60/1026419
gcatgg

SEQ ID NO: 100487 - DNA, 6 bp, Unknown
  misc_feature (1)..( 6): Result.002 file - promoters60/1026419
aacaaa

SEQ ID NO: 100488 - DNA, 6 bp, Unknown
  misc_feature (1)..( 6): Result.002 file - promoters60/1026419
aacaaa

SEQ ID NO: 100489 - DNA, 8 bp, Unknown
  misc_feature (1)..( 8): Result.002 file - promoters60/1026419
gaagtgag

SEQ ID NO: 100490 - DNA, 8 bp, Unknown
  misc_feature (1)..( 8): Result.002 file - promoters60/1026419
gaagagag

SEQ ID NO: 100491 - DNA, 7 bp, Unknown
  misc_feature (1)..( 7): Result.002 file - promoters60/1026419
ggttaat

SEQ ID NO: 100492 - DNA, 7 bp, Unknown
  misc_feature (1)..( 7): Result.002 file - promoters60/1026419
ggtgaat

SEQ ID NO: 100493 - DNA, 6 bp, Unknown
  misc_feature (1)..( 6): Result.002 file - promoters60/1026419
ttgggt

SEQ ID NO: 100494 - DNA, 6 bp, Unknown
  misc_feature (1)..( 6): Result.002 file - promoters60/1026419
ttgggt

SEQ ID NO: 100495 - DNA, 6 bp, Unknown
  misc_feature (1)..( 6): Result.002 file - promoters60/1026419
ataaaa

SEQ ID NO: 100496 - DNA, 6 bp, Unknown
  misc_feature (1)..( 6): Result.002 file - promoters60/1026419
ataaaa

SEQ ID NO: 100497 - DNA, 6 bp, Unknown
  misc_feature (1)..( 6): Result.002 file - promoters60/1026419
aagaaa

SEQ ID NO: 100498 - DNA, 6 bp, Unknown
  misc_feature (1)..( 6): Result.002 file - promoters60/1026419
aagaaa

SEQ ID NO: 100499 - DNA, 6 bp, Unknown
  misc_feature (1)..( 6): Result.002 file - promoters60/1026419
cacatg

SEQ ID NO: 100500 - DNA, 6 bp, Unknown
  misc_feature (1)..( 6): Result.002 file - promoters60/1026419
cacatg

SEQ ID NO: 100501 - DNA, 9 bp, Unknown
  misc_feature (1)..( 9): Result.002 file - promoters60/1026514
ggttttgct

SEQ ID NO: 100502 - DNA, 9 bp, Unknown
  misc_feature (1)..( 9): Result.002 file - promoters60/1026514
tcttttgct

SEQ ID NO: 100503 - DNA, 9 bp, Unknown
  misc_feature (1)..( 9): Result.002 file - promoters60/1026514
ggttttgta

SEQ ID NO: 100504 - DNA, 7 bp, Unknown
  misc_feature (1)..( 7): Result.002 file - promoters60/1026514
aagaagt

SEQ ID NO: 100505 - DNA, 7 bp, Unknown
  misc_feature (1)..( 7): Result.002 file - promoters60/1026514
aagaagt

SEQ ID NO: 100506 - DNA, 7 bp, Unknown
  misc_feature (1)..( 7): Result.002 file - promoters60/1026514
aactttt

SEQ ID NO: 100507 - DNA, 7 bp, Unknown
  misc_feature (1)..( 7): Result.002 file - promoters60/1026514
aactttt

SEQ ID NO: 100508 - DNA, 10 bp, Unknown
  misc_feature (1)..( 10): Result.002 file - promoters60/1026514
gttcaattgt

SEQ ID NO: 100509 - DNA, 10 bp, Unknown
  misc_feature (1)..( 10): Result.002 file - promoters60/1026514
gttgaataat

SEQ ID NO: 100510 - DNA, 10 bp, Unknown
  misc_feature (1)..( 10): Result.002 file - promoters60/1026514
actaaattga

SEQ ID NO: 100511 - DNA, 6 bp, Unknown
  misc_feature (1)..( 6): Result.002 file - promoters60/1026514
taaaat

SEQ ID NO: 100512 - DNA, 6 bp, Unknown
  misc_feature (1)..( 6): Result.002 file - promoters60/1026514
taaaat

SEQ ID NO: 100513 - DNA, 10 bp, Unknown
  misc_feature (1)..( 10): Result.002 file - promoters60/1026514
ttaaaaaaaa

SEQ ID NO: 100514 - DNA, 10 bp, Unknown
  misc_feature (1)..( 10): Result.002 file - promoters60/1026514
ataaaaaaaa

SEQ ID NO: 100515 - DNA, 10 bp, Unknown
  misc_feature (1)..( 10): Result.002 file - promoters60/1026514
ttaaacaaag

SEQ ID NO: 100516 - DNA, 6 bp, Unknown
  misc_feature (1)..( 6): Result.002 file - promoters60/1026514
gaaaaa

SEQ ID NO: 100517 - DNA, 6 bp, Unknown
  misc_feature (1)..( 6): Result.002 file - promoters60/1026514
gaaaaa

SEQ ID NO: 100518 - DNA, 6 bp, Unknown
  misc_feature (1)..( 6): Result.002 file - promoters60/1026514
aataat

SEQ ID NO: 100519 - DNA, 6 bp, Unknown
  misc_feature (1)..( 6): Result.002 file - promoters60/1026514
aataat

SEQ ID NO: 100520 - DNA, 8 bp, Unknown
  misc_feature (1)..( 8): Result.002 file - promoters60/1026514
gccactac

SEQ ID NO: 100521 - DNA, 8 bp, Unknown
  misc_feature (1)..( 8): Result.002 file - promoters60/1026514
gcctctac

SEQ ID NO: 100522 - DNA, 7 bp, Unknown
  misc_feature (1)..( 7): Result.002 file - promoters60/1026514
acttttc

SEQ ID NO: 100523 - DNA, 7 bp, Unknown
  misc_feature (1)..( 7): Result.002 file - promoters60/1026514
actgttc

SEQ ID NO: 100524 - DNA, 6 bp, Unknown
  misc_feature (1)..( 6): Result.002 file - promoters60/1026514
actcaa

SEQ ID NO: 100525 - DNA, 6 bp, Unknown
  misc_feature (1)..( 6): Result.002 file - promoters60/1026514
actcaa

SEQ ID NO: 100526 - DNA, 7 bp, Unknown
  misc_feature (1)..( 7): Result.002 file - promoters60/1026514
aaagtaa

SEQ ID NO: 100527 - DNA, 7 bp, Unknown
  misc_feature (1)..( 7): Result.002 file - promoters60/1026514
aaattaa

SEQ ID NO: 100528 - DNA, 8 bp, Unknown
  misc_feature (1)..( 8): Result.002 file - promoters60/1026514
ctcattta

SEQ ID NO: 100529 - DNA, 8 bp, Unknown
  misc_feature (1)..( 8): Result.002 file - promoters60/1026514
ctcaatta

SEQ ID NO: 100530 - DNA, 7 bp, Unknown
  misc_feature (1)..( 7): Result.002 file - promoters60/1026514
tatttgt

SEQ ID NO: 100531 - DNA, 7 bp, Unknown
  misc_feature (1)..( 7): Result.002 file - promoters60/1026514
tatttgt

SEQ ID NO: 100532 - DNA, 9 bp, Unknown
  misc_feature (1)..( 9): Result.002 file - promoters60/1026514
taatgtatt

SEQ ID NO: 100533 - DNA, 9 bp, Unknown
  misc_feature (1)..( 9): Result.002 file - promoters60/1026514
taatctatt

SEQ ID NO: 100534 - DNA, 6 bp, Unknown
  misc_feature (1)..( 6): Result.002 file - promoters60/1026514
atgacc

SEQ ID NO: 100535 - DNA, 6 bp, Unknown
  misc_feature (1)..( 6): Result.002 file - promoters60/1026514
atgacc

SEQ ID NO: 100536 - DNA, 7 bp, Unknown
  misc_feature (1)..( 7): Result.002 file - promoters60/1026514
cataaaa

SEQ ID NO: 100537 - DNA, 7 bp, Unknown
  misc_feature (1)..( 7): Result.002 file - promoters60/1026514
catcaaa

SEQ ID NO: 100538 - DNA, 11 bp, Unknown
  misc_feature (1)..( 11): Result.002 file - promoters60/1026514
tttgaggcctt

SEQ ID NO: 100539 - DNA, 11 bp, Unknown
  misc_feature (1)..( 11): Result.002 file - promoters60/1026514
tttgcggcctt

SEQ ID NO: 100540 - DNA, 7 bp, Unknown
  misc_feature (1)..( 7): Result.002 file - promoters60/1026514
tttgctt

SEQ ID NO: 100541 - DNA, 7 bp, Unknown
  misc_feature (1)..( 7): Result.002 file - promoters60/1026514
ttttctt

SEQ ID NO: 100542 - DNA, 10 bp, Unknown
  misc_feature (1)..( 10): Result.002 file - promoters60/1026551
taaatcaata

SEQ ID NO: 100543 - DNA, 10 bp, Unknown
  misc_feature (1)..( 10): Result.002 file - promoters60/1026551
taaattaata

SEQ ID NO: 100544 - DNA, 10 bp, Unknown
  misc_feature (1)..( 10): Result.002 file - promoters60/1026551
taagttaaga

SEQ ID NO: 100545 - DNA, 10 bp, Unknown
  misc_feature (1)..( 10): Result.002 file - promoters60/1026551
tcaatatata

SEQ ID NO: 100546 - DNA, 10 bp, Unknown
  misc_feature (1)..( 10): Result.002 file - promoters60/1026551
ttaatttata

SEQ ID NO: 100547 - DNA, 10 bp, Unknown
  misc_feature (1)..( 10): Result.002 file - promoters60/1026551
cccatatatg

SEQ ID NO: 100548 - DNA, 10 bp, Unknown
  misc_feature (1)..( 10): Result.002 file - promoters60/1026551
ttaagttaag

SEQ ID NO: 100549 - DNA, 11 bp, Unknown
  misc_feature (1)..( 11): Result.002 file - promoters60/1026551
gcatatacctt

SEQ ID NO: 100550 - DNA, 11 bp, Unknown
  misc_feature (1)..( 11): Result.002 file - promoters60/1026551
aagtataactt

SEQ ID NO: 100551 - DNA, 11 bp, Unknown
  misc_feature (1)..( 11): Result.002 file - promoters60/1026551
aagtttaaaat

SEQ ID NO: 100552 - DNA, 11 bp, Unknown
  misc_feature (1)..( 11): Result.002 file - promoters60/1026551
tggtttaaaaa

SEQ ID NO: 100553 - DNA, 8 bp, Unknown
  misc_feature (1)..( 8): Result.002 file - promoters60/1026551
ttaccaat

SEQ ID NO: 100554 - DNA, 8 bp, Unknown
  misc_feature (1)..( 8): Result.002 file - promoters60/1026551
ttatcaat

SEQ ID NO: 100555 - DNA, 8 bp, Unknown
  misc_feature (1)..( 8): Result.002 file - promoters60/1026551
atatcaat

SEQ ID NO: 100556 - DNA, 7 bp, Unknown
  misc_feature (1)..( 7): Result.002 file - promoters60/1026551
aaatatt

SEQ ID NO: 100557 - DNA, 7 bp, Unknown
  misc_feature (1)..( 7): Result.002 file - promoters60/1026551
aaatatg

SEQ ID NO: 100558 - DNA, 7 bp, Unknown
  misc_feature (1)..( 7): Result.002 file - promoters60/1026551
aaaaatg

SEQ ID NO: 100559 - DNA, 15 bp, Unknown
  misc_feature (1)..( 15): Result.002 file - promoters60/1026551
aaggatgatggacca

SEQ ID NO: 100560 - DNA, 15 bp, Unknown
  misc_feature (1)..( 15): Result.002 file - promoters60/1026551
aaggatgatggacca

SEQ ID NO: 100561 - DNA, 15 bp, Unknown
  misc_feature (1)..( 15): Result.002 file - promoters60/1026551
aaggatgctgtgcca

SEQ ID NO: 100562 - DNA, 21 bp, Unknown
  misc_feature (1)..( 21): Result.002 file - promoters60/1026551
tacacattaataacgtggtcc

SEQ ID NO: 100563 - DNA, 21 bp, Unknown
  misc_feature (1)..( 21): Result.002 file - promoters60/1026551
tacacattaataacgtggtcg

SEQ ID NO: 100564 - DNA, 21 bp, Unknown
  misc_feature (1)..( 21): Result.002 file - promoters60/1026551
cccacgtaaataacgtggtcc

SEQ ID NO: 100565 - DNA, 41 bp, Unknown
  misc_feature (1)..( 41): Result.002 file - promoters60/1026551
attttatcaaataaagaaaataaatttctatgacccaataa

SEQ ID NO: 100566 - DNA, 41 bp, Unknown
  misc_feature (1)..( 41): Result.002 file - promoters60/1026551
cgtttaccaaatcaagaaaatacatttctatgatccactaa

SEQ ID NO: 100567 - DNA, 41 bp, Unknown
  misc_feature (1)..( 41): Result.002 file - promoters60/1026551
attttgtcaaacctatccttatcttaataacaaacaaaata

SEQ ID NO: 100568 - DNA, 41 bp, Unknown
  misc_feature (1)..( 41): Result.002 file - promoters60/1026551
acgtggtccaacattaaatataacaatttaattgaaagctc

SEQ ID NO: 100569 - DNA, 7 bp, Unknown
  misc_feature (1)..( 7): Result.002 file - promoters60/1026551
ttacttt

SEQ ID NO: 100570 - DNA, 7 bp, Unknown
  misc_feature (1)..( 7): Result.002 file - promoters60/1026551
ttagttt

SEQ ID NO: 100571 - DNA, 7 bp, Unknown
  misc_feature (1)..( 7): Result.002 file - promoters60/1026551
ttaattt

SEQ ID NO: 100572 - DNA, 11 bp, Unknown
  misc_feature (1)..( 11): Result.002 file - promoters60/1026551
taaattttacg

SEQ ID NO: 100573 - DNA, 11 bp, Unknown
  misc_feature (1)..( 11): Result.002 file - promoters60/1026551
attattttata

SEQ ID NO: 100574 - DNA, 11 bp, Unknown
  misc_feature (1)..( 11): Result.002 file - promoters60/1026551
acgattatata

SEQ ID NO: 100575 - DNA, 11 bp, Unknown
  misc_feature (1)..( 11): Result.002 file - promoters60/1026551
attgttttaaa

SEQ ID NO: 100576 - DNA, 7 bp, Unknown
  misc_feature (1)..( 7): Result.002 file - promoters60/1026551
tttcatg

SEQ ID NO: 100577 - DNA, 7 bp, Unknown
  misc_feature (1)..( 7): Result.002 file - promoters60/1026551
tttgatg

SEQ ID NO: 100578 - DNA, 7 bp, Unknown
  misc_feature (1)..( 7): Result.002 file - promoters60/1026551
tttcatt

SEQ ID NO: 100579 - DNA, 9 bp, Unknown
  misc_feature (1)..( 9): Result.002 file - promoters60/1026551
tatattaat

SEQ ID NO: 100580 - DNA, 9 bp, Unknown
  misc_feature (1)..( 9): Result.002 file - promoters60/1026551
aatatcaat

SEQ ID NO: 100581 - DNA, 9 bp, Unknown
  misc_feature (1)..( 9): Result.002 file - promoters60/1026551
tattttata

SEQ ID NO: 100582 - DNA, 7 bp, Unknown
  misc_feature (1)..( 7): Result.002 file - promoters60/1026551
aatatgt

SEQ ID NO: 100583 - DNA, 7 bp, Unknown
  misc_feature (1)..( 7): Result.002 file - promoters60/1026551
tatatgt

SEQ ID NO: 100584 - DNA, 7 bp, Unknown
  misc_feature (1)..( 7): Result.002 file - promoters60/1026551
tatatgt

SEQ ID NO: 100585 - DNA, 7 bp, Unknown
  misc_feature (1)..( 7): Result.002 file - promoters60/1026562
aattata

SEQ ID NO: 100586 - DNA, 7 bp, Unknown
  misc_feature (1)..( 7): Result.002 file - promoters60/1026562
aataata

SEQ ID NO: 100587 - DNA, 8 bp, Unknown
  misc_feature (1)..( 8): Result.002 file - promoters60/1026562
ttgaagat

SEQ ID NO: 100588 - DNA, 8 bp, Unknown
  misc_feature (1)..( 8): Result.002 file - promoters60/1026562
ttgaggat

SEQ ID NO: 100589 - DNA, 6 bp, Unknown
  misc_feature (1)..( 6): Result.002 file - promoters60/1026562
agatta

SEQ ID NO: 100590 - DNA, 6 bp, Unknown
  misc_feature (1)..( 6): Result.002 file - promoters60/1026562
agatta

SEQ ID NO: 100591 - DNA, 13 bp, Unknown
  misc_feature (1)..( 13): Result.002 file - promoters60/1026562
aacgattttgtcc

SEQ ID NO: 100592 - DNA, 13 bp, Unknown
  misc_feature (1)..( 13): Result.002 file - promoters60/1026562
aacgagtttatcc

SEQ ID NO: 100593 - DNA, 8 bp, Unknown
  misc_feature (1)..( 8): Result.002 file - promoters60/1026562
ttttgtat

SEQ ID NO: 100594 - DNA, 8 bp, Unknown
  misc_feature (1)..( 8): Result.002 file - promoters60/1026562
tttcgtat

SEQ ID NO: 100595 - DNA, 7 bp, Unknown
  misc_feature (1)..( 7): Result.002 file - promoters60/1026562
caaatgg

SEQ ID NO: 100596 - DNA, 7 bp, Unknown
  misc_feature (1)..( 7): Result.002 file - promoters60/1026562
caaatgg

SEQ ID NO: 100597 - DNA, 6 bp, Unknown
  misc_feature (1)..( 6): Result.002 file - promoters60/1026562
ataatt

SEQ ID NO: 100598 - DNA, 6 bp, Unknown
  misc_feature (1)..( 6): Result.002 file - promoters60/1026562
ataatt

SEQ ID NO: 100599 - DNA, 6 bp, Unknown
  misc_feature (1)..( 6): Result.002 file - promoters60/1026562
caatct

SEQ ID NO: 100600 - DNA, 6 bp, Unknown
  misc_feature (1)..( 6): Result.002 file - promoters60/1026562
caatct

SEQ ID NO: 100601 - DNA, 7 bp, Unknown
  misc_feature (1)..( 7): Result.002 file - promoters60/1026562
aaaatct

SEQ ID NO: 100602 - DNA, 7 bp, Unknown
  misc_feature (1)..( 7): Result.002 file - promoters60/1026562
aaagtct

SEQ ID NO: 100603 - DNA, 6 bp, Unknown
  misc_feature (1)..( 6): Result.002 file - promoters60/1026562
caactg

SEQ ID NO: 100604 - DNA, 6 bp, Unknown
  misc_feature (1)..( 6): Result.002 file - promoters60/1026562
caactg

SEQ ID NO: 100605 - DNA, 7 bp, Unknown
  misc_feature (1)..( 7): Result.002 file - promoters60/1026562
aattaat

SEQ ID NO: 100606 - DNA, 7 bp, Unknown
  misc_feature (1)..( 7): Result.002 file - promoters60/1026562
aatcaat

SEQ ID NO: 100607 - DNA, 8 bp, Unknown
  misc_feature (1)..( 8): Result.002 file - promoters60/1026562
gagaaagt

SEQ ID NO: 100608 - DNA, 8 bp, Unknown
  misc_feature (1)..( 8): Result.002 file - promoters60/1026562
gagaaagt

SEQ ID NO: 100609 - DNA, 7 bp, Unknown
  misc_feature (1)..( 7): Result.002 file - promoters60/1026562
ttatcta

SEQ ID NO: 100610 - DNA, 7 bp, Unknown
  misc_feature (1)..( 7): Result.002 file - promoters60/1026562
ttatcta

SEQ ID NO: 100611 - DNA, 6 bp, Unknown
  misc_feature (1)..( 6): Result.002 file - promoters60/1026562
tgtttc

SEQ ID NO: 100612 - DNA, 6 bp, Unknown
  misc_feature (1)..( 6): Result.002 file - promoters60/1026562
tgtttc

SEQ ID NO: 100613 - DNA, 7 bp, Unknown
  misc_feature (1)..( 7): Result.002 file - promoters60/1026565
gttgaga

SEQ ID NO: 100614 - DNA, 7 bp, Unknown
  misc_feature (1)..( 7): Result.002 file - promoters60/1026565
gttcaga

SEQ ID NO: 100615 - DNA, 8 bp, Unknown
  misc_feature (1)..( 8): Result.002 file - promoters60/1026565
tttttttg

SEQ ID NO: 100616 - DNA, 8 bp, Unknown
  misc_feature (1)..( 8): Result.002 file - promoters60/1026565
ttttattg

SEQ ID NO: 100617 - DNA, 6 bp, Unknown
  misc_feature (1)..( 6): Result.002 file - promoters60/1026565
ttactt

SEQ ID NO: 100618 - DNA, 6 bp, Unknown
  misc_feature (1)..( 6): Result.002 file - promoters60/1026565
ttactt

SEQ ID NO: 100619 - DNA, 11 bp, Unknown
  misc_feature (1)..( 11): Result.002 file - promoters60/1026565
aagacagaaca

SEQ ID NO: 100620 - DNA, 11 bp, Unknown
  misc_feature (1)..( 11): Result.002 file - promoters60/1026565
aagacagaaca

SEQ ID NO: 100621 - DNA, 7 bp, Unknown
  misc_feature (1)..( 7): Result.002 file - promoters60/1026565
acaaaaa

SEQ ID NO: 100622 - DNA, 7 bp, Unknown
  misc_feature (1)..( 7): Result.002 file - promoters60/1026565
acataaa

SEQ ID NO: 100623 - DNA, 9 bp, Unknown
  misc_feature (1)..( 9): Result.002 file - promoters60/1026565
aagacgaca

SEQ ID NO: 100624 - DNA, 9 bp, Unknown
  misc_feature (1)..( 9): Result.002 file - promoters60/1026565
aagaagaca

SEQ ID NO: 100625 - DNA, 7 bp, Unknown
  misc_feature (1)..( 7): Result.002 file - promoters60/1026565
atttata

SEQ ID NO: 100626 - DNA, 7 bp, Unknown
  misc_feature (1)..( 7): Result.002 file - promoters60/1026565
atttata

SEQ ID NO: 100627 - DNA, 10 bp, Unknown
  misc_feature (1)..( 10): Result.002 file - promoters60/1026565
aagctctgaa

SEQ ID NO: 100628 - DNA, 10 bp, Unknown
  misc_feature (1)..( 10): Result.002 file - promoters60/1026565
aagctgtgaa

SEQ ID NO: 100629 - DNA, 7 bp, Unknown
  misc_feature (1)..( 7): Result.002 file - promoters60/1026565
ttttgat

SEQ ID NO: 100630 - DNA, 7 bp, Unknown
  misc_feature (1)..( 7): Result.002 file - promoters60/1026565
tttggat

SEQ ID NO: 100631 - DNA, 9 bp, Unknown
  misc_feature (1)..( 9): Result.002 file - promoters60/1026565
agacagaac

SEQ ID NO: 100632 - DNA, 9 bp, Unknown
  misc_feature (1)..( 9): Result.002 file - promoters60/1026565
agacaaaac

SEQ ID NO: 100633 - DNA, 6 bp, Unknown
  misc_feature (1)..( 6): Result.002 file - promoters60/1026565
aaaaag

SEQ ID NO: 100634 - DNA, 6 bp, Unknown
  misc_feature (1)..( 6): Result.002 file - promoters60/1026565
aaaaag

SEQ ID NO: 100635 - DNA, 7 bp, Unknown
  misc_feature (1)..( 7): Result.002 file - promoters60/1026565
tgatgaa

SEQ ID NO: 100636 - DNA, 7 bp, Unknown
  misc_feature (1)..( 7): Result.002 file - promoters60/1026565
tgaagaa

SEQ ID NO: 100637 - DNA, 7 bp, Unknown
  misc_feature (1)..( 7): Result.002 file - promoters60/1026565
aactatc

SEQ ID NO: 100638 - DNA, 7 bp, Unknown
  misc_feature (1)..( 7): Result.002 file - promoters60/1026565
aactatc

SEQ ID NO: 100639 - DNA, 8 bp, Unknown
  misc_feature (1)..( 8): Result.002 file - promoters60/1026565
agagatga

SEQ ID NO: 100640 - DNA, 8 bp, Unknown
  misc_feature (1)..( 8): Result.002 file - promoters60/1026565
agacatga

SEQ ID NO: 100641 - DNA, 6 bp, Unknown
  misc_feature (1)..( 6): Result.002 file - promoters60/1026565
actttt

SEQ ID NO: 100642 - DNA, 6 bp, Unknown
  misc_feature (1)..( 6): Result.002 file - promoters60/1026565
actttt

SEQ ID NO: 100643 - DNA, 7 bp, Unknown
  misc_feature (1)..( 7): Result.002 file - promoters60/1026565
tttgatt

SEQ ID NO: 100644 - DNA, 7 bp, Unknown
  misc_feature (1)..( 7): Result.002 file - promoters60/1026565
ttttatt

SEQ ID NO: 100645 - DNA, 6 bp, Unknown
  misc_feature (1)..( 6): Result.002 file - promoters60/1026565
acaaaa

SEQ ID NO: 100646 - DNA, 6 bp, Unknown
  misc_feature (1)..( 6): Result.002 file - promoters60/1026565
acaaaa

SEQ ID NO: 100647 - DNA, 9 bp, Unknown
  misc_feature (1)..( 9): Result.002 file - promoters60/1026578
gttgtttaa

SEQ ID NO: 100648 - DNA, 9 bp, Unknown
  misc_feature (1)..( 9): Result.002 file - promoters60/1026578
attgttttc

SEQ ID NO: 100649 - DNA, 9 bp, Unknown
  misc_feature (1)..( 9): Result.002 file - promoters60/1026578
atttttttc

SEQ ID NO: 100650 - DNA, 8 bp, Unknown
  misc_feature (1)..( 8): Result.002 file - promoters60/1026578
taaaagta

SEQ ID NO: 100651 - DNA, 8 bp, Unknown
  misc_feature (1)..( 8): Result.002 file - promoters60/1026578
taaaagat

SEQ ID NO: 100652 - DNA, 8 bp, Unknown
  misc_feature (1)..( 8): Result.002 file - promoters60/1026578
taagagag

SEQ ID NO: 100653 - DNA, 8 bp, Unknown
  misc_feature (1)..( 8): Result.002 file - promoters60/1026578
aaaaagat

SEQ ID NO: 100654 - DNA, 7 bp, Unknown
  misc_feature (1)..( 7): Result.002 file - promoters60/1026578
aaaattt

SEQ ID NO: 100655 - DNA, 7 bp, Unknown
  misc_feature (1)..( 7): Result.002 file - promoters60/1026578
taaattt

SEQ ID NO: 100656 - DNA, 7 bp, Unknown
  misc_feature (1)..( 7): Result.002 file - promoters60/1026578
taaattc

SEQ ID NO: 100657 - DNA, 10 bp, Unknown
  misc_feature (1)..( 10): Result.002 file - promoters60/1026618
taataagtat

SEQ ID NO: 100658 - DNA, 10 bp, Unknown
  misc_feature (1)..( 10): Result.002 file - promoters60/1026618
aaataattat

SEQ ID NO: 100659 - DNA, 10 bp, Unknown
  misc_feature (1)..( 10): Result.002 file - promoters60/1026618
gaattagtat

SEQ ID NO: 100660 - DNA, 10 bp, Unknown
  misc_feature (1)..( 10): Result.002 file - promoters60/1026618
aaaaaaatgg

SEQ ID NO: 100661 - DNA, 10 bp, Unknown
  misc_feature (1)..( 10): Result.002 file - promoters60/1026618
aaaaaaatca

SEQ ID NO: 100662 - DNA, 10 bp, Unknown
  misc_feature (1)..( 10): Result.002 file - promoters60/1026618
tcattatttg

SEQ ID NO: 100663 - DNA, 13 bp, Unknown
  misc_feature (1)..( 13): Result.002 file - promoters60/1026618
acgattataaaca

SEQ ID NO: 100664 - DNA, 13 bp, Unknown
  misc_feature (1)..( 13): Result.002 file - promoters60/1026618
aaatttaaaaagc

SEQ ID NO: 100665 - DNA, 13 bp, Unknown
  misc_feature (1)..( 13): Result.002 file - promoters60/1026618
ctacatataaatg

SEQ ID NO: 100666 - DNA, 13 bp, Unknown
  misc_feature (1)..( 13): Result.002 file - promoters60/1026618
gatcctaaacagc

SEQ ID NO: 100667 - DNA, 13 bp, Unknown
  misc_feature (1)..( 13): Result.002 file - promoters60/1026618
atttagataaatt

SEQ ID NO: 100668 - DNA, 13 bp, Unknown
  misc_feature (1)..( 13): Result.002 file - promoters60/1026618
aaacttaaaagta

SEQ ID NO: 100669 - DNA, 13 bp, Unknown
  misc_feature (1)..( 13): Result.002 file - promoters60/1026618
aattttatatatg

SEQ ID NO: 100670 - DNA, 9 bp, Unknown
  misc_feature (1)..( 9): Result.002 file - promoters60/1026622
aatccaaag

SEQ ID NO: 100671 - DNA, 9 bp, Unknown
  misc_feature (1)..( 9): Result.002 file - promoters60/1026622
aatcgaaat

SEQ ID NO: 100672 - DNA, 9 bp, Unknown
  misc_feature (1)..( 9): Result.002 file - promoters60/1026622
tatccgaag

SEQ ID NO: 100673 - DNA, 9 bp, Unknown
  misc_feature (1)..( 9): Result.002 file - promoters60/1026622
aatcgatag

SEQ ID NO: 100674 - DNA, 9 bp, Unknown
  misc_feature (1)..( 9): Result.002 file - promoters60/1026622
aatagatat

SEQ ID NO: 100675 - DNA, 9 bp, Unknown
  misc_feature (1)..( 9): Result.002 file - promoters60/1026622
ggtccaaag

SEQ ID NO: 100676 - DNA, 11 bp, Unknown
  misc_feature (1)..( 11): Result.002 file - promoters60/1026622
tgatataataa

SEQ ID NO: 100677 - DNA, 11 bp, Unknown
  misc_feature (1)..( 11): Result.002 file - promoters60/1026622
acatataaaat

SEQ ID NO: 100678 - DNA, 11 bp, Unknown
  misc_feature (1)..( 11): Result.002 file - promoters60/1026622
tgatttaataa

SEQ ID NO: 100679 - DNA, 11 bp, Unknown
  misc_feature (1)..( 11): Result.002 file - promoters60/1026622
ctttataaaaa

SEQ ID NO: 100680 - DNA, 11 bp, Unknown
  misc_feature (1)..( 11): Result.002 file - promoters60/1026622
tgattaaattg

SEQ ID NO: 100681 - DNA, 11 bp, Unknown
  misc_feature (1)..( 11): Result.002 file - promoters60/1026622
atatacaaaaa

SEQ ID NO: 100682 - DNA, 15 bp, Unknown
  misc_feature (1)..( 15): Result.002 file - promoters60/1026705
gtgacataccaagaa

SEQ ID NO: 100683 - DNA, 15 bp, Unknown
  misc_feature (1)..( 15): Result.002 file - promoters60/1026705
tgtacataacaaacg

SEQ ID NO: 100684 - DNA, 15 bp, Unknown
  misc_feature (1)..( 15): Result.002 file - promoters60/1026705
gtgaaatagtaaatt

SEQ ID NO: 100685 - DNA, 15 bp, Unknown
  misc_feature (1)..( 15): Result.002 file - promoters60/1026705
tgtgtataaccaacc

SEQ ID NO: 100686 - DNA, 15 bp, Unknown
  misc_feature (1)..( 15): Result.002 file - promoters60/1026705
tcgaaatataaaggc

SEQ ID NO: 100687 - DNA, 15 bp, Unknown
  misc_feature (1)..( 15): Result.002 file - promoters60/1026705
ttcatcaaaccgacc

SEQ ID NO: 100688 - DNA, 9 bp, Unknown
  misc_feature (1)..( 9): Result.002 file - promoters60/1026742
ctcttgctg

SEQ ID NO: 100689 - DNA, 9 bp, Unknown
  misc_feature (1)..( 9): Result.002 file - promoters60/1026742
cccttactg

SEQ ID NO: 100690 - DNA, 9 bp, Unknown
  misc_feature (1)..( 9): Result.002 file - promoters60/1026742
ctctttctg

SEQ ID NO: 100691 - DNA, 8 bp, Unknown
  misc_feature (1)..( 8): Result.002 file - promoters60/1026742
ccgtcaat

SEQ ID NO: 100692 - DNA, 8 bp, Unknown
  misc_feature (1)..( 8): Result.002 file - promoters60/1026742
ttgtcaat

SEQ ID NO: 100693 - DNA, 8 bp, Unknown
  misc_feature (1)..( 8): Result.002 file - promoters60/1026742
ccggcaaa

SEQ ID NO: 100694 - DNA, 6 bp, Unknown
  misc_feature (1)..( 6): Result.002 file - promoters60/1026754
ttgtta

SEQ ID NO: 100695 - DNA, 6 bp, Unknown
  misc_feature (1)..( 6): Result.002 file - promoters60/1026754
ttgtta

SEQ ID NO: 100696 - DNA, 6 bp, Unknown
  misc_feature (1)..( 6): Result.002 file - promoters60/1026754
tggaaa

SEQ ID NO: 100697 - DNA, 6 bp, Unknown
  misc_feature (1)..( 6): Result.002 file - promoters60/1026754
tggaaa

SEQ ID NO: 100698 - DNA, 8 bp, Unknown
  misc_feature (1)..( 8): Result.002 file - promoters60/1026754
ttcattct

SEQ ID NO: 100699 - DNA, 8 bp, Unknown
  misc_feature (1)..( 8): Result.002 file - promoters60/1026754
ttccttct

SEQ ID NO: 100700 - DNA, 9 bp, Unknown
  misc_feature (1)..( 9): Result.002 file - promoters60/1026754
gtttcttac

SEQ ID NO: 100701 - DNA, 9 bp, Unknown
  misc_feature (1)..( 9): Result.002 file - promoters60/1026754
gttttttac

SEQ ID NO: 100702 - DNA, 7 bp, Unknown
  misc_feature (1)..( 7): Result.002 file - promoters60/1026754
ctttctc

SEQ ID NO: 100703 - DNA, 7 bp, Unknown
  misc_feature (1)..( 7): Result.002 file - promoters60/1026754
ctttctc

SEQ ID NO: 100704 - DNA, 6 bp, Unknown
  misc_feature (1)..( 6): Result.002 file - promoters60/1026754
tacaag

SEQ ID NO: 100705 - DNA, 6 bp, Unknown
  misc_feature (1)..( 6): Result.002 file - promoters60/1026754
tacaag

SEQ ID NO: 100706 - DNA, 7 bp, Unknown
  misc_feature (1)..( 7): Result.002 file - promoters60/1026754
tttggtt

SEQ ID NO: 100707 - DNA, 7 bp, Unknown
  misc_feature (1)..( 7): Result.002 file - promoters60/1026754
tttagtt

SEQ ID NO: 100708 - DNA, 7 bp, Unknown
  misc_feature (1)..( 7): Result.002 file - promoters60/1026754
tcagatt

SEQ ID NO: 100709 - DNA, 7 bp, Unknown
  misc_feature (1)..( 7): Result.002 file - promoters60/1026754
tcacatt

SEQ ID NO: 100710 - DNA, 6 bp, Unknown
  misc_feature (1)..( 6): Result.002 file - promoters60/1026754
aagaaa

SEQ ID NO: 100711 - DNA, 6 bp, Unknown
  misc_feature (1)..( 6): Result.002 file - promoters60/1026754
aagaaa

SEQ ID NO: 100712 - DNA, 7 bp, Unknown
  misc_feature (1)..( 7): Result.002 file - promoters60/1026754
agaaagt

SEQ ID NO: 100713 - DNA, 7 bp, Unknown
  misc_feature (1)..( 7): Result.002 file - promoters60/1026754
agatagt

SEQ ID NO: 100714 - DNA, 6 bp, Unknown
  misc_feature (1)..( 6): Result.002 file - promoters60/1026754
aaatgc

SEQ ID NO: 100715 - DNA, 6 bp, Unknown
  misc_feature (1)..( 6): Result.002 file - promoters60/1026754
aaatgc

SEQ ID NO: 100716 - DNA, 7 bp, Unknown
  misc_feature (1)..( 7): Result.002 file - promoters60/1026754
ttataat

SEQ ID NO: 100717 - DNA, 7 bp, Unknown
  misc_feature (1)..( 7): Result.002 file - promoters60/1026754
ttaaaat

SEQ ID NO: 100718 - DNA, 9 bp, Unknown
  misc_feature (1)..( 9): Result.002 file - promoters60/1026754
tactccatt

SEQ ID NO: 100719 - DNA, 9 bp, Unknown
  misc_feature (1)..( 9): Result.002 file - promoters60/1026754
tactcaatt

SEQ ID NO: 100720 - DNA, 8 bp, Unknown
  misc_feature (1)..( 8): Result.002 file - promoters60/1026822
aaatatat

SEQ ID NO: 100721 - DNA, 8 bp, Unknown
  misc_feature (1)..( 8): Result.002 file - promoters60/1026822
aaacatat

SEQ ID NO: 100722 - DNA, 8 bp, Unknown
  misc_feature (1)..( 8): Result.002 file - promoters60/1026822
aaacactt

SEQ ID NO: 100723 - DNA, 8 bp, Unknown
  misc_feature (1)..( 8): Result.002 file - promoters60/1026822
aaaaactt

SEQ ID NO: 100724 - DNA, 7 bp, Unknown
  misc_feature (1)..( 7): Result.002 file - promoters60/1026822
attttaa

SEQ ID NO: 100725 - DNA, 7 bp, Unknown
  misc_feature (1)..( 7): Result.002 file - promoters60/1026822
attttaa

SEQ ID NO: 100726 - DNA, 10 bp, Unknown
  misc_feature (1)..( 10): Result.002 file - promoters60/1026822
acaaaatagg

SEQ ID NO: 100727 - DNA, 10 bp, Unknown
  misc_feature (1)..( 10): Result.002 file - promoters60/1026822
acacaatctt

SEQ ID NO: 100728 - DNA, 10 bp, Unknown
  misc_feature (1)..( 10): Result.002 file - promoters60/1026822
tataaattag

SEQ ID NO: 100729 - DNA, 6 bp, Unknown
  misc_feature (1)..( 6): Result.002 file - promoters60/1026822
ttaatt

SEQ ID NO: 100730 - DNA, 6 bp, Unknown
  misc_feature (1)..( 6): Result.002 file - promoters60/1026822
ttaatt

SEQ ID NO: 100731 - DNA, 7 bp, Unknown
  misc_feature (1)..( 7): Result.002 file - promoters60/1026822
ttatata

SEQ ID NO: 100732 - DNA, 7 bp, Unknown
  misc_feature (1)..( 7): Result.002 file - promoters60/1026822
ttacata

SEQ ID NO: 100733 - DNA, 6 bp, Unknown
  misc_feature (1)..( 6): Result.002 file - promoters60/1026822
tgatat

SEQ ID NO: 100734 - DNA, 6 bp, Unknown
  misc_feature (1)..( 6): Result.002 file - promoters60/1026822
tgatat

SEQ ID NO: 100735 - DNA, 6 bp, Unknown
  misc_feature (1)..( 6): Result.002 file - promoters60/1026822
aagatg

SEQ ID NO: 100736 - DNA, 6 bp, Unknown
  misc_feature (1)..( 6): Result.002 file - promoters60/1026822
aagatg

SEQ ID NO: 100737 - DNA, 6 bp, Unknown
  misc_feature (1)..( 6): Result.002 file - promoters60/1026822
ttaaac

SEQ ID NO: 100738 - DNA, 6 bp, Unknown
  misc_feature (1)..( 6): Result.002 file - promoters60/1026822
ttaaac

SEQ ID NO: 100739 - DNA, 8 bp, Unknown
  misc_feature (1)..( 8): Result.002 file - promoters60/1026822
aaattcat

SEQ ID NO: 100740 - DNA, 8 bp, Unknown
  misc_feature (1)..( 8): Result.002 file - promoters60/1026822
taatacat

SEQ ID NO: 100741 - DNA, 8 bp, Unknown
  misc_feature (1)..( 8): Result.002 file - promoters60/1026822
taaaacag

SEQ ID NO: 100742 - DNA, 6 bp, Unknown
  misc_feature (1)..( 6): Result.002 file - promoters60/1026822
atcaag

SEQ ID NO: 100743 - DNA, 6 bp, Unknown
  misc_feature (1)..( 6): Result.002 file - promoters60/1026822
atcaag

SEQ ID NO: 100744 - DNA, 6 bp, Unknown
  misc_feature (1)..( 6): Result.002 file - promoters60/1026822
aaagtt

SEQ ID NO: 100745 - DNA, 6 bp, Unknown
  misc_feature (1)..( 6): Result.002 file - promoters60/1026822
aaagtt

SEQ ID NO: 100746 - DNA, 7 bp, Unknown
  misc_feature (1)..( 7): Result.002 file - promoters60/1026822
tcattat

SEQ ID NO: 100747 - DNA, 7 bp, Unknown
  misc_feature (1)..( 7): Result.002 file - promoters60/1026822
tcattat

SEQ ID NO: 100748 - DNA, 7 bp, Unknown
  misc_feature (1)..( 7): Result.002 file - promoters60/1026822
ttttata

SEQ ID NO: 100749 - DNA, 7 bp, Unknown
  misc_feature (1)..( 7): Result.002 file - promoters60/1026822
tttaata

SEQ ID NO: 100750 - DNA, 8 bp, Unknown
  misc_feature (1)..( 8): Result.002 file - promoters60/1026822
acagaaca

SEQ ID NO: 100751 - DNA, 8 bp, Unknown
  misc_feature (1)..( 8): Result.002 file - promoters60/1026822
acagtaca

SEQ ID NO: 100752 - DNA, 8 bp, Unknown
  misc_feature (1)..( 8): Result.002 file - promoters60/1026822
aagagcat

SEQ ID NO: 100753 - DNA, 8 bp, Unknown
  misc_feature (1)..( 8): Result.002 file - promoters60/1026822
aagaccat

SEQ ID NO: 100754 - DNA, 13 bp, Unknown
  misc_feature (1)..( 13): Result.002 file - promoters60/1026861
acattcacgaaat

SEQ ID NO: 100755 - DNA, 13 bp, Unknown
  misc_feature (1)..( 13): Result.002 file - promoters60/1026861
atattctcgaatt

SEQ ID NO: 100756 - DNA, 13 bp, Unknown
  misc_feature (1)..( 13): Result.002 file - promoters60/1026861
acaatcagtatcc

SEQ ID NO: 100757 - DNA, 13 bp, Unknown
  misc_feature (1)..( 13): Result.002 file - promoters60/1026861
cgaatcagctaaa

SEQ ID NO: 100758 - DNA, 13 bp, Unknown
  misc_feature (1)..( 13): Result.002 file - promoters60/1026861
aaggcttcgaatt

SEQ ID NO: 100759 - DNA, 13 bp, Unknown
  misc_feature (1)..( 13): Result.002 file - promoters60/1026861
tatggatcgaatt

SEQ ID NO: 100760 - DNA, 9 bp, Unknown
  misc_feature (1)..( 9): Result.002 file - promoters60/1026861
ttataaaac

SEQ ID NO: 100761 - DNA, 9 bp, Unknown
  misc_feature (1)..( 9): Result.002 file - promoters60/1026861
ttataaaaa

SEQ ID NO: 100762 - DNA, 9 bp, Unknown
  misc_feature (1)..( 9): Result.002 file - promoters60/1026861
tcataaaat

SEQ ID NO: 100763 - DNA, 9 bp, Unknown
  misc_feature (1)..( 9): Result.002 file - promoters60/1026861
atataaaac

SEQ ID NO: 100764 - DNA, 10 bp, Unknown
  misc_feature (1)..( 10): Result.002 file - promoters60/1026861
atatataaag

SEQ ID NO: 100765 - DNA, 10 bp, Unknown
  misc_feature (1)..( 10): Result.002 file - promoters60/1026861
gaatagaaag

SEQ ID NO: 100766 - DNA, 9 bp, Unknown
  misc_feature (1)..( 9): Result.002 file - promoters60/1026883
tcaaataat

SEQ ID NO: 100767 - DNA, 9 bp, Unknown
  misc_feature (1)..( 9): Result.002 file - promoters60/1026883
gaaaacaat

SEQ ID NO: 100768 - DNA, 9 bp, Unknown
  misc_feature (1)..( 9): Result.002 file - promoters60/1026883
acaaattta

SEQ ID NO: 100769 - DNA, 9 bp, Unknown
  misc_feature (1)..( 9): Result.002 file - promoters60/1026883
taaaattta

SEQ ID NO: 100770 - DNA, 10 bp, Unknown
  misc_feature (1)..( 10): Result.002 file - promoters60/1026883
aatttgtctt

SEQ ID NO: 100771 - DNA, 10 bp, Unknown
  misc_feature (1)..( 10): Result.002 file - promoters60/1026883
tatttatcta

SEQ ID NO: 100772 - DNA, 10 bp, Unknown
  misc_feature (1)..( 10): Result.002 file - promoters60/1026883
aatctgttta

SEQ ID NO: 100773 - DNA, 10 bp, Unknown
  misc_feature (1)..( 10): Result.002 file - promoters60/1026883
attttgttta

SEQ ID NO: 100774 - DNA, 7 bp, Unknown
  misc_feature (1)..( 7): Result.002 file - promoters60/1026976
aatttag

SEQ ID NO: 100775 - DNA, 7 bp, Unknown
  misc_feature (1)..( 7): Result.002 file - promoters60/1026976
aatgtag

SEQ ID NO: 100776 - DNA, 13 bp, Unknown
  misc_feature (1)..( 13): Result.002 file - promoters60/1026976
ttgaatgtaatct

SEQ ID NO: 100777 - DNA, 13 bp, Unknown
  misc_feature (1)..( 13): Result.002 file - promoters60/1026976
ttgaatcaatatt

SEQ ID NO: 100778 - DNA, 13 bp, Unknown
  misc_feature (1)..( 13): Result.002 file - promoters60/1026976
ttgattcaaaatt

SEQ ID NO: 100779 - DNA, 6 bp, Unknown
  misc_feature (1)..( 6): Result.002 file - promoters60/1026976
aagaga

SEQ ID NO: 100780 - DNA, 6 bp, Unknown
  misc_feature (1)..( 6): Result.002 file - promoters60/1026976
aagaga

SEQ ID NO: 100781 - DNA, 6 bp, Unknown
  misc_feature (1)..( 6): Result.002 file - promoters60/1026976
tttgca

SEQ ID NO: 100782 - DNA, 6 bp, Unknown
  misc_feature (1)..( 6): Result.002 file - promoters60/1026976
tttgca

SEQ ID NO: 100783 - DNA, 6 bp, Unknown
  misc_feature (1)..( 6): Result.002 file - promoters60/1026976
tgaatc

SEQ ID NO: 100784 - DNA, 6 bp, Unknown
  misc_feature (1)..( 6): Result.002 file - promoters60/1026976
tgaatc

SEQ ID NO: 100785 - DNA, 7 bp, Unknown
  misc_feature (1)..( 7): Result.002 file - promoters60/1026976
atacata

SEQ ID NO: 100786 - DNA, 7 bp, Unknown
  misc_feature (1)..( 7): Result.002 file - promoters60/1026976
ataaata

SEQ ID NO: 100787 - DNA, 8 bp, Unknown
  misc_feature (1)..( 8): Result.002 file - promoters60/1026976
attcctgc

SEQ ID NO: 100788 - DNA, 8 bp, Unknown
  misc_feature (1)..( 8): Result.002 file - promoters60/1026976
atttctgc

SEQ ID NO: 100789 - DNA, 8 bp, Unknown
  misc_feature (1)..( 8): Result.002 file - promoters60/1026976
atttctct

SEQ ID NO: 100790 - DNA, 8 bp, Unknown
  misc_feature (1)..( 8): Result.002 file - promoters60/1026976
agaacaag

SEQ ID NO: 100791 - DNA, 8 bp, Unknown
  misc_feature (1)..( 8): Result.002 file - promoters60/1026976
agaacaag

SEQ ID NO: 100792 - DNA, 6 bp, Unknown
  misc_feature (1)..( 6): Result.002 file - promoters60/1026976
caagaa

SEQ ID NO: 100793 - DNA, 6 bp, Unknown
  misc_feature (1)..( 6): Result.002 file - promoters60/1026976
caagaa

SEQ ID NO: 100794 - DNA, 8 bp, Unknown
  misc_feature (1)..( 8): Result.002 file - promoters60/1026976
agaaagag

SEQ ID NO: 100795 - DNA, 8 bp, Unknown
  misc_feature (1)..( 8): Result.002 file - promoters60/1026976
agagagag

SEQ ID NO: 100796 - DNA, 9 bp, Unknown
  misc_feature (1)..( 9): Result.002 file - promoters60/1026976
ttgaggaag

SEQ ID NO: 100797 - DNA, 9 bp, Unknown
  misc_feature (1)..( 9): Result.002 file - promoters60/1026976
ttgagaaag

SEQ ID NO: 100798 - DNA, 6 bp, Unknown
  misc_feature (1)..( 6): Result.002 file - promoters60/1026976
gaatgc

SEQ ID NO: 100799 - DNA, 6 bp, Unknown
  misc_feature (1)..( 6): Result.002 file - promoters60/1026976
gaatgc

SEQ ID NO: 100800 - DNA, 9 bp, Unknown
  misc_feature (1)..( 9): Result.002 file - promoters60/1026976
atacttaat

SEQ ID NO: 100801 - DNA, 9 bp, Unknown
  misc_feature (1)..( 9): Result.002 file - promoters60/1026976
atatttaat

SEQ ID NO: 100802 - DNA, 7 bp, Unknown
  misc_feature (1)..( 7): Result.002 file - promoters60/1026976
tggattt

SEQ ID NO: 100803 - DNA, 7 bp, Unknown
  misc_feature (1)..( 7): Result.002 file - promoters60/1026976
tggattt

SEQ ID NO: 100804 - DNA, 6 bp, Unknown
  misc_feature (1)..( 6): Result.002 file - promoters60/1026976
aagatt

SEQ ID NO: 100805 - DNA, 6 bp, Unknown
  misc_feature (1)..( 6): Result.002 file - promoters60/1026976
aagatt

SEQ ID NO: 100806 - DNA, 6 bp, Unknown
  misc_feature (1)..( 6): Result.002 file - promoters60/1026976
ttggtt

SEQ ID NO: 100807 - DNA, 6 bp, Unknown
  misc_feature (1)..( 6): Result.002 file - promoters60/1026976
ttggtt

SEQ ID NO: 100808 - DNA, 6 bp, Unknown
  misc_feature (1)..( 6): Result.002 file - promoters60/1026976
ttaacc

SEQ ID NO: 100809 - DNA, 6 bp, Unknown
  misc_feature (1)..( 6): Result.002 file - promoters60/1026976
ttaacc

SEQ ID NO: 100810 - DNA, 7 bp, Unknown
  misc_feature (1)..( 7): Result.002 file - promoters60/1026976
ctcactc

SEQ ID NO: 100811 - DNA, 7 bp, Unknown
  misc_feature (1)..( 7): Result.002 file - promoters60/1026976
ctcgctc

SEQ ID NO: 100812 - DNA, 12 bp, Unknown
  misc_feature (1)..( 12): Result.002 file - promoters60/1026983
gtgacataccaa

SEQ ID NO: 100813 - DNA, 12 bp, Unknown
  misc_feature (1)..( 12): Result.002 file - promoters60/1026983
tgtacataacaa

SEQ ID NO: 100814 - DNA, 12 bp, Unknown
  misc_feature (1)..( 12): Result.002 file - promoters60/1026983
gtgaaatagtaa

SEQ ID NO: 100815 - DNA, 12 bp, Unknown
  misc_feature (1)..( 12): Result.002 file - promoters60/1026983
tttacatatcaa

SEQ ID NO: 100816 - DNA, 12 bp, Unknown
  misc_feature (1)..( 12): Result.002 file - promoters60/1026983
gtgaaaatggcg

SEQ ID NO: 100817 - DNA, 12 bp, Unknown
  misc_feature (1)..( 12): Result.002 file - promoters60/1026983
tcgaaatataaa

SEQ ID NO: 100818 - DNA, 11 bp, Unknown
  misc_feature (1)..( 11): Result.002 file - promoters60/1026987
tctattccttt

SEQ ID NO: 100819 - DNA, 11 bp, Unknown
  misc_feature (1)..( 11): Result.002 file - promoters60/1026987
ctacttccttg

SEQ ID NO: 100820 - DNA, 11 bp, Unknown
  misc_feature (1)..( 11): Result.002 file - promoters60/1026987
cgttttcgttg

SEQ ID NO: 100821 - DNA, 11 bp, Unknown
  misc_feature (1)..( 11): Result.002 file - promoters60/1026987
taacttcctcg

SEQ ID NO: 100822 - DNA, 11 bp, Unknown
  misc_feature (1)..( 11): Result.002 file - promoters60/1026987
taatttcaaaa

SEQ ID NO: 100823 - DNA, 11 bp, Unknown
  misc_feature (1)..( 11): Result.002 file - promoters60/1026987
aaacctccaat

SEQ ID NO: 100824 - DNA, 9 bp, Unknown
  misc_feature (1)..( 9): Result.002 file - promoters60/1026987
tctataaaa

SEQ ID NO: 100825 - DNA, 9 bp, Unknown
  misc_feature (1)..( 9): Result.002 file - promoters60/1026987
tatataaat

SEQ ID NO: 100826 - DNA, 9 bp, Unknown
  misc_feature (1)..( 9): Result.002 file - promoters60/1026987
cttataaat

SEQ ID NO: 100827 - DNA, 9 bp, Unknown
  misc_feature (1)..( 9): Result.002 file - promoters60/1026987
tatttaaac

SEQ ID NO: 100828 - DNA, 9 bp, Unknown
  misc_feature (1)..( 9): Result.002 file - promoters60/1026987
tatataaac

SEQ ID NO: 100829 - DNA, 9 bp, Unknown
  misc_feature (1)..( 9): Result.002 file - promoters60/1026987
cctataaac

SEQ ID NO: 100830 - DNA, 12 bp, Unknown
  misc_feature (1)..( 12): Result.002 file - promoters60/1026987
tatgtaaacgta

SEQ ID NO: 100831 - DNA, 12 bp, Unknown
  misc_feature (1)..( 12): Result.002 file - promoters60/1026987
tatttaaaaaga

SEQ ID NO: 100832 - DNA, 12 bp, Unknown
  misc_feature (1)..( 12): Result.002 file - promoters60/1026987
ctagtaaacata

SEQ ID NO: 100833 - DNA, 12 bp, Unknown
  misc_feature (1)..( 12): Result.002 file - promoters60/1026987
tatctaagacct

SEQ ID NO: 100834 - DNA, 12 bp, Unknown
  misc_feature (1)..( 12): Result.002 file - promoters60/1026987
taattaaacaga

SEQ ID NO: 100835 - DNA, 12 bp, Unknown
  misc_feature (1)..( 12): Result.002 file - promoters60/1026987
gcattaaaatat

SEQ ID NO: 100836 - DNA, 12 bp, Unknown
  misc_feature (1)..( 12): Result.002 file - promoters60/1026987
attttagaaaga

SEQ ID NO: 100837 - DNA, 12 bp, Unknown
  misc_feature (1)..( 12): Result.002 file - promoters60/1026987
gtcacaaatata

SEQ ID NO: 100838 - DNA, 12 bp, Unknown
  misc_feature (1)..( 12): Result.002 file - promoters60/1026987
ctagtaaacata

SEQ ID NO: 100839 - DNA, 12 bp, Unknown
  misc_feature (1)..( 12): Result.002 file - promoters60/1026987
gtaacaaataat

SEQ ID NO: 100840 - DNA, 12 bp, Unknown
  misc_feature (1)..( 12): Result.002 file - promoters60/1026987
ctaaaaaatcgt

SEQ ID NO: 100841 - DNA, 12 bp, Unknown
  misc_feature (1)..( 12): Result.002 file - promoters60/1026987
tttagaaagatc

SEQ ID NO: 100842 - DNA, 12 bp, Unknown
  misc_feature (1)..( 12): Result.002 file - promoters60/1026987
tttaaaaagaag

SEQ ID NO: 100843 - DNA, 10 bp, Unknown
  misc_feature (1)..( 10): Result.002 file - promoters60/1026987
acaaaagaga

SEQ ID NO: 100844 - DNA, 10 bp, Unknown
  misc_feature (1)..( 10): Result.002 file - promoters60/1026987
ccagaagaga

SEQ ID NO: 100845 - DNA, 10 bp, Unknown
  misc_feature (1)..( 10): Result.002 file - promoters60/1026987
attaaacaga

SEQ ID NO: 100846 - DNA, 10 bp, Unknown
  misc_feature (1)..( 10): Result.002 file - promoters60/1026987
tttaaaaaga

SEQ ID NO: 100847 - DNA, 10 bp, Unknown
  misc_feature (1)..( 10): Result.002 file - promoters60/1026987
attaaaatat

SEQ ID NO: 100848 - DNA, 10 bp, Unknown
  misc_feature (1)..( 10): Result.002 file - promoters60/1026987
tttagaaaga

SEQ ID NO: 100849 - DNA, 8 bp, Unknown
  misc_feature (1)..( 8): Result.002 file - promoters60/1027002
tttgagag

SEQ ID NO: 100850 - DNA, 8 bp, Unknown
  misc_feature (1)..( 8): Result.002 file - promoters60/1027002
tttgagta

SEQ ID NO: 100851 - DNA, 8 bp, Unknown
  misc_feature (1)..( 8): Result.002 file - promoters60/1027002
cttgggag

SEQ ID NO: 100852 - DNA, 8 bp, Unknown
  misc_feature (1)..( 8): Result.002 file - promoters60/1027002
aaaaaagc

SEQ ID NO: 100853 - DNA, 8 bp, Unknown
  misc_feature (1)..( 8): Result.002 file - promoters60/1027002
aaaaaaaa

SEQ ID NO: 100854 - DNA, 9 bp, Unknown
  misc_feature (1)..( 9): Result.002 file - promoters60/1027002
aaaataaaa

SEQ ID NO: 100855 - DNA, 8 bp, Unknown
  misc_feature (1)..( 8): Result.002 file - promoters60/1027002
agttttta

SEQ ID NO: 100856 - DNA, 8 bp, Unknown
  misc_feature (1)..( 8): Result.002 file - promoters60/1027002
tgttgtta

SEQ ID NO: 100857 - DNA, 8 bp, Unknown
  misc_feature (1)..( 8): Result.002 file - promoters60/1027002
agttttag

SEQ ID NO: 100858 - DNA, 8 bp, Unknown
  misc_feature (1)..( 8): Result.002 file - promoters60/1027002
aaataatt

SEQ ID NO: 100859 - DNA, 8 bp, Unknown
  misc_feature (1)..( 8): Result.002 file - promoters60/1027002
aaaaaatg

SEQ ID NO: 100860 - DNA, 8 bp, Unknown
  misc_feature (1)..( 8): Result.002 file - promoters60/1027002
gaaaaatg

SEQ ID NO: 100861 - DNA, 7 bp, Unknown
  misc_feature (1)..( 7): Result.002 file - promoters60/1027002
tgaaaag

SEQ ID NO: 100862 - DNA, 7 bp, Unknown
  misc_feature (1)..( 7): Result.002 file - promoters60/1027002
tgaaaaa

SEQ ID NO: 100863 - DNA, 7 bp, Unknown
  misc_feature (1)..( 7): Result.002 file - promoters60/1027002
cgaaaaa

SEQ ID NO: 100864 - DNA, 12 bp, Unknown
  misc_feature (1)..( 12): Result.002 file - promoters60/1027032
ttttaattatat

SEQ ID NO: 100865 - DNA, 12 bp, Unknown
  misc_feature (1)..( 12): Result.002 file - promoters60/1027032
atttaattagat

SEQ ID NO: 100866 - DNA, 12 bp, Unknown
  misc_feature (1)..( 12): Result.002 file - promoters60/1027032
gtaaaattatat

SEQ ID NO: 100867 - DNA, 12 bp, Unknown
  misc_feature (1)..( 12): Result.002 file - promoters60/1027032
tgtgaatgataa

SEQ ID NO: 100868 - DNA, 12 bp, Unknown
  misc_feature (1)..( 12): Result.002 file - promoters60/1027032
ccgtaattagta

SEQ ID NO: 100869 - DNA, 12 bp, Unknown
  misc_feature (1)..( 12): Result.002 file - promoters60/1027032
atttaagaactc

SEQ ID NO: 100870 - DNA, 7 bp, Unknown
  misc_feature (1)..( 7): Result.002 file - promoters60/1027125
ttatttt

SEQ ID NO: 100871 - DNA, 7 bp, Unknown
  misc_feature (1)..( 7): Result.002 file - promoters60/1027125
ttatttg

SEQ ID NO: 100872 - DNA, 8 bp, Unknown
  misc_feature (1)..( 8): Result.002 file - promoters60/1027125
ctatgtta

SEQ ID NO: 100873 - DNA, 10 bp, Unknown
  misc_feature (1)..( 10): Result.002 file - promoters60/1027125
aagtttacta

SEQ ID NO: 100874 - DNA, 10 bp, Unknown
  misc_feature (1)..( 10): Result.002 file - promoters60/1027125
aagtttttga

SEQ ID NO: 100875 - DNA, 10 bp, Unknown
  misc_feature (1)..( 10): Result.002 file - promoters60/1027125
tagtttttga

SEQ ID NO: 100876 - DNA, 7 bp, Unknown
  misc_feature (1)..( 7): Result.002 file - promoters60/1027125
gtttgtt

SEQ ID NO: 100877 - DNA, 7 bp, Unknown
  misc_feature (1)..( 7): Result.002 file - promoters60/1027125
ttttgtt

SEQ ID NO: 100878 - DNA, 7 bp, Unknown
  misc_feature (1)..( 7): Result.002 file - promoters60/1027125
ttttgta

SEQ ID NO: 100879 - DNA, 7 bp, Unknown
  misc_feature (1)..( 7): Result.002 file - promoters60/1027125
ctttgta

SEQ ID NO: 100880 - DNA, 7 bp, Unknown
  misc_feature (1)..( 7): Result.002 file - promoters60/1027125
tgtaaaa

SEQ ID NO: 100881 - DNA, 7 bp, Unknown
  misc_feature (1)..( 7): Result.002 file - promoters60/1027125
tgtaaat

SEQ ID NO: 100882 - DNA, 7 bp, Unknown
  misc_feature (1)..( 7): Result.002 file - promoters60/1027125
agtaaaa

SEQ ID NO: 100883 - DNA, 9 bp, Unknown
  misc_feature (1)..( 9): Result.002 file - promoters60/1027125
gcaaaaaga

SEQ ID NO: 100884 - DNA, 9 bp, Unknown
  misc_feature (1)..( 9): Result.002 file - promoters60/1027125
acaaaaaga

SEQ ID NO: 100885 - DNA, 9 bp, Unknown
  misc_feature (1)..( 9): Result.002 file - promoters60/1027125
aaaaaaagg

SEQ ID NO: 100886 - DNA, 9 bp, Unknown
  misc_feature (1)..( 9): Result.002 file - promoters60/1027125
acaaaaata

SEQ ID NO: 100887 - DNA, 9 bp, Unknown
  misc_feature (1)..( 9): Result.002 file - promoters60/1027125
ccagctaat

SEQ ID NO: 100888 - DNA, 9 bp, Unknown
  misc_feature (1)..( 9): Result.002 file - promoters60/1027125
ttagctaaa

SEQ ID NO: 100889 - DNA, 9 bp, Unknown
  misc_feature (1)..( 9): Result.002 file - promoters60/1027125
ttagcgaaa

SEQ ID NO: 100890 - DNA, 12 bp, Unknown
  misc_feature (1)..( 12): Result.002 file - promoters60/1027125
agctgtaaaatt

SEQ ID NO: 100891 - DNA, 12 bp, Unknown
  misc_feature (1)..( 12): Result.002 file - promoters60/1027125
aaaaataaaatt

SEQ ID NO: 100892 - DNA, 12 bp, Unknown
  misc_feature (1)..( 12): Result.002 file - promoters60/1027125
aaaaaaaaaata

SEQ ID NO: 100893 - DNA, 12 bp, Unknown
  misc_feature (1)..( 12): Result.002 file - promoters60/1027125
aatatgatcatc

SEQ ID NO: 100894 - DNA, 12 bp, Unknown
  misc_feature (1)..( 12): Result.002 file - promoters60/1027125
tgtatcatcatc

SEQ ID NO: 100895 - DNA, 12 bp, Unknown
  misc_feature (1)..( 12): Result.002 file - promoters60/1027125
tgtctcatgtgc

SEQ ID NO: 100896 - DNA, 8 bp, Unknown
  misc_feature (1)..( 8): Result.002 file - promoters60/1027156
atacaaaa

SEQ ID NO: 100897 - DNA, 8 bp, Unknown
  misc_feature (1)..( 8): Result.002 file - promoters60/1027156
atacaata

SEQ ID NO: 100898 - DNA, 8 bp, Unknown
  misc_feature (1)..( 8): Result.002 file - promoters60/1027156
ctacaata

SEQ ID NO: 100899 - DNA, 9 bp, Unknown
  misc_feature (1)..( 9): Result.002 file - promoters60/1027156
ttagtcaac

SEQ ID NO: 100900 - DNA, 9 bp, Unknown
  misc_feature (1)..( 9): Result.002 file - promoters60/1027156
aaagtaaac

SEQ ID NO: 100901 - DNA, 9 bp, Unknown
  misc_feature (1)..( 9): Result.002 file - promoters60/1027156
aaagaaaaa

SEQ ID NO: 100902 - DNA, 10 bp, Unknown
  misc_feature (1)..( 10): Result.002 file - promoters60/1027156
catataggtt

SEQ ID NO: 100903 - DNA, 10 bp, Unknown
  misc_feature (1)..( 10): Result.002 file - promoters60/1027156
aaaataagtt

SEQ ID NO: 100904 - DNA, 10 bp, Unknown
  misc_feature (1)..( 10): Result.002 file - promoters60/1027156
aaactaagaa

SEQ ID NO: 100905 - DNA, 9 bp, Unknown
  misc_feature (1)..( 9): Result.002 file - promoters60/1027156
caacaactt

SEQ ID NO: 100906 - DNA, 9 bp, Unknown
  misc_feature (1)..( 9): Result.002 file - promoters60/1027156
caaaaacta

SEQ ID NO: 100907 - DNA, 9 bp, Unknown
  misc_feature (1)..( 9): Result.002 file - promoters60/1027156
taaaataag

SEQ ID NO: 100908 - DNA, 8 bp, Unknown
  misc_feature (1)..( 8): Result.002 file - promoters60/1027171
ttttctta

SEQ ID NO: 100909 - DNA, 8 bp, Unknown
  misc_feature (1)..( 8): Result.002 file - promoters60/1027171
ttttgtta

SEQ ID NO: 100910 - DNA, 8 bp, Unknown
  misc_feature (1)..( 8): Result.002 file - promoters60/1027171
aaaatcaa

SEQ ID NO: 100911 - DNA, 8 bp, Unknown
  misc_feature (1)..( 8): Result.002 file - promoters60/1027171
aaaaacaa

SEQ ID NO: 100912 - DNA, 7 bp, Unknown
  misc_feature (1)..( 7): Result.002 file - promoters60/1027171
attcaaa

SEQ ID NO: 100913 - DNA, 7 bp, Unknown
  misc_feature (1)..( 7): Result.002 file - promoters60/1027171
atttaaa

SEQ ID NO: 100914 - DNA, 7 bp, Unknown
  misc_feature (1)..( 7): Result.002 file - promoters60/1027171
attcaac

SEQ ID NO: 100915 - DNA, 6 bp, Unknown
  misc_feature (1)..( 6): Result.002 file - promoters60/1027171
aaagat

SEQ ID NO: 100916 - DNA, 6 bp, Unknown
  misc_feature (1)..( 6): Result.002 file - promoters60/1027171
aaagat

SEQ ID NO: 100917 - DNA, 7 bp, Unknown
  misc_feature (1)..( 7): Result.002 file - promoters60/1027171
ttaatca

SEQ ID NO: 100918 - DNA, 7 bp, Unknown
  misc_feature (1)..( 7): Result.002 file - promoters60/1027171
ttaatca

SEQ ID NO: 100919 - DNA, 7 bp, Unknown
  misc_feature (1)..( 7): Result.002 file - promoters60/1027171
ccaaagc

SEQ ID NO: 100920 - DNA, 7 bp, Unknown
  misc_feature (1)..( 7): Result.002 file - promoters60/1027171
ccacagc

SEQ ID NO: 100921 - DNA, 6 bp, Unknown
  misc_feature (1)..( 6): Result.002 file - promoters60/1027171
aaaaca

SEQ ID NO: 100922 - DNA, 6 bp, Unknown
  misc_feature (1)..( 6): Result.002 file - promoters60/1027171
aaaaca

SEQ ID NO: 100923 - DNA, 7 bp, Unknown
  misc_feature (1)..( 7): Result.002 file - promoters60/1027171
agtagga

SEQ ID NO: 100924 - DNA, 7 bp, Unknown
  misc_feature (1)..( 7): Result.002 file - promoters60/1027171
agtagga

SEQ ID NO: 100925 - DNA, 10 bp, Unknown
  misc_feature (1)..( 10): Result.002 file - promoters60/1027171
tataattcaa

SEQ ID NO: 100926 - DNA, 10 bp, Unknown
  misc_feature (1)..( 10): Result.002 file - promoters60/1027171
tattattcaa

SEQ ID NO: 100927 - DNA, 6 bp, Unknown
  misc_feature (1)..( 6): Result.002 file - promoters60/1027171
aaactc

SEQ ID NO: 100928 - DNA, 6 bp, Unknown
  misc_feature (1)..( 6): Result.002 file - promoters60/1027171
aaactc

SEQ ID NO: 100929 - DNA, 7 bp, Unknown
  misc_feature (1)..( 7): Result.002 file - promoters60/1027171
ttcaaca

SEQ ID NO: 100930 - DNA, 7 bp, Unknown
  misc_feature (1)..( 7): Result.002 file - promoters60/1027171
ttctaca

SEQ ID NO: 100931 - DNA, 7 bp, Unknown
  misc_feature (1)..( 7): Result.002 file - promoters60/1027171
accgtca

SEQ ID NO: 100932 - DNA, 7 bp, Unknown
  misc_feature (1)..( 7): Result.002 file - promoters60/1027171
accatca

SEQ ID NO: 100933 - DNA, 6 bp, Unknown
  misc_feature (1)..( 6): Result.002 file - promoters60/1027171
ataaag

SEQ ID NO: 100934 - DNA, 6 bp, Unknown
  misc_feature (1)..( 6): Result.002 file - promoters60/1027171
ataaag

SEQ ID NO: 100935 - DNA, 10 bp, Unknown
  misc_feature (1)..( 10): Result.002 file - promoters60/1027171
caaaaaataa

SEQ ID NO: 100936 - DNA, 10 bp, Unknown
  misc_feature (1)..( 10): Result.002 file - promoters60/1027171
caaaacataa

SEQ ID NO: 100937 - DNA, 7 bp, Unknown
  misc_feature (1)..( 7): Result.002 file - promoters60/1027171
aatctag

SEQ ID NO: 100938 - DNA, 7 bp, Unknown
  misc_feature (1)..( 7): Result.002 file - promoters60/1027171
aatctag

SEQ ID NO: 100939 - DNA, 7 bp, Unknown
  misc_feature (1)..( 7): Result.002 file - promoters60/1027171
agataaa

SEQ ID NO: 100940 - DNA, 7 bp, Unknown
  misc_feature (1)..( 7): Result.002 file - promoters60/1027171
agataaa

SEQ ID NO: 100941 - DNA, 7 bp, Unknown
  misc_feature (1)..( 7): Result.002 file - promoters60/1027171
aaactta

SEQ ID NO: 100942 - DNA, 7 bp, Unknown
  misc_feature (1)..( 7): Result.002 file - promoters60/1027171
aaactta

SEQ ID NO: 100943 - DNA, 10 bp, Unknown
  misc_feature (1)..( 10): Result.002 file - promoters60/1027171
acaaacatta

SEQ ID NO: 100944 - DNA, 10 bp, Unknown
  misc_feature (1)..( 10): Result.002 file - promoters60/1027171
acaaacgtta

SEQ ID NO: 100945 - DNA, 8 bp, Unknown
  misc_feature (1)..( 8): Result.002 file - promoters60/1027171
aaaaaaac

SEQ ID NO: 100946 - DNA, 8 bp, Unknown
  misc_feature (1)..( 8): Result.002 file - promoters60/1027171
aaaagaac

SEQ ID NO: 100947 - DNA, 6 bp, Unknown
  misc_feature (1)..( 6): Result.002 file - promoters60/1027171
aaacat

SEQ ID NO: 100948 - DNA, 6 bp, Unknown
  misc_feature (1)..( 6): Result.002 file - promoters60/1027171
aaacat

SEQ ID NO: 100949 - DNA, 6 bp, Unknown
  misc_feature (1)..( 6): Result.002 file - promoters60/1027171
taatat

SEQ ID NO: 100950 - DNA, 6 bp, Unknown
  misc_feature (1)..( 6): Result.002 file - promoters60/1027171
taatat

SEQ ID NO: 100951 - DNA, 10 bp, Unknown
  misc_feature (1)..( 10): Result.002 file - promoters60/1027189
cctaaaaaat

SEQ ID NO: 100952 - DNA, 10 bp, Unknown
  misc_feature (1)..( 10): Result.002 file - promoters60/1027189
acaaaataat

SEQ ID NO: 100953 - DNA, 10 bp, Unknown
  misc_feature (1)..( 10): Result.002 file - promoters60/1027189
ttagaaaaat

SEQ ID NO: 100954 - DNA, 10 bp, Unknown
  misc_feature (1)..( 10): Result.002 file - promoters60/1027189
cggaaaaaac

SEQ ID NO: 100955 - DNA, 10 bp, Unknown
  misc_feature (1)..( 10): Result.002 file - promoters60/1027189
tagagaaaca

SEQ ID NO: 100956 - DNA, 10 bp, Unknown
  misc_feature (1)..( 10): Result.002 file - promoters60/1027189
ggtttggttt

SEQ ID NO: 100957 - DNA, 10 bp, Unknown
  misc_feature (1)..( 10): Result.002 file - promoters60/1027189
ggtttgtttt

SEQ ID NO: 100958 - DNA, 10 bp, Unknown
  misc_feature (1)..( 10): Result.002 file - promoters60/1027189
tcattggtta

SEQ ID NO: 100959 - DNA, 10 bp, Unknown
  misc_feature (1)..( 10): Result.002 file - promoters60/1027189
aatttatttg

SEQ ID NO: 100960 - DNA, 10 bp, Unknown
  misc_feature (1)..( 10): Result.002 file - promoters60/1027189
tatttattta

SEQ ID NO: 100961 - DNA, 10 bp, Unknown
  misc_feature (1)..( 10): Result.002 file - promoters60/1027189
cctttattct

SEQ ID NO: 100962 - DNA, 9 bp, Unknown
  misc_feature (1)..( 9): Result.002 file - promoters60/1027189
tatatgatg

SEQ ID NO: 100963 - DNA, 9 bp, Unknown
  misc_feature (1)..( 9): Result.002 file - promoters60/1027189
ggtatcatg

SEQ ID NO: 100964 - DNA, 9 bp, Unknown
  misc_feature (1)..( 9): Result.002 file - promoters60/1027189
aatatgaga

SEQ ID NO: 100965 - DNA, 9 bp, Unknown
  misc_feature (1)..( 9): Result.002 file - promoters60/1027189
tatatgaca

SEQ ID NO: 100966 - DNA, 9 bp, Unknown
  misc_feature (1)..( 9): Result.002 file - promoters60/1027189
aatattatg

SEQ ID NO: 100967 - DNA, 11 bp, Unknown
  misc_feature (1)..( 11): Result.002 file - promoters60/1027189
tacataacaaa

SEQ ID NO: 100968 - DNA, 11 bp, Unknown
  misc_feature (1)..( 11): Result.002 file - promoters60/1027189
tgtaaaacaaa

SEQ ID NO: 100969 - DNA, 11 bp, Unknown
  misc_feature (1)..( 11): Result.002 file - promoters60/1027189
aaaataaaaaa

SEQ ID NO: 100970 - DNA, 11 bp, Unknown
  misc_feature (1)..( 11): Result.002 file - promoters60/1027189
tacatatcaaa

SEQ ID NO: 100971 - DNA, 11 bp, Unknown
  misc_feature (1)..( 11): Result.002 file - promoters60/1027189
tttataccaac

SEQ ID NO: 100972 - DNA, 11 bp, Unknown
  misc_feature (1)..( 11): Result.002 file - promoters60/1027189
gttacaccaat

SEQ ID NO: 100973 - DNA, 7 bp, Unknown
  misc_feature (1)..( 7): Result.002 file - promoters60/1027189
caagaaa

SEQ ID NO: 100974 - DNA, 7 bp, Unknown
  misc_feature (1)..( 7): Result.002 file - promoters60/1027189
caacaaa

SEQ ID NO: 100975 - DNA, 7 bp, Unknown
  misc_feature (1)..( 7): Result.002 file - promoters60/1027189
aaacaaa

SEQ ID NO: 100976 - DNA, 7 bp, Unknown
  misc_feature (1)..( 7): Result.002 file - promoters60/1027189
aaacaat

SEQ ID NO: 100977 - DNA, 7 bp, Unknown
  misc_feature (1)..( 7): Result.002 file - promoters60/1027189
aaacaaa

SEQ ID NO: 100978 - DNA, 15 bp, Unknown
  misc_feature (1)..( 15): Result.002 file - promoters60/1027189
ataataattttgact

SEQ ID NO: 100979 - DNA, 15 bp, Unknown
  misc_feature (1)..( 15): Result.002 file - promoters60/1027189
ataattattttaact

SEQ ID NO: 100980 - DNA, 15 bp, Unknown
  misc_feature (1)..( 15): Result.002 file - promoters60/1027189
cttagaatttggttc

SEQ ID NO: 100981 - DNA, 15 bp, Unknown
  misc_feature (1)..( 15): Result.002 file - promoters60/1027189
atatttatttattta

SEQ ID NO: 100982 - DNA, 15 bp, Unknown
  misc_feature (1)..( 15): Result.002 file - promoters60/1027189
tttattcttttatgc

SEQ ID NO: 100983 - DNA, 15 bp, Unknown
  misc_feature (1)..( 15): Result.002 file - promoters60/1027201
aaatcatctcaatgc

SEQ ID NO: 100984 - DNA, 15 bp, Unknown
  misc_feature (1)..( 15): Result.002 file - promoters60/1027201
aaatcatctcaatgc

SEQ ID NO: 100985 - DNA, 7 bp, Unknown
  misc_feature (1)..( 7): Result.002 file - promoters60/1027201
catcata

SEQ ID NO: 100986 - DNA, 7 bp, Unknown
  misc_feature (1)..( 7): Result.002 file - promoters60/1027201
cataata

SEQ ID NO: 100987 - DNA, 8 bp, Unknown
  misc_feature (1)..( 8): Result.002 file - promoters60/1027201
caagaaca

SEQ ID NO: 100988 - DNA, 8 bp, Unknown
  misc_feature (1)..( 8): Result.002 file - promoters60/1027201
caataaca

SEQ ID NO: 100989 - DNA, 6 bp, Unknown
  misc_feature (1)..( 6): Result.002 file - promoters60/1027201
aattaa

SEQ ID NO: 100990 - DNA, 6 bp, Unknown
  misc_feature (1)..( 6): Result.002 file - promoters60/1027201
aattaa

SEQ ID NO: 100991 - DNA, 9 bp, Unknown
  misc_feature (1)..( 9): Result.002 file - promoters60/1027201
gatgaagaa

SEQ ID NO: 100992 - DNA, 9 bp, Unknown
  misc_feature (1)..( 9): Result.002 file - promoters60/1027201
attgatgaa

SEQ ID NO: 100993 - DNA, 9 bp, Unknown
  misc_feature (1)..( 9): Result.002 file - promoters60/1027201
gatgcagat

SEQ ID NO: 100994 - DNA, 6 bp, Unknown
  misc_feature (1)..( 6): Result.002 file - promoters60/1027201
ctctct

SEQ ID NO: 100995 - DNA, 6 bp, Unknown
  misc_feature (1)..( 6): Result.002 file - promoters60/1027201
ctctct

SEQ ID NO: 100996 - DNA, 7 bp, Unknown
  misc_feature (1)..( 7): Result.002 file - promoters60/1027201
tcgaatt

SEQ ID NO: 100997 - DNA, 7 bp, Unknown
  misc_feature (1)..( 7): Result.002 file - promoters60/1027201
tcgtatt

SEQ ID NO: 100998 - DNA, 9 bp, Unknown
  misc_feature (1)..( 9): Result.002 file - promoters60/1027201
aagctcgat

SEQ ID NO: 100999 - DNA, 9 bp, Unknown
  misc_feature (1)..( 9): Result.002 file - promoters60/1027201
aaggtcgat

SEQ ID NO: 101000 - DNA, 9 bp, Unknown
  misc_feature (1)..( 9): Result.002 file - promoters60/1027201
aagctcgat

SEQ ID NO: 101001 - DNA, 6 bp, Unknown
  misc_feature (1)..( 6): Result.002 file - promoters60/1027201
gaaaaa

SEQ ID NO: 101002 - DNA, 6 bp, Unknown
  misc_feature (1)..( 6): Result.002 file - promoters60/1027201
gaaaaa

SEQ ID NO: 101003 - DNA, 7 bp, Unknown
  misc_feature (1)..( 7): Result.002 file - promoters60/1027201
aaaaaat

SEQ ID NO: 101004 - DNA, 7 bp, Unknown
  misc_feature (1)..( 7): Result.002 file - promoters60/1027201
aaaaaat

SEQ ID NO: 101005 - DNA, 7 bp, Unknown
  misc_feature (1)..( 7): Result.002 file - promoters60/1027201
aaaaaaa

SEQ ID NO: 101006 - DNA, 7 bp, Unknown
  misc_feature (1)..( 7): Result.002 file - promoters60/1027201
atttgtt

SEQ ID NO: 101007 - DNA, 7 bp, Unknown
  misc_feature (1)..( 7): Result.002 file - promoters60/1027201
attggtt

SEQ ID NO: 101008 - DNA, 6 bp, Unknown
  misc_feature (1)..( 6): Result.002 file - promoters60/1027201
aaactt

SEQ ID NO: 101009 - DNA, 6 bp, Unknown
  misc_feature (1)..( 6): Result.002 file - promoters60/1027201
aaactt

SEQ ID NO: 101010 - DNA, 8 bp, Unknown
  misc_feature (1)..( 8): Result.002 file - promoters60/1027201
aaaattaa

SEQ ID NO: 101011 - DNA, 8 bp, Unknown
  misc_feature (1)..( 8): Result.002 file - promoters60/1027201
aaaattaa

SEQ ID NO: 101012 - DNA, 7 bp, Unknown
  misc_feature (1)..( 7): Result.002 file - promoters60/1027201
tactata

SEQ ID NO: 101013 - DNA, 7 bp, Unknown
  misc_feature (1)..( 7): Result.002 file - promoters60/1027201
tactata

SEQ ID NO: 101014 - DNA, 7 bp, Unknown
  misc_feature (1)..( 7): Result.002 file - promoters60/1027240
cgatttt

SEQ ID NO: 101015 - DNA, 7 bp, Unknown
  misc_feature (1)..( 7): Result.002 file - promoters60/1027240
agatttt

SEQ ID NO: 101016 - DNA, 7 bp, Unknown
  misc_feature (1)..( 7): Result.002 file - promoters60/1027240
agagttt

SEQ ID NO: 101017 - DNA, 10 bp, Unknown
  misc_feature (1)..( 10): Result.002 file - promoters60/1027240
caaaatattt

SEQ ID NO: 101018 - DNA, 10 bp, Unknown
  misc_feature (1)..( 10): Result.002 file - promoters60/1027240
caaaatcttt

SEQ ID NO: 101019 - DNA, 10 bp, Unknown
  misc_feature (1)..( 10): Result.002 file - promoters60/1027240
taaattatat

SEQ ID NO: 101020 - DNA, 10 bp, Unknown
  misc_feature (1)..( 10): Result.002 file - promoters60/1027240
taaaaccggt

SEQ ID NO: 101021 - DNA, 10 bp, Unknown
  misc_feature (1)..( 10): Result.002 file - promoters60/1027240
taaaacgaaa

SEQ ID NO: 101022 - DNA, 11 bp, Unknown
  misc_feature (1)..( 11): Result.002 file - promoters60/1027240
tataaaccgaa

SEQ ID NO: 101023 - DNA, 8 bp, Unknown
  misc_feature (1)..( 8): Result.002 file - promoters60/1027240
aatcaaaa

SEQ ID NO: 101024 - DNA, 8 bp, Unknown
  misc_feature (1)..( 8): Result.002 file - promoters60/1027240
tatcaaaa

SEQ ID NO: 101025 - DNA, 8 bp, Unknown
  misc_feature (1)..( 8): Result.002 file - promoters60/1027240
aatgaaaa

SEQ ID NO: 101026 - DNA, 9 bp, Unknown
  misc_feature (1)..( 9): Result.002 file - promoters60/1027240
taaccctag

SEQ ID NO: 101027 - DNA, 9 bp, Unknown
  misc_feature (1)..( 9): Result.002 file - promoters60/1027240
taaacctaa

SEQ ID NO: 101028 - DNA, 9 bp, Unknown
  misc_feature (1)..( 9): Result.002 file - promoters60/1027240
ctacccaaa

SEQ ID NO: 101029 - DNA, 9 bp, Unknown
  misc_feature (1)..( 9): Result.002 file - promoters60/1027240
tttggccca

SEQ ID NO: 101030 - DNA, 9 bp, Unknown
  misc_feature (1)..( 9): Result.002 file - promoters60/1027240
catggtcca

SEQ ID NO: 101031 - DNA, 9 bp, Unknown
  misc_feature (1)..( 9): Result.002 file - promoters60/1027240
catagtcgc

SEQ ID NO: 101032 - DNA, 12 bp, Unknown
  misc_feature (1)..( 12): Result.002 file - promoters60/1027240
atataattaaaa

SEQ ID NO: 101033 - DNA, 12 bp, Unknown
  misc_feature (1)..( 12): Result.002 file - promoters60/1027240
atataaaccgaa

SEQ ID NO: 101034 - DNA, 12 bp, Unknown
  misc_feature (1)..( 12): Result.002 file - promoters60/1027240
ttataaaacgaa

SEQ ID NO: 101035 - DNA, 6 bp, Unknown
  misc_feature (1)..( 6): Result.002 file - promoters60/1027240
aaaaac

SEQ ID NO: 101036 - DNA, 6 bp, Unknown
  misc_feature (1)..( 6): Result.002 file - promoters60/1027240
aaaaac

SEQ ID NO: 101037 - DNA, 6 bp, Unknown
  misc_feature (1)..( 6): Result.002 file - promoters60/1027240
aaaaaa

SEQ ID NO: 101038 - DNA, 12 bp, Unknown
  misc_feature (1)..( 12): Result.002 file - promoters60/1027240
cgagttaaccac

SEQ ID NO: 101039 - DNA, 12 bp, Unknown
  misc_feature (1)..( 12): Result.002 file - promoters60/1027240
taaaataaacac

SEQ ID NO: 101040 - DNA, 12 bp, Unknown
  misc_feature (1)..( 12): Result.002 file - promoters60/1027240
taagatatacac

SEQ ID NO: 101041 - DNA, 7 bp, Unknown
  misc_feature (1)..( 7): Result.002 file - promoters60/1027243
tatatat

SEQ ID NO: 101042 - DNA, 7 bp, Unknown
  misc_feature (1)..( 7): Result.002 file - promoters60/1027243
tatttat

SEQ ID NO: 101043 - DNA, 6 bp, Unknown
  misc_feature (1)..( 6): Result.002 file - promoters60/1027243
ttttat

SEQ ID NO: 101044 - DNA, 6 bp, Unknown
  misc_feature (1)..( 6): Result.002 file - promoters60/1027243
ttttat

SEQ ID NO: 101045 - DNA, 7 bp, Unknown
  misc_feature (1)..( 7): Result.002 file - promoters60/1027243
taatctt

SEQ ID NO: 101046 - DNA, 7 bp, Unknown
  misc_feature (1)..( 7): Result.002 file - promoters60/1027243
taaactt

SEQ ID NO: 101047 - DNA, 7 bp, Unknown
  misc_feature (1)..( 7): Result.002 file - promoters60/1027243
gcacaat

SEQ ID NO: 101048 - DNA, 7 bp, Unknown
  misc_feature (1)..( 7): Result.002 file - promoters60/1027243
gcaaaat

SEQ ID NO: 101049 - DNA, 7 bp, Unknown
  misc_feature (1)..( 7): Result.002 file - promoters60/1027243
agtgttg

SEQ ID NO: 101050 - DNA, 7 bp, Unknown
  misc_feature (1)..( 7): Result.002 file - promoters60/1027243
agttttg

SEQ ID NO: 101051 - DNA, 8 bp, Unknown
  misc_feature (1)..( 8): Result.002 file - promoters60/1027243
tagcagtt

SEQ ID NO: 101052 - DNA, 8 bp, Unknown
  misc_feature (1)..( 8): Result.002 file - promoters60/1027243
tagaagtt

SEQ ID NO: 101053 - DNA, 7 bp, Unknown
  misc_feature (1)..( 7): Result.002 file - promoters60/1027243
agtgaat

SEQ ID NO: 101054 - DNA, 7 bp, Unknown
  misc_feature (1)..( 7): Result.002 file - promoters60/1027243
agttaat

SEQ ID NO: 101055 - DNA, 6 bp, Unknown
  misc_feature (1)..( 6): Result.002 file - promoters60/1027243
caaaac

SEQ ID NO: 101056 - DNA, 6 bp, Unknown
  misc_feature (1)..( 6): Result.002 file - promoters60/1027243
caaaac

SEQ ID NO: 101057 - DNA, 7 bp, Unknown
  misc_feature (1)..( 7): Result.002 file - promoters60/1027243
taactct

SEQ ID NO: 101058 - DNA, 7 bp, Unknown
  misc_feature (1)..( 7): Result.002 file - promoters60/1027243
taactct

SEQ ID NO: 101059 - DNA, 7 bp, Unknown
  misc_feature (1)..( 7): Result.002 file - promoters60/1027243
atttata

SEQ ID NO: 101060 - DNA, 7 bp, Unknown
  misc_feature (1)..( 7): Result.002 file - promoters60/1027243
attcata

SEQ ID NO: 101061 - DNA, 6 bp, Unknown
  misc_feature (1)..( 6): Result.002 file - promoters60/1027243
tattaa

SEQ ID NO: 101062 - DNA, 6 bp, Unknown
  misc_feature (1)..( 6): Result.002 file - promoters60/1027243
tattaa

SEQ ID NO: 101063 - DNA, 9 bp, Unknown
  misc_feature (1)..( 9): Result.002 file - promoters60/1027243
ataataaca

SEQ ID NO: 101064 - DNA, 9 bp, Unknown
  misc_feature (1)..( 9): Result.002 file - promoters60/1027243
ataatcaca

SEQ ID NO: 101065 - DNA, 7 bp, Unknown
  misc_feature (1)..( 7): Result.002 file - promoters60/1027243
atattat

SEQ ID NO: 101066 - DNA, 7 bp, Unknown
  misc_feature (1)..( 7): Result.002 file - promoters60/1027243
atagtat

SEQ ID NO: 101067 - DNA, 6 bp, Unknown
  misc_feature (1)..( 6): Result.002 file - promoters60/1027243
aatctt

SEQ ID NO: 101068 - DNA, 6 bp, Unknown
  misc_feature (1)..( 6): Result.002 file - promoters60/1027243
aatctt

SEQ ID NO: 101069 - DNA, 6 bp, Unknown
  misc_feature (1)..( 6): Result.002 file - promoters60/1027243
tttttt

SEQ ID NO: 101070 - DNA, 6 bp, Unknown
  misc_feature (1)..( 6): Result.002 file - promoters60/1027243
tttttt

SEQ ID NO: 101071 - DNA, 11 bp, Unknown
  misc_feature (1)..( 11): Result.002 file - promoters60/1027243
cattgatactt

SEQ ID NO: 101072 - DNA, 11 bp, Unknown
  misc_feature (1)..( 11): Result.002 file - promoters60/1027243
cattggtactt

SEQ ID NO: 101073 - DNA, 8 bp, Unknown
  misc_feature (1)..( 8): Result.002 file - promoters60/1027243
aaataaaa

SEQ ID NO: 101074 - DNA, 8 bp, Unknown
  misc_feature (1)..( 8): Result.002 file - promoters60/1027243
aaagaaaa

SEQ ID NO: 101075 - DNA, 6 bp, Unknown
  misc_feature (1)..( 6): Result.002 file - promoters60/1027243
taataa

SEQ ID NO: 101076 - DNA, 6 bp, Unknown
  misc_feature (1)..( 6): Result.002 file - promoters60/1027243
taataa

SEQ ID NO: 101077 - DNA, 6 bp, Unknown
  misc_feature (1)..( 6): Result.002 file - promoters60/1027243
cacaca

SEQ ID NO: 101078 - DNA, 6 bp, Unknown
  misc_feature (1)..( 6): Result.002 file - promoters60/1027243
cacaca

SEQ ID NO: 101079 - DNA, 8 bp, Unknown
  misc_feature (1)..( 8): Result.002 file - promoters60/1027243
atttactt

SEQ ID NO: 101080 - DNA, 8 bp, Unknown
  misc_feature (1)..( 8): Result.002 file - promoters60/1027243
atttactt

SEQ ID NO: 101081 - DNA, 8 bp, Unknown
  misc_feature (1)..( 8): Result.002 file - promoters60/1027243
atcaaaac

SEQ ID NO: 101082 - DNA, 8 bp, Unknown
  misc_feature (1)..( 8): Result.002 file - promoters60/1027243
atccaaac

SEQ ID NO: 101083 - DNA, 8 bp, Unknown
  misc_feature (1)..( 8): Result.002 file - promoters60/1027243
cttcttca

SEQ ID NO: 101084 - DNA, 8 bp, Unknown
  misc_feature (1)..( 8): Result.002 file - promoters60/1027243
cttcttca

SEQ ID NO: 101085 - DNA, 8 bp, Unknown
  misc_feature (1)..( 8): Result.002 file - promoters60/1027276
acatattt

SEQ ID NO: 101086 - DNA, 8 bp, Unknown
  misc_feature (1)..( 8): Result.002 file - promoters60/1027276
acatatta

SEQ ID NO: 101087 - DNA, 8 bp, Unknown
  misc_feature (1)..( 8): Result.002 file - promoters60/1027276
acatgttt

SEQ ID NO: 101088 - DNA, 8 bp, Unknown
  misc_feature (1)..( 8): Result.002 file - promoters60/1027276
tcatctta

SEQ ID NO: 101089 - DNA, 8 bp, Unknown
  misc_feature (1)..( 8): Result.002 file - promoters60/1027276
ttatgttt

SEQ ID NO: 101090 - DNA, 8 bp, Unknown
  misc_feature (1)..( 8): Result.002 file - promoters60/1027276
tcatctaa

SEQ ID NO: 101091 - DNA, 12 bp, Unknown
  misc_feature (1)..( 12): Result.002 file - promoters60/1027276
attttaatctct

SEQ ID NO: 101092 - DNA, 12 bp, Unknown
  misc_feature (1)..( 12): Result.002 file - promoters60/1027276
tttttattctat

SEQ ID NO: 101093 - DNA, 12 bp, Unknown
  misc_feature (1)..( 12): Result.002 file - promoters60/1027276
gttgtattctaa

SEQ ID NO: 101094 - DNA, 12 bp, Unknown
  misc_feature (1)..( 12): Result.002 file - promoters60/1027276
caattaatctca

SEQ ID NO: 101095 - DNA, 12 bp, Unknown
  misc_feature (1)..( 12): Result.002 file - promoters60/1027276
tttttacggcgt

SEQ ID NO: 101096 - DNA, 12 bp, Unknown
  misc_feature (1)..( 12): Result.002 file - promoters60/1027276
tgctgaatcaat

SEQ ID NO: 101097 - DNA, 14 bp, Unknown
  misc_feature (1)..( 14): Result.002 file - promoters60/1027327
atttggaaaagacc

SEQ ID NO: 101098 - DNA, 14 bp, Unknown
  misc_feature (1)..( 14): Result.002 file - promoters60/1027327
tgttgtaaatgttg

SEQ ID NO: 101099 - DNA, 14 bp, Unknown
  misc_feature (1)..( 14): Result.002 file - promoters60/1027327
acttgtaaatgttt

SEQ ID NO: 101100 - DNA, 14 bp, Unknown
  misc_feature (1)..( 14): Result.002 file - promoters60/1027327
tcaagtaaatttaa

SEQ ID NO: 101101 - DNA, 14 bp, Unknown
  misc_feature (1)..( 14): Result.002 file - promoters60/1027327
acttataagtctct

SEQ ID NO: 101102 - DNA, 14 bp, Unknown
  misc_feature (1)..( 14): Result.002 file - promoters60/1027327
aataataaattaaa

SEQ ID NO: 101103 - DNA, 14 bp, Unknown
  misc_feature (1)..( 14): Result.002 file - promoters60/1027327
agaaacgaatcaat

SEQ ID NO: 101104 - DNA, 21 bp, Unknown
  misc_feature (1)..( 21): Result.002 file - promoters60/1027327
tatttaaaaaattatataatt

SEQ ID NO: 101105 - DNA, 21 bp, Unknown
  misc_feature (1)..( 21): Result.002 file - promoters60/1027327
gctagagaaaattcatttaag

SEQ ID NO: 101106 - DNA, 21 bp, Unknown
  misc_feature (1)..( 21): Result.002 file - promoters60/1027327
ggaagaataaattttatcatt

SEQ ID NO: 101107 - DNA, 21 bp, Unknown
  misc_feature (1)..( 21): Result.002 file - promoters60/1027327
aaaggataaaattagtgaact

SEQ ID NO: 101108 - DNA, 21 bp, Unknown
  misc_feature (1)..( 21): Result.002 file - promoters60/1027327
gagaacacaaagtcacaagac

SEQ ID NO: 101109 - DNA, 21 bp, Unknown
  misc_feature (1)..( 21): Result.002 file - promoters60/1027327
gcacataaaactttgaaccca

SEQ ID NO: 101110 - DNA, 21 bp, Unknown
  misc_feature (1)..( 21): Result.002 file - promoters60/1027327
tttttcactaattcataaaat

SEQ ID NO: 101111 - DNA, 12 bp, Unknown
  misc_feature (1)..( 12): Result.002 file - promoters60/1027327
aaaaattatata

SEQ ID NO: 101112 - DNA, 12 bp, Unknown
  misc_feature (1)..( 12): Result.002 file - promoters60/1027327
tcaatttatatc

SEQ ID NO: 101113 - DNA, 13 bp, Unknown
  misc_feature (1)..( 13): Result.002 file - promoters60/1027327
aaattttatcatt

SEQ ID NO: 101114 - DNA, 14 bp, Unknown
  misc_feature (1)..( 14): Result.002 file - promoters60/1027327
ttcactaattcata

SEQ ID NO: 101115 - DNA, 14 bp, Unknown
  misc_feature (1)..( 14): Result.002 file - promoters60/1027327
acttttaatcgatc

SEQ ID NO: 101116 - DNA, 14 bp, Unknown
  misc_feature (1)..( 14): Result.002 file - promoters60/1027327
aaactttgaaccca

SEQ ID NO: 101117 - DNA, 17 bp, Unknown
  misc_feature (1)..( 17): Result.002 file - promoters60/1027327
tatataatttaaatatt

SEQ ID NO: 101118 - DNA, 17 bp, Unknown
  misc_feature (1)..( 17): Result.002 file - promoters60/1027327
cataaaatacaacttct

SEQ ID NO: 101119 - DNA, 17 bp, Unknown
  misc_feature (1)..( 17): Result.002 file - promoters60/1027327
gaataaattttatcatt

SEQ ID NO: 101120 - DNA, 17 bp, Unknown
  misc_feature (1)..( 17): Result.002 file - promoters60/1027327
aatcaatttatatcttt

SEQ ID NO: 101121 - DNA, 17 bp, Unknown
  misc_feature (1)..( 17): Result.002 file - promoters60/1027327
gaaaaaatagtttacct

SEQ ID NO: 101122 - DNA, 17 bp, Unknown
  misc_feature (1)..( 17): Result.002 file - promoters60/1027327
ataaaactttgaaccca

SEQ ID NO: 101123 - DNA, 10 bp, Unknown
  misc_feature (1)..( 10): Result.002 file - promoters60/1027327
gtacattact

SEQ ID NO: 101124 - DNA, 10 bp, Unknown
  misc_feature (1)..( 10): Result.002 file - promoters60/1027327
gtaaatttaa

SEQ ID NO: 101125 - DNA, 10 bp, Unknown
  misc_feature (1)..( 10): Result.002 file - promoters60/1027327
gtaaatgttg

SEQ ID NO: 101126 - DNA, 11 bp, Unknown
  misc_feature (1)..( 11): Result.002 file - promoters60/1027327
tcaaacttata

SEQ ID NO: 101127 - DNA, 11 bp, Unknown
  misc_feature (1)..( 11): Result.002 file - promoters60/1027327
ataaattaaac

SEQ ID NO: 101128 - DNA, 11 bp, Unknown
  misc_feature (1)..( 11): Result.002 file - promoters60/1027327
aacgaatcaat

SEQ ID NO: 101129 - DNA, 12 bp, Unknown
  misc_feature (1)..( 12): Result.002 file - promoters60/1027399
tgataaaaatat

SEQ ID NO: 101130 - DNA, 12 bp, Unknown
  misc_feature (1)..( 12): Result.002 file - promoters60/1027399
tgatcaaatcaa

SEQ ID NO: 101131 - DNA, 12 bp, Unknown
  misc_feature (1)..( 12): Result.002 file - promoters60/1027399
tgctaaaaatcc

SEQ ID NO: 101132 - DNA, 12 bp, Unknown
  misc_feature (1)..( 12): Result.002 file - promoters60/1027399
tgaccaaaaggc

SEQ ID NO: 101133 - DNA, 12 bp, Unknown
  misc_feature (1)..( 12): Result.002 file - promoters60/1027399
aactaaaagaat

SEQ ID NO: 101134 - DNA, 12 bp, Unknown
  misc_feature (1)..( 12): Result.002 file - promoters60/1027399
tggtaaaacatc

SEQ ID NO: 101135 - DNA, 10 bp, Unknown
  misc_feature (1)..( 10): Result.002 file - promoters60/1027399
gaaattaaag

SEQ ID NO: 101136 - DNA, 10 bp, Unknown
  misc_feature (1)..( 10): Result.002 file - promoters60/1027399
caaactaatg

SEQ ID NO: 101137 - DNA, 10 bp, Unknown
  misc_feature (1)..( 10): Result.002 file - promoters60/1027399
ataagtaatt

SEQ ID NO: 101138 - DNA, 10 bp, Unknown
  misc_feature (1)..( 10): Result.002 file - promoters60/1027399
ccaagacatt

SEQ ID NO: 101139 - DNA, 10 bp, Unknown
  misc_feature (1)..( 10): Result.002 file - promoters60/1027399
taaataaacc

SEQ ID NO: 101140 - DNA, 10 bp, Unknown
  misc_feature (1)..( 10): Result.002 file - promoters60/1027399
taaagccata

SEQ ID NO: 101141 - DNA, 13 bp, Unknown
  misc_feature (1)..( 13): Result.002 file - promoters60/1027406
acaaactgtgaaa

SEQ ID NO: 101142 - DNA, 13 bp, Unknown
  misc_feature (1)..( 13): Result.002 file - promoters60/1027406
aaaaaatgtgaaa

SEQ ID NO: 101143 - DNA, 13 bp, Unknown
  misc_feature (1)..( 13): Result.002 file - promoters60/1027406
aaaaaataacttc

SEQ ID NO: 101144 - DNA, 13 bp, Unknown
  misc_feature (1)..( 13): Result.002 file - promoters60/1027406
aaataatttttag

SEQ ID NO: 101145 - DNA, 13 bp, Unknown
  misc_feature (1)..( 13): Result.002 file - promoters60/1027406
tgatagtttagaa

SEQ ID NO: 101146 - DNA, 13 bp, Unknown
  misc_feature (1)..( 13): Result.002 file - promoters60/1027406
taaacatatttga

SEQ ID NO: 101147 - DNA, 11 bp, Unknown
  misc_feature (1)..( 11): Result.002 file - promoters60/1027406
ccaaatttggt

SEQ ID NO: 101148 - DNA, 11 bp, Unknown
  misc_feature (1)..( 11): Result.002 file - promoters60/1027406
ccaattttaag

SEQ ID NO: 101149 - DNA, 11 bp, Unknown
  misc_feature (1)..( 11): Result.002 file - promoters60/1027406
attattctaag

SEQ ID NO: 101150 - DNA, 11 bp, Unknown
  misc_feature (1)..( 11): Result.002 file - promoters60/1027406
aagatttttct

SEQ ID NO: 101151 - DNA, 11 bp, Unknown
  misc_feature (1)..( 11): Result.002 file - promoters60/1027406
gacattttttt

SEQ ID NO: 101152 - DNA, 9 bp, Unknown
  misc_feature (1)..( 9): Result.002 file - promoters60/1027406
aattcttat

SEQ ID NO: 101153 - DNA, 9 bp, Unknown
  misc_feature (1)..( 9): Result.002 file - promoters60/1027406
aatttttac

SEQ ID NO: 101154 - DNA, 9 bp, Unknown
  misc_feature (1)..( 9): Result.002 file - promoters60/1027406
gtattttac

SEQ ID NO: 101155 - DNA, 9 bp, Unknown
  misc_feature (1)..( 9): Result.002 file - promoters60/1027406
ggattttaa

SEQ ID NO: 101156 - DNA, 9 bp, Unknown
  misc_feature (1)..( 9): Result.002 file - promoters60/1027406
atgttttaa

SEQ ID NO: 101157 - DNA, 10 bp, Unknown
  misc_feature (1)..( 10): Result.002 file - promoters60/1027406
aatgttgtaa

SEQ ID NO: 101158 - DNA, 9 bp, Unknown
  misc_feature (1)..( 9): Result.002 file - promoters60/1027406
aattaatat

SEQ ID NO: 101159 - DNA, 9 bp, Unknown
  misc_feature (1)..( 9): Result.002 file - promoters60/1027406
aatgaatat

SEQ ID NO: 101160 - DNA, 9 bp, Unknown
  misc_feature (1)..( 9): Result.002 file - promoters60/1027406
aatttttgg

SEQ ID NO: 101161 - DNA, 9 bp, Unknown
  misc_feature (1)..( 9): Result.002 file - promoters60/1027406
gatgaatgt

SEQ ID NO: 101162 - DNA, 9 bp, Unknown
  misc_feature (1)..( 9): Result.002 file - promoters60/1027406
tttgaataa

SEQ ID NO: 101163 - DNA, 11 bp, Unknown
  misc_feature (1)..( 11): Result.002 file - promoters60/1027406
taatttttgag

SEQ ID NO: 101164 - DNA, 11 bp, Unknown
  misc_feature (1)..( 11): Result.002 file - promoters60/1027406
taactttttct

SEQ ID NO: 101165 - DNA, 11 bp, Unknown
  misc_feature (1)..( 11): Result.002 file - promoters60/1027406
gcggtttgtga

SEQ ID NO: 101166 - DNA, 11 bp, Unknown
  misc_feature (1)..( 11): Result.002 file - promoters60/1027406
tttttttttgc

SEQ ID NO: 101167 - DNA, 11 bp, Unknown
  misc_feature (1)..( 11): Result.002 file - promoters60/1027406
gaactttaaaa

SEQ ID NO: 101168 - DNA, 13 bp, Unknown
  misc_feature (1)..( 13): Result.002 file - promoters60/1027406
ttaaggattttcc

SEQ ID NO: 101169 - DNA, 13 bp, Unknown
  misc_feature (1)..( 13): Result.002 file - promoters60/1027406
ttaaagatttttc

SEQ ID NO: 101170 - DNA, 13 bp, Unknown
  misc_feature (1)..( 13): Result.002 file - promoters60/1027406
taggagatttagg

SEQ ID NO: 101171 - DNA, 14 bp, Unknown
  misc_feature (1)..( 14): Result.002 file - promoters60/1027406
catattattattct

SEQ ID NO: 101172 - DNA, 14 bp, Unknown
  misc_feature (1)..( 14): Result.002 file - promoters60/1027406
cacgacattttttt

SEQ ID NO: 101173 - DNA, 18 bp, Unknown
  misc_feature (1)..( 18): Result.002 file - promoters60/1027406
attttaagaaagtatata

SEQ ID NO: 101174 - DNA, 18 bp, Unknown
  misc_feature (1)..( 18): Result.002 file - promoters60/1027406
gttttaaggataaattac

SEQ ID NO: 101175 - DNA, 18 bp, Unknown
  misc_feature (1)..( 18): Result.002 file - promoters60/1027406
attctaagtttggttttt

SEQ ID NO: 101176 - DNA, 18 bp, Unknown
  misc_feature (1)..( 18): Result.002 file - promoters60/1027406
tttttaaaaaactatata

SEQ ID NO: 101177 - DNA, 18 bp, Unknown
  misc_feature (1)..( 18): Result.002 file - promoters60/1027406
tcgataaaagctaatgtt

SEQ ID NO: 101178 - DNA, 18 bp, Unknown
  misc_feature (1)..( 18): Result.002 file - promoters60/1027406
attttaagaaagtatata

SEQ ID NO: 101179 - DNA, 18 bp, Unknown
  misc_feature (1)..( 18): Result.002 file - promoters60/1027406
tgaggttttaaggataaa

SEQ ID NO: 101180 - DNA, 18 bp, Unknown
  misc_feature (1)..( 18): Result.002 file - promoters60/1027406
tttttaaaaaactatata

SEQ ID NO: 101181 - DNA, 19 bp, Unknown
  misc_feature (1)..( 19): Result.002 file - promoters60/1027406
attcgataaaagctaatgt

SEQ ID NO: 101182 - DNA, 19 bp, Unknown
  misc_feature (1)..( 19): Result.002 file - promoters60/1027406
tttttatctgagaaatttc

SEQ ID NO: 101183 - DNA, 8 bp, Unknown
  misc_feature (1)..( 8): Result.002 file - promoters60/1027406
atgaaatg

SEQ ID NO: 101184 - DNA, 8 bp, Unknown
  misc_feature (1)..( 8): Result.002 file - promoters60/1027406
ctgaaatt

SEQ ID NO: 101185 - DNA, 8 bp, Unknown
  misc_feature (1)..( 8): Result.002 file - promoters60/1027406
ttgatatg

SEQ ID NO: 101186 - DNA, 8 bp, Unknown
  misc_feature (1)..( 8): Result.002 file - promoters60/1027406
atgaaatc

SEQ ID NO: 101187 - DNA, 8 bp, Unknown
  misc_feature (1)..( 8): Result.002 file - promoters60/1027406
ctgcaatt

SEQ ID NO: 101188 - DNA, 10 bp, Unknown
  misc_feature (1)..( 10): Result.002 file - promoters60/1027434
attattgttt

SEQ ID NO: 101189 - DNA, 10 bp, Unknown
  misc_feature (1)..( 10): Result.002 file - promoters60/1027434
gaaatttttt

SEQ ID NO: 101190 - DNA, 10 bp, Unknown
  misc_feature (1)..( 10): Result.002 file - promoters60/1027434
aaaatttcgc

SEQ ID NO: 101191 - DNA, 10 bp, Unknown
  misc_feature (1)..( 10): Result.002 file - promoters60/1027434
attatttttc

SEQ ID NO: 101192 - DNA, 11 bp, Unknown
  misc_feature (1)..( 11): Result.002 file - promoters60/1027452
taatttaaccc

SEQ ID NO: 101193 - DNA, 11 bp, Unknown
  misc_feature (1)..( 11): Result.002 file - promoters60/1027452
taatttcttaa

SEQ ID NO: 101194 - DNA, 11 bp, Unknown
  misc_feature (1)..( 11): Result.002 file - promoters60/1027452
aaatttcgtaa

SEQ ID NO: 101195 - DNA, 11 bp, Unknown
  misc_feature (1)..( 11): Result.002 file - promoters60/1027452
tgattgcgtct

SEQ ID NO: 101196 - DNA, 11 bp, Unknown
  misc_feature (1)..( 11): Result.002 file - promoters60/1027456
ccttttttttg

SEQ ID NO: 101197 - DNA, 11 bp, Unknown
  misc_feature (1)..( 11): Result.002 file - promoters60/1027456
actttattttg

SEQ ID NO: 101198 - DNA, 11 bp, Unknown
  misc_feature (1)..( 11): Result.002 file - promoters60/1027456
tttctattttt

SEQ ID NO: 101199 - DNA, 11 bp, Unknown
  misc_feature (1)..( 11): Result.002 file - promoters60/1027456
actatatatat

SEQ ID NO: 101200 - DNA, 7 bp, Unknown
  misc_feature (1)..( 7): Result.002 file - promoters60/1027456
ttttctt

SEQ ID NO: 101201 - DNA, 7 bp, Unknown
  misc_feature (1)..( 7): Result.002 file - promoters60/1027456
gtttctt

SEQ ID NO: 101202 - DNA, 8 bp, Unknown
  misc_feature (1)..( 8): Result.002 file - promoters60/1027456
tttatctg

SEQ ID NO: 101203 - DNA, 8 bp, Unknown
  misc_feature (1)..( 8): Result.002 file - promoters60/1027456
tgtatctg

SEQ ID NO: 101204 - DNA, 7 bp, Unknown
  misc_feature (1)..( 7): Result.002 file - promoters60/1027456
attatcc

SEQ ID NO: 101205 - DNA, 7 bp, Unknown
  misc_feature (1)..( 7): Result.002 file - promoters60/1027456
attgtcc

SEQ ID NO: 101206 - DNA, 7 bp, Unknown
  misc_feature (1)..( 7): Result.002 file - promoters60/1027456
attatca

SEQ ID NO: 101207 - DNA, 7 bp, Unknown
  misc_feature (1)..( 7): Result.002 file - promoters60/1027456
gttatcc

SEQ ID NO: 101208 - DNA, 8 bp, Unknown
  misc_feature (1)..( 8): Result.002 file - promoters60/1027456
tctttttt

SEQ ID NO: 101209 - DNA, 8 bp, Unknown
  misc_feature (1)..( 8): Result.002 file - promoters60/1027456
tatttttt

SEQ ID NO: 101210 - DNA, 8 bp, Unknown
  misc_feature (1)..( 8): Result.002 file - promoters60/1027456
tcttttta

SEQ ID NO: 101211 - DNA, 9 bp, Unknown
  misc_feature (1)..( 9): Result.002 file - promoters60/1027456
tatttattt

SEQ ID NO: 101212 - DNA, 9 bp, Unknown
  misc_feature (1)..( 9): Result.002 file - promoters60/1027456
aatttatgg

SEQ ID NO: 101213 - DNA, 9 bp, Unknown
  misc_feature (1)..( 9): Result.002 file - promoters60/1027456
tatcagtca

SEQ ID NO: 101214 - DNA, 9 bp, Unknown
  misc_feature (1)..( 9): Result.002 file - promoters60/1027456
tatgagtca

SEQ ID NO: 101215 - DNA, 9 bp, Unknown
  misc_feature (1)..( 9): Result.002 file - promoters60/1027456
gatgattca

SEQ ID NO: 101216 - DNA, 9 bp, Unknown
  misc_feature (1)..( 9): Result.002 file - promoters60/1027456
aatgtgtca

SEQ ID NO: 101217 - DNA, 9 bp, Unknown
  misc_feature (1)..( 9): Result.002 file - promoters60/1027456
tatgatttc

SEQ ID NO: 101218 - DNA, 9 bp, Unknown
  misc_feature (1)..( 9): Result.002 file - promoters60/1027456
ttaatttct

SEQ ID NO: 101219 - DNA, 9 bp, Unknown
  misc_feature (1)..( 9): Result.002 file - promoters60/1027456
ataaattca

SEQ ID NO: 101220 - DNA, 9 bp, Unknown
  misc_feature (1)..( 9): Result.002 file - promoters60/1027456
ttattttct

SEQ ID NO: 101221 - DNA, 9 bp, Unknown
  misc_feature (1)..( 9): Result.002 file - promoters60/1027456
gaaaaatca

SEQ ID NO: 101222 - DNA, 9 bp, Unknown
  misc_feature (1)..( 9): Result.002 file - promoters60/1027456
aaaaattca

SEQ ID NO: 101223 - DNA, 16 bp, Unknown
  misc_feature (1)..( 16): Result.002 file - promoters60/1027456
tcatctgaaaaatcaa

SEQ ID NO: 101224 - DNA, 16 bp, Unknown
  misc_feature (1)..( 16): Result.002 file - promoters60/1027456
cgattttaaaaattca

SEQ ID NO: 101225 - DNA, 16 bp, Unknown
  misc_feature (1)..( 16): Result.002 file - promoters60/1027456
tatatatataaattca

SEQ ID NO: 101226 - DNA, 16 bp, Unknown
  misc_feature (1)..( 16): Result.002 file - promoters60/1027456
tatatatatatattta

SEQ ID NO: 101227 - DNA, 11 bp, Unknown
  misc_feature (1)..( 11): Result.002 file - promoters60/1027456
agaattgttga

SEQ ID NO: 101228 - DNA, 11 bp, Unknown
  misc_feature (1)..( 11): Result.002 file - promoters60/1027456
agaattgaaat

SEQ ID NO: 101229 - DNA, 11 bp, Unknown
  misc_feature (1)..( 11): Result.002 file - promoters60/1027456
ttaattgtatt

SEQ ID NO: 101230 - DNA, 11 bp, Unknown
  misc_feature (1)..( 11): Result.002 file - promoters60/1027456
ttcattgcatt

SEQ ID NO: 101231 - DNA, 13 bp, Unknown
  misc_feature (1)..( 13): Result.002 file - promoters60/1027456
gaagagaacctga

SEQ ID NO: 101232 - DNA, 13 bp, Unknown
  misc_feature (1)..( 13): Result.002 file - promoters60/1027456
gaaaagatatata

SEQ ID NO: 101233 - DNA, 13 bp, Unknown
  misc_feature (1)..( 13): Result.002 file - promoters60/1027456
agaaatatatata

SEQ ID NO: 101234 - DNA, 13 bp, Unknown
  misc_feature (1)..( 13): Result.002 file - promoters60/1027456
ccaaatttatggt

SEQ ID NO: 101235 - DNA, 10 bp, Unknown
  misc_feature (1)..( 10): Result.002 file - promoters60/1027456
attcgtttag

SEQ ID NO: 101236 - DNA, 10 bp, Unknown
  misc_feature (1)..( 10): Result.002 file - promoters60/1027456
tttcatttta

SEQ ID NO: 101237 - DNA, 10 bp, Unknown
  misc_feature (1)..( 10): Result.002 file - promoters60/1027456
ttttatttct

SEQ ID NO: 101238 - DNA, 10 bp, Unknown
  misc_feature (1)..( 10): Result.002 file - promoters60/1027456
actaatttta

SEQ ID NO: 101239 - DNA, 11 bp, Unknown
  misc_feature (1)..( 11): Result.002 file - promoters60/1027456
acatcttaaat

SEQ ID NO: 101240 - DNA, 11 bp, Unknown
  misc_feature (1)..( 11): Result.002 file - promoters60/1027456
caagctttaat

SEQ ID NO: 101241 - DNA, 11 bp, Unknown
  misc_feature (1)..( 11): Result.002 file - promoters60/1027456
attacttactc

SEQ ID NO: 101242 - DNA, 11 bp, Unknown
  misc_feature (1)..( 11): Result.002 file - promoters60/1027456
tttatttaata

SEQ ID NO: 101243 - DNA, 14 bp, Unknown
  misc_feature (1)..( 14): Result.002 file - promoters60/1027456
tttttacttacaaa

SEQ ID NO: 101244 - DNA, 14 bp, Unknown
  misc_feature (1)..( 14): Result.002 file - promoters60/1027456
taattaattaaaaa

SEQ ID NO: 101245 - DNA, 14 bp, Unknown
  misc_feature (1)..( 14): Result.002 file - promoters60/1027456
ccattacttactct

SEQ ID NO: 101246 - DNA, 14 bp, Unknown
  misc_feature (1)..( 14): Result.002 file - promoters60/1027456
tttttactgtatta

SEQ ID NO: 101247 - DNA, 12 bp, Unknown
  misc_feature (1)..( 12): Result.002 file - promoters60/1027456
tacaatatattt

SEQ ID NO: 101248 - DNA, 12 bp, Unknown
  misc_feature (1)..( 12): Result.002 file - promoters60/1027456
tacaaaataaat

SEQ ID NO: 101249 - DNA, 12 bp, Unknown
  misc_feature (1)..( 12): Result.002 file - promoters60/1027456
aataatttattt

SEQ ID NO: 101250 - DNA, 12 bp, Unknown
  misc_feature (1)..( 12): Result.002 file - promoters60/1027456
tttaattaatta

SEQ ID NO: 101251 - DNA, 15 bp, Unknown
  misc_feature (1)..( 15): Result.002 file - promoters60/1027456
ttagtaaatcatctc

SEQ ID NO: 101252 - DNA, 15 bp, Unknown
  misc_feature (1)..( 15): Result.002 file - promoters60/1027456
tctctgtatcttctt

SEQ ID NO: 101253 - DNA, 15 bp, Unknown
  misc_feature (1)..( 15): Result.002 file - promoters60/1027456
ttagtaattcattgt

SEQ ID NO: 101254 - DNA, 15 bp, Unknown
  misc_feature (1)..( 15): Result.002 file - promoters60/1027456
gtacattttcgttgt

SEQ ID NO: 101255 - DNA, 14 bp, Unknown
  misc_feature (1)..( 14): Result.002 file - promoters60/1027460
ctttgtcaaaaata

SEQ ID NO: 101256 - DNA, 14 bp, Unknown
  misc_feature (1)..( 14): Result.002 file - promoters60/1027460
gactttgaaacata

SEQ ID NO: 101257 - DNA, 14 bp, Unknown
  misc_feature (1)..( 14): Result.002 file - promoters60/1027460
gacattgacacaga

SEQ ID NO: 101258 - DNA, 9 bp, Unknown
  misc_feature (1)..( 9): Result.002 file - promoters60/1027460
aaacataat

SEQ ID NO: 101259 - DNA, 9 bp, Unknown
  misc_feature (1)..( 9): Result.002 file - promoters60/1027460
aaaaatagt

SEQ ID NO: 101260 - DNA, 9 bp, Unknown
  misc_feature (1)..( 9): Result.002 file - promoters60/1027460
taaaatata

SEQ ID NO: 101261 - DNA, 9 bp, Unknown
  misc_feature (1)..( 9): Result.002 file - promoters60/1027460
gaaaacata

SEQ ID NO: 101262 - DNA, 9 bp, Unknown
  misc_feature (1)..( 9): Result.002 file - promoters60/1027460
gaaaaccgg

SEQ ID NO: 101263 - DNA, 9 bp, Unknown
  misc_feature (1)..( 9): Result.002 file - promoters60/1027460
taaaatata

SEQ ID NO: 101264 - DNA, 8 bp, Unknown
  misc_feature (1)..( 8): Result.002 file - promoters60/1027460
atgagaac

SEQ ID NO: 101265 - DNA, 8 bp, Unknown
  misc_feature (1)..( 8): Result.002 file - promoters60/1027460
aagagaac

SEQ ID NO: 101266 - DNA, 8 bp, Unknown
  misc_feature (1)..( 8): Result.002 file - promoters60/1027460
aagaaaac

SEQ ID NO: 101267 - DNA, 7 bp, Unknown
  misc_feature (1)..( 7): Result.002 file - promoters60/1027460
gagtaat

SEQ ID NO: 101268 - DNA, 7 bp, Unknown
  misc_feature (1)..( 7): Result.002 file - promoters60/1027460
gagtaaa

SEQ ID NO: 101269 - DNA, 7 bp, Unknown
  misc_feature (1)..( 7): Result.002 file - promoters60/1027460
gaggaaa

SEQ ID NO: 101270 - DNA, 13 bp, Unknown
  misc_feature (1)..( 13): Result.002 file - promoters60/1027460
agactttgaaaca

SEQ ID NO: 101271 - DNA, 13 bp, Unknown
  misc_feature (1)..( 13): Result.002 file - promoters60/1027460
agactttcgttcc

SEQ ID NO: 101272 - DNA, 13 bp, Unknown
  misc_feature (1)..( 13): Result.002 file - promoters60/1027460
tgacattgacaca

SEQ ID NO: 101273 - DNA, 11 bp, Unknown
  misc_feature (1)..( 11): Result.002 file - promoters60/1027492
acctaagttta

SEQ ID NO: 101274 - DNA, 11 bp, Unknown
  misc_feature (1)..( 11): Result.002 file - promoters60/1027492
agtaaagatta

SEQ ID NO: 101275 - DNA, 11 bp, Unknown
  misc_feature (1)..( 11): Result.002 file - promoters60/1027492
tctgaagtttc

SEQ ID NO: 101276 - DNA, 11 bp, Unknown
  misc_feature (1)..( 11): Result.002 file - promoters60/1027492
tcagaattttt

SEQ ID NO: 101277 - DNA, 11 bp, Unknown
  misc_feature (1)..( 11): Result.002 file - promoters60/1027492
atcagagtttt

SEQ ID NO: 101278 - DNA, 11 bp, Unknown
  misc_feature (1)..( 11): Result.002 file - promoters60/1027492
atcagaaccca

SEQ ID NO: 101279 - DNA, 16 bp, Unknown
  misc_feature (1)..( 16): Result.002 file - promoters60/1027492
tgtacatattgagagg

SEQ ID NO: 101280 - DNA, 16 bp, Unknown
  misc_feature (1)..( 16): Result.002 file - promoters60/1027492
aaagattattgatata

SEQ ID NO: 101281 - DNA, 16 bp, Unknown
  misc_feature (1)..( 16): Result.002 file - promoters60/1027492
gtggttgattgatagg

SEQ ID NO: 101282 - DNA, 16 bp, Unknown
  misc_feature (1)..( 16): Result.002 file - promoters60/1027492
cagaatttttgcgagc

SEQ ID NO: 101283 - DNA, 16 bp, Unknown
  misc_feature (1)..( 16): Result.002 file - promoters60/1027492
tcagagttttaaaaag

SEQ ID NO: 101284 - DNA, 16 bp, Unknown
  misc_feature (1)..( 16): Result.002 file - promoters60/1027492
gagaggaatcagaacc

SEQ ID NO: 101285 - DNA, 13 bp, Unknown
  misc_feature (1)..( 13): Result.002 file - promoters60/1027492
acaatgggctggg

SEQ ID NO: 101286 - DNA, 13 bp, Unknown
  misc_feature (1)..( 13): Result.002 file - promoters60/1027492
gaaataggcccaa

SEQ ID NO: 101287 - DNA, 13 bp, Unknown
  misc_feature (1)..( 13): Result.002 file - promoters60/1027492
ctgttgggctttt

SEQ ID NO: 101288 - DNA, 13 bp, Unknown
  misc_feature (1)..( 13): Result.002 file - promoters60/1027492
taattgggctttt

SEQ ID NO: 101289 - DNA, 13 bp, Unknown
  misc_feature (1)..( 13): Result.002 file - promoters60/1027492
taaaaaggcccat

SEQ ID NO: 101290 - DNA, 13 bp, Unknown
  misc_feature (1)..( 13): Result.002 file - promoters60/1027492
taaaaaatatctg

SEQ ID NO: 101291 - DNA, 15 bp, Unknown
  misc_feature (1)..( 15): Result.002 file - promoters60/1027590
tagtaagattctaga

SEQ ID NO: 101292 - DNA, 15 bp, Unknown
  misc_feature (1)..( 15): Result.002 file - promoters60/1027590
aactaggattcttac

SEQ ID NO: 101293 - DNA, 15 bp, Unknown
  misc_feature (1)..( 15): Result.002 file - promoters60/1027590
aagagagattctttg

SEQ ID NO: 101294 - DNA, 15 bp, Unknown
  misc_feature (1)..( 15): Result.002 file - promoters60/1027590
tttatatatttttaa

SEQ ID NO: 101295 - DNA, 15 bp, Unknown
  misc_feature (1)..( 15): Result.002 file - promoters60/1027590
tttatatattttgtc

SEQ ID NO: 101296 - DNA, 15 bp, Unknown
  misc_feature (1)..( 15): Result.002 file - promoters60/1027590
accatggatgctttt

SEQ ID NO: 101297 - DNA, 15 bp, Unknown
  misc_feature (1)..( 15): Result.002 file - promoters60/1027590
aaagatcattcgtac

SEQ ID NO: 101298 - DNA, 10 bp, Unknown
  misc_feature (1)..( 10): Result.002 file - promoters60/1027590
tatttttaaa

SEQ ID NO: 101299 - DNA, 10 bp, Unknown
  misc_feature (1)..( 10): Result.002 file - promoters60/1027590
gctttttaac

SEQ ID NO: 101300 - DNA, 10 bp, Unknown
  misc_feature (1)..( 10): Result.002 file - promoters60/1027590
gattcttact

SEQ ID NO: 101301 - DNA, 10 bp, Unknown
  misc_feature (1)..( 10): Result.002 file - promoters60/1027590
gattttttta

SEQ ID NO: 101302 - DNA, 10 bp, Unknown
  misc_feature (1)..( 10): Result.002 file - promoters60/1027590
cttgtttaac

SEQ ID NO: 101303 - DNA, 10 bp, Unknown
  misc_feature (1)..( 10): Result.002 file - promoters60/1027590
cattcgtacc

SEQ ID NO: 101304 - DNA, 10 bp, Unknown
  misc_feature (1)..( 10): Result.002 file - promoters60/1027590
gattctttgg

SEQ ID NO: 101305 - DNA, 11 bp, Unknown
  misc_feature (1)..( 11): Result.002 file - promoters60/1027590
ttattttcctc

SEQ ID NO: 101306 - DNA, 11 bp, Unknown
  misc_feature (1)..( 11): Result.002 file - promoters60/1027590
gtattttttgt

SEQ ID NO: 101307 - DNA, 11 bp, Unknown
  misc_feature (1)..( 11): Result.002 file - promoters60/1027590
agattttttgt

SEQ ID NO: 101308 - DNA, 11 bp, Unknown
  misc_feature (1)..( 11): Result.002 file - promoters60/1027590
gggttttttcc

SEQ ID NO: 101309 - DNA, 11 bp, Unknown
  misc_feature (1)..( 11): Result.002 file - promoters60/1027590
gtatttaaaca

SEQ ID NO: 101310 - DNA, 11 bp, Unknown
  misc_feature (1)..( 11): Result.002 file - promoters60/1027590
ctatttaaaac

SEQ ID NO: 101311 - DNA, 12 bp, Unknown
  misc_feature (1)..( 12): Result.002 file - promoters60/1027596
tactttctggca

SEQ ID NO: 101312 - DNA, 12 bp, Unknown
  misc_feature (1)..( 12): Result.002 file - promoters60/1027596
tacttttaaccc

SEQ ID NO: 101313 - DNA, 12 bp, Unknown
  misc_feature (1)..( 12): Result.002 file - promoters60/1027596
aactttcatata

SEQ ID NO: 101314 - DNA, 12 bp, Unknown
  misc_feature (1)..( 12): Result.002 file - promoters60/1027596
aactttctggga

SEQ ID NO: 101315 - DNA, 12 bp, Unknown
  misc_feature (1)..( 12): Result.002 file - promoters60/1027596
ttcttcctggga

SEQ ID NO: 101316 - DNA, 8 bp, Unknown
  misc_feature (1)..( 8): Result.002 file - promoters60/1027596
aaaaagtt

SEQ ID NO: 101317 - DNA, 8 bp, Unknown
  misc_feature (1)..( 8): Result.002 file - promoters60/1027596
aaaaagtc

SEQ ID NO: 101318 - DNA, 8 bp, Unknown
  misc_feature (1)..( 8): Result.002 file - promoters60/1027596
ggaaagtt

SEQ ID NO: 101319 - DNA, 8 bp, Unknown
  misc_feature (1)..( 8): Result.002 file - promoters60/1027596
aaaaagaa

SEQ ID NO: 101320 - DNA, 8 bp, Unknown
  misc_feature (1)..( 8): Result.002 file - promoters60/1027596
aaaaattt

SEQ ID NO: 101321 - DNA, 11 bp, Unknown
  misc_feature (1)..( 11): Result.002 file - promoters60/1027596
cttattattgt

SEQ ID NO: 101322 - DNA, 11 bp, Unknown
  misc_feature (1)..( 11): Result.002 file - promoters60/1027596
attattattca

SEQ ID NO: 101323 - DNA, 12 bp, Unknown
  misc_feature (1)..( 12): Result.002 file - promoters60/1027596
tttctttatttc

SEQ ID NO: 101324 - DNA, 12 bp, Unknown
  misc_feature (1)..( 12): Result.002 file - promoters60/1027596
cttcttaattaa

SEQ ID NO: 101325 - DNA, 12 bp, Unknown
  misc_feature (1)..( 12): Result.002 file - promoters60/1027596
catttttagact

SEQ ID NO: 101326 - DNA, 12 bp, Unknown
  misc_feature (1)..( 12): Result.002 file - promoters60/1027596
agatttaattct

SEQ ID NO: 101327 - DNA, 11 bp, Unknown
  misc_feature (1)..( 11): Result.002 file - promoters60/1027596
agagaaagaaa

SEQ ID NO: 101328 - DNA, 11 bp, Unknown
  misc_feature (1)..( 11): Result.002 file - promoters60/1027596
gacgaaagacg

SEQ ID NO: 101329 - DNA, 11 bp, Unknown
  misc_feature (1)..( 11): Result.002 file - promoters60/1027596
agaggaagtga

SEQ ID NO: 101330 - DNA, 11 bp, Unknown
  misc_feature (1)..( 11): Result.002 file - promoters60/1027596
gagtaaataaa

SEQ ID NO: 101331 - DNA, 11 bp, Unknown
  misc_feature (1)..( 11): Result.002 file - promoters60/1027596
cgctaattaaa

SEQ ID NO: 101332 - DNA, 11 bp, Unknown
  misc_feature (1)..( 11): Result.002 file - promoters60/1027596
ttatttacttt

SEQ ID NO: 101333 - DNA, 11 bp, Unknown
  misc_feature (1)..( 11): Result.002 file - promoters60/1027596
ttattttcttt

SEQ ID NO: 101334 - DNA, 11 bp, Unknown
  misc_feature (1)..( 11): Result.002 file - promoters60/1027596
aaactttctgg

SEQ ID NO: 101335 - DNA, 11 bp, Unknown
  misc_feature (1)..( 11): Result.002 file - promoters60/1027596
cgattctctta

SEQ ID NO: 101336 - DNA, 11 bp, Unknown
  misc_feature (1)..( 11): Result.002 file - promoters60/1027596
gtatttttgtt

SEQ ID NO: 101337 - DNA, 10 bp, Unknown
  misc_feature (1)..( 10): Result.002 file - promoters60/1027596
cttattattc

SEQ ID NO: 101338 - DNA, 10 bp, Unknown
  misc_feature (1)..( 10): Result.002 file - promoters60/1027596
tatatcattt

SEQ ID NO: 101339 - DNA, 10 bp, Unknown
  misc_feature (1)..( 10): Result.002 file - promoters60/1027596
gtcatcattt

SEQ ID NO: 101340 - DNA, 10 bp, Unknown
  misc_feature (1)..( 10): Result.002 file - promoters60/1027596
gtcataattc

SEQ ID NO: 101341 - DNA, 10 bp, Unknown
  misc_feature (1)..( 10): Result.002 file - promoters60/1027596
aataccatgc

SEQ ID NO: 101342 - DNA, 12 bp, Unknown
  misc_feature (1)..( 12): Result.002 file - promoters60/1027652
ttgcatatataa

SEQ ID NO: 101343 - DNA, 12 bp, Unknown
  misc_feature (1)..( 12): Result.002 file - promoters60/1027652
attagtatttaa

SEQ ID NO: 101344 - DNA, 10 bp, Unknown
  misc_feature (1)..( 10): Result.002 file - promoters60/1027652
gcatctatat

SEQ ID NO: 101345 - DNA, 12 bp, Unknown
  misc_feature (1)..( 12): Result.002 file - promoters60/1027652
tagcatttacta

SEQ ID NO: 101346 - DNA, 9 bp, Unknown
  misc_feature (1)..( 9): Result.002 file - promoters60/1027652
tttttgttt

SEQ ID NO: 101347 - DNA, 9 bp, Unknown
  misc_feature (1)..( 9): Result.002 file - promoters60/1027652
tttatgttt

SEQ ID NO: 101348 - DNA, 9 bp, Unknown
  misc_feature (1)..( 9): Result.002 file - promoters60/1027652
ccgttgttt

SEQ ID NO: 101349 - DNA, 9 bp, Unknown
  misc_feature (1)..( 9): Result.002 file - promoters60/1027652
attacgtta

SEQ ID NO: 101350 - DNA, 10 bp, Unknown
  misc_feature (1)..( 10): Result.002 file - promoters60/1027652
atactcaaat

SEQ ID NO: 101351 - DNA, 10 bp, Unknown
  misc_feature (1)..( 10): Result.002 file - promoters60/1027652
aaactaaaat

SEQ ID NO: 101352 - DNA, 10 bp, Unknown
  misc_feature (1)..( 10): Result.002 file - promoters60/1027652
ttgctcaaac

SEQ ID NO: 101353 - DNA, 10 bp, Unknown
  misc_feature (1)..( 10): Result.002 file - promoters60/1027652
atattcaaac

SEQ ID NO: 101354 - DNA, 9 bp, Unknown
  misc_feature (1)..( 9): Result.002 file - promoters60/1027652
caaaggaaa

SEQ ID NO: 101355 - DNA, 9 bp, Unknown
  misc_feature (1)..( 9): Result.002 file - promoters60/1027652
ttaagaaaa

SEQ ID NO: 101356 - DNA, 9 bp, Unknown
  misc_feature (1)..( 9): Result.002 file - promoters60/1027652
ataaaaaaa

SEQ ID NO: 101357 - DNA, 9 bp, Unknown
  misc_feature (1)..( 9): Result.002 file - promoters60/1027652
ttaagaagc

SEQ ID NO: 101358 - DNA, 9 bp, Unknown
  misc_feature (1)..( 9): Result.002 file - promoters60/1027652
tcaaaaaag

SEQ ID NO: 101359 - DNA, 8 bp, Unknown
  misc_feature (1)..( 8): Result.002 file - promoters60/1027652
ttttgtca

SEQ ID NO: 101360 - DNA, 8 bp, Unknown
  misc_feature (1)..( 8): Result.002 file - promoters60/1027652
gtttttca

SEQ ID NO: 101361 - DNA, 8 bp, Unknown
  misc_feature (1)..( 8): Result.002 file - promoters60/1027652
ttttgtta

SEQ ID NO: 101362 - DNA, 8 bp, Unknown
  misc_feature (1)..( 8): Result.002 file - promoters60/1027652
atttaaaa

SEQ ID NO: 101363 - DNA, 19 bp, Unknown
  misc_feature (1)..( 19): Result.002 file - promoters60/1027652
gaaaaacatgtttttgttt

SEQ ID NO: 101364 - DNA, 19 bp, Unknown
  misc_feature (1)..( 19): Result.002 file - promoters60/1027652
gaaaaattattaaagtata

SEQ ID NO: 101365 - DNA, 19 bp, Unknown
  misc_feature (1)..( 19): Result.002 file - promoters60/1027652
taaagattattaaattata

SEQ ID NO: 101366 - DNA, 19 bp, Unknown
  misc_feature (1)..( 19): Result.002 file - promoters60/1027652
acaagattcacaactaatg

SEQ ID NO: 101367 - DNA, 10 bp, Unknown
  misc_feature (1)..( 10): Result.002 file - promoters60/1027652
ggaaaataag

SEQ ID NO: 101368 - DNA, 10 bp, Unknown
  misc_feature (1)..( 10): Result.002 file - promoters60/1027652
gtcaaaaaag

SEQ ID NO: 101369 - DNA, 10 bp, Unknown
  misc_feature (1)..( 10): Result.002 file - promoters60/1027652
aaaaaaaaag

SEQ ID NO: 101370 - DNA, 10 bp, Unknown
  misc_feature (1)..( 10): Result.002 file - promoters60/1027652
ttaagaaaat

SEQ ID NO: 101371 - DNA, 10 bp, Unknown
  misc_feature (1)..( 10): Result.002 file - promoters60/1027652
ttaagaagct

SEQ ID NO: 101372 - DNA, 9 bp, Unknown
  misc_feature (1)..( 9): Result.002 file - promoters60/1027652
tatttaaac

SEQ ID NO: 101373 - DNA, 9 bp, Unknown
  misc_feature (1)..( 9): Result.002 file - promoters60/1027652
tatttatat

SEQ ID NO: 101374 - DNA, 9 bp, Unknown
  misc_feature (1)..( 9): Result.002 file - promoters60/1027652
tatataagt

SEQ ID NO: 101375 - DNA, 9 bp, Unknown
  misc_feature (1)..( 9): Result.002 file - promoters60/1027652
tatatatat

SEQ ID NO: 101376 - DNA, 8 bp, Unknown
  misc_feature (1)..( 8): Result.002 file - promoters60/1027652
aaagtcca

SEQ ID NO: 101377 - DNA, 8 bp, Unknown
  misc_feature (1)..( 8): Result.002 file - promoters60/1027652
aaattcct

SEQ ID NO: 101378 - DNA, 8 bp, Unknown
  misc_feature (1)..( 8): Result.002 file - promoters60/1027652
aaattcaa

SEQ ID NO: 101379 - DNA, 8 bp, Unknown
  misc_feature (1)..( 8): Result.002 file - promoters60/1027652
tatttcta

SEQ ID NO: 101380 - DNA, 8 bp, Unknown
  misc_feature (1)..( 8): Result.002 file - promoters60/1027652
aaattcga

SEQ ID NO: 101381 - DNA, 12 bp, Unknown
  misc_feature (1)..( 12): Result.002 file - promoters60/1027652
tagatctagatc

SEQ ID NO: 101382 - DNA, 12 bp, Unknown
  misc_feature (1)..( 12): Result.002 file - promoters60/1027652
actctctcgatc

SEQ ID NO: 101383 - DNA, 12 bp, Unknown
  misc_feature (1)..( 12): Result.002 file - promoters60/1027652
aaaatcaagagt

SEQ ID NO: 101384 - DNA, 12 bp, Unknown
  misc_feature (1)..( 12): Result.002 file - promoters60/1027652
aaaattaaggat

SEQ ID NO: 101385 - DNA, 12 bp, Unknown
  misc_feature (1)..( 12): Result.002 file - promoters60/1027652
acaaattcaaat

SEQ ID NO: 101386 - DNA, 12 bp, Unknown
  misc_feature (1)..( 12): Result.002 file - promoters60/1027652
acatatttctaa

SEQ ID NO: 101387 - DNA, 12 bp, Unknown
  misc_feature (1)..( 12): Result.002 file - promoters60/1027652
tcaaattcgaat

SEQ ID NO: 101388 - DNA, 12 bp, Unknown
  misc_feature (1)..( 12): Result.002 file - promoters60/1027652
ctaaattcctat

SEQ ID NO: 101389 - DNA, 12 bp, Unknown
  misc_feature (1)..( 12): Result.002 file - promoters60/1027652
ccaaaatatctc

SEQ ID NO: 101390 - DNA, 9 bp, Unknown
  misc_feature (1)..( 9): Result.002 file - promoters60/1027652
aataatatt

SEQ ID NO: 101391 - DNA, 9 bp, Unknown
  misc_feature (1)..( 9): Result.002 file - promoters60/1027652
gctaatatt

SEQ ID NO: 101392 - DNA, 9 bp, Unknown
  misc_feature (1)..( 9): Result.002 file - promoters60/1027652
aataatatg

SEQ ID NO: 101393 - DNA, 9 bp, Unknown
  misc_feature (1)..( 9): Result.002 file - promoters60/1027652
catattata

SEQ ID NO: 101394 - DNA, 10 bp, Unknown
  misc_feature (1)..( 10): Result.002 file - promoters60/1027652
aaaaattatt

SEQ ID NO: 101395 - DNA, 10 bp, Unknown
  misc_feature (1)..( 10): Result.002 file - promoters60/1027652
aaaaattaag

SEQ ID NO: 101396 - DNA, 10 bp, Unknown
  misc_feature (1)..( 10): Result.002 file - promoters60/1027652
gtaaattatt

SEQ ID NO: 101397 - DNA, 10 bp, Unknown
  misc_feature (1)..( 10): Result.002 file - promoters60/1027652
caaaatcaag

SEQ ID NO: 101398 - DNA, 6 bp, Unknown
  misc_feature (1)..( 6): Result.002 file - promoters60/1027673
atcaca

SEQ ID NO: 101399 - DNA, 6 bp, Unknown
  misc_feature (1)..( 6): Result.002 file - promoters60/1027673
atcaca

SEQ ID NO: 101400 - DNA, 7 bp, Unknown
  misc_feature (1)..( 7): Result.002 file - promoters60/1027673
ttttgta

SEQ ID NO: 101401 - DNA, 7 bp, Unknown
  misc_feature (1)..( 7): Result.002 file - promoters60/1027673
tttcgta

SEQ ID NO: 101402 - DNA, 6 bp, Unknown
  misc_feature (1)..( 6): Result.002 file - promoters60/1027673
agaaga

SEQ ID NO: 101403 - DNA, 6 bp, Unknown
  misc_feature (1)..( 6): Result.002 file - promoters60/1027673
agaaga

SEQ ID NO: 101404 - DNA, 7 bp, Unknown
  misc_feature (1)..( 7): Result.002 file - promoters60/1027673
ttgtaga

SEQ ID NO: 101405 - DNA, 7 bp, Unknown
  misc_feature (1)..( 7): Result.002 file - promoters60/1027673
ttggaga

SEQ ID NO: 101406 - DNA, 9 bp, Unknown
  misc_feature (1)..( 9): Result.002 file - promoters60/1027673
gagagagag

SEQ ID NO: 101407 - DNA, 9 bp, Unknown
  misc_feature (1)..( 9): Result.002 file - promoters60/1027673
gagtgagag

SEQ ID NO: 101408 - DNA, 7 bp, Unknown
  misc_feature (1)..( 7): Result.002 file - promoters60/1027673
caaatta

SEQ ID NO: 101409 - DNA, 7 bp, Unknown
  misc_feature (1)..( 7): Result.002 file - promoters60/1027673
caattta

SEQ ID NO: 101410 - DNA, 8 bp, Unknown
  misc_feature (1)..( 8): Result.002 file - promoters60/1027673
aaatacga

SEQ ID NO: 101411 - DNA, 8 bp, Unknown
  misc_feature (1)..( 8): Result.002 file - promoters60/1027673
aaatccga

SEQ ID NO: 101412 - DNA, 8 bp, Unknown
  misc_feature (1)..( 8): Result.002 file - promoters60/1027673
agacgaag

SEQ ID NO: 101413 - DNA, 8 bp, Unknown
  misc_feature (1)..( 8): Result.002 file - promoters60/1027673
agaagaag

SEQ ID NO: 101414 - DNA, 6 bp, Unknown
  misc_feature (1)..( 6): Result.002 file - promoters60/1027673
tgtttc

SEQ ID NO: 101415 - DNA, 6 bp, Unknown
  misc_feature (1)..( 6): Result.002 file - promoters60/1027673
tgtttc

SEQ ID NO: 101416 - DNA, 11 bp, Unknown
  misc_feature (1)..( 11): Result.002 file - promoters60/1027725
tttaacagttg

SEQ ID NO: 101417 - DNA, 11 bp, Unknown
  misc_feature (1)..( 11): Result.002 file - promoters60/1027725
aataaaagttt

SEQ ID NO: 101418 - DNA, 11 bp, Unknown
  misc_feature (1)..( 11): Result.002 file - promoters60/1027725
cataacagttg

SEQ ID NO: 101419 - DNA, 11 bp, Unknown
  misc_feature (1)..( 11): Result.002 file - promoters60/1027725
acataaatttt

SEQ ID NO: 101420 - DNA, 11 bp, Unknown
  misc_feature (1)..( 11): Result.002 file - promoters60/1027725
aatagaagaaa

SEQ ID NO: 101421 - DNA, 11 bp, Unknown
  misc_feature (1)..( 11): Result.002 file - promoters60/1027725
catagtagaat

SEQ ID NO: 101422 - DNA, 11 bp, Unknown
  misc_feature (1)..( 11): Result.002 file - promoters60/1027725
gacctaagttt

SEQ ID NO: 101423 - DNA, 11 bp, Unknown
  misc_feature (1)..( 11): Result.002 file - promoters60/1027725
tagataaattt

SEQ ID NO: 101424 - DNA, 10 bp, Unknown
  misc_feature (1)..( 10): Result.002 file - promoters60/1027725
ttgtatttgg

SEQ ID NO: 101425 - DNA, 10 bp, Unknown
  misc_feature (1)..( 10): Result.002 file - promoters60/1027725
ttggattaat

SEQ ID NO: 101426 - DNA, 10 bp, Unknown
  misc_feature (1)..( 10): Result.002 file - promoters60/1027725
atgtttttgc

SEQ ID NO: 101427 - DNA, 10 bp, Unknown
  misc_feature (1)..( 10): Result.002 file - promoters60/1027725
ttgttttatt

SEQ ID NO: 101428 - DNA, 10 bp, Unknown
  misc_feature (1)..( 10): Result.002 file - promoters60/1027725
ttggatagct

SEQ ID NO: 101429 - DNA, 10 bp, Unknown
  misc_feature (1)..( 10): Result.002 file - promoters60/1027725
atgtttatgc

SEQ ID NO: 101430 - DNA, 13 bp, Unknown
  misc_feature (1)..( 13): Result.002 file - promoters60/1027725
ctaatttcattga

SEQ ID NO: 101431 - DNA, 13 bp, Unknown
  misc_feature (1)..( 13): Result.002 file - promoters60/1027725
ttacttttattat

SEQ ID NO: 101432 - DNA, 13 bp, Unknown
  misc_feature (1)..( 13): Result.002 file - promoters60/1027725
caactctcagtga

SEQ ID NO: 101433 - DNA, 13 bp, Unknown
  misc_feature (1)..( 13): Result.002 file - promoters60/1027725
gtctgttcattga

SEQ ID NO: 101434 - DNA, 13 bp, Unknown
  misc_feature (1)..( 13): Result.002 file - promoters60/1027725
ttacttttaacaa

SEQ ID NO: 101435 - DNA, 13 bp, Unknown
  misc_feature (1)..( 13): Result.002 file - promoters60/1027725
attctttttacag

SEQ ID NO: 101436 - DNA, 14 bp, Unknown
  misc_feature (1)..( 14): Result.002 file - promoters60/1027725
aaaacattatgcgt

SEQ ID NO: 101437 - DNA, 14 bp, Unknown
  misc_feature (1)..( 14): Result.002 file - promoters60/1027725
taaaaatttttctg

SEQ ID NO: 101438 - DNA, 14 bp, Unknown
  misc_feature (1)..( 14): Result.002 file - promoters60/1027725
aaaagattatggtt

SEQ ID NO: 101439 - DNA, 14 bp, Unknown
  misc_feature (1)..( 14): Result.002 file - promoters60/1027725
tctagtttattgtt

SEQ ID NO: 101440 - DNA, 14 bp, Unknown
  misc_feature (1)..( 14): Result.002 file - promoters60/1027725
gtcatattcttaag

SEQ ID NO: 101441 - DNA, 14 bp, Unknown
  misc_feature (1)..( 14): Result.002 file - promoters60/1027725
atgtctttgttagt

SEQ ID NO: 101442 - DNA, 8 bp, Unknown
  misc_feature (1)..( 8): Result.002 file - promoters60/1027765
gaaacaaa

SEQ ID NO: 101443 - DNA, 8 bp, Unknown
  misc_feature (1)..( 8): Result.002 file - promoters60/1027765
taaaaaaa

SEQ ID NO: 101444 - DNA, 8 bp, Unknown
  misc_feature (1)..( 8): Result.002 file - promoters60/1027765
taaaaatt

SEQ ID NO: 101445 - DNA, 12 bp, Unknown
  misc_feature (1)..( 12): Result.002 file - promoters60/1027765
taaattttttaa

SEQ ID NO: 101446 - DNA, 12 bp, Unknown
  misc_feature (1)..( 12): Result.002 file - promoters60/1027765
aagattttataa

SEQ ID NO: 101447 - DNA, 12 bp, Unknown
  misc_feature (1)..( 12): Result.002 file - promoters60/1027765
aaaatttacact

SEQ ID NO: 101448 - DNA, 7 bp, Unknown
  misc_feature (1)..( 7): Result.002 file - promoters60/1027765
ttacaaa

SEQ ID NO: 101449 - DNA, 7 bp, Unknown
  misc_feature (1)..( 7): Result.002 file - promoters60/1027765
ttagaaa

SEQ ID NO: 101450 - DNA, 7 bp, Unknown
  misc_feature (1)..( 7): Result.002 file - promoters60/1027765
ttataaa

SEQ ID NO: 101451 - DNA, 12 bp, Unknown
  misc_feature (1)..( 12): Result.002 file - promoters60/1027765
ggattgttttgt

SEQ ID NO: 101452 - DNA, 12 bp, Unknown
  misc_feature (1)..( 12): Result.002 file - promoters60/1027765
atatttttttgt

SEQ ID NO: 101453 - DNA, 12 bp, Unknown
  misc_feature (1)..( 12): Result.002 file - promoters60/1027765
atattttttact

SEQ ID NO: 101454 - DNA, 7 bp, Unknown
  misc_feature (1)..( 7): Result.002 file - promoters60/1027765
ttaaaat

SEQ ID NO: 101455 - DNA, 7 bp, Unknown
  misc_feature (1)..( 7): Result.002 file - promoters60/1027765
ttacaat

SEQ ID NO: 101456 - DNA, 7 bp, Unknown
  misc_feature (1)..( 7): Result.002 file - promoters60/1027765
ttaaaat

SEQ ID NO: 101457 - DNA, 8 bp, Unknown
  misc_feature (1)..( 8): Result.002 file - promoters60/1027765
aaaagaag

SEQ ID NO: 101458 - DNA, 8 bp, Unknown
  misc_feature (1)..( 8): Result.002 file - promoters60/1027765
aaaagaac

SEQ ID NO: 101459 - DNA, 8 bp, Unknown
  misc_feature (1)..( 8): Result.002 file - promoters60/1027765
aaaaaaac

SEQ ID NO: 101460 - DNA, 11 bp, Unknown
  misc_feature (1)..( 11): Result.002 file - promoters60/1027765
tataatttaca

SEQ ID NO: 101461 - DNA, 11 bp, Unknown
  misc_feature (1)..( 11): Result.002 file - promoters60/1027765
tatgatttgtt

SEQ ID NO: 101462 - DNA, 11 bp, Unknown
  misc_feature (1)..( 11): Result.002 file - promoters60/1027765
gataaattaca

SEQ ID NO: 101463 - DNA, 9 bp, Unknown
  misc_feature (1)..( 9): Result.002 file - promoters60/1027765
taaaaattg

SEQ ID NO: 101464 - DNA, 9 bp, Unknown
  misc_feature (1)..( 9): Result.002 file - promoters60/1027765
taaaaattg

SEQ ID NO: 101465 - DNA, 9 bp, Unknown
  misc_feature (1)..( 9): Result.002 file - promoters60/1027765
taataatcc

SEQ ID NO: 101466 - DNA, 9 bp, Unknown
  misc_feature (1)..( 9): Result.002 file - promoters60/1027869
atcgtttac

SEQ ID NO: 101467 - DNA, 9 bp, Unknown
  misc_feature (1)..( 9): Result.002 file - promoters60/1027869
ctcgtctac

SEQ ID NO: 101468 - DNA, 9 bp, Unknown
  misc_feature (1)..( 9): Result.002 file - promoters60/1027869
atcttttta

SEQ ID NO: 101469 - DNA, 6 bp, Unknown
  misc_feature (1)..( 6): Result.002 file - promoters60/1027869
gatttg

SEQ ID NO: 101470 - DNA, 6 bp, Unknown
  misc_feature (1)..( 6): Result.002 file - promoters60/1027869
gatttg

SEQ ID NO: 101471 - DNA, 10 bp, Unknown
  misc_feature (1)..( 10): Result.002 file - promoters60/1027869
aaagattgaa

SEQ ID NO: 101472 - DNA, 10 bp, Unknown
  misc_feature (1)..( 10): Result.002 file - promoters60/1027869
aaagatcgaa

SEQ ID NO: 101473 - DNA, 10 bp, Unknown
  misc_feature (1)..( 10): Result.002 file - promoters60/1027869
aaatatcaca

SEQ ID NO: 101474 - DNA, 7 bp, Unknown
  misc_feature (1)..( 7): Result.002 file - promoters60/1027869
aacaaat

SEQ ID NO: 101475 - DNA, 7 bp, Unknown
  misc_feature (1)..( 7): Result.002 file - promoters60/1027869
aacaaat

SEQ ID NO: 101476 - DNA, 6 bp, Unknown
  misc_feature (1)..( 6): Result.002 file - promoters60/1027869
aattta

SEQ ID NO: 101477 - DNA, 6 bp, Unknown
  misc_feature (1)..( 6): Result.002 file - promoters60/1027869
aattta

SEQ ID NO: 101478 - DNA, 7 bp, Unknown
  misc_feature (1)..( 7): Result.002 file - promoters60/1027869
ttacaat

SEQ ID NO: 101479 - DNA, 7 bp, Unknown
  misc_feature (1)..( 7): Result.002 file - promoters60/1027869
ttataat

SEQ ID NO: 101480 - DNA, 7 bp, Unknown
  misc_feature (1)..( 7): Result.002 file - promoters60/1027869
tttacaa

SEQ ID NO: 101481 - DNA, 7 bp, Unknown
  misc_feature (1)..( 7): Result.002 file - promoters60/1027869
ttttcaa

SEQ ID NO: 101482 - DNA, 7 bp, Unknown
  misc_feature (1)..( 7): Result.002 file - promoters60/1027869
agataca

SEQ ID NO: 101483 - DNA, 7 bp, Unknown
  misc_feature (1)..( 7): Result.002 file - promoters60/1027869
agaaaca

SEQ ID NO: 101484 - DNA, 11 bp, Unknown
  misc_feature (1)..( 11): Result.002 file - promoters60/1027869
tatcaacatct

SEQ ID NO: 101485 - DNA, 11 bp, Unknown
  misc_feature (1)..( 11): Result.002 file - promoters60/1027869
tataaacatct

SEQ ID NO: 101486 - DNA, 7 bp, Unknown
  misc_feature (1)..( 7): Result.002 file - promoters60/1027869
atgaaga

SEQ ID NO: 101487 - DNA, 7 bp, Unknown
  misc_feature (1)..( 7): Result.002 file - promoters60/1027869
atgtaga

SEQ ID NO: 101488 - DNA, 7 bp, Unknown
  misc_feature (1)..( 7): Result.002 file - promoters60/1027873
tttattt

SEQ ID NO: 101489 - DNA, 7 bp, Unknown
  misc_feature (1)..( 7): Result.002 file - promoters60/1027873
tttattt

SEQ ID NO: 101490 - DNA, 10 bp, Unknown
  misc_feature (1)..( 10): Result.002 file - promoters60/1027873
tttttaacaa

SEQ ID NO: 101491 - DNA, 10 bp, Unknown
  misc_feature (1)..( 10): Result.002 file - promoters60/1027873
tttctaactc

SEQ ID NO: 101492 - DNA, 10 bp, Unknown
  misc_feature (1)..( 10): Result.002 file - promoters60/1027873
gatttagcaa

SEQ ID NO: 101493 - DNA, 6 bp, Unknown
  misc_feature (1)..( 6): Result.002 file - promoters60/1027873
agttaa

SEQ ID NO: 101494 - DNA, 6 bp, Unknown
  misc_feature (1)..( 6): Result.002 file - promoters60/1027873
agttaa

SEQ ID NO: 101495 - DNA, 6 bp, Unknown
  misc_feature (1)..( 6): Result.002 file - promoters60/1027873
ttttgg

SEQ ID NO: 101496 - DNA, 6 bp, Unknown
  misc_feature (1)..( 6): Result.002 file - promoters60/1027873
ttttgg

SEQ ID NO: 101497 - DNA, 6 bp, Unknown
  misc_feature (1)..( 6): Result.002 file - promoters60/1027873
ttttgg

SEQ ID NO: 101498 - DNA, 6 bp, Unknown
  misc_feature (1)..( 6): Result.002 file - promoters60/1027873
aataat

SEQ ID NO: 101499 - DNA, 6 bp, Unknown
  misc_feature (1)..( 6): Result.002 file - promoters60/1027873
aataat

SEQ ID NO: 101500 - DNA, 7 bp, Unknown
  misc_feature (1)..( 7): Result.002 file - promoters60/1027873
taaatta

SEQ ID NO: 101501 - DNA, 7 bp, Unknown
  misc_feature (1)..( 7): Result.002 file - promoters60/1027873
taactta

SEQ ID NO: 101502 - DNA, 13 bp, Unknown
  misc_feature (1)..( 13): Result.002 file - promoters60/1027873
cgcaaaaacatat

SEQ ID NO: 101503 - DNA, 13 bp, Unknown
  misc_feature (1)..( 13): Result.002 file - promoters60/1027873
accaaaatcatat

SEQ ID NO: 101504 - DNA, 13 bp, Unknown
  misc_feature (1)..( 13): Result.002 file - promoters60/1027873
accagaatcgctt

SEQ ID NO: 101505 - DNA, 8 bp, Unknown
  misc_feature (1)..( 8): Result.002 file - promoters60/1027873
ttttggta

SEQ ID NO: 101506 - DNA, 8 bp, Unknown
  misc_feature (1)..( 8): Result.002 file - promoters60/1027873
tttgggta

SEQ ID NO: 101507 - DNA, 6 bp, Unknown
  misc_feature (1)..( 6): Result.002 file - promoters60/1027873
atggtt

SEQ ID NO: 101508 - DNA, 6 bp, Unknown
  misc_feature (1)..( 6): Result.002 file - promoters60/1027873
atggtt

SEQ ID NO: 101509 - DNA, 8 bp, Unknown
  misc_feature (1)..( 8): Result.002 file - promoters60/1027873
gttaacaa

SEQ ID NO: 101510 - DNA, 8 bp, Unknown
  misc_feature (1)..( 8): Result.002 file - promoters60/1027873
tttagcaa

SEQ ID NO: 101511 - DNA, 9 bp, Unknown
  misc_feature (1)..( 9): Result.002 file - promoters60/1027873
attcagctg

SEQ ID NO: 101512 - DNA, 6 bp, Unknown
  misc_feature (1)..( 6): Result.002 file - promoters60/1027873
cgattt

SEQ ID NO: 101513 - DNA, 6 bp, Unknown
  misc_feature (1)..( 6): Result.002 file - promoters60/1027873
cgattt

SEQ ID NO: 101514 - DNA, 7 bp, Unknown
  misc_feature (1)..( 7): Result.002 file - promoters60/1027873
atgtcta

SEQ ID NO: 101515 - DNA, 7 bp, Unknown
  misc_feature (1)..( 7): Result.002 file - promoters60/1027873
atgacta

SEQ ID NO: 101516 - DNA, 6 bp, Unknown
  misc_feature (1)..( 6): Result.002 file - promoters60/1027873
attttt

SEQ ID NO: 101517 - DNA, 6 bp, Unknown
  misc_feature (1)..( 6): Result.002 file - promoters60/1027873
attttt

SEQ ID NO: 101518 - DNA, 8 bp, Unknown
  misc_feature (1)..( 8): Result.002 file - promoters60/1027873
catttttg

SEQ ID NO: 101519 - DNA, 8 bp, Unknown
  misc_feature (1)..( 8): Result.002 file - promoters60/1027873
catttttg

SEQ ID NO: 101520 - DNA, 8 bp, Unknown
  misc_feature (1)..( 8): Result.002 file - promoters60/1027873
tggggttg

SEQ ID NO: 101521 - DNA, 8 bp, Unknown
  misc_feature (1)..( 8): Result.002 file - promoters60/1027873
tgggtttg

SEQ ID NO: 101522 - DNA, 10 bp, Unknown
  misc_feature (1)..( 10): Result.002 file - promoters60/1027873
aaagggctta

SEQ ID NO: 101523 - DNA, 10 bp, Unknown
  misc_feature (1)..( 10): Result.002 file - promoters60/1027873
aaagagctta

SEQ ID NO: 101524 - DNA, 10 bp, Unknown
  misc_feature (1)..( 10): Result.002 file - promoters60/1027873
gaccaaacca

SEQ ID NO: 101525 - DNA, 10 bp, Unknown
  misc_feature (1)..( 10): Result.002 file - promoters60/1027873
gaccgaacca

SEQ ID NO: 101526 - DNA, 7 bp, Unknown
  misc_feature (1)..( 7): Result.002 file - promoters60/1027873
taataag

SEQ ID NO: 101527 - DNA, 7 bp, Unknown
  misc_feature (1)..( 7): Result.002 file - promoters60/1027873
taaaaag

SEQ ID NO: 101528 - DNA, 8 bp, Unknown
  misc_feature (1)..( 8): Result.002 file - promoters60/1027877
atcaagaa

SEQ ID NO: 101529 - DNA, 8 bp, Unknown
  misc_feature (1)..( 8): Result.002 file - promoters60/1027877
atcaggaa

SEQ ID NO: 101530 - DNA, 8 bp, Unknown
  misc_feature (1)..( 8): Result.002 file - promoters60/1027877
atcaagag

SEQ ID NO: 101531 - DNA, 8 bp, Unknown
  misc_feature (1)..( 8): Result.002 file - promoters60/1027877
aattgaaa

SEQ ID NO: 101532 - DNA, 8 bp, Unknown
  misc_feature (1)..( 8): Result.002 file - promoters60/1027877
aatcgaaa

SEQ ID NO: 101533 - DNA, 8 bp, Unknown
  misc_feature (1)..( 8): Result.002 file - promoters60/1027877
taagaatc

SEQ ID NO: 101534 - DNA, 8 bp, Unknown
  misc_feature (1)..( 8): Result.002 file - promoters60/1027877
taagaatc

SEQ ID NO: 101535 - DNA, 7 bp, Unknown
  misc_feature (1)..( 7): Result.002 file - promoters60/1027877
tttcttt

SEQ ID NO: 101536 - DNA, 7 bp, Unknown
  misc_feature (1)..( 7): Result.002 file - promoters60/1027877
tttgttt

SEQ ID NO: 101537 - DNA, 8 bp, Unknown
  misc_feature (1)..( 8): Result.002 file - promoters60/1027877
ttgtagaa

SEQ ID NO: 101538 - DNA, 8 bp, Unknown
  misc_feature (1)..( 8): Result.002 file - promoters60/1027877
gagtagaa

SEQ ID NO: 101539 - DNA, 8 bp, Unknown
  misc_feature (1)..( 8): Result.002 file - promoters60/1027877
ttgtagac

SEQ ID NO: 101540 - DNA, 7 bp, Unknown
  misc_feature (1)..( 7): Result.002 file - promoters60/1027877
acaagta

SEQ ID NO: 101541 - DNA, 7 bp, Unknown
  misc_feature (1)..( 7): Result.002 file - promoters60/1027877
acaggta

SEQ ID NO: 101542 - DNA, 6 bp, Unknown
  misc_feature (1)..( 6): Result.002 file - promoters60/1027877
caagaa

SEQ ID NO: 101543 - DNA, 6 bp, Unknown
  misc_feature (1)..( 6): Result.002 file - promoters60/1027877
caagaa

SEQ ID NO: 101544 - DNA, 6 bp, Unknown
  misc_feature (1)..( 6): Result.002 file - promoters60/1027877
atgaca

SEQ ID NO: 101545 - DNA, 6 bp, Unknown
  misc_feature (1)..( 6): Result.002 file - promoters60/1027877
atgaca

SEQ ID NO: 101546 - DNA, 6 bp, Unknown
  misc_feature (1)..( 6): Result.002 file - promoters60/1027877
actggt

SEQ ID NO: 101547 - DNA, 6 bp, Unknown
  misc_feature (1)..( 6): Result.002 file - promoters60/1027877
actggt

SEQ ID NO: 101548 - DNA, 10 bp, Unknown
  misc_feature (1)..( 10): Result.002 file - promoters60/1027877
atcacttgat

SEQ ID NO: 101549 - DNA, 10 bp, Unknown
  misc_feature (1)..( 10): Result.002 file - promoters60/1027877
atcccttgat

SEQ ID NO: 101550 - DNA, 9 bp, Unknown
  misc_feature (1)..( 9): Result.002 file - promoters60/1027877
atttaaata

SEQ ID NO: 101551 - DNA, 9 bp, Unknown
  misc_feature (1)..( 9): Result.002 file - promoters60/1027877
attgaaata

SEQ ID NO: 101552 - DNA, 8 bp, Unknown
  misc_feature (1)..( 8): Result.002 file - promoters60/1027914
tcttttct

SEQ ID NO: 101553 - DNA, 8 bp, Unknown
  misc_feature (1)..( 8): Result.002 file - promoters60/1027914
tctcttct

SEQ ID NO: 101554 - DNA, 8 bp, Unknown
  misc_feature (1)..( 8): Result.002 file - promoters60/1027914
tctattct

SEQ ID NO: 101555 - DNA, 7 bp, Unknown
  misc_feature (1)..( 7): Result.002 file - promoters60/1027914
gtgatta

SEQ ID NO: 101556 - DNA, 7 bp, Unknown
  misc_feature (1)..( 7): Result.002 file - promoters60/1027914
ttgatta

SEQ ID NO: 101557 - DNA, 7 bp, Unknown
  misc_feature (1)..( 7): Result.002 file - promoters60/1027914
ttgttta

SEQ ID NO: 101558 - DNA, 11 bp, Unknown
  misc_feature (1)..( 11): Result.002 file - promoters60/1027914
attataaaaac

SEQ ID NO: 101559 - DNA, 11 bp, Unknown
  misc_feature (1)..( 11): Result.002 file - promoters60/1027914
tatataataac

SEQ ID NO: 101560 - DNA, 11 bp, Unknown
  misc_feature (1)..( 11): Result.002 file - promoters60/1027914
tatataatcca

SEQ ID NO: 101561 - DNA, 11 bp, Unknown
  misc_feature (1)..( 11): Result.002 file - promoters60/1027928
tgttttctacc

SEQ ID NO: 101562 - DNA, 11 bp, Unknown
  misc_feature (1)..( 11): Result.002 file - promoters60/1027928
atttttctact

SEQ ID NO: 101563 - DNA, 12 bp, Unknown
  misc_feature (1)..( 12): Result.002 file - promoters60/1027928
aacacttcaacc

SEQ ID NO: 101564 - DNA, 12 bp, Unknown
  misc_feature (1)..( 12): Result.002 file - promoters60/1027928
aatttatctaac

SEQ ID NO: 101565 - DNA, 12 bp, Unknown
  misc_feature (1)..( 12): Result.002 file - promoters60/1027928
cctttttcatca

SEQ ID NO: 101566 - DNA, 12 bp, Unknown
  misc_feature (1)..( 12): Result.002 file - promoters60/1027928
ttttttgcatca

SEQ ID NO: 101567 - DNA, 12 bp, Unknown
  misc_feature (1)..( 12): Result.002 file - promoters60/1027928
aatttatgaaaa

SEQ ID NO: 101568 - DNA, 13 bp, Unknown
  misc_feature (1)..( 13): Result.002 file - promoters60/1027928
actcttttgagaa

SEQ ID NO: 101569 - DNA, 13 bp, Unknown
  misc_feature (1)..( 13): Result.002 file - promoters60/1027928
actatttatacat

SEQ ID NO: 101570 - DNA, 13 bp, Unknown
  misc_feature (1)..( 13): Result.002 file - promoters60/1027928
tttcttttcacat

SEQ ID NO: 101571 - DNA, 13 bp, Unknown
  misc_feature (1)..( 13): Result.002 file - promoters60/1027928
cctattaataaaa

SEQ ID NO: 101572 - DNA, 13 bp, Unknown
  misc_feature (1)..( 13): Result.002 file - promoters60/1027928
ttgattagtaaaa

SEQ ID NO: 101573 - DNA, 13 bp, Unknown
  misc_feature (1)..( 13): Result.002 file - promoters60/1027928
tttataaatattt

SEQ ID NO: 101574 - DNA, 13 bp, Unknown
  misc_feature (1)..( 13): Result.002 file - promoters60/1027928
tgtttaaacatta

SEQ ID NO: 101575 - DNA, 10 bp, Unknown
  misc_feature (1)..( 10): Result.002 file - promoters60/1027928
atgttaaacc

SEQ ID NO: 101576 - DNA, 10 bp, Unknown
  misc_feature (1)..( 10): Result.002 file - promoters60/1027928
ttgtcaaatg

SEQ ID NO: 101577 - DNA, 10 bp, Unknown
  misc_feature (1)..( 10): Result.002 file - promoters60/1027928
gtgttaaaag

SEQ ID NO: 101578 - DNA, 11 bp, Unknown
  misc_feature (1)..( 11): Result.002 file - promoters60/1027928
gtgtttaaaca

SEQ ID NO: 101579 - DNA, 11 bp, Unknown
  misc_feature (1)..( 11): Result.002 file - promoters60/1027928
tattttcaact

SEQ ID NO: 101580 - DNA, 11 bp, Unknown
  misc_feature (1)..( 11): Result.002 file - promoters60/1027928
agaatcaccta

SEQ ID NO: 101581 - DNA, 15 bp, Unknown
  misc_feature (1)..( 15): Result.002 file - promoters60/1027928
tgtaatttttttcta

SEQ ID NO: 101582 - DNA, 15 bp, Unknown
  misc_feature (1)..( 15): Result.002 file - promoters60/1027928
aataatgtttttcta

SEQ ID NO: 101583 - DNA, 15 bp, Unknown
  misc_feature (1)..( 15): Result.002 file - promoters60/1027928
tttaatttcttttca

SEQ ID NO: 101584 - DNA, 15 bp, Unknown
  misc_feature (1)..( 15): Result.002 file - promoters60/1027928
ataaatattttcaac

SEQ ID NO: 101585 - DNA, 15 bp, Unknown
  misc_feature (1)..( 15): Result.002 file - promoters60/1027928
taaaatttcacaatg

SEQ ID NO: 101586 - DNA, 15 bp, Unknown
  misc_feature (1)..( 15): Result.002 file - promoters60/1027928
tttgattagtaaaag

SEQ ID NO: 101587 - DNA, 15 bp, Unknown
  misc_feature (1)..( 15): Result.002 file - promoters60/1027928
tttaaacattaaaga

SEQ ID NO: 101588 - DNA, 6 bp, Unknown
  misc_feature (1)..( 6): Result.002 file - promoters60/1027970
ttttgt

SEQ ID NO: 101589 - DNA, 6 bp, Unknown
  misc_feature (1)..( 6): Result.002 file - promoters60/1027970
ttttgt

SEQ ID NO: 101590 - DNA, 6 bp, Unknown
  misc_feature (1)..( 6): Result.002 file - promoters60/1027970
tatatt

SEQ ID NO: 101591 - DNA, 6 bp, Unknown
  misc_feature (1)..( 6): Result.002 file - promoters60/1027970
tatatt

SEQ ID NO: 101592 - DNA, 6 bp, Unknown
  misc_feature (1)..( 6): Result.002 file - promoters60/1027970
tattat

SEQ ID NO: 101593 - DNA, 6 bp, Unknown
  misc_feature (1)..( 6): Result.002 file - promoters60/1027970
tattat

SEQ ID NO: 101594 - DNA, 7 bp, Unknown
  misc_feature (1)..( 7): Result.002 file - promoters60/1027970
attattc

SEQ ID NO: 101595 - DNA, 7 bp, Unknown
  misc_feature (1)..( 7): Result.002 file - promoters60/1027970
atttttc

SEQ ID NO: 101596 - DNA, 6 bp, Unknown
  misc_feature (1)..( 6): Result.002 file - promoters60/1027970
taaaga

SEQ ID NO: 101597 - DNA, 6 bp, Unknown
  misc_feature (1)..( 6): Result.002 file - promoters60/1027970
taaaga

SEQ ID NO: 101598 - DNA, 6 bp, Unknown
  misc_feature (1)..( 6): Result.002 file - promoters60/1027970
agtttt

SEQ ID NO: 101599 - DNA, 6 bp, Unknown
  misc_feature (1)..( 6): Result.002 file - promoters60/1027970
agtttt

SEQ ID NO: 101600 - DNA, 7 bp, Unknown
  misc_feature (1)..( 7): Result.002 file - promoters60/1027970
tcgttta

SEQ ID NO: 101601 - DNA, 7 bp, Unknown
  misc_feature (1)..( 7): Result.002 file - promoters60/1027970
tcggtta

SEQ ID NO: 101602 - DNA, 8 bp, Unknown
  misc_feature (1)..( 8): Result.002 file - promoters60/1027970
taagattc

SEQ ID NO: 101603 - DNA, 8 bp, Unknown
  misc_feature (1)..( 8): Result.002 file - promoters60/1027970
taaaattg

SEQ ID NO: 101604 - DNA, 8 bp, Unknown
  misc_feature (1)..( 8): Result.002 file - promoters60/1027970
taagcttc

SEQ ID NO: 101605 - DNA, 6 bp, Unknown
  misc_feature (1)..( 6): Result.002 file - promoters60/1027970
aagtga

SEQ ID NO: 101606 - DNA, 6 bp, Unknown
  misc_feature (1)..( 6): Result.002 file - promoters60/1027970
aagtga

SEQ ID NO: 101607 - DNA, 10 bp, Unknown
  misc_feature (1)..( 10): Result.002 file - promoters60/1027970
ttactttctt

SEQ ID NO: 101608 - DNA, 10 bp, Unknown
  misc_feature (1)..( 10): Result.002 file - promoters60/1027970
ttaatttctt

SEQ ID NO: 101609 - DNA, 12 bp, Unknown
  misc_feature (1)..( 12): Result.002 file - promoters60/1027970
ttggaaaacatg

SEQ ID NO: 101610 - DNA, 12 bp, Unknown
  misc_feature (1)..( 12): Result.002 file - promoters60/1027970
ttggaaagcatg

SEQ ID NO: 101611 - DNA, 7 bp, Unknown
  misc_feature (1)..( 7): Result.002 file - promoters60/1027970
cttccgt

SEQ ID NO: 101612 - DNA, 7 bp, Unknown
  misc_feature (1)..( 7): Result.002 file - promoters60/1027970
cttccgt

SEQ ID NO: 101613 - DNA, 6 bp, Unknown
  misc_feature (1)..( 6): Result.002 file - promoters60/1027970
attatt

SEQ ID NO: 101614 - DNA, 6 bp, Unknown
  misc_feature (1)..( 6): Result.002 file - promoters60/1027970
attatt

SEQ ID NO: 101615 - DNA, 7 bp, Unknown
  misc_feature (1)..( 7): Result.002 file - promoters60/1027970
gagctaa

SEQ ID NO: 101616 - DNA, 7 bp, Unknown
  misc_feature (1)..( 7): Result.002 file - promoters60/1027970
gaggtaa

SEQ ID NO: 101617 - DNA, 6 bp, Unknown
  misc_feature (1)..( 6): Result.002 file - promoters60/1027970
aataaa

SEQ ID NO: 101618 - DNA, 6 bp, Unknown
  misc_feature (1)..( 6): Result.002 file - promoters60/1027970
aataaa

SEQ ID NO: 101619 - DNA, 6 bp, Unknown
  misc_feature (1)..( 6): Result.002 file - promoters60/1027970
aaaatt

SEQ ID NO: 101620 - DNA, 6 bp, Unknown
  misc_feature (1)..( 6): Result.002 file - promoters60/1027970
aaaatt

SEQ ID NO: 101621 - DNA, 7 bp, Unknown
  misc_feature (1)..( 7): Result.002 file - promoters60/1027990
aaaaccc

SEQ ID NO: 101622 - DNA, 7 bp, Unknown
  misc_feature (1)..( 7): Result.002 file - promoters60/1027990
aaaaccc

SEQ ID NO: 101623 - DNA, 6 bp, Unknown
  misc_feature (1)..( 6): Result.002 file - promoters60/1027990
tagaaa

SEQ ID NO: 101624 - DNA, 6 bp, Unknown
  misc_feature (1)..( 6): Result.002 file - promoters60/1027990
tagaaa

SEQ ID NO: 101625 - DNA, 7 bp, Unknown
  misc_feature (1)..( 7): Result.002 file - promoters60/1027990
tgtggtt

SEQ ID NO: 101626 - DNA, 7 bp, Unknown
  misc_feature (1)..( 7): Result.002 file - promoters60/1027990
tgtcgtt

SEQ ID NO: 101627 - DNA, 6 bp, Unknown
  misc_feature (1)..( 6): Result.002 file - promoters60/1027990
caggaa

SEQ ID NO: 101628 - DNA, 6 bp, Unknown
  misc_feature (1)..( 6): Result.002 file - promoters60/1027990
caggaa

SEQ ID NO: 101629 - DNA, 7 bp, Unknown
  misc_feature (1)..( 7): Result.002 file - promoters60/1027990
tttctca

SEQ ID NO: 101630 - DNA, 7 bp, Unknown
  misc_feature (1)..( 7): Result.002 file - promoters60/1027990
tttctca

SEQ ID NO: 101631 - DNA, 7 bp, Unknown
  misc_feature (1)..( 7): Result.002 file - promoters60/1028013
atcaagc

SEQ ID NO: 101632 - DNA, 7 bp, Unknown
  misc_feature (1)..( 7): Result.002 file - promoters60/1028013
atctagc

SEQ ID NO: 101633 - DNA, 6 bp, Unknown
  misc_feature (1)..( 6): Result.002 file - promoters60/1028013
ttttct

SEQ ID NO: 101634 - DNA, 6 bp, Unknown
  misc_feature (1)..( 6): Result.002 file - promoters60/1028013
ttttct

SEQ ID NO: 101635 - DNA, 8 bp, Unknown
  misc_feature (1)..( 8): Result.002 file - promoters60/1028013
agagaaga

SEQ ID NO: 101636 - DNA, 8 bp, Unknown
  misc_feature (1)..( 8): Result.002 file - promoters60/1028013
taagaaga

SEQ ID NO: 101637 - DNA, 8 bp, Unknown
  misc_feature (1)..( 8): Result.002 file - promoters60/1028013
agataagt

SEQ ID NO: 101638 - DNA, 8 bp, Unknown
  misc_feature (1)..( 8): Result.002 file - promoters60/1028013
tgggctta

SEQ ID NO: 101639 - DNA, 8 bp, Unknown
  misc_feature (1)..( 8): Result.002 file - promoters60/1028013
tgggatta

SEQ ID NO: 101640 - DNA, 6 bp, Unknown
  misc_feature (1)..( 6): Result.002 file - promoters60/1028013
tttaaa

SEQ ID NO: 101641 - DNA, 6 bp, Unknown
  misc_feature (1)..( 6): Result.002 file - promoters60/1028013
tttaaa

SEQ ID NO: 101642 - DNA, 7 bp, Unknown
  misc_feature (1)..( 7): Result.002 file - promoters60/1028013
aaagcat

SEQ ID NO: 101643 - DNA, 7 bp, Unknown
  misc_feature (1)..( 7): Result.002 file - promoters60/1028013
aaatcat

SEQ ID NO: 101644 - DNA, 8 bp, Unknown
  misc_feature (1)..( 8): Result.002 file - promoters60/1028013
tctcttct

SEQ ID NO: 101645 - DNA, 8 bp, Unknown
  misc_feature (1)..( 8): Result.002 file - promoters60/1028013
tctcgtct

SEQ ID NO: 101646 - DNA, 7 bp, Unknown
  misc_feature (1)..( 7): Result.002 file - promoters60/1028013
agaaaag

SEQ ID NO: 101647 - DNA, 7 bp, Unknown
  misc_feature (1)..( 7): Result.002 file - promoters60/1028013
agataag

SEQ ID NO: 101648 - DNA, 6 bp, Unknown
  misc_feature (1)..( 6): Result.002 file - promoters60/1028013
acgtgg

SEQ ID NO: 101649 - DNA, 6 bp, Unknown
  misc_feature (1)..( 6): Result.002 file - promoters60/1028013
acgtgg

SEQ ID NO: 101650 - DNA, 6 bp, Unknown
  misc_feature (1)..( 6): Result.002 file - promoters60/1028013
agatag

SEQ ID NO: 101651 - DNA, 6 bp, Unknown
  misc_feature (1)..( 6): Result.002 file - promoters60/1028013
agatag

SEQ ID NO: 101652 - DNA, 8 bp, Unknown
  misc_feature (1)..( 8): Result.002 file - promoters60/1028013
tttatttt

SEQ ID NO: 101653 - DNA, 8 bp, Unknown
  misc_feature (1)..( 8): Result.002 file - promoters60/1028013
tttctttt

SEQ ID NO: 101654 - DNA, 6 bp, Unknown
  misc_feature (1)..( 6): Result.002 file - promoters60/1028013
tgactc

SEQ ID NO: 101655 - DNA, 6 bp, Unknown
  misc_feature (1)..( 6): Result.002 file - promoters60/1028013
tgactc

SEQ ID NO: 101656 - DNA, 7 bp, Unknown
  misc_feature (1)..( 7): Result.002 file - promoters60/1028013
ttgtgtc

SEQ ID NO: 101657 - DNA, 7 bp, Unknown
  misc_feature (1)..( 7): Result.002 file - promoters60/1028013
ttgagtc

SEQ ID NO: 101658 - DNA, 7 bp, Unknown
  misc_feature (1)..( 7): Result.002 file - promoters60/1028013
ctttttt

SEQ ID NO: 101659 - DNA, 7 bp, Unknown
  misc_feature (1)..( 7): Result.002 file - promoters60/1028013
cttgttt

SEQ ID NO: 101660 - DNA, 7 bp, Unknown
  misc_feature (1)..( 7): Result.002 file - promoters60/1028013
taaaatt

SEQ ID NO: 101661 - DNA, 7 bp, Unknown
  misc_feature (1)..( 7): Result.002 file - promoters60/1028013
taagatt

SEQ ID NO: 101662 - DNA, 6 bp, Unknown
  misc_feature (1)..( 6): Result.002 file - promoters60/1028013
ttcaaa

SEQ ID NO: 101663 - DNA, 6 bp, Unknown
  misc_feature (1)..( 6): Result.002 file - promoters60/1028013
ttcaaa

SEQ ID NO: 101664 - DNA, 9 bp, Unknown
  misc_feature (1)..( 9): Result.002 file - promoters60/1028013
aaaaaaaac

SEQ ID NO: 101665 - DNA, 9 bp, Unknown
  misc_feature (1)..( 9): Result.002 file - promoters60/1028013
aaacaaaac

SEQ ID NO: 101666 - DNA, 7 bp, Unknown
  misc_feature (1)..( 7): Result.002 file - promoters60/1028013
ttattca

SEQ ID NO: 101667 - DNA, 7 bp, Unknown
  misc_feature (1)..( 7): Result.002 file - promoters60/1028013
ttagtca

SEQ ID NO: 101668 - DNA, 7 bp, Unknown
  misc_feature (1)..( 7): Result.002 file - promoters60/1028013
aattaat

SEQ ID NO: 101669 - DNA, 7 bp, Unknown
  misc_feature (1)..( 7): Result.002 file - promoters60/1028013
aataaat

SEQ ID NO: 101670 - DNA, 6 bp, Unknown
  misc_feature (1)..( 6): Result.002 file - promoters60/1028013
aataat

SEQ ID NO: 101671 - DNA, 6 bp, Unknown
  misc_feature (1)..( 6): Result.002 file - promoters60/1028013
aataat

SEQ ID NO: 101672 - DNA, 6 bp, Unknown
  misc_feature (1)..( 6): Result.002 file - promoters60/1028042
ttaaaa

SEQ ID NO: 101673 - DNA, 6 bp, Unknown
  misc_feature (1)..( 6): Result.002 file - promoters60/1028042
ttaaaa

SEQ ID NO: 101674 - DNA, 6 bp, Unknown
  misc_feature (1)..( 6): Result.002 file - promoters60/1028042
taaaac

SEQ ID NO: 101675 - DNA, 6 bp, Unknown
  misc_feature (1)..( 6): Result.002 file - promoters60/1028042
taaaac

SEQ ID NO: 101676 - DNA, 6 bp, Unknown
  misc_feature (1)..( 6): Result.002 file - promoters60/1028042
aaactt

SEQ ID NO: 101677 - DNA, 6 bp, Unknown
  misc_feature (1)..( 6): Result.002 file - promoters60/1028042
aaactt

SEQ ID NO: 101678 - DNA, 7 bp, Unknown
  misc_feature (1)..( 7): Result.002 file - promoters60/1028042
cacgatc

SEQ ID NO: 101679 - DNA, 7 bp, Unknown
  misc_feature (1)..( 7): Result.002 file - promoters60/1028042
cacaatc

SEQ ID NO: 101680 - DNA, 7 bp, Unknown
  misc_feature (1)..( 7): Result.002 file - promoters60/1028042
aaagcaa

SEQ ID NO: 101681 - DNA, 7 bp, Unknown
  misc_feature (1)..( 7): Result.002 file - promoters60/1028042
aaaccaa

SEQ ID NO: 101682 - DNA, 6 bp, Unknown
  misc_feature (1)..( 6): Result.002 file - promoters60/1028042
agttaa

SEQ ID NO: 101683 - DNA, 6 bp, Unknown
  misc_feature (1)..( 6): Result.002 file - promoters60/1028042
agttaa

SEQ ID NO: 101684 - DNA, 7 bp, Unknown
  misc_feature (1)..( 7): Result.002 file - promoters60/1028042
aagcaat

SEQ ID NO: 101685 - DNA, 7 bp, Unknown
  misc_feature (1)..( 7): Result.002 file - promoters60/1028042
aagcaat

SEQ ID NO: 101686 - DNA, 7 bp, Unknown
  misc_feature (1)..( 7): Result.002 file - promoters60/1028042
acatgta

SEQ ID NO: 101687 - DNA, 7 bp, Unknown
  misc_feature (1)..( 7): Result.002 file - promoters60/1028042
acatgtt

SEQ ID NO: 101688 - DNA, 7 bp, Unknown
  misc_feature (1)..( 7): Result.002 file - promoters60/1028042
ccatgtt

SEQ ID NO: 101689 - DNA, 7 bp, Unknown
  misc_feature (1)..( 7): Result.002 file - promoters60/1028042
aatctaa

SEQ ID NO: 101690 - DNA, 7 bp, Unknown
  misc_feature (1)..( 7): Result.002 file - promoters60/1028042
aatgtaa

SEQ ID NO: 101691 - DNA, 7 bp, Unknown
  misc_feature (1)..( 7): Result.002 file - promoters60/1028042
gatgtaa

SEQ ID NO: 101692 - DNA, 13 bp, Unknown
  misc_feature (1)..( 13): Result.002 file - promoters60/1028042
cagaaaagaagac

SEQ ID NO: 101693 - DNA, 13 bp, Unknown
  misc_feature (1)..( 13): Result.002 file - promoters60/1028042
cagaaaagaaaaa

SEQ ID NO: 101694 - DNA, 13 bp, Unknown
  misc_feature (1)..( 13): Result.002 file - promoters60/1028042
accaaaagacaaa

SEQ ID NO: 101695 - DNA, 8 bp, Unknown
  misc_feature (1)..( 8): Result.002 file - promoters60/1028042
aaatcaaa

SEQ ID NO: 101696 - DNA, 8 bp, Unknown
  misc_feature (1)..( 8): Result.002 file - promoters60/1028042
aaaacaaa

SEQ ID NO: 101697 - DNA, 7 bp, Unknown
  misc_feature (1)..( 7): Result.002 file - promoters60/1028042
acaaaag

SEQ ID NO: 101698 - DNA, 7 bp, Unknown
  misc_feature (1)..( 7): Result.002 file - promoters60/1028042
acaaaag

SEQ ID NO: 101699 - DNA, 8 bp, Unknown
  misc_feature (1)..( 8): Result.002 file - promoters60/1028042
agaggaag

SEQ ID NO: 101700 - DNA, 8 bp, Unknown
  misc_feature (1)..( 8): Result.002 file - promoters60/1028042
agacgaaa

SEQ ID NO: 101701 - DNA, 8 bp, Unknown
  misc_feature (1)..( 8): Result.002 file - promoters60/1028042
aaacgaaa

SEQ ID NO: 101702 - DNA, 13 bp, Unknown
  misc_feature (1)..( 13): Result.002 file - promoters60/1028042
actctaatcaacc

SEQ ID NO: 101703 - DNA, 13 bp, Unknown
  misc_feature (1)..( 13): Result.002 file - promoters60/1028042
agaacaattaacc

SEQ ID NO: 101704 - DNA, 13 bp, Unknown
  misc_feature (1)..( 13): Result.002 file - promoters60/1028042
agatcaattagtg

SEQ ID NO: 101705 - DNA, 6 bp, Unknown
  misc_feature (1)..( 6): Result.002 file - promoters60/1028042
cctttc

SEQ ID NO: 101706 - DNA, 6 bp, Unknown
  misc_feature (1)..( 6): Result.002 file - promoters60/1028042
cctttc

SEQ ID NO: 101707 - DNA, 6 bp, Unknown
  misc_feature (1)..( 6): Result.002 file - promoters60/1028042
ctttaa

SEQ ID NO: 101708 - DNA, 6 bp, Unknown
  misc_feature (1)..( 6): Result.002 file - promoters60/1028042
ctttaa

SEQ ID NO: 101709 - DNA, 9 bp, Unknown
  misc_feature (1)..( 9): Result.002 file - promoters60/1028042
aatttcagt

SEQ ID NO: 101710 - DNA, 9 bp, Unknown
  misc_feature (1)..( 9): Result.002 file - promoters60/1028042
aatttaagt

SEQ ID NO: 101711 - DNA, 8 bp, Unknown
  misc_feature (1)..( 8): Result.002 file - promoters60/1028042
atatttca

SEQ ID NO: 101712 - DNA, 8 bp, Unknown
  misc_feature (1)..( 8): Result.002 file - promoters60/1028042
atagttca

SEQ ID NO: 101713 - DNA, 7 bp, Unknown
  misc_feature (1)..( 7): Result.002 file - promoters60/1028042
ttttttt

SEQ ID NO: 101714 - DNA, 7 bp, Unknown
  misc_feature (1)..( 7): Result.002 file - promoters60/1028042
ttttttt

SEQ ID NO: 101715 - DNA, 7 bp, Unknown
  misc_feature (1)..( 7): Result.002 file - promoters60/1028042
tttgttt

SEQ ID NO: 101716 - DNA, 7 bp, Unknown
  misc_feature (1)..( 7): Result.002 file - promoters60/1028042
tttattt

SEQ ID NO: 101717 - DNA, 7 bp, Unknown
  misc_feature (1)..( 7): Result.002 file - promoters60/1028042
aaacttt

SEQ ID NO: 101718 - DNA, 7 bp, Unknown
  misc_feature (1)..( 7): Result.002 file - promoters60/1028042
aaagttt

SEQ ID NO: 101719 - DNA, 7 bp, Unknown
  misc_feature (1)..( 7): Result.002 file - promoters60/1028042
cattata

SEQ ID NO: 101720 - DNA, 7 bp, Unknown
  misc_feature (1)..( 7): Result.002 file - promoters60/1028042
cataata

SEQ ID NO: 101721 - DNA, 7 bp, Unknown
  misc_feature (1)..( 7): Result.002 file - promoters60/1028042
aaacgcg

SEQ ID NO: 101722 - DNA, 7 bp, Unknown
  misc_feature (1)..( 7): Result.002 file - promoters60/1028042
aaaagcg

SEQ ID NO: 101723 - DNA, 12 bp, Unknown
  misc_feature (1)..( 12): Result.002 file - promoters60/1028084
gaaattttagga

SEQ ID NO: 101724 - DNA, 12 bp, Unknown
  misc_feature (1)..( 12): Result.002 file - promoters60/1028084
gaaattttattt

SEQ ID NO: 101725 - DNA, 12 bp, Unknown
  misc_feature (1)..( 12): Result.002 file - promoters60/1028084
tatcttttattt

SEQ ID NO: 101726 - DNA, 8 bp, Unknown
  misc_feature (1)..( 8): Result.002 file - promoters60/1028084
catccaca

SEQ ID NO: 101727 - DNA, 8 bp, Unknown
  misc_feature (1)..( 8): Result.002 file - promoters60/1028084
catccaca

SEQ ID NO: 101728 - DNA, 6 bp, Unknown
  misc_feature (1)..( 6): Result.002 file - promoters60/1028084
cacaaa

SEQ ID NO: 101729 - DNA, 6 bp, Unknown
  misc_feature (1)..( 6): Result.002 file - promoters60/1028084
cacaaa

SEQ ID NO: 101730 - DNA, 10 bp, Unknown
  misc_feature (1)..( 10): Result.002 file - promoters60/1028084
atatcaattt

SEQ ID NO: 101731 - DNA, 10 bp, Unknown
  misc_feature (1)..( 10): Result.002 file - promoters60/1028084
ataccaattt

SEQ ID NO: 101732 - DNA, 10 bp, Unknown
  misc_feature (1)..( 10): Result.002 file - promoters60/1028084
gtaacaattt

SEQ ID NO: 101733 - DNA, 7 bp, Unknown
  misc_feature (1)..( 7): Result.002 file - promoters60/1028084
aaacaaa

SEQ ID NO: 101734 - DNA, 7 bp, Unknown
  misc_feature (1)..( 7): Result.002 file - promoters60/1028084
aaaaaaa

SEQ ID NO: 101735 - DNA, 8 bp, Unknown
  misc_feature (1)..( 8): Result.002 file - promoters60/1028084
aaacagac

SEQ ID NO: 101736 - DNA, 8 bp, Unknown
  misc_feature (1)..( 8): Result.002 file - promoters60/1028084
aaaaagac

SEQ ID NO: 101737 - DNA, 6 bp, Unknown
  misc_feature (1)..( 6): Result.002 file - promoters60/1028084
tatata

SEQ ID NO: 101738 - DNA, 6 bp, Unknown
  misc_feature (1)..( 6): Result.002 file - promoters60/1028084
tatata

SEQ ID NO: 101739 - DNA, 6 bp, Unknown
  misc_feature (1)..( 6): Result.002 file - promoters60/1028084
tgtatg

SEQ ID NO: 101740 - DNA, 6 bp, Unknown
  misc_feature (1)..( 6): Result.002 file - promoters60/1028084
tgtatg

SEQ ID NO: 101741 - DNA, 6 bp, Unknown
  misc_feature (1)..( 6): Result.002 file - promoters60/1028084
ataata

SEQ ID NO: 101742 - DNA, 6 bp, Unknown
  misc_feature (1)..( 6): Result.002 file - promoters60/1028084
ataata

SEQ ID NO: 101743 - DNA, 6 bp, Unknown
  misc_feature (1)..( 6): Result.002 file - promoters60/1028084
attatt

SEQ ID NO: 101744 - DNA, 6 bp, Unknown
  misc_feature (1)..( 6): Result.002 file - promoters60/1028084
attatt

SEQ ID NO: 101745 - DNA, 7 bp, Unknown
  misc_feature (1)..( 7): Result.002 file - promoters60/1028084
gttaagt

SEQ ID NO: 101746 - DNA, 7 bp, Unknown
  misc_feature (1)..( 7): Result.002 file - promoters60/1028084
gtttagt

SEQ ID NO: 101747 - DNA, 6 bp, Unknown
  misc_feature (1)..( 6): Result.002 file - promoters60/1028084
tagtgt

SEQ ID NO: 101748 - DNA, 6 bp, Unknown
  misc_feature (1)..( 6): Result.002 file - promoters60/1028084
tagtgt

SEQ ID NO: 101749 - DNA, 7 bp, Unknown
  misc_feature (1)..( 7): Result.002 file - promoters60/1028084
ttttcac

SEQ ID NO: 101750 - DNA, 7 bp, Unknown
  misc_feature (1)..( 7): Result.002 file - promoters60/1028084
tttgcac

SEQ ID NO: 101751 - DNA, 6 bp, Unknown
  misc_feature (1)..( 6): Result.002 file - promoters60/1028084
aagaaa

SEQ ID NO: 101752 - DNA, 6 bp, Unknown
  misc_feature (1)..( 6): Result.002 file - promoters60/1028084
aagaaa

SEQ ID NO: 101753 - DNA, 6 bp, Unknown
  misc_feature (1)..( 6): Result.002 file - promoters60/1028084
aaatca

SEQ ID NO: 101754 - DNA, 6 bp, Unknown
  misc_feature (1)..( 6): Result.002 file - promoters60/1028084
aaatca

SEQ ID NO: 101755 - DNA, 7 bp, Unknown
  misc_feature (1)..( 7): Result.002 file - promoters60/1028084
aataact

SEQ ID NO: 101756 - DNA, 7 bp, Unknown
  misc_feature (1)..( 7): Result.002 file - promoters60/1028084
aataact

SEQ ID NO: 101757 - DNA, 6 bp, Unknown
  misc_feature (1)..( 6): Result.002 file - promoters60/1028095
gattaa

SEQ ID NO: 101758 - DNA, 6 bp, Unknown
  misc_feature (1)..( 6): Result.002 file - promoters60/1028095
gattaa

SEQ ID NO: 101759 - DNA, 8 bp, Unknown
  misc_feature (1)..( 8): Result.002 file - promoters60/1028095
atatgttt

SEQ ID NO: 101760 - DNA, 8 bp, Unknown
  misc_feature (1)..( 8): Result.002 file - promoters60/1028095
atatcttt

SEQ ID NO: 101761 - DNA, 9 bp, Unknown
  misc_feature (1)..( 9): Result.002 file - promoters60/1028095
aaccacatc

SEQ ID NO: 101762 - DNA, 9 bp, Unknown
  misc_feature (1)..( 9): Result.002 file - promoters60/1028095
aacaacatc

SEQ ID NO: 101763 - DNA, 8 bp, Unknown
  misc_feature (1)..( 8): Result.002 file - promoters60/1028095
tagttata

SEQ ID NO: 101764 - DNA, 8 bp, Unknown
  misc_feature (1)..( 8): Result.002 file - promoters60/1028095
tagctata

SEQ ID NO: 101765 - DNA, 6 bp, Unknown
  misc_feature (1)..( 6): Result.002 file - promoters60/1028095
tttttt

SEQ ID NO: 101766 - DNA, 6 bp, Unknown
  misc_feature (1)..( 6): Result.002 file - promoters60/1028095
tttttt

SEQ ID NO: 101767 - DNA, 9 bp, Unknown
  misc_feature (1)..( 9): Result.002 file - promoters60/1028095
tttttttta

SEQ ID NO: 101768 - DNA, 9 bp, Unknown
  misc_feature (1)..( 9): Result.002 file - promoters60/1028095
tttatttta

SEQ ID NO: 101769 - DNA, 7 bp, Unknown
  misc_feature (1)..( 7): Result.002 file - promoters60/1028095
tataaaa

SEQ ID NO: 101770 - DNA, 7 bp, Unknown
  misc_feature (1)..( 7): Result.002 file - promoters60/1028095
tataaaa

SEQ ID NO: 101771 - DNA, 7 bp, Unknown
  misc_feature (1)..( 7): Result.002 file - promoters60/1028095
tgaaatt

SEQ ID NO: 101772 - DNA, 7 bp, Unknown
  misc_feature (1)..( 7): Result.002 file - promoters60/1028095
tgatatt

SEQ ID NO: 101773 - DNA, 7 bp, Unknown
  misc_feature (1)..( 7): Result.002 file - promoters60/1028095
cgttttt

SEQ ID NO: 101774 - DNA, 7 bp, Unknown
  misc_feature (1)..( 7): Result.002 file - promoters60/1028095
cgttttt

SEQ ID NO: 101775 - DNA, 8 bp, Unknown
  misc_feature (1)..( 8): Result.002 file - promoters60/1028095
caaataaa

SEQ ID NO: 101776 - DNA, 8 bp, Unknown
  misc_feature (1)..( 8): Result.002 file - promoters60/1028095
caaagaaa

SEQ ID NO: 101777 - DNA, 7 bp, Unknown
  misc_feature (1)..( 7): Result.002 file - promoters60/1028095
ttattat

SEQ ID NO: 101778 - DNA, 7 bp, Unknown
  misc_feature (1)..( 7): Result.002 file - promoters60/1028095
ttattat

SEQ ID NO: 101779 - DNA, 10 bp, Unknown
  misc_feature (1)..( 10): Result.002 file - promoters60/1028095
aaataaagtt

SEQ ID NO: 101780 - DNA, 10 bp, Unknown
  misc_feature (1)..( 10): Result.002 file - promoters60/1028095
aaataaggtt

SEQ ID NO: 101781 - DNA, 6 bp, Unknown
  misc_feature (1)..( 6): Result.002 file - promoters60/1028095
aaaacg

SEQ ID NO: 101782 - DNA, 6 bp, Unknown
  misc_feature (1)..( 6): Result.002 file - promoters60/1028095
aaaacg

SEQ ID NO: 101783 - DNA, 8 bp, Unknown
  misc_feature (1)..( 8): Result.002 file - promoters60/1028131
catatata

SEQ ID NO: 101784 - DNA, 8 bp, Unknown
  misc_feature (1)..( 8): Result.002 file - promoters60/1028131
agtatata

SEQ ID NO: 101785 - DNA, 8 bp, Unknown
  misc_feature (1)..( 8): Result.002 file - promoters60/1028131
agtctatt

SEQ ID NO: 101786 - DNA, 8 bp, Unknown
  misc_feature (1)..( 8): Result.002 file - promoters60/1028131
atcatttc

SEQ ID NO: 101787 - DNA, 8 bp, Unknown
  misc_feature (1)..( 8): Result.002 file - promoters60/1028131
ttcatttt

SEQ ID NO: 101788 - DNA, 9 bp, Unknown
  misc_feature (1)..( 9): Result.002 file - promoters60/1028131
ttcatattt

SEQ ID NO: 101789 - DNA, 14 bp, Unknown
  misc_feature (1)..( 14): Result.002 file - promoters60/1028131
cccaaatttattta

SEQ ID NO: 101790 - DNA, 14 bp, Unknown
  misc_feature (1)..( 14): Result.002 file - promoters60/1028131
tcttcattttttta

SEQ ID NO: 101791 - DNA, 14 bp, Unknown
  misc_feature (1)..( 14): Result.002 file - promoters60/1028131
ttcatatttgaaga

SEQ ID NO: 101792 - DNA, 10 bp, Unknown
  misc_feature (1)..( 10): Result.002 file - promoters60/1028131
gaaaccctag

SEQ ID NO: 101793 - DNA, 10 bp, Unknown
  misc_feature (1)..( 10): Result.002 file - promoters60/1028131
gaagcccaat

SEQ ID NO: 101794 - DNA, 10 bp, Unknown
  misc_feature (1)..( 10): Result.002 file - promoters60/1028131
atagcccaat

SEQ ID NO: 101795 - DNA, 6 bp, Unknown
  misc_feature (1)..( 6): Result.002 file - promoters60/1028151
aagatg

SEQ ID NO: 101796 - DNA, 6 bp, Unknown
  misc_feature (1)..( 6): Result.002 file - promoters60/1028151
aagatg

SEQ ID NO: 101797 - DNA, 9 bp, Unknown
  misc_feature (1)..( 9): Result.002 file - promoters60/1028151
gttttattt

SEQ ID NO: 101798 - DNA, 9 bp, Unknown
  misc_feature (1)..( 9): Result.002 file - promoters60/1028151
tgattattt

SEQ ID NO: 101799 - DNA, 9 bp, Unknown
  misc_feature (1)..( 9): Result.002 file - promoters60/1028151
tgagtattc

SEQ ID NO: 101800 - DNA, 8 bp, Unknown
  misc_feature (1)..( 8): Result.002 file - promoters60/1028151
acagcttt

SEQ ID NO: 101801 - DNA, 8 bp, Unknown
  misc_feature (1)..( 8): Result.002 file - promoters60/1028151
acatcttt

SEQ ID NO: 101802 - DNA, 6 bp, Unknown
  misc_feature (1)..( 6): Result.002 file - promoters60/1028151
tatttt

SEQ ID NO: 101803 - DNA, 6 bp, Unknown
  misc_feature (1)..( 6): Result.002 file - promoters60/1028151
tatttt

SEQ ID NO: 101804 - DNA, 7 bp, Unknown
  misc_feature (1)..( 7): Result.002 file - promoters60/1028151
agatttt

SEQ ID NO: 101805 - DNA, 7 bp, Unknown
  misc_feature (1)..( 7): Result.002 file - promoters60/1028151
agatttt

SEQ ID NO: 101806 - DNA, 7 bp, Unknown
  misc_feature (1)..( 7): Result.002 file - promoters60/1028151
aaagact

SEQ ID NO: 101807 - DNA, 7 bp, Unknown
  misc_feature (1)..( 7): Result.002 file - promoters60/1028151
aaacact

SEQ ID NO: 101808 - DNA, 6 bp, Unknown
  misc_feature (1)..( 6): Result.002 file - promoters60/1028151
tctctc

SEQ ID NO: 101809 - DNA, 6 bp, Unknown
  misc_feature (1)..( 6): Result.002 file - promoters60/1028151
tctctc

SEQ ID NO: 101810 - DNA, 7 bp, Unknown
  misc_feature (1)..( 7): Result.002 file - promoters60/1028151
atgttga

SEQ ID NO: 101811 - DNA, 7 bp, Unknown
  misc_feature (1)..( 7): Result.002 file - promoters60/1028151
atgatga

SEQ ID NO: 101812 - DNA, 8 bp, Unknown
  misc_feature (1)..( 8): Result.002 file - promoters60/1028151
attgtttt

SEQ ID NO: 101813 - DNA, 8 bp, Unknown
  misc_feature (1)..( 8): Result.002 file - promoters60/1028151
attttttt

SEQ ID NO: 101814 - DNA, 8 bp, Unknown
  misc_feature (1)..( 8): Result.002 file - promoters60/1028151
aagatgat

SEQ ID NO: 101815 - DNA, 8 bp, Unknown
  misc_feature (1)..( 8): Result.002 file - promoters60/1028151
aagaggat

SEQ ID NO: 101816 - DNA, 10 bp, Unknown
  misc_feature (1)..( 10): Result.002 file - promoters60/1028151
tttatttata

SEQ ID NO: 101817 - DNA, 10 bp, Unknown
  misc_feature (1)..( 10): Result.002 file - promoters60/1028151
tttttttata

SEQ ID NO: 101818 - DNA, 7 bp, Unknown
  misc_feature (1)..( 7): Result.002 file - promoters60/1028151
tcttaaa

SEQ ID NO: 101819 - DNA, 7 bp, Unknown
  misc_feature (1)..( 7): Result.002 file - promoters60/1028151
tctaaaa

SEQ ID NO: 101820 - DNA, 7 bp, Unknown
  misc_feature (1)..( 7): Result.002 file - promoters60/1028177
tatttta

SEQ ID NO: 101821 - DNA, 7 bp, Unknown
  misc_feature (1)..( 7): Result.002 file - promoters60/1028177
gatttta

SEQ ID NO: 101822 - DNA, 7 bp, Unknown
  misc_feature (1)..( 7): Result.002 file - promoters60/1028177
gattttt

SEQ ID NO: 101823 - DNA, 8 bp, Unknown
  misc_feature (1)..( 8): Result.002 file - promoters60/1028177
ttggccaa

SEQ ID NO: 101824 - DNA, 8 bp, Unknown
  misc_feature (1)..( 8): Result.002 file - promoters60/1028177
ttggacaa

SEQ ID NO: 101825 - DNA, 11 bp, Unknown
  misc_feature (1)..( 11): Result.002 file - promoters60/1028177
ctatcaatttt

SEQ ID NO: 101826 - DNA, 11 bp, Unknown
  misc_feature (1)..( 11): Result.002 file - promoters60/1028177
ctatcaatttt

SEQ ID NO: 101827 - DNA, 9 bp, Unknown
  misc_feature (1)..( 9): Result.002 file - promoters60/1028177
tgatttctt

SEQ ID NO: 101828 - DNA, 9 bp, Unknown
  misc_feature (1)..( 9): Result.002 file - promoters60/1028177
tgatttctt

SEQ ID NO: 101829 - DNA, 7 bp, Unknown
  misc_feature (1)..( 7): Result.002 file - promoters60/1028177
gatatgt

SEQ ID NO: 101830 - DNA, 7 bp, Unknown
  misc_feature (1)..( 7): Result.002 file - promoters60/1028177
gatttgt

SEQ ID NO: 101831 - DNA, 9 bp, Unknown
  misc_feature (1)..( 9): Result.002 file - promoters60/1028177
gttctatgg

SEQ ID NO: 101832 - DNA, 9 bp, Unknown
  misc_feature (1)..( 9): Result.002 file - promoters60/1028177
gttctaact

SEQ ID NO: 101833 - DNA, 9 bp, Unknown
  misc_feature (1)..( 9): Result.002 file - promoters60/1028177
cttcttact

SEQ ID NO: 101834 - DNA, 7 bp, Unknown
  misc_feature (1)..( 7): Result.002 file - promoters60/1028177
ctaagta

SEQ ID NO: 101835 - DNA, 7 bp, Unknown
  misc_feature (1)..( 7): Result.002 file - promoters60/1028177
ctatgta

SEQ ID NO: 101836 - DNA, 6 bp, Unknown
  misc_feature (1)..( 6): Result.002 file - promoters60/1028177
aactct

SEQ ID NO: 101837 - DNA, 6 bp, Unknown
  misc_feature (1)..( 6): Result.002 file - promoters60/1028177
aactct

SEQ ID NO: 101838 - DNA, 8 bp, Unknown
  misc_feature (1)..( 8): Result.002 file - promoters60/1028177
gttgtact

SEQ ID NO: 101839 - DNA, 8 bp, Unknown
  misc_feature (1)..( 8): Result.002 file - promoters60/1028177
gttctact

SEQ ID NO: 101840 - DNA, 8 bp, Unknown
  misc_feature (1)..( 8): Result.002 file - promoters60/1028177
aggatttg

SEQ ID NO: 101841 - DNA, 8 bp, Unknown
  misc_feature (1)..( 8): Result.002 file - promoters60/1028177
tggatttg

SEQ ID NO: 101842 - DNA, 8 bp, Unknown
  misc_feature (1)..( 8): Result.002 file - promoters60/1028177
tggtttta

SEQ ID NO: 101843 - DNA, 6 bp, Unknown
  misc_feature (1)..( 6): Result.002 file - promoters60/1028177
tttttt

SEQ ID NO: 101844 - DNA, 6 bp, Unknown
  misc_feature (1)..( 6): Result.002 file - promoters60/1028177
tttttt

SEQ ID NO: 101845 - DNA, 7 bp, Unknown
  misc_feature (1)..( 7): Result.002 file - promoters60/1028177
ttatttt

SEQ ID NO: 101846 - DNA, 7 bp, Unknown
  misc_feature (1)..( 7): Result.002 file - promoters60/1028177
ttagttt

SEQ ID NO: 101847 - DNA, 7 bp, Unknown
  misc_feature (1)..( 7): Result.002 file - promoters60/1028177
tctaaaa

SEQ ID NO: 101848 - DNA, 7 bp, Unknown
  misc_feature (1)..( 7): Result.002 file - promoters60/1028177
tcttaaa

SEQ ID NO: 101849 - DNA, 6 bp, Unknown
  misc_feature (1)..( 6): Result.002 file - promoters60/1028177
tagaaa

SEQ ID NO: 101850 - DNA, 6 bp, Unknown
  misc_feature (1)..( 6): Result.002 file - promoters60/1028177
tagaaa

SEQ ID NO: 101851 - DNA, 8 bp, Unknown
  misc_feature (1)..( 8): Result.002 file - promoters60/1028177
cctagaat

SEQ ID NO: 101852 - DNA, 8 bp, Unknown
  misc_feature (1)..( 8): Result.002 file - promoters60/1028177
cctggaat

SEQ ID NO: 101853 - DNA, 6 bp, Unknown
  misc_feature (1)..( 6): Result.002 file - promoters60/1028224
taagtt

SEQ ID NO: 101854 - DNA, 6 bp, Unknown
  misc_feature (1)..( 6): Result.002 file - promoters60/1028224
taagtt

SEQ ID NO: 101855 - DNA, 7 bp, Unknown
  misc_feature (1)..( 7): Result.002 file - promoters60/1028224
tcgtcaa

SEQ ID NO: 101856 - DNA, 7 bp, Unknown
  misc_feature (1)..( 7): Result.002 file - promoters60/1028224
tcgtcaa

SEQ ID NO: 101857 - DNA, 6 bp, Unknown
  misc_feature (1)..( 6): Result.002 file - promoters60/1028224
caatta

SEQ ID NO: 101858 - DNA, 6 bp, Unknown
  misc_feature (1)..( 6): Result.002 file - promoters60/1028224
caatta

SEQ ID NO: 101859 - DNA, 8 bp, Unknown
  misc_feature (1)..( 8): Result.002 file - promoters60/1028224
taatcagt

SEQ ID NO: 101860 - DNA, 8 bp, Unknown
  misc_feature (1)..( 8): Result.002 file - promoters60/1028224
taatcacg

SEQ ID NO: 101861 - DNA, 8 bp, Unknown
  misc_feature (1)..( 8): Result.002 file - promoters60/1028224
aaattagt

SEQ ID NO: 101862 - DNA, 6 bp, Unknown
  misc_feature (1)..( 6): Result.002 file - promoters60/1028224
acgact

SEQ ID NO: 101863 - DNA, 6 bp, Unknown
  misc_feature (1)..( 6): Result.002 file - promoters60/1028224
acgact

SEQ ID NO: 101864 - DNA, 8 bp, Unknown
  misc_feature (1)..( 8): Result.002 file - promoters60/1028224
atgtttat

SEQ ID NO: 101865 - DNA, 8 bp, Unknown
  misc_feature (1)..( 8): Result.002 file - promoters60/1028224
atgttttg

SEQ ID NO: 101866 - DNA, 8 bp, Unknown
  misc_feature (1)..( 8): Result.002 file - promoters60/1028224
ctgtttat

SEQ ID NO: 101867 - DNA, 6 bp, Unknown
  misc_feature (1)..( 6): Result.002 file - promoters60/1028224
ttaaaa

SEQ ID NO: 101868 - DNA, 6 bp, Unknown
  misc_feature (1)..( 6): Result.002 file - promoters60/1028224
ttaaaa

SEQ ID NO: 101869 - DNA, 8 bp, Unknown
  misc_feature (1)..( 8): Result.002 file - promoters60/1028224
ttatgttt

SEQ ID NO: 101870 - DNA, 8 bp, Unknown
  misc_feature (1)..( 8): Result.002 file - promoters60/1028224
ttatgtat

SEQ ID NO: 101871 - DNA, 8 bp, Unknown
  misc_feature (1)..( 8): Result.002 file - promoters60/1028224
atattttt

SEQ ID NO: 101872 - DNA, 6 bp, Unknown
  misc_feature (1)..( 6): Result.002 file - promoters60/1028224
tataaa

SEQ ID NO: 101873 - DNA, 6 bp, Unknown
  misc_feature (1)..( 6): Result.002 file - promoters60/1028224
tataaa

SEQ ID NO: 101874 - DNA, 7 bp, Unknown
  misc_feature (1)..( 7): Result.002 file - promoters60/1028224
acaattt

SEQ ID NO: 101875 - DNA, 7 bp, Unknown
  misc_feature (1)..( 7): Result.002 file - promoters60/1028224
acatttt

SEQ ID NO: 101876 - DNA, 7 bp, Unknown
  misc_feature (1)..( 7): Result.002 file - promoters60/1028224
taatata

SEQ ID NO: 101877 - DNA, 7 bp, Unknown
  misc_feature (1)..( 7): Result.002 file - promoters60/1028224
taaaata

SEQ ID NO: 101878 - DNA, 6 bp, Unknown
  misc_feature (1)..( 6): Result.002 file - promoters60/1028224
tttcat

SEQ ID NO: 101879 - DNA, 6 bp, Unknown
  misc_feature (1)..( 6): Result.002 file - promoters60/1028224
tttcat

SEQ ID NO: 101880 - DNA, 6 bp, Unknown
  misc_feature (1)..( 6): Result.002 file - promoters60/1028224
tgaaat

SEQ ID NO: 101881 - DNA, 6 bp, Unknown
  misc_feature (1)..( 6): Result.002 file - promoters60/1028224
tgaaat

SEQ ID NO: 101882 - DNA, 7 bp, Unknown
  misc_feature (1)..( 7): Result.002 file - promoters60/1028224
gtttaaa

SEQ ID NO: 101883 - DNA, 7 bp, Unknown
  misc_feature (1)..( 7): Result.002 file - promoters60/1028224
gttgaaa

SEQ ID NO: 101884 - DNA, 7 bp, Unknown
  misc_feature (1)..( 7): Result.002 file - promoters60/1028224
gtttttt

SEQ ID NO: 101885 - DNA, 7 bp, Unknown
  misc_feature (1)..( 7): Result.002 file - promoters60/1028224
gtttttt

SEQ ID NO: 101886 - DNA, 7 bp, Unknown
  misc_feature (1)..( 7): Result.002 file - promoters60/1028224
ggtcaac

SEQ ID NO: 101887 - DNA, 7 bp, Unknown
  misc_feature (1)..( 7): Result.002 file - promoters60/1028224
ggtaaac

SEQ ID NO: 101888 - DNA, 6 bp, Unknown
  misc_feature (1)..( 6): Result.002 file - promoters60/1028224
atttga

SEQ ID NO: 101889 - DNA, 6 bp, Unknown
  misc_feature (1)..( 6): Result.002 file - promoters60/1028224
atttga

SEQ ID NO: 101890 - DNA, 6 bp, Unknown
  misc_feature (1)..( 6): Result.002 file - promoters60/1028224
taaatt

SEQ ID NO: 101891 - DNA, 6 bp, Unknown
  misc_feature (1)..( 6): Result.002 file - promoters60/1028224
taaatt

SEQ ID NO: 101892 - DNA, 6 bp, Unknown
  misc_feature (1)..( 6): Result.002 file - promoters60/1028224
taatct

SEQ ID NO: 101893 - DNA, 6 bp, Unknown
  misc_feature (1)..( 6): Result.002 file - promoters60/1028224
taatct

SEQ ID NO: 101894 - DNA, 9 bp, Unknown
  misc_feature (1)..( 9): Result.002 file - promoters60/1028224
taaccattt

SEQ ID NO: 101895 - DNA, 9 bp, Unknown
  misc_feature (1)..( 9): Result.002 file - promoters60/1028224
taaccattt

SEQ ID NO: 101896 - DNA, 7 bp, Unknown
  misc_feature (1)..( 7): Result.002 file - promoters60/1028224
tattgtt

SEQ ID NO: 101897 - DNA, 7 bp, Unknown
  misc_feature (1)..( 7): Result.002 file - promoters60/1028224
tatagtt

SEQ ID NO: 101898 - DNA, 11 bp, Unknown
  misc_feature (1)..( 11): Result.002 file - promoters60/1028224
aaacttcatct

SEQ ID NO: 101899 - DNA, 11 bp, Unknown
  misc_feature (1)..( 11): Result.002 file - promoters60/1028224
aaagttcatct

SEQ ID NO: 101900 - DNA, 7 bp, Unknown
  misc_feature (1)..( 7): Result.002 file - promoters60/1028224
tatatgt

SEQ ID NO: 101901 - DNA, 7 bp, Unknown
  misc_feature (1)..( 7): Result.002 file - promoters60/1028224
tatgtgt

SEQ ID NO: 101902 - DNA, 7 bp, Unknown
  misc_feature (1)..( 7): Result.002 file - promoters60/1028224
taagatt

SEQ ID NO: 101903 - DNA, 7 bp, Unknown
  misc_feature (1)..( 7): Result.002 file - promoters60/1028224
taagatt

SEQ ID NO: 101904 - DNA, 7 bp, Unknown
  misc_feature (1)..( 7): Result.002 file - promoters60/1028224
tggttat

SEQ ID NO: 101905 - DNA, 7 bp, Unknown
  misc_feature (1)..( 7): Result.002 file - promoters60/1028224
tggatat

SEQ ID NO: 101906 - DNA, 10 bp, Unknown
  misc_feature (1)..( 10): Result.002 file - promoters60/1028243
actataaaac

SEQ ID NO: 101907 - DNA, 10 bp, Unknown
  misc_feature (1)..( 10): Result.002 file - promoters60/1028243
tatataaaga

SEQ ID NO: 101908 - DNA, 10 bp, Unknown
  misc_feature (1)..( 10): Result.002 file - promoters60/1028243
tatataaaag

SEQ ID NO: 101909 - DNA, 10 bp, Unknown
  misc_feature (1)..( 10): Result.002 file - promoters60/1028243
catacaaaga

SEQ ID NO: 101910 - DNA, 10 bp, Unknown
  misc_feature (1)..( 10): Result.002 file - promoters60/1028243
tatataaatg

SEQ ID NO: 101911 - DNA, 10 bp, Unknown
  misc_feature (1)..( 10): Result.002 file - promoters60/1028243
tatttaaggc

SEQ ID NO: 101912 - DNA, 11 bp, Unknown
  misc_feature (1)..( 11): Result.002 file - promoters60/1028243
acacgtttgta

SEQ ID NO: 101913 - DNA, 11 bp, Unknown
  misc_feature (1)..( 11): Result.002 file - promoters60/1028243
acaagttaatt

SEQ ID NO: 101914 - DNA, 11 bp, Unknown
  misc_feature (1)..( 11): Result.002 file - promoters60/1028243
acatgttattc

SEQ ID NO: 101915 - DNA, 11 bp, Unknown
  misc_feature (1)..( 11): Result.002 file - promoters60/1028243
tcaatttaaaa

SEQ ID NO: 101916 - DNA, 11 bp, Unknown
  misc_feature (1)..( 11): Result.002 file - promoters60/1028243
aaaatataaaa

SEQ ID NO: 101917 - DNA, 11 bp, Unknown
  misc_feature (1)..( 11): Result.002 file - promoters60/1028243
tgaatttaaat

SEQ ID NO: 101918 - DNA, 6 bp, Unknown
  misc_feature (1)..( 6): Result.002 file - promoters60/1028273
gccaat

SEQ ID NO: 101919 - DNA, 6 bp, Unknown
  misc_feature (1)..( 6): Result.002 file - promoters60/1028273
gccaat

SEQ ID NO: 101920 - DNA, 6 bp, Unknown
  misc_feature (1)..( 6): Result.002 file - promoters60/1028273
gcagag

SEQ ID NO: 101921 - DNA, 6 bp, Unknown
  misc_feature (1)..( 6): Result.002 file - promoters60/1028273
gcagag

SEQ ID NO: 101922 - DNA, 6 bp, Unknown
  misc_feature (1)..( 6): Result.002 file - promoters60/1028273
ttaaag

SEQ ID NO: 101923 - DNA, 6 bp, Unknown
  misc_feature (1)..( 6): Result.002 file - promoters60/1028273
ttaaag

SEQ ID NO: 101924 - DNA, 8 bp, Unknown
  misc_feature (1)..( 8): Result.002 file - promoters60/1028273
aattctaa

SEQ ID NO: 101925 - DNA, 8 bp, Unknown
  misc_feature (1)..( 8): Result.002 file - promoters60/1028273
aattttaa

SEQ ID NO: 101926 - DNA, 7 bp, Unknown
  misc_feature (1)..( 7): Result.002 file - promoters60/1028273
aatcgga

SEQ ID NO: 101927 - DNA, 7 bp, Unknown
  misc_feature (1)..( 7): Result.002 file - promoters60/1028273
aatcgga

SEQ ID NO: 101928 - DNA, 11 bp, Unknown
  misc_feature (1)..( 11): Result.002 file - promoters60/1028273
agagagtgaag

SEQ ID NO: 101929 - DNA, 11 bp, Unknown
  misc_feature (1)..( 11): Result.002 file - promoters60/1028273
agacagtgaag

SEQ ID NO: 101930 - DNA, 6 bp, Unknown
  misc_feature (1)..( 6): Result.002 file - promoters60/1028273
aagtgt

SEQ ID NO: 101931 - DNA, 6 bp, Unknown
  misc_feature (1)..( 6): Result.002 file - promoters60/1028273
aagtgt

SEQ ID NO: 101932 - DNA, 6 bp, Unknown
  misc_feature (1)..( 6): Result.002 file - promoters60/1028273
atatat

SEQ ID NO: 101933 - DNA, 6 bp, Unknown
  misc_feature (1)..( 6): Result.002 file - promoters60/1028273
atatat

SEQ ID NO: 101934 - DNA, 7 bp, Unknown
  misc_feature (1)..( 7): Result.002 file - promoters60/1028273
acaatac

SEQ ID NO: 101935 - DNA, 7 bp, Unknown
  misc_feature (1)..( 7): Result.002 file - promoters60/1028273
acaatac

SEQ ID NO: 101936 - DNA, 9 bp, Unknown
  misc_feature (1)..( 9): Result.002 file - promoters60/1028273
atacaaata

SEQ ID NO: 101937 - DNA, 9 bp, Unknown
  misc_feature (1)..( 9): Result.002 file - promoters60/1028273
atacacata

SEQ ID NO: 101938 - DNA, 6 bp, Unknown
  misc_feature (1)..( 6): Result.002 file - promoters60/1028273
tcaaat

SEQ ID NO: 101939 - DNA, 6 bp, Unknown
  misc_feature (1)..( 6): Result.002 file - promoters60/1028273
tcaaat

SEQ ID NO: 101940 - DNA, 6 bp, Unknown
  misc_feature (1)..( 6): Result.002 file - promoters60/1028273
gagcag

SEQ ID NO: 101941 - DNA, 6 bp, Unknown
  misc_feature (1)..( 6): Result.002 file - promoters60/1028273
gagcag

SEQ ID NO: 101942 - DNA, 7 bp, Unknown
  misc_feature (1)..( 7): Result.002 file - promoters60/1028273
gaattaa

SEQ ID NO: 101943 - DNA, 7 bp, Unknown
  misc_feature (1)..( 7): Result.002 file - promoters60/1028273
gaaataa

SEQ ID NO: 101944 - DNA, 10 bp, Unknown
  misc_feature (1)..( 10): Result.002 file - promoters60/1028318
ttcttcaaga

SEQ ID NO: 101945 - DNA, 10 bp, Unknown
  misc_feature (1)..( 10): Result.002 file - promoters60/1028318
ttcttaaaga

SEQ ID NO: 101946 - DNA, 10 bp, Unknown
  misc_feature (1)..( 10): Result.002 file - promoters60/1028318
ctcttaataa

SEQ ID NO: 101947 - DNA, 8 bp, Unknown
  misc_feature (1)..( 8): Result.002 file - promoters60/1028318
tattatag

SEQ ID NO: 101948 - DNA, 8 bp, Unknown
  misc_feature (1)..( 8): Result.002 file - promoters60/1028318
tattattt

SEQ ID NO: 101949 - DNA, 8 bp, Unknown
  misc_feature (1)..( 8): Result.002 file - promoters60/1028318
gattcttt

SEQ ID NO: 101950 - DNA, 8 bp, Unknown
  misc_feature (1)..( 8): Result.002 file - promoters60/1028318
acaaataa

SEQ ID NO: 101951 - DNA, 8 bp, Unknown
  misc_feature (1)..( 8): Result.002 file - promoters60/1028318
ataaataa

SEQ ID NO: 101952 - DNA, 8 bp, Unknown
  misc_feature (1)..( 8): Result.002 file - promoters60/1028318
ataaatac

SEQ ID NO: 101953 - DNA, 8 bp, Unknown
  misc_feature (1)..( 8): Result.002 file - promoters60/1028318
aatctttt

SEQ ID NO: 101954 - DNA, 8 bp, Unknown
  misc_feature (1)..( 8): Result.002 file - promoters60/1028318
catcgttt

SEQ ID NO: 101955 - DNA, 8 bp, Unknown
  misc_feature (1)..( 8): Result.002 file - promoters60/1028318
catcgtcg

SEQ ID NO: 101956 - DNA, 14 bp, Unknown
  misc_feature (1)..( 14): Result.002 file - promoters60/1028368
ggagcaaataaatt

SEQ ID NO: 101957 - DNA, 14 bp, Unknown
  misc_feature (1)..( 14): Result.002 file - promoters60/1028368
agtgacaatacatt

SEQ ID NO: 101958 - DNA, 14 bp, Unknown
  misc_feature (1)..( 14): Result.002 file - promoters60/1028368
gagattaaaaaaag

SEQ ID NO: 101959 - DNA, 14 bp, Unknown
  misc_feature (1)..( 14): Result.002 file - promoters60/1028368
cagctaaacaaaaa

SEQ ID NO: 101960 - DNA, 14 bp, Unknown
  misc_feature (1)..( 14): Result.002 file - promoters60/1028368
tcaaagaatacaca

SEQ ID NO: 101961 - DNA, 14 bp, Unknown
  misc_feature (1)..( 14): Result.002 file - promoters60/1028368
agactaaaaactct

SEQ ID NO: 101962 - DNA, 14 bp, Unknown
  misc_feature (1)..( 14): Result.002 file - promoters60/1028368
aacccaactacaaa

SEQ ID NO: 101963 - DNA, 10 bp, Unknown
  misc_feature (1)..( 10): Result.002 file - promoters60/1028368
taattaaact

SEQ ID NO: 101964 - DNA, 10 bp, Unknown
  misc_feature (1)..( 10): Result.002 file - promoters60/1028368
agattaaaaa

SEQ ID NO: 101965 - DNA, 10 bp, Unknown
  misc_feature (1)..( 10): Result.002 file - promoters60/1028368
gacttaaaat

SEQ ID NO: 101966 - DNA, 10 bp, Unknown
  misc_feature (1)..( 10): Result.002 file - promoters60/1028368
agactaaaaa

SEQ ID NO: 101967 - DNA, 10 bp, Unknown
  misc_feature (1)..( 10): Result.002 file - promoters60/1028368
atactaaaaa

SEQ ID NO: 101968 - DNA, 10 bp, Unknown
  misc_feature (1)..( 10): Result.002 file - promoters60/1028368
caactacaaa

SEQ ID NO: 101969 - DNA, 14 bp, Unknown
  misc_feature (1)..( 14): Result.002 file - promoters60/1028413
accaaatctaaatt

SEQ ID NO: 101970 - DNA, 14 bp, Unknown
  misc_feature (1)..( 14): Result.002 file - promoters60/1028413
cttcaatttaactg

SEQ ID NO: 101971 - DNA, 14 bp, Unknown
  misc_feature (1)..( 14): Result.002 file - promoters60/1028413
atttcatttttaaa

SEQ ID NO: 101972 - DNA, 14 bp, Unknown
  misc_feature (1)..( 14): Result.002 file - promoters60/1028413
aatatattttgaaa

SEQ ID NO: 101973 - DNA, 14 bp, Unknown
  misc_feature (1)..( 14): Result.002 file - promoters60/1028413
taattatttttggc

SEQ ID NO: 101974 - DNA, 14 bp, Unknown
  misc_feature (1)..( 14): Result.002 file - promoters60/1028413
taatgatttggggt

SEQ ID NO: 101975 - DNA, 13 bp, Unknown
  misc_feature (1)..( 13): Result.002 file - promoters60/1028413
ctaaattcttata

SEQ ID NO: 101976 - DNA, 13 bp, Unknown
  misc_feature (1)..( 13): Result.002 file - promoters60/1028413
tttcatttttaaa

SEQ ID NO: 101977 - DNA, 13 bp, Unknown
  misc_feature (1)..( 13): Result.002 file - promoters60/1028413
ctaaagtctataa

SEQ ID NO: 101978 - DNA, 13 bp, Unknown
  misc_feature (1)..( 13): Result.002 file - promoters60/1028413
tgacattcttcag

SEQ ID NO: 101979 - DNA, 13 bp, Unknown
  misc_feature (1)..( 13): Result.002 file - promoters60/1028413
ttatcttcaattt

SEQ ID NO: 101980 - DNA, 13 bp, Unknown
  misc_feature (1)..( 13): Result.002 file - promoters60/1028413
atatattttgaaa

SEQ ID NO: 101981 - DNA, 12 bp, Unknown
  misc_feature (1)..( 12): Result.002 file - promoters60/1028470
aataaaattaat

SEQ ID NO: 101982 - DNA, 12 bp, Unknown
  misc_feature (1)..( 12): Result.002 file - promoters60/1028470
gataatatttca

SEQ ID NO: 101983 - DNA, 12 bp, Unknown
  misc_feature (1)..( 12): Result.002 file - promoters60/1028470
tataaaatacag

SEQ ID NO: 101984 - DNA, 12 bp, Unknown
  misc_feature (1)..( 12): Result.002 file - promoters60/1028470
aataaatcttgt

SEQ ID NO: 101985 - DNA, 12 bp, Unknown
  misc_feature (1)..( 12): Result.002 file - promoters60/1028470
taaaaaatcaaa

SEQ ID NO: 101986 - DNA, 12 bp, Unknown
  misc_feature (1)..( 12): Result.002 file - promoters60/1028470
aatattattaac

SEQ ID NO: 101987 - DNA, 12 bp, Unknown
  misc_feature (1)..( 12): Result.002 file - promoters60/1028470
atgaatattttc

SEQ ID NO: 101988 - DNA, 9 bp, Unknown
  misc_feature (1)..( 9): Result.002 file - promoters60/1028470
atttcttta

SEQ ID NO: 101989 - DNA, 9 bp, Unknown
  misc_feature (1)..( 9): Result.002 file - promoters60/1028470
ttttgtttc

SEQ ID NO: 101990 - DNA, 9 bp, Unknown
  misc_feature (1)..( 9): Result.002 file - promoters60/1028470
ctttttttg

SEQ ID NO: 101991 - DNA, 9 bp, Unknown
  misc_feature (1)..( 9): Result.002 file - promoters60/1028470
gtttttttc

SEQ ID NO: 101992 - DNA, 9 bp, Unknown
  misc_feature (1)..( 9): Result.002 file - promoters60/1028470
taatcttta

SEQ ID NO: 101993 - DNA, 9 bp, Unknown
  misc_feature (1)..( 9): Result.002 file - promoters60/1028470
ttttgttaa

SEQ ID NO: 101994 - DNA, 11 bp, Unknown
  misc_feature (1)..( 11): Result.002 file - promoters60/1028470
ttcaaatacaa

SEQ ID NO: 101995 - DNA, 11 bp, Unknown
  misc_feature (1)..( 11): Result.002 file - promoters60/1028470
atcaaataggt

SEQ ID NO: 101996 - DNA, 11 bp, Unknown
  misc_feature (1)..( 11): Result.002 file - promoters60/1028470
ctcaaattcaa

SEQ ID NO: 101997 - DNA, 12 bp, Unknown
  misc_feature (1)..( 12): Result.002 file - promoters60/1028470
atctaaaaaagt

SEQ ID NO: 101998 - DNA, 12 bp, Unknown
  misc_feature (1)..( 12): Result.002 file - promoters60/1028470
tttcaataaccg

SEQ ID NO: 101999 - DNA, 12 bp, Unknown
  misc_feature (1)..( 12): Result.002 file - promoters60/1028470
tttcaactttgg

SEQ ID NO: 102000 - DNA, 11 bp, Unknown
  misc_feature (1)..( 11): Result.002 file - promoters60/1028470
ccgttaaaaat

SEQ ID NO: 102001 - DNA, 11 bp, Unknown
  misc_feature (1)..( 11): Result.002 file - promoters60/1028470
ataataaaaaa

SEQ ID NO: 102002 - DNA, 11 bp, Unknown
  misc_feature (1)..( 11): Result.002 file - promoters60/1028470
gatctaaaaaa

SEQ ID NO: 102003 - DNA, 11 bp, Unknown
  misc_feature (1)..( 11): Result.002 file - promoters60/1028470
cgtttaaataa

SEQ ID NO: 102004 - DNA, 11 bp, Unknown
  misc_feature (1)..( 11): Result.002 file - promoters60/1028470
cccagaaaaaa

SEQ ID NO: 102005 - DNA, 11 bp, Unknown
  misc_feature (1)..( 11): Result.002 file - promoters60/1028470
tgtctcaaatt

SEQ ID NO: 102006 - DNA, 7 bp, Unknown
  misc_feature (1)..( 7): Result.002 file - promoters60/1028508
tcttctt

SEQ ID NO: 102007 - DNA, 7 bp, Unknown
  misc_feature (1)..( 7): Result.002 file - promoters60/1028508
tcttctt

SEQ ID NO: 102008 - DNA, 7 bp, Unknown
  misc_feature (1)..( 7): Result.002 file - promoters60/1028508
caaacaa

SEQ ID NO: 102009 - DNA, 7 bp, Unknown
  misc_feature (1)..( 7): Result.002 file - promoters60/1028508
caaccaa

SEQ ID NO: 102010 - DNA, 7 bp, Unknown
  misc_feature (1)..( 7): Result.002 file - promoters60/1028508
aaaaatc

SEQ ID NO: 102011 - DNA, 7 bp, Unknown
  misc_feature (1)..( 7): Result.002 file - promoters60/1028508
aaatatc

SEQ ID NO: 102012 - DNA, 11 bp, Unknown
  misc_feature (1)..( 11): Result.002 file - promoters60/1028508
tctatataaac

SEQ ID NO: 102013 - DNA, 11 bp, Unknown
  misc_feature (1)..( 11): Result.002 file - promoters60/1028508
tctatataaac

SEQ ID NO: 102014 - DNA, 7 bp, Unknown
  misc_feature (1)..( 7): Result.002 file - promoters60/1028508
gtccagt

SEQ ID NO: 102015 - DNA, 7 bp, Unknown
  misc_feature (1)..( 7): Result.002 file - promoters60/1028508
gtcaagt

SEQ ID NO: 102016 - DNA, 6 bp, Unknown
  misc_feature (1)..( 6): Result.002 file - promoters60/1028508
ttggaa

SEQ ID NO: 102017 - DNA, 6 bp, Unknown
  misc_feature (1)..( 6): Result.002 file - promoters60/1028508
ttggaa

SEQ ID NO: 102018 - DNA, 8 bp, Unknown
  misc_feature (1)..( 8): Result.002 file - promoters60/1028508
tcataaaa

SEQ ID NO: 102019 - DNA, 8 bp, Unknown
  misc_feature (1)..( 8): Result.002 file - promoters60/1028508
tcagaaaa

SEQ ID NO: 102020 - DNA, 7 bp, Unknown
  misc_feature (1)..( 7): Result.002 file - promoters60/1028508
aaaacaa

SEQ ID NO: 102021 - DNA, 7 bp, Unknown
  misc_feature (1)..( 7): Result.002 file - promoters60/1028508
aaagcaa

SEQ ID NO: 102022 - DNA, 12 bp, Unknown
  misc_feature (1)..( 12): Result.002 file - promoters60/1028508
taatggatctac

SEQ ID NO: 102023 - DNA, 12 bp, Unknown
  misc_feature (1)..( 12): Result.002 file - promoters60/1028508
taatagatttac

SEQ ID NO: 102024 - DNA, 6 bp, Unknown
  misc_feature (1)..( 6): Result.002 file - promoters60/1028508
aaaaaa

SEQ ID NO: 102025 - DNA, 6 bp, Unknown
  misc_feature (1)..( 6): Result.002 file - promoters60/1028508
aaaaaa

SEQ ID NO: 102026 - DNA, 6 bp, Unknown
  misc_feature (1)..( 6): Result.002 file - promoters60/1028508
tttggc

SEQ ID NO: 102027 - DNA, 6 bp, Unknown
  misc_feature (1)..( 6): Result.002 file - promoters60/1028508
tttggc

SEQ ID NO: 102028 - DNA, 6 bp, Unknown
  misc_feature (1)..( 6): Result.002 file - promoters60/1028508
tatgga

SEQ ID NO: 102029 - DNA, 6 bp, Unknown
  misc_feature (1)..( 6): Result.002 file - promoters60/1028508
tatgga

SEQ ID NO: 102030 - DNA, 7 bp, Unknown
  misc_feature (1)..( 7): Result.002 file - promoters60/1028508
tggacgt

SEQ ID NO: 102031 - DNA, 7 bp, Unknown
  misc_feature (1)..( 7): Result.002 file - promoters60/1028508
tggccgt

SEQ ID NO: 102032 - DNA, 6 bp, Unknown
  misc_feature (1)..( 6): Result.002 file - promoters60/1028508
tggaat

SEQ ID NO: 102033 - DNA, 6 bp, Unknown
  misc_feature (1)..( 6): Result.002 file - promoters60/1028508
tggaat

SEQ ID NO: 102034 - DNA, 7 bp, Unknown
  misc_feature (1)..( 7): Result.002 file - promoters60/1028508
ttctact

SEQ ID NO: 102035 - DNA, 7 bp, Unknown
  misc_feature (1)..( 7): Result.002 file - promoters60/1028508
ttcaact

SEQ ID NO: 102036 - DNA, 7 bp, Unknown
  misc_feature (1)..( 7): Result.002 file - promoters60/1028508
cttttaa

SEQ ID NO: 102037 - DNA, 7 bp, Unknown
  misc_feature (1)..( 7): Result.002 file - promoters60/1028508
cttgtaa

SEQ ID NO: 102038 - DNA, 9 bp, Unknown
  misc_feature (1)..( 9): Result.002 file - promoters60/1028508
ttctcaaaa

SEQ ID NO: 102039 - DNA, 9 bp, Unknown
  misc_feature (1)..( 9): Result.002 file - promoters60/1028508
ttcttaaaa

SEQ ID NO: 102040 - DNA, 6 bp, Unknown
  misc_feature (1)..( 6): Result.002 file - promoters60/1028508
aaattg

SEQ ID NO: 102041 - DNA, 6 bp, Unknown
  misc_feature (1)..( 6): Result.002 file - promoters60/1028508
aaattg

SEQ ID NO: 102042 - DNA, 8 bp, Unknown
  misc_feature (1)..( 8): Result.002 file - promoters60/1028508
accagcga

SEQ ID NO: 102043 - DNA, 8 bp, Unknown
  misc_feature (1)..( 8): Result.002 file - promoters60/1028508
accagcga

SEQ ID NO: 102044 - DNA, 8 bp, Unknown
  misc_feature (1)..( 8): Result.002 file - promoters60/1028508
aaagaaaa

SEQ ID NO: 102045 - DNA, 8 bp, Unknown
  misc_feature (1)..( 8): Result.002 file - promoters60/1028508
aaaaaaaa

SEQ ID NO: 102046 - DNA, 11 bp, Unknown
  misc_feature (1)..( 11): Result.002 file - promoters60/1028545
ttatattaaaa

SEQ ID NO: 102047 - DNA, 11 bp, Unknown
  misc_feature (1)..( 11): Result.002 file - promoters60/1028545
ttattttaatt

SEQ ID NO: 102048 - DNA, 11 bp, Unknown
  misc_feature (1)..( 11): Result.002 file - promoters60/1028545
agttttgaatt

SEQ ID NO: 102049 - DNA, 11 bp, Unknown
  misc_feature (1)..( 11): Result.002 file - promoters60/1028545
ttatgtattca

SEQ ID NO: 102050 - DNA, 11 bp, Unknown
  misc_feature (1)..( 11): Result.002 file - promoters60/1028545
ttaagtagatt

SEQ ID NO: 102051 - DNA, 11 bp, Unknown
  misc_feature (1)..( 11): Result.002 file - promoters60/1028545
cgaagaagatt

SEQ ID NO: 102052 - DNA, 8 bp, Unknown
  misc_feature (1)..( 8): Result.002 file - promoters60/1028545
aaatttta

SEQ ID NO: 102053 - DNA, 8 bp, Unknown
  misc_feature (1)..( 8): Result.002 file - promoters60/1028545
aaatatta

SEQ ID NO: 102054 - DNA, 8 bp, Unknown
  misc_feature (1)..( 8): Result.002 file - promoters60/1028545
aaatttgt

SEQ ID NO: 102055 - DNA, 8 bp, Unknown
  misc_feature (1)..( 8): Result.002 file - promoters60/1028545
gtccttta

SEQ ID NO: 102056 - DNA, 8 bp, Unknown
  misc_feature (1)..( 8): Result.002 file - promoters60/1028545
gtcttttt

SEQ ID NO: 102057 - DNA, 8 bp, Unknown
  misc_feature (1)..( 8): Result.002 file - promoters60/1028545
cacttttt

SEQ ID NO: 102058 - DNA, 8 bp, Unknown
  misc_feature (1)..( 8): Result.002 file - promoters60/1028545
ctaatttc

SEQ ID NO: 102059 - DNA, 8 bp, Unknown
  misc_feature (1)..( 8): Result.002 file - promoters60/1028545
aaaatttc

SEQ ID NO: 102060 - DNA, 8 bp, Unknown
  misc_feature (1)..( 8): Result.002 file - promoters60/1028545
ctaatttg

SEQ ID NO: 102061 - DNA, 11 bp, Unknown
  misc_feature (1)..( 11): Result.002 file - promoters60/1028545
gcaagtatata

SEQ ID NO: 102062 - DNA, 11 bp, Unknown
  misc_feature (1)..( 11): Result.002 file - promoters60/1028545
acaagaatata

SEQ ID NO: 102063 - DNA, 11 bp, Unknown
  misc_feature (1)..( 11): Result.002 file - promoters60/1028545
acaagatcaag

SEQ ID NO: 102064 - DNA, 7 bp, Unknown
  misc_feature (1)..( 7): Result.002 file - promoters60/1028549
tctgtat

SEQ ID NO: 102065 - DNA, 7 bp, Unknown
  misc_feature (1)..( 7): Result.002 file - promoters60/1028549
tctatat

SEQ ID NO: 102066 - DNA, 7 bp, Unknown
  misc_feature (1)..( 7): Result.002 file - promoters60/1028549
aaatcga

SEQ ID NO: 102067 - DNA, 7 bp, Unknown
  misc_feature (1)..( 7): Result.002 file - promoters60/1028549
aaatcga

SEQ ID NO: 102068 - DNA, 7 bp, Unknown
  misc_feature (1)..( 7): Result.002 file - promoters60/1028549
acttttg

SEQ ID NO: 102069 - DNA, 7 bp, Unknown
  misc_feature (1)..( 7): Result.002 file - promoters60/1028549
actgttg

SEQ ID NO: 102070 - DNA, 6 bp, Unknown
  misc_feature (1)..( 6): Result.002 file - promoters60/1028549
tttaaa

SEQ ID NO: 102071 - DNA, 6 bp, Unknown
  misc_feature (1)..( 6): Result.002 file - promoters60/1028549
tttaaa

SEQ ID NO: 102072 - DNA, 6 bp, Unknown
  misc_feature (1)..( 6): Result.002 file - promoters60/1028549
gtgaaa

SEQ ID NO: 102073 - DNA, 6 bp, Unknown
  misc_feature (1)..( 6): Result.002 file - promoters60/1028549
gtgaaa

SEQ ID NO: 102074 - DNA, 7 bp, Unknown
  misc_feature (1)..( 7): Result.002 file - promoters60/1028549
aaaagaa

SEQ ID NO: 102075 - DNA, 7 bp, Unknown
  misc_feature (1)..( 7): Result.002 file - promoters60/1028549
aaaggaa

SEQ ID NO: 102076 - DNA, 7 bp, Unknown
  misc_feature (1)..( 7): Result.002 file - promoters60/1028549
aaaccca

SEQ ID NO: 102077 - DNA, 7 bp, Unknown
  misc_feature (1)..( 7): Result.002 file - promoters60/1028549
aaatcca

SEQ ID NO: 102078 - DNA, 7 bp, Unknown
  misc_feature (1)..( 7): Result.002 file - promoters60/1028549
aactgaa

SEQ ID NO: 102079 - DNA, 7 bp, Unknown
  misc_feature (1)..( 7): Result.002 file - promoters60/1028549
aactgaa

SEQ ID NO: 102080 - DNA, 7 bp, Unknown
  misc_feature (1)..( 7): Result.002 file - promoters60/1028549
tttggtg

SEQ ID NO: 102081 - DNA, 7 bp, Unknown
  misc_feature (1)..( 7): Result.002 file - promoters60/1028549
ttttgtg

SEQ ID NO: 102082 - DNA, 7 bp, Unknown
  misc_feature (1)..( 7): Result.002 file - promoters60/1028549
gtttatc

SEQ ID NO: 102083 - DNA, 7 bp, Unknown
  misc_feature (1)..( 7): Result.002 file - promoters60/1028549
gtttatc

SEQ ID NO: 102084 - DNA, 7 bp, Unknown
  misc_feature (1)..( 7): Result.002 file - promoters60/1028549
atcgtac

SEQ ID NO: 102085 - DNA, 7 bp, Unknown
  misc_feature (1)..( 7): Result.002 file - promoters60/1028549
atcttac

SEQ ID NO: 102086 - DNA, 6 bp, Unknown
  misc_feature (1)..( 6): Result.002 file - promoters60/1028549
ataaat

SEQ ID NO: 102087 - DNA, 6 bp, Unknown
  misc_feature (1)..( 6): Result.002 file - promoters60/1028549
ataaat

SEQ ID NO: 102088 - DNA, 7 bp, Unknown
  misc_feature (1)..( 7): Result.002 file - promoters60/1028549
ggtacaa

SEQ ID NO: 102089 - DNA, 7 bp, Unknown
  misc_feature (1)..( 7): Result.002 file - promoters60/1028549
ggttcaa

SEQ ID NO: 102090 - DNA, 8 bp, Unknown
  misc_feature (1)..( 8): Result.002 file - promoters60/1028549
cagtggat

SEQ ID NO: 102091 - DNA, 8 bp, Unknown
  misc_feature (1)..( 8): Result.002 file - promoters60/1028549
cagttgat

SEQ ID NO: 102092 - DNA, 9 bp, Unknown
  misc_feature (1)..( 9): Result.002 file - promoters60/1028590
atgattatc

SEQ ID NO: 102093 - DNA, 9 bp, Unknown
  misc_feature (1)..( 9): Result.002 file - promoters60/1028590
atgattatc

SEQ ID NO: 102094 - DNA, 8 bp, Unknown
  misc_feature (1)..( 8): Result.002 file - promoters60/1028590
aaaatact

SEQ ID NO: 102095 - DNA, 8 bp, Unknown
  misc_feature (1)..( 8): Result.002 file - promoters60/1028590
aaaaaact

SEQ ID NO: 102096 - DNA, 7 bp, Unknown
  misc_feature (1)..( 7): Result.002 file - promoters60/1028590
cttctta

SEQ ID NO: 102097 - DNA, 7 bp, Unknown
  misc_feature (1)..( 7): Result.002 file - promoters60/1028590
tttctta

SEQ ID NO: 102098 - DNA, 8 bp, Unknown
  misc_feature (1)..( 8): Result.002 file - promoters60/1028590
tttacttt

SEQ ID NO: 102099 - DNA, 8 bp, Unknown
  misc_feature (1)..( 8): Result.002 file - promoters60/1028590
caaccttg

SEQ ID NO: 102100 - DNA, 8 bp, Unknown
  misc_feature (1)..( 8): Result.002 file - promoters60/1028590
caactttg

SEQ ID NO: 102101 - DNA, 6 bp, Unknown
  misc_feature (1)..( 6): Result.002 file - promoters60/1028590
atcaag

SEQ ID NO: 102102 - DNA, 6 bp, Unknown
  misc_feature (1)..( 6): Result.002 file - promoters60/1028590
atcaag

SEQ ID NO: 102103 - DNA, 9 bp, Unknown
  misc_feature (1)..( 9): Result.002 file - promoters60/1028590
aactaaata

SEQ ID NO: 102104 - DNA, 9 bp, Unknown
  misc_feature (1)..( 9): Result.002 file - promoters60/1028590
aactatata

SEQ ID NO: 102105 - DNA, 7 bp, Unknown
  misc_feature (1)..( 7): Result.002 file - promoters60/1028590
aactacg

SEQ ID NO: 102106 - DNA, 7 bp, Unknown
  misc_feature (1)..( 7): Result.002 file - promoters60/1028590
aacaacg

SEQ ID NO: 102107 - DNA, 13 bp, Unknown
  misc_feature (1)..( 13): Result.002 file - promoters60/1028590
aaaacaaaaatga

SEQ ID NO: 102108 - DNA, 13 bp, Unknown
  misc_feature (1)..( 13): Result.002 file - promoters60/1028590
aaaacaaaaatga

SEQ ID NO: 102109 - DNA, 13 bp, Unknown
  misc_feature (1)..( 13): Result.002 file - promoters60/1028590
aaaacaaagaacc

SEQ ID NO: 102110 - DNA, 7 bp, Unknown
  misc_feature (1)..( 7): Result.002 file - promoters60/1028590
tactata

SEQ ID NO: 102111 - DNA, 7 bp, Unknown
  misc_feature (1)..( 7): Result.002 file - promoters60/1028590
tacaata

SEQ ID NO: 102112 - DNA, 6 bp, Unknown
  misc_feature (1)..( 6): Result.002 file - promoters60/1028590
ccaaac

SEQ ID NO: 102113 - DNA, 6 bp, Unknown
  misc_feature (1)..( 6): Result.002 file - promoters60/1028590
ccaaac

SEQ ID NO: 102114 - DNA, 8 bp, Unknown
  misc_feature (1)..( 8): Result.002 file - promoters60/1028590
aaaggttg

SEQ ID NO: 102115 - DNA, 8 bp, Unknown
  misc_feature (1)..( 8): Result.002 file - promoters60/1028590
aaaagttg

SEQ ID NO: 102116 - DNA, 10 bp, Unknown
  misc_feature (1)..( 10): Result.002 file - promoters60/1028590
ggtagtatac

SEQ ID NO: 102117 - DNA, 10 bp, Unknown
  misc_feature (1)..( 10): Result.002 file - promoters60/1028590
ggtagaatac

SEQ ID NO: 102118 - DNA, 7 bp, Unknown
  misc_feature (1)..( 7): Result.002 file - promoters60/1028590
tataaat

SEQ ID NO: 102119 - DNA, 7 bp, Unknown
  misc_feature (1)..( 7): Result.002 file - promoters60/1028590
tataaat

SEQ ID NO: 102120 - DNA, 6 bp, Unknown
  misc_feature (1)..( 6): Result.002 file - promoters60/1028590
ttgatg

SEQ ID NO: 102121 - DNA, 6 bp, Unknown
  misc_feature (1)..( 6): Result.002 file - promoters60/1028590
ttgatg

SEQ ID NO: 102122 - DNA, 7 bp, Unknown
  misc_feature (1)..( 7): Result.002 file - promoters60/1028590
tcattca

SEQ ID NO: 102123 - DNA, 7 bp, Unknown
  misc_feature (1)..( 7): Result.002 file - promoters60/1028590
tcaatca

SEQ ID NO: 102124 - DNA, 8 bp, Unknown
  misc_feature (1)..( 8): Result.002 file - promoters60/1028590
ttcatctt

SEQ ID NO: 102125 - DNA, 8 bp, Unknown
  misc_feature (1)..( 8): Result.002 file - promoters60/1028590
ttcatctt

SEQ ID NO: 102126 - DNA, 8 bp, Unknown
  misc_feature (1)..( 8): Result.002 file - promoters60/1028590
tcttctcc

SEQ ID NO: 102127 - DNA, 8 bp, Unknown
  misc_feature (1)..( 8): Result.002 file - promoters60/1028590
tcttctcc

SEQ ID NO: 102128 - DNA, 7 bp, Unknown
  misc_feature (1)..( 7): Result.002 file - promoters60/1028590
attttat

SEQ ID NO: 102129 - DNA, 7 bp, Unknown
  misc_feature (1)..( 7): Result.002 file - promoters60/1028590
attatat

SEQ ID NO: 102130 - DNA, 6 bp, Unknown
  misc_feature (1)..( 6): Result.002 file - promoters60/1028590
ttctta

SEQ ID NO: 102131 - DNA, 6 bp, Unknown
  misc_feature (1)..( 6): Result.002 file - promoters60/1028590
ttctta

SEQ ID NO: 102132 - DNA, 6 bp, Unknown
  misc_feature (1)..( 6): Result.002 file - promoters60/1028590
taatta

SEQ ID NO: 102133 - DNA, 6 bp, Unknown
  misc_feature (1)..( 6): Result.002 file - promoters60/1028590
taatta

SEQ ID NO: 102134 - DNA, 7 bp, Unknown
  misc_feature (1)..( 7): Result.002 file - promoters60/1028674
ttaaaat

SEQ ID NO: 102135 - DNA, 7 bp, Unknown
  misc_feature (1)..( 7): Result.002 file - promoters60/1028674
ttataat

SEQ ID NO: 102136 - DNA, 7 bp, Unknown
  misc_feature (1)..( 7): Result.002 file - promoters60/1028674
ttataag

SEQ ID NO: 102137 - DNA, 11 bp, Unknown
  misc_feature (1)..( 11): Result.002 file - promoters60/1028674
aaatatcaaat

SEQ ID NO: 102138 - DNA, 11 bp, Unknown
  misc_feature (1)..( 11): Result.002 file - promoters60/1028674
ttataacaaat

SEQ ID NO: 102139 - DNA, 11 bp, Unknown
  misc_feature (1)..( 11): Result.002 file - promoters60/1028674
ttagaactaaa

SEQ ID NO: 102140 - DNA, 9 bp, Unknown
  misc_feature (1)..( 9): Result.002 file - promoters60/1028674
aaaatttaa

SEQ ID NO: 102141 - DNA, 9 bp, Unknown
  misc_feature (1)..( 9): Result.002 file - promoters60/1028674
tatatttaa

SEQ ID NO: 102142 - DNA, 9 bp, Unknown
  misc_feature (1)..( 9): Result.002 file - promoters60/1028674
aaaatttac

SEQ ID NO: 102143 - DNA, 9 bp, Unknown
  misc_feature (1)..( 9): Result.002 file - promoters60/1028674
aataattat

SEQ ID NO: 102144 - DNA, 9 bp, Unknown
  misc_feature (1)..( 9): Result.002 file - promoters60/1028674
tttaaagat

SEQ ID NO: 102145 - DNA, 9 bp, Unknown
  misc_feature (1)..( 9): Result.002 file - promoters60/1028674
attagagat

SEQ ID NO: 102146 - DNA, 9 bp, Unknown
  misc_feature (1)..( 9): Result.002 file - promoters60/1028674
tttaaaatc

SEQ ID NO: 102147 - DNA, 9 bp, Unknown
  misc_feature (1)..( 9): Result.002 file - promoters60/1028674
cattaatta

SEQ ID NO: 102148 - DNA, 9 bp, Unknown
  misc_feature (1)..( 9): Result.002 file - promoters60/1028674
atttaatta

SEQ ID NO: 102149 - DNA, 9 bp, Unknown
  misc_feature (1)..( 9): Result.002 file - promoters60/1028674
cattaataa

SEQ ID NO: 102150 - DNA, 8 bp, Unknown
  misc_feature (1)..( 8): Result.002 file - promoters60/1028674
ttgaaaat

SEQ ID NO: 102151 - DNA, 8 bp, Unknown
  misc_feature (1)..( 8): Result.002 file - promoters60/1028674
atgaaaat

SEQ ID NO: 102152 - DNA, 8 bp, Unknown
  misc_feature (1)..( 8): Result.002 file - promoters60/1028674
atgaaatc

SEQ ID NO: 102153 - DNA, 8 bp, Unknown
  misc_feature (1)..( 8): Result.002 file - promoters60/1028674
attaaaaa

SEQ ID NO: 102154 - DNA, 8 bp, Unknown
  misc_feature (1)..( 8): Result.002 file - promoters60/1028674
tttaaaaa

SEQ ID NO: 102155 - DNA, 8 bp, Unknown
  misc_feature (1)..( 8): Result.002 file - promoters60/1028674
tttaaaca

SEQ ID NO: 102156 - DNA, 10 bp, Unknown
  misc_feature (1)..( 10): Result.002 file - promoters60/1028682
ttttcaatta

SEQ ID NO: 102157 - DNA, 10 bp, Unknown
  misc_feature (1)..( 10): Result.002 file - promoters60/1028682
ttttcaaacc

SEQ ID NO: 102158 - DNA, 10 bp, Unknown
  misc_feature (1)..( 10): Result.002 file - promoters60/1028682
gtttcaattc

SEQ ID NO: 102159 - DNA, 10 bp, Unknown
  misc_feature (1)..( 10): Result.002 file - promoters60/1028682
tgatcacttc

SEQ ID NO: 102160 - DNA, 9 bp, Unknown
  misc_feature (1)..( 9): Result.002 file - promoters60/1028682
acatatata

SEQ ID NO: 102161 - DNA, 9 bp, Unknown
  misc_feature (1)..( 9): Result.002 file - promoters60/1028682
ctatatatt

SEQ ID NO: 102162 - DNA, 9 bp, Unknown
  misc_feature (1)..( 9): Result.002 file - promoters60/1028682
atatatata

SEQ ID NO: 102163 - DNA, 9 bp, Unknown
  misc_feature (1)..( 9): Result.002 file - promoters60/1028682
ccatataaa

SEQ ID NO: 102164 - DNA, 9 bp, Unknown
  misc_feature (1)..( 9): Result.002 file - promoters60/1028682
ctataaatt

SEQ ID NO: 102165 - DNA, 9 bp, Unknown
  misc_feature (1)..( 9): Result.002 file - promoters60/1028682
aaaaattca

SEQ ID NO: 102166 - DNA, 9 bp, Unknown
  misc_feature (1)..( 9): Result.002 file - promoters60/1028682
caaatttca

SEQ ID NO: 102167 - DNA, 9 bp, Unknown
  misc_feature (1)..( 9): Result.002 file - promoters60/1028682
aaaaatcga

SEQ ID NO: 102168 - DNA, 9 bp, Unknown
  misc_feature (1)..( 9): Result.002 file - promoters60/1028682
aaaaactca

SEQ ID NO: 102169 - DNA, 6 bp, Unknown
  misc_feature (1)..( 6): Result.002 file - promoters60/1028735
atatga

SEQ ID NO: 102170 - DNA, 6 bp, Unknown
  misc_feature (1)..( 6): Result.002 file - promoters60/1028735
atatga

SEQ ID NO: 102171 - DNA, 7 bp, Unknown
  misc_feature (1)..( 7): Result.002 file - promoters60/1028735
aacacac

SEQ ID NO: 102172 - DNA, 7 bp, Unknown
  misc_feature (1)..( 7): Result.002 file - promoters60/1028735
aacacac

SEQ ID NO: 102173 - DNA, 7 bp, Unknown
  misc_feature (1)..( 7): Result.002 file - promoters60/1028735
agggtcc

SEQ ID NO: 102174 - DNA, 7 bp, Unknown
  misc_feature (1)..( 7): Result.002 file - promoters60/1028735
aggatcc

SEQ ID NO: 102175 - DNA, 6 bp, Unknown
  misc_feature (1)..( 6): Result.002 file - promoters60/1028735
ttcttc

SEQ ID NO: 102176 - DNA, 6 bp, Unknown
  misc_feature (1)..( 6): Result.002 file - promoters60/1028735
ttcttc

SEQ ID NO: 102177 - DNA, 11 bp, Unknown
  misc_feature (1)..( 11): Result.002 file - promoters60/1028735
gaaccactcac

SEQ ID NO: 102178 - DNA, 11 bp, Unknown
  misc_feature (1)..( 11): Result.002 file - promoters60/1028735
gaaacacgcac

SEQ ID NO: 102179 - DNA, 6 bp, Unknown
  misc_feature (1)..( 6): Result.002 file - promoters60/1028735
ggaaaa

SEQ ID NO: 102180 - DNA, 6 bp, Unknown
  misc_feature (1)..( 6): Result.002 file - promoters60/1028735
ggaaaa

SEQ ID NO: 102181 - DNA, 7 bp, Unknown
  misc_feature (1)..( 7): Result.002 file - promoters60/1028735
aacaact

SEQ ID NO: 102182 - DNA, 7 bp, Unknown
  misc_feature (1)..( 7): Result.002 file - promoters60/1028735
aactact

SEQ ID NO: 102183 - DNA, 6 bp, Unknown
  misc_feature (1)..( 6): Result.002 file - promoters60/1028735
aggtat

SEQ ID NO: 102184 - DNA, 6 bp, Unknown
  misc_feature (1)..( 6): Result.002 file - promoters60/1028735
aggtat

SEQ ID NO: 102185 - DNA, 9 bp, Unknown
  misc_feature (1)..( 9): Result.002 file - promoters60/1028735
cacttttac

SEQ ID NO: 102186 - DNA, 9 bp, Unknown
  misc_feature (1)..( 9): Result.002 file - promoters60/1028735
cacttttac

SEQ ID NO: 102187 - DNA, 11 bp, Unknown
  misc_feature (1)..( 11): Result.002 file - promoters60/1028735
acaattggagg

SEQ ID NO: 102188 - DNA, 11 bp, Unknown
  misc_feature (1)..( 11): Result.002 file - promoters60/1028735
acacttggagg

SEQ ID NO: 102189 - DNA, 7 bp, Unknown
  misc_feature (1)..( 7): Result.002 file - promoters60/1028735
tacccac

SEQ ID NO: 102190 - DNA, 7 bp, Unknown
  misc_feature (1)..( 7): Result.002 file - promoters60/1028735
tactcac

SEQ ID NO: 102191 - DNA, 6 bp, Unknown
  misc_feature (1)..( 6): Result.002 file - promoters60/1028751
cagaaa

SEQ ID NO: 102192 - DNA, 6 bp, Unknown
  misc_feature (1)..( 6): Result.002 file - promoters60/1028751
cagaaa

SEQ ID NO: 102193 - DNA, 10 bp, Unknown
  misc_feature (1)..( 10): Result.002 file - promoters60/1028751
tgcaataaga

SEQ ID NO: 102194 - DNA, 10 bp, Unknown
  misc_feature (1)..( 10): Result.002 file - promoters60/1028751
tgcaacaaga

SEQ ID NO: 102195 - DNA, 6 bp, Unknown
  misc_feature (1)..( 6): Result.002 file - promoters60/1028751
aaaaaa

SEQ ID NO: 102196 - DNA, 6 bp, Unknown
  misc_feature (1)..( 6): Result.002 file - promoters60/1028751
aaaaaa

SEQ ID NO: 102197 - DNA, 6 bp, Unknown
  misc_feature (1)..( 6): Result.002 file - promoters60/1028751
cttttc

SEQ ID NO: 102198 - DNA, 6 bp, Unknown
  misc_feature (1)..( 6): Result.002 file - promoters60/1028751
cttttc

SEQ ID NO: 102199 - DNA, 7 bp, Unknown
  misc_feature (1)..( 7): Result.002 file - promoters60/1028751
ttccttt

SEQ ID NO: 102200 - DNA, 7 bp, Unknown
  misc_feature (1)..( 7): Result.002 file - promoters60/1028751
ttcattt

SEQ ID NO: 102201 - DNA, 9 bp, Unknown
  misc_feature (1)..( 9): Result.002 file - promoters60/1028751
tttatttta

SEQ ID NO: 102202 - DNA, 9 bp, Unknown
  misc_feature (1)..( 9): Result.002 file - promoters60/1028751
tttagttta

SEQ ID NO: 102203 - DNA, 6 bp, Unknown
  misc_feature (1)..( 6): Result.002 file - promoters60/1028751
taatgt

SEQ ID NO: 102204 - DNA, 6 bp, Unknown
  misc_feature (1)..( 6): Result.002 file - promoters60/1028751
taatgt

SEQ ID NO: 102205 - DNA, 10 bp, Unknown
  misc_feature (1)..( 10): Result.002 file - promoters60/1028751
gataattgat

SEQ ID NO: 102206 - DNA, 10 bp, Unknown
  misc_feature (1)..( 10): Result.002 file - promoters60/1028751
gataattgat

SEQ ID NO: 102207 - DNA, 6 bp, Unknown
  misc_feature (1)..( 6): Result.002 file - promoters60/1028751
tcaaaa

SEQ ID NO: 102208 - DNA, 6 bp, Unknown
  misc_feature (1)..( 6): Result.002 file - promoters60/1028751
tcaaaa

SEQ ID NO: 102209 - DNA, 6 bp, Unknown
  misc_feature (1)..( 6): Result.002 file - promoters60/1028751
tggatt

SEQ ID NO: 102210 - DNA, 6 bp, Unknown
  misc_feature (1)..( 6): Result.002 file - promoters60/1028751
tggatt

SEQ ID NO: 102211 - DNA, 6 bp, Unknown
  misc_feature (1)..( 6): Result.002 file - promoters60/1028751
ttttgc

SEQ ID NO: 102212 - DNA, 6 bp, Unknown
  misc_feature (1)..( 6): Result.002 file - promoters60/1028751
ttttgc

SEQ ID NO: 102213 - DNA, 9 bp, Unknown
  misc_feature (1)..( 9): Result.002 file - promoters60/1028751
gatataata

SEQ ID NO: 102214 - DNA, 9 bp, Unknown
  misc_feature (1)..( 9): Result.002 file - promoters60/1028751
gatattata

SEQ ID NO: 102215 - DNA, 7 bp, Unknown
  misc_feature (1)..( 7): Result.002 file - promoters60/1028751
attagag

SEQ ID NO: 102216 - DNA, 7 bp, Unknown
  misc_feature (1)..( 7): Result.002 file - promoters60/1028751
atttgag

SEQ ID NO: 102217 - DNA, 6 bp, Unknown
  misc_feature (1)..( 6): Result.002 file - promoters60/1028751
catgaa

SEQ ID NO: 102218 - DNA, 6 bp, Unknown
  misc_feature (1)..( 6): Result.002 file - promoters60/1028751
catgaa

SEQ ID NO: 102219 - DNA, 7 bp, Unknown
  misc_feature (1)..( 7): Result.002 file - promoters60/1028751
aattctt

SEQ ID NO: 102220 - DNA, 7 bp, Unknown
  misc_feature (1)..( 7): Result.002 file - promoters60/1028751
aatgctt

SEQ ID NO: 102221 - DNA, 7 bp, Unknown
  misc_feature (1)..( 7): Result.002 file - promoters60/1028751
gatccag

SEQ ID NO: 102222 - DNA, 7 bp, Unknown
  misc_feature (1)..( 7): Result.002 file - promoters60/1028751
gatacag

SEQ ID NO: 102223 - DNA, 6 bp, Unknown
  misc_feature (1)..( 6): Result.002 file - promoters60/1028751
attcca

SEQ ID NO: 102224 - DNA, 6 bp, Unknown
  misc_feature (1)..( 6): Result.002 file - promoters60/1028751
attcca

SEQ ID NO: 102225 - DNA, 7 bp, Unknown
  misc_feature (1)..( 7): Result.002 file - promoters60/1028751
aaacctg

SEQ ID NO: 102226 - DNA, 7 bp, Unknown
  misc_feature (1)..( 7): Result.002 file - promoters60/1028751
aaagctg

SEQ ID NO: 102227 - DNA, 6 bp, Unknown
  misc_feature (1)..( 6): Result.002 file - promoters60/1028751
tttgac

SEQ ID NO: 102228 - DNA, 6 bp, Unknown
  misc_feature (1)..( 6): Result.002 file - promoters60/1028751
tttgac

SEQ ID NO: 102229 - DNA, 6 bp, Unknown
  misc_feature (1)..( 6): Result.002 file - promoters60/1028751
acggta

SEQ ID NO: 102230 - DNA, 6 bp, Unknown
  misc_feature (1)..( 6): Result.002 file - promoters60/1028751
acggta

SEQ ID NO: 102231 - DNA, 7 bp, Unknown
  misc_feature (1)..( 7): Result.002 file - promoters60/1028751
tcacgtt

SEQ ID NO: 102232 - DNA, 7 bp, Unknown
  misc_feature (1)..( 7): Result.002 file - promoters60/1028751
tcaagtt

SEQ ID NO: 102233 - DNA, 9 bp, Unknown
  misc_feature (1)..( 9): Result.002 file - promoters60/1028751
atttgattt

SEQ ID NO: 102234 - DNA, 9 bp, Unknown
  misc_feature (1)..( 9): Result.002 file - promoters60/1028751
atttaattt

SEQ ID NO: 102235 - DNA, 13 bp, Unknown
  misc_feature (1)..( 13): Result.002 file - promoters60/1028826
aaacgtttaggag

SEQ ID NO: 102236 - DNA, 13 bp, Unknown
  misc_feature (1)..( 13): Result.002 file - promoters60/1028826
atacgtttttttt

SEQ ID NO: 102237 - DNA, 13 bp, Unknown
  misc_feature (1)..( 13): Result.002 file - promoters60/1028826
aaaagtttgttat

SEQ ID NO: 102238 - DNA, 13 bp, Unknown
  misc_feature (1)..( 13): Result.002 file - promoters60/1028826
ttacatttgtctg

SEQ ID NO: 102239 - DNA, 13 bp, Unknown
  misc_feature (1)..( 13): Result.002 file - promoters60/1028826
gtccatttttctg

SEQ ID NO: 102240 - DNA, 13 bp, Unknown
  misc_feature (1)..( 13): Result.002 file - promoters60/1028826
cgtcgttttgcgt

SEQ ID NO: 102241 - DNA, 12 bp, Unknown
  misc_feature (1)..( 12): Result.002 file - promoters60/1028826
gtcatgtgttgt

SEQ ID NO: 102242 - DNA, 12 bp, Unknown
  misc_feature (1)..( 12): Result.002 file - promoters60/1028826
tacatttgtctg

SEQ ID NO: 102243 - DNA, 12 bp, Unknown
  misc_feature (1)..( 12): Result.002 file - promoters60/1028826
agtatgtgttga

SEQ ID NO: 102244 - DNA, 12 bp, Unknown
  misc_feature (1)..( 12): Result.002 file - promoters60/1028826
tacgtttttttt

SEQ ID NO: 102245 - DNA, 12 bp, Unknown
  misc_feature (1)..( 12): Result.002 file - promoters60/1028826
tccatttttctg

SEQ ID NO: 102246 - DNA, 12 bp, Unknown
  misc_feature (1)..( 12): Result.002 file - promoters60/1028826
gtcgttttgcgt

SEQ ID NO: 102247 - DNA, 10 bp, Unknown
  misc_feature (1)..( 10): Result.002 file - promoters60/1028859
aaagatatat

SEQ ID NO: 102248 - DNA, 10 bp, Unknown
  misc_feature (1)..( 10): Result.002 file - promoters60/1028859
aaatatatat

SEQ ID NO: 102249 - DNA, 6 bp, Unknown
  misc_feature (1)..( 6): Result.002 file - promoters60/1028859
aaaaaa

SEQ ID NO: 102250 - DNA, 6 bp, Unknown
  misc_feature (1)..( 6): Result.002 file - promoters60/1028859
aaaaaa

SEQ ID NO: 102251 - DNA, 7 bp, Unknown
  misc_feature (1)..( 7): Result.002 file - promoters60/1028859
atgcttg

SEQ ID NO: 102252 - DNA, 7 bp, Unknown
  misc_feature (1)..( 7): Result.002 file - promoters60/1028859
atgattg

SEQ ID NO: 102253 - DNA, 14 bp, Unknown
  misc_feature (1)..( 14): Result.002 file - promoters60/1028859
attatagtttaatt

SEQ ID NO: 102254 - DNA, 14 bp, Unknown
  misc_feature (1)..( 14): Result.002 file - promoters60/1028859
attaaagttcaatt

SEQ ID NO: 102255 - DNA, 7 bp, Unknown
  misc_feature (1)..( 7): Result.002 file - promoters60/1028859
aaggaat

SEQ ID NO: 102256 - DNA, 7 bp, Unknown
  misc_feature (1)..( 7): Result.002 file - promoters60/1028859
aagaaat

SEQ ID NO: 102257 - DNA, 8 bp, Unknown
  misc_feature (1)..( 8): Result.002 file - promoters60/1028859
aataaaat

SEQ ID NO: 102258 - DNA, 8 bp, Unknown
  misc_feature (1)..( 8): Result.002 file - promoters60/1028859
aatcaaat

SEQ ID NO: 102259 - DNA, 6 bp, Unknown
  misc_feature (1)..( 6): Result.002 file - promoters60/1028859
ctcaag

SEQ ID NO: 102260 - DNA, 6 bp, Unknown
  misc_feature (1)..( 6): Result.002 file - promoters60/1028859
ctcaag

SEQ ID NO: 102261 - DNA, 7 bp, Unknown
  misc_feature (1)..( 7): Result.002 file - promoters60/1028859
tcttctt

SEQ ID NO: 102262 - DNA, 7 bp, Unknown
  misc_feature (1)..( 7): Result.002 file - promoters60/1028859
tcttctt

SEQ ID NO: 102263 - DNA, 9 bp, Unknown
  misc_feature (1)..( 9): Result.002 file - promoters60/1028859
tctcttttt

SEQ ID NO: 102264 - DNA, 9 bp, Unknown
  misc_feature (1)..( 9): Result.002 file - promoters60/1028859
tctcttttt

SEQ ID NO: 102265 - DNA, 6 bp, Unknown
  misc_feature (1)..( 6): Result.002 file - promoters60/1028859
tgtgtt

SEQ ID NO: 102266 - DNA, 6 bp, Unknown
  misc_feature (1)..( 6): Result.002 file - promoters60/1028859
tgtgtt

SEQ ID NO: 102267 - DNA, 6 bp, Unknown
  misc_feature (1)..( 6): Result.002 file - promoters60/1028859
tttttt

SEQ ID NO: 102268 - DNA, 6 bp, Unknown
  misc_feature (1)..( 6): Result.002 file - promoters60/1028859
tttttt

SEQ ID NO: 102269 - DNA, 6 bp, Unknown
  misc_feature (1)..( 6): Result.002 file - promoters60/1028859
ttttta

SEQ ID NO: 102270 - DNA, 6 bp, Unknown
  misc_feature (1)..( 6): Result.002 file - promoters60/1028859
ttttta

SEQ ID NO: 102271 - DNA, 6 bp, Unknown
  misc_feature (1)..( 6): Result.002 file - promoters60/1028859
ttgttt

SEQ ID NO: 102272 - DNA, 6 bp, Unknown
  misc_feature (1)..( 6): Result.002 file - promoters60/1028859
ttgttt

SEQ ID NO: 102273 - DNA, 9 bp, Unknown
  misc_feature (1)..( 9): Result.002 file - promoters60/1028863
tttcattaa

SEQ ID NO: 102274 - DNA, 9 bp, Unknown
  misc_feature (1)..( 9): Result.002 file - promoters60/1028863
attcattta

SEQ ID NO: 102275 - DNA, 9 bp, Unknown
  misc_feature (1)..( 9): Result.002 file - promoters60/1028863
tttgatttt

SEQ ID NO: 102276 - DNA, 9 bp, Unknown
  misc_feature (1)..( 9): Result.002 file - promoters60/1028863
tttcactaa

SEQ ID NO: 102277 - DNA, 9 bp, Unknown
  misc_feature (1)..( 9): Result.002 file - promoters60/1028863
attaattaa

SEQ ID NO: 102278 - DNA, 9 bp, Unknown
  misc_feature (1)..( 9): Result.002 file - promoters60/1028863
tttcactct

SEQ ID NO: 102279 - DNA, 6 bp, Unknown
  misc_feature (1)..( 6): Result.002 file - promoters60/1028878
attcga

SEQ ID NO: 102280 - DNA, 6 bp, Unknown
  misc_feature (1)..( 6): Result.002 file - promoters60/1028878
attcga

SEQ ID NO: 102281 - DNA, 9 bp, Unknown
  misc_feature (1)..( 9): Result.002 file - promoters60/1028878
cttgaagaa

SEQ ID NO: 102282 - DNA, 9 bp, Unknown
  misc_feature (1)..( 9): Result.002 file - promoters60/1028878
cttcaagaa

SEQ ID NO: 102283 - DNA, 6 bp, Unknown
  misc_feature (1)..( 6): Result.002 file - promoters60/1028878
tcttct

SEQ ID NO: 102284 - DNA, 6 bp, Unknown
  misc_feature (1)..( 6): Result.002 file - promoters60/1028878
tcttct

SEQ ID NO: 102285 - DNA, 6 bp, Unknown
  misc_feature (1)..( 6): Result.002 file - promoters60/1028878
tctgta

SEQ ID NO: 102286 - DNA, 6 bp, Unknown
  misc_feature (1)..( 6): Result.002 file - promoters60/1028878
tctgta

SEQ ID NO: 102287 - DNA, 6 bp, Unknown
  misc_feature (1)..( 6): Result.002 file - promoters60/1028878
gataaa

SEQ ID NO: 102288 - DNA, 6 bp, Unknown
  misc_feature (1)..( 6): Result.002 file - promoters60/1028878
gataaa

SEQ ID NO: 102289 - DNA, 6 bp, Unknown
  misc_feature (1)..( 6): Result.002 file - promoters60/1028878
cttctt

SEQ ID NO: 102290 - DNA, 6 bp, Unknown
  misc_feature (1)..( 6): Result.002 file - promoters60/1028878
cttctt

SEQ ID NO: 102291 - DNA, 6 bp, Unknown
  misc_feature (1)..( 6): Result.002 file - promoters60/1028878
catctc

SEQ ID NO: 102292 - DNA, 6 bp, Unknown
  misc_feature (1)..( 6): Result.002 file - promoters60/1028878
catctc

SEQ ID NO: 102293 - DNA, 6 bp, Unknown
  misc_feature (1)..( 6): Result.002 file - promoters60/1028878
agtttt

SEQ ID NO: 102294 - DNA, 6 bp, Unknown
  misc_feature (1)..( 6): Result.002 file - promoters60/1028878
agtttt

SEQ ID NO: 102295 - DNA, 7 bp, Unknown
  misc_feature (1)..( 7): Result.002 file - promoters60/1028878
acataaa

SEQ ID NO: 102296 - DNA, 7 bp, Unknown
  misc_feature (1)..( 7): Result.002 file - promoters60/1028878
acaaaaa

SEQ ID NO: 102297 - DNA, 11 bp, Unknown
  misc_feature (1)..( 11): Result.002 file - promoters60/1028908
acaaataaagt

SEQ ID NO: 102298 - DNA, 11 bp, Unknown
  misc_feature (1)..( 11): Result.002 file - promoters60/1028908
acaaatacgaa

SEQ ID NO: 102299 - DNA, 11 bp, Unknown
  misc_feature (1)..( 11): Result.002 file - promoters60/1028908
tcaagtacgaa

SEQ ID NO: 102300 - DNA, 13 bp, Unknown
  misc_feature (1)..( 13): Result.002 file - promoters60/1028908
gttggtttatcat

SEQ ID NO: 102301 - DNA, 13 bp, Unknown
  misc_feature (1)..( 13): Result.002 file - promoters60/1028908
aatggttaatcat

SEQ ID NO: 102302 - DNA, 13 bp, Unknown
  misc_feature (1)..( 13): Result.002 file - promoters60/1028908
aatgcttacattg

SEQ ID NO: 102303 - DNA, 8 bp, Unknown
  misc_feature (1)..( 8): Result.002 file - promoters60/1028908
actttttc

SEQ ID NO: 102304 - DNA, 8 bp, Unknown
  misc_feature (1)..( 8): Result.002 file - promoters60/1028908
actttttc

SEQ ID NO: 102305 - DNA, 8 bp, Unknown
  misc_feature (1)..( 8): Result.002 file - promoters60/1028908
gaaaaaac

SEQ ID NO: 102306 - DNA, 8 bp, Unknown
  misc_feature (1)..( 8): Result.002 file - promoters60/1028908
gaacaaac

SEQ ID NO: 102307 - DNA, 6 bp, Unknown
  misc_feature (1)..( 6): Result.002 file - promoters60/1028908
atctat

SEQ ID NO: 102308 - DNA, 6 bp, Unknown
  misc_feature (1)..( 6): Result.002 file - promoters60/1028908
atctat

SEQ ID NO: 102309 - DNA, 6 bp, Unknown
  misc_feature (1)..( 6): Result.002 file - promoters60/1028908
atctct

SEQ ID NO: 102310 - DNA, 6 bp, Unknown
  misc_feature (1)..( 6): Result.002 file - promoters60/1028908
atctct

SEQ ID NO: 102311 - DNA, 7 bp, Unknown
  misc_feature (1)..( 7): Result.002 file - promoters60/1028908
ttcaatc

SEQ ID NO: 102312 - DNA, 7 bp, Unknown
  misc_feature (1)..( 7): Result.002 file - promoters60/1028908
ttctatc

SEQ ID NO: 102313 - DNA, 8 bp, Unknown
  misc_feature (1)..( 8): Result.002 file - promoters60/1028908
gcgtggtc

SEQ ID NO: 102314 - DNA, 8 bp, Unknown
  misc_feature (1)..( 8): Result.002 file - promoters60/1028908
gcgtcgtc

SEQ ID NO: 102315 - DNA, 6 bp, Unknown
  misc_feature (1)..( 6): Result.002 file - promoters60/1028908
tcagat

SEQ ID NO: 102316 - DNA, 6 bp, Unknown
  misc_feature (1)..( 6): Result.002 file - promoters60/1028908
tcagat

SEQ ID NO: 102317 - DNA, 7 bp, Unknown
  misc_feature (1)..( 7): Result.002 file - promoters60/1028908
acacgca

SEQ ID NO: 102318 - DNA, 7 bp, Unknown
  misc_feature (1)..( 7): Result.002 file - promoters60/1028908
acacgca

SEQ ID NO: 102319 - DNA, 6 bp, Unknown
  misc_feature (1)..( 6): Result.002 file - promoters60/1028908
ttcctt

SEQ ID NO: 102320 - DNA, 6 bp, Unknown
  misc_feature (1)..( 6): Result.002 file - promoters60/1028908
ttcctt

SEQ ID NO: 102321 - DNA, 12 bp, Unknown
  misc_feature (1)..( 12): Result.002 file - promoters60/1028937
acaataataaac

SEQ ID NO: 102322 - DNA, 12 bp, Unknown
  misc_feature (1)..( 12): Result.002 file - promoters60/1028937
tttataatataa

SEQ ID NO: 102323 - DNA, 12 bp, Unknown
  misc_feature (1)..( 12): Result.002 file - promoters60/1028937
acaattatatag

SEQ ID NO: 102324 - DNA, 12 bp, Unknown
  misc_feature (1)..( 12): Result.002 file - promoters60/1028937
taaatagtaaaa

SEQ ID NO: 102325 - DNA, 12 bp, Unknown
  misc_feature (1)..( 12): Result.002 file - promoters60/1028937
atccttatctag

SEQ ID NO: 102326 - DNA, 13 bp, Unknown
  misc_feature (1)..( 13): Result.002 file - promoters60/1028937
atcatataaaaaa

SEQ ID NO: 102327 - DNA, 13 bp, Unknown
  misc_feature (1)..( 13): Result.002 file - promoters60/1028937
tttacataaaaat

SEQ ID NO: 102328 - DNA, 13 bp, Unknown
  misc_feature (1)..( 13): Result.002 file - promoters60/1028937
aaacaataattat

SEQ ID NO: 102329 - DNA, 13 bp, Unknown
  misc_feature (1)..( 13): Result.002 file - promoters60/1028937
ccttatcaaaaaa

SEQ ID NO: 102330 - DNA, 13 bp, Unknown
  misc_feature (1)..( 13): Result.002 file - promoters60/1028937
taaacaaacaaat

SEQ ID NO: 102331 - DNA, 13 bp, Unknown
  misc_feature (1)..( 13): Result.002 file - promoters60/1028937
aaaacaatttata

SEQ ID NO: 102332 - DNA, 13 bp, Unknown
  misc_feature (1)..( 13): Result.002 file - promoters60/1028937
caaacaaaaacaa

SEQ ID NO: 102333 - DNA, 13 bp, Unknown
  misc_feature (1)..( 13): Result.002 file - promoters60/1028937
aaaagaatttata

SEQ ID NO: 102334 - DNA, 13 bp, Unknown
  misc_feature (1)..( 13): Result.002 file - promoters60/1028937
tgaagaatctgat

SEQ ID NO: 102335 - DNA, 9 bp, Unknown
  misc_feature (1)..( 9): Result.002 file - promoters60/1028937
taatgaaac

SEQ ID NO: 102336 - DNA, 9 bp, Unknown
  misc_feature (1)..( 9): Result.002 file - promoters60/1028937
ttatgaaac

SEQ ID NO: 102337 - DNA, 9 bp, Unknown
  misc_feature (1)..( 9): Result.002 file - promoters60/1028937
aaatgaaac

SEQ ID NO: 102338 - DNA, 9 bp, Unknown
  misc_feature (1)..( 9): Result.002 file - promoters60/1028937
aaaagaaaa

SEQ ID NO: 102339 - DNA, 8 bp, Unknown
  misc_feature (1)..( 8): Result.002 file - promoters60/1028937
ctattttg

SEQ ID NO: 102340 - DNA, 8 bp, Unknown
  misc_feature (1)..( 8): Result.002 file - promoters60/1028937
ttatttta

SEQ ID NO: 102341 - DNA, 8 bp, Unknown
  misc_feature (1)..( 8): Result.002 file - promoters60/1028937
taattttg

SEQ ID NO: 102342 - DNA, 8 bp, Unknown
  misc_feature (1)..( 8): Result.002 file - promoters60/1028937
ctaatttc

SEQ ID NO: 102343 - DNA, 11 bp, Unknown
  misc_feature (1)..( 11): Result.002 file - promoters60/1028937
atatatataat

SEQ ID NO: 102344 - DNA, 11 bp, Unknown
  misc_feature (1)..( 11): Result.002 file - promoters60/1028937
atatatttaat

SEQ ID NO: 102345 - DNA, 11 bp, Unknown
  misc_feature (1)..( 11): Result.002 file - promoters60/1028937
ttctttttaat

SEQ ID NO: 102346 - DNA, 11 bp, Unknown
  misc_feature (1)..( 11): Result.002 file - promoters60/1028937
atttttataaa

SEQ ID NO: 102347 - DNA, 11 bp, Unknown
  misc_feature (1)..( 11): Result.002 file - promoters60/1028937
ggattatctat

SEQ ID NO: 102348 - DNA, 11 bp, Unknown
  misc_feature (1)..( 11): Result.002 file - promoters60/1028937
agattatcaaa

SEQ ID NO: 102349 - DNA, 11 bp, Unknown
  misc_feature (1)..( 11): Result.002 file - promoters60/1028937
attttatgaaa

SEQ ID NO: 102350 - DNA, 11 bp, Unknown
  misc_feature (1)..( 11): Result.002 file - promoters60/1028937
agattataaga

SEQ ID NO: 102351 - DNA, 9 bp, Unknown
  misc_feature (1)..( 9): Result.002 file - promoters60/1028937
attttataa

SEQ ID NO: 102352 - DNA, 9 bp, Unknown
  misc_feature (1)..( 9): Result.002 file - promoters60/1028937
attttatag

SEQ ID NO: 102353 - DNA, 9 bp, Unknown
  misc_feature (1)..( 9): Result.002 file - promoters60/1028937
tttttaatt

SEQ ID NO: 102354 - DNA, 9 bp, Unknown
  misc_feature (1)..( 9): Result.002 file - promoters60/1028937
tttttataa

SEQ ID NO: 102355 - DNA, 9 bp, Unknown
  misc_feature (1)..( 9): Result.002 file - promoters60/1028937
tatttaatc

SEQ ID NO: 102356 - DNA, 16 bp, Unknown
  misc_feature (1)..( 16): Result.002 file - promoters60/1028937
gaaaacaatttatatt

SEQ ID NO: 102357 - DNA, 16 bp, Unknown
  misc_feature (1)..( 16): Result.002 file - promoters60/1028937
agcacttttttttatt

SEQ ID NO: 102358 - DNA, 16 bp, Unknown
  misc_feature (1)..( 16): Result.002 file - promoters60/1028937
aaaaagaatttataaa

SEQ ID NO: 102359 - DNA, 16 bp, Unknown
  misc_feature (1)..( 16): Result.002 file - promoters60/1028937
aaaaacaataattatg

SEQ ID NO: 102360 - DNA, 16 bp, Unknown
  misc_feature (1)..( 16): Result.002 file - promoters60/1028937
atgaagaatctgatgt

SEQ ID NO: 102361 - DNA, 12 bp, Unknown
  misc_feature (1)..( 12): Result.002 file - promoters60/1028937
aaataaaaattg

SEQ ID NO: 102362 - DNA, 12 bp, Unknown
  misc_feature (1)..( 12): Result.002 file - promoters60/1028937
aaaaaaacattg

SEQ ID NO: 102363 - DNA, 12 bp, Unknown
  misc_feature (1)..( 12): Result.002 file - promoters60/1028937
tgttaaaaacta

SEQ ID NO: 102364 - DNA, 12 bp, Unknown
  misc_feature (1)..( 12): Result.002 file - promoters60/1028937
aagtaaaaaaca

SEQ ID NO: 102365 - DNA, 12 bp, Unknown
  misc_feature (1)..( 12): Result.002 file - promoters60/1028937
acaaaattgaat

SEQ ID NO: 102366 - DNA, 12 bp, Unknown
  misc_feature (1)..( 12): Result.002 file - promoters60/1028937
acaaaattaact

SEQ ID NO: 102367 - DNA, 12 bp, Unknown
  misc_feature (1)..( 12): Result.002 file - promoters60/1028937
acaaaaatgaat

SEQ ID NO: 102368 - DNA, 12 bp, Unknown
  misc_feature (1)..( 12): Result.002 file - promoters60/1028937
ataaaaattaga

SEQ ID NO: 102369 - DNA, 8 bp, Unknown
  misc_feature (1)..( 8): Result.002 file - promoters60/1028937
aagaaata

SEQ ID NO: 102370 - DNA, 8 bp, Unknown
  misc_feature (1)..( 8): Result.002 file - promoters60/1028937
tagaaatg

SEQ ID NO: 102371 - DNA, 8 bp, Unknown
  misc_feature (1)..( 8): Result.002 file - promoters60/1028937
aagaaaga

SEQ ID NO: 102372 - DNA, 8 bp, Unknown
  misc_feature (1)..( 8): Result.002 file - promoters60/1028937
aagtaata

SEQ ID NO: 102373 - DNA, 11 bp, Unknown
  misc_feature (1)..( 11): Result.002 file - promoters60/1028937
taataaaacaa

SEQ ID NO: 102374 - DNA, 11 bp, Unknown
  misc_feature (1)..( 11): Result.002 file - promoters60/1028937
gaataaaacaa

SEQ ID NO: 102375 - DNA, 11 bp, Unknown
  misc_feature (1)..( 11): Result.002 file - promoters60/1028937
taataaaatat

SEQ ID NO: 102376 - DNA, 11 bp, Unknown
  misc_feature (1)..( 11): Result.002 file - promoters60/1028937
ttataaaaatt

SEQ ID NO: 102377 - DNA, 10 bp, Unknown
  misc_feature (1)..( 10): Result.002 file - promoters60/1028937
gaatacttta

SEQ ID NO: 102378 - DNA, 10 bp, Unknown
  misc_feature (1)..( 10): Result.002 file - promoters60/1028937
acatattttt

SEQ ID NO: 102379 - DNA, 10 bp, Unknown
  misc_feature (1)..( 10): Result.002 file - promoters60/1028937
atgtattttt

SEQ ID NO: 102380 - DNA, 10 bp, Unknown
  misc_feature (1)..( 10): Result.002 file - promoters60/1028937
atatatttaa

SEQ ID NO: 102381 - DNA, 12 bp, Unknown
  misc_feature (1)..( 12): Result.002 file - promoters60/1028955
acaaatatatgt

SEQ ID NO: 102382 - DNA, 12 bp, Unknown
  misc_feature (1)..( 12): Result.002 file - promoters60/1028955
ttagatagatgt

SEQ ID NO: 102383 - DNA, 12 bp, Unknown
  misc_feature (1)..( 12): Result.002 file - promoters60/1028955
aaaaataccact

SEQ ID NO: 102384 - DNA, 12 bp, Unknown
  misc_feature (1)..( 12): Result.002 file - promoters60/1028955
aaacataaattt

SEQ ID NO: 102385 - DNA, 12 bp, Unknown
  misc_feature (1)..( 12): Result.002 file - promoters60/1028955
caaaagagagag

SEQ ID NO: 102386 - DNA, 12 bp, Unknown
  misc_feature (1)..( 12): Result.002 file - promoters60/1028955
gatgattgattg

SEQ ID NO: 102387 - DNA, 8 bp, Unknown
  misc_feature (1)..( 8): Result.002 file - promoters60/1028963
tgttttgc

SEQ ID NO: 102388 - DNA, 8 bp, Unknown
  misc_feature (1)..( 8): Result.002 file - promoters60/1028963
tgttttgc

SEQ ID NO: 102389 - DNA, 6 bp, Unknown
  misc_feature (1)..( 6): Result.002 file - promoters60/1028963
tttcaa

SEQ ID NO: 102390 - DNA, 6 bp, Unknown
  misc_feature (1)..( 6): Result.002 file - promoters60/1028963
tttcaa

SEQ ID NO: 102391 - DNA, 9 bp, Unknown
  misc_feature (1)..( 9): Result.002 file - promoters60/1028963
gattgaaca

SEQ ID NO: 102392 - DNA, 9 bp, Unknown
  misc_feature (1)..( 9): Result.002 file - promoters60/1028963
gattaaaca

SEQ ID NO: 102393 - DNA, 10 bp, Unknown
  misc_feature (1)..( 10): Result.002 file - promoters60/1028963
taatacaatt

SEQ ID NO: 102394 - DNA, 10 bp, Unknown
  misc_feature (1)..( 10): Result.002 file - promoters60/1028963
aaataaaata

SEQ ID NO: 102395 - DNA, 10 bp, Unknown
  misc_feature (1)..( 10): Result.002 file - promoters60/1028963
aaatgaaata

SEQ ID NO: 102396 - DNA, 8 bp, Unknown
  misc_feature (1)..( 8): Result.002 file - promoters60/1028963
tatcttct

SEQ ID NO: 102397 - DNA, 8 bp, Unknown
  misc_feature (1)..( 8): Result.002 file - promoters60/1028963
tattttct

SEQ ID NO: 102398 - DNA, 8 bp, Unknown
  misc_feature (1)..( 8): Result.002 file - promoters60/1028963
tatcttaa

SEQ ID NO: 102399 - DNA, 6 bp, Unknown
  misc_feature (1)..( 6): Result.002 file - promoters60/1028963
aaatcg

SEQ ID NO: 102400 - DNA, 6 bp, Unknown
  misc_feature (1)..( 6): Result.002 file - promoters60/1028963
aaatcg

SEQ ID NO: 102401 - DNA, 6 bp, Unknown
  misc_feature (1)..( 6): Result.002 file - promoters60/1028963
atctga

SEQ ID NO: 102402 - DNA, 6 bp, Unknown
  misc_feature (1)..( 6): Result.002 file - promoters60/1028963
atctga

SEQ ID NO: 102403 - DNA, 7 bp, Unknown
  misc_feature (1)..( 7): Result.002 file - promoters60/1028963
tatatat

SEQ ID NO: 102404 - DNA, 7 bp, Unknown
  misc_feature (1)..( 7): Result.002 file - promoters60/1028963
tatctat

SEQ ID NO: 102405 - DNA, 7 bp, Unknown
  misc_feature (1)..( 7): Result.002 file - promoters60/1028963
gaacaaa

SEQ ID NO: 102406 - DNA, 7 bp, Unknown
  misc_feature (1)..( 7): Result.002 file - promoters60/1028963
gaaaaaa

SEQ ID NO: 102407 - DNA, 6 bp, Unknown
  misc_feature (1)..( 6): Result.002 file - promoters60/1028963
agtaaa

SEQ ID NO: 102408 - DNA, 6 bp, Unknown
  misc_feature (1)..( 6): Result.002 file - promoters60/1028963
agtaaa

SEQ ID NO: 102409 - DNA, 7 bp, Unknown
  misc_feature (1)..( 7): Result.002 file - promoters60/1028963
aatcggg

SEQ ID NO: 102410 - DNA, 7 bp, Unknown
  misc_feature (1)..( 7): Result.002 file - promoters60/1028963
aattggg

SEQ ID NO: 102411 - DNA, 8 bp, Unknown
  misc_feature (1)..( 8): Result.002 file - promoters60/1028963
gaaagaaa

SEQ ID NO: 102412 - DNA, 8 bp, Unknown
  misc_feature (1)..( 8): Result.002 file - promoters60/1028963
gaaacaaa

SEQ ID NO: 102413 - DNA, 10 bp, Unknown
  misc_feature (1)..( 10): Result.002 file - promoters60/1028963
ggaaaagaaa

SEQ ID NO: 102414 - DNA, 10 bp, Unknown
  misc_feature (1)..( 10): Result.002 file - promoters60/1028963
ggaaatgaaa

SEQ ID NO: 102415 - DNA, 7 bp, Unknown
  misc_feature (1)..( 7): Result.002 file - promoters60/1028963
cccacta

SEQ ID NO: 102416 - DNA, 7 bp, Unknown
  misc_feature (1)..( 7): Result.002 file - promoters60/1028963
cccacta

SEQ ID NO: 102417 - DNA, 9 bp, Unknown
  misc_feature (1)..( 9): Result.002 file - promoters60/1028963
aaagaaaag

SEQ ID NO: 102418 - DNA, 9 bp, Unknown
  misc_feature (1)..( 9): Result.002 file - promoters60/1028963
aaagtaaag

SEQ ID NO: 102419 - DNA, 7 bp, Unknown
  misc_feature (1)..( 7): Result.002 file - promoters60/1028963
gtatata

SEQ ID NO: 102420 - DNA, 7 bp, Unknown
  misc_feature (1)..( 7): Result.002 file - promoters60/1028963
gtatata

SEQ ID NO: 102421 - DNA, 7 bp, Unknown
  misc_feature (1)..( 7): Result.002 file - promoters60/1028984
aaaaacc

SEQ ID NO: 102422 - DNA, 7 bp, Unknown
  misc_feature (1)..( 7): Result.002 file - promoters60/1028984
aaacacc

SEQ ID NO: 102423 - DNA, 7 bp, Unknown
  misc_feature (1)..( 7): Result.002 file - promoters60/1028984
taaaatg

SEQ ID NO: 102424 - DNA, 7 bp, Unknown
  misc_feature (1)..( 7): Result.002 file - promoters60/1028984
taaaata

SEQ ID NO: 102425 - DNA, 7 bp, Unknown
  misc_feature (1)..( 7): Result.002 file - promoters60/1028984
gaaaatg

SEQ ID NO: 102426 - DNA, 7 bp, Unknown
  misc_feature (1)..( 7): Result.002 file - promoters60/1028984
aaaatca

SEQ ID NO: 102427 - DNA, 7 bp, Unknown
  misc_feature (1)..( 7): Result.002 file - promoters60/1028984
aaaatca

SEQ ID NO: 102428 - DNA, 6 bp, Unknown
  misc_feature (1)..( 6): Result.002 file - promoters60/1028984
ggttta

SEQ ID NO: 102429 - DNA, 6 bp, Unknown
  misc_feature (1)..( 6): Result.002 file - promoters60/1028984
ggttta

SEQ ID NO: 102430 - DNA, 7 bp, Unknown
  misc_feature (1)..( 7): Result.002 file - promoters60/1028984
gattata

SEQ ID NO: 102431 - DNA, 7 bp, Unknown
  misc_feature (1)..( 7): Result.002 file - promoters60/1028984
gattata

SEQ ID NO: 102432 - DNA, 9 bp, Unknown
  misc_feature (1)..( 9): Result.002 file - promoters60/1028984
cagtaacaa

SEQ ID NO: 102433 - DNA, 9 bp, Unknown
  misc_feature (1)..( 9): Result.002 file - promoters60/1028984
cagtagcaa

SEQ ID NO: 102434 - DNA, 6 bp, Unknown
  misc_feature (1)..( 6): Result.002 file - promoters60/1028984
tcaaca

SEQ ID NO: 102435 - DNA, 6 bp, Unknown
  misc_feature (1)..( 6): Result.002 file - promoters60/1028984
tcaaca

SEQ ID NO: 102436 - DNA, 7 bp, Unknown
  misc_feature (1)..( 7): Result.002 file - promoters60/1028984
attacag

SEQ ID NO: 102437 - DNA, 7 bp, Unknown
  misc_feature (1)..( 7): Result.002 file - promoters60/1028984
atttcag

SEQ ID NO: 102438 - DNA, 8 bp, Unknown
  misc_feature (1)..( 8): Result.002 file - promoters60/1028984
agtggttt

SEQ ID NO: 102439 - DNA, 8 bp, Unknown
  misc_feature (1)..( 8): Result.002 file - promoters60/1028984
agtagttt

SEQ ID NO: 102440 - DNA, 7 bp, Unknown
  misc_feature (1)..( 7): Result.002 file - promoters60/1028984
ttaatcg

SEQ ID NO: 102441 - DNA, 7 bp, Unknown
  misc_feature (1)..( 7): Result.002 file - promoters60/1028984
ttattcg

SEQ ID NO: 102442 - DNA, 6 bp, Unknown
  misc_feature (1)..( 6): Result.002 file - promoters60/1028984
tacgaa

SEQ ID NO: 102443 - DNA, 6 bp, Unknown
  misc_feature (1)..( 6): Result.002 file - promoters60/1028984
tacgaa

SEQ ID NO: 102444 - DNA, 7 bp, Unknown
  misc_feature (1)..( 7): Result.002 file - promoters60/1028984
aaaaatc

SEQ ID NO: 102445 - DNA, 7 bp, Unknown
  misc_feature (1)..( 7): Result.002 file - promoters60/1028984
aaacatc

SEQ ID NO: 102446 - DNA, 7 bp, Unknown
  misc_feature (1)..( 7): Result.002 file - promoters60/1028984
gataaac

SEQ ID NO: 102447 - DNA, 7 bp, Unknown
  misc_feature (1)..( 7): Result.002 file - promoters60/1028984
gattaac

SEQ ID NO: 102448 - DNA, 6 bp, Unknown
  misc_feature (1)..( 6): Result.002 file - promoters60/1028984
atcgtc

SEQ ID NO: 102449 - DNA, 6 bp, Unknown
  misc_feature (1)..( 6): Result.002 file - promoters60/1028984
atcgtc

SEQ ID NO: 102450 - DNA, 6 bp, Unknown
  misc_feature (1)..( 6): Result.002 file - promoters60/1028984
tttcac

SEQ ID NO: 102451 - DNA, 6 bp, Unknown
  misc_feature (1)..( 6): Result.002 file - promoters60/1028984
tttcac

SEQ ID NO: 102452 - DNA, 8 bp, Unknown
  misc_feature (1)..( 8): Result.002 file - promoters60/1028984
taacgcgt

SEQ ID NO: 102453 - DNA, 8 bp, Unknown
  misc_feature (1)..( 8): Result.002 file - promoters60/1028984
taacacgt

SEQ ID NO: 102454 - DNA, 10 bp, Unknown
  misc_feature (1)..( 10): Result.002 file - promoters60/1029005
gctattacat

SEQ ID NO: 102455 - DNA, 10 bp, Unknown
  misc_feature (1)..( 10): Result.002 file - promoters60/1029005
attataacaa

SEQ ID NO: 102456 - DNA, 10 bp, Unknown
  misc_feature (1)..( 10): Result.002 file - promoters60/1029005
attatatcca

SEQ ID NO: 102457 - DNA, 10 bp, Unknown
  misc_feature (1)..( 10): Result.002 file - promoters60/1029005
tacataacaa

SEQ ID NO: 102458 - DNA, 12 bp, Unknown
  misc_feature (1)..( 12): Result.002 file - promoters60/1029005
ttaatagacaaa

SEQ ID NO: 102459 - DNA, 12 bp, Unknown
  misc_feature (1)..( 12): Result.002 file - promoters60/1029005
gtaaaagaaaga

SEQ ID NO: 102460 - DNA, 12 bp, Unknown
  misc_feature (1)..( 12): Result.002 file - promoters60/1029005
ttaagagacaaa

SEQ ID NO: 102461 - DNA, 12 bp, Unknown
  misc_feature (1)..( 12): Result.002 file - promoters60/1029005
ctaacagaataa

SEQ ID NO: 102462 - DNA, 9 bp, Unknown
  misc_feature (1)..( 9): Result.002 file - promoters60/1029005
gaatgatat

SEQ ID NO: 102463 - DNA, 9 bp, Unknown
  misc_feature (1)..( 9): Result.002 file - promoters60/1029005
aaattatat

SEQ ID NO: 102464 - DNA, 9 bp, Unknown
  misc_feature (1)..( 9): Result.002 file - promoters60/1029005
taattataa

SEQ ID NO: 102465 - DNA, 9 bp, Unknown
  misc_feature (1)..( 9): Result.002 file - promoters60/1029005
aaagtatct

SEQ ID NO: 102466 - DNA, 10 bp, Unknown
  misc_feature (1)..( 10): Result.002 file - promoters60/1029005
cttttcttta

SEQ ID NO: 102467 - DNA, 10 bp, Unknown
  misc_feature (1)..( 10): Result.002 file - promoters60/1029005
tttttgtttc

SEQ ID NO: 102468 - DNA, 10 bp, Unknown
  misc_feature (1)..( 10): Result.002 file - promoters60/1029005
tttttctttc

SEQ ID NO: 102469 - DNA, 10 bp, Unknown
  misc_feature (1)..( 10): Result.002 file - promoters60/1029005
gtttttttcc

SEQ ID NO: 102470 - DNA, 10 bp, Unknown
  misc_feature (1)..( 10): Result.002 file - promoters60/1029005
aatttattta

SEQ ID NO: 102471 - DNA, 10 bp, Unknown
  misc_feature (1)..( 10): Result.002 file - promoters60/1029005
tttttctttc

SEQ ID NO: 102472 - DNA, 10 bp, Unknown
  misc_feature (1)..( 10): Result.002 file - promoters60/1029005
cgtttttttc

SEQ ID NO: 102473 - DNA, 10 bp, Unknown
  misc_feature (1)..( 10): Result.002 file - promoters60/1029005
tttttgtttc

SEQ ID NO: 102474 - DNA, 13 bp, Unknown
  misc_feature (1)..( 13): Result.002 file - promoters60/1029005
caaaccaatgtta

SEQ ID NO: 102475 - DNA, 13 bp, Unknown
  misc_feature (1)..( 13): Result.002 file - promoters60/1029005
aaaatcaaatttt

SEQ ID NO: 102476 - DNA, 13 bp, Unknown
  misc_feature (1)..( 13): Result.002 file - promoters60/1029005
aaaaacaaagttt

SEQ ID NO: 102477 - DNA, 14 bp, Unknown
  misc_feature (1)..( 14): Result.002 file - promoters60/1029005
aaagaataaaaatt

SEQ ID NO: 102478 - DNA, 9 bp, Unknown
  misc_feature (1)..( 9): Result.002 file - promoters60/1029085
gtttaattt

SEQ ID NO: 102479 - DNA, 9 bp, Unknown
  misc_feature (1)..( 9): Result.002 file - promoters60/1029085
gttaaattt

SEQ ID NO: 102480 - DNA, 9 bp, Unknown
  misc_feature (1)..( 9): Result.002 file - promoters60/1029085
gattaattt

SEQ ID NO: 102481 - DNA, 7 bp, Unknown
  misc_feature (1)..( 7): Result.002 file - promoters60/1029085
caaaaac

SEQ ID NO: 102482 - DNA, 7 bp, Unknown
  misc_feature (1)..( 7): Result.002 file - promoters60/1029085
caaaaag

SEQ ID NO: 102483 - DNA, 7 bp, Unknown
  misc_feature (1)..( 7): Result.002 file - promoters60/1029085
taaaaag

SEQ ID NO: 102484 - DNA, 8 bp, Unknown
  misc_feature (1)..( 8): Result.002 file - promoters60/1029085
taaaaaat

SEQ ID NO: 102485 - DNA, 8 bp, Unknown
  misc_feature (1)..( 8): Result.002 file - promoters60/1029085
gaaaaaat

SEQ ID NO: 102486 - DNA, 8 bp, Unknown
  misc_feature (1)..( 8): Result.002 file - promoters60/1029085
taaaaagg

SEQ ID NO: 102487 - DNA, 8 bp, Unknown
  misc_feature (1)..( 8): Result.002 file - promoters60/1029085
gattgata

SEQ ID NO: 102488 - DNA, 8 bp, Unknown
  misc_feature (1)..( 8): Result.002 file - promoters60/1029085
gattcata

SEQ ID NO: 102489 - DNA, 8 bp, Unknown
  misc_feature (1)..( 8): Result.002 file - promoters60/1029085
gattcaaa

SEQ ID NO: 102490 - DNA, 8 bp, Unknown
  misc_feature (1)..( 8): Result.002 file - promoters60/1029242
attccaaa

SEQ ID NO: 102491 - DNA, 8 bp, Unknown
  misc_feature (1)..( 8): Result.002 file - promoters60/1029242
attccaaa

SEQ ID NO: 102492 - DNA, 7 bp, Unknown
  misc_feature (1)..( 7): Result.002 file - promoters60/1029242
ttttgaa

SEQ ID NO: 102493 - DNA, 7 bp, Unknown
  misc_feature (1)..( 7): Result.002 file - promoters60/1029242
ttttgaa

SEQ ID NO: 102494 - DNA, 12 bp, Unknown
  misc_feature (1)..( 12): Result.002 file - promoters60/1029242
ataagtaatttt

SEQ ID NO: 102495 - DNA, 12 bp, Unknown
  misc_feature (1)..( 12): Result.002 file - promoters60/1029242
gagtataattta

SEQ ID NO: 102496 - DNA, 12 bp, Unknown
  misc_feature (1)..( 12): Result.002 file - promoters60/1029242
gagtagaattta

SEQ ID NO: 102497 - DNA, 8 bp, Unknown
  misc_feature (1)..( 8): Result.002 file - promoters60/1029242
aattctta

SEQ ID NO: 102498 - DNA, 8 bp, Unknown
  misc_feature (1)..( 8): Result.002 file - promoters60/1029242
aattttta

SEQ ID NO: 102499 - DNA, 7 bp, Unknown
  misc_feature (1)..( 7): Result.002 file - promoters60/1029242
atataac

SEQ ID NO: 102500 - DNA, 7 bp, Unknown
  misc_feature (1)..( 7): Result.002 file - promoters60/1029242
ataaaac

SEQ ID NO: 102501 - DNA, 6 bp, Unknown
  misc_feature (1)..( 6): Result.002 file - promoters60/1029242
tactta

SEQ ID NO: 102502 - DNA, 6 bp, Unknown
  misc_feature (1)..( 6): Result.002 file - promoters60/1029242
tactta

SEQ ID NO: 102503 - DNA, 7 bp, Unknown
  misc_feature (1)..( 7): Result.002 file - promoters60/1029242
aattaaa

SEQ ID NO: 102504 - DNA, 7 bp, Unknown
  misc_feature (1)..( 7): Result.002 file - promoters60/1029242
aattaaa

SEQ ID NO: 102505 - DNA, 6 bp, Unknown
  misc_feature (1)..( 6): Result.002 file - promoters60/1029242
aaaaga

SEQ ID NO: 102506 - DNA, 6 bp, Unknown
  misc_feature (1)..( 6): Result.002 file - promoters60/1029242
aaaaga

SEQ ID NO: 102507 - DNA, 8 bp, Unknown
  misc_feature (1)..( 8): Result.002 file - promoters60/1029242
aaaccaaa

SEQ ID NO: 102508 - DNA, 8 bp, Unknown
  misc_feature (1)..( 8): Result.002 file - promoters60/1029242
aaatcaaa

SEQ ID NO: 102509 - DNA, 6 bp, Unknown
  misc_feature (1)..( 6): Result.002 file - promoters60/1029242
agagta

SEQ ID NO: 102510 - DNA, 6 bp, Unknown
  misc_feature (1)..( 6): Result.002 file - promoters60/1029242
agagta

SEQ ID NO: 102511 - DNA, 10 bp, Unknown
  misc_feature (1)..( 10): Result.002 file - promoters60/1029242
caaatttctt

SEQ ID NO: 102512 - DNA, 10 bp, Unknown
  misc_feature (1)..( 10): Result.002 file - promoters60/1029242
caaatatctt

SEQ ID NO: 102513 - DNA, 7 bp, Unknown
  misc_feature (1)..( 7): Result.002 file - promoters60/1029242
ttttctt

SEQ ID NO: 102514 - DNA, 7 bp, Unknown
  misc_feature (1)..( 7): Result.002 file - promoters60/1029242
tttactt

SEQ ID NO: 102515 - DNA, 6 bp, Unknown
  misc_feature (1)..( 6): Result.002 file - promoters60/1029242
aaaaat

SEQ ID NO: 102516 - DNA, 6 bp, Unknown
  misc_feature (1)..( 6): Result.002 file - promoters60/1029242
aaaaat

SEQ ID NO: 102517 - DNA, 8 bp, Unknown
  misc_feature (1)..( 8): Result.002 file - promoters60/1029242
tatttaca

SEQ ID NO: 102518 - DNA, 8 bp, Unknown
  misc_feature (1)..( 8): Result.002 file - promoters60/1029242
tatataca

SEQ ID NO: 102519 - DNA, 9 bp, Unknown
  misc_feature (1)..( 9): Result.002 file - promoters60/1029315
ttttgattt

SEQ ID NO: 102520 - DNA, 9 bp, Unknown
  misc_feature (1)..( 9): Result.002 file - promoters60/1029315
ttttggttt

SEQ ID NO: 102521 - DNA, 9 bp, Unknown
  misc_feature (1)..( 9): Result.002 file - promoters60/1029315
ggtggattc

SEQ ID NO: 102522 - DNA, 8 bp, Unknown
  misc_feature (1)..( 8): Result.002 file - promoters60/1029315
caacattc

SEQ ID NO: 102523 - DNA, 8 bp, Unknown
  misc_feature (1)..( 8): Result.002 file - promoters60/1029315
caaaattg

SEQ ID NO: 102524 - DNA, 8 bp, Unknown
  misc_feature (1)..( 8): Result.002 file - promoters60/1029315
aaaacttg

SEQ ID NO: 102525 - DNA, 9 bp, Unknown
  misc_feature (1)..( 9): Result.002 file - promoters60/1029315
aacaaacac

SEQ ID NO: 102526 - DNA, 9 bp, Unknown
  misc_feature (1)..( 9): Result.002 file - promoters60/1029315
aacaatcac

SEQ ID NO: 102527 - DNA, 9 bp, Unknown
  misc_feature (1)..( 9): Result.002 file - promoters60/1029315
aacaatcaa

SEQ ID NO: 102528 - DNA, 7 bp, Unknown
  misc_feature (1)..( 7): Result.002 file - promoters60/1029315
atataat

SEQ ID NO: 102529 - DNA, 7 bp, Unknown
  misc_feature (1)..( 7): Result.002 file - promoters60/1029315
atataat

SEQ ID NO: 102530 - DNA, 7 bp, Unknown
  misc_feature (1)..( 7): Result.002 file - promoters60/1029315
atataaa

SEQ ID NO: 102531 - DNA, 9 bp, Unknown
  misc_feature (1)..( 9): Result.002 file - promoters60/1029315
ctttgatta

SEQ ID NO: 102532 - DNA, 9 bp, Unknown
  misc_feature (1)..( 9): Result.002 file - promoters60/1029315
ttttcatta

SEQ ID NO: 102533 - DNA, 9 bp, Unknown
  misc_feature (1)..( 9): Result.002 file - promoters60/1029315
ttttcaata

SEQ ID NO: 102534 - DNA, 9 bp, Unknown
  misc_feature (1)..( 9): Result.002 file - promoters60/1029315
aaactaaac

SEQ ID NO: 102535 - DNA, 9 bp, Unknown
  misc_feature (1)..( 9): Result.002 file - promoters60/1029315
aaactaatt

SEQ ID NO: 102536 - DNA, 9 bp, Unknown
  misc_feature (1)..( 9): Result.002 file - promoters60/1029315
aaagtaatt

SEQ ID NO: 102537 - DNA, 9 bp, Unknown
  misc_feature (1)..( 9): Result.002 file - promoters60/1029395
aattgatga

SEQ ID NO: 102538 - DNA, 9 bp, Unknown
  misc_feature (1)..( 9): Result.002 file - promoters60/1029395
atttggtga

SEQ ID NO: 102539 - DNA, 9 bp, Unknown
  misc_feature (1)..( 9): Result.002 file - promoters60/1029395
aatcgatct

SEQ ID NO: 102540 - DNA, 7 bp, Unknown
  misc_feature (1)..( 7): Result.002 file - promoters60/1029395
ataaatc

SEQ ID NO: 102541 - DNA, 7 bp, Unknown
  misc_feature (1)..( 7): Result.002 file - promoters60/1029395
atatatc

SEQ ID NO: 102542 - DNA, 8 bp, Unknown
  misc_feature (1)..( 8): Result.002 file - promoters60/1029395
atgaataa

SEQ ID NO: 102543 - DNA, 8 bp, Unknown
  misc_feature (1)..( 8): Result.002 file - promoters60/1029395
atgcataa

SEQ ID NO: 102544 - DNA, 7 bp, Unknown
  misc_feature (1)..( 7): Result.002 file - promoters60/1029395
ctaattg

SEQ ID NO: 102545 - DNA, 7 bp, Unknown
  misc_feature (1)..( 7): Result.002 file - promoters60/1029395
ctatttg

SEQ ID NO: 102546 - DNA, 6 bp, Unknown
  misc_feature (1)..( 6): Result.002 file - promoters60/1029395
tagcta

SEQ ID NO: 102547 - DNA, 6 bp, Unknown
  misc_feature (1)..( 6): Result.002 file - promoters60/1029395
tagcta

SEQ ID NO: 102548 - DNA, 7 bp, Unknown
  misc_feature (1)..( 7): Result.002 file - promoters60/1029395
tcaattt

SEQ ID NO: 102549 - DNA, 7 bp, Unknown
  misc_feature (1)..( 7): Result.002 file - promoters60/1029395
tcagttt

SEQ ID NO: 102550 - DNA, 6 bp, Unknown
  misc_feature (1)..( 6): Result.002 file - promoters60/1029395
atctcg

SEQ ID NO: 102551 - DNA, 6 bp, Unknown
  misc_feature (1)..( 6): Result.002 file - promoters60/1029395
atctcg

SEQ ID NO: 102552 - DNA, 6 bp, Unknown
  misc_feature (1)..( 6): Result.002 file - promoters60/1029395
ctaaat

SEQ ID NO: 102553 - DNA, 6 bp, Unknown
  misc_feature (1)..( 6): Result.002 file - promoters60/1029395
ctaaat

SEQ ID NO: 102554 - DNA, 9 bp, Unknown
  misc_feature (1)..( 9): Result.002 file - promoters60/1029395
aattaaaaa

SEQ ID NO: 102555 - DNA, 9 bp, Unknown
  misc_feature (1)..( 9): Result.002 file - promoters60/1029395
aattgaaaa

SEQ ID NO: 102556 - DNA, 9 bp, Unknown
  misc_feature (1)..( 9): Result.002 file - promoters60/1029395
cttttgtat

SEQ ID NO: 102557 - DNA, 9 bp, Unknown
  misc_feature (1)..( 9): Result.002 file - promoters60/1029395
cttttttat

SEQ ID NO: 102558 - DNA, 6 bp, Unknown
  misc_feature (1)..( 6): Result.002 file - promoters60/1029395
aaaaga

SEQ ID NO: 102559 - DNA, 6 bp, Unknown
  misc_feature (1)..( 6): Result.002 file - promoters60/1029395
aaaaga

SEQ ID NO: 102560 - DNA, 6 bp, Unknown
  misc_feature (1)..( 6): Result.002 file - promoters60/1029395
aataat

SEQ ID NO: 102561 - DNA, 6 bp, Unknown
  misc_feature (1)..( 6): Result.002 file - promoters60/1029395
aataat

SEQ ID NO: 102562 - DNA, 8 bp, Unknown
  misc_feature (1)..( 8): Result.002 file - promoters60/1029395
aaacatgt

SEQ ID NO: 102563 - DNA, 8 bp, Unknown
  misc_feature (1)..( 8): Result.002 file - promoters60/1029395
aaacatgt

SEQ ID NO: 102564 - DNA, 9 bp, Unknown
  misc_feature (1)..( 9): Result.002 file - promoters60/1029395
tttatttga

SEQ ID NO: 102565 - DNA, 9 bp, Unknown
  misc_feature (1)..( 9): Result.002 file - promoters60/1029395
tttgtttca

SEQ ID NO: 102566 - DNA, 9 bp, Unknown
  misc_feature (1)..( 9): Result.002 file - promoters60/1029395
tctatttgt

SEQ ID NO: 102567 - DNA, 6 bp, Unknown
  misc_feature (1)..( 6): Result.002 file - promoters60/1029395
actatt

SEQ ID NO: 102568 - DNA, 6 bp, Unknown
  misc_feature (1)..( 6): Result.002 file - promoters60/1029395
actatt

SEQ ID NO: 102569 - DNA, 8 bp, Unknown
  misc_feature (1)..( 8): Result.002 file - promoters60/1029395
tcttttat

SEQ ID NO: 102570 - DNA, 8 bp, Unknown
  misc_feature (1)..( 8): Result.002 file - promoters60/1029395
tctcttat

SEQ ID NO: 102571 - DNA, 6 bp, Unknown
  misc_feature (1)..( 6): Result.002 file - promoters60/1029395
tttgta

SEQ ID NO: 102572 - DNA, 6 bp, Unknown
  misc_feature (1)..( 6): Result.002 file - promoters60/1029395
tttgta

SEQ ID NO: 102573 - DNA, 6 bp, Unknown
  misc_feature (1)..( 6): Result.002 file - promoters60/1029395
tcactc

SEQ ID NO: 102574 - DNA, 6 bp, Unknown
  misc_feature (1)..( 6): Result.002 file - promoters60/1029395
tcactc

SEQ ID NO: 102575 - DNA, 6 bp, Unknown
  misc_feature (1)..( 6): Result.002 file - promoters60/1029636
atcatt

SEQ ID NO: 102576 - DNA, 6 bp, Unknown
  misc_feature (1)..( 6): Result.002 file - promoters60/1029636
atcatt

SEQ ID NO: 102577 - DNA, 8 bp, Unknown
  misc_feature (1)..( 8): Result.002 file - promoters60/1029636
aatgattt

SEQ ID NO: 102578 - DNA, 8 bp, Unknown
  misc_feature (1)..( 8): Result.002 file - promoters60/1029636
aatcattt

SEQ ID NO: 102579 - DNA, 15 bp, Unknown
  misc_feature (1)..( 15): Result.002 file - promoters60/1029636
attattaaaaataaa

SEQ ID NO: 102580 - DNA, 15 bp, Unknown
  misc_feature (1)..( 15): Result.002 file - promoters60/1029636
attgttataaaaaaa

SEQ ID NO: 102581 - DNA, 6 bp, Unknown
  misc_feature (1)..( 6): Result.002 file - promoters60/1029636
agagaa

SEQ ID NO: 102582 - DNA, 6 bp, Unknown
  misc_feature (1)..( 6): Result.002 file - promoters60/1029636
agagaa

SEQ ID NO: 102583 - DNA, 7 bp, Unknown
  misc_feature (1)..( 7): Result.002 file - promoters60/1029636
gatagga

SEQ ID NO: 102584 - DNA, 7 bp, Unknown
  misc_feature (1)..( 7): Result.002 file - promoters60/1029636
gattgga

SEQ ID NO: 102585 - DNA, 8 bp, Unknown
  misc_feature (1)..( 8): Result.002 file - promoters60/1029636
agtgacat

SEQ ID NO: 102586 - DNA, 8 bp, Unknown
  misc_feature (1)..( 8): Result.002 file - promoters60/1029636
agtgacat

SEQ ID NO: 102587 - DNA, 12 bp, Unknown
  misc_feature (1)..( 12): Result.002 file - promoters60/1029636
gttaggttggat

SEQ ID NO: 102588 - DNA, 12 bp, Unknown
  misc_feature (1)..( 12): Result.002 file - promoters60/1029636
gttcggttcgat

SEQ ID NO: 102589 - DNA, 7 bp, Unknown
  misc_feature (1)..( 7): Result.002 file - promoters60/1029636
aaaaccg

SEQ ID NO: 102590 - DNA, 7 bp, Unknown
  misc_feature (1)..( 7): Result.002 file - promoters60/1029636
aaatccg

SEQ ID NO: 102591 - DNA, 6 bp, Unknown
  misc_feature (1)..( 6): Result.002 file - promoters60/1029636
tgtttc

SEQ ID NO: 102592 - DNA, 6 bp, Unknown
  misc_feature (1)..( 6): Result.002 file - promoters60/1029636
tgtttc

SEQ ID NO: 102593 - DNA, 6 bp, Unknown
  misc_feature (1)..( 6): Result.002 file - promoters60/1029837
ataaat

SEQ ID NO: 102594 - DNA, 6 bp, Unknown
  misc_feature (1)..( 6): Result.002 file - promoters60/1029837
ataaat

SEQ ID NO: 102595 - DNA, 6 bp, Unknown
  misc_feature (1)..( 6): Result.002 file - promoters60/1029837
caaaat

SEQ ID NO: 102596 - DNA, 6 bp, Unknown
  misc_feature (1)..( 6): Result.002 file - promoters60/1029837
caaaat

SEQ ID NO: 102597 - DNA, 6 bp, Unknown
  misc_feature (1)..( 6): Result.002 file - promoters60/1029837
ataata

SEQ ID NO: 102598 - DNA, 6 bp, Unknown
  misc_feature (1)..( 6): Result.002 file - promoters60/1029837
ataata

SEQ ID NO: 102599 - DNA, 6 bp, Unknown
  misc_feature (1)..( 6): Result.002 file - promoters60/1029837
aatttt

SEQ ID NO: 102600 - DNA, 6 bp, Unknown
  misc_feature (1)..( 6): Result.002 file - promoters60/1029837
aatttt

SEQ ID NO: 102601 - DNA, 8 bp, Unknown
  misc_feature (1)..( 8): Result.002 file - promoters60/1029837
ataaagaa

SEQ ID NO: 102602 - DNA, 8 bp, Unknown
  misc_feature (1)..( 8): Result.002 file - promoters60/1029837
atagagaa

SEQ ID NO: 102603 - DNA, 6 bp, Unknown
  misc_feature (1)..( 6): Result.002 file - promoters60/1029837
agtcgc

SEQ ID NO: 102604 - DNA, 6 bp, Unknown
  misc_feature (1)..( 6): Result.002 file - promoters60/1029837
agtcgc

SEQ ID NO: 102605 - DNA, 7 bp, Unknown
  misc_feature (1)..( 7): Result.002 file - promoters60/1029837
gccgagt

SEQ ID NO: 102606 - DNA, 7 bp, Unknown
  misc_feature (1)..( 7): Result.002 file - promoters60/1029837
gccgagt

SEQ ID NO: 102607 - DNA, 7 bp, Unknown
  misc_feature (1)..( 7): Result.002 file - promoters60/1029837
acggttc

SEQ ID NO: 102608 - DNA, 7 bp, Unknown
  misc_feature (1)..( 7): Result.002 file - promoters60/1029837
acgtttc

SEQ ID NO: 102609 - DNA, 8 bp, Unknown
  misc_feature (1)..( 8): Result.002 file - promoters60/1029837
tctaactc

SEQ ID NO: 102610 - DNA, 8 bp, Unknown
  misc_feature (1)..( 8): Result.002 file - promoters60/1029837
tctcactc

SEQ ID NO: 102611 - DNA, 6 bp, Unknown
  misc_feature (1)..( 6): Result.002 file - promoters60/1029837
agatta

SEQ ID NO: 102612 - DNA, 6 bp, Unknown
  misc_feature (1)..( 6): Result.002 file - promoters60/1029837
agatta

SEQ ID NO: 102613 - DNA, 18 bp, Unknown
  misc_feature (1)..( 18): Result.002 file - promoters60/1029837
aaatcttactaatcaaat

SEQ ID NO: 102614 - DNA, 18 bp, Unknown
  misc_feature (1)..( 18): Result.002 file - promoters60/1029837
aaatattaataattaaat

SEQ ID NO: 102615 - DNA, 18 bp, Unknown
  misc_feature (1)..( 18): Result.002 file - promoters60/1029837
ataaagtaataataacaa

SEQ ID NO: 102616 - DNA, 7 bp, Unknown
  misc_feature (1)..( 7): Result.002 file - promoters60/1029837
tttttga

SEQ ID NO: 102617 - DNA, 7 bp, Unknown
  misc_feature (1)..( 7): Result.002 file - promoters60/1029837
tttttga

SEQ ID NO: 102618 - DNA, 7 bp, Unknown
  misc_feature (1)..( 7): Result.002 file - promoters60/1029837
tttaaat

SEQ ID NO: 102619 - DNA, 7 bp, Unknown
  misc_feature (1)..( 7): Result.002 file - promoters60/1029837
tttaaat

SEQ ID NO: 102620 - DNA, 8 bp, Unknown
  misc_feature (1)..( 8): Result.002 file - promoters60/1029837
aattaatt

SEQ ID NO: 102621 - DNA, 8 bp, Unknown
  misc_feature (1)..( 8): Result.002 file - promoters60/1029837
aataaatt

SEQ ID NO: 102622 - DNA, 7 bp, Unknown
  misc_feature (1)..( 7): Result.002 file - promoters60/1029837
tcattaa

SEQ ID NO: 102623 - DNA, 7 bp, Unknown
  misc_feature (1)..( 7): Result.002 file - promoters60/1029837
tcattaa

SEQ ID NO: 102624 - DNA, 7 bp, Unknown
  misc_feature (1)..( 7): Result.002 file - promoters60/1029837
tctctga

SEQ ID NO: 102625 - DNA, 7 bp, Unknown
  misc_feature (1)..( 7): Result.002 file - promoters60/1029837
tctttga

SEQ ID NO: 102626 - DNA, 6 bp, Unknown
  misc_feature (1)..( 6): Result.002 file - promoters60/1029837
cctata

SEQ ID NO: 102627 - DNA, 6 bp, Unknown
  misc_feature (1)..( 6): Result.002 file - promoters60/1029837
cctata

SEQ ID NO: 102628 - DNA, 8 bp, Unknown
  misc_feature (1)..( 8): Result.002 file - promoters60/1029837
taaatttt

SEQ ID NO: 102629 - DNA, 8 bp, Unknown
  misc_feature (1)..( 8): Result.002 file - promoters60/1029837
aaaattta

SEQ ID NO: 102630 - DNA, 6 bp, Unknown
  misc_feature (1)..( 6): Result.002 file - promoters60/1029837
aacttt

SEQ ID NO: 102631 - DNA, 6 bp, Unknown
  misc_feature (1)..( 6): Result.002 file - promoters60/1029837
aacttt

SEQ ID NO: 102632 - DNA, 7 bp, Unknown
  misc_feature (1)..( 7): Result.002 file - promoters60/1029837
agatcca

SEQ ID NO: 102633 - DNA, 7 bp, Unknown
  misc_feature (1)..( 7): Result.002 file - promoters60/1029837
agatcca

SEQ ID NO: 102634 - DNA, 6 bp, Unknown
  misc_feature (1)..( 6): Result.002 file - promoters60/1029837
ttaatg

SEQ ID NO: 102635 - DNA, 6 bp, Unknown
  misc_feature (1)..( 6): Result.002 file - promoters60/1029837
ttaatg

SEQ ID NO: 102636 - DNA, 6 bp, Unknown
  misc_feature (1)..( 6): Result.002 file - promoters60/1029837
gaaaaa

SEQ ID NO: 102637 - DNA, 6 bp, Unknown
  misc_feature (1)..( 6): Result.002 file - promoters60/1029837
gaaaaa

SEQ ID NO: 102638 - DNA, 8 bp, Unknown
  misc_feature (1)..( 8): Result.002 file - promoters60/1029841
aaaacatt

SEQ ID NO: 102639 - DNA, 8 bp, Unknown
  misc_feature (1)..( 8): Result.002 file - promoters60/1029841
aaaacaaa

SEQ ID NO: 102640 - DNA, 8 bp, Unknown
  misc_feature (1)..( 8): Result.002 file - promoters60/1029841
aaatcaaa

SEQ ID NO: 102641 - DNA, 8 bp, Unknown
  misc_feature (1)..( 8): Result.002 file - promoters60/1029841
cataagag

SEQ ID NO: 102642 - DNA, 8 bp, Unknown
  misc_feature (1)..( 8): Result.002 file - promoters60/1029841
cataagtc

SEQ ID NO: 102643 - DNA, 8 bp, Unknown
  misc_feature (1)..( 8): Result.002 file - promoters60/1029841
tataagat

SEQ ID NO: 102644 - DNA, 8 bp, Unknown
  misc_feature (1)..( 8): Result.002 file - promoters60/1029841
tttaagat

SEQ ID NO: 102645 - DNA, 11 bp, Unknown
  misc_feature (1)..( 11): Result.002 file - promoters60/1029841
gaataaagtat

SEQ ID NO: 102646 - DNA, 11 bp, Unknown
  misc_feature (1)..( 11): Result.002 file - promoters60/1029841
agatacagtat

SEQ ID NO: 102647 - DNA, 11 bp, Unknown
  misc_feature (1)..( 11): Result.002 file - promoters60/1029841
gaagaaaaaag

SEQ ID NO: 102648 - DNA, 11 bp, Unknown
  misc_feature (1)..( 11): Result.002 file - promoters60/1029841
aaagaaaaaca

SEQ ID NO: 102649 - DNA, 9 bp, Unknown
  misc_feature (1)..( 9): Result.002 file - promoters60/1029841
gaataatcc

SEQ ID NO: 102650 - DNA, 9 bp, Unknown
  misc_feature (1)..( 9): Result.002 file - promoters60/1029841
taataatta

SEQ ID NO: 102651 - DNA, 9 bp, Unknown
  misc_feature (1)..( 9): Result.002 file - promoters60/1029841
aaatattta

SEQ ID NO: 102652 - DNA, 9 bp, Unknown
  misc_feature (1)..( 9): Result.002 file - promoters60/1029841
taaaaatca

SEQ ID NO: 102653 - DNA, 7 bp, Unknown
  misc_feature (1)..( 7): Result.002 file - promoters60/1029841
taaattg

SEQ ID NO: 102654 - DNA, 7 bp, Unknown
  misc_feature (1)..( 7): Result.002 file - promoters60/1029841
taagttg

SEQ ID NO: 102655 - DNA, 7 bp, Unknown
  misc_feature (1)..( 7): Result.002 file - promoters60/1029841
taaattg

SEQ ID NO: 102656 - DNA, 13 bp, Unknown
  misc_feature (1)..( 13): Result.002 file - promoters60/1029841
aaaccaaaatcac

SEQ ID NO: 102657 - DNA, 13 bp, Unknown
  misc_feature (1)..( 13): Result.002 file - promoters60/1029841
aaaacaaaacatt

SEQ ID NO: 102658 - DNA, 13 bp, Unknown
  misc_feature (1)..( 13): Result.002 file - promoters60/1029841
taaacacaataca

SEQ ID NO: 102659 - DNA, 10 bp, Unknown
  misc_feature (1)..( 10): Result.002 file - promoters60/1029841
ataatgtgag

SEQ ID NO: 102660 - DNA, 10 bp, Unknown
  misc_feature (1)..( 10): Result.002 file - promoters60/1029841
gtaatgtaca

SEQ ID NO: 102661 - DNA, 10 bp, Unknown
  misc_feature (1)..( 10): Result.002 file - promoters60/1029841
gtaatgaaca

SEQ ID NO: 102662 - DNA, 8 bp, Unknown
  misc_feature (1)..( 8): Result.002 file - promoters60/1029841
aaaatgaa

SEQ ID NO: 102663 - DNA, 8 bp, Unknown
  misc_feature (1)..( 8): Result.002 file - promoters60/1029841
aaaaagaa

SEQ ID NO: 102664 - DNA, 9 bp, Unknown
  misc_feature (1)..( 9): Result.002 file - promoters60/1029841
aagaaagat

SEQ ID NO: 102665 - DNA, 16 bp, Unknown
  misc_feature (1)..( 16): Result.002 file - promoters60/1029908
tgagaagatttatttg

SEQ ID NO: 102666 - DNA, 16 bp, Unknown
  misc_feature (1)..( 16): Result.002 file - promoters60/1029908
aagaaagattctgaat

SEQ ID NO: 102667 - DNA, 16 bp, Unknown
  misc_feature (1)..( 16): Result.002 file - promoters60/1029908
gttatagatttaattg

SEQ ID NO: 102668 - DNA, 16 bp, Unknown
  misc_feature (1)..( 16): Result.002 file - promoters60/1029908
aagaaaaattacgaga

SEQ ID NO: 102669 - DNA, 16 bp, Unknown
  misc_feature (1)..( 16): Result.002 file - promoters60/1029908
cgtatagattagatca

SEQ ID NO: 102670 - DNA, 16 bp, Unknown
  misc_feature (1)..( 16): Result.002 file - promoters60/1029908
tgggacgaagcccgta

SEQ ID NO: 102671 - DNA, 12 bp, Unknown
  misc_feature (1)..( 12): Result.002 file - promoters60/1029931
gcaaggtttcgt

SEQ ID NO: 102672 - DNA, 12 bp, Unknown
  misc_feature (1)..( 12): Result.002 file - promoters60/1029931
caaagctttaaa

SEQ ID NO: 102673 - DNA, 12 bp, Unknown
  misc_feature (1)..( 12): Result.002 file - promoters60/1029931
gcaaggttggat

SEQ ID NO: 102674 - DNA, 12 bp, Unknown
  misc_feature (1)..( 12): Result.002 file - promoters60/1029931
aaaatctttaaa

SEQ ID NO: 102675 - DNA, 6 bp, Unknown
  misc_feature (1)..( 6): Result.002 file - promoters60/1030139
ttcaca

SEQ ID NO: 102676 - DNA, 6 bp, Unknown
  misc_feature (1)..( 6): Result.002 file - promoters60/1030139
ttcaca

SEQ ID NO: 102677 - DNA, 6 bp, Unknown
  misc_feature (1)..( 6): Result.002 file - promoters60/1030139
agcttt

SEQ ID NO: 102678 - DNA, 6 bp, Unknown
  misc_feature (1)..( 6): Result.002 file - promoters60/1030139
agcttt

SEQ ID NO: 102679 - DNA, 6 bp, Unknown
  misc_feature (1)..( 6): Result.002 file - promoters60/1030139
ttttca

SEQ ID NO: 102680 - DNA, 6 bp, Unknown
  misc_feature (1)..( 6): Result.002 file - promoters60/1030139
ttttca

SEQ ID NO: 102681 - DNA, 7 bp, Unknown
  misc_feature (1)..( 7): Result.002 file - promoters60/1030139
atataag

SEQ ID NO: 102682 - DNA, 7 bp, Unknown
  misc_feature (1)..( 7): Result.002 file - promoters60/1030139
atataag

SEQ ID NO: 102683 - DNA, 6 bp, Unknown
  misc_feature (1)..( 6): Result.002 file - promoters60/1030139
tcacta

SEQ ID NO: 102684 - DNA, 6 bp, Unknown
  misc_feature (1)..( 6): Result.002 file - promoters60/1030139
tcacta

SEQ ID NO: 102685 - DNA, 6 bp, Unknown
  misc_feature (1)..( 6): Result.002 file - promoters60/1030139
tcaatc

SEQ ID NO: 102686 - DNA, 6 bp, Unknown
  misc_feature (1)..( 6): Result.002 file - promoters60/1030139
tcaatc

SEQ ID NO: 102687 - DNA, 6 bp, Unknown
  misc_feature (1)..( 6): Result.002 file - promoters60/1030139
agtaag

SEQ ID NO: 102688 - DNA, 6 bp, Unknown
  misc_feature (1)..( 6): Result.002 file - promoters60/1030139
agtaag

SEQ ID NO: 102689 - DNA, 7 bp, Unknown
  misc_feature (1)..( 7): Result.002 file - promoters60/1030139
accaaac

SEQ ID NO: 102690 - DNA, 7 bp, Unknown
  misc_feature (1)..( 7): Result.002 file - promoters60/1030139
accaaac

SEQ ID NO: 102691 - DNA, 7 bp, Unknown
  misc_feature (1)..( 7): Result.002 file - promoters60/1030139
ttgctgt

SEQ ID NO: 102692 - DNA, 7 bp, Unknown
  misc_feature (1)..( 7): Result.002 file - promoters60/1030139
ttgatgt

SEQ ID NO: 102693 - DNA, 7 bp, Unknown
  misc_feature (1)..( 7): Result.002 file - promoters60/1030157
aacattt

SEQ ID NO: 102694 - DNA, 7 bp, Unknown
  misc_feature (1)..( 7): Result.002 file - promoters60/1030157
aacattt

SEQ ID NO: 102695 - DNA, 7 bp, Unknown
  misc_feature (1)..( 7): Result.002 file - promoters60/1030157
aacattc

SEQ ID NO: 102696 - DNA, 7 bp, Unknown
  misc_feature (1)..( 7): Result.002 file - promoters60/1030157
taaccta

SEQ ID NO: 102697 - DNA, 7 bp, Unknown
  misc_feature (1)..( 7): Result.002 file - promoters60/1030157
taaacta

SEQ ID NO: 102698 - DNA, 6 bp, Unknown
  misc_feature (1)..( 6): Result.002 file - promoters60/1030157
gaaatt

SEQ ID NO: 102699 - DNA, 6 bp, Unknown
  misc_feature (1)..( 6): Result.002 file - promoters60/1030157
gaaatt

SEQ ID NO: 102700 - DNA, 7 bp, Unknown
  misc_feature (1)..( 7): Result.002 file - promoters60/1030157
taatata

SEQ ID NO: 102701 - DNA, 7 bp, Unknown
  misc_feature (1)..( 7): Result.002 file - promoters60/1030157
taaaata

SEQ ID NO: 102702 - DNA, 6 bp, Unknown
  misc_feature (1)..( 6): Result.002 file - promoters60/1030157
taatta

SEQ ID NO: 102703 - DNA, 6 bp, Unknown
  misc_feature (1)..( 6): Result.002 file - promoters60/1030157
taatta

SEQ ID NO: 102704 - DNA, 6 bp, Unknown
  misc_feature (1)..( 6): Result.002 file - promoters60/1030157
aaaata

SEQ ID NO: 102705 - DNA, 6 bp, Unknown
  misc_feature (1)..( 6): Result.002 file - promoters60/1030157
aaaata

SEQ ID NO: 102706 - DNA, 7 bp, Unknown
  misc_feature (1)..( 7): Result.002 file - promoters60/1030157
aataaca

SEQ ID NO: 102707 - DNA, 7 bp, Unknown
  misc_feature (1)..( 7): Result.002 file - promoters60/1030157
aataaca

SEQ ID NO: 102708 - DNA, 7 bp, Unknown
  misc_feature (1)..( 7): Result.002 file - promoters60/1030157
tttgttt

SEQ ID NO: 102709 - DNA, 7 bp, Unknown
  misc_feature (1)..( 7): Result.002 file - promoters60/1030157
tttcttt

SEQ ID NO: 102710 - DNA, 8 bp, Unknown
  misc_feature (1)..( 8): Result.002 file - promoters60/1030157
tgaaatat

SEQ ID NO: 102711 - DNA, 8 bp, Unknown
  misc_feature (1)..( 8): Result.002 file - promoters60/1030157
tgagatat

SEQ ID NO: 102712 - DNA, 6 bp, Unknown
  misc_feature (1)..( 6): Result.002 file - promoters60/1030157
tcaaat

SEQ ID NO: 102713 - DNA, 6 bp, Unknown
  misc_feature (1)..( 6): Result.002 file - promoters60/1030157
tcaaat

SEQ ID NO: 102714 - DNA, 7 bp, Unknown
  misc_feature (1)..( 7): Result.002 file - promoters60/1030157
caattcg

SEQ ID NO: 102715 - DNA, 7 bp, Unknown
  misc_feature (1)..( 7): Result.002 file - promoters60/1030157
caaatcg

SEQ ID NO: 102716 - DNA, 6 bp, Unknown
  misc_feature (1)..( 6): Result.002 file - promoters60/1030157
aaaata

SEQ ID NO: 102717 - DNA, 6 bp, Unknown
  misc_feature (1)..( 6): Result.002 file - promoters60/1030157
aaaata

SEQ ID NO: 102718 - DNA, 6 bp, Unknown
  misc_feature (1)..( 6): Result.002 file - promoters60/1030157
tataac

SEQ ID NO: 102719 - DNA, 6 bp, Unknown
  misc_feature (1)..( 6): Result.002 file - promoters60/1030157
tataac

SEQ ID NO: 102720 - DNA, 8 bp, Unknown
  misc_feature (1)..( 8): Result.002 file - promoters60/1030157
agtgaaga

SEQ ID NO: 102721 - DNA, 8 bp, Unknown
  misc_feature (1)..( 8): Result.002 file - promoters60/1030157
agtgaaga

SEQ ID NO: 102722 - DNA, 6 bp, Unknown
  misc_feature (1)..( 6): Result.002 file - promoters60/1030157
agacga

SEQ ID NO: 102723 - DNA, 6 bp, Unknown
  misc_feature (1)..( 6): Result.002 file - promoters60/1030157
agacga

SEQ ID NO: 102724 - DNA, 6 bp, Unknown
  misc_feature (1)..( 6): Result.002 file - promoters60/1030209
tattct

SEQ ID NO: 102725 - DNA, 6 bp, Unknown
  misc_feature (1)..( 6): Result.002 file - promoters60/1030209
tattct

SEQ ID NO: 102726 - DNA, 9 bp, Unknown
  misc_feature (1)..( 9): Result.002 file - promoters60/1030209
atgatatct

SEQ ID NO: 102727 - DNA, 9 bp, Unknown
  misc_feature (1)..( 9): Result.002 file - promoters60/1030209
atgttatct

SEQ ID NO: 102728 - DNA, 11 bp, Unknown
  misc_feature (1)..( 11): Result.002 file - promoters60/1030209
tcttctcaaca

SEQ ID NO: 102729 - DNA, 11 bp, Unknown
  misc_feature (1)..( 11): Result.002 file - promoters60/1030209
tctactccaca

SEQ ID NO: 102730 - DNA, 11 bp, Unknown
  misc_feature (1)..( 11): Result.002 file - promoters60/1030209
gttaaatctaa

SEQ ID NO: 102731 - DNA, 11 bp, Unknown
  misc_feature (1)..( 11): Result.002 file - promoters60/1030209
gttacatcaag

SEQ ID NO: 102732 - DNA, 11 bp, Unknown
  misc_feature (1)..( 11): Result.002 file - promoters60/1030209
aacacaccaag

SEQ ID NO: 102733 - DNA, 7 bp, Unknown
  misc_feature (1)..( 7): Result.002 file - promoters60/1030209
aagcaaa

SEQ ID NO: 102734 - DNA, 7 bp, Unknown
  misc_feature (1)..( 7): Result.002 file - promoters60/1030209
aagaaaa

SEQ ID NO: 102735 - DNA, 7 bp, Unknown
  misc_feature (1)..( 7): Result.002 file - promoters60/1030209
aaatccc

SEQ ID NO: 102736 - DNA, 7 bp, Unknown
  misc_feature (1)..( 7): Result.002 file - promoters60/1030209
aaagccc

SEQ ID NO: 102737 - DNA, 6 bp, Unknown
  misc_feature (1)..( 6): Result.002 file - promoters60/1030209
tatttt

SEQ ID NO: 102738 - DNA, 6 bp, Unknown
  misc_feature (1)..( 6): Result.002 file - promoters60/1030209
tatttt

SEQ ID NO: 102739 - DNA, 9 bp, Unknown
  misc_feature (1)..( 9): Result.002 file - promoters60/1030209
ttttaaaaa

SEQ ID NO: 102740 - DNA, 9 bp, Unknown
  misc_feature (1)..( 9): Result.002 file - promoters60/1030209
ttttgaaaa

SEQ ID NO: 102741 - DNA, 9 bp, Unknown
  misc_feature (1)..( 9): Result.002 file - promoters60/1030209
atctaaaaa

SEQ ID NO: 102742 - DNA, 6 bp, Unknown
  misc_feature (1)..( 6): Result.002 file - promoters60/1030209
aaacag

SEQ ID NO: 102743 - DNA, 6 bp, Unknown
  misc_feature (1)..( 6): Result.002 file - promoters60/1030209
aaacag

SEQ ID NO: 102744 - DNA, 8 bp, Unknown
  misc_feature (1)..( 8): Result.002 file - promoters60/1030209
aaaaagtt

SEQ ID NO: 102745 - DNA, 8 bp, Unknown
  misc_feature (1)..( 8): Result.002 file - promoters60/1030209
aaagagtt

SEQ ID NO: 102746 - DNA, 11 bp, Unknown
  misc_feature (1)..( 11): Result.002 file - promoters60/1030209
gatgagagaaa

SEQ ID NO: 102747 - DNA, 11 bp, Unknown
  misc_feature (1)..( 11): Result.002 file - promoters60/1030209
gatcagagaaa

SEQ ID NO: 102748 - DNA, 7 bp, Unknown
  misc_feature (1)..( 7): Result.002 file - promoters60/1030209
gaatatt

SEQ ID NO: 102749 - DNA, 7 bp, Unknown
  misc_feature (1)..( 7): Result.002 file - promoters60/1030209
gaaaatt

SEQ ID NO: 102750 - DNA, 6 bp, Unknown
  misc_feature (1)..( 6): Result.002 file - promoters60/1030209
tttctc

SEQ ID NO: 102751 - DNA, 6 bp, Unknown
  misc_feature (1)..( 6): Result.002 file - promoters60/1030209
tttctc

SEQ ID NO: 102752 - DNA, 6 bp, Unknown
  misc_feature (1)..( 6): Result.002 file - promoters60/1030209
aaaaat

SEQ ID NO: 102753 - DNA, 6 bp, Unknown
  misc_feature (1)..( 6): Result.002 file - promoters60/1030209
aaaaat

SEQ ID NO: 102754 - DNA, 7 bp, Unknown
  misc_feature (1)..( 7): Result.002 file - promoters60/1030209
aaagtaa

SEQ ID NO: 102755 - DNA, 7 bp, Unknown
  misc_feature (1)..( 7): Result.002 file - promoters60/1030209
aaaataa

SEQ ID NO: 102756 - DNA, 6 bp, Unknown
  misc_feature (1)..( 6): Result.002 file - promoters60/1030209
aaaaac

SEQ ID NO: 102757 - DNA, 6 bp, Unknown
  misc_feature (1)..( 6): Result.002 file - promoters60/1030209
aaaaac

SEQ ID NO: 102758 - DNA, 12 bp, Unknown
  misc_feature (1)..( 12): Result.002 file - promoters60/1030259
ttttatttctat

SEQ ID NO: 102759 - DNA, 12 bp, Unknown
  misc_feature (1)..( 12): Result.002 file - promoters60/1030259
atttatttggat

SEQ ID NO: 102760 - DNA, 12 bp, Unknown
  misc_feature (1)..( 12): Result.002 file - promoters60/1030259
atttatttatat

SEQ ID NO: 102761 - DNA, 13 bp, Unknown
  misc_feature (1)..( 13): Result.002 file - promoters60/1030259
tttctattgcaac

SEQ ID NO: 102762 - DNA, 7 bp, Unknown
  misc_feature (1)..( 7): Result.002 file - promoters60/1030336
cgccgcc

SEQ ID NO: 102763 - DNA, 7 bp, Unknown
  misc_feature (1)..( 7): Result.002 file - promoters60/1030336
cgccgcc

SEQ ID NO: 102764 - DNA, 10 bp, Unknown
  misc_feature (1)..( 10): Result.002 file - promoters60/1030336
aatcattcaa

SEQ ID NO: 102765 - DNA, 10 bp, Unknown
  misc_feature (1)..( 10): Result.002 file - promoters60/1030336
aatccttcaa

SEQ ID NO: 102766 - DNA, 7 bp, Unknown
  misc_feature (1)..( 7): Result.002 file - promoters60/1030336
caatttc

SEQ ID NO: 102767 - DNA, 7 bp, Unknown
  misc_feature (1)..( 7): Result.002 file - promoters60/1030336
caaattc

SEQ ID NO: 102768 - DNA, 12 bp, Unknown
  misc_feature (1)..( 12): Result.002 file - promoters60/1030336
cgtcaaaaagaa

SEQ ID NO: 102769 - DNA, 12 bp, Unknown
  misc_feature (1)..( 12): Result.002 file - promoters60/1030336
ggtaaaacagaa

SEQ ID NO: 102770 - DNA, 13 bp, Unknown
  misc_feature (1)..( 13): Result.002 file - promoters60/1030336
aggtaaaccagat

SEQ ID NO: 102771 - DNA, 8 bp, Unknown
  misc_feature (1)..( 8): Result.002 file - promoters60/1030336
tttaagaa

SEQ ID NO: 102772 - DNA, 8 bp, Unknown
  misc_feature (1)..( 8): Result.002 file - promoters60/1030336
tttatgaa

SEQ ID NO: 102773 - DNA, 6 bp, Unknown
  misc_feature (1)..( 6): Result.002 file - promoters60/1030336
gtttcg

SEQ ID NO: 102774 - DNA, 6 bp, Unknown
  misc_feature (1)..( 6): Result.002 file - promoters60/1030336
gtttcg

SEQ ID NO: 102775 - DNA, 7 bp, Unknown
  misc_feature (1)..( 7): Result.002 file - promoters60/1030336
cgccttt

SEQ ID NO: 102776 - DNA, 7 bp, Unknown
  misc_feature (1)..( 7): Result.002 file - promoters60/1030336
cgccttt

SEQ ID NO: 102777 - DNA, 6 bp, Unknown
  misc_feature (1)..( 6): Result.002 file - promoters60/1030336
aatttc

SEQ ID NO: 102778 - DNA, 6 bp, Unknown
  misc_feature (1)..( 6): Result.002 file - promoters60/1030336
aatttc

SEQ ID NO: 102779 - DNA, 8 bp, Unknown
  misc_feature (1)..( 8): Result.002 file - promoters60/1030336
ccagaaga

SEQ ID NO: 102780 - DNA, 8 bp, Unknown
  misc_feature (1)..( 8): Result.002 file - promoters60/1030336
ccaaaaga

SEQ ID NO: 102781 - DNA, 6 bp, Unknown
  misc_feature (1)..( 6): Result.002 file - promoters60/1030336
aagaga

SEQ ID NO: 102782 - DNA, 6 bp, Unknown
  misc_feature (1)..( 6): Result.002 file - promoters60/1030336
aagaga

SEQ ID NO: 102783 - DNA, 7 bp, Unknown
  misc_feature (1)..( 7): Result.002 file - promoters60/1030336
atcatcg

SEQ ID NO: 102784 - DNA, 7 bp, Unknown
  misc_feature (1)..( 7): Result.002 file - promoters60/1030336
atcatcg

SEQ ID NO: 102785 - DNA, 6 bp, Unknown
  misc_feature (1)..( 6): Result.002 file - promoters60/1030336
cggtta

SEQ ID NO: 102786 - DNA, 6 bp, Unknown
  misc_feature (1)..( 6): Result.002 file - promoters60/1030336
cggtta

SEQ ID NO: 102787 - DNA, 8 bp, Unknown
  misc_feature (1)..( 8): Result.002 file - promoters60/1030428
tgttttta

SEQ ID NO: 102788 - DNA, 8 bp, Unknown
  misc_feature (1)..( 8): Result.002 file - promoters60/1030428
tattttta

SEQ ID NO: 102789 - DNA, 8 bp, Unknown
  misc_feature (1)..( 8): Result.002 file - promoters60/1030428
tatatttc

SEQ ID NO: 102790 - DNA, 8 bp, Unknown
  misc_feature (1)..( 8): Result.002 file - promoters60/1030428
atatgtga

SEQ ID NO: 102791 - DNA, 8 bp, Unknown
  misc_feature (1)..( 8): Result.002 file - promoters60/1030428
atatgtta

SEQ ID NO: 102792 - DNA, 8 bp, Unknown
  misc_feature (1)..( 8): Result.002 file - promoters60/1030428
ttatttta

SEQ ID NO: 102793 - DNA, 7 bp, Unknown
  misc_feature (1)..( 7): Result.002 file - promoters60/1030428
tataaag

SEQ ID NO: 102794 - DNA, 7 bp, Unknown
  misc_feature (1)..( 7): Result.002 file - promoters60/1030428
aataaag

SEQ ID NO: 102795 - DNA, 7 bp, Unknown
  misc_feature (1)..( 7): Result.002 file - promoters60/1030428
tataaac

SEQ ID NO: 102796 - DNA, 9 bp, Unknown
  misc_feature (1)..( 9): Result.002 file - promoters60/1030428
tgttatata

SEQ ID NO: 102797 - DNA, 9 bp, Unknown
  misc_feature (1)..( 9): Result.002 file - promoters60/1030428
gattacata

SEQ ID NO: 102798 - DNA, 9 bp, Unknown
  misc_feature (1)..( 9): Result.002 file - promoters60/1030428
gattacagc

SEQ ID NO: 102799 - DNA, 7 bp, Unknown
  misc_feature (1)..( 7): Result.002 file - promoters60/1030428
taaagaa

SEQ ID NO: 102800 - DNA, 7 bp, Unknown
  misc_feature (1)..( 7): Result.002 file - promoters60/1030428
aaaagaa

SEQ ID NO: 102801 - DNA, 7 bp, Unknown
  misc_feature (1)..( 7): Result.002 file - promoters60/1030428
aaaagag

SEQ ID NO: 102802 - DNA, 8 bp, Unknown
  misc_feature (1)..( 8): Result.002 file - promoters60/1030428
tgtgtttt

SEQ ID NO: 102803 - DNA, 8 bp, Unknown
  misc_feature (1)..( 8): Result.002 file - promoters60/1030428
cttgtttt

SEQ ID NO: 102804 - DNA, 8 bp, Unknown
  misc_feature (1)..( 8): Result.002 file - promoters60/1030428
cttatttc

SEQ ID NO: 102805 - DNA, 7 bp, Unknown
  misc_feature (1)..( 7): Result.002 file - promoters60/1030528
ttaaaaa

SEQ ID NO: 102806 - DNA, 7 bp, Unknown
  misc_feature (1)..( 7): Result.002 file - promoters60/1030528
ttaaaac

SEQ ID NO: 102807 - DNA, 7 bp, Unknown
  misc_feature (1)..( 7): Result.002 file - promoters60/1030528
ctaaaaa

SEQ ID NO: 102808 - DNA, 7 bp, Unknown
  misc_feature (1)..( 7): Result.002 file - promoters60/1030528
ttaaaat

SEQ ID NO: 102809 - DNA, 9 bp, Unknown
  misc_feature (1)..( 9): Result.002 file - promoters60/1030528
atactaatt

SEQ ID NO: 102810 - DNA, 9 bp, Unknown
  misc_feature (1)..( 9): Result.002 file - promoters60/1030528
ataataatt

SEQ ID NO: 102811 - DNA, 9 bp, Unknown
  misc_feature (1)..( 9): Result.002 file - promoters60/1030528
agaataatg

SEQ ID NO: 102812 - DNA, 13 bp, Unknown
  misc_feature (1)..( 13): Result.002 file - promoters60/1030528
ttatttttttaaa

SEQ ID NO: 102813 - DNA, 13 bp, Unknown
  misc_feature (1)..( 13): Result.002 file - promoters60/1030528
ttatatttttaat

SEQ ID NO: 102814 - DNA, 13 bp, Unknown
  misc_feature (1)..( 13): Result.002 file - promoters60/1030528
caatgcatttaaa

SEQ ID NO: 102815 - DNA, 13 bp, Unknown
  misc_feature (1)..( 13): Result.002 file - promoters60/1030528
tctaattcttatc

SEQ ID NO: 102816 - DNA, 7 bp, Unknown
  misc_feature (1)..( 7): Result.002 file - promoters60/1030528
aaacgtt

SEQ ID NO: 102817 - DNA, 7 bp, Unknown
  misc_feature (1)..( 7): Result.002 file - promoters60/1030528
aaaagtt

SEQ ID NO: 102818 - DNA, 7 bp, Unknown
  misc_feature (1)..( 7): Result.002 file - promoters60/1030528
aaaagtc

SEQ ID NO: 102819 - DNA, 9 bp, Unknown
  misc_feature (1)..( 9): Result.002 file - promoters60/1030528
tataaaacc

SEQ ID NO: 102820 - DNA, 9 bp, Unknown
  misc_feature (1)..( 9): Result.002 file - promoters60/1030528
tataaacac

SEQ ID NO: 102821 - DNA, 9 bp, Unknown
  misc_feature (1)..( 9): Result.002 file - promoters60/1030528
tataaaacc

SEQ ID NO: 102822 - DNA, 17 bp, Unknown
  misc_feature (1)..( 17): Result.002 file - promoters60/1030530
ttttaattttttaaata

SEQ ID NO: 102823 - DNA, 17 bp, Unknown
  misc_feature (1)..( 17): Result.002 file - promoters60/1030530
ttttcattattttaata

SEQ ID NO: 102824 - DNA, 17 bp, Unknown
  misc_feature (1)..( 17): Result.002 file - promoters60/1030530
ttttaaacatgtatgaa

SEQ ID NO: 102825 - DNA, 17 bp, Unknown
  misc_feature (1)..( 17): Result.002 file - promoters60/1030530
tgttaattgtctccggc

SEQ ID NO: 102826 - DNA, 13 bp, Unknown
  misc_feature (1)..( 13): Result.002 file - promoters60/1030530
gacttgtaaattt

SEQ ID NO: 102827 - DNA, 13 bp, Unknown
  misc_feature (1)..( 13): Result.002 file - promoters60/1030530
aacttgtctgagt

SEQ ID NO: 102828 - DNA, 13 bp, Unknown
  misc_feature (1)..( 13): Result.002 file - promoters60/1030530
aacatgtatgaat

SEQ ID NO: 102829 - DNA, 13 bp, Unknown
  misc_feature (1)..( 13): Result.002 file - promoters60/1030530
ggcgactatgaat

SEQ ID NO: 102830 - DNA, 13 bp, Unknown
  misc_feature (1)..( 13): Result.002 file - promoters60/1030530
aaaacgtatgaac

SEQ ID NO: 102831 - DNA, 13 bp, Unknown
  misc_feature (1)..( 13): Result.002 file - promoters60/1030530
aacatgtatgaat

SEQ ID NO: 102832 - DNA, 13 bp, Unknown
  misc_feature (1)..( 13): Result.002 file - promoters60/1030530
aaaacgtatgaac

SEQ ID NO: 102833 - DNA, 13 bp, Unknown
  misc_feature (1)..( 13): Result.002 file - promoters60/1030530
aacttgtctgagt

SEQ ID NO: 102834 - DNA, 13 bp, Unknown
  misc_feature (1)..( 13): Result.002 file - promoters60/1030530
ggcgactatgaat

SEQ ID NO: 102835 - DNA, 14 bp, Unknown
  misc_feature (1)..( 14): Result.002 file - promoters60/1030547
tgcattagttcttc

SEQ ID NO: 102836 - DNA, 14 bp, Unknown
  misc_feature (1)..( 14): Result.002 file - promoters60/1030547
taaatttgttatgt

SEQ ID NO: 102837 - DNA, 14 bp, Unknown
  misc_feature (1)..( 14): Result.002 file - promoters60/1030547
gttattagttaacc

SEQ ID NO: 102838 - DNA, 14 bp, Unknown
  misc_feature (1)..( 14): Result.002 file - promoters60/1030547
attattatttctcg

SEQ ID NO: 102839 - DNA, 14 bp, Unknown
  misc_feature (1)..( 14): Result.002 file - promoters60/1030547
taaattttttaaaa

SEQ ID NO: 102840 - DNA, 14 bp, Unknown
  misc_feature (1)..( 14): Result.002 file - promoters60/1030547
tatacgttttaaaa

SEQ ID NO: 102841 - DNA, 14 bp, Unknown
  misc_feature (1)..( 14): Result.002 file - promoters60/1030547
gaaatttcctcgct

SEQ ID NO: 102842 - DNA, 15 bp, Unknown
  misc_feature (1)..( 15): Result.002 file - promoters60/1030547
aattcgaatttttca

SEQ ID NO: 102843 - DNA, 15 bp, Unknown
  misc_feature (1)..( 15): Result.002 file - promoters60/1030547
ggccggaattttagt

SEQ ID NO: 102844 - DNA, 15 bp, Unknown
  misc_feature (1)..( 15): Result.002 file - promoters60/1030547
atttgaaattttcat

SEQ ID NO: 102845 - DNA, 15 bp, Unknown
  misc_feature (1)..( 15): Result.002 file - promoters60/1030547
gaatgaaatctgtcc

SEQ ID NO: 102846 - DNA, 15 bp, Unknown
  misc_feature (1)..( 15): Result.002 file - promoters60/1030547
cgcctaaataaaaaa

SEQ ID NO: 102847 - DNA, 15 bp, Unknown
  misc_feature (1)..( 15): Result.002 file - promoters60/1030547
aggaaaaatcaaaaa

SEQ ID NO: 102848 - DNA, 20 bp, Unknown
  misc_feature (1)..( 20): Result.002 file - promoters60/1030547
attcgaatttttcaatattt

SEQ ID NO: 102849 - DNA, 20 bp, Unknown
  misc_feature (1)..( 20): Result.002 file - promoters60/1030547
tttagtctattttaattcgt

SEQ ID NO: 102850 - DNA, 20 bp, Unknown
  misc_feature (1)..( 20): Result.002 file - promoters60/1030547
atttgaaattttcataaact

SEQ ID NO: 102851 - DNA, 20 bp, Unknown
  misc_feature (1)..( 20): Result.002 file - promoters60/1030547
caatcccaattctaacaatg

SEQ ID NO: 102852 - DNA, 20 bp, Unknown
  misc_feature (1)..( 20): Result.002 file - promoters60/1030547
tagaaaagaatgaaatctgt

SEQ ID NO: 102853 - DNA, 20 bp, Unknown
  misc_feature (1)..( 20): Result.002 file - promoters60/1030547
aaagacgcgcctaaataaaa

SEQ ID NO: 102854 - DNA, 20 bp, Unknown
  misc_feature (1)..( 20): Result.002 file - promoters60/1030547
aaaggaaaaatcaaaaatcc

SEQ ID NO: 102855 - DNA, 11 bp, Unknown
  misc_feature (1)..( 11): Result.002 file - promoters60/1030547
ttttgaagaat

SEQ ID NO: 102856 - DNA, 11 bp, Unknown
  misc_feature (1)..( 11): Result.002 file - promoters60/1030547
ttttgatgaat

SEQ ID NO: 102857 - DNA, 11 bp, Unknown
  misc_feature (1)..( 11): Result.002 file - promoters60/1030547
gtttgaatcgt

SEQ ID NO: 102858 - DNA, 11 bp, Unknown
  misc_feature (1)..( 11): Result.002 file - promoters60/1030547
atttgctgaat

SEQ ID NO: 102859 - DNA, 11 bp, Unknown
  misc_feature (1)..( 11): Result.002 file - promoters60/1030547
aaaagatgaag

SEQ ID NO: 102860 - DNA, 11 bp, Unknown
  misc_feature (1)..( 11): Result.002 file - promoters60/1030547
tttcgatgtat

SEQ ID NO: 102861 - DNA, 19 bp, Unknown
  misc_feature (1)..( 19): Result.002 file - promoters60/1030547
ataaaaatgttagatagga

SEQ ID NO: 102862 - DNA, 19 bp, Unknown
  misc_feature (1)..( 19): Result.002 file - promoters60/1030547
tcataaattttaaaattat

SEQ ID NO: 102863 - DNA, 19 bp, Unknown
  misc_feature (1)..( 19): Result.002 file - promoters60/1030547
tgttaaatatgaatattac

SEQ ID NO: 102864 - DNA, 20 bp, Unknown
  misc_feature (1)..( 20): Result.002 file - promoters60/1030547
atgtaaattttgaaataatt

SEQ ID NO: 102865 - DNA, 20 bp, Unknown
  misc_feature (1)..( 20): Result.002 file - promoters60/1030547
tgagaaatagatttgaaaaa

SEQ ID NO: 102866 - DNA, 20 bp, Unknown
  misc_feature (1)..( 20): Result.002 file - promoters60/1030547
ttttaaattttttaaaatat

SEQ ID NO: 102867 - DNA, 11 bp, Unknown
  misc_feature (1)..( 11): Result.002 file - promoters60/1030547
cttatataaac

SEQ ID NO: 102868 - DNA, 11 bp, Unknown
  misc_feature (1)..( 11): Result.002 file - promoters60/1030547
tatatataata

SEQ ID NO: 102869 - DNA, 11 bp, Unknown
  misc_feature (1)..( 11): Result.002 file - promoters60/1030547
agtatataaac

SEQ ID NO: 102870 - DNA, 11 bp, Unknown
  misc_feature (1)..( 11): Result.002 file - promoters60/1030547
tataaataaaa

SEQ ID NO: 102871 - DNA, 11 bp, Unknown
  misc_feature (1)..( 11): Result.002 file - promoters60/1030547
tgtatataaat

SEQ ID NO: 102872 - DNA, 11 bp, Unknown
  misc_feature (1)..( 11): Result.002 file - promoters60/1030547
gctataaaaac

SEQ ID NO: 102873 - DNA, 11 bp, Unknown
  misc_feature (1)..( 11): Result.002 file - promoters60/1030547
cccataaaagc

SEQ ID NO: 102874 - DNA, 11 bp, Unknown
  misc_feature (1)..( 11): Result.002 file - promoters60/1030547
gataaatatcc

SEQ ID NO: 102875 - DNA, 12 bp, Unknown
  misc_feature (1)..( 12): Result.002 file - promoters60/1030547
tatataaacaaa

SEQ ID NO: 102876 - DNA, 12 bp, Unknown
  misc_feature (1)..( 12): Result.002 file - promoters60/1030547
ataataaccaaa

SEQ ID NO: 102877 - DNA, 12 bp, Unknown
  misc_feature (1)..( 12): Result.002 file - promoters60/1030547
tatataaactct

SEQ ID NO: 102878 - DNA, 12 bp, Unknown
  misc_feature (1)..( 12): Result.002 file - promoters60/1030547
tttataaataaa

SEQ ID NO: 102879 - DNA, 12 bp, Unknown
  misc_feature (1)..( 12): Result.002 file - promoters60/1030547
tatataaatgac

SEQ ID NO: 102880 - DNA, 12 bp, Unknown
  misc_feature (1)..( 12): Result.002 file - promoters60/1030547
gctataaaaacc

SEQ ID NO: 102881 - DNA, 12 bp, Unknown
  misc_feature (1)..( 12): Result.002 file - promoters60/1030547
cccataaaagca

SEQ ID NO: 102882 - DNA, 11 bp, Unknown
  misc_feature (1)..( 11): Result.002 file - promoters60/1030547
caaaatttgta

SEQ ID NO: 102883 - DNA, 11 bp, Unknown
  misc_feature (1)..( 11): Result.002 file - promoters60/1030547
caatattttaa

SEQ ID NO: 102884 - DNA, 11 bp, Unknown
  misc_feature (1)..( 11): Result.002 file - promoters60/1030547
gaatatgtttt

SEQ ID NO: 102885 - DNA, 11 bp, Unknown
  misc_feature (1)..( 11): Result.002 file - promoters60/1030547
aattattttac

SEQ ID NO: 102886 - DNA, 12 bp, Unknown
  misc_feature (1)..( 12): Result.002 file - promoters60/1030547
atttagtttgaa

SEQ ID NO: 102887 - DNA, 12 bp, Unknown
  misc_feature (1)..( 12): Result.002 file - promoters60/1030547
ggctgattttac

SEQ ID NO: 102888 - DNA, 12 bp, Unknown
  misc_feature (1)..( 12): Result.002 file - promoters60/1030547
agatagtatata

SEQ ID NO: 102889 - DNA, 19 bp, Unknown
  misc_feature (1)..( 19): Result.002 file - promoters60/1030547
gataggaaaaagttgttac

SEQ ID NO: 102890 - DNA, 19 bp, Unknown
  misc_feature (1)..( 19): Result.002 file - promoters60/1030547
gcccagaaaaagctgattg

SEQ ID NO: 102891 - DNA, 19 bp, Unknown
  misc_feature (1)..( 19): Result.002 file - promoters60/1030547
gatttgaaaaacagacaac

SEQ ID NO: 102892 - DNA, 19 bp, Unknown
  misc_feature (1)..( 19): Result.002 file - promoters60/1030547
gatagtaaaaaaagagatc

SEQ ID NO: 102893 - DNA, 19 bp, Unknown
  misc_feature (1)..( 19): Result.002 file - promoters60/1030547
attttcataaattttaaaa

SEQ ID NO: 102894 - DNA, 19 bp, Unknown
  misc_feature (1)..( 19): Result.002 file - promoters60/1030547
gaaactaagattataattt

SEQ ID NO: 102895 - DNA, 10 bp, Unknown
  misc_feature (1)..( 10): Result.002 file - promoters60/1030547
gttatttttg

SEQ ID NO: 102896 - DNA, 10 bp, Unknown
  misc_feature (1)..( 10): Result.002 file - promoters60/1030547
tttagtttga

SEQ ID NO: 102897 - DNA, 10 bp, Unknown
  misc_feature (1)..( 10): Result.002 file - promoters60/1030547
gttttttttt

SEQ ID NO: 102898 - DNA, 10 bp, Unknown
  misc_feature (1)..( 10): Result.002 file - promoters60/1030547
attattttac

SEQ ID NO: 102899 - DNA, 10 bp, Unknown
  misc_feature (1)..( 10): Result.002 file - promoters60/1030547
ctgattttac

SEQ ID NO: 102900 - DNA, 10 bp, Unknown
  misc_feature (1)..( 10): Result.002 file - promoters60/1030547
aatattttaa

SEQ ID NO: 102901 - DNA, 8 bp, Unknown
  misc_feature (1)..( 8): Result.002 file - promoters60/1030547
aaatcctc

SEQ ID NO: 102902 - DNA, 8 bp, Unknown
  misc_feature (1)..( 8): Result.002 file - promoters60/1030547
aaaacctt

SEQ ID NO: 102903 - DNA, 8 bp, Unknown
  misc_feature (1)..( 8): Result.002 file - promoters60/1030547
aaaccctt

SEQ ID NO: 102904 - DNA, 8 bp, Unknown
  misc_feature (1)..( 8): Result.002 file - promoters60/1030547
aaagcctg

SEQ ID NO: 102905 - DNA, 8 bp, Unknown
  misc_feature (1)..( 8): Result.002 file - promoters60/1030547
taaacctg

SEQ ID NO: 102906 - DNA, 8 bp, Unknown
  misc_feature (1)..( 8): Result.002 file - promoters60/1030547
ttaacctt

SEQ ID NO: 102907 - DNA, 9 bp, Unknown
  misc_feature (1)..( 9): Result.002 file - promoters60/1030581
aatgtgaaa

SEQ ID NO: 102908 - DNA, 9 bp, Unknown
  misc_feature (1)..( 9): Result.002 file - promoters60/1030581
aatttgaaa

SEQ ID NO: 102909 - DNA, 9 bp, Unknown
  misc_feature (1)..( 9): Result.002 file - promoters60/1030581
gttttgaag

SEQ ID NO: 102910 - DNA, 10 bp, Unknown
  misc_feature (1)..( 10): Result.002 file - promoters60/1030581
agtttagaac

SEQ ID NO: 102911 - DNA, 14 bp, Unknown
  misc_feature (1)..( 14): Result.002 file - promoters60/1030605
ggagactataagct

SEQ ID NO: 102912 - DNA, 14 bp, Unknown
  misc_feature (1)..( 14): Result.002 file - promoters60/1030605
ttaaactatagttg

SEQ ID NO: 102913 - DNA, 14 bp, Unknown
  misc_feature (1)..( 14): Result.002 file - promoters60/1030605
tagtactatcgttt

SEQ ID NO: 102914 - DNA, 14 bp, Unknown
  misc_feature (1)..( 14): Result.002 file - promoters60/1030605
ttaaaatatattta

SEQ ID NO: 102915 - DNA, 14 bp, Unknown
  misc_feature (1)..( 14): Result.002 file - promoters60/1030605
ttgacatattttta

SEQ ID NO: 102916 - DNA, 14 bp, Unknown
  misc_feature (1)..( 14): Result.002 file - promoters60/1030605
ataagctagtatcg

SEQ ID NO: 102917 - DNA, 14 bp, Unknown
  misc_feature (1)..( 14): Result.002 file - promoters60/1030605
ttaaactatagttg

SEQ ID NO: 102918 - DNA, 14 bp, Unknown
  misc_feature (1)..( 14): Result.002 file - promoters60/1030605
aaaaactaaatgat

SEQ ID NO: 102919 - DNA, 14 bp, Unknown
  misc_feature (1)..( 14): Result.002 file - promoters60/1030605
ttaaaatatattta

SEQ ID NO: 102920 - DNA, 14 bp, Unknown
  misc_feature (1)..( 14): Result.002 file - promoters60/1030605
ttgacatattttta

SEQ ID NO: 102921 - DNA, 12 bp, Unknown
  misc_feature (1)..( 12): Result.002 file - promoters60/1030605
caaataaaacag

SEQ ID NO: 102922 - DNA, 12 bp, Unknown
  misc_feature (1)..( 12): Result.002 file - promoters60/1030605
aaaataataatc

SEQ ID NO: 102923 - DNA, 12 bp, Unknown
  misc_feature (1)..( 12): Result.002 file - promoters60/1030605
aaaaaaaaatac

SEQ ID NO: 102924 - DNA, 12 bp, Unknown
  misc_feature (1)..( 12): Result.002 file - promoters60/1030605
caactaatttgt

SEQ ID NO: 102925 - DNA, 12 bp, Unknown
  misc_feature (1)..( 12): Result.002 file - promoters60/1030605
gaaaaattcaac

SEQ ID NO: 102926 - DNA, 12 bp, Unknown
  misc_feature (1)..( 12): Result.002 file - promoters60/1030605
caaaaaaagaat

SEQ ID NO: 102927 - DNA, 15 bp, Unknown
  misc_feature (1)..( 15): Result.002 file - promoters60/1030605
aaattttgaaatcat

SEQ ID NO: 102928 - DNA, 15 bp, Unknown
  misc_feature (1)..( 15): Result.002 file - promoters60/1030605
tcattttgacatcat

SEQ ID NO: 102929 - DNA, 15 bp, Unknown
  misc_feature (1)..( 15): Result.002 file - promoters60/1030605
aaattttattgcttg

SEQ ID NO: 102930 - DNA, 15 bp, Unknown
  misc_feature (1)..( 15): Result.002 file - promoters60/1030605
tgtttttgaacttat

SEQ ID NO: 102931 - DNA, 15 bp, Unknown
  misc_feature (1)..( 15): Result.002 file - promoters60/1030605
ttgttttgatcgctt

SEQ ID NO: 102932 - DNA, 15 bp, Unknown
  misc_feature (1)..( 15): Result.002 file - promoters60/1030605
tatatttaatcagaa

SEQ ID NO: 102933 - DNA, 15 bp, Unknown
  misc_feature (1)..( 15): Result.002 file - promoters60/1030605
cacgattgacatatt

SEQ ID NO: 102934 - DNA, 8 bp, Unknown
  misc_feature (1)..( 8): Result.002 file - promoters60/1030605
aacaaata

SEQ ID NO: 102935 - DNA, 8 bp, Unknown
  misc_feature (1)..( 8): Result.002 file - promoters60/1030605
gacaaatg

SEQ ID NO: 102936 - DNA, 8 bp, Unknown
  misc_feature (1)..( 8): Result.002 file - promoters60/1030605
aactaatt

SEQ ID NO: 102937 - DNA, 8 bp, Unknown
  misc_feature (1)..( 8): Result.002 file - promoters60/1030605
tcctaatt

SEQ ID NO: 102938 - DNA, 8 bp, Unknown
  misc_feature (1)..( 8): Result.002 file - promoters60/1030605
gacaaagt

SEQ ID NO: 102939 - DNA, 11 bp, Unknown
  misc_feature (1)..( 11): Result.002 file - promoters60/1030605
tttgaaaagga

SEQ ID NO: 102940 - DNA, 11 bp, Unknown
  misc_feature (1)..( 11): Result.002 file - promoters60/1030605
tttgcaaattt

SEQ ID NO: 102941 - DNA, 11 bp, Unknown
  misc_feature (1)..( 11): Result.002 file - promoters60/1030605
tctgaaaaact

SEQ ID NO: 102942 - DNA, 11 bp, Unknown
  misc_feature (1)..( 11): Result.002 file - promoters60/1030605
gatgaaaaatt

SEQ ID NO: 102943 - DNA, 12 bp, Unknown
  misc_feature (1)..( 12): Result.002 file - promoters60/1030605
gttgaagaaaaa

SEQ ID NO: 102944 - DNA, 7 bp, Unknown
  misc_feature (1)..( 7): Result.002 file - promoters60/1030605
aaataaa

SEQ ID NO: 102945 - DNA, 7 bp, Unknown
  misc_feature (1)..( 7): Result.002 file - promoters60/1030605
aaataat

SEQ ID NO: 102946 - DNA, 7 bp, Unknown
  misc_feature (1)..( 7): Result.002 file - promoters60/1030605
agatata

SEQ ID NO: 102947 - DNA, 7 bp, Unknown
  misc_feature (1)..( 7): Result.002 file - promoters60/1030605
atatata

SEQ ID NO: 102948 - DNA, 7 bp, Unknown
  misc_feature (1)..( 7): Result.002 file - promoters60/1030605
atatata

SEQ ID NO: 102949 - DNA, 8 bp, Unknown
  misc_feature (1)..( 8): Result.002 file - promoters60/1030605
aaagtaaa

SEQ ID NO: 102950 - DNA, 11 bp, Unknown
  misc_feature (1)..( 11): Result.002 file - promoters60/1030605
aaatattttga

SEQ ID NO: 102951 - DNA, 11 bp, Unknown
  misc_feature (1)..( 11): Result.002 file - promoters60/1030605
atatatttata

SEQ ID NO: 102952 - DNA, 11 bp, Unknown
  misc_feature (1)..( 11): Result.002 file - promoters60/1030605
ataaattagaa

SEQ ID NO: 102953 - DNA, 11 bp, Unknown
  misc_feature (1)..( 11): Result.002 file - promoters60/1030605
atatatattac

SEQ ID NO: 102954 - DNA, 11 bp, Unknown
  misc_feature (1)..( 11): Result.002 file - promoters60/1030605
ttttattcata

SEQ ID NO: 102955 - DNA, 11 bp, Unknown
  misc_feature (1)..( 11): Result.002 file - promoters60/1030605
tcataattatc

SEQ ID NO: 102956 - DNA, 11 bp, Unknown
  misc_feature (1)..( 11): Result.002 file - promoters60/1030605
taaattagaat

SEQ ID NO: 102957 - DNA, 11 bp, Unknown
  misc_feature (1)..( 11): Result.002 file - promoters60/1030605
ataaatagaat

SEQ ID NO: 102958 - DNA, 11 bp, Unknown
  misc_feature (1)..( 11): Result.002 file - promoters60/1030605
gttaattgaaa

SEQ ID NO: 102959 - DNA, 11 bp, Unknown
  misc_feature (1)..( 11): Result.002 file - promoters60/1030605
ttacttggaaa

SEQ ID NO: 102960 - DNA, 11 bp, Unknown
  misc_feature (1)..( 11): Result.002 file - promoters60/1030605
cgacttggtcc

SEQ ID NO: 102961 - DNA, 16 bp, Unknown
  misc_feature (1)..( 16): Result.002 file - promoters60/1030605
ccttctataaaaagga

SEQ ID NO: 102962 - DNA, 16 bp, Unknown
  misc_feature (1)..( 16): Result.002 file - promoters60/1030605
cctactatataaactc

SEQ ID NO: 102963 - DNA, 16 bp, Unknown
  misc_feature (1)..( 16): Result.002 file - promoters60/1030605
ctctctatatataaag

SEQ ID NO: 102964 - DNA, 16 bp, Unknown
  misc_feature (1)..( 16): Result.002 file - promoters60/1030605
ttagctataaaaggag

SEQ ID NO: 102965 - DNA, 16 bp, Unknown
  misc_feature (1)..( 16): Result.002 file - promoters60/1030605
ataagtatatatactc

SEQ ID NO: 102966 - DNA, 10 bp, Unknown
  misc_feature (1)..( 10): Result.002 file - promoters60/1030605
tatttagaaa

SEQ ID NO: 102967 - DNA, 10 bp, Unknown
  misc_feature (1)..( 10): Result.002 file - promoters60/1030605
tattgagata

SEQ ID NO: 102968 - DNA, 10 bp, Unknown
  misc_feature (1)..( 10): Result.002 file - promoters60/1030605
tatttaatca

SEQ ID NO: 102969 - DNA, 10 bp, Unknown
  misc_feature (1)..( 10): Result.002 file - promoters60/1030605
tttttataaa

SEQ ID NO: 102970 - DNA, 10 bp, Unknown
  misc_feature (1)..( 10): Result.002 file - promoters60/1030605
tattttttgg

SEQ ID NO: 102971 - DNA, 8 bp, Unknown
  misc_feature (1)..( 8): Result.002 file - promoters60/1030616
ttctattc

SEQ ID NO: 102972 - DNA, 8 bp, Unknown
  misc_feature (1)..( 8): Result.002 file - promoters60/1030616
ttctataa

SEQ ID NO: 102973 - DNA, 8 bp, Unknown
  misc_feature (1)..( 8): Result.002 file - promoters60/1030616
gtctataa

SEQ ID NO: 102974 - DNA, 6 bp, Unknown
  misc_feature (1)..( 6): Result.002 file - promoters60/1030616
tttgct

SEQ ID NO: 102975 - DNA, 6 bp, Unknown
  misc_feature (1)..( 6): Result.002 file - promoters60/1030616
tttgct

SEQ ID NO: 102976 - DNA, 7 bp, Unknown
  misc_feature (1)..( 7): Result.002 file - promoters60/1030616
gaaattt

SEQ ID NO: 102977 - DNA, 7 bp, Unknown
  misc_feature (1)..( 7): Result.002 file - promoters60/1030616
gaaatta

SEQ ID NO: 102978 - DNA, 7 bp, Unknown
  misc_feature (1)..( 7): Result.002 file - promoters60/1030616
aaaatat

SEQ ID NO: 102979 - DNA, 6 bp, Unknown
  misc_feature (1)..( 6): Result.002 file - promoters60/1030616
atttgt

SEQ ID NO: 102980 - DNA, 6 bp, Unknown
  misc_feature (1)..( 6): Result.002 file - promoters60/1030616
atttgt

SEQ ID NO: 102981 - DNA, 7 bp, Unknown
  misc_feature (1)..( 7): Result.002 file - promoters60/1030616
tgtaaat

SEQ ID NO: 102982 - DNA, 7 bp, Unknown
  misc_feature (1)..( 7): Result.002 file - promoters60/1030616
tgtaaaa

SEQ ID NO: 102983 - DNA, 7 bp, Unknown
  misc_feature (1)..( 7): Result.002 file - promoters60/1030616
tgttaat

SEQ ID NO: 102984 - DNA, 10 bp, Unknown
  misc_feature (1)..( 10): Result.002 file - promoters60/1030616
ctacgattga

SEQ ID NO: 102985 - DNA, 10 bp, Unknown
  misc_feature (1)..( 10): Result.002 file - promoters60/1030616
ctacaattag

SEQ ID NO: 102986 - DNA, 10 bp, Unknown
  misc_feature (1)..( 10): Result.002 file - promoters60/1030616
ttccaattag

SEQ ID NO: 102987 - DNA, 6 bp, Unknown
  misc_feature (1)..( 6): Result.002 file - promoters60/1030616
gattta

SEQ ID NO: 102988 - DNA, 6 bp, Unknown
  misc_feature (1)..( 6): Result.002 file - promoters60/1030616
gattta

SEQ ID NO: 102989 - DNA, 6 bp, Unknown
  misc_feature (1)..( 6): Result.002 file - promoters60/1030616
aaatga

SEQ ID NO: 102990 - DNA, 6 bp, Unknown
  misc_feature (1)..( 6): Result.002 file - promoters60/1030616
aaatga

SEQ ID NO: 102991 - DNA, 10 bp, Unknown
  misc_feature (1)..( 10): Result.002 file - promoters60/1030616
ccggaatttt

SEQ ID NO: 102992 - DNA, 10 bp, Unknown
  misc_feature (1)..( 10): Result.002 file - promoters60/1030616
ccgaaatttt

SEQ ID NO: 102993 - DNA, 6 bp, Unknown
  misc_feature (1)..( 6): Result.002 file - promoters60/1030616
caaaaa

SEQ ID NO: 102994 - DNA, 6 bp, Unknown
  misc_feature (1)..( 6): Result.002 file - promoters60/1030616
caaaaa

SEQ ID NO: 102995 - DNA, 7 bp, Unknown
  misc_feature (1)..( 7): Result.002 file - promoters60/1030616
gccaaat

SEQ ID NO: 102996 - DNA, 7 bp, Unknown
  misc_feature (1)..( 7): Result.002 file - promoters60/1030616
gcccaat

SEQ ID NO: 102997 - DNA, 8 bp, Unknown
  misc_feature (1)..( 8): Result.002 file - promoters60/1030616
aaatcctc

SEQ ID NO: 102998 - DNA, 8 bp, Unknown
  misc_feature (1)..( 8): Result.002 file - promoters60/1030616
aaattctc

SEQ ID NO: 102999 - DNA, 8 bp, Unknown
  misc_feature (1)..( 8): Result.002 file - promoters60/1030616
taatttct

SEQ ID NO: 103000 - DNA, 8 bp, Unknown
  misc_feature (1)..( 8): Result.002 file - promoters60/1030616
aaatatct

SEQ ID NO: 103001 - DNA, 8 bp, Unknown
  misc_feature (1)..( 8): Result.002 file - promoters60/1030616
aaattata

SEQ ID NO: 103002 - DNA, 7 bp, Unknown
  misc_feature (1)..( 7): Result.002 file - promoters60/1030616
tttgtaa

SEQ ID NO: 103003 - DNA, 7 bp, Unknown
  misc_feature (1)..( 7): Result.002 file - promoters60/1030616
tttataa

SEQ ID NO: 103004 - DNA, 7 bp, Unknown
  misc_feature (1)..( 7): Result.002 file - promoters60/1030616
attataa

SEQ ID NO: 103005 - DNA, 6 bp, Unknown
  misc_feature (1)..( 6): Result.002 file - promoters60/1030616
ttgtta

SEQ ID NO: 103006 - DNA, 6 bp, Unknown
  misc_feature (1)..( 6): Result.002 file - promoters60/1030616
ttgtta

SEQ ID NO: 103007 - DNA, 7 bp, Unknown
  misc_feature (1)..( 7): Result.002 file - promoters60/1030616
ttttgaa

SEQ ID NO: 103008 - DNA, 7 bp, Unknown
  misc_feature (1)..( 7): Result.002 file - promoters60/1030616
ttttgat

SEQ ID NO: 103009 - DNA, 7 bp, Unknown
  misc_feature (1)..( 7): Result.002 file - promoters60/1030616
ttttatt

SEQ ID NO: 103010 - DNA, 8 bp, Unknown
  misc_feature (1)..( 8): Result.002 file - promoters60/1030616
agaccctt

SEQ ID NO: 103011 - DNA, 8 bp, Unknown
  misc_feature (1)..( 8): Result.002 file - promoters60/1030616
agactctt

SEQ ID NO: 103012 - DNA, 6 bp, Unknown
  misc_feature (1)..( 6): Result.002 file - promoters60/1030616
ttgaga

SEQ ID NO: 103013 - DNA, 6 bp, Unknown
  misc_feature (1)..( 6): Result.002 file - promoters60/1030616
ttgaga

SEQ ID NO: 103014 - DNA, 7 bp, Unknown
  misc_feature (1)..( 7): Result.002 file - promoters60/1030616
taaattg

SEQ ID NO: 103015 - DNA, 7 bp, Unknown
  misc_feature (1)..( 7): Result.002 file - promoters60/1030616
taagttg

SEQ ID NO: 103016 - DNA, 10 bp, Unknown
  misc_feature (1)..( 10): Result.002 file - promoters60/1030616
tctattttaa

SEQ ID NO: 103017 - DNA, 10 bp, Unknown
  misc_feature (1)..( 10): Result.002 file - promoters60/1030616
aaacttttaa

SEQ ID NO: 103018 - DNA, 10 bp, Unknown
  misc_feature (1)..( 10): Result.002 file - promoters60/1030616
aaactcttac

SEQ ID NO: 103019 - DNA, 6 bp, Unknown
  misc_feature (1)..( 6): Result.002 file - promoters60/1030616
atacct

SEQ ID NO: 103020 - DNA, 6 bp, Unknown
  misc_feature (1)..( 6): Result.002 file - promoters60/1030616
atacct

SEQ ID NO: 103021 - DNA, 7 bp, Unknown
  misc_feature (1)..( 7): Result.002 file - promoters60/1030616
aaagata

SEQ ID NO: 103022 - DNA, 7 bp, Unknown
  misc_feature (1)..( 7): Result.002 file - promoters60/1030616
aaacata

SEQ ID NO: 103023 - DNA, 9 bp, Unknown
  misc_feature (1)..( 9): Result.002 file - promoters60/1030616
taaaacatt

SEQ ID NO: 103024 - DNA, 9 bp, Unknown
  misc_feature (1)..( 9): Result.002 file - promoters60/1030616
taaaatatt

SEQ ID NO: 103025 - DNA, 8 bp, Unknown
  misc_feature (1)..( 8): Result.002 file - promoters60/1030616
ctttgcat

SEQ ID NO: 103026 - DNA, 8 bp, Unknown
  misc_feature (1)..( 8): Result.002 file - promoters60/1030616
ctttacat

SEQ ID NO: 103027 - DNA, 7 bp, Unknown
  misc_feature (1)..( 7): Result.002 file - promoters60/1030616
aaagaaa

SEQ ID NO: 103028 - DNA, 7 bp, Unknown
  misc_feature (1)..( 7): Result.002 file - promoters60/1030616
aaataaa

SEQ ID NO: 103029 - DNA, 6 bp, Unknown
  misc_feature (1)..( 6): Result.002 file - promoters60/1030616
ttacct

SEQ ID NO: 103030 - DNA, 6 bp, Unknown
  misc_feature (1)..( 6): Result.002 file - promoters60/1030616
ttacct

SEQ ID NO: 103031 - DNA, 9 bp, Unknown
  misc_feature (1)..( 9): Result.002 file - promoters60/1030699
ttaccatat

SEQ ID NO: 103032 - DNA, 9 bp, Unknown
  misc_feature (1)..( 9): Result.002 file - promoters60/1030699
ttaacatgg

SEQ ID NO: 103033 - DNA, 9 bp, Unknown
  misc_feature (1)..( 9): Result.002 file - promoters60/1030699
ttaacaaaa

SEQ ID NO: 103034 - DNA, 9 bp, Unknown
  misc_feature (1)..( 9): Result.002 file - promoters60/1030699
ttaagaaaa

SEQ ID NO: 103035 - DNA, 9 bp, Unknown
  misc_feature (1)..( 9): Result.002 file - promoters60/1030699
acaactttt

SEQ ID NO: 103036 - DNA, 9 bp, Unknown
  misc_feature (1)..( 9): Result.002 file - promoters60/1030699
gttactttt

SEQ ID NO: 103037 - DNA, 9 bp, Unknown
  misc_feature (1)..( 9): Result.002 file - promoters60/1030699
acaaatttt

SEQ ID NO: 103038 - DNA, 9 bp, Unknown
  misc_feature (1)..( 9): Result.002 file - promoters60/1030699
acaaaaaat

SEQ ID NO: 103039 - DNA, 15 bp, Unknown
  misc_feature (1)..( 15): Result.002 file - promoters60/1030699
tttattttttgaaat

SEQ ID NO: 103040 - DNA, 15 bp, Unknown
  misc_feature (1)..( 15): Result.002 file - promoters60/1030699
tttattatttcaaat

SEQ ID NO: 103041 - DNA, 15 bp, Unknown
  misc_feature (1)..( 15): Result.002 file - promoters60/1030699
tttacttttaacaaa

SEQ ID NO: 103042 - DNA, 15 bp, Unknown
  misc_feature (1)..( 15): Result.002 file - promoters60/1030699
tttatttcttggttc

SEQ ID NO: 103043 - DNA, 11 bp, Unknown
  misc_feature (1)..( 11): Result.002 file - promoters60/1030699
aacaaaaacaa

SEQ ID NO: 103044 - DNA, 11 bp, Unknown
  misc_feature (1)..( 11): Result.002 file - promoters60/1030699
gacataaattt

SEQ ID NO: 103045 - DNA, 11 bp, Unknown
  misc_feature (1)..( 11): Result.002 file - promoters60/1030699
aacaaaacaat

SEQ ID NO: 103046 - DNA, 11 bp, Unknown
  misc_feature (1)..( 11): Result.002 file - promoters60/1030699
aacgaaaccaa

SEQ ID NO: 103047 - DNA, 15 bp, Unknown
  misc_feature (1)..( 15): Result.002 file - promoters60/1030699
caaacttttattttt

SEQ ID NO: 103048 - DNA, 15 bp, Unknown
  misc_feature (1)..( 15): Result.002 file - promoters60/1030699
caaatttttactttt

SEQ ID NO: 103049 - DNA, 15 bp, Unknown
  misc_feature (1)..( 15): Result.002 file - promoters60/1030699
atgcttttgatttca

SEQ ID NO: 103050 - DNA, 15 bp, Unknown
  misc_feature (1)..( 15): Result.002 file - promoters60/1030699
catattcttaagcaa

SEQ ID NO: 103051 - DNA, 7 bp, Unknown
  misc_feature (1)..( 7): Result.002 file - promoters60/1030699
ttgtttt

SEQ ID NO: 103052 - DNA, 7 bp, Unknown
  misc_feature (1)..( 7): Result.002 file - promoters60/1030699
atgtttt

SEQ ID NO: 103053 - DNA, 7 bp, Unknown
  misc_feature (1)..( 7): Result.002 file - promoters60/1030699
atgtttg

SEQ ID NO: 103054 - DNA, 7 bp, Unknown
  misc_feature (1)..( 7): Result.002 file - promoters60/1030699
atgattg

SEQ ID NO: 103055 - DNA, 9 bp, Unknown
  misc_feature (1)..( 9): Result.002 file - promoters60/1030715
ttcataata

SEQ ID NO: 103056 - DNA, 9 bp, Unknown
  misc_feature (1)..( 9): Result.002 file - promoters60/1030715
agtataata

SEQ ID NO: 103057 - DNA, 9 bp, Unknown
  misc_feature (1)..( 9): Result.002 file - promoters60/1030715
ttcattata

SEQ ID NO: 103058 - DNA, 6 bp, Unknown
  misc_feature (1)..( 6): Result.002 file - promoters60/1030715
acaaag

SEQ ID NO: 103059 - DNA, 6 bp, Unknown
  misc_feature (1)..( 6): Result.002 file - promoters60/1030715
acaaag

SEQ ID NO: 103060 - DNA, 8 bp, Unknown
  misc_feature (1)..( 8): Result.002 file - promoters60/1030715
atgaattc

SEQ ID NO: 103061 - DNA, 8 bp, Unknown
  misc_feature (1)..( 8): Result.002 file - promoters60/1030715
atggattc

SEQ ID NO: 103062 - DNA, 7 bp, Unknown
  misc_feature (1)..( 7): Result.002 file - promoters60/1030715
aaattga

SEQ ID NO: 103063 - DNA, 7 bp, Unknown
  misc_feature (1)..( 7): Result.002 file - promoters60/1030715
aaattga

SEQ ID NO: 103064 - DNA, 7 bp, Unknown
  misc_feature (1)..( 7): Result.002 file - promoters60/1030715
atatttc

SEQ ID NO: 103065 - DNA, 7 bp, Unknown
  misc_feature (1)..( 7): Result.002 file - promoters60/1030715
ttatttc

SEQ ID NO: 103066 - DNA, 7 bp, Unknown
  misc_feature (1)..( 7): Result.002 file - promoters60/1030715
atatttt

SEQ ID NO: 103067 - DNA, 7 bp, Unknown
  misc_feature (1)..( 7): Result.002 file - promoters60/1030715
aagaatt

SEQ ID NO: 103068 - DNA, 7 bp, Unknown
  misc_feature (1)..( 7): Result.002 file - promoters60/1030715
aagaatg

SEQ ID NO: 103069 - DNA, 7 bp, Unknown
  misc_feature (1)..( 7): Result.002 file - promoters60/1030715
gagaatg

SEQ ID NO: 103070 - DNA, 7 bp, Unknown
  misc_feature (1)..( 7): Result.002 file - promoters60/1030715
gtttgtg

SEQ ID NO: 103071 - DNA, 7 bp, Unknown
  misc_feature (1)..( 7): Result.002 file - promoters60/1030715
gtttgtg

SEQ ID NO: 103072 - DNA, 6 bp, Unknown
  misc_feature (1)..( 6): Result.002 file - promoters60/1030715
tgctaa

SEQ ID NO: 103073 - DNA, 6 bp, Unknown
  misc_feature (1)..( 6): Result.002 file - promoters60/1030715
tgctaa

SEQ ID NO: 103074 - DNA, 8 bp, Unknown
  misc_feature (1)..( 8): Result.002 file - promoters60/1030715
taaaagtt

SEQ ID NO: 103075 - DNA, 8 bp, Unknown
  misc_feature (1)..( 8): Result.002 file - promoters60/1030715
taacagtt

SEQ ID NO: 103076 - DNA, 11 bp, Unknown
  misc_feature (1)..( 11): Result.002 file - promoters60/1030715
ttgttcttatt

SEQ ID NO: 103077 - DNA, 11 bp, Unknown
  misc_feature (1)..( 11): Result.002 file - promoters60/1030715
ttgtacttatt

SEQ ID NO: 103078 - DNA, 6 bp, Unknown
  misc_feature (1)..( 6): Result.002 file - promoters60/1030715
tttatt

SEQ ID NO: 103079 - DNA, 6 bp, Unknown
  misc_feature (1)..( 6): Result.002 file - promoters60/1030715
tttatt

SEQ ID NO: 103080 - DNA, 7 bp, Unknown
  misc_feature (1)..( 7): Result.002 file - promoters60/1030715
tttaaga

SEQ ID NO: 103081 - DNA, 7 bp, Unknown
  misc_feature (1)..( 7): Result.002 file - promoters60/1030715
tttcaga

SEQ ID NO: 103082 - DNA, 6 bp, Unknown
  misc_feature (1)..( 6): Result.002 file - promoters60/1030715
tttgtg

SEQ ID NO: 103083 - DNA, 6 bp, Unknown
  misc_feature (1)..( 6): Result.002 file - promoters60/1030715
tttgtg

SEQ ID NO: 103084 - DNA, 7 bp, Unknown
  misc_feature (1)..( 7): Result.002 file - promoters60/1030715
aaaatga

SEQ ID NO: 103085 - DNA, 7 bp, Unknown
  misc_feature (1)..( 7): Result.002 file - promoters60/1030715
aaaatga

SEQ ID NO: 103086 - DNA, 6 bp, Unknown
  misc_feature (1)..( 6): Result.002 file - promoters60/1030715
ttaaac

SEQ ID NO: 103087 - DNA, 6 bp, Unknown
  misc_feature (1)..( 6): Result.002 file - promoters60/1030715
ttaaac

SEQ ID NO: 103088 - DNA, 6 bp, Unknown
  misc_feature (1)..( 6): Result.002 file - promoters60/1030715
gaattt

SEQ ID NO: 103089 - DNA, 6 bp, Unknown
  misc_feature (1)..( 6): Result.002 file - promoters60/1030715
gaattt

SEQ ID NO: 103090 - DNA, 6 bp, Unknown
  misc_feature (1)..( 6): Result.002 file - promoters60/1030715
ttatta

SEQ ID NO: 103091 - DNA, 6 bp, Unknown
  misc_feature (1)..( 6): Result.002 file - promoters60/1030715
ttatta

SEQ ID NO: 103092 - DNA, 8 bp, Unknown
  misc_feature (1)..( 8): Result.002 file - promoters60/1030715
ttacaaat

SEQ ID NO: 103093 - DNA, 8 bp, Unknown
  misc_feature (1)..( 8): Result.002 file - promoters60/1030715
ttacgaat

SEQ ID NO: 103094 - DNA, 6 bp, Unknown
  misc_feature (1)..( 6): Result.002 file - promoters60/1030715
taataa

SEQ ID NO: 103095 - DNA, 6 bp, Unknown
  misc_feature (1)..( 6): Result.002 file - promoters60/1030715
taataa

SEQ ID NO: 103096 - DNA, 8 bp, Unknown
  misc_feature (1)..( 8): Result.002 file - promoters60/1030715
taaagatt

SEQ ID NO: 103097 - DNA, 8 bp, Unknown
  misc_feature (1)..( 8): Result.002 file - promoters60/1030715
taaatatt

SEQ ID NO: 103098 - DNA, 7 bp, Unknown
  misc_feature (1)..( 7): Result.002 file - promoters60/1030715
tttcttt

SEQ ID NO: 103099 - DNA, 7 bp, Unknown
  misc_feature (1)..( 7): Result.002 file - promoters60/1030715
tttgttt

SEQ ID NO: 103100 - DNA, 7 bp, Unknown
  misc_feature (1)..( 7): Result.002 file - promoters60/1030715
ttggatg

SEQ ID NO: 103101 - DNA, 7 bp, Unknown
  misc_feature (1)..( 7): Result.002 file - promoters60/1030715
ttggatg

SEQ ID NO: 103102 - DNA, 7 bp, Unknown
  misc_feature (1)..( 7): Result.002 file - promoters60/1030715
tgagtat

SEQ ID NO: 103103 - DNA, 7 bp, Unknown
  misc_feature (1)..( 7): Result.002 file - promoters60/1030715
tgactat

SEQ ID NO: 103104 - DNA, 6 bp, Unknown
  misc_feature (1)..( 6): Result.002 file - promoters60/1030715
atctaa

SEQ ID NO: 103105 - DNA, 6 bp, Unknown
  misc_feature (1)..( 6): Result.002 file - promoters60/1030715
atctaa

SEQ ID NO: 103106 - DNA, 6 bp, Unknown
  misc_feature (1)..( 6): Result.002 file - promoters60/1030715
taggtg

SEQ ID NO: 103107 - DNA, 6 bp, Unknown
  misc_feature (1)..( 6): Result.002 file - promoters60/1030715
taggtg

SEQ ID NO: 103108 - DNA, 11 bp, Unknown
  misc_feature (1)..( 11): Result.002 file - promoters60/1030757
caaatacattg

SEQ ID NO: 103109 - DNA, 11 bp, Unknown
  misc_feature (1)..( 11): Result.002 file - promoters60/1030757
caaaaacaact

SEQ ID NO: 103110 - DNA, 11 bp, Unknown
  misc_feature (1)..( 11): Result.002 file - promoters60/1030757
taaatacattt

SEQ ID NO: 103111 - DNA, 11 bp, Unknown
  misc_feature (1)..( 11): Result.002 file - promoters60/1030757
ctgataaattt

SEQ ID NO: 103112 - DNA, 11 bp, Unknown
  misc_feature (1)..( 11): Result.002 file - promoters60/1030757
aagatacgttg

SEQ ID NO: 103113 - DNA, 8 bp, Unknown
  misc_feature (1)..( 8): Result.002 file - promoters60/1030757
caaataat

SEQ ID NO: 103114 - DNA, 8 bp, Unknown
  misc_feature (1)..( 8): Result.002 file - promoters60/1030757
caaataag

SEQ ID NO: 103115 - DNA, 8 bp, Unknown
  misc_feature (1)..( 8): Result.002 file - promoters60/1030757
caaatatt

SEQ ID NO: 103116 - DNA, 8 bp, Unknown
  misc_feature (1)..( 8): Result.002 file - promoters60/1030757
aaaacaat

SEQ ID NO: 103117 - DNA, 10 bp, Unknown
  misc_feature (1)..( 10): Result.002 file - promoters60/1030757
tttttttttt

SEQ ID NO: 103118 - DNA, 10 bp, Unknown
  misc_feature (1)..( 10): Result.002 file - promoters60/1030757
tttttttctg

SEQ ID NO: 103119 - DNA, 11 bp, Unknown
  misc_feature (1)..( 11): Result.002 file - promoters60/1030757
ttttgtttctc

SEQ ID NO: 103120 - DNA, 11 bp, Unknown
  misc_feature (1)..( 11): Result.002 file - promoters60/1030757
aaatgtttctc

SEQ ID NO: 103121 - DNA, 8 bp, Unknown
  misc_feature (1)..( 8): Result.002 file - promoters60/1030757
cttctgaa

SEQ ID NO: 103122 - DNA, 8 bp, Unknown
  misc_feature (1)..( 8): Result.002 file - promoters60/1030757
cttttgaa

SEQ ID NO: 103123 - DNA, 8 bp, Unknown
  misc_feature (1)..( 8): Result.002 file - promoters60/1030757
attttgag

SEQ ID NO: 103124 - DNA, 8 bp, Unknown
  misc_feature (1)..( 8): Result.002 file - promoters60/1030757
ctttagag

SEQ ID NO: 103125 - DNA, 10 bp, Unknown
  misc_feature (1)..( 10): Result.002 file - promoters60/1030757
gttttttgtt

SEQ ID NO: 103126 - DNA, 10 bp, Unknown
  misc_feature (1)..( 10): Result.002 file - promoters60/1030757
attttttttt

SEQ ID NO: 103127 - DNA, 10 bp, Unknown
  misc_feature (1)..( 10): Result.002 file - promoters60/1030757
gttttttgag

SEQ ID NO: 103128 - DNA, 10 bp, Unknown
  misc_feature (1)..( 10): Result.002 file - promoters60/1030757
tgattttgag

SEQ ID NO: 103129 - DNA, 10 bp, Unknown
  misc_feature (1)..( 10): Result.002 file - promoters60/1030757
aatatattac

SEQ ID NO: 103130 - DNA, 10 bp, Unknown
  misc_feature (1)..( 10): Result.002 file - promoters60/1030757
aatttattag

SEQ ID NO: 103131 - DNA, 10 bp, Unknown
  misc_feature (1)..( 10): Result.002 file - promoters60/1030757
gatagatttc

SEQ ID NO: 103132 - DNA, 10 bp, Unknown
  misc_feature (1)..( 10): Result.002 file - promoters60/1030757
catataactt

SEQ ID NO: 103133 - DNA, 10 bp, Unknown
  misc_feature (1)..( 10): Result.002 file - promoters60/1030757
tattcatttt

SEQ ID NO: 103134 - DNA, 11 bp, Unknown
  misc_feature (1)..( 11): Result.002 file - promoters60/1030757
acttttatata

SEQ ID NO: 103135 - DNA, 11 bp, Unknown
  misc_feature (1)..( 11): Result.002 file - promoters60/1030757
acttttatgtt

SEQ ID NO: 103136 - DNA, 11 bp, Unknown
  misc_feature (1)..( 11): Result.002 file - promoters60/1030757
gatttcataca

SEQ ID NO: 103137 - DNA, 11 bp, Unknown
  misc_feature (1)..( 11): Result.002 file - promoters60/1030757
gaatttaaata

SEQ ID NO: 103138 - DNA, 9 bp, Unknown
  misc_feature (1)..( 9): Result.002 file - promoters60/1030757
tttattata

SEQ ID NO: 103139 - DNA, 9 bp, Unknown
  misc_feature (1)..( 9): Result.002 file - promoters60/1030757
tttgttacc

SEQ ID NO: 103140 - DNA, 9 bp, Unknown
  misc_feature (1)..( 9): Result.002 file - promoters60/1030757
cttaatata

SEQ ID NO: 103141 - DNA, 10 bp, Unknown
  misc_feature (1)..( 10): Result.002 file - promoters60/1030757
tttgattaat

SEQ ID NO: 103142 - DNA, 8 bp, Unknown
  misc_feature (1)..( 8): Result.002 file - promoters60/1030757
aattttta

SEQ ID NO: 103143 - DNA, 8 bp, Unknown
  misc_feature (1)..( 8): Result.002 file - promoters60/1030757
aatttttt

SEQ ID NO: 103144 - DNA, 8 bp, Unknown
  misc_feature (1)..( 8): Result.002 file - promoters60/1030757
atttttta

SEQ ID NO: 103145 - DNA, 8 bp, Unknown
  misc_feature (1)..( 8): Result.002 file - promoters60/1030757
ctttttta

SEQ ID NO: 103146 - DNA, 9 bp, Unknown
  misc_feature (1)..( 9): Result.002 file - promoters60/1030757
caccagtca

SEQ ID NO: 103147 - DNA, 9 bp, Unknown
  misc_feature (1)..( 9): Result.002 file - promoters60/1030757
cacgagtcg

SEQ ID NO: 103148 - DNA, 9 bp, Unknown
  misc_feature (1)..( 9): Result.002 file - promoters60/1030757
aacctgtct

SEQ ID NO: 103149 - DNA, 9 bp, Unknown
  misc_feature (1)..( 9): Result.002 file - promoters60/1030757
cccctctct

SEQ ID NO: 103150 - DNA, 9 bp, Unknown
  misc_feature (1)..( 9): Result.002 file - promoters60/1030757
tttcttttt

SEQ ID NO: 103151 - DNA, 9 bp, Unknown
  misc_feature (1)..( 9): Result.002 file - promoters60/1030757
attcatttt

SEQ ID NO: 103152 - DNA, 9 bp, Unknown
  misc_feature (1)..( 9): Result.002 file - promoters60/1030757
tttcttatc

SEQ ID NO: 103153 - DNA, 9 bp, Unknown
  misc_feature (1)..( 9): Result.002 file - promoters60/1030757
tatcaattt

SEQ ID NO: 103154 - DNA, 9 bp, Unknown
  misc_feature (1)..( 9): Result.002 file - promoters60/1030757
gaccaattt

SEQ ID NO: 103155 - DNA, 11 bp, Unknown
  misc_feature (1)..( 11): Result.002 file - promoters60/1030757
aatataaacat

SEQ ID NO: 103156 - DNA, 11 bp, Unknown
  misc_feature (1)..( 11): Result.002 file - promoters60/1030757
tctataaaact

SEQ ID NO: 103157 - DNA, 11 bp, Unknown
  misc_feature (1)..( 11): Result.002 file - promoters60/1030757
tatataaagag

SEQ ID NO: 103158 - DNA, 11 bp, Unknown
  misc_feature (1)..( 11): Result.002 file - promoters60/1030757
tatttaacggt

SEQ ID NO: 103159 - DNA, 11 bp, Unknown
  misc_feature (1)..( 11): Result.002 file - promoters60/1030757
tgcataaaact

SEQ ID NO: 103160 - DNA, 11 bp, Unknown
  misc_feature (1)..( 11): Result.002 file - promoters60/1030757
aaacgtgaaag

SEQ ID NO: 103161 - DNA, 11 bp, Unknown
  misc_feature (1)..( 11): Result.002 file - promoters60/1030757
tggattgaaag

SEQ ID NO: 103162 - DNA, 11 bp, Unknown
  misc_feature (1)..( 11): Result.002 file - promoters60/1030757
aaacgtaaaac

SEQ ID NO: 103163 - DNA, 11 bp, Unknown
  misc_feature (1)..( 11): Result.002 file - promoters60/1030757
aacattcaaaa

SEQ ID NO: 103164 - DNA, 8 bp, Unknown
  misc_feature (1)..( 8): Result.002 file - promoters60/1030757
agatatac

SEQ ID NO: 103165 - DNA, 8 bp, Unknown
  misc_feature (1)..( 8): Result.002 file - promoters60/1030757
ggatttac

SEQ ID NO: 103166 - DNA, 8 bp, Unknown
  misc_feature (1)..( 8): Result.002 file - promoters60/1030757
agaaatag

SEQ ID NO: 103167 - DNA, 8 bp, Unknown
  misc_feature (1)..( 8): Result.002 file - promoters60/1030757
cggttttg

SEQ ID NO: 103168 - DNA, 8 bp, Unknown
  misc_feature (1)..( 8): Result.002 file - promoters60/1030757
ggatttga

SEQ ID NO: 103169 - DNA, 8 bp, Unknown
  misc_feature (1)..( 8): Result.002 file - promoters60/1030771
tgtatctc

SEQ ID NO: 103170 - DNA, 8 bp, Unknown
  misc_feature (1)..( 8): Result.002 file - promoters60/1030771
tgtctctc

SEQ ID NO: 103171 - DNA, 7 bp, Unknown
  misc_feature (1)..( 7): Result.002 file - promoters60/1030771
agattct

SEQ ID NO: 103172 - DNA, 7 bp, Unknown
  misc_feature (1)..( 7): Result.002 file - promoters60/1030771
agagtct

SEQ ID NO: 103173 - DNA, 7 bp, Unknown
  misc_feature (1)..( 7): Result.002 file - promoters60/1030771
cttactc

SEQ ID NO: 103174 - DNA, 7 bp, Unknown
  misc_feature (1)..( 7): Result.002 file - promoters60/1030771
cttcctc

SEQ ID NO: 103175 - DNA, 6 bp, Unknown
  misc_feature (1)..( 6): Result.002 file - promoters60/1030771
ctttta

SEQ ID NO: 103176 - DNA, 6 bp, Unknown
  misc_feature (1)..( 6): Result.002 file - promoters60/1030771
ctttta

SEQ ID NO: 103177 - DNA, 6 bp, Unknown
  misc_feature (1)..( 6): Result.002 file - promoters60/1030771
ccaatc

SEQ ID NO: 103178 - DNA, 6 bp, Unknown
  misc_feature (1)..( 6): Result.002 file - promoters60/1030771
ccaatc

SEQ ID NO: 103179 - DNA, 9 bp, Unknown
  misc_feature (1)..( 9): Result.002 file - promoters60/1030771
tgaaaaagt

SEQ ID NO: 103180 - DNA, 9 bp, Unknown
  misc_feature (1)..( 9): Result.002 file - promoters60/1030771
tgaaaaaaa

SEQ ID NO: 103181 - DNA, 9 bp, Unknown
  misc_feature (1)..( 9): Result.002 file - promoters60/1030771
taaaagagt

SEQ ID NO: 103182 - DNA, 6 bp, Unknown
  misc_feature (1)..( 6): Result.002 file - promoters60/1030771
aaaaac

SEQ ID NO: 103183 - DNA, 6 bp, Unknown
  misc_feature (1)..( 6): Result.002 file - promoters60/1030771
aaaaac

SEQ ID NO: 103184 - DNA, 6 bp, Unknown
  misc_feature (1)..( 6): Result.002 file - promoters60/1030771
taaaaa

SEQ ID NO: 103185 - DNA, 6 bp, Unknown
  misc_feature (1)..( 6): Result.002 file - promoters60/1030771
taaaaa

SEQ ID NO: 103186 - DNA, 7 bp, Unknown
  misc_feature (1)..( 7): Result.002 file - promoters60/1030771
aagccca

SEQ ID NO: 103187 - DNA, 7 bp, Unknown
  misc_feature (1)..( 7): Result.002 file - promoters60/1030771
aagtcca

SEQ ID NO: 103188 - DNA, 6 bp, Unknown
  misc_feature (1)..( 6): Result.002 file - promoters60/1030771
atccaa

SEQ ID NO: 103189 - DNA, 6 bp, Unknown
  misc_feature (1)..( 6): Result.002 file - promoters60/1030771
atccaa

SEQ ID NO: 103190 - DNA, 7 bp, Unknown
  misc_feature (1)..( 7): Result.002 file - promoters60/1030771
catattt

SEQ ID NO: 103191 - DNA, 7 bp, Unknown
  misc_feature (1)..( 7): Result.002 file - promoters60/1030771
cattttt

SEQ ID NO: 103192 - DNA, 6 bp, Unknown
  misc_feature (1)..( 6): Result.002 file - promoters60/1030771
tttcat

SEQ ID NO: 103193 - DNA, 6 bp, Unknown
  misc_feature (1)..( 6): Result.002 file - promoters60/1030771
tttcat

SEQ ID NO: 103194 - DNA, 6 bp, Unknown
  misc_feature (1)..( 6): Result.002 file - promoters60/1030771
ttatta

SEQ ID NO: 103195 - DNA, 6 bp, Unknown
  misc_feature (1)..( 6): Result.002 file - promoters60/1030771
ttatta

SEQ ID NO: 103196 - DNA, 7 bp, Unknown
  misc_feature (1)..( 7): Result.002 file - promoters60/1030771
gcccatt

SEQ ID NO: 103197 - DNA, 7 bp, Unknown
  misc_feature (1)..( 7): Result.002 file - promoters60/1030771
gcccatt

SEQ ID NO: 103198 - DNA, 7 bp, Unknown
  misc_feature (1)..( 7): Result.002 file - promoters60/1030771
tcttcct

SEQ ID NO: 103199 - DNA, 7 bp, Unknown
  misc_feature (1)..( 7): Result.002 file - promoters60/1030771
tctgcct

SEQ ID NO: 103200 - DNA, 6 bp, Unknown
  misc_feature (1)..( 6): Result.002 file - promoters60/1030771
gtaata

SEQ ID NO: 103201 - DNA, 6 bp, Unknown
  misc_feature (1)..( 6): Result.002 file - promoters60/1030771
gtaata

SEQ ID NO: 103202 - DNA, 6 bp, Unknown
  misc_feature (1)..( 6): Result.002 file - promoters60/1030778
agagca

SEQ ID NO: 103203 - DNA, 6 bp, Unknown
  misc_feature (1)..( 6): Result.002 file - promoters60/1030778
agagca

SEQ ID NO: 103204 - DNA, 6 bp, Unknown
  misc_feature (1)..( 6): Result.002 file - promoters60/1030778
atagag

SEQ ID NO: 103205 - DNA, 6 bp, Unknown
  misc_feature (1)..( 6): Result.002 file - promoters60/1030778
atagag

SEQ ID NO: 103206 - DNA, 7 bp, Unknown
  misc_feature (1)..( 7): Result.002 file - promoters60/1030778
tatcttg

SEQ ID NO: 103207 - DNA, 7 bp, Unknown
  misc_feature (1)..( 7): Result.002 file - promoters60/1030778
tatattg

SEQ ID NO: 103208 - DNA, 6 bp, Unknown
  misc_feature (1)..( 6): Result.002 file - promoters60/1030778
aaagac

SEQ ID NO: 103209 - DNA, 6 bp, Unknown
  misc_feature (1)..( 6): Result.002 file - promoters60/1030778
aaagac

SEQ ID NO: 103210 - DNA, 7 bp, Unknown
  misc_feature (1)..( 7): Result.002 file - promoters60/1030778
taataaa

SEQ ID NO: 103211 - DNA, 7 bp, Unknown
  misc_feature (1)..( 7): Result.002 file - promoters60/1030778
taaaaaa

SEQ ID NO: 103212 - DNA, 6 bp, Unknown
  misc_feature (1)..( 6): Result.002 file - promoters60/1030778
taaaaa

SEQ ID NO: 103213 - DNA, 6 bp, Unknown
  misc_feature (1)..( 6): Result.002 file - promoters60/1030778
taaaaa

SEQ ID NO: 103214 - DNA, 6 bp, Unknown
  misc_feature (1)..( 6): Result.002 file - promoters60/1030778
cttcta

SEQ ID NO: 103215 - DNA, 6 bp, Unknown
  misc_feature (1)..( 6): Result.002 file - promoters60/1030778
cttcta

SEQ ID NO: 103216 - DNA, 7 bp, Unknown
  misc_feature (1)..( 7): Result.002 file - promoters60/1030778
tttctat

SEQ ID NO: 103217 - DNA, 7 bp, Unknown
  misc_feature (1)..( 7): Result.002 file - promoters60/1030778
tttgtat

SEQ ID NO: 103218 - DNA, 7 bp, Unknown
  misc_feature (1)..( 7): Result.002 file - promoters60/1030778
tatattg

SEQ ID NO: 103219 - DNA, 7 bp, Unknown
  misc_feature (1)..( 7): Result.002 file - promoters60/1030778
tatgttg

SEQ ID NO: 103220 - DNA, 8 bp, Unknown
  misc_feature (1)..( 8): Result.002 file - promoters60/1030778
tgttaaaa

SEQ ID NO: 103221 - DNA, 8 bp, Unknown
  misc_feature (1)..( 8): Result.002 file - promoters60/1030778
tgttgaaa

SEQ ID NO: 103222 - DNA, 8 bp, Unknown
  misc_feature (1)..( 8): Result.002 file - promoters60/1030778
cattaaac

SEQ ID NO: 103223 - DNA, 8 bp, Unknown
  misc_feature (1)..( 8): Result.002 file - promoters60/1030778
catttaac

SEQ ID NO: 103224 - DNA, 6 bp, Unknown
  misc_feature (1)..( 6): Result.002 file - promoters60/1030778
tctcca

SEQ ID NO: 103225 - DNA, 6 bp, Unknown
  misc_feature (1)..( 6): Result.002 file - promoters60/1030778
tctcca

SEQ ID NO: 103226 - DNA, 7 bp, Unknown
  misc_feature (1)..( 7): Result.002 file - promoters60/1030778
ccatttt

SEQ ID NO: 103227 - DNA, 7 bp, Unknown
  misc_feature (1)..( 7): Result.002 file - promoters60/1030778
ccatttt

SEQ ID NO: 103228 - DNA, 6 bp, Unknown
  misc_feature (1)..( 6): Result.002 file - promoters60/1030778
ttttca

SEQ ID NO: 103229 - DNA, 6 bp, Unknown
  misc_feature (1)..( 6): Result.002 file - promoters60/1030778
ttttca

SEQ ID NO: 103230 - DNA, 6 bp, Unknown
  misc_feature (1)..( 6): Result.002 file - promoters60/1030778
tgtctt

SEQ ID NO: 103231 - DNA, 6 bp, Unknown
  misc_feature (1)..( 6): Result.002 file - promoters60/1030778
tgtctt

SEQ ID NO: 103232 - DNA, 6 bp, Unknown
  misc_feature (1)..( 6): Result.002 file - promoters60/1030778
caagct

SEQ ID NO: 103233 - DNA, 6 bp, Unknown
  misc_feature (1)..( 6): Result.002 file - promoters60/1030778
caagct

SEQ ID NO: 103234 - DNA, 7 bp, Unknown
  misc_feature (1)..( 7): Result.002 file - promoters60/1030778
ataaata

SEQ ID NO: 103235 - DNA, 7 bp, Unknown
  misc_feature (1)..( 7): Result.002 file - promoters60/1030778
atacata

SEQ ID NO: 103236 - DNA, 7 bp, Unknown
  misc_feature (1)..( 7): Result.002 file - promoters60/1030782
atgcctg

SEQ ID NO: 103237 - DNA, 7 bp, Unknown
  misc_feature (1)..( 7): Result.002 file - promoters60/1030782
atgtctg

SEQ ID NO: 103238 - DNA, 8 bp, Unknown
  misc_feature (1)..( 8): Result.002 file - promoters60/1030782
tcataatg

SEQ ID NO: 103239 - DNA, 8 bp, Unknown
  misc_feature (1)..( 8): Result.002 file - promoters60/1030782
tcataatg

SEQ ID NO: 103240 - DNA, 8 bp, Unknown
  misc_feature (1)..( 8): Result.002 file - promoters60/1030782
attttgat

SEQ ID NO: 103241 - DNA, 8 bp, Unknown
  misc_feature (1)..( 8): Result.002 file - promoters60/1030782
atttggat

SEQ ID NO: 103242 - DNA, 8 bp, Unknown
  misc_feature (1)..( 8): Result.002 file - promoters60/1030782
cgttcaaa

SEQ ID NO: 103243 - DNA, 8 bp, Unknown
  misc_feature (1)..( 8): Result.002 file - promoters60/1030782
cgttgaaa

SEQ ID NO: 103244 - DNA, 7 bp, Unknown
  misc_feature (1)..( 7): Result.002 file - promoters60/1030782
gaaataa

SEQ ID NO: 103245 - DNA, 7 bp, Unknown
  misc_feature (1)..( 7): Result.002 file - promoters60/1030782
gaaataa

SEQ ID NO: 103246 - DNA, 6 bp, Unknown
  misc_feature (1)..( 6): Result.002 file - promoters60/1030782
aataaa

SEQ ID NO: 103247 - DNA, 6 bp, Unknown
  misc_feature (1)..( 6): Result.002 file - promoters60/1030782
aataaa

SEQ ID NO: 103248 - DNA, 7 bp, Unknown
  misc_feature (1)..( 7): Result.002 file - promoters60/1030782
atagttt

SEQ ID NO: 103249 - DNA, 7 bp, Unknown
  misc_feature (1)..( 7): Result.002 file - promoters60/1030782
atatttt

SEQ ID NO: 103250 - DNA, 6 bp, Unknown
  misc_feature (1)..( 6): Result.002 file - promoters60/1030782
agatca

SEQ ID NO: 103251 - DNA, 6 bp, Unknown
  misc_feature (1)..( 6): Result.002 file - promoters60/1030782
agatca

SEQ ID NO: 103252 - DNA, 7 bp, Unknown
  misc_feature (1)..( 7): Result.002 file - promoters60/1030782
aaagaaa

SEQ ID NO: 103253 - DNA, 7 bp, Unknown
  misc_feature (1)..( 7): Result.002 file - promoters60/1030782
aaagaaa

SEQ ID NO: 103254 - DNA, 6 bp, Unknown
  misc_feature (1)..( 6): Result.002 file - promoters60/1030782
atgaca

SEQ ID NO: 103255 - DNA, 6 bp, Unknown
  misc_feature (1)..( 6): Result.002 file - promoters60/1030782
atgaca

SEQ ID NO: 103256 - DNA, 7 bp, Unknown
  misc_feature (1)..( 7): Result.002 file - promoters60/1030782
aaaggta

SEQ ID NO: 103257 - DNA, 7 bp, Unknown
  misc_feature (1)..( 7): Result.002 file - promoters60/1030782
aaatgta

SEQ ID NO: 103258 - DNA, 9 bp, Unknown
  misc_feature (1)..( 9): Result.002 file - promoters60/1030782
attaatacc

SEQ ID NO: 103259 - DNA, 9 bp, Unknown
  misc_feature (1)..( 9): Result.002 file - promoters60/1030782
attaacacc

SEQ ID NO: 103260 - DNA, 6 bp, Unknown
  misc_feature (1)..( 6): Result.002 file - promoters60/1030782
caatca

SEQ ID NO: 103261 - DNA, 6 bp, Unknown
  misc_feature (1)..( 6): Result.002 file - promoters60/1030782
caatca

SEQ ID NO: 103262 - DNA, 8 bp, Unknown
  misc_feature (1)..( 8): Result.002 file - promoters60/1030782
aaagagaa

SEQ ID NO: 103263 - DNA, 8 bp, Unknown
  misc_feature (1)..( 8): Result.002 file - promoters60/1030782
aaagagaa

SEQ ID NO: 103264 - DNA, 6 bp, Unknown
  misc_feature (1)..( 6): Result.002 file - promoters60/1030782
atgaga

SEQ ID NO: 103265 - DNA, 6 bp, Unknown
  misc_feature (1)..( 6): Result.002 file - promoters60/1030782
atgaga

SEQ ID NO: 103266 - DNA, 9 bp, Unknown
  misc_feature (1)..( 9): Result.002 file - promoters60/1030803
tcggtgaag

SEQ ID NO: 103267 - DNA, 9 bp, Unknown
  misc_feature (1)..( 9): Result.002 file - promoters60/1030803
tcggagaat

SEQ ID NO: 103268 - DNA, 9 bp, Unknown
  misc_feature (1)..( 9): Result.002 file - promoters60/1030803
aatgtgaag

SEQ ID NO: 103269 - DNA, 8 bp, Unknown
  misc_feature (1)..( 8): Result.002 file - promoters60/1030803
tcggggaa

SEQ ID NO: 103270 - DNA, 8 bp, Unknown
  misc_feature (1)..( 8): Result.002 file - promoters60/1030803
tcggagaa

SEQ ID NO: 103271 - DNA, 8 bp, Unknown
  misc_feature (1)..( 8): Result.002 file - promoters60/1030803
aattttac

SEQ ID NO: 103272 - DNA, 8 bp, Unknown
  misc_feature (1)..( 8): Result.002 file - promoters60/1030803
aatattac

SEQ ID NO: 103273 - DNA, 7 bp, Unknown
  misc_feature (1)..( 7): Result.002 file - promoters60/1030803
agggaaa

SEQ ID NO: 103274 - DNA, 7 bp, Unknown
  misc_feature (1)..( 7): Result.002 file - promoters60/1030803
aggcaaa

SEQ ID NO: 103275 - DNA, 7 bp, Unknown
  misc_feature (1)..( 7): Result.002 file - promoters60/1030803
gtgtgtt

SEQ ID NO: 103276 - DNA, 7 bp, Unknown
  misc_feature (1)..( 7): Result.002 file - promoters60/1030803
gtgggtt

SEQ ID NO: 103277 - DNA, 7 bp, Unknown
  misc_feature (1)..( 7): Result.002 file - promoters60/1030803
caatcac

SEQ ID NO: 103278 - DNA, 7 bp, Unknown
  misc_feature (1)..( 7): Result.002 file - promoters60/1030803
caaccac

SEQ ID NO: 103279 - DNA, 6 bp, Unknown
  misc_feature (1)..( 6): Result.002 file - promoters60/1030803
ggctga

SEQ ID NO: 103280 - DNA, 6 bp, Unknown
  misc_feature (1)..( 6): Result.002 file - promoters60/1030803
ggctga

SEQ ID NO: 103281 - DNA, 11 bp, Unknown
  misc_feature (1)..( 11): Result.002 file - promoters60/1030803
aggttctcaga

SEQ ID NO: 103282 - DNA, 11 bp, Unknown
  misc_feature (1)..( 11): Result.002 file - promoters60/1030803
agggtctgaga

SEQ ID NO: 103283 - DNA, 6 bp, Unknown
  misc_feature (1)..( 6): Result.002 file - promoters60/1030803
agattt

SEQ ID NO: 103284 - DNA, 6 bp, Unknown
  misc_feature (1)..( 6): Result.002 file - promoters60/1030803
agattt

SEQ ID NO: 103285 - DNA, 9 bp, Unknown
  misc_feature (1)..( 9): Result.002 file - promoters60/1030821
tttgcttac

SEQ ID NO: 103286 - DNA, 9 bp, Unknown
  misc_feature (1)..( 9): Result.002 file - promoters60/1030821
ttttctttt

SEQ ID NO: 103287 - DNA, 9 bp, Unknown
  misc_feature (1)..( 9): Result.002 file - promoters60/1030821
cttgtttaa

SEQ ID NO: 103288 - DNA, 9 bp, Unknown
  misc_feature (1)..( 9): Result.002 file - promoters60/1030821
cttctttag

SEQ ID NO: 103289 - DNA, 9 bp, Unknown
  misc_feature (1)..( 9): Result.002 file - promoters60/1030821
cttctttaa

SEQ ID NO: 103290 - DNA, 9 bp, Unknown
  misc_feature (1)..( 9): Result.002 file - promoters60/1030821
catgtttaa

SEQ ID NO: 103291 - DNA, 8 bp, Unknown
  misc_feature (1)..( 8): Result.002 file - promoters60/1030894
attgtttt

SEQ ID NO: 103292 - DNA, 8 bp, Unknown
  misc_feature (1)..( 8): Result.002 file - promoters60/1030894
tatgtttt

SEQ ID NO: 103293 - DNA, 8 bp, Unknown
  misc_feature (1)..( 8): Result.002 file - promoters60/1030894
attgtttt

SEQ ID NO: 103294 - DNA, 8 bp, Unknown
  misc_feature (1)..( 8): Result.002 file - promoters60/1030894
attgttcg

SEQ ID NO: 103295 - DNA, 13 bp, Unknown
  misc_feature (1)..( 13): Result.002 file - promoters60/1030894
caaaaacaaatgt

SEQ ID NO: 103296 - DNA, 13 bp, Unknown
  misc_feature (1)..( 13): Result.002 file - promoters60/1030894
aggatacaactgt

SEQ ID NO: 103297 - DNA, 13 bp, Unknown
  misc_feature (1)..( 13): Result.002 file - promoters60/1030894
caaaaacaaaaaa

SEQ ID NO: 103298 - DNA, 13 bp, Unknown
  misc_feature (1)..( 13): Result.002 file - promoters60/1030894
tccctacaaccat

SEQ ID NO: 103299 - DNA, 13 bp, Unknown
  misc_feature (1)..( 13): Result.002 file - promoters60/1030894
gccaaacaacatt

SEQ ID NO: 103300 - DNA, 8 bp, Unknown
  misc_feature (1)..( 8): Result.002 file - promoters60/1030894
aaaaacaa

SEQ ID NO: 103301 - DNA, 8 bp, Unknown
  misc_feature (1)..( 8): Result.002 file - promoters60/1030894
ccaaacaa

SEQ ID NO: 103302 - DNA, 8 bp, Unknown
  misc_feature (1)..( 8): Result.002 file - promoters60/1030894
ccatacac

SEQ ID NO: 103303 - DNA, 8 bp, Unknown
  misc_feature (1)..( 8): Result.002 file - promoters60/1030894
aaaaacaa

SEQ ID NO: 103304 - DNA, 13 bp, Unknown
  misc_feature (1)..( 13): Result.002 file - promoters60/1030902
gtcttataaataa

SEQ ID NO: 103305 - DNA, 13 bp, Unknown
  misc_feature (1)..( 13): Result.002 file - promoters60/1030902
catgtataaaaac

SEQ ID NO: 103306 - DNA, 13 bp, Unknown
  misc_feature (1)..( 13): Result.002 file - promoters60/1030902
gtcatataaatat

SEQ ID NO: 103307 - DNA, 13 bp, Unknown
  misc_feature (1)..( 13): Result.002 file - promoters60/1030902
ttcatataagtaa

SEQ ID NO: 103308 - DNA, 13 bp, Unknown
  misc_feature (1)..( 13): Result.002 file - promoters60/1030902
gcactataaacaa

SEQ ID NO: 103309 - DNA, 13 bp, Unknown
  misc_feature (1)..( 13): Result.002 file - promoters60/1030902
tctttataaactc

SEQ ID NO: 103310 - DNA, 11 bp, Unknown
  misc_feature (1)..( 11): Result.002 file - promoters60/1030916
gtaattgtagt

SEQ ID NO: 103311 - DNA, 11 bp, Unknown
  misc_feature (1)..( 11): Result.002 file - promoters60/1030916
ataactgtcat

SEQ ID NO: 103312 - DNA, 11 bp, Unknown
  misc_feature (1)..( 11): Result.002 file - promoters60/1030916
aatattgtaag

SEQ ID NO: 103313 - DNA, 11 bp, Unknown
  misc_feature (1)..( 11): Result.002 file - promoters60/1030916
ttaattgcagt

SEQ ID NO: 103314 - DNA, 11 bp, Unknown
  misc_feature (1)..( 11): Result.002 file - promoters60/1030916
ttacttgattc

SEQ ID NO: 103315 - DNA, 11 bp, Unknown
  misc_feature (1)..( 11): Result.002 file - promoters60/1030916
agcaaaaacgt

SEQ ID NO: 103316 - DNA, 11 bp, Unknown
  misc_feature (1)..( 11): Result.002 file - promoters60/1030916
ttcaaaaacgt

SEQ ID NO: 103317 - DNA, 11 bp, Unknown
  misc_feature (1)..( 11): Result.002 file - promoters60/1030916
agcaaaacatt

SEQ ID NO: 103318 - DNA, 11 bp, Unknown
  misc_feature (1)..( 11): Result.002 file - promoters60/1030916
gtcaaaatctg

SEQ ID NO: 103319 - DNA, 11 bp, Unknown
  misc_feature (1)..( 11): Result.002 file - promoters60/1030916
tacaaaataat

SEQ ID NO: 103320 - DNA, 12 bp, Unknown
  misc_feature (1)..( 12): Result.002 file - promoters60/1030916
ttttgcttttaa

SEQ ID NO: 103321 - DNA, 12 bp, Unknown
  misc_feature (1)..( 12): Result.002 file - promoters60/1030916
ttttccttttaa

SEQ ID NO: 103322 - DNA, 12 bp, Unknown
  misc_feature (1)..( 12): Result.002 file - promoters60/1030916
agttgtttttta

SEQ ID NO: 103323 - DNA, 12 bp, Unknown
  misc_feature (1)..( 12): Result.002 file - promoters60/1030916
aatcaattttaa

SEQ ID NO: 103324 - DNA, 10 bp, Unknown
  misc_feature (1)..( 10): Result.002 file - promoters60/1030916
gttttacaat

SEQ ID NO: 103325 - DNA, 10 bp, Unknown
  misc_feature (1)..( 10): Result.002 file - promoters60/1030916
actttataat

SEQ ID NO: 103326 - DNA, 10 bp, Unknown
  misc_feature (1)..( 10): Result.002 file - promoters60/1030916
acattaaaat

SEQ ID NO: 103327 - DNA, 10 bp, Unknown
  misc_feature (1)..( 10): Result.002 file - promoters60/1030916
acttcataga

SEQ ID NO: 103328 - DNA, 7 bp, Unknown
  misc_feature (1)..( 7): Result.002 file - promoters60/1030916
acacaat

SEQ ID NO: 103329 - DNA, 7 bp, Unknown
  misc_feature (1)..( 7): Result.002 file - promoters60/1030916
acaaaat

SEQ ID NO: 103330 - DNA, 7 bp, Unknown
  misc_feature (1)..( 7): Result.002 file - promoters60/1030916
tcacaat

SEQ ID NO: 103331 - DNA, 7 bp, Unknown
  misc_feature (1)..( 7): Result.002 file - promoters60/1030916
tcaaaat

SEQ ID NO: 103332 - DNA, 11 bp, Unknown
  misc_feature (1)..( 11): Result.002 file - promoters60/1030918
ctttatttgat

SEQ ID NO: 103333 - DNA, 11 bp, Unknown
  misc_feature (1)..( 11): Result.002 file - promoters60/1030918
gtttattgata

SEQ ID NO: 103334 - DNA, 11 bp, Unknown
  misc_feature (1)..( 11): Result.002 file - promoters60/1030918
ctttattcgat

SEQ ID NO: 103335 - DNA, 11 bp, Unknown
  misc_feature (1)..( 11): Result.002 file - promoters60/1030918
cttaatgaaac

SEQ ID NO: 103336 - DNA, 7 bp, Unknown
  misc_feature (1)..( 7): Result.002 file - promoters60/1030933
taaggtt

SEQ ID NO: 103337 - DNA, 7 bp, Unknown
  misc_feature (1)..( 7): Result.002 file - promoters60/1030933
taaagtt

SEQ ID NO: 103338 - DNA, 7 bp, Unknown
  misc_feature (1)..( 7): Result.002 file - promoters60/1030933
tgttaag

SEQ ID NO: 103339 - DNA, 7 bp, Unknown
  misc_feature (1)..( 7): Result.002 file - promoters60/1030933
tgttaag

SEQ ID NO: 103340 - DNA, 7 bp, Unknown
  misc_feature (1)..( 7): Result.002 file - promoters60/1030933
ttttaga

SEQ ID NO: 103341 - DNA, 7 bp, Unknown
  misc_feature (1)..( 7): Result.002 file - promoters60/1030933
ttttaga

SEQ ID NO: 103342 - DNA, 7 bp, Unknown
  misc_feature (1)..( 7): Result.002 file - promoters60/1030933
ttttagc

SEQ ID NO: 103343 - DNA, 9 bp, Unknown
  misc_feature (1)..( 9): Result.002 file - promoters60/1030933
tataaccat

SEQ ID NO: 103344 - DNA, 9 bp, Unknown
  misc_feature (1)..( 9): Result.002 file - promoters60/1030933
gataaccat

SEQ ID NO: 103345 - DNA, 9 bp, Unknown
  misc_feature (1)..( 9): Result.002 file - promoters60/1030933
tataacata

SEQ ID NO: 103346 - DNA, 11 bp, Unknown
  misc_feature (1)..( 11): Result.002 file - promoters60/1030933
tgaataaaaaa

SEQ ID NO: 103347 - DNA, 11 bp, Unknown
  misc_feature (1)..( 11): Result.002 file - promoters60/1030933
tgaaaaaaaaa

SEQ ID NO: 103348 - DNA, 11 bp, Unknown
  misc_feature (1)..( 11): Result.002 file - promoters60/1030933
aaaccaaaaaa

SEQ ID NO: 103349 - DNA, 6 bp, Unknown
  misc_feature (1)..( 6): Result.002 file - promoters60/1030933
aagata

SEQ ID NO: 103350 - DNA, 6 bp, Unknown
  misc_feature (1)..( 6): Result.002 file - promoters60/1030933
aagata

SEQ ID NO: 103351 - DNA, 7 bp, Unknown
  misc_feature (1)..( 7): Result.002 file - promoters60/1030933
taacaat

SEQ ID NO: 103352 - DNA, 7 bp, Unknown
  misc_feature (1)..( 7): Result.002 file - promoters60/1030933
taaaaat

SEQ ID NO: 103353 - DNA, 8 bp, Unknown
  misc_feature (1)..( 8): Result.002 file - promoters60/1030933
ttaaacca

SEQ ID NO: 103354 - DNA, 8 bp, Unknown
  misc_feature (1)..( 8): Result.002 file - promoters60/1030933
gtaaaccg

SEQ ID NO: 103355 - DNA, 8 bp, Unknown
  misc_feature (1)..( 8): Result.002 file - promoters60/1030933
ttaatcca

SEQ ID NO: 103356 - DNA, 6 bp, Unknown
  misc_feature (1)..( 6): Result.002 file - promoters60/1030933
acaaaa

SEQ ID NO: 103357 - DNA, 6 bp, Unknown
  misc_feature (1)..( 6): Result.002 file - promoters60/1030933
acaaaa

SEQ ID NO: 103358 - DNA, 6 bp, Unknown
  misc_feature (1)..( 6): Result.002 file - promoters60/1030933
tttata

SEQ ID NO: 103359 - DNA, 6 bp, Unknown
  misc_feature (1)..( 6): Result.002 file - promoters60/1030933
tttata

SEQ ID NO: 103360 - DNA, 7 bp, Unknown
  misc_feature (1)..( 7): Result.002 file - promoters60/1030933
ttttttt

SEQ ID NO: 103361 - DNA, 7 bp, Unknown
  misc_feature (1)..( 7): Result.002 file - promoters60/1030933
tttcttt

SEQ ID NO: 103362 - DNA, 6 bp, Unknown
  misc_feature (1)..( 6): Result.002 file - promoters60/1030933
tttttc

SEQ ID NO: 103363 - DNA, 6 bp, Unknown
  misc_feature (1)..( 6): Result.002 file - promoters60/1030933
tttttc

SEQ ID NO: 103364 - DNA, 6 bp, Unknown
  misc_feature (1)..( 6): Result.002 file - promoters60/1030933
agatat

SEQ ID NO: 103365 - DNA, 6 bp, Unknown
  misc_feature (1)..( 6): Result.002 file - promoters60/1030933
agatat

SEQ ID NO: 103366 - DNA, 11 bp, Unknown
  misc_feature (1)..( 11): Result.002 file - promoters60/1030933
taacaatattt

SEQ ID NO: 103367 - DNA, 11 bp, Unknown
  misc_feature (1)..( 11): Result.002 file - promoters60/1030933
agccaatgttt

SEQ ID NO: 103368 - DNA, 11 bp, Unknown
  misc_feature (1)..( 11): Result.002 file - promoters60/1030933
agcaaatggga

SEQ ID NO: 103369 - DNA, 6 bp, Unknown
  misc_feature (1)..( 6): Result.002 file - promoters60/1030933
gatatc

SEQ ID NO: 103370 - DNA, 6 bp, Unknown
  misc_feature (1)..( 6): Result.002 file - promoters60/1030933
gatatc

SEQ ID NO: 103371 - DNA, 7 bp, Unknown
  misc_feature (1)..( 7): Result.002 file - promoters60/1030933
aattaaa

SEQ ID NO: 103372 - DNA, 7 bp, Unknown
  misc_feature (1)..( 7): Result.002 file - promoters60/1030933
aatcaaa

SEQ ID NO: 103373 - DNA, 6 bp, Unknown
  misc_feature (1)..( 6): Result.002 file - promoters60/1030933
gaaaat

SEQ ID NO: 103374 - DNA, 6 bp, Unknown
  misc_feature (1)..( 6): Result.002 file - promoters60/1030933
gaaaat

SEQ ID NO: 103375 - DNA, 8 bp, Unknown
  misc_feature (1)..( 8): Result.002 file - promoters60/1030933
aaattgaa

SEQ ID NO: 103376 - DNA, 8 bp, Unknown
  misc_feature (1)..( 8): Result.002 file - promoters60/1030933
aaattgaa

SEQ ID NO: 103377 - DNA, 6 bp, Unknown
  misc_feature (1)..( 6): Result.002 file - promoters60/1030933
attttt

SEQ ID NO: 103378 - DNA, 6 bp, Unknown
  misc_feature (1)..( 6): Result.002 file - promoters60/1030933
attttt

SEQ ID NO: 103379 - DNA, 7 bp, Unknown
  misc_feature (1)..( 7): Result.002 file - promoters60/1030933
tagatga

SEQ ID NO: 103380 - DNA, 7 bp, Unknown
  misc_feature (1)..( 7): Result.002 file - promoters60/1030933
tagatga

SEQ ID NO: 103381 - DNA, 7 bp, Unknown
  misc_feature (1)..( 7): Result.002 file - promoters60/1030933
gagataa

SEQ ID NO: 103382 - DNA, 7 bp, Unknown
  misc_feature (1)..( 7): Result.002 file - promoters60/1030933
gagctaa

SEQ ID NO: 103383 - DNA, 7 bp, Unknown
  misc_feature (1)..( 7): Result.002 file - promoters60/1030933
caataag

SEQ ID NO: 103384 - DNA, 7 bp, Unknown
  misc_feature (1)..( 7): Result.002 file - promoters60/1030933
caacaag

SEQ ID NO: 103385 - DNA, 6 bp, Unknown
  misc_feature (1)..( 6): Result.002 file - promoters60/1030933
aaatct

SEQ ID NO: 103386 - DNA, 6 bp, Unknown
  misc_feature (1)..( 6): Result.002 file - promoters60/1030933
aaatct

SEQ ID NO: 103387 - DNA, 6 bp, Unknown
  misc_feature (1)..( 6): Result.002 file - promoters60/1030933
aattgt

SEQ ID NO: 103388 - DNA, 6 bp, Unknown
  misc_feature (1)..( 6): Result.002 file - promoters60/1030933
aattgt

SEQ ID NO: 103389 - DNA, 7 bp, Unknown
  misc_feature (1)..( 7): Result.002 file - promoters60/1030933
aattaat

SEQ ID NO: 103390 - DNA, 7 bp, Unknown
  misc_feature (1)..( 7): Result.002 file - promoters60/1030933
aataaat

SEQ ID NO: 103391 - DNA, 6 bp, Unknown
  misc_feature (1)..( 6): Result.002 file - promoters60/1030933
gaaaac

SEQ ID NO: 103392 - DNA, 6 bp, Unknown
  misc_feature (1)..( 6): Result.002 file - promoters60/1030933
gaaaac

SEQ ID NO: 103393 - DNA, 6 bp, Unknown
  misc_feature (1)..( 6): Result.002 file - promoters60/1030933
ccaatc

SEQ ID NO: 103394 - DNA, 6 bp, Unknown
  misc_feature (1)..( 6): Result.002 file - promoters60/1030933
ccaatc

SEQ ID NO: 103395 - DNA, 6 bp, Unknown
  misc_feature (1)..( 6): Result.002 file - promoters60/1030933
agaaat

SEQ ID NO: 103396 - DNA, 6 bp, Unknown
  misc_feature (1)..( 6): Result.002 file - promoters60/1030933
agaaat

SEQ ID NO: 103397 - DNA, 14 bp, Unknown
  misc_feature (1)..( 14): Result.002 file - promoters60/1030940
actacacatagtga

SEQ ID NO: 103398 - DNA, 14 bp, Unknown
  misc_feature (1)..( 14): Result.002 file - promoters60/1030940
gctaaacaaaaact

SEQ ID NO: 103399 - DNA, 14 bp, Unknown
  misc_feature (1)..( 14): Result.002 file - promoters60/1030940
aacaaaccaaatca

SEQ ID NO: 103400 - DNA, 14 bp, Unknown
  misc_feature (1)..( 14): Result.002 file - promoters60/1030940
gcttaacactctta

SEQ ID NO: 103401 - DNA, 14 bp, Unknown
  misc_feature (1)..( 14): Result.002 file - promoters60/1030940
tccaaattctgaac

SEQ ID NO: 103402 - DNA, 14 bp, Unknown
  misc_feature (1)..( 14): Result.002 file - promoters60/1030940
agataataaagcaa

SEQ ID NO: 103403 - DNA, 15 bp, Unknown
  misc_feature (1)..( 15): Result.002 file - promoters60/1030940
aagaaagaaacctcg

SEQ ID NO: 103404 - DNA, 15 bp, Unknown
  misc_feature (1)..( 15): Result.002 file - promoters60/1030940
cttaaagaataggtt

SEQ ID NO: 103405 - DNA, 15 bp, Unknown
  misc_feature (1)..( 15): Result.002 file - promoters60/1030940
caagaagaaaaaaat

SEQ ID NO: 103406 - DNA, 15 bp, Unknown
  misc_feature (1)..( 15): Result.002 file - promoters60/1030940
cctgaagaacaggtt

SEQ ID NO: 103407 - DNA, 15 bp, Unknown
  misc_feature (1)..( 15): Result.002 file - promoters60/1030940
ttgcgtttacatgtt

SEQ ID NO: 103408 - DNA, 15 bp, Unknown
  misc_feature (1)..( 15): Result.002 file - promoters60/1030940
cttagagacaaagta

SEQ ID NO: 103409 - DNA, 7 bp, Unknown
  misc_feature (1)..( 7): Result.002 file - promoters60/1031035
attgatt

SEQ ID NO: 103410 - DNA, 7 bp, Unknown
  misc_feature (1)..( 7): Result.002 file - promoters60/1031035
tttgatt

SEQ ID NO: 103411 - DNA, 8 bp, Unknown
  misc_feature (1)..( 8): Result.002 file - promoters60/1031035
tttggatc

SEQ ID NO: 103412 - DNA, 10 bp, Unknown
  misc_feature (1)..( 10): Result.002 file - promoters60/1031035
acttacaaaa

SEQ ID NO: 103413 - DNA, 10 bp, Unknown
  misc_feature (1)..( 10): Result.002 file - promoters60/1031035
acaaacaaaa

SEQ ID NO: 103414 - DNA, 10 bp, Unknown
  misc_feature (1)..( 10): Result.002 file - promoters60/1031035
acagacaaaa

SEQ ID NO: 103415 - DNA, 11 bp, Unknown
  misc_feature (1)..( 11): Result.002 file - promoters60/1031035
aaagacagaac

SEQ ID NO: 103416 - DNA, 11 bp, Unknown
  misc_feature (1)..( 11): Result.002 file - promoters60/1031035
acagacaaaac

SEQ ID NO: 103417 - DNA, 11 bp, Unknown
  misc_feature (1)..( 11): Result.002 file - promoters60/1031035
acaaacaaaaa

SEQ ID NO: 103418 - DNA, 7 bp, Unknown
  misc_feature (1)..( 7): Result.002 file - promoters60/1031035
acaaaaa

SEQ ID NO: 103419 - DNA, 7 bp, Unknown
  misc_feature (1)..( 7): Result.002 file - promoters60/1031035
tcaaaaa

SEQ ID NO: 103420 - DNA, 7 bp, Unknown
  misc_feature (1)..( 7): Result.002 file - promoters60/1031035
acaaaag

SEQ ID NO: 103421 - DNA, 8 bp, Unknown
  misc_feature (1)..( 8): Result.002 file - promoters60/1031048
tggtgtta

SEQ ID NO: 103422 - DNA, 8 bp, Unknown
  misc_feature (1)..( 8): Result.002 file - promoters60/1031048
tggtatta

SEQ ID NO: 103423 - DNA, 7 bp, Unknown
  misc_feature (1)..( 7): Result.002 file - promoters60/1031048
aacttca

SEQ ID NO: 103424 - DNA, 7 bp, Unknown
  misc_feature (1)..( 7): Result.002 file - promoters60/1031048
aacctca

SEQ ID NO: 103425 - DNA, 8 bp, Unknown
  misc_feature (1)..( 8): Result.002 file - promoters60/1031048
acgctgcc

SEQ ID NO: 103426 - DNA, 8 bp, Unknown
  misc_feature (1)..( 8): Result.002 file - promoters60/1031048
acgttgcc

SEQ ID NO: 103427 - DNA, 7 bp, Unknown
  misc_feature (1)..( 7): Result.002 file - promoters60/1031048
tggagtt

SEQ ID NO: 103428 - DNA, 7 bp, Unknown
  misc_feature (1)..( 7): Result.002 file - promoters60/1031048
tggggtt

SEQ ID NO: 103429 - DNA, 7 bp, Unknown
  misc_feature (1)..( 7): Result.002 file - promoters60/1031048
ttagtgg

SEQ ID NO: 103430 - DNA, 7 bp, Unknown
  misc_feature (1)..( 7): Result.002 file - promoters60/1031048
ttaatgg

SEQ ID NO: 103431 - DNA, 8 bp, Unknown
  misc_feature (1)..( 8): Result.002 file - promoters60/1031048
ttcatcta

SEQ ID NO: 103432 - DNA, 8 bp, Unknown
  misc_feature (1)..( 8): Result.002 file - promoters60/1031048
ttcaacta

SEQ ID NO: 103433 - DNA, 6 bp, Unknown
  misc_feature (1)..( 6): Result.002 file - promoters60/1031048
tacaaa

SEQ ID NO: 103434 - DNA, 6 bp, Unknown
  misc_feature (1)..( 6): Result.002 file - promoters60/1031048
tacaaa

SEQ ID NO: 103435 - DNA, 6 bp, Unknown
  misc_feature (1)..( 6): Result.002 file - promoters60/1031048
gttttt

SEQ ID NO: 103436 - DNA, 6 bp, Unknown
  misc_feature (1)..( 6): Result.002 file - promoters60/1031048
gttttt

SEQ ID NO: 103437 - DNA, 9 bp, Unknown
  misc_feature (1)..( 9): Result.002 file - promoters60/1031084
tagagaatg

SEQ ID NO: 103438 - DNA, 9 bp, Unknown
  misc_feature (1)..( 9): Result.002 file - promoters60/1031084
tagacaatg

SEQ ID NO: 103439 - DNA, 9 bp, Unknown
  misc_feature (1)..( 9): Result.002 file - promoters60/1031084
tagagaata

SEQ ID NO: 103440 - DNA, 8 bp, Unknown
  misc_feature (1)..( 8): Result.002 file - promoters60/1031084
taataagt

SEQ ID NO: 103441 - DNA, 8 bp, Unknown
  misc_feature (1)..( 8): Result.002 file - promoters60/1031084
caatgagt

SEQ ID NO: 103442 - DNA, 8 bp, Unknown
  misc_feature (1)..( 8): Result.002 file - promoters60/1031084
taataaaa

SEQ ID NO: 103443 - DNA, 6 bp, Unknown
  misc_feature (1)..( 6): Result.002 file - promoters60/1031084
attaaa

SEQ ID NO: 103444 - DNA, 6 bp, Unknown
  misc_feature (1)..( 6): Result.002 file - promoters60/1031084
attaaa

SEQ ID NO: 103445 - DNA, 7 bp, Unknown
  misc_feature (1)..( 7): Result.002 file - promoters60/1031084
attgaaa

SEQ ID NO: 103446 - DNA, 12 bp, Unknown
  misc_feature (1)..( 12): Result.002 file - promoters60/1031084
aaaatagaaaaa

SEQ ID NO: 103447 - DNA, 12 bp, Unknown
  misc_feature (1)..( 12): Result.002 file - promoters60/1031084
aaaatactttaa

SEQ ID NO: 103448 - DNA, 12 bp, Unknown
  misc_feature (1)..( 12): Result.002 file - promoters60/1031084
gaaacagagaaa

SEQ ID NO: 103449 - DNA, 11 bp, Unknown
  misc_feature (1)..( 11): Result.002 file - promoters60/1031084
aaatagaaaaa

SEQ ID NO: 103450 - DNA, 11 bp, Unknown
  misc_feature (1)..( 11): Result.002 file - promoters60/1031084
ttaaggaaaaa

SEQ ID NO: 103451 - DNA, 11 bp, Unknown
  misc_feature (1)..( 11): Result.002 file - promoters60/1031084
aaacagagaaa

SEQ ID NO: 103452 - DNA, 7 bp, Unknown
  misc_feature (1)..( 7): Result.002 file - promoters60/1031084
aaaacca

SEQ ID NO: 103453 - DNA, 7 bp, Unknown
  misc_feature (1)..( 7): Result.002 file - promoters60/1031084
taaacca

SEQ ID NO: 103454 - DNA, 7 bp, Unknown
  misc_feature (1)..( 7): Result.002 file - promoters60/1031084
taatcca

SEQ ID NO: 103455 - DNA, 7 bp, Unknown
  misc_feature (1)..( 7): Result.002 file - promoters60/1031084
atcaaaa

SEQ ID NO: 103456 - DNA, 7 bp, Unknown
  misc_feature (1)..( 7): Result.002 file - promoters60/1031084
ttcaaaa

SEQ ID NO: 103457 - DNA, 7 bp, Unknown
  misc_feature (1)..( 7): Result.002 file - promoters60/1031084
atcaaag

SEQ ID NO: 103458 - DNA, 8 bp, Unknown
  misc_feature (1)..( 8): Result.002 file - promoters60/1031084
tacaagca

SEQ ID NO: 103459 - DNA, 8 bp, Unknown
  misc_feature (1)..( 8): Result.002 file - promoters60/1031084
cacatgca

SEQ ID NO: 103460 - DNA, 8 bp, Unknown
  misc_feature (1)..( 8): Result.002 file - promoters60/1031084
aagaagta

SEQ ID NO: 103461 - DNA, 12 bp, Unknown
  misc_feature (1)..( 12): Result.002 file - promoters60/1031103
tgtgttatttca

SEQ ID NO: 103462 - DNA, 12 bp, Unknown
  misc_feature (1)..( 12): Result.002 file - promoters60/1031103
gtagttatttca

SEQ ID NO: 103463 - DNA, 12 bp, Unknown
  misc_feature (1)..( 12): Result.002 file - promoters60/1031103
tgtgatattgat

SEQ ID NO: 103464 - DNA, 6 bp, Unknown
  misc_feature (1)..( 6): Result.002 file - promoters60/1031103
aattat

SEQ ID NO: 103465 - DNA, 6 bp, Unknown
  misc_feature (1)..( 6): Result.002 file - promoters60/1031103
aattat

SEQ ID NO: 103466 - DNA, 7 bp, Unknown
  misc_feature (1)..( 7): Result.002 file - promoters60/1031103
aaagtgg

SEQ ID NO: 103467 - DNA, 7 bp, Unknown
  misc_feature (1)..( 7): Result.002 file - promoters60/1031103
aaattgg

SEQ ID NO: 103468 - DNA, 6 bp, Unknown
  misc_feature (1)..( 6): Result.002 file - promoters60/1031103
ttttga

SEQ ID NO: 103469 - DNA, 6 bp, Unknown
  misc_feature (1)..( 6): Result.002 file - promoters60/1031103
ttttga

SEQ ID NO: 103470 - DNA, 8 bp, Unknown
  misc_feature (1)..( 8): Result.002 file - promoters60/1031103
aatacaaa

SEQ ID NO: 103471 - DNA, 8 bp, Unknown
  misc_feature (1)..( 8): Result.002 file - promoters60/1031103
aattcaaa

SEQ ID NO: 103472 - DNA, 7 bp, Unknown
  misc_feature (1)..( 7): Result.002 file - promoters60/1031103
aaaaccc

SEQ ID NO: 103473 - DNA, 7 bp, Unknown
  misc_feature (1)..( 7): Result.002 file - promoters60/1031103
aaaaccc

SEQ ID NO: 103474 - DNA, 8 bp, Unknown
  misc_feature (1)..( 8): Result.002 file - promoters60/1031103
agattgat

SEQ ID NO: 103475 - DNA, 8 bp, Unknown
  misc_feature (1)..( 8): Result.002 file - promoters60/1031103
agattgat

SEQ ID NO: 103476 - DNA, 7 bp, Unknown
  misc_feature (1)..( 7): Result.002 file - promoters60/1031103
ttatgga

SEQ ID NO: 103477 - DNA, 7 bp, Unknown
  misc_feature (1)..( 7): Result.002 file - promoters60/1031103
ttatgga

SEQ ID NO: 103478 - DNA, 6 bp, Unknown
  misc_feature (1)..( 6): Result.002 file - promoters60/1031103
tatttt

SEQ ID NO: 103479 - DNA, 6 bp, Unknown
  misc_feature (1)..( 6): Result.002 file - promoters60/1031103
tatttt

SEQ ID NO: 103480 - DNA, 6 bp, Unknown
  misc_feature (1)..( 6): Result.002 file - promoters60/1031103
ttttct

SEQ ID NO: 103481 - DNA, 6 bp, Unknown
  misc_feature (1)..( 6): Result.002 file - promoters60/1031103
ttttct

SEQ ID NO: 103482 - DNA, 6 bp, Unknown
  misc_feature (1)..( 6): Result.002 file - promoters60/1031103
tttaga

SEQ ID NO: 103483 - DNA, 6 bp, Unknown
  misc_feature (1)..( 6): Result.002 file - promoters60/1031103
tttaga

SEQ ID NO: 103484 - DNA, 7 bp, Unknown
  misc_feature (1)..( 7): Result.002 file - promoters60/1031103
agaaaat

SEQ ID NO: 103485 - DNA, 7 bp, Unknown
  misc_feature (1)..( 7): Result.002 file - promoters60/1031103
agacaat

SEQ ID NO: 103486 - DNA, 6 bp, Unknown
  misc_feature (1)..( 6): Result.002 file - promoters60/1031103
atgtag

SEQ ID NO: 103487 - DNA, 6 bp, Unknown
  misc_feature (1)..( 6): Result.002 file - promoters60/1031103
atgtag

SEQ ID NO: 103488 - DNA, 7 bp, Unknown
  misc_feature (1)..( 7): Result.002 file - promoters60/1031103
gcactaa

SEQ ID NO: 103489 - DNA, 7 bp, Unknown
  misc_feature (1)..( 7): Result.002 file - promoters60/1031103
gcagtaa

SEQ ID NO: 103490 - DNA, 7 bp, Unknown
  misc_feature (1)..( 7): Result.002 file - promoters60/1031103
taaattt

SEQ ID NO: 103491 - DNA, 7 bp, Unknown
  misc_feature (1)..( 7): Result.002 file - promoters60/1031103
taacttt

SEQ ID NO: 103492 - DNA, 6 bp, Unknown
  misc_feature (1)..( 6): Result.002 file - promoters60/1031103
tttcta

SEQ ID NO: 103493 - DNA, 6 bp, Unknown
  misc_feature (1)..( 6): Result.002 file - promoters60/1031103
tttcta

SEQ ID NO: 103494 - DNA, 7 bp, Unknown
  misc_feature (1)..( 7): Result.002 file - promoters60/1031103
tatattc

SEQ ID NO: 103495 - DNA, 7 bp, Unknown
  misc_feature (1)..( 7): Result.002 file - promoters60/1031103
tatgttc

SEQ ID NO: 103496 - DNA, 7 bp, Unknown
  misc_feature (1)..( 7): Result.002 file - promoters60/1031103
ttacatt

SEQ ID NO: 103497 - DNA, 7 bp, Unknown
  misc_feature (1)..( 7): Result.002 file - promoters60/1031103
ttagatt

SEQ ID NO: 103498 - DNA, 6 bp, Unknown
  misc_feature (1)..( 6): Result.002 file - promoters60/1031208
tataat

SEQ ID NO: 103499 - DNA, 6 bp, Unknown
  misc_feature (1)..( 6): Result.002 file - promoters60/1031208
tataat

SEQ ID NO: 103500 - DNA, 11 bp, Unknown
  misc_feature (1)..( 11): Result.002 file - promoters60/1031208
aaaaagaaaaa

SEQ ID NO: 103501 - DNA, 11 bp, Unknown
  misc_feature (1)..( 11): Result.002 file - promoters60/1031208
aaaaataaaaa

SEQ ID NO: 103502 - DNA, 8 bp, Unknown
  misc_feature (1)..( 8): Result.002 file - promoters60/1031208
aatttttg

SEQ ID NO: 103503 - DNA, 8 bp, Unknown
  misc_feature (1)..( 8): Result.002 file - promoters60/1031208
aatttttt

SEQ ID NO: 103504 - DNA, 8 bp, Unknown
  misc_feature (1)..( 8): Result.002 file - promoters60/1031208
cgtttttt

SEQ ID NO: 103505 - DNA, 10 bp, Unknown
  misc_feature (1)..( 10): Result.002 file - promoters60/1031208
tcaattacac

SEQ ID NO: 103506 - DNA, 10 bp, Unknown
  misc_feature (1)..( 10): Result.002 file - promoters60/1031208
tcaattaaaa

SEQ ID NO: 103507 - DNA, 10 bp, Unknown
  misc_feature (1)..( 10): Result.002 file - promoters60/1031208
ccaattcaaa

SEQ ID NO: 103508 - DNA, 6 bp, Unknown
  misc_feature (1)..( 6): Result.002 file - promoters60/1031208
aaaaaa

SEQ ID NO: 103509 - DNA, 6 bp, Unknown
  misc_feature (1)..( 6): Result.002 file - promoters60/1031208
aaaaaa

SEQ ID NO: 103510 - DNA, 9 bp, Unknown
  misc_feature (1)..( 9): Result.002 file - promoters60/1031208
cttaatttg

SEQ ID NO: 103511 - DNA, 9 bp, Unknown
  misc_feature (1)..( 9): Result.002 file - promoters60/1031208
cttactttg

SEQ ID NO: 103512 - DNA, 8 bp, Unknown
  misc_feature (1)..( 8): Result.002 file - promoters60/1031208
attatctt

SEQ ID NO: 103513 - DNA, 8 bp, Unknown
  misc_feature (1)..( 8): Result.002 file - promoters60/1031208
attctctt

SEQ ID NO: 103514 - DNA, 14 bp, Unknown
  misc_feature (1)..( 14): Result.002 file - promoters60/1031208
aatatggtcttaaa

SEQ ID NO: 103515 - DNA, 14 bp, Unknown
  misc_feature (1)..( 14): Result.002 file - promoters60/1031208
aatttggtctaaaa

SEQ ID NO: 103516 - DNA, 7 bp, Unknown
  misc_feature (1)..( 7): Result.002 file - promoters60/1031208
atttgtt

SEQ ID NO: 103517 - DNA, 7 bp, Unknown
  misc_feature (1)..( 7): Result.002 file - promoters60/1031208
ttttgtt

SEQ ID NO: 103518 - DNA, 7 bp, Unknown
  misc_feature (1)..( 7): Result.002 file - promoters60/1031208
ttttgta

SEQ ID NO: 103519 - DNA, 7 bp, Unknown
  misc_feature (1)..( 7): Result.002 file - promoters60/1031208
atatttg

SEQ ID NO: 103520 - DNA, 7 bp, Unknown
  misc_feature (1)..( 7): Result.002 file - promoters60/1031208
ttatttg

SEQ ID NO: 103521 - DNA, 7 bp, Unknown
  misc_feature (1)..( 7): Result.002 file - promoters60/1031208
ttatttc

SEQ ID NO: 103522 - DNA, 10 bp, Unknown
  misc_feature (1)..( 10): Result.002 file - promoters60/1031208
ttattcttaa

SEQ ID NO: 103523 - DNA, 10 bp, Unknown
  misc_feature (1)..( 10): Result.002 file - promoters60/1031208
ttattctcta

SEQ ID NO: 103524 - DNA, 10 bp, Unknown
  misc_feature (1)..( 10): Result.002 file - promoters60/1031208
tcattctcta

SEQ ID NO: 103525 - DNA, 7 bp, Unknown
  misc_feature (1)..( 7): Result.002 file - promoters60/1031208
atactta

SEQ ID NO: 103526 - DNA, 7 bp, Unknown
  misc_feature (1)..( 7): Result.002 file - promoters60/1031208
ataatta

SEQ ID NO: 103527 - DNA, 7 bp, Unknown
  misc_feature (1)..( 7): Result.002 file - promoters60/1031208
attaatc

SEQ ID NO: 103528 - DNA, 7 bp, Unknown
  misc_feature (1)..( 7): Result.002 file - promoters60/1031208
attaatc

SEQ ID NO: 103529 - DNA, 10 bp, Unknown
  misc_feature (1)..( 10): Result.002 file - promoters60/1031208
tttttttatt

SEQ ID NO: 103530 - DNA, 10 bp, Unknown
  misc_feature (1)..( 10): Result.002 file - promoters60/1031208
ttttattatt

SEQ ID NO: 103531 - DNA, 6 bp, Unknown
  misc_feature (1)..( 6): Result.002 file - promoters60/1031208
gtatgt

SEQ ID NO: 103532 - DNA, 6 bp, Unknown
  misc_feature (1)..( 6): Result.002 file - promoters60/1031208
gtatgt

SEQ ID NO: 103533 - DNA, 8 bp, Unknown
  misc_feature (1)..( 8): Result.002 file - promoters60/1031208
tcaacaac

SEQ ID NO: 103534 - DNA, 8 bp, Unknown
  misc_feature (1)..( 8): Result.002 file - promoters60/1031208
tcaagaac

SEQ ID NO: 103535 - DNA, 6 bp, Unknown
  misc_feature (1)..( 6): Result.002 file - promoters60/1031208
tcggcc

SEQ ID NO: 103536 - DNA, 6 bp, Unknown
  misc_feature (1)..( 6): Result.002 file - promoters60/1031208
tcggcc

SEQ ID NO: 103537 - DNA, 10 bp, Unknown
  misc_feature (1)..( 10): Result.002 file - promoters60/1031229
agtcttaccc

SEQ ID NO: 103538 - DNA, 10 bp, Unknown
  misc_feature (1)..( 10): Result.002 file - promoters60/1031229
agttttactt

SEQ ID NO: 103539 - DNA, 10 bp, Unknown
  misc_feature (1)..( 10): Result.002 file - promoters60/1031229
ccttttcttg

SEQ ID NO: 103540 - DNA, 12 bp, Unknown
  misc_feature (1)..( 12): Result.002 file - promoters60/1031229
ttttcttgttgt

SEQ ID NO: 103541 - DNA, 12 bp, Unknown
  misc_feature (1)..( 12): Result.002 file - promoters60/1031229
ttttcttattgt

SEQ ID NO: 103542 - DNA, 12 bp, Unknown
  misc_feature (1)..( 12): Result.002 file - promoters60/1031229
tttacttgcagc

SEQ ID NO: 103543 - DNA, 11 bp, Unknown
  misc_feature (1)..( 11): Result.002 file - promoters60/1031229
gtactatttta

SEQ ID NO: 103544 - DNA, 11 bp, Unknown
  misc_feature (1)..( 11): Result.002 file - promoters60/1031229
ttactttttta

SEQ ID NO: 103545 - DNA, 11 bp, Unknown
  misc_feature (1)..( 11): Result.002 file - promoters60/1031229
ttacttctcgt

SEQ ID NO: 103546 - DNA, 11 bp, Unknown
  misc_feature (1)..( 11): Result.002 file - promoters60/1031267
gtgacttggag

SEQ ID NO: 103547 - DNA, 11 bp, Unknown
  misc_feature (1)..( 11): Result.002 file - promoters60/1031267
atgacgtggaa

SEQ ID NO: 103548 - DNA, 11 bp, Unknown
  misc_feature (1)..( 11): Result.002 file - promoters60/1031267
gtggcttgttt

SEQ ID NO: 103549 - DNA, 11 bp, Unknown
  misc_feature (1)..( 11): Result.002 file - promoters60/1031267
acggattggag

SEQ ID NO: 103550 - DNA, 11 bp, Unknown
  misc_feature (1)..( 11): Result.002 file - promoters60/1031267
aggagttggag

SEQ ID NO: 103551 - DNA, 11 bp, Unknown
  misc_feature (1)..( 11): Result.002 file - promoters60/1031267
tggtggtggaa

SEQ ID NO: 103552 - DNA, 15 bp, Unknown
  misc_feature (1)..( 15): Result.002 file - promoters60/1031291
tctctcaaagatttt

SEQ ID NO: 103553 - DNA, 15 bp, Unknown
  misc_feature (1)..( 15): Result.002 file - promoters60/1031291
agtttcaaagaaaga

SEQ ID NO: 103554 - DNA, 15 bp, Unknown
  misc_feature (1)..( 15): Result.002 file - promoters60/1031291
gccctcaaaaaagct

SEQ ID NO: 103555 - DNA, 15 bp, Unknown
  misc_feature (1)..( 15): Result.002 file - promoters60/1031291
tctttcaaaatttga

SEQ ID NO: 103556 - DNA, 15 bp, Unknown
  misc_feature (1)..( 15): Result.002 file - promoters60/1031291
acaaggaaagacttt

SEQ ID NO: 103557 - DNA, 15 bp, Unknown
  misc_feature (1)..( 15): Result.002 file - promoters60/1031291
agactcaaaagttat

SEQ ID NO: 103558 - DNA, 7 bp, Unknown
  misc_feature (1)..( 7): Result.002 file - promoters60/1031299
taaacat

SEQ ID NO: 103559 - DNA, 7 bp, Unknown
  misc_feature (1)..( 7): Result.002 file - promoters60/1031299
taaacat

SEQ ID NO: 103560 - DNA, 7 bp, Unknown
  misc_feature (1)..( 7): Result.002 file - promoters60/1031299
aaaacat

SEQ ID NO: 103561 - DNA, 16 bp, Unknown
  misc_feature (1)..( 16): Result.002 file - promoters60/1031299
ttaactttacgttctt

SEQ ID NO: 103562 - DNA, 16 bp, Unknown
  misc_feature (1)..( 16): Result.002 file - promoters60/1031299
ttaactgataaaatat

SEQ ID NO: 103563 - DNA, 17 bp, Unknown
  misc_feature (1)..( 17): Result.002 file - promoters60/1031299
ataatctaattgataaa

SEQ ID NO: 103564 - DNA, 17 bp, Unknown
  misc_feature (1)..( 17): Result.002 file - promoters60/1031299
ttaatataagactaatc

SEQ ID NO: 103565 - DNA, 8 bp, Unknown
  misc_feature (1)..( 8): Result.002 file - promoters60/1031299
agatttta

SEQ ID NO: 103566 - DNA, 8 bp, Unknown
  misc_feature (1)..( 8): Result.002 file - promoters60/1031299
agatttta

SEQ ID NO: 103567 - DNA, 8 bp, Unknown
  misc_feature (1)..( 8): Result.002 file - promoters60/1031299
aaatttta

SEQ ID NO: 103568 - DNA, 8 bp, Unknown
  misc_feature (1)..( 8): Result.002 file - promoters60/1031299
aaatatat

SEQ ID NO: 103569 - DNA, 8 bp, Unknown
  misc_feature (1)..( 8): Result.002 file - promoters60/1031299
taatatat

SEQ ID NO: 103570 - DNA, 8 bp, Unknown
  misc_feature (1)..( 8): Result.002 file - promoters60/1031299
aaatatgc

SEQ ID NO: 103571 - DNA, 10 bp, Unknown
  misc_feature (1)..( 10): Result.002 file - promoters60/1031299
acactttttc

SEQ ID NO: 103572 - DNA, 10 bp, Unknown
  misc_feature (1)..( 10): Result.002 file - promoters60/1031299
acaattttta

SEQ ID NO: 103573 - DNA, 10 bp, Unknown
  misc_feature (1)..( 10): Result.002 file - promoters60/1031299
ttggttttta

SEQ ID NO: 103574 - DNA, 8 bp, Unknown
  misc_feature (1)..( 8): Result.002 file - promoters60/1031299
tttaaaat

SEQ ID NO: 103575 - DNA, 8 bp, Unknown
  misc_feature (1)..( 8): Result.002 file - promoters60/1031299
tgtaaaat

SEQ ID NO: 103576 - DNA, 8 bp, Unknown
  misc_feature (1)..( 8): Result.002 file - promoters60/1031299
tttaaaac

SEQ ID NO: 103577 - DNA, 7 bp, Unknown
  misc_feature (1)..( 7): Result.002 file - promoters60/1031299
aatgtta

SEQ ID NO: 103578 - DNA, 7 bp, Unknown
  misc_feature (1)..( 7): Result.002 file - promoters60/1031299
aatgttt

SEQ ID NO: 103579 - DNA, 7 bp, Unknown
  misc_feature (1)..( 7): Result.002 file - promoters60/1031299
aatctta

SEQ ID NO: 103580 - DNA, 16 bp, Unknown
  misc_feature (1)..( 16): Result.002 file - promoters60/1031299
taatttaactgataaa

SEQ ID NO: 103581 - DNA, 16 bp, Unknown
  misc_feature (1)..( 16): Result.002 file - promoters60/1031299
aaatttaatataagac

SEQ ID NO: 103582 - DNA, 16 bp, Unknown
  misc_feature (1)..( 16): Result.002 file - promoters60/1031299
taatctaattgataaa

SEQ ID NO: 103583 - DNA, 8 bp, Unknown
  misc_feature (1)..( 8): Result.002 file - promoters60/1031299
tataaata

SEQ ID NO: 103584 - DNA, 8 bp, Unknown
  misc_feature (1)..( 8): Result.002 file - promoters60/1031299
gatatata

SEQ ID NO: 103585 - DNA, 8 bp, Unknown
  misc_feature (1)..( 8): Result.002 file - promoters60/1031299
tataaata

SEQ ID NO: 103586 - DNA, 8 bp, Unknown
  misc_feature (1)..( 8): Result.002 file - promoters60/1031336
tgttgact

SEQ ID NO: 103587 - DNA, 8 bp, Unknown
  misc_feature (1)..( 8): Result.002 file - promoters60/1031336
tgttgact

SEQ ID NO: 103588 - DNA, 6 bp, Unknown
  misc_feature (1)..( 6): Result.002 file - promoters60/1031336
ctttgt

SEQ ID NO: 103589 - DNA, 6 bp, Unknown
  misc_feature (1)..( 6): Result.002 file - promoters60/1031336
ctttgt

SEQ ID NO: 103590 - DNA, 6 bp, Unknown
  misc_feature (1)..( 6): Result.002 file - promoters60/1031336
gtagct

SEQ ID NO: 103591 - DNA, 6 bp, Unknown
  misc_feature (1)..( 6): Result.002 file - promoters60/1031336
gtagct

SEQ ID NO: 103592 - DNA, 10 bp, Unknown
  misc_feature (1)..( 10): Result.002 file - promoters60/1031336
ttcttgtttc

SEQ ID NO: 103593 - DNA, 10 bp, Unknown
  misc_feature (1)..( 10): Result.002 file - promoters60/1031336
ttcttcttta

SEQ ID NO: 103594 - DNA, 10 bp, Unknown
  misc_feature (1)..( 10): Result.002 file - promoters60/1031336
aagatcttta

SEQ ID NO: 103595 - DNA, 8 bp, Unknown
  misc_feature (1)..( 8): Result.002 file - promoters60/1031336
ccagattt

SEQ ID NO: 103596 - DNA, 8 bp, Unknown
  misc_feature (1)..( 8): Result.002 file - promoters60/1031336
ccatattt

SEQ ID NO: 103597 - DNA, 7 bp, Unknown
  misc_feature (1)..( 7): Result.002 file - promoters60/1031336
tttaact

SEQ ID NO: 103598 - DNA, 7 bp, Unknown
  misc_feature (1)..( 7): Result.002 file - promoters60/1031336
tttcact

SEQ ID NO: 103599 - DNA, 9 bp, Unknown
  misc_feature (1)..( 9): Result.002 file - promoters60/1031336
aaaacaaaa

SEQ ID NO: 103600 - DNA, 9 bp, Unknown
  misc_feature (1)..( 9): Result.002 file - promoters60/1031336
aaaacaaaa

SEQ ID NO: 103601 - DNA, 9 bp, Unknown
  misc_feature (1)..( 9): Result.002 file - promoters60/1031336
tcaacaaaa

SEQ ID NO: 103602 - DNA, 6 bp, Unknown
  misc_feature (1)..( 6): Result.002 file - promoters60/1031336
aaatat

SEQ ID NO: 103603 - DNA, 6 bp, Unknown
  misc_feature (1)..( 6): Result.002 file - promoters60/1031336
aaatat

SEQ ID NO: 103604 - DNA, 6 bp, Unknown
  misc_feature (1)..( 6): Result.002 file - promoters60/1031336
caaaaa

SEQ ID NO: 103605 - DNA, 6 bp, Unknown
  misc_feature (1)..( 6): Result.002 file - promoters60/1031336
caaaaa

SEQ ID NO: 103606 - DNA, 7 bp, Unknown
  misc_feature (1)..( 7): Result.002 file - promoters60/1031336
actgaat

SEQ ID NO: 103607 - DNA, 7 bp, Unknown
  misc_feature (1)..( 7): Result.002 file - promoters60/1031336
acttaat

SEQ ID NO: 103608 - DNA, 9 bp, Unknown
  misc_feature (1)..( 9): Result.002 file - promoters60/1031336
ctcaagttt

SEQ ID NO: 103609 - DNA, 9 bp, Unknown
  misc_feature (1)..( 9): Result.002 file - promoters60/1031336
ctcaaattt

SEQ ID NO: 103610 - DNA, 6 bp, Unknown
  misc_feature (1)..( 6): Result.002 file - promoters60/1031336
aaacaa

SEQ ID NO: 103611 - DNA, 6 bp, Unknown
  misc_feature (1)..( 6): Result.002 file - promoters60/1031336
aaacaa

SEQ ID NO: 103612 - DNA, 10 bp, Unknown
  misc_feature (1)..( 10): Result.002 file - promoters60/1031336
attaaagaaa

SEQ ID NO: 103613 - DNA, 10 bp, Unknown
  misc_feature (1)..( 10): Result.002 file - promoters60/1031336
attaaaggaa

SEQ ID NO: 103614 - DNA, 10 bp, Unknown
  misc_feature (1)..( 10): Result.002 file - promoters60/1031336
agtaagggaa

SEQ ID NO: 103615 - DNA, 9 bp, Unknown
  misc_feature (1)..( 9): Result.002 file - promoters60/1031336
aaaacaaaa

SEQ ID NO: 103616 - DNA, 9 bp, Unknown
  misc_feature (1)..( 9): Result.002 file - promoters60/1031336
aaaacaaaa

SEQ ID NO: 103617 - DNA, 7 bp, Unknown
  misc_feature (1)..( 7): Result.002 file - promoters60/1031336
aaacacg

SEQ ID NO: 103618 - DNA, 7 bp, Unknown
  misc_feature (1)..( 7): Result.002 file - promoters60/1031336
aaaaacg

SEQ ID NO: 103619 - DNA, 7 bp, Unknown
  misc_feature (1)..( 7): Result.002 file - promoters60/1031336
tgtgatt

SEQ ID NO: 103620 - DNA, 7 bp, Unknown
  misc_feature (1)..( 7): Result.002 file - promoters60/1031336
tgtaatt

SEQ ID NO: 103621 - DNA, 8 bp, Unknown
  misc_feature (1)..( 8): Result.002 file - promoters60/1031336
atttttat

SEQ ID NO: 103622 - DNA, 8 bp, Unknown
  misc_feature (1)..( 8): Result.002 file - promoters60/1031336
attattat

SEQ ID NO: 103623 - DNA, 10 bp, Unknown
  misc_feature (1)..( 10): Result.002 file - promoters60/1031336
ttgtgatgat

SEQ ID NO: 103624 - DNA, 10 bp, Unknown
  misc_feature (1)..( 10): Result.002 file - promoters60/1031336
ttgtaatgat

SEQ ID NO: 103625 - DNA, 6 bp, Unknown
  misc_feature (1)..( 6): Result.002 file - promoters60/1031336
tagaat

SEQ ID NO: 103626 - DNA, 6 bp, Unknown
  misc_feature (1)..( 6): Result.002 file - promoters60/1031336
tagaat

SEQ ID NO: 103627 - DNA, 9 bp, Unknown
  misc_feature (1)..( 9): Result.002 file - promoters60/1031336
taaagtttt

SEQ ID NO: 103628 - DNA, 9 bp, Unknown
  misc_feature (1)..( 9): Result.002 file - promoters60/1031336
taaagtttt

SEQ ID NO: 103629 - DNA, 8 bp, Unknown
  misc_feature (1)..( 8): Result.002 file - promoters60/1031336
ttttagtt

SEQ ID NO: 103630 - DNA, 8 bp, Unknown
  misc_feature (1)..( 8): Result.002 file - promoters60/1031336
ttttggtt

SEQ ID NO: 103631 - DNA, 12 bp, Unknown
  misc_feature (1)..( 12): Result.002 file - promoters60/1031368
ttcgtggacaca

SEQ ID NO: 103632 - DNA, 12 bp, Unknown
  misc_feature (1)..( 12): Result.002 file - promoters60/1031368
gatttggagaca

SEQ ID NO: 103633 - DNA, 12 bp, Unknown
  misc_feature (1)..( 12): Result.002 file - promoters60/1031368
ttcgttgactaa

SEQ ID NO: 103634 - DNA, 7 bp, Unknown
  misc_feature (1)..( 7): Result.002 file - promoters60/1031368
ggactat

SEQ ID NO: 103635 - DNA, 7 bp, Unknown
  misc_feature (1)..( 7): Result.002 file - promoters60/1031368
tgactat

SEQ ID NO: 103636 - DNA, 7 bp, Unknown
  misc_feature (1)..( 7): Result.002 file - promoters60/1031368
tgattat

SEQ ID NO: 103637 - DNA, 6 bp, Unknown
  misc_feature (1)..( 6): Result.002 file - promoters60/1031368
gtcaat

SEQ ID NO: 103638 - DNA, 6 bp, Unknown
  misc_feature (1)..( 6): Result.002 file - promoters60/1031368
gtcaat

SEQ ID NO: 103639 - DNA, 9 bp, Unknown
  misc_feature (1)..( 9): Result.002 file - promoters60/1031368
tttattgtt

SEQ ID NO: 103640 - DNA, 9 bp, Unknown
  misc_feature (1)..( 9): Result.002 file - promoters60/1031368
tttcttgtt

SEQ ID NO: 103641 - DNA, 6 bp, Unknown
  misc_feature (1)..( 6): Result.002 file - promoters60/1031368
attgta

SEQ ID NO: 103642 - DNA, 6 bp, Unknown
  misc_feature (1)..( 6): Result.002 file - promoters60/1031368
attgta

SEQ ID NO: 103643 - DNA, 8 bp, Unknown
  misc_feature (1)..( 8): Result.002 file - promoters60/1031368
caaataat

SEQ ID NO: 103644 - DNA, 8 bp, Unknown
  misc_feature (1)..( 8): Result.002 file - promoters60/1031368
caaataat

SEQ ID NO: 103645 - DNA, 6 bp, Unknown
  misc_feature (1)..( 6): Result.002 file - promoters60/1031368
tacaaa

SEQ ID NO: 103646 - DNA, 6 bp, Unknown
  misc_feature (1)..( 6): Result.002 file - promoters60/1031368
tacaaa

SEQ ID NO: 103647 - DNA, 9 bp, Unknown
  misc_feature (1)..( 9): Result.002 file - promoters60/1031368
cataaattc

SEQ ID NO: 103648 - DNA, 9 bp, Unknown
  misc_feature (1)..( 9): Result.002 file - promoters60/1031368
cataaattt

SEQ ID NO: 103649 - DNA, 9 bp, Unknown
  misc_feature (1)..( 9): Result.002 file - promoters60/1031368
tatatattt

SEQ ID NO: 103650 - DNA, 6 bp, Unknown
  misc_feature (1)..( 6): Result.002 file - promoters60/1031368
ttatat

SEQ ID NO: 103651 - DNA, 6 bp, Unknown
  misc_feature (1)..( 6): Result.002 file - promoters60/1031368
ttatat

SEQ ID NO: 103652 - DNA, 6 bp, Unknown
  misc_feature (1)..( 6): Result.002 file - promoters60/1031368
ggtttg

SEQ ID NO: 103653 - DNA, 6 bp, Unknown
  misc_feature (1)..( 6): Result.002 file - promoters60/1031368
ggtttg

SEQ ID NO: 103654 - DNA, 6 bp, Unknown
  misc_feature (1)..( 6): Result.002 file - promoters60/1031368
ggttga

SEQ ID NO: 103655 - DNA, 6 bp, Unknown
  misc_feature (1)..( 6): Result.002 file - promoters60/1031368
ggttga

SEQ ID NO: 103656 - DNA, 6 bp, Unknown
  misc_feature (1)..( 6): Result.002 file - promoters60/1031368
ttattg

SEQ ID NO: 103657 - DNA, 6 bp, Unknown
  misc_feature (1)..( 6): Result.002 file - promoters60/1031368
ttattg

SEQ ID NO: 103658 - DNA, 7 bp, Unknown
  misc_feature (1)..( 7): Result.002 file - promoters60/1031368
ttgtatg

SEQ ID NO: 103659 - DNA, 7 bp, Unknown
  misc_feature (1)..( 7): Result.002 file - promoters60/1031368
ttgtatg

SEQ ID NO: 103660 - DNA, 6 bp, Unknown
  misc_feature (1)..( 6): Result.002 file - promoters60/1031368
cgtgtc

SEQ ID NO: 103661 - DNA, 6 bp, Unknown
  misc_feature (1)..( 6): Result.002 file - promoters60/1031368
cgtgtc

SEQ ID NO: 103662 - DNA, 7 bp, Unknown
  misc_feature (1)..( 7): Result.002 file - promoters60/1031368
aatatat

SEQ ID NO: 103663 - DNA, 7 bp, Unknown
  misc_feature (1)..( 7): Result.002 file - promoters60/1031368
aatttat

SEQ ID NO: 103664 - DNA, 8 bp, Unknown
  misc_feature (1)..( 8): Result.002 file - promoters60/1031386
atttataa

SEQ ID NO: 103665 - DNA, 8 bp, Unknown
  misc_feature (1)..( 8): Result.002 file - promoters60/1031386
attaataa

SEQ ID NO: 103666 - DNA, 6 bp, Unknown
  misc_feature (1)..( 6): Result.002 file - promoters60/1031386
tcaaat

SEQ ID NO: 103667 - DNA, 6 bp, Unknown
  misc_feature (1)..( 6): Result.002 file - promoters60/1031386
tcaaat

SEQ ID NO: 103668 - DNA, 8 bp, Unknown
  misc_feature (1)..( 8): Result.002 file - promoters60/1031386
tgactaaa

SEQ ID NO: 103669 - DNA, 8 bp, Unknown
  misc_feature (1)..( 8): Result.002 file - promoters60/1031386
tgaataaa

SEQ ID NO: 103670 - DNA, 8 bp, Unknown
  misc_feature (1)..( 8): Result.002 file - promoters60/1031386
atttaaat

SEQ ID NO: 103671 - DNA, 8 bp, Unknown
  misc_feature (1)..( 8): Result.002 file - promoters60/1031386
attttaat

SEQ ID NO: 103672 - DNA, 8 bp, Unknown
  misc_feature (1)..( 8): Result.002 file - promoters60/1031386
ttatgagt

SEQ ID NO: 103673 - DNA, 8 bp, Unknown
  misc_feature (1)..( 8): Result.002 file - promoters60/1031386
ttattagt

SEQ ID NO: 103674 - DNA, 6 bp, Unknown
  misc_feature (1)..( 6): Result.002 file - promoters60/1031386
atatat

SEQ ID NO: 103675 - DNA, 6 bp, Unknown
  misc_feature (1)..( 6): Result.002 file - promoters60/1031386
atatat

SEQ ID NO: 103676 - DNA, 7 bp, Unknown
  misc_feature (1)..( 7): Result.002 file - promoters60/1031386
aaccaaa

SEQ ID NO: 103677 - DNA, 7 bp, Unknown
  misc_feature (1)..( 7): Result.002 file - promoters60/1031386
aactaaa

SEQ ID NO: 103678 - DNA, 6 bp, Unknown
  misc_feature (1)..( 6): Result.002 file - promoters60/1031386
gtcatg

SEQ ID NO: 103679 - DNA, 6 bp, Unknown
  misc_feature (1)..( 6): Result.002 file - promoters60/1031386
gtcatg

SEQ ID NO: 103680 - DNA, 6 bp, Unknown
  misc_feature (1)..( 6): Result.002 file - promoters60/1031386
ttttag

SEQ ID NO: 103681 - DNA, 6 bp, Unknown
  misc_feature (1)..( 6): Result.002 file - promoters60/1031386
ttttag

SEQ ID NO: 103682 - DNA, 8 bp, Unknown
  misc_feature (1)..( 8): Result.002 file - promoters60/1031386
aatccaat

SEQ ID NO: 103683 - DNA, 8 bp, Unknown
  misc_feature (1)..( 8): Result.002 file - promoters60/1031386
aatcgaat

SEQ ID NO: 103684 - DNA, 6 bp, Unknown
  misc_feature (1)..( 6): Result.002 file - promoters60/1031386
ttacat

SEQ ID NO: 103685 - DNA, 6 bp, Unknown
  misc_feature (1)..( 6): Result.002 file - promoters60/1031386
ttacat

SEQ ID NO: 103686 - DNA, 8 bp, Unknown
  misc_feature (1)..( 8): Result.002 file - promoters60/1031386
aaatatca

SEQ ID NO: 103687 - DNA, 8 bp, Unknown
  misc_feature (1)..( 8): Result.002 file - promoters60/1031386
aaatatcc

SEQ ID NO: 103688 - DNA, 9 bp, Unknown
  misc_feature (1)..( 9): Result.002 file - promoters60/1031386
aaattatcc

SEQ ID NO: 103689 - DNA, 7 bp, Unknown
  misc_feature (1)..( 7): Result.002 file - promoters60/1031386
cgacatc

SEQ ID NO: 103690 - DNA, 7 bp, Unknown
  misc_feature (1)..( 7): Result.002 file - promoters60/1031386
cgaaatc

SEQ ID NO: 103691 - DNA, 8 bp, Unknown
  misc_feature (1)..( 8): Result.002 file - promoters60/1031386
agaaaaca

SEQ ID NO: 103692 - DNA, 8 bp, Unknown
  misc_feature (1)..( 8): Result.002 file - promoters60/1031386
agaaaaca

SEQ ID NO: 103693 - DNA, 8 bp, Unknown
  misc_feature (1)..( 8): Result.002 file - promoters60/1031386
agacaacg

SEQ ID NO: 103694 - DNA, 6 bp, Unknown
  misc_feature (1)..( 6): Result.002 file - promoters60/1031386
aagaaa

SEQ ID NO: 103695 - DNA, 6 bp, Unknown
  misc_feature (1)..( 6): Result.002 file - promoters60/1031386
aagaaa

SEQ ID NO: 103696 - DNA, 10 bp, Unknown
  misc_feature (1)..( 10): Result.002 file - promoters60/1031386
atacatttag

SEQ ID NO: 103697 - DNA, 10 bp, Unknown
  misc_feature (1)..( 10): Result.002 file - promoters60/1031386
ataaatttag

SEQ ID NO: 103698 - DNA, 6 bp, Unknown
  misc_feature (1)..( 6): Result.002 file - promoters60/1031386
tttcat

SEQ ID NO: 103699 - DNA, 6 bp, Unknown
  misc_feature (1)..( 6): Result.002 file - promoters60/1031386
tttcat

SEQ ID NO: 103700 - DNA, 7 bp, Unknown
  misc_feature (1)..( 7): Result.002 file - promoters60/1031386
tgagttt

SEQ ID NO: 103701 - DNA, 7 bp, Unknown
  misc_feature (1)..( 7): Result.002 file - promoters60/1031386
tgatttt

SEQ ID NO: 103702 - DNA, 6 bp, Unknown
  misc_feature (1)..( 6): Result.002 file - promoters60/1031386
gaaaaa

SEQ ID NO: 103703 - DNA, 6 bp, Unknown
  misc_feature (1)..( 6): Result.002 file - promoters60/1031386
gaaaaa

SEQ ID NO: 103704 - DNA, 8 bp, Unknown
  misc_feature (1)..( 8): Result.002 file - promoters60/1031386
taaaggat

SEQ ID NO: 103705 - DNA, 8 bp, Unknown
  misc_feature (1)..( 8): Result.002 file - promoters60/1031386
taaacgat

SEQ ID NO: 103706 - DNA, 7 bp, Unknown
  misc_feature (1)..( 7): Result.002 file - promoters60/1031386
tattcta

SEQ ID NO: 103707 - DNA, 7 bp, Unknown
  misc_feature (1)..( 7): Result.002 file - promoters60/1031386
tatacta

SEQ ID NO: 103708 - DNA, 6 bp, Unknown
  misc_feature (1)..( 6): Result.002 file - promoters60/1031386
taaaat

SEQ ID NO: 103709 - DNA, 6 bp, Unknown
  misc_feature (1)..( 6): Result.002 file - promoters60/1031386
taaaat

SEQ ID NO: 103710 - DNA, 7 bp, Unknown
  misc_feature (1)..( 7): Result.002 file - promoters60/1031386
atatgaa

SEQ ID NO: 103711 - DNA, 7 bp, Unknown
  misc_feature (1)..( 7): Result.002 file - promoters60/1031386
ataggaa

SEQ ID NO: 103712 - DNA, 7 bp, Unknown
  misc_feature (1)..( 7): Result.002 file - promoters60/1031386
cgaacaa

SEQ ID NO: 103713 - DNA, 7 bp, Unknown
  misc_feature (1)..( 7): Result.002 file - promoters60/1031386
cgaacaa

SEQ ID NO: 103714 - DNA, 9 bp, Unknown
  misc_feature (1)..( 9): Result.002 file - promoters60/1031386
atgttaaat

SEQ ID NO: 103715 - DNA, 9 bp, Unknown
  misc_feature (1)..( 9): Result.002 file - promoters60/1031386
atgtaaaat

SEQ ID NO: 103716 - DNA, 9 bp, Unknown
  misc_feature (1)..( 9): Result.002 file - promoters60/1031386
gtttacttt

SEQ ID NO: 103717 - DNA, 9 bp, Unknown
  misc_feature (1)..( 9): Result.002 file - promoters60/1031386
gttcacttt

SEQ ID NO: 103718 - DNA, 8 bp, Unknown
  misc_feature (1)..( 8): Result.002 file - promoters60/1031386
gtttgttt

SEQ ID NO: 103719 - DNA, 8 bp, Unknown
  misc_feature (1)..( 8): Result.002 file - promoters60/1031386
gttttttt

SEQ ID NO: 103720 - DNA, 13 bp, Unknown
  misc_feature (1)..( 13): Result.002 file - promoters60/1031390
agtatttttaaaa

SEQ ID NO: 103721 - DNA, 13 bp, Unknown
  misc_feature (1)..( 13): Result.002 file - promoters60/1031390
tctgttttcaaaa

SEQ ID NO: 103722 - DNA, 13 bp, Unknown
  misc_feature (1)..( 13): Result.002 file - promoters60/1031390
agtgttttcaaac

SEQ ID NO: 103723 - DNA, 13 bp, Unknown
  misc_feature (1)..( 13): Result.002 file - promoters60/1031390
ctaattgtaaaaa

SEQ ID NO: 103724 - DNA, 8 bp, Unknown
  misc_feature (1)..( 8): Result.002 file - promoters60/1031390
taaaaagg

SEQ ID NO: 103725 - DNA, 8 bp, Unknown
  misc_feature (1)..( 8): Result.002 file - promoters60/1031390
taaatagg

SEQ ID NO: 103726 - DNA, 8 bp, Unknown
  misc_feature (1)..( 8): Result.002 file - promoters60/1031390
taaaaaca

SEQ ID NO: 103727 - DNA, 10 bp, Unknown
  misc_feature (1)..( 10): Result.002 file - promoters60/1031390
tgatattttc

SEQ ID NO: 103728 - DNA, 10 bp, Unknown
  misc_feature (1)..( 10): Result.002 file - promoters60/1031390
tgaaattttt

SEQ ID NO: 103729 - DNA, 11 bp, Unknown
  misc_feature (1)..( 11): Result.002 file - promoters60/1031390
gttgattatta

SEQ ID NO: 103730 - DNA, 11 bp, Unknown
  misc_feature (1)..( 11): Result.002 file - promoters60/1031390
tgatattattt

SEQ ID NO: 103731 - DNA, 9 bp, Unknown
  misc_feature (1)..( 9): Result.002 file - promoters60/1031390
cttttttgt

SEQ ID NO: 103732 - DNA, 9 bp, Unknown
  misc_feature (1)..( 9): Result.002 file - promoters60/1031390
tttttatgt

SEQ ID NO: 103733 - DNA, 10 bp, Unknown
  misc_feature (1)..( 10): Result.002 file - promoters60/1031390
attattaaaa

SEQ ID NO: 103734 - DNA, 10 bp, Unknown
  misc_feature (1)..( 10): Result.002 file - promoters60/1031390
attattttaa

SEQ ID NO: 103735 - DNA, 7 bp, Unknown
  misc_feature (1)..( 7): Result.002 file - promoters60/1031425
tcaaaca

SEQ ID NO: 103736 - DNA, 7 bp, Unknown
  misc_feature (1)..( 7): Result.002 file - promoters60/1031425
tcaaacc

SEQ ID NO: 103737 - DNA, 7 bp, Unknown
  misc_feature (1)..( 7): Result.002 file - promoters60/1031425
ccaaacc

SEQ ID NO: 103738 - DNA, 8 bp, Unknown
  misc_feature (1)..( 8): Result.002 file - promoters60/1031425
atatattt

SEQ ID NO: 103739 - DNA, 8 bp, Unknown
  misc_feature (1)..( 8): Result.002 file - promoters60/1031425
caatattt

SEQ ID NO: 103740 - DNA, 8 bp, Unknown
  misc_feature (1)..( 8): Result.002 file - promoters60/1031425
caaaatta

SEQ ID NO: 103741 - DNA, 15 bp, Unknown
  misc_feature (1)..( 15): Result.002 file - promoters60/1031563
acaatagtcttaaac

SEQ ID NO: 103742 - DNA, 15 bp, Unknown
  misc_feature (1)..( 15): Result.002 file - promoters60/1031563
ggaatgaacttaaac

SEQ ID NO: 103743 - DNA, 15 bp, Unknown
  misc_feature (1)..( 15): Result.002 file - promoters60/1031563
acattagtctaaaat

SEQ ID NO: 103744 - DNA, 7 bp, Unknown
  misc_feature (1)..( 7): Result.002 file - promoters60/1031563
gtgtagt

SEQ ID NO: 103745 - DNA, 7 bp, Unknown
  misc_feature (1)..( 7): Result.002 file - promoters60/1031563
gtgtagt

SEQ ID NO: 103746 - DNA, 7 bp, Unknown
  misc_feature (1)..( 7): Result.002 file - promoters60/1031563
acaaaat

SEQ ID NO: 103747 - DNA, 7 bp, Unknown
  misc_feature (1)..( 7): Result.002 file - promoters60/1031563
acaaaat

SEQ ID NO: 103748 - DNA, 7 bp, Unknown
  misc_feature (1)..( 7): Result.002 file - promoters60/1031563
cactcaa

SEQ ID NO: 103749 - DNA, 7 bp, Unknown
  misc_feature (1)..( 7): Result.002 file - promoters60/1031563
cacacaa

SEQ ID NO: 103750 - DNA, 6 bp, Unknown
  misc_feature (1)..( 6): Result.002 file - promoters60/1031563
gaaact

SEQ ID NO: 103751 - DNA, 6 bp, Unknown
  misc_feature (1)..( 6): Result.002 file - promoters60/1031563
gaaact

SEQ ID NO: 103752 - DNA, 7 bp, Unknown
  misc_feature (1)..( 7): Result.002 file - promoters60/1031563
gaaacgt

SEQ ID NO: 103753 - DNA, 7 bp, Unknown
  misc_feature (1)..( 7): Result.002 file - promoters60/1031563
gaatcgt

SEQ ID NO: 103754 - DNA, 8 bp, Unknown
  misc_feature (1)..( 8): Result.002 file - promoters60/1031563
ctatagat

SEQ ID NO: 103755 - DNA, 8 bp, Unknown
  misc_feature (1)..( 8): Result.002 file - promoters60/1031563
ctaaagag

SEQ ID NO: 103756 - DNA, 8 bp, Unknown
  misc_feature (1)..( 8): Result.002 file - promoters60/1031563
aaaaagag

SEQ ID NO: 103757 - DNA, 7 bp, Unknown
  misc_feature (1)..( 7): Result.002 file - promoters60/1031563
caatagt

SEQ ID NO: 103758 - DNA, 7 bp, Unknown
  misc_feature (1)..( 7): Result.002 file - promoters60/1031563
caaaagt

SEQ ID NO: 103759 - DNA, 7 bp, Unknown
  misc_feature (1)..( 7): Result.002 file - promoters60/1031563
caaaagc

SEQ ID NO: 103760 - DNA, 8 bp, Unknown
  misc_feature (1)..( 8): Result.002 file - promoters60/1031563
agcgattt

SEQ ID NO: 103761 - DNA, 8 bp, Unknown
  misc_feature (1)..( 8): Result.002 file - promoters60/1031563
agctattt

SEQ ID NO: 103762 - DNA, 7 bp, Unknown
  misc_feature (1)..( 7): Result.002 file - promoters60/1031563
tacaaac

SEQ ID NO: 103763 - DNA, 7 bp, Unknown
  misc_feature (1)..( 7): Result.002 file - promoters60/1031563
tacaaac

SEQ ID NO: 103764 - DNA, 8 bp, Unknown
  misc_feature (1)..( 8): Result.002 file - promoters60/1031563
ttattaca

SEQ ID NO: 103765 - DNA, 8 bp, Unknown
  misc_feature (1)..( 8): Result.002 file - promoters60/1031563
ttataaca

SEQ ID NO: 103766 - DNA, 6 bp, Unknown
  misc_feature (1)..( 6): Result.002 file - promoters60/1031563
agattc

SEQ ID NO: 103767 - DNA, 6 bp, Unknown
  misc_feature (1)..( 6): Result.002 file - promoters60/1031563
agattc

SEQ ID NO: 103768 - DNA, 7 bp, Unknown
  misc_feature (1)..( 7): Result.002 file - promoters60/1031563
ttttgta

SEQ ID NO: 103769 - DNA, 7 bp, Unknown
  misc_feature (1)..( 7): Result.002 file - promoters60/1031563
tttagta

SEQ ID NO: 103770 - DNA, 7 bp, Unknown
  misc_feature (1)..( 7): Result.002 file - promoters60/1031563
attacct

SEQ ID NO: 103771 - DNA, 7 bp, Unknown
  misc_feature (1)..( 7): Result.002 file - promoters60/1031563
attccct

SEQ ID NO: 103772 - DNA, 7 bp, Unknown
  misc_feature (1)..( 7): Result.002 file - promoters60/1031563
ccttttc

SEQ ID NO: 103773 - DNA, 7 bp, Unknown
  misc_feature (1)..( 7): Result.002 file - promoters60/1031563
cctattc

SEQ ID NO: 103774 - DNA, 7 bp, Unknown
  misc_feature (1)..( 7): Result.002 file - promoters60/1031563
ttgtgtt

SEQ ID NO: 103775 - DNA, 7 bp, Unknown
  misc_feature (1)..( 7): Result.002 file - promoters60/1031563
ttgtgtt

SEQ ID NO: 103776 - DNA, 8 bp, Unknown
  misc_feature (1)..( 8): Result.002 file - promoters60/1031563
tgttaata

SEQ ID NO: 103777 - DNA, 8 bp, Unknown
  misc_feature (1)..( 8): Result.002 file - promoters60/1031563
tgttcata

SEQ ID NO: 103778 - DNA, 7 bp, Unknown
  misc_feature (1)..( 7): Result.002 file - promoters60/1031563
aaaaaat

SEQ ID NO: 103779 - DNA, 7 bp, Unknown
  misc_feature (1)..( 7): Result.002 file - promoters60/1031563
aaataat

SEQ ID NO: 103780 - DNA, 7 bp, Unknown
  misc_feature (1)..( 7): Result.002 file - promoters60/1031563
aaatact

SEQ ID NO: 103781 - DNA, 7 bp, Unknown
  misc_feature (1)..( 7): Result.002 file - promoters60/1031563
aaatact

SEQ ID NO: 103782 - DNA, 9 bp, Unknown
  misc_feature (1)..( 9): Result.002 file - promoters60/1031563
tttaataga

SEQ ID NO: 103783 - DNA, 9 bp, Unknown
  misc_feature (1)..( 9): Result.002 file - promoters60/1031563
ttttataga

SEQ ID NO: 103784 - DNA, 6 bp, Unknown
  misc_feature (1)..( 6): Result.002 file - promoters60/1031563
aaaagc

SEQ ID NO: 103785 - DNA, 6 bp, Unknown
  misc_feature (1)..( 6): Result.002 file - promoters60/1031563
aaaagc

SEQ ID NO: 103786 - DNA, 6 bp, Unknown
  misc_feature (1)..( 6): Result.002 file - promoters60/1031563
aatttc

SEQ ID NO: 103787 - DNA, 6 bp, Unknown
  misc_feature (1)..( 6): Result.002 file - promoters60/1031563
aatttc

SEQ ID NO: 103788 - DNA, 6 bp, Unknown
  misc_feature (1)..( 6): Result.002 file - promoters60/1031563
ttgaaa

SEQ ID NO: 103789 - DNA, 6 bp, Unknown
  misc_feature (1)..( 6): Result.002 file - promoters60/1031563
ttgaaa

SEQ ID NO: 103790 - DNA, 6 bp, Unknown
  misc_feature (1)..( 6): Result.002 file - promoters60/1031563
aaaaaa

SEQ ID NO: 103791 - DNA, 6 bp, Unknown
  misc_feature (1)..( 6): Result.002 file - promoters60/1031563
aaaaaa

SEQ ID NO: 103792 - DNA, 7 bp, Unknown
  misc_feature (1)..( 7): Result.002 file - promoters60/1031638
tccaaaa

SEQ ID NO: 103793 - DNA, 7 bp, Unknown
  misc_feature (1)..( 7): Result.002 file - promoters60/1031638
tcctaaa

SEQ ID NO: 103794 - DNA, 7 bp, Unknown
  misc_feature (1)..( 7): Result.002 file - promoters60/1031638
tccaaac

SEQ ID NO: 103795 - DNA, 9 bp, Unknown
  misc_feature (1)..( 9): Result.002 file - promoters60/1031638
aaaagcaaa

SEQ ID NO: 103796 - DNA, 9 bp, Unknown
  misc_feature (1)..( 9): Result.002 file - promoters60/1031638
aaaaacaac

SEQ ID NO: 103797 - DNA, 9 bp, Unknown
  misc_feature (1)..( 9): Result.002 file - promoters60/1031638
caaaacaaa

SEQ ID NO: 103798 - DNA, 9 bp, Unknown
  misc_feature (1)..( 9): Result.002 file - promoters60/1031638
gaaaacact

SEQ ID NO: 103799 - DNA, 7 bp, Unknown
  misc_feature (1)..( 7): Result.002 file - promoters60/1031638
cccacga

SEQ ID NO: 103800 - DNA, 7 bp, Unknown
  misc_feature (1)..( 7): Result.002 file - promoters60/1031638
tccacga

SEQ ID NO: 103801 - DNA, 7 bp, Unknown
  misc_feature (1)..( 7): Result.002 file - promoters60/1031638
cccacgt

SEQ ID NO: 103802 - DNA, 8 bp, Unknown
  misc_feature (1)..( 8): Result.002 file - promoters60/1031638
aaattata

SEQ ID NO: 103803 - DNA, 8 bp, Unknown
  misc_feature (1)..( 8): Result.002 file - promoters60/1031638
aaaatatc

SEQ ID NO: 103804 - DNA, 8 bp, Unknown
  misc_feature (1)..( 8): Result.002 file - promoters60/1031638
taatcata

SEQ ID NO: 103805 - DNA, 9 bp, Unknown
  misc_feature (1)..( 9): Result.002 file - promoters60/1031638
aaaaataaa

SEQ ID NO: 103806 - DNA, 9 bp, Unknown
  misc_feature (1)..( 9): Result.002 file - promoters60/1031638
caaaacaaa

SEQ ID NO: 103807 - DNA, 9 bp, Unknown
  misc_feature (1)..( 9): Result.002 file - promoters60/1031638
aaaaattag

SEQ ID NO: 103808 - DNA, 9 bp, Unknown
  misc_feature (1)..( 9): Result.002 file - promoters60/1031638
gcaaactta

SEQ ID NO: 103809 - DNA, 10 bp, Unknown
  misc_feature (1)..( 10): Result.002 file - promoters60/1031638
aaatattgaa

SEQ ID NO: 103810 - DNA, 10 bp, Unknown
  misc_feature (1)..( 10): Result.002 file - promoters60/1031638
aaaaatttat

SEQ ID NO: 103811 - DNA, 10 bp, Unknown
  misc_feature (1)..( 10): Result.002 file - promoters60/1031638
atatataata

SEQ ID NO: 103812 - DNA, 9 bp, Unknown
  misc_feature (1)..( 9): Result.002 file - promoters60/1031638
ctaaacact

SEQ ID NO: 103813 - DNA, 9 bp, Unknown
  misc_feature (1)..( 9): Result.002 file - promoters60/1031638
ttaaacata

SEQ ID NO: 103814 - DNA, 9 bp, Unknown
  misc_feature (1)..( 9): Result.002 file - promoters60/1031638
ttaaaaata

SEQ ID NO: 103815 - DNA, 9 bp, Unknown
  misc_feature (1)..( 9): Result.002 file - promoters60/1031638
attttgtag

SEQ ID NO: 103816 - DNA, 9 bp, Unknown
  misc_feature (1)..( 9): Result.002 file - promoters60/1031638
attttgtaa

SEQ ID NO: 103817 - DNA, 9 bp, Unknown
  misc_feature (1)..( 9): Result.002 file - promoters60/1031638
cgtttataa

SEQ ID NO: 103818 - DNA, 7 bp, Unknown
  misc_feature (1)..( 7): Result.002 file - promoters60/1031638
aaaattg

SEQ ID NO: 103819 - DNA, 7 bp, Unknown
  misc_feature (1)..( 7): Result.002 file - promoters60/1031638
aaaatta

SEQ ID NO: 103820 - DNA, 7 bp, Unknown
  misc_feature (1)..( 7): Result.002 file - promoters60/1031638
aaactta

SEQ ID NO: 103821 - DNA, 7 bp, Unknown
  misc_feature (1)..( 7): Result.002 file - promoters60/1031638
ataaaat

SEQ ID NO: 103822 - DNA, 7 bp, Unknown
  misc_feature (1)..( 7): Result.002 file - promoters60/1031638
gtaaaat

SEQ ID NO: 103823 - DNA, 7 bp, Unknown
  misc_feature (1)..( 7): Result.002 file - promoters60/1031638
gtaaaaa

SEQ ID NO: 103824 - DNA, 9 bp, Unknown
  misc_feature (1)..( 9): Result.002 file - promoters60/1031638
ttaatattt

SEQ ID NO: 103825 - DNA, 9 bp, Unknown
  misc_feature (1)..( 9): Result.002 file - promoters60/1031638
ataagattt

SEQ ID NO: 103826 - DNA, 9 bp, Unknown
  misc_feature (1)..( 9): Result.002 file - promoters60/1031638
ataatattg

SEQ ID NO: 103827 - DNA, 6 bp, Unknown
  misc_feature (1)..( 6): Result.002 file - promoters60/1031638
ttcaaa

SEQ ID NO: 103828 - DNA, 6 bp, Unknown
  misc_feature (1)..( 6): Result.002 file - promoters60/1031638
ttcaaa

SEQ ID NO: 103829 - DNA, 6 bp, Unknown
  misc_feature (1)..( 6): Result.002 file - promoters60/1031638
ttcaaa

SEQ ID NO: 103830 - DNA, 9 bp, Unknown
  misc_feature (1)..( 9): Result.002 file - promoters60/1031638
ttttttttt

SEQ ID NO: 103831 - DNA, 9 bp, Unknown
  misc_feature (1)..( 9): Result.002 file - promoters60/1031638
ttttttttc

SEQ ID NO: 103832 - DNA, 9 bp, Unknown
  misc_feature (1)..( 9): Result.002 file - promoters60/1031638
tttcttaaa

SEQ ID NO: 103833 - DNA, 10 bp, Unknown
  misc_feature (1)..( 10): Result.002 file - promoters60/1031638
attgatgttc

SEQ ID NO: 103834 - DNA, 10 bp, Unknown
  misc_feature (1)..( 10): Result.002 file - promoters60/1031638
attaatgttc

SEQ ID NO: 103835 - DNA, 10 bp, Unknown
  misc_feature (1)..( 10): Result.002 file - promoters60/1031638
attaattcca

SEQ ID NO: 103836 - DNA, 9 bp, Unknown
  misc_feature (1)..( 9): Result.002 file - promoters60/1031638
ttaaaatag

SEQ ID NO: 103837 - DNA, 9 bp, Unknown
  misc_feature (1)..( 9): Result.002 file - promoters60/1031638
ttaaaaata

SEQ ID NO: 103838 - DNA, 9 bp, Unknown
  misc_feature (1)..( 9): Result.002 file - promoters60/1031638
ttaaacata

SEQ ID NO: 103839 - DNA, 8 bp, Unknown
  misc_feature (1)..( 8): Result.002 file - promoters60/1031638
ttaaaata

SEQ ID NO: 103840 - DNA, 8 bp, Unknown
  misc_feature (1)..( 8): Result.002 file - promoters60/1031638
taaaaata

SEQ ID NO: 103841 - DNA, 9 bp, Unknown
  misc_feature (1)..( 9): Result.002 file - promoters60/1031638
ttaaacata

SEQ ID NO: 103842 - DNA, 7 bp, Unknown
  misc_feature (1)..( 7): Result.002 file - promoters60/1031665
ttagtca

SEQ ID NO: 103843 - DNA, 7 bp, Unknown
  misc_feature (1)..( 7): Result.002 file - promoters60/1031665
ttattca

SEQ ID NO: 103844 - DNA, 7 bp, Unknown
  misc_feature (1)..( 7): Result.002 file - promoters60/1031665
atagatt

SEQ ID NO: 103845 - DNA, 7 bp, Unknown
  misc_feature (1)..( 7): Result.002 file - promoters60/1031665
atatatt

SEQ ID NO: 103846 - DNA, 9 bp, Unknown
  misc_feature (1)..( 9): Result.002 file - promoters60/1031665
tgatagatt

SEQ ID NO: 103847 - DNA, 9 bp, Unknown
  misc_feature (1)..( 9): Result.002 file - promoters60/1031665
gtataaatt

SEQ ID NO: 103848 - DNA, 9 bp, Unknown
  misc_feature (1)..( 9): Result.002 file - promoters60/1031665
gtaaaaata

SEQ ID NO: 103849 - DNA, 8 bp, Unknown
  misc_feature (1)..( 8): Result.002 file - promoters60/1031665
cttttttt

SEQ ID NO: 103850 - DNA, 8 bp, Unknown
  misc_feature (1)..( 8): Result.002 file - promoters60/1031665
ttttgttt

SEQ ID NO: 103851 - DNA, 8 bp, Unknown
  misc_feature (1)..( 8): Result.002 file - promoters60/1031665
ttttgttt

SEQ ID NO: 103852 - DNA, 9 bp, Unknown
  misc_feature (1)..( 9): Result.002 file - promoters60/1031665
aagttgttg

SEQ ID NO: 103853 - DNA, 9 bp, Unknown
  misc_feature (1)..( 9): Result.002 file - promoters60/1031665
ttgtttttg

SEQ ID NO: 103854 - DNA, 9 bp, Unknown
  misc_feature (1)..( 9): Result.002 file - promoters60/1031665
ttgttttaa

SEQ ID NO: 103855 - DNA, 9 bp, Unknown
  misc_feature (1)..( 9): Result.002 file - promoters60/1031665
aaatcaaat

SEQ ID NO: 103856 - DNA, 9 bp, Unknown
  misc_feature (1)..( 9): Result.002 file - promoters60/1031665
aaaccaaac

SEQ ID NO: 103857 - DNA, 9 bp, Unknown
  misc_feature (1)..( 9): Result.002 file - promoters60/1031665
aaatgaaat

SEQ ID NO: 103858 - DNA, 12 bp, Unknown
  misc_feature (1)..( 12): Result.002 file - promoters60/1031665
aaaaaaataaaa

SEQ ID NO: 103859 - DNA, 12 bp, Unknown
  misc_feature (1)..( 12): Result.002 file - promoters60/1031665
aaataaattaaa

SEQ ID NO: 103860 - DNA, 7 bp, Unknown
  misc_feature (1)..( 7): Result.002 file - promoters60/1031665
tttgttt

SEQ ID NO: 103861 - DNA, 7 bp, Unknown
  misc_feature (1)..( 7): Result.002 file - promoters60/1031665
tttattt

SEQ ID NO: 103862 - DNA, 7 bp, Unknown
  misc_feature (1)..( 7): Result.002 file - promoters60/1031665
tttattt

SEQ ID NO: 103863 - DNA, 8 bp, Unknown
  misc_feature (1)..( 8): Result.002 file - promoters60/1031665
gtctaaac

SEQ ID NO: 103864 - DNA, 8 bp, Unknown
  misc_feature (1)..( 8): Result.002 file - promoters60/1031665
gtccaaac

SEQ ID NO: 103865 - DNA, 8 bp, Unknown
  misc_feature (1)..( 8): Result.002 file - promoters60/1031665
ttgaactc

SEQ ID NO: 103866 - DNA, 8 bp, Unknown
  misc_feature (1)..( 8): Result.002 file - promoters60/1031665
ttgaactc

SEQ ID NO: 103867 - DNA, 7 bp, Unknown
  misc_feature (1)..( 7): Result.002 file - promoters60/1031665
ttttaat

SEQ ID NO: 103868 - DNA, 7 bp, Unknown
  misc_feature (1)..( 7): Result.002 file - promoters60/1031665
ttttaat

SEQ ID NO: 103869 - DNA, 7 bp, Unknown
  misc_feature (1)..( 7): Result.002 file - promoters60/1031665
aaatcaa

SEQ ID NO: 103870 - DNA, 7 bp, Unknown
  misc_feature (1)..( 7): Result.002 file - promoters60/1031665
aaaccaa

SEQ ID NO: 103871 - DNA, 6 bp, Unknown
  misc_feature (1)..( 6): Result.002 file - promoters60/1031665
aaccaa

SEQ ID NO: 103872 - DNA, 6 bp, Unknown
  misc_feature (1)..( 6): Result.002 file - promoters60/1031665
aaccaa

SEQ ID NO: 103873 - DNA, 6 bp, Unknown
  misc_feature (1)..( 6): Result.002 file - promoters60/1031665
aagaaa

SEQ ID NO: 103874 - DNA, 6 bp, Unknown
  misc_feature (1)..( 6): Result.002 file - promoters60/1031665
aagaaa

SEQ ID NO: 103875 - DNA, 7 bp, Unknown
  misc_feature (1)..( 7): Result.002 file - promoters60/1031665
aataatt

SEQ ID NO: 103876 - DNA, 7 bp, Unknown
  misc_feature (1)..( 7): Result.002 file - promoters60/1031665
aataatt

SEQ ID NO: 103877 - DNA, 9 bp, Unknown
  misc_feature (1)..( 9): Result.002 file - promoters60/1031665
caaaaagag

SEQ ID NO: 103878 - DNA, 9 bp, Unknown
  misc_feature (1)..( 9): Result.002 file - promoters60/1031665
caaagagag

SEQ ID NO: 103879 - DNA, 6 bp, Unknown
  misc_feature (1)..( 6): Result.002 file - promoters60/1031665
aaattg

SEQ ID NO: 103880 - DNA, 6 bp, Unknown
  misc_feature (1)..( 6): Result.002 file - promoters60/1031665
aaattg

SEQ ID NO: 103881 - DNA, 9 bp, Unknown
  misc_feature (1)..( 9): Result.002 file - promoters60/1031665
tgaagcaaa

SEQ ID NO: 103882 - DNA, 9 bp, Unknown
  misc_feature (1)..( 9): Result.002 file - promoters60/1031665
tgaaacaaa

SEQ ID NO: 103883 - DNA, 7 bp, Unknown
  misc_feature (1)..( 7): Result.002 file - promoters60/1031665
tattgtg

SEQ ID NO: 103884 - DNA, 7 bp, Unknown
  misc_feature (1)..( 7): Result.002 file - promoters60/1031665
tattgtg

SEQ ID NO: 103885 - DNA, 10 bp, Unknown
  misc_feature (1)..( 10): Result.002 file - promoters60/1031706
tcaaccaact

SEQ ID NO: 103886 - DNA, 10 bp, Unknown
  misc_feature (1)..( 10): Result.002 file - promoters60/1031706
ctaactaaca

SEQ ID NO: 103887 - DNA, 10 bp, Unknown
  misc_feature (1)..( 10): Result.002 file - promoters60/1031706
ccaaccaatg

SEQ ID NO: 103888 - DNA, 10 bp, Unknown
  misc_feature (1)..( 10): Result.002 file - promoters60/1031706
tcaatcaaat

SEQ ID NO: 103889 - DNA, 10 bp, Unknown
  misc_feature (1)..( 10): Result.002 file - promoters60/1031706
ttaatgaaat

SEQ ID NO: 103890 - DNA, 10 bp, Unknown
  misc_feature (1)..( 10): Result.002 file - promoters60/1031706
tcaattaatc

SEQ ID NO: 103891 - DNA, 9 bp, Unknown
  misc_feature (1)..( 9): Result.002 file - promoters60/1031706
aaaacaaac

SEQ ID NO: 103892 - DNA, 9 bp, Unknown
  misc_feature (1)..( 9): Result.002 file - promoters60/1031706
ggaacaaaa

SEQ ID NO: 103893 - DNA, 9 bp, Unknown
  misc_feature (1)..( 9): Result.002 file - promoters60/1031706
caaacaaat

SEQ ID NO: 103894 - DNA, 9 bp, Unknown
  misc_feature (1)..( 9): Result.002 file - promoters60/1031706
taaaaaaag

SEQ ID NO: 103895 - DNA, 9 bp, Unknown
  misc_feature (1)..( 9): Result.002 file - promoters60/1031706
aaaacaatt

SEQ ID NO: 103896 - DNA, 9 bp, Unknown
  misc_feature (1)..( 9): Result.002 file - promoters60/1031706
taaacaaac

SEQ ID NO: 103897 - DNA, 12 bp, Unknown
  misc_feature (1)..( 12): Result.002 file - promoters60/1031706
taacaaaaaaaa

SEQ ID NO: 103898 - DNA, 12 bp, Unknown
  misc_feature (1)..( 12): Result.002 file - promoters60/1031706
tctcaagaaacg

SEQ ID NO: 103899 - DNA, 13 bp, Unknown
  misc_feature (1)..( 13): Result.002 file - promoters60/1031706
taggaaaataata

SEQ ID NO: 103900 - DNA, 13 bp, Unknown
  misc_feature (1)..( 13): Result.002 file - promoters60/1031706
taataaaaaactc

SEQ ID NO: 103901 - DNA, 13 bp, Unknown
  misc_feature (1)..( 13): Result.002 file - promoters60/1031706
gaacaaacaaaca

SEQ ID NO: 103902 - DNA, 13 bp, Unknown
  misc_feature (1)..( 13): Result.002 file - promoters60/1031706
ctcataactaact

SEQ ID NO: 103903 - DNA, 9 bp, Unknown
  misc_feature (1)..( 9): Result.002 file - promoters60/1031706
aataagaat

SEQ ID NO: 103904 - DNA, 9 bp, Unknown
  misc_feature (1)..( 9): Result.002 file - promoters60/1031706
gataagacg

SEQ ID NO: 103905 - DNA, 9 bp, Unknown
  misc_feature (1)..( 9): Result.002 file - promoters60/1031706
tttaaaaat

SEQ ID NO: 103906 - DNA, 9 bp, Unknown
  misc_feature (1)..( 9): Result.002 file - promoters60/1031706
gataagaca

SEQ ID NO: 103907 - DNA, 9 bp, Unknown
  misc_feature (1)..( 9): Result.002 file - promoters60/1031706
gtgaaaata

SEQ ID NO: 103908 - DNA, 9 bp, Unknown
  misc_feature (1)..( 9): Result.002 file - promoters60/1031706
gacaaaaat

SEQ ID NO: 103909 - DNA, 13 bp, Unknown
  misc_feature (1)..( 13): Result.002 file - promoters60/1031706
tccattatatata

SEQ ID NO: 103910 - DNA, 13 bp, Unknown
  misc_feature (1)..( 13): Result.002 file - promoters60/1031706
acgcctatatata

SEQ ID NO: 103911 - DNA, 13 bp, Unknown
  misc_feature (1)..( 13): Result.002 file - promoters60/1031706
tcttgtatatata

SEQ ID NO: 103912 - DNA, 13 bp, Unknown
  misc_feature (1)..( 13): Result.002 file - promoters60/1031706
tttcttatatctt

SEQ ID NO: 103913 - DNA, 13 bp, Unknown
  misc_feature (1)..( 13): Result.002 file - promoters60/1031706
tcctttatattct

SEQ ID NO: 103914 - DNA, 13 bp, Unknown
  misc_feature (1)..( 13): Result.002 file - promoters60/1031706
tggtctatataaa

SEQ ID NO: 103915 - DNA, 11 bp, Unknown
  misc_feature (1)..( 11): Result.002 file - promoters60/1031706
acatattctga

SEQ ID NO: 103916 - DNA, 11 bp, Unknown
  misc_feature (1)..( 11): Result.002 file - promoters60/1031706
acatattgagc

SEQ ID NO: 103917 - DNA, 11 bp, Unknown
  misc_feature (1)..( 11): Result.002 file - promoters60/1031706
gaataatcttt

SEQ ID NO: 103918 - DNA, 11 bp, Unknown
  misc_feature (1)..( 11): Result.002 file - promoters60/1031706
cgttaattttt

SEQ ID NO: 103919 - DNA, 11 bp, Unknown
  misc_feature (1)..( 11): Result.002 file - promoters60/1031706
gagtaatttta

SEQ ID NO: 103920 - DNA, 11 bp, Unknown
  misc_feature (1)..( 11): Result.002 file - promoters60/1031706
tcattataaaa

SEQ ID NO: 103921 - DNA, 9 bp, Unknown
  misc_feature (1)..( 9): Result.002 file - promoters60/1031706
caaaactac

SEQ ID NO: 103922 - DNA, 9 bp, Unknown
  misc_feature (1)..( 9): Result.002 file - promoters60/1031706
aaaatctaa

SEQ ID NO: 103923 - DNA, 9 bp, Unknown
  misc_feature (1)..( 9): Result.002 file - promoters60/1031706
aaaaactgt

SEQ ID NO: 103924 - DNA, 9 bp, Unknown
  misc_feature (1)..( 9): Result.002 file - promoters60/1031706
aaaatcaag

SEQ ID NO: 103925 - DNA, 9 bp, Unknown
  misc_feature (1)..( 9): Result.002 file - promoters60/1031706
caaataaac

SEQ ID NO: 103926 - DNA, 10 bp, Unknown
  misc_feature (1)..( 10): Result.002 file - promoters60/1031706
aaagatctgt

SEQ ID NO: 103927 - DNA, 13 bp, Unknown
  misc_feature (1)..( 13): Result.002 file - promoters60/1031706
atatttcatcgtt

SEQ ID NO: 103928 - DNA, 13 bp, Unknown
  misc_feature (1)..( 13): Result.002 file - promoters60/1031706
aaatttcataacc

SEQ ID NO: 103929 - DNA, 13 bp, Unknown
  misc_feature (1)..( 13): Result.002 file - promoters60/1031706
ataattccagagt

SEQ ID NO: 103930 - DNA, 13 bp, Unknown
  misc_feature (1)..( 13): Result.002 file - promoters60/1031706
ccatttgaataat

SEQ ID NO: 103931 - DNA, 13 bp, Unknown
  misc_feature (1)..( 13): Result.002 file - promoters60/1031706
caaataccaaaat

SEQ ID NO: 103932 - DNA, 13 bp, Unknown
  misc_feature (1)..( 13): Result.002 file - promoters60/1031706
ttaaatcccaagt

SEQ ID NO: 103933 - DNA, 7 bp, Unknown
  misc_feature (1)..( 7): Result.002 file - promoters60/1032026
attgaaa

SEQ ID NO: 103934 - DNA, 7 bp, Unknown
  misc_feature (1)..( 7): Result.002 file - promoters60/1032026
attaaaa

SEQ ID NO: 103935 - DNA, 6 bp, Unknown
  misc_feature (1)..( 6): Result.002 file - promoters60/1032026
tattta

SEQ ID NO: 103936 - DNA, 6 bp, Unknown
  misc_feature (1)..( 6): Result.002 file - promoters60/1032026
tattta

SEQ ID NO: 103937 - DNA, 7 bp, Unknown
  misc_feature (1)..( 7): Result.002 file - promoters60/1032026
gatattc

SEQ ID NO: 103938 - DNA, 7 bp, Unknown
  misc_feature (1)..( 7): Result.002 file - promoters60/1032026
gatcttc

SEQ ID NO: 103939 - DNA, 6 bp, Unknown
  misc_feature (1)..( 6): Result.002 file - promoters60/1032026
aaaaca

SEQ ID NO: 103940 - DNA, 6 bp, Unknown
  misc_feature (1)..( 6): Result.002 file - promoters60/1032026
aaaaca

SEQ ID NO: 103941 - DNA, 10 bp, Unknown
  misc_feature (1)..( 10): Result.002 file - promoters60/1032026
agaaaacaaa

SEQ ID NO: 103942 - DNA, 10 bp, Unknown
  misc_feature (1)..( 10): Result.002 file - promoters60/1032026
agaaaaaaaa

SEQ ID NO: 103943 - DNA, 6 bp, Unknown
  misc_feature (1)..( 6): Result.002 file - promoters60/1032026
ataata

SEQ ID NO: 103944 - DNA, 6 bp, Unknown
  misc_feature (1)..( 6): Result.002 file - promoters60/1032026
ataata

SEQ ID NO: 103945 - DNA, 7 bp, Unknown
  misc_feature (1)..( 7): Result.002 file - promoters60/1032026
aaacaca

SEQ ID NO: 103946 - DNA, 7 bp, Unknown
  misc_feature (1)..( 7): Result.002 file - promoters60/1032026
aaataca

SEQ ID NO: 103947 - DNA, 7 bp, Unknown
  misc_feature (1)..( 7): Result.002 file - promoters60/1032026
actttag

SEQ ID NO: 103948 - DNA, 7 bp, Unknown
  misc_feature (1)..( 7): Result.002 file - promoters60/1032026
actatag

SEQ ID NO: 103949 - DNA, 6 bp, Unknown
  misc_feature (1)..( 6): Result.002 file - promoters60/1032026
actata

SEQ ID NO: 103950 - DNA, 6 bp, Unknown
  misc_feature (1)..( 6): Result.002 file - promoters60/1032026
actata

SEQ ID NO: 103951 - DNA, 7 bp, Unknown
  misc_feature (1)..( 7): Result.002 file - promoters60/1032026
acattta

SEQ ID NO: 103952 - DNA, 7 bp, Unknown
  misc_feature (1)..( 7): Result.002 file - promoters60/1032026
acagtta

SEQ ID NO: 103953 - DNA, 6 bp, Unknown
  misc_feature (1)..( 6): Result.002 file - promoters60/1032026
ttaatc

SEQ ID NO: 103954 - DNA, 6 bp, Unknown
  misc_feature (1)..( 6): Result.002 file - promoters60/1032026
ttaatc

SEQ ID NO: 103955 - DNA, 8 bp, Unknown
  misc_feature (1)..( 8): Result.002 file - promoters60/1032026
taccaaaa

SEQ ID NO: 103956 - DNA, 8 bp, Unknown
  misc_feature (1)..( 8): Result.002 file - promoters60/1032026
tacaaaaa

SEQ ID NO: 103957 - DNA, 6 bp, Unknown
  misc_feature (1)..( 6): Result.002 file - promoters60/1032026
aattat

SEQ ID NO: 103958 - DNA, 6 bp, Unknown
  misc_feature (1)..( 6): Result.002 file - promoters60/1032026
aattat

SEQ ID NO: 103959 - DNA, 7 bp, Unknown
  misc_feature (1)..( 7): Result.002 file - promoters60/1032026
taatcac

SEQ ID NO: 103960 - DNA, 7 bp, Unknown
  misc_feature (1)..( 7): Result.002 file - promoters60/1032026
taaacac

SEQ ID NO: 103961 - DNA, 6 bp, Unknown
  misc_feature (1)..( 6): Result.002 file - promoters60/1032026
caaaac

SEQ ID NO: 103962 - DNA, 6 bp, Unknown
  misc_feature (1)..( 6): Result.002 file - promoters60/1032026
caaaac

SEQ ID NO: 103963 - DNA, 8 bp, Unknown
  misc_feature (1)..( 8): Result.002 file - promoters60/1032026
tactattt

SEQ ID NO: 103964 - DNA, 8 bp, Unknown
  misc_feature (1)..( 8): Result.002 file - promoters60/1032026
tacaattt

SEQ ID NO: 103965 - DNA, 9 bp, Unknown
  misc_feature (1)..( 9): Result.002 file - promoters60/1032026
cagcttttt

SEQ ID NO: 103966 - DNA, 9 bp, Unknown
  misc_feature (1)..( 9): Result.002 file - promoters60/1032026
cagtttttt

SEQ ID NO: 103967 - DNA, 6 bp, Unknown
  misc_feature (1)..( 6): Result.002 file - promoters60/1032026
acaact

SEQ ID NO: 103968 - DNA, 6 bp, Unknown
  misc_feature (1)..( 6): Result.002 file - promoters60/1032026
acaact

SEQ ID NO: 103969 - DNA, 7 bp, Unknown
  misc_feature (1)..( 7): Result.002 file - promoters60/1032026
tttctaa

SEQ ID NO: 103970 - DNA, 7 bp, Unknown
  misc_feature (1)..( 7): Result.002 file - promoters60/1032026
tttctaa

SEQ ID NO: 103971 - DNA, 6 bp, Unknown
  misc_feature (1)..( 6): Result.002 file - promoters60/1032026
ctccaa

SEQ ID NO: 103972 - DNA, 6 bp, Unknown
  misc_feature (1)..( 6): Result.002 file - promoters60/1032026
ctccaa

SEQ ID NO: 103973 - DNA, 7 bp, Unknown
  misc_feature (1)..( 7): Result.002 file - promoters60/1032026
tactatt

SEQ ID NO: 103974 - DNA, 7 bp, Unknown
  misc_feature (1)..( 7): Result.002 file - promoters60/1032026
tacaatt

SEQ ID NO: 103975 - DNA, 7 bp, Unknown
  misc_feature (1)..( 7): Result.002 file - promoters60/1032026
acataaa

SEQ ID NO: 103976 - DNA, 7 bp, Unknown
  misc_feature (1)..( 7): Result.002 file - promoters60/1032026
acataaa

SEQ ID NO: 103977 - DNA, 7 bp, Unknown
  misc_feature (1)..( 7): Result.002 file - promoters60/1032026
aaatttt

SEQ ID NO: 103978 - DNA, 7 bp, Unknown
  misc_feature (1)..( 7): Result.002 file - promoters60/1032026
aaacttt

SEQ ID NO: 103979 - DNA, 6 bp, Unknown
  misc_feature (1)..( 6): Result.002 file - promoters60/1032026
taaata

SEQ ID NO: 103980 - DNA, 6 bp, Unknown
  misc_feature (1)..( 6): Result.002 file - promoters60/1032026
taaata

SEQ ID NO: 103981 - DNA, 7 bp, Unknown
  misc_feature (1)..( 7): Result.002 file - promoters60/1032047
caatatt

SEQ ID NO: 103982 - DNA, 7 bp, Unknown
  misc_feature (1)..( 7): Result.002 file - promoters60/1032047
caaaatt

SEQ ID NO: 103983 - DNA, 7 bp, Unknown
  misc_feature (1)..( 7): Result.002 file - promoters60/1032047
caatata

SEQ ID NO: 103984 - DNA, 7 bp, Unknown
  misc_feature (1)..( 7): Result.002 file - promoters60/1032047
tttttac

SEQ ID NO: 103985 - DNA, 7 bp, Unknown
  misc_feature (1)..( 7): Result.002 file - promoters60/1032047
gttttac

SEQ ID NO: 103986 - DNA, 7 bp, Unknown
  misc_feature (1)..( 7): Result.002 file - promoters60/1032047
tttttat

SEQ ID NO: 103987 - DNA, 12 bp, Unknown
  misc_feature (1)..( 12): Result.002 file - promoters60/1032047
aaaggaaagaat

SEQ ID NO: 103988 - DNA, 12 bp, Unknown
  misc_feature (1)..( 12): Result.002 file - promoters60/1032047
acaggaaaatgg

SEQ ID NO: 103989 - DNA, 12 bp, Unknown
  misc_feature (1)..( 12): Result.002 file - promoters60/1032047
aaagcaaacaat

SEQ ID NO: 103990 - DNA, 13 bp, Unknown
  misc_feature (1)..( 13): Result.002 file - promoters60/1032047
ctcctataaattg

SEQ ID NO: 103991 - DNA, 13 bp, Unknown
  misc_feature (1)..( 13): Result.002 file - promoters60/1032047
ggtgtataaattg

SEQ ID NO: 103992 - DNA, 13 bp, Unknown
  misc_feature (1)..( 13): Result.002 file - promoters60/1032047
ctcttatatattc

SEQ ID NO: 103993 - DNA, 15 bp, Unknown
  misc_feature (1)..( 15): Result.002 file - promoters60/1032047
tatataagatatatg

SEQ ID NO: 103994 - DNA, 15 bp, Unknown
  misc_feature (1)..( 15): Result.002 file - promoters60/1032047
caaaaaagaaatatg

SEQ ID NO: 103995 - DNA, 16 bp, Unknown
  misc_feature (1)..( 16): Result.002 file - promoters60/1032047
ccataaaggaaaaagc

SEQ ID NO: 103996 - DNA, 9 bp, Unknown
  misc_feature (1)..( 9): Result.002 file - promoters60/1032047
atatgaaat

SEQ ID NO: 103997 - DNA, 9 bp, Unknown
  misc_feature (1)..( 9): Result.002 file - promoters60/1032047
ataggaata

SEQ ID NO: 103998 - DNA, 9 bp, Unknown
  misc_feature (1)..( 9): Result.002 file - promoters60/1032047
atagtaata

SEQ ID NO: 103999 - DNA, 13 bp, Unknown
  misc_feature (1)..( 13): Result.002 file - promoters60/1032047
tgtttatggaaaa

SEQ ID NO: 104000 - DNA, 13 bp, Unknown
  misc_feature (1)..( 13): Result.002 file - promoters60/1032047
ccataaaggaaaa

SEQ ID NO: 104001 - DNA, 13 bp, Unknown
  misc_feature (1)..( 13): Result.002 file - promoters60/1032047
ccaaaaaagaaat

SEQ ID NO: 104002 - DNA, 8 bp, Unknown
  misc_feature (1)..( 8): Result.002 file - promoters60/1032149
ttagtgca

SEQ ID NO: 104003 - DNA, 8 bp, Unknown
  misc_feature (1)..( 8): Result.002 file - promoters60/1032149
ttattgca

SEQ ID NO: 104004 - DNA, 6 bp, Unknown
  misc_feature (1)..( 6): Result.002 file - promoters60/1032149
aaatta

SEQ ID NO: 104005 - DNA, 6 bp, Unknown
  misc_feature (1)..( 6): Result.002 file - promoters60/1032149
aaatta

SEQ ID NO: 104006 - DNA, 9 bp, Unknown
  misc_feature (1)..( 9): Result.002 file - promoters60/1032149
ataaaaata

SEQ ID NO: 104007 - DNA, 9 bp, Unknown
  misc_feature (1)..( 9): Result.002 file - promoters60/1032149
atagaaata

SEQ ID NO: 104008 - DNA, 9 bp, Unknown
  misc_feature (1)..( 9): Result.002 file - promoters60/1032149
tttgcataa

SEQ ID NO: 104009 - DNA, 9 bp, Unknown
  misc_feature (1)..( 9): Result.002 file - promoters60/1032149
tttgtataa

SEQ ID NO: 104010 - DNA, 12 bp, Unknown
  misc_feature (1)..( 12): Result.002 file - promoters60/1032149
tttgcataatca

SEQ ID NO: 104011 - DNA, 12 bp, Unknown
  misc_feature (1)..( 12): Result.002 file - promoters60/1032149
agttattaatca

SEQ ID NO: 104012 - DNA, 12 bp, Unknown
  misc_feature (1)..( 12): Result.002 file - promoters60/1032149
agtgattcatct

SEQ ID NO: 104013 - DNA, 11 bp, Unknown
  misc_feature (1)..( 11): Result.002 file - promoters60/1032149
tcatattaagc

SEQ ID NO: 104014 - DNA, 11 bp, Unknown
  misc_feature (1)..( 11): Result.002 file - promoters60/1032149
agttattaatc

SEQ ID NO: 104015 - DNA, 11 bp, Unknown
  misc_feature (1)..( 11): Result.002 file - promoters60/1032149
agtgattcatc

SEQ ID NO: 104016 - DNA, 6 bp, Unknown
  misc_feature (1)..( 6): Result.002 file - promoters60/1032149
ttttac

SEQ ID NO: 104017 - DNA, 6 bp, Unknown
  misc_feature (1)..( 6): Result.002 file - promoters60/1032149
ttttac

SEQ ID NO: 104018 - DNA, 11 bp, Unknown
  misc_feature (1)..( 11): Result.002 file - promoters60/1032149
ttttttacaca

SEQ ID NO: 104019 - DNA, 11 bp, Unknown
  misc_feature (1)..( 11): Result.002 file - promoters60/1032149
tttcttataca

SEQ ID NO: 104020 - DNA, 6 bp, Unknown
  misc_feature (1)..( 6): Result.002 file - promoters60/1032149
ctaaca

SEQ ID NO: 104021 - DNA, 6 bp, Unknown
  misc_feature (1)..( 6): Result.002 file - promoters60/1032149
ctaaca

SEQ ID NO: 104022 - DNA, 7 bp, Unknown
  misc_feature (1)..( 7): Result.002 file - promoters60/1032149
caattaa

SEQ ID NO: 104023 - DNA, 7 bp, Unknown
  misc_feature (1)..( 7): Result.002 file - promoters60/1032149
caactaa

SEQ ID NO: 104024 - DNA, 7 bp, Unknown
  misc_feature (1)..( 7): Result.002 file - promoters60/1032149
tactatt

SEQ ID NO: 104025 - DNA, 7 bp, Unknown
  misc_feature (1)..( 7): Result.002 file - promoters60/1032149
tacaatt

SEQ ID NO: 104026 - DNA, 6 bp, Unknown
  misc_feature (1)..( 6): Result.002 file - promoters60/1032149
taaaaa

SEQ ID NO: 104027 - DNA, 6 bp, Unknown
  misc_feature (1)..( 6): Result.002 file - promoters60/1032149
taaaaa

SEQ ID NO: 104028 - DNA, 6 bp, Unknown
  misc_feature (1)..( 6): Result.002 file - promoters60/1032149
atttat

SEQ ID NO: 104029 - DNA, 6 bp, Unknown
  misc_feature (1)..( 6): Result.002 file - promoters60/1032149
atttat

SEQ ID NO: 104030 - DNA, 6 bp, Unknown
  misc_feature (1)..( 6): Result.002 file - promoters60/1032149
ttcttt

SEQ ID NO: 104031 - DNA, 6 bp, Unknown
  misc_feature (1)..( 6): Result.002 file - promoters60/1032149
ttcttt

SEQ ID NO: 104032 - DNA, 9 bp, Unknown
  misc_feature (1)..( 9): Result.002 file - promoters60/1032149
aataaatta

SEQ ID NO: 104033 - DNA, 9 bp, Unknown
  misc_feature (1)..( 9): Result.002 file - promoters60/1032149
aataaatta

SEQ ID NO: 104034 - DNA, 8 bp, Unknown
  misc_feature (1)..( 8): Result.002 file - promoters60/1032149
gatcggta

SEQ ID NO: 104035 - DNA, 8 bp, Unknown
  misc_feature (1)..( 8): Result.002 file - promoters60/1032149
gattggta

SEQ ID NO: 104036 - DNA, 6 bp, Unknown
  misc_feature (1)..( 6): Result.002 file - promoters60/1032149
atagtt

SEQ ID NO: 104037 - DNA, 6 bp, Unknown
  misc_feature (1)..( 6): Result.002 file - promoters60/1032149
atagtt

SEQ ID NO: 104038 - DNA, 10 bp, Unknown
  misc_feature (1)..( 10): Result.002 file - promoters60/1032149
attttttatc

SEQ ID NO: 104039 - DNA, 10 bp, Unknown
  misc_feature (1)..( 10): Result.002 file - promoters60/1032149
atttttaatc

SEQ ID NO: 104040 - DNA, 8 bp, Unknown
  misc_feature (1)..( 8): Result.002 file - promoters60/1032149
catactgt

SEQ ID NO: 104041 - DNA, 8 bp, Unknown
  misc_feature (1)..( 8): Result.002 file - promoters60/1032149
catattgt

SEQ ID NO: 104042 - DNA, 9 bp, Unknown
  misc_feature (1)..( 9): Result.002 file - promoters60/1032149
tttattaaa

SEQ ID NO: 104043 - DNA, 9 bp, Unknown
  misc_feature (1)..( 9): Result.002 file - promoters60/1032149
ttttttaaa

SEQ ID NO: 104044 - DNA, 6 bp, Unknown
  misc_feature (1)..( 6): Result.002 file - promoters60/1032149
acaaaa

SEQ ID NO: 104045 - DNA, 6 bp, Unknown
  misc_feature (1)..( 6): Result.002 file - promoters60/1032149
acaaaa

SEQ ID NO: 104046 - DNA, 7 bp, Unknown
  misc_feature (1)..( 7): Result.002 file - promoters60/1032149
aaaagtt

SEQ ID NO: 104047 - DNA, 7 bp, Unknown
  misc_feature (1)..( 7): Result.002 file - promoters60/1032149
aaaagtt

SEQ ID NO: 104048 - DNA, 7 bp, Unknown
  misc_feature (1)..( 7): Result.002 file - promoters60/1032149
tttctta

SEQ ID NO: 104049 - DNA, 7 bp, Unknown
  misc_feature (1)..( 7): Result.002 file - promoters60/1032149
tttttta

SEQ ID NO: 104050 - DNA, 10 bp, Unknown
  misc_feature (1)..( 10): Result.002 file - promoters60/1032160
gcaagagaca

SEQ ID NO: 104051 - DNA, 10 bp, Unknown
  misc_feature (1)..( 10): Result.002 file - promoters60/1032160
cacagagact

SEQ ID NO: 104052 - DNA, 10 bp, Unknown
  misc_feature (1)..( 10): Result.002 file - promoters60/1032160
caaagaaaca

SEQ ID NO: 104053 - DNA, 10 bp, Unknown
  misc_feature (1)..( 10): Result.002 file - promoters60/1032160
ttgagagact

SEQ ID NO: 104054 - DNA, 10 bp, Unknown
  misc_feature (1)..( 10): Result.002 file - promoters60/1032160
cacacagaat

SEQ ID NO: 104055 - DNA, 10 bp, Unknown
  misc_feature (1)..( 10): Result.002 file - promoters60/1032160
cagacagaaa

SEQ ID NO: 104056 - DNA, 12 bp, Unknown
  misc_feature (1)..( 12): Result.002 file - promoters60/1032160
aattttaagata

SEQ ID NO: 104057 - DNA, 12 bp, Unknown
  misc_feature (1)..( 12): Result.002 file - promoters60/1032160
aatattacgttt

SEQ ID NO: 104058 - DNA, 12 bp, Unknown
  misc_feature (1)..( 12): Result.002 file - promoters60/1032160
aattttgctaaa

SEQ ID NO: 104059 - DNA, 12 bp, Unknown
  misc_feature (1)..( 12): Result.002 file - promoters60/1032160
aatttatttaat

SEQ ID NO: 104060 - DNA, 12 bp, Unknown
  misc_feature (1)..( 12): Result.002 file - promoters60/1032160
gattttgctgtg

SEQ ID NO: 104061 - DNA, 12 bp, Unknown
  misc_feature (1)..( 12): Result.002 file - promoters60/1032160
cttattatgttt

SEQ ID NO: 104062 - DNA, 8 bp, Unknown
  misc_feature (1)..( 8): Result.002 file - promoters60/1032258
tgttgcta

SEQ ID NO: 104063 - DNA, 8 bp, Unknown
  misc_feature (1)..( 8): Result.002 file - promoters60/1032258
tgttgcta

SEQ ID NO: 104064 - DNA, 8 bp, Unknown
  misc_feature (1)..( 8): Result.002 file - promoters60/1032258
tgtggctt

SEQ ID NO: 104065 - DNA, 7 bp, Unknown
  misc_feature (1)..( 7): Result.002 file - promoters60/1032258
gcatttt

SEQ ID NO: 104066 - DNA, 7 bp, Unknown
  misc_feature (1)..( 7): Result.002 file - promoters60/1032258
gcagttt

SEQ ID NO: 104067 - DNA, 6 bp, Unknown
  misc_feature (1)..( 6): Result.002 file - promoters60/1032258
atattg

SEQ ID NO: 104068 - DNA, 6 bp, Unknown
  misc_feature (1)..( 6): Result.002 file - promoters60/1032258
atattg

SEQ ID NO: 104069 - DNA, 7 bp, Unknown
  misc_feature (1)..( 7): Result.002 file - promoters60/1032258
ccatata

SEQ ID NO: 104070 - DNA, 7 bp, Unknown
  misc_feature (1)..( 7): Result.002 file - promoters60/1032258
ccacata

SEQ ID NO: 104071 - DNA, 6 bp, Unknown
  misc_feature (1)..( 6): Result.002 file - promoters60/1032258
attgaa

SEQ ID NO: 104072 - DNA, 6 bp, Unknown
  misc_feature (1)..( 6): Result.002 file - promoters60/1032258
attgaa

SEQ ID NO: 104073 - DNA, 7 bp, Unknown
  misc_feature (1)..( 7): Result.002 file - promoters60/1032258
attataa

SEQ ID NO: 104074 - DNA, 7 bp, Unknown
  misc_feature (1)..( 7): Result.002 file - promoters60/1032258
attctaa

SEQ ID NO: 104075 - DNA, 6 bp, Unknown
  misc_feature (1)..( 6): Result.002 file - promoters60/1032258
aaaaac

SEQ ID NO: 104076 - DNA, 6 bp, Unknown
  misc_feature (1)..( 6): Result.002 file - promoters60/1032258
aaaaac

SEQ ID NO: 104077 - DNA, 6 bp, Unknown
  misc_feature (1)..( 6): Result.002 file - promoters60/1032258
gaaaat

SEQ ID NO: 104078 - DNA, 6 bp, Unknown
  misc_feature (1)..( 6): Result.002 file - promoters60/1032258
gaaaat

SEQ ID NO: 104079 - DNA, 6 bp, Unknown
  misc_feature (1)..( 6): Result.002 file - promoters60/1032258
atgatg

SEQ ID NO: 104080 - DNA, 6 bp, Unknown
  misc_feature (1)..( 6): Result.002 file - promoters60/1032258
atgatg

SEQ ID NO: 104081 - DNA, 6 bp, Unknown
  misc_feature (1)..( 6): Result.002 file - promoters60/1032258
tattgt

SEQ ID NO: 104082 - DNA, 6 bp, Unknown
  misc_feature (1)..( 6): Result.002 file - promoters60/1032258
tattgt

SEQ ID NO: 104083 - DNA, 7 bp, Unknown
  misc_feature (1)..( 7): Result.002 file - promoters60/1032258
atattta

SEQ ID NO: 104084 - DNA, 7 bp, Unknown
  misc_feature (1)..( 7): Result.002 file - promoters60/1032258
atattta

SEQ ID NO: 104085 - DNA, 6 bp, Unknown
  misc_feature (1)..( 6): Result.002 file - promoters60/1032258
agtatt

SEQ ID NO: 104086 - DNA, 6 bp, Unknown
  misc_feature (1)..( 6): Result.002 file - promoters60/1032258
agtatt

SEQ ID NO: 104087 - DNA, 6 bp, Unknown
  misc_feature (1)..( 6): Result.002 file - promoters60/1032258
aataca

SEQ ID NO: 104088 - DNA, 6 bp, Unknown
  misc_feature (1)..( 6): Result.002 file - promoters60/1032258
aataca

SEQ ID NO: 104089 - DNA, 7 bp, Unknown
  misc_feature (1)..( 7): Result.002 file - promoters60/1032258
attctct

SEQ ID NO: 104090 - DNA, 7 bp, Unknown
  misc_feature (1)..( 7): Result.002 file - promoters60/1032258
attttct

SEQ ID NO: 104091 - DNA, 7 bp, Unknown
  misc_feature (1)..( 7): Result.002 file - promoters60/1032258
tttttaa

SEQ ID NO: 104092 - DNA, 7 bp, Unknown
  misc_feature (1)..( 7): Result.002 file - promoters60/1032258
tttataa

SEQ ID NO: 104093 - DNA, 6 bp, Unknown
  misc_feature (1)..( 6): Result.002 file - promoters60/1032258
tgtaaa

SEQ ID NO: 104094 - DNA, 6 bp, Unknown
  misc_feature (1)..( 6): Result.002 file - promoters60/1032258
tgtaaa

SEQ ID NO: 104095 - DNA, 7 bp, Unknown
  misc_feature (1)..( 7): Result.002 file - promoters60/1032266
agtcttt

SEQ ID NO: 104096 - DNA, 7 bp, Unknown
  misc_feature (1)..( 7): Result.002 file - promoters60/1032266
agtgttt

SEQ ID NO: 104097 - DNA, 6 bp, Unknown
  misc_feature (1)..( 6): Result.002 file - promoters60/1032266
attcta

SEQ ID NO: 104098 - DNA, 6 bp, Unknown
  misc_feature (1)..( 6): Result.002 file - promoters60/1032266
attcta

SEQ ID NO: 104099 - DNA, 6 bp, Unknown
  misc_feature (1)..( 6): Result.002 file - promoters60/1032266
gaacat

SEQ ID NO: 104100 - DNA, 6 bp, Unknown
  misc_feature (1)..( 6): Result.002 file - promoters60/1032266
gaacat

SEQ ID NO: 104101 - DNA, 6 bp, Unknown
  misc_feature (1)..( 6): Result.002 file - promoters60/1032266
tctaca

SEQ ID NO: 104102 - DNA, 6 bp, Unknown
  misc_feature (1)..( 6): Result.002 file - promoters60/1032266
tctaca

SEQ ID NO: 104103 - DNA, 6 bp, Unknown
  misc_feature (1)..( 6): Result.002 file - promoters60/1032266
cgtaga

SEQ ID NO: 104104 - DNA, 6 bp, Unknown
  misc_feature (1)..( 6): Result.002 file - promoters60/1032266
cgtaga

SEQ ID NO: 104105 - DNA, 11 bp, Unknown
  misc_feature (1)..( 11): Result.002 file - promoters60/1032266
atttattagtg

SEQ ID NO: 104106 - DNA, 11 bp, Unknown
  misc_feature (1)..( 11): Result.002 file - promoters60/1032266
atttatttgtg

SEQ ID NO: 104107 - DNA, 6 bp, Unknown
  misc_feature (1)..( 6): Result.002 file - promoters60/1032266
aaatat

SEQ ID NO: 104108 - DNA, 6 bp, Unknown
  misc_feature (1)..( 6): Result.002 file - promoters60/1032266
aaatat

SEQ ID NO: 104109 - DNA, 8 bp, Unknown
  misc_feature (1)..( 8): Result.002 file - promoters60/1032266
atattttc

SEQ ID NO: 104110 - DNA, 8 bp, Unknown
  misc_feature (1)..( 8): Result.002 file - promoters60/1032266
atatcttc

SEQ ID NO: 104111 - DNA, 8 bp, Unknown
  misc_feature (1)..( 8): Result.002 file - promoters60/1032266
aaaatttg

SEQ ID NO: 104112 - DNA, 8 bp, Unknown
  misc_feature (1)..( 8): Result.002 file - promoters60/1032266
aaaatttg

SEQ ID NO: 104113 - DNA, 7 bp, Unknown
  misc_feature (1)..( 7): Result.002 file - promoters60/1032266
atgaact

SEQ ID NO: 104114 - DNA, 7 bp, Unknown
  misc_feature (1)..( 7): Result.002 file - promoters60/1032266
atgtact

SEQ ID NO: 104115 - DNA, 6 bp, Unknown
  misc_feature (1)..( 6): Result.002 file - promoters60/1032266
aaaaag

SEQ ID NO: 104116 - DNA, 6 bp, Unknown
  misc_feature (1)..( 6): Result.002 file - promoters60/1032266
aaaaag

SEQ ID NO: 104117 - DNA, 7 bp, Unknown
  misc_feature (1)..( 7): Result.002 file - promoters60/1032266
agattta

SEQ ID NO: 104118 - DNA, 7 bp, Unknown
  misc_feature (1)..( 7): Result.002 file - promoters60/1032266
agattta

SEQ ID NO: 104119 - DNA, 6 bp, Unknown
  misc_feature (1)..( 6): Result.002 file - promoters60/1032266
attatt

SEQ ID NO: 104120 - DNA, 6 bp, Unknown
  misc_feature (1)..( 6): Result.002 file - promoters60/1032266
attatt

SEQ ID NO: 104121 - DNA, 10 bp, Unknown
  misc_feature (1)..( 10): Result.002 file - promoters60/1032266
tttgcaacgt

SEQ ID NO: 104122 - DNA, 10 bp, Unknown
  misc_feature (1)..( 10): Result.002 file - promoters60/1032266
tttgtaacgt

SEQ ID NO: 104123 - DNA, 6 bp, Unknown
  misc_feature (1)..( 6): Result.002 file - promoters60/1032266
tgatat

SEQ ID NO: 104124 - DNA, 6 bp, Unknown
  misc_feature (1)..( 6): Result.002 file - promoters60/1032266
tgatat

SEQ ID NO: 104125 - DNA, 6 bp, Unknown
  misc_feature (1)..( 6): Result.002 file - promoters60/1032266
ttaaaa

SEQ ID NO: 104126 - DNA, 6 bp, Unknown
  misc_feature (1)..( 6): Result.002 file - promoters60/1032266
ttaaaa

SEQ ID NO: 104127 - DNA, 8 bp, Unknown
  misc_feature (1)..( 8): Result.002 file - promoters60/1032266
ttcgttaa

SEQ ID NO: 104128 - DNA, 8 bp, Unknown
  misc_feature (1)..( 8): Result.002 file - promoters60/1032266
ttcattaa

SEQ ID NO: 104129 - DNA, 12 bp, Unknown
  misc_feature (1)..( 12): Result.002 file - promoters60/1032316
aagcaaaacaca

SEQ ID NO: 104130 - DNA, 12 bp, Unknown
  misc_feature (1)..( 12): Result.002 file - promoters60/1032316
ccacaaaacatc

SEQ ID NO: 104131 - DNA, 12 bp, Unknown
  misc_feature (1)..( 12): Result.002 file - promoters60/1032316
actaaaaacaga

SEQ ID NO: 104132 - DNA, 12 bp, Unknown
  misc_feature (1)..( 12): Result.002 file - promoters60/1032316
gaataaaaaatc

SEQ ID NO: 104133 - DNA, 12 bp, Unknown
  misc_feature (1)..( 12): Result.002 file - promoters60/1032316
actaaaaactct

SEQ ID NO: 104134 - DNA, 12 bp, Unknown
  misc_feature (1)..( 12): Result.002 file - promoters60/1032316
ttctaaatctcg

SEQ ID NO: 104135 - DNA, 9 bp, Unknown
  misc_feature (1)..( 9): Result.002 file - promoters60/1032400
gaagtggaa

SEQ ID NO: 104136 - DNA, 9 bp, Unknown
  misc_feature (1)..( 9): Result.002 file - promoters60/1032400
gaagaggaa

SEQ ID NO: 104137 - DNA, 8 bp, Unknown
  misc_feature (1)..( 8): Result.002 file - promoters60/1032400
aatgagct

SEQ ID NO: 104138 - DNA, 8 bp, Unknown
  misc_feature (1)..( 8): Result.002 file - promoters60/1032400
aatgtgct

SEQ ID NO: 104139 - DNA, 9 bp, Unknown
  misc_feature (1)..( 9): Result.002 file - promoters60/1032400
tgctaaatt

SEQ ID NO: 104140 - DNA, 9 bp, Unknown
  misc_feature (1)..( 9): Result.002 file - promoters60/1032400
tgcttaatt

SEQ ID NO: 104141 - DNA, 7 bp, Unknown
  misc_feature (1)..( 7): Result.002 file - promoters60/1032400
taatgaa

SEQ ID NO: 104142 - DNA, 7 bp, Unknown
  misc_feature (1)..( 7): Result.002 file - promoters60/1032400
taatgaa

SEQ ID NO: 104143 - DNA, 8 bp, Unknown
  misc_feature (1)..( 8): Result.002 file - promoters60/1032400
tggctgtt

SEQ ID NO: 104144 - DNA, 8 bp, Unknown
  misc_feature (1)..( 8): Result.002 file - promoters60/1032400
tggttgtt

SEQ ID NO: 104145 - DNA, 8 bp, Unknown
  misc_feature (1)..( 8): Result.002 file - promoters60/1032400
aattgatt

SEQ ID NO: 104146 - DNA, 8 bp, Unknown
  misc_feature (1)..( 8): Result.002 file - promoters60/1032400
aatttatt

SEQ ID NO: 104147 - DNA, 8 bp, Unknown
  misc_feature (1)..( 8): Result.002 file - promoters60/1032400
ctttgatt

SEQ ID NO: 104148 - DNA, 7 bp, Unknown
  misc_feature (1)..( 7): Result.002 file - promoters60/1032400
gtttaat

SEQ ID NO: 104149 - DNA, 7 bp, Unknown
  misc_feature (1)..( 7): Result.002 file - promoters60/1032400
gttaaat

SEQ ID NO: 104150 - DNA, 9 bp, Unknown
  misc_feature (1)..( 9): Result.002 file - promoters60/1032400
cccgggaaa

SEQ ID NO: 104151 - DNA, 9 bp, Unknown
  misc_feature (1)..( 9): Result.002 file - promoters60/1032400
cccgagaaa

SEQ ID NO: 104152 - DNA, 7 bp, Unknown
  misc_feature (1)..( 7): Result.002 file - promoters60/1032400
acagaag

SEQ ID NO: 104153 - DNA, 7 bp, Unknown
  misc_feature (1)..( 7): Result.002 file - promoters60/1032400
acacaag

SEQ ID NO: 104154 - DNA, 7 bp, Unknown
  misc_feature (1)..( 7): Result.002 file - promoters60/1032400
agaaaaa

SEQ ID NO: 104155 - DNA, 7 bp, Unknown
  misc_feature (1)..( 7): Result.002 file - promoters60/1032400
agagaaa

SEQ ID NO: 104156 - DNA, 7 bp, Unknown
  misc_feature (1)..( 7): Result.002 file - promoters60/1032400
ttcaatg

SEQ ID NO: 104157 - DNA, 7 bp, Unknown
  misc_feature (1)..( 7): Result.002 file - promoters60/1032400
ttcaatg

SEQ ID NO: 104158 - DNA, 8 bp, Unknown
  misc_feature (1)..( 8): Result.002 file - promoters60/1032400
tctttatt

SEQ ID NO: 104159 - DNA, 8 bp, Unknown
  misc_feature (1)..( 8): Result.002 file - promoters60/1032400
tcttaatt

SEQ ID NO: 104160 - DNA, 6 bp, Unknown
  misc_feature (1)..( 6): Result.002 file - promoters60/1032436
ttggtt

SEQ ID NO: 104161 - DNA, 6 bp, Unknown
  misc_feature (1)..( 6): Result.002 file - promoters60/1032436
ttggtt

SEQ ID NO: 104162 - DNA, 8 bp, Unknown
  misc_feature (1)..( 8): Result.002 file - promoters60/1032436
tactcaaa

SEQ ID NO: 104163 - DNA, 8 bp, Unknown
  misc_feature (1)..( 8): Result.002 file - promoters60/1032436
tactgaaa

SEQ ID NO: 104164 - DNA, 8 bp, Unknown
  misc_feature (1)..( 8): Result.002 file - promoters60/1032436
aactcaat

SEQ ID NO: 104165 - DNA, 6 bp, Unknown
  misc_feature (1)..( 6): Result.002 file - promoters60/1032436
ttctgt

SEQ ID NO: 104166 - DNA, 6 bp, Unknown
  misc_feature (1)..( 6): Result.002 file - promoters60/1032436
ttctgt

SEQ ID NO: 104167 - DNA, 7 bp, Unknown
  misc_feature (1)..( 7): Result.002 file - promoters60/1032436
gaaaata

SEQ ID NO: 104168 - DNA, 7 bp, Unknown
  misc_feature (1)..( 7): Result.002 file - promoters60/1032436
gaacata

SEQ ID NO: 104169 - DNA, 7 bp, Unknown
  misc_feature (1)..( 7): Result.002 file - promoters60/1032436
ggttttg

SEQ ID NO: 104170 - DNA, 7 bp, Unknown
  misc_feature (1)..( 7): Result.002 file - promoters60/1032436
ggttttg

SEQ ID NO: 104171 - DNA, 6 bp, Unknown
  misc_feature (1)..( 6): Result.002 file - promoters60/1032436
gaaaaa

SEQ ID NO: 104172 - DNA, 6 bp, Unknown
  misc_feature (1)..( 6): Result.002 file - promoters60/1032436
gaaaaa

SEQ ID NO: 104173 - DNA, 6 bp, Unknown
  misc_feature (1)..( 6): Result.002 file - promoters60/1032436
aataat

SEQ ID NO: 104174 - DNA, 6 bp, Unknown
  misc_feature (1)..( 6): Result.002 file - promoters60/1032436
aataat

SEQ ID NO: 104175 - DNA, 8 bp, Unknown
  misc_feature (1)..( 8): Result.002 file - promoters60/1032436
gccactac

SEQ ID NO: 104176 - DNA, 8 bp, Unknown
  misc_feature (1)..( 8): Result.002 file - promoters60/1032436
gcctctac

SEQ ID NO: 104177 - DNA, 7 bp, Unknown
  misc_feature (1)..( 7): Result.002 file - promoters60/1032436
acttttc

SEQ ID NO: 104178 - DNA, 7 bp, Unknown
  misc_feature (1)..( 7): Result.002 file - promoters60/1032436
actgttc

SEQ ID NO: 104179 - DNA, 7 bp, Unknown
  misc_feature (1)..( 7): Result.002 file - promoters60/1032436
aaagtaa

SEQ ID NO: 104180 - DNA, 7 bp, Unknown
  misc_feature (1)..( 7): Result.002 file - promoters60/1032436
aaattaa

SEQ ID NO: 104181 - DNA, 9 bp, Unknown
  misc_feature (1)..( 9): Result.002 file - promoters60/1032436
ttaaaaaaa

SEQ ID NO: 104182 - DNA, 9 bp, Unknown
  misc_feature (1)..( 9): Result.002 file - promoters60/1032436
ttaaacaaa

SEQ ID NO: 104183 - DNA, 8 bp, Unknown
  misc_feature (1)..( 8): Result.002 file - promoters60/1032436
ctcattta

SEQ ID NO: 104184 - DNA, 8 bp, Unknown
  misc_feature (1)..( 8): Result.002 file - promoters60/1032436
ctcaatta

SEQ ID NO: 104185 - DNA, 7 bp, Unknown
  misc_feature (1)..( 7): Result.002 file - promoters60/1032436
tatttgt

SEQ ID NO: 104186 - DNA, 7 bp, Unknown
  misc_feature (1)..( 7): Result.002 file - promoters60/1032436
tatttgt

SEQ ID NO: 104187 - DNA, 9 bp, Unknown
  misc_feature (1)..( 9): Result.002 file - promoters60/1032436
taatgtatt

SEQ ID NO: 104188 - DNA, 9 bp, Unknown
  misc_feature (1)..( 9): Result.002 file - promoters60/1032436
taatctatt

SEQ ID NO: 104189 - DNA, 9 bp, Unknown
  misc_feature (1)..( 9): Result.002 file - promoters60/1032436
gattcgttt

SEQ ID NO: 104190 - DNA, 9 bp, Unknown
  misc_feature (1)..( 9): Result.002 file - promoters60/1032436
gatttgttt

SEQ ID NO: 104191 - DNA, 7 bp, Unknown
  misc_feature (1)..( 7): Result.002 file - promoters60/1032436
gtttctt

SEQ ID NO: 104192 - DNA, 7 bp, Unknown
  misc_feature (1)..( 7): Result.002 file - promoters60/1032436
gttcctt

SEQ ID NO: 104193 - DNA, 13 bp, Unknown
  misc_feature (1)..( 13): Result.002 file - promoters60/1032436
aagaattagtgat

SEQ ID NO: 104194 - DNA, 13 bp, Unknown
  misc_feature (1)..( 13): Result.002 file - promoters60/1032436
aaggattaatgat

SEQ ID NO: 104195 - DNA, 12 bp, Unknown
  misc_feature (1)..( 12): Result.002 file - promoters60/1032668
taaaaatgaatt

SEQ ID NO: 104196 - DNA, 12 bp, Unknown
  misc_feature (1)..( 12): Result.002 file - promoters60/1032668
taaaaatgatac

SEQ ID NO: 104197 - DNA, 12 bp, Unknown
  misc_feature (1)..( 12): Result.002 file - promoters60/1032668
gtttaatggatt

SEQ ID NO: 104198 - DNA, 12 bp, Unknown
  misc_feature (1)..( 12): Result.002 file - promoters60/1032668
tgaaaaggatga

SEQ ID NO: 104199 - DNA, 9 bp, Unknown
  misc_feature (1)..( 9): Result.002 file - promoters60/1032668
aaacatgaa

SEQ ID NO: 104200 - DNA, 9 bp, Unknown
  misc_feature (1)..( 9): Result.002 file - promoters60/1032668
aaaaatgca

SEQ ID NO: 104201 - DNA, 9 bp, Unknown
  misc_feature (1)..( 9): Result.002 file - promoters60/1032668
ggacatgaa

SEQ ID NO: 104202 - DNA, 9 bp, Unknown
  misc_feature (1)..( 9): Result.002 file - promoters60/1032668
aaaaataaa

SEQ ID NO: 104203 - DNA, 6 bp, Unknown
  misc_feature (1)..( 6): Result.002 file - promoters60/1032698
caaatc

SEQ ID NO: 104204 - DNA, 6 bp, Unknown
  misc_feature (1)..( 6): Result.002 file - promoters60/1032698
caaatc

SEQ ID NO: 104205 - DNA, 7 bp, Unknown
  misc_feature (1)..( 7): Result.002 file - promoters60/1032698
ttctcta

SEQ ID NO: 104206 - DNA, 7 bp, Unknown
  misc_feature (1)..( 7): Result.002 file - promoters60/1032698
ttcacta

SEQ ID NO: 104207 - DNA, 7 bp, Unknown
  misc_feature (1)..( 7): Result.002 file - promoters60/1032698
agatgga

SEQ ID NO: 104208 - DNA, 7 bp, Unknown
  misc_feature (1)..( 7): Result.002 file - promoters60/1032698
agacgga

SEQ ID NO: 104209 - DNA, 7 bp, Unknown
  misc_feature (1)..( 7): Result.002 file - promoters60/1032698
cataatt

SEQ ID NO: 104210 - DNA, 7 bp, Unknown
  misc_feature (1)..( 7): Result.002 file - promoters60/1032698
cattatt

SEQ ID NO: 104211 - DNA, 7 bp, Unknown
  misc_feature (1)..( 7): Result.002 file - promoters60/1032698
tttcagc

SEQ ID NO: 104212 - DNA, 7 bp, Unknown
  misc_feature (1)..( 7): Result.002 file - promoters60/1032698
ttttagc

SEQ ID NO: 104213 - DNA, 6 bp, Unknown
  misc_feature (1)..( 6): Result.002 file - promoters60/1032698
actttt

SEQ ID NO: 104214 - DNA, 6 bp, Unknown
  misc_feature (1)..( 6): Result.002 file - promoters60/1032698
actttt

SEQ ID NO: 104215 - DNA, 7 bp, Unknown
  misc_feature (1)..( 7): Result.002 file - promoters60/1032698
tataaaa

SEQ ID NO: 104216 - DNA, 7 bp, Unknown
  misc_feature (1)..( 7): Result.002 file - promoters60/1032698
tataaaa

SEQ ID NO: 104217 - DNA, 6 bp, Unknown
  misc_feature (1)..( 6): Result.002 file - promoters60/1032698
gaatct

SEQ ID NO: 104218 - DNA, 6 bp, Unknown
  misc_feature (1)..( 6): Result.002 file - promoters60/1032698
gaatct

SEQ ID NO: 104219 - DNA, 7 bp, Unknown
  misc_feature (1)..( 7): Result.002 file - promoters60/1032698
tggaaag

SEQ ID NO: 104220 - DNA, 7 bp, Unknown
  misc_feature (1)..( 7): Result.002 file - promoters60/1032698
tggaaat

SEQ ID NO: 104221 - DNA, 7 bp, Unknown
  misc_feature (1)..( 7): Result.002 file - promoters60/1032698
aggaaat

SEQ ID NO: 104222 - DNA, 6 bp, Unknown
  misc_feature (1)..( 6): Result.002 file - promoters60/1032698
gagata

SEQ ID NO: 104223 - DNA, 6 bp, Unknown
  misc_feature (1)..( 6): Result.002 file - promoters60/1032698
gagata

SEQ ID NO: 104224 - DNA, 9 bp, Unknown
  misc_feature (1)..( 9): Result.002 file - promoters60/1032698
caatcaaaa

SEQ ID NO: 104225 - DNA, 9 bp, Unknown
  misc_feature (1)..( 9): Result.002 file - promoters60/1032698
caaacaaaa

SEQ ID NO: 104226 - DNA, 7 bp, Unknown
  misc_feature (1)..( 7): Result.002 file - promoters60/1032698
tattttt

SEQ ID NO: 104227 - DNA, 7 bp, Unknown
  misc_feature (1)..( 7): Result.002 file - promoters60/1032698
tatattt

SEQ ID NO: 104228 - DNA, 8 bp, Unknown
  misc_feature (1)..( 8): Result.002 file - promoters60/1032698
atctgaaa

SEQ ID NO: 104229 - DNA, 8 bp, Unknown
  misc_feature (1)..( 8): Result.002 file - promoters60/1032698
atcagaaa

SEQ ID NO: 104230 - DNA, 7 bp, Unknown
  misc_feature (1)..( 7): Result.002 file - promoters60/1032698
atgagaa

SEQ ID NO: 104231 - DNA, 7 bp, Unknown
  misc_feature (1)..( 7): Result.002 file - promoters60/1032698
atgagaa

SEQ ID NO: 104232 - DNA, 7 bp, Unknown
  misc_feature (1)..( 7): Result.002 file - promoters60/1032698
aggttca

SEQ ID NO: 104233 - DNA, 7 bp, Unknown
  misc_feature (1)..( 7): Result.002 file - promoters60/1032698
aggctca

SEQ ID NO: 104234 - DNA, 6 bp, Unknown
  misc_feature (1)..( 6): Result.002 file - promoters60/1032698
gaagat

SEQ ID NO: 104235 - DNA, 6 bp, Unknown
  misc_feature (1)..( 6): Result.002 file - promoters60/1032698
gaagat

SEQ ID NO: 104236 - DNA, 7 bp, Unknown
  misc_feature (1)..( 7): Result.002 file - promoters60/1032698
ttggtcc

SEQ ID NO: 104237 - DNA, 7 bp, Unknown
  misc_feature (1)..( 7): Result.002 file - promoters60/1032698
ttgatcc

SEQ ID NO: 104238 - DNA, 6 bp, Unknown
  misc_feature (1)..( 6): Result.002 file - promoters60/1032698
acttgg

SEQ ID NO: 104239 - DNA, 6 bp, Unknown
  misc_feature (1)..( 6): Result.002 file - promoters60/1032698
acttgg

SEQ ID NO: 104240 - DNA, 8 bp, Unknown
  misc_feature (1)..( 8): Result.002 file - promoters60/1032698
aaagaaaa

SEQ ID NO: 104241 - DNA, 8 bp, Unknown
  misc_feature (1)..( 8): Result.002 file - promoters60/1032698
aaagaaaa

SEQ ID NO: 104242 - DNA, 7 bp, Unknown
  misc_feature (1)..( 7): Result.002 file - promoters60/1032709
aatatgt

SEQ ID NO: 104243 - DNA, 7 bp, Unknown
  misc_feature (1)..( 7): Result.002 file - promoters60/1032709
aatgtgt

SEQ ID NO: 104244 - DNA, 8 bp, Unknown
  misc_feature (1)..( 8): Result.002 file - promoters60/1032709
tgatggat

SEQ ID NO: 104245 - DNA, 8 bp, Unknown
  misc_feature (1)..( 8): Result.002 file - promoters60/1032709
tgatggat

SEQ ID NO: 104246 - DNA, 6 bp, Unknown
  misc_feature (1)..( 6): Result.002 file - promoters60/1032709
cagtct

SEQ ID NO: 104247 - DNA, 6 bp, Unknown
  misc_feature (1)..( 6): Result.002 file - promoters60/1032709
cagtct

SEQ ID NO: 104248 - DNA, 8 bp, Unknown
  misc_feature (1)..( 8): Result.002 file - promoters60/1032709
tcctagaa

SEQ ID NO: 104249 - DNA, 8 bp, Unknown
  misc_feature (1)..( 8): Result.002 file - promoters60/1032709
tccttgaa

SEQ ID NO: 104250 - DNA, 7 bp, Unknown
  misc_feature (1)..( 7): Result.002 file - promoters60/1032709
ctggtct

SEQ ID NO: 104251 - DNA, 7 bp, Unknown
  misc_feature (1)..( 7): Result.002 file - promoters60/1032709
ctgttct

SEQ ID NO: 104252 - DNA, 7 bp, Unknown
  misc_feature (1)..( 7): Result.002 file - promoters60/1032709
ttgactc

SEQ ID NO: 104253 - DNA, 7 bp, Unknown
  misc_feature (1)..( 7): Result.002 file - promoters60/1032709
ttgactc

SEQ ID NO: 104254 - DNA, 7 bp, Unknown
  misc_feature (1)..( 7): Result.002 file - promoters60/1032709
agacgag

SEQ ID NO: 104255 - DNA, 7 bp, Unknown
  misc_feature (1)..( 7): Result.002 file - promoters60/1032709
agacgag

SEQ ID NO: 104256 - DNA, 9 bp, Unknown
  misc_feature (1)..( 9): Result.002 file - promoters60/1032709
agaaacaaa

SEQ ID NO: 104257 - DNA, 9 bp, Unknown
  misc_feature (1)..( 9): Result.002 file - promoters60/1032709
agaaaaaaa

SEQ ID NO: 104258 - DNA, 7 bp, Unknown
  misc_feature (1)..( 7): Result.002 file - promoters60/1032709
atattta

SEQ ID NO: 104259 - DNA, 7 bp, Unknown
  misc_feature (1)..( 7): Result.002 file - promoters60/1032709
atattta

SEQ ID NO: 104260 - DNA, 7 bp, Unknown
  misc_feature (1)..( 7): Result.002 file - promoters60/1032709
aacacag

SEQ ID NO: 104261 - DNA, 7 bp, Unknown
  misc_feature (1)..( 7): Result.002 file - promoters60/1032709
aactcag

SEQ ID NO: 104262 - DNA, 9 bp, Unknown
  misc_feature (1)..( 9): Result.002 file - promoters60/1032709
ttgttctta

SEQ ID NO: 104263 - DNA, 9 bp, Unknown
  misc_feature (1)..( 9): Result.002 file - promoters60/1032709
ttgttatta

SEQ ID NO: 104264 - DNA, 6 bp, Unknown
  misc_feature (1)..( 6): Result.002 file - promoters60/1032709
aatatc

SEQ ID NO: 104265 - DNA, 6 bp, Unknown
  misc_feature (1)..( 6): Result.002 file - promoters60/1032709
aatatc

SEQ ID NO: 104266 - DNA, 7 bp, Unknown
  misc_feature (1)..( 7): Result.002 file - promoters60/1032709
ctaaacc

SEQ ID NO: 104267 - DNA, 7 bp, Unknown
  misc_feature (1)..( 7): Result.002 file - promoters60/1032709
ctaaacc

SEQ ID NO: 104268 - DNA, 7 bp, Unknown
  misc_feature (1)..( 7): Result.002 file - promoters60/1032709
cgtattg

SEQ ID NO: 104269 - DNA, 7 bp, Unknown
  misc_feature (1)..( 7): Result.002 file - promoters60/1032709
cgtattg

SEQ ID NO: 104270 - DNA, 7 bp, Unknown
  misc_feature (1)..( 7): Result.002 file - promoters60/1032709
aaatcaa

SEQ ID NO: 104271 - DNA, 7 bp, Unknown
  misc_feature (1)..( 7): Result.002 file - promoters60/1032709
aaaccaa

SEQ ID NO: 104272 - DNA, 7 bp, Unknown
  misc_feature (1)..( 7): Result.002 file - promoters60/1032709
gaaaaaa

SEQ ID NO: 104273 - DNA, 7 bp, Unknown
  misc_feature (1)..( 7): Result.002 file - promoters60/1032709
gaaaaaa

SEQ ID NO: 104274 - DNA, 9 bp, Unknown
  misc_feature (1)..( 9): Result.002 file - promoters60/1032713
tttcaaaac

SEQ ID NO: 104275 - DNA, 9 bp, Unknown
  misc_feature (1)..( 9): Result.002 file - promoters60/1032713
tttgaaaca

SEQ ID NO: 104276 - DNA, 9 bp, Unknown
  misc_feature (1)..( 9): Result.002 file - promoters60/1032713
attgaaaca

SEQ ID NO: 104277 - DNA, 9 bp, Unknown
  misc_feature (1)..( 9): Result.002 file - promoters60/1032713
acacggcaa

SEQ ID NO: 104278 - DNA, 9 bp, Unknown
  misc_feature (1)..( 9): Result.002 file - promoters60/1032713
aaacgccaa

SEQ ID NO: 104279 - DNA, 9 bp, Unknown
  misc_feature (1)..( 9): Result.002 file - promoters60/1032713
aaaagccat

SEQ ID NO: 104280 - DNA, 7 bp, Unknown
  misc_feature (1)..( 7): Result.002 file - promoters60/1032713
caacata

SEQ ID NO: 104281 - DNA, 7 bp, Unknown
  misc_feature (1)..( 7): Result.002 file - promoters60/1032713
caaaata

SEQ ID NO: 104282 - DNA, 7 bp, Unknown
  misc_feature (1)..( 7): Result.002 file - promoters60/1032713
caaaata

SEQ ID NO: 104283 - DNA, 10 bp, Unknown
  misc_feature (1)..( 10): Result.002 file - promoters60/1032713
tgtactaact

SEQ ID NO: 104284 - DNA, 10 bp, Unknown
  misc_feature (1)..( 10): Result.002 file - promoters60/1032713
attacttact

SEQ ID NO: 104285 - DNA, 10 bp, Unknown
  misc_feature (1)..( 10): Result.002 file - promoters60/1032713
attgcttata

SEQ ID NO: 104286 - DNA, 8 bp, Unknown
  misc_feature (1)..( 8): Result.002 file - promoters60/1032713
aaatccat

SEQ ID NO: 104287 - DNA, 8 bp, Unknown
  misc_feature (1)..( 8): Result.002 file - promoters60/1032713
aaagccat

SEQ ID NO: 104288 - DNA, 9 bp, Unknown
  misc_feature (1)..( 9): Result.002 file - promoters60/1032713
aaacgccaa

SEQ ID NO: 104289 - DNA, 7 bp, Unknown
  misc_feature (1)..( 7): Result.002 file - promoters60/1032730
ctaaata

SEQ ID NO: 104290 - DNA, 7 bp, Unknown
  misc_feature (1)..( 7): Result.002 file - promoters60/1032730
ctagata

SEQ ID NO: 104291 - DNA, 9 bp, Unknown
  misc_feature (1)..( 9): Result.002 file - promoters60/1032730
gtagtatat

SEQ ID NO: 104292 - DNA, 9 bp, Unknown
  misc_feature (1)..( 9): Result.002 file - promoters60/1032730
gtagtatat

SEQ ID NO: 104293 - DNA, 8 bp, Unknown
  misc_feature (1)..( 8): Result.002 file - promoters60/1032730
tgtcgttt

SEQ ID NO: 104294 - DNA, 8 bp, Unknown
  misc_feature (1)..( 8): Result.002 file - promoters60/1032730
tgtggttt

SEQ ID NO: 104295 - DNA, 6 bp, Unknown
  misc_feature (1)..( 6): Result.002 file - promoters60/1032730
cccaaa

SEQ ID NO: 104296 - DNA, 6 bp, Unknown
  misc_feature (1)..( 6): Result.002 file - promoters60/1032730
cccaaa

SEQ ID NO: 104297 - DNA, 6 bp, Unknown
  misc_feature (1)..( 6): Result.002 file - promoters60/1032730
acaaat

SEQ ID NO: 104298 - DNA, 6 bp, Unknown
  misc_feature (1)..( 6): Result.002 file - promoters60/1032730
acaaat

SEQ ID NO: 104299 - DNA, 7 bp, Unknown
  misc_feature (1)..( 7): Result.002 file - promoters60/1032730
aaattca

SEQ ID NO: 104300 - DNA, 7 bp, Unknown
  misc_feature (1)..( 7): Result.002 file - promoters60/1032730
aaaatca

SEQ ID NO: 104301 - DNA, 8 bp, Unknown
  misc_feature (1)..( 8): Result.002 file - promoters60/1032730
ttttaaaa

SEQ ID NO: 104302 - DNA, 8 bp, Unknown
  misc_feature (1)..( 8): Result.002 file - promoters60/1032730
ttttcaaa

SEQ ID NO: 104303 - DNA, 7 bp, Unknown
  misc_feature (1)..( 7): Result.002 file - promoters60/1032730
aaaaaga

SEQ ID NO: 104304 - DNA, 7 bp, Unknown
  misc_feature (1)..( 7): Result.002 file - promoters60/1032730
aaagaga

SEQ ID NO: 104305 - DNA, 8 bp, Unknown
  misc_feature (1)..( 8): Result.002 file - promoters60/1032730
cgtttata

SEQ ID NO: 104306 - DNA, 8 bp, Unknown
  misc_feature (1)..( 8): Result.002 file - promoters60/1032730
cgttaata

SEQ ID NO: 104307 - DNA, 6 bp, Unknown
  misc_feature (1)..( 6): Result.002 file - promoters60/1032730
agaatc

SEQ ID NO: 104308 - DNA, 6 bp, Unknown
  misc_feature (1)..( 6): Result.002 file - promoters60/1032730
agaatc

SEQ ID NO: 104309 - DNA, 6 bp, Unknown
  misc_feature (1)..( 6): Result.002 file - promoters60/1032730
actcaa

SEQ ID NO: 104310 - DNA, 6 bp, Unknown
  misc_feature (1)..( 6): Result.002 file - promoters60/1032730
actcaa

SEQ ID NO: 104311 - DNA, 8 bp, Unknown
  misc_feature (1)..( 8): Result.002 file - promoters60/1032730
aatcaaaa

SEQ ID NO: 104312 - DNA, 8 bp, Unknown
  misc_feature (1)..( 8): Result.002 file - promoters60/1032730
aatcaaaa

SEQ ID NO: 104313 - DNA, 6 bp, Unknown
  misc_feature (1)..( 6): Result.002 file - promoters60/1032730
cagaaa

SEQ ID NO: 104314 - DNA, 6 bp, Unknown
  misc_feature (1)..( 6): Result.002 file - promoters60/1032730
cagaaa

SEQ ID NO: 104315 - DNA, 7 bp, Unknown
  misc_feature (1)..( 7): Result.002 file - promoters60/1032730
attaaaa

SEQ ID NO: 104316 - DNA, 7 bp, Unknown
  misc_feature (1)..( 7): Result.002 file - promoters60/1032730
attgaaa

SEQ ID NO: 104317 - DNA, 6 bp, Unknown
  misc_feature (1)..( 6): Result.002 file - promoters60/1032730
acgaaa

SEQ ID NO: 104318 - DNA, 6 bp, Unknown
  misc_feature (1)..( 6): Result.002 file - promoters60/1032730
acgaaa

SEQ ID NO: 104319 - DNA, 6 bp, Unknown
  misc_feature (1)..( 6): Result.002 file - promoters60/1032730
gacttt

SEQ ID NO: 104320 - DNA, 6 bp, Unknown
  misc_feature (1)..( 6): Result.002 file - promoters60/1032730
gacttt

SEQ ID NO: 104321 - DNA, 9 bp, Unknown
  misc_feature (1)..( 9): Result.002 file - promoters60/1032752
agaacaata

SEQ ID NO: 104322 - DNA, 9 bp, Unknown
  misc_feature (1)..( 9): Result.002 file - promoters60/1032752
aaaacaata

SEQ ID NO: 104323 - DNA, 9 bp, Unknown
  misc_feature (1)..( 9): Result.002 file - promoters60/1032752
agaataatg

SEQ ID NO: 104324 - DNA, 9 bp, Unknown
  misc_feature (1)..( 9): Result.002 file - promoters60/1032752
gaaaaaatt

SEQ ID NO: 104325 - DNA, 9 bp, Unknown
  misc_feature (1)..( 9): Result.002 file - promoters60/1032752
ctaaaaatg

SEQ ID NO: 104326 - DNA, 12 bp, Unknown
  misc_feature (1)..( 12): Result.002 file - promoters60/1032752
cttttctatttg

SEQ ID NO: 104327 - DNA, 12 bp, Unknown
  misc_feature (1)..( 12): Result.002 file - promoters60/1032752
aaacactaattg

SEQ ID NO: 104328 - DNA, 12 bp, Unknown
  misc_feature (1)..( 12): Result.002 file - promoters60/1032752
cttttgtatttt

SEQ ID NO: 104329 - DNA, 12 bp, Unknown
  misc_feature (1)..( 12): Result.002 file - promoters60/1032752
tttttgtcaacg

SEQ ID NO: 104330 - DNA, 9 bp, Unknown
  misc_feature (1)..( 9): Result.002 file - promoters60/1032752
aatttattc

SEQ ID NO: 104331 - DNA, 9 bp, Unknown
  misc_feature (1)..( 9): Result.002 file - promoters60/1032752
aatatatta

SEQ ID NO: 104332 - DNA, 9 bp, Unknown
  misc_feature (1)..( 9): Result.002 file - promoters60/1032752
gatttatac

SEQ ID NO: 104333 - DNA, 9 bp, Unknown
  misc_feature (1)..( 9): Result.002 file - promoters60/1032752
catttatca

SEQ ID NO: 104334 - DNA, 9 bp, Unknown
  misc_feature (1)..( 9): Result.002 file - promoters60/1032752
tatgtatat

SEQ ID NO: 104335 - DNA, 9 bp, Unknown
  misc_feature (1)..( 9): Result.002 file - promoters60/1032752
cattaatca

SEQ ID NO: 104336 - DNA, 18 bp, Unknown
  misc_feature (1)..( 18): Result.002 file - promoters60/1032752
ggtacactcattaatcat

SEQ ID NO: 104337 - DNA, 18 bp, Unknown
  misc_feature (1)..( 18): Result.002 file - promoters60/1032752
ttccacaaaaataatcat

SEQ ID NO: 104338 - DNA, 18 bp, Unknown
  misc_feature (1)..( 18): Result.002 file - promoters60/1032752
aaaaaagaaagtaatcga

SEQ ID NO: 104339 - DNA, 18 bp, Unknown
  misc_feature (1)..( 18): Result.002 file - promoters60/1032752
atcatcacaaagaatcca

SEQ ID NO: 104340 - DNA, 18 bp, Unknown
  misc_feature (1)..( 18): Result.002 file - promoters60/1032752
aaaaaaaaaattaatact

SEQ ID NO: 104341 - DNA, 11 bp, Unknown
  misc_feature (1)..( 11): Result.002 file - promoters60/1032752
attgtcttttc

SEQ ID NO: 104342 - DNA, 11 bp, Unknown
  misc_feature (1)..( 11): Result.002 file - promoters60/1032752
tttgtattttt

SEQ ID NO: 104343 - DNA, 11 bp, Unknown
  misc_feature (1)..( 11): Result.002 file - promoters60/1032752
attgtcttatt

SEQ ID NO: 104344 - DNA, 11 bp, Unknown
  misc_feature (1)..( 11): Result.002 file - promoters60/1032752
gtcaaattttt

SEQ ID NO: 104345 - DNA, 9 bp, Unknown
  misc_feature (1)..( 9): Result.002 file - promoters60/1032752
catgaatat

SEQ ID NO: 104346 - DNA, 9 bp, Unknown
  misc_feature (1)..( 9): Result.002 file - promoters60/1032752
aatgaatta

SEQ ID NO: 104347 - DNA, 9 bp, Unknown
  misc_feature (1)..( 9): Result.002 file - promoters60/1032752
tatgtatat

SEQ ID NO: 104348 - DNA, 9 bp, Unknown
  misc_feature (1)..( 9): Result.002 file - promoters60/1032752
cattaatca

SEQ ID NO: 104349 - DNA, 9 bp, Unknown
  misc_feature (1)..( 9): Result.002 file - promoters60/1032752
catttatca

SEQ ID NO: 104350 - DNA, 9 bp, Unknown
  misc_feature (1)..( 9): Result.002 file - promoters60/1032752
aaagaaagt

SEQ ID NO: 104351 - DNA, 9 bp, Unknown
  misc_feature (1)..( 9): Result.002 file - promoters60/1032752
aaaaaaaaa

SEQ ID NO: 104352 - DNA, 9 bp, Unknown
  misc_feature (1)..( 9): Result.002 file - promoters60/1032752
aaagaaagt

SEQ ID NO: 104353 - DNA, 9 bp, Unknown
  misc_feature (1)..( 9): Result.002 file - promoters60/1032752
aaagaatcc

SEQ ID NO: 104354 - DNA, 10 bp, Unknown
  misc_feature (1)..( 10): Result.002 file - promoters60/1032752
aaaaataatc

SEQ ID NO: 104355 - DNA, 10 bp, Unknown
  misc_feature (1)..( 10): Result.002 file - promoters60/1032752
aaaaattaat

SEQ ID NO: 104356 - DNA, 10 bp, Unknown
  misc_feature (1)..( 10): Result.002 file - promoters60/1032752
gaaagtaatc

SEQ ID NO: 104357 - DNA, 10 bp, Unknown
  misc_feature (1)..( 10): Result.002 file - promoters60/1032752
aaaaatcagt

SEQ ID NO: 104358 - DNA, 11 bp, Unknown
  misc_feature (1)..( 11): Result.002 file - promoters60/1032752
aaatttaatga

SEQ ID NO: 104359 - DNA, 11 bp, Unknown
  misc_feature (1)..( 11): Result.002 file - promoters60/1032752
caatttaaatt

SEQ ID NO: 104360 - DNA, 11 bp, Unknown
  misc_feature (1)..( 11): Result.002 file - promoters60/1032752
gcatttaaatt

SEQ ID NO: 104361 - DNA, 11 bp, Unknown
  misc_feature (1)..( 11): Result.002 file - promoters60/1032752
aaagttagttt

SEQ ID NO: 104362 - DNA, 11 bp, Unknown
  misc_feature (1)..( 11): Result.002 file - promoters60/1032752
ggtcaaatttt

SEQ ID NO: 104363 - DNA, 11 bp, Unknown
  misc_feature (1)..( 11): Result.002 file - promoters60/1032752
atttaaattta

SEQ ID NO: 104364 - DNA, 11 bp, Unknown
  misc_feature (1)..( 11): Result.002 file - promoters60/1032752
atttaaattga

SEQ ID NO: 104365 - DNA, 11 bp, Unknown
  misc_feature (1)..( 11): Result.002 file - promoters60/1032752
aaaaaaagtta

SEQ ID NO: 104366 - DNA, 12 bp, Unknown
  misc_feature (1)..( 12): Result.002 file - promoters60/1032788
ttgagtttaggc

SEQ ID NO: 104367 - DNA, 12 bp, Unknown
  misc_feature (1)..( 12): Result.002 file - promoters60/1032788
ttaagtctagta

SEQ ID NO: 104368 - DNA, 12 bp, Unknown
  misc_feature (1)..( 12): Result.002 file - promoters60/1032788
gatagtttaaaa

SEQ ID NO: 104369 - DNA, 12 bp, Unknown
  misc_feature (1)..( 12): Result.002 file - promoters60/1032788
ataagtttcaaa

SEQ ID NO: 104370 - DNA, 12 bp, Unknown
  misc_feature (1)..( 12): Result.002 file - promoters60/1032788
acaattctaatt

SEQ ID NO: 104371 - DNA, 12 bp, Unknown
  misc_feature (1)..( 12): Result.002 file - promoters60/1032788
atatgtttatat

SEQ ID NO: 104372 - DNA, 12 bp, Unknown
  misc_feature (1)..( 12): Result.002 file - promoters60/1032788
tgaagtatcatc

SEQ ID NO: 104373 - DNA, 9 bp, Unknown
  misc_feature (1)..( 9): Result.002 file - promoters60/1032788
aaaaataaa

SEQ ID NO: 104374 - DNA, 9 bp, Unknown
  misc_feature (1)..( 9): Result.002 file - promoters60/1032788
aaacatata

SEQ ID NO: 104375 - DNA, 9 bp, Unknown
  misc_feature (1)..( 9): Result.002 file - promoters60/1032788
aaaattaat

SEQ ID NO: 104376 - DNA, 9 bp, Unknown
  misc_feature (1)..( 9): Result.002 file - promoters60/1032788
taaaataca

SEQ ID NO: 104377 - DNA, 9 bp, Unknown
  misc_feature (1)..( 9): Result.002 file - promoters60/1032788
aaaaattta

SEQ ID NO: 104378 - DNA, 9 bp, Unknown
  misc_feature (1)..( 9): Result.002 file - promoters60/1032788
aaaaatcaa

SEQ ID NO: 104379 - DNA, 9 bp, Unknown
  misc_feature (1)..( 9): Result.002 file - promoters60/1032788
taacatagg

SEQ ID NO: 104380 - DNA, 9 bp, Unknown
  misc_feature (1)..( 9): Result.002 file - promoters60/1032788
gataatatt

SEQ ID NO: 104381 - DNA, 11 bp, Unknown
  misc_feature (1)..( 11): Result.002 file - promoters60/1032788
aataaataaaa

SEQ ID NO: 104382 - DNA, 11 bp, Unknown
  misc_feature (1)..( 11): Result.002 file - promoters60/1032788
tttaattaaac

SEQ ID NO: 104383 - DNA, 11 bp, Unknown
  misc_feature (1)..( 11): Result.002 file - promoters60/1032788
aaacaataaaa

SEQ ID NO: 104384 - DNA, 11 bp, Unknown
  misc_feature (1)..( 11): Result.002 file - promoters60/1032788
acattataaaa

SEQ ID NO: 104385 - DNA, 11 bp, Unknown
  misc_feature (1)..( 11): Result.002 file - promoters60/1032788
tttcatttcca

SEQ ID NO: 104386 - DNA, 11 bp, Unknown
  misc_feature (1)..( 11): Result.002 file - promoters60/1032788
aaaaaatcaaa

SEQ ID NO: 104387 - DNA, 12 bp, Unknown
  misc_feature (1)..( 12): Result.002 file - promoters60/1032788
aaaatttacaaa

SEQ ID NO: 104388 - DNA, 10 bp, Unknown
  misc_feature (1)..( 10): Result.002 file - promoters60/1032788
atattattag

SEQ ID NO: 104389 - DNA, 10 bp, Unknown
  misc_feature (1)..( 10): Result.002 file - promoters60/1032788
atattaataa

SEQ ID NO: 104390 - DNA, 10 bp, Unknown
  misc_feature (1)..( 10): Result.002 file - promoters60/1032788
atattattag

SEQ ID NO: 104391 - DNA, 10 bp, Unknown
  misc_feature (1)..( 10): Result.002 file - promoters60/1032788
atataattat

SEQ ID NO: 104392 - DNA, 10 bp, Unknown
  misc_feature (1)..( 10): Result.002 file - promoters60/1032788
ttattatatt

SEQ ID NO: 104393 - DNA, 10 bp, Unknown
  misc_feature (1)..( 10): Result.002 file - promoters60/1032788
atattaacac

SEQ ID NO: 104394 - DNA, 10 bp, Unknown
  misc_feature (1)..( 10): Result.002 file - promoters60/1032788
atataactaa

SEQ ID NO: 104395 - DNA, 11 bp, Unknown
  misc_feature (1)..( 11): Result.002 file - promoters60/1032788
gtttgtttaac

SEQ ID NO: 104396 - DNA, 11 bp, Unknown
  misc_feature (1)..( 11): Result.002 file - promoters60/1032788
atttatttact

SEQ ID NO: 104397 - DNA, 11 bp, Unknown
  misc_feature (1)..( 11): Result.002 file - promoters60/1032788
ttttatttctt

SEQ ID NO: 104398 - DNA, 11 bp, Unknown
  misc_feature (1)..( 11): Result.002 file - promoters60/1032788
ttttgtttctg

SEQ ID NO: 104399 - DNA, 11 bp, Unknown
  misc_feature (1)..( 11): Result.002 file - promoters60/1032788
atttttttcac

SEQ ID NO: 104400 - DNA, 11 bp, Unknown
  misc_feature (1)..( 11): Result.002 file - promoters60/1032788
ttttctttcaa

SEQ ID NO: 104401 - DNA, 11 bp, Unknown
  misc_feature (1)..( 11): Result.002 file - promoters60/1032788
gaagcttccaa

SEQ ID NO: 104402 - DNA, 11 bp, Unknown
  misc_feature (1)..( 11): Result.002 file - promoters60/1032788
ttttattttta

SEQ ID NO: 104403 - DNA, 12 bp, Unknown
  misc_feature (1)..( 12): Result.002 file - promoters60/1032788
aaattaaaatca

SEQ ID NO: 104404 - DNA, 12 bp, Unknown
  misc_feature (1)..( 12): Result.002 file - promoters60/1032788
gaatgaaaaaaa

SEQ ID NO: 104405 - DNA, 12 bp, Unknown
  misc_feature (1)..( 12): Result.002 file - promoters60/1032788
ccgttaaaaatc

SEQ ID NO: 104406 - DNA, 12 bp, Unknown
  misc_feature (1)..( 12): Result.002 file - promoters60/1032788
ctcagaaaaaca

SEQ ID NO: 104407 - DNA, 12 bp, Unknown
  misc_feature (1)..( 12): Result.002 file - promoters60/1032788
aaatcaaatagt

SEQ ID NO: 104408 - DNA, 12 bp, Unknown
  misc_feature (1)..( 12): Result.002 file - promoters60/1032788
ttaataaaccaa

SEQ ID NO: 104409 - DNA, 12 bp, Unknown
  misc_feature (1)..( 12): Result.002 file - promoters60/1032788
cgtttaaataag

SEQ ID NO: 104410 - DNA, 10 bp, Unknown
  misc_feature (1)..( 10): Result.002 file - promoters60/1032788
aaaatattaa

SEQ ID NO: 104411 - DNA, 10 bp, Unknown
  misc_feature (1)..( 10): Result.002 file - promoters60/1032788
taaaaattaa

SEQ ID NO: 104412 - DNA, 10 bp, Unknown
  misc_feature (1)..( 10): Result.002 file - promoters60/1032788
caaatattgc

SEQ ID NO: 104413 - DNA, 10 bp, Unknown
  misc_feature (1)..( 10): Result.002 file - promoters60/1032788
taacaattct

SEQ ID NO: 104414 - DNA, 10 bp, Unknown
  misc_feature (1)..( 10): Result.002 file - promoters60/1032788
ccaaaattca

SEQ ID NO: 104415 - DNA, 10 bp, Unknown
  misc_feature (1)..( 10): Result.002 file - promoters60/1032788
gtaaaatttc

SEQ ID NO: 104416 - DNA, 8 bp, Unknown
  misc_feature (1)..( 8): Result.002 file - promoters60/1032788
aaaacaaa

SEQ ID NO: 104417 - DNA, 8 bp, Unknown
  misc_feature (1)..( 8): Result.002 file - promoters60/1032788
taaataaa

SEQ ID NO: 104418 - DNA, 8 bp, Unknown
  misc_feature (1)..( 8): Result.002 file - promoters60/1032788
taaaaaaa

SEQ ID NO: 104419 - DNA, 8 bp, Unknown
  misc_feature (1)..( 8): Result.002 file - promoters60/1032788
aaaacaat

SEQ ID NO: 104420 - DNA, 8 bp, Unknown
  misc_feature (1)..( 8): Result.002 file - promoters60/1032788
caaacaaa

SEQ ID NO: 104421 - DNA, 8 bp, Unknown
  misc_feature (1)..( 8): Result.002 file - promoters60/1032788
tatatatt

SEQ ID NO: 104422 - DNA, 8 bp, Unknown
  misc_feature (1)..( 8): Result.002 file - promoters60/1032788
aatattaa

SEQ ID NO: 104423 - DNA, 10 bp, Unknown
  misc_feature (1)..( 10): Result.002 file - promoters60/1032788
tgaaaaacaa

SEQ ID NO: 104424 - DNA, 10 bp, Unknown
  misc_feature (1)..( 10): Result.002 file - promoters60/1032788
agaaaaaata

SEQ ID NO: 104425 - DNA, 10 bp, Unknown
  misc_feature (1)..( 10): Result.002 file - promoters60/1032788
tgaaaatctc

SEQ ID NO: 104426 - DNA, 10 bp, Unknown
  misc_feature (1)..( 10): Result.002 file - promoters60/1032788
ttaaaaaata

SEQ ID NO: 104427 - DNA, 10 bp, Unknown
  misc_feature (1)..( 10): Result.002 file - promoters60/1032788
ccaaaatata

SEQ ID NO: 104428 - DNA, 10 bp, Unknown
  misc_feature (1)..( 10): Result.002 file - promoters60/1032788
caaaacaatt

SEQ ID NO: 104429 - DNA, 9 bp, Unknown
  misc_feature (1)..( 9): Result.002 file - promoters60/1032788
atatagtat

SEQ ID NO: 104430 - DNA, 9 bp, Unknown
  misc_feature (1)..( 9): Result.002 file - promoters60/1032788
atatcgtaa

SEQ ID NO: 104431 - DNA, 9 bp, Unknown
  misc_feature (1)..( 9): Result.002 file - promoters60/1032788
atacagtag

SEQ ID NO: 104432 - DNA, 9 bp, Unknown
  misc_feature (1)..( 9): Result.002 file - promoters60/1032788
agataatat

SEQ ID NO: 104433 - DNA, 9 bp, Unknown
  misc_feature (1)..( 9): Result.002 file - promoters60/1032788
aaaaaatca

SEQ ID NO: 104434 - DNA, 9 bp, Unknown
  misc_feature (1)..( 9): Result.002 file - promoters60/1032788
aaaaaaccc

SEQ ID NO: 104435 - DNA, 10 bp, Unknown
  misc_feature (1)..( 10): Result.002 file - promoters60/1032815
gaagattcta

SEQ ID NO: 104436 - DNA, 10 bp, Unknown
  misc_feature (1)..( 10): Result.002 file - promoters60/1032815
gaagtttcta

SEQ ID NO: 104437 - DNA, 10 bp, Unknown
  misc_feature (1)..( 10): Result.002 file - promoters60/1032815
tcagtttcat

SEQ ID NO: 104438 - DNA, 6 bp, Unknown
  misc_feature (1)..( 6): Result.002 file - promoters60/1032844
aatcgt

SEQ ID NO: 104439 - DNA, 6 bp, Unknown
  misc_feature (1)..( 6): Result.002 file - promoters60/1032844
aatcgt

SEQ ID NO: 104440 - DNA, 6 bp, Unknown
  misc_feature (1)..( 6): Result.002 file - promoters60/1032844
aatcgt

SEQ ID NO: 104441 - DNA, 9 bp, Unknown
  misc_feature (1)..( 9): Result.002 file - promoters60/1032844
taagattgg

SEQ ID NO: 104442 - DNA, 9 bp, Unknown
  misc_feature (1)..( 9): Result.002 file - promoters60/1032844
taatattgg

SEQ ID NO: 104443 - DNA, 7 bp, Unknown
  misc_feature (1)..( 7): Result.002 file - promoters60/1032844
ataaaaa

SEQ ID NO: 104444 - DNA, 7 bp, Unknown
  misc_feature (1)..( 7): Result.002 file - promoters60/1032844
ataaaaa

SEQ ID NO: 104445 - DNA, 7 bp, Unknown
  misc_feature (1)..( 7): Result.002 file - promoters60/1032844
agaagct

SEQ ID NO: 104446 - DNA, 7 bp, Unknown
  misc_feature (1)..( 7): Result.002 file - promoters60/1032844
agaagct

SEQ ID NO: 104447 - DNA, 15 bp, Unknown
  misc_feature (1)..( 15): Result.002 file - promoters60/1032844
ttaatatatattact

SEQ ID NO: 104448 - DNA, 15 bp, Unknown
  misc_feature (1)..( 15): Result.002 file - promoters60/1032844
ttaatatatattact

SEQ ID NO: 104449 - DNA, 6 bp, Unknown
  misc_feature (1)..( 6): Result.002 file - promoters60/1032844
ttttaa

SEQ ID NO: 104450 - DNA, 6 bp, Unknown
  misc_feature (1)..( 6): Result.002 file - promoters60/1032844
ttttaa

SEQ ID NO: 104451 - DNA, 7 bp, Unknown
  misc_feature (1)..( 7): Result.002 file - promoters60/1032844
actcaaa

SEQ ID NO: 104452 - DNA, 7 bp, Unknown
  misc_feature (1)..( 7): Result.002 file - promoters60/1032844
actcaaa

SEQ ID NO: 104453 - DNA, 7 bp, Unknown
  misc_feature (1)..( 7): Result.002 file - promoters60/1032844
tttggtt

SEQ ID NO: 104454 - DNA, 7 bp, Unknown
  misc_feature (1)..( 7): Result.002 file - promoters60/1032844
tttagtt

SEQ ID NO: 104455 - DNA, 9 bp, Unknown
  misc_feature (1)..( 9): Result.002 file - promoters60/1032844
agcccaata

SEQ ID NO: 104456 - DNA, 9 bp, Unknown
  misc_feature (1)..( 9): Result.002 file - promoters60/1032844
agcccaata

SEQ ID NO: 104457 - DNA, 6 bp, Unknown
  misc_feature (1)..( 6): Result.002 file - promoters60/1032844
agccca

SEQ ID NO: 104458 - DNA, 6 bp, Unknown
  misc_feature (1)..( 6): Result.002 file - promoters60/1032844
agccca

SEQ ID NO: 104459 - DNA, 8 bp, Unknown
  misc_feature (1)..( 8): Result.002 file - promoters60/1032844
tcatcatc

SEQ ID NO: 104460 - DNA, 8 bp, Unknown
  misc_feature (1)..( 8): Result.002 file - promoters60/1032844
tcatcatc

SEQ ID NO: 104461 - DNA, 8 bp, Unknown
  misc_feature (1)..( 8): Result.002 file - promoters60/1032844
aagtggta

SEQ ID NO: 104462 - DNA, 8 bp, Unknown
  misc_feature (1)..( 8): Result.002 file - promoters60/1032844
aagttgta

SEQ ID NO: 104463 - DNA, 7 bp, Unknown
  misc_feature (1)..( 7): Result.002 file - promoters60/1032844
gctcatt

SEQ ID NO: 104464 - DNA, 7 bp, Unknown
  misc_feature (1)..( 7): Result.002 file - promoters60/1032844
gctgatt

SEQ ID NO: 104465 - DNA, 14 bp, Unknown
  misc_feature (1)..( 14): Result.002 file - promoters60/1032897
agacttaaaatcta

SEQ ID NO: 104466 - DNA, 14 bp, Unknown
  misc_feature (1)..( 14): Result.002 file - promoters60/1032897
agaattaaaatcaa

SEQ ID NO: 104467 - DNA, 14 bp, Unknown
  misc_feature (1)..( 14): Result.002 file - promoters60/1032897
cttgttacaatgtt

SEQ ID NO: 104468 - DNA, 14 bp, Unknown
  misc_feature (1)..( 14): Result.002 file - promoters60/1032897
tgctctaaaatcta

SEQ ID NO: 104469 - DNA, 14 bp, Unknown
  misc_feature (1)..( 14): Result.002 file - promoters60/1032897
agaattattttgct

SEQ ID NO: 104470 - DNA, 14 bp, Unknown
  misc_feature (1)..( 14): Result.002 file - promoters60/1032897
tcgattaaatgtgg

SEQ ID NO: 104471 - DNA, 14 bp, Unknown
  misc_feature (1)..( 14): Result.002 file - promoters60/1032897
gatactataataaa

SEQ ID NO: 104472 - DNA, 13 bp, Unknown
  misc_feature (1)..( 13): Result.002 file - promoters60/1032897
tttataaaaccct

SEQ ID NO: 104473 - DNA, 13 bp, Unknown
  misc_feature (1)..( 13): Result.002 file - promoters60/1032897
tatataaatggcc

SEQ ID NO: 104474 - DNA, 13 bp, Unknown
  misc_feature (1)..( 13): Result.002 file - promoters60/1032897
tatataaatccct

SEQ ID NO: 104475 - DNA, 13 bp, Unknown
  misc_feature (1)..( 13): Result.002 file - promoters60/1032897
atcatctcttcaa

SEQ ID NO: 104476 - DNA, 13 bp, Unknown
  misc_feature (1)..( 13): Result.002 file - promoters60/1032897
attatttaaggcc

SEQ ID NO: 104477 - DNA, 13 bp, Unknown
  misc_feature (1)..( 13): Result.002 file - promoters60/1032897
tatataaagttcc

SEQ ID NO: 104478 - DNA, 12 bp, Unknown
  misc_feature (1)..( 12): Result.002 file - promoters60/1032897
aggaggaagaag

SEQ ID NO: 104479 - DNA, 12 bp, Unknown
  misc_feature (1)..( 12): Result.002 file - promoters60/1032897
ggatagaaaaag

SEQ ID NO: 104480 - DNA, 12 bp, Unknown
  misc_feature (1)..( 12): Result.002 file - promoters60/1032897
ttatataaaata

SEQ ID NO: 104481 - DNA, 12 bp, Unknown
  misc_feature (1)..( 12): Result.002 file - promoters60/1032897
ttatatagtcaa

SEQ ID NO: 104482 - DNA, 12 bp, Unknown
  misc_feature (1)..( 12): Result.002 file - promoters60/1032897
ctatatacgcat

SEQ ID NO: 104483 - DNA, 12 bp, Unknown
  misc_feature (1)..( 12): Result.002 file - promoters60/1032897
ctatgtagatgt

SEQ ID NO: 104484 - DNA, 7 bp, Unknown
  misc_feature (1)..( 7): Result.002 file - promoters60/1032940
taaccgc

SEQ ID NO: 104485 - DNA, 7 bp, Unknown
  misc_feature (1)..( 7): Result.002 file - promoters60/1032940
taaacgc

SEQ ID NO: 104486 - DNA, 7 bp, Unknown
  misc_feature (1)..( 7): Result.002 file - promoters60/1032940
agatcca

SEQ ID NO: 104487 - DNA, 7 bp, Unknown
  misc_feature (1)..( 7): Result.002 file - promoters60/1032940
agaccca

SEQ ID NO: 104488 - DNA, 7 bp, Unknown
  misc_feature (1)..( 7): Result.002 file - promoters60/1032940
aaagtaa

SEQ ID NO: 104489 - DNA, 7 bp, Unknown
  misc_feature (1)..( 7): Result.002 file - promoters60/1032940
aaattaa

SEQ ID NO: 104490 - DNA, 6 bp, Unknown
  misc_feature (1)..( 6): Result.002 file - promoters60/1032940
aataaa

SEQ ID NO: 104491 - DNA, 6 bp, Unknown
  misc_feature (1)..( 6): Result.002 file - promoters60/1032940
aataaa

SEQ ID NO: 104492 - DNA, 7 bp, Unknown
  misc_feature (1)..( 7): Result.002 file - promoters60/1032940
tttaaaa

SEQ ID NO: 104493 - DNA, 7 bp, Unknown
  misc_feature (1)..( 7): Result.002 file - promoters60/1032940
tttaaaa

SEQ ID NO: 104494 - DNA, 8 bp, Unknown
  misc_feature (1)..( 8): Result.002 file - promoters60/1032940
ttcgtaaa

SEQ ID NO: 104495 - DNA, 8 bp, Unknown
  misc_feature (1)..( 8): Result.002 file - promoters60/1032940
ttcggaaa

SEQ ID NO: 104496 - DNA, 6 bp, Unknown
  misc_feature (1)..( 6): Result.002 file - promoters60/1032940
agttgt

SEQ ID NO: 104497 - DNA, 6 bp, Unknown
  misc_feature (1)..( 6): Result.002 file - promoters60/1032940
agttgt

SEQ ID NO: 104498 - DNA, 7 bp, Unknown
  misc_feature (1)..( 7): Result.002 file - promoters60/1032940
tttagga

SEQ ID NO: 104499 - DNA, 7 bp, Unknown
  misc_feature (1)..( 7): Result.002 file - promoters60/1032940
ttttgga

SEQ ID NO: 104500 - DNA, 8 bp, Unknown
  misc_feature (1)..( 8): Result.002 file - promoters60/1032940
taacgttt

SEQ ID NO: 104501 - DNA, 8 bp, Unknown
  misc_feature (1)..( 8): Result.002 file - promoters60/1032940
taaagttt

SEQ ID NO: 104502 - DNA, 8 bp, Unknown
  misc_feature (1)..( 8): Result.002 file - promoters60/1032940
gaaacttt

SEQ ID NO: 104503 - DNA, 8 bp, Unknown
  misc_feature (1)..( 8): Result.002 file - promoters60/1032940
atataata

SEQ ID NO: 104504 - DNA, 8 bp, Unknown
  misc_feature (1)..( 8): Result.002 file - promoters60/1032940
atataata

SEQ ID NO: 104505 - DNA, 6 bp, Unknown
  misc_feature (1)..( 6): Result.002 file - promoters60/1032940
tttttt

SEQ ID NO: 104506 - DNA, 6 bp, Unknown
  misc_feature (1)..( 6): Result.002 file - promoters60/1032940
tttttt

SEQ ID NO: 104507 - DNA, 6 bp, Unknown
  misc_feature (1)..( 6): Result.002 file - promoters60/1032940
tatata

SEQ ID NO: 104508 - DNA, 6 bp, Unknown
  misc_feature (1)..( 6): Result.002 file - promoters60/1032940
tatata

SEQ ID NO: 104509 - DNA, 6 bp, Unknown
  misc_feature (1)..( 6): Result.002 file - promoters60/1032940
ttagaa

SEQ ID NO: 104510 - DNA, 6 bp, Unknown
  misc_feature (1)..( 6): Result.002 file - promoters60/1032940
ttagaa

SEQ ID NO: 104511 - DNA, 8 bp, Unknown
  misc_feature (1)..( 8): Result.002 file - promoters60/1032940
ttttgtat

SEQ ID NO: 104512 - DNA, 8 bp, Unknown
  misc_feature (1)..( 8): Result.002 file - promoters60/1032940
ttttgtat

SEQ ID NO: 104513 - DNA, 10 bp, Unknown
  misc_feature (1)..( 10): Result.002 file - promoters60/1032940
ttttaaatta

SEQ ID NO: 104514 - DNA, 10 bp, Unknown
  misc_feature (1)..( 10): Result.002 file - promoters60/1032940
ttttaaatta

SEQ ID NO: 104515 - DNA, 9 bp, Unknown
  misc_feature (1)..( 9): Result.002 file - promoters60/1032940
aatctttga

SEQ ID NO: 104516 - DNA, 9 bp, Unknown
  misc_feature (1)..( 9): Result.002 file - promoters60/1032940
aatgtttga

SEQ ID NO: 104517 - DNA, 8 bp, Unknown
  misc_feature (1)..( 8): Result.002 file - promoters60/1032940
ttaaatta

SEQ ID NO: 104518 - DNA, 8 bp, Unknown
  misc_feature (1)..( 8): Result.002 file - promoters60/1032940
ttaaatta

SEQ ID NO: 104519 - DNA, 7 bp, Unknown
  misc_feature (1)..( 7): Result.002 file - promoters60/1032940
tttgtta

SEQ ID NO: 104520 - DNA, 7 bp, Unknown
  misc_feature (1)..( 7): Result.002 file - promoters60/1032940
tttttta

SEQ ID NO: 104521 - DNA, 9 bp, Unknown
  misc_feature (1)..( 9): Result.002 file - promoters60/1032940
aattaaaat

SEQ ID NO: 104522 - DNA, 9 bp, Unknown
  misc_feature (1)..( 9): Result.002 file - promoters60/1032940
aatttaaat

SEQ ID NO: 104523 - DNA, 6 bp, Unknown
  misc_feature (1)..( 6): Result.002 file - promoters60/1032940
tcaatt

SEQ ID NO: 104524 - DNA, 6 bp, Unknown
  misc_feature (1)..( 6): Result.002 file - promoters60/1032940
tcaatt

SEQ ID NO: 104525 - DNA, 7 bp, Unknown
  misc_feature (1)..( 7): Result.002 file - promoters60/1032940
aaataca

SEQ ID NO: 104526 - DNA, 7 bp, Unknown
  misc_feature (1)..( 7): Result.002 file - promoters60/1032940
aaataca

SEQ ID NO: 104527 - DNA, 8 bp, Unknown
  misc_feature (1)..( 8): Result.002 file - promoters60/1032940
taaataca

SEQ ID NO: 104528 - DNA, 8 bp, Unknown
  misc_feature (1)..( 8): Result.002 file - promoters60/1032940
taaataca

SEQ ID NO: 104529 - DNA, 9 bp, Unknown
  misc_feature (1)..( 9): Result.002 file - promoters60/1032940
caatttaaa

SEQ ID NO: 104530 - DNA, 9 bp, Unknown
  misc_feature (1)..( 9): Result.002 file - promoters60/1032940
caatttaaa

SEQ ID NO: 104531 - DNA, 10 bp, Unknown
  misc_feature (1)..( 10): Result.002 file - promoters60/1032940
atataatata

SEQ ID NO: 104532 - DNA, 10 bp, Unknown
  misc_feature (1)..( 10): Result.002 file - promoters60/1032940
atataaaata

SEQ ID NO: 104533 - DNA, 11 bp, Unknown
  misc_feature (1)..( 11): Result.002 file - promoters60/1033164
ctttatttgat

SEQ ID NO: 104534 - DNA, 11 bp, Unknown
  misc_feature (1)..( 11): Result.002 file - promoters60/1033164
ctttattcgat

SEQ ID NO: 104535 - DNA, 11 bp, Unknown
  misc_feature (1)..( 11): Result.002 file - promoters60/1033164
gttgatttacc

SEQ ID NO: 104536 - DNA, 7 bp, Unknown
  misc_feature (1)..( 7): Result.002 file - promoters60/1033164
cgaaaga

SEQ ID NO: 104537 - DNA, 7 bp, Unknown
  misc_feature (1)..( 7): Result.002 file - promoters60/1033164
cgagaga

SEQ ID NO: 104538 - DNA, 7 bp, Unknown
  misc_feature (1)..( 7): Result.002 file - promoters60/1033164
ggagaga

SEQ ID NO: 104539 - DNA, 10 bp, Unknown
  misc_feature (1)..( 10): Result.002 file - promoters60/1033184
acttaatctt

SEQ ID NO: 104540 - DNA, 10 bp, Unknown
  misc_feature (1)..( 10): Result.002 file - promoters60/1033184
acttaattct

SEQ ID NO: 104541 - DNA, 10 bp, Unknown
  misc_feature (1)..( 10): Result.002 file - promoters60/1033184
acttaacaaa

SEQ ID NO: 104542 - DNA, 10 bp, Unknown
  misc_feature (1)..( 10): Result.002 file - promoters60/1033184
acttgattca

SEQ ID NO: 104543 - DNA, 10 bp, Unknown
  misc_feature (1)..( 10): Result.002 file - promoters60/1033184
tcttggttca

SEQ ID NO: 104544 - DNA, 10 bp, Unknown
  misc_feature (1)..( 10): Result.002 file - promoters60/1033184
actaaacgga

SEQ ID NO: 104545 - DNA, 15 bp, Unknown
  misc_feature (1)..( 15): Result.002 file - promoters60/1033184
gggtttaagtcttaa

SEQ ID NO: 104546 - DNA, 15 bp, Unknown
  misc_feature (1)..( 15): Result.002 file - promoters60/1033184
ttatttaaggcccaa

SEQ ID NO: 104547 - DNA, 15 bp, Unknown
  misc_feature (1)..( 15): Result.002 file - promoters60/1033184
ctattaaagccgcat

SEQ ID NO: 104548 - DNA, 15 bp, Unknown
  misc_feature (1)..( 15): Result.002 file - promoters60/1033184
ttatataaatccttc

SEQ ID NO: 104549 - DNA, 15 bp, Unknown
  misc_feature (1)..( 15): Result.002 file - promoters60/1033184
ttatattcttcgttc

SEQ ID NO: 104550 - DNA, 15 bp, Unknown
  misc_feature (1)..( 15): Result.002 file - promoters60/1033184
tactataaattcttc

SEQ ID NO: 104551 - DNA, 16 bp, Unknown
  misc_feature (1)..( 16): Result.002 file - promoters60/1033184
ttttttttttttttac

SEQ ID NO: 104552 - DNA, 16 bp, Unknown
  misc_feature (1)..( 16): Result.002 file - promoters60/1033184
aatagatttttgttaa

SEQ ID NO: 104553 - DNA, 16 bp, Unknown
  misc_feature (1)..( 16): Result.002 file - promoters60/1033184
tcgattatgtttttac

SEQ ID NO: 104554 - DNA, 16 bp, Unknown
  misc_feature (1)..( 16): Result.002 file - promoters60/1033184
tcgattgtgttcttag

SEQ ID NO: 104555 - DNA, 16 bp, Unknown
  misc_feature (1)..( 16): Result.002 file - promoters60/1033184
attccaaagttcaatt

SEQ ID NO: 104556 - DNA, 16 bp, Unknown
  misc_feature (1)..( 16): Result.002 file - promoters60/1033184
atgatctacttcttat

SEQ ID NO: 104557 - DNA, 9 bp, Unknown
  misc_feature (1)..( 9): Result.002 file - promoters60/1033208
aaacgtttg

SEQ ID NO: 104558 - DNA, 9 bp, Unknown
  misc_feature (1)..( 9): Result.002 file - promoters60/1033208
taacttttg

SEQ ID NO: 104559 - DNA, 9 bp, Unknown
  misc_feature (1)..( 9): Result.002 file - promoters60/1033208
taaatttta

SEQ ID NO: 104560 - DNA, 7 bp, Unknown
  misc_feature (1)..( 7): Result.002 file - promoters60/1033208
ttaacaa

SEQ ID NO: 104561 - DNA, 7 bp, Unknown
  misc_feature (1)..( 7): Result.002 file - promoters60/1033208
ctaacaa

SEQ ID NO: 104562 - DNA, 7 bp, Unknown
  misc_feature (1)..( 7): Result.002 file - promoters60/1033208
ttagcaa

SEQ ID NO: 104563 - DNA, 11 bp, Unknown
  misc_feature (1)..( 11): Result.002 file - promoters60/1033208
ttgggaaatgt

SEQ ID NO: 104564 - DNA, 11 bp, Unknown
  misc_feature (1)..( 11): Result.002 file - promoters60/1033208
atggaaaatgt

SEQ ID NO: 104565 - DNA, 11 bp, Unknown
  misc_feature (1)..( 11): Result.002 file - promoters60/1033208
ttggaaaatat

SEQ ID NO: 104566 - DNA, 11 bp, Unknown
  misc_feature (1)..( 11): Result.002 file - promoters60/1033208
cccatttgcta

SEQ ID NO: 104567 - DNA, 11 bp, Unknown
  misc_feature (1)..( 11): Result.002 file - promoters60/1033208
ccctttttttt

SEQ ID NO: 104568 - DNA, 11 bp, Unknown
  misc_feature (1)..( 11): Result.002 file - promoters60/1033208
aactttttaaa

SEQ ID NO: 104569 - DNA, 11 bp, Unknown
  misc_feature (1)..( 11): Result.002 file - promoters60/1033208
taatttttaaa

SEQ ID NO: 104570 - DNA, 10 bp, Unknown
  misc_feature (1)..( 10): Result.002 file - promoters60/1033208
aagaaaatct

SEQ ID NO: 104571 - DNA, 10 bp, Unknown
  misc_feature (1)..( 10): Result.002 file - promoters60/1033208
aagtaaatga

SEQ ID NO: 104572 - DNA, 10 bp, Unknown
  misc_feature (1)..( 10): Result.002 file - promoters60/1033208
tcttaaatga

SEQ ID NO: 104573 - DNA, 7 bp, Unknown
  misc_feature (1)..( 7): Result.002 file - promoters60/1033217
aagatga

SEQ ID NO: 104574 - DNA, 7 bp, Unknown
  misc_feature (1)..( 7): Result.002 file - promoters60/1033217
aagatga

SEQ ID NO: 104575 - DNA, 6 bp, Unknown
  misc_feature (1)..( 6): Result.002 file - promoters60/1033217
tgaaga

SEQ ID NO: 104576 - DNA, 6 bp, Unknown
  misc_feature (1)..( 6): Result.002 file - promoters60/1033217
tgaaga

SEQ ID NO: 104577 - DNA, 7 bp, Unknown
  misc_feature (1)..( 7): Result.002 file - promoters60/1033217
tatcaac

SEQ ID NO: 104578 - DNA, 7 bp, Unknown
  misc_feature (1)..( 7): Result.002 file - promoters60/1033217
tatgaac

SEQ ID NO: 104579 - DNA, 6 bp, Unknown
  misc_feature (1)..( 6): Result.002 file - promoters60/1033217
ggggaa

SEQ ID NO: 104580 - DNA, 6 bp, Unknown
  misc_feature (1)..( 6): Result.002 file - promoters60/1033217
ggggaa

SEQ ID NO: 104581 - DNA, 6 bp, Unknown
  misc_feature (1)..( 6): Result.002 file - promoters60/1033217
ttgaag

SEQ ID NO: 104582 - DNA, 6 bp, Unknown
  misc_feature (1)..( 6): Result.002 file - promoters60/1033217
ttgaag

SEQ ID NO: 104583 - DNA, 7 bp, Unknown
  misc_feature (1)..( 7): Result.002 file - promoters60/1033217
tatttta

SEQ ID NO: 104584 - DNA, 7 bp, Unknown
  misc_feature (1)..( 7): Result.002 file - promoters60/1033217
tatttta

SEQ ID NO: 104585 - DNA, 7 bp, Unknown
  misc_feature (1)..( 7): Result.002 file - promoters60/1033217
aaaaaaa

SEQ ID NO: 104586 - DNA, 7 bp, Unknown
  misc_feature (1)..( 7): Result.002 file - promoters60/1033217
aaaaaaa

SEQ ID NO: 104587 - DNA, 6 bp, Unknown
  misc_feature (1)..( 6): Result.002 file - promoters60/1033217
taaaaa

SEQ ID NO: 104588 - DNA, 6 bp, Unknown
  misc_feature (1)..( 6): Result.002 file - promoters60/1033217
taaaaa

SEQ ID NO: 104589 - DNA, 6 bp, Unknown
  misc_feature (1)..( 6): Result.002 file - promoters60/1033217
aaaaca

SEQ ID NO: 104590 - DNA, 6 bp, Unknown
  misc_feature (1)..( 6): Result.002 file - promoters60/1033217
aaaaca

SEQ ID NO: 104591 - DNA, 6 bp, Unknown
  misc_feature (1)..( 6): Result.002 file - promoters60/1033217
acaaac

SEQ ID NO: 104592 - DNA, 6 bp, Unknown
  misc_feature (1)..( 6): Result.002 file - promoters60/1033217
acaaac

SEQ ID NO: 104593 - DNA, 7 bp, Unknown
  misc_feature (1)..( 7): Result.002 file - promoters60/1033217
atgttga

SEQ ID NO: 104594 - DNA, 7 bp, Unknown
  misc_feature (1)..( 7): Result.002 file - promoters60/1033217
atgatga

SEQ ID NO: 104595 - DNA, 8 bp, Unknown
  misc_feature (1)..( 8): Result.002 file - promoters60/1033217
attgtttt

SEQ ID NO: 104596 - DNA, 8 bp, Unknown
  misc_feature (1)..( 8): Result.002 file - promoters60/1033217
attttttt

SEQ ID NO: 104597 - DNA, 8 bp, Unknown
  misc_feature (1)..( 8): Result.002 file - promoters60/1033217
tgattatt

SEQ ID NO: 104598 - DNA, 8 bp, Unknown
  misc_feature (1)..( 8): Result.002 file - promoters60/1033217
tgagtatt

SEQ ID NO: 104599 - DNA, 8 bp, Unknown
  misc_feature (1)..( 8): Result.002 file - promoters60/1033217
aagatgat

SEQ ID NO: 104600 - DNA, 8 bp, Unknown
  misc_feature (1)..( 8): Result.002 file - promoters60/1033217
aagaggat

SEQ ID NO: 104601 - DNA, 10 bp, Unknown
  misc_feature (1)..( 10): Result.002 file - promoters60/1033217
tttatttata

SEQ ID NO: 104602 - DNA, 10 bp, Unknown
  misc_feature (1)..( 10): Result.002 file - promoters60/1033217
tttttttata

SEQ ID NO: 104603 - DNA, 7 bp, Unknown
  misc_feature (1)..( 7): Result.002 file - promoters60/1033217
tcttaaa

SEQ ID NO: 104604 - DNA, 7 bp, Unknown
  misc_feature (1)..( 7): Result.002 file - promoters60/1033217
tctaaaa

SEQ ID NO: 104605 - DNA, 11 bp, Unknown
  misc_feature (1)..( 11): Result.002 file - promoters60/1033262
agttgaattta

SEQ ID NO: 104606 - DNA, 11 bp, Unknown
  misc_feature (1)..( 11): Result.002 file - promoters60/1033262
agtggaaatta

SEQ ID NO: 104607 - DNA, 11 bp, Unknown
  misc_feature (1)..( 11): Result.002 file - promoters60/1033262
attacaattta

SEQ ID NO: 104608 - DNA, 11 bp, Unknown
  misc_feature (1)..( 11): Result.002 file - promoters60/1033262
actggcaatgt

SEQ ID NO: 104609 - DNA, 11 bp, Unknown
  misc_feature (1)..( 11): Result.002 file - promoters60/1033262
ttcctaaatta

SEQ ID NO: 104610 - DNA, 11 bp, Unknown
  misc_feature (1)..( 11): Result.002 file - promoters60/1033262
aatccaaatta

SEQ ID NO: 104611 - DNA, 13 bp, Unknown
  misc_feature (1)..( 13): Result.002 file - promoters60/1033262
tcggaacaaaatc

SEQ ID NO: 104612 - DNA, 13 bp, Unknown
  misc_feature (1)..( 13): Result.002 file - promoters60/1033262
aaagaataaatat

SEQ ID NO: 104613 - DNA, 13 bp, Unknown
  misc_feature (1)..( 13): Result.002 file - promoters60/1033262
tagaaacaaaatc

SEQ ID NO: 104614 - DNA, 13 bp, Unknown
  misc_feature (1)..( 13): Result.002 file - promoters60/1033262
acagaaaaaaaga

SEQ ID NO: 104615 - DNA, 13 bp, Unknown
  misc_feature (1)..( 13): Result.002 file - promoters60/1033262
tagcaacaagtat

SEQ ID NO: 104616 - DNA, 13 bp, Unknown
  misc_feature (1)..( 13): Result.002 file - promoters60/1033262
taaacataaaagc

SEQ ID NO: 104617 - DNA, 14 bp, Unknown
  misc_feature (1)..( 14): Result.002 file - promoters60/1033262
cctttataaaaccc

SEQ ID NO: 104618 - DNA, 14 bp, Unknown
  misc_feature (1)..( 14): Result.002 file - promoters60/1033262
gaaatataaattag

SEQ ID NO: 104619 - DNA, 14 bp, Unknown
  misc_feature (1)..( 14): Result.002 file - promoters60/1033262
ggcctataaaatgc

SEQ ID NO: 104620 - DNA, 14 bp, Unknown
  misc_feature (1)..( 14): Result.002 file - promoters60/1033262
cccttataaaaatc

SEQ ID NO: 104621 - DNA, 14 bp, Unknown
  misc_feature (1)..( 14): Result.002 file - promoters60/1033262
taacaataaagatc

SEQ ID NO: 104622 - DNA, 14 bp, Unknown
  misc_feature (1)..( 14): Result.002 file - promoters60/1033262
cccatatatatata

SEQ ID NO: 104623 - DNA, 14 bp, Unknown
  misc_feature (1)..( 14): Result.002 file - promoters60/1033360
gggccaaagtatct

SEQ ID NO: 104624 - DNA, 14 bp, Unknown
  misc_feature (1)..( 14): Result.002 file - promoters60/1033360
tttttaaattatta

SEQ ID NO: 104625 - DNA, 14 bp, Unknown
  misc_feature (1)..( 14): Result.002 file - promoters60/1033360
tgtttaaataatta

SEQ ID NO: 104626 - DNA, 14 bp, Unknown
  misc_feature (1)..( 14): Result.002 file - promoters60/1033360
atagtaaatgaagc

SEQ ID NO: 104627 - DNA, 14 bp, Unknown
  misc_feature (1)..( 14): Result.002 file - promoters60/1033360
tgtgtaaagctgta

SEQ ID NO: 104628 - DNA, 11 bp, Unknown
  misc_feature (1)..( 11): Result.002 file - promoters60/1033360
taaaatttcac

SEQ ID NO: 104629 - DNA, 11 bp, Unknown
  misc_feature (1)..( 11): Result.002 file - promoters60/1033360
taaattttaca

SEQ ID NO: 104630 - DNA, 11 bp, Unknown
  misc_feature (1)..( 11): Result.002 file - promoters60/1033360
acaattttttg

SEQ ID NO: 104631 - DNA, 11 bp, Unknown
  misc_feature (1)..( 11): Result.002 file - promoters60/1033360
ttaattttaat

SEQ ID NO: 104632 - DNA, 11 bp, Unknown
  misc_feature (1)..( 11): Result.002 file - promoters60/1033360
aagatttgttg

SEQ ID NO: 104633 - DNA, 16 bp, Unknown
  misc_feature (1)..( 16): Result.002 file - promoters60/1033360
atgtgatattaattac

SEQ ID NO: 104634 - DNA, 16 bp, Unknown
  misc_feature (1)..( 16): Result.002 file - promoters60/1033360
gagatacattgattac

SEQ ID NO: 104635 - DNA, 16 bp, Unknown
  misc_feature (1)..( 16): Result.002 file - promoters60/1033360
atgagatagtaaatga

SEQ ID NO: 104636 - DNA, 16 bp, Unknown
  misc_feature (1)..( 16): Result.002 file - promoters60/1033360
tcctcttatcaattca

SEQ ID NO: 104637 - DNA, 16 bp, Unknown
  misc_feature (1)..( 16): Result.002 file - promoters60/1033360
caaatttagtaagcgg

SEQ ID NO: 104638 - DNA, 8 bp, Unknown
  misc_feature (1)..( 8): Result.002 file - promoters60/1033360
agtgattt

SEQ ID NO: 104639 - DNA, 8 bp, Unknown
  misc_feature (1)..( 8): Result.002 file - promoters60/1033360
gttgattt

SEQ ID NO: 104640 - DNA, 8 bp, Unknown
  misc_feature (1)..( 8): Result.002 file - promoters60/1033360
attggttt

SEQ ID NO: 104641 - DNA, 8 bp, Unknown
  misc_feature (1)..( 8): Result.002 file - promoters60/1033360
gtttattc

SEQ ID NO: 104642 - DNA, 8 bp, Unknown
  misc_feature (1)..( 8): Result.002 file - promoters60/1033360
atttgttt

SEQ ID NO: 104643 - DNA, 12 bp, Unknown
  misc_feature (1)..( 12): Result.002 file - promoters60/1033360
tattattttgaa

SEQ ID NO: 104644 - DNA, 12 bp, Unknown
  misc_feature (1)..( 12): Result.002 file - promoters60/1033360
tagcattatgat

SEQ ID NO: 104645 - DNA, 12 bp, Unknown
  misc_feature (1)..( 12): Result.002 file - promoters60/1033360
gtttatttttta

SEQ ID NO: 104646 - DNA, 12 bp, Unknown
  misc_feature (1)..( 12): Result.002 file - promoters60/1033360
gttgattttctt

SEQ ID NO: 104647 - DNA, 12 bp, Unknown
  misc_feature (1)..( 12): Result.002 file - promoters60/1033360
gtttattcatgt

SEQ ID NO: 104648 - DNA, 12 bp, Unknown
  misc_feature (1)..( 12): Result.002 file - promoters60/1033360
ttgttttaggat

SEQ ID NO: 104649 - DNA, 14 bp, Unknown
  misc_feature (1)..( 14): Result.002 file - promoters60/1033360
taacaataaatttt

SEQ ID NO: 104650 - DNA, 14 bp, Unknown
  misc_feature (1)..( 14): Result.002 file - promoters60/1033360
gcttaataaatctg

SEQ ID NO: 104651 - DNA, 14 bp, Unknown
  misc_feature (1)..( 14): Result.002 file - promoters60/1033360
taagaataaacaaa

SEQ ID NO: 104652 - DNA, 14 bp, Unknown
  misc_feature (1)..( 14): Result.002 file - promoters60/1033360
ttttactaagacat

SEQ ID NO: 104653 - DNA, 14 bp, Unknown
  misc_feature (1)..( 14): Result.002 file - promoters60/1033360
cctgtgtaaagctg

SEQ ID NO: 104654 - DNA, 11 bp, Unknown
  misc_feature (1)..( 11): Result.002 file - promoters60/1033430
cttttggtaaa

SEQ ID NO: 104655 - DNA, 11 bp, Unknown
  misc_feature (1)..( 11): Result.002 file - promoters60/1033430
cttttgttttt

SEQ ID NO: 104656 - DNA, 11 bp, Unknown
  misc_feature (1)..( 11): Result.002 file - promoters60/1033430
gatttggtttt

SEQ ID NO: 104657 - DNA, 11 bp, Unknown
  misc_feature (1)..( 11): Result.002 file - promoters60/1033430
gtcttggttgg

SEQ ID NO: 104658 - DNA, 7 bp, Unknown
  misc_feature (1)..( 7): Result.002 file - promoters60/1033430
ttacttt

SEQ ID NO: 104659 - DNA, 7 bp, Unknown
  misc_feature (1)..( 7): Result.002 file - promoters60/1033430
ttaattt

SEQ ID NO: 104660 - DNA, 7 bp, Unknown
  misc_feature (1)..( 7): Result.002 file - promoters60/1033430
ataattt

SEQ ID NO: 104661 - DNA, 9 bp, Unknown
  misc_feature (1)..( 9): Result.002 file - promoters60/1033430
tttggtaaa

SEQ ID NO: 104662 - DNA, 9 bp, Unknown
  misc_feature (1)..( 9): Result.002 file - promoters60/1033430
tttggtttt

SEQ ID NO: 104663 - DNA, 9 bp, Unknown
  misc_feature (1)..( 9): Result.002 file - promoters60/1033430
ttttgtttt

SEQ ID NO: 104664 - DNA, 9 bp, Unknown
  misc_feature (1)..( 9): Result.002 file - promoters60/1033430
cttggttgg

SEQ ID NO: 104665 - DNA, 7 bp, Unknown
  misc_feature (1)..( 7): Result.002 file - promoters60/1033430
tttataa

SEQ ID NO: 104666 - DNA, 7 bp, Unknown
  misc_feature (1)..( 7): Result.002 file - promoters60/1033430
gttataa

SEQ ID NO: 104667 - DNA, 7 bp, Unknown
  misc_feature (1)..( 7): Result.002 file - promoters60/1033430
gttttaa

SEQ ID NO: 104668 - DNA, 9 bp, Unknown
  misc_feature (1)..( 9): Result.002 file - promoters60/1033430
taattttca

SEQ ID NO: 104669 - DNA, 9 bp, Unknown
  misc_feature (1)..( 9): Result.002 file - promoters60/1033430
taaatttct

SEQ ID NO: 104670 - DNA, 9 bp, Unknown
  misc_feature (1)..( 9): Result.002 file - promoters60/1033430
ggtatttct

SEQ ID NO: 104671 - DNA, 13 bp, Unknown
  misc_feature (1)..( 13): Result.002 file - promoters60/1033430
ccgattcaattcc

SEQ ID NO: 104672 - DNA, 13 bp, Unknown
  misc_feature (1)..( 13): Result.002 file - promoters60/1033430
ttgattcaaaatt

SEQ ID NO: 104673 - DNA, 13 bp, Unknown
  misc_feature (1)..( 13): Result.002 file - promoters60/1033430
ttgaatcaatatt

SEQ ID NO: 104674 - DNA, 8 bp, Unknown
  misc_feature (1)..( 8): Result.002 file - promoters60/1033430
ttttgtct

SEQ ID NO: 104675 - DNA, 8 bp, Unknown
  misc_feature (1)..( 8): Result.002 file - promoters60/1033430
atttctct

SEQ ID NO: 104676 - DNA, 8 bp, Unknown
  misc_feature (1)..( 8): Result.002 file - promoters60/1033430
atttctgc

SEQ ID NO: 104677 - DNA, 13 bp, Unknown
  misc_feature (1)..( 13): Result.002 file - promoters60/1033430
ttggatcaacaat

SEQ ID NO: 104678 - DNA, 13 bp, Unknown
  misc_feature (1)..( 13): Result.002 file - promoters60/1033430
ttgaatcaatatt

SEQ ID NO: 104679 - DNA, 13 bp, Unknown
  misc_feature (1)..( 13): Result.002 file - promoters60/1033430
ttgattcaaaatt

SEQ ID NO: 104680 - DNA, 6 bp, Unknown
  misc_feature (1)..( 6): Result.002 file - promoters60/1033430
tggatt

SEQ ID NO: 104681 - DNA, 6 bp, Unknown
  misc_feature (1)..( 6): Result.002 file - promoters60/1033430
tggatt

SEQ ID NO: 104682 - DNA, 6 bp, Unknown
  misc_feature (1)..( 6): Result.002 file - promoters60/1033430
tggatt

SEQ ID NO: 104683 - DNA, 13 bp, Unknown
  misc_feature (1)..( 13): Result.002 file - promoters60/1033430
tttaggaaaaatt

SEQ ID NO: 104684 - DNA, 13 bp, Unknown
  misc_feature (1)..( 13): Result.002 file - promoters60/1033430
ttgattcaaaatt

SEQ ID NO: 104685 - DNA, 13 bp, Unknown
  misc_feature (1)..( 13): Result.002 file - promoters60/1033430
ttgaatcaatatt

SEQ ID NO: 104686 - DNA, 6 bp, Unknown
  misc_feature (1)..( 6): Result.002 file - promoters60/1033526
ttgaag

SEQ ID NO: 104687 - DNA, 6 bp, Unknown
  misc_feature (1)..( 6): Result.002 file - promoters60/1033526
ttgaag

SEQ ID NO: 104688 - DNA, 6 bp, Unknown
  misc_feature (1)..( 6): Result.002 file - promoters60/1033526
acgagc

SEQ ID NO: 104689 - DNA, 6 bp, Unknown
  misc_feature (1)..( 6): Result.002 file - promoters60/1033526
acgagc

SEQ ID NO: 104690 - DNA, 8 bp, Unknown
  misc_feature (1)..( 8): Result.002 file - promoters60/1033526
cttacttt

SEQ ID NO: 104691 - DNA, 8 bp, Unknown
  misc_feature (1)..( 8): Result.002 file - promoters60/1033526
ctttcttt

SEQ ID NO: 104692 - DNA, 7 bp, Unknown
  misc_feature (1)..( 7): Result.002 file - promoters60/1033526
cttttgt

SEQ ID NO: 104693 - DNA, 7 bp, Unknown
  misc_feature (1)..( 7): Result.002 file - promoters60/1033526
cttttgt

SEQ ID NO: 104694 - DNA, 10 bp, Unknown
  misc_feature (1)..( 10): Result.002 file - promoters60/1033526
ttgtttctct

SEQ ID NO: 104695 - DNA, 10 bp, Unknown
  misc_feature (1)..( 10): Result.002 file - promoters60/1033526
ttgtttgtct

SEQ ID NO: 104696 - DNA, 7 bp, Unknown
  misc_feature (1)..( 7): Result.002 file - promoters60/1033526
acttact

SEQ ID NO: 104697 - DNA, 7 bp, Unknown
  misc_feature (1)..( 7): Result.002 file - promoters60/1033526
actgact

SEQ ID NO: 104698 - DNA, 7 bp, Unknown
  misc_feature (1)..( 7): Result.002 file - promoters60/1033526
agattat

SEQ ID NO: 104699 - DNA, 7 bp, Unknown
  misc_feature (1)..( 7): Result.002 file - promoters60/1033526
agattat

SEQ ID NO: 104700 - DNA, 7 bp, Unknown
  misc_feature (1)..( 7): Result.002 file - promoters60/1033526
tattatt

SEQ ID NO: 104701 - DNA, 7 bp, Unknown
  misc_feature (1)..( 7): Result.002 file - promoters60/1033526
tatgatt

SEQ ID NO: 104702 - DNA, 7 bp, Unknown
  misc_feature (1)..( 7): Result.002 file - promoters60/1033526
gcaatta

SEQ ID NO: 104703 - DNA, 7 bp, Unknown
  misc_feature (1)..( 7): Result.002 file - promoters60/1033526
gcagtta

SEQ ID NO: 104704 - DNA, 9 bp, Unknown
  misc_feature (1)..( 9): Result.002 file - promoters60/1033526
aagacaatt

SEQ ID NO: 104705 - DNA, 9 bp, Unknown
  misc_feature (1)..( 9): Result.002 file - promoters60/1033526
aagaaaatt

SEQ ID NO: 104706 - DNA, 7 bp, Unknown
  misc_feature (1)..( 7): Result.002 file - promoters60/1033526
gaccttg

SEQ ID NO: 104707 - DNA, 7 bp, Unknown
  misc_feature (1)..( 7): Result.002 file - promoters60/1033526
gacattg

SEQ ID NO: 104708 - DNA, 6 bp, Unknown
  misc_feature (1)..( 6): Result.002 file - promoters60/1033526
cttgat

SEQ ID NO: 104709 - DNA, 6 bp, Unknown
  misc_feature (1)..( 6): Result.002 file - promoters60/1033526
cttgat

SEQ ID NO: 104710 - DNA, 7 bp, Unknown
  misc_feature (1)..( 7): Result.002 file - promoters60/1033526
gaggtaa

SEQ ID NO: 104711 - DNA, 7 bp, Unknown
  misc_feature (1)..( 7): Result.002 file - promoters60/1033526
gaggtaa

SEQ ID NO: 104712 - DNA, 8 bp, Unknown
  misc_feature (1)..( 8): Result.002 file - promoters60/1033526
tcttcatt

SEQ ID NO: 104713 - DNA, 8 bp, Unknown
  misc_feature (1)..( 8): Result.002 file - promoters60/1033526
tctgcatt

SEQ ID NO: 104714 - DNA, 8 bp, Unknown
  misc_feature (1)..( 8): Result.002 file - promoters60/1033526
tttatatc

SEQ ID NO: 104715 - DNA, 8 bp, Unknown
  misc_feature (1)..( 8): Result.002 file - promoters60/1033526
tttttatc

SEQ ID NO: 104716 - DNA, 6 bp, Unknown
  misc_feature (1)..( 6): Result.002 file - promoters60/1033526
atcttc

SEQ ID NO: 104717 - DNA, 6 bp, Unknown
  misc_feature (1)..( 6): Result.002 file - promoters60/1033526
atcttc

SEQ ID NO: 104718 - DNA, 7 bp, Unknown
  misc_feature (1)..( 7): Result.002 file - promoters60/1033526
tgagatt

SEQ ID NO: 104719 - DNA, 7 bp, Unknown
  misc_feature (1)..( 7): Result.002 file - promoters60/1033526
tgatatt

SEQ ID NO: 104720 - DNA, 8 bp, Unknown
  misc_feature (1)..( 8): Result.002 file - promoters60/1033526
tatattta

SEQ ID NO: 104721 - DNA, 8 bp, Unknown
  misc_feature (1)..( 8): Result.002 file - promoters60/1033526
tatgttta

SEQ ID NO: 104722 - DNA, 6 bp, Unknown
  misc_feature (1)..( 6): Result.002 file - promoters60/1033679
gttgta

SEQ ID NO: 104723 - DNA, 6 bp, Unknown
  misc_feature (1)..( 6): Result.002 file - promoters60/1033679
gttgta

SEQ ID NO: 104724 - DNA, 6 bp, Unknown
  misc_feature (1)..( 6): Result.002 file - promoters60/1033679
aaacaa

SEQ ID NO: 104725 - DNA, 6 bp, Unknown
  misc_feature (1)..( 6): Result.002 file - promoters60/1033679
aaacaa

SEQ ID NO: 104726 - DNA, 6 bp, Unknown
  misc_feature (1)..( 6): Result.002 file - promoters60/1033679
acaatc

SEQ ID NO: 104727 - DNA, 6 bp, Unknown
  misc_feature (1)..( 6): Result.002 file - promoters60/1033679
acaatc

SEQ ID NO: 104728 - DNA, 7 bp, Unknown
  misc_feature (1)..( 7): Result.002 file - promoters60/1033679
ctatttc

SEQ ID NO: 104729 - DNA, 7 bp, Unknown
  misc_feature (1)..( 7): Result.002 file - promoters60/1033679
ctagttc

SEQ ID NO: 104730 - DNA, 6 bp, Unknown
  misc_feature (1)..( 6): Result.002 file - promoters60/1033679
gcgttt

SEQ ID NO: 104731 - DNA, 6 bp, Unknown
  misc_feature (1)..( 6): Result.002 file - promoters60/1033679
gcgttt

SEQ ID NO: 104732 - DNA, 8 bp, Unknown
  misc_feature (1)..( 8): Result.002 file - promoters60/1033679
gtaaaaat

SEQ ID NO: 104733 - DNA, 8 bp, Unknown
  misc_feature (1)..( 8): Result.002 file - promoters60/1033679
gtaaaaat

SEQ ID NO: 104734 - DNA, 7 bp, Unknown
  misc_feature (1)..( 7): Result.002 file - promoters60/1033679
acattgt

SEQ ID NO: 104735 - DNA, 7 bp, Unknown
  misc_feature (1)..( 7): Result.002 file - promoters60/1033679
acattgt

SEQ ID NO: 104736 - DNA, 6 bp, Unknown
  misc_feature (1)..( 6): Result.002 file - promoters60/1033679
caaaaa

SEQ ID NO: 104737 - DNA, 6 bp, Unknown
  misc_feature (1)..( 6): Result.002 file - promoters60/1033679
caaaaa

SEQ ID NO: 104738 - DNA, 8 bp, Unknown
  misc_feature (1)..( 8): Result.002 file - promoters60/1033679
ttgttcta

SEQ ID NO: 104739 - DNA, 8 bp, Unknown
  misc_feature (1)..( 8): Result.002 file - promoters60/1033679
ttgttcta

SEQ ID NO: 104740 - DNA, 6 bp, Unknown
  misc_feature (1)..( 6): Result.002 file - promoters60/1033679
aaaaac

SEQ ID NO: 104741 - DNA, 6 bp, Unknown
  misc_feature (1)..( 6): Result.002 file - promoters60/1033679
aaaaac

SEQ ID NO: 104742 - DNA, 6 bp, Unknown
  misc_feature (1)..( 6): Result.002 file - promoters60/1033679
ttaaaa

SEQ ID NO: 104743 - DNA, 6 bp, Unknown
  misc_feature (1)..( 6): Result.002 file - promoters60/1033679
ttaaaa

SEQ ID NO: 104744 - DNA, 7 bp, Unknown
  misc_feature (1)..( 7): Result.002 file - promoters60/1033679
agtattc

SEQ ID NO: 104745 - DNA, 7 bp, Unknown
  misc_feature (1)..( 7): Result.002 file - promoters60/1033679
agttttc

SEQ ID NO: 104746 - DNA, 6 bp, Unknown
  misc_feature (1)..( 6): Result.002 file - promoters60/1033679
aatgga

SEQ ID NO: 104747 - DNA, 6 bp, Unknown
  misc_feature (1)..( 6): Result.002 file - promoters60/1033679
aatgga

SEQ ID NO: 104748 - DNA, 6 bp, Unknown
  misc_feature (1)..( 6): Result.002 file - promoters60/1033679
ttcata

SEQ ID NO: 104749 - DNA, 6 bp, Unknown
  misc_feature (1)..( 6): Result.002 file - promoters60/1033679
ttcata

SEQ ID NO: 104750 - DNA, 6 bp, Unknown
  misc_feature (1)..( 6): Result.002 file - promoters60/1033679
cccaat

SEQ ID NO: 104751 - DNA, 6 bp, Unknown
  misc_feature (1)..( 6): Result.002 file - promoters60/1033679
cccaat

SEQ ID NO: 104752 - DNA, 6 bp, Unknown
  misc_feature (1)..( 6): Result.002 file - promoters60/1033679
ttacgt

SEQ ID NO: 104753 - DNA, 6 bp, Unknown
  misc_feature (1)..( 6): Result.002 file - promoters60/1033679
ttacgt

SEQ ID NO: 104754 - DNA, 6 bp, Unknown
  misc_feature (1)..( 6): Result.002 file - promoters60/1033716
ttaaaa

SEQ ID NO: 104755 - DNA, 6 bp, Unknown
  misc_feature (1)..( 6): Result.002 file - promoters60/1033716
ttaaaa

SEQ ID NO: 104756 - DNA, 6 bp, Unknown
  misc_feature (1)..( 6): Result.002 file - promoters60/1033716
aaaaga

SEQ ID NO: 104757 - DNA, 6 bp, Unknown
  misc_feature (1)..( 6): Result.002 file - promoters60/1033716
aaaaga

SEQ ID NO: 104758 - DNA, 6 bp, Unknown
  misc_feature (1)..( 6): Result.002 file - promoters60/1033716
aaaacg

SEQ ID NO: 104759 - DNA, 6 bp, Unknown
  misc_feature (1)..( 6): Result.002 file - promoters60/1033716
aaaacg

SEQ ID NO: 104760 - DNA, 8 bp, Unknown
  misc_feature (1)..( 8): Result.002 file - promoters60/1033716
gtattaac

SEQ ID NO: 104761 - DNA, 8 bp, Unknown
  misc_feature (1)..( 8): Result.002 file - promoters60/1033716
gtagtaac

SEQ ID NO: 104762 - DNA, 6 bp, Unknown
  misc_feature (1)..( 6): Result.002 file - promoters60/1033716
agatga

SEQ ID NO: 104763 - DNA, 6 bp, Unknown
  misc_feature (1)..( 6): Result.002 file - promoters60/1033716
agatga

SEQ ID NO: 104764 - DNA, 10 bp, Unknown
  misc_feature (1)..( 10): Result.002 file - promoters60/1033716
aaaagtaaaa

SEQ ID NO: 104765 - DNA, 10 bp, Unknown
  misc_feature (1)..( 10): Result.002 file - promoters60/1033716
aaaagaaaaa

SEQ ID NO: 104766 - DNA, 7 bp, Unknown
  misc_feature (1)..( 7): Result.002 file - promoters60/1033716
agattct

SEQ ID NO: 104767 - DNA, 7 bp, Unknown
  misc_feature (1)..( 7): Result.002 file - promoters60/1033716
agattct

SEQ ID NO: 104768 - DNA, 8 bp, Unknown
  misc_feature (1)..( 8): Result.002 file - promoters60/1033716
ctcagagc

SEQ ID NO: 104769 - DNA, 8 bp, Unknown
  misc_feature (1)..( 8): Result.002 file - promoters60/1033716
ctcaaagc

SEQ ID NO: 104770 - DNA, 6 bp, Unknown
  misc_feature (1)..( 6): Result.002 file - promoters60/1033716
attatc

SEQ ID NO: 104771 - DNA, 6 bp, Unknown
  misc_feature (1)..( 6): Result.002 file - promoters60/1033716
attatc

SEQ ID NO: 104772 - DNA, 9 bp, Unknown
  misc_feature (1)..( 9): Result.002 file - promoters60/1033716
tatttaaaa

SEQ ID NO: 104773 - DNA, 9 bp, Unknown
  misc_feature (1)..( 9): Result.002 file - promoters60/1033716
tattgaaaa

SEQ ID NO: 104774 - DNA, 8 bp, Unknown
  misc_feature (1)..( 8): Result.002 file - promoters60/1033716
aaaacgac

SEQ ID NO: 104775 - DNA, 8 bp, Unknown
  misc_feature (1)..( 8): Result.002 file - promoters60/1033716
aaaacgac

SEQ ID NO: 104776 - DNA, 9 bp, Unknown
  misc_feature (1)..( 9): Result.002 file - promoters60/1033716
gggtaagag

SEQ ID NO: 104777 - DNA, 9 bp, Unknown
  misc_feature (1)..( 9): Result.002 file - promoters60/1033716
gggtaagag

SEQ ID NO: 104778 - DNA, 8 bp, Unknown
  misc_feature (1)..( 8): Result.002 file - promoters60/1033716
aatcgaat

SEQ ID NO: 104779 - DNA, 8 bp, Unknown
  misc_feature (1)..( 8): Result.002 file - promoters60/1033716
aatctaat

SEQ ID NO: 104780 - DNA, 7 bp, Unknown
  misc_feature (1)..( 7): Result.002 file - promoters60/1033716
tattggt

SEQ ID NO: 104781 - DNA, 7 bp, Unknown
  misc_feature (1)..( 7): Result.002 file - promoters60/1033716
tattggt

SEQ ID NO: 104782 - DNA, 7 bp, Unknown
  misc_feature (1)..( 7): Result.002 file - promoters60/1033716
ttctcat

SEQ ID NO: 104783 - DNA, 7 bp, Unknown
  misc_feature (1)..( 7): Result.002 file - promoters60/1033716
ttctcat

SEQ ID NO: 104784 - DNA, 10 bp, Unknown
  misc_feature (1)..( 10): Result.002 file - promoters60/1033723
atggaaatta

SEQ ID NO: 104785 - DNA, 10 bp, Unknown
  misc_feature (1)..( 10): Result.002 file - promoters60/1033723
atggtaatta

SEQ ID NO: 104786 - DNA, 7 bp, Unknown
  misc_feature (1)..( 7): Result.002 file - promoters60/1033723
gattatg

SEQ ID NO: 104787 - DNA, 7 bp, Unknown
  misc_feature (1)..( 7): Result.002 file - promoters60/1033723
gatgatg

SEQ ID NO: 104788 - DNA, 7 bp, Unknown
  misc_feature (1)..( 7): Result.002 file - promoters60/1033723
atgaaga

SEQ ID NO: 104789 - DNA, 7 bp, Unknown
  misc_feature (1)..( 7): Result.002 file - promoters60/1033723
atgaaga

SEQ ID NO: 104790 - DNA, 7 bp, Unknown
  misc_feature (1)..( 7): Result.002 file - promoters60/1033723
ctgaaga

SEQ ID NO: 104791 - DNA, 7 bp, Unknown
  misc_feature (1)..( 7): Result.002 file - promoters60/1033723
agaagga

SEQ ID NO: 104792 - DNA, 7 bp, Unknown
  misc_feature (1)..( 7): Result.002 file - promoters60/1033723
agacgga

SEQ ID NO: 104793 - DNA, 6 bp, Unknown
  misc_feature (1)..( 6): Result.002 file - promoters60/1033723
ataatt

SEQ ID NO: 104794 - DNA, 6 bp, Unknown
  misc_feature (1)..( 6): Result.002 file - promoters60/1033723
ataatt

SEQ ID NO: 104795 - DNA, 9 bp, Unknown
  misc_feature (1)..( 9): Result.002 file - promoters60/1033723
ggatctggt

SEQ ID NO: 104796 - DNA, 9 bp, Unknown
  misc_feature (1)..( 9): Result.002 file - promoters60/1033723
ggatcgggt

SEQ ID NO: 104797 - DNA, 6 bp, Unknown
  misc_feature (1)..( 6): Result.002 file - promoters60/1033723
ttcgga

SEQ ID NO: 104798 - DNA, 6 bp, Unknown
  misc_feature (1)..( 6): Result.002 file - promoters60/1033723
ttcgga

SEQ ID NO: 104799 - DNA, 6 bp, Unknown
  misc_feature (1)..( 6): Result.002 file - promoters60/1033723
cggcga

SEQ ID NO: 104800 - DNA, 6 bp, Unknown
  misc_feature (1)..( 6): Result.002 file - promoters60/1033723
cggcga

SEQ ID NO: 104801 - DNA, 8 bp, Unknown
  misc_feature (1)..( 8): Result.002 file - promoters60/1033723
ggaggatc

SEQ ID NO: 104802 - DNA, 8 bp, Unknown
  misc_feature (1)..( 8): Result.002 file - promoters60/1033723
ggaggatc

SEQ ID NO: 104803 - DNA, 11 bp, Unknown
  misc_feature (1)..( 11): Result.002 file - promoters60/1033723
gaatggagatg

SEQ ID NO: 104804 - DNA, 11 bp, Unknown
  misc_feature (1)..( 11): Result.002 file - promoters60/1033723
gaagggagatg

SEQ ID NO: 104805 - DNA, 11 bp, Unknown
  misc_feature (1)..( 11): Result.002 file - promoters60/1033781
taaagcaaaac

SEQ ID NO: 104806 - DNA, 11 bp, Unknown
  misc_feature (1)..( 11): Result.002 file - promoters60/1033781
tggagcaaata

SEQ ID NO: 104807 - DNA, 11 bp, Unknown
  misc_feature (1)..( 11): Result.002 file - promoters60/1033781
taaaacaaaaa

SEQ ID NO: 104808 - DNA, 11 bp, Unknown
  misc_feature (1)..( 11): Result.002 file - promoters60/1033781
aatcacaaaac

SEQ ID NO: 104809 - DNA, 12 bp, Unknown
  misc_feature (1)..( 12): Result.002 file - promoters60/1033781
ccaatcataaaa

SEQ ID NO: 104810 - DNA, 12 bp, Unknown
  misc_feature (1)..( 12): Result.002 file - promoters60/1033781
agaatcattaat

SEQ ID NO: 104811 - DNA, 13 bp, Unknown
  misc_feature (1)..( 13): Result.002 file - promoters60/1033781
aggcccatattta

SEQ ID NO: 104812 - DNA, 13 bp, Unknown
  misc_feature (1)..( 13): Result.002 file - promoters60/1033781
cggcccaaattta

SEQ ID NO: 104813 - DNA, 13 bp, Unknown
  misc_feature (1)..( 13): Result.002 file - promoters60/1033781
aggcccaataaat

SEQ ID NO: 104814 - DNA, 13 bp, Unknown
  misc_feature (1)..( 13): Result.002 file - promoters60/1033781
taaaacaaattag

SEQ ID NO: 104815 - DNA, 13 bp, Unknown
  misc_feature (1)..( 13): Result.002 file - promoters60/1033781
aggcccaacaaaa

SEQ ID NO: 104816 - DNA, 13 bp, Unknown
  misc_feature (1)..( 13): Result.002 file - promoters60/1033781
aggcccaataact

SEQ ID NO: 104817 - DNA, 9 bp, Unknown
  misc_feature (1)..( 9): Result.002 file - promoters60/1033781
aaataaatt

SEQ ID NO: 104818 - DNA, 9 bp, Unknown
  misc_feature (1)..( 9): Result.002 file - promoters60/1033781
aaaaaaagt

SEQ ID NO: 104819 - DNA, 9 bp, Unknown
  misc_feature (1)..( 9): Result.002 file - promoters60/1033781
tcataaatc

SEQ ID NO: 104820 - DNA, 9 bp, Unknown
  misc_feature (1)..( 9): Result.002 file - promoters60/1033781
acataaaca

SEQ ID NO: 104821 - DNA, 9 bp, Unknown
  misc_feature (1)..( 9): Result.002 file - promoters60/1033781
tcataaaag

SEQ ID NO: 104822 - DNA, 9 bp, Unknown
  misc_feature (1)..( 9): Result.002 file - promoters60/1033781
tcattaatc

SEQ ID NO: 104823 - DNA, 12 bp, Unknown
  misc_feature (1)..( 12): Result.002 file - promoters60/1033781
taattaaactgg

SEQ ID NO: 104824 - DNA, 12 bp, Unknown
  misc_feature (1)..( 12): Result.002 file - promoters60/1033781
agattaaaaaaa

SEQ ID NO: 104825 - DNA, 12 bp, Unknown
  misc_feature (1)..( 12): Result.002 file - promoters60/1033781
taactaaattgg

SEQ ID NO: 104826 - DNA, 12 bp, Unknown
  misc_feature (1)..( 12): Result.002 file - promoters60/1033781
ctgctgaattgg

SEQ ID NO: 104827 - DNA, 12 bp, Unknown
  misc_feature (1)..( 12): Result.002 file - promoters60/1033781
cttatgatttgc

SEQ ID NO: 104828 - DNA, 12 bp, Unknown
  misc_feature (1)..( 12): Result.002 file - promoters60/1033781
ttactaaaagtt

SEQ ID NO: 104829 - DNA, 11 bp, Unknown
  misc_feature (1)..( 11): Result.002 file - promoters60/1033781
ttcaaaaaaga

SEQ ID NO: 104830 - DNA, 11 bp, Unknown
  misc_feature (1)..( 11): Result.002 file - promoters60/1033781
cttaaaaaact

SEQ ID NO: 104831 - DNA, 11 bp, Unknown
  misc_feature (1)..( 11): Result.002 file - promoters60/1033781
ttcaaaaaaaa

SEQ ID NO: 104832 - DNA, 11 bp, Unknown
  misc_feature (1)..( 11): Result.002 file - promoters60/1033781
tataataaact

SEQ ID NO: 104833 - DNA, 11 bp, Unknown
  misc_feature (1)..( 11): Result.002 file - promoters60/1033781
atcaacaaatg

SEQ ID NO: 104834 - DNA, 11 bp, Unknown
  misc_feature (1)..( 11): Result.002 file - promoters60/1033781
tgccaaaaacc

SEQ ID NO: 104835 - DNA, 14 bp, Unknown
  misc_feature (1)..( 14): Result.002 file - promoters60/1033841
caatgggctgggcc

SEQ ID NO: 104836 - DNA, 14 bp, Unknown
  misc_feature (1)..( 14): Result.002 file - promoters60/1033841
ttttgggcttctta

SEQ ID NO: 104837 - DNA, 14 bp, Unknown
  misc_feature (1)..( 14): Result.002 file - promoters60/1033841
aaataggcccaaca

SEQ ID NO: 104838 - DNA, 14 bp, Unknown
  misc_feature (1)..( 14): Result.002 file - promoters60/1033841
aattgggcttttta

SEQ ID NO: 104839 - DNA, 14 bp, Unknown
  misc_feature (1)..( 14): Result.002 file - promoters60/1033841
aattgggattattt

SEQ ID NO: 104840 - DNA, 14 bp, Unknown
  misc_feature (1)..( 14): Result.002 file - promoters60/1033841
taatgggcctttag

SEQ ID NO: 104841 - DNA, 7 bp, Unknown
  misc_feature (1)..( 7): Result.002 file - promoters60/1033849
attcact

SEQ ID NO: 104842 - DNA, 7 bp, Unknown
  misc_feature (1)..( 7): Result.002 file - promoters60/1033849
attcact

SEQ ID NO: 104843 - DNA, 6 bp, Unknown
  misc_feature (1)..( 6): Result.002 file - promoters60/1033849
taaaga

SEQ ID NO: 104844 - DNA, 6 bp, Unknown
  misc_feature (1)..( 6): Result.002 file - promoters60/1033849
taaaga

SEQ ID NO: 104845 - DNA, 11 bp, Unknown
  misc_feature (1)..( 11): Result.002 file - promoters60/1033849
acagtttataa

SEQ ID NO: 104846 - DNA, 11 bp, Unknown
  misc_feature (1)..( 11): Result.002 file - promoters60/1033849
acaatttataa

SEQ ID NO: 104847 - DNA, 7 bp, Unknown
  misc_feature (1)..( 7): Result.002 file - promoters60/1033849
gtaacta

SEQ ID NO: 104848 - DNA, 7 bp, Unknown
  misc_feature (1)..( 7): Result.002 file - promoters60/1033849
gtaacta

SEQ ID NO: 104849 - DNA, 7 bp, Unknown
  misc_feature (1)..( 7): Result.002 file - promoters60/1033849
aattttt

SEQ ID NO: 104850 - DNA, 7 bp, Unknown
  misc_feature (1)..( 7): Result.002 file - promoters60/1033849
aattttt

SEQ ID NO: 104851 - DNA, 7 bp, Unknown
  misc_feature (1)..( 7): Result.002 file - promoters60/1033849
tttgttt

SEQ ID NO: 104852 - DNA, 7 bp, Unknown
  misc_feature (1)..( 7): Result.002 file - promoters60/1033849
tttgttt

SEQ ID NO: 104853 - DNA, 7 bp, Unknown
  misc_feature (1)..( 7): Result.002 file - promoters60/1033849
tgtcaaa

SEQ ID NO: 104854 - DNA, 7 bp, Unknown
  misc_feature (1)..( 7): Result.002 file - promoters60/1033849
tgtgaaa

SEQ ID NO: 104855 - DNA, 7 bp, Unknown
  misc_feature (1)..( 7): Result.002 file - promoters60/1033849
tagtaaa

SEQ ID NO: 104856 - DNA, 7 bp, Unknown
  misc_feature (1)..( 7): Result.002 file - promoters60/1033849
tagaaaa

SEQ ID NO: 104857 - DNA, 7 bp, Unknown
  misc_feature (1)..( 7): Result.002 file - promoters60/1033849
tatgtaa

SEQ ID NO: 104858 - DNA, 7 bp, Unknown
  misc_feature (1)..( 7): Result.002 file - promoters60/1033849
tatataa

SEQ ID NO: 104859 - DNA, 8 bp, Unknown
  misc_feature (1)..( 8): Result.002 file - promoters60/1033849
atatttac

SEQ ID NO: 104860 - DNA, 8 bp, Unknown
  misc_feature (1)..( 8): Result.002 file - promoters60/1033849
atatatac

SEQ ID NO: 104861 - DNA, 6 bp, Unknown
  misc_feature (1)..( 6): Result.002 file - promoters60/1033849
tagata

SEQ ID NO: 104862 - DNA, 6 bp, Unknown
  misc_feature (1)..( 6): Result.002 file - promoters60/1033849
tagata

SEQ ID NO: 104863 - DNA, 7 bp, Unknown
  misc_feature (1)..( 7): Result.002 file - promoters60/1033849
caaaaat

SEQ ID NO: 104864 - DNA, 7 bp, Unknown
  misc_feature (1)..( 7): Result.002 file - promoters60/1033849
caaaaag

SEQ ID NO: 104865 - DNA, 7 bp, Unknown
  misc_feature (1)..( 7): Result.002 file - promoters60/1033849
gaaaaag

SEQ ID NO: 104866 - DNA, 6 bp, Unknown
  misc_feature (1)..( 6): Result.002 file - promoters60/1033849
gcaata

SEQ ID NO: 104867 - DNA, 6 bp, Unknown
  misc_feature (1)..( 6): Result.002 file - promoters60/1033849
gcaata

SEQ ID NO: 104868 - DNA, 7 bp, Unknown
  misc_feature (1)..( 7): Result.002 file - promoters60/1033849
aaactat

SEQ ID NO: 104869 - DNA, 7 bp, Unknown
  misc_feature (1)..( 7): Result.002 file - promoters60/1033849
aaactat

SEQ ID NO: 104870 - DNA, 6 bp, Unknown
  misc_feature (1)..( 6): Result.002 file - promoters60/1033849
aaaata

SEQ ID NO: 104871 - DNA, 6 bp, Unknown
  misc_feature (1)..( 6): Result.002 file - promoters60/1033849
aaaata

SEQ ID NO: 104872 - DNA, 13 bp, Unknown
  misc_feature (1)..( 13): Result.002 file - promoters60/1033865
aaatgctttttat

SEQ ID NO: 104873 - DNA, 13 bp, Unknown
  misc_feature (1)..( 13): Result.002 file - promoters60/1033865
aaaagctaatttt

SEQ ID NO: 104874 - DNA, 13 bp, Unknown
  misc_feature (1)..( 13): Result.002 file - promoters60/1033865
ggatgctttttaa

SEQ ID NO: 104875 - DNA, 13 bp, Unknown
  misc_feature (1)..( 13): Result.002 file - promoters60/1033865
aaaagctaatttt

SEQ ID NO: 104876 - DNA, 13 bp, Unknown
  misc_feature (1)..( 13): Result.002 file - promoters60/1033865
tatatatttttaa

SEQ ID NO: 104877 - DNA, 13 bp, Unknown
  misc_feature (1)..( 13): Result.002 file - promoters60/1033865
ggattcttacttt

SEQ ID NO: 104878 - DNA, 13 bp, Unknown
  misc_feature (1)..( 13): Result.002 file - promoters60/1033865
tgatttttttata

SEQ ID NO: 104879 - DNA, 13 bp, Unknown
  misc_feature (1)..( 13): Result.002 file - promoters60/1033865
agattctttggtg

SEQ ID NO: 104880 - DNA, 11 bp, Unknown
  misc_feature (1)..( 11): Result.002 file - promoters60/1033865
gttattgggtt

SEQ ID NO: 104881 - DNA, 11 bp, Unknown
  misc_feature (1)..( 11): Result.002 file - promoters60/1033865
atgatttggtc

SEQ ID NO: 104882 - DNA, 11 bp, Unknown
  misc_feature (1)..( 11): Result.002 file - promoters60/1033865
atgatttggtc

SEQ ID NO: 104883 - DNA, 11 bp, Unknown
  misc_feature (1)..( 11): Result.002 file - promoters60/1033865
tttgttgtgtt

SEQ ID NO: 104884 - DNA, 11 bp, Unknown
  misc_feature (1)..( 11): Result.002 file - promoters60/1033865
tgtattttttg

SEQ ID NO: 104885 - DNA, 11 bp, Unknown
  misc_feature (1)..( 11): Result.002 file - promoters60/1033865
agtttttagta

SEQ ID NO: 104886 - DNA, 12 bp, Unknown
  misc_feature (1)..( 12): Result.002 file - promoters60/1033865
atgctttttata

SEQ ID NO: 104887 - DNA, 12 bp, Unknown
  misc_feature (1)..( 12): Result.002 file - promoters60/1033865
tatatttttaaa

SEQ ID NO: 104888 - DNA, 12 bp, Unknown
  misc_feature (1)..( 12): Result.002 file - promoters60/1033865
atgctttttaac

SEQ ID NO: 104889 - DNA, 12 bp, Unknown
  misc_feature (1)..( 12): Result.002 file - promoters60/1033865
ttactttttcct

SEQ ID NO: 104890 - DNA, 12 bp, Unknown
  misc_feature (1)..( 12): Result.002 file - promoters60/1033865
gatttttttata

SEQ ID NO: 104891 - DNA, 13 bp, Unknown
  misc_feature (1)..( 13): Result.002 file - promoters60/1033865
gagattctttggt

SEQ ID NO: 104892 - DNA, 13 bp, Unknown
  misc_feature (1)..( 13): Result.002 file - promoters60/1033865
aagattctagaaa

SEQ ID NO: 104893 - DNA, 14 bp, Unknown
  misc_feature (1)..( 14): Result.002 file - promoters60/1033865
tagtaagattctag

SEQ ID NO: 104894 - DNA, 14 bp, Unknown
  misc_feature (1)..( 14): Result.002 file - promoters60/1033865
aactaggattctta

SEQ ID NO: 104895 - DNA, 14 bp, Unknown
  misc_feature (1)..( 14): Result.002 file - promoters60/1033865
aagagagattcttt

SEQ ID NO: 104896 - DNA, 14 bp, Unknown
  misc_feature (1)..( 14): Result.002 file - promoters60/1033865
tttatatattttta

SEQ ID NO: 104897 - DNA, 14 bp, Unknown
  misc_feature (1)..( 14): Result.002 file - promoters60/1033865
tttatatattttgt

SEQ ID NO: 104898 - DNA, 14 bp, Unknown
  misc_feature (1)..( 14): Result.002 file - promoters60/1033865
accatggatgcttt

SEQ ID NO: 104899 - DNA, 14 bp, Unknown
  misc_feature (1)..( 14): Result.002 file - promoters60/1033865
tagtaagattctag

SEQ ID NO: 104900 - DNA, 9 bp, Unknown
  misc_feature (1)..( 9): Result.002 file - promoters60/1034030
atattaaat

SEQ ID NO: 104901 - DNA, 9 bp, Unknown
  misc_feature (1)..( 9): Result.002 file - promoters60/1034030
tttttaaat

SEQ ID NO: 104902 - DNA, 9 bp, Unknown
  misc_feature (1)..( 9): Result.002 file - promoters60/1034030
tttttcaat

SEQ ID NO: 104903 - DNA, 12 bp, Unknown
  misc_feature (1)..( 12): Result.002 file - promoters60/1034030
tataagtcaatt

SEQ ID NO: 104904 - DNA, 12 bp, Unknown
  misc_feature (1)..( 12): Result.002 file - promoters60/1034030
tattagtaaata

SEQ ID NO: 104905 - DNA, 12 bp, Unknown
  misc_feature (1)..( 12): Result.002 file - promoters60/1034030
cttttttcaatt

SEQ ID NO: 104906 - DNA, 12 bp, Unknown
  misc_feature (1)..( 12): Result.002 file - promoters60/1034030
cattagtgaccc

SEQ ID NO: 104907 - DNA, 12 bp, Unknown
  misc_feature (1)..( 12): Result.002 file - promoters60/1034030
aaaccaaaagtt

SEQ ID NO: 104908 - DNA, 12 bp, Unknown
  misc_feature (1)..( 12): Result.002 file - promoters60/1034030
aaatcaaataag

SEQ ID NO: 104909 - DNA, 13 bp, Unknown
  misc_feature (1)..( 13): Result.002 file - promoters60/1034030
tagccacaagcgt

SEQ ID NO: 104910 - DNA, 13 bp, Unknown
  misc_feature (1)..( 13): Result.002 file - promoters60/1034030
aaagagaaagtca

SEQ ID NO: 104911 - DNA, 6 bp, Unknown
  misc_feature (1)..( 6): Result.002 file - promoters60/1034034
tttatt

SEQ ID NO: 104912 - DNA, 6 bp, Unknown
  misc_feature (1)..( 6): Result.002 file - promoters60/1034034
tttatt

SEQ ID NO: 104913 - DNA, 7 bp, Unknown
  misc_feature (1)..( 7): Result.002 file - promoters60/1034034
ttggggt

SEQ ID NO: 104914 - DNA, 7 bp, Unknown
  misc_feature (1)..( 7): Result.002 file - promoters60/1034034
ttgcggt

SEQ ID NO: 104915 - DNA, 7 bp, Unknown
  misc_feature (1)..( 7): Result.002 file - promoters60/1034034
cttctgt

SEQ ID NO: 104916 - DNA, 7 bp, Unknown
  misc_feature (1)..( 7): Result.002 file - promoters60/1034034
cttgtgt

SEQ ID NO: 104917 - DNA, 7 bp, Unknown
  misc_feature (1)..( 7): Result.002 file - promoters60/1034034
ttactcc

SEQ ID NO: 104918 - DNA, 7 bp, Unknown
  misc_feature (1)..( 7): Result.002 file - promoters60/1034034
ttattcc

SEQ ID NO: 104919 - DNA, 9 bp, Unknown
  misc_feature (1)..( 9): Result.002 file - promoters60/1034034
tttggattt

SEQ ID NO: 104920 - DNA, 9 bp, Unknown
  misc_feature (1)..( 9): Result.002 file - promoters60/1034034
tttggtttt

SEQ ID NO: 104921 - DNA, 7 bp, Unknown
  misc_feature (1)..( 7): Result.002 file - promoters60/1034034
agatatg

SEQ ID NO: 104922 - DNA, 7 bp, Unknown
  misc_feature (1)..( 7): Result.002 file - promoters60/1034034
agaaatg

SEQ ID NO: 104923 - DNA, 6 bp, Unknown
  misc_feature (1)..( 6): Result.002 file - promoters60/1034034
gagaag

SEQ ID NO: 104924 - DNA, 6 bp, Unknown
  misc_feature (1)..( 6): Result.002 file - promoters60/1034034
gagaag

SEQ ID NO: 104925 - DNA, 7 bp, Unknown
  misc_feature (1)..( 7): Result.002 file - promoters60/1034034
agaattt

SEQ ID NO: 104926 - DNA, 7 bp, Unknown
  misc_feature (1)..( 7): Result.002 file - promoters60/1034034
agagttt

SEQ ID NO: 104927 - DNA, 8 bp, Unknown
  misc_feature (1)..( 8): Result.002 file - promoters60/1034034
tcaaagat

SEQ ID NO: 104928 - DNA, 8 bp, Unknown
  misc_feature (1)..( 8): Result.002 file - promoters60/1034034
tcagagat

SEQ ID NO: 104929 - DNA, 8 bp, Unknown
  misc_feature (1)..( 8): Result.002 file - promoters60/1034034
ttcaattc

SEQ ID NO: 104930 - DNA, 8 bp, Unknown
  misc_feature (1)..( 8): Result.002 file - promoters60/1034034
ttcgattc

SEQ ID NO: 104931 - DNA, 8 bp, Unknown
  misc_feature (1)..( 8): Result.002 file - promoters60/1034034
gaacaaac

SEQ ID NO: 104932 - DNA, 8 bp, Unknown
  misc_feature (1)..( 8): Result.002 file - promoters60/1034034
gaagaaac

SEQ ID NO: 104933 - DNA, 6 bp, Unknown
  misc_feature (1)..( 6): Result.002 file - promoters60/1034034
gaatca

SEQ ID NO: 104934 - DNA, 6 bp, Unknown
  misc_feature (1)..( 6): Result.002 file - promoters60/1034034
gaatca

SEQ ID NO: 104935 - DNA, 7 bp, Unknown
  misc_feature (1)..( 7): Result.002 file - promoters60/1034034
tccggtt

SEQ ID NO: 104936 - DNA, 7 bp, Unknown
  misc_feature (1)..( 7): Result.002 file - promoters60/1034034
tccagtt

SEQ ID NO: 104937 - DNA, 6 bp, Unknown
  misc_feature (1)..( 6): Result.002 file - promoters60/1034034
tttccg

SEQ ID NO: 104938 - DNA, 6 bp, Unknown
  misc_feature (1)..( 6): Result.002 file - promoters60/1034034
tttccg

SEQ ID NO: 104939 - DNA, 6 bp, Unknown
  misc_feature (1)..( 6): Result.002 file - promoters60/1034034
ataaat

SEQ ID NO: 104940 - DNA, 6 bp, Unknown
  misc_feature (1)..( 6): Result.002 file - promoters60/1034034
ataaat

SEQ ID NO: 104941 - DNA, 6 bp, Unknown
  misc_feature (1)..( 6): Result.002 file - promoters60/1034034
aaccct

SEQ ID NO: 104942 - DNA, 6 bp, Unknown
  misc_feature (1)..( 6): Result.002 file - promoters60/1034034
aaccct

SEQ ID NO: 104943 - DNA, 6 bp, Unknown
  misc_feature (1)..( 6): Result.002 file - promoters60/1034119
aataat

SEQ ID NO: 104944 - DNA, 6 bp, Unknown
  misc_feature (1)..( 6): Result.002 file - promoters60/1034119
aataat

SEQ ID NO: 104945 - DNA, 11 bp, Unknown
  misc_feature (1)..( 11): Result.002 file - promoters60/1034119
ataataataat

SEQ ID NO: 104946 - DNA, 11 bp, Unknown
  misc_feature (1)..( 11): Result.002 file - promoters60/1034119
ataataataat

SEQ ID NO: 104947 - DNA, 7 bp, Unknown
  misc_feature (1)..( 7): Result.002 file - promoters60/1034119
atcgtca

SEQ ID NO: 104948 - DNA, 7 bp, Unknown
  misc_feature (1)..( 7): Result.002 file - promoters60/1034119
atcttca

SEQ ID NO: 104949 - DNA, 10 bp, Unknown
  misc_feature (1)..( 10): Result.002 file - promoters60/1034119
aacatgaggc

SEQ ID NO: 104950 - DNA, 10 bp, Unknown
  misc_feature (1)..( 10): Result.002 file - promoters60/1034119
aacataaggc

SEQ ID NO: 104951 - DNA, 6 bp, Unknown
  misc_feature (1)..( 6): Result.002 file - promoters60/1034119
aattta

SEQ ID NO: 104952 - DNA, 6 bp, Unknown
  misc_feature (1)..( 6): Result.002 file - promoters60/1034119
aattta

SEQ ID NO: 104953 - DNA, 6 bp, Unknown
  misc_feature (1)..( 6): Result.002 file - promoters60/1034119
tttatt

SEQ ID NO: 104954 - DNA, 6 bp, Unknown
  misc_feature (1)..( 6): Result.002 file - promoters60/1034119
tttatt

SEQ ID NO: 104955 - DNA, 7 bp, Unknown
  misc_feature (1)..( 7): Result.002 file - promoters60/1034119
tatgtta

SEQ ID NO: 104956 - DNA, 7 bp, Unknown
  misc_feature (1)..( 7): Result.002 file - promoters60/1034119
tatttta

SEQ ID NO: 104957 - DNA, 6 bp, Unknown
  misc_feature (1)..( 6): Result.002 file - promoters60/1034119
taaaaa

SEQ ID NO: 104958 - DNA, 6 bp, Unknown
  misc_feature (1)..( 6): Result.002 file - promoters60/1034119
taaaaa

SEQ ID NO: 104959 - DNA, 6 bp, Unknown
  misc_feature (1)..( 6): Result.002 file - promoters60/1034119
tataaa

SEQ ID NO: 104960 - DNA, 6 bp, Unknown
  misc_feature (1)..( 6): Result.002 file - promoters60/1034119
tataaa

SEQ ID NO: 104961 - DNA, 10 bp, Unknown
  misc_feature (1)..( 10): Result.002 file - promoters60/1034137
ataaagaaag

SEQ ID NO: 104962 - DNA, 10 bp, Unknown
  misc_feature (1)..( 10): Result.002 file - promoters60/1034137
ttaaaaaaaa

SEQ ID NO: 104963 - DNA, 10 bp, Unknown
  misc_feature (1)..( 10): Result.002 file - promoters60/1034137
aaaaaaaaaa

SEQ ID NO: 104964 - DNA, 10 bp, Unknown
  misc_feature (1)..( 10): Result.002 file - promoters60/1034137
caaaacaaaa

SEQ ID NO: 104965 - DNA, 10 bp, Unknown
  misc_feature (1)..( 10): Result.002 file - promoters60/1034137
ttaaaaaagg

SEQ ID NO: 104966 - DNA, 11 bp, Unknown
  misc_feature (1)..( 11): Result.002 file - promoters60/1034137
acaaagggata

SEQ ID NO: 104967 - DNA, 11 bp, Unknown
  misc_feature (1)..( 11): Result.002 file - promoters60/1034137
ataaatggaaa

SEQ ID NO: 104968 - DNA, 11 bp, Unknown
  misc_feature (1)..( 11): Result.002 file - promoters60/1034137
atatatgtgat

SEQ ID NO: 104969 - DNA, 11 bp, Unknown
  misc_feature (1)..( 11): Result.002 file - promoters60/1034137
caaaatggaaa

SEQ ID NO: 104970 - DNA, 34 bp, Unknown; identical to SEQ ID NO: 76977
  misc_feature (1)..( 34): Result.002 file - promoters60/1034137

SEQ ID NO: 104971 - DNA, 34 bp, Unknown
  misc_feature (1)..( 34): Result.002 file - promoters60/1034137
tgggatttataaataatagtctacaatcaagaaa

SEQ ID NO: 104972 - DNA, 34 bp, Unknown
  misc_feature (1)..( 34): Result.002 file - promoters60/1034137
tcagttttataaaaaaggcttcaaggccgagagt

SEQ ID NO: 104973 - DNA, 34 bp, Unknown; identical to SEQ ID NO: 76979
  misc_feature (1)..( 34): Result.002 file - promoters60/1034137

SEQ ID NO: 104974 - DNA, 8 bp, Unknown
  misc_feature (1)..( 8): Result.002 file - promoters60/1034145
taataagt

SEQ ID NO: 104975 - DNA, 8 bp, Unknown
  misc_feature (1)..( 8): Result.002 file - promoters60/1034145
taaaaagt

SEQ ID NO: 104976 - DNA, 8 bp, Unknown
  misc_feature (1)..( 8): Result.002 file - promoters60/1034145
taataagt

SEQ ID NO: 104977 - DNA, 6 bp, Unknown
  misc_feature (1)..( 6): Result.002 file - promoters60/1034145
atatcc

SEQ ID NO: 104978 - DNA, 6 bp, Unknown
  misc_feature (1)..( 6): Result.002 file - promoters60/1034145
atatcc

SEQ ID NO: 104979 - DNA, 8 bp, Unknown
  misc_feature (1)..( 8): Result.002 file - promoters60/1034145
tctatatt

SEQ ID NO: 104980 - DNA, 8 bp, Unknown
  misc_feature (1)..( 8): Result.002 file - promoters60/1034145
cctatata

SEQ ID NO: 104981 - DNA, 8 bp, Unknown
  misc_feature (1)..( 8): Result.002 file - promoters60/1034145
tgtatata

SEQ ID NO: 104982 - DNA, 7 bp, Unknown
  misc_feature (1)..( 7): Result.002 file - promoters60/1034145
aaaaaat

SEQ ID NO: 104983 - DNA, 7 bp, Unknown
  misc_feature (1)..( 7): Result.002 file - promoters60/1034145
aaacaat

SEQ ID NO: 104984 - DNA, 9 bp, Unknown
  misc_feature (1)..( 9): Result.002 file - promoters60/1034145
aaagagagt

SEQ ID NO: 104985 - DNA, 9 bp, Unknown
  misc_feature (1)..( 9): Result.002 file - promoters60/1034145
aaagagagt

SEQ ID NO: 104986 - DNA, 6 bp, Unknown
  misc_feature (1)..( 6): Result.002 file - promoters60/1034145
ctttat

SEQ ID NO: 104987 - DNA, 6 bp, Unknown
  misc_feature (1)..( 6): Result.002 file - promoters60/1034145
ctttat

SEQ ID NO: 104988 - DNA, 10 bp, Unknown
  misc_feature (1)..( 10): Result.002 file - promoters60/1034145
ctaatatgaa

SEQ ID NO: 104989 - DNA, 10 bp, Unknown
  misc_feature (1)..( 10): Result.002 file - promoters60/1034145
ctaatttgaa

SEQ ID NO: 104990 - DNA, 10 bp, Unknown
  misc_feature (1)..( 10): Result.002 file - promoters60/1034145
aaaatatgaa

SEQ ID NO: 104991 - DNA, 7 bp, Unknown
  misc_feature (1)..( 7): Result.002 file - promoters60/1034145
tctagca

SEQ ID NO: 104992 - DNA, 7 bp, Unknown
  misc_feature (1)..( 7): Result.002 file - promoters60/1034145
tctagca

SEQ ID NO: 104993 - DNA, 7 bp, Unknown
  misc_feature (1)..( 7): Result.002 file - promoters60/1034145
aaatgag

SEQ ID NO: 104994 - DNA, 7 bp, Unknown
  misc_feature (1)..( 7): Result.002 file - promoters60/1034145
aaaagag

SEQ ID NO: 104995 - DNA, 6 bp, Unknown
  misc_feature (1)..( 6): Result.002 file - promoters60/1034145
agcctt

SEQ ID NO: 104996 - DNA, 6 bp, Unknown
  misc_feature (1)..( 6): Result.002 file - promoters60/1034145
agcctt

SEQ ID NO: 104997 - DNA, 7 bp, Unknown
  misc_feature (1)..( 7): Result.002 file - promoters60/1034145
gagcaaa

SEQ ID NO: 104998 - DNA, 7 bp, Unknown
  misc_feature (1)..( 7): Result.002 file - promoters60/1034145
gaggaaa

SEQ ID NO: 104999 - DNA, 7 bp, Unknown
  misc_feature (1)..( 7): Result.002 file - promoters60/1034145
ttgttgt

SEQ ID NO: 105000 - DNA, 7 bp, Unknown
  misc_feature (1)..( 7): Result.002 file - promoters60/1034145
ttgttgt

SEQ ID NO: 105001 - DNA, 9 bp, Unknown
  misc_feature (1)..( 9): Result.002 file - promoters60/1034145
ttgaatttt

SEQ ID NO: 105002 - DNA, 9 bp, Unknown
  misc_feature (1)..( 9): Result.002 file - promoters60/1034145
ttgtatttt

SEQ ID NO: 105003 - DNA, 6 bp, Unknown
  misc_feature (1)..( 6): Result.002 file - promoters60/1034145
ttttga

SEQ ID NO: 105004 - DNA, 6 bp, Unknown
  misc_feature (1)..( 6): Result.002 file - promoters60/1034145
ttttga

SEQ ID NO: 105005 - DNA, 8 bp, Unknown
  misc_feature (1)..( 8): Result.002 file - promoters60/1034145
aagagatt

SEQ ID NO: 105006 - DNA, 8 bp, Unknown
  misc_feature (1)..( 8): Result.002 file - promoters60/1034145
aagatatt

SEQ ID NO: 105007 - DNA, 6 bp, Unknown
  misc_feature (1)..( 6): Result.002 file - promoters60/1034145
taaaaa

SEQ ID NO: 105008 - DNA, 6 bp, Unknown
  misc_feature (1)..( 6): Result.002 file - promoters60/1034145
taaaaa

SEQ ID NO: 105009 - DNA, 11 bp, Unknown
  misc_feature (1)..( 11): Result.002 file - promoters60/1034306
gaaataaatta

SEQ ID NO: 105010 - DNA, 11 bp, Unknown
  misc_feature (1)..( 11): Result.002 file - promoters60/1034306
tgaataaattg

SEQ ID NO: 105011 - DNA, 12 bp, Unknown
  misc_feature (1)..( 12): Result.002 file - promoters60/1034306
tgaagtaaccgt

SEQ ID NO: 105012 - DNA, 12 bp, Unknown
  misc_feature (1)..( 12): Result.002 file - promoters60/1034306
cactttaaatta

SEQ ID NO: 105013 - DNA, 9 bp, Unknown
  misc_feature (1)..( 9): Result.002 file - promoters60/1034306
taaataaat

SEQ ID NO: 105014 - DNA, 9 bp, Unknown
  misc_feature (1)..( 9): Result.002 file - promoters60/1034306
taattaaaa

SEQ ID NO: 105015 - DNA, 9 bp, Unknown
  misc_feature (1)..( 9): Result.002 file - promoters60/1034306
caaataaaa

SEQ ID NO: 105016 - DNA, 9 bp, Unknown
  misc_feature (1)..( 9): Result.002 file - promoters60/1034306
actataaaa

SEQ ID NO: 105017 - DNA, 12 bp, Unknown
  misc_feature (1)..( 12): Result.002 file - promoters60/1034306
tttttttaactg

SEQ ID NO: 105018 - DNA, 12 bp, Unknown
  misc_feature (1)..( 12): Result.002 file - promoters60/1034306
ctcttttaatat

SEQ ID NO: 105019 - DNA, 12 bp, Unknown
  misc_feature (1)..( 12): Result.002 file - promoters60/1034306
attttttagtta

SEQ ID NO: 105020 - DNA, 12 bp, Unknown
  misc_feature (1)..( 12): Result.002 file - promoters60/1034306
attatttcccat

SEQ ID NO: 105021 - DNA, 12 bp, Unknown
  misc_feature (1)..( 12): Result.002 file - promoters60/1034306
ttcgtttgatat

SEQ ID NO: 105022 - DNA, 11 bp, Unknown
  misc_feature (1)..( 11): Result.002 file - promoters60/1034306
aaacatataac

SEQ ID NO: 105023 - DNA, 11 bp, Unknown
  misc_feature (1)..( 11): Result.002 file - promoters60/1034306
gactataaaac

SEQ ID NO: 105024 - DNA, 11 bp, Unknown
  misc_feature (1)..( 11): Result.002 file - promoters60/1034306
aaacaaataaa

SEQ ID NO: 105025 - DNA, 11 bp, Unknown
  misc_feature (1)..( 11): Result.002 file - promoters60/1034306
cattaaacaac

SEQ ID NO: 105026 - DNA, 9 bp, Unknown
  misc_feature (1)..( 9): Result.002 file - promoters60/1034306
atattattt

SEQ ID NO: 105027 - DNA, 9 bp, Unknown
  misc_feature (1)..( 9): Result.002 file - promoters60/1034306
acatttttt

SEQ ID NO: 105028 - DNA, 9 bp, Unknown
  misc_feature (1)..( 9): Result.002 file - promoters60/1034306
tcacgtttt

SEQ ID NO: 105029 - DNA, 9 bp, Unknown
  misc_feature (1)..( 9): Result.002 file - promoters60/1034306
acatctttg

SEQ ID NO: 105030 - DNA, 11 bp, Unknown
  misc_feature (1)..( 11): Result.002 file - promoters60/1034306
gataatctgaa

SEQ ID NO: 105031 - DNA, 11 bp, Unknown
  misc_feature (1)..( 11): Result.002 file - promoters60/1034306
tttaatatgaa

SEQ ID NO: 105032 - DNA, 11 bp, Unknown
  misc_feature (1)..( 11): Result.002 file - promoters60/1034306
tttgatatata

SEQ ID NO: 105033 - DNA, 11 bp, Unknown
  misc_feature (1)..( 11): Result.002 file - promoters60/1034306
tataatatttt

SEQ ID NO: 105034 - DNA, 9 bp, Unknown
  misc_feature (1)..( 9): Result.002 file - promoters60/1034306
gttagataa

SEQ ID NO: 105035 - DNA, 9 bp, Unknown
  misc_feature (1)..( 9): Result.002 file - promoters60/1034306
gtttgatat

SEQ ID NO: 105036 - DNA, 9 bp, Unknown
  misc_feature (1)..( 9): Result.002 file - promoters60/1034306
tttatatat

SEQ ID NO: 105037 - DNA, 9 bp, Unknown
  misc_feature (1)..( 9): Result.002 file - promoters60/1034306
ttttaatat

SEQ ID NO: 105038 - DNA, 9 bp, Unknown
  misc_feature (1)..( 9): Result.002 file - promoters60/1034322
tatatatag

SEQ ID NO: 105039 - DNA, 9 bp, Unknown
  misc_feature (1)..( 9): Result.002 file - promoters60/1034322
tatataaat

SEQ ID NO: 105040 - DNA, 9 bp, Unknown
  misc_feature (1)..( 9): Result.002 file - promoters60/1034322
tataaatat

SEQ ID NO: 105041 - DNA, 9 bp, Unknown
  misc_feature (1)..( 9): Result.002 file - promoters60/1034322
tatatattt

SEQ ID NO: 105042 - DNA, 9 bp, Unknown
  misc_feature (1)..( 9): Result.002 file - promoters60/1034322
tatacaaat

SEQ ID NO: 105043 - DNA, 9 bp, Unknown
  misc_feature (1)..( 9): Result.002 file - promoters60/1034322
aacaaatct

SEQ ID NO: 105044 - DNA, 9 bp, Unknown
  misc_feature (1)..( 9): Result.002 file - promoters60/1034322
tataaactc

SEQ ID NO: 105045 - DNA, 10 bp, Unknown
  misc_feature (1)..( 10): Result.002 file - promoters60/1034349
tttaattaaa

SEQ ID NO: 105046 - DNA, 10 bp, Unknown
  misc_feature (1)..( 10): Result.002 file - promoters60/1034349
aacaataaaa

SEQ ID NO: 105047 - DNA, 10 bp, Unknown
  misc_feature (1)..( 10): Result.002 file - promoters60/1034349
gtcaaaaaac

SEQ ID NO: 105048 - DNA, 10 bp, Unknown
  misc_feature (1)..( 10): Result.002 file - promoters60/1034349
agcaaaaatt

SEQ ID NO: 105049 - DNA, 10 bp, Unknown
  misc_feature (1)..( 10): Result.002 file - promoters60/1034349
gtcacaaaat

SEQ ID NO: 105050 - DNA, 10 bp, Unknown
  misc_feature (1)..( 10): Result.002 file - promoters60/1034349
tatatttaag

SEQ ID NO: 105051 - DNA, 10 bp, Unknown
  misc_feature (1)..( 10): Result.002 file - promoters60/1034349
tatacttaag

SEQ ID NO: 105052 - DNA, 10 bp, Unknown
  misc_feature (1)..( 10): Result.002 file - promoters60/1034349
ccaattgaag

SEQ ID NO: 105053 - DNA, 10 bp, Unknown
  misc_feature (1)..( 10): Result.002 file - promoters60/1034349
aaggtttaag

SEQ ID NO: 105054 - DNA, 10 bp, Unknown
  misc_feature (1)..( 10): Result.002 file - promoters60/1034349
atagtttaaa

SEQ ID NO: 105055 - DNA, 10 bp, Unknown
  misc_feature (1)..( 10): Result.002 file - promoters60/1034349
tatacaaatc

SEQ ID NO: 105056 - DNA, 10 bp, Unknown
  misc_feature (1)..( 10): Result.002 file - promoters60/1034349
tatataaacc

SEQ ID NO: 105057 - DNA, 10 bp, Unknown
  misc_feature (1)..( 10): Result.002 file - promoters60/1034349
aatataaata

SEQ ID NO: 105058 - DNA, 10 bp, Unknown
  misc_feature (1)..( 10): Result.002 file - promoters60/1034349
tttataaact

SEQ ID NO: 105059 - DNA, 10 bp, Unknown
  misc_feature (1)..( 10): Result.002 file - promoters60/1034349
gctataaata

SEQ ID NO: 105060 - DNA, 14 bp, Unknown
  misc_feature (1)..( 14): Result.002 file - promoters60/1034349
tttaataaaccaat

SEQ ID NO: 105061 - DNA, 14 bp, Unknown
  misc_feature (1)..( 14): Result.002 file - promoters60/1034349
aacgacaaaacaag

SEQ ID NO: 105062 - DNA, 14 bp, Unknown
  misc_feature (1)..( 14): Result.002 file - promoters60/1034349
gcttatcaactaat

SEQ ID NO: 105063 - DNA, 14 bp, Unknown
  misc_feature (1)..( 14): Result.002 file - promoters60/1034349
aacaacaaaaaaag

SEQ ID NO: 105064 - DNA, 14 bp, Unknown
  misc_feature (1)..( 14): Result.002 file - promoters60/1034349
taatgttcactaat

SEQ ID NO: 105065 - DNA, 10 bp, Unknown
  misc_feature (1)..( 10): Result.002 file - promoters60/1034353
ataataggcc

SEQ ID NO: 105066 - DNA, 10 bp, Unknown
  misc_feature (1)..( 10): Result.002 file - promoters60/1034353
ataatagata

SEQ ID NO: 105067 - DNA, 10 bp, Unknown
  misc_feature (1)..( 10): Result.002 file - promoters60/1034353
ataagaggct

SEQ ID NO: 105068 - DNA, 10 bp, Unknown
  misc_feature (1)..( 10): Result.002 file - promoters60/1034353
cgaattgata

SEQ ID NO: 105069 - DNA, 9 bp, Unknown
  misc_feature (1)..( 9): Result.002 file - promoters60/1034497
agattttct

SEQ ID NO: 105070 - DNA, 9 bp, Unknown
  misc_feature (1)..( 9): Result.002 file - promoters60/1034497
tcattatct

SEQ ID NO: 105071 - DNA, 9 bp, Unknown
  misc_feature (1)..( 9): Result.002 file - promoters60/1034497
agattttaa

SEQ ID NO: 105072 - DNA, 14 bp, Unknown
  misc_feature (1)..( 14): Result.002 file - promoters60/1034497
gacatatttcattt

SEQ ID NO: 105073 - DNA, 14 bp, Unknown
  misc_feature (1)..( 14): Result.002 file - promoters60/1034497
gacatttttttatt

SEQ ID NO: 105074 - DNA, 14 bp, Unknown
  misc_feature (1)..( 14): Result.002 file - promoters60/1034497
tttgtattttattt

SEQ ID NO: 105075 - DNA, 10 bp, Unknown
  misc_feature (1)..( 10): Result.002 file - promoters60/1034497
tatttcattt

SEQ ID NO: 105076 - DNA, 10 bp, Unknown
  misc_feature (1)..( 10): Result.002 file - promoters60/1034497
ttttttattt

SEQ ID NO: 105077 - DNA, 10 bp, Unknown
  misc_feature (1)..( 10): Result.002 file - promoters60/1034497
tattttattt

SEQ ID NO: 105078 - DNA, 9 bp, Unknown
  misc_feature (1)..( 9): Result.002 file - promoters60/1034497
ttttaatcg

SEQ ID NO: 105079 - DNA, 9 bp, Unknown
  misc_feature (1)..( 9): Result.002 file - promoters60/1034497
tttaaataa

SEQ ID NO: 105080 - DNA, 9 bp, Unknown
  misc_feature (1)..( 9): Result.002 file - promoters60/1034497
tcttactcg

SEQ ID NO: 105081 - DNA, 9 bp, Unknown
  misc_feature (1)..( 9): Result.002 file - promoters60/1034497
attaaatat

SEQ ID NO: 105082 - DNA, 12 bp, Unknown
  misc_feature (1)..( 12): Result.002 file - promoters60/1034497
ttttaatcgatc

SEQ ID NO: 105083 - DNA, 12 bp, Unknown
  misc_feature (1)..( 12): Result.002 file - promoters60/1034497
aaataattgatt

SEQ ID NO: 105084 - DNA, 12 bp, Unknown
  misc_feature (1)..( 12): Result.002 file - promoters60/1034497
tcttactcggta

SEQ ID NO: 105085 - DNA, 12 bp, Unknown
  misc_feature (1)..( 12): Result.002 file - promoters60/1034497
atttattctatt

SEQ ID NO: 105086 - DNA, 8 bp, Unknown
  misc_feature (1)..( 8): Result.002 file - promoters60/1034497
tattacca

SEQ ID NO: 105087 - DNA, 8 bp, Unknown
  misc_feature (1)..( 8): Result.002 file - promoters60/1034497
aattacca

SEQ ID NO: 105088 - DNA, 8 bp, Unknown
  misc_feature (1)..( 8): Result.002 file - promoters60/1034497
tactacca

SEQ ID NO: 105089 - DNA, 11 bp, Unknown
  misc_feature (1)..( 11): Result.002 file - promoters60/1034497
gtttacttgct

SEQ ID NO: 105090 - DNA, 11 bp, Unknown
  misc_feature (1)..( 11): Result.002 file - promoters60/1034497
atttatttgtg

SEQ ID NO: 105091 - DNA, 11 bp, Unknown
  misc_feature (1)..( 11): Result.002 file - promoters60/1034497
atttattagtg

SEQ ID NO: 105092 - DNA, 11 bp, Unknown
  misc_feature (1)..( 11): Result.002 file - promoters60/1034497
ctttattctta

SEQ ID NO: 105093 - DNA, 8 bp, Unknown
  misc_feature (1)..( 8): Result.002 file - promoters60/1034497
tagtacta

SEQ ID NO: 105094 - DNA, 8 bp, Unknown
  misc_feature (1)..( 8): Result.002 file - promoters60/1034497
atgtacta

SEQ ID NO: 105095 - DNA, 8 bp, Unknown
  misc_feature (1)..( 8): Result.002 file - promoters60/1034497
atgaactc

SEQ ID NO: 105096 - DNA, 9 bp, Unknown
  misc_feature (1)..( 9): Result.002 file - promoters60/1034497
accatgtat

SEQ ID NO: 105097 - DNA, 9 bp, Unknown
  misc_feature (1)..( 9): Result.002 file - promoters60/1034497
accaagtag

SEQ ID NO: 105098 - DNA, 9 bp, Unknown
  misc_feature (1)..( 9): Result.002 file - promoters60/1034497
aaaaagtag

SEQ ID NO: 105099 - DNA, 11 bp, Unknown
  misc_feature (1)..( 11): Result.002 file - promoters60/1034497
atttattagtg

SEQ ID NO: 105100 - DNA, 11 bp, Unknown
  misc_feature (1)..( 11): Result.002 file - promoters60/1034497
ctttattctta

SEQ ID NO: 105101 - DNA, 11 bp, Unknown
  misc_feature (1)..( 11): Result.002 file - promoters60/1034497
atttatttgtg

SEQ ID NO: 105102 - DNA, 10 bp, Unknown
  misc_feature (1)..( 10): Result.002 file - promoters60/1034497
attcaaataa

SEQ ID NO: 105103 - DNA, 10 bp, Unknown
  misc_feature (1)..( 10): Result.002 file - promoters60/1034497
attcaattct

SEQ ID NO: 105104 - DNA, 10 bp, Unknown
  misc_feature (1)..( 10): Result.002 file - promoters60/1034497
tttcatttct

SEQ ID NO: 105105 - DNA, 10 bp, Unknown
  misc_feature (1)..( 10): Result.002 file - promoters60/1034497
ttatattttc

SEQ ID NO: 105106 - DNA, 10 bp, Unknown
  misc_feature (1)..( 10): Result.002 file - promoters60/1034497
ttagattttt

SEQ ID NO: 105107 - DNA, 10 bp, Unknown
  misc_feature (1)..( 10): Result.002 file - promoters60/1034497
taatatcttc

SEQ ID NO: 105108 - DNA, 9 bp, Unknown
  misc_feature (1)..( 9): Result.002 file - promoters60/1034652
gaaaaaaag

SEQ ID NO: 105109 - DNA, 9 bp, Unknown
  misc_feature (1)..( 9): Result.002 file - promoters60/1034652
caaacaaat

SEQ ID NO: 105110 - DNA, 9 bp, Unknown
  misc_feature (1)..( 9): Result.002 file - promoters60/1034652
aaaagaaac

SEQ ID NO: 105111 - DNA, 9 bp, Unknown
  misc_feature (1)..( 9): Result.002 file - promoters60/1034652
caaagaaag

SEQ ID NO: 105112 - DNA, 9 bp, Unknown
  misc_feature (1)..( 9): Result.002 file - promoters60/1034652
caaaaaaaa

SEQ ID NO: 105113 - DNA, 9 bp, Unknown
  misc_feature (1)..( 9): Result.002 file - promoters60/1034652
caaacacaa

SEQ ID NO: 105114 - DNA, 9 bp, Unknown
  misc_feature (1)..( 9): Result.002 file - promoters60/1034652
caaggaaag

SEQ ID NO: 105115 - DNA, 10 bp, Unknown
  misc_feature (1)..( 10): Result.002 file - promoters60/1034692
tcacttgcac

SEQ ID NO: 105116 - DNA, 10 bp, Unknown
  misc_feature (1)..( 10): Result.002 file - promoters60/1034692
attcttacac

SEQ ID NO: 105117 - DNA, 10 bp, Unknown
  misc_feature (1)..( 10): Result.002 file - promoters60/1034692
atttttactt

SEQ ID NO: 105118 - DNA, 9 bp, Unknown
  misc_feature (1)..( 9): Result.002 file - promoters60/1034692
caaatcaac

SEQ ID NO: 105119 - DNA, 9 bp, Unknown
  misc_feature (1)..( 9): Result.002 file - promoters60/1034692
aaaatcaac

SEQ ID NO: 105120 - DNA, 9 bp, Unknown
  misc_feature (1)..( 9): Result.002 file - promoters60/1034692
aaaaacaat

SEQ ID NO: 105121 - DNA, 8 bp, Unknown
  misc_feature (1)..( 8): Result.002 file - promoters60/1034692
aaaaggaa

SEQ ID NO: 105122 - DNA, 8 bp, Unknown
  misc_feature (1)..( 8): Result.002 file - promoters60/1034692
aaatggaa

SEQ ID NO: 105123 - DNA, 8 bp, Unknown
  misc_feature (1)..( 8): Result.002 file - promoters60/1034692
aaaacgaa

SEQ ID NO: 105124 - DNA, 9 bp, Unknown
  misc_feature (1)..( 9): Result.002 file - promoters60/1034715
tgtctgatg

SEQ ID NO: 105125 - DNA, 9 bp, Unknown
  misc_feature (1)..( 9): Result.002 file - promoters60/1034715
tgtcagatg

SEQ ID NO: 105126 - DNA, 6 bp, Unknown
  misc_feature (1)..( 6): Result.002 file - promoters60/1034715
tagttt

SEQ ID NO: 105127 - DNA, 6 bp, Unknown
  misc_feature (1)..( 6): Result.002 file - promoters60/1034715
tagttt

SEQ ID NO: 105128 - DNA, 7 bp, Unknown
  misc_feature (1)..( 7): Result.002 file - promoters60/1034715
tagctca

SEQ ID NO: 105129 - DNA, 7 bp, Unknown
  misc_feature (1)..( 7): Result.002 file - promoters60/1034715
tagatca

SEQ ID NO: 105130 - DNA, 6 bp, Unknown
  misc_feature (1)..( 6): Result.002 file - promoters60/1034715
ccgtga

SEQ ID NO: 105131 - DNA, 6 bp, Unknown
  misc_feature (1)..( 6): Result.002 file - promoters60/1034715
ccgtga

SEQ ID NO: 105132 - DNA, 7 bp, Unknown
  misc_feature (1)..( 7): Result.002 file - promoters60/1034715
tcttctg

SEQ ID NO: 105133 - DNA, 7 bp, Unknown
  misc_feature (1)..( 7): Result.002 file - promoters60/1034715
tcttctg

SEQ ID NO: 105134 - DNA, 6 bp, Unknown
  misc_feature (1)..( 6): Result.002 file - promoters60/1034715
catttt

SEQ ID NO: 105135 - DNA, 6 bp, Unknown
  misc_feature (1)..( 6): Result.002 file - promoters60/1034715
catttt

SEQ ID NO: 105136 - DNA, 9 bp, Unknown
  misc_feature (1)..( 9): Result.002 file - promoters60/1034715
tttacagat

SEQ ID NO: 105137 - DNA, 9 bp, Unknown
  misc_feature (1)..( 9): Result.002 file - promoters60/1034715
ttttcagat

SEQ ID NO: 105138 - DNA, 7 bp, Unknown
  misc_feature (1)..( 7): Result.002 file - promoters60/1034715
cagtgaa

SEQ ID NO: 105139 - DNA, 7 bp, Unknown
  misc_feature (1)..( 7): Result.002 file - promoters60/1034715
cagggaa

SEQ ID NO: 105140 - DNA, 9 bp, Unknown
  misc_feature (1)..( 9): Result.002 file - promoters60/1034810
aactaggca

SEQ ID NO: 105141 - DNA, 9 bp, Unknown
  misc_feature (1)..( 9): Result.002 file - promoters60/1034810
aacaaggca

SEQ ID NO: 105142 - DNA, 7 bp, Unknown
  misc_feature (1)..( 7): Result.002 file - promoters60/1034810
gagtgtt

SEQ ID NO: 105143 - DNA, 7 bp, Unknown
  misc_feature (1)..( 7): Result.002 file - promoters60/1034810
gagtgtt

SEQ ID NO: 105144 - DNA, 6 bp, Unknown
  misc_feature (1)..( 6): Result.002 file - promoters60/1034810
ggaagc

SEQ ID NO: 105145 - DNA, 6 bp, Unknown
  misc_feature (1)..( 6): Result.002 file - promoters60/1034810
ggaagc

SEQ ID NO: 105146 - DNA, 7 bp, Unknown
  misc_feature (1)..( 7): Result.002 file - promoters60/1034810
aaaggtg

SEQ ID NO: 105147 - DNA, 7 bp, Unknown
  misc_feature (1)..( 7): Result.002 file - promoters60/1034810
aaaagtg

SEQ ID NO: 105148 - DNA, 6 bp, Unknown
  misc_feature (1)..( 6): Result.002 file - promoters60/1034810
atacac

SEQ ID NO: 105149 - DNA, 6 bp, Unknown
  misc_feature (1)..( 6): Result.002 file - promoters60/1034810
atacac

SEQ ID NO: 105150 - DNA, 9 bp, Unknown
  misc_feature (1)..( 9): Result.002 file - promoters60/1034810
cattgactt

SEQ ID NO: 105151 - DNA, 9 bp, Unknown
  misc_feature (1)..( 9): Result.002 file - promoters60/1034810
cattaactt

SEQ ID NO: 105152 - DNA, 8 bp, Unknown
  misc_feature (1)..( 8): Result.002 file - promoters60/1034810
gctgaact

SEQ ID NO: 105153 - DNA, 8 bp, Unknown
  misc_feature (1)..( 8): Result.002 file - promoters60/1034810
gctggact

SEQ ID NO: 105154 - DNA, 6 bp, Unknown
  misc_feature (1)..( 6): Result.002 file - promoters60/1034810
cttagg

SEQ ID NO: 105155 - DNA, 6 bp, Unknown
  misc_feature (1)..( 6): Result.002 file - promoters60/1034810
cttagg

SEQ ID NO: 105156 - DNA, 6 bp, Unknown
  misc_feature (1)..( 6): Result.002 file - promoters60/1034810
tcttga

SEQ ID NO: 105157 - DNA, 6 bp, Unknown
  misc_feature (1)..( 6): Result.002 file - promoters60/1034810
tcttga

SEQ ID NO: 105158 - DNA, 8 bp, Unknown
  misc_feature (1)..( 8): Result.002 file - promoters60/1034810
gttcattg

SEQ ID NO: 105159 - DNA, 8 bp, Unknown
  misc_feature (1)..( 8): Result.002 file - promoters60/1034810
gttcattg

SEQ ID NO: 105160 - DNA, 6 bp, Unknown
  misc_feature (1)..( 6): Result.002 file - promoters60/1034810
ggcttg

SEQ ID NO: 105161 - DNA, 6 bp, Unknown
  misc_feature (1)..( 6): Result.002 file - promoters60/1034810
ggcttg

SEQ ID NO: 105162 - DNA, 10 bp, Unknown
  misc_feature (1)..( 10): Result.002 file - promoters60/1034837
tcaataaact

SEQ ID NO: 105163 - DNA, 10 bp, Unknown
  misc_feature (1)..( 10): Result.002 file - promoters60/1034837
tcaacaaaat

SEQ ID NO: 105164 - DNA, 10 bp, Unknown
  misc_feature (1)..( 10): Result.002 file - promoters60/1034837
aaaacaaatc

SEQ ID NO: 105165 - DNA, 10 bp, Unknown
  misc_feature (1)..( 10): Result.002 file - promoters60/1034837
ggaaaaaaat

SEQ ID NO: 105166 - DNA, 10 bp, Unknown
  misc_feature (1)..( 10): Result.002 file - promoters60/1034837
ataacaaata

SEQ ID NO: 105167 - DNA, 12 bp, Unknown
  misc_feature (1)..( 12): Result.002 file - promoters60/1034837
caacaatgtaca

SEQ ID NO: 105168 - DNA, 12 bp, Unknown
  misc_feature (1)..( 12): Result.002 file - promoters60/1034837
caataatttaca

SEQ ID NO: 105169 - DNA, 12 bp, Unknown
  misc_feature (1)..( 12): Result.002 file - promoters60/1034837
acacaatataca

SEQ ID NO: 105170 - DNA, 12 bp, Unknown
  misc_feature (1)..( 12): Result.002 file - promoters60/1034837
agatattttaaa

SEQ ID NO: 105171 - DNA, 12 bp, Unknown
  misc_feature (1)..( 12): Result.002 file - promoters60/1034837
tgaaaatttata

SEQ ID NO: 105172 - DNA, 12 bp, Unknown
  misc_feature (1)..( 12): Result.002 file - promoters60/1034837
ttaaaaatccaa

SEQ ID NO: 105173 - DNA, 12 bp, Unknown
  misc_feature (1)..( 12): Result.002 file - promoters60/1034837
ttaaaaacattt

SEQ ID NO: 105174 - DNA, 12 bp, Unknown
  misc_feature (1)..( 12): Result.002 file - promoters60/1034837
ttaaaaacaatt

SEQ ID NO: 105175 - DNA, 12 bp, Unknown
  misc_feature (1)..( 12): Result.002 file - promoters60/1034837
ttaacaaccttt

SEQ ID NO: 105176 - DNA, 8 bp, Unknown
  misc_feature (1)..( 8): Result.002 file - promoters60/1034837
attcataa

SEQ ID NO: 105177 - DNA, 8 bp, Unknown
  misc_feature (1)..( 8): Result.002 file - promoters60/1034837
attcattg

SEQ ID NO: 105178 - DNA, 8 bp, Unknown
  misc_feature (1)..( 8): Result.002 file - promoters60/1034837
attaattt

SEQ ID NO: 105179 - DNA, 9 bp, Unknown
  misc_feature (1)..( 9): Result.002 file - promoters60/1034837
attaaattg

SEQ ID NO: 105180 - DNA, 13 bp, Unknown
  misc_feature (1)..( 13): Result.002 file - promoters60/1034870
agtacaatgcaat

SEQ ID NO: 105181 - DNA, 13 bp, Unknown
  misc_feature (1)..( 13): Result.002 file - promoters60/1034870
agtgtaatgaaat

SEQ ID NO: 105182 - DNA, 13 bp, Unknown
  misc_feature (1)..( 13): Result.002 file - promoters60/1034870
aacagaataaaaa

SEQ ID NO: 105183 - DNA, 13 bp, Unknown
  misc_feature (1)..( 13): Result.002 file - promoters60/1034870
ccagccatgaaag

SEQ ID NO: 105184 - DNA, 13 bp, Unknown
  misc_feature (1)..( 13): Result.002 file - promoters60/1034870
aacagagtaattg

SEQ ID NO: 105185 - DNA, 8 bp, Unknown
  misc_feature (1)..( 8): Result.002 file - promoters60/1034962
atttttaa

SEQ ID NO: 105186 - DNA, 8 bp, Unknown
  misc_feature (1)..( 8): Result.002 file - promoters60/1034962
attttttt

SEQ ID NO: 105187 - DNA, 9 bp, Unknown
  misc_feature (1)..( 9): Result.002 file - promoters60/1034962
ttttgtttc

SEQ ID NO: 105188 - DNA, 7 bp, Unknown
  misc_feature (1)..( 7): Result.002 file - promoters60/1034962
aatatta

SEQ ID NO: 105189 - DNA, 7 bp, Unknown
  misc_feature (1)..( 7): Result.002 file - promoters60/1034962
aatttta

SEQ ID NO: 105190 - DNA, 7 bp, Unknown
  misc_feature (1)..( 7): Result.002 file - promoters60/1034962
aattaaa

SEQ ID NO: 105191 - DNA, 7 bp, Unknown
  misc_feature (1)..( 7): Result.002 file - promoters60/1034962
aatgaaa

SEQ ID NO: 105192 - DNA, 9 bp, Unknown
  misc_feature (1)..( 9): Result.002 file - promoters60/1034962
aaatcattt

SEQ ID NO: 105193 - DNA, 9 bp, Unknown
  misc_feature (1)..( 9): Result.002 file - promoters60/1034962
caatgattt

SEQ ID NO: 105194 - DNA, 9 bp, Unknown
  misc_feature (1)..( 9): Result.002 file - promoters60/1034962
caattattc

SEQ ID NO: 105195 - DNA, 6 bp, Unknown
  misc_feature (1)..( 6): Result.002 file - promoters60/1034962
gattta

SEQ ID NO: 105196 - DNA, 6 bp, Unknown
  misc_feature (1)..( 6): Result.002 file - promoters60/1034962
gattta

SEQ ID NO: 105197 - DNA, 7 bp, Unknown
  misc_feature (1)..( 7): Result.002 file - promoters60/1034962
agaacat

SEQ ID NO: 105198 - DNA, 7 bp, Unknown
  misc_feature (1)..( 7): Result.002 file - promoters60/1034962
agaccat

SEQ ID NO: 105199 - DNA, 8 bp, Unknown
  misc_feature (1)..( 8): Result.002 file - promoters60/1034962
taatccac

SEQ ID NO: 105200 - DNA, 8 bp, Unknown
  misc_feature (1)..( 8): Result.002 file - promoters60/1034962
taattcac

SEQ ID NO: 105201 - DNA, 11 bp, Unknown
  misc_feature (1)..( 11): Result.002 file - promoters60/1034962
tctgatgacaa

SEQ ID NO: 105202 - DNA, 11 bp, Unknown
  misc_feature (1)..( 11): Result.002 file - promoters60/1034962
tctgataacaa

SEQ ID NO: 105203 - DNA, 6 bp, Unknown
  misc_feature (1)..( 6): Result.002 file - promoters60/1034962
tcaatt

SEQ ID NO: 105204 - DNA, 6 bp, Unknown
  misc_feature (1)..( 6): Result.002 file - promoters60/1034962
tcaatt

SEQ ID NO: 105205 - DNA, 7 bp, Unknown
  misc_feature (1)..( 7): Result.002 file - promoters60/1034962
aataaat

SEQ ID NO: 105206 - DNA, 7 bp, Unknown
  misc_feature (1)..( 7): Result.002 file - promoters60/1034962
aattaat

SEQ ID NO: 105207 - DNA, 8 bp, Unknown
  misc_feature (1)..( 8): Result.002 file - promoters60/1034962
tctaggga

SEQ ID NO: 105208 - DNA, 8 bp, Unknown
  misc_feature (1)..( 8): Result.002 file - promoters60/1034962
tctaggga

SEQ ID NO: 105209 - DNA, 10 bp, Unknown
  misc_feature (1)..( 10): Result.002 file - promoters60/1034962
aatttaaaag

SEQ ID NO: 105210 - DNA, 10 bp, Unknown
  misc_feature (1)..( 10): Result.002 file - promoters60/1034962
aatttaaaag

SEQ ID NO: 105211 - DNA, 7 bp, Unknown
  misc_feature (1)..( 7): Result.002 file - promoters60/1034962
ttctgtt

SEQ ID NO: 105212 - DNA, 7 bp, Unknown
  misc_feature (1)..( 7): Result.002 file - promoters60/1034962
ttcggtt

SEQ ID NO: 105213 - DNA, 7 bp, Unknown
  misc_feature (1)..( 7): Result.002 file - promoters60/1034962
gaataga

SEQ ID NO: 105214 - DNA, 7 bp, Unknown
  misc_feature (1)..( 7): Result.002 file - promoters60/1034962
gaagaga

SEQ ID NO: 105215 - DNA, 7 bp, Unknown
  misc_feature (1)..( 7): Result.002 file - promoters60/1034962
tatttta

SEQ ID NO: 105216 - DNA, 7 bp, Unknown
  misc_feature (1)..( 7): Result.002 file - promoters60/1034962
tatttta

SEQ ID NO: 105217 - DNA, 7 bp, Unknown
  misc_feature (1)..( 7): Result.002 file - promoters60/1034962
tttagaa

SEQ ID NO: 105218 - DNA, 7 bp, Unknown
  misc_feature (1)..( 7): Result.002 file - promoters60/1034962
tttagaa

SEQ ID NO: 105219 - DNA, 7 bp, Unknown
  misc_feature (1)..( 7): Result.002 file - promoters60/1034962
cttcctc

SEQ ID NO: 105220 - DNA, 7 bp, Unknown
  misc_feature (1)..( 7): Result.002 file - promoters60/1034962
cttcctc

SEQ ID NO: 105221 - DNA, 7 bp, Unknown
  misc_feature (1)..( 7): Result.002 file - promoters60/1035027
tttctat

SEQ ID NO: 105222 - DNA, 7 bp, Unknown
  misc_feature (1)..( 7): Result.002 file - promoters60/1035027
tttatat

SEQ ID NO: 105223 - DNA, 7 bp, Unknown
  misc_feature (1)..( 7): Result.002 file - promoters60/1035027
gtagata

SEQ ID NO: 105224 - DNA, 7 bp, Unknown
  misc_feature (1)..( 7): Result.002 file - promoters60/1035027
gtaaata

SEQ ID NO: 105225 - DNA, 6 bp, Unknown
  misc_feature (1)..( 6): Result.002 file - promoters60/1035027
atatat

SEQ ID NO: 105226 - DNA, 6 bp, Unknown
  misc_feature (1)..( 6): Result.002 file - promoters60/1035027
atatat

SEQ ID NO: 105227 - DNA, 8 bp, Unknown
  misc_feature (1)..( 8): Result.002 file - promoters60/1035027
aatataca

SEQ ID NO: 105228 - DNA, 8 bp, Unknown
  misc_feature (1)..( 8): Result.002 file - promoters60/1035027
aatttaca

SEQ ID NO: 105229 - DNA, 7 bp, Unknown
  misc_feature (1)..( 7): Result.002 file - promoters60/1035027
aaagaaa

SEQ ID NO: 105230 - DNA, 7 bp, Unknown
  misc_feature (1)..( 7): Result.002 file - promoters60/1035027
aaacaaa

SEQ ID NO: 105231 - DNA, 7 bp, Unknown
  misc_feature (1)..( 7): Result.002 file - promoters60/1035027
aaagaaa

SEQ ID NO: 105232 - DNA, 12 bp, Unknown
  misc_feature (1)..( 12): Result.002 file - promoters60/1035027
aattgtatgtta

SEQ ID NO: 105233 - DNA, 12 bp, Unknown
  misc_feature (1)..( 12): Result.002 file - promoters60/1035027
aattttatttta

SEQ ID NO: 105234 - DNA, 12 bp, Unknown
  misc_feature (1)..( 12): Result.002 file - promoters60/1035027
aataatattttt

SEQ ID NO: 105235 - DNA, 6 bp, Unknown
  misc_feature (1)..( 6): Result.002 file - promoters60/1035027
tttcct

SEQ ID NO: 105236 - DNA, 6 bp, Unknown
  misc_feature (1)..( 6): Result.002 file - promoters60/1035027
tttcct

SEQ ID NO: 105237 - DNA, 6 bp, Unknown
  misc_feature (1)..( 6): Result.002 file - promoters60/1035027
caaact

SEQ ID NO: 105238 - DNA, 6 bp, Unknown
  misc_feature (1)..( 6): Result.002 file - promoters60/1035027
caaact

SEQ ID NO: 105239 - DNA, 6 bp, Unknown
  misc_feature (1)..( 6): Result.002 file - promoters60/1035027
ctatac

SEQ ID NO: 105240 - DNA, 6 bp, Unknown
  misc_feature (1)..( 6): Result.002 file - promoters60/1035027
ctatac

SEQ ID NO: 105241 - DNA, 6 bp, Unknown
  misc_feature (1)..( 6): Result.002 file - promoters60/1035027
tttgtt

SEQ ID NO: 105242 - DNA, 6 bp, Unknown
  misc_feature (1)..( 6): Result.002 file - promoters60/1035027
tttgtt

SEQ ID NO: 105243 - DNA, 7 bp, Unknown
  misc_feature (1)..( 7): Result.002 file - promoters60/1035027
aatagaa

SEQ ID NO: 105244 - DNA, 7 bp, Unknown
  misc_feature (1)..( 7): Result.002 file - promoters60/1035027
aatggaa

SEQ ID NO: 105245 - DNA, 7 bp, Unknown
  misc_feature (1)..( 7): Result.002 file - promoters60/1035027
taataat

SEQ ID NO: 105246 - DNA, 7 bp, Unknown
  misc_feature (1)..( 7): Result.002 file - promoters60/1035027
aaataat

SEQ ID NO: 105247 - DNA, 7 bp, Unknown
  misc_feature (1)..( 7): Result.002 file - promoters60/1035027
aaacaat

SEQ ID NO: 105248 - DNA, 7 bp, Unknown
  misc_feature (1)..( 7): Result.002 file - promoters60/1035027
aattaat

SEQ ID NO: 105249 - DNA, 7 bp, Unknown
  misc_feature (1)..( 7): Result.002 file - promoters60/1035027
aatcaat

SEQ ID NO: 105250 - DNA, 8 bp, Unknown
  misc_feature (1)..( 8): Result.002 file - promoters60/1035027
aactaatc

SEQ ID NO: 105251 - DNA, 8 bp, Unknown
  misc_feature (1)..( 8): Result.002 file - promoters60/1035027
aactaatc

SEQ ID NO: 105252 - DNA, 13 bp, Unknown
  misc_feature (1)..( 13): Result.002 file - promoters60/1035027
ctttctctttttt

SEQ ID NO: 105253 - DNA, 13 bp, Unknown
  misc_feature (1)..( 13): Result.002 file - promoters60/1035027
ctttcactttttt

SEQ ID NO: 105254 - DNA, 9 bp, Unknown
  misc_feature (1)..( 9): Result.002 file - promoters60/1035027
attaaaaaa

SEQ ID NO: 105255 - DNA, 9 bp, Unknown
  misc_feature (1)..( 9): Result.002 file - promoters60/1035027
attaaaaaa

SEQ ID NO: 105256 - DNA, 15 bp, Unknown
  misc_feature (1)..( 15): Result.002 file - promoters60/1035027
aaatagaagaaaatg

SEQ ID NO: 105257 - DNA, 15 bp, Unknown
  misc_feature (1)..( 15): Result.002 file - promoters60/1035027
aaaaagaagataatg

SEQ ID NO: 105258 - DNA, 7 bp, Unknown
  misc_feature (1)..( 7): Result.002 file - promoters60/1035027
tatgaac

SEQ ID NO: 105259 - DNA, 7 bp, Unknown
  misc_feature (1)..( 7): Result.002 file - promoters60/1035027
tataaac

SEQ ID NO: 105260 - DNA, 6 bp, Unknown
  misc_feature (1)..( 6): Result.002 file - promoters60/1035027
agtatt

SEQ ID NO: 105261 - DNA, 6 bp, Unknown
  misc_feature (1)..( 6): Result.002 file - promoters60/1035027
agtatt

SEQ ID NO: 105262 - DNA, 6 bp, Unknown
  misc_feature (1)..( 6): Result.002 file - promoters60/1035027
tattta

SEQ ID NO: 105263 - DNA, 6 bp, Unknown
  misc_feature (1)..( 6): Result.002 file - promoters60/1035027
tattta

SEQ ID NO: 105264 - DNA, 6 bp, Unknown
  misc_feature (1)..( 6): Result.002 file - promoters60/1035027
aaataa

SEQ ID NO: 105265 - DNA, 6 bp, Unknown
  misc_feature (1)..( 6): Result.002 file - promoters60/1035027
aaataa

SEQ ID NO: 105266 - DNA, 9 bp, Unknown
  misc_feature (1)..( 9): Result.002 file - promoters60/1035027
gaaaacagt

SEQ ID NO: 105267 - DNA, 9 bp, Unknown
  misc_feature (1)..( 9): Result.002 file - promoters60/1035027
gaaaagagt

SEQ ID NO: 105268 - DNA, 13 bp, Unknown
  misc_feature (1)..( 13): Result.002 file - promoters60/1035083
aaatgtttgtatt

SEQ ID NO: 105269 - DNA, 13 bp, Unknown
  misc_feature (1)..( 13): Result.002 file - promoters60/1035083
ccacaattgtatt

SEQ ID NO: 105270 - DNA, 13 bp, Unknown
  misc_feature (1)..( 13): Result.002 file - promoters60/1035083
ccacatttggatt

SEQ ID NO: 105271 - DNA, 13 bp, Unknown
  misc_feature (1)..( 13): Result.002 file - promoters60/1035083
caatctttgtatc

SEQ ID NO: 105272 - DNA, 13 bp, Unknown
  misc_feature (1)..( 13): Result.002 file - promoters60/1035083
caatctttgtttt

SEQ ID NO: 105273 - DNA, 15 bp, Unknown
  misc_feature (1)..( 15): Result.002 file - promoters60/1035083
ttatttttgaagaat

SEQ ID NO: 105274 - DNA, 15 bp, Unknown
  misc_feature (1)..( 15): Result.002 file - promoters60/1035083
ctatttatgacgagg

SEQ ID NO: 105275 - DNA, 15 bp, Unknown
  misc_feature (1)..( 15): Result.002 file - promoters60/1035083
acaattttgatgaat

SEQ ID NO: 105276 - DNA, 15 bp, Unknown
  misc_feature (1)..( 15): Result.002 file - promoters60/1035083
atattttaattcatg

SEQ ID NO: 105277 - DNA, 15 bp, Unknown
  misc_feature (1)..( 15): Result.002 file - promoters60/1035083
gtttttttttttttt

SEQ ID NO: 105278 - DNA, 15 bp, Unknown
  misc_feature (1)..( 15): Result.002 file - promoters60/1035083
gtagatttgctgaat

SEQ ID NO: 105279 - DNA, 15 bp, Unknown
  misc_feature (1)..( 15): Result.002 file - promoters60/1035083
tgattttacaccact

SEQ ID NO: 105280 - DNA, 14 bp, Unknown
  misc_feature (1)..( 14): Result.002 file - promoters60/1035083
tgcattagttcttc

SEQ ID NO: 105281 - DNA, 14 bp, Unknown
  misc_feature (1)..( 14): Result.002 file - promoters60/1035083
taaatttgttatgt

SEQ ID NO: 105282 - DNA, 14 bp, Unknown
  misc_feature (1)..( 14): Result.002 file - promoters60/1035083
attattatttctcg

SEQ ID NO: 105283 - DNA, 14 bp, Unknown
  misc_feature (1)..( 14): Result.002 file - promoters60/1035083
taaattttttaaaa

SEQ ID NO: 105284 - DNA, 14 bp, Unknown
  misc_feature (1)..( 14): Result.002 file - promoters60/1035083
tatacgttttaaaa

SEQ ID NO: 105285 - DNA, 11 bp, Unknown
  misc_feature (1)..( 11): Result.002 file - promoters60/1035083
cttatataaac

SEQ ID NO: 105286 - DNA, 11 bp, Unknown
  misc_feature (1)..( 11): Result.002 file - promoters60/1035083
tatatataata

SEQ ID NO: 105287 - DNA, 11 bp, Unknown
  misc_feature (1)..( 11): Result.002 file - promoters60/1035083
tataaataaaa

SEQ ID NO: 105288 - DNA, 11 bp, Unknown
  misc_feature (1)..( 11): Result.002 file - promoters60/1035083
gctataaaaac

SEQ ID NO: 105289 - DNA, 11 bp, Unknown
  misc_feature (1)..( 11): Result.002 file - promoters60/1035083
cccataaaagc

SEQ ID NO: 105290 - DNA, 11 bp, Unknown
  misc_feature (1)..( 11): Result.002 file - promoters60/1035083
gataaatatcc

SEQ ID NO: 105291 - DNA, 10 bp, Unknown
  misc_feature (1)..( 10): Result.002 file - promoters60/1035083
tataaacaaa

SEQ ID NO: 105292 - DNA, 10 bp, Unknown
  misc_feature (1)..( 10): Result.002 file - promoters60/1035083
aataaccaaa

SEQ ID NO: 105293 - DNA, 10 bp, Unknown
  misc_feature (1)..( 10): Result.002 file - promoters60/1035083
tataaataaa

SEQ ID NO: 105294 - DNA, 10 bp, Unknown
  misc_feature (1)..( 10): Result.002 file - promoters60/1035083
tataaaaacc

SEQ ID NO: 105295 - DNA, 10 bp, Unknown
  misc_feature (1)..( 10): Result.002 file - promoters60/1035083
cataaaagca

SEQ ID NO: 105296 - DNA, 11 bp, Unknown
  misc_feature (1)..( 11): Result.002 file - promoters60/1035083
caaaatttgta

SEQ ID NO: 105297 - DNA, 11 bp, Unknown
  misc_feature (1)..( 11): Result.002 file - promoters60/1035083
caatattttaa

SEQ ID NO: 105298 - DNA, 11 bp, Unknown
  misc_feature (1)..( 11): Result.002 file - promoters60/1035083
gaatatgtttt

SEQ ID NO: 105299 - DNA, 11 bp, Unknown
  misc_feature (1)..( 11): Result.002 file - promoters60/1035083
aattattttac

SEQ ID NO: 105300 - DNA, 11 bp, Unknown
  misc_feature (1)..( 11): Result.002 file - promoters60/1035083
gctgattttac

SEQ ID NO: 105301 - DNA, 10 bp, Unknown
  misc_feature (1)..( 10): Result.002 file - promoters60/1035083
tataattatg

SEQ ID NO: 105302 - DNA, 10 bp, Unknown
  misc_feature (1)..( 10): Result.002 file - promoters60/1035083
aataataatg

SEQ ID NO: 105303 - DNA, 10 bp, Unknown
  misc_feature (1)..( 10): Result.002 file - promoters60/1035083
tattattatt

SEQ ID NO: 105304 - DNA, 10 bp, Unknown
  misc_feature (1)..( 10): Result.002 file - promoters60/1035083
taatataagt

SEQ ID NO: 105305 - DNA, 10 bp, Unknown
  misc_feature (1)..( 10): Result.002 file - promoters60/1035083
ccatattata

SEQ ID NO: 105306 - DNA, 12 bp, Unknown
  misc_feature (1)..( 12): Result.002 file - promoters60/1035083
tggataccacaa

SEQ ID NO: 105307 - DNA, 12 bp, Unknown
  misc_feature (1)..( 12): Result.002 file - promoters60/1035083
gttataccatca

SEQ ID NO: 105308 - DNA, 12 bp, Unknown
  misc_feature (1)..( 12): Result.002 file - promoters60/1035083
gttttaccttaa

SEQ ID NO: 105309 - DNA, 12 bp, Unknown
  misc_feature (1)..( 12): Result.002 file - promoters60/1035083
actataccacat

SEQ ID NO: 105310 - DNA, 12 bp, Unknown
  misc_feature (1)..( 12): Result.002 file - promoters60/1035083
ttaatacgacat

SEQ ID NO: 105311 - DNA, 7 bp, Unknown
  misc_feature (1)..( 7): Result.002 file - promoters60/1035097
aaaataa

SEQ ID NO: 105312 - DNA, 7 bp, Unknown
  misc_feature (1)..( 7): Result.002 file - promoters60/1035097
aaattaa

SEQ ID NO: 105313 - DNA, 7 bp, Unknown
  misc_feature (1)..( 7): Result.002 file - promoters60/1035097
aaaataa

SEQ ID NO: 105314 - DNA, 8 bp, Unknown
  misc_feature (1)..( 8): Result.002 file - promoters60/1035097
gaaaaaat

SEQ ID NO: 105315 - DNA, 8 bp, Unknown
  misc_feature (1)..( 8): Result.002 file - promoters60/1035097
caaaaaat

SEQ ID NO: 105316 - DNA, 8 bp, Unknown
  misc_feature (1)..( 8): Result.002 file - promoters60/1035097
gaagaaag

SEQ ID NO: 105317 - DNA, 9 bp, Unknown
  misc_feature (1)..( 9): Result.002 file - promoters60/1035117
tattttttg

SEQ ID NO: 105318 - DNA, 9 bp, Unknown
  misc_feature (1)..( 9): Result.002 file - promoters60/1035117
tattctttg

SEQ ID NO: 105319 - DNA, 9 bp, Unknown
  misc_feature (1)..( 9): Result.002 file - promoters60/1035117
tgttttttc

SEQ ID NO: 105320 - DNA, 9 bp, Unknown
  misc_feature (1)..( 9): Result.002 file - promoters60/1035117
tatttttca

SEQ ID NO: 105321 - DNA, 9 bp, Unknown
  misc_feature (1)..( 9): Result.002 file - promoters60/1035117
tattcttca

SEQ ID NO: 105322 - DNA, 7 bp, Unknown
  misc_feature (1)..( 7): Result.002 file - promoters60/1035117
aaagtct

SEQ ID NO: 105323 - DNA, 7 bp, Unknown
  misc_feature (1)..( 7): Result.002 file - promoters60/1035117
aaactct

SEQ ID NO: 105324 - DNA, 9 bp, Unknown
  misc_feature (1)..( 9): Result.002 file - promoters60/1035117
ctttgttat

SEQ ID NO: 105325 - DNA, 9 bp, Unknown
  misc_feature (1)..( 9): Result.002 file - promoters60/1035117
ctttgtaag

SEQ ID NO: 105326 - DNA, 9 bp, Unknown
  misc_feature (1)..( 9): Result.002 file - promoters60/1035117
atttgatat

SEQ ID NO: 105327 - DNA, 6 bp, Unknown
  misc_feature (1)..( 6): Result.002 file - promoters60/1035117
tataca

SEQ ID NO: 105328 - DNA, 6 bp, Unknown
  misc_feature (1)..( 6): Result.002 file - promoters60/1035117
tataca

SEQ ID NO: 105329 - DNA, 10 bp, Unknown
  misc_feature (1)..( 10): Result.002 file - promoters60/1035117
ccaataaaaa

SEQ ID NO: 105330 - DNA, 10 bp, Unknown
  misc_feature (1)..( 10): Result.002 file - promoters60/1035117
tctatagaaa

SEQ ID NO: 105331 - DNA, 10 bp, Unknown
  misc_feature (1)..( 10): Result.002 file - promoters60/1035117
tctttagatt

SEQ ID NO: 105332 - DNA, 6 bp, Unknown
  misc_feature (1)..( 6): Result.002 file - promoters60/1035117
aaaact

SEQ ID NO: 105333 - DNA, 6 bp, Unknown
  misc_feature (1)..( 6): Result.002 file - promoters60/1035117
aaaact

SEQ ID NO: 105334 - DNA, 6 bp, Unknown
  misc_feature (1)..( 6): Result.002 file - promoters60/1035117
ctttta

SEQ ID NO: 105335 - DNA, 6 bp, Unknown
  misc_feature (1)..( 6): Result.002 file - promoters60/1035117
ctttta

SEQ ID NO: 105336 - DNA, 8 bp, Unknown
  misc_feature (1)..( 8): Result.002 file - promoters60/1035117
agcaaaaa

SEQ ID NO: 105337 - DNA, 8 bp, Unknown
  misc_feature (1)..( 8): Result.002 file - promoters60/1035117
atcaaaaa

SEQ ID NO: 105338 - DNA, 8 bp, Unknown
  misc_feature (1)..( 8): Result.002 file - promoters60/1035117
atcaaaat

SEQ ID NO: 105339 - DNA, 8 bp, Unknown
  misc_feature (1)..( 8): Result.002 file - promoters60/1035117
ttaaagtt

SEQ ID NO: 105340 - DNA, 8 bp, Unknown
  misc_feature (1)..( 8): Result.002 file - promoters60/1035117
ttaaagtt

SEQ ID NO: 105341 - DNA, 11 bp, Unknown
  misc_feature (1)..( 11): Result.002 file - promoters60/1035117
aaacaacaaat

SEQ ID NO: 105342 - DNA, 11 bp, Unknown
  misc_feature (1)..( 11): Result.002 file - promoters60/1035117
aaataacaaat

SEQ ID NO: 105343 - DNA, 7 bp, Unknown
  misc_feature (1)..( 7): Result.002 file - promoters60/1035117
ctattta

SEQ ID NO: 105344 - DNA, 7 bp, Unknown
  misc_feature (1)..( 7): Result.002 file - promoters60/1035117
ctattta

SEQ ID NO: 105345 - DNA, 8 bp, Unknown
  misc_feature (1)..( 8): Result.002 file - promoters60/1035117
gatatgtc

SEQ ID NO: 105346 - DNA, 8 bp, Unknown
  misc_feature (1)..( 8): Result.002 file - promoters60/1035117
gatgtgtc

SEQ ID NO: 105347 - DNA, 11 bp, Unknown
  misc_feature (1)..( 11): Result.002 file - promoters60/1035117
tttatttaatt

SEQ ID NO: 105348 - DNA, 11 bp, Unknown
  misc_feature (1)..( 11): Result.002 file - promoters60/1035117
tttctttcatt

SEQ ID NO: 105349 - DNA, 8 bp, Unknown
  misc_feature (1)..( 8): Result.002 file - promoters60/1035117
tattacaa

SEQ ID NO: 105350 - DNA, 8 bp, Unknown
  misc_feature (1)..( 8): Result.002 file - promoters60/1035117
tataacaa

SEQ ID NO: 105351 - DNA, 6 bp, Unknown
  misc_feature (1)..( 6): Result.002 file - promoters60/1035117
aaaatc

SEQ ID NO: 105352 - DNA, 6 bp, Unknown
  misc_feature (1)..( 6): Result.002 file - promoters60/1035117
aaaatc

SEQ ID NO: 105353 - DNA, 8 bp, Unknown
  misc_feature (1)..( 8): Result.002 file - promoters60/1035117
ttacatat

SEQ ID NO: 105354 - DNA, 8 bp, Unknown
  misc_feature (1)..( 8): Result.002 file - promoters60/1035117
ttacttat

SEQ ID NO: 105355 - DNA, 7 bp, Unknown
  misc_feature (1)..( 7): Result.002 file - promoters60/1035117
acgattc

SEQ ID NO: 105356 - DNA, 7 bp, Unknown
  misc_feature (1)..( 7): Result.002 file - promoters60/1035117
acgattc

SEQ ID NO: 105357 - DNA, 8 bp, Unknown
  misc_feature (1)..( 8): Result.002 file - promoters60/1035160
atttattt

SEQ ID NO: 105358 - DNA, 8 bp, Unknown
  misc_feature (1)..( 8): Result.002 file - promoters60/1035160
attgattt

SEQ ID NO: 105359 - DNA, 10 bp, Unknown
  misc_feature (1)..( 10): Result.002 file - promoters60/1035160
atttgaggat

SEQ ID NO: 105360 - DNA, 10 bp, Unknown
  misc_feature (1)..( 10): Result.002 file - promoters60/1035160
attttaggat

SEQ ID NO: 105361 - DNA, 9 bp, Unknown
  misc_feature (1)..( 9): Result.002 file - promoters60/1035160
tttgaccat

SEQ ID NO: 105362 - DNA, 9 bp, Unknown
  misc_feature (1)..( 9): Result.002 file - promoters60/1035160
tttgaacat

SEQ ID NO: 105363 - DNA, 10 bp, Unknown
  misc_feature (1)..( 10): Result.002 file - promoters60/1035160
aaaactcgtg

SEQ ID NO: 105364 - DNA, 10 bp, Unknown
  misc_feature (1)..( 10): Result.002 file - promoters60/1035160
aaaacacgtg

SEQ ID NO: 105365 - DNA, 7 bp, Unknown
  misc_feature (1)..( 7): Result.002 file - promoters60/1035160
tctatat

SEQ ID NO: 105366 - DNA, 7 bp, Unknown
  misc_feature (1)..( 7): Result.002 file - promoters60/1035160
tctctat

SEQ ID NO: 105367 - DNA, 7 bp, Unknown
  misc_feature (1)..( 7): Result.002 file - promoters60/1035160
caatgaa

SEQ ID NO: 105368 - DNA, 7 bp, Unknown
  misc_feature (1)..( 7): Result.002 file - promoters60/1035160
caacgaa

SEQ ID NO: 105369 - DNA, 9 bp, Unknown
  misc_feature (1)..( 9): Result.002 file - promoters60/1035160
gaaaacgtg

SEQ ID NO: 105370 - DNA, 9 bp, Unknown
  misc_feature (1)..( 9): Result.002 file - promoters60/1035160
gaaaacagg

SEQ ID NO: 105371 - DNA, 9 bp, Unknown
  misc_feature (1)..( 9): Result.002 file - promoters60/1035160
aaaaaaagg

SEQ ID NO: 105372 - DNA, 8 bp, Unknown
  misc_feature (1)..( 8): Result.002 file - promoters60/1035172
ctataaat

SEQ ID NO: 105373 - DNA, 8 bp, Unknown
  misc_feature (1)..( 8): Result.002 file - promoters60/1035172
atataaag

SEQ ID NO: 105374 - DNA, 8 bp, Unknown
  misc_feature (1)..( 8): Result.002 file - promoters60/1035172
ctataaaa

SEQ ID NO: 105375 - DNA, 8 bp, Unknown
  misc_feature (1)..( 8): Result.002 file - promoters60/1035172
ggataaag

SEQ ID NO: 105376 - DNA, 9 bp, Unknown
  misc_feature (1)..( 9): Result.002 file - promoters60/1035172
ctatataac

SEQ ID NO: 105377 - DNA, 8 bp, Unknown
  misc_feature (1)..( 8): Result.002 file - promoters60/1035172
aaaattat

SEQ ID NO: 105378 - DNA, 8 bp, Unknown
  misc_feature (1)..( 8): Result.002 file - promoters60/1035172
aaaattaa

SEQ ID NO: 105379 - DNA, 8 bp, Unknown
  misc_feature (1)..( 8): Result.002 file - promoters60/1035172
aataataa

SEQ ID NO: 105380 - DNA, 8 bp, Unknown
  misc_feature (1)..( 8): Result.002 file - promoters60/1035172
aaaaatag

SEQ ID NO: 105381 - DNA, 8 bp, Unknown
  misc_feature (1)..( 8): Result.002 file - promoters60/1035172
aaacatag

SEQ ID NO: 105382 - DNA, 10 bp, Unknown
  misc_feature (1)..( 10): Result.002 file - promoters60/1035176
taaataaaag

SEQ ID NO: 105383 - DNA, 10 bp, Unknown
  misc_feature (1)..( 10): Result.002 file - promoters60/1035176
gatataaaaa

SEQ ID NO: 105384 - DNA, 10 bp, Unknown
  misc_feature (1)..( 10): Result.002 file - promoters60/1035176
gaaagaaaga

SEQ ID NO: 105385 - DNA, 10 bp, Unknown
  misc_feature (1)..( 10): Result.002 file - promoters60/1035176
attataaaat

SEQ ID NO: 105386 - DNA, 10 bp, Unknown
  misc_feature (1)..( 10): Result.002 file - promoters60/1035176
attagaaaat

SEQ ID NO: 105387 - DNA, 10 bp, Unknown
  misc_feature (1)..( 10): Result.002 file - promoters60/1035176
attctaaaaa

SEQ ID NO: 105388 - DNA, 11 bp, Unknown
  misc_feature (1)..( 11): Result.002 file - promoters60/1035176
cattatatata

SEQ ID NO: 105389 - DNA, 11 bp, Unknown
  misc_feature (1)..( 11): Result.002 file - promoters60/1035176
acatatataaa

SEQ ID NO: 105390 - DNA, 11 bp, Unknown
  misc_feature (1)..( 11): Result.002 file - promoters60/1035176
gcctatatata

SEQ ID NO: 105391 - DNA, 11 bp, Unknown
  misc_feature (1)..( 11): Result.002 file - promoters60/1035176
ccttataaata

SEQ ID NO: 105392 - DNA, 11 bp, Unknown
  misc_feature (1)..( 11): Result.002 file - promoters60/1035176
ccacataaatg

SEQ ID NO: 105393 - DNA, 11 bp, Unknown
  misc_feature (1)..( 11): Result.002 file - promoters60/1035176
ccttaaaaacc

SEQ ID NO: 105394 - DNA, 12 bp, Unknown
  misc_feature (1)..( 12): Result.002 file - promoters60/1035176
atccaaaatgaa

SEQ ID NO: 105395 - DNA, 12 bp, Unknown
  misc_feature (1)..( 12): Result.002 file - promoters60/1035176
ttaaaaaaagaa

SEQ ID NO: 105396 - DNA, 12 bp, Unknown
  misc_feature (1)..( 12): Result.002 file - promoters60/1035176
ccataaaaaata

SEQ ID NO: 105397 - DNA, 12 bp, Unknown
  misc_feature (1)..( 12): Result.002 file - promoters60/1035176
ttctaaaaagtt

SEQ ID NO: 105398 - DNA, 12 bp, Unknown
  misc_feature (1)..( 12): Result.002 file - promoters60/1035176
tgtgaaaaaaaa

SEQ ID NO: 105399 - DNA, 12 bp, Unknown
  misc_feature (1)..( 12): Result.002 file - promoters60/1035176
agtcaaacaaat

SEQ ID NO: 105400 - DNA, 12 bp, Unknown
  misc_feature (1)..( 12): Result.002 file - promoters60/1035176
ttagaaacagac

SEQ ID NO: 105401 - DNA, 10 bp, Unknown
  misc_feature (1)..( 10): Result.002 file - promoters60/1035176
taaaaaatat

SEQ ID NO: 105402 - DNA, 10 bp, Unknown
  misc_feature (1)..( 10): Result.002 file - promoters60/1035176
taaaaaaaga

SEQ ID NO: 105403 - DNA, 10 bp, Unknown
  misc_feature (1)..( 10): Result.002 file - promoters60/1035176
taaaaagtta

SEQ ID NO: 105404 - DNA, 10 bp, Unknown
  misc_feature (1)..( 10): Result.002 file - promoters60/1035176
gaaaaaaaaa

SEQ ID NO: 105405 - DNA, 11 bp, Unknown
  misc_feature (1)..( 11): Result.002 file - promoters60/1035176
caaacaaatgt

SEQ ID NO: 105406 - DNA, 11 bp, Unknown
  misc_feature (1)..( 11): Result.002 file - promoters60/1035176
ttagaaacaga

SEQ ID NO: 105407 - DNA, 9 bp, Unknown
  misc_feature (1)..( 9): Result.002 file - promoters60/1035267
tcaaataat

SEQ ID NO: 105408 - DNA, 9 bp, Unknown
  misc_feature (1)..( 9): Result.002 file - promoters60/1035267
gaaaacaat

SEQ ID NO: 105409 - DNA, 9 bp, Unknown
  misc_feature (1)..( 9): Result.002 file - promoters60/1035267
acaaattta

SEQ ID NO: 105410 - DNA, 9 bp, Unknown
  misc_feature (1)..( 9): Result.002 file - promoters60/1035267
taaaattta

SEQ ID NO: 105411 - DNA, 10 bp, Unknown
  misc_feature (1)..( 10): Result.002 file - promoters60/1035267
aatttgtctt

SEQ ID NO: 105412 - DNA, 10 bp, Unknown
  misc_feature (1)..( 10): Result.002 file - promoters60/1035267
tatttatcta

SEQ ID NO: 105413 - DNA, 10 bp, Unknown
  misc_feature (1)..( 10): Result.002 file - promoters60/1035267
aatctgttta

SEQ ID NO: 105414 - DNA, 10 bp, Unknown
  misc_feature (1)..( 10): Result.002 file - promoters60/1035267
attttgttta

SEQ ID NO: 105415 - DNA, 7 bp, Unknown
  misc_feature (1)..( 7): Result.002 file - promoters60/1035306
tgtggtt

SEQ ID NO: 105416 - DNA, 7 bp, Unknown
  misc_feature (1)..( 7): Result.002 file - promoters60/1035306
tgtagtt

SEQ ID NO: 105417 - DNA, 6 bp, Unknown
  misc_feature (1)..( 6): Result.002 file - promoters60/1035306
cgtaaa

SEQ ID NO: 105418 - DNA, 6 bp, Unknown
  misc_feature (1)..( 6): Result.002 file - promoters60/1035306
cgtaaa

SEQ ID NO: 105419 - DNA, 8 bp, Unknown
  misc_feature (1)..( 8): Result.002 file - promoters60/1035306
taaatcaa

SEQ ID NO: 105420 - DNA, 8 bp, Unknown
  misc_feature (1)..( 8): Result.002 file - promoters60/1035306
taaaacaa

SEQ ID NO: 105421 - DNA, 11 bp, Unknown
  misc_feature (1)..( 11): Result.002 file - promoters60/1035306
caaataatatt

SEQ ID NO: 105422 - DNA, 11 bp, Unknown
  misc_feature (1)..( 11): Result.002 file - promoters60/1035306
caattaatatt

SEQ ID NO: 105423 - DNA, 6 bp, Unknown
  misc_feature (1)..( 6): Result.002 file - promoters60/1035306
atattt

SEQ ID NO: 105424 - DNA, 6 bp, Unknown
  misc_feature (1)..( 6): Result.002 file - promoters60/1035306
atattt

SEQ ID NO: 105425 - DNA, 6 bp, Unknown
  misc_feature (1)..( 6): Result.002 file - promoters60/1035306
ttgtat

SEQ ID NO: 105426 - DNA, 6 bp, Unknown
  misc_feature (1)..( 6): Result.002 file - promoters60/1035306
ttgtat

SEQ ID NO: 105427 - DNA, 7 bp, Unknown
  misc_feature (1)..( 7): Result.002 file - promoters60/1035306
atattaa

SEQ ID NO: 105428 - DNA, 7 bp, Unknown
  misc_feature (1)..( 7): Result.002 file - promoters60/1035306
ataataa

SEQ ID NO: 105429 - DNA, 7 bp, Unknown
  misc_feature (1)..( 7): Result.002 file - promoters60/1035306
tatctat

SEQ ID NO: 105430 - DNA, 7 bp, Unknown
  misc_feature (1)..( 7): Result.002 file - promoters60/1035306
tatatat

SEQ ID NO: 105431 - DNA, 7 bp, Unknown
  misc_feature (1)..( 7): Result.002 file - promoters60/1035306
tgtaaaa

SEQ ID NO: 105432 - DNA, 7 bp, Unknown
  misc_feature (1)..( 7): Result.002 file - promoters60/1035306
tgttaaa

SEQ ID NO: 105433 - DNA, 6 bp, Unknown
  misc_feature (1)..( 6): Result.002 file - promoters60/1035306
gtagaa

SEQ ID NO: 105434 - DNA, 6 bp, Unknown
  misc_feature (1)..( 6): Result.002 file - promoters60/1035306
gtagaa

SEQ ID NO: 105435 - DNA, 8 bp, Unknown
  misc_feature (1)..( 8): Result.002 file - promoters60/1035306
aacatgca

SEQ ID NO: 105436 - DNA, 8 bp, Unknown
  misc_feature (1)..( 8): Result.002 file - promoters60/1035306
aacgtgca

SEQ ID NO: 105437 - DNA, 10 bp, Unknown
  misc_feature (1)..( 10): Result.002 file - promoters60/1035306
ctttaaaaaa

SEQ ID NO: 105438 - DNA, 10 bp, Unknown
  misc_feature (1)..( 10): Result.002 file - promoters60/1035306
ctttaaaaaa

SEQ ID NO: 105439 - DNA, 9 bp, Unknown
  misc_feature (1)..( 9): Result.002 file - promoters60/1035306
tattataat

SEQ ID NO: 105440 - DNA, 9 bp, Unknown
  misc_feature (1)..( 9): Result.002 file - promoters60/1035306
tattaaaat

SEQ ID NO: 105441 - DNA, 7 bp, Unknown
  misc_feature (1)..( 7): Result.002 file - promoters60/1035306
atcaaat

SEQ ID NO: 105442 - DNA, 7 bp, Unknown
  misc_feature (1)..( 7): Result.002 file - promoters60/1035306
atcgaat

SEQ ID NO: 105443 - DNA, 6 bp, Unknown
  misc_feature (1)..( 6): Result.002 file - promoters60/1035306
aattat

SEQ ID NO: 105444 - DNA, 6 bp, Unknown
  misc_feature (1)..( 6): Result.002 file - promoters60/1035306
aattat

SEQ ID NO: 105445 - DNA, 11 bp, Unknown
  misc_feature (1)..( 11): Result.002 file - promoters60/1035306
atttataaaat

SEQ ID NO: 105446 - DNA, 11 bp, Unknown
  misc_feature (1)..( 11): Result.002 file - promoters60/1035306
atttataaaat

SEQ ID NO: 105447 - DNA, 9 bp, Unknown
  misc_feature (1)..( 9): Result.002 file - promoters60/1035306
aaaagttat

SEQ ID NO: 105448 - DNA, 9 bp, Unknown
  misc_feature (1)..( 9): Result.002 file - promoters60/1035306
aaaggttat

SEQ ID NO: 105449 - DNA, 12 bp, Unknown
  misc_feature (1)..( 12): Result.002 file - promoters60/1035312
tgaatcaaaacc

SEQ ID NO: 105450 - DNA, 12 bp, Unknown
  misc_feature (1)..( 12): Result.002 file - promoters60/1035312
aaaatcaaaaat

SEQ ID NO: 105451 - DNA, 12 bp, Unknown
  misc_feature (1)..( 12): Result.002 file - promoters60/1035312
tgattcactctt

SEQ ID NO: 105452 - DNA, 12 bp, Unknown
  misc_feature (1)..( 12): Result.002 file - promoters60/1035312
catgtcaaaaag

SEQ ID NO: 105453 - DNA, 12 bp, Unknown
  misc_feature (1)..( 12): Result.002 file - promoters60/1035312
ttaatcaacaat

SEQ ID NO: 105454 - DNA, 12 bp, Unknown
  misc_feature (1)..( 12): Result.002 file - promoters60/1035312
atgggcaataat

SEQ ID NO: 105455 - DNA, 12 bp, Unknown
  misc_feature (1)..( 12): Result.002 file - promoters60/1035312
aaattcaaggtt

SEQ ID NO: 105456 - DNA, 10 bp, Unknown
  misc_feature (1)..( 10): Result.002 file - promoters60/1035312
aagggttttt

SEQ ID NO: 105457 - DNA, 10 bp, Unknown
  misc_feature (1)..( 10): Result.002 file - promoters60/1035312
ataagttttt

SEQ ID NO: 105458 - DNA, 10 bp, Unknown
  misc_feature (1)..( 10): Result.002 file - promoters60/1035312
acttgttttt

SEQ ID NO: 105459 - DNA, 10 bp, Unknown
  misc_feature (1)..( 10): Result.002 file - promoters60/1035312
tagtgtattt

SEQ ID NO: 105460 - DNA, 10 bp, Unknown
  misc_feature (1)..( 10): Result.002 file - promoters60/1035312
taaggtttca

SEQ ID NO: 105461 - DNA, 10 bp, Unknown
  misc_feature (1)..( 10): Result.002 file - promoters60/1035312
cattgatttg

SEQ ID NO: 105462 - DNA, 6 bp, Unknown
  misc_feature (1)..( 6): Result.002 file - promoters60/1035323
acaaaa

SEQ ID NO: 105463 - DNA, 6 bp, Unknown
  misc_feature (1)..( 6): Result.002 file - promoters60/1035323
acaaaa

SEQ ID NO: 105464 - DNA, 6 bp, Unknown
  misc_feature (1)..( 6): Result.002 file - promoters60/1035323
ttgaaa

SEQ ID NO: 105465 - DNA, 6 bp, Unknown
  misc_feature (1)..( 6): Result.002 file - promoters60/1035323
ttgaaa

SEQ ID NO: 105466 - DNA, 7 bp, Unknown
  misc_feature (1)..( 7): Result.002 file - promoters60/1035323
ttcgttt

SEQ ID NO: 105467 - DNA, 7 bp, Unknown
  misc_feature (1)..( 7): Result.002 file - promoters60/1035323
ttccttt

SEQ ID NO: 105468 - DNA, 8 bp, Unknown
  misc_feature (1)..( 8): Result.002 file - promoters60/1035323
tttctttt

SEQ ID NO: 105469 - DNA, 8 bp, Unknown
  misc_feature (1)..( 8): Result.002 file - promoters60/1035323
tttatttt

SEQ ID NO: 105470 - DNA, 8 bp, Unknown
  misc_feature (1)..( 8): Result.002 file - promoters60/1035323
tttatttc

SEQ ID NO: 105471 - DNA, 7 bp, Unknown
  misc_feature (1)..( 7): Result.002 file - promoters60/1035323
ttcttct

SEQ ID NO: 105472 - DNA, 7 bp, Unknown
  misc_feature (1)..( 7): Result.002 file - promoters60/1035323
ttcgtct

SEQ ID NO: 105473 - DNA, 6 bp, Unknown
  misc_feature (1)..( 6): Result.002 file - promoters60/1035323
tgatca

SEQ ID NO: 105474 - DNA, 6 bp, Unknown
  misc_feature (1)..( 6): Result.002 file - promoters60/1035323
tgatca

SEQ ID NO: 105475 - DNA, 9 bp, Unknown
  misc_feature (1)..( 9): Result.002 file - promoters60/1035323
tgaacaact

SEQ ID NO: 105476 - DNA, 9 bp, Unknown
  misc_feature (1)..( 9): Result.002 file - promoters60/1035323
tgaaccact

SEQ ID NO: 105477 - DNA, 12 bp, Unknown
  misc_feature (1)..( 12): Result.002 file - promoters60/1035323
tttttgaaattc

SEQ ID NO: 105478 - DNA, 12 bp, Unknown
  misc_feature (1)..( 12): Result.002 file - promoters60/1035323
tttctgaaattt

SEQ ID NO: 105479 - DNA, 12 bp, Unknown
  misc_feature (1)..( 12): Result.002 file - promoters60/1035323
ctgatcaaattt

SEQ ID NO: 105480 - DNA, 8 bp, Unknown
  misc_feature (1)..( 8): Result.002 file - promoters60/1035323
caactgta

SEQ ID NO: 105481 - DNA, 8 bp, Unknown
  misc_feature (1)..( 8): Result.002 file - promoters60/1035323
aaactgtt

SEQ ID NO: 105482 - DNA, 8 bp, Unknown
  misc_feature (1)..( 8): Result.002 file - promoters60/1035323
aaattgtt

SEQ ID NO: 105483 - DNA, 6 bp, Unknown
  misc_feature (1)..( 6): Result.002 file - promoters60/1035323
taataa

SEQ ID NO: 105484 - DNA, 6 bp, Unknown
  misc_feature (1)..( 6): Result.002 file - promoters60/1035323
taataa

SEQ ID NO: 105485 - DNA, 6 bp, Unknown
  misc_feature (1)..( 6): Result.002 file - promoters60/1035323
ttttct

SEQ ID NO: 105486 - DNA, 6 bp, Unknown
  misc_feature (1)..( 6): Result.002 file - promoters60/1035323
ttttct

SEQ ID NO: 105487 - DNA, 7 bp, Unknown
  misc_feature (1)..( 7): Result.002 file - promoters60/1035323
atcgtca

SEQ ID NO: 105488 - DNA, 7 bp, Unknown
  misc_feature (1)..( 7): Result.002 file - promoters60/1035323
atcttca

SEQ ID NO: 105489 - DNA, 7 bp, Unknown
  misc_feature (1)..( 7): Result.002 file - promoters60/1035323
aaaccgg

SEQ ID NO: 105490 - DNA, 7 bp, Unknown
  misc_feature (1)..( 7): Result.002 file - promoters60/1035323
aaaccgg

SEQ ID NO: 105491 - DNA, 9 bp, Unknown
  misc_feature (1)..( 9): Result.002 file - promoters60/1035323
cttttttcc

SEQ ID NO: 105492 - DNA, 9 bp, Unknown
  misc_feature (1)..( 9): Result.002 file - promoters60/1035323
cttttttcc

SEQ ID NO: 105493 - DNA, 6 bp, Unknown
  misc_feature (1)..( 6): Result.002 file - promoters60/1035323
aatttg

SEQ ID NO: 105494 - DNA, 6 bp, Unknown
  misc_feature (1)..( 6): Result.002 file - promoters60/1035323
aatttg

SEQ ID NO: 105495 - DNA, 7 bp, Unknown
  misc_feature (1)..( 7): Result.002 file - promoters60/1035323
ttgttaa

SEQ ID NO: 105496 - DNA, 7 bp, Unknown
  misc_feature (1)..( 7): Result.002 file - promoters60/1035323
ttgataa

SEQ ID NO: 105497 - DNA, 6 bp, Unknown
  misc_feature (1)..( 6): Result.002 file - promoters60/1035323
gtatat

SEQ ID NO: 105498 - DNA, 6 bp, Unknown
  misc_feature (1)..( 6): Result.002 file - promoters60/1035323
gtatat

SEQ ID NO: 105499 - DNA, 6 bp, Unknown
  misc_feature (1)..( 6): Result.002 file - promoters60/1035373
taaagg

SEQ ID NO: 105500 - DNA, 6 bp, Unknown
  misc_feature (1)..( 6): Result.002 file - promoters60/1035373
taaagg

SEQ ID NO: 105501 - DNA, 7 bp, Unknown
  misc_feature (1)..( 7): Result.002 file - promoters60/1035373
ctacaaa

SEQ ID NO: 105502 - DNA, 7 bp, Unknown
  misc_feature (1)..( 7): Result.002 file - promoters60/1035373
ctataaa

SEQ ID NO: 105503 - DNA, 7 bp, Unknown
  misc_feature (1)..( 7): Result.002 file - promoters60/1035373
aaacgct

SEQ ID NO: 105504 - DNA, 7 bp, Unknown
  misc_feature (1)..( 7): Result.002 file - promoters60/1035373
aaaggct

SEQ ID NO: 105505 - DNA, 7 bp, Unknown
  misc_feature (1)..( 7): Result.002 file - promoters60/1035373
atttaga

SEQ ID NO: 105506 - DNA, 7 bp, Unknown
  misc_feature (1)..( 7): Result.002 file - promoters60/1035373
attgaga

SEQ ID NO: 105507 - DNA, 7 bp, Unknown
  misc_feature (1)..( 7): Result.002 file - promoters60/1035373
gatccag

SEQ ID NO: 105508 - DNA, 7 bp, Unknown
  misc_feature (1)..( 7): Result.002 file - promoters60/1035373
gatacag

SEQ ID NO: 105509 - DNA, 6 bp, Unknown
  misc_feature (1)..( 6): Result.002 file - promoters60/1035373
attcca

SEQ ID NO: 105510 - DNA, 6 bp, Unknown
  misc_feature (1)..( 6): Result.002 file - promoters60/1035373
attcca

SEQ ID NO: 105511 - DNA, 7 bp, Unknown
  misc_feature (1)..( 7): Result.002 file - promoters60/1035373
aaacctg

SEQ ID NO: 105512 - DNA, 7 bp, Unknown
  misc_feature (1)..( 7): Result.002 file - promoters60/1035373
aaagctg

SEQ ID NO: 105513 - DNA, 6 bp, Unknown
  misc_feature (1)..( 6): Result.002 file - promoters60/1035373
tttgac

SEQ ID NO: 105514 - DNA, 6 bp, Unknown
  misc_feature (1)..( 6): Result.002 file - promoters60/1035373
tttgac

SEQ ID NO: 105515 - DNA, 6 bp, Unknown
  misc_feature (1)..( 6): Result.002 file - promoters60/1035373
acggta

SEQ ID NO: 105516 - DNA, 6 bp, Unknown
  misc_feature (1)..( 6): Result.002 file - promoters60/1035373
acggta

SEQ ID NO: 105517 - DNA, 7 bp, Unknown
  misc_feature (1)..( 7): Result.002 file - promoters60/1035373
tcacgtt

SEQ ID NO: 105518 - DNA, 7 bp, Unknown
  misc_feature (1)..( 7): Result.002 file - promoters60/1035373
tcaagtt

SEQ ID NO: 105519 - DNA, 9 bp, Unknown
  misc_feature (1)..( 9): Result.002 file - promoters60/1035373
atttgattt

SEQ ID NO: 105520 - DNA, 9 bp, Unknown
  misc_feature (1)..( 9): Result.002 file - promoters60/1035373
atttaattt

SEQ ID NO: 105521 - DNA, 7 bp, Unknown
  misc_feature (1)..( 7): Result.002 file - promoters60/1035507
caaaagt

SEQ ID NO: 105522 - DNA, 7 bp, Unknown
  misc_feature (1)..( 7): Result.002 file - promoters60/1035507
aaaaagt

SEQ ID NO: 105523 - DNA, 8 bp, Unknown
  misc_feature (1)..( 8): Result.002 file - promoters60/1035507
taaagagt

SEQ ID NO: 105524 - DNA, 10 bp, Unknown
  misc_feature (1)..( 10): Result.002 file - promoters60/1035507
tttcagtttc

SEQ ID NO: 105525 - DNA, 10 bp, Unknown
  misc_feature (1)..( 10): Result.002 file - promoters60/1035507
tttcattttt

SEQ ID NO: 105526 - DNA, 10 bp, Unknown
  misc_feature (1)..( 10): Result.002 file - promoters60/1035507
caagattttt

SEQ ID NO: 105527 - DNA, 10 bp, Unknown
  misc_feature (1)..( 10): Result.002 file - promoters60/1035507
aattattttc

SEQ ID NO: 105528 - DNA, 9 bp, Unknown
  misc_feature (1)..( 9): Result.002 file - promoters60/1035507
ttcaatttg

SEQ ID NO: 105529 - DNA, 9 bp, Unknown
  misc_feature (1)..( 9): Result.002 file - promoters60/1035507
tacaaattg

SEQ ID NO: 105530 - DNA, 9 bp, Unknown
  misc_feature (1)..( 9): Result.002 file - promoters60/1035507
ttcaattgg

SEQ ID NO: 105531 - DNA, 12 bp, Unknown
  misc_feature (1)..( 12): Result.002 file - promoters60/1035507
aatttggttaat

SEQ ID NO: 105532 - DNA, 12 bp, Unknown
  misc_feature (1)..( 12): Result.002 file - promoters60/1035507
tctttgtttatt

SEQ ID NO: 105533 - DNA, 12 bp, Unknown
  misc_feature (1)..( 12): Result.002 file - promoters60/1035507
tctttatttatt

SEQ ID NO: 105534 - DNA, 7 bp, Unknown
  misc_feature (1)..( 7): Result.002 file - promoters60/1035507
tataaaa

SEQ ID NO: 105535 - DNA, 7 bp, Unknown
  misc_feature (1)..( 7): Result.002 file - promoters60/1035507
cataaaa

SEQ ID NO: 105536 - DNA, 7 bp, Unknown
  misc_feature (1)..( 7): Result.002 file - promoters60/1035507
cattaaa

SEQ ID NO: 105537 - DNA, 7 bp, Unknown
  misc_feature (1)..( 7): Result.002 file - promoters60/1035623
ttagcca

SEQ ID NO: 105538 - DNA, 7 bp, Unknown
  misc_feature (1)..( 7): Result.002 file - promoters60/1035623
ttatcca

SEQ ID NO: 105539 - DNA, 7 bp, Unknown
  misc_feature (1)..( 7): Result.002 file - promoters60/1035623
cagggac

SEQ ID NO: 105540 - DNA, 7 bp, Unknown
  misc_feature (1)..( 7): Result.002 file - promoters60/1035623
cagagac

SEQ ID NO: 105541 - DNA, 6 bp, Unknown
  misc_feature (1)..( 6): Result.002 file - promoters60/1035623
tttgtt

SEQ ID NO: 105542 - DNA, 6 bp, Unknown
  misc_feature (1)..( 6): Result.002 file - promoters60/1035623
tttgtt

SEQ ID NO: 105543 - DNA, 6 bp, Unknown
  misc_feature (1)..( 6): Result.002 file - promoters60/1035623
cttctt

SEQ ID NO: 105544 - DNA, 6 bp, Unknown
  misc_feature (1)..( 6): Result.002 file - promoters60/1035623
cttctt

SEQ ID NO: 105545 - DNA, 7 bp, Unknown
  misc_feature (1)..( 7): Result.002 file - promoters60/1035623
ttctgga

SEQ ID NO: 105546 - DNA, 7 bp, Unknown
  misc_feature (1)..( 7): Result.002 file - promoters60/1035623
ttctgga

SEQ ID NO: 105547 - DNA, 7 bp, Unknown
  misc_feature (1)..( 7): Result.002 file - promoters60/1035623
tgtatat

SEQ ID NO: 105548 - DNA, 7 bp, Unknown
  misc_feature (1)..( 7): Result.002 file - promoters60/1035623
tgtctat

SEQ ID NO: 105549 - DNA, 8 bp, Unknown
  misc_feature (1)..( 8): Result.002 file - promoters60/1035623
tctggttt

SEQ ID NO: 105550 - DNA, 8 bp, Unknown
  misc_feature (1)..( 8): Result.002 file - promoters60/1035623
tctggttt

SEQ ID NO: 105551 - DNA, 7 bp, Unknown
  misc_feature (1)..( 7): Result.002 file - promoters60/1035623
tttactt

SEQ ID NO: 105552 - DNA, 7 bp, Unknown
  misc_feature (1)..( 7): Result.002 file - promoters60/1035623
tttgctt

SEQ ID NO: 105553 - DNA, 8 bp, Unknown
  misc_feature (1)..( 8): Result.002 file - promoters60/1035623
cttttctc

SEQ ID NO: 105554 - DNA, 8 bp, Unknown
  misc_feature (1)..( 8): Result.002 file - promoters60/1035623
cttgtctc

SEQ ID NO: 105555 - DNA, 7 bp, Unknown
  misc_feature (1)..( 7): Result.002 file - promoters60/1035623
ttgaagc

SEQ ID NO: 105556 - DNA, 7 bp, Unknown
  misc_feature (1)..( 7): Result.002 file - promoters60/1035623
ttgaagc

SEQ ID NO: 105557 - DNA, 6 bp, Unknown
  misc_feature (1)..( 6): Result.002 file - promoters60/1035623
cctttt

SEQ ID NO: 105558 - DNA, 6 bp, Unknown
  misc_feature (1)..( 6): Result.002 file - promoters60/1035623
cctttt

SEQ ID NO: 105559 - DNA, 7 bp, Unknown
  misc_feature (1)..( 7): Result.002 file - promoters60/1035623
ttttttt

SEQ ID NO: 105560 - DNA, 7 bp, Unknown
  misc_feature (1)..( 7): Result.002 file - promoters60/1035623
ttttttt

SEQ ID NO: 105561 - DNA, 7 bp, Unknown
  misc_feature (1)..( 7): Result.002 file - promoters60/1035623
ggcctat

SEQ ID NO: 105562 - DNA, 7 bp, Unknown
  misc_feature (1)..( 7): Result.002 file - promoters60/1035623
ggcctat

SEQ ID NO: 105563 - DNA, 8 bp, Unknown
  misc_feature (1)..( 8): Result.002 file - promoters60/1035632
agataaaa

SEQ ID NO: 105564 - DNA, 8 bp, Unknown
  misc_feature (1)..( 8): Result.002 file - promoters60/1035632
tgattaaa

SEQ ID NO: 105565 - DNA, 8 bp, Unknown
  misc_feature (1)..( 8): Result.002 file - promoters60/1035632
taataaaa

SEQ ID NO: 105566 - DNA, 8 bp, Unknown
  misc_feature (1)..( 8): Result.002 file - promoters60/1035632
ccataaaa

SEQ ID NO: 105567 - DNA, 8 bp, Unknown
  misc_feature (1)..( 8): Result.002 file - promoters60/1035632
taatgaaa

SEQ ID NO: 105568 - DNA, 8 bp, Unknown
  misc_feature (1)..( 8): Result.002 file - promoters60/1035632
gaataaat

SEQ ID NO: 105569 - DNA, 11 bp, Unknown
  misc_feature (1)..( 11): Result.002 file - promoters60/1035632
gacaaaagata

SEQ ID NO: 105570 - DNA, 11 bp, Unknown
  misc_feature (1)..( 11): Result.002 file - promoters60/1035632
tataaaaaata

SEQ ID NO: 105571 - DNA, 11 bp, Unknown
  misc_feature (1)..( 11): Result.002 file - promoters60/1035632
cacaaaagaat

SEQ ID NO: 105572 - DNA, 11 bp, Unknown
  misc_feature (1)..( 11): Result.002 file - promoters60/1035632
aacacaagtga

SEQ ID NO: 105573 - DNA, 11 bp, Unknown
  misc_feature (1)..( 11): Result.002 file - promoters60/1035632
aacacacacta

SEQ ID NO: 105574 - DNA, 11 bp, Unknown
  misc_feature (1)..( 11): Result.002 file - promoters60/1035632
ctgaaaacaaa

SEQ ID NO: 105575 - DNA, 11 bp, Unknown
  misc_feature (1)..( 11): Result.002 file - promoters60/1035632
cataaaaaatt

SEQ ID NO: 105576 - DNA, 10 bp, Unknown
  misc_feature (1)..( 10): Result.002 file - promoters60/1035632
gtgtttttct

SEQ ID NO: 105577 - DNA, 10 bp, Unknown
  misc_feature (1)..( 10): Result.002 file - promoters60/1035632
tgatttttct

SEQ ID NO: 105578 - DNA, 10 bp, Unknown
  misc_feature (1)..( 10): Result.002 file - promoters60/1035632
cagttttttt

SEQ ID NO: 105579 - DNA, 10 bp, Unknown
  misc_feature (1)..( 10): Result.002 file - promoters60/1035632
agcgttttct

SEQ ID NO: 105580 - DNA, 10 bp, Unknown
  misc_feature (1)..( 10): Result.002 file - promoters60/1035632
tgatttttaa

SEQ ID NO: 105581 - DNA, 10 bp, Unknown
  misc_feature (1)..( 10): Result.002 file - promoters60/1035632
acgtttgtat

SEQ ID NO: 105582 - DNA, 8 bp, Unknown
  misc_feature (1)..( 8): Result.002 file - promoters60/1035632
ttttctgt

SEQ ID NO: 105583 - DNA, 8 bp, Unknown
  misc_feature (1)..( 8): Result.002 file - promoters60/1035632
atttttgt

SEQ ID NO: 105584 - DNA, 8 bp, Unknown
  misc_feature (1)..( 8): Result.002 file - promoters60/1035632
ttttctat

SEQ ID NO: 105585 - DNA, 8 bp, Unknown
  misc_feature (1)..( 8): Result.002 file - promoters60/1035632
atttttaa

SEQ ID NO: 105586 - DNA, 8 bp, Unknown
  misc_feature (1)..( 8): Result.002 file - promoters60/1035632
gtttgtat

SEQ ID NO: 105587 - DNA, 8 bp, Unknown
  misc_feature (1)..( 8): Result.002 file - promoters60/1035632
ttttcttc

SEQ ID NO: 105588 - DNA, 7 bp, Unknown
  misc_feature (1)..( 7): Result.002 file - promoters60/1035665
gtgcaat

SEQ ID NO: 105589 - DNA, 7 bp, Unknown
  misc_feature (1)..( 7): Result.002 file - promoters60/1035665
gtgaaat

SEQ ID NO: 105590 - DNA, 7 bp, Unknown
  misc_feature (1)..( 7): Result.002 file - promoters60/1035665
taagtta

SEQ ID NO: 105591 - DNA, 7 bp, Unknown
  misc_feature (1)..( 7): Result.002 file - promoters60/1035665
taaatta

SEQ ID NO: 105592 - DNA, 7 bp, Unknown
  misc_feature (1)..( 7): Result.002 file - promoters60/1035665
taattta

SEQ ID NO: 105593 - DNA, 16 bp, Unknown
  misc_feature (1)..( 16): Result.002 file - promoters60/1035665
ttaattattaattttt

SEQ ID NO: 105594 - DNA, 16 bp, Unknown
  misc_feature (1)..( 16): Result.002 file - promoters60/1035665
ttctcaaggaatcttt

SEQ ID NO: 105595 - DNA, 16 bp, Unknown
  misc_feature (1)..( 16): Result.002 file - promoters60/1035665
ttatttactaatttat

SEQ ID NO: 105596 - DNA, 7 bp, Unknown
  misc_feature (1)..( 7): Result.002 file - promoters60/1035665
catctta

SEQ ID NO: 105597 - DNA, 7 bp, Unknown
  misc_feature (1)..( 7): Result.002 file - promoters60/1035665
catgtta

SEQ ID NO: 105598 - DNA, 7 bp, Unknown
  misc_feature (1)..( 7): Result.002 file - promoters60/1035665
tgcattt

SEQ ID NO: 105599 - DNA, 7 bp, Unknown
  misc_feature (1)..( 7): Result.002 file - promoters60/1035665
tgcgttt

SEQ ID NO: 105600 - DNA, 6 bp, Unknown
  misc_feature (1)..( 6): Result.002 file - promoters60/1035665
ttaaaa

SEQ ID NO: 105601 - DNA, 6 bp, Unknown
  misc_feature (1)..( 6): Result.002 file - promoters60/1035665
ttaaaa

SEQ ID NO: 105602 - DNA, 7 bp, Unknown
  misc_feature (1)..( 7): Result.002 file - promoters60/1035665
aaaagta

SEQ ID NO: 105603 - DNA, 7 bp, Unknown
  misc_feature (1)..( 7): Result.002 file - promoters60/1035665
aaaagta

SEQ ID NO: 105604 - DNA, 9 bp, Unknown
  misc_feature (1)..( 9): Result.002 file - promoters60/1035665
atcagtttt

SEQ ID NO: 105605 - DNA, 9 bp, Unknown
  misc_feature (1)..( 9): Result.002 file - promoters60/1035665
atcattttt

SEQ ID NO: 105606 - DNA, 8 bp, Unknown
  misc_feature (1)..( 8): Result.002 file - promoters60/1035665
tgattttt

SEQ ID NO: 105607 - DNA, 8 bp, Unknown
  misc_feature (1)..( 8): Result.002 file - promoters60/1035665
tgaatttt

SEQ ID NO: 105608 - DNA, 6 bp, Unknown
  misc_feature (1)..( 6): Result.002 file - promoters60/1035665
tttgtt

SEQ ID NO: 105609 - DNA, 6 bp, Unknown
  misc_feature (1)..( 6): Result.002 file - promoters60/1035665
tttgtt

SEQ ID NO: 105610 - DNA, 8 bp, Unknown
  misc_feature (1)..( 8): Result.002 file - promoters60/1035665
gtttcata

SEQ ID NO: 105611 - DNA, 8 bp, Unknown
  misc_feature (1)..( 8): Result.002 file - promoters60/1035665
atttcatt

SEQ ID NO: 105612 - DNA, 8 bp, Unknown
  misc_feature (1)..( 8): Result.002 file - promoters60/1035665
atttgatt

SEQ ID NO: 105613 - DNA, 6 bp, Unknown
  misc_feature (1)..( 6): Result.002 file - promoters60/1035665
aaaaaa

SEQ ID NO: 105614 - DNA, 6 bp, Unknown
  misc_feature (1)..( 6): Result.002 file - promoters60/1035665
aaaaaa

SEQ ID NO: 105615 - DNA, 8 bp, Unknown
  misc_feature (1)..( 8): Result.002 file - promoters60/1035665
caaaaact

SEQ ID NO: 105616 - DNA, 8 bp, Unknown
  misc_feature (1)..( 8): Result.002 file - promoters60/1035665
caaaaact

SEQ ID NO: 105617 - DNA, 9 bp, Unknown
  misc_feature (1)..( 9): Result.002 file - promoters60/1035665
ttgggcctt

SEQ ID NO: 105618 - DNA, 9 bp, Unknown
  misc_feature (1)..( 9): Result.002 file - promoters60/1035665
atgggcctt

SEQ ID NO: 105619 - DNA, 9 bp, Unknown
  misc_feature (1)..( 9): Result.002 file - promoters60/1035665
ttgggcttt

SEQ ID NO: 105620 - DNA, 12 bp, Unknown
  misc_feature (1)..( 12): Result.002 file - promoters60/1035665
tttttttttttt

SEQ ID NO: 105621 - DNA, 12 bp, Unknown
  misc_feature (1)..( 12): Result.002 file - promoters60/1035665
ttttctttattt

SEQ ID NO: 105622 - DNA, 8 bp, Unknown
  misc_feature (1)..( 8): Result.002 file - promoters60/1035665
ttaattat

SEQ ID NO: 105623 - DNA, 8 bp, Unknown
  misc_feature (1)..( 8): Result.002 file - promoters60/1035665
ttaaatat

SEQ ID NO: 105624 - DNA, 6 bp, Unknown
  misc_feature (1)..( 6): Result.002 file - promoters60/1035665
tttaat

SEQ ID NO: 105625 - DNA, 6 bp, Unknown
  misc_feature (1)..( 6): Result.002 file - promoters60/1035665
tttaat

SEQ ID NO: 105626 - DNA, 6 bp, Unknown
  misc_feature (1)..( 6): Result.002 file - promoters60/1035665
ccaagt

SEQ ID NO: 105627 - DNA, 6 bp, Unknown
  misc_feature (1)..( 6): Result.002 file - promoters60/1035665
ccaagt

SEQ ID NO: 105628 - DNA, 11 bp, Unknown
  misc_feature (1)..( 11): Result.002 file - promoters60/1035665
taaattttgtt

SEQ ID NO: 105629 - DNA, 11 bp, Unknown
  misc_feature (1)..( 11): Result.002 file - promoters60/1035665
taaaatttgat

SEQ ID NO: 105630 - DNA, 11 bp, Unknown
  misc_feature (1)..( 11): Result.002 file - promoters60/1035665
ttgatttcatt

SEQ ID NO: 105631 - DNA, 7 bp, Unknown
  misc_feature (1)..( 7): Result.002 file - promoters60/1035665
aaatagt

SEQ ID NO: 105632 - DNA, 7 bp, Unknown
  misc_feature (1)..( 7): Result.002 file - promoters60/1035665
aaaaagt

SEQ ID NO: 105633 - DNA, 6 bp, Unknown
  misc_feature (1)..( 6): Result.002 file - promoters60/1035665
caaaaa

SEQ ID NO: 105634 - DNA, 6 bp, Unknown
  misc_feature (1)..( 6): Result.002 file - promoters60/1035665
caaaaa

SEQ ID NO: 105635 - DNA, 6 bp, Unknown
  misc_feature (1)..( 6): Result.002 file - promoters60/1035665
ttgtgt

SEQ ID NO: 105636 - DNA, 6 bp, Unknown
  misc_feature (1)..( 6): Result.002 file - promoters60/1035665
ttgtgt

SEQ ID NO: 105637 - DNA, 11 bp, Unknown
  misc_feature (1)..( 11): Result.002 file - promoters60/1035665
gtttgacatat

SEQ ID NO: 105638 - DNA, 11 bp, Unknown
  misc_feature (1)..( 11): Result.002 file - promoters60/1035665
gtttgacatat

SEQ ID NO: 105639 - DNA, 7 bp, Unknown
  misc_feature (1)..( 7): Result.002 file - promoters60/1035665
ttatttc

SEQ ID NO: 105640 - DNA, 7 bp, Unknown
  misc_feature (1)..( 7): Result.002 file - promoters60/1035665
ttacttc

SEQ ID NO: 105641 - DNA, 6 bp, Unknown
  misc_feature (1)..( 6): Result.002 file - promoters60/1035665
tttgat

SEQ ID NO: 105642 - DNA, 6 bp, Unknown
  misc_feature (1)..( 6): Result.002 file - promoters60/1035665
tttgat

SEQ ID NO: 105643 - DNA, 12 bp, Unknown
  misc_feature (1)..( 12): Result.002 file - promoters60/1375217
attacaaaacta

SEQ ID NO: 105644 - DNA, 12 bp, Unknown
  misc_feature (1)..( 12): Result.002 file - promoters60/1375217
tatacaaaaaaa

SEQ ID NO: 105645 - DNA, 12 bp, Unknown
  misc_feature (1)..( 12): Result.002 file - promoters60/1375217
ttgacaaataaa

SEQ ID NO: 105646 - DNA, 12 bp, Unknown
  misc_feature (1)..( 12): Result.002 file - promoters60/1375217
tatacaagaaca

SEQ ID NO: 105647 - DNA, 10 bp, Unknown
  misc_feature (1)..( 10): Result.002 file - promoters60/1375217
tgaaaaaacg

SEQ ID NO: 105648 - DNA, 12 bp, Unknown
  misc_feature (1)..( 12): Result.002 file - promoters60/1375217
agttcaaataat

SEQ ID NO: 105649 - DNA, 10 bp, Unknown
  misc_feature (1)..( 10): Result.002 file - promoters60/1375217
aaaatattaa

SEQ ID NO: 105650 - DNA, 10 bp, Unknown
  misc_feature (1)..( 10): Result.002 file - promoters60/1375217
taaaaattaa

SEQ ID NO: 105651 - DNA, 10 bp, Unknown
  misc_feature (1)..( 10): Result.002 file - promoters60/1375217
caaagattta

SEQ ID NO: 105652 - DNA, 10 bp, Unknown
  misc_feature (1)..( 10): Result.002 file - promoters60/1375217
gtaaaatttc

SEQ ID NO: 105653 - DNA, 10 bp, Unknown
  misc_feature (1)..( 10): Result.002 file - promoters60/1375217
taacaattct

SEQ ID NO: 105654 - DNA, 10 bp, Unknown
  misc_feature (1)..( 10): Result.002 file - promoters60/1375217
ccaaaattca

SEQ ID NO: 105655 - DNA, 9 bp, Unknown
  misc_feature (1)..( 9): Result.002 file - promoters60/1375217
aaaaataaa

SEQ ID NO: 105656 - DNA, 9 bp, Unknown
  misc_feature (1)..( 9): Result.002 file - promoters60/1375217
aaaattaat

SEQ ID NO: 105657 - DNA, 10 bp, Unknown
  misc_feature (1)..( 10): Result.002 file - promoters60/1375217
ataaaataca

SEQ ID NO: 105658 - DNA, 9 bp, Unknown
  misc_feature (1)..( 9): Result.002 file - promoters60/1375217
aaaaattta

SEQ ID NO: 105659 - DNA, 10 bp, Unknown
  misc_feature (1)..( 10): Result.002 file - promoters60/1375217
aatgaatatt

SEQ ID NO: 105660 - DNA, 10 bp, Unknown
  misc_feature (1)..( 10): Result.002 file - promoters60/1375217
agataatatt

SEQ ID NO: 105661 - DNA, 10 bp, Unknown
  misc_feature (1)..( 10): Result.002 file - promoters60/1375217
caatattatt

SEQ ID NO: 105662 - DNA, 9 bp, Unknown
  misc_feature (1)..( 9): Result.002 file - promoters60/1375217
aataaaagc

SEQ ID NO: 105663 - DNA, 9 bp, Unknown
  misc_feature (1)..( 9): Result.002 file - promoters60/1375217
aataaaatt

SEQ ID NO: 105664 - DNA, 9 bp, Unknown
  misc_feature (1)..( 9): Result.002 file - promoters60/1375217
tataaaata

SEQ ID NO: 105665 - DNA, 9 bp, Unknown
  misc_feature (1)..( 9): Result.002 file - promoters60/1375217
gataatatt

SEQ ID NO: 105666 - DNA, 9 bp, Unknown
  misc_feature (1)..( 9): Result.002 file - promoters60/1375217
aatattatt

SEQ ID NO: 105667 - DNA, 10 bp, Unknown
  misc_feature (1)..( 10): Result.002 file - promoters60/1375217
tttacaaact

SEQ ID NO: 105668 - DNA, 10 bp, Unknown
  misc_feature (1)..( 10): Result.002 file - promoters60/1375217
aatgaatatt

SEQ ID NO: 105669 - DNA, 10 bp, Unknown
  misc_feature (1)..( 10): Result.002 file - promoters60/1375217
aatacaaata

SEQ ID NO: 105670 - DNA, 9 bp, Unknown
  misc_feature (1)..( 9): Result.002 file - promoters60/1375217
aaaacaaac

SEQ ID NO: 105671 - DNA, 9 bp, Unknown
  misc_feature (1)..( 9): Result.002 file - promoters60/1375217
taaataaat

SEQ ID NO: 105672 - DNA, 9 bp, Unknown
  misc_feature (1)..( 9): Result.002 file - promoters60/1375217
caaacaaat

SEQ ID NO: 105673 - DNA, 9 bp, Unknown
  misc_feature (1)..( 9): Result.002 file - promoters60/1375217
taaaaaaag

SEQ ID NO: 105674 - DNA, 9 bp, Unknown
  misc_feature (1)..( 9): Result.002 file - promoters60/1375217
aaaacaatt

SEQ ID NO: 105675 - DNA, 9 bp, Unknown
  misc_feature (1)..( 9): Result.002 file - promoters60/1375217
gaaacaaat

SEQ ID NO: 105676 - DNA, 9 bp, Unknown
  misc_feature (1)..( 9): Result.002 file - promoters60/1375217
gtcataaat

SEQ ID NO: 105677 - DNA, 10 bp, Unknown
  misc_feature (1)..( 10): Result.002 file - promoters60/1375217
atattattag

SEQ ID NO: 105678 - DNA, 10 bp, Unknown
  misc_feature (1)..( 10): Result.002 file - promoters60/1375217
atattattag

SEQ ID NO: 105679 - DNA, 10 bp, Unknown
  misc_feature (1)..( 10): Result.002 file - promoters60/1375217
ttattatatt

SEQ ID NO: 105680 - DNA, 10 bp, Unknown
  misc_feature (1)..( 10): Result.002 file - promoters60/1375217
atataattat

SEQ ID NO: 105681 - DNA, 10 bp, Unknown
  misc_feature (1)..( 10): Result.002 file - promoters60/1375217
aaattattta

SEQ ID NO: 105682 - DNA, 10 bp, Unknown
  misc_feature (1)..( 10): Result.002 file - promoters60/1375217
atacaatgaa

SEQ ID NO: 105683 - DNA, 10 bp, Unknown
  misc_feature (1)..( 10): Result.002 file - promoters60/1375217
tgtttgttta

SEQ ID NO: 105684 - DNA, 10 bp, Unknown
  misc_feature (1)..( 10): Result.002 file - promoters60/1375217
tttttatttc

SEQ ID NO: 105685 - DNA, 10 bp, Unknown
  misc_feature (1)..( 10): Result.002 file - promoters60/1375217
cttttgtttc

SEQ ID NO: 105686 - DNA, 10 bp, Unknown
  misc_feature (1)..( 10): Result.002 file - promoters60/1375217
actttttttg

SEQ ID NO: 105687 - DNA, 10 bp, Unknown
  misc_feature (1)..( 10): Result.002 file - promoters60/1375217
tgtttttttc

SEQ ID NO: 105688 - DNA, 10 bp, Unknown
  misc_feature (1)..( 10): Result.002 file - promoters60/1375217
catttttttc

SEQ ID NO: 105689 - DNA, 10 bp, Unknown
  misc_feature (1)..( 10): Result.002 file - promoters60/1375217
aaattatttt

SEQ ID NO: 105690 - DNA, 9 bp, Unknown
  misc_feature (1)..( 9): Result.002 file - promoters60/1375217
attaaaatc

SEQ ID NO: 105691 - DNA, 9 bp, Unknown
  misc_feature (1)..( 9): Result.002 file - promoters60/1375217
gttaaaaat

SEQ ID NO: 105692 - DNA, 9 bp, Unknown
  misc_feature (1)..( 9): Result.002 file - promoters60/1375217
aataaaaaa

SEQ ID NO: 105693 - DNA, 9 bp, Unknown
  misc_feature (1)..( 9): Result.002 file - promoters60/1375217
tctaaaaaa

SEQ ID NO: 105694 - DNA, 9 bp, Unknown
  misc_feature (1)..( 9): Result.002 file - promoters60/1375217
cagaaaaaa

SEQ ID NO: 105695 - DNA, 10 bp, Unknown
  misc_feature (1)..( 10): Result.002 file - promoters60/1375217
ttcaaagaaa

SEQ ID NO: 105696 - DNA, 13 bp, Unknown
  misc_feature (1)..( 13): Result.002 file - promoters60/1375217
tccattatatata

SEQ ID NO: 105697 - DNA, 13 bp, Unknown
  misc_feature (1)..( 13): Result.002 file - promoters60/1375217
acgcctatatata

SEQ ID NO: 105698 - DNA, 13 bp, Unknown
  misc_feature (1)..( 13): Result.002 file - promoters60/1375217
tcttgtatatata

SEQ ID NO: 105699 - DNA, 13 bp, Unknown
  misc_feature (1)..( 13): Result.002 file - promoters60/1375217
tcctttatatata

SEQ ID NO: 105700 - DNA, 13 bp, Unknown
  misc_feature (1)..( 13): Result.002 file - promoters60/1375217
tcctttttagttc

SEQ ID NO: 105701 - DNA, 13 bp, Unknown
  misc_feature (1)..( 13): Result.002 file - promoters60/1375217
cacattatataaa

SEQ ID NO: 105702 - DNA, 12 bp, Unknown
  misc_feature (1)..( 12): Result.002 file - promoters60/1375217
aatgaaaaacaa

SEQ ID NO: 105703 - DNA, 12 bp, Unknown
  misc_feature (1)..( 12): Result.002 file - promoters60/1375217
gaagaaaaaata

SEQ ID NO: 105704 - DNA, 12 bp, Unknown
  misc_feature (1)..( 12): Result.002 file - promoters60/1375217
agttaaaaaata

SEQ ID NO: 105705 - DNA, 12 bp, Unknown
  misc_feature (1)..( 12): Result.002 file - promoters60/1375217
atttacaaacaa

SEQ ID NO: 105706 - DNA, 12 bp, Unknown
  misc_feature (1)..( 12): Result.002 file - promoters60/1375217
ttcaaaacaatt

SEQ ID NO: 105707 - DNA, 12 bp, Unknown
  misc_feature (1)..( 12): Result.002 file - promoters60/1375217
ctttacaaccat

SEQ ID NO: 105708 - DNA, 12 bp, Unknown
  misc_feature (1)..( 12): Result.002 file - promoters60/1375217
atttacatacac

SEQ ID NO: 105709 - DNA, 9 bp, Unknown
  misc_feature (1)..( 9): Result.002 file - promoters60/1375217
ttaatattt

SEQ ID NO: 105710 - DNA, 9 bp, Unknown
  misc_feature (1)..( 9): Result.002 file - promoters60/1375217
tcaatatta

SEQ ID NO: 105711 - DNA, 9 bp, Unknown
  misc_feature (1)..( 9): Result.002 file - promoters60/1375217
ataatattt

SEQ ID NO: 105712 - DNA, 9 bp, Unknown
  misc_feature (1)..( 9): Result.002 file - promoters60/1375217
ccaacattc

SEQ ID NO: 105713 - DNA, 9 bp, Unknown
  misc_feature (1)..( 9): Result.002 file - promoters60/1375217
tgaatattt

SEQ ID NO: 105714 - DNA, 9 bp, Unknown
  misc_feature (1)..( 9): Result.002 file - promoters60/1375217
tatatattt

SEQ ID NO: 105715 - DNA, 8 bp, Unknown
  misc_feature (1)..( 8): Result.002 file - promoters60/1375217
aaattttt

SEQ ID NO: 105716 - DNA, 8 bp, Unknown
  misc_feature (1)..( 8): Result.002 file - promoters60/1375217
taatcttt

SEQ ID NO: 105717 - DNA, 8 bp, Unknown
  misc_feature (1)..( 8): Result.002 file - promoters60/1375217
taagtttc

SEQ ID NO: 105718 - DNA, 8 bp, Unknown
  misc_feature (1)..( 8): Result.002 file - promoters60/1375217
gaaattta

SEQ ID NO: 105719 - DNA, 8 bp, Unknown
  misc_feature (1)..( 8): Result.002 file - promoters60/1375217
aaatgttt

SEQ ID NO: 105720 - DNA, 8 bp, Unknown
  misc_feature (1)..( 8): Result.002 file - promoters60/1375217
ggatcttt

SEQ ID NO: 105721 - DNA, 10 bp, Unknown
  misc_feature (1)..( 10): Result.002 file - promoters60/1375217
agttaaaaaa

SEQ ID NO: 105722 - DNA, 10 bp, Unknown
  misc_feature (1)..( 10): Result.002 file - promoters60/1375217
cgttaaagtt

SEQ ID NO: 105723 - DNA, 11 bp, Unknown
  misc_feature (1)..( 11): Result.002 file - promoters60/1375217
atttacaaaca

SEQ ID NO: 105724 - DNA, 11 bp, Unknown
  misc_feature (1)..( 11): Result.002 file - promoters60/1375217
agttaaaaagt

SEQ ID NO: 105725 - DNA, 11 bp, Unknown
  misc_feature (1)..( 11): Result.002 file - promoters60/1375217
ctttacaacca

SEQ ID NO: 105726 - DNA, 11 bp, Unknown
  misc_feature (1)..( 11): Result.002 file - promoters60/1375217
atttacataca

SEQ ID NO: 105727 - DNA, 12 bp, Unknown
  misc_feature (1)..( 12): Result.002 file - promoters60/1375252
gtatatatataa

SEQ ID NO: 105728 - DNA, 12 bp, Unknown
  misc_feature (1)..( 12): Result.002 file - promoters60/1375252
atatttatatag

SEQ ID NO: 105729 - DNA, 12 bp, Unknown
  misc_feature (1)..( 12): Result.002 file - promoters60/1375252
caataaaaagca

SEQ ID NO: 105730 - DNA, 12 bp, Unknown
  misc_feature (1)..( 12): Result.002 file - promoters60/1375252
atatataaacaa

SEQ ID NO: 105731 - DNA, 12 bp, Unknown
  misc_feature (1)..( 12): Result.002 file - promoters60/1375252
acagttaaatag

SEQ ID NO: 105732 - DNA, 12 bp, Unknown
  misc_feature (1)..( 12): Result.002 file - promoters60/1375252
atatttgtatca

SEQ ID NO: 105733 - DNA, 12 bp, Unknown
  misc_feature (1)..( 12): Result.002 file - promoters60/1375252
tctgttaaaatc

SEQ ID NO: 105734 - DNA, 12 bp, Unknown
  misc_feature (1)..( 12): Result.002 file - promoters60/1375252
gactttaaattg

SEQ ID NO: 105735 - DNA, 14 bp, Unknown
  misc_feature (1)..( 14): Result.002 file - promoters60/1375252
gtggcttgttttct

SEQ ID NO: 105736 - DNA, 14 bp, Unknown
  misc_feature (1)..( 14): Result.002 file - promoters60/1375252
cttacttgtttaaa

SEQ ID NO: 105737 - DNA, 14 bp, Unknown
  misc_feature (1)..( 14): Result.002 file - promoters60/1375252
gtggcatgtttgat

SEQ ID NO: 105738 - DNA, 14 bp, Unknown
  misc_feature (1)..( 14): Result.002 file - promoters60/1375252
tgaagctgtctaag

SEQ ID NO: 105739 - DNA, 14 bp, Unknown
  misc_feature (1)..( 14): Result.002 file - promoters60/1375252
ccaccatttttcta

SEQ ID NO: 105740 - DNA, 14 bp, Unknown
  misc_feature (1)..( 14): Result.002 file - promoters60/1375252
atgcaatttatcta

SEQ ID NO: 105741 - DNA, 7 bp, Unknown
  misc_feature (1)..( 7): Result.002 file - promoters60/1375266
gaaacgt

SEQ ID NO: 105742 - DNA, 7 bp, Unknown
  misc_feature (1)..( 7): Result.002 file - promoters60/1375266
gaatcgt

SEQ ID NO: 105743 - DNA, 6 bp, Unknown
  misc_feature (1)..( 6): Result.002 file - promoters60/1375266
tctctc

SEQ ID NO: 105744 - DNA, 6 bp, Unknown
  misc_feature (1)..( 6): Result.002 file - promoters60/1375266
tctctc

SEQ ID NO: 105745 - DNA, 8 bp, Unknown
  misc_feature (1)..( 8): Result.002 file - promoters60/1375266
ccgataac

SEQ ID NO: 105746 - DNA, 8 bp, Unknown
  misc_feature (1)..( 8): Result.002 file - promoters60/1375266
ccgttaac

SEQ ID NO: 105747 - DNA, 6 bp, Unknown
  misc_feature (1)..( 6): Result.002 file - promoters60/1375266
ttgaag

SEQ ID NO: 105748 - DNA, 6 bp, Unknown
  misc_feature (1)..( 6): Result.002 file - promoters60/1375266
ttgaag

SEQ ID NO: 105749 - DNA, 7 bp, Unknown
  misc_feature (1)..( 7): Result.002 file - promoters60/1375266
aaaaaaa

SEQ ID NO: 105750 - DNA, 7 bp, Unknown
  misc_feature (1)..( 7): Result.002 file - promoters60/1375266
aaacaaa

SEQ ID NO: 105751 - DNA, 7 bp, Unknown
  misc_feature (1)..( 7): Result.002 file - promoters60/1375266
acaaaat

SEQ ID NO: 105752 - DNA, 7 bp, Unknown
  misc_feature (1)..( 7): Result.002 file - promoters60/1375266
acataat

SEQ ID NO: 105753 - DNA, 8 bp, Unknown
  misc_feature (1)..( 8): Result.002 file - promoters60/1375266
ataaaaaa

SEQ ID NO: 105754 - DNA, 8 bp, Unknown
  misc_feature (1)..( 8): Result.002 file - promoters60/1375266
ataaaaaa

SEQ ID NO: 105755 - DNA, 9 bp, Unknown
  misc_feature (1)..( 9): Result.002 file - promoters60/1375266
taaataaaa

SEQ ID NO: 105756 - DNA, 9 bp, Unknown
  misc_feature (1)..( 9): Result.002 file - promoters60/1375266
taagtaaaa

SEQ ID NO: 105757 - DNA, 7 bp, Unknown
  misc_feature (1)..( 7): Result.002 file - promoters60/1375266
atgttga

SEQ ID NO: 105758 - DNA, 7 bp, Unknown
  misc_feature (1)..( 7): Result.002 file - promoters60/1375266
atgatga

SEQ ID NO: 105759 - DNA, 8 bp, Unknown
  misc_feature (1)..( 8): Result.002 file - promoters60/1375266
attgtttt

SEQ ID NO: 105760 - DNA, 8 bp, Unknown
  misc_feature (1)..( 8): Result.002 file - promoters60/1375266
attttttt

SEQ ID NO: 105761 - DNA, 8 bp, Unknown
  misc_feature (1)..( 8): Result.002 file - promoters60/1375266
tgattatt

SEQ ID NO: 105762 - DNA, 8 bp, Unknown
  misc_feature (1)..( 8): Result.002 file - promoters60/1375266
tgagtatt

SEQ ID NO: 105763 - DNA, 8 bp, Unknown
  misc_feature (1)..( 8): Result.002 file - promoters60/1375266
aagatgat

SEQ ID NO: 105764 - DNA, 8 bp, Unknown
  misc_feature (1)..( 8): Result.002 file - promoters60/1375266
aagaggat

SEQ ID NO: 105765 - DNA, 10 bp, Unknown
  misc_feature (1)..( 10): Result.002 file - promoters60/1375266
tttatttata

SEQ ID NO: 105766 - DNA, 10 bp, Unknown
  misc_feature (1)..( 10): Result.002 file - promoters60/1375266
tttttttata

SEQ ID NO: 105767 - DNA, 7 bp, Unknown
  misc_feature (1)..( 7): Result.002 file - promoters60/1375266
tcttaaa

SEQ ID NO: 105768 - DNA, 7 bp, Unknown
  misc_feature (1)..( 7): Result.002 file - promoters60/1375266
tctaaaa

SEQ ID NO: 105769 - DNA, 6 bp, Unknown
  misc_feature (1)..( 6): Result.002 file - promoters60/1375329
aaaaca

SEQ ID NO: 105770 - DNA, 6 bp, Unknown
  misc_feature (1)..( 6): Result.002 file - promoters60/1375329
aaaaca

SEQ ID NO: 105771 - DNA, 7 bp, Unknown
  misc_feature (1)..( 7): Result.002 file - promoters60/1375329
atcatga

SEQ ID NO: 105772 - DNA, 7 bp, Unknown
  misc_feature (1)..( 7): Result.002 file - promoters60/1375329
atcttga

SEQ ID NO: 105773 - DNA, 6 bp, Unknown
  misc_feature (1)..( 6): Result.002 file - promoters60/1375329
gtttta

SEQ ID NO: 105774 - DNA, 6 bp, Unknown
  misc_feature (1)..( 6): Result.002 file - promoters60/1375329
gtttta

SEQ ID NO: 105775 - DNA, 7 bp, Unknown
  misc_feature (1)..( 7): Result.002 file - promoters60/1375329
tttatgt

SEQ ID NO: 105776 - DNA, 7 bp, Unknown
  misc_feature (1)..( 7): Result.002 file - promoters60/1375329
tttatgt

SEQ ID NO: 105777 - DNA, 7 bp, Unknown
  misc_feature (1)..( 7): Result.002 file - promoters60/1375329
ttaaaac

SEQ ID NO: 105778 - DNA, 7 bp, Unknown
  misc_feature (1)..( 7): Result.002 file - promoters60/1375329
ttataac

SEQ ID NO: 105779 - DNA, 8 bp, Unknown
  misc_feature (1)..( 8): Result.002 file - promoters60/1375329
tctgtttg

SEQ ID NO: 105780 - DNA, 8 bp, Unknown
  misc_feature (1)..( 8): Result.002 file - promoters60/1375329
tctgtttg

SEQ ID NO: 105781 - DNA, 8 bp, Unknown
  misc_feature (1)..( 8): Result.002 file - promoters60/1375329
aaaaacat

SEQ ID NO: 105782 - DNA, 8 bp, Unknown
  misc_feature (1)..( 8): Result.002 file - promoters60/1375329
aaaaacat

SEQ ID NO: 105783 - DNA, 7 bp, Unknown
  misc_feature (1)..( 7): Result.002 file - promoters60/1375329
aaccaat

SEQ ID NO: 105784 - DNA, 7 bp, Unknown
  misc_feature (1)..( 7): Result.002 file - promoters60/1375329
aaccaat

SEQ ID NO: 105785 - DNA, 6 bp, Unknown
  misc_feature (1)..( 6): Result.002 file - promoters60/1375329
cctata

SEQ ID NO: 105786 - DNA, 6 bp, Unknown
  misc_feature (1)..( 6): Result.002 file - promoters60/1375329
cctata

SEQ ID NO: 105787 - DNA, 15 bp, Unknown
  misc_feature (1)..( 15): Result.002 file - promoters60/1375329
aaggcaggctgtcac

SEQ ID NO: 105788 - DNA, 15 bp, Unknown
  misc_feature (1)..( 15): Result.002 file - promoters60/1375329
aaggcaggctgtcac

SEQ ID NO: 105789 - DNA, 27 bp, Unknown
  misc_feature (1)..( 27): Result.002 file - promoters60/1375329
tggcggaccccaacaaattatcaaatc

SEQ ID NO: 105790 - DNA, 27 bp, Unknown
  misc_feature (1)..( 27): Result.002 file - promoters60/1375329
tggcggaccccaaccaattatcaaatc

SEQ ID NO: 105791 - DNA, 8 bp, Unknown
  misc_feature (1)..( 8): Result.002 file - promoters60/1375329
aataaatt

SEQ ID NO: 105792 - DNA, 8 bp, Unknown
  misc_feature (1)..( 8): Result.002 file - promoters60/1375329
aatcaatt

SEQ ID NO: 105793 - DNA, 10 bp, Unknown
  misc_feature (1)..( 10): Result.002 file - promoters60/1375329
aaaccaatcc

SEQ ID NO: 105794 - DNA, 10 bp, Unknown
  misc_feature (1)..( 10): Result.002 file - promoters60/1375329
aaaccgatcc

SEQ ID NO: 105795 - DNA, 10 bp, Unknown
  misc_feature (1)..( 10): Result.002 file - promoters60/1375329
ataacaataa

SEQ ID NO: 105796 - DNA, 10 bp, Unknown
  misc_feature (1)..( 10): Result.002 file - promoters60/1375329
ataagaataa

SEQ ID NO: 105797 - DNA, 7 bp, Unknown
  misc_feature (1)..( 7): Result.002 file - promoters60/1375329
taagtaa

SEQ ID NO: 105798 - DNA, 7 bp, Unknown
  misc_feature (1)..( 7): Result.002 file - promoters60/1375329
taaataa

SEQ ID NO: 105799 - DNA, 8 bp, Unknown
  misc_feature (1)..( 8): Result.002 file - promoters60/1375329
acaacctt

SEQ ID NO: 105800 - DNA, 8 bp, Unknown
  misc_feature (1)..( 8): Result.002 file - promoters60/1375329
acaagctt

SEQ ID NO: 105801 - DNA, 6 bp, Unknown
  misc_feature (1)..( 6): Result.002 file - promoters60/1375329
cttaca

SEQ ID NO: 105802 - DNA, 6 bp, Unknown
  misc_feature (1)..( 6): Result.002 file - promoters60/1375329
cttaca

SEQ ID NO: 105803 - DNA, 7 bp, Unknown
  misc_feature (1)..( 7): Result.002 file - promoters60/1375329
ttctttt

SEQ ID NO: 105804 - DNA, 7 bp, Unknown
  misc_feature (1)..( 7): Result.002 file - promoters60/1375329
ttccttt

SEQ ID NO: 105805 - DNA, 8 bp, Unknown
  misc_feature (1)..( 8): Result.002 file - promoters60/1375456
gcttcgtt

SEQ ID NO: 105806 - DNA, 8 bp, Unknown
  misc_feature (1)..( 8): Result.002 file - promoters60/1375456
gcttcgtt

SEQ ID NO: 105807 - DNA, 7 bp, Unknown
  misc_feature (1)..( 7): Result.002 file - promoters60/1375456
aaaagca

SEQ ID NO: 105808 - DNA, 7 bp, Unknown
  misc_feature (1)..( 7): Result.002 file - promoters60/1375456
aaaagca

SEQ ID NO: 105809 - DNA, 9 bp, Unknown
  misc_feature (1)..( 9): Result.002 file - promoters60/1375456
ttggaacaa

SEQ ID NO: 105810 - DNA, 9 bp, Unknown
  misc_feature (1)..( 9): Result.002 file - promoters60/1375456
ttggaaaag

SEQ ID NO: 105811 - DNA, 9 bp, Unknown
  misc_feature (1)..( 9): Result.002 file - promoters60/1375456
ttgaaacaa

SEQ ID NO: 105812 - DNA, 9 bp, Unknown
  misc_feature (1)..( 9): Result.002 file - promoters60/1375456
agaaagaag

SEQ ID NO: 105813 - DNA, 9 bp, Unknown
  misc_feature (1)..( 9): Result.002 file - promoters60/1375456
agaaagctt

SEQ ID NO: 105814 - DNA, 9 bp, Unknown
  misc_feature (1)..( 9): Result.002 file - promoters60/1375456
tgaaacaaa

SEQ ID NO: 105815 - DNA, 9 bp, Unknown
  misc_feature (1)..( 9): Result.002 file - promoters60/1375456
agaaagaag

SEQ ID NO: 105816 - DNA, 9 bp, Unknown
  misc_feature (1)..( 9): Result.002 file - promoters60/1375456
gaaaagaaa

SEQ ID NO: 105817 - DNA, 10 bp, Unknown
  misc_feature (1)..( 10): Result.002 file - promoters60/1375456
ggaaatgaaa

SEQ ID NO: 105818 - DNA, 6 bp, Unknown
  misc_feature (1)..( 6): Result.002 file - promoters60/1375456
gaagaa

SEQ ID NO: 105819 - DNA, 6 bp, Unknown
  misc_feature (1)..( 6): Result.002 file - promoters60/1375456
gaagaa

SEQ ID NO: 105820 - DNA, 6 bp, Unknown
  misc_feature (1)..( 6): Result.002 file - promoters60/1375456
ttctct

SEQ ID NO: 105821 - DNA, 6 bp, Unknown
  misc_feature (1)..( 6): Result.002 file - promoters60/1375456
ttctct

SEQ ID NO: 105822 - DNA, 11 bp, Unknown
  misc_feature (1)..( 11): Result.002 file - promoters60/1375456
gaagtatagaa

SEQ ID NO: 105823 - DNA, 11 bp, Unknown
  misc_feature (1)..( 11): Result.002 file - promoters60/1375456
gaaatatctta

SEQ ID NO: 105824 - DNA, 11 bp, Unknown
  misc_feature (1)..( 11): Result.002 file - promoters60/1375456
aaaataaaata

SEQ ID NO: 105825 - DNA, 6 bp, Unknown
  misc_feature (1)..( 6): Result.002 file - promoters60/1375456
agtaaa

SEQ ID NO: 105826 - DNA, 6 bp, Unknown
  misc_feature (1)..( 6): Result.002 file - promoters60/1375456
agtaaa

SEQ ID NO: 105827 - DNA, 7 bp, Unknown
  misc_feature (1)..( 7): Result.002 file - promoters60/1375456
aatcggg

SEQ ID NO: 105828 - DNA, 7 bp, Unknown
  misc_feature (1)..( 7): Result.002 file - promoters60/1375456
aattggg

SEQ ID NO: 105829 - DNA, 7 bp, Unknown
  misc_feature (1)..( 7): Result.002 file - promoters60/1375456
cccacta

SEQ ID NO: 105830 - DNA, 7 bp, Unknown
  misc_feature (1)..( 7): Result.002 file - promoters60/1375456
cccacta

SEQ ID NO: 105831 - DNA, 9 bp, Unknown
  misc_feature (1)..( 9): Result.002 file - promoters60/1375456
aaagaaaag

SEQ ID NO: 105832 - DNA, 9 bp, Unknown
  misc_feature (1)..( 9): Result.002 file - promoters60/1375456
aaagtaaag

SEQ ID NO: 105833 - DNA, 7 bp, Unknown
  misc_feature (1)..( 7): Result.002 file - promoters60/1375456
gtatata

SEQ ID NO: 105834 - DNA, 7 bp, Unknown
  misc_feature (1)..( 7): Result.002 file - promoters60/1375456
gtatata

SEQ ID NO: 105835 - DNA, 8 bp, Unknown
  misc_feature (1)..( 8): Result.002 file - promoters60/1375471
tataattt

SEQ ID NO: 105836 - DNA, 8 bp, Unknown
  misc_feature (1)..( 8): Result.002 file - promoters60/1375471
gataattc

SEQ ID NO: 105837 - DNA, 8 bp, Unknown
  misc_feature (1)..( 8): Result.002 file - promoters60/1375471
tttaattc

SEQ ID NO: 105838 - DNA, 8 bp, Unknown
  misc_feature (1)..( 8): Result.002 file - promoters60/1375471
tttgatta

SEQ ID NO: 105839 - DNA, 8 bp, Unknown
  misc_feature (1)..( 8): Result.002 file - promoters60/1375471
attaattg

SEQ ID NO: 105840 - DNA, 9 bp, Unknown
  misc_feature (1)..( 9): Result.002 file - promoters60/1375471
gaatttaat

SEQ ID NO: 105841 - DNA, 9 bp, Unknown
  misc_feature (1)..( 9): Result.002 file - promoters60/1375471
gaattttac

SEQ ID NO: 105842 - DNA, 9 bp, Unknown
  misc_feature (1)..( 9): Result.002 file - promoters60/1375471
taatctaac

SEQ ID NO: 105843 - DNA, 9 bp, Unknown
  misc_feature (1)..( 9): Result.002 file - promoters60/1375471
aattctaac

SEQ ID NO: 105844 - DNA, 9 bp, Unknown
  misc_feature (1)..( 9): Result.002 file - promoters60/1375471
ttttctaaa

SEQ ID NO: 105845 - DNA, 11 bp, Unknown
  misc_feature (1)..( 11): Result.002 file - promoters60/1375471
aagaaataaat

SEQ ID NO: 105846 - DNA, 11 bp, Unknown
  misc_feature (1)..( 11): Result.002 file - promoters60/1375471
acaaaataaaa

SEQ ID NO: 105847 - DNA, 11 bp, Unknown
  misc_feature (1)..( 11): Result.002 file - promoters60/1375471
aagaaaaaaat

SEQ ID NO: 105848 - DNA, 11 bp, Unknown
  misc_feature (1)..( 11): Result.002 file - promoters60/1375471
ctaaaataata

SEQ ID NO: 105849 - DNA, 11 bp, Unknown
  misc_feature (1)..( 11): Result.002 file - promoters60/1375471
acagaataaaa

SEQ ID NO: 105850 - DNA, 11 bp, Unknown
  misc_feature (1)..( 11): Result.002 file - promoters60/1375471
acaaaatctcc

SEQ ID NO: 105851 - DNA, 13 bp, Unknown
  misc_feature (1)..( 13): Result.002 file - promoters60/1375471
tgataaaatttca

SEQ ID NO: 105852 - DNA, 13 bp, Unknown
  misc_feature (1)..( 13): Result.002 file - promoters60/1375471
aaatacaatctcc

SEQ ID NO: 105853 - DNA, 13 bp, Unknown
  misc_feature (1)..( 13): Result.002 file - promoters60/1375471
tgatcaaatccga

SEQ ID NO: 105854 - DNA, 13 bp, Unknown
  misc_feature (1)..( 13): Result.002 file - promoters60/1375471
ttataatattagt

SEQ ID NO: 105855 - DNA, 13 bp, Unknown
  misc_feature (1)..( 13): Result.002 file - promoters60/1375471
tcacaaaatttta

SEQ ID NO: 105856 - DNA, 10 bp, Unknown
  misc_feature (1)..( 10): Result.002 file - promoters60/1375471
caaacttatc

SEQ ID NO: 105857 - DNA, 10 bp, Unknown
  misc_feature (1)..( 10): Result.002 file - promoters60/1375471
caaaattata

SEQ ID NO: 105858 - DNA, 10 bp, Unknown
  misc_feature (1)..( 10): Result.002 file - promoters60/1375471
caatatttgt

SEQ ID NO: 105859 - DNA, 10 bp, Unknown
  misc_feature (1)..( 10): Result.002 file - promoters60/1375471
tgatattata

SEQ ID NO: 105860 - DNA, 10 bp, Unknown
  misc_feature (1)..( 10): Result.002 file - promoters60/1375471
caatatgtgc

SEQ ID NO: 105861 - DNA, 8 bp, Unknown
  misc_feature (1)..( 8): Result.002 file - promoters60/1375474
taatttca

SEQ ID NO: 105862 - DNA, 8 bp, Unknown
  misc_feature (1)..( 8): Result.002 file - promoters60/1375474
taatgtca

SEQ ID NO: 105863 - DNA, 7 bp, Unknown
  misc_feature (1)..( 7): Result.002 file - promoters60/1375474
atgccat

SEQ ID NO: 105864 - DNA, 7 bp, Unknown
  misc_feature (1)..( 7): Result.002 file - promoters60/1375474
atgccat

SEQ ID NO: 105865 - DNA, 6 bp, Unknown
  misc_feature (1)..( 6): Result.002 file - promoters60/1375474
attagt

SEQ ID NO: 105866 - DNA, 6 bp, Unknown
  misc_feature (1)..( 6): Result.002 file - promoters60/1375474
attagt

SEQ ID NO: 105867 - DNA, 7 bp, Unknown
  misc_feature (1)..( 7): Result.002 file - promoters60/1375474
tcatata

SEQ ID NO: 105868 - DNA, 7 bp, Unknown
  misc_feature (1)..( 7): Result.002 file - promoters60/1375474
tcatata

SEQ ID NO: 105869 - DNA, 10 bp, Unknown
  misc_feature (1)..( 10): Result.002 file - promoters60/1375474
aaacataaaa

SEQ ID NO: 105870 - DNA, 10 bp, Unknown
  misc_feature (1)..( 10): Result.002 file - promoters60/1375474
aaacctaaat

SEQ ID NO: 105871 - DNA, 10 bp, Unknown
  misc_feature (1)..( 10): Result.002 file - promoters60/1375474
ccgcctcaat

SEQ ID NO: 105872 - DNA, 9 bp, Unknown
  misc_feature (1)..( 9): Result.002 file - promoters60/1375474
gtagtatta

SEQ ID NO: 105873 - DNA, 9 bp, Unknown
  misc_feature (1)..( 9): Result.002 file - promoters60/1375474
gtattatta

SEQ ID NO: 105874 - DNA, 7 bp, Unknown
  misc_feature (1)..( 7): Result.002 file - promoters60/1375474
aatgtaa

SEQ ID NO: 105875 - DNA, 7 bp, Unknown
  misc_feature (1)..( 7): Result.002 file - promoters60/1375474
aatttaa

SEQ ID NO: 105876 - DNA, 6 bp, Unknown
  misc_feature (1)..( 6): Result.002 file - promoters60/1375474
aaccaa

SEQ ID NO: 105877 - DNA, 6 bp, Unknown
  misc_feature (1)..( 6): Result.002 file - promoters60/1375474
aaccaa

SEQ ID NO: 105878 - DNA, 10 bp, Unknown
  misc_feature (1)..( 10): Result.002 file - promoters60/1375474
tatcatattt

SEQ ID NO: 105879 - DNA, 10 bp, Unknown
  misc_feature (1)..( 10): Result.002 file - promoters60/1375474
tatcatcttt

SEQ ID NO: 105880 - DNA, 8 bp, Unknown
  misc_feature (1)..( 8): Result.002 file - promoters60/1375474
aatacgtt

SEQ ID NO: 105881 - DNA, 8 bp, Unknown
  misc_feature (1)..( 8): Result.002 file - promoters60/1375474
aatatgtt

SEQ ID NO: 105882 - DNA, 10 bp, Unknown
  misc_feature (1)..( 10): Result.002 file - promoters60/1375474
ttatttgttc

SEQ ID NO: 105883 - DNA, 10 bp, Unknown
  misc_feature (1)..( 10): Result.002 file - promoters60/1375474
cactttcttc

SEQ ID NO: 105884 - DNA, 10 bp, Unknown
  misc_feature (1)..( 10): Result.002 file - promoters60/1375474
cactctctta

SEQ ID NO: 105885 - DNA, 6 bp, Unknown
  misc_feature (1)..( 6): Result.002 file - promoters60/1375474
aagttg

SEQ ID NO: 105886 - DNA, 6 bp, Unknown
  misc_feature (1)..( 6): Result.002 file - promoters60/1375474
aagttg

SEQ ID NO: 105887 - DNA, 6 bp, Unknown
  misc_feature (1)..( 6): Result.002 file - promoters60/1375474
cattct

SEQ ID NO: 105888 - DNA, 6 bp, Unknown
  misc_feature (1)..( 6): Result.002 file - promoters60/1375474
cattct

SEQ ID NO: 105889 - DNA, 6 bp, Unknown
  misc_feature (1)..( 6): Result.002 file - promoters60/1375474
tctgga

SEQ ID NO: 105890 - DNA, 6 bp, Unknown
  misc_feature (1)..( 6): Result.002 file - promoters60/1375474
tctgga

SEQ ID NO: 105891 - DNA, 7 bp, Unknown
  misc_feature (1)..( 7): Result.002 file - promoters60/1375474
attttta

SEQ ID NO: 105892 - DNA, 7 bp, Unknown
  misc_feature (1)..( 7): Result.002 file - promoters60/1375474
attgtta

SEQ ID NO: 105893 - DNA, 10 bp, Unknown
  misc_feature (1)..( 10): Result.002 file - promoters60/1375547
cgatagacag

SEQ ID NO: 105894 - DNA, 10 bp, Unknown
  misc_feature (1)..( 10): Result.002 file - promoters60/1375547
cgaaagacag

SEQ ID NO: 105895 - DNA, 11 bp, Unknown
  misc_feature (1)..( 11): Result.002 file - promoters60/1375547
ctttatttgat

SEQ ID NO: 105896 - DNA, 11 bp, Unknown
  misc_feature (1)..( 11): Result.002 file - promoters60/1375547
gtttattgata

SEQ ID NO: 105897 - DNA, 11 bp, Unknown
  misc_feature (1)..( 11): Result.002 file - promoters60/1375547
ctttattcgat

SEQ ID NO: 105898 - DNA, 8 bp, Unknown
  misc_feature (1)..( 8): Result.002 file - promoters60/1375547
ataactgg

SEQ ID NO: 105899 - DNA, 8 bp, Unknown
  misc_feature (1)..( 8): Result.002 file - promoters60/1375547
ataattgg

SEQ ID NO: 105900 - DNA, 7 bp, Unknown
  misc_feature (1)..( 7): Result.002 file - promoters60/1375547
cttcttc

SEQ ID NO: 105901 - DNA, 7 bp, Unknown
  misc_feature (1)..( 7): Result.002 file - promoters60/1375547
cttattc

SEQ ID NO: 105902 - DNA, 6 bp, Unknown
  misc_feature (1)..( 6): Result.002 file - promoters60/1375547
ttcatc

SEQ ID NO: 105903 - DNA, 6 bp, Unknown
  misc_feature (1)..( 6): Result.002 file - promoters60/1375547
ttcatc

SEQ ID NO: 105904 - DNA, 7 bp, Unknown
  misc_feature (1)..( 7): Result.002 file - promoters60/1375547
atttgtt

SEQ ID NO: 105905 - DNA, 7 bp, Unknown
  misc_feature (1)..( 7): Result.002 file - promoters60/1375547
atttgtt

SEQ ID NO: 105906 - DNA, 6 bp, Unknown
  misc_feature (1)..( 6): Result.002 file - promoters60/1375547
tctcgc

SEQ ID NO: 105907 - DNA, 6 bp, Unknown
  misc_feature (1)..( 6): Result.002 file - promoters60/1375547
tctcgc

SEQ ID NO: 105908 - DNA, 6 bp, Unknown
  misc_feature (1)..( 6): Result.002 file - promoters60/1375547
gaacat

SEQ ID NO: 105909 - DNA, 6 bp, Unknown
  misc_feature (1)..( 6): Result.002 file - promoters60/1375547
gaacat

SEQ ID NO: 105910 - DNA, 6 bp, Unknown
  misc_feature (1)..( 6): Result.002 file - promoters60/1375547
aagaaa

SEQ ID NO: 105911 - DNA, 6 bp, Unknown
  misc_feature (1)..( 6): Result.002 file - promoters60/1375547
aagaaa

SEQ ID NO: 105912 - DNA, 6 bp, Unknown
  misc_feature (1)..( 6): Result.002 file - promoters60/1375547
acgccg

SEQ ID NO: 105913 - DNA, 6 bp, Unknown
  misc_feature (1)..( 6): Result.002 file - promoters60/1375547
acgccg

SEQ ID NO: 105914 - DNA, 6 bp, Unknown
  misc_feature (1)..( 6): Result.002 file - promoters60/1375547
gcggcg

SEQ ID NO: 105915 - DNA, 6 bp, Unknown
  misc_feature (1)..( 6): Result.002 file - promoters60/1375547
gcggcg

SEQ ID NO: 105916 - DNA, 7 bp, Unknown
  misc_feature (1)..( 7): Result.002 file - promoters60/1375547
gttcgtt

SEQ ID NO: 105917 - DNA, 7 bp, Unknown
  misc_feature (1)..( 7): Result.002 file - promoters60/1375547
gtttgtt

SEQ ID NO: 105918 - DNA, 7 bp, Unknown
  misc_feature (1)..( 7): Result.002 file - promoters60/1375547
tttattc

SEQ ID NO: 105919 - DNA, 7 bp, Unknown
  misc_feature (1)..( 7): Result.002 file - promoters60/1375547
ttttttc

SEQ ID NO: 105920 - DNA, 6 bp, Unknown
  misc_feature (1)..( 6): Result.002 file - promoters60/1375570
tgaaga

SEQ ID NO: 105921 - DNA, 6 bp, Unknown
  misc_feature (1)..( 6): Result.002 file - promoters60/1375570
tgaaga

SEQ ID NO: 105922 - DNA, 6 bp, Unknown
  misc_feature (1)..( 6): Result.002 file - promoters60/1375570
tgttac

SEQ ID NO: 105923 - DNA, 6 bp, Unknown
  misc_feature (1)..( 6): Result.002 file - promoters60/1375570
tgttac

SEQ ID NO: 105924 - DNA, 7 bp, Unknown
  misc_feature (1)..( 7): Result.002 file - promoters60/1375570
agaagaa

SEQ ID NO: 105925 - DNA, 7 bp, Unknown
  misc_feature (1)..( 7): Result.002 file - promoters60/1375570
agaagaa

SEQ ID NO: 105926 - DNA, 6 bp, Unknown
  misc_feature (1)..( 6): Result.002 file - promoters60/1375570
tggaag

SEQ ID NO: 105927 - DNA, 6 bp, Unknown
  misc_feature (1)..( 6): Result.002 file - promoters60/1375570
tggaag

SEQ ID NO: 105928 - DNA, 11 bp, Unknown
  misc_feature (1)..( 11): Result.002 file - promoters60/1375570
tgtgatgatgt

SEQ ID NO: 105929 - DNA, 11 bp, Unknown
  misc_feature (1)..( 11): Result.002 file - promoters60/1375570
tgttatgatgt

SEQ ID NO: 105930 - DNA, 10 bp, Unknown
  misc_feature (1)..( 10): Result.002 file - promoters60/1375570
aaatggaacc

SEQ ID NO: 105931 - DNA, 10 bp, Unknown
  misc_feature (1)..( 10): Result.002 file - promoters60/1375570
aaatcgaacc

SEQ ID NO: 105932 - DNA, 7 bp, Unknown
  misc_feature (1)..( 7): Result.002 file - promoters60/1375570
tgaacaa

SEQ ID NO: 105933 - DNA, 7 bp, Unknown
  misc_feature (1)..( 7): Result.002 file - promoters60/1375570
tgaacaa

SEQ ID NO: 105934 - DNA, 6 bp, Unknown
  misc_feature (1)..( 6): Result.002 file - promoters60/1375570
tgaaag

SEQ ID NO: 105935 - DNA, 6 bp, Unknown
  misc_feature (1)..( 6): Result.002 file - promoters60/1375570
tgaaag

SEQ ID NO: 105936 - DNA, 6 bp, Unknown
  misc_feature (1)..( 6): Result.002 file - promoters60/1375570
tttgtc

SEQ ID NO: 105937 - DNA, 6 bp, Unknown
  misc_feature (1)..( 6): Result.002 file - promoters60/1375570
tttgtc

SEQ ID NO: 105938 - DNA, 7 bp, Unknown
  misc_feature (1)..( 7): Result.002 file - promoters60/1375570
aaggaca

SEQ ID NO: 105939 - DNA, 7 bp, Unknown
  misc_feature (1)..( 7): Result.002 file - promoters60/1375570
aagtaca

SEQ ID NO: 105940 - DNA, 7 bp, Unknown
  misc_feature (1)..( 7): Result.002 file - promoters60/1375570
gtcaagg

SEQ ID NO: 105941 - DNA, 7 bp, Unknown
  misc_feature (1)..( 7): Result.002 file - promoters60/1375570
gtcaagg

SEQ ID NO: 105942 - DNA, 6 bp, Unknown
  misc_feature (1)..( 6): Result.002 file - promoters60/1375570
gttgga

SEQ ID NO: 105943 - DNA, 6 bp, Unknown
  misc_feature (1)..( 6): Result.002 file - promoters60/1375570
gttgga

SEQ ID NO: 105944 - DNA, 7 bp, Unknown
  misc_feature (1)..( 7): Result.002 file - promoters60/1375570
gagtttc

SEQ ID NO: 105945 - DNA, 7 bp, Unknown
  misc_feature (1)..( 7): Result.002 file - promoters60/1375570
gagcttc

SEQ ID NO: 105946 - DNA, 8 bp, Unknown
  misc_feature (1)..( 8): Result.002 file - promoters60/1375615
atcatatt

SEQ ID NO: 105947 - DNA, 8 bp, Unknown
  misc_feature (1)..( 8): Result.002 file - promoters60/1375615
atcatatt

SEQ ID NO: 105948 - DNA, 8 bp, Unknown
  misc_feature (1)..( 8): Result.002 file - promoters60/1375615
atcatatt

SEQ ID NO: 105949 - DNA, 9 bp, Unknown
  misc_feature (1)..( 9): Result.002 file - promoters60/1375615
tttgtagtg

SEQ ID NO: 105950 - DNA, 9 bp, Unknown
  misc_feature (1)..( 9): Result.002 file - promoters60/1375615
attgtagct

SEQ ID NO: 105951 - DNA, 9 bp, Unknown
  misc_feature (1)..( 9): Result.002 file - promoters60/1375615
tttgttgtg

SEQ ID NO: 105952 - DNA, 8 bp, Unknown
  misc_feature (1)..( 8): Result.002 file - promoters60/1375615
tgatttgt

SEQ ID NO: 105953 - DNA, 8 bp, Unknown
  misc_feature (1)..( 8): Result.002 file - promoters60/1375615
agatatgt

SEQ ID NO: 105954 - DNA, 8 bp, Unknown
  misc_feature (1)..( 8): Result.002 file - promoters60/1375615
tgatttgg

SEQ ID NO: 105955 - DNA, 6 bp, Unknown
  misc_feature (1)..( 6): Result.002 file - promoters60/1375615
atattt

SEQ ID NO: 105956 - DNA, 6 bp, Unknown
  misc_feature (1)..( 6): Result.002 file - promoters60/1375615
atattt

SEQ ID NO: 105957 - DNA, 7 bp, Unknown
  misc_feature (1)..( 7): Result.002 file - promoters60/1375615
gtttgtt

SEQ ID NO: 105958 - DNA, 7 bp, Unknown
  misc_feature (1)..( 7): Result.002 file - promoters60/1375615
gtttgtg

SEQ ID NO: 105959 - DNA, 7 bp, Unknown
  misc_feature (1)..( 7): Result.002 file - promoters60/1375615
ttttgtt

SEQ ID NO: 105960 - DNA, 6 bp, Unknown
  misc_feature (1)..( 6): Result.002 file - promoters60/1375615
tgatgt

SEQ ID NO: 105961 - DNA, 6 bp, Unknown
  misc_feature (1)..( 6): Result.002 file - promoters60/1375615
tgatgt

SEQ ID NO: 105962 - DNA, 8 bp, Unknown
  misc_feature (1)..( 8): Result.002 file - promoters60/1375615
tgtttgtt

SEQ ID NO: 105963 - DNA, 8 bp, Unknown
  misc_feature (1)..( 8): Result.002 file - promoters60/1375615
gatttgtt

SEQ ID NO: 105964 - DNA, 8 bp, Unknown
  misc_feature (1)..( 8): Result.002 file - promoters60/1375615
gatatgta

SEQ ID NO: 105965 - DNA, 7 bp, Unknown
  misc_feature (1)..( 7): Result.002 file - promoters60/1375615
gttttgt

SEQ ID NO: 105966 - DNA, 7 bp, Unknown
  misc_feature (1)..( 7): Result.002 file - promoters60/1375615
gttttgt

SEQ ID NO: 105967 - DNA, 7 bp, Unknown
  misc_feature (1)..( 7): Result.002 file - promoters60/1375615
aagaaca

SEQ ID NO: 105968 - DNA, 7 bp, Unknown
  misc_feature (1)..( 7): Result.002 file - promoters60/1375615
aagaaca

SEQ ID NO: 105969 - DNA, 6 bp, Unknown
  misc_feature (1)..( 6): Result.002 file - promoters60/1375615
tgtgat

SEQ ID NO: 105970 - DNA, 6 bp, Unknown
  misc_feature (1)..( 6): Result.002 file - promoters60/1375615
tgtgat

SEQ ID NO: 105971 - DNA, 8 bp, Unknown
  misc_feature (1)..( 8): Result.002 file - promoters60/1375615
atagtttg

SEQ ID NO: 105972 - DNA, 8 bp, Unknown
  misc_feature (1)..( 8): Result.002 file - promoters60/1375615
ataatttg

SEQ ID NO: 105973 - DNA, 8 bp, Unknown
  misc_feature (1)..( 8): Result.002 file - promoters60/1375615
agtatgtt

SEQ ID NO: 105974 - DNA, 8 bp, Unknown
  misc_feature (1)..( 8): Result.002 file - promoters60/1375615
agtttgtt

SEQ ID NO: 105975 - DNA, 6 bp, Unknown
  misc_feature (1)..( 6): Result.002 file - promoters60/1375615
tgtttg

SEQ ID NO: 105976 - DNA, 6 bp, Unknown
  misc_feature (1)..( 6): Result.002 file - promoters60/1375615
tgtttg

SEQ ID NO: 105977 - DNA, 6 bp, Unknown
  misc_feature (1)..( 6): Result.002 file - promoters60/1375615
gagttt

SEQ ID NO: 105978 - DNA, 6 bp, Unknown
  misc_feature (1)..( 6): Result.002 file - promoters60/1375615
gagttt

SEQ ID NO: 105979 - DNA, 6 bp, Unknown
  misc_feature (1)..( 6): Result.002 file - promoters60/1375615
ctgatt

SEQ ID NO: 105980 - DNA, 6 bp, Unknown
  misc_feature (1)..( 6): Result.002 file - promoters60/1375615
ctgatt

SEQ ID NO: 105981 - DNA, 6 bp, Unknown
  misc_feature (1)..( 6): Result.002 file - promoters60/1375615
ttagtt

SEQ ID NO: 105982 - DNA, 6 bp, Unknown
  misc_feature (1)..( 6): Result.002 file - promoters60/1375615
ttagtt

SEQ ID NO: 105983 - DNA, 12 bp, Unknown
  misc_feature (1)..( 12): Result.002 file - promoters60/1375634
attcttttatca

SEQ ID NO: 105984 - DNA, 12 bp, Unknown
  misc_feature (1)..( 12): Result.002 file - promoters60/1375634
ttgtttttgtca

SEQ ID NO: 105985 - DNA, 12 bp, Unknown
  misc_feature (1)..( 12): Result.002 file - promoters60/1375634
tcaattttataa

SEQ ID NO: 105986 - DNA, 12 bp, Unknown
  misc_feature (1)..( 12): Result.002 file - promoters60/1375634
tcaatcttattg

SEQ ID NO: 105987 - DNA, 7 bp, Unknown
  misc_feature (1)..( 7): Result.002 file - promoters60/1375634
aaatatc

SEQ ID NO: 105988 - DNA, 7 bp, Unknown
  misc_feature (1)..( 7): Result.002 file - promoters60/1375634
aaatatg

SEQ ID NO: 105989 - DNA, 7 bp, Unknown
  misc_feature (1)..( 7): Result.002 file - promoters60/1375634
taatatg

SEQ ID NO: 105990 - DNA, 9 bp, Unknown
  misc_feature (1)..( 9): Result.002 file - promoters60/1375634
tatatatac

SEQ ID NO: 105991 - DNA, 9 bp, Unknown
  misc_feature (1)..( 9): Result.002 file - promoters60/1375634
aatatgtac

SEQ ID NO: 105992 - DNA, 9 bp, Unknown
  misc_feature (1)..( 9): Result.002 file - promoters60/1375634
aatatgttg

SEQ ID NO: 105993 - DNA, 8 bp, Unknown
  misc_feature (1)..( 8): Result.002 file - promoters60/1375634
aaatcaat

SEQ ID NO: 105994 - DNA, 8 bp, Unknown
  misc_feature (1)..( 8): Result.002 file - promoters60/1375634
aaaacaac

SEQ ID NO: 105995 - DNA, 8 bp, Unknown
  misc_feature (1)..( 8): Result.002 file - promoters60/1375634
aaaagaac

SEQ ID NO: 105996 - DNA, 9 bp, Unknown
  misc_feature (1)..( 9): Result.002 file - promoters60/1375634
tgtatggtg

SEQ ID NO: 105997 - DNA, 9 bp, Unknown
  misc_feature (1)..( 9): Result.002 file - promoters60/1375634
tgtatgcat

SEQ ID NO: 105998 - DNA, 9 bp, Unknown
  misc_feature (1)..( 9): Result.002 file - promoters60/1375634
agtaagcat

SEQ ID NO: 105999 - DNA, 10 bp, Unknown
  misc_feature (1)..( 10): Result.002 file - promoters60/1375634
ttaattttta

SEQ ID NO: 106000 - DNA, 10 bp, Unknown
  misc_feature (1)..( 10): Result.002 file - promoters60/1375634
tcaattttat

SEQ ID NO: 106001 - DNA, 10 bp, Unknown
  misc_feature (1)..( 10): Result.002 file - promoters60/1375634
tcaatcttat

SEQ ID NO: 106002 - DNA, 10 bp, Unknown
  misc_feature (1)..( 10): Result.002 file - promoters60/1375634
taatttttat

SEQ ID NO: 106003 - DNA, 10 bp, Unknown
  misc_feature (1)..( 10): Result.002 file - promoters60/1375634
tcaattttat

SEQ ID NO: 106004 - DNA, 10 bp, Unknown
  misc_feature (1)..( 10): Result.002 file - promoters60/1375634
tcaatcttat

SEQ ID NO: 106005 - DNA, 9 bp, Unknown
  misc_feature (1)..( 9): Result.002 file - promoters60/1375634
tatataaat

SEQ ID NO: 106006 - DNA, 9 bp, Unknown
  misc_feature (1)..( 9): Result.002 file - promoters60/1375634
tatttaaaa

SEQ ID NO: 106007 - DNA, 9 bp, Unknown
  misc_feature (1)..( 9): Result.002 file - promoters60/1375634
ttcttaaaa

SEQ ID NO: 106008 - DNA, 6 bp, Unknown
  misc_feature (1)..( 6): Result.002 file - promoters60/1375634
aaactt

SEQ ID NO: 106009 - DNA, 6 bp, Unknown
  misc_feature (1)..( 6): Result.002 file - promoters60/1375634
aaactt

SEQ ID NO: 106010 - DNA, 6 bp, Unknown
  misc_feature (1)..( 6): Result.002 file - promoters60/1375634
aaactt

SEQ ID NO: 106011 - DNA, 9 bp, Unknown
  misc_feature (1)..( 9): Result.002 file - promoters60/1375793
tgtttgttt

SEQ ID NO: 106012 - DNA, 9 bp, Unknown
  misc_feature (1)..( 9): Result.002 file - promoters60/1375793
tgttagttt

SEQ ID NO: 106013 - DNA, 9 bp, Unknown
  misc_feature (1)..( 9): Result.002 file - promoters60/1375793
ggtttgtaa

SEQ ID NO: 106014 - DNA, 7 bp, Unknown
  misc_feature (1)..( 7): Result.002 file - promoters60/1375957
taaacat

SEQ ID NO: 106015 - DNA, 7 bp, Unknown
  misc_feature (1)..( 7): Result.002 file - promoters60/1375957
taaacat

SEQ ID NO: 106016 - DNA, 7 bp, Unknown
  misc_feature (1)..( 7): Result.002 file - promoters60/1375957
aaaacat

SEQ ID NO: 106017 - DNA, 16 bp, Unknown
  misc_feature (1)..( 16): Result.002 file - promoters60/1375957
ttaactttacgttctt

SEQ ID NO: 106018 - DNA, 16 bp, Unknown
  misc_feature (1)..( 16): Result.002 file - promoters60/1375957
ttaactgataaaatat

SEQ ID NO: 106019 - DNA, 17 bp, Unknown
  misc_feature (1)..( 17): Result.002 file - promoters60/1375957
ataatctaattgataaa

SEQ ID NO: 106020 - DNA, 8 bp, Unknown
  misc_feature (1)..( 8): Result.002 file - promoters60/1375957
agatttta

SEQ ID NO: 106021 - DNA, 8 bp, Unknown
  misc_feature (1)..( 8): Result.002 file - promoters60/1375957
agatttta

SEQ ID NO: 106022 - DNA, 8 bp, Unknown
  misc_feature (1)..( 8): Result.002 file - promoters60/1375957
aaatttta

SEQ ID NO: 106023 - DNA, 10 bp, Unknown
  misc_feature (1)..( 10): Result.002 file - promoters60/1375957
taaaatatat

SEQ ID NO: 106024 - DNA, 10 bp, Unknown
  misc_feature (1)..( 10): Result.002 file - promoters60/1375957
aataatatat

SEQ ID NO: 106025 - DNA, 10 bp, Unknown
  misc_feature (1)..( 10): Result.002 file - promoters60/1375957
ataaatatgc

SEQ ID NO: 106026 - DNA, 10 bp, Unknown
  misc_feature (1)..( 10): Result.002 file - promoters60/1375957
ataaatttaa

SEQ ID NO: 106027 - DNA, 9 bp, Unknown
  misc_feature (1)..( 9): Result.002 file - promoters60/1375957
ttttgttgc

SEQ ID NO: 106028 - DNA, 11 bp, Unknown
  misc_feature (1)..( 11): Result.002 file - promoters60/1375957
tctttggttct

SEQ ID NO: 106029 - DNA, 11 bp, Unknown
  misc_feature (1)..( 11): Result.002 file - promoters60/1375957
gtttttgtagg

SEQ ID NO: 106030 - DNA, 11 bp, Unknown
  misc_feature (1)..( 11): Result.002 file - promoters60/1375957
tttttagtcat

SEQ ID NO: 106031 - DNA, 9 bp, Unknown
  misc_feature (1)..( 9): Result.002 file - promoters60/1375957
cttattatg

SEQ ID NO: 106032 - DNA, 9 bp, Unknown
  misc_feature (1)..( 9): Result.002 file - promoters60/1375957
cttattatt

SEQ ID NO: 106033 - DNA, 9 bp, Unknown
  misc_feature (1)..( 9): Result.002 file - promoters60/1375957
tctatgatg

SEQ ID NO: 106034 - DNA, 9 bp, Unknown
  misc_feature (1)..( 9): Result.002 file - promoters60/1375957
aacctattt

SEQ ID NO: 106035 - DNA, 9 bp, Unknown
  misc_feature (1)..( 9): Result.002 file - promoters60/1375957
aacgtatat

SEQ ID NO: 106036 - DNA, 9 bp, Unknown
  misc_feature (1)..( 9): Result.002 file - promoters60/1375957
taccgattt

SEQ ID NO: 106037 - DNA, 7 bp, Unknown
  misc_feature (1)..( 7): Result.002 file - promoters60/1375975
tttgatt

SEQ ID NO: 106038 - DNA, 7 bp, Unknown
  misc_feature (1)..( 7): Result.002 file - promoters60/1375975
tttcatt

SEQ ID NO: 106039 - DNA, 6 bp, Unknown
  misc_feature (1)..( 6): Result.002 file - promoters60/1375975
aatgtt

SEQ ID NO: 106040 - DNA, 6 bp, Unknown
  misc_feature (1)..( 6): Result.002 file - promoters60/1375975
aatgtt

SEQ ID NO: 106041 - DNA, 8 bp, Unknown
  misc_feature (1)..( 8): Result.002 file - promoters60/1375975
aatcttct

SEQ ID NO: 106042 - DNA, 8 bp, Unknown
  misc_feature (1)..( 8): Result.002 file - promoters60/1375975
aattttct

SEQ ID NO: 106043 - DNA, 7 bp, Unknown
  misc_feature (1)..( 7): Result.002 file - promoters60/1375975
acttaaa

SEQ ID NO: 106044 - DNA, 7 bp, Unknown
  misc_feature (1)..( 7): Result.002 file - promoters60/1375975
actgaaa

SEQ ID NO: 106045 - DNA, 8 bp, Unknown
  misc_feature (1)..( 8): Result.002 file - promoters60/1375975
ttaaaata

SEQ ID NO: 106046 - DNA, 8 bp, Unknown
  misc_feature (1)..( 8): Result.002 file - promoters60/1375975
ttagaata

SEQ ID NO: 106047 - DNA, 7 bp, Unknown
  misc_feature (1)..( 7): Result.002 file - promoters60/1375975
aatttaa

SEQ ID NO: 106048 - DNA, 7 bp, Unknown
  misc_feature (1)..( 7): Result.002 file - promoters60/1375975
aatataa

SEQ ID NO: 106049 - DNA, 7 bp, Unknown
  misc_feature (1)..( 7): Result.002 file - promoters60/1375975
ttggatg

SEQ ID NO: 106050 - DNA, 7 bp, Unknown
  misc_feature (1)..( 7): Result.002 file - promoters60/1375975
ttggatg

SEQ ID NO: 106051 - DNA, 7 bp, Unknown
  misc_feature (1)..( 7): Result.002 file - promoters60/1375975
gttgata

SEQ ID NO: 106052 - DNA, 7 bp, Unknown
  misc_feature (1)..( 7): Result.002 file - promoters60/1375975
gttcata

SEQ ID NO: 106053 - DNA, 9 bp, Unknown
  misc_feature (1)..( 9): Result.002 file - promoters60/1375975
atgtagctt

SEQ ID NO: 106054 - DNA, 9 bp, Unknown
  misc_feature (1)..( 9): Result.002 file - promoters60/1375975
atgtagata

SEQ ID NO: 106055 - DNA, 9 bp, Unknown
  misc_feature (1)..( 9): Result.002 file - promoters60/1375975
ttgtaaata

SEQ ID NO: 106056 - DNA, 6 bp, Unknown
  misc_feature (1)..( 6): Result.002 file - promoters60/1375975
gaatat

SEQ ID NO: 106057 - DNA, 6 bp, Unknown
  misc_feature (1)..( 6): Result.002 file - promoters60/1375975
gaatat

SEQ ID NO: 106058 - DNA, 7 bp, Unknown
  misc_feature (1)..( 7): Result.002 file - promoters60/1375975
aaccgtt

SEQ ID NO: 106059 - DNA, 7 bp, Unknown
  misc_feature (1)..( 7): Result.002 file - promoters60/1375975
aacagtt

SEQ ID NO: 106060 - DNA, 7 bp, Unknown
  misc_feature (1)..( 7): Result.002 file - promoters60/1375975
caaaatt

SEQ ID NO: 106061 - DNA, 7 bp, Unknown
  misc_feature (1)..( 7): Result.002 file - promoters60/1375975
aaaaatt

SEQ ID NO: 106062 - DNA, 7 bp, Unknown
  misc_feature (1)..( 7): Result.002 file - promoters60/1375975
aaaaatg

SEQ ID NO: 106063 - DNA, 8 bp, Unknown
  misc_feature (1)..( 8): Result.002 file - promoters60/1375975
atccatca

SEQ ID NO: 106064 - DNA, 8 bp, Unknown
  misc_feature (1)..( 8): Result.002 file - promoters60/1375975
atccttca

SEQ ID NO: 106065 - DNA, 8 bp, Unknown
  misc_feature (1)..( 8): Result.002 file - promoters60/1375975
aaagtcta

SEQ ID NO: 106066 - DNA, 8 bp, Unknown
  misc_feature (1)..( 8): Result.002 file - promoters60/1375975
aaaggcta

SEQ ID NO: 106067 - DNA, 6 bp, Unknown
  misc_feature (1)..( 6): Result.002 file - promoters60/1375975
caaaaa

SEQ ID NO: 106068 - DNA, 6 bp, Unknown
  misc_feature (1)..( 6): Result.002 file - promoters60/1375975
caaaaa

SEQ ID NO: 106069 - DNA, 8 bp, Unknown
  misc_feature (1)..( 8): Result.002 file - promoters60/1375975
aaataaaa

SEQ ID NO: 106070 - DNA, 8 bp, Unknown
  misc_feature (1)..( 8): Result.002 file - promoters60/1375975
aaataaaa

SEQ ID NO: 106071 - DNA, 6 bp, Unknown
  misc_feature (1)..( 6): Result.002 file - promoters60/1375975
tgaaat

SEQ ID NO: 106072 - DNA, 6 bp, Unknown
  misc_feature (1)..( 6): Result.002 file - promoters60/1375975
tgaaat

SEQ ID NO: 106073 - DNA, 6 bp, Unknown
  misc_feature (1)..( 6): Result.002 file - promoters60/1375975
atatta

SEQ ID NO: 106074 - DNA, 6 bp, Unknown
  misc_feature (1)..( 6): Result.002 file - promoters60/1375975
atatta

SEQ ID NO: 106075 - DNA, 6 bp, Unknown
  misc_feature (1)..( 6): Result.002 file - promoters60/1375975
aagaat

SEQ ID NO: 106076 - DNA, 6 bp, Unknown
  misc_feature (1)..( 6): Result.002 file - promoters60/1375975
aagaat

SEQ ID NO: 106077 - DNA, 8 bp, Unknown
  misc_feature (1)..( 8): Result.002 file - promoters60/1375975
cttttaat

SEQ ID NO: 106078 - DNA, 8 bp, Unknown
  misc_feature (1)..( 8): Result.002 file - promoters60/1375975
cttataat

SEQ ID NO: 106079 - DNA, 6 bp, Unknown
  misc_feature (1)..( 6): Result.002 file - promoters60/1375975
atttgg

SEQ ID NO: 106080 - DNA, 6 bp, Unknown
  misc_feature (1)..( 6): Result.002 file - promoters60/1375975
atttgg

SEQ ID NO: 106081 - DNA, 7 bp, Unknown
  misc_feature (1)..( 7): Result.002 file - promoters60/1375975
ttaattt

SEQ ID NO: 106082 - DNA, 7 bp, Unknown
  misc_feature (1)..( 7): Result.002 file - promoters60/1375975
ttatttt

SEQ ID NO: 106083 - DNA, 7 bp, Unknown
  misc_feature (1)..( 7): Result.002 file - promoters60/1376361
cgatcat

SEQ ID NO: 106084 - DNA, 7 bp, Unknown
  misc_feature (1)..( 7): Result.002 file - promoters60/1376361
tgatcat

SEQ ID NO: 106085 - DNA, 7 bp, Unknown
  misc_feature (1)..( 7): Result.002 file - promoters60/1376361
cgaccat

SEQ ID NO: 106086 - DNA, 7 bp, Unknown
  misc_feature (1)..( 7): Result.002 file - promoters60/1376361
cgagcat

SEQ ID NO: 106087 - DNA, 14 bp, Unknown
  misc_feature (1)..( 14): Result.002 file - promoters60/1376455
gacagaaatgtcaa

SEQ ID NO: 106088 - DNA, 14 bp, Unknown
  misc_feature (1)..( 14): Result.002 file - promoters60/1376455
aatagaattgttga

SEQ ID NO: 106089 - DNA, 14 bp, Unknown
  misc_feature (1)..( 14): Result.002 file - promoters60/1376455
taaaaaaatgtagt

SEQ ID NO: 106090 - DNA, 14 bp, Unknown
  misc_feature (1)..( 14): Result.002 file - promoters60/1376455
gcctaaaatatcaa

SEQ ID NO: 106091 - DNA, 14 bp, Unknown
  misc_feature (1)..( 14): Result.002 file - promoters60/1376455
attataaaatacag

SEQ ID NO: 106092 - DNA, 14 bp, Unknown
  misc_feature (1)..( 14): Result.002 file - promoters60/1376455
tttagaaaagtctc

SEQ ID NO: 106093 - DNA, 14 bp, Unknown
  misc_feature (1)..( 14): Result.002 file - promoters60/1376455
ttttgaacgcctaa

SEQ ID NO: 106094 - DNA, 16 bp, Unknown
  misc_feature (1)..( 16): Result.002 file - promoters60/1376455
aacgaaaaataaataa

SEQ ID NO: 106095 - DNA, 16 bp, Unknown
  misc_feature (1)..( 16): Result.002 file - promoters60/1376455
attataaaatacagta

SEQ ID NO: 106096 - DNA, 16 bp, Unknown
  misc_feature (1)..( 16): Result.002 file - promoters60/1376455
aaatgtaaataaataa

SEQ ID NO: 106097 - DNA, 16 bp, Unknown
  misc_feature (1)..( 16): Result.002 file - promoters60/1376455
cgaatagaattgttga

SEQ ID NO: 106098 - DNA, 16 bp, Unknown
  misc_feature (1)..( 16): Result.002 file - promoters60/1376455
attctaaaatcttcca

SEQ ID NO: 106099 - DNA, 16 bp, Unknown
  misc_feature (1)..( 16): Result.002 file - promoters60/1376455
cttgataaatacaaga

SEQ ID NO: 106100 - DNA, 16 bp, Unknown
  misc_feature (1)..( 16): Result.002 file - promoters60/1376455
ttaaccgattaatact

SEQ ID NO: 106101 - DNA, 16 bp, Unknown
  misc_feature (1)..( 16): Result.002 file - promoters60/1376455
tctcttcaatacacgc

SEQ ID NO: 106102 - DNA, 12 bp, Unknown
  misc_feature (1)..( 12): Result.002 file - promoters60/1376455
aataaataaaag

SEQ ID NO: 106103 - DNA, 12 bp, Unknown
  misc_feature (1)..( 12): Result.002 file - promoters60/1376455
acattataaaat

SEQ ID NO: 106104 - DNA, 12 bp, Unknown
  misc_feature (1)..( 12): Result.002 file - promoters60/1376455
tgtaaataaata

SEQ ID NO: 106105 - DNA, 12 bp, Unknown
  misc_feature (1)..( 12): Result.002 file - promoters60/1376455
gataaatacaag

SEQ ID NO: 106106 - DNA, 12 bp, Unknown
  misc_feature (1)..( 12): Result.002 file - promoters60/1376455
tccgaatagaat

SEQ ID NO: 106107 - DNA, 12 bp, Unknown
  misc_feature (1)..( 12): Result.002 file - promoters60/1376455
gaattctaaaat

SEQ ID NO: 106108 - DNA, 12 bp, Unknown
  misc_feature (1)..( 12): Result.002 file - promoters60/1376455
gattaatactaa

SEQ ID NO: 106109 - DNA, 12 bp, Unknown
  misc_feature (1)..( 12): Result.002 file - promoters60/1376455
cttcaatacacg

SEQ ID NO: 106110 - DNA, 12 bp, Unknown
  misc_feature (1)..( 12): Result.002 file - promoters60/1376455
atgaaaaacaaa

SEQ ID NO: 106111 - DNA, 12 bp, Unknown
  misc_feature (1)..( 12): Result.002 file - promoters60/1376455
attttaaaaaaa

SEQ ID NO: 106112 - DNA, 12 bp, Unknown
  misc_feature (1)..( 12): Result.002 file - promoters60/1376455
catctaaataaa

SEQ ID NO: 106113 - DNA, 12 bp, Unknown
  misc_feature (1)..( 12): Result.002 file - promoters60/1376455
ttgagaaaaagg

SEQ ID NO: 106114 - DNA, 12 bp, Unknown
  misc_feature (1)..( 12): Result.002 file - promoters60/1376455
attacaaatatg

SEQ ID NO: 106115 - DNA, 12 bp, Unknown
  misc_feature (1)..( 12): Result.002 file - promoters60/1376455
attacattttgc

SEQ ID NO: 106116 - DNA, 12 bp, Unknown
  misc_feature (1)..( 12): Result.002 file - promoters60/1376455
attgcattgacc

SEQ ID NO: 106117 - DNA, 8 bp, Unknown
  misc_feature (1)..( 8): Result.002 file - promoters60/1376650
caaaccaa

SEQ ID NO: 106118 - DNA, 8 bp, Unknown
  misc_feature (1)..( 8): Result.002 file - promoters60/1376650
gaaatcaa

SEQ ID NO: 106119 - DNA, 8 bp, Unknown
  misc_feature (1)..( 8): Result.002 file - promoters60/1376650
gaactcag

SEQ ID NO: 106120 - DNA, 8 bp, Unknown
  misc_feature (1)..( 8): Result.002 file - promoters60/1376650
taacacag

SEQ ID NO: 106121 - DNA, 8 bp, Unknown
  misc_feature (1)..( 8): Result.002 file - promoters60/1376650
gaactcag

SEQ ID NO: 106122 - DNA, 8 bp, Unknown
  misc_feature (1)..( 8): Result.002 file - promoters60/1376650
gaaatcaa

SEQ ID NO: 106123 - DNA, 9 bp, Unknown
  misc_feature (1)..( 9): Result.002 file - promoters60/1376650
ccgaaaaaa

SEQ ID NO: 106124 - DNA, 9 bp, Unknown
  misc_feature (1)..( 9): Result.002 file - promoters60/1376650
aagaaaaaa

SEQ ID NO: 106125 - DNA, 9 bp, Unknown
  misc_feature (1)..( 9): Result.002 file - promoters60/1376650
aagacaaaa

SEQ ID NO: 106126 - DNA, 8 bp, Unknown
  misc_feature (1)..( 8): Result.002 file - promoters60/1376650
tgggaaat

SEQ ID NO: 106127 - DNA, 8 bp, Unknown
  misc_feature (1)..( 8): Result.002 file - promoters60/1376650
tggaaaag

SEQ ID NO: 106128 - DNA, 8 bp, Unknown
  misc_feature (1)..( 8): Result.002 file - promoters60/1376650
agggaaat

SEQ ID NO: 106129 - DNA, 9 bp, Unknown
  misc_feature (1)..( 9): Result.002 file - promoters60/1376650
atatataaa

SEQ ID NO: 106130 - DNA, 9 bp, Unknown
  misc_feature (1)..( 9): Result.002 file - promoters60/1376650
gtatataaa

SEQ ID NO: 106131 - DNA, 9 bp, Unknown
  misc_feature (1)..( 9): Result.002 file - promoters60/1376650
atatattta

SEQ ID NO: 106132 - DNA, 9 bp, Unknown
  misc_feature (1)..( 9): Result.002 file - promoters60/1376650
tgaaacaca

SEQ ID NO: 106133 - DNA, 9 bp, Unknown
  misc_feature (1)..( 9): Result.002 file - promoters60/1376650
tgaaacaaa

SEQ ID NO: 106134 - DNA, 9 bp, Unknown
  misc_feature (1)..( 9): Result.002 file - promoters60/1376650
agaaagaaa

SEQ ID NO: 106135 - DNA, 6 bp, Unknown
  misc_feature (1)..( 6): Result.002 file - promoters60/1376726
agaatt

SEQ ID NO: 106136 - DNA, 6 bp, Unknown
  misc_feature (1)..( 6): Result.002 file - promoters60/1376726
agaatt

SEQ ID NO: 106137 - DNA, 8 bp, Unknown
  misc_feature (1)..( 8): Result.002 file - promoters60/1376726
agtttgat

SEQ ID NO: 106138 - DNA, 8 bp, Unknown
  misc_feature (1)..( 8): Result.002 file - promoters60/1376726
agtttgat

SEQ ID NO: 106139 - DNA, 7 bp, Unknown
  misc_feature (1)..( 7): Result.002 file - promoters60/1376726
attagaa

SEQ ID NO: 106140 - DNA, 7 bp, Unknown
  misc_feature (1)..( 7): Result.002 file - promoters60/1376726
attagaa

SEQ ID NO: 106141 - DNA, 8 bp, Unknown
  misc_feature (1)..( 8): Result.002 file - promoters60/1376726
taataatc

SEQ ID NO: 106142 - DNA, 8 bp, Unknown
  misc_feature (1)..( 8): Result.002 file - promoters60/1376726
taaaaata

SEQ ID NO: 106143 - DNA, 8 bp, Unknown
  misc_feature (1)..( 8): Result.002 file - promoters60/1376726
aaattatc

SEQ ID NO: 106144 - DNA, 7 bp, Unknown
  misc_feature (1)..( 7): Result.002 file - promoters60/1376726
aataaaa

SEQ ID NO: 106145 - DNA, 7 bp, Unknown
  misc_feature (1)..( 7): Result.002 file - promoters60/1376726
aattaaa

SEQ ID NO: 106146 - DNA, 7 bp, Unknown
  misc_feature (1)..( 7): Result.002 file - promoters60/1376726
cagagga

SEQ ID NO: 106147 - DNA, 7 bp, Unknown
  misc_feature (1)..( 7): Result.002 file - promoters60/1376726
cagcgga

SEQ ID NO: 106148 - DNA, 7 bp, Unknown
  misc_feature (1)..( 7): Result.002 file - promoters60/1376726
ttttgac

SEQ ID NO: 106149 - DNA, 7 bp, Unknown
  misc_feature (1)..( 7): Result.002 file - promoters60/1376726
tttggac

SEQ ID NO: 106150 - DNA, 6 bp, Unknown
  misc_feature (1)..( 6): Result.002 file - promoters60/1376726
ctggga

SEQ ID NO: 106151 - DNA, 6 bp, Unknown
  misc_feature (1)..( 6): Result.002 file - promoters60/1376726
ctggga

SEQ ID NO: 106152 - DNA, 7 bp, Unknown
  misc_feature (1)..( 7): Result.002 file - promoters60/1376726
atctgat

SEQ ID NO: 106153 - DNA, 7 bp, Unknown
  misc_feature (1)..( 7): Result.002 file - promoters60/1376726
atctgat

SEQ ID NO: 106154 - DNA, 8 bp, Unknown
  misc_feature (1)..( 8): Result.002 file - promoters60/1376726
tctttatt

SEQ ID NO: 106155 - DNA, 8 bp, Unknown
  misc_feature (1)..( 8): Result.002 file - promoters60/1376726
tcttaatt

SEQ ID NO: 106156 - DNA, 8 bp, Unknown
  misc_feature (1)..( 8): Result.002 file - promoters60/1376726
tattttct

SEQ ID NO: 106157 - DNA, 8 bp, Unknown
  misc_feature (1)..( 8): Result.002 file - promoters60/1376726
tattctct

SEQ ID NO: 106158 - DNA, 7 bp, Unknown
  misc_feature (1)..( 7): Result.002 file - promoters60/1376726
aaattct

SEQ ID NO: 106159 - DNA, 7 bp, Unknown
  misc_feature (1)..( 7): Result.002 file - promoters60/1376726
aaaatct

SEQ ID NO: 106160 - DNA, 7 bp, Unknown
  misc_feature (1)..( 7): Result.002 file - promoters60/1376726
aaaaatt

SEQ ID NO: 106161 - DNA, 7 bp, Unknown
  misc_feature (1)..( 7): Result.002 file - promoters60/1376726
aaagatt

SEQ ID NO: 106162 - DNA, 10 bp, Unknown
  misc_feature (1)..( 10): Result.002 file - promoters60/1376726
aatttcattt

SEQ ID NO: 106163 - DNA, 10 bp, Unknown
  misc_feature (1)..( 10): Result.002 file - promoters60/1376726
aattacattt

SEQ ID NO: 106164 - DNA, 6 bp, Unknown
  misc_feature (1)..( 6): Result.002 file - promoters60/1376881
taaaca

SEQ ID NO: 106165 - DNA, 6 bp, Unknown
  misc_feature (1)..( 6): Result.002 file - promoters60/1376881
taaaca

SEQ ID NO: 106166 - DNA, 6 bp, Unknown
  misc_feature (1)..( 6): Result.002 file - promoters60/1376881
ttaata

SEQ ID NO: 106167 - DNA, 6 bp, Unknown
  misc_feature (1)..( 6): Result.002 file - promoters60/1376881
ttaata

SEQ ID NO: 106168 - DNA, 6 bp, Unknown
  misc_feature (1)..( 6): Result.002 file - promoters60/1376881
agtaaa

SEQ ID NO: 106169 - DNA, 6 bp, Unknown
  misc_feature (1)..( 6): Result.002 file - promoters60/1376881
agtaaa

SEQ ID NO: 106170 - DNA, 6 bp, Unknown
  misc_feature (1)..( 6): Result.002 file - promoters60/1376881
agtaaa

SEQ ID NO: 106171 - DNA, 8 bp, Unknown
  misc_feature (1)..( 8): Result.002 file - promoters60/1376881
aaaatcct

SEQ ID NO: 106172 - DNA, 8 bp, Unknown
  misc_feature (1)..( 8): Result.002 file - promoters60/1376881
aaaaccct

SEQ ID NO: 106173 - DNA, 7 bp, Unknown
  misc_feature (1)..( 7): Result.002 file - promoters60/1376881
gctggtt

SEQ ID NO: 106174 - DNA, 7 bp, Unknown
  misc_feature (1)..( 7): Result.002 file - promoters60/1376881
gctggtt

SEQ ID NO: 106175 - DNA, 10 bp, Unknown
  misc_feature (1)..( 10): Result.002 file - promoters60/1376881
aagagaatga

SEQ ID NO: 106176 - DNA, 10 bp, Unknown
  misc_feature (1)..( 10): Result.002 file - promoters60/1376881
aagagagtga

SEQ ID NO: 106177 - DNA, 10 bp, Unknown
  misc_feature (1)..( 10): Result.002 file - promoters60/1376881
tcaacaaaaa

SEQ ID NO: 106178 - DNA, 10 bp, Unknown
  misc_feature (1)..( 10): Result.002 file - promoters60/1376881
gaaacaaaaa

SEQ ID NO: 106179 - DNA, 10 bp, Unknown
  misc_feature (1)..( 10): Result.002 file - promoters60/1376881
gaaagaaagc

SEQ ID NO: 106180 - DNA, 11 bp, Unknown
  misc_feature (1)..( 11): Result.002 file - promoters60/1376881
tgaacgtcatt

SEQ ID NO: 106181 - DNA, 11 bp, Unknown
  misc_feature (1)..( 11): Result.002 file - promoters60/1376881
tgaccgtcatt

SEQ ID NO: 106182 - DNA, 7 bp, Unknown
  misc_feature (1)..( 7): Result.002 file - promoters60/1376881
aatcggg

SEQ ID NO: 106183 - DNA, 7 bp, Unknown
  misc_feature (1)..( 7): Result.002 file - promoters60/1376881
aattggg

SEQ ID NO: 106184 - DNA, 10 bp, Unknown
  misc_feature (1)..( 10): Result.002 file - promoters60/1376881
ggaaaagaaa

SEQ ID NO: 106185 - DNA, 10 bp, Unknown
  misc_feature (1)..( 10): Result.002 file - promoters60/1376881
ggaaatgaaa

SEQ ID NO: 106186 - DNA, 7 bp, Unknown
  misc_feature (1)..( 7): Result.002 file - promoters60/1376881
cccacta

SEQ ID NO: 106187 - DNA, 7 bp, Unknown
  misc_feature (1)..( 7): Result.002 file - promoters60/1376881
cccacta

SEQ ID NO: 106188 - DNA, 9 bp, Unknown
  misc_feature (1)..( 9): Result.002 file - promoters60/1376881
aaagaaaag

SEQ ID NO: 106189 - DNA, 9 bp, Unknown
  misc_feature (1)..( 9): Result.002 file - promoters60/1376881
aaagtaaag

SEQ ID NO: 106190 - DNA, 7 bp, Unknown
  misc_feature (1)..( 7): Result.002 file - promoters60/1376881
gtatata

SEQ ID NO: 106191 - DNA, 7 bp, Unknown
  misc_feature (1)..( 7): Result.002 file - promoters60/1376881
gtatata

SEQ ID NO: 106192 - DNA, 8 bp, Unknown
  misc_feature (1)..( 8): Result.002 file - promoters60/1376888
ttttttat

SEQ ID NO: 106193 - DNA, 8 bp, Unknown
  misc_feature (1)..( 8): Result.002 file - promoters60/1376888
ctttatat

SEQ ID NO: 106194 - DNA, 9 bp, Unknown
  misc_feature (1)..( 9): Result.002 file - promoters60/1376888
ctttgttac

SEQ ID NO: 106195 - DNA, 9 bp, Unknown
  misc_feature (1)..( 9): Result.002 file - promoters60/1376888
atttattaa

SEQ ID NO: 106196 - DNA, 7 bp, Unknown
  misc_feature (1)..( 7): Result.002 file - promoters60/1376888
gatattt

SEQ ID NO: 106197 - DNA, 7 bp, Unknown
  misc_feature (1)..( 7): Result.002 file - promoters60/1376888
tatattt

SEQ ID NO: 106198 - DNA, 7 bp, Unknown
  misc_feature (1)..( 7): Result.002 file - promoters60/1376888
tatattg

SEQ ID NO: 106199 - DNA, 8 bp, Unknown
  misc_feature (1)..( 8): Result.002 file - promoters60/1376888
cttatttt

SEQ ID NO: 106200 - DNA, 8 bp, Unknown
  misc_feature (1)..( 8): Result.002 file - promoters60/1376888
tttagttt

SEQ ID NO: 106201 - DNA, 8 bp, Unknown
  misc_feature (1)..( 8): Result.002 file - promoters60/1376888
ttttgttt

SEQ ID NO: 106202 - DNA, 8 bp, Unknown
  misc_feature (1)..( 8): Result.002 file - promoters60/1376888
ttttcttt

SEQ ID NO: 106203 - DNA, 8 bp, Unknown
  misc_feature (1)..( 8): Result.002 file - promoters60/1376888
ttttgttt

SEQ ID NO: 106204 - DNA, 8 bp, Unknown
  misc_feature (1)..( 8): Result.002 file - promoters60/1376888
tttagttt

SEQ ID NO: 106205 - DNA, 6 bp, Unknown
  misc_feature (1)..( 6): Result.002 file - promoters60/1376902
taatgc

SEQ ID NO: 106206 - DNA, 6 bp, Unknown
  misc_feature (1)..( 6): Result.002 file - promoters60/1376902
taatgc

SEQ ID NO: 106207 - DNA, 7 bp, Unknown
  misc_feature (1)..( 7): Result.002 file - promoters60/1376902
atactaa

SEQ ID NO: 106208 - DNA, 7 bp, Unknown
  misc_feature (1)..( 7): Result.002 file - promoters60/1376902
atagtaa

SEQ ID NO: 106209 - DNA, 8 bp, Unknown
  misc_feature (1)..( 8): Result.002 file - promoters60/1376902
aaggttaa

SEQ ID NO: 106210 - DNA, 8 bp, Unknown
  misc_feature (1)..( 8): Result.002 file - promoters60/1376902
aagggtaa

SEQ ID NO: 106211 - DNA, 7 bp, Unknown
  misc_feature (1)..( 7): Result.002 file - promoters60/1376902
tttgttg

SEQ ID NO: 106212 - DNA, 7 bp, Unknown
  misc_feature (1)..( 7): Result.002 file - promoters60/1376902
ttttttg

SEQ ID NO: 106213 - DNA, 7 bp, Unknown
  misc_feature (1)..( 7): Result.002 file - promoters60/1376902
ttctatt

SEQ ID NO: 106214 - DNA, 7 bp, Unknown
  misc_feature (1)..( 7): Result.002 file - promoters60/1376902
ttccatt

SEQ ID NO: 106215 - DNA, 7 bp, Unknown
  misc_feature (1)..( 7): Result.002 file - promoters60/1376902
acaaact

SEQ ID NO: 106216 - DNA, 7 bp, Unknown
  misc_feature (1)..( 7): Result.002 file - promoters60/1376902
acacact

SEQ ID NO: 106217 - DNA, 7 bp, Unknown
  misc_feature (1)..( 7): Result.002 file - promoters60/1376902
ccttttg

SEQ ID NO: 106218 - DNA, 7 bp, Unknown
  misc_feature (1)..( 7): Result.002 file - promoters60/1376902
ccttttg

SEQ ID NO: 106219 - DNA, 8 bp, Unknown
  misc_feature (1)..( 8): Result.002 file - promoters60/1376902
caacatca

SEQ ID NO: 106220 - DNA, 8 bp, Unknown
  misc_feature (1)..( 8): Result.002 file - promoters60/1376902
caatatca

SEQ ID NO: 106221 - DNA, 7 bp, Unknown
  misc_feature (1)..( 7): Result.002 file - promoters60/1376902
aacattt

SEQ ID NO: 106222 - DNA, 7 bp, Unknown
  misc_feature (1)..( 7): Result.002 file - promoters60/1376902
aactttt

SEQ ID NO: 106223 - DNA, 6 bp, Unknown
  misc_feature (1)..( 6): Result.002 file - promoters60/1376902
cttctt

SEQ ID NO: 106224 - DNA, 6 bp, Unknown
  misc_feature (1)..( 6): Result.002 file - promoters60/1376902
cttctt

SEQ ID NO: 106225 - DNA, 6 bp, Unknown
  misc_feature (1)..( 6): Result.002 file - promoters60/1376902
catctc

SEQ ID NO: 106226 - DNA, 6 bp, Unknown
  misc_feature (1)..( 6): Result.002 file - promoters60/1376902
catctc

SEQ ID NO: 106227 - DNA, 6 bp, Unknown
  misc_feature (1)..( 6): Result.002 file - promoters60/1376902
agtttt

SEQ ID NO: 106228 - DNA, 6 bp, Unknown
  misc_feature (1)..( 6): Result.002 file - promoters60/1376902
agtttt

SEQ ID NO: 106229 - DNA, 7 bp, Unknown
  misc_feature (1)..( 7): Result.002 file - promoters60/1376902
acataaa

SEQ ID NO: 106230 - DNA, 7 bp, Unknown
  misc_feature (1)..( 7): Result.002 file - promoters60/1376902
acaaaaa

SEQ ID NO: 106231 - DNA, 11 bp, Unknown
  misc_feature (1)..( 11): Result.002 file - promoters60/1376958
aatgatacaaa

SEQ ID NO: 106232 - DNA, 11 bp, Unknown
  misc_feature (1)..( 11): Result.002 file - promoters60/1376958
aatcatacaac

SEQ ID NO: 106233 - DNA, 11 bp, Unknown
  misc_feature (1)..( 11): Result.002 file - promoters60/1376958
atacatagaaa

SEQ ID NO: 106234 - DNA, 6 bp, Unknown
  misc_feature (1)..( 6): Result.002 file - promoters60/1376958
tcttga

SEQ ID NO: 106235 - DNA, 6 bp, Unknown
  misc_feature (1)..( 6): Result.002 file - promoters60/1376958
tcttga

SEQ ID NO: 106236 - DNA, 7 bp, Unknown
  misc_feature (1)..( 7): Result.002 file - promoters60/1376958
tagtata

SEQ ID NO: 106237 - DNA, 7 bp, Unknown
  misc_feature (1)..( 7): Result.002 file - promoters60/1376958
tagaata

SEQ ID NO: 106238 - DNA, 11 bp, Unknown
  misc_feature (1)..( 11): Result.002 file - promoters60/1376958
acacgttaagt

SEQ ID NO: 106239 - DNA, 11 bp, Unknown
  misc_feature (1)..( 11): Result.002 file - promoters60/1376958
acacattaagt

SEQ ID NO: 106240 - DNA, 11 bp, Unknown
  misc_feature (1)..( 11): Result.002 file - promoters60/1376958
gataattaaga

SEQ ID NO: 106241 - DNA, 7 bp, Unknown
  misc_feature (1)..( 7): Result.002 file - promoters60/1376958
caaataa

SEQ ID NO: 106242 - DNA, 7 bp, Unknown
  misc_feature (1)..( 7): Result.002 file - promoters60/1376958
caagtaa

SEQ ID NO: 106243 - DNA, 7 bp, Unknown
  misc_feature (1)..( 7): Result.002 file - promoters60/1376958
ctatata

SEQ ID NO: 106244 - DNA, 7 bp, Unknown
  misc_feature (1)..( 7): Result.002 file - promoters60/1376958
ctaaata

SEQ ID NO: 106245 - DNA, 6 bp, Unknown
  misc_feature (1)..( 6): Result.002 file - promoters60/1376958
tataaa

SEQ ID NO: 106246 - DNA, 6 bp, Unknown
  misc_feature (1)..( 6): Result.002 file - promoters60/1376958
tataaa

SEQ ID NO: 106247 - DNA, 7 bp, Unknown
  misc_feature (1)..( 7): Result.002 file - promoters60/1376958
cacacaa

SEQ ID NO: 106248 - DNA, 7 bp, Unknown
  misc_feature (1)..( 7): Result.002 file - promoters60/1376958
cacccaa

SEQ ID NO: 106249 - DNA, 7 bp, Unknown
  misc_feature (1)..( 7): Result.002 file - promoters60/1376958
aatatca

SEQ ID NO: 106250 - DNA, 7 bp, Unknown
  misc_feature (1)..( 7): Result.002 file - promoters60/1376958
aatctca

SEQ ID NO: 106251 - DNA, 8 bp, Unknown
  misc_feature (1)..( 8): Result.002 file - promoters60/1376958
atacaaat

SEQ ID NO: 106252 - DNA, 8 bp, Unknown
  misc_feature (1)..( 8): Result.002 file - promoters60/1376958
atagaaat

SEQ ID NO: 106253 - DNA, 7 bp, Unknown
  misc_feature (1)..( 7): Result.002 file - promoters60/1376958
atacata

SEQ ID NO: 106254 - DNA, 7 bp, Unknown
  misc_feature (1)..( 7): Result.002 file - promoters60/1376958
ataaata

SEQ ID NO: 106255 - DNA, 8 bp, Unknown
  misc_feature (1)..( 8): Result.002 file - promoters60/1376958
aatattaa

SEQ ID NO: 106256 - DNA, 8 bp, Unknown
  misc_feature (1)..( 8): Result.002 file - promoters60/1376958
aataataa

SEQ ID NO: 106257 - DNA, 8 bp, Unknown
  misc_feature (1)..( 8): Result.002 file - promoters60/1376958
acaagaag

SEQ ID NO: 106258 - DNA, 8 bp, Unknown
  misc_feature (1)..( 8): Result.002 file - promoters60/1376958
acaaaaag

SEQ ID NO: 106259 - DNA, 6 bp, Unknown
  misc_feature (1)..( 6): Result.002 file - promoters60/1376958
ataaac

SEQ ID NO: 106260 - DNA, 6 bp, Unknown
  misc_feature (1)..( 6): Result.002 file - promoters60/1376958
ataaac

SEQ ID NO: 106261 - DNA, 7 bp, Unknown
  misc_feature (1)..( 7): Result.002 file - promoters60/1376958
tgaacaa

SEQ ID NO: 106262 - DNA, 7 bp, Unknown
  misc_feature (1)..( 7): Result.002 file - promoters60/1376958
tgatcaa

SEQ ID NO: 106263 - DNA, 6 bp, Unknown
  misc_feature (1)..( 6): Result.002 file - promoters60/1376958
cgatta

SEQ ID NO: 106264 - DNA, 6 bp, Unknown
  misc_feature (1)..( 6): Result.002 file - promoters60/1376958
cgatta

SEQ ID NO: 106265 - DNA, 6 bp, Unknown
  misc_feature (1)..( 6): Result.002 file - promoters60/1376958
ttttga

SEQ ID NO: 106266 - DNA, 6 bp, Unknown
  misc_feature (1)..( 6): Result.002 file - promoters60/1376958
ttttga

SEQ ID NO: 106267 - DNA, 6 bp, Unknown
  misc_feature (1)..( 6): Result.002 file - promoters60/1376958
acagta

SEQ ID NO: 106268 - DNA, 6 bp, Unknown
  misc_feature (1)..( 6): Result.002 file - promoters60/1376958
acagta

SEQ ID NO: 106269 - DNA, 7 bp, Unknown
  misc_feature (1)..( 7): Result.002 file - promoters60/1376958
taaaata

SEQ ID NO: 106270 - DNA, 7 bp, Unknown
  misc_feature (1)..( 7): Result.002 file - promoters60/1376958
taatata

SEQ ID NO: 106271 - DNA, 6 bp, Unknown
  misc_feature (1)..( 6): Result.002 file - promoters60/1376958
ttgaca

SEQ ID NO: 106272 - DNA, 6 bp, Unknown
  misc_feature (1)..( 6): Result.002 file - promoters60/1376958
ttgaca

SEQ ID NO: 106273 - DNA, 7 bp, Unknown
  misc_feature (1)..( 7): Result.002 file - promoters60/1376958
aaccaag

SEQ ID NO: 106274 - DNA, 7 bp, Unknown
  misc_feature (1)..( 7): Result.002 file - promoters60/1376958
aacgaag

SEQ ID NO: 106275 - DNA, 8 bp, Unknown
  misc_feature (1)..( 8): Result.002 file - promoters60/1376958
acgatgac

SEQ ID NO: 106276 - DNA, 8 bp, Unknown
  misc_feature (1)..( 8): Result.002 file - promoters60/1376958
acgatgac

SEQ ID NO: 106277 - DNA, 6 bp, Unknown
  misc_feature (1)..( 6): Result.002 file - promoters60/1377045
aatatc

SEQ ID NO: 106278 - DNA, 6 bp, Unknown
  misc_feature (1)..( 6): Result.002 file - promoters60/1377045
aatatc

SEQ ID NO: 106279 - DNA, 6 bp, Unknown
  misc_feature (1)..( 6): Result.002 file - promoters60/1377045
aatgaa

SEQ ID NO: 106280 - DNA, 6 bp, Unknown
  misc_feature (1)..( 6): Result.002 file - promoters60/1377045
aatgaa

SEQ ID NO: 106281 - DNA, 7 bp, Unknown
  misc_feature (1)..( 7): Result.002 file - promoters60/1377045
ataattg

SEQ ID NO: 106282 - DNA, 7 bp, Unknown
  misc_feature (1)..( 7): Result.002 file - promoters60/1377045
atatttg

SEQ ID NO: 106283 - DNA, 6 bp, Unknown
  misc_feature (1)..( 6): Result.002 file - promoters60/1377045
gggtaa

SEQ ID NO: 106284 - DNA, 6 bp, Unknown
  misc_feature (1)..( 6): Result.002 file - promoters60/1377045
gggtaa

SEQ ID NO: 106285 - DNA, 8 bp, Unknown
  misc_feature (1)..( 8): Result.002 file - promoters60/1377045
aaagaaaa

SEQ ID NO: 106286 - DNA, 8 bp, Unknown
  misc_feature (1)..( 8): Result.002 file - promoters60/1377045
aaagaaaa

SEQ ID NO: 106287 - DNA, 8 bp, Unknown
  misc_feature (1)..( 8): Result.002 file - promoters60/1377045
aaaacaaa

SEQ ID NO: 106288 - DNA, 8 bp, Unknown
  misc_feature (1)..( 8): Result.002 file - promoters60/1377045
aaaataaa

SEQ ID NO: 106289 - DNA, 8 bp, Unknown
  misc_feature (1)..( 8): Result.002 file - promoters60/1377045
ttttgaaa

SEQ ID NO: 106290 - DNA, 8 bp, Unknown
  misc_feature (1)..( 8): Result.002 file - promoters60/1377045
tttttaaa

SEQ ID NO: 106291 - DNA, 6 bp, Unknown
  misc_feature (1)..( 6): Result.002 file - promoters60/1377045
agttaa

SEQ ID NO: 106292 - DNA, 6 bp, Unknown
  misc_feature (1)..( 6): Result.002 file - promoters60/1377045
agttaa

SEQ ID NO: 106293 - DNA, 6 bp, Unknown
  misc_feature (1)..( 6): Result.002 file - promoters60/1377045
accaaa

SEQ ID NO: 106294 - DNA, 6 bp, Unknown
  misc_feature (1)..( 6): Result.002 file - promoters60/1377045
accaaa

SEQ ID NO: 106295 - DNA, 8 bp, Unknown
  misc_feature (1)..( 8): Result.002 file - promoters60/1377045
aatgcttt

SEQ ID NO: 106296 - DNA, 8 bp, Unknown
  misc_feature (1)..( 8): Result.002 file - promoters60/1377045
aatggttt

SEQ ID NO: 106297 - DNA, 7 bp, Unknown
  misc_feature (1)..( 7): Result.002 file - promoters60/1377045
atatttt

SEQ ID NO: 106298 - DNA, 7 bp, Unknown
  misc_feature (1)..( 7): Result.002 file - promoters60/1377045
atatttt

SEQ ID NO: 106299 - DNA, 7 bp, Unknown
  misc_feature (1)..( 7): Result.002 file - promoters60/1377045
aaataaa

SEQ ID NO: 106300 - DNA, 7 bp, Unknown
  misc_feature (1)..( 7): Result.002 file - promoters60/1377045
aaataaa

SEQ ID NO: 106301 - DNA, 7 bp, Unknown
  misc_feature (1)..( 7): Result.002 file - promoters60/1377045
gtaaaac

SEQ ID NO: 106302 - DNA, 7 bp, Unknown
  misc_feature (1)..( 7): Result.002 file - promoters60/1377045
gtaaaac

SEQ ID NO: 106303 - DNA, 6 bp, Unknown
  misc_feature (1)..( 6): Result.002 file - promoters60/1377045
caaagg

SEQ ID NO: 106304 - DNA, 6 bp, Unknown
  misc_feature (1)..( 6): Result.002 file - promoters60/1377045
caaagg

SEQ ID NO: 106305 - DNA, 9 bp, Unknown
  misc_feature (1)..( 9): Result.002 file - promoters60/1377139
agttgaaga

SEQ ID NO: 106306 - DNA, 9 bp, Unknown
  misc_feature (1)..( 9): Result.002 file - promoters60/1377139
agttgaatc

SEQ ID NO: 106307 - DNA, 9 bp, Unknown
  misc_feature (1)..( 9): Result.002 file - promoters60/1377139
tcttggaga

SEQ ID NO: 106308 - DNA, 8 bp, Unknown
  misc_feature (1)..( 8): Result.002 file - promoters60/1377139
gaaactct

SEQ ID NO: 106309 - DNA, 8 bp, Unknown
  misc_feature (1)..( 8): Result.002 file - promoters60/1377139
gaatctct

SEQ ID NO: 106310 - DNA, 8 bp, Unknown
  misc_feature (1)..( 8): Result.002 file - promoters60/1377139
gaaagtct

SEQ ID NO: 106311 - DNA, 12 bp, Unknown
  misc_feature (1)..( 12): Result.002 file - promoters60/1377139
gattttgtctat

SEQ ID NO: 106312 - DNA, 12 bp, Unknown
  misc_feature (1)..( 12): Result.002 file - promoters60/1377139
gatgttgtttat

SEQ ID NO: 106313 - DNA, 12 bp, Unknown
  misc_feature (1)..( 12): Result.002 file - promoters60/1377139
tgagttattttc

SEQ ID NO: 106314 - DNA, 11 bp, Unknown
  misc_feature (1)..( 11): Result.002 file - promoters60/1377139
tcaagttaaac

SEQ ID NO: 106315 - DNA, 11 bp, Unknown
  misc_feature (1)..( 11): Result.002 file - promoters60/1377139
tcaatttaaaa

SEQ ID NO: 106316 - DNA, 11 bp, Unknown
  misc_feature (1)..( 11): Result.002 file - promoters60/1377139
gctttttaaag

SEQ ID NO: 106317 - DNA, 8 bp, Unknown
  misc_feature (1)..( 8): Result.002 file - promoters60/1377139
tttgagaa

SEQ ID NO: 106318 - DNA, 8 bp, Unknown
  misc_feature (1)..( 8): Result.002 file - promoters60/1377139
tttgagag

SEQ ID NO: 106319 - DNA, 8 bp, Unknown
  misc_feature (1)..( 8): Result.002 file - promoters60/1377139
actgagag

SEQ ID NO: 106320 - DNA, 10 bp, Unknown
  misc_feature (1)..( 10): Result.002 file - promoters60/1377192
taaaaaaaaa

SEQ ID NO: 106321 - DNA, 10 bp, Unknown
  misc_feature (1)..( 10): Result.002 file - promoters60/1377192
taacaaactt

SEQ ID NO: 106322 - DNA, 11 bp, Unknown
  misc_feature (1)..( 11): Result.002 file - promoters60/1377192
taaagaaaaag

SEQ ID NO: 106323 - DNA, 16 bp, Unknown
  misc_feature (1)..( 16): Result.002 file - promoters60/1377192
ttttttcaaaagcttg

SEQ ID NO: 106324 - DNA, 16 bp, Unknown
  misc_feature (1)..( 16): Result.002 file - promoters60/1377192
tttactcaacagcttg

SEQ ID NO: 106325 - DNA, 16 bp, Unknown
  misc_feature (1)..( 16): Result.002 file - promoters60/1377192
tttactaaaccaaaaa

SEQ ID NO: 106326 - DNA, 13 bp, Unknown
  misc_feature (1)..( 13): Result.002 file - promoters60/1377192
agcgaaacaaaaa

SEQ ID NO: 106327 - DNA, 13 bp, Unknown
  misc_feature (1)..( 13): Result.002 file - promoters60/1377192
aattgttcaaaaa

SEQ ID NO: 106328 - DNA, 13 bp, Unknown
  misc_feature (1)..( 13): Result.002 file - promoters60/1377192
aaataaacaaagg

SEQ ID NO: 106329 - DNA, 11 bp, Unknown
  misc_feature (1)..( 11): Result.002 file - promoters60/1377192
taaatatttaa

SEQ ID NO: 106330 - DNA, 11 bp, Unknown
  misc_feature (1)..( 11): Result.002 file - promoters60/1377192
ttaatctttaa

SEQ ID NO: 106331 - DNA, 11 bp, Unknown
  misc_feature (1)..( 11): Result.002 file - promoters60/1377192
ttaaacttgga

SEQ ID NO: 106332 - DNA, 9 bp, Unknown
  misc_feature (1)..( 9): Result.002 file - promoters60/1377192
aaaaaaagt

SEQ ID NO: 106333 - DNA, 9 bp, Unknown
  misc_feature (1)..( 9): Result.002 file - promoters60/1377192
aaagaaaca

SEQ ID NO: 106334 - DNA, 9 bp, Unknown
  misc_feature (1)..( 9): Result.002 file - promoters60/1377192
aaagtaaca

SEQ ID NO: 106335 - DNA, 10 bp, Unknown
  misc_feature (1)..( 10): Result.002 file - promoters60/1377192
ttctttaaca

SEQ ID NO: 106336 - DNA, 10 bp, Unknown
  misc_feature (1)..( 10): Result.002 file - promoters60/1377192
cgttttcaca

SEQ ID NO: 106337 - DNA, 10 bp, Unknown
  misc_feature (1)..( 10): Result.002 file - promoters60/1377192
cgtcttcact

SEQ ID NO: 106338 - DNA, 11 bp, Unknown
  misc_feature (1)..( 11): Result.002 file - promoters60/1377192
cgtcttcacta

SEQ ID NO: 106339 - DNA, 11 bp, Unknown
  misc_feature (1)..( 11): Result.002 file - promoters60/1377192
gacattcccta

SEQ ID NO: 106340 - DNA, 11 bp, Unknown
  misc_feature (1)..( 11): Result.002 file - promoters60/1377192
cgttttcacac

SEQ ID NO: 106341 - DNA, 8 bp, Unknown
  misc_feature (1)..( 8): Result.002 file - promoters60/1377197
gaaagaaa

SEQ ID NO: 106342 - DNA, 8 bp, Unknown
  misc_feature (1)..( 8): Result.002 file - promoters60/1377197
gaaagaag

SEQ ID NO: 106343 - DNA, 8 bp, Unknown
  misc_feature (1)..( 8): Result.002 file - promoters60/1377197
aaaacaaa

SEQ ID NO: 106344 - DNA, 8 bp, Unknown
  misc_feature (1)..( 8): Result.002 file - promoters60/1377197
caaataaa

SEQ ID NO: 106345 - DNA, 8 bp, Unknown
  misc_feature (1)..( 8): Result.002 file - promoters60/1377197
caaatcaa

SEQ ID NO: 106346 - DNA, 9 bp, Unknown
  misc_feature (1)..( 9): Result.002 file - promoters60/1377197
aaagaaaga

SEQ ID NO: 106347 - DNA, 9 bp, Unknown
  misc_feature (1)..( 9): Result.002 file - promoters60/1377197
gcagagaga

SEQ ID NO: 106348 - DNA, 9 bp, Unknown
  misc_feature (1)..( 9): Result.002 file - promoters60/1377197
aaacaaatg

SEQ ID NO: 106349 - DNA, 9 bp, Unknown
  misc_feature (1)..( 9): Result.002 file - promoters60/1377197
aaataaaat

SEQ ID NO: 106350 - DNA, 9 bp, Unknown
  misc_feature (1)..( 9): Result.002 file - promoters60/1377197
aaatcaatg

SEQ ID NO: 106351 - DNA, 7 bp, Unknown
  misc_feature (1)..( 7): Result.002 file - promoters60/1377197
ataaaaa

SEQ ID NO: 106352 - DNA, 7 bp, Unknown
  misc_feature (1)..( 7): Result.002 file - promoters60/1377197
ataaaaa

SEQ ID NO: 106353 - DNA, 7 bp, Unknown
  misc_feature (1)..( 7): Result.002 file - promoters60/1377197
ataaaat

SEQ ID NO: 106354 - DNA, 7 bp, Unknown
  misc_feature (1)..( 7): Result.002 file - promoters60/1377197
atataaa

SEQ ID NO: 106355 - DNA, 13 bp, Unknown
  misc_feature (1)..( 13): Result.002 file - promoters60/1377197
tttatgaaagaag

SEQ ID NO: 106356 - DNA, 13 bp, Unknown
  misc_feature (1)..( 13): Result.002 file - promoters60/1377197
ggaaaaaaaaaag

SEQ ID NO: 106357 - DNA, 13 bp, Unknown
  misc_feature (1)..( 13): Result.002 file - promoters60/1377197
aatcaaaaataag

SEQ ID NO: 106358 - DNA, 13 bp, Unknown
  misc_feature (1)..( 13): Result.002 file - promoters60/1377197
atatgtaaaacga

SEQ ID NO: 106359 - DNA, 11 bp, Unknown
  misc_feature (1)..( 11): Result.002 file - promoters60/1377268
ctaatcagaaa

SEQ ID NO: 106360 - DNA, 11 bp, Unknown
  misc_feature (1)..( 11): Result.002 file - promoters60/1377268
ctaattagaaa

SEQ ID NO: 106361 - DNA, 7 bp, Unknown
  misc_feature (1)..( 7): Result.002 file - promoters60/1377268
tcttttt

SEQ ID NO: 106362 - DNA, 7 bp, Unknown
  misc_feature (1)..( 7): Result.002 file - promoters60/1377268
tctattt

SEQ ID NO: 106363 - DNA, 10 bp, Unknown
  misc_feature (1)..( 10): Result.002 file - promoters60/1377268
aaactaaaac

SEQ ID NO: 106364 - DNA, 10 bp, Unknown
  misc_feature (1)..( 10): Result.002 file - promoters60/1377268
aaactactta

SEQ ID NO: 106365 - DNA, 10 bp, Unknown
  misc_feature (1)..( 10): Result.002 file - promoters60/1377268
aaactacaac

SEQ ID NO: 106366 - DNA, 10 bp, Unknown
  misc_feature (1)..( 10): Result.002 file - promoters60/1377268
aaacgtgaaa

SEQ ID NO: 106367 - DNA, 10 bp, Unknown
  misc_feature (1)..( 10): Result.002 file - promoters60/1377268
taacgtggca

SEQ ID NO: 106368 - DNA, 10 bp, Unknown
  misc_feature (1)..( 10): Result.002 file - promoters60/1377268
aaacgtaaaa

SEQ ID NO: 106369 - DNA, 6 bp, Unknown
  misc_feature (1)..( 6): Result.002 file - promoters60/1377268
tttact

SEQ ID NO: 106370 - DNA, 6 bp, Unknown
  misc_feature (1)..( 6): Result.002 file - promoters60/1377268
tttact

SEQ ID NO: 106371 - DNA, 14 bp, Unknown
  misc_feature (1)..( 14): Result.002 file - promoters60/1377268
tacctttttttaac

SEQ ID NO: 106372 - DNA, 14 bp, Unknown
  misc_feature (1)..( 14): Result.002 file - promoters60/1377268
tactttttgttaac

SEQ ID NO: 106373 - DNA, 6 bp, Unknown
  misc_feature (1)..( 6): Result.002 file - promoters60/1377268
acaatt

SEQ ID NO: 106374 - DNA, 6 bp, Unknown
  misc_feature (1)..( 6): Result.002 file - promoters60/1377268
acaatt

SEQ ID NO: 106375 - DNA, 6 bp, Unknown
  misc_feature (1)..( 6): Result.002 file - promoters60/1377268
cttcaa

SEQ ID NO: 106376 - DNA, 6 bp, Unknown
  misc_feature (1)..( 6): Result.002 file - promoters60/1377268
cttcaa

SEQ ID NO: 106377 - DNA, 6 bp, Unknown
  misc_feature (1)..( 6): Result.002 file - promoters60/1377268
tattta

SEQ ID NO: 106378 - DNA, 6 bp, Unknown
  misc_feature (1)..( 6): Result.002 file - promoters60/1377268
tattta

SEQ ID NO: 106379 - DNA, 7 bp, Unknown
  misc_feature (1)..( 7): Result.002 file - promoters60/1377268
ctaccaa

SEQ ID NO: 106380 - DNA, 7 bp, Unknown
  misc_feature (1)..( 7): Result.002 file - promoters60/1377268
ctaccaa

SEQ ID NO: 106381 - DNA, 7 bp, Unknown
  misc_feature (1)..( 7): Result.002 file - promoters60/1377268
tacgaaa

SEQ ID NO: 106382 - DNA, 7 bp, Unknown
  misc_feature (1)..( 7): Result.002 file - promoters60/1377268
tactaaa

SEQ ID NO: 106383 - DNA, 7 bp, Unknown
  misc_feature (1)..( 7): Result.002 file - promoters60/1377268
agatata

SEQ ID NO: 106384 - DNA, 7 bp, Unknown
  misc_feature (1)..( 7): Result.002 file - promoters60/1377268
agaaata

SEQ ID NO: 106385 - DNA, 8 bp, Unknown
  misc_feature (1)..( 8): Result.002 file - promoters60/1377268
taagatta

SEQ ID NO: 106386 - DNA, 8 bp, Unknown
  misc_feature (1)..( 8): Result.002 file - promoters60/1377268
taagttta

SEQ ID NO: 106387 - DNA, 11 bp, Unknown
  misc_feature (1)..( 11): Result.002 file - promoters60/1377268
acaatataaac

SEQ ID NO: 106388 - DNA, 11 bp, Unknown
  misc_feature (1)..( 11): Result.002 file - promoters60/1377268
tatatataaag

SEQ ID NO: 106389 - DNA, 11 bp, Unknown
  misc_feature (1)..( 11): Result.002 file - promoters60/1377268
tatatataaag

SEQ ID NO: 106390 - DNA, 6 bp, Unknown
  misc_feature (1)..( 6): Result.002 file - promoters60/1377268
aatatt

SEQ ID NO: 106391 - DNA, 6 bp, Unknown
  misc_feature (1)..( 6): Result.002 file - promoters60/1377268
aatatt

SEQ ID NO: 106392 - DNA, 6 bp, Unknown
  misc_feature (1)..( 6): Result.002 file - promoters60/1377268
acttat

SEQ ID NO: 106393 - DNA, 6 bp, Unknown
  misc_feature (1)..( 6): Result.002 file - promoters60/1377268
acttat

SEQ ID NO: 106394 - DNA, 6 bp, Unknown
  misc_feature (1)..( 6): Result.002 file - promoters60/1377268
ataaac

SEQ ID NO: 106395 - DNA, 6 bp, Unknown
  misc_feature (1)..( 6): Result.002 file - promoters60/1377268
ataaac

SEQ ID NO: 106396 - DNA, 6 bp, Unknown
  misc_feature (1)..( 6): Result.002 file - promoters60/1377268
aagata

SEQ ID NO: 106397 - DNA, 6 bp, Unknown
  misc_feature (1)..( 6): Result.002 file - promoters60/1377268
aagata

SEQ ID NO: 106398 - DNA, 7 bp, Unknown
  misc_feature (1)..( 7): Result.002 file - promoters60/1377268
atttatt

SEQ ID NO: 106399 - DNA, 7 bp, Unknown
  misc_feature (1)..( 7): Result.002 file - promoters60/1377268
atttatt

SEQ ID NO: 106400 - DNA, 12 bp, Unknown
  misc_feature (1)..( 12): Result.002 file - promoters60/1377412
cgctatttgtaa

SEQ ID NO: 106401 - DNA, 12 bp, Unknown
  misc_feature (1)..( 12): Result.002 file - promoters60/1377412
aactatttttta

SEQ ID NO: 106402 - DNA, 12 bp, Unknown
  misc_feature (1)..( 12): Result.002 file - promoters60/1377412
tactgtttgctt

SEQ ID NO: 106403 - DNA, 12 bp, Unknown
  misc_feature (1)..( 12): Result.002 file - promoters60/1377412
acgtgttagctt

SEQ ID NO: 106404 - DNA, 12 bp, Unknown
  misc_feature (1)..( 12): Result.002 file - promoters60/1377412
tactgtgaattc

SEQ ID NO: 106405 - DNA, 7 bp, Unknown
  misc_feature (1)..( 7): Result.002 file - promoters60/1377472
aaaacaa

SEQ ID NO: 106406 - DNA, 7 bp, Unknown
  misc_feature (1)..( 7): Result.002 file - promoters60/1377472
aaaacat

SEQ ID NO: 106407 - DNA, 7 bp, Unknown
  misc_feature (1)..( 7): Result.002 file - promoters60/1377472
aaatcaa

SEQ ID NO: 106408 - DNA, 8 bp, Unknown
  misc_feature (1)..( 8): Result.002 file - promoters60/1377472
aatctttt

SEQ ID NO: 106409 - DNA, 8 bp, Unknown
  misc_feature (1)..( 8): Result.002 file - promoters60/1377472
catcgttt

SEQ ID NO: 106410 - DNA, 8 bp, Unknown
  misc_feature (1)..( 8): Result.002 file - promoters60/1377472
catcgtcg

SEQ ID NO: 106411 - DNA, 8 bp, Unknown
  misc_feature (1)..( 8): Result.002 file - promoters60/1377472
tattattt

SEQ ID NO: 106412 - DNA, 8 bp, Unknown
  misc_feature (1)..( 8): Result.002 file - promoters60/1377472
gattcttt

SEQ ID NO: 106413 - DNA, 8 bp, Unknown
  misc_feature (1)..( 8): Result.002 file - promoters60/1377472
gattctct

SEQ ID NO: 106414 - DNA, 7 bp, Unknown
  misc_feature (1)..( 7): Result.002 file - promoters60/1377522
gttcctt

SEQ ID NO: 106415 - DNA, 7 bp, Unknown
  misc_feature (1)..( 7): Result.002 file - promoters60/1377522
gtttctt

SEQ ID NO: 106416 - DNA, 7 bp, Unknown
  misc_feature (1)..( 7): Result.002 file - promoters60/1377522
gttcctc

SEQ ID NO: 106417 - DNA, 8 bp, Unknown
  misc_feature (1)..( 8): Result.002 file - promoters60/1377522
aaatgtta

SEQ ID NO: 106418 - DNA, 8 bp, Unknown
  misc_feature (1)..( 8): Result.002 file - promoters60/1377522
aaaagttt

SEQ ID NO: 106419 - DNA, 8 bp, Unknown
  misc_feature (1)..( 8): Result.002 file - promoters60/1377522
caatttta

SEQ ID NO: 106420 - DNA, 7 bp, Unknown
  misc_feature (1)..( 7): Result.002 file - promoters60/1377522
gttgatt

SEQ ID NO: 106421 - DNA, 7 bp, Unknown
  misc_feature (1)..( 7): Result.002 file - promoters60/1377522
gttgatg

SEQ ID NO: 106422 - DNA, 7 bp, Unknown
  misc_feature (1)..( 7): Result.002 file - promoters60/1377522
gttaatt

SEQ ID NO: 106423 - DNA, 8 bp, Unknown
  misc_feature (1)..( 8): Result.002 file - promoters60/1377522
cgacatgt

SEQ ID NO: 106424 - DNA, 8 bp, Unknown
  misc_feature (1)..( 8): Result.002 file - promoters60/1377522
cgacatta

SEQ ID NO: 106425 - DNA, 8 bp, Unknown
  misc_feature (1)..( 8): Result.002 file - promoters60/1377522
cgacatgt

SEQ ID NO: 106426 - DNA, 8 bp, Unknown
  misc_feature (1)..( 8): Result.002 file - promoters60/1377522
acacatgt

SEQ ID NO: 106427 - DNA, 6 bp, Unknown
  misc_feature (1)..( 6): Result.002 file - promoters60/1377522
acatgt

SEQ ID NO: 106428 - DNA, 6 bp, Unknown
  misc_feature (1)..( 6): Result.002 file - promoters60/1377522
acatgt

SEQ ID NO: 106429 - DNA, 6 bp, Unknown
  misc_feature (1)..( 6): Result.002 file - promoters60/1377522
acatgt

SEQ ID NO: 106430 - DNA, 7 bp, Unknown
  misc_feature (1)..( 7): Result.002 file - promoters60/1377564
attttac

SEQ ID NO: 106431 - DNA, 7 bp, Unknown
  misc_feature (1)..( 7): Result.002 file - promoters60/1377564
tttttac

SEQ ID NO: 106432 - DNA, 7 bp, Unknown
  misc_feature (1)..( 7): Result.002 file - promoters60/1377564
attttaa

SEQ ID NO: 106433 - DNA, 9 bp, Unknown
  misc_feature (1)..( 9): Result.002 file - promoters60/1377564
ttgtattaa

SEQ ID NO: 106434 - DNA, 9 bp, Unknown
  misc_feature (1)..( 9): Result.002 file - promoters60/1377564
aagtaataa

SEQ ID NO: 106435 - DNA, 9 bp, Unknown
  misc_feature (1)..( 9): Result.002 file - promoters60/1377564
aagaaatga

SEQ ID NO: 106436 - DNA, 7 bp, Unknown
  misc_feature (1)..( 7): Result.002 file - promoters60/1377564
caaaatt

SEQ ID NO: 106437 - DNA, 7 bp, Unknown
  misc_feature (1)..( 7): Result.002 file - promoters60/1377564
caaaatc

SEQ ID NO: 106438 - DNA, 7 bp, Unknown
  misc_feature (1)..( 7): Result.002 file - promoters60/1377564
taaaatc

SEQ ID NO: 106439 - DNA, 8 bp, Unknown
  misc_feature (1)..( 8): Result.002 file - promoters60/1377564
ttatgtca

SEQ ID NO: 106440 - DNA, 8 bp, Unknown
  misc_feature (1)..( 8): Result.002 file - promoters60/1377564
ttatgtct

SEQ ID NO: 106441 - DNA, 8 bp, Unknown
  misc_feature (1)..( 8): Result.002 file - promoters60/1377564
acatgtct

SEQ ID NO: 106442 - DNA, 7 bp, Unknown
  misc_feature (1)..( 7): Result.002 file - promoters60/1377564
gatggat

SEQ ID NO: 106443 - DNA, 7 bp, Unknown
  misc_feature (1)..( 7): Result.002 file - promoters60/1377564
gatcgat

SEQ ID NO: 106444 - DNA, 7 bp, Unknown
  misc_feature (1)..( 7): Result.002 file - promoters60/1377564
gatcgaa

SEQ ID NO: 106445 - DNA, 10 bp, Unknown
  misc_feature (1)..( 10): Result.002 file - promoters60/1377642
taaaaatgaa

SEQ ID NO: 106446 - DNA, 10 bp, Unknown
  misc_feature (1)..( 10): Result.002 file - promoters60/1377642
taaaaagtct

SEQ ID NO: 106447 - DNA, 10 bp, Unknown
  misc_feature (1)..( 10): Result.002 file - promoters60/1377642
aaaaaaagaa

SEQ ID NO: 106448 - DNA, 10 bp, Unknown
  misc_feature (1)..( 10): Result.002 file - promoters60/1377642
caaaaatctt

SEQ ID NO: 106449 - DNA, 10 bp, Unknown
  misc_feature (1)..( 10): Result.002 file - promoters60/1377642
gaaaaagggt

SEQ ID NO: 106450 - DNA, 13 bp, Unknown
  misc_feature (1)..( 13): Result.002 file - promoters60/1377642
actcataataaat

SEQ ID NO: 106451 - DNA, 13 bp, Unknown
  misc_feature (1)..( 13): Result.002 file - promoters60/1377642
tcatataatagta

SEQ ID NO: 106452 - DNA, 13 bp, Unknown
  misc_feature (1)..( 13): Result.002 file - promoters60/1377642
atttataatataa

SEQ ID NO: 106453 - DNA, 13 bp, Unknown
  misc_feature (1)..( 13): Result.002 file - promoters60/1377642
acttataatgaat

SEQ ID NO: 106454 - DNA, 12 bp, Unknown
  misc_feature (1)..( 12): Result.002 file - promoters60/1377642
atataataaata

SEQ ID NO: 106455 - DNA, 12 bp, Unknown
  misc_feature (1)..( 12): Result.002 file - promoters60/1377642
gcataaaaaata

SEQ ID NO: 106456 - DNA, 12 bp, Unknown
  misc_feature (1)..( 12): Result.002 file - promoters60/1377642
ttattatacttc

SEQ ID NO: 106457 - DNA, 12 bp, Unknown
  misc_feature (1)..( 12): Result.002 file - promoters60/1377642
atataattatct

SEQ ID NO: 106458 - DNA, 12 bp, Unknown
  misc_feature (1)..( 12): Result.002 file - promoters60/1377642
gtttaataacaa

SEQ ID NO: 106459 - DNA, 12 bp, Unknown
  misc_feature (1)..( 12): Result.002 file - promoters60/1377642
ctaaaatataat

SEQ ID NO: 106460 - DNA, 11 bp, Unknown
  misc_feature (1)..( 11): Result.002 file - promoters60/1377642
tgtatatatat

SEQ ID NO: 106461 - DNA, 11 bp, Unknown
  misc_feature (1)..( 11): Result.002 file - promoters60/1377642
aaaataaatag

SEQ ID NO: 106462 - DNA, 11 bp, Unknown
  misc_feature (1)..( 11): Result.002 file - promoters60/1377642
aaaatatataa

SEQ ID NO: 106463 - DNA, 11 bp, Unknown
  misc_feature (1)..( 11): Result.002 file - promoters60/1377642
agaataaaaat

SEQ ID NO: 106464 - DNA, 11 bp, Unknown
  misc_feature (1)..( 11): Result.002 file - promoters60/1377642
aaaatataata

SEQ ID NO: 106465 - DNA, 12 bp, Unknown
  misc_feature (1)..( 12): Result.002 file - promoters60/1377642
tagaaattaata

SEQ ID NO: 106466 - DNA, 12 bp, Unknown
  misc_feature (1)..( 12): Result.002 file - promoters60/1377642
agataattaagt

SEQ ID NO: 106467 - DNA, 11 bp, Unknown
  misc_feature (1)..( 11): Result.002 file - promoters60/1377642
taaaatcaata

SEQ ID NO: 106468 - DNA, 11 bp, Unknown
  misc_feature (1)..( 11): Result.002 file - promoters60/1377642
tttaattatta

SEQ ID NO: 106469 - DNA, 12 bp, Unknown
  misc_feature (1)..( 12): Result.002 file - promoters60/1377642
ataacatcactt

SEQ ID NO: 106470 - DNA, 12 bp, Unknown
  misc_feature (1)..( 12): Result.002 file - promoters60/1377642
ttttatcacaag

SEQ ID NO: 106471 - DNA, 12 bp, Unknown
  misc_feature (1)..( 12): Result.002 file - promoters60/1377642
ttttgtcaacga

SEQ ID NO: 106472 - DNA, 12 bp, Unknown
  misc_feature (1)..( 12): Result.002 file - promoters60/1377642
gtataacaataa

SEQ ID NO: 106473 - DNA, 12 bp, Unknown
  misc_feature (1)..( 12): Result.002 file - promoters60/1377642
cggtgtaaacga

SEQ ID NO: 106474 - DNA, 12 bp, Unknown
  misc_feature (1)..( 12): Result.002 file - promoters60/1377642
ttttgtatctaa

SEQ ID NO: 106475 - DNA, 8 bp, Unknown
  misc_feature (1)..( 8): Result.002 file - promoters60/1377642
atatatat

SEQ ID NO: 106476 - DNA, 8 bp, Unknown
  misc_feature (1)..( 8): Result.002 file - promoters60/1377642
atatttat

SEQ ID NO: 106477 - DNA, 8 bp, Unknown
  misc_feature (1)..( 8): Result.002 file - promoters60/1377642
caatttat

SEQ ID NO: 106478 - DNA, 8 bp, Unknown
  misc_feature (1)..( 8): Result.002 file - promoters60/1377642
taatttat

SEQ ID NO: 106479 - DNA, 8 bp, Unknown
  misc_feature (1)..( 8): Result.002 file - promoters60/1377642
aatcaaaa

SEQ ID NO: 106480 - DNA, 8 bp, Unknown
  misc_feature (1)..( 8): Result.002 file - promoters60/1377642
aatcaaat

SEQ ID NO: 106481 - DNA, 9 bp, Unknown
  misc_feature (1)..( 9): Result.002 file - promoters60/1377642
gatccaaac

SEQ ID NO: 106482 - DNA, 9 bp, Unknown
  misc_feature (1)..( 9): Result.002 file - promoters60/1377642
ctttcaaat

SEQ ID NO: 106483 - DNA, 9 bp, Unknown
  misc_feature (1)..( 9): Result.002 file - promoters60/1377642
tatcctaac

SEQ ID NO: 106484 - DNA, 11 bp, Unknown
  misc_feature (1)..( 11): Result.002 file - promoters60/1377642
ctagacacgta

SEQ ID NO: 106485 - DNA, 11 bp, Unknown
  misc_feature (1)..( 11): Result.002 file - promoters60/1377642
atcaacacgta

SEQ ID NO: 106486 - DNA, 11 bp, Unknown
  misc_feature (1)..( 11): Result.002 file - promoters60/1377642
aaagagacgaa

SEQ ID NO: 106487 - DNA, 11 bp, Unknown
  misc_feature (1)..( 11): Result.002 file - promoters60/1377642
aaaaagaatac

SEQ ID NO: 106488 - DNA, 9 bp, Unknown
  misc_feature (1)..( 9): Result.002 file - promoters60/1377642
aaactatac

SEQ ID NO: 106489 - DNA, 9 bp, Unknown
  misc_feature (1)..( 9): Result.002 file - promoters60/1377642
ttactttac

SEQ ID NO: 106490 - DNA, 9 bp, Unknown
  misc_feature (1)..( 9): Result.002 file - promoters60/1377642
aatctttac

SEQ ID NO: 106491 - DNA, 9 bp, Unknown
  misc_feature (1)..( 9): Result.002 file - promoters60/1377642
ttaattttt

SEQ ID NO: 106492 - DNA, 10 bp, Unknown
  misc_feature (1)..( 10): Result.002 file - promoters60/1377642
ctttgttggt

SEQ ID NO: 106493 - DNA, 10 bp, Unknown
  misc_feature (1)..( 10): Result.002 file - promoters60/1377642
ttttattgat

SEQ ID NO: 106494 - DNA, 10 bp, Unknown
  misc_feature (1)..( 10): Result.002 file - promoters60/1377642
cgttactgat

SEQ ID NO: 106495 - DNA, 10 bp, Unknown
  misc_feature (1)..( 10): Result.002 file - promoters60/1377642
ttttatcgag

SEQ ID NO: 106496 - DNA, 8 bp, Unknown
  misc_feature (1)..( 8): Result.002 file - promoters60/1377642
tttaaaac

SEQ ID NO: 106497 - DNA, 8 bp, Unknown
  misc_feature (1)..( 8): Result.002 file - promoters60/1377642
tttcaaat

SEQ ID NO: 106498 - DNA, 8 bp, Unknown
  misc_feature (1)..( 8): Result.002 file - promoters60/1377642
aatcaaat

SEQ ID NO: 106499 - DNA, 8 bp, Unknown
  misc_feature (1)..( 8): Result.002 file - promoters60/1377642
tttgaaat

SEQ ID NO: 106500 - DNA, 11 bp, Unknown
  misc_feature (1)..( 11): Result.002 file - promoters60/1377642
tgtgcaaaaat

SEQ ID NO: 106501 - DNA, 11 bp, Unknown
  misc_feature (1)..( 11): Result.002 file - promoters60/1377642
tgaccaaaaaa

SEQ ID NO: 106502 - DNA, 11 bp, Unknown
  misc_feature (1)..( 11): Result.002 file - promoters60/1377642
tgtccaaaaat

SEQ ID NO: 106503 - DNA, 11 bp, Unknown
  misc_feature (1)..( 11): Result.002 file - promoters60/1377642
agacgaaaaag

SEQ ID NO: 106504 - DNA, 8 bp, Unknown
  misc_feature (1)..( 8): Result.002 file - promoters60/1377642
ttataatg

SEQ ID NO: 106505 - DNA, 8 bp, Unknown
  misc_feature (1)..( 8): Result.002 file - promoters60/1377642
atataata

SEQ ID NO: 106506 - DNA, 8 bp, Unknown
  misc_feature (1)..( 8): Result.002 file - promoters60/1377642
ttattata

SEQ ID NO: 106507 - DNA, 8 bp, Unknown
  misc_feature (1)..( 8): Result.002 file - promoters60/1377642
ataaaatc

SEQ ID NO: 106508 - DNA, 7 bp, Unknown
  misc_feature (1)..( 7): Result.002 file - promoters60/1377642
cattttt

SEQ ID NO: 106509 - DNA, 7 bp, Unknown
  misc_feature (1)..( 7): Result.002 file - promoters60/1377642
tattttt

SEQ ID NO: 106510 - DNA, 7 bp, Unknown
  misc_feature (1)..( 7): Result.002 file - promoters60/1377642
aattttt

SEQ ID NO: 106511 - DNA, 7 bp, Unknown
  misc_feature (1)..( 7): Result.002 file - promoters60/1377642
aatcttt

SEQ ID NO: 106512 - DNA, 10 bp, Unknown
  misc_feature (1)..( 10): Result.002 file - promoters60/1377680
aaatcatttt

SEQ ID NO: 106513 - DNA, 10 bp, Unknown
  misc_feature (1)..( 10): Result.002 file - promoters60/1377680
aaataatttt

SEQ ID NO: 106514 - DNA, 10 bp, Unknown
  misc_feature (1)..( 10): Result.002 file - promoters60/1377680
caatcatatt

SEQ ID NO: 106515 - DNA, 10 bp, Unknown
  misc_feature (1)..( 10): Result.002 file - promoters60/1377680
ctatcataat

SEQ ID NO: 106516 - DNA, 10 bp, Unknown
  misc_feature (1)..( 10): Result.002 file - promoters60/1377680
atatgatata

SEQ ID NO: 106517 - DNA, 10 bp, Unknown
  misc_feature (1)..( 10): Result.002 file - promoters60/1377680
aaataaagtg

SEQ ID NO: 106518 - DNA, 6 bp, Unknown
  misc_feature (1)..( 6): Result.002 file - promoters60/1377687
attcaa

SEQ ID NO: 106519 - DNA, 6 bp, Unknown
  misc_feature (1)..( 6): Result.002 file - promoters60/1377687
attcaa

SEQ ID NO: 106520 - DNA, 7 bp, Unknown
  misc_feature (1)..( 7): Result.002 file - promoters60/1377687
cttttct

SEQ ID NO: 106521 - DNA, 7 bp, Unknown
  misc_feature (1)..( 7): Result.002 file - promoters60/1377687
cttatct

SEQ ID NO: 106522 - DNA, 7 bp, Unknown
  misc_feature (1)..( 7): Result.002 file - promoters60/1377687
gttatct

SEQ ID NO: 106523 - DNA, 8 bp, Unknown
  misc_feature (1)..( 8): Result.002 file - promoters60/1377687
tctagaac

SEQ ID NO: 106524 - DNA, 8 bp, Unknown
  misc_feature (1)..( 8): Result.002 file - promoters60/1377687
tctaaaac

SEQ ID NO: 106525 - DNA, 8 bp, Unknown
  misc_feature (1)..( 8): Result.002 file - promoters60/1377687
aaaacaat

SEQ ID NO: 106526 - DNA, 8 bp, Unknown
  misc_feature (1)..( 8): Result.002 file - promoters60/1377687
aaaaaaat

SEQ ID NO: 106527 - DNA, 8 bp, Unknown
  misc_feature (1)..( 8): Result.002 file - promoters60/1377687
aaaccaag

SEQ ID NO: 106528 - DNA, 6 bp, Unknown
  misc_feature (1)..( 6): Result.002 file - promoters60/1377687
gcaaaa

SEQ ID NO: 106529 - DNA, 6 bp, Unknown
  misc_feature (1)..( 6): Result.002 file - promoters60/1377687
gcaaaa

SEQ ID NO: 106530 - DNA, 8 bp, Unknown
  misc_feature (1)..( 8): Result.002 file - promoters60/1377687
tatttata

SEQ ID NO: 106531 - DNA, 8 bp, Unknown
  misc_feature (1)..( 8): Result.002 file - promoters60/1377687
tatatata

SEQ ID NO: 106532 - DNA, 8 bp, Unknown
  misc_feature (1)..( 8): Result.002 file - promoters60/1377687
ttcaaaac

SEQ ID NO: 106533 - DNA, 8 bp, Unknown
  misc_feature (1)..( 8): Result.002 file - promoters60/1377687
ttcataac

SEQ ID NO: 106534 - DNA, 15 bp, Unknown
  misc_feature (1)..( 15): Result.002 file - promoters60/1377687
actaaaataactcac

SEQ ID NO: 106535 - DNA, 15 bp, Unknown
  misc_feature (1)..( 15): Result.002 file - promoters60/1377687
acagaaataaatcac

SEQ ID NO: 106536 - DNA, 15 bp, Unknown
  misc_feature (1)..( 15): Result.002 file - promoters60/1377687
acacaaatatgccaa

SEQ ID NO: 106537 - DNA, 6 bp, Unknown
  misc_feature (1)..( 6): Result.002 file - promoters60/1377687
tactaa

SEQ ID NO: 106538 - DNA, 6 bp, Unknown
  misc_feature (1)..( 6): Result.002 file - promoters60/1377687
tactaa

SEQ ID NO: 106539 - DNA, 7 bp, Unknown
  misc_feature (1)..( 7): Result.002 file - promoters60/1377687
aaaatca

SEQ ID NO: 106540 - DNA, 7 bp, Unknown
  misc_feature (1)..( 7): Result.002 file - promoters60/1377687
aaattca

SEQ ID NO: 106541 - DNA, 6 bp, Unknown
  misc_feature (1)..( 6): Result.002 file - promoters60/1377687
aattat

SEQ ID NO: 106542 - DNA, 6 bp, Unknown
  misc_feature (1)..( 6): Result.002 file - promoters60/1377687
aattat

SEQ ID NO: 106543 - DNA, 7 bp, Unknown
  misc_feature (1)..( 7): Result.002 file - promoters60/1377687
ataaatt

SEQ ID NO: 106544 - DNA, 7 bp, Unknown
  misc_feature (1)..( 7): Result.002 file - promoters60/1377687
atacatt

SEQ ID NO: 106545 - DNA, 8 bp, Unknown
  misc_feature (1)..( 8): Result.002 file - promoters60/1377714
gaagccag

SEQ ID NO: 106546 - DNA, 8 bp, Unknown
  misc_feature (1)..( 8): Result.002 file - promoters60/1377714
gaaaccac

SEQ ID NO: 106547 - DNA, 8 bp, Unknown
  misc_feature (1)..( 8): Result.002 file - promoters60/1377714
caaaacac

SEQ ID NO: 106548 - DNA, 8 bp, Unknown
  misc_feature (1)..( 8): Result.002 file - promoters60/1377714
gaagaaat

SEQ ID NO: 106549 - DNA, 8 bp, Unknown
  misc_feature (1)..( 8): Result.002 file - promoters60/1377714
aaagaaaa

SEQ ID NO: 106550 - DNA, 8 bp, Unknown
  misc_feature (1)..( 8): Result.002 file - promoters60/1377714
gaacaaat

SEQ ID NO: 106551 - DNA, 13 bp, Unknown
  misc_feature (1)..( 13): Result.002 file - promoters60/1377714
gttatgatttctt

SEQ ID NO: 106552 - DNA, 13 bp, Unknown
  misc_feature (1)..( 13): Result.002 file - promoters60/1377714
gttataatttttt

SEQ ID NO: 106553 - DNA, 13 bp, Unknown
  misc_feature (1)..( 13): Result.002 file - promoters60/1377714
gttacaatttttt

SEQ ID NO: 106554 - DNA, 8 bp, Unknown
  misc_feature (1)..( 8): Result.002 file - promoters60/1377714
atgagata

SEQ ID NO: 106555 - DNA, 8 bp, Unknown
  misc_feature (1)..( 8): Result.002 file - promoters60/1377714
ttgatata

SEQ ID NO: 106556 - DNA, 8 bp, Unknown
  misc_feature (1)..( 8): Result.002 file - promoters60/1377714
ttgttatg

SEQ ID NO: 106557 - DNA, 7 bp, Unknown
  misc_feature (1)..( 7): Result.002 file - promoters60/1377718
gtcgaaa

SEQ ID NO: 106558 - DNA, 7 bp, Unknown
  misc_feature (1)..( 7): Result.002 file - promoters60/1377718
gtctaaa

SEQ ID NO: 106559 - DNA, 7 bp, Unknown
  misc_feature (1)..( 7): Result.002 file - promoters60/1377718
aaacatt

SEQ ID NO: 106560 - DNA, 7 bp, Unknown
  misc_feature (1)..( 7): Result.002 file - promoters60/1377718
aaatatt

SEQ ID NO: 106561 - DNA, 10 bp, Unknown
  misc_feature (1)..( 10): Result.002 file - promoters60/1377718
taaatttgct

SEQ ID NO: 106562 - DNA, 10 bp, Unknown
  misc_feature (1)..( 10): Result.002 file - promoters60/1377718
taaatttaaa

SEQ ID NO: 106563 - DNA, 10 bp, Unknown
  misc_feature (1)..( 10): Result.002 file - promoters60/1377718
tgaatctgct

SEQ ID NO: 106564 - DNA, 9 bp, Unknown
  misc_feature (1)..( 9): Result.002 file - promoters60/1377718
tcagttaga

SEQ ID NO: 106565 - DNA, 9 bp, Unknown
  misc_feature (1)..( 9): Result.002 file - promoters60/1377718
tcagtaaga

SEQ ID NO: 106566 - DNA, 7 bp, Unknown
  misc_feature (1)..( 7): Result.002 file - promoters60/1377718
tttattg

SEQ ID NO: 106567 - DNA, 7 bp, Unknown
  misc_feature (1)..( 7): Result.002 file - promoters60/1377718
tttcttg

SEQ ID NO: 106568 - DNA, 7 bp, Unknown
  misc_feature (1)..( 7): Result.002 file - promoters60/1377718
tgaaaaa

SEQ ID NO: 106569 - DNA, 7 bp, Unknown
  misc_feature (1)..( 7): Result.002 file - promoters60/1377718
tgaaaaa

SEQ ID NO: 106570 - DNA, 6 bp, Unknown
  misc_feature (1)..( 6): Result.002 file - promoters60/1377718
aatatt

SEQ ID NO: 106571 - DNA, 6 bp, Unknown
  misc_feature (1)..( 6): Result.002 file - promoters60/1377718
aatatt

SEQ ID NO: 106572 - DNA, 12 bp, Unknown
  misc_feature (1)..( 12): Result.002 file - promoters60/1377718
ttagtttggtct

SEQ ID NO: 106573 - DNA, 12 bp, Unknown
  misc_feature (1)..( 12): Result.002 file - promoters60/1377718
ttagtttgttct

SEQ ID NO: 106574 - DNA, 6 bp, Unknown
  misc_feature (1)..( 6): Result.002 file - promoters60/1377718
ttttat

SEQ ID NO: 106575 - DNA, 6 bp, Unknown
  misc_feature (1)..( 6): Result.002 file - promoters60/1377718
ttttat

SEQ ID NO: 106576 - DNA, 9 bp, Unknown
  misc_feature (1)..( 9): Result.002 file - promoters60/1377718
attataaga

SEQ ID NO: 106577 - DNA, 9 bp, Unknown
  misc_feature (1)..( 9): Result.002 file - promoters60/1377718
attagaaga

SEQ ID NO: 106578 - DNA, 7 bp, Unknown
  misc_feature (1)..( 7): Result.002 file - promoters60/1377734
tatttgc

SEQ ID NO: 106579 - DNA, 7 bp, Unknown
  misc_feature (1)..( 7): Result.002 file - promoters60/1377734
tatgtgc

SEQ ID NO: 106580 - DNA, 6 bp, Unknown
  misc_feature (1)..( 6): Result.002 file - promoters60/1377734
tcatct

SEQ ID NO: 106581 - DNA, 6 bp, Unknown
  misc_feature (1)..( 6): Result.002 file - promoters60/1377734
tcatct

SEQ ID NO: 106582 - DNA, 6 bp, Unknown
  misc_feature (1)..( 6): Result.002 file - promoters60/1377734
ttttcc

SEQ ID NO: 106583 - DNA, 6 bp, Unknown
  misc_feature (1)..( 6): Result.002 file - promoters60/1377734
ttttcc

SEQ ID NO: 106584 - DNA, 7 bp, Unknown
  misc_feature (1)..( 7): Result.002 file - promoters60/1377734
ttagttt

SEQ ID NO: 106585 - DNA, 7 bp, Unknown
  misc_feature (1)..( 7): Result.002 file - promoters60/1377734
ttagttt

SEQ ID NO: 106586 - DNA, 6 bp, Unknown
  misc_feature (1)..( 6): Result.002 file - promoters60/1377734
agagct

SEQ ID NO: 106587 - DNA, 6 bp, Unknown
  misc_feature (1)..( 6): Result.002 file - promoters60/1377734
agagct

SEQ ID NO: 106588 - DNA, 7 bp, Unknown
  misc_feature (1)..( 7): Result.002 file - promoters60/1377734
taataat

SEQ ID NO: 106589 - DNA, 7 bp, Unknown
  misc_feature (1)..( 7): Result.002 file - promoters60/1377734
taaaaat

SEQ ID NO: 106590 - DNA, 7 bp, Unknown
  misc_feature (1)..( 7): Result.002 file - promoters60/1377734
tttgatt

SEQ ID NO: 106591 - DNA, 7 bp, Unknown
  misc_feature (1)..( 7): Result.002 file - promoters60/1377734
tttaatt

SEQ ID NO: 106592 - DNA, 8 bp, Unknown
  misc_feature (1)..( 8): Result.002 file - promoters60/1377734
tgaagtat

SEQ ID NO: 106593 - DNA, 8 bp, Unknown
  misc_feature (1)..( 8): Result.002 file - promoters60/1377734
tgaaatat

SEQ ID NO: 106594 - DNA, 7 bp, Unknown
  misc_feature (1)..( 7): Result.002 file - promoters60/1377734
gtgactc

SEQ ID NO: 106595 - DNA, 7 bp, Unknown
  misc_feature (1)..( 7): Result.002 file - promoters60/1377734
ttgactc

SEQ ID NO: 106596 - DNA, 7 bp, Unknown
  misc_feature (1)..( 7): Result.002 file - promoters60/1377734
ttgacta

SEQ ID NO: 106597 - DNA, 6 bp, Unknown
  misc_feature (1)..( 6): Result.002 file - promoters60/1377734
ctaaat

SEQ ID NO: 106598 - DNA, 6 bp, Unknown
  misc_feature (1)..( 6): Result.002 file - promoters60/1377734
ctaaat

SEQ ID NO: 106599 - DNA, 9 bp, Unknown
  misc_feature (1)..( 9): Result.002 file - promoters60/1377734
gagcctgat

SEQ ID NO: 106600 - DNA, 9 bp, Unknown
  misc_feature (1)..( 9): Result.002 file - promoters60/1377734
gagtctgat

SEQ ID NO: 106601 - DNA, 6 bp, Unknown
  misc_feature (1)..( 6): Result.002 file - promoters60/1377734
aattgc

SEQ ID NO: 106602 - DNA, 6 bp, Unknown
  misc_feature (1)..( 6): Result.002 file - promoters60/1377734
aattgc

SEQ ID NO: 106603 - DNA, 6 bp, Unknown
  misc_feature (1)..( 6): Result.002 file - promoters60/1377734
tccaaa

SEQ ID NO: 106604 - DNA, 6 bp, Unknown
  misc_feature (1)..( 6): Result.002 file - promoters60/1377734
tccaaa

SEQ ID NO: 106605 - DNA, 6 bp, Unknown
  misc_feature (1)..( 6): Result.002 file - promoters60/1377734
aaacga

SEQ ID NO: 106606 - DNA, 6 bp, Unknown
  misc_feature (1)..( 6): Result.002 file - promoters60/1377734
aaacga

SEQ ID NO: 106607 - DNA, 6 bp, Unknown
  misc_feature (1)..( 6): Result.002 file - promoters60/1377734
tctaaa

SEQ ID NO: 106608 - DNA, 6 bp, Unknown
  misc_feature (1)..( 6): Result.002 file - promoters60/1377734
tctaaa

SEQ ID NO: 106609 - DNA, 8 bp, Unknown
  misc_feature (1)..( 8): Result.002 file - promoters60/1377734
aacacaaa

SEQ ID NO: 106610 - DNA, 8 bp, Unknown
  misc_feature (1)..( 8): Result.002 file - promoters60/1377734
aacaaaaa

SEQ ID NO: 106611 - DNA, 8 bp, Unknown
  misc_feature (1)..( 8): Result.002 file - promoters60/1377734
ccaagacg

SEQ ID NO: 106612 - DNA, 8 bp, Unknown
  misc_feature (1)..( 8): Result.002 file - promoters60/1377734
ccaagacg

SEQ ID NO: 106613 - DNA, 7 bp, Unknown
  misc_feature (1)..( 7): Result.002 file - promoters60/1377734
aggccca

SEQ ID NO: 106614 - DNA, 7 bp, Unknown
  misc_feature (1)..( 7): Result.002 file - promoters60/1377734
aggccca

SEQ ID NO: 106615 - DNA, 6 bp, Unknown
  misc_feature (1)..( 6): Result.002 file - promoters60/1377835
ttgttt

SEQ ID NO: 106616 - DNA, 6 bp, Unknown
  misc_feature (1)..( 6): Result.002 file - promoters60/1377835
ttgttt

SEQ ID NO: 106617 - DNA, 6 bp, Unknown
  misc_feature (1)..( 6): Result.002 file - promoters60/1377835
tatttt

SEQ ID NO: 106618 - DNA, 6 bp, Unknown
  misc_feature (1)..( 6): Result.002 file - promoters60/1377835
tatttt

SEQ ID NO: 106619 - DNA, 7 bp, Unknown
  misc_feature (1)..( 7): Result.002 file - promoters60/1377835
tttgctt

SEQ ID NO: 106620 - DNA, 7 bp, Unknown
  misc_feature (1)..( 7): Result.002 file - promoters60/1377835
tttactt

SEQ ID NO: 106621 - DNA, 6 bp, Unknown
  misc_feature (1)..( 6): Result.002 file - promoters60/1377835
aaaaga

SEQ ID NO: 106622 - DNA, 6 bp, Unknown
  misc_feature (1)..( 6): Result.002 file - promoters60/1377835
aaaaga

SEQ ID NO: 106623 - DNA, 6 bp, Unknown
  misc_feature (1)..( 6): Result.002 file - promoters60/1377835
aataaa

SEQ ID NO: 106624 - DNA, 6 bp, Unknown
  misc_feature (1)..( 6): Result.002 file - promoters60/1377835
aataaa

SEQ ID NO: 106625 - DNA, 7 bp, Unknown
  misc_feature (1)..( 7): Result.002 file - promoters60/1377835
ttcttcc

SEQ ID NO: 106626 - DNA, 7 bp, Unknown
  misc_feature (1)..( 7): Result.002 file - promoters60/1377835
ttcctcc

SEQ ID NO: 106627 - DNA, 10 bp, Unknown
  misc_feature (1)..( 10): Result.002 file - promoters60/1377835
gtacaaagta

SEQ ID NO: 106628 - DNA, 10 bp, Unknown
  misc_feature (1)..( 10): Result.002 file - promoters60/1377835
gtaaaaattt

SEQ ID NO: 106629 - DNA, 10 bp, Unknown
  misc_feature (1)..( 10): Result.002 file - promoters60/1377835
ctaaatattt

SEQ ID NO: 106630 - DNA, 7 bp, Unknown
  misc_feature (1)..( 7): Result.002 file - promoters60/1377835
ttggtca

SEQ ID NO: 106631 - DNA, 7 bp, Unknown
  misc_feature (1)..( 7): Result.002 file - promoters60/1377835
ttgctca

SEQ ID NO: 106632 - DNA, 7 bp, Unknown
  misc_feature (1)..( 7): Result.002 file - promoters60/1377835
ccactaa

SEQ ID NO: 106633 - DNA, 7 bp, Unknown
  misc_feature (1)..( 7): Result.002 file - promoters60/1377835
ccattaa

SEQ ID NO: 106634 - DNA, 6 bp, Unknown
  misc_feature (1)..( 6): Result.002 file - promoters60/1377835
ataaaa

SEQ ID NO: 106635 - DNA, 6 bp, Unknown
  misc_feature (1)..( 6): Result.002 file - promoters60/1377835
ataaaa

SEQ ID NO: 106636 - DNA, 8 bp, Unknown
  misc_feature (1)..( 8): Result.002 file - promoters60/1377835
tttatttt

SEQ ID NO: 106637 - DNA, 8 bp, Unknown
  misc_feature (1)..( 8): Result.002 file - promoters60/1377835
tttctttt

SEQ ID NO: 106638 - DNA, 6 bp, Unknown
  misc_feature (1)..( 6): Result.002 file - promoters60/1377835
tttact

SEQ ID NO: 106639 - DNA, 6 bp, Unknown
  misc_feature (1)..( 6): Result.002 file - promoters60/1377835
tttact

SEQ ID NO: 106640 - DNA, 9 bp, Unknown
  misc_feature (1)..( 9): Result.002 file - promoters60/1377835
cttattttt

SEQ ID NO: 106641 - DNA, 9 bp, Unknown
  misc_feature (1)..( 9): Result.002 file - promoters60/1377835
cttagtttt

SEQ ID NO: 106642 - DNA, 8 bp, Unknown
  misc_feature (1)..( 8): Result.002 file - promoters60/1377835
tttgtttg

SEQ ID NO: 106643 - DNA, 8 bp, Unknown
  misc_feature (1)..( 8): Result.002 file - promoters60/1377835
tttgtttg

SEQ ID NO: 106644 - DNA, 6 bp, Unknown
  misc_feature (1)..( 6): Result.002 file - promoters60/1377835
aagttt

SEQ ID NO: 106645 - DNA, 6 bp, Unknown
  misc_feature (1)..( 6): Result.002 file - promoters60/1377835
aagttt

SEQ ID NO: 106646 - DNA, 10 bp, Unknown
  misc_feature (1)..( 10): Result.002 file - promoters60/1377835
caaagtaatt

SEQ ID NO: 106647 - DNA, 10 bp, Unknown
  misc_feature (1)..( 10): Result.002 file - promoters60/1377835
caaactaatt

SEQ ID NO: 106648 - DNA, 7 bp, Unknown
  misc_feature (1)..( 7): Result.002 file - promoters60/1377835
attggaa

SEQ ID NO: 106649 - DNA, 7 bp, Unknown
  misc_feature (1)..( 7): Result.002 file - promoters60/1377835
attagaa

SEQ ID NO: 106650 - DNA, 8 bp, Unknown
  misc_feature (1)..( 8): Result.002 file - promoters60/1377835
aacaaaat

SEQ ID NO: 106651 - DNA, 8 bp, Unknown
  misc_feature (1)..( 8): Result.002 file - promoters60/1377835
aactaaat

SEQ ID NO: 106652 - DNA, 9 bp, Unknown
  misc_feature (1)..( 9): Result.002 file - promoters60/1377847
gaaaatatt

SEQ ID NO: 106653 - DNA, 9 bp, Unknown
  misc_feature (1)..( 9): Result.002 file - promoters60/1377847
aaaaataag

SEQ ID NO: 106654 - DNA, 9 bp, Unknown
  misc_feature (1)..( 9): Result.002 file - promoters60/1377847
aaaaattaa

SEQ ID NO: 106655 - DNA, 9 bp, Unknown
  misc_feature (1)..( 9): Result.002 file - promoters60/1377847
aaacatatt

SEQ ID NO: 106656 - DNA, 9 bp, Unknown
  misc_feature (1)..( 9): Result.002 file - promoters60/1377847
taaaatttc

SEQ ID NO: 106657 - DNA, 9 bp, Unknown
  misc_feature (1)..( 9): Result.002 file - promoters60/1377847
caaaattca

SEQ ID NO: 106658 - DNA, 12 bp, Unknown
  misc_feature (1)..( 12): Result.002 file - promoters60/1377847
gaaaaataaata

SEQ ID NO: 106659 - DNA, 12 bp, Unknown
  misc_feature (1)..( 12): Result.002 file - promoters60/1377847
tattaataaagc

SEQ ID NO: 106660 - DNA, 12 bp, Unknown
  misc_feature (1)..( 12): Result.002 file - promoters60/1377847
ataaaattaata

SEQ ID NO: 106661 - DNA, 12 bp, Unknown
  misc_feature (1)..( 12): Result.002 file - promoters60/1377847
atattattaact

SEQ ID NO: 106662 - DNA, 12 bp, Unknown
  misc_feature (1)..( 12): Result.002 file - promoters60/1377847
agataatatttc

SEQ ID NO: 106663 - DNA, 12 bp, Unknown
  misc_feature (1)..( 12): Result.002 file - promoters60/1377847
acattataaaat

SEQ ID NO: 106664 - DNA, 12 bp, Unknown
  misc_feature (1)..( 12): Result.002 file - promoters60/1377847
aaccgattaata

SEQ ID NO: 106665 - DNA, 12 bp, Unknown
  misc_feature (1)..( 12): Result.002 file - promoters60/1377847
aatttacaaact

SEQ ID NO: 106666 - DNA, 9 bp, Unknown
  misc_feature (1)..( 9): Result.002 file - promoters60/1377847
aaaacaaac

SEQ ID NO: 106667 - DNA, 9 bp, Unknown
  misc_feature (1)..( 9): Result.002 file - promoters60/1377847
aaaaaaaag

SEQ ID NO: 106668 - DNA, 9 bp, Unknown
  misc_feature (1)..( 9): Result.002 file - promoters60/1377847
taaataaat

SEQ ID NO: 106669 - DNA, 9 bp, Unknown
  misc_feature (1)..( 9): Result.002 file - promoters60/1377847
caaacaaat

SEQ ID NO: 106670 - DNA, 9 bp, Unknown
  misc_feature (1)..( 9): Result.002 file - promoters60/1377847
taaaaaaag

SEQ ID NO: 106671 - DNA, 9 bp, Unknown
  misc_feature (1)..( 9): Result.002 file - promoters60/1377847
aaaacaatt

SEQ ID NO: 106672 - DNA, 9 bp, Unknown
  misc_feature (1)..( 9): Result.002 file - promoters60/1377847
taaataaat

SEQ ID NO: 106673 - DNA, 9 bp, Unknown
  misc_feature (1)..( 9): Result.002 file - promoters60/1377847
gtcataaat

SEQ ID NO: 106674 - DNA, 13 bp, Unknown
  misc_feature (1)..( 13): Result.002 file - promoters60/1377847
attacaaaactac

SEQ ID NO: 106675 - DNA, 13 bp, Unknown
  misc_feature (1)..( 13): Result.002 file - promoters60/1377847
tatacaaaaaaag

SEQ ID NO: 106676 - DNA, 13 bp, Unknown
  misc_feature (1)..( 13): Result.002 file - promoters60/1377847
ctcccaaaaataa

SEQ ID NO: 106677 - DNA, 13 bp, Unknown
  misc_feature (1)..( 13): Result.002 file - promoters60/1377847
attcctaaaatca

SEQ ID NO: 106678 - DNA, 13 bp, Unknown
  misc_feature (1)..( 13): Result.002 file - promoters60/1377847
acaaataaacata

SEQ ID NO: 106679 - DNA, 13 bp, Unknown
  misc_feature (1)..( 13): Result.002 file - promoters60/1377847
tattcaagatgat

SEQ ID NO: 106680 - DNA, 13 bp, Unknown
  misc_feature (1)..( 13): Result.002 file - promoters60/1377847
aataaataaaagc

SEQ ID NO: 106681 - DNA, 13 bp, Unknown
  misc_feature (1)..( 13): Result.002 file - promoters60/1377847
aaacaataaaatt

SEQ ID NO: 106682 - DNA, 13 bp, Unknown
  misc_feature (1)..( 13): Result.002 file - promoters60/1377847
acattataaaata

SEQ ID NO: 106683 - DNA, 13 bp, Unknown
  misc_feature (1)..( 13): Result.002 file - promoters60/1377847
aaacagtaaaacc

SEQ ID NO: 106684 - DNA, 13 bp, Unknown
  misc_feature (1)..( 13): Result.002 file - promoters60/1377847
aggagataatatt

SEQ ID NO: 106685 - DNA, 14 bp, Unknown
  misc_feature (1)..( 14): Result.002 file - promoters60/1377847
aaaatttacaaact

SEQ ID NO: 106686 - DNA, 10 bp, Unknown
  misc_feature (1)..( 10): Result.002 file - promoters60/1377847
atattattag

SEQ ID NO: 106687 - DNA, 10 bp, Unknown
  misc_feature (1)..( 10): Result.002 file - promoters60/1377847
atattattag

SEQ ID NO: 106688 - DNA, 10 bp, Unknown
  misc_feature (1)..( 10): Result.002 file - promoters60/1377847
ttattatatt

SEQ ID NO: 106689 - DNA, 10 bp, Unknown
  misc_feature (1)..( 10): Result.002 file - promoters60/1377847
atataattat

SEQ ID NO: 106690 - DNA, 10 bp, Unknown
  misc_feature (1)..( 10): Result.002 file - promoters60/1377847
ttattatgtg

SEQ ID NO: 106691 - DNA, 10 bp, Unknown
  misc_feature (1)..( 10): Result.002 file - promoters60/1377847
atacaatgaa

SEQ ID NO: 106692 - DNA, 9 bp, Unknown
  misc_feature (1)..( 9): Result.002 file - promoters60/1377847
caaccaact

SEQ ID NO: 106693 - DNA, 9 bp, Unknown
  misc_feature (1)..( 9): Result.002 file - promoters60/1377847
aaaccaatg

SEQ ID NO: 106694 - DNA, 9 bp, Unknown
  misc_feature (1)..( 9): Result.002 file - promoters60/1377847
gaacaaact

SEQ ID NO: 106695 - DNA, 9 bp, Unknown
  misc_feature (1)..( 9): Result.002 file - promoters60/1377847
agaccaatc

SEQ ID NO: 106696 - DNA, 9 bp, Unknown
  misc_feature (1)..( 9): Result.002 file - promoters60/1377847
aaatcaaat

SEQ ID NO: 106697 - DNA, 10 bp, Unknown
  misc_feature (1)..( 10): Result.002 file - promoters60/1377847
aaattcaatg

SEQ ID NO: 106698 - DNA, 10 bp, Unknown
  misc_feature (1)..( 10): Result.002 file - promoters60/1377847
gaaaaacaaa

SEQ ID NO: 106699 - DNA, 10 bp, Unknown
  misc_feature (1)..( 10): Result.002 file - promoters60/1377847
gaaaaaatag

SEQ ID NO: 106700 - DNA, 10 bp, Unknown
  misc_feature (1)..( 10): Result.002 file - promoters60/1377847
gaaaaaaaag

SEQ ID NO: 106701 - DNA, 10 bp, Unknown
  misc_feature (1)..( 10): Result.002 file - promoters60/1377847
taaaaaatat

SEQ ID NO: 106702 - DNA, 10 bp, Unknown
  misc_feature (1)..( 10): Result.002 file - promoters60/1377847
taaacattga

SEQ ID NO: 106703 - DNA, 10 bp, Unknown
  misc_feature (1)..( 10): Result.002 file - promoters60/1377847
aaaacaattc

SEQ ID NO: 106704 - DNA, 10 bp, Unknown
  misc_feature (1)..( 10): Result.002 file - promoters60/1377847
tatacaatga

SEQ ID NO: 106705 - DNA, 9 bp, Unknown
  misc_feature (1)..( 9): Result.002 file - promoters60/1377847
aaatttttg

SEQ ID NO: 106706 - DNA, 9 bp, Unknown
  misc_feature (1)..( 9): Result.002 file - promoters60/1377847
taatcttta

SEQ ID NO: 106707 - DNA, 9 bp, Unknown
  misc_feature (1)..( 9): Result.002 file - promoters60/1377847
taagtttcc

SEQ ID NO: 106708 - DNA, 9 bp, Unknown
  misc_feature (1)..( 9): Result.002 file - promoters60/1377847
caatgttta

SEQ ID NO: 106709 - DNA, 9 bp, Unknown
  misc_feature (1)..( 9): Result.002 file - promoters60/1377847
aaatgtttg

SEQ ID NO: 106710 - DNA, 9 bp, Unknown
  misc_feature (1)..( 9): Result.002 file - promoters60/1377847
aattgttta

SEQ ID NO: 106711 - DNA, 10 bp, Unknown
  misc_feature (1)..( 10): Result.002 file - promoters60/1378049
gaaaatatta

SEQ ID NO: 106712 - DNA, 10 bp, Unknown
  misc_feature (1)..( 10): Result.002 file - promoters60/1378049
aaaaataaga

SEQ ID NO: 106713 - DNA, 10 bp, Unknown
  misc_feature (1)..( 10): Result.002 file - promoters60/1378049
aaaaattaaa

SEQ ID NO: 106714 - DNA, 10 bp, Unknown
  misc_feature (1)..( 10): Result.002 file - promoters60/1378049
tcaaatattg

SEQ ID NO: 106715 - DNA, 10 bp, Unknown
  misc_feature (1)..( 10): Result.002 file - promoters60/1378049
taaaatttca

SEQ ID NO: 106716 - DNA, 10 bp, Unknown
  misc_feature (1)..( 10): Result.002 file - promoters60/1378049
caaaattgac

SEQ ID NO: 106717 - DNA, 10 bp, Unknown
  misc_feature (1)..( 10): Result.002 file - promoters60/1378049
agaaatttca

SEQ ID NO: 106718 - DNA, 8 bp, Unknown
  misc_feature (1)..( 8): Result.002 file - promoters60/1378049
aaaacaaa

SEQ ID NO: 106719 - DNA, 8 bp, Unknown
  misc_feature (1)..( 8): Result.002 file - promoters60/1378049
aaaaaaaa

SEQ ID NO: 106720 - DNA, 8 bp, Unknown
  misc_feature (1)..( 8): Result.002 file - promoters60/1378049
ggaacaaa

SEQ ID NO: 106721 - DNA, 8 bp, Unknown
  misc_feature (1)..( 8): Result.002 file - promoters60/1378049
taaataaa

SEQ ID NO: 106722 - DNA, 8 bp, Unknown
  misc_feature (1)..( 8): Result.002 file - promoters60/1378049
caaacaaa

SEQ ID NO: 106723 - DNA, 8 bp, Unknown
  misc_feature (1)..( 8): Result.002 file - promoters60/1378049
agaaaaaa

SEQ ID NO: 106724 - DNA, 8 bp, Unknown
  misc_feature (1)..( 8): Result.002 file - promoters60/1378049
aaaatata

SEQ ID NO: 106725 - DNA, 14 bp, Unknown
  misc_feature (1)..( 14): Result.002 file - promoters60/1378049
aaattgggactaaa

SEQ ID NO: 106726 - DNA, 14 bp, Unknown
  misc_feature (1)..( 14): Result.002 file - promoters60/1378049
ttatttggataaaa

SEQ ID NO: 106727 - DNA, 14 bp, Unknown
  misc_feature (1)..( 14): Result.002 file - promoters60/1378049
tcctttgaataaaa

SEQ ID NO: 106728 - DNA, 14 bp, Unknown
  misc_feature (1)..( 14): Result.002 file - promoters60/1378049
tccgttgacacgta

SEQ ID NO: 106729 - DNA, 14 bp, Unknown
  misc_feature (1)..( 14): Result.002 file - promoters60/1378049
ccaattaaaaagga

SEQ ID NO: 106730 - DNA, 14 bp, Unknown
  misc_feature (1)..( 14): Result.002 file - promoters60/1378049
aaaggtcaataaat

SEQ ID NO: 106731 - DNA, 12 bp, Unknown
  misc_feature (1)..( 12): Result.002 file - promoters60/1378049
ttgagtttaggc

SEQ ID NO: 106732 - DNA, 12 bp, Unknown
  misc_feature (1)..( 12): Result.002 file - promoters60/1378049
ttgacttttgac

SEQ ID NO: 106733 - DNA, 12 bp, Unknown
  misc_feature (1)..( 12): Result.002 file - promoters60/1378049
gatagtttaaaa

SEQ ID NO: 106734 - DNA, 12 bp, Unknown
  misc_feature (1)..( 12): Result.002 file - promoters60/1378049
ttggcttctatt

SEQ ID NO: 106735 - DNA, 12 bp, Unknown
  misc_feature (1)..( 12): Result.002 file - promoters60/1378049
ataagtttcaaa

SEQ ID NO: 106736 - DNA, 12 bp, Unknown
  misc_feature (1)..( 12): Result.002 file - promoters60/1378049
taaagttttgtc

SEQ ID NO: 106737 - DNA, 12 bp, Unknown
  misc_feature (1)..( 12): Result.002 file - promoters60/1378049
ttacaaaactac

SEQ ID NO: 106738 - DNA, 12 bp, Unknown
  misc_feature (1)..( 12): Result.002 file - promoters60/1378049
atacaaaaaaag

SEQ ID NO: 106739 - DNA, 12 bp, Unknown
  misc_feature (1)..( 12): Result.002 file - promoters60/1378049
tcccaaaaataa

SEQ ID NO: 106740 - DNA, 12 bp, Unknown
  misc_feature (1)..( 12): Result.002 file - promoters60/1378049
ttcctaaaatca

SEQ ID NO: 106741 - DNA, 12 bp, Unknown
  misc_feature (1)..( 12): Result.002 file - promoters60/1378049
aaacataagttt

SEQ ID NO: 106742 - DNA, 12 bp, Unknown
  misc_feature (1)..( 12): Result.002 file - promoters60/1378049
acccaaaattga

SEQ ID NO: 106743 - DNA, 12 bp, Unknown
  misc_feature (1)..( 12): Result.002 file - promoters60/1378049
tgtcataaattt

SEQ ID NO: 106744 - DNA, 12 bp, Unknown
  misc_feature (1)..( 12): Result.002 file - promoters60/1378049
ttatatatagaa

SEQ ID NO: 106745 - DNA, 12 bp, Unknown
  misc_feature (1)..( 12): Result.002 file - promoters60/1378049
ctatatataaaa

SEQ ID NO: 106746 - DNA, 12 bp, Unknown
  misc_feature (1)..( 12): Result.002 file - promoters60/1378049
ttatatataacc

SEQ ID NO: 106747 - DNA, 12 bp, Unknown
  misc_feature (1)..( 12): Result.002 file - promoters60/1378049
atataaataaca

SEQ ID NO: 106748 - DNA, 12 bp, Unknown
  misc_feature (1)..( 12): Result.002 file - promoters60/1378049
ctataaattaca

SEQ ID NO: 106749 - DNA, 12 bp, Unknown
  misc_feature (1)..( 12): Result.002 file - promoters60/1378049
ccatataaattt

SEQ ID NO: 106750 - DNA, 12 bp, Unknown
  misc_feature (1)..( 12): Result.002 file - promoters60/1378049
agatataataca

SEQ ID NO: 106751 - DNA, 16 bp, Unknown
  misc_feature (1)..( 16): Result.002 file - promoters60/1378049
ttcgtagattgcgtga

SEQ ID NO: 106752 - DNA, 16 bp, Unknown
  misc_feature (1)..( 16): Result.002 file - promoters60/1378049
tttttagtttgtgtgc

SEQ ID NO: 106753 - DNA, 16 bp, Unknown
  misc_feature (1)..( 16): Result.002 file - promoters60/1378049
attgtatatttagttg

SEQ ID NO: 106754 - DNA, 16 bp, Unknown
  misc_feature (1)..( 16): Result.002 file - promoters60/1378049
catgtcagtttcgttt

SEQ ID NO: 106755 - DNA, 16 bp, Unknown
  misc_feature (1)..( 16): Result.002 file - promoters60/1378049
atttaatattttcaga

SEQ ID NO: 106756 - DNA, 16 bp, Unknown
  misc_feature (1)..( 16): Result.002 file - promoters60/1378049
taaaaatctcgtgtgc

SEQ ID NO: 106757 - DNA, 16 bp, Unknown
  misc_feature (1)..( 16): Result.002 file - promoters60/1378049
tttttaatttgtgtct

SEQ ID NO: 106758 - DNA, 14 bp, Unknown
  misc_feature (1)..( 14): Result.002 file - promoters60/1378088
caaatattttattc

SEQ ID NO: 106759 - DNA, 14 bp, Unknown
  misc_feature (1)..( 14): Result.002 file - promoters60/1378088
aacttattttatga

SEQ ID NO: 106760 - DNA, 14 bp, Unknown
  misc_feature (1)..( 14): Result.002 file - promoters60/1378088
aaatctttttgtga

SEQ ID NO: 106761 - DNA, 14 bp, Unknown
  misc_feature (1)..( 14): Result.002 file - promoters60/1378088
aaattattttaatt

SEQ ID NO: 106762 - DNA, 14 bp, Unknown
  misc_feature (1)..( 14): Result.002 file - promoters60/1378088
aactaatttagcgt

SEQ ID NO: 106763 - DNA, 10 bp, Unknown
  misc_feature (1)..( 10): Result.002 file - promoters60/1378088
caaaatttta

SEQ ID NO: 106764 - DNA, 10 bp, Unknown
  misc_feature (1)..( 10): Result.002 file - promoters60/1378088
aaaaattggg

SEQ ID NO: 106765 - DNA, 10 bp, Unknown
  misc_feature (1)..( 10): Result.002 file - promoters60/1378088
taaagtttta

SEQ ID NO: 106766 - DNA, 11 bp, Unknown
  misc_feature (1)..( 11): Result.002 file - promoters60/1378088
taataatcctt

SEQ ID NO: 106767 - DNA, 11 bp, Unknown
  misc_feature (1)..( 11): Result.002 file - promoters60/1378088
aaaattcggat

SEQ ID NO: 106768 - DNA, 11 bp, Unknown
  misc_feature (1)..( 11): Result.002 file - promoters60/1378088
aaaattgaatc

SEQ ID NO: 106769 - DNA, 11 bp, Unknown
  misc_feature (1)..( 11): Result.002 file - promoters60/1378088
caaattgtttt

SEQ ID NO: 106770 - DNA, 11 bp, Unknown
  misc_feature (1)..( 11): Result.002 file - promoters60/1378088
taaattatttt

SEQ ID NO: 106771 - DNA, 13 bp, Unknown
  misc_feature (1)..( 13): Result.002 file - promoters60/1378088
caaaaaatctgga

SEQ ID NO: 106772 - DNA, 13 bp, Unknown
  misc_feature (1)..( 13): Result.002 file - promoters60/1378088
taaaaaaacatat

SEQ ID NO: 106773 - DNA, 13 bp, Unknown
  misc_feature (1)..( 13): Result.002 file - promoters60/1378088
aaaaaaaacattg

SEQ ID NO: 106774 - DNA, 13 bp, Unknown
  misc_feature (1)..( 13): Result.002 file - promoters60/1378088
taaaaagagaaaa

SEQ ID NO: 106775 - DNA, 8 bp, Unknown
  misc_feature (1)..( 8): Result.002 file - promoters60/1378088
gatattta

SEQ ID NO: 106776 - DNA, 8 bp, Unknown
  misc_feature (1)..( 8): Result.002 file - promoters60/1378088
catatttt

SEQ ID NO: 106777 - DNA, 8 bp, Unknown
  misc_feature (1)..( 8): Result.002 file - promoters60/1378088
aatactta

SEQ ID NO: 106778 - DNA, 8 bp, Unknown
  misc_feature (1)..( 8): Result.002 file - promoters60/1378088
aatatttt

SEQ ID NO: 106779 - DNA, 8 bp, Unknown
  misc_feature (1)..( 8): Result.002 file - promoters60/1378088
catattac

SEQ ID NO: 106780 - DNA, 7 bp, Unknown
  misc_feature (1)..( 7): Result.002 file - promoters60/1378088
aagattt

SEQ ID NO: 106781 - DNA, 7 bp, Unknown
  misc_feature (1)..( 7): Result.002 file - promoters60/1378088
tagattt

SEQ ID NO: 106782 - DNA, 7 bp, Unknown
  misc_feature (1)..( 7): Result.002 file - promoters60/1378088
cagattt

SEQ ID NO: 106783 - DNA, 7 bp, Unknown
  misc_feature (1)..( 7): Result.002 file - promoters60/1378088
tagattt

SEQ ID NO: 106784 - DNA, 11 bp, Unknown
  misc_feature (1)..( 11): Result.002 file - promoters60/1378088
tctaaatttta

SEQ ID NO: 106785 - DNA, 11 bp, Unknown
  misc_feature (1)..( 11): Result.002 file - promoters60/1378088
aaattatttta

SEQ ID NO: 106786 - DNA, 11 bp, Unknown
  misc_feature (1)..( 11): Result.002 file - promoters60/1378088
aacttatttta

SEQ ID NO: 106787 - DNA, 11 bp, Unknown
  misc_feature (1)..( 11): Result.002 file - promoters60/1378088
aactaatttag

SEQ ID NO: 106788 - DNA, 13 bp, Unknown
  misc_feature (1)..( 13): Result.002 file - promoters60/1378088
aattggatccgaa

SEQ ID NO: 106789 - DNA, 13 bp, Unknown
  misc_feature (1)..( 13): Result.002 file - promoters60/1378088
aattagatttttt

SEQ ID NO: 106790 - DNA, 13 bp, Unknown
  misc_feature (1)..( 13): Result.002 file - promoters60/1378088
atctagatttgtg

SEQ ID NO: 106791 - DNA, 13 bp, Unknown
  misc_feature (1)..( 13): Result.002 file - promoters60/1378088
tattcgatctttt

SEQ ID NO: 106792 - DNA, 9 bp, Unknown
  misc_feature (1)..( 9): Result.002 file - promoters60/1378088
aaaatctgg

SEQ ID NO: 106793 - DNA, 9 bp, Unknown
  misc_feature (1)..( 9): Result.002 file - promoters60/1378088
aaaatcatt

SEQ ID NO: 106794 - DNA, 9 bp, Unknown
  misc_feature (1)..( 9): Result.002 file - promoters60/1378088
aaaaacata

SEQ ID NO: 106795 - DNA, 9 bp, Unknown
  misc_feature (1)..( 9): Result.002 file - promoters60/1378088
aaaaacatt

SEQ ID NO: 106796 - DNA, 9 bp, Unknown
  misc_feature (1)..( 9): Result.002 file - promoters60/1378088
taaaacaat

SEQ ID NO: 106797 - DNA, 9 bp, Unknown
  misc_feature (1)..( 9): Result.002 file - promoters60/1378088
taaaaatct

SEQ ID NO: 106798 - DNA, 9 bp, Unknown
  misc_feature (1)..( 9): Result.002 file - promoters60/1378088
taaaaatta

SEQ ID NO: 106799 - DNA, 9 bp, Unknown
  misc_feature (1)..( 9): Result.002 file - promoters60/1378088
acaaaatta

SEQ ID NO: 106800 - DNA, 9 bp, Unknown
  misc_feature (1)..( 9): Result.002 file - promoters60/1378088
actaaatta

SEQ ID NO: 106801 - DNA, 7 bp, Unknown
  misc_feature (1)..( 7): Result.002 file - promoters60/1378088
taaaaat

SEQ ID NO: 106802 - DNA, 7 bp, Unknown
  misc_feature (1)..( 7): Result.002 file - promoters60/1378088
taaaaaa

SEQ ID NO: 106803 - DNA, 7 bp, Unknown
  misc_feature (1)..( 7): Result.002 file - promoters60/1378088
taaaaac

SEQ ID NO: 106804 - DNA, 7 bp, Unknown
  misc_feature (1)..( 7): Result.002 file - promoters60/1378088
taataat

SEQ ID NO: 106805 - DNA, 8 bp, Unknown
  misc_feature (1)..( 8): Result.002 file - promoters60/1378088
aatcatat

SEQ ID NO: 106806 - DNA, 8 bp, Unknown
  misc_feature (1)..( 8): Result.002 file - promoters60/1378088
aattataa

SEQ ID NO: 106807 - DNA, 8 bp, Unknown
  misc_feature (1)..( 8): Result.002 file - promoters60/1378088
tttcatat

SEQ ID NO: 106808 - DNA, 8 bp, Unknown
  misc_feature (1)..( 8): Result.002 file - promoters60/1378088
acttataa

SEQ ID NO: 106809 - DNA, 20 bp, Unknown
  misc_feature (1)..( 20): Result.002 file - promoters60/1378088
ttgtcaactatgaattattg

SEQ ID NO: 106810 - DNA, 20 bp, Unknown
  misc_feature (1)..( 20): Result.002 file - promoters60/1378088
attttaatcaacaataattt

SEQ ID NO: 106811 - DNA, 20 bp, Unknown
  misc_feature (1)..( 20): Result.002 file - promoters60/1378088
gaaatattattcaataataa

SEQ ID NO: 106812 - DNA, 20 bp, Unknown
  misc_feature (1)..( 20): Result.002 file - promoters60/1378088
cttataaaaattagaaatgc

SEQ ID NO: 106813 - DNA, 11 bp, Unknown
  misc_feature (1)..( 11): Result.002 file - promoters60/1378088
ttactttttta

SEQ ID NO: 106814 - DNA, 11 bp, Unknown
  misc_feature (1)..( 11): Result.002 file - promoters60/1378088
ccaatttgtta

SEQ ID NO: 106815 - DNA, 11 bp, Unknown
  misc_feature (1)..( 11): Result.002 file - promoters60/1378088
ttcgttttttt

SEQ ID NO: 106816 - DNA, 11 bp, Unknown
  misc_feature (1)..( 11): Result.002 file - promoters60/1378088
tacattttatc

SEQ ID NO: 106817 - DNA, 10 bp, Unknown
  misc_feature (1)..( 10): Result.002 file - promoters60/1378088
attttataat

SEQ ID NO: 106818 - DNA, 10 bp, Unknown
  misc_feature (1)..( 10): Result.002 file - promoters60/1378088
attttatagg

SEQ ID NO: 106819 - DNA, 10 bp, Unknown
  misc_feature (1)..( 10): Result.002 file - promoters60/1378088
tttttaattc

SEQ ID NO: 106820 - DNA, 10 bp, Unknown
  misc_feature (1)..( 10): Result.002 file - promoters60/1378088
actttaaaat

SEQ ID NO: 106821 - DNA, 13 bp, Unknown
  misc_feature (1)..( 13): Result.002 file - promoters60/1378088
ttagaagaagtta

SEQ ID NO: 106822 - DNA, 13 bp, Unknown
  misc_feature (1)..( 13): Result.002 file - promoters60/1378088
ttataagaagaaa

SEQ ID NO: 106823 - DNA, 13 bp, Unknown
  misc_feature (1)..( 13): Result.002 file - promoters60/1378088
taaaaagagaaaa

SEQ ID NO: 106824 - DNA, 13 bp, Unknown
  misc_feature (1)..( 13): Result.002 file - promoters60/1378088
ttataaaacaatt

SEQ ID NO: 106825 - DNA, 9 bp, Unknown
  misc_feature (1)..( 9): Result.002 file - promoters60/1378088
gttagaaat

SEQ ID NO: 106826 - DNA, 9 bp, Unknown
  misc_feature (1)..( 9): Result.002 file - promoters60/1378088
gttaaaaac

SEQ ID NO: 106827 - DNA, 9 bp, Unknown
  misc_feature (1)..( 9): Result.002 file - promoters60/1378088
cttataaaa

SEQ ID NO: 106828 - DNA, 9 bp, Unknown
  misc_feature (1)..( 9): Result.002 file - promoters60/1378088
taaaaaaac

SEQ ID NO: 106829 - DNA, 9 bp, Unknown
  misc_feature (1)..( 9): Result.002 file - promoters60/1378088
attataaga

SEQ ID NO: 106830 - DNA, 12 bp, Unknown
  misc_feature (1)..( 12): Result.002 file - promoters60/1378088
ttaaaaactttg

SEQ ID NO: 106831 - DNA, 12 bp, Unknown
  misc_feature (1)..( 12): Result.002 file - promoters60/1378088
aaaaaaacattg

SEQ ID NO: 106832 - DNA, 12 bp, Unknown
  misc_feature (1)..( 12): Result.002 file - promoters60/1378088
ttaaaaactaaa

SEQ ID NO: 106833 - DNA, 12 bp, Unknown
  misc_feature (1)..( 12): Result.002 file - promoters60/1378088
tataaaacaatt

SEQ ID NO: 106834 - DNA, 9 bp, Unknown
  misc_feature (1)..( 9): Result.002 file - promoters60/1378088
ttaatcaac

SEQ ID NO: 106835 - DNA, 9 bp, Unknown
  misc_feature (1)..( 9): Result.002 file - promoters60/1378088
aaaattaac

SEQ ID NO: 106836 - DNA, 9 bp, Unknown
  misc_feature (1)..( 9): Result.002 file - promoters60/1378088
aaaattaga

SEQ ID NO: 106837 - DNA, 9 bp, Unknown
  misc_feature (1)..( 9): Result.002 file - promoters60/1378088
taaattagt

SEQ ID NO: 106838 - DNA, 12 bp, Unknown
  misc_feature (1)..( 12): Result.002 file - promoters60/1378088
ccaaaaataaat

SEQ ID NO: 106839 - DNA, 12 bp, Unknown
  misc_feature (1)..( 12): Result.002 file - promoters60/1378088
caagaaaaaaat

SEQ ID NO: 106840 - DNA, 12 bp, Unknown
  misc_feature (1)..( 12): Result.002 file - promoters60/1378088
aagcaaaaattc

SEQ ID NO: 106841 - DNA, 12 bp, Unknown
  misc_feature (1)..( 12): Result.002 file - promoters60/1378088
ttttaaaaataa

SEQ ID NO: 106842 - DNA, 8 bp, Unknown
  misc_feature (1)..( 8): Result.002 file - promoters60/1378088
aaaacata

SEQ ID NO: 106843 - DNA, 8 bp, Unknown
  misc_feature (1)..( 8): Result.002 file - promoters60/1378088
aaaacaaa

SEQ ID NO: 106844 - DNA, 8 bp, Unknown
  misc_feature (1)..( 8): Result.002 file - promoters60/1378088
aaaaaaaa

SEQ ID NO: 106845 - DNA, 8 bp, Unknown
  misc_feature (1)..( 8): Result.002 file - promoters60/1378088
aaaacaat

SEQ ID NO: 106846 - DNA, 9 bp, Unknown
  misc_feature (1)..( 9): Result.002 file - promoters60/1378287
atttgagag

SEQ ID NO: 106847 - DNA, 9 bp, Unknown
  misc_feature (1)..( 9): Result.002 file - promoters60/1378287
ttttgagtg

SEQ ID NO: 106848 - DNA, 9 bp, Unknown
  misc_feature (1)..( 9): Result.002 file - promoters60/1378287
acttgggag

SEQ ID NO: 106849 - DNA, 9 bp, Unknown
  misc_feature (1)..( 9): Result.002 file - promoters60/1378287
atttgattc

SEQ ID NO: 106850 - DNA, 11 bp, Unknown
  misc_feature (1)..( 11): Result.002 file - promoters60/1378287
gttatgtgaca

SEQ ID NO: 106851 - DNA, 11 bp, Unknown
  misc_feature (1)..( 11): Result.002 file - promoters60/1378287
aaaatgtgaaa

SEQ ID NO: 106852 - DNA, 11 bp, Unknown
  misc_feature (1)..( 11): Result.002 file - promoters60/1378287
aaactgtgaaa

SEQ ID NO: 106853 - DNA, 11 bp, Unknown
  misc_feature (1)..( 11): Result.002 file - promoters60/1378287
gctttgtgaaa

SEQ ID NO: 106854 - DNA, 8 bp, Unknown
  misc_feature (1)..( 8): Result.002 file - promoters60/1378287
aaaaattg

SEQ ID NO: 106855 - DNA, 8 bp, Unknown
  misc_feature (1)..( 8): Result.002 file - promoters60/1378287
aaatattt

SEQ ID NO: 106856 - DNA, 8 bp, Unknown
  misc_feature (1)..( 8): Result.002 file - promoters60/1378287
aaatcgaa

SEQ ID NO: 106857 - DNA, 8 bp, Unknown
  misc_feature (1)..( 8): Result.002 file - promoters60/1378287
caatattc

SEQ ID NO: 106858 - DNA, 10 bp, Unknown
  misc_feature (1)..( 10): Result.002 file - promoters60/1378287
aaaattgaaa

SEQ ID NO: 106859 - DNA, 10 bp, Unknown
  misc_feature (1)..( 10): Result.002 file - promoters60/1378287
tgaatttaaa

SEQ ID NO: 106860 - DNA, 10 bp, Unknown
  misc_feature (1)..( 10): Result.002 file - promoters60/1378287
caaatcgaag

SEQ ID NO: 106861 - DNA, 10 bp, Unknown
  misc_feature (1)..( 10): Result.002 file - promoters60/1378287
tgaatttgta

SEQ ID NO: 106862 - DNA, 8 bp, Unknown
  misc_feature (1)..( 8): Result.002 file - promoters60/1378297
taagattt

SEQ ID NO: 106863 - DNA, 8 bp, Unknown
  misc_feature (1)..( 8): Result.002 file - promoters60/1378297
taatattt

SEQ ID NO: 106864 - DNA, 9 bp, Unknown
  misc_feature (1)..( 9): Result.002 file - promoters60/1378297
atatgattt

SEQ ID NO: 106865 - DNA, 9 bp, Unknown
  misc_feature (1)..( 9): Result.002 file - promoters60/1378297
aaatggttt

SEQ ID NO: 106866 - DNA, 9 bp, Unknown
  misc_feature (1)..( 9): Result.002 file - promoters60/1378297
aaatggttt

SEQ ID NO: 106867 - DNA, 6 bp, Unknown
  misc_feature (1)..( 6): Result.002 file - promoters60/1378297
aaaaaa

SEQ ID NO: 106868 - DNA, 6 bp, Unknown
  misc_feature (1)..( 6): Result.002 file - promoters60/1378297
aaaaaa

SEQ ID NO: 106869 - DNA, 6 bp, Unknown
  misc_feature (1)..( 6): Result.002 file - promoters60/1378297
aaaaat

SEQ ID NO: 106870 - DNA, 6 bp, Unknown
  misc_feature (1)..( 6): Result.002 file - promoters60/1378297
aaaaat

SEQ ID NO: 106871 - DNA, 7 bp, Unknown
  misc_feature (1)..( 7): Result.002 file - promoters60/1378297
aaacaaa

SEQ ID NO: 106872 - DNA, 7 bp, Unknown
  misc_feature (1)..( 7): Result.002 file - promoters60/1378297
aaacaaa

SEQ ID NO: 106873 - DNA, 6 bp, Unknown
  misc_feature (1)..( 6): Result.002 file - promoters60/1378297
aaataa

SEQ ID NO: 106874 - DNA, 6 bp, Unknown
  misc_feature (1)..( 6): Result.002 file - promoters60/1378297
aaataa

SEQ ID NO: 106875 - DNA, 6 bp, Unknown
  misc_feature (1)..( 6): Result.002 file - promoters60/1378297
atttcc

SEQ ID NO: 106876 - DNA, 6 bp, Unknown
  misc_feature (1)..( 6): Result.002 file - promoters60/1378297
atttcc

SEQ ID NO: 106877 - DNA, 8 bp, Unknown
  misc_feature (1)..( 8): Result.002 file - promoters60/1378297
aaataatc

SEQ ID NO: 106878 - DNA, 8 bp, Unknown
  misc_feature (1)..( 8): Result.002 file - promoters60/1378297
aaataatc

SEQ ID NO: 106879 - DNA, 6 bp, Unknown
  misc_feature (1)..( 6): Result.002 file - promoters60/1378297
aaaatc

SEQ ID NO: 106880 - DNA, 6 bp, Unknown
  misc_feature (1)..( 6): Result.002 file - promoters60/1378297
aaaatc

SEQ ID NO: 106881 - DNA, 7 bp, Unknown
  misc_feature (1)..( 7): Result.002 file - promoters60/1378297
tattctt

SEQ ID NO: 106882 - DNA, 7 bp, Unknown
  misc_feature (1)..( 7): Result.002 file - promoters60/1378297
tatgctt

SEQ ID NO: 106883 - DNA, 8 bp, Unknown
  misc_feature (1)..( 8): Result.002 file - promoters60/1378297
aaaataca

SEQ ID NO: 106884 - DNA, 8 bp, Unknown
  misc_feature (1)..( 8): Result.002 file - promoters60/1378297
aaaataca

SEQ ID NO: 106885 - DNA, 6 bp, Unknown
  misc_feature (1)..( 6): Result.002 file - promoters60/1378297
ttgatc

SEQ ID NO: 106886 - DNA, 6 bp, Unknown
  misc_feature (1)..( 6): Result.002 file - promoters60/1378297
ttgatc

SEQ ID NO: 106887 - DNA, 6 bp, Unknown
  misc_feature (1)..( 6): Result.002 file - promoters60/1378297
cacaga

SEQ ID NO: 106888 - DNA, 6 bp, Unknown
  misc_feature (1)..( 6): Result.002 file - promoters60/1378297
cacaga

SEQ ID NO: 106889 - DNA, 7 bp, Unknown
  misc_feature (1)..( 7): Result.002 file - promoters60/1378297
tacatta

SEQ ID NO: 106890 - DNA, 7 bp, Unknown
  misc_feature (1)..( 7): Result.002 file - promoters60/1378297
tacatta

SEQ ID NO: 106891 - DNA, 10 bp, Unknown
  misc_feature (1)..( 10): Result.002 file - promoters60/1378297
tgatatcatt

SEQ ID NO: 106892 - DNA, 10 bp, Unknown
  misc_feature (1)..( 10): Result.002 file - promoters60/1378297
tgatattatt

SEQ ID NO: 106893 - DNA, 9 bp, Unknown
  misc_feature (1)..( 9): Result.002 file - promoters60/1378297
ataaagaaa

SEQ ID NO: 106894 - DNA, 9 bp, Unknown
  misc_feature (1)..( 9): Result.002 file - promoters60/1378297
ataatgaaa

SEQ ID NO: 106895 - DNA, 7 bp, Unknown
  misc_feature (1)..( 7): Result.002 file - promoters60/1378297
gtggagc

SEQ ID NO: 106896 - DNA, 7 bp, Unknown
  misc_feature (1)..( 7): Result.002 file - promoters60/1378297
gtggagc

SEQ ID NO: 106897 - DNA, 8 bp, Unknown
  misc_feature (1)..( 8): Result.002 file - promoters60/1378297
gcttttgc

SEQ ID NO: 106898 - DNA, 8 bp, Unknown
  misc_feature (1)..( 8): Result.002 file - promoters60/1378297
gcttttgc

SEQ ID NO: 106899 - DNA, 6 bp, Unknown
  misc_feature (1)..( 6): Result.002 file - promoters60/1378333
cgtgga

SEQ ID NO: 106900 - DNA, 6 bp, Unknown
  misc_feature (1)..( 6): Result.002 file - promoters60/1378333
cgtgga

SEQ ID NO: 106901 - DNA, 7 bp, Unknown
  misc_feature (1)..( 7): Result.002 file - promoters60/1378333
gctaaaa

SEQ ID NO: 106902 - DNA, 7 bp, Unknown
  misc_feature (1)..( 7): Result.002 file - promoters60/1378333
gctgaaa

SEQ ID NO: 106903 - DNA, 7 bp, Unknown
  misc_feature (1)..( 7): Result.002 file - promoters60/1378333
tctgaaa

SEQ ID NO: 106904 - DNA, 6 bp, Unknown
  misc_feature (1)..( 6): Result.002 file - promoters60/1378333
attcaa

SEQ ID NO: 106905 - DNA, 6 bp, Unknown
  misc_feature (1)..( 6): Result.002 file - promoters60/1378333
attcaa

SEQ ID NO: 106906 - DNA, 9 bp, Unknown
  misc_feature (1)..( 9): Result.002 file - promoters60/1378333
tttggattt

SEQ ID NO: 106907 - DNA, 9 bp, Unknown
  misc_feature (1)..( 9): Result.002 file - promoters60/1378333
ttttgattt

SEQ ID NO: 106908 - DNA, 8 bp, Unknown
  misc_feature (1)..( 8): Result.002 file - promoters60/1378333
cacaccgt

SEQ ID NO: 106909 - DNA, 8 bp, Unknown
  misc_feature (1)..( 8): Result.002 file - promoters60/1378333
cacatcgt

SEQ ID NO: 106910 - DNA, 7 bp, Unknown
  misc_feature (1)..( 7): Result.002 file - promoters60/1378333
gtggatt

SEQ ID NO: 106911 - DNA, 7 bp, Unknown
  misc_feature (1)..( 7): Result.002 file - promoters60/1378333
gtgaatt

SEQ ID NO: 106912 - DNA, 6 bp, Unknown
  misc_feature (1)..( 6): Result.002 file - promoters60/1378333
ccgttg

SEQ ID NO: 106913 - DNA, 6 bp, Unknown
  misc_feature (1)..( 6): Result.002 file - promoters60/1378333
ccgttg

SEQ ID NO: 106914 - DNA, 6 bp, Unknown
  misc_feature (1)..( 6): Result.002 file - promoters60/1378333
atcgta

SEQ ID NO: 106915 - DNA, 6 bp, Unknown
  misc_feature (1)..( 6): Result.002 file - promoters60/1378333
atcgta

SEQ ID NO: 106916 - DNA, 6 bp, Unknown
  misc_feature (1)..( 6): Result.002 file - promoters60/1378333
agtcga

SEQ ID NO: 106917 - DNA, 6 bp, Unknown
  misc_feature (1)..( 6): Result.002 file - promoters60/1378333
agtcga

SEQ ID NO: 106918 - DNA, 9 bp, Unknown
  misc_feature (1)..( 9): Result.002 file - promoters60/1378333
gtgtcctct

SEQ ID NO: 106919 - DNA, 9 bp, Unknown
  misc_feature (1)..( 9): Result.002 file - promoters60/1378333
gtgtgctct

SEQ ID NO: 106920 - DNA, 6 bp, Unknown
  misc_feature (1)..( 6): Result.002 file - promoters60/1378333
aaccgt

SEQ ID NO: 106921 - DNA, 6 bp, Unknown
  misc_feature (1)..( 6): Result.002 file - promoters60/1378333
aaccgt

SEQ ID NO: 106922 - DNA, 7 bp, Unknown
  misc_feature (1)..( 7): Result.002 file - promoters60/1378333
aatacaa

SEQ ID NO: 106923 - DNA, 7 bp, Unknown
  misc_feature (1)..( 7): Result.002 file - promoters60/1378333
aatgcaa

SEQ ID NO: 106924 - DNA, 7 bp, Unknown
  misc_feature (1)..( 7): Result.002 file - promoters60/1378333
agatagg

SEQ ID NO: 106925 - DNA, 7 bp, Unknown
  misc_feature (1)..( 7): Result.002 file - promoters60/1378333
agaaagg

SEQ ID NO: 106926 - DNA, 7 bp, Unknown
  misc_feature (1)..( 7): Result.002 file - promoters60/1378333
ttgaaga

SEQ ID NO: 106927 - DNA, 7 bp, Unknown
  misc_feature (1)..( 7): Result.002 file - promoters60/1378333
ttgcaga

SEQ ID NO: 106928 - DNA, 7 bp, Unknown
  misc_feature (1)..( 7): Result.002 file - promoters60/1378333
cgtggat

SEQ ID NO: 106929 - DNA, 7 bp, Unknown
  misc_feature (1)..( 7): Result.002 file - promoters60/1378333
cgtggat

SEQ ID NO: 106930 - DNA, 7 bp, Unknown
  misc_feature (1)..( 7): Result.002 file - promoters60/1378333
catcgag

SEQ ID NO: 106931 - DNA, 7 bp, Unknown
  misc_feature (1)..( 7): Result.002 file - promoters60/1378333
cattgag

SEQ ID NO: 106932 - DNA, 6 bp, Unknown
  misc_feature (1)..( 6): Result.002 file - promoters60/1378333
atcgga

SEQ ID NO: 106933 - DNA, 6 bp, Unknown
  misc_feature (1)..( 6): Result.002 file - promoters60/1378333
atcgga

SEQ ID NO: 106934 - DNA, 8 bp, Unknown
  misc_feature (1)..( 8): Result.002 file - promoters60/1378333
gtaagttt

SEQ ID NO: 106935 - DNA, 8 bp, Unknown
  misc_feature (1)..( 8): Result.002 file - promoters60/1378333
gtacgttt

SEQ ID NO: 106936 - DNA, 7 bp, Unknown
  misc_feature (1)..( 7): Result.002 file - promoters60/1378333
ctacaca

SEQ ID NO: 106937 - DNA, 7 bp, Unknown
  misc_feature (1)..( 7): Result.002 file - promoters60/1378333
ctaaaca

SEQ ID NO: 106938 - DNA, 14 bp, Unknown
  misc_feature (1)..( 14): Result.002 file - promoters60/1378393
gaaaatctcataat

SEQ ID NO: 106939 - DNA, 14 bp, Unknown
  misc_feature (1)..( 14): Result.002 file - promoters60/1378393
gataatatcagaat

SEQ ID NO: 106940 - DNA, 14 bp, Unknown
  misc_feature (1)..( 14): Result.002 file - promoters60/1378393
ataaatctggaatc

SEQ ID NO: 106941 - DNA, 14 bp, Unknown
  misc_feature (1)..( 14): Result.002 file - promoters60/1378393
taaaatcaaccaat

SEQ ID NO: 106942 - DNA, 14 bp, Unknown
  misc_feature (1)..( 14): Result.002 file - promoters60/1378393
cagaataacataat

SEQ ID NO: 106943 - DNA, 14 bp, Unknown
  misc_feature (1)..( 14): Result.002 file - promoters60/1378393
tgatgtatcagtag

SEQ ID NO: 106944 - DNA, 15 bp, Unknown
  misc_feature (1)..( 15): Result.002 file - promoters60/1378400
cccatagctccttaa

SEQ ID NO: 106945 - DNA, 15 bp, Unknown
  misc_feature (1)..( 15): Result.002 file - promoters60/1378400
cccatagctccttaa

SEQ ID NO: 106946 - DNA, 7 bp, Unknown
  misc_feature (1)..( 7): Result.002 file - promoters60/1378400
tttggtt

SEQ ID NO: 106947 - DNA, 7 bp, Unknown
  misc_feature (1)..( 7): Result.002 file - promoters60/1378400
tttggtt

SEQ ID NO: 106948 - DNA, 8 bp, Unknown
  misc_feature (1)..( 8): Result.002 file - promoters60/1378400
gaaaagaa

SEQ ID NO: 106949 - DNA, 8 bp, Unknown
  misc_feature (1)..( 8): Result.002 file - promoters60/1378400
gaagagaa

SEQ ID NO: 106950 - DNA, 8 bp, Unknown
  misc_feature (1)..( 8): Result.002 file - promoters60/1378400
gaagagaa

SEQ ID NO: 106951 - DNA, 14 bp, Unknown
  misc_feature (1)..( 14): Result.002 file - promoters60/1378400
atagcttaccttta

SEQ ID NO: 106952 - DNA, 14 bp, Unknown
  misc_feature (1)..( 14): Result.002 file - promoters60/1378400
ttagcttcagcttc

SEQ ID NO: 106953 - DNA, 14 bp, Unknown
  misc_feature (1)..( 14): Result.002 file - promoters60/1378400
ttagcttcagcttc

SEQ ID NO: 106954 - DNA, 14 bp, Unknown
  misc_feature (1)..( 14): Result.002 file - promoters60/1378400
agagagagagagag

SEQ ID NO: 106955 - DNA, 14 bp, Unknown
  misc_feature (1)..( 14): Result.002 file - promoters60/1378400
agagagagagagag

SEQ ID NO: 106956 - DNA, 14 bp, Unknown
  misc_feature (1)..( 14): Result.002 file - promoters60/1378400
agagagagaggtga

SEQ ID NO: 106957 - DNA, 7 bp, Unknown
  misc_feature (1)..( 7): Result.002 file - promoters60/1378400
agagaag

SEQ ID NO: 106958 - DNA, 7 bp, Unknown
  misc_feature (1)..( 7): Result.002 file - promoters60/1378400
agagaag

SEQ ID NO: 106959 - DNA, 7 bp, Unknown
  misc_feature (1)..( 7): Result.002 file - promoters60/1378400
ggatcaa

SEQ ID NO: 106960 - DNA, 7 bp, Unknown
  misc_feature (1)..( 7): Result.002 file - promoters60/1378400
ggatcaa

SEQ ID NO: 106961 - DNA, 11 bp, Unknown
  misc_feature (1)..( 11): Result.002 file - promoters60/1378400
attcagggttt

SEQ ID NO: 106962 - DNA, 11 bp, Unknown
  misc_feature (1)..( 11): Result.002 file - promoters60/1378400
attcaggtttt

SEQ ID NO: 106963 - DNA, 8 bp, Unknown
  misc_feature (1)..( 8): Result.002 file - promoters60/1378400
aaacgatt

SEQ ID NO: 106964 - DNA, 8 bp, Unknown
  misc_feature (1)..( 8): Result.002 file - promoters60/1378400
aaacaatt

SEQ ID NO: 106965 - DNA, 7 bp, Unknown
  misc_feature (1)..( 7): Result.002 file - promoters60/1378400
aacgcga

SEQ ID NO: 106966 - DNA, 7 bp, Unknown
  misc_feature (1)..( 7): Result.002 file - promoters60/1378400
aacgcga

SEQ ID NO: 106967 - DNA, 8 bp, Unknown
  misc_feature (1)..( 8): Result.002 file - promoters60/1378400
aaagagaa

SEQ ID NO: 106968 - DNA, 8 bp, Unknown
  misc_feature (1)..( 8): Result.002 file - promoters60/1378400
aaagagaa

SEQ ID NO: 106969 - DNA, 8 bp, Unknown
  misc_feature (1)..( 8): Result.002 file - promoters60/1378400
aacgcgaa

SEQ ID NO: 106970 - DNA, 8 bp, Unknown
  misc_feature (1)..( 8): Result.002 file - promoters60/1378400
aacgtgaa

SEQ ID NO: 106971 - DNA, 6 bp, Unknown
  misc_feature (1)..( 6): Result.002 file - promoters60/1378400
ttatat

SEQ ID NO: 106972 - DNA, 6 bp, Unknown
  misc_feature (1)..( 6): Result.002 file - promoters60/1378400
ttatat

SEQ ID NO: 106973 - DNA, 7 bp, Unknown
  misc_feature (1)..( 7): Result.002 file - promoters60/1378400
tttggtt

SEQ ID NO: 106974 - DNA, 7 bp, Unknown
  misc_feature (1)..( 7): Result.002 file - promoters60/1378400
tttggtt

SEQ ID NO: 106975 - DNA, 6 bp, Unknown
  misc_feature (1)..( 6): Result.002 file - promoters60/1378400
tagctt

SEQ ID NO: 106976 - DNA, 6 bp, Unknown
  misc_feature (1)..( 6): Result.002 file - promoters60/1378400
tagctt

SEQ ID NO: 106977 - DNA, 7 bp, Unknown
  misc_feature (1)..( 7): Result.002 file - promoters60/1378400
aacgcga

SEQ ID NO: 106978 - DNA, 7 bp, Unknown
  misc_feature (1)..( 7): Result.002 file - promoters60/1378400
aacgcga

SEQ ID NO: 106979 - DNA, 7 bp, Unknown
  misc_feature (1)..( 7): Result.002 file - promoters60/1378458
gcttctc

SEQ ID NO: 106980 - DNA, 7 bp, Unknown
  misc_feature (1)..( 7): Result.002 file - promoters60/1378458
gcttctc

SEQ ID NO: 106981 - DNA, 8 bp, Unknown
  misc_feature (1)..( 8): Result.002 file - promoters60/1378458
gaagcaaa

SEQ ID NO: 106982 - DNA, 8 bp, Unknown
  misc_feature (1)..( 8): Result.002 file - promoters60/1378458
aaagaaaa

SEQ ID NO: 106983 - DNA, 8 bp, Unknown
  misc_feature (1)..( 8): Result.002 file - promoters60/1378458
aaagaata

SEQ ID NO: 106984 - DNA, 9 bp, Unknown
  misc_feature (1)..( 9): Result.002 file - promoters60/1378458
aaccaatcc

SEQ ID NO: 106985 - DNA, 9 bp, Unknown
  misc_feature (1)..( 9): Result.002 file - promoters60/1378458
aaccactcc

SEQ ID NO: 106986 - DNA, 6 bp, Unknown
  misc_feature (1)..( 6): Result.002 file - promoters60/1378458
tgtcaa

SEQ ID NO: 106987 - DNA, 6 bp, Unknown
  misc_feature (1)..( 6): Result.002 file - promoters60/1378458
tgtcaa

SEQ ID NO: 106988 - DNA, 10 bp, Unknown
  misc_feature (1)..( 10): Result.002 file - promoters60/1378458
ttcttgatta

SEQ ID NO: 106989 - DNA, 10 bp, Unknown
  misc_feature (1)..( 10): Result.002 file - promoters60/1378458
ttcttcatta

SEQ ID NO: 106990 - DNA, 8 bp, Unknown
  misc_feature (1)..( 8): Result.002 file - promoters60/1378458
gatgggaa

SEQ ID NO: 106991 - DNA, 8 bp, Unknown
  misc_feature (1)..( 8): Result.002 file - promoters60/1378458
gatgtgaa

SEQ ID NO: 106992 - DNA, 7 bp, Unknown
  misc_feature (1)..( 7): Result.002 file - promoters60/1378458
tctgcag

SEQ ID NO: 106993 - DNA, 7 bp, Unknown
  misc_feature (1)..( 7): Result.002 file - promoters60/1378458
tcttcag

SEQ ID NO: 106994 - DNA, 7 bp, Unknown
  misc_feature (1)..( 7): Result.002 file - promoters60/1378458
gtcctat

SEQ ID NO: 106995 - DNA, 7 bp, Unknown
  misc_feature (1)..( 7): Result.002 file - promoters60/1378458
gtcttat

SEQ ID NO: 106996 - DNA, 7 bp, Unknown
  misc_feature (1)..( 7): Result.002 file - promoters60/1378458
tggtggg

SEQ ID NO: 106997 - DNA, 7 bp, Unknown
  misc_feature (1)..( 7): Result.002 file - promoters60/1378458
tggtggg

SEQ ID NO: 106998 - DNA, 7 bp, Unknown
  misc_feature (1)..( 7): Result.002 file - promoters60/1378458
gaagttg

SEQ ID NO: 106999 - DNA, 7 bp, Unknown
  misc_feature (1)..( 7): Result.002 file - promoters60/1378458
gaagttg

SEQ ID NO: 107000 - DNA, 8 bp, Unknown
  misc_feature (1)..( 8): Result.002 file - promoters60/1378458
tttagctt

SEQ ID NO: 107001 - DNA, 8 bp, Unknown
  misc_feature (1)..( 8): Result.002 file - promoters60/1378458
tttatctt

SEQ ID NO: 107002 - DNA, 6 bp, Unknown
  misc_feature (1)..( 6): Result.002 file - promoters60/1378458
gaatta

SEQ ID NO: 107003 - DNA, 6 bp, Unknown
  misc_feature (1)..( 6): Result.002 file - promoters60/1378458
gaatta

SEQ ID NO: 107004 - DNA, 6 bp, Unknown
  misc_feature (1)..( 6): Result.002 file - promoters60/1378458
gcggaa

SEQ ID NO: 107005 - DNA, 6 bp, Unknown
  misc_feature (1)..( 6): Result.002 file - promoters60/1378458
gcggaa

SEQ ID NO: 107006 - DNA, 7 bp, Unknown
  misc_feature (1)..( 7): Result.002 file - promoters60/1378458
tattttc

SEQ ID NO: 107007 - DNA, 7 bp, Unknown
  misc_feature (1)..( 7): Result.002 file - promoters60/1378458
tatcttc

SEQ ID NO: 107008 - DNA, 6 bp, Unknown
  misc_feature (1)..( 6): Result.002 file - promoters60/1378458
tccttg

SEQ ID NO: 107009 - DNA, 6 bp, Unknown
  misc_feature (1)..( 6): Result.002 file - promoters60/1378458
tccttg

SEQ ID NO: 107010 - DNA, 7 bp, Unknown
  misc_feature (1)..( 7): Result.002 file - promoters60/1378458
gatatat

SEQ ID NO: 107011 - DNA, 7 bp, Unknown
  misc_feature (1)..( 7): Result.002 file - promoters60/1378458
gatgtat

SEQ ID NO: 107012 - DNA, 10 bp, Unknown
  misc_feature (1)..( 10): Result.002 file - promoters60/1378528
agtttttgaa

SEQ ID NO: 107013 - DNA, 10 bp, Unknown
  misc_feature (1)..( 10): Result.002 file - promoters60/1378528
taattttgaa

SEQ ID NO: 107014 - DNA, 10 bp, Unknown
  misc_feature (1)..( 10): Result.002 file - promoters60/1378528
taatattggt

SEQ ID NO: 107015 - DNA, 7 bp, Unknown
  misc_feature (1)..( 7): Result.002 file - promoters60/1378528
aaagaaa

SEQ ID NO: 107016 - DNA, 7 bp, Unknown
  misc_feature (1)..( 7): Result.002 file - promoters60/1378528
aaaaaaa

SEQ ID NO: 107017 - DNA, 7 bp, Unknown
  misc_feature (1)..( 7): Result.002 file - promoters60/1378528
aaataat

SEQ ID NO: 107018 - DNA, 9 bp, Unknown
  misc_feature (1)..( 9): Result.002 file - promoters60/1378528
gtgatttag

SEQ ID NO: 107019 - DNA, 9 bp, Unknown
  misc_feature (1)..( 9): Result.002 file - promoters60/1378528
agtatttag

SEQ ID NO: 107020 - DNA, 9 bp, Unknown
  misc_feature (1)..( 9): Result.002 file - promoters60/1378528
agtttttac

SEQ ID NO: 107021 - DNA, 7 bp, Unknown
  misc_feature (1)..( 7): Result.002 file - promoters60/1378528
aatacaa

SEQ ID NO: 107022 - DNA, 7 bp, Unknown
  misc_feature (1)..( 7): Result.002 file - promoters60/1378528
tatacaa

SEQ ID NO: 107023 - DNA, 7 bp, Unknown
  misc_feature (1)..( 7): Result.002 file - promoters60/1378528
tattcaa

SEQ ID NO: 107024 - DNA, 11 bp, Unknown
  misc_feature (1)..( 11): Result.002 file - promoters60/1378528
ccaaaattgat

SEQ ID NO: 107025 - DNA, 11 bp, Unknown
  misc_feature (1)..( 11): Result.002 file - promoters60/1378528
ccaaaataaaa

SEQ ID NO: 107026 - DNA, 11 bp, Unknown
  misc_feature (1)..( 11): Result.002 file - promoters60/1378528
ctaaaaaaaaa

SEQ ID NO: 107027 - DNA, 9 bp, Unknown
  misc_feature (1)..( 9): Result.002 file - promoters60/1378528
atataatat

SEQ ID NO: 107028 - DNA, 9 bp, Unknown
  misc_feature (1)..( 9): Result.002 file - promoters60/1378528
ataaaataa

SEQ ID NO: 107029 - DNA, 9 bp, Unknown
  misc_feature (1)..( 9): Result.002 file - promoters60/1378528
atacaataa

SEQ ID NO: 107030 - DNA, 9 bp, Unknown
  misc_feature (1)..( 9): Result.002 file - promoters60/1378528
aaaaaaaaa

SEQ ID NO: 107031 - DNA, 9 bp, Unknown
  misc_feature (1)..( 9): Result.002 file - promoters60/1378528
tttgtaatt

SEQ ID NO: 107032 - DNA, 9 bp, Unknown
  misc_feature (1)..( 9): Result.002 file - promoters60/1378528
tttttaatt

SEQ ID NO: 107033 - DNA, 9 bp, Unknown
  misc_feature (1)..( 9): Result.002 file - promoters60/1378528
gttttaagg

SEQ ID NO: 107034 - DNA, 11 bp, Unknown
  misc_feature (1)..( 11): Result.002 file - promoters60/1378528
ttttaaagatt

SEQ ID NO: 107035 - DNA, 11 bp, Unknown
  misc_feature (1)..( 11): Result.002 file - promoters60/1378528
tttaaaacatt

SEQ ID NO: 107036 - DNA, 11 bp, Unknown
  misc_feature (1)..( 11): Result.002 file - promoters60/1378528
aagaaatcata

SEQ ID NO: 107037 - DNA, 6 bp, Unknown
  misc_feature (1)..( 6): Result.002 file - promoters60/1378528
ttttct

SEQ ID NO: 107038 - DNA, 6 bp, Unknown
  misc_feature (1)..( 6): Result.002 file - promoters60/1378528
ttttct

SEQ ID NO: 107039 - DNA, 6 bp, Unknown
  misc_feature (1)..( 6): Result.002 file - promoters60/1378528
ttttct

SEQ ID NO: 107040 - DNA, 7 bp, Unknown
  misc_feature (1)..( 7): Result.002 file - promoters60/1378622
tttttta

SEQ ID NO: 107041 - DNA, 7 bp, Unknown
  misc_feature (1)..( 7): Result.002 file - promoters60/1378622
tttatta

SEQ ID NO: 107042 - DNA, 8 bp, Unknown
  misc_feature (1)..( 8): Result.002 file - promoters60/1378622
tttatcta

SEQ ID NO: 107043 - DNA, 8 bp, Unknown
  misc_feature (1)..( 8): Result.002 file - promoters60/1378622
tttttcta

SEQ ID NO: 107044 - DNA, 6 bp, Unknown
  misc_feature (1)..( 6): Result.002 file - promoters60/1378622
attttt

SEQ ID NO: 107045 - DNA, 6 bp, Unknown
  misc_feature (1)..( 6): Result.002 file - promoters60/1378622
attttt

SEQ ID NO: 107046 - DNA, 8 bp, Unknown
  misc_feature (1)..( 8): Result.002 file - promoters60/1378622
aaagattt

SEQ ID NO: 107047 - DNA, 8 bp, Unknown
  misc_feature (1)..( 8): Result.002 file - promoters60/1378622
aaagattt

SEQ ID NO: 107048 - DNA, 8 bp, Unknown
  misc_feature (1)..( 8): Result.002 file - promoters60/1378622
taagattg

SEQ ID NO: 107049 - DNA, 8 bp, Unknown
  misc_feature (1)..( 8): Result.002 file - promoters60/1378622
ggtatttg

SEQ ID NO: 107050 - DNA, 8 bp, Unknown
  misc_feature (1)..( 8): Result.002 file - promoters60/1378622
ggtgtttg

SEQ ID NO: 107051 - DNA, 6 bp, Unknown
  misc_feature (1)..( 6): Result.002 file - promoters60/1378622
atgaat

SEQ ID NO: 107052 - DNA, 6 bp, Unknown
  misc_feature (1)..( 6): Result.002 file - promoters60/1378622
atgaat

SEQ ID NO: 107053 - DNA, 7 bp, Unknown
  misc_feature (1)..( 7): Result.002 file - promoters60/1378622
ttacaat

SEQ ID NO: 107054 - DNA, 7 bp, Unknown
  misc_feature (1)..( 7): Result.002 file - promoters60/1378622
ttataat

SEQ ID NO: 107055 - DNA, 9 bp, Unknown
  misc_feature (1)..( 9): Result.002 file - promoters60/1378622
aattataaa

SEQ ID NO: 107056 - DNA, 9 bp, Unknown
  misc_feature (1)..( 9): Result.002 file - promoters60/1378622
aattttaac

SEQ ID NO: 107057 - DNA, 9 bp, Unknown
  misc_feature (1)..( 9): Result.002 file - promoters60/1378622
cctttgacc

SEQ ID NO: 107058 - DNA, 14 bp, Unknown
  misc_feature (1)..( 14): Result.002 file - promoters60/1378622
aatttctcccaaaa

SEQ ID NO: 107059 - DNA, 14 bp, Unknown
  misc_feature (1)..( 14): Result.002 file - promoters60/1378622
aatttctgccaaaa

SEQ ID NO: 107060 - DNA, 14 bp, Unknown
  misc_feature (1)..( 14): Result.002 file - promoters60/1378622
tatttctcttatcc

SEQ ID NO: 107061 - DNA, 8 bp, Unknown
  misc_feature (1)..( 8): Result.002 file - promoters60/1378622
ataaactt

SEQ ID NO: 107062 - DNA, 8 bp, Unknown
  misc_feature (1)..( 8): Result.002 file - promoters60/1378622
ttaacctt

SEQ ID NO: 107063 - DNA, 8 bp, Unknown
  misc_feature (1)..( 8): Result.002 file - promoters60/1378622
ttaaccct

SEQ ID NO: 107064 - DNA, 13 bp, Unknown
  misc_feature (1)..( 13): Result.002 file - promoters60/1378622
ttgaatcaatatt

SEQ ID NO: 107065 - DNA, 13 bp, Unknown
  misc_feature (1)..( 13): Result.002 file - promoters60/1378622
ttgattcaaaatt

SEQ ID NO: 107066 - DNA, 7 bp, Unknown
  misc_feature (1)..( 7): Result.002 file - promoters60/1378622
tggattt

SEQ ID NO: 107067 - DNA, 7 bp, Unknown
  misc_feature (1)..( 7): Result.002 file - promoters60/1378622
tggattt

SEQ ID NO: 107068 - DNA, 6 bp, Unknown
  misc_feature (1)..( 6): Result.002 file - promoters60/1378622
ttggtt

SEQ ID NO: 107069 - DNA, 6 bp, Unknown
  misc_feature (1)..( 6): Result.002 file - promoters60/1378622
ttggtt

SEQ ID NO: 107070 - DNA, 7 bp, Unknown
  misc_feature (1)..( 7): Result.002 file - promoters60/1378622
ctcactc

SEQ ID NO: 107071 - DNA, 7 bp, Unknown
  misc_feature (1)..( 7): Result.002 file - promoters60/1378622
ctcgctc

SEQ ID NO: 107072 - DNA, 10 bp, Unknown
  misc_feature (1)..( 10): Result.002 file - promoters60/1378692
atttataaac

SEQ ID NO: 107073 - DNA, 10 bp, Unknown
  misc_feature (1)..( 10): Result.002 file - promoters60/1378692
atttataagt

SEQ ID NO: 107074 - DNA, 10 bp, Unknown
  misc_feature (1)..( 10): Result.002 file - promoters60/1378692
gattataaac

SEQ ID NO: 107075 - DNA, 10 bp, Unknown
  misc_feature (1)..( 10): Result.002 file - promoters60/1378692
atttatatta

SEQ ID NO: 107076 - DNA, 8 bp, Unknown
  misc_feature (1)..( 8): Result.002 file - promoters60/1378692
aataatta

SEQ ID NO: 107077 - DNA, 8 bp, Unknown
  misc_feature (1)..( 8): Result.002 file - promoters60/1378692
aatattta

SEQ ID NO: 107078 - DNA, 8 bp, Unknown
  misc_feature (1)..( 8): Result.002 file - promoters60/1378692
aatttttt

SEQ ID NO: 107079 - DNA, 8 bp, Unknown
  misc_feature (1)..( 8): Result.002 file - promoters60/1378692
gatatttt

SEQ ID NO: 107080 - DNA, 12 bp, Unknown
  misc_feature (1)..( 12): Result.002 file - promoters60/1378692
cgctatttctct

SEQ ID NO: 107081 - DNA, 12 bp, Unknown
  misc_feature (1)..( 12): Result.002 file - promoters60/1378692
ttctatttgtct

SEQ ID NO: 107082 - DNA, 12 bp, Unknown
  misc_feature (1)..( 12): Result.002 file - promoters60/1378692
cgctattcctga

SEQ ID NO: 107083 - DNA, 12 bp, Unknown
  misc_feature (1)..( 12): Result.002 file - promoters60/1378692
taaattttgtca

SEQ ID NO: 107084 - DNA, 10 bp, Unknown
  misc_feature (1)..( 10): Result.002 file - promoters60/1378692
gatttataat

SEQ ID NO: 107085 - DNA, 10 bp, Unknown
  misc_feature (1)..( 10): Result.002 file - promoters60/1378692
gatttctaat

SEQ ID NO: 107086 - DNA, 10 bp, Unknown
  misc_feature (1)..( 10): Result.002 file - promoters60/1378692
attttataat

SEQ ID NO: 107087 - DNA, 11 bp, Unknown
  misc_feature (1)..( 11): Result.002 file - promoters60/1378692
actttcataaa

SEQ ID NO: 107088 - DNA, 9 bp, Unknown
  misc_feature (1)..( 9): Result.002 file - promoters60/1378692
tccacaatg

SEQ ID NO: 107089 - DNA, 9 bp, Unknown
  misc_feature (1)..( 9): Result.002 file - promoters60/1378692
aatacaatg

SEQ ID NO: 107090 - DNA, 9 bp, Unknown
  misc_feature (1)..( 9): Result.002 file - promoters60/1378692
tatataatt

SEQ ID NO: 107091 - DNA, 9 bp, Unknown
  misc_feature (1)..( 9): Result.002 file - promoters60/1378692
tttacaata

SEQ ID NO: 107092 - DNA, 9 bp, Unknown
  misc_feature (1)..( 9): Result.002 file - promoters60/1378692
tatataaag

SEQ ID NO: 107093 - DNA, 8 bp, Unknown
  misc_feature (1)..( 8): Result.002 file - promoters60/1378692
aacaatca

SEQ ID NO: 107094 - DNA, 8 bp, Unknown
  misc_feature (1)..( 8): Result.002 file - promoters60/1378692
tacaatcc

SEQ ID NO: 107095 - DNA, 8 bp, Unknown
  misc_feature (1)..( 8): Result.002 file - promoters60/1378692
accaatca

SEQ ID NO: 107096 - DNA, 8 bp, Unknown
  misc_feature (1)..( 8): Result.002 file - promoters60/1378692
aataatag

SEQ ID NO: 107097 - DNA, 9 bp, Unknown
  misc_feature (1)..( 9): Result.002 file - promoters60/1378692
tattatccg

SEQ ID NO: 107098 - DNA, 9 bp, Unknown
  misc_feature (1)..( 9): Result.002 file - promoters60/1378692
tattatcat

SEQ ID NO: 107099 - DNA, 9 bp, Unknown
  misc_feature (1)..( 9): Result.002 file - promoters60/1378692
tattataaa

SEQ ID NO: 107100 - DNA, 9 bp, Unknown
  misc_feature (1)..( 9): Result.002 file - promoters60/1378692
gattataaa

SEQ ID NO: 107101 - DNA, 9 bp, Unknown
  misc_feature (1)..( 9): Result.002 file - promoters60/1378692
ggtattatt

SEQ ID NO: 107102 - DNA, 9 bp, Unknown
  misc_feature (1)..( 9): Result.002 file - promoters60/1378692
gatattatt

SEQ ID NO: 107103 - DNA, 9 bp, Unknown
  misc_feature (1)..( 9): Result.002 file - promoters60/1378692
gatcttaag

SEQ ID NO: 107104 - DNA, 9 bp, Unknown
  misc_feature (1)..( 9): Result.002 file - promoters60/1378692
catattacc

SEQ ID NO: 107105 - DNA, 6 bp, Unknown
  misc_feature (1)..( 6): Result.002 file - promoters60/1378800
gttttt

SEQ ID NO: 107106 - DNA, 6 bp, Unknown
  misc_feature (1)..( 6): Result.002 file - promoters60/1378800
gttttt

SEQ ID NO: 107107 - DNA, 6 bp, Unknown
  misc_feature (1)..( 6): Result.002 file - promoters60/1378800
gttttt

SEQ ID NO: 107108 - DNA, 8 bp, Unknown
  misc_feature (1)..( 8): Result.002 file - promoters60/1378800
gtttcttt

SEQ ID NO: 107109 - DNA, 8 bp, Unknown
  misc_feature (1)..( 8): Result.002 file - promoters60/1378800
ttttcttt

SEQ ID NO: 107110 - DNA, 8 bp, Unknown
  misc_feature (1)..( 8): Result.002 file - promoters60/1378800
gttttttt

SEQ ID NO: 107111 - DNA, 7 bp, Unknown
  misc_feature (1)..( 7): Result.002 file - promoters60/1378800
tttcttt

SEQ ID NO: 107112 - DNA, 7 bp, Unknown
  misc_feature (1)..( 7): Result.002 file - promoters60/1378800
tttctta

SEQ ID NO: 107113 - DNA, 7 bp, Unknown
  misc_feature (1)..( 7): Result.002 file - promoters60/1378800
ttttttt

SEQ ID NO: 107114 - DNA, 8 bp, Unknown
  misc_feature (1)..( 8): Result.002 file - promoters60/1378800
atttttta

SEQ ID NO: 107115 - DNA, 8 bp, Unknown
  misc_feature (1)..( 8): Result.002 file - promoters60/1378800
atttttct

SEQ ID NO: 107116 - DNA, 8 bp, Unknown
  misc_feature (1)..( 8): Result.002 file - promoters60/1378800
ttttttta

SEQ ID NO: 107117 - DNA, 9 bp, Unknown
  misc_feature (1)..( 9): Result.002 file - promoters60/1378800
ttttttaaa

SEQ ID NO: 107118 - DNA, 9 bp, Unknown
  misc_feature (1)..( 9): Result.002 file - promoters60/1378800
attttcaaa

SEQ ID NO: 107119 - DNA, 9 bp, Unknown
  misc_feature (1)..( 9): Result.002 file - promoters60/1378800
ttttttaca

SEQ ID NO: 107120 - DNA, 8 bp, Unknown
  misc_feature (1)..( 8): Result.002 file - promoters60/1378800
tttaaaaa

SEQ ID NO: 107121 - DNA, 8 bp, Unknown
  misc_feature (1)..( 8): Result.002 file - promoters60/1378800
cataaaaa

SEQ ID NO: 107122 - DNA, 8 bp, Unknown
  misc_feature (1)..( 8): Result.002 file - promoters60/1378800
catataaa

SEQ ID NO: 107123 - DNA, 6 bp, Unknown
  misc_feature (1)..( 6): Result.002 file - promoters60/1378880
tgaata

SEQ ID NO: 107124 - DNA, 6 bp, Unknown
  misc_feature (1)..( 6): Result.002 file - promoters60/1378880
tgaata

SEQ ID NO: 107125 - DNA, 6 bp, Unknown
  misc_feature (1)..( 6): Result.002 file - promoters60/1378880
tgaata

SEQ ID NO: 107126 - DNA, 7 bp, Unknown
  misc_feature (1)..( 7): Result.002 file - promoters60/1378880
aaagaaa

SEQ ID NO: 107127 - DNA, 7 bp, Unknown
  misc_feature (1)..( 7): Result.002 file - promoters60/1378880
gaagaaa

SEQ ID NO: 107128 - DNA, 7 bp, Unknown
  misc_feature (1)..( 7): Result.002 file - promoters60/1378880
aaataaa

SEQ ID NO: 107129 - DNA, 7 bp, Unknown
  misc_feature (1)..( 7): Result.002 file - promoters60/1378880
aaaatat

SEQ ID NO: 107130 - DNA, 7 bp, Unknown
  misc_feature (1)..( 7): Result.002 file - promoters60/1378880
aaactat

SEQ ID NO: 107131 - DNA, 6 bp, Unknown
  misc_feature (1)..( 6): Result.002 file - promoters60/1378880
tcacaa

SEQ ID NO: 107132 - DNA, 6 bp, Unknown
  misc_feature (1)..( 6): Result.002 file - promoters60/1378880
tcacaa

SEQ ID NO: 107133 - DNA, 6 bp, Unknown
  misc_feature (1)..( 6): Result.002 file - promoters60/1378880
tcacaa

SEQ ID NO: 107134 - DNA, 7 bp, Unknown
  misc_feature (1)..( 7): Result.002 file - promoters60/1378880
atctaac

SEQ ID NO: 107135 - DNA, 7 bp, Unknown
  misc_feature (1)..( 7): Result.002 file - promoters60/1378880
atctaac

SEQ ID NO: 107136 - DNA, 15 bp, Unknown
  misc_feature (1)..( 15): Result.002 file - promoters60/1378880
gcttatgatgtgtcg

SEQ ID NO: 107137 - DNA, 15 bp, Unknown
  misc_feature (1)..( 15): Result.002 file - promoters60/1378880
gcttatgatgtgtcg

SEQ ID NO: 107138 - DNA, 7 bp, Unknown
  misc_feature (1)..( 7): Result.002 file - promoters60/1378880
atacaaa

SEQ ID NO: 107139 - DNA, 7 bp, Unknown
  misc_feature (1)..( 7): Result.002 file - promoters60/1378880
atataaa

SEQ ID NO: 107140 - DNA, 7 bp, Unknown
  misc_feature (1)..( 7): Result.002 file - promoters60/1378880
atatata

SEQ ID NO: 107141 - DNA, 7 bp, Unknown
  misc_feature (1)..( 7): Result.002 file - promoters60/1378880
atatata

SEQ ID NO: 107142 - DNA, 7 bp, Unknown
  misc_feature (1)..( 7): Result.002 file - promoters60/1378880
aaaatat

SEQ ID NO: 107143 - DNA, 7 bp, Unknown
  misc_feature (1)..( 7): Result.002 file - promoters60/1378880
aaaatat

SEQ ID NO: 107144 - DNA, 7 bp, Unknown
  misc_feature (1)..( 7): Result.002 file - promoters60/1378880
aaacaaa

SEQ ID NO: 107145 - DNA, 7 bp, Unknown
  misc_feature (1)..( 7): Result.002 file - promoters60/1378880
aaagaaa

SEQ ID NO: 107146 - DNA, 8 bp, Unknown
  misc_feature (1)..( 8): Result.002 file - promoters60/1378880
ctaaattc

SEQ ID NO: 107147 - DNA, 8 bp, Unknown
  misc_feature (1)..( 8): Result.002 file - promoters60/1378880
ctaatttc

SEQ ID NO: 107148 - DNA, 8 bp, Unknown
  misc_feature (1)..( 8): Result.002 file - promoters60/1378880
ttaatttt

SEQ ID NO: 107149 - DNA, 6 bp, Unknown
  misc_feature (1)..( 6): Result.002 file - promoters60/1378880
gattct

SEQ ID NO: 107150 - DNA, 6 bp, Unknown
  misc_feature (1)..( 6): Result.002 file - promoters60/1378880
gattct

SEQ ID NO: 107151 - DNA, 7 bp, Unknown
  misc_feature (1)..( 7): Result.002 file - promoters60/1378880
cacctgt

SEQ ID NO: 107152 - DNA, 7 bp, Unknown
  misc_feature (1)..( 7): Result.002 file - promoters60/1378880
cacgtgt

SEQ ID NO: 107153 - DNA, 9 bp, Unknown
  misc_feature (1)..( 9): Result.002 file - promoters60/1378880
ttcaccata

SEQ ID NO: 107154 - DNA, 9 bp, Unknown
  misc_feature (1)..( 9): Result.002 file - promoters60/1378880
ttcacaata

SEQ ID NO: 107155 - DNA, 6 bp, Unknown
  misc_feature (1)..( 6): Result.002 file - promoters60/1378880
gcaaag

SEQ ID NO: 107156 - DNA, 6 bp, Unknown
  misc_feature (1)..( 6): Result.002 file - promoters60/1378880
gcaaag

SEQ ID NO: 107157 - DNA, 6 bp, Unknown
  misc_feature (1)..( 6): Result.002 file - promoters60/1378880
gtaacg

SEQ ID NO: 107158 - DNA, 6 bp, Unknown
  misc_feature (1)..( 6): Result.002 file - promoters60/1378880
gtaacg

SEQ ID NO: 107159 - DNA, 6 bp, Unknown
  misc_feature (1)..( 6): Result.002 file - promoters60/1378888
cttttg

SEQ ID NO: 107160 - DNA, 6 bp, Unknown
  misc_feature (1)..( 6): Result.002 file - promoters60/1378888
cttttg

SEQ ID NO: 107161 - DNA, 6 bp, Unknown
  misc_feature (1)..( 6): Result.002 file - promoters60/1378888
atctct

SEQ ID NO: 107162 - DNA, 6 bp, Unknown
  misc_feature (1)..( 6): Result.002 file - promoters60/1378888
atctct

SEQ ID NO: 107163 - DNA, 11 bp, Unknown
  misc_feature (1)..( 11): Result.002 file - promoters60/1378888
caagtatctga

SEQ ID NO: 107164 - DNA, 11 bp, Unknown
  misc_feature (1)..( 11): Result.002 file - promoters60/1378888
aaagtttctga

SEQ ID NO: 107165 - DNA, 11 bp, Unknown
  misc_feature (1)..( 11): Result.002 file - promoters60/1378888
caattattttc

SEQ ID NO: 107166 - DNA, 6 bp, Unknown
  misc_feature (1)..( 6): Result.002 file - promoters60/1378888
tttcat

SEQ ID NO: 107167 - DNA, 6 bp, Unknown
  misc_feature (1)..( 6): Result.002 file - promoters60/1378888
tttcat

SEQ ID NO: 107168 - DNA, 6 bp, Unknown
  misc_feature (1)..( 6): Result.002 file - promoters60/1378888
gaaatt

SEQ ID NO: 107169 - DNA, 6 bp, Unknown
  misc_feature (1)..( 6): Result.002 file - promoters60/1378888
gaaatt

SEQ ID NO: 107170 - DNA, 7 bp, Unknown
  misc_feature (1)..( 7): Result.002 file - promoters60/1378888
agtttga

SEQ ID NO: 107171 - DNA, 7 bp, Unknown
  misc_feature (1)..( 7): Result.002 file - promoters60/1378888
agtttga

SEQ ID NO: 107172 - DNA, 8 bp, Unknown
  misc_feature (1)..( 8): Result.002 file - promoters60/1378888
actacttt

SEQ ID NO: 107173 - DNA, 8 bp, Unknown
  misc_feature (1)..( 8): Result.002 file - promoters60/1378888
actgcttt

SEQ ID NO: 107174 - DNA, 8 bp, Unknown
  misc_feature (1)..( 8): Result.002 file - promoters60/1378888
tgtcagaa

SEQ ID NO: 107175 - DNA, 8 bp, Unknown
  misc_feature (1)..( 8): Result.002 file - promoters60/1378888
tgttagaa

SEQ ID NO: 107176 - DNA, 6 bp, Unknown
  misc_feature (1)..( 6): Result.002 file - promoters60/1378888
attact

SEQ ID NO: 107177 - DNA, 6 bp, Unknown
  misc_feature (1)..( 6): Result.002 file - promoters60/1378888
attact

SEQ ID NO: 107178 - DNA, 8 bp, Unknown
  misc_feature (1)..( 8): Result.002 file - promoters60/1378888
ttgaaatt

SEQ ID NO: 107179 - DNA, 8 bp, Unknown
  misc_feature (1)..( 8): Result.002 file - promoters60/1378888
ttgtaatt

SEQ ID NO: 107180 - DNA, 8 bp, Unknown
  misc_feature (1)..( 8): Result.002 file - promoters60/1378888
atatttca

SEQ ID NO: 107181 - DNA, 8 bp, Unknown
  misc_feature (1)..( 8): Result.002 file - promoters60/1378888
atatttgt

SEQ ID NO: 107182 - DNA, 8 bp, Unknown
  misc_feature (1)..( 8): Result.002 file - promoters60/1378888
gtatctgt

SEQ ID NO: 107183 - DNA, 7 bp, Unknown
  misc_feature (1)..( 7): Result.002 file - promoters60/1378888
tatctat

SEQ ID NO: 107184 - DNA, 7 bp, Unknown
  misc_feature (1)..( 7): Result.002 file - promoters60/1378888
tatttat

SEQ ID NO: 107185 - DNA, 8 bp, Unknown
  misc_feature (1)..( 8): Result.002 file - promoters60/1378888
ttgaatga

SEQ ID NO: 107186 - DNA, 8 bp, Unknown
  misc_feature (1)..( 8): Result.002 file - promoters60/1378888
ttgtatga

SEQ ID NO: 107187 - DNA, 6 bp, Unknown
  misc_feature (1)..( 6): Result.002 file - promoters60/1378888
aaaaat

SEQ ID NO: 107188 - DNA, 6 bp, Unknown
  misc_feature (1)..( 6): Result.002 file - promoters60/1378888
aaaaat

SEQ ID NO: 107189 - DNA, 6 bp, Unknown
  misc_feature (1)..( 6): Result.002 file - promoters60/1378888
tttcag

SEQ ID NO: 107190 - DNA, 6 bp, Unknown
  misc_feature (1)..( 6): Result.002 file - promoters60/1378888
tttcag

SEQ ID NO: 107191 - DNA, 7 bp, Unknown
  misc_feature (1)..( 7): Result.002 file - promoters60/1378888
aaaatga

SEQ ID NO: 107192 - DNA, 7 bp, Unknown
  misc_feature (1)..( 7): Result.002 file - promoters60/1378888
aaagtga

SEQ ID NO: 107193 - DNA, 6 bp, Unknown
  misc_feature (1)..( 6): Result.002 file - promoters60/1378888
tgtatt

SEQ ID NO: 107194 - DNA, 6 bp, Unknown
  misc_feature (1)..( 6): Result.002 file - promoters60/1378888
tgtatt

SEQ ID NO: 107195 - DNA, 7 bp, Unknown
  misc_feature (1)..( 7): Result.002 file - promoters60/1378888
attgtat

SEQ ID NO: 107196 - DNA, 7 bp, Unknown
  misc_feature (1)..( 7): Result.002 file - promoters60/1378888
attgtat

SEQ ID NO: 107197 - DNA, 9 bp, Unknown
  misc_feature (1)..( 9): Result.002 file - promoters60/1378888
tttctgttt

SEQ ID NO: 107198 - DNA, 9 bp, Unknown
  misc_feature (1)..( 9): Result.002 file - promoters60/1378888
tttttgttt

SEQ ID NO: 107199 - DNA, 8 bp, Unknown
  misc_feature (1)..( 8): Result.002 file - promoters60/1378888
cttaaaat

SEQ ID NO: 107200 - DNA, 8 bp, Unknown
  misc_feature (1)..( 8): Result.002 file - promoters60/1378888
cttataat

SEQ ID NO: 107201 - DNA, 11 bp, Unknown
  misc_feature (1)..( 11): Result.002 file - promoters60/1378888
aaataataatt

SEQ ID NO: 107202 - DNA, 11 bp, Unknown
  misc_feature (1)..( 11): Result.002 file - promoters60/1378888
aaataataatt

SEQ ID NO: 107203 - DNA, 6 bp, Unknown
  misc_feature (1)..( 6): Result.002 file - promoters60/1378888
acaaaa

SEQ ID NO: 107204 - DNA, 6 bp, Unknown
  misc_feature (1)..( 6): Result.002 file - promoters60/1378888
acaaaa

SEQ ID NO: 107205 - DNA, 6 bp, Unknown
  misc_feature (1)..( 6): Result.002 file - promoters60/1379005
ttaaaa

SEQ ID NO: 107206 - DNA, 6 bp, Unknown
  misc_feature (1)..( 6): Result.002 file - promoters60/1379005
ttaaaa

SEQ ID NO: 107207 - DNA, 6 bp, Unknown
  misc_feature (1)..( 6): Result.002 file - promoters60/1379005
taaaac

SEQ ID NO: 107208 - DNA, 6 bp, Unknown
  misc_feature (1)..( 6): Result.002 file - promoters60/1379005
taaaac

SEQ ID NO: 107209 - DNA, 6 bp, Unknown
  misc_feature (1)..( 6): Result.002 file - promoters60/1379005
aaactt

SEQ ID NO: 107210 - DNA, 6 bp, Unknown
  misc_feature (1)..( 6): Result.002 file - promoters60/1379005
aaactt

SEQ ID NO: 107211 - DNA, 7 bp, Unknown
  misc_feature (1)..( 7): Result.002 file - promoters60/1379005
cacgatc

SEQ ID NO: 107212 - DNA, 7 bp, Unknown
  misc_feature (1)..( 7): Result.002 file - promoters60/1379005
cacaatc

SEQ ID NO: 107213 - DNA, 7 bp, Unknown
  misc_feature (1)..( 7): Result.002 file - promoters60/1379005
aaagcaa

SEQ ID NO: 107214 - DNA, 7 bp, Unknown
  misc_feature (1)..( 7): Result.002 file - promoters60/1379005
aaaccaa

SEQ ID NO: 107215 - DNA, 7 bp, Unknown
  misc_feature (1)..( 7): Result.002 file - promoters60/1379005
aaagcaa

SEQ ID NO: 107216 - DNA, 7 bp, Unknown
  misc_feature (1)..( 7): Result.002 file - promoters60/1379005
aaaccaa

SEQ ID NO: 107217 - DNA, 6 bp, Unknown
  misc_feature (1)..( 6): Result.002 file - promoters60/1379005
aataaa

SEQ ID NO: 107218 - DNA, 6 bp, Unknown
  misc_feature (1)..( 6): Result.002 file - promoters60/1379005
aataaa

SEQ ID NO: 107219 - DNA, 7 bp, Unknown
  misc_feature (1)..( 7): Result.002 file - promoters60/1379005
aagaaga

SEQ ID NO: 107220 - DNA, 7 bp, Unknown
  misc_feature (1)..( 7): Result.002 file - promoters60/1379005
aagaaga

SEQ ID NO: 107221 - DNA, 9 bp, Unknown
  misc_feature (1)..( 9): Result.002 file - promoters60/1379005
aaacattta

SEQ ID NO: 107222 - DNA, 9 bp, Unknown
  misc_feature (1)..( 9): Result.002 file - promoters60/1379005
ttacagtta

SEQ ID NO: 107223 - DNA, 9 bp, Unknown
  misc_feature (1)..( 9): Result.002 file - promoters60/1379005
ttatagtca

SEQ ID NO: 107224 - DNA, 6 bp, Unknown
  misc_feature (1)..( 6): Result.002 file - promoters60/1379005
cagaaa

SEQ ID NO: 107225 - DNA, 6 bp, Unknown
  misc_feature (1)..( 6): Result.002 file - promoters60/1379005
cagaaa

SEQ ID NO: 107226 - DNA, 7 bp, Unknown
  misc_feature (1)..( 7): Result.002 file - promoters60/1379005
tccgcca

SEQ ID NO: 107227 - DNA, 7 bp, Unknown
  misc_feature (1)..( 7): Result.002 file - promoters60/1379005
tccacca

SEQ ID NO: 107228 - DNA, 6 bp, Unknown
  misc_feature (1)..( 6): Result.002 file - promoters60/1379005
ttttga

SEQ ID NO: 107229 - DNA, 6 bp, Unknown
  misc_feature (1)..( 6): Result.002 file - promoters60/1379005
ttttga

SEQ ID NO: 107230 - DNA, 6 bp, Unknown
  misc_feature (1)..( 6): Result.002 file - promoters60/1379005
tcttct

SEQ ID NO: 107231 - DNA, 6 bp, Unknown
  misc_feature (1)..( 6): Result.002 file - promoters60/1379005
tcttct

SEQ ID NO: 107232 - DNA, 7 bp, Unknown
  misc_feature (1)..( 7): Result.002 file - promoters60/1379005
cacacca

SEQ ID NO: 107233 - DNA, 7 bp, Unknown
  misc_feature (1)..( 7): Result.002 file - promoters60/1379005
cacccca

SEQ ID NO: 107234 - DNA, 11 bp, Unknown
  misc_feature (1)..( 11): Result.002 file - promoters60/1379005
ctttcttgttt

SEQ ID NO: 107235 - DNA, 11 bp, Unknown
  misc_feature (1)..( 11): Result.002 file - promoters60/1379005
ctttcttcttt

SEQ ID NO: 107236 - DNA, 8 bp, Unknown
  misc_feature (1)..( 8): Result.002 file - promoters60/1379005
tttgcttc

SEQ ID NO: 107237 - DNA, 8 bp, Unknown
  misc_feature (1)..( 8): Result.002 file - promoters60/1379005
ttttcttc

SEQ ID NO: 107238 - DNA, 7 bp, Unknown
  misc_feature (1)..( 7): Result.002 file - promoters60/1379005
caagttg

SEQ ID NO: 107239 - DNA, 7 bp, Unknown
  misc_feature (1)..( 7): Result.002 file - promoters60/1379005
caatttg

SEQ ID NO: 107240 - DNA, 8 bp, Unknown
  misc_feature (1)..( 8): Result.002 file - promoters60/1379005
taaaaaaa

SEQ ID NO: 107241 - DNA, 8 bp, Unknown
  misc_feature (1)..( 8): Result.002 file - promoters60/1379005
taagaaaa

SEQ ID NO: 107242 - DNA, 8 bp, Unknown
  misc_feature (1)..( 8): Result.002 file - promoters60/1379005
caataaaa

SEQ ID NO: 107243 - DNA, 8 bp, Unknown
  misc_feature (1)..( 8): Result.002 file - promoters60/1379005
caagaaaa

SEQ ID NO: 107244 - DNA, 8 bp, Unknown
  misc_feature (1)..( 8): Result.002 file - promoters60/1379005
aagaatct

SEQ ID NO: 107245 - DNA, 8 bp, Unknown
  misc_feature (1)..( 8): Result.002 file - promoters60/1379005
aaggatct

SEQ ID NO: 107246 - DNA, 8 bp, Unknown
  misc_feature (1)..( 8): Result.002 file - promoters60/1379005
tccaccaa

SEQ ID NO: 107247 - DNA, 8 bp, Unknown
  misc_feature (1)..( 8): Result.002 file - promoters60/1379005
tccaacaa

SEQ ID NO: 107248 - DNA, 7 bp, Unknown
  misc_feature (1)..( 7): Result.002 file - promoters60/1379014
ttagttt

SEQ ID NO: 107249 - DNA, 7 bp, Unknown
  misc_feature (1)..( 7): Result.002 file - promoters60/1379014
ttatttt

SEQ ID NO: 107250 - DNA, 7 bp, Unknown
  misc_feature (1)..( 7): Result.002 file - promoters60/1379014
aaaaaag

SEQ ID NO: 107251 - DNA, 7 bp, Unknown
  misc_feature (1)..( 7): Result.002 file - promoters60/1379014
aaagaag

SEQ ID NO: 107252 - DNA, 7 bp, Unknown
  misc_feature (1)..( 7): Result.002 file - promoters60/1379014
catgcaa

SEQ ID NO: 107253 - DNA, 7 bp, Unknown
  misc_feature (1)..( 7): Result.002 file - promoters60/1379014
catacaa

SEQ ID NO: 107254 - DNA, 7 bp, Unknown
  misc_feature (1)..( 7): Result.002 file - promoters60/1379014
gatgcaa

SEQ ID NO: 107255 - DNA, 6 bp, Unknown
  misc_feature (1)..( 6): Result.002 file - promoters60/1379014
cataga

SEQ ID NO: 107256 - DNA, 6 bp, Unknown
  misc_feature (1)..( 6): Result.002 file - promoters60/1379014
cataga

SEQ ID NO: 107257 - DNA, 7 bp, Unknown
  misc_feature (1)..( 7): Result.002 file - promoters60/1379014
aatctat

SEQ ID NO: 107258 - DNA, 7 bp, Unknown
  misc_feature (1)..( 7): Result.002 file - promoters60/1379014
aatttat

SEQ ID NO: 107259 - DNA, 6 bp, Unknown
  misc_feature (1)..( 6): Result.002 file - promoters60/1379014
caaaac

SEQ ID NO: 107260 - DNA, 6 bp, Unknown
  misc_feature (1)..( 6): Result.002 file - promoters60/1379014
caaaac

SEQ ID NO: 107261 - DNA, 6 bp, Unknown
  misc_feature (1)..( 6): Result.002 file - promoters60/1379014
ccaaaa

SEQ ID NO: 107262 - DNA, 6 bp, Unknown
  misc_feature (1)..( 6): Result.002 file - promoters60/1379014
ccaaaa

SEQ ID NO: 107263 - DNA, 6 bp, Unknown
  misc_feature (1)..( 6): Result.002 file - promoters60/1379014
atacaa

SEQ ID NO: 107264 - DNA, 6 bp, Unknown
  misc_feature (1)..( 6): Result.002 file - promoters60/1379014
atacaa

SEQ ID NO: 107265 - DNA, 6 bp, Unknown
  misc_feature (1)..( 6): Result.002 file - promoters60/1379014
aaattc

SEQ ID NO: 107266 - DNA, 6 bp, Unknown
  misc_feature (1)..( 6): Result.002 file - promoters60/1379014
aaattc

SEQ ID NO: 107267 - DNA, 8 bp, Unknown
  misc_feature (1)..( 8): Result.002 file - promoters60/1379014
aatttacc

SEQ ID NO: 107268 - DNA, 8 bp, Unknown
  misc_feature (1)..( 8): Result.002 file - promoters60/1379014
aatttaaa

SEQ ID NO: 107269 - DNA, 8 bp, Unknown
  misc_feature (1)..( 8): Result.002 file - promoters60/1379014
aattcaaa

SEQ ID NO: 107270 - DNA, 6 bp, Unknown
  misc_feature (1)..( 6): Result.002 file - promoters60/1379014
aaataa

SEQ ID NO: 107271 - DNA, 6 bp, Unknown
  misc_feature (1)..( 6): Result.002 file - promoters60/1379014
aaataa

SEQ ID NO: 107272 - DNA, 6 bp, Unknown
  misc_feature (1)..( 6): Result.002 file - promoters60/1379014
taaata

SEQ ID NO: 107273 - DNA, 6 bp, Unknown
  misc_feature (1)..( 6): Result.002 file - promoters60/1379014
taaata

SEQ ID NO: 107274 - DNA, 6 bp, Unknown
  misc_feature (1)..( 6): Result.002 file - promoters60/1379014
atgaag

SEQ ID NO: 107275 - DNA, 6 bp, Unknown
  misc_feature (1)..( 6): Result.002 file - promoters60/1379014
atgaag

SEQ ID NO: 107276 - DNA, 11 bp, Unknown
  misc_feature (1)..( 11): Result.002 file - promoters60/1379014
tttctctttca

SEQ ID NO: 107277 - DNA, 11 bp, Unknown
  misc_feature (1)..( 11): Result.002 file - promoters60/1379014
tttttctttca

SEQ ID NO: 107278 - DNA, 6 bp, Unknown
  misc_feature (1)..( 6): Result.002 file - promoters60/1379014
acaatt

SEQ ID NO: 107279 - DNA, 6 bp, Unknown
  misc_feature (1)..( 6): Result.002 file - promoters60/1379014
acaatt

SEQ ID NO: 107280 - DNA, 6 bp, Unknown
  misc_feature (1)..( 6): Result.002 file - promoters60/1379014
aaaata

SEQ ID NO: 107281 - DNA, 6 bp, Unknown
  misc_feature (1)..( 6): Result.002 file - promoters60/1379014
aaaata

SEQ ID NO: 107282 - DNA, 7 bp, Unknown
  misc_feature (1)..( 7): Result.002 file - promoters60/1379014
aaagaga

SEQ ID NO: 107283 - DNA, 7 bp, Unknown
  misc_feature (1)..( 7): Result.002 file - promoters60/1379014
aaaaaga

SEQ ID NO: 107284 - DNA, 6 bp, Unknown
  misc_feature (1)..( 6): Result.002 file - promoters60/1379014
atagac

SEQ ID NO: 107285 - DNA, 6 bp, Unknown
  misc_feature (1)..( 6): Result.002 file - promoters60/1379014
atagac

SEQ ID NO: 107286 - DNA, 7 bp, Unknown
  misc_feature (1)..( 7): Result.002 file - promoters60/1379014
agaattt

SEQ ID NO: 107287 - DNA, 7 bp, Unknown
  misc_feature (1)..( 7): Result.002 file - promoters60/1379014
agacttt

SEQ ID NO: 107288 - DNA, 11 bp, Unknown
  misc_feature (1)..( 11): Result.002 file - promoters60/1379037
tttaaataaaa

SEQ ID NO: 107289 - DNA, 11 bp, Unknown
  misc_feature (1)..( 11): Result.002 file - promoters60/1379037
ttcaaataaaa

SEQ ID NO: 107290 - DNA, 11 bp, Unknown
  misc_feature (1)..( 11): Result.002 file - promoters60/1379037
ttctaatatcc

SEQ ID NO: 107291 - DNA, 10 bp, Unknown
  misc_feature (1)..( 10): Result.002 file - promoters60/1379037
ctaaaatagt

SEQ ID NO: 107292 - DNA, 10 bp, Unknown
  misc_feature (1)..( 10): Result.002 file - promoters60/1379037
tcaaaatagc

SEQ ID NO: 107293 - DNA, 10 bp, Unknown
  misc_feature (1)..( 10): Result.002 file - promoters60/1379037
ctacaatttt

SEQ ID NO: 107294 - DNA, 10 bp, Unknown
  misc_feature (1)..( 10): Result.002 file - promoters60/1379037
tcaaaaagca

SEQ ID NO: 107295 - DNA, 9 bp, Unknown
  misc_feature (1)..( 9): Result.002 file - promoters60/1379037
aagaaaaaa

SEQ ID NO: 107296 - DNA, 9 bp, Unknown
  misc_feature (1)..( 9): Result.002 file - promoters60/1379037
aagaaacct

SEQ ID NO: 107297 - DNA, 9 bp, Unknown
  misc_feature (1)..( 9): Result.002 file - promoters60/1379037
aagaaaaaa

SEQ ID NO: 107298 - DNA, 11 bp, Unknown
  misc_feature (1)..( 11): Result.002 file - promoters60/1379037
aaaaaactcaa

SEQ ID NO: 107299 - DNA, 11 bp, Unknown
  misc_feature (1)..( 11): Result.002 file - promoters60/1379037
agaaacctcaa

SEQ ID NO: 107300 - DNA, 11 bp, Unknown
  misc_feature (1)..( 11): Result.002 file - promoters60/1379037
aaaaaacttag

SEQ ID NO: 107301 - DNA, 12 bp, Unknown
  misc_feature (1)..( 12): Result.002 file - promoters60/1379037
aaataaatggaa

SEQ ID NO: 107302 - DNA, 12 bp, Unknown
  misc_feature (1)..( 12): Result.002 file - promoters60/1379037
aaagaaagggaa

SEQ ID NO: 107303 - DNA, 12 bp, Unknown
  misc_feature (1)..( 12): Result.002 file - promoters60/1379037
taataattggcg

SEQ ID NO: 107304 - DNA, 8 bp, Unknown
  misc_feature (1)..( 8): Result.002 file - promoters60/1379037
cagaaagt

SEQ ID NO: 107305 - DNA, 8 bp, Unknown
  misc_feature (1)..( 8): Result.002 file - promoters60/1379037
gagaaaga

SEQ ID NO: 107306 - DNA, 8 bp, Unknown
  misc_feature (1)..( 8): Result.002 file - promoters60/1379037
aacaaaaa

SEQ ID NO: 107307 - DNA, 10 bp, Unknown
  misc_feature (1)..( 10): Result.002 file - promoters60/1379037
aataagaaaa

SEQ ID NO: 107308 - DNA, 10 bp, Unknown
  misc_feature (1)..( 10): Result.002 file - promoters60/1379037
gaaaagaaaa

SEQ ID NO: 107309 - DNA, 11 bp, Unknown
  misc_feature (1)..( 11): Result.002 file - promoters60/1379037
ggaaatgaaat

SEQ ID NO: 107310 - DNA, 9 bp, Unknown
  misc_feature (1)..( 9): Result.002 file - promoters60/1379037
aaataaatg

SEQ ID NO: 107311 - DNA, 9 bp, Unknown
  misc_feature (1)..( 9): Result.002 file - promoters60/1379037
aaataaaat

SEQ ID NO: 107312 - DNA, 10 bp, Unknown
  misc_feature (1)..( 10): Result.002 file - promoters60/1379037
aaatgaaata

SEQ ID NO: 107313 - DNA, 9 bp, Unknown
  misc_feature (1)..( 9): Result.002 file - promoters60/1379037
caagtaaga

SEQ ID NO: 107314 - DNA, 9 bp, Unknown
  misc_feature (1)..( 9): Result.002 file - promoters60/1379037
aaagtaaag

SEQ ID NO: 107315 - DNA, 9 bp, Unknown
  misc_feature (1)..( 9): Result.002 file - promoters60/1379037
aaagaaaag

SEQ ID NO: 107316 - DNA, 8 bp, Unknown
  misc_feature (1)..( 8): Result.002 file - promoters60/1379043
attttatt

SEQ ID NO: 107317 - DNA, 8 bp, Unknown
  misc_feature (1)..( 8): Result.002 file - promoters60/1379043
atttgatt

SEQ ID NO: 107318 - DNA, 7 bp, Unknown
  misc_feature (1)..( 7): Result.002 file - promoters60/1379043
ttctccc

SEQ ID NO: 107319 - DNA, 7 bp, Unknown
  misc_feature (1)..( 7): Result.002 file - promoters60/1379043
ttctccc

SEQ ID NO: 107320 - DNA, 7 bp, Unknown
  misc_feature (1)..( 7): Result.002 file - promoters60/1379043
acaatct

SEQ ID NO: 107321 - DNA, 7 bp, Unknown
  misc_feature (1)..( 7): Result.002 file - promoters60/1379043
acactct

SEQ ID NO: 107322 - DNA, 7 bp, Unknown
  misc_feature (1)..( 7): Result.002 file - promoters60/1379043
tctatat

SEQ ID NO: 107323 - DNA, 7 bp, Unknown
  misc_feature (1)..( 7): Result.002 file - promoters60/1379043
tctttat

SEQ ID NO: 107324 - DNA, 8 bp, Unknown
  misc_feature (1)..( 8): Result.002 file - promoters60/1379043
tatctttg

SEQ ID NO: 107325 - DNA, 8 bp, Unknown
  misc_feature (1)..( 8): Result.002 file - promoters60/1379043
tatcgttg

SEQ ID NO: 107326 - DNA, 6 bp, Unknown
  misc_feature (1)..( 6): Result.002 file - promoters60/1379043
ctccaa

SEQ ID NO: 107327 - DNA, 6 bp, Unknown
  misc_feature (1)..( 6): Result.002 file - promoters60/1379043
ctccaa

SEQ ID NO: 107328 - DNA, 6 bp, Unknown
  misc_feature (1)..( 6): Result.002 file - promoters60/1379043
ttaaca

SEQ ID NO: 107329 - DNA, 6 bp, Unknown
  misc_feature (1)..( 6): Result.002 file - promoters60/1379043
ttaaca

SEQ ID NO: 107330 - DNA, 6 bp, Unknown
  misc_feature (1)..( 6): Result.002 file - promoters60/1379043
gtggac

SEQ ID NO: 107331 - DNA, 6 bp, Unknown
  misc_feature (1)..( 6): Result.002 file - promoters60/1379043
gtggac

SEQ ID NO: 107332 - DNA, 6 bp, Unknown
  misc_feature (1)..( 6): Result.002 file - promoters60/1379043
attata

SEQ ID NO: 107333 - DNA, 6 bp, Unknown
  misc_feature (1)..( 6): Result.002 file - promoters60/1379043
attata

SEQ ID NO: 107334 - DNA, 6 bp, Unknown
  misc_feature (1)..( 6): Result.002 file - promoters60/1379043
tatttt

SEQ ID NO: 107335 - DNA, 6 bp, Unknown
  misc_feature (1)..( 6): Result.002 file - promoters60/1379043
tatttt

SEQ ID NO: 107336 - DNA, 11 bp, Unknown
  misc_feature (1)..( 11): Result.002 file - promoters60/1379043
ccaaatattaa

SEQ ID NO: 107337 - DNA, 11 bp, Unknown
  misc_feature (1)..( 11): Result.002 file - promoters60/1379043
ccatatattaa

SEQ ID NO: 107338 - DNA, 6 bp, Unknown
  misc_feature (1)..( 6): Result.002 file - promoters60/1379043
ataaaa

SEQ ID NO: 107339 - DNA, 6 bp, Unknown
  misc_feature (1)..( 6): Result.002 file - promoters60/1379043
ataaaa

SEQ ID NO: 107340 - DNA, 8 bp, Unknown
  misc_feature (1)..( 8): Result.002 file - promoters60/1379043
aaaataag

SEQ ID NO: 107341 - DNA, 8 bp, Unknown
  misc_feature (1)..( 8): Result.002 file - promoters60/1379043
aaaagaag

SEQ ID NO: 107342 - DNA, 7 bp, Unknown
  misc_feature (1)..( 7): Result.002 file - promoters60/1379043
aaaaaga

SEQ ID NO: 107343 - DNA, 7 bp, Unknown
  misc_feature (1)..( 7): Result.002 file - promoters60/1379043
aaaaaga

SEQ ID NO: 107344 - DNA, 7 bp, Unknown
  misc_feature (1)..( 7): Result.002 file - promoters60/1379043
aaaacaa

SEQ ID NO: 107345 - DNA, 7 bp, Unknown
  misc_feature (1)..( 7): Result.002 file - promoters60/1379043
aaaacaa

SEQ ID NO: 107346 - DNA, 6 bp, Unknown
  misc_feature (1)..( 6): Result.002 file - promoters60/1379043
ggtctc

SEQ ID NO: 107347 - DNA, 6 bp, Unknown
  misc_feature (1)..( 6): Result.002 file - promoters60/1379043
ggtctc

SEQ ID NO: 107348 - DNA, 7 bp, Unknown
  misc_feature (1)..( 7): Result.002 file - promoters60/1379043
ctaattt

SEQ ID NO: 107349 - DNA, 7 bp, Unknown
  misc_feature (1)..( 7): Result.002 file - promoters60/1379043
ctagttt

SEQ ID NO: 107350 - DNA, 6 bp, Unknown
  misc_feature (1)..( 6): Result.002 file - promoters60/1379043
tttgga

SEQ ID NO: 107351 - DNA, 6 bp, Unknown
  misc_feature (1)..( 6): Result.002 file - promoters60/1379043
tttgga

SEQ ID NO: 107352 - DNA, 6 bp, Unknown
  misc_feature (1)..( 6): Result.002 file - promoters60/1379043
gatttg

SEQ ID NO: 107353 - DNA, 6 bp, Unknown
  misc_feature (1)..( 6): Result.002 file - promoters60/1379043
gatttg

SEQ ID NO: 107354 - DNA, 8 bp, Unknown
  misc_feature (1)..( 8): Result.002 file - promoters60/1379043
aaaacttt

SEQ ID NO: 107355 - DNA, 8 bp, Unknown
  misc_feature (1)..( 8): Result.002 file - promoters60/1379043
aaatcttt

SEQ ID NO: 107356 - DNA, 6 bp, Unknown
  misc_feature (1)..( 6): Result.002 file - promoters60/1379050
aacaaa

SEQ ID NO: 107357 - DNA, 6 bp, Unknown
  misc_feature (1)..( 6): Result.002 file - promoters60/1379050
aacaaa

SEQ ID NO: 107358 - DNA, 7 bp, Unknown
  misc_feature (1)..( 7): Result.002 file - promoters60/1379050
tttaaac

SEQ ID NO: 107359 - DNA, 7 bp, Unknown
  misc_feature (1)..( 7): Result.002 file - promoters60/1379050
tttaaac

SEQ ID NO: 107360 - DNA, 7 bp, Unknown
  misc_feature (1)..( 7): Result.002 file - promoters60/1379050
cttaaac

SEQ ID NO: 107361 - DNA, 6 bp, Unknown
  misc_feature (1)..( 6): Result.002 file - promoters60/1379050
tgaaga

SEQ ID NO: 107362 - DNA, 6 bp, Unknown
  misc_feature (1)..( 6): Result.002 file - promoters60/1379050
tgaaga

SEQ ID NO: 107363 - DNA, 9 bp, Unknown
  misc_feature (1)..( 9): Result.002 file - promoters60/1379050
tgaaggaaa

SEQ ID NO: 107364 - DNA, 9 bp, Unknown
  misc_feature (1)..( 9): Result.002 file - promoters60/1379050
tgaatgaaa

SEQ ID NO: 107365 - DNA, 6 bp, Unknown
  misc_feature (1)..( 6): Result.002 file - promoters60/1379050
tctctc

SEQ ID NO: 107366 - DNA, 6 bp, Unknown
  misc_feature (1)..( 6): Result.002 file - promoters60/1379050
tctctc

SEQ ID NO: 107367 - DNA, 7 bp, Unknown
  misc_feature (1)..( 7): Result.002 file - promoters60/1379050
taaggag

SEQ ID NO: 107368 - DNA, 7 bp, Unknown
  misc_feature (1)..( 7): Result.002 file - promoters60/1379050
taaagag

SEQ ID NO: 107369 - DNA, 6 bp, Unknown
  misc_feature (1)..( 6): Result.002 file - promoters60/1379050
acgctt

SEQ ID NO: 107370 - DNA, 6 bp, Unknown
  misc_feature (1)..( 6): Result.002 file - promoters60/1379050
acgctt

SEQ ID NO: 107371 - DNA, 7 bp, Unknown
  misc_feature (1)..( 7): Result.002 file - promoters60/1379050
tatataa

SEQ ID NO: 107372 - DNA, 7 bp, Unknown
  misc_feature (1)..( 7): Result.002 file - promoters60/1379050
tatttaa

SEQ ID NO: 107373 - DNA, 7 bp, Unknown
  misc_feature (1)..( 7): Result.002 file - promoters60/1379050
cttgtat

SEQ ID NO: 107374 - DNA, 7 bp, Unknown
  misc_feature (1)..( 7): Result.002 file - promoters60/1379050
cttttat

SEQ ID NO: 107375 - DNA, 7 bp, Unknown
  misc_feature (1)..( 7): Result.002 file - promoters60/1379050
cgaggaa

SEQ ID NO: 107376 - DNA, 7 bp, Unknown
  misc_feature (1)..( 7): Result.002 file - promoters60/1379050
cgatgaa

SEQ ID NO: 107377 - DNA, 7 bp, Unknown
  misc_feature (1)..( 7): Result.002 file - promoters60/1379050
ttacacg

SEQ ID NO: 107378 - DNA, 7 bp, Unknown
  misc_feature (1)..( 7): Result.002 file - promoters60/1379050
ttatacg

SEQ ID NO: 107379 - DNA, 8 bp, Unknown
  misc_feature (1)..( 8): Result.002 file - promoters60/1379050
agatgttt

SEQ ID NO: 107380 - DNA, 8 bp, Unknown
  misc_feature (1)..( 8): Result.002 file - promoters60/1379050
agattttt

SEQ ID NO: 107381 - DNA, 9 bp, Unknown
  misc_feature (1)..( 9): Result.002 file - promoters60/1379050
gaggtttat

SEQ ID NO: 107382 - DNA, 9 bp, Unknown
  misc_feature (1)..( 9): Result.002 file - promoters60/1379050
gaggtttat

SEQ ID NO: 107383 - DNA, 6 bp, Unknown
  misc_feature (1)..( 6): Result.002 file - promoters60/1379050
ctaata

SEQ ID NO: 107384 - DNA, 6 bp, Unknown
  misc_feature (1)..( 6): Result.002 file - promoters60/1379050
ctaata

SEQ ID NO: 107385 - DNA, 7 bp, Unknown
  misc_feature (1)..( 7): Result.002 file - promoters60/1379050
aattata

SEQ ID NO: 107386 - DNA, 7 bp, Unknown
  misc_feature (1)..( 7): Result.002 file - promoters60/1379050
aattata

SEQ ID NO: 107387 - DNA, 7 bp, Unknown
  misc_feature (1)..( 7): Result.002 file - promoters60/1379075
tatgtta

SEQ ID NO: 107388 - DNA, 7 bp, Unknown
  misc_feature (1)..( 7): Result.002 file - promoters60/1379075
tatctta

SEQ ID NO: 107389 - DNA, 6 bp, Unknown
  misc_feature (1)..( 6): Result.002 file - promoters60/1379075
tattaa

SEQ ID NO: 107390 - DNA, 6 bp, Unknown
  misc_feature (1)..( 6): Result.002 file - promoters60/1379075
tattaa

SEQ ID NO: 107391 - DNA, 9 bp, Unknown
  misc_feature (1)..( 9): Result.002 file - promoters60/1379075
gaatataaa

SEQ ID NO: 107392 - DNA, 9 bp, Unknown
  misc_feature (1)..( 9): Result.002 file - promoters60/1379075
gactataaa

SEQ ID NO: 107393 - DNA, 9 bp, Unknown
  misc_feature (1)..( 9): Result.002 file - promoters60/1379075
gaagataat

SEQ ID NO: 107394 - DNA, 8 bp, Unknown
  misc_feature (1)..( 8): Result.002 file - promoters60/1379075
aaaataac

SEQ ID NO: 107395 - DNA, 8 bp, Unknown
  misc_feature (1)..( 8): Result.002 file - promoters60/1379075
aaattaaa

SEQ ID NO: 107396 - DNA, 8 bp, Unknown
  misc_feature (1)..( 8): Result.002 file - promoters60/1379075
taattaaa

SEQ ID NO: 107397 - DNA, 10 bp, Unknown
  misc_feature (1)..( 10): Result.002 file - promoters60/1379075
ttttaacaaa

SEQ ID NO: 107398 - DNA, 10 bp, Unknown
  misc_feature (1)..( 10): Result.002 file - promoters60/1379075
tttaaacaaa

SEQ ID NO: 107399 - DNA, 6 bp, Unknown
  misc_feature (1)..( 6): Result.002 file - promoters60/1379075
attaat

SEQ ID NO: 107400 - DNA, 6 bp, Unknown
  misc_feature (1)..( 6): Result.002 file - promoters60/1379075
attaat

SEQ ID NO: 107401 - DNA, 12 bp, Unknown
  misc_feature (1)..( 12): Result.002 file - promoters60/1379075
atttaaaattaa

SEQ ID NO: 107402 - DNA, 12 bp, Unknown
  misc_feature (1)..( 12): Result.002 file - promoters60/1379075
attaaaaaataa

SEQ ID NO: 107403 - DNA, 6 bp, Unknown
  misc_feature (1)..( 6): Result.002 file - promoters60/1379075
taaaat

SEQ ID NO: 107404 - DNA, 6 bp, Unknown
  misc_feature (1)..( 6): Result.002 file - promoters60/1379075
taaaat

SEQ ID NO: 107405 - DNA, 9 bp, Unknown
  misc_feature (1)..( 9): Result.002 file - promoters60/1379075
ccataaaca

SEQ ID NO: 107406 - DNA, 9 bp, Unknown
  misc_feature (1)..( 9): Result.002 file - promoters60/1379075
gaataaaca

SEQ ID NO: 107407 - DNA, 9 bp, Unknown
  misc_feature (1)..( 9): Result.002 file - promoters60/1379075
ccaaaaagg

SEQ ID NO: 107408 - DNA, 7 bp, Unknown
  misc_feature (1)..( 7): Result.002 file - promoters60/1379075
agaagaa

SEQ ID NO: 107409 - DNA, 7 bp, Unknown
  misc_feature (1)..( 7): Result.002 file - promoters60/1379075
agacgaa

SEQ ID NO: 107410 - DNA, 6 bp, Unknown
  misc_feature (1)..( 6): Result.002 file - promoters60/1379075
cgttaa

SEQ ID NO: 107411 - DNA, 6 bp, Unknown
  misc_feature (1)..( 6): Result.002 file - promoters60/1379075
cgttaa

SEQ ID NO: 107412 - DNA, 6 bp, Unknown
  misc_feature (1)..( 6): Result.002 file - promoters60/1379075
ttttta

SEQ ID NO: 107413 - DNA, 6 bp, Unknown
  misc_feature (1)..( 6): Result.002 file - promoters60/1379075
ttttta

SEQ ID NO: 107414 - DNA, 11 bp, Unknown
  misc_feature (1)..( 11): Result.002 file - promoters60/1379075
ataaataaata

SEQ ID NO: 107415 - DNA, 11 bp, Unknown
  misc_feature (1)..( 11): Result.002 file - promoters60/1379075
ataaataaata

SEQ ID NO: 107416 - DNA, 7 bp, Unknown
  misc_feature (1)..( 7): Result.002 file - promoters60/1379075
taacttt

SEQ ID NO: 107417 - DNA, 7 bp, Unknown
  misc_feature (1)..( 7): Result.002 file - promoters60/1379075
aaacttt

SEQ ID NO: 107418 - DNA, 7 bp, Unknown
  misc_feature (1)..( 7): Result.002 file - promoters60/1379075
aaactta

SEQ ID NO: 107419 - DNA, 13 bp, Unknown
  misc_feature (1)..( 13): Result.002 file - promoters60/1379075
ctttttaatgcat

SEQ ID NO: 107420 - DNA, 13 bp, Unknown
  misc_feature (1)..( 13): Result.002 file - promoters60/1379075
cttttaaatactt

SEQ ID NO: 107421 - DNA, 13 bp, Unknown
  misc_feature (1)..( 13): Result.002 file - promoters60/1379075
aaattaaaaactt

SEQ ID NO: 107422 - DNA, 13 bp, Unknown
  misc_feature (1)..( 13): Result.002 file - promoters60/1379075
taagatatttttt

SEQ ID NO: 107423 - DNA, 13 bp, Unknown
  misc_feature (1)..( 13): Result.002 file - promoters60/1379075
ttaaatacttttt

SEQ ID NO: 107424 - DNA, 13 bp, Unknown
  misc_feature (1)..( 13): Result.002 file - promoters60/1379075
ttaaaaacttacc

SEQ ID NO: 107425 - DNA, 15 bp, Unknown
  misc_feature (1)..( 15): Result.002 file - promoters60/1379075
tttcattttcaattt

SEQ ID NO: 107426 - DNA, 15 bp, Unknown
  misc_feature (1)..( 15): Result.002 file - promoters60/1379075
tttaattctcagttt

SEQ ID NO: 107427 - DNA, 6 bp, Unknown
  misc_feature (1)..( 6): Result.002 file - promoters60/1379075
gtattc

SEQ ID NO: 107428 - DNA, 6 bp, Unknown
  misc_feature (1)..( 6): Result.002 file - promoters60/1379075
gtattc

SEQ ID NO: 107429 - DNA, 7 bp, Unknown
  misc_feature (1)..( 7): Result.002 file - promoters60/1379075
tgttgct

SEQ ID NO: 107430 - DNA, 7 bp, Unknown
  misc_feature (1)..( 7): Result.002 file - promoters60/1379075
tgtagct

SEQ ID NO: 107431 - DNA, 8 bp, Unknown
  misc_feature (1)..( 8): Result.002 file - promoters60/1379075
ggataaga

SEQ ID NO: 107432 - DNA, 8 bp, Unknown
  misc_feature (1)..( 8): Result.002 file - promoters60/1379075
ggattaga

SEQ ID NO: 107433 - DNA, 7 bp, Unknown
  misc_feature (1)..( 7): Result.002 file - promoters60/1379075
tttatga

SEQ ID NO: 107434 - DNA, 7 bp, Unknown
  misc_feature (1)..( 7): Result.002 file - promoters60/1379075
tttatga

SEQ ID NO: 107435 - DNA, 8 bp, Unknown
  misc_feature (1)..( 8): Result.002 file - promoters60/1379075
aattaccc

SEQ ID NO: 107436 - DNA, 8 bp, Unknown
  misc_feature (1)..( 8): Result.002 file - promoters60/1379075
aatcaccc

SEQ ID NO: 107437 - DNA, 8 bp, Unknown
  misc_feature (1)..( 8): Result.002 file - promoters60/1379141
aatcattt

SEQ ID NO: 107438 - DNA, 8 bp, Unknown
  misc_feature (1)..( 8): Result.002 file - promoters60/1379141
aattattt

SEQ ID NO: 107439 - DNA, 7 bp, Unknown
  misc_feature (1)..( 7): Result.002 file - promoters60/1379141
aaaatta

SEQ ID NO: 107440 - DNA, 7 bp, Unknown
  misc_feature (1)..( 7): Result.002 file - promoters60/1379141
aaactta

SEQ ID NO: 107441 - DNA, 8 bp, Unknown
  misc_feature (1)..( 8): Result.002 file - promoters60/1379141
tatcggtt

SEQ ID NO: 107442 - DNA, 8 bp, Unknown
  misc_feature (1)..( 8): Result.002 file - promoters60/1379141
tatgggtt

SEQ ID NO: 107443 - DNA, 9 bp, Unknown
  misc_feature (1)..( 9): Result.002 file - promoters60/1379141
tttcactaa

SEQ ID NO: 107444 - DNA, 9 bp, Unknown
  misc_feature (1)..( 9): Result.002 file - promoters60/1379141
tttcaataa

SEQ ID NO: 107445 - DNA, 7 bp, Unknown
  misc_feature (1)..( 7): Result.002 file - promoters60/1379141
tattttc

SEQ ID NO: 107446 - DNA, 7 bp, Unknown
  misc_feature (1)..( 7): Result.002 file - promoters60/1379141
tattttc

SEQ ID NO: 107447 - DNA, 9 bp, Unknown
  misc_feature (1)..( 9): Result.002 file - promoters60/1379141
aaataaaat

SEQ ID NO: 107448 - DNA, 9 bp, Unknown
  misc_feature (1)..( 9): Result.002 file - promoters60/1379141
gcatataat

SEQ ID NO: 107449 - DNA, 9 bp, Unknown
  misc_feature (1)..( 9): Result.002 file - promoters60/1379141
aaataaaat

SEQ ID NO: 107450 - DNA, 6 bp, Unknown
  misc_feature (1)..( 6): Result.002 file - promoters60/1379141
taacaa

SEQ ID NO: 107451 - DNA, 6 bp, Unknown
  misc_feature (1)..( 6): Result.002 file - promoters60/1379141
taacaa

SEQ ID NO: 107452 - DNA, 8 bp, Unknown
  misc_feature (1)..( 8): Result.002 file - promoters60/1379141
tagttgat

SEQ ID NO: 107453 - DNA, 8 bp, Unknown
  misc_feature (1)..( 8): Result.002 file - promoters60/1379141
aagttgat

SEQ ID NO: 107454 - DNA, 8 bp, Unknown
  misc_feature (1)..( 8): Result.002 file - promoters60/1379141
aagttgtt

SEQ ID NO: 107455 - DNA, 6 bp, Unknown
  misc_feature (1)..( 6): Result.002 file - promoters60/1379141
tagtat

SEQ ID NO: 107456 - DNA, 6 bp, Unknown
  misc_feature (1)..( 6): Result.002 file - promoters60/1379141
tagtat

SEQ ID NO: 107457 - DNA, 8 bp, Unknown
  misc_feature (1)..( 8): Result.002 file - promoters60/1379141
tttcagga

SEQ ID NO: 107458 - DNA, 8 bp, Unknown
  misc_feature (1)..( 8): Result.002 file - promoters60/1379141
tttgagga

SEQ ID NO: 107459 - DNA, 7 bp, Unknown
  misc_feature (1)..( 7): Result.002 file - promoters60/1379141
tcataaa

SEQ ID NO: 107460 - DNA, 7 bp, Unknown
  misc_feature (1)..( 7): Result.002 file - promoters60/1379141
tcacaaa

SEQ ID NO: 107461 - DNA, 7 bp, Unknown
  misc_feature (1)..( 7): Result.002 file - promoters60/1379141
aattaaa

SEQ ID NO: 107462 - DNA, 7 bp, Unknown
  misc_feature (1)..( 7): Result.002 file - promoters60/1379141
aataaaa

SEQ ID NO: 107463 - DNA, 9 bp, Unknown
  misc_feature (1)..( 9): Result.002 file - promoters60/1379141
taaaaaaat

SEQ ID NO: 107464 - DNA, 9 bp, Unknown
  misc_feature (1)..( 9): Result.002 file - promoters60/1379141
taaaaaaat

SEQ ID NO: 107465 - DNA, 7 bp, Unknown
  misc_feature (1)..( 7): Result.002 file - promoters60/1379141
acggttc

SEQ ID NO: 107466 - DNA, 7 bp, Unknown
  misc_feature (1)..( 7): Result.002 file - promoters60/1379141
acgtttc

SEQ ID NO: 107467 - DNA, 9 bp, Unknown
  misc_feature (1)..( 9): Result.002 file - promoters60/1379141
aagaattta

SEQ ID NO: 107468 - DNA, 9 bp, Unknown
  misc_feature (1)..( 9): Result.002 file - promoters60/1379141
aagagttta

SEQ ID NO: 107469 - DNA, 6 bp, Unknown
  misc_feature (1)..( 6): Result.002 file - promoters60/1379141
tttttg

SEQ ID NO: 107470 - DNA, 6 bp, Unknown
  misc_feature (1)..( 6): Result.002 file - promoters60/1379141
tttttg

SEQ ID NO: 107471 - DNA, 6 bp, Unknown
  misc_feature (1)..( 6): Result.002 file - promoters60/1379141
ttagct

SEQ ID NO: 107472 - DNA, 6 bp, Unknown
  misc_feature (1)..( 6): Result.002 file - promoters60/1379141
ttagct

SEQ ID NO: 107473 - DNA, 8 bp, Unknown
  misc_feature (1)..( 8): Result.002 file - promoters60/1379141
taagcata

SEQ ID NO: 107474 - DNA, 8 bp, Unknown
  misc_feature (1)..( 8): Result.002 file - promoters60/1379141
taagaata

SEQ ID NO: 107475 - DNA, 6 bp, Unknown
  misc_feature (1)..( 6): Result.002 file - promoters60/1379141
caaaaa

SEQ ID NO: 107476 - DNA, 6 bp, Unknown
  misc_feature (1)..( 6): Result.002 file - promoters60/1379141
caaaaa

SEQ ID NO: 107477 - DNA, 7 bp, Unknown
  misc_feature (1)..( 7): Result.002 file - promoters60/1379141
ttcctct

SEQ ID NO: 107478 - DNA, 7 bp, Unknown
  misc_feature (1)..( 7): Result.002 file - promoters60/1379141
ttcttct

SEQ ID NO: 107479 - DNA, 7 bp, Unknown
  misc_feature (1)..( 7): Result.002 file - promoters60/1379166
ttgttat

SEQ ID NO: 107480 - DNA, 7 bp, Unknown
  misc_feature (1)..( 7): Result.002 file - promoters60/1379166
ttgctat

SEQ ID NO: 107481 - DNA, 7 bp, Unknown
  misc_feature (1)..( 7): Result.002 file - promoters60/1379166
gttttgt

SEQ ID NO: 107482 - DNA, 7 bp, Unknown
  misc_feature (1)..( 7): Result.002 file - promoters60/1379166
gttttgt

SEQ ID NO: 107483 - DNA, 7 bp, Unknown
  misc_feature (1)..( 7): Result.002 file - promoters60/1379166
aaattaa

SEQ ID NO: 107484 - DNA, 7 bp, Unknown
  misc_feature (1)..( 7): Result.002 file - promoters60/1379166
aaattaa

SEQ ID NO: 107485 - DNA, 6 bp, Unknown
  misc_feature (1)..( 6): Result.002 file - promoters60/1379166
atctcc

SEQ ID NO: 107486 - DNA, 6 bp, Unknown
  misc_feature (1)..( 6): Result.002 file - promoters60/1379166
atctcc

SEQ ID NO: 107487 - DNA, 6 bp, Unknown
  misc_feature (1)..( 6): Result.002 file - promoters60/1379166
ctaaat

SEQ ID NO: 107488 - DNA, 6 bp, Unknown
  misc_feature (1)..( 6): Result.002 file - promoters60/1379166
ctaaat

SEQ ID NO: 107489 - DNA, 6 bp, Unknown
  misc_feature (1)..( 6): Result.002 file - promoters60/1379166
attttg

SEQ ID NO: 107490 - DNA, 6 bp, Unknown
  misc_feature (1)..( 6): Result.002 file - promoters60/1379166
attttg

SEQ ID NO: 107491 - DNA, 6 bp, Unknown
  misc_feature (1)..( 6): Result.002 file - promoters60/1379166
tttgtt

SEQ ID NO: 107492 - DNA, 6 bp, Unknown
  misc_feature (1)..( 6): Result.002 file - promoters60/1379166
tttgtt

SEQ ID NO: 107493 - DNA, 8 bp, Unknown
  misc_feature (1)..( 8): Result.002 file - promoters60/1379166
cattgtta

SEQ ID NO: 107494 - DNA, 8 bp, Unknown
  misc_feature (1)..( 8): Result.002 file - promoters60/1379166
cattgtta

SEQ ID NO: 107495 - DNA, 7 bp, Unknown
  misc_feature (1)..( 7): Result.002 file - promoters60/1379166
aacaaaa

SEQ ID NO: 107496 - DNA, 7 bp, Unknown
  misc_feature (1)..( 7): Result.002 file - promoters60/1379166
aactaaa

SEQ ID NO: 107497 - DNA, 7 bp, Unknown
  misc_feature (1)..( 7): Result.002 file - promoters60/1379166
aaatctt

SEQ ID NO: 107498 - DNA, 7 bp, Unknown
  misc_feature (1)..( 7): Result.002 file - promoters60/1379166
aaaactt

SEQ ID NO: 107499 - DNA, 6 bp, Unknown
  misc_feature (1)..( 6): Result.002 file - promoters60/1379166
ttattg

SEQ ID NO: 107500 - DNA, 6 bp, Unknown
  misc_feature (1)..( 6): Result.002 file - promoters60/1379166
ttattg

SEQ ID NO: 107501 - DNA, 6 bp, Unknown
  misc_feature (1)..( 6): Result.002 file - promoters60/1379166
agaaga

SEQ ID NO: 107502 - DNA, 6 bp, Unknown
  misc_feature (1)..( 6): Result.002 file - promoters60/1379166
agaaga

SEQ ID NO: 107503 - DNA, 6 bp, Unknown
  misc_feature (1)..( 6): Result.002 file - promoters60/1379166
tggtta

SEQ ID NO: 107504 - DNA, 6 bp, Unknown
  misc_feature (1)..( 6): Result.002 file - promoters60/1379166
tggtta

SEQ ID NO: 107505 - DNA, 8 bp, Unknown
  misc_feature (1)..( 8): Result.002 file - promoters60/1379166
atcgagaa

SEQ ID NO: 107506 - DNA, 8 bp, Unknown
  misc_feature (1)..( 8): Result.002 file - promoters60/1379166
atcgcgaa

SEQ ID NO: 107507 - DNA, 6 bp, Unknown
  misc_feature (1)..( 6): Result.002 file - promoters60/1379166
cgattc

SEQ ID NO: 107508 - DNA, 6 bp, Unknown
  misc_feature (1)..( 6): Result.002 file - promoters60/1379166
cgattc

SEQ ID NO: 107509 - DNA, 7 bp, Unknown
  misc_feature (1)..( 7): Result.002 file - promoters60/1379166
tccgaag

SEQ ID NO: 107510 - DNA, 7 bp, Unknown
  misc_feature (1)..( 7): Result.002 file - promoters60/1379166
tccaaag

SEQ ID NO: 107511 - DNA, 7 bp, Unknown
  misc_feature (1)..( 7): Result.002 file - promoters60/1379166
aaaacaa

SEQ ID NO: 107512 - DNA, 7 bp, Unknown
  misc_feature (1)..( 7): Result.002 file - promoters60/1379166
aaaccaa

SEQ ID NO: 107513 - DNA, 12 bp, Unknown
  misc_feature (1)..( 12): Result.002 file - promoters60/1379201
caaatttgccaa

SEQ ID NO: 107514 - DNA, 12 bp, Unknown
  misc_feature (1)..( 12): Result.002 file - promoters60/1379201
caaattacggag

SEQ ID NO: 107515 - DNA, 12 bp, Unknown
  misc_feature (1)..( 12): Result.002 file - promoters60/1379201
aaaatacgaaga

SEQ ID NO: 107516 - DNA, 8 bp, Unknown
  misc_feature (1)..( 8): Result.002 file - promoters60/1379201
acatttta

SEQ ID NO: 107517 - DNA, 8 bp, Unknown
  misc_feature (1)..( 8): Result.002 file - promoters60/1379201
acatttct

SEQ ID NO: 107518 - DNA, 8 bp, Unknown
  misc_feature (1)..( 8): Result.002 file - promoters60/1379201
ccatttta

SEQ ID NO: 107519 - DNA, 12 bp, Unknown
  misc_feature (1)..( 12): Result.002 file - promoters60/1379201
ggtcaacgaagt

SEQ ID NO: 107520 - DNA, 12 bp, Unknown
  misc_feature (1)..( 12): Result.002 file - promoters60/1379201
aaaatacgaaga

SEQ ID NO: 107521 - DNA, 12 bp, Unknown
  misc_feature (1)..( 12): Result.002 file - promoters60/1379201
aaattacggaga

SEQ ID NO: 107522 - DNA, 10 bp, Unknown
  misc_feature (1)..( 10): Result.002 file - promoters60/1379201
ccgaatctga

SEQ ID NO: 107523 - DNA, 10 bp, Unknown
  misc_feature (1)..( 10): Result.002 file - promoters60/1379201
ccgattctct

SEQ ID NO: 107524 - DNA, 10 bp, Unknown
  misc_feature (1)..( 10): Result.002 file - promoters60/1379201
tagatgctct

SEQ ID NO: 107525 - DNA, 6 bp, Unknown
  misc_feature (1)..( 6): Result.002 file - promoters60/1379229
atttat

SEQ ID NO: 107526 - DNA, 6 bp, Unknown
  misc_feature (1)..( 6): Result.002 file - promoters60/1379229
atttat

SEQ ID NO: 107527 - DNA, 7 bp, Unknown
  misc_feature (1)..( 7): Result.002 file - promoters60/1379229
taataga

SEQ ID NO: 107528 - DNA, 7 bp, Unknown
  misc_feature (1)..( 7): Result.002 file - promoters60/1379229
taaaaga

SEQ ID NO: 107529 - DNA, 8 bp, Unknown
  misc_feature (1)..( 8): Result.002 file - promoters60/1379229
tttaaaaa

SEQ ID NO: 107530 - DNA, 8 bp, Unknown
  misc_feature (1)..( 8): Result.002 file - promoters60/1379229
tttaaaaa

SEQ ID NO: 107531 - DNA, 6 bp, Unknown
  misc_feature (1)..( 6): Result.002 file - promoters60/1379229
tgaaat

SEQ ID NO: 107532 - DNA, 6 bp, Unknown
  misc_feature (1)..( 6): Result.002 file - promoters60/1379229
tgaaat

SEQ ID NO: 107533 - DNA, 9 bp, Unknown
  misc_feature (1)..( 9): Result.002 file - promoters60/1379229
acaaaagaa

SEQ ID NO: 107534 - DNA, 9 bp, Unknown
  misc_feature (1)..( 9): Result.002 file - promoters60/1379229
acaaaagaa

SEQ ID NO: 107535 - DNA, 9 bp, Unknown
  misc_feature (1)..( 9): Result.002 file - promoters60/1379229
ggtcccacc

SEQ ID NO: 107536 - DNA, 9 bp, Unknown
  misc_feature (1)..( 9): Result.002 file - promoters60/1379229
ggtcacacc

SEQ ID NO: 107537 - DNA, 6 bp, Unknown
  misc_feature (1)..( 6): Result.002 file - promoters60/1379229
ataatt

SEQ ID NO: 107538 - DNA, 6 bp, Unknown
  misc_feature (1)..( 6): Result.002 file - promoters60/1379229
ataatt

SEQ ID NO: 107539 - DNA, 6 bp, Unknown
  misc_feature (1)..( 6): Result.002 file - promoters60/1379229
tgaaga

SEQ ID NO: 107540 - DNA, 6 bp, Unknown
  misc_feature (1)..( 6): Result.002 file - promoters60/1379229
tgaaga

SEQ ID NO: 107541 - DNA, 6 bp, Unknown
  misc_feature (1)..( 6): Result.002 file - promoters60/1379229
acaaat

SEQ ID NO: 107542 - DNA, 6 bp, Unknown
  misc_feature (1)..( 6): Result.002 file - promoters60/1379229
acaaat

SEQ ID NO: 107543 - DNA, 6 bp, Unknown
  misc_feature (1)..( 6): Result.002 file - promoters60/1379229
gatacc

SEQ ID NO: 107544 - DNA, 6 bp, Unknown
  misc_feature (1)..( 6): Result.002 file - promoters60/1379229
gatacc

SEQ ID NO: 107545 - DNA, 6 bp, Unknown
  misc_feature (1)..( 6): Result.002 file - promoters60/1379229
tagata

SEQ ID NO: 107546 - DNA, 6 bp, Unknown
  misc_feature (1)..( 6): Result.002 file - promoters60/1379229
tagata

SEQ ID NO: 107547 - DNA, 9 bp, Unknown
  misc_feature (1)..( 9): Result.002 file - promoters60/1379229
actaaactc

SEQ ID NO: 107548 - DNA, 9 bp, Unknown
  misc_feature (1)..( 9): Result.002 file - promoters60/1379229
actacactc

SEQ ID NO: 107549 - DNA, 6 bp, Unknown
  misc_feature (1)..( 6): Result.002 file - promoters60/1379239
atttta

SEQ ID NO: 107550 - DNA, 6 bp, Unknown
  misc_feature (1)..( 6): Result.002 file - promoters60/1379239
atttta

SEQ ID NO: 107551 - DNA, 9 bp, Unknown
  misc_feature (1)..( 9): Result.002 file - promoters60/1379239
aaattaaac

SEQ ID NO: 107552 - DNA, 9 bp, Unknown
  misc_feature (1)..( 9): Result.002 file - promoters60/1379239
aaatcaaat

SEQ ID NO: 107553 - DNA, 9 bp, Unknown
  misc_feature (1)..( 9): Result.002 file - promoters60/1379239
ctattaaac

SEQ ID NO: 107554 - DNA, 6 bp, Unknown
  misc_feature (1)..( 6): Result.002 file - promoters60/1379239
agttaa

SEQ ID NO: 107555 - DNA, 6 bp, Unknown
  misc_feature (1)..( 6): Result.002 file - promoters60/1379239
agttaa

SEQ ID NO: 107556 - DNA, 9 bp, Unknown
  misc_feature (1)..( 9): Result.002 file - promoters60/1379239
atacccggt

SEQ ID NO: 107557 - DNA, 9 bp, Unknown
  misc_feature (1)..( 9): Result.002 file - promoters60/1379239
atacgcggt

SEQ ID NO: 107558 - DNA, 9 bp, Unknown
  misc_feature (1)..( 9): Result.002 file - promoters60/1379239
tataaaaac

SEQ ID NO: 107559 - DNA, 9 bp, Unknown
  misc_feature (1)..( 9): Result.002 file - promoters60/1379239
tataaacac

SEQ ID NO: 107560 - DNA, 9 bp, Unknown
  misc_feature (1)..( 9): Result.002 file - promoters60/1379239
gataaaaac

SEQ ID NO: 107561 - DNA, 6 bp, Unknown
  misc_feature (1)..( 6): Result.002 file - promoters60/1379239
ttggaa

SEQ ID NO: 107562 - DNA, 6 bp, Unknown
  misc_feature (1)..( 6): Result.002 file - promoters60/1379239
ttggaa

SEQ ID NO: 107563 - DNA, 8 bp, Unknown
  misc_feature (1)..( 8): Result.002 file - promoters60/1379239
aactttag

SEQ ID NO: 107564 - DNA, 8 bp, Unknown
  misc_feature (1)..( 8): Result.002 file - promoters60/1379239
aacattag

SEQ ID NO: 107565 - DNA, 8 bp, Unknown
  misc_feature (1)..( 8): Result.002 file - promoters60/1379239
caataaat

SEQ ID NO: 107566 - DNA, 8 bp, Unknown
  misc_feature (1)..( 8): Result.002 file - promoters60/1379239
caatcaat

SEQ ID NO: 107567 - DNA, 7 bp, Unknown
  misc_feature (1)..( 7): Result.002 file - promoters60/1379239
tccaatt

SEQ ID NO: 107568 - DNA, 7 bp, Unknown
  misc_feature (1)..( 7): Result.002 file - promoters60/1379239
tccaatt

SEQ ID NO: 107569 - DNA, 6 bp, Unknown
  misc_feature (1)..( 6): Result.002 file - promoters60/1379239
tttgtt

SEQ ID NO: 107570 - DNA, 6 bp, Unknown
  misc_feature (1)..( 6): Result.002 file - promoters60/1379239
tttgtt

SEQ ID NO: 107571 - DNA, 8 bp, Unknown
  misc_feature (1)..( 8): Result.002 file - promoters60/1379239
gaaagaaa

SEQ ID NO: 107572 - DNA, 8 bp, Unknown
  misc_feature (1)..( 8): Result.002 file - promoters60/1379239
taaacaaa

SEQ ID NO: 107573 - DNA, 8 bp, Unknown
  misc_feature (1)..( 8): Result.002 file - promoters60/1379239
acaacaaa

SEQ ID NO: 107574 - DNA, 6 bp, Unknown
  misc_feature (1)..( 6): Result.002 file - promoters60/1379239
cagaaa

SEQ ID NO: 107575 - DNA, 6 bp, Unknown
  misc_feature (1)..( 6): Result.002 file - promoters60/1379239
cagaaa

SEQ ID NO: 107576 - DNA, 7 bp, Unknown
  misc_feature (1)..( 7): Result.002 file - promoters60/1379239
ttctaga

SEQ ID NO: 107577 - DNA, 7 bp, Unknown
  misc_feature (1)..( 7): Result.002 file - promoters60/1379239
ttcaaga

SEQ ID NO: 107578 - DNA, 8 bp, Unknown
  misc_feature (1)..( 8): Result.002 file - promoters60/1379239
aatctctc

SEQ ID NO: 107579 - DNA, 8 bp, Unknown
  misc_feature (1)..( 8): Result.002 file - promoters60/1379239
aatatctc

SEQ ID NO: 107580 - DNA, 6 bp, Unknown
  misc_feature (1)..( 6): Result.002 file - promoters60/1379239
taatgt

SEQ ID NO: 107581 - DNA, 6 bp, Unknown
  misc_feature (1)..( 6): Result.002 file - promoters60/1379239
taatgt

SEQ ID NO: 107582 - DNA, 6 bp, Unknown
  misc_feature (1)..( 6): Result.002 file - promoters60/1379239
tcgact

SEQ ID NO: 107583 - DNA, 6 bp, Unknown
  misc_feature (1)..( 6): Result.002 file - promoters60/1379239
tcgact

SEQ ID NO: 107584 - DNA, 8 bp, Unknown
  misc_feature (1)..( 8): Result.002 file - promoters60/1379239
aaattata

SEQ ID NO: 107585 - DNA, 8 bp, Unknown
  misc_feature (1)..( 8): Result.002 file - promoters60/1379239
aaataata

SEQ ID NO: 107586 - DNA, 7 bp, Unknown
  misc_feature (1)..( 7): Result.002 file - promoters60/1379239
tatagct

SEQ ID NO: 107587 - DNA, 7 bp, Unknown
  misc_feature (1)..( 7): Result.002 file - promoters60/1379239
tatcgct

SEQ ID NO: 107588 - DNA, 9 bp, Unknown
  misc_feature (1)..( 9): Result.002 file - promoters60/1379607
tttctaaaa

SEQ ID NO: 107589 - DNA, 9 bp, Unknown
  misc_feature (1)..( 9): Result.002 file - promoters60/1379607
tagctaaaa

SEQ ID NO: 107590 - DNA, 9 bp, Unknown
  misc_feature (1)..( 9): Result.002 file - promoters60/1379607
tttataaac

SEQ ID NO: 107591 - DNA, 9 bp, Unknown
  misc_feature (1)..( 9): Result.002 file - promoters60/1379607
gttataaag

SEQ ID NO: 107592 - DNA, 8 bp, Unknown
  misc_feature (1)..( 8): Result.002 file - promoters60/1379607
ttaattta

SEQ ID NO: 107593 - DNA, 8 bp, Unknown
  misc_feature (1)..( 8): Result.002 file - promoters60/1379607
ttaattaa

SEQ ID NO: 107594 - DNA, 8 bp, Unknown
  misc_feature (1)..( 8): Result.002 file - promoters60/1379607
ataatttc

SEQ ID NO: 107595 - DNA, 8 bp, Unknown
  misc_feature (1)..( 8): Result.002 file - promoters60/1379607
taaattaa

SEQ ID NO: 107596 - DNA, 8 bp, Unknown
  misc_feature (1)..( 8): Result.002 file - promoters60/1379607
taatttaa

SEQ ID NO: 107597 - DNA, 8 bp, Unknown
  misc_feature (1)..( 8): Result.002 file - promoters60/1379607
aaatttaa

SEQ ID NO: 107598 - DNA, 8 bp, Unknown
  misc_feature (1)..( 8): Result.002 file - promoters60/1379607
taatttcc

SEQ ID NO: 107599 - DNA, 8 bp, Unknown
  misc_feature (1)..( 8): Result.002 file - promoters60/1379607
taaattaa

SEQ ID NO: 107600 - DNA, 7 bp, Unknown
  misc_feature (1)..( 7): Result.002 file - promoters60/1379671
tggcgag

SEQ ID NO: 107601 - DNA, 7 bp, Unknown
  misc_feature (1)..( 7): Result.002 file - promoters60/1379671
tggagag

SEQ ID NO: 107602 - DNA, 6 bp, Unknown
  misc_feature (1)..( 6): Result.002 file - promoters60/1379671
agtatc

SEQ ID NO: 107603 - DNA, 6 bp, Unknown
  misc_feature (1)..( 6): Result.002 file - promoters60/1379671
agtatc

SEQ ID NO: 107604 - DNA, 7 bp, Unknown
  misc_feature (1)..( 7): Result.002 file - promoters60/1379671
tgatctt

SEQ ID NO: 107605 - DNA, 7 bp, Unknown
  misc_feature (1)..( 7): Result.002 file - promoters60/1379671
tgatctt

SEQ ID NO: 107606 - DNA, 7 bp, Unknown
  misc_feature (1)..( 7): Result.002 file - promoters60/1379671
acagagt

SEQ ID NO: 107607 - DNA, 7 bp, Unknown
  misc_feature (1)..( 7): Result.002 file - promoters60/1379671
acaaagt

SEQ ID NO: 107608 - DNA, 6 bp, Unknown
  misc_feature (1)..( 6): Result.002 file - promoters60/1379671
attatt

SEQ ID NO: 107609 - DNA, 6 bp, Unknown
  misc_feature (1)..( 6): Result.002 file - promoters60/1379671
attatt

SEQ ID NO: 107610 - DNA, 7 bp, Unknown
  misc_feature (1)..( 7): Result.002 file - promoters60/1379671
attgtgt

SEQ ID NO: 107611 - DNA, 7 bp, Unknown
  misc_feature (1)..( 7): Result.002 file - promoters60/1379671
attttgt

SEQ ID NO: 107612 - DNA, 6 bp, Unknown
  misc_feature (1)..( 6): Result.002 file - promoters60/1379671
cttcag

SEQ ID NO: 107613 - DNA, 6 bp, Unknown
  misc_feature (1)..( 6): Result.002 file - promoters60/1379671
cttcag

SEQ ID NO: 107614 - DNA, 6 bp, Unknown
  misc_feature (1)..( 6): Result.002 file - promoters60/1379671
ttaata

SEQ ID NO: 107615 - DNA, 6 bp, Unknown
  misc_feature (1)..( 6): Result.002 file - promoters60/1379671
ttaata

SEQ ID NO: 107616 - DNA, 9 bp, Unknown
  misc_feature (1)..( 9): Result.002 file - promoters60/1379671
gaatatatt

SEQ ID NO: 107617 - DNA, 9 bp, Unknown
  misc_feature (1)..( 9): Result.002 file - promoters60/1379671
gaataaatt

SEQ ID NO: 107618 - DNA, 7 bp, Unknown
  misc_feature (1)..( 7): Result.002 file - promoters60/1379671
caccacc

SEQ ID NO: 107619 - DNA, 7 bp, Unknown
  misc_feature (1)..( 7): Result.002 file - promoters60/1379671
caccacc

SEQ ID NO: 107620 - DNA, 7 bp, Unknown
  misc_feature (1)..( 7): Result.002 file - promoters60/1379671
gtatcaa

SEQ ID NO: 107621 - DNA, 7 bp, Unknown
  misc_feature (1)..( 7): Result.002 file - promoters60/1379671
gtatcaa

SEQ ID NO: 107622 - DNA, 9 bp, Unknown
  misc_feature (1)..( 9): Result.002 file - promoters60/1379671
aattaccaa

SEQ ID NO: 107623 - DNA, 9 bp, Unknown
  misc_feature (1)..( 9): Result.002 file - promoters60/1379671
aataaccaa

SEQ ID NO: 107624 - DNA, 8 bp, Unknown
  misc_feature (1)..( 8): Result.002 file - promoters60/1379671
cagctatt

SEQ ID NO: 107625 - DNA, 8 bp, Unknown
  misc_feature (1)..( 8): Result.002 file - promoters60/1379671
cagttatt

SEQ ID NO: 107626 - DNA, 7 bp, Unknown
  misc_feature (1)..( 7): Result.002 file - promoters60/1379671
attgttg

SEQ ID NO: 107627 - DNA, 7 bp, Unknown
  misc_feature (1)..( 7): Result.002 file - promoters60/1379671
atttttg

SEQ ID NO: 107628 - DNA, 8 bp, Unknown
  misc_feature (1)..( 8): Result.002 file - promoters60/1379671
catataaa

SEQ ID NO: 107629 - DNA, 8 bp, Unknown
  misc_feature (1)..( 8): Result.002 file - promoters60/1379671
cataaaaa

SEQ ID NO: 107630 - DNA, 7 bp, Unknown
  misc_feature (1)..( 7): Result.002 file - promoters60/1379671
acagatt

SEQ ID NO: 107631 - DNA, 7 bp, Unknown
  misc_feature (1)..( 7): Result.002 file - promoters60/1379671
acatatt

SEQ ID NO: 107632 - DNA, 7 bp, Unknown
  misc_feature (1)..( 7): Result.002 file - promoters60/1379671
tttagtt

SEQ ID NO: 107633 - DNA, 7 bp, Unknown
  misc_feature (1)..( 7): Result.002 file - promoters60/1379671
ttttgtt

SEQ ID NO: 107634 - DNA, 8 bp, Unknown
  misc_feature (1)..( 8): Result.002 file - promoters60/1379671
ttcacaaa

SEQ ID NO: 107635 - DNA, 8 bp, Unknown
  misc_feature (1)..( 8): Result.002 file - promoters60/1379671
ttcaaaaa

SEQ ID NO: 107636 - DNA, 7 bp, Unknown
  misc_feature (1)..( 7): Result.002 file - promoters60/1379818
agatcgt

SEQ ID NO: 107637 - DNA, 7 bp, Unknown
  misc_feature (1)..( 7): Result.002 file - promoters60/1379818
agaacgt

SEQ ID NO: 107638 - DNA, 6 bp, Unknown
  misc_feature (1)..( 6): Result.002 file - promoters60/1379818
gttttg

SEQ ID NO: 107639 - DNA, 6 bp, Unknown
  misc_feature (1)..( 6): Result.002 file - promoters60/1379818
gttttg

SEQ ID NO: 107640 - DNA, 6 bp, Unknown
  misc_feature (1)..( 6): Result.002 file - promoters60/1379818
tgtata

SEQ ID NO: 107641 - DNA, 6 bp, Unknown
  misc_feature (1)..( 6): Result.002 file - promoters60/1379818
tgtata

SEQ ID NO: 107642 - DNA, 8 bp, Unknown
  misc_feature (1)..( 8): Result.002 file - promoters60/1379818
tgtcaatt

SEQ ID NO: 107643 - DNA, 8 bp, Unknown
  misc_feature (1)..( 8): Result.002 file - promoters60/1379818
tgtcaatt

SEQ ID NO: 107644 - DNA, 6 bp, Unknown
  misc_feature (1)..( 6): Result.002 file - promoters60/1379818
aattca

SEQ ID NO: 107645 - DNA, 6 bp, Unknown
  misc_feature (1)..( 6): Result.002 file - promoters60/1379818
aattca

SEQ ID NO: 107646 - DNA, 6 bp, Unknown
  misc_feature (1)..( 6): Result.002 file - promoters60/1379818
ttttta

SEQ ID NO: 107647 - DNA, 6 bp, Unknown
  misc_feature (1)..( 6): Result.002 file - promoters60/1379818
ttttta

SEQ ID NO: 107648 - DNA, 9 bp, Unknown
  misc_feature (1)..( 9): Result.002 file - promoters60/1379818
aaaatctct

SEQ ID NO: 107649 - DNA, 9 bp, Unknown
  misc_feature (1)..( 9): Result.002 file - promoters60/1379818
aaaatctct

SEQ ID NO: 107650 - DNA, 6 bp, Unknown
  misc_feature (1)..( 6): Result.002 file - promoters60/1379818
gaatta

SEQ ID NO: 107651 - DNA, 6 bp, Unknown
  misc_feature (1)..( 6): Result.002 file - promoters60/1379818
gaatta

SEQ ID NO: 107652 - DNA, 8 bp, Unknown
  misc_feature (1)..( 8): Result.002 file - promoters60/1379818
attttttt

SEQ ID NO: 107653 - DNA, 8 bp, Unknown
  misc_feature (1)..( 8): Result.002 file - promoters60/1379818
atttattt

SEQ ID NO: 107654 - DNA, 11 bp, Unknown
  misc_feature (1)..( 11): Result.002 file - promoters60/1379818
tactgttttag

SEQ ID NO: 107655 - DNA, 11 bp, Unknown
  misc_feature (1)..( 11): Result.002 file - promoters60/1379818
tactgtattag

SEQ ID NO: 107656 - DNA, 6 bp, Unknown
  misc_feature (1)..( 6): Result.002 file - promoters60/1379818
aatatt

SEQ ID NO: 107657 - DNA, 6 bp, Unknown
  misc_feature (1)..( 6): Result.002 file - promoters60/1379818
aatatt

SEQ ID NO: 107658 - DNA, 6 bp, Unknown
  misc_feature (1)..( 6): Result.002 file - promoters60/1379818
tataat

SEQ ID NO: 107659 - DNA, 6 bp, Unknown
  misc_feature (1)..( 6): Result.002 file - promoters60/1379818
tataat

SEQ ID NO: 107660 - DNA, 8 bp, Unknown
  misc_feature (1)..( 8): Result.002 file - promoters60/1379818
taatatta

SEQ ID NO: 107661 - DNA, 8 bp, Unknown
  misc_feature (1)..( 8): Result.002 file - promoters60/1379818
taatctta

SEQ ID NO: 107662 - DNA, 8 bp, Unknown
  misc_feature (1)..( 8): Result.002 file - promoters60/1379818
attaaaaa

SEQ ID NO: 107663 - DNA, 8 bp, Unknown
  misc_feature (1)..( 8): Result.002 file - promoters60/1379818
attagaaa

SEQ ID NO: 107664 - DNA, 6 bp, Unknown
  misc_feature (1)..( 6): Result.002 file - promoters60/1379981
cgatta

SEQ ID NO: 107665 - DNA, 6 bp, Unknown
  misc_feature (1)..( 6): Result.002 file - promoters60/1379981
cgatta

SEQ ID NO: 107666 - DNA, 6 bp, Unknown
  misc_feature (1)..( 6): Result.002 file - promoters60/1379981
atttaa

SEQ ID NO: 107667 - DNA, 6 bp, Unknown
  misc_feature (1)..( 6): Result.002 file - promoters60/1379981
atttaa

SEQ ID NO: 107668 - DNA, 7 bp, Unknown
  misc_feature (1)..( 7): Result.002 file - promoters60/1379981
tcatttt

SEQ ID NO: 107669 - DNA, 7 bp, Unknown
  misc_feature (1)..( 7): Result.002 file - promoters60/1379981
tcatttt

SEQ ID NO: 107670 - DNA, 8 bp, Unknown
  misc_feature (1)..( 8): Result.002 file - promoters60/1379981
ttttaata

SEQ ID NO: 107671 - DNA, 8 bp, Unknown
  misc_feature (1)..( 8): Result.002 file - promoters60/1379981
ttttaaga

SEQ ID NO: 107672 - DNA, 8 bp, Unknown
  misc_feature (1)..( 8): Result.002 file - promoters60/1379981
ctttatta

SEQ ID NO: 107673 - DNA, 7 bp, Unknown
  misc_feature (1)..( 7): Result.002 file - promoters60/1379981
gttatgt

SEQ ID NO: 107674 - DNA, 7 bp, Unknown
  misc_feature (1)..( 7): Result.002 file - promoters60/1379981
gttatgt

SEQ ID NO: 107675 - DNA, 9 bp, Unknown
  misc_feature (1)..( 9): Result.002 file - promoters60/1379981
attaataaa

SEQ ID NO: 107676 - DNA, 9 bp, Unknown
  misc_feature (1)..( 9): Result.002 file - promoters60/1379981
atttataaa

SEQ ID NO: 107677 - DNA, 10 bp, Unknown
  misc_feature (1)..( 10): Result.002 file - promoters60/1379981
ctaataaatt

SEQ ID NO: 107678 - DNA, 10 bp, Unknown
  misc_feature (1)..( 10): Result.002 file - promoters60/1379981
tttttaaatt

SEQ ID NO: 107679 - DNA, 10 bp, Unknown
  misc_feature (1)..( 10): Result.002 file - promoters60/1379981
aaagtaaaca

SEQ ID NO: 107680 - DNA, 8 bp, Unknown
  misc_feature (1)..( 8): Result.002 file - promoters60/1379981
cattcttt

SEQ ID NO: 107681 - DNA, 8 bp, Unknown
  misc_feature (1)..( 8): Result.002 file - promoters60/1379981
catttttt

SEQ ID NO: 107682 - DNA, 7 bp, Unknown
  misc_feature (1)..( 7): Result.002 file - promoters60/1379981
tgtttca

SEQ ID NO: 107683 - DNA, 7 bp, Unknown
  misc_feature (1)..( 7): Result.002 file - promoters60/1379981
tgtttca

SEQ ID NO: 107684 - DNA, 10 bp, Unknown
  misc_feature (1)..( 10): Result.002 file - promoters60/1379981
cttaaataat

SEQ ID NO: 107685 - DNA, 10 bp, Unknown
  misc_feature (1)..( 10): Result.002 file - promoters60/1379981
cttaaatatt

SEQ ID NO: 107686 - DNA, 10 bp, Unknown
  misc_feature (1)..( 10): Result.002 file - promoters60/1379981
cacaaagaat

SEQ ID NO: 107687 - DNA, 7 bp, Unknown
  misc_feature (1)..( 7): Result.002 file - promoters60/1379981
aatgttt

SEQ ID NO: 107688 - DNA, 7 bp, Unknown
  misc_feature (1)..( 7): Result.002 file - promoters60/1379981
aatattt

SEQ ID NO: 107689 - DNA, 7 bp, Unknown
  misc_feature (1)..( 7): Result.002 file - promoters60/1379981
ttctttc

SEQ ID NO: 107690 - DNA, 7 bp, Unknown
  misc_feature (1)..( 7): Result.002 file - promoters60/1379981
ttcattc

SEQ ID NO: 107691 - DNA, 6 bp, Unknown
  misc_feature (1)..( 6): Result.002 file - promoters60/1379981
aaatct

SEQ ID NO: 107692 - DNA, 6 bp, Unknown
  misc_feature (1)..( 6): Result.002 file - promoters60/1379981
aaatct

SEQ ID NO: 107693 - DNA, 7 bp, Unknown
  misc_feature (1)..( 7): Result.002 file - promoters60/1379981
atatata

SEQ ID NO: 107694 - DNA, 7 bp, Unknown
  misc_feature (1)..( 7): Result.002 file - promoters60/1379981
ataaata

SEQ ID NO: 107695 - DNA, 6 bp, Unknown
  misc_feature (1)..( 6): Result.002 file - promoters60/1379981
aatttt

SEQ ID NO: 107696 - DNA, 6 bp, Unknown
  misc_feature (1)..( 6): Result.002 file - promoters60/1379981
aatttt

SEQ ID NO: 107697 - DNA, 6 bp, Unknown
  misc_feature (1)..( 6): Result.002 file - promoters60/1379981
aaaaag

SEQ ID NO: 107698 - DNA, 6 bp, Unknown
  misc_feature (1)..( 6): Result.002 file - promoters60/1379981
aaaaag

SEQ ID NO: 107699 - DNA, 7 bp, Unknown
  misc_feature (1)..( 7): Result.002 file - promoters60/1379981
aagctat

SEQ ID NO: 107700 - DNA, 7 bp, Unknown
  misc_feature (1)..( 7): Result.002 file - promoters60/1379981
aagatat

SEQ ID NO: 107701 - DNA, 7 bp, Unknown
  misc_feature (1)..( 7): Result.002 file - promoters60/1379981
aaagcac

SEQ ID NO: 107702 - DNA, 7 bp, Unknown
  misc_feature (1)..( 7): Result.002 file - promoters60/1379981
aaaccac

SEQ ID NO: 107703 - DNA, 8 bp, Unknown
  misc_feature (1)..( 8): Result.002 file - promoters60/1379981
aaaataag

SEQ ID NO: 107704 - DNA, 8 bp, Unknown
  misc_feature (1)..( 8): Result.002 file - promoters60/1379981
aaactaag

SEQ ID NO: 107705 - DNA, 8 bp, Unknown
  misc_feature (1)..( 8): Result.002 file - promoters60/1379981
taagttgt

SEQ ID NO: 107706 - DNA, 8 bp, Unknown
  misc_feature (1)..( 8): Result.002 file - promoters60/1379981
taaattgt

SEQ ID NO: 107707 - DNA, 6 bp, Unknown
  misc_feature (1)..( 6): Result.002 file - promoters60/1379981
atagat

SEQ ID NO: 107708 - DNA, 6 bp, Unknown
  misc_feature (1)..( 6): Result.002 file - promoters60/1379981
atagat

SEQ ID NO: 107709 - DNA, 7 bp, Unknown
  misc_feature (1)..( 7): Result.002 file - promoters60/1379981
agatata

SEQ ID NO: 107710 - DNA, 7 bp, Unknown
  misc_feature (1)..( 7): Result.002 file - promoters60/1379981
agagata

SEQ ID NO: 107711 - DNA, 6 bp, Unknown
  misc_feature (1)..( 6): Result.002 file - promoters60/1379981
ttttgg

SEQ ID NO: 107712 - DNA, 6 bp, Unknown
  misc_feature (1)..( 6): Result.002 file - promoters60/1379981
ttttgg

SEQ ID NO: 107713 - DNA, 6 bp, Unknown
  misc_feature (1)..( 6): Result.002 file - promoters60/1379981
taagat

SEQ ID NO: 107714 - DNA, 6 bp, Unknown
  misc_feature (1)..( 6): Result.002 file - promoters60/1379981
taagat

SEQ ID NO: 107715 - DNA, 6 bp, Unknown
  misc_feature (1)..( 6): Result.002 file - promoters60/1379981
aaagaa

SEQ ID NO: 107716 - DNA, 6 bp, Unknown
  misc_feature (1)..( 6): Result.002 file - promoters60/1379981
aaagaa

SEQ ID NO: 107717 - DNA, 12 bp, Unknown
  misc_feature (1)..( 12): Result.002 file - promoters60/1379981
aaaaacaaaaca

SEQ ID NO: 107718 - DNA, 12 bp, Unknown
  misc_feature (1)..( 12): Result.002 file - promoters60/1379981
aaacacaataca

SEQ ID NO: 107719 - DNA, 6 bp, Unknown
  misc_feature (1)..( 6): Result.002 file - promoters60/1379981
aaaaat

SEQ ID NO: 107720 - DNA, 6 bp, Unknown
  misc_feature (1)..( 6): Result.002 file - promoters60/1379981
aaaaat

SEQ ID NO: 107721 - DNA, 6 bp, Unknown
  misc_feature (1)..( 6): Result.002 file - promoters60/1379981
taaccc

SEQ ID NO: 107722 - DNA, 6 bp, Unknown
  misc_feature (1)..( 6): Result.002 file - promoters60/1379981
taaccc

SEQ ID NO: 107723 - DNA, 6 bp, Unknown
  misc_feature (1)..( 6): Result.002 file - promoters60/1379998
aacata

SEQ ID NO: 107724 - DNA, 6 bp, Unknown
  misc_feature (1)..( 6): Result.002 file - promoters60/1379998
aacata

SEQ ID NO: 107725 - DNA, 6 bp, Unknown
  misc_feature (1)..( 6): Result.002 file - promoters60/1379998
gagata

SEQ ID NO: 107726 - DNA, 6 bp, Unknown
  misc_feature (1)..( 6): Result.002 file - promoters60/1379998
gagata

SEQ ID NO: 107727 - DNA, 7 bp, Unknown
  misc_feature (1)..( 7): Result.002 file - promoters60/1379998
tttataa

SEQ ID NO: 107728 - DNA, 7 bp, Unknown
  misc_feature (1)..( 7): Result.002 file - promoters60/1379998
tttgtaa

SEQ ID NO: 107729 - DNA, 6 bp, Unknown
  misc_feature (1)..( 6): Result.002 file - promoters60/1379998
caaaaa

SEQ ID NO: 107730 - DNA, 6 bp, Unknown
  misc_feature (1)..( 6): Result.002 file - promoters60/1379998
caaaaa

SEQ ID NO: 107731 - DNA, 8 bp, Unknown
  misc_feature (1)..( 8): Result.002 file - promoters60/1379998
gtcccaaa

SEQ ID NO: 107732 - DNA, 8 bp, Unknown
  misc_feature (1)..( 8): Result.002 file - promoters60/1379998
gtcacaaa

SEQ ID NO: 107733 - DNA, 6 bp, Unknown
  misc_feature (1)..( 6): Result.002 file - promoters60/1379998
atattt

SEQ ID NO: 107734 - DNA, 6 bp, Unknown
  misc_feature (1)..( 6): Result.002 file - promoters60/1379998
atattt

SEQ ID NO: 107735 - DNA, 7 bp, Unknown
  misc_feature (1)..( 7): Result.002 file - promoters60/1379998
aaaacaa

SEQ ID NO: 107736 - DNA, 7 bp, Unknown
  misc_feature (1)..( 7): Result.002 file - promoters60/1379998
aaatcaa

SEQ ID NO: 107737 - DNA, 6 bp, Unknown
  misc_feature (1)..( 6): Result.002 file - promoters60/1379998
agtaaa

SEQ ID NO: 107738 - DNA, 6 bp, Unknown
  misc_feature (1)..( 6): Result.002 file - promoters60/1379998
agtaaa

SEQ ID NO: 107739 - DNA, 6 bp, Unknown
  misc_feature (1)..( 6): Result.002 file - promoters60/1379998
ttccaa

SEQ ID NO: 107740 - DNA, 6 bp, Unknown
  misc_feature (1)..( 6): Result.002 file - promoters60/1379998
ttccaa

SEQ ID NO: 107741 - DNA, 6 bp, Unknown
  misc_feature (1)..( 6): Result.002 file - promoters60/1379998
gttttc

SEQ ID NO: 107742 - DNA, 6 bp, Unknown
  misc_feature (1)..( 6): Result.002 file - promoters60/1379998
gttttc

SEQ ID NO: 107743 - DNA, 7 bp, Unknown
  misc_feature (1)..( 7): Result.002 file - promoters60/1379998
tttcgaa

SEQ ID NO: 107744 - DNA, 7 bp, Unknown
  misc_feature (1)..( 7): Result.002 file - promoters60/1379998
tttcgaa

SEQ ID NO: 107745 - DNA, 8 bp, Unknown
  misc_feature (1)..( 8): Result.002 file - promoters60/1379998
ttttgttt

SEQ ID NO: 107746 - DNA, 8 bp, Unknown
  misc_feature (1)..( 8): Result.002 file - promoters60/1379998
ttttgttt

SEQ ID NO: 107747 - DNA, 6 bp, Unknown
  misc_feature (1)..( 6): Result.002 file - promoters60/1379998
tttgtt

SEQ ID NO: 107748 - DNA, 6 bp, Unknown
  misc_feature (1)..( 6): Result.002 file - promoters60/1379998
tttgtt

SEQ ID NO: 107749 - DNA, 7 bp, Unknown
  misc_feature (1)..( 7): Result.002 file - promoters60/1379998
aaagctt

SEQ ID NO: 107750 - DNA, 7 bp, Unknown
  misc_feature (1)..( 7): Result.002 file - promoters60/1379998
aaaactt

SEQ ID NO: 107751 - DNA, 7 bp, Unknown
  misc_feature (1)..( 7): Result.002 file - promoters60/1379998
atttaag

SEQ ID NO: 107752 - DNA, 7 bp, Unknown
  misc_feature (1)..( 7): Result.002 file - promoters60/1379998
attaaag

SEQ ID NO: 107753 - DNA, 6 bp, Unknown
  misc_feature (1)..( 6): Result.002 file - promoters60/1379998
agtaaa

SEQ ID NO: 107754 - DNA, 6 bp, Unknown
  misc_feature (1)..( 6): Result.002 file - promoters60/1379998
agtaaa

SEQ ID NO: 107755 - DNA, 7 bp, Unknown
  misc_feature (1)..( 7): Result.002 file - promoters60/1379998
aatcggg

SEQ ID NO: 107756 - DNA, 7 bp, Unknown
  misc_feature (1)..( 7): Result.002 file - promoters60/1379998
aattggg

SEQ ID NO: 107757 - DNA, 8 bp, Unknown
  misc_feature (1)..( 8): Result.002 file - promoters60/1379998
gaaagaaa

SEQ ID NO: 107758 - DNA, 8 bp, Unknown
  misc_feature (1)..( 8): Result.002 file - promoters60/1379998
gaaacaaa

SEQ ID NO: 107759 - DNA, 10 bp, Unknown
  misc_feature (1)..( 10): Result.002 file - promoters60/1379998
ggaaaagaaa

SEQ ID NO: 107760 - DNA, 10 bp, Unknown
  misc_feature (1)..( 10): Result.002 file - promoters60/1379998
ggaaatgaaa

SEQ ID NO: 107761 - DNA, 7 bp, Unknown
  misc_feature (1)..( 7): Result.002 file - promoters60/1379998
cccacta

SEQ ID NO: 107762 - DNA, 7 bp, Unknown
  misc_feature (1)..( 7): Result.002 file - promoters60/1379998
cccacta

SEQ ID NO: 107763 - DNA, 9 bp, Unknown
  misc_feature (1)..( 9): Result.002 file - promoters60/1379998
aaagaaaag

SEQ ID NO: 107764 - DNA, 9 bp, Unknown
  misc_feature (1)..( 9): Result.002 file - promoters60/1379998
aaagtaaag

SEQ ID NO: 107765 - DNA, 7 bp, Unknown
  misc_feature (1)..( 7): Result.002 file - promoters60/1379998
gtatata

SEQ ID NO: 107766 - DNA, 7 bp, Unknown
  misc_feature (1)..( 7): Result.002 file - promoters60/1379998
gtatata

SEQ ID NO: 107767 - DNA, 9 bp, Unknown
  misc_feature (1)..( 9): Result.002 file - promoters60/1380309
acaaatcta

SEQ ID NO: 107768 - DNA, 9 bp, Unknown
  misc_feature (1)..( 9): Result.002 file - promoters60/1380309
ataaaccta

SEQ ID NO: 107769 - DNA, 9 bp, Unknown
  misc_feature (1)..( 9): Result.002 file - promoters60/1380309
acaaatcaa

SEQ ID NO: 107770 - DNA, 8 bp, Unknown
  misc_feature (1)..( 8): Result.002 file - promoters60/1380309
taaatata

SEQ ID NO: 107771 - DNA, 8 bp, Unknown
  misc_feature (1)..( 8): Result.002 file - promoters60/1380309
taaatata

SEQ ID NO: 107772 - DNA, 6 bp, Unknown
  misc_feature (1)..( 6): Result.002 file - promoters60/1380309
tataaa

SEQ ID NO: 107773 - DNA, 6 bp, Unknown
  misc_feature (1)..( 6): Result.002 file - promoters60/1380309
tataaa

SEQ ID NO: 107774 - DNA, 12 bp, Unknown
  misc_feature (1)..( 12): Result.002 file - promoters60/1380309
agtttaatattt

SEQ ID NO: 107775 - DNA, 12 bp, Unknown
  misc_feature (1)..( 12): Result.002 file - promoters60/1380309
agtctaagacaa

SEQ ID NO: 107776 - DNA, 12 bp, Unknown
  misc_feature (1)..( 12): Result.002 file - promoters60/1380309
aacttaaacttt

SEQ ID NO: 107777 - DNA, 9 bp, Unknown
  misc_feature (1)..( 9): Result.002 file - promoters60/1380309
atcagtact

SEQ ID NO: 107778 - DNA, 9 bp, Unknown
  misc_feature (1)..( 9): Result.002 file - promoters60/1380309
atcaatact

SEQ ID NO: 107779 - DNA, 7 bp, Unknown
  misc_feature (1)..( 7): Result.002 file - promoters60/1380309
ttttatt

SEQ ID NO: 107780 - DNA, 7 bp, Unknown
  misc_feature (1)..( 7): Result.002 file - promoters60/1380309
tttaatt

SEQ ID NO: 107781 - DNA, 7 bp, Unknown
  misc_feature (1)..( 7): Result.002 file - promoters60/1380309
aaatagt

SEQ ID NO: 107782 - DNA, 7 bp, Unknown
  misc_feature (1)..( 7): Result.002 file - promoters60/1380309
aaacagt

SEQ ID NO: 107783 - DNA, 6 bp, Unknown
  misc_feature (1)..( 6): Result.002 file - promoters60/1380309
aaaaat

SEQ ID NO: 107784 - DNA, 6 bp, Unknown
  misc_feature (1)..( 6): Result.002 file - promoters60/1380309
aaaaat

SEQ ID NO: 107785 - DNA, 10 bp, Unknown
  misc_feature (1)..( 10): Result.002 file - promoters60/1380309
atgtaacaaa

SEQ ID NO: 107786 - DNA, 10 bp, Unknown
  misc_feature (1)..( 10): Result.002 file - promoters60/1380309
atggaacaaa

SEQ ID NO: 107787 - DNA, 10 bp, Unknown
  misc_feature (1)..( 10): Result.002 file - promoters60/1380309
aataattaaa

SEQ ID NO: 107788 - DNA, 10 bp, Unknown
  misc_feature (1)..( 10): Result.002 file - promoters60/1380309
aatagttaaa

SEQ ID NO: 107789 - DNA, 7 bp, Unknown
  misc_feature (1)..( 7): Result.002 file - promoters60/1380309
atttaag

SEQ ID NO: 107790 - DNA, 7 bp, Unknown
  misc_feature (1)..( 7): Result.002 file - promoters60/1380309
attgaag

SEQ ID NO: 107791 - DNA, 7 bp, Unknown
  misc_feature (1)..( 7): Result.002 file - promoters60/1380309
tataaat

SEQ ID NO: 107792 - DNA, 7 bp, Unknown
  misc_feature (1)..( 7): Result.002 file - promoters60/1380309
tatcaat

SEQ ID NO: 107793 - DNA, 8 bp, Unknown
  misc_feature (1)..( 8): Result.002 file - promoters60/1380309
tcttaaaa

SEQ ID NO: 107794 - DNA, 8 bp, Unknown
  misc_feature (1)..( 8): Result.002 file - promoters60/1380309
tcttgaaa

SEQ ID NO: 107795 - DNA, 6 bp, Unknown
  misc_feature (1)..( 6): Result.002 file - promoters60/1380309
gtagtt

SEQ ID NO: 107796 - DNA, 6 bp, Unknown
  misc_feature (1)..( 6): Result.002 file - promoters60/1380309
gtagtt

SEQ ID NO: 107797 - DNA, 6 bp, Unknown
  misc_feature (1)..( 6): Result.002 file - promoters60/1380309
gtatat

SEQ ID NO: 107798 - DNA, 6 bp, Unknown
  misc_feature (1)..( 6): Result.002 file - promoters60/1380309
gtatat

SEQ ID NO: 107799 - DNA, 7 bp, Unknown
  misc_feature (1)..( 7): Result.002 file - promoters60/1380309
taaacaa

SEQ ID NO: 107800 - DNA, 7 bp, Unknown
  misc_feature (1)..( 7): Result.002 file - promoters60/1380309
taatcaa

SEQ ID NO: 107801 - DNA, 6 bp, Unknown
  misc_feature (1)..( 6): Result.002 file - promoters60/1380309
tggaag

SEQ ID NO: 107802 - DNA, 6 bp, Unknown
  misc_feature (1)..( 6): Result.002 file - promoters60/1380309
tggaag

SEQ ID NO: 107803 - DNA, 6 bp, Unknown
  misc_feature (1)..( 6): Result.002 file - promoters60/1380309
tttgtt

SEQ ID NO: 107804 - DNA, 6 bp, Unknown
  misc_feature (1)..( 6): Result.002 file - promoters60/1380309
tttgtt

SEQ ID NO: 107805 - DNA, 6 bp, Unknown
  misc_feature (1)..( 6): Result.002 file - promoters60/1380309
ttttta

SEQ ID NO: 107806 - DNA, 6 bp, Unknown
  misc_feature (1)..( 6): Result.002 file - promoters60/1380309
ttttta

SEQ ID NO: 107807 - DNA, 12 bp, Unknown
  misc_feature (1)..( 12): Result.002 file - promoters60/1380385
tggtaacactgt

SEQ ID NO: 107808 - DNA, 12 bp, Unknown
  misc_feature (1)..( 12): Result.002 file - promoters60/1380385
tggaaacattgt

SEQ ID NO: 107809 - DNA, 8 bp, Unknown
  misc_feature (1)..( 8): Result.002 file - promoters60/1380385
tgtcattt

SEQ ID NO: 107810 - DNA, 8 bp, Unknown
  misc_feature (1)..( 8): Result.002 file - promoters60/1380385
tgtccttt

SEQ ID NO: 107811 - DNA, 6 bp, Unknown
  misc_feature (1)..( 6): Result.002 file - promoters60/1380385
agacag

SEQ ID NO: 107812 - DNA, 6 bp, Unknown
  misc_feature (1)..( 6): Result.002 file - promoters60/1380385
agacag

SEQ ID NO: 107813 - DNA, 9 bp, Unknown
  misc_feature (1)..( 9): Result.002 file - promoters60/1380385
ggctggatc

SEQ ID NO: 107814 - DNA, 9 bp, Unknown
  misc_feature (1)..( 9): Result.002 file - promoters60/1380385
ggctgaatc

SEQ ID NO: 107815 - DNA, 6 bp, Unknown
  misc_feature (1)..( 6): Result.002 file - promoters60/1380385
tctgac

SEQ ID NO: 107816 - DNA, 6 bp, Unknown
  misc_feature (1)..( 6): Result.002 file - promoters60/1380385
tctgac

SEQ ID NO: 107817 - DNA, 6 bp, Unknown
  misc_feature (1)..( 6): Result.002 file - promoters60/1380385
ttgtgt

SEQ ID NO: 107818 - DNA, 6 bp, Unknown
  misc_feature (1)..( 6): Result.002 file - promoters60/1380385
ttgtgt

SEQ ID NO: 107819 - DNA, 8 bp, Unknown
  misc_feature (1)..( 8): Result.002 file - promoters60/1380385
attatcaa

SEQ ID NO: 107820 - DNA, 8 bp, Unknown
  misc_feature (1)..( 8): Result.002 file - promoters60/1380385
attttcaa

SEQ ID NO: 107821 - DNA, 7 bp, Unknown
  misc_feature (1)..( 7): Result.002 file - promoters60/1380385
tttctct

SEQ ID NO: 107822 - DNA, 7 bp, Unknown
  misc_feature (1)..( 7): Result.002 file - promoters60/1380385
tttttct

SEQ ID NO: 107823 - DNA, 6 bp, Unknown
  misc_feature (1)..( 6): Result.002 file - promoters60/1380385
cttttt

SEQ ID NO: 107824 - DNA, 6 bp, Unknown
  misc_feature (1)..( 6): Result.002 file - promoters60/1380385
cttttt

SEQ ID NO: 107825 - DNA, 9 bp, Unknown
  misc_feature (1)..( 9): Result.002 file - promoters60/1380389
caaaaatat

SEQ ID NO: 107826 - DNA, 9 bp, Unknown
  misc_feature (1)..( 9): Result.002 file - promoters60/1380389
caaaattat

SEQ ID NO: 107827 - DNA, 9 bp, Unknown
  misc_feature (1)..( 9): Result.002 file - promoters60/1380389
gaaagatat

SEQ ID NO: 107828 - DNA, 7 bp, Unknown
  misc_feature (1)..( 7): Result.002 file - promoters60/1380389
caaaacg

SEQ ID NO: 107829 - DNA, 7 bp, Unknown
  misc_feature (1)..( 7): Result.002 file - promoters60/1380389
caagacg

SEQ ID NO: 107830 - DNA, 7 bp, Unknown
  misc_feature (1)..( 7): Result.002 file - promoters60/1380389
caagacg

SEQ ID NO: 107831 - DNA, 8 bp, Unknown
  misc_feature (1)..( 8): Result.002 file - promoters60/1380389
cttgcttt

SEQ ID NO: 107832 - DNA, 8 bp, Unknown
  misc_feature (1)..( 8): Result.002 file - promoters60/1380389
tttggttt

SEQ ID NO: 107833 - DNA, 9 bp, Unknown
  misc_feature (1)..( 9): Result.002 file - promoters60/1380389
tttaggtct

SEQ ID NO: 107834 - DNA, 8 bp, Unknown
  misc_feature (1)..( 8): Result.002 file - promoters60/1380389
taaattca

SEQ ID NO: 107835 - DNA, 8 bp, Unknown
  misc_feature (1)..( 8): Result.002 file - promoters60/1380389
taaattga

SEQ ID NO: 107836 - DNA, 8 bp, Unknown
  misc_feature (1)..( 8): Result.002 file - promoters60/1380389
taaactga

SEQ ID NO: 107837 - DNA, 9 bp, Unknown
  misc_feature (1)..( 9): Result.002 file - promoters60/1380389
aaaaacagt

SEQ ID NO: 107838 - DNA, 9 bp, Unknown
  misc_feature (1)..( 9): Result.002 file - promoters60/1380389
aaaaacatt

SEQ ID NO: 107839 - DNA, 9 bp, Unknown
  misc_feature (1)..( 9): Result.002 file - promoters60/1380389
gaacacaaa

SEQ ID NO: 107840 - DNA, 7 bp, Unknown
  misc_feature (1)..( 7): Result.002 file - promoters60/1380418
aagagat

SEQ ID NO: 107841 - DNA, 7 bp, Unknown
  misc_feature (1)..( 7): Result.002 file - promoters60/1380418
aagagat

SEQ ID NO: 107842 - DNA, 7 bp, Unknown
  misc_feature (1)..( 7): Result.002 file - promoters60/1380418
agtttct

SEQ ID NO: 107843 - DNA, 7 bp, Unknown
  misc_feature (1)..( 7): Result.002 file - promoters60/1380418
agtttct

SEQ ID NO: 107844 - DNA, 10 bp, Unknown
  misc_feature (1)..( 10): Result.002 file - promoters60/1380418
aaaaatcgtt

SEQ ID NO: 107845 - DNA, 10 bp, Unknown
  misc_feature (1)..( 10): Result.002 file - promoters60/1380418
aaaaatggtt

SEQ ID NO: 107846 - DNA, 10 bp, Unknown
  misc_feature (1)..( 10): Result.002 file - promoters60/1380418
aaaaatgctg

SEQ ID NO: 107847 - DNA, 7 bp, Unknown
  misc_feature (1)..( 7): Result.002 file - promoters60/1380418
ttttgtt

SEQ ID NO: 107848 - DNA, 7 bp, Unknown
  misc_feature (1)..( 7): Result.002 file - promoters60/1380418
ttttgtt

SEQ ID NO: 107849 - DNA, 8 bp, Unknown
  misc_feature (1)..( 8): Result.002 file - promoters60/1380418
cagtgata

SEQ ID NO: 107850 - DNA, 8 bp, Unknown
  misc_feature (1)..( 8): Result.002 file - promoters60/1380418
cagttata

SEQ ID NO: 107851 - DNA, 10 bp, Unknown
  misc_feature (1)..( 10): Result.002 file - promoters60/1380418
agatgagttt

SEQ ID NO: 107852 - DNA, 10 bp, Unknown
  misc_feature (1)..( 10): Result.002 file - promoters60/1380418
agattagttt

SEQ ID NO: 107853 - DNA, 7 bp, Unknown
  misc_feature (1)..( 7): Result.002 file - promoters60/1380418
caaaatg

SEQ ID NO: 107854 - DNA, 7 bp, Unknown
  misc_feature (1)..( 7): Result.002 file - promoters60/1380418
caatatg

SEQ ID NO: 107855 - DNA, 7 bp, Unknown
  misc_feature (1)..( 7): Result.002 file - promoters60/1380418
caaccaa

SEQ ID NO: 107856 - DNA, 7 bp, Unknown
  misc_feature (1)..( 7): Result.002 file - promoters60/1380418
caaccaa

SEQ ID NO: 107857 - DNA, 7 bp, Unknown
  misc_feature (1)..( 7): Result.002 file - promoters60/1380418
acaagaa

SEQ ID NO: 107858 - DNA, 7 bp, Unknown
  misc_feature (1)..( 7): Result.002 file - promoters60/1380418
acaagaa

SEQ ID NO: 107859 - DNA, 7 bp, Unknown
  misc_feature (1)..( 7): Result.002 file - promoters60/1380437
aactatt

SEQ ID NO: 107860 - DNA, 7 bp, Unknown
  misc_feature (1)..( 7): Result.002 file - promoters60/1380437
aacaatt

SEQ ID NO: 107861 - DNA, 11 bp, Unknown
  misc_feature (1)..( 11): Result.002 file - promoters60/1380437
tttcaaataaa

SEQ ID NO: 107862 - DNA, 11 bp, Unknown
  misc_feature (1)..( 11): Result.002 file - promoters60/1380437
tttcagataaa

SEQ ID NO: 107863 - DNA, 7 bp, Unknown
  misc_feature (1)..( 7): Result.002 file - promoters60/1380437
tcaattt

SEQ ID NO: 107864 - DNA, 7 bp, Unknown
  misc_feature (1)..( 7): Result.002 file - promoters60/1380437
tcacttt

SEQ ID NO: 107865 - DNA, 6 bp, Unknown
  misc_feature (1)..( 6): Result.002 file - promoters60/1380437
tttgta

SEQ ID NO: 107866 - DNA, 6 bp, Unknown
  misc_feature (1)..( 6): Result.002 file - promoters60/1380437
tttgta

SEQ ID NO: 107867 - DNA, 7 bp, Unknown
  misc_feature (1)..( 7): Result.002 file - promoters60/1380437
aacaaaa

SEQ ID NO: 107868 - DNA, 7 bp, Unknown
  misc_feature (1)..( 7): Result.002 file - promoters60/1380437
cacaaaa

SEQ ID NO: 107869 - DNA, 7 bp, Unknown
  misc_feature (1)..( 7): Result.002 file - promoters60/1380437
aactaaa

SEQ ID NO: 107870 - DNA, 6 bp, Unknown
  misc_feature (1)..( 6): Result.002 file - promoters60/1380437
gatatt

SEQ ID NO: 107871 - DNA, 6 bp, Unknown
  misc_feature (1)..( 6): Result.002 file - promoters60/1380437
gatatt

SEQ ID NO: 107872 - DNA, 6 bp, Unknown
  misc_feature (1)..( 6): Result.002 file - promoters60/1380437
tattta

SEQ ID NO: 107873 - DNA, 6 bp, Unknown
  misc_feature (1)..( 6): Result.002 file - promoters60/1380437
tattta

SEQ ID NO: 107874 - DNA, 12 bp, Unknown
  misc_feature (1)..( 12): Result.002 file - promoters60/1380437
aaaacaagataa

SEQ ID NO: 107875 - DNA, 12 bp, Unknown
  misc_feature (1)..( 12): Result.002 file - promoters60/1380437
aaatcaagttaa

SEQ ID NO: 107876 - DNA, 11 bp, Unknown
  misc_feature (1)..( 11): Result.002 file - promoters60/1380437
aaagggttaaa

SEQ ID NO: 107877 - DNA, 11 bp, Unknown
  misc_feature (1)..( 11): Result.002 file - promoters60/1380437
aaaggggtaaa

SEQ ID NO: 107878 - DNA, 9 bp, Unknown
  misc_feature (1)..( 9): Result.002 file - promoters60/1380437
gaagaaaag

SEQ ID NO: 107879 - DNA, 9 bp, Unknown
  misc_feature (1)..( 9): Result.002 file - promoters60/1380437
aaagaaaag

SEQ ID NO: 107880 - DNA, 9 bp, Unknown
  misc_feature (1)..( 9): Result.002 file - promoters60/1380437
aaagtaaag

SEQ ID NO: 107881 - DNA, 6 bp, Unknown
  misc_feature (1)..( 6): Result.002 file - promoters60/1380437
aaatcg

SEQ ID NO: 107882 - DNA, 6 bp, Unknown
  misc_feature (1)..( 6): Result.002 file - promoters60/1380437
aaatcg

SEQ ID NO: 107883 - DNA, 6 bp, Unknown
  misc_feature (1)..( 6): Result.002 file - promoters60/1380437
agagta

SEQ ID NO: 107884 - DNA, 6 bp, Unknown
  misc_feature (1)..( 6): Result.002 file - promoters60/1380437
agagta

SEQ ID NO: 107885 - DNA, 6 bp, Unknown
  misc_feature (1)..( 6): Result.002 file - promoters60/1380437
taaaaa

SEQ ID NO: 107886 - DNA, 6 bp, Unknown
  misc_feature (1)..( 6): Result.002 file - promoters60/1380437
taaaaa

SEQ ID NO: 107887 - DNA, 7 bp, Unknown
  misc_feature (1)..( 7): Result.002 file - promoters60/1380437
tttcttg

SEQ ID NO: 107888 - DNA, 7 bp, Unknown
  misc_feature (1)..( 7): Result.002 file - promoters60/1380437
tttgttg

SEQ ID NO: 107889 - DNA, 7 bp, Unknown
  misc_feature (1)..( 7): Result.002 file - promoters60/1380437
ttgttat

SEQ ID NO: 107890 - DNA, 7 bp, Unknown
  misc_feature (1)..( 7): Result.002 file - promoters60/1380437
ttgttat

SEQ ID NO: 107891 - DNA, 6 bp, Unknown
  misc_feature (1)..( 6): Result.002 file - promoters60/1380437
aatatc

SEQ ID NO: 107892 - DNA, 6 bp, Unknown
  misc_feature (1)..( 6): Result.002 file - promoters60/1380437
aatatc

SEQ ID NO: 107893 - DNA, 7 bp, Unknown
  misc_feature (1)..( 7): Result.002 file - promoters60/1380437
aaaacaa

SEQ ID NO: 107894 - DNA, 7 bp, Unknown
  misc_feature (1)..( 7): Result.002 file - promoters60/1380437
aaaccaa

SEQ ID NO: 107895 - DNA, 7 bp, Unknown
  misc_feature (1)..( 7): Result.002 file - promoters60/1380437
gtcaaaa

SEQ ID NO: 107896 - DNA, 7 bp, Unknown
  misc_feature (1)..( 7): Result.002 file - promoters60/1380437
gtctaaa

SEQ ID NO: 107897 - DNA, 6 bp, Unknown
  misc_feature (1)..( 6): Result.002 file - promoters60/1380437
agtaaa

SEQ ID NO: 107898 - DNA, 6 bp, Unknown
  misc_feature (1)..( 6): Result.002 file - promoters60/1380437
agtaaa

SEQ ID NO: 107899 - DNA, 7 bp, Unknown
  misc_feature (1)..( 7): Result.002 file - promoters60/1380437
aatcggg

SEQ ID NO: 107900 - DNA, 7 bp, Unknown
  misc_feature (1)..( 7): Result.002 file - promoters60/1380437
aattggg

SEQ ID NO: 107901 - DNA, 8 bp, Unknown
  misc_feature (1)..( 8): Result.002 file - promoters60/1380437
gaaagaaa

SEQ ID NO: 107902 - DNA, 8 bp, Unknown
  misc_feature (1)..( 8): Result.002 file - promoters60/1380437
gaaacaaa

SEQ ID NO: 107903 - DNA, 10 bp, Unknown
  misc_feature (1)..( 10): Result.002 file - promoters60/1380437
ggaaaagaaa

SEQ ID NO: 107904 - DNA, 10 bp, Unknown
  misc_feature (1)..( 10): Result.002 file - promoters60/1380437
ggaaatgaaa

SEQ ID NO: 107905 - DNA, 7 bp, Unknown
  misc_feature (1)..( 7): Result.002 file - promoters60/1380437
cccacta

SEQ ID NO: 107906 - DNA, 7 bp, Unknown
  misc_feature (1)..( 7): Result.002 file - promoters60/1380437
cccacta

SEQ ID NO: 107907 - DNA, 7 bp, Unknown
  misc_feature (1)..( 7): Result.002 file - promoters60/1380437
gtatata

SEQ ID NO: 107908 - DNA, 7 bp, Unknown
  misc_feature (1)..( 7): Result.002 file - promoters60/1380437
gtatata

SEQ ID NO: 107909 - DNA, 6 bp, Unknown
  misc_feature (1)..( 6): Result.002 file - promoters60/1380478
ctgatg

SEQ ID NO: 107910 - DNA, 6 bp, Unknown
  misc_feature (1)..( 6): Result.002 file - promoters60/1380478
ctgatg

SEQ ID NO: 107911 - DNA, 6 bp, Unknown
  misc_feature (1)..( 6): Result.002 file - promoters60/1380478
cattac

SEQ ID NO: 107912 - DNA, 6 bp, Unknown
  misc_feature (1)..( 6): Result.002 file - promoters60/1380478
cattac

SEQ ID NO: 107913 - DNA, 6 bp, Unknown
  misc_feature (1)..( 6): Result.002 file - promoters60/1380478
catttt

SEQ ID NO: 107914 - DNA, 6 bp, Unknown
  misc_feature (1)..( 6): Result.002 file - promoters60/1380478
catttt

SEQ ID NO: 107915 - DNA, 7 bp, Unknown
  misc_feature (1)..( 7): Result.002 file - promoters60/1380478
tattcaa

SEQ ID NO: 107916 - DNA, 7 bp, Unknown
  misc_feature (1)..( 7): Result.002 file - promoters60/1380478
tatacaa

SEQ ID NO: 107917 - DNA, 8 bp, Unknown
  misc_feature (1)..( 8): Result.002 file - promoters60/1380478
ggtgtgat

SEQ ID NO: 107918 - DNA, 8 bp, Unknown
  misc_feature (1)..( 8): Result.002 file - promoters60/1380478
ggtgggat

SEQ ID NO: 107919 - DNA, 6 bp, Unknown
  misc_feature (1)..( 6): Result.002 file - promoters60/1380478
tggaaa

SEQ ID NO: 107920 - DNA, 6 bp, Unknown
  misc_feature (1)..( 6): Result.002 file - promoters60/1380478
tggaaa

SEQ ID NO: 107921 - DNA, 8 bp, Unknown
  misc_feature (1)..( 8): Result.002 file - promoters60/1380478
caacacca

SEQ ID NO: 107922 - DNA, 8 bp, Unknown
  misc_feature (1)..( 8): Result.002 file - promoters60/1380478
caactcca

SEQ ID NO: 107923 - DNA, 7 bp, Unknown
  misc_feature (1)..( 7): Result.002 file - promoters60/1380478
ttacttg

SEQ ID NO: 107924 - DNA, 7 bp, Unknown
  misc_feature (1)..( 7): Result.002 file - promoters60/1380478
ttaattg

SEQ ID NO: 107925 - DNA, 8 bp, Unknown
  misc_feature (1)..( 8): Result.002 file - promoters60/1380478
actttata

SEQ ID NO: 107926 - DNA, 8 bp, Unknown
  misc_feature (1)..( 8): Result.002 file - promoters60/1380478
acttcata

SEQ ID NO: 107927 - DNA, 7 bp, Unknown
  misc_feature (1)..( 7): Result.002 file - promoters60/1380478
catttcc

SEQ ID NO: 107928 - DNA, 7 bp, Unknown
  misc_feature (1)..( 7): Result.002 file - promoters60/1380478
catatcc

SEQ ID NO: 107929 - DNA, 9 bp, Unknown
  misc_feature (1)..( 9): Result.002 file - promoters60/1380519
tctcaaact

SEQ ID NO: 107930 - DNA, 9 bp, Unknown
  misc_feature (1)..( 9): Result.002 file - promoters60/1380519
tctaaaaag

SEQ ID NO: 107931 - DNA, 9 bp, Unknown
  misc_feature (1)..( 9): Result.002 file - promoters60/1380519
tatcatact

SEQ ID NO: 107932 - DNA, 8 bp, Unknown
  misc_feature (1)..( 8): Result.002 file - promoters60/1380519
gagcaaaa

SEQ ID NO: 107933 - DNA, 8 bp, Unknown
  misc_feature (1)..( 8): Result.002 file - promoters60/1380519
gagaaaaa

SEQ ID NO: 107934 - DNA, 8 bp, Unknown
  misc_feature (1)..( 8): Result.002 file - promoters60/1380519
gagcaatg

SEQ ID NO: 107935 - DNA, 7 bp, Unknown
  misc_feature (1)..( 7): Result.002 file - promoters60/1380545
attgatt

SEQ ID NO: 107936 - DNA, 7 bp, Unknown
  misc_feature (1)..( 7): Result.002 file - promoters60/1380545
atttatt

SEQ ID NO: 107937 - DNA, 9 bp, Unknown
  misc_feature (1)..( 9): Result.002 file - promoters60/1380545
tgttcatac

SEQ ID NO: 107938 - DNA, 9 bp, Unknown
  misc_feature (1)..( 9): Result.002 file - promoters60/1380545
tgttaataa

SEQ ID NO: 107939 - DNA, 9 bp, Unknown
  misc_feature (1)..( 9): Result.002 file - promoters60/1380545
tcttcatac

SEQ ID NO: 107940 - DNA, 6 bp, Unknown
  misc_feature (1)..( 6): Result.002 file - promoters60/1380545
ataaac

SEQ ID NO: 107941 - DNA, 6 bp, Unknown
  misc_feature (1)..( 6): Result.002 file - promoters60/1380545
ataaac

SEQ ID NO: 107942 - DNA, 9 bp, Unknown
  misc_feature (1)..( 9): Result.002 file - promoters60/1380545
gttataaaa

SEQ ID NO: 107943 - DNA, 9 bp, Unknown
  misc_feature (1)..( 9): Result.002 file - promoters60/1380545
gttataaaa

SEQ ID NO: 107944 - DNA, 6 bp, Unknown
  misc_feature (1)..( 6): Result.002 file - promoters60/1380545
ttaacc

SEQ ID NO: 107945 - DNA, 6 bp, Unknown
  misc_feature (1)..( 6): Result.002 file - promoters60/1380545
ttaacc

SEQ ID NO: 107946 - DNA, 8 bp, Unknown
  misc_feature (1)..( 8): Result.002 file - promoters60/1380545
acaaaatg

SEQ ID NO: 107947 - DNA, 8 bp, Unknown
  misc_feature (1)..( 8): Result.002 file - promoters60/1380545
acacaatg

SEQ ID NO: 107948 - DNA, 9 bp, Unknown
  misc_feature (1)..( 9): Result.002 file - promoters60/1380545
caaaaaaac

SEQ ID NO: 107949 - DNA, 9 bp, Unknown
  misc_feature (1)..( 9): Result.002 file - promoters60/1380545
caacaaaac

SEQ ID NO: 107950 - DNA, 9 bp, Unknown
  misc_feature (1)..( 9): Result.002 file - promoters60/1380545
aatcctaat

SEQ ID NO: 107951 - DNA, 9 bp, Unknown
  misc_feature (1)..( 9): Result.002 file - promoters60/1380545
aatcataat

SEQ ID NO: 107952 - DNA, 7 bp, Unknown
  misc_feature (1)..( 7): Result.002 file - promoters60/1380545
tgaacag

SEQ ID NO: 107953 - DNA, 7 bp, Unknown
  misc_feature (1)..( 7): Result.002 file - promoters60/1380545
tgaacag

SEQ ID NO: 107954 - DNA, 6 bp, Unknown
  misc_feature (1)..( 6): Result.002 file - promoters60/1380545
actcaa

SEQ ID NO: 107955 - DNA, 6 bp, Unknown
  misc_feature (1)..( 6): Result.002 file - promoters60/1380545
actcaa

SEQ ID NO: 107956 - DNA, 7 bp, Unknown
  misc_feature (1)..( 7): Result.002 file - promoters60/1380545
caacgta

SEQ ID NO: 107957 - DNA, 7 bp, Unknown
  misc_feature (1)..( 7): Result.002 file - promoters60/1380545
caaggta

SEQ ID NO: 107958 - DNA, 8 bp, Unknown
  misc_feature (1)..( 8): Result.002 file - promoters60/1380545
ttagacac

SEQ ID NO: 107959 - DNA, 8 bp, Unknown
  misc_feature (1)..( 8): Result.002 file - promoters60/1380545
ttagacac

SEQ ID NO: 107960 - DNA, 11 bp, Unknown
  misc_feature (1)..( 11): Result.002 file - promoters60/1380708
taacatttttt

SEQ ID NO: 107961 - DNA, 11 bp, Unknown
  misc_feature (1)..( 11): Result.002 file - promoters60/1380708
taagatttttg

SEQ ID NO: 107962 - DNA, 11 bp, Unknown
  misc_feature (1)..( 11): Result.002 file - promoters60/1380708
tagaatttttt

SEQ ID NO: 107963 - DNA, 9 bp, Unknown
  misc_feature (1)..( 9): Result.002 file - promoters60/1380708
tttaatcag

SEQ ID NO: 107964 - DNA, 9 bp, Unknown
  misc_feature (1)..( 9): Result.002 file - promoters60/1380708
tttattcag

SEQ ID NO: 107965 - DNA, 9 bp, Unknown
  misc_feature (1)..( 9): Result.002 file - promoters60/1380708
gttattcga

SEQ ID NO: 107966 - DNA, 6 bp, Unknown
  misc_feature (1)..( 6): Result.002 file - promoters60/1380708
tgcaat

SEQ ID NO: 107967 - DNA, 6 bp, Unknown
  misc_feature (1)..( 6): Result.002 file - promoters60/1380708
tgcaat

SEQ ID NO: 107968 - DNA, 8 bp, Unknown
  misc_feature (1)..( 8): Result.002 file - promoters60/1380708
ttcattta

SEQ ID NO: 107969 - DNA, 8 bp, Unknown
  misc_feature (1)..( 8): Result.002 file - promoters60/1380708
ttcattta

SEQ ID NO: 107970 - DNA, 6 bp, Unknown
  misc_feature (1)..( 6): Result.002 file - promoters60/1380708
tatttt

SEQ ID NO: 107971 - DNA, 6 bp, Unknown
  misc_feature (1)..( 6): Result.002 file - promoters60/1380708
tatttt

SEQ ID NO: 107972 - DNA, 6 bp, Unknown
  misc_feature (1)..( 6): Result.002 file - promoters60/1380708
taattt

SEQ ID NO: 107973 - DNA, 6 bp, Unknown
  misc_feature (1)..( 6): Result.002 file - promoters60/1380708
taattt

SEQ ID NO: 107974 - DNA, 6 bp, Unknown
  misc_feature (1)..( 6): Result.002 file - promoters60/1380708
tttcac

SEQ ID NO: 107975 - DNA, 6 bp, Unknown
  misc_feature (1)..( 6): Result.002 file - promoters60/1380708
tttcac

SEQ ID NO: 107976 - DNA, 7 bp, Unknown
  misc_feature (1)..( 7): Result.002 file - promoters60/1380708
attttca

SEQ ID NO: 107977 - DNA, 7 bp, Unknown
  misc_feature (1)..( 7): Result.002 file - promoters60/1380708
attctca

SEQ ID NO: 107978 - DNA, 7 bp, Unknown
  misc_feature (1)..( 7): Result.002 file - promoters60/1380708
atgttat

SEQ ID NO: 107979 - DNA, 7 bp, Unknown
  misc_feature (1)..( 7): Result.002 file - promoters60/1380708
atggtat

SEQ ID NO: 107980 - DNA, 6 bp, Unknown
  misc_feature (1)..( 6): Result.002 file - promoters60/1380708
aatatt

SEQ ID NO: 107981 - DNA, 6 bp, Unknown
  misc_feature (1)..( 6): Result.002 file - promoters60/1380708
aatatt

SEQ ID NO: 107982 - DNA, 6 bp, Unknown
  misc_feature (1)..( 6): Result.002 file - promoters60/1380708
gaaaat

SEQ ID NO: 107983 - DNA, 6 bp, Unknown
  misc_feature (1)..( 6): Result.002 file - promoters60/1380708
gaaaat

SEQ ID NO: 107984 - DNA, 7 bp, Unknown
  misc_feature (1)..( 7): Result.002 file - promoters60/1380708
taaatct

SEQ ID NO: 107985 - DNA, 7 bp, Unknown
  misc_feature (1)..( 7): Result.002 file - promoters60/1380708
taactct

SEQ ID NO: 107986 - DNA, 12 bp, Unknown
  misc_feature (1)..( 12): Result.002 file - promoters60/1380708
aaaaaatctctg

SEQ ID NO: 107987 - DNA, 12 bp, Unknown
  misc_feature (1)..( 12): Result.002 file - promoters60/1380708
aaataatctctg

SEQ ID NO: 107988 - DNA, 7 bp, Unknown
  misc_feature (1)..( 7): Result.002 file - promoters60/1380708
aattttt

SEQ ID NO: 107989 - DNA, 7 bp, Unknown
  misc_feature (1)..( 7): Result.002 file - promoters60/1380708
aattttt

SEQ ID NO: 107990 - DNA, 7 bp, Unknown
  misc_feature (1)..( 7): Result.002 file - promoters60/1380708
ttaatgt

SEQ ID NO: 107991 - DNA, 7 bp, Unknown
  misc_feature (1)..( 7): Result.002 file - promoters60/1380708
ttattgt

SEQ ID NO: 107992 - DNA, 6 bp, Unknown
  misc_feature (1)..( 6): Result.002 file - promoters60/1380708
aatttt

SEQ ID NO: 107993 - DNA, 6 bp, Unknown
  misc_feature (1)..( 6): Result.002 file - promoters60/1380708
aatttt

SEQ ID NO: 107994 - DNA, 6 bp, Unknown
  misc_feature (1)..( 6): Result.002 file - promoters60/1380708
tattcg

SEQ ID NO: 107995 - DNA, 6 bp, Unknown
  misc_feature (1)..( 6): Result.002 file - promoters60/1380708
tattcg

SEQ ID NO: 107996 - DNA, 6 bp, Unknown
  misc_feature (1)..( 6): Result.002 file - promoters60/1380708
acctat

SEQ ID NO: 107997 - DNA, 6 bp, Unknown
  misc_feature (1)..( 6): Result.002 file - promoters60/1380708
acctat

SEQ ID NO: 107998 - DNA, 8 bp, Unknown
  misc_feature (1)..( 8): Result.002 file - promoters60/1380708
caaaactt

SEQ ID NO: 107999 - DNA, 8 bp, Unknown
  misc_feature (1)..( 8): Result.002 file - promoters60/1380708
caaatctt

SEQ ID NO: 108000 - DNA, 7 bp, Unknown
  misc_feature (1)..( 7): Result.002 file - promoters60/1380708
gaataaa

SEQ ID NO: 108001 - DNA, 7 bp, Unknown
  misc_feature (1)..( 7): Result.002 file - promoters60/1380708
gaaaaaa

SEQ ID NO: 108002 - DNA, 6 bp, Unknown
  misc_feature (1)..( 6): Result.002 file - promoters60/1380708
atttaa

SEQ ID NO: 108003 - DNA, 6 bp, Unknown
  misc_feature (1)..( 6): Result.002 file - promoters60/1380708
atttaa

SEQ ID NO: 108004 - DNA, 6 bp, Unknown
  misc_feature (1)..( 6): Result.002 file - promoters60/1380708
taaaat

SEQ ID NO: 108005 - DNA, 6 bp, Unknown
  misc_feature (1)..( 6): Result.002 file - promoters60/1380708
taaaat

SEQ ID NO: 108006 - DNA, 7 bp, Unknown
  misc_feature (1)..( 7): Result.002 file - promoters60/1380708
aaagtca

SEQ ID NO: 108007 - DNA, 7 bp, Unknown
  misc_feature (1)..( 7): Result.002 file - promoters60/1380708
aaaatca

SEQ ID NO: 108008 - DNA, 6 bp, Unknown
  misc_feature (1)..( 6): Result.002 file - promoters60/1380708
tcacat

SEQ ID NO: 108009 - DNA, 6 bp, Unknown
  misc_feature (1)..( 6): Result.002 file - promoters60/1380708
tcacat

SEQ ID NO: 108010 - DNA, 6 bp, Unknown
  misc_feature (1)..( 6): Result.002 file - promoters60/1380708
aatcat

SEQ ID NO: 108011 - DNA, 6 bp, Unknown
  misc_feature (1)..( 6): Result.002 file - promoters60/1380708
aatcat

SEQ ID NO: 108012 - DNA, 6 bp, Unknown
  misc_feature (1)..( 6): Result.002 file - promoters60/1380708
tttgta

SEQ ID NO: 108013 - DNA, 6 bp, Unknown
  misc_feature (1)..( 6): Result.002 file - promoters60/1380708
tttgta

SEQ ID NO: 108014 - DNA, 9 bp, Unknown
  misc_feature (1)..( 9): Result.002 file - promoters60/1380738
tctaaatta

SEQ ID NO: 108015 - DNA, 9 bp, Unknown
  misc_feature (1)..( 9): Result.002 file - promoters60/1380738
tctagatta

SEQ ID NO: 108016 - DNA, 7 bp, Unknown
  misc_feature (1)..( 7): Result.002 file - promoters60/1380738
tatttgt

SEQ ID NO: 108017 - DNA, 7 bp, Unknown
  misc_feature (1)..( 7): Result.002 file - promoters60/1380738
tatctgt

SEQ ID NO: 108018 - DNA, 10 bp, Unknown
  misc_feature (1)..( 10): Result.002 file - promoters60/1380738
tgttcattta

SEQ ID NO: 108019 - DNA, 10 bp, Unknown
  misc_feature (1)..( 10): Result.002 file - promoters60/1380738
tgtgcatttg

SEQ ID NO: 108020 - DNA, 10 bp, Unknown
  misc_feature (1)..( 10): Result.002 file - promoters60/1380738
cgttaattta

SEQ ID NO: 108021 - DNA, 6 bp, Unknown
  misc_feature (1)..( 6): Result.002 file - promoters60/1380738
acgtgt

SEQ ID NO: 108022 - DNA, 6 bp, Unknown
  misc_feature (1)..( 6): Result.002 file - promoters60/1380738
acgtgt

SEQ ID NO: 108023 - DNA, 7 bp, Unknown
  misc_feature (1)..( 7): Result.002 file - promoters60/1380738
ggcttaa

SEQ ID NO: 108024 - DNA, 7 bp, Unknown
  misc_feature (1)..( 7): Result.002 file - promoters60/1380738
ggcttaa

SEQ ID NO: 108025 - DNA, 8 bp, Unknown
  misc_feature (1)..( 8): Result.002 file - promoters60/1380738
ggtccggg

SEQ ID NO: 108026 - DNA, 8 bp, Unknown
  misc_feature (1)..( 8): Result.002 file - promoters60/1380738
ggtcaggg

SEQ ID NO: 108027 - DNA, 8 bp, Unknown
  misc_feature (1)..( 8): Result.002 file - promoters60/1380738
gacaagag

SEQ ID NO: 108028 - DNA, 8 bp, Unknown
  misc_feature (1)..( 8): Result.002 file - promoters60/1380738
gacgagag

SEQ ID NO: 108029 - DNA, 6 bp, Unknown
  misc_feature (1)..( 6): Result.002 file - promoters60/1380738
ttttta

SEQ ID NO: 108030 - DNA, 6 bp, Unknown
  misc_feature (1)..( 6): Result.002 file - promoters60/1380738
ttttta

SEQ ID NO: 108031 - DNA, 7 bp, Unknown
  misc_feature (1)..( 7): Result.002 file - promoters60/1380738
aaataca

SEQ ID NO: 108032 - DNA, 7 bp, Unknown
  misc_feature (1)..( 7): Result.002 file - promoters60/1380738
aaaaaca

SEQ ID NO: 108033 - DNA, 6 bp, Unknown
  misc_feature (1)..( 6): Result.002 file - promoters60/1380738
aagaaa

SEQ ID NO: 108034 - DNA, 6 bp, Unknown
  misc_feature (1)..( 6): Result.002 file - promoters60/1380738
aagaaa

SEQ ID NO: 108035 - DNA, 6 bp, Unknown
  misc_feature (1)..( 6): Result.002 file - promoters60/1380738
taattt

SEQ ID NO: 108036 - DNA, 6 bp, Unknown
  misc_feature (1)..( 6): Result.002 file - promoters60/1380738
taattt

SEQ ID NO: 108037 - DNA, 6 bp, Unknown
  misc_feature (1)..( 6): Result.002 file - promoters60/1380738
tttacc

SEQ ID NO: 108038 - DNA, 6 bp, Unknown
  misc_feature (1)..( 6): Result.002 file - promoters60/1380738
tttacc

SEQ ID NO: 108039 - DNA, 6 bp, Unknown
  misc_feature (1)..( 6): Result.002 file - promoters60/1380738
ttattt

SEQ ID NO: 108040 - DNA, 6 bp, Unknown
  misc_feature (1)..( 6): Result.002 file - promoters60/1380738
ttattt

SEQ ID NO: 108041 - DNA, 8 bp, Unknown
  misc_feature (1)..( 8): Result.002 file - promoters60/1380738
tacattat

SEQ ID NO: 108042 - DNA, 8 bp, Unknown
  misc_feature (1)..( 8): Result.002 file - promoters60/1380738
tacaatat

SEQ ID NO: 108043 - DNA, 8 bp, Unknown
  misc_feature (1)..( 8): Result.002 file - promoters60/1380738
attccaaa

SEQ ID NO: 108044 - DNA, 8 bp, Unknown
  misc_feature (1)..( 8): Result.002 file - promoters60/1380738
attacaaa

SEQ ID NO: 108045 - DNA, 8 bp, Unknown
  misc_feature (1)..( 8): Result.002 file - promoters60/1380738
taatcaaa

SEQ ID NO: 108046 - DNA, 8 bp, Unknown
  misc_feature (1)..( 8): Result.002 file - promoters60/1380738
taattaaa

SEQ ID NO: 108047 - DNA, 7 bp, Unknown
  misc_feature (1)..( 7): Result.002 file - promoters60/1380738
acaaaac

SEQ ID NO: 108048 - DNA, 7 bp, Unknown
  misc_feature (1)..( 7): Result.002 file - promoters60/1380738
acaaaac

SEQ ID NO: 108049 - DNA, 8 bp, Unknown
  misc_feature (1)..( 8): Result.002 file - promoters60/1380738
ctgtcaag

SEQ ID NO: 108050 - DNA, 8 bp, Unknown
  misc_feature (1)..( 8): Result.002 file - promoters60/1380738
ctgacaag

SEQ ID NO: 108051 - DNA, 7 bp, Unknown
  misc_feature (1)..( 7): Result.002 file - promoters60/1380738
atttaaa

SEQ ID NO: 108052 - DNA, 7 bp, Unknown
  misc_feature (1)..( 7): Result.002 file - promoters60/1380738
attaaaa

SEQ ID NO: 108053 - DNA, 6 bp, Unknown
  misc_feature (1)..( 6): Result.002 file - promoters60/1380738
aaaccc

SEQ ID NO: 108054 - DNA, 6 bp, Unknown
  misc_feature (1)..( 6): Result.002 file - promoters60/1380738
aaaccc

SEQ ID NO: 108055 - DNA, 7 bp, Unknown
  misc_feature (1)..( 7): Result.002 file - promoters60/1380797
taaattt

SEQ ID NO: 108056 - DNA, 7 bp, Unknown
  misc_feature (1)..( 7): Result.002 file - promoters60/1380797
taaattt

SEQ ID NO: 108057 - DNA, 7 bp, Unknown
  misc_feature (1)..( 7): Result.002 file - promoters60/1380797
taaaaat

SEQ ID NO: 108058 - DNA, 7 bp, Unknown
  misc_feature (1)..( 7): Result.002 file - promoters60/1380797
taataat

SEQ ID NO: 108059 - DNA, 7 bp, Unknown
  misc_feature (1)..( 7): Result.002 file - promoters60/1380797
tatcatt

SEQ ID NO: 108060 - DNA, 7 bp, Unknown
  misc_feature (1)..( 7): Result.002 file - promoters60/1380797
tatgatt

SEQ ID NO: 108061 - DNA, 8 bp, Unknown
  misc_feature (1)..( 8): Result.002 file - promoters60/1380797
tctgatta

SEQ ID NO: 108062 - DNA, 8 bp, Unknown
  misc_feature (1)..( 8): Result.002 file - promoters60/1380797
tctcatta

SEQ ID NO: 108063 - DNA, 8 bp, Unknown
  misc_feature (1)..( 8): Result.002 file - promoters60/1380797
aaaaaata

SEQ ID NO: 108064 - DNA, 8 bp, Unknown
  misc_feature (1)..( 8): Result.002 file - promoters60/1380797
aaaacata

SEQ ID NO: 108065 - DNA, 7 bp, Unknown
  misc_feature (1)..( 7): Result.002 file - promoters60/1380797
ataatat

SEQ ID NO: 108066 - DNA, 7 bp, Unknown
  misc_feature (1)..( 7): Result.002 file - promoters60/1380797
atagtat

SEQ ID NO: 108067 - DNA, 7 bp, Unknown
  misc_feature (1)..( 7): Result.002 file - promoters60/1380797
atgtatt

SEQ ID NO: 108068 - DNA, 7 bp, Unknown
  misc_feature (1)..( 7): Result.002 file - promoters60/1380797
atgtatt

SEQ ID NO: 108069 - DNA, 8 bp, Unknown
  misc_feature (1)..( 8): Result.002 file - promoters60/1380797
taatgaat

SEQ ID NO: 108070 - DNA, 8 bp, Unknown
  misc_feature (1)..( 8): Result.002 file - promoters60/1380797
caatcaat

SEQ ID NO: 108071 - DNA, 8 bp, Unknown
  misc_feature (1)..( 8): Result.002 file - promoters60/1380797
taatgaat

SEQ ID NO: 108072 - DNA, 12 bp, Unknown
  misc_feature (1)..( 12): Result.002 file - promoters60/1380797
taataaaaaaag

SEQ ID NO: 108073 - DNA, 12 bp, Unknown
  misc_feature (1)..( 12): Result.002 file - promoters60/1380797
taatcaaaaaag

SEQ ID NO: 108074 - DNA, 7 bp, Unknown
  misc_feature (1)..( 7): Result.002 file - promoters60/1380797
aaatagt

SEQ ID NO: 108075 - DNA, 7 bp, Unknown
  misc_feature (1)..( 7): Result.002 file - promoters60/1380797
aaaaagt

SEQ ID NO: 108076 - DNA, 7 bp, Unknown
  misc_feature (1)..( 7): Result.002 file - promoters60/1380797
aaacata

SEQ ID NO: 108077 - DNA, 6 bp, Unknown
  misc_feature (1)..( 6): Result.002 file - promoters60/1380797
tataaa

SEQ ID NO: 108078 - DNA, 6 bp, Unknown
  misc_feature (1)..( 6): Result.002 file - promoters60/1380797
tataaa

SEQ ID NO: 108079 - DNA, 7 bp, Unknown
  misc_feature (1)..( 7): Result.002 file - promoters60/1380797
tttggaa

SEQ ID NO: 108080 - DNA, 7 bp, Unknown
  misc_feature (1)..( 7): Result.002 file - promoters60/1380797
tttggaa

SEQ ID NO: 108081 - DNA, 7 bp, Unknown
  misc_feature (1)..( 7): Result.002 file - promoters60/1380797
aaaggtt

SEQ ID NO: 108082 - DNA, 7 bp, Unknown
  misc_feature (1)..( 7): Result.002 file - promoters60/1380797
aaatgtt

SEQ ID NO: 108083 - DNA, 8 bp, Unknown
  misc_feature (1)..( 8): Result.002 file - promoters60/1380797
tgtaaatg

SEQ ID NO: 108084 - DNA, 8 bp, Unknown
  misc_feature (1)..( 8): Result.002 file - promoters60/1380797
tgtaaatt

SEQ ID NO: 108085 - DNA, 8 bp, Unknown
  misc_feature (1)..( 8): Result.002 file - promoters60/1380797
actaaatt

SEQ ID NO: 108086 - DNA, 8 bp, Unknown
  misc_feature (1)..( 8): Result.002 file - promoters60/1380797
taaagaca

SEQ ID NO: 108087 - DNA, 8 bp, Unknown
  misc_feature (1)..( 8): Result.002 file - promoters60/1380797
taaaaaca

SEQ ID NO: 108088 - DNA, 7 bp, Unknown
  misc_feature (1)..( 7): Result.002 file - promoters60/1380797
caacaaa

SEQ ID NO: 108089 - DNA, 7 bp, Unknown
  misc_feature (1)..( 7): Result.002 file - promoters60/1380797
caagaaa

SEQ ID NO: 108090 - DNA, 8 bp, Unknown
  misc_feature (1)..( 8): Result.002 file - promoters60/1380797
aaagaacg

SEQ ID NO: 108091 - DNA, 8 bp, Unknown
  misc_feature (1)..( 8): Result.002 file - promoters60/1380797
aaataacg

SEQ ID NO: 108092 - DNA, 6 bp, Unknown
  misc_feature (1)..( 6): Result.002 file - promoters60/1380797
acaaat

SEQ ID NO: 108093 - DNA, 6 bp, Unknown
  misc_feature (1)..( 6): Result.002 file - promoters60/1380797
acaaat

SEQ ID NO: 108094 - DNA, 7 bp, Unknown
  misc_feature (1)..( 7): Result.002 file - promoters60/1380797
tttgttg

SEQ ID NO: 108095 - DNA, 7 bp, Unknown
  misc_feature (1)..( 7): Result.002 file - promoters60/1380797
tttcttg

SEQ ID NO: 108096 - DNA, 6 bp, Unknown
  misc_feature (1)..( 6): Result.002 file - promoters60/1380797
taacaa

SEQ ID NO: 108097 - DNA, 6 bp, Unknown
  misc_feature (1)..( 6): Result.002 file - promoters60/1380797
taacaa

SEQ ID NO: 108098 - DNA, 7 bp, Unknown
  misc_feature (1)..( 7): Result.002 file - promoters60/1380797
ttatgga

SEQ ID NO: 108099 - DNA, 7 bp, Unknown
  misc_feature (1)..( 7): Result.002 file - promoters60/1380797
ttatgga

SEQ ID NO: 108100 - DNA, 6 bp, Unknown
  misc_feature (1)..( 6): Result.002 file - promoters60/1380797
cgtttt

SEQ ID NO: 108101 - DNA, 6 bp, Unknown
  misc_feature (1)..( 6): Result.002 file - promoters60/1380797
cgtttt

SEQ ID NO: 108102 - DNA, 6 bp, Unknown
  misc_feature (1)..( 6): Result.002 file - promoters60/1380797
aaatta

SEQ ID NO: 108103 - DNA, 6 bp, Unknown
  misc_feature (1)..( 6): Result.002 file - promoters60/1380797
aaatta

SEQ ID NO: 108104 - DNA, 6 bp, Unknown
  misc_feature (1)..( 6): Result.002 file - promoters60/1380797
agaaaa

SEQ ID NO: 108105 - DNA, 6 bp, Unknown
  misc_feature (1)..( 6): Result.002 file - promoters60/1380797
agaaaa

SEQ ID NO: 108106 - DNA, 10 bp, Unknown
  misc_feature (1)..( 10): Result.002 file - promoters60/1380797
caaatgttta

SEQ ID NO: 108107 - DNA, 10 bp, Unknown
  misc_feature (1)..( 10): Result.002 file - promoters60/1380797
caaatggtta

SEQ ID NO: 108108 - DNA, 9 bp, Unknown
  misc_feature (1)..( 9): Result.002 file - promoters60/1380947
tggggttat

SEQ ID NO: 108109 - DNA, 9 bp, Unknown
  misc_feature (1)..( 9): Result.002 file - promoters60/1380947
tggagtttt

SEQ ID NO: 108110 - DNA, 9 bp, Unknown
  misc_feature (1)..( 9): Result.002 file - promoters60/1380947
agggcttat

SEQ ID NO: 108111 - DNA, 7 bp, Unknown
  misc_feature (1)..( 7): Result.002 file - promoters60/1380947
atcactt

SEQ ID NO: 108112 - DNA, 7 bp, Unknown
  misc_feature (1)..( 7): Result.002 file - promoters60/1380947
atctctt

SEQ ID NO: 108113 - DNA, 6 bp, Unknown
  misc_feature (1)..( 6): Result.002 file - promoters60/1380947
tgaaaa

SEQ ID NO: 108114 - DNA, 6 bp, Unknown
  misc_feature (1)..( 6): Result.002 file - promoters60/1380947
tgaaaa

SEQ ID NO: 108115 - DNA, 8 bp, Unknown
  misc_feature (1)..( 8): Result.002 file - promoters60/1380947
aaaagcaa

SEQ ID NO: 108116 - DNA, 8 bp, Unknown
  misc_feature (1)..( 8): Result.002 file - promoters60/1380947
aaaaacaa

SEQ ID NO: 108117 - DNA, 7 bp, Unknown
  misc_feature (1)..( 7): Result.002 file - promoters60/1380947
aataaca

SEQ ID NO: 108118 - DNA, 7 bp, Unknown
  misc_feature (1)..( 7): Result.002 file - promoters60/1380947
aataaca

SEQ ID NO: 108119 - DNA, 6 bp, Unknown
  misc_feature (1)..( 6): Result.002 file - promoters60/1380947
ttcttc

SEQ ID NO: 108120 - DNA, 6 bp, Unknown
  misc_feature (1)..( 6): Result.002 file - promoters60/1380947
ttcttc

SEQ ID NO: 108121 - DNA, 8 bp, Unknown
  misc_feature (1)..( 8): Result.002 file - promoters60/1380947
ttaatact

SEQ ID NO: 108122 - DNA, 8 bp, Unknown
  misc_feature (1)..( 8): Result.002 file - promoters60/1380947
ttattact

SEQ ID NO: 108123 - DNA, 6 bp, Unknown
  misc_feature (1)..( 6): Result.002 file - promoters60/1380947
aaatat

SEQ ID NO: 108124 - DNA, 6 bp, Unknown
  misc_feature (1)..( 6): Result.002 file - promoters60/1380947
aaatat

SEQ ID NO: 108125 - DNA, 7 bp, Unknown
  misc_feature (1)..( 7): Result.002 file - promoters60/1380947
tattaaa

SEQ ID NO: 108126 - DNA, 7 bp, Unknown
  misc_feature (1)..( 7): Result.002 file - promoters60/1380947
tattaaa

SEQ ID NO: 108127 - DNA, 7 bp, Unknown
  misc_feature (1)..( 7): Result.002 file - promoters60/1380947
gttaatt

SEQ ID NO: 108128 - DNA, 7 bp, Unknown
  misc_feature (1)..( 7): Result.002 file - promoters60/1380947
gttaatt

SEQ ID NO: 108129 - DNA, 7 bp, Unknown
  misc_feature (1)..( 7): Result.002 file - promoters60/1380947
aaaaaca

SEQ ID NO: 108130 - DNA, 7 bp, Unknown
  misc_feature (1)..( 7): Result.002 file - promoters60/1380947
aaacaca

SEQ ID NO: 108131 - DNA, 8 bp, Unknown
  misc_feature (1)..( 8): Result.002 file - promoters60/1380947
tattacaa

SEQ ID NO: 108132 - DNA, 8 bp, Unknown
  misc_feature (1)..( 8): Result.002 file - promoters60/1380947
tataacaa

SEQ ID NO: 108133 - DNA, 7 bp, Unknown
  misc_feature (1)..( 7): Result.002 file - promoters60/1380947
aactctt

SEQ ID NO: 108134 - DNA, 7 bp, Unknown
  misc_feature (1)..( 7): Result.002 file - promoters60/1380947
aacactt

SEQ ID NO: 108135 - DNA, 6 bp, Unknown
  misc_feature (1)..( 6): Result.002 file - promoters60/1380947
atgtct

SEQ ID NO: 108136 - DNA, 6 bp, Unknown
  misc_feature (1)..( 6): Result.002 file - promoters60/1380947
atgtct

SEQ ID NO: 108137 - DNA, 7 bp, Unknown
  misc_feature (1)..( 7): Result.002 file - promoters60/1380947
ttggaga

SEQ ID NO: 108138 - DNA, 7 bp, Unknown
  misc_feature (1)..( 7): Result.002 file - promoters60/1380947
ttggaga

SEQ ID NO: 108139 - DNA, 6 bp, Unknown
  misc_feature (1)..( 6): Result.002 file - promoters60/1380947
gaagat

SEQ ID NO: 108140 - DNA, 6 bp, Unknown
  misc_feature (1)..( 6): Result.002 file - promoters60/1380947
gaagat

SEQ ID NO: 108141 - DNA, 6 bp, Unknown
  misc_feature (1)..( 6): Result.002 file - promoters60/1380947
gatcga

SEQ ID NO: 108142 - DNA, 6 bp, Unknown
  misc_feature (1)..( 6): Result.002 file - promoters60/1380947
gatcga

SEQ ID NO: 108143 - DNA, 6 bp, Unknown
  misc_feature (1)..( 6): Result.002 file - promoters60/1380947
aaatgc

SEQ ID NO: 108144 - DNA, 6 bp, Unknown
  misc_feature (1)..( 6): Result.002 file - promoters60/1380947
aaatgc

SEQ ID NO: 108145 - DNA, 8 bp, Unknown
  misc_feature (1)..( 8): Result.002 file - promoters60/1380947
ggatttgt

SEQ ID NO: 108146 - DNA, 8 bp, Unknown
  misc_feature (1)..( 8): Result.002 file - promoters60/1380947
ggacttgt

SEQ ID NO: 108147 - DNA, 7 bp, Unknown
  misc_feature (1)..( 7): Result.002 file - promoters60/1380963
atatata

SEQ ID NO: 108148 - DNA, 7 bp, Unknown
  misc_feature (1)..( 7): Result.002 file - promoters60/1380963
atatata

SEQ ID NO: 108149 - DNA, 7 bp, Unknown
  misc_feature (1)..( 7): Result.002 file - promoters60/1380963
atatatc

SEQ ID NO: 108150 - DNA, 7 bp, Unknown
  misc_feature (1)..( 7): Result.002 file - promoters60/1380963
tgggtct

SEQ ID NO: 108151 - DNA, 7 bp, Unknown
  misc_feature (1)..( 7): Result.002 file - promoters60/1380963
tggttct

SEQ ID NO: 108152 - DNA, 10 bp, Unknown
  misc_feature (1)..( 10): Result.002 file - promoters60/1380963
tataccttta

SEQ ID NO: 108153 - DNA, 10 bp, Unknown
  misc_feature (1)..( 10): Result.002 file - promoters60/1380963
tatactttta

SEQ ID NO: 108154 - DNA, 10 bp, Unknown
  misc_feature (1)..( 10): Result.002 file - promoters60/1380963
tattctttac

SEQ ID NO: 108155 - DNA, 7 bp, Unknown
  misc_feature (1)..( 7): Result.002 file - promoters60/1380963
accaatt

SEQ ID NO: 108156 - DNA, 7 bp, Unknown
  misc_feature (1)..( 7): Result.002 file - promoters60/1380963
accaatt

SEQ ID NO: 108157 - DNA, 9 bp, Unknown
  misc_feature (1)..( 9): Result.002 file - promoters60/1380963
tatataaca

SEQ ID NO: 108158 - DNA, 9 bp, Unknown
  misc_feature (1)..( 9): Result.002 file - promoters60/1380963
tatataaat

SEQ ID NO: 108159 - DNA, 9 bp, Unknown
  misc_feature (1)..( 9): Result.002 file - promoters60/1380963
aatagaaat

SEQ ID NO: 108160 - DNA, 6 bp, Unknown
  misc_feature (1)..( 6): Result.002 file - promoters60/1380963
taaaat

SEQ ID NO: 108161 - DNA, 6 bp, Unknown
  misc_feature (1)..( 6): Result.002 file - promoters60/1380963
taaaat

SEQ ID NO: 108162 - DNA, 7 bp, Unknown
  misc_feature (1)..( 7): Result.002 file - promoters60/1380963
aatttta

SEQ ID NO: 108163 - DNA, 7 bp, Unknown
  misc_feature (1)..( 7): Result.002 file - promoters60/1380963
aatttta

SEQ ID NO: 108164 - DNA, 6 bp, Unknown
  misc_feature (1)..( 6): Result.002 file - promoters60/1380963
atttct

SEQ ID NO: 108165 - DNA, 6 bp, Unknown
  misc_feature (1)..( 6): Result.002 file - promoters60/1380963
atttct

SEQ ID NO: 108166 - DNA, 6 bp, Unknown
  misc_feature (1)..( 6): Result.002 file - promoters60/1380963
taatgt

SEQ ID NO: 108167 - DNA, 6 bp, Unknown
  misc_feature (1)..( 6): Result.002 file - promoters60/1380963
taatgt

SEQ ID NO: 108168 - DNA, 6 bp, Unknown
  misc_feature (1)..( 6): Result.002 file - promoters60/1380963
tatata

SEQ ID NO: 108169 - DNA, 6 bp, Unknown
  misc_feature (1)..( 6): Result.002 file - promoters60/1380963
tatata

SEQ ID NO: 108170 - DNA, 7 bp, Unknown
  misc_feature (1)..( 7): Result.002 file - promoters60/1380963
aagaaaa

SEQ ID NO: 108171 - DNA, 7 bp, Unknown
  misc_feature (1)..( 7): Result.002 file - promoters60/1380963
aagaaaa

SEQ ID NO: 108172 - DNA, 7 bp, Unknown
  misc_feature (1)..( 7): Result.002 file - promoters60/1380963
cagaaaa

SEQ ID NO: 108173 - DNA, 7 bp, Unknown
  misc_feature (1)..( 7): Result.002 file - promoters60/1380963
atctttt

SEQ ID NO: 108174 - DNA, 7 bp, Unknown
  misc_feature (1)..( 7): Result.002 file - promoters60/1380963
atctttt

SEQ ID NO: 108175 - DNA, 9 bp, Unknown
  misc_feature (1)..( 9): Result.002 file - promoters60/1380963
tttacggtt

SEQ ID NO: 108176 - DNA, 9 bp, Unknown
  misc_feature (1)..( 9): Result.002 file - promoters60/1380963
tttaaggtt

SEQ ID NO: 108177 - DNA, 7 bp, Unknown
  misc_feature (1)..( 7): Result.002 file - promoters60/1380963
tatttgt

SEQ ID NO: 108178 - DNA, 7 bp, Unknown
  misc_feature (1)..( 7): Result.002 file - promoters60/1380963
tatatgt

SEQ ID NO: 108179 - DNA, 7 bp, Unknown
  misc_feature (1)..( 7): Result.002 file - promoters60/1380963
taatatt

SEQ ID NO: 108180 - DNA, 7 bp, Unknown
  misc_feature (1)..( 7): Result.002 file - promoters60/1380963
taaaatt

SEQ ID NO: 108181 - DNA, 8 bp, Unknown
  misc_feature (1)..( 8): Result.002 file - promoters60/1380963
ttatttta

SEQ ID NO: 108182 - DNA, 8 bp, Unknown
  misc_feature (1)..( 8): Result.002 file - promoters60/1380963
ttagttta

SEQ ID NO: 108183 - DNA, 6 bp, Unknown
  misc_feature (1)..( 6): Result.002 file - promoters60/1380963
ttaatg

SEQ ID NO: 108184 - DNA, 6 bp, Unknown
  misc_feature (1)..( 6): Result.002 file - promoters60/1380963
ttaatg

SEQ ID NO: 108185 - DNA, 8 bp, Unknown
  misc_feature (1)..( 8): Result.002 file - promoters60/1380963
tattatat

SEQ ID NO: 108186 - DNA, 8 bp, Unknown
  misc_feature (1)..( 8): Result.002 file - promoters60/1380963
tatcatat

SEQ ID NO: 108187 - DNA, 8 bp, Unknown
  misc_feature (1)..( 8): Result.002 file - promoters60/1380963
tttactgt

SEQ ID NO: 108188 - DNA, 8 bp, Unknown
  misc_feature (1)..( 8): Result.002 file - promoters60/1380963
tttactgt

SEQ ID NO: 108189 - DNA, 6 bp, Unknown
  misc_feature (1)..( 6): Result.002 file - promoters60/1380963
aaaaag

SEQ ID NO: 108190 - DNA, 6 bp, Unknown
  misc_feature (1)..( 6): Result.002 file - promoters60/1380963
aaaaag

SEQ ID NO: 108191 - DNA, 7 bp, Unknown
  misc_feature (1)..( 7): Result.002 file - promoters60/1380963
gtagaat

SEQ ID NO: 108192 - DNA, 7 bp, Unknown
  misc_feature (1)..( 7): Result.002 file - promoters60/1380963
gtacaat

SEQ ID NO: 108193 - DNA, 8 bp, Unknown
  misc_feature (1)..( 8): Result.002 file - promoters60/1380963
ctttacaa

SEQ ID NO: 108194 - DNA, 8 bp, Unknown
  misc_feature (1)..( 8): Result.002 file - promoters60/1380963
cttaacaa

SEQ ID NO: 108195 - DNA, 6 bp, Unknown
  misc_feature (1)..( 6): Result.002 file - promoters60/1380963
tatata

SEQ ID NO: 108196 - DNA, 6 bp, Unknown
  misc_feature (1)..( 6): Result.002 file - promoters60/1380963
tatata

SEQ ID NO: 108197 - DNA, 7 bp, Unknown
  misc_feature (1)..( 7): Result.002 file - promoters60/1380963
aaaagaa

SEQ ID NO: 108198 - DNA, 7 bp, Unknown
  misc_feature (1)..( 7): Result.002 file - promoters60/1380963
aaacgaa

SEQ ID NO: 108199 - DNA, 6 bp, Unknown
  misc_feature (1)..( 6): Result.002 file - promoters60/1380963
gattag

SEQ ID NO: 108200 - DNA, 6 bp, Unknown
  misc_feature (1)..( 6): Result.002 file - promoters60/1380963
gattag

SEQ ID NO: 108201 - DNA, 7 bp, Unknown
  misc_feature (1)..( 7): Result.002 file - promoters60/1380963
attatta

SEQ ID NO: 108202 - DNA, 7 bp, Unknown
  misc_feature (1)..( 7): Result.002 file - promoters60/1380963
attctta

SEQ ID NO: 108203 - DNA, 12 bp, Unknown
  misc_feature (1)..( 12): Result.002 file - promoters60/1381002
actacaattaag

SEQ ID NO: 108204 - DNA, 12 bp, Unknown
  misc_feature (1)..( 12): Result.002 file - promoters60/1381002
actaaaataaag

SEQ ID NO: 108205 - DNA, 12 bp, Unknown
  misc_feature (1)..( 12): Result.002 file - promoters60/1381002
cattaaataata

SEQ ID NO: 108206 - DNA, 12 bp, Unknown
  misc_feature (1)..( 12): Result.002 file - promoters60/1381002
aataaaatctag

SEQ ID NO: 108207 - DNA, 12 bp, Unknown
  misc_feature (1)..( 12): Result.002 file - promoters60/1381002
attaaaattgtc

SEQ ID NO: 108208 - DNA, 12 bp, Unknown
  misc_feature (1)..( 12): Result.002 file - promoters60/1381002
gagaaaaaaaag

SEQ ID NO: 108209 - DNA, 16 bp, Unknown
  misc_feature (1)..( 16): Result.002 file - promoters60/1381002
tcaaaaactttcataa

SEQ ID NO: 108210 - DNA, 16 bp, Unknown
  misc_feature (1)..( 16): Result.002 file - promoters60/1381002
tattaaattttaattg

SEQ ID NO: 108211 - DNA, 16 bp, Unknown
  misc_feature (1)..( 16): Result.002 file - promoters60/1381002
catgttactttcttaa

SEQ ID NO: 108212 - DNA, 16 bp, Unknown
  misc_feature (1)..( 16): Result.002 file - promoters60/1381002
tatcaaattgacttgt

SEQ ID NO: 108213 - DNA, 16 bp, Unknown
  misc_feature (1)..( 16): Result.002 file - promoters60/1381002
attcttacttgttcta

SEQ ID NO: 108214 - DNA, 9 bp, Unknown
  misc_feature (1)..( 9): Result.002 file - promoters60/1381033
atacatatg

SEQ ID NO: 108215 - DNA, 9 bp, Unknown
  misc_feature (1)..( 9): Result.002 file - promoters60/1381033
ataaatatg

SEQ ID NO: 108216 - DNA, 8 bp, Unknown
  misc_feature (1)..( 8): Result.002 file - promoters60/1381033
atatgaaa

SEQ ID NO: 108217 - DNA, 8 bp, Unknown
  misc_feature (1)..( 8): Result.002 file - promoters60/1381033
atattaaa

SEQ ID NO: 108218 - DNA, 9 bp, Unknown
  misc_feature (1)..( 9): Result.002 file - promoters60/1381033
atatcattc

SEQ ID NO: 108219 - DNA, 9 bp, Unknown
  misc_feature (1)..( 9): Result.002 file - promoters60/1381033
atatctttc

SEQ ID NO: 108220 - DNA, 7 bp, Unknown
  misc_feature (1)..( 7): Result.002 file - promoters60/1381033
ttttttc

SEQ ID NO: 108221 - DNA, 7 bp, Unknown
  misc_feature (1)..( 7): Result.002 file - promoters60/1381033
tttattc

SEQ ID NO: 108222 - DNA, 6 bp, Unknown
  misc_feature (1)..( 6): Result.002 file - promoters60/1381033
atgacc

SEQ ID NO: 108223 - DNA, 6 bp, Unknown
  misc_feature (1)..( 6): Result.002 file - promoters60/1381033
atgacc

SEQ ID NO: 108224 - DNA, 11 bp, Unknown
  misc_feature (1)..( 11): Result.002 file - promoters60/1381033
agataatgatt

SEQ ID NO: 108225 - DNA, 11 bp, Unknown
  misc_feature (1)..( 11): Result.002 file - promoters60/1381033
agataataatt

SEQ ID NO: 108226 - DNA, 11 bp, Unknown
  misc_feature (1)..( 11): Result.002 file - promoters60/1381033
caataatgatt

SEQ ID NO: 108227 - DNA, 8 bp, Unknown
  misc_feature (1)..( 8): Result.002 file - promoters60/1381033
gaaaaata

SEQ ID NO: 108228 - DNA, 8 bp, Unknown
  misc_feature (1)..( 8): Result.002 file - promoters60/1381033
gaaacata

SEQ ID NO: 108229 - DNA, 8 bp, Unknown
  misc_feature (1)..( 8): Result.002 file - promoters60/1381033
aacaaaca

SEQ ID NO: 108230 - DNA, 8 bp, Unknown
  misc_feature (1)..( 8): Result.002 file - promoters60/1381033
aacacaca

SEQ ID NO: 108231 - DNA, 8 bp, Unknown
  misc_feature (1)..( 8): Result.002 file - promoters60/1381033
cccacaca

SEQ ID NO: 108232 - DNA, 7 bp, Unknown
  misc_feature (1)..( 7): Result.002 file - promoters60/1381033
aaacaaa

SEQ ID NO: 108233 - DNA, 7 bp, Unknown
  misc_feature (1)..( 7): Result.002 file - promoters60/1381033
aaaaaaa

SEQ ID NO: 108234 - DNA, 6 bp, Unknown
  misc_feature (1)..( 6): Result.002 file - promoters60/1381033
aaatta

SEQ ID NO: 108235 - DNA, 6 bp, Unknown
  misc_feature (1)..( 6): Result.002 file - promoters60/1381033
aaatta

SEQ ID NO: 108236 - DNA, 8 bp, Unknown
  misc_feature (1)..( 8): Result.002 file - promoters60/1381033
actctaaa

SEQ ID NO: 108237 - DNA, 8 bp, Unknown
  misc_feature (1)..( 8): Result.002 file - promoters60/1381033
actttaaa

SEQ ID NO: 108238 - DNA, 6 bp, Unknown
  misc_feature (1)..( 6): Result.002 file - promoters60/1381033
tatgtg

SEQ ID NO: 108239 - DNA, 6 bp, Unknown
  misc_feature (1)..( 6): Result.002 file - promoters60/1381033
tatgtg

SEQ ID NO: 108240 - DNA, 11 bp, Unknown
  misc_feature (1)..( 11): Result.002 file - promoters60/1381033
ctttttttttt

SEQ ID NO: 108241 - DNA, 11 bp, Unknown
  misc_feature (1)..( 11): Result.002 file - promoters60/1381033
ctttttttttt

SEQ ID NO: 108242 - DNA, 7 bp, Unknown
  misc_feature (1)..( 7): Result.002 file - promoters60/1381033
cacaaaa

SEQ ID NO: 108243 - DNA, 7 bp, Unknown
  misc_feature (1)..( 7): Result.002 file - promoters60/1381033
cacaaaa

SEQ ID NO: 108244 - DNA, 6 bp, Unknown
  misc_feature (1)..( 6): Result.002 file - promoters60/1381195
tattct

SEQ ID NO: 108245 - DNA, 6 bp, Unknown
  misc_feature (1)..( 6): Result.002 file - promoters60/1381195
tattct

SEQ ID NO: 108246 - DNA, 7 bp, Unknown
  misc_feature (1)..( 7): Result.002 file - promoters60/1381195
taagtgg

SEQ ID NO: 108247 - DNA, 7 bp, Unknown
  misc_feature (1)..( 7): Result.002 file - promoters60/1381195
taattgg

SEQ ID NO: 108248 - DNA, 7 bp, Unknown
  misc_feature (1)..( 7): Result.002 file - promoters60/1381195
taaatgg

SEQ ID NO: 108249 - DNA, 8 bp, Unknown
  misc_feature (1)..( 8): Result.002 file - promoters60/1381195
atatgtgt

SEQ ID NO: 108250 - DNA, 8 bp, Unknown
  misc_feature (1)..( 8): Result.002 file - promoters60/1381195
atatatgt

SEQ ID NO: 108251 - DNA, 8 bp, Unknown
  misc_feature (1)..( 8): Result.002 file - promoters60/1381195
tcaatatt

SEQ ID NO: 108252 - DNA, 8 bp, Unknown
  misc_feature (1)..( 8): Result.002 file - promoters60/1381195
tcactatt

SEQ ID NO: 108253 - DNA, 7 bp, Unknown
  misc_feature (1)..( 7): Result.002 file - promoters60/1381195
aacatta

SEQ ID NO: 108254 - DNA, 7 bp, Unknown
  misc_feature (1)..( 7): Result.002 file - promoters60/1381195
aacttta

SEQ ID NO: 108255 - DNA, 6 bp, Unknown
  misc_feature (1)..( 6): Result.002 file - promoters60/1381195
ttttgt

SEQ ID NO: 108256 - DNA, 6 bp, Unknown
  misc_feature (1)..( 6): Result.002 file - promoters60/1381195
ttttgt

SEQ ID NO: 108257 - DNA, 6 bp, Unknown
  misc_feature (1)..( 6): Result.002 file - promoters60/1381195
gcttaa

SEQ ID NO: 108258 - DNA, 6 bp, Unknown
  misc_feature (1)..( 6): Result.002 file - promoters60/1381195
gcttaa

SEQ ID NO: 108259 - DNA, 7 bp, Unknown
  misc_feature (1)..( 7): Result.002 file - promoters60/1381195
aacacaa

SEQ ID NO: 108260 - DNA, 7 bp, Unknown
  misc_feature (1)..( 7): Result.002 file - promoters60/1381195
aactcaa

SEQ ID NO: 108261 - DNA, 7 bp, Unknown
  misc_feature (1)..( 7): Result.002 file - promoters60/1381195
attgata

SEQ ID NO: 108262 - DNA, 7 bp, Unknown
  misc_feature (1)..( 7): Result.002 file - promoters60/1381195
atttata

SEQ ID NO: 108263 - DNA, 6 bp, Unknown
  misc_feature (1)..( 6): Result.002 file - promoters60/1381195
taatta

SEQ ID NO: 108264 - DNA, 6 bp, Unknown
  misc_feature (1)..( 6): Result.002 file - promoters60/1381195
taatta

SEQ ID NO: 108265 - DNA, 8 bp, Unknown
  misc_feature (1)..( 8): Result.002 file - promoters60/1381195
ttaactac

SEQ ID NO: 108266 - DNA, 8 bp, Unknown
  misc_feature (1)..( 8): Result.002 file - promoters60/1381195
ttaactac

SEQ ID NO: 108267 - DNA, 6 bp, Unknown
  misc_feature (1)..( 6): Result.002 file - promoters60/1381195
gtaaat

SEQ ID NO: 108268 - DNA, 6 bp, Unknown
  misc_feature (1)..( 6): Result.002 file - promoters60/1381195
gtaaat

SEQ ID NO: 108269 - DNA, 8 bp, Unknown
  misc_feature (1)..( 8): Result.002 file - promoters60/1381195
tttactat

SEQ ID NO: 108270 - DNA, 8 bp, Unknown
  misc_feature (1)..( 8): Result.002 file - promoters60/1381195
tttattat

SEQ ID NO: 108271 - DNA, 7 bp, Unknown
  misc_feature (1)..( 7): Result.002 file - promoters60/1381195
ctttatt

SEQ ID NO: 108272 - DNA, 7 bp, Unknown
  misc_feature (1)..( 7): Result.002 file - promoters60/1381195
ctttatt

SEQ ID NO: 108273 - DNA, 10 bp, Unknown
  misc_feature (1)..( 10): Result.002 file - promoters60/1381195
tgtctagatt

SEQ ID NO: 108274 - DNA, 10 bp, Unknown
  misc_feature (1)..( 10): Result.002 file - promoters60/1381195
tgtttagatt

SEQ ID NO: 108275 - DNA, 6 bp, Unknown
  misc_feature (1)..( 6): Result.002 file - promoters60/1381195
tatagt

SEQ ID NO: 108276 - DNA, 6 bp, Unknown
  misc_feature (1)..( 6): Result.002 file - promoters60/1381195
tatagt

SEQ ID NO: 108277 - DNA, 7 bp, Unknown
  misc_feature (1)..( 7): Result.002 file - promoters60/1381195
attgtaa

SEQ ID NO: 108278 - DNA, 7 bp, Unknown
  misc_feature (1)..( 7): Result.002 file - promoters60/1381195
attgtaa

SEQ ID NO: 108279 - DNA, 6 bp, Unknown
  misc_feature (1)..( 6): Result.002 file - promoters60/1381195
tgattc

SEQ ID NO: 108280 - DNA, 6 bp, Unknown
  misc_feature (1)..( 6): Result.002 file - promoters60/1381195
tgattc

SEQ ID NO: 108281 - DNA, 11 bp, Unknown
  misc_feature (1)..( 11): Result.002 file - promoters60/1381457
ggcttttgacc

SEQ ID NO: 108282 - DNA, 11 bp, Unknown
  misc_feature (1)..( 11): Result.002 file - promoters60/1381457
ggcttatgaat

SEQ ID NO: 108283 - DNA, 11 bp, Unknown
  misc_feature (1)..( 11): Result.002 file - promoters60/1381457
agattttgatt

SEQ ID NO: 108284 - DNA, 11 bp, Unknown
  misc_feature (1)..( 11): Result.002 file - promoters60/1381457
aggttttgaaa

SEQ ID NO: 108285 - DNA, 11 bp, Unknown
  misc_feature (1)..( 11): Result.002 file - promoters60/1381457
gtcttatgtgg

SEQ ID NO: 108286 - DNA, 11 bp, Unknown
  misc_feature (1)..( 11): Result.002 file - promoters60/1381457
taagtataaat

SEQ ID NO: 108287 - DNA, 11 bp, Unknown
  misc_feature (1)..( 11): Result.002 file - promoters60/1381457
tctgtttcatt

SEQ ID NO: 108288 - DNA, 9 bp, Unknown
  misc_feature (1)..( 9): Result.002 file - promoters60/1381494
tgttttaat

SEQ ID NO: 108289 - DNA, 9 bp, Unknown
  misc_feature (1)..( 9): Result.002 file - promoters60/1381494
tgtgttaat

SEQ ID NO: 108290 - DNA, 9 bp, Unknown
  misc_feature (1)..( 9): Result.002 file - promoters60/1381494
aaatggttt

SEQ ID NO: 108291 - DNA, 9 bp, Unknown
  misc_feature (1)..( 9): Result.002 file - promoters60/1381494
aaatgcttt

SEQ ID NO: 108292 - DNA, 7 bp, Unknown
  misc_feature (1)..( 7): Result.002 file - promoters60/1381494
ttctttg

SEQ ID NO: 108293 - DNA, 7 bp, Unknown
  misc_feature (1)..( 7): Result.002 file - promoters60/1381494
ttctttg

SEQ ID NO: 108294 - DNA, 6 bp, Unknown
  misc_feature (1)..( 6): Result.002 file - promoters60/1381494
atttat

SEQ ID NO: 108295 - DNA, 6 bp, Unknown
  misc_feature (1)..( 6): Result.002 file - promoters60/1381494
atttat

SEQ ID NO: 108296 - DNA, 8 bp, Unknown
  misc_feature (1)..( 8): Result.002 file - promoters60/1381494
ggggtaaa

SEQ ID NO: 108297 - DNA, 8 bp, Unknown
  misc_feature (1)..( 8): Result.002 file - promoters60/1381494
ggggtaaa

SEQ ID NO: 108298 - DNA, 7 bp, Unknown
  misc_feature (1)..( 7): Result.002 file - promoters60/1381494
ttatatc

SEQ ID NO: 108299 - DNA, 7 bp, Unknown
  misc_feature (1)..( 7): Result.002 file - promoters60/1381494
ttagatc

SEQ ID NO: 108300 - DNA, 8 bp, Unknown
  misc_feature (1)..( 8): Result.002 file - promoters60/1381494
aatccctg

SEQ ID NO: 108301 - DNA, 8 bp, Unknown
  misc_feature (1)..( 8): Result.002 file - promoters60/1381494
aatctctg

SEQ ID NO: 108302 - DNA, 6 bp, Unknown
  misc_feature (1)..( 6): Result.002 file - promoters60/1381494
tccaaa

SEQ ID NO: 108303 - DNA, 6 bp, Unknown
  misc_feature (1)..( 6): Result.002 file - promoters60/1381494
tccaaa

SEQ ID NO: 108304 - DNA, 8 bp, Unknown
  misc_feature (1)..( 8): Result.002 file - promoters60/1381494
tccataga

SEQ ID NO: 108305 - DNA, 8 bp, Unknown
  misc_feature (1)..( 8): Result.002 file - promoters60/1381494
tccaaaga

SEQ ID NO: 108306 - DNA, 9 bp, Unknown
  misc_feature (1)..( 9): Result.002 file - promoters60/1381494
aatttatgg

SEQ ID NO: 108307 - DNA, 9 bp, Unknown
  misc_feature (1)..( 9): Result.002 file - promoters60/1381494
aattaatgg

SEQ ID NO: 108308 - DNA, 7 bp, Unknown
  misc_feature (1)..( 7): Result.002 file - promoters60/1381494
attttca

SEQ ID NO: 108309 - DNA, 7 bp, Unknown
  misc_feature (1)..( 7): Result.002 file - promoters60/1381494
attgtca

SEQ ID NO: 108310 - DNA, 6 bp, Unknown
  misc_feature (1)..( 6): Result.002 file - promoters60/1381494
agtaaa

SEQ ID NO: 108311 - DNA, 6 bp, Unknown
  misc_feature (1)..( 6): Result.002 file - promoters60/1381494
agtaaa

SEQ ID NO: 108312 - DNA, 7 bp, Unknown
  misc_feature (1)..( 7): Result.002 file - promoters60/1381494
aatcggg

SEQ ID NO: 108313 - DNA, 7 bp, Unknown
  misc_feature (1)..( 7): Result.002 file - promoters60/1381494
aattggg

SEQ ID NO: 108314 - DNA, 8 bp, Unknown
  misc_feature (1)..( 8): Result.002 file - promoters60/1381494
gaaagaaa

SEQ ID NO: 108315 - DNA, 8 bp, Unknown
  misc_feature (1)..( 8): Result.002 file - promoters60/1381494
gaaacaaa

SEQ ID NO: 108316 - DNA, 10 bp, Unknown
  misc_feature (1)..( 10): Result.002 file - promoters60/1381494
ggaaaagaaa

SEQ ID NO: 108317 - DNA, 10 bp, Unknown
  misc_feature (1)..( 10): Result.002 file - promoters60/1381494
ggaaatgaaa

SEQ ID NO: 108318 - DNA, 7 bp, Unknown
  misc_feature (1)..( 7): Result.002 file - promoters60/1381494
cccacta

SEQ ID NO: 108319 - DNA, 7 bp, Unknown
  misc_feature (1)..( 7): Result.002 file - promoters60/1381494
cccacta

SEQ ID NO: 108320 - DNA, 9 bp, Unknown
  misc_feature (1)..( 9): Result.002 file - promoters60/1381494
aaagaaaag

SEQ ID NO: 108321 - DNA, 9 bp, Unknown
  misc_feature (1)..( 9): Result.002 file - promoters60/1381494
aaagtaaag

SEQ ID NO: 108322 - DNA, 7 bp, Unknown
  misc_feature (1)..( 7): Result.002 file - promoters60/1381494
gtatata

SEQ ID NO: 108323 - DNA, 7 bp, Unknown
  misc_feature (1)..( 7): Result.002 file - promoters60/1381494
gtatata

SEQ ID NO: 108324 - DNA, 8 bp, Unknown
  misc_feature (1)..( 8): Result.002 file - promoters60/1381537
ggattctt

SEQ ID NO: 108325 - DNA, 8 bp, Unknown
  misc_feature (1)..( 8): Result.002 file - promoters60/1381537
ggattctt

SEQ ID NO: 108326 - DNA, 8 bp, Unknown
  misc_feature (1)..( 8): Result.002 file - promoters60/1381537
agatggat

SEQ ID NO: 108327 - DNA, 8 bp, Unknown
  misc_feature (1)..( 8): Result.002 file - promoters60/1381537
agatagat

SEQ ID NO: 108328 - DNA, 7 bp, Unknown
  misc_feature (1)..( 7): Result.002 file - promoters60/1381537
catcttc

SEQ ID NO: 108329 - DNA, 7 bp, Unknown
  misc_feature (1)..( 7): Result.002 file - promoters60/1381537
cattttc

SEQ ID NO: 108330 - DNA, 7 bp, Unknown
  misc_feature (1)..( 7): Result.002 file - promoters60/1381537
tcatttt

SEQ ID NO: 108331 - DNA, 7 bp, Unknown
  misc_feature (1)..( 7): Result.002 file - promoters60/1381537
tcacttt

SEQ ID NO: 108332 - DNA, 10 bp, Unknown
  misc_feature (1)..( 10): Result.002 file - promoters60/1381537
aaaatccttt

SEQ ID NO: 108333 - DNA, 10 bp, Unknown
  misc_feature (1)..( 10): Result.002 file - promoters60/1381537
aaaatgcttt

SEQ ID NO: 108334 - DNA, 9 bp, Unknown
  misc_feature (1)..( 9): Result.002 file - promoters60/1381537
taaaacaaa

SEQ ID NO: 108335 - DNA, 9 bp, Unknown
  misc_feature (1)..( 9): Result.002 file - promoters60/1381537
caaaataaa

SEQ ID NO: 108336 - DNA, 9 bp, Unknown
  misc_feature (1)..( 9): Result.002 file - promoters60/1381537
taaaccaat

SEQ ID NO: 108337 - DNA, 7 bp, Unknown
  misc_feature (1)..( 7): Result.002 file - promoters60/1381537
gaaaaat

SEQ ID NO: 108338 - DNA, 7 bp, Unknown
  misc_feature (1)..( 7): Result.002 file - promoters60/1381537
gaagaat

SEQ ID NO: 108339 - DNA, 9 bp, Unknown
  misc_feature (1)..( 9): Result.002 file - promoters60/1381537
tcctcattt

SEQ ID NO: 108340 - DNA, 9 bp, Unknown
  misc_feature (1)..( 9): Result.002 file - promoters60/1381537
tcctaattt

SEQ ID NO: 108341 - DNA, 6 bp, Unknown
  misc_feature (1)..( 6): Result.002 file - promoters60/1381537
tttgtt

SEQ ID NO: 108342 - DNA, 6 bp, Unknown
  misc_feature (1)..( 6): Result.002 file - promoters60/1381537
tttgtt

SEQ ID NO: 108343 - DNA, 6 bp, Unknown
  misc_feature (1)..( 6): Result.002 file - promoters60/1381537
taaagg

SEQ ID NO: 108344 - DNA, 6 bp, Unknown
  misc_feature (1)..( 6): Result.002 file - promoters60/1381537
taaagg

SEQ ID NO: 108345 - DNA, 6 bp, Unknown
  misc_feature (1)..( 6): Result.002 file - promoters60/1381537
ttagat

SEQ ID NO: 108346 - DNA, 6 bp, Unknown
  misc_feature (1)..( 6): Result.002 file - promoters60/1381537
ttagat

SEQ ID NO: 108347 - DNA, 7 bp, Unknown
  misc_feature (1)..( 7): Result.002 file - promoters60/1381537
ggttgaa

SEQ ID NO: 108348 - DNA, 7 bp, Unknown
  misc_feature (1)..( 7): Result.002 file - promoters60/1381537
ggttgaa

SEQ ID NO: 108349 - DNA, 6 bp, Unknown
  misc_feature (1)..( 6): Result.002 file - promoters60/1381537
tttaat

SEQ ID NO: 108350 - DNA, 6 bp, Unknown
  misc_feature (1)..( 6): Result.002 file - promoters60/1381537
tttaat

SEQ ID NO: 108351 - DNA, 8 bp, Unknown
  misc_feature (1)..( 8): Result.002 file - promoters60/1381537
agaaaaaa

SEQ ID NO: 108352 - DNA, 8 bp, Unknown
  misc_feature (1)..( 8): Result.002 file - promoters60/1381537
agaaaaaa

SEQ ID NO: 108353 - DNA, 8 bp, Unknown
  misc_feature (1)..( 8): Result.002 file - promoters60/1381537
aaaataaa

SEQ ID NO: 108354 - DNA, 8 bp, Unknown
  misc_feature (1)..( 8): Result.002 file - promoters60/1381537
aaaaaaaa

SEQ ID NO: 108355 - DNA, 8 bp, Unknown
  misc_feature (1)..( 8): Result.002 file - promoters60/1381537
gcccatta

SEQ ID NO: 108356 - DNA, 8 bp, Unknown
  misc_feature (1)..( 8): Result.002 file - promoters60/1381537
gcccatta

SEQ ID NO: 108357 - DNA, 6 bp, Unknown
  misc_feature (1)..( 6): Result.002 file - promoters60/1381537
agtaaa

SEQ ID NO: 108358 - DNA, 6 bp, Unknown
  misc_feature (1)..( 6): Result.002 file - promoters60/1381537
agtaaa

SEQ ID NO: 108359 - DNA, 7 bp, Unknown
  misc_feature (1)..( 7): Result.002 file - promoters60/1381537
aatcggg

SEQ ID NO: 108360 - DNA, 7 bp, Unknown
  misc_feature (1)..( 7): Result.002 file - promoters60/1381537
aattggg

SEQ ID NO: 108361 - DNA, 8 bp, Unknown
  misc_feature (1)..( 8): Result.002 file - promoters60/1381537
gaaagaaa

SEQ ID NO: 108362 - DNA, 8 bp, Unknown
  misc_feature (1)..( 8): Result.002 file - promoters60/1381537
gaaacaaa

SEQ ID NO: 108363 - DNA, 10 bp, Unknown
  misc_feature (1)..( 10): Result.002 file - promoters60/1381537
ggaaaagaaa

SEQ ID NO: 108364 - DNA, 10 bp, Unknown
  misc_feature (1)..( 10): Result.002 file - promoters60/1381537
ggaaatgaaa

SEQ ID NO: 108365 - DNA, 7 bp, Unknown
  misc_feature (1)..( 7): Result.002 file - promoters60/1381537
cccacta

SEQ ID NO: 108366 - DNA, 7 bp, Unknown
  misc_feature (1)..( 7): Result.002 file - promoters60/1381537
cccacta

SEQ ID NO: 108367 - DNA, 9 bp, Unknown
  misc_feature (1)..( 9): Result.002 file - promoters60/1381537
aaagaaaag

SEQ ID NO: 108368 - DNA, 9 bp, Unknown
  misc_feature (1)..( 9): Result.002 file - promoters60/1381537
aaagtaaag

SEQ ID NO: 108369 - DNA, 7 bp, Unknown
  misc_feature (1)..( 7): Result.002 file - promoters60/1381537
gtatata

SEQ ID NO: 108370 - DNA, 7 bp, Unknown
  misc_feature (1)..( 7): Result.002 file - promoters60/1381537
gtatata

SEQ ID NO: 108371 - DNA, 8 bp, Unknown
  misc_feature (1)..( 8): Result.002 file - promoters60/1381563
tgaagaaa

SEQ ID NO: 108372 - DNA, 8 bp, Unknown
  misc_feature (1)..( 8): Result.002 file - promoters60/1381563
tgatgaat

SEQ ID NO: 108373 - DNA, 8 bp, Unknown
  misc_feature (1)..( 8): Result.002 file - promoters60/1381563
ggataaat

SEQ ID NO: 108374 - DNA, 8 bp, Unknown
  misc_feature (1)..( 8): Result.002 file - promoters60/1381563
agataaaa

SEQ ID NO: 108375 - DNA, 9 bp, Unknown
  misc_feature (1)..( 9): Result.002 file - promoters60/1381563
ttacaaaaa

SEQ ID NO: 108376 - DNA, 9 bp, Unknown
  misc_feature (1)..( 9): Result.002 file - promoters60/1381563
ttagaaaaa

SEQ ID NO: 108377 - DNA, 9 bp, Unknown
  misc_feature (1)..( 9): Result.002 file - promoters60/1381563
gtacaaact

SEQ ID NO: 108378 - DNA, 9 bp, Unknown
  misc_feature (1)..( 9): Result.002 file - promoters60/1381563
ttataaaac

SEQ ID NO: 108379 - DNA, 10 bp, Unknown
  misc_feature (1)..( 10): Result.002 file - promoters60/1381563
gaaagattgt

SEQ ID NO: 108380 - DNA, 10 bp, Unknown
  misc_feature (1)..( 10): Result.002 file - promoters60/1381563
taaagcttgg

SEQ ID NO: 108381 - DNA, 10 bp, Unknown
  misc_feature (1)..( 10): Result.002 file - promoters60/1381563
taaaaattta

SEQ ID NO: 108382 - DNA, 10 bp, Unknown
  misc_feature (1)..( 10): Result.002 file - promoters60/1381563
taaaaaggag

SEQ ID NO: 108383 - DNA, 10 bp, Unknown
  misc_feature (1)..( 10): Result.002 file - promoters60/1381563
taaaagttta

SEQ ID NO: 108384 - DNA, 9 bp, Unknown
  misc_feature (1)..( 9): Result.002 file - promoters60/1381563
tcccactaa

SEQ ID NO: 108385 - DNA, 9 bp, Unknown
  misc_feature (1)..( 9): Result.002 file - promoters60/1381563
aaccattaa

SEQ ID NO: 108386 - DNA, 9 bp, Unknown
  misc_feature (1)..( 9): Result.002 file - promoters60/1381563
aactattct

SEQ ID NO: 108387 - DNA, 9 bp, Unknown
  misc_feature (1)..( 9): Result.002 file - promoters60/1381563
gtccattag

SEQ ID NO: 108388 - DNA, 10 bp, Unknown
  misc_feature (1)..( 10): Result.002 file - promoters60/1381563
ttctttgaat

SEQ ID NO: 108389 - DNA, 10 bp, Unknown
  misc_feature (1)..( 10): Result.002 file - promoters60/1381563
atatttaaat

SEQ ID NO: 108390 - DNA, 10 bp, Unknown
  misc_feature (1)..( 10): Result.002 file - promoters60/1381563
tgatttttgg

SEQ ID NO: 108391 - DNA, 10 bp, Unknown
  misc_feature (1)..( 10): Result.002 file - promoters60/1381563
cactttaaaa

SEQ ID NO: 108392 - DNA, 9 bp, Unknown
  misc_feature (1)..( 9): Result.002 file - promoters60/1381566
cagaaaaac

SEQ ID NO: 108393 - DNA, 9 bp, Unknown
  misc_feature (1)..( 9): Result.002 file - promoters60/1381566
atcaaaaac

SEQ ID NO: 108394 - DNA, 9 bp, Unknown
  misc_feature (1)..( 9): Result.002 file - promoters60/1381566
tagagaaag

SEQ ID NO: 108395 - DNA, 9 bp, Unknown
  misc_feature (1)..( 9): Result.002 file - promoters60/1381566
tagagaagc

SEQ ID NO: 108396 - DNA, 7 bp, Unknown
  misc_feature (1)..( 7): Result.002 file - promoters60/1381615
acacagt

SEQ ID NO: 108397 - DNA, 7 bp, Unknown
  misc_feature (1)..( 7): Result.002 file - promoters60/1381615
acaaagt

SEQ ID NO: 108398 - DNA, 6 bp, Unknown
  misc_feature (1)..( 6): Result.002 file - promoters60/1381615
taacaa

SEQ ID NO: 108399 - DNA, 6 bp, Unknown
  misc_feature (1)..( 6): Result.002 file - promoters60/1381615
taacaa

SEQ ID NO: 108400 - DNA, 6 bp, Unknown
  misc_feature (1)..( 6): Result.002 file - promoters60/1381615
atctga

SEQ ID NO: 108401 - DNA, 6 bp, Unknown
  misc_feature (1)..( 6): Result.002 file - promoters60/1381615
atctga

SEQ ID NO: 108402 - DNA, 8 bp, Unknown
  misc_feature (1)..( 8): Result.002 file - promoters60/1381615
actgttca

SEQ ID NO: 108403 - DNA, 8 bp, Unknown
  misc_feature (1)..( 8): Result.002 file - promoters60/1381615
actcttca

SEQ ID NO: 108404 - DNA, 8 bp, Unknown
  misc_feature (1)..( 8): Result.002 file - promoters60/1381615
atgtgtat

SEQ ID NO: 108405 - DNA, 8 bp, Unknown
  misc_feature (1)..( 8): Result.002 file - promoters60/1381615
atgtatat

SEQ ID NO: 108406 - DNA, 6 bp, Unknown
  misc_feature (1)..( 6): Result.002 file - promoters60/1381615
ctgttt

SEQ ID NO: 108407 - DNA, 6 bp, Unknown
  misc_feature (1)..( 6): Result.002 file - promoters60/1381615
ctgttt

SEQ ID NO: 108408 - DNA, 7 bp, Unknown
  misc_feature (1)..( 7): Result.002 file - promoters60/1381615
tcaacag

SEQ ID NO: 108409 - DNA, 7 bp, Unknown
  misc_feature (1)..( 7): Result.002 file - promoters60/1381615
tcaccag

SEQ ID NO: 108410 - DNA, 7 bp, Unknown
  misc_feature (1)..( 7): Result.002 file - promoters60/1381615
ttacagg

SEQ ID NO: 108411 - DNA, 7 bp, Unknown
  misc_feature (1)..( 7): Result.002 file - promoters60/1381615
ttacagg

SEQ ID NO: 108412 - DNA, 7 bp, Unknown
  misc_feature (1)..( 7): Result.002 file - promoters60/1381615
tacaact

SEQ ID NO: 108413 - DNA, 7 bp, Unknown
  misc_feature (1)..( 7): Result.002 file - promoters60/1381615
tacaact

SEQ ID NO: 108414 - DNA, 9 bp, Unknown
  misc_feature (1)..( 9): Result.002 file - promoters60/1381615
tttgatgat

SEQ ID NO: 108415 - DNA, 9 bp, Unknown
  misc_feature (1)..( 9): Result.002 file - promoters60/1381615
tttcatgat

SEQ ID NO: 108416 - DNA, 6 bp, Unknown
  misc_feature (1)..( 6): Result.002 file - promoters60/1381615
caacat

SEQ ID NO: 108417 - DNA, 6 bp, Unknown
  misc_feature (1)..( 6): Result.002 file - promoters60/1381615
caacat

SEQ ID NO: 108418 - DNA, 10 bp, Unknown
  misc_feature (1)..( 10): Result.002 file - promoters60/1381647
ttctcttaat

SEQ ID NO: 108419 - DNA, 10 bp, Unknown
  misc_feature (1)..( 10): Result.002 file - promoters60/1381647
aagtctgaat

SEQ ID NO: 108420 - DNA, 10 bp, Unknown
  misc_feature (1)..( 10): Result.002 file - promoters60/1381647
aagtttgata

SEQ ID NO: 108421 - DNA, 10 bp, Unknown
  misc_feature (1)..( 10): Result.002 file - promoters60/1381647
aaatatgttg

SEQ ID NO: 108422 - DNA, 9 bp, Unknown
  misc_feature (1)..( 9): Result.002 file - promoters60/1381647
aaatgaaga

SEQ ID NO: 108423 - DNA, 9 bp, Unknown
  misc_feature (1)..( 9): Result.002 file - promoters60/1381647
gaatgaaga

SEQ ID NO: 108424 - DNA, 10 bp, Unknown
  misc_feature (1)..( 10): Result.002 file - promoters60/1381647
aaactgaagc

SEQ ID NO: 108425 - DNA, 10 bp, Unknown
  misc_feature (1)..( 10): Result.002 file - promoters60/1381647
accttcgtcc

SEQ ID NO: 108426 - DNA, 10 bp, Unknown
  misc_feature (1)..( 10): Result.002 file - promoters60/1381647
atcttcttcc

SEQ ID NO: 108427 - DNA, 10 bp, Unknown
  misc_feature (1)..( 10): Result.002 file - promoters60/1381647
atcatctaaa

SEQ ID NO: 108428 - DNA, 9 bp, Unknown
  misc_feature (1)..( 9): Result.002 file - promoters60/1381647
atttccttt

SEQ ID NO: 108429 - DNA, 9 bp, Unknown
  misc_feature (1)..( 9): Result.002 file - promoters60/1381647
gttttcttt

SEQ ID NO: 108430 - DNA, 9 bp, Unknown
  misc_feature (1)..( 9): Result.002 file - promoters60/1381647
gttttcgta

SEQ ID NO: 108431 - DNA, 9 bp, Unknown
  misc_feature (1)..( 9): Result.002 file - promoters60/1381647
ttaattatg

SEQ ID NO: 108432 - DNA, 9 bp, Unknown
  misc_feature (1)..( 9): Result.002 file - promoters60/1381647
ataaatatg

SEQ ID NO: 108433 - DNA, 9 bp, Unknown
  misc_feature (1)..( 9): Result.002 file - promoters60/1381647
ataagtttg

SEQ ID NO: 108434 - DNA, 7 bp, Unknown
  misc_feature (1)..( 7): Result.002 file - promoters60/1381647
tttgttt

SEQ ID NO: 108435 - DNA, 7 bp, Unknown
  misc_feature (1)..( 7): Result.002 file - promoters60/1381647
tttcttt

SEQ ID NO: 108436 - DNA, 7 bp, Unknown
  misc_feature (1)..( 7): Result.002 file - promoters60/1381647
tttgttc

SEQ ID NO: 108437 - DNA, 9 bp, Unknown
  misc_feature (1)..( 9): Result.002 file - promoters60/1381704
gtttccttt

SEQ ID NO: 108438 - DNA, 9 bp, Unknown
  misc_feature (1)..( 9): Result.002 file - promoters60/1381704
gttaccttt

SEQ ID NO: 108439 - DNA, 9 bp, Unknown
  misc_feature (1)..( 9): Result.002 file - promoters60/1381704
gcttcgttt

SEQ ID NO: 108440 - DNA, 8 bp, Unknown
  misc_feature (1)..( 8): Result.002 file - promoters60/1381704
caccaata

SEQ ID NO: 108441 - DNA, 8 bp, Unknown
  misc_feature (1)..( 8): Result.002 file - promoters60/1381704
aaccaata

SEQ ID NO: 108442 - DNA, 8 bp, Unknown
  misc_feature (1)..( 8): Result.002 file - promoters60/1381704
aacaaata

SEQ ID NO: 108443 - DNA, 9 bp, Unknown
  misc_feature (1)..( 9): Result.002 file - promoters60/1381704
tttcctttt

SEQ ID NO: 108444 - DNA, 9 bp, Unknown
  misc_feature (1)..( 9): Result.002 file - promoters60/1381704
ttttcttaa

SEQ ID NO: 108445 - DNA, 9 bp, Unknown
  misc_feature (1)..( 9): Result.002 file - promoters60/1381704
gttcctaat

SEQ ID NO: 108446 - DNA, 10 bp, Unknown
  misc_feature (1)..( 10): Result.002 file - promoters60/1381818
gaaatatagg

SEQ ID NO: 108447 - DNA, 10 bp, Unknown
  misc_feature (1)..( 10): Result.002 file - promoters60/1381818
aaaatattaa

SEQ ID NO: 108448 - DNA, 10 bp, Unknown
  misc_feature (1)..( 10): Result.002 file - promoters60/1381818
taaaaattaa

SEQ ID NO: 108449 - DNA, 10 bp, Unknown
  misc_feature (1)..( 10): Result.002 file - promoters60/1381818
taacaattct

SEQ ID NO: 108450 - DNA, 10 bp, Unknown
  misc_feature (1)..( 10): Result.002 file - promoters60/1381818
ccaaaattca

SEQ ID NO: 108451 - DNA, 10 bp, Unknown
  misc_feature (1)..( 10): Result.002 file - promoters60/1381818
gtaaaatttc

SEQ ID NO: 108452 - DNA, 10 bp, Unknown
  misc_feature (1)..( 10): Result.002 file - promoters60/1381818
ccaaaattga

SEQ ID NO: 108453 - DNA, 9 bp, Unknown
  misc_feature (1)..( 9): Result.002 file - promoters60/1381818
tacaacaaa

SEQ ID NO: 108454 - DNA, 9 bp, Unknown
  misc_feature (1)..( 9): Result.002 file - promoters60/1381818
aaaaacaaa

SEQ ID NO: 108455 - DNA, 9 bp, Unknown
  misc_feature (1)..( 9): Result.002 file - promoters60/1381818
ataaataaa

SEQ ID NO: 108456 - DNA, 9 bp, Unknown
  misc_feature (1)..( 9): Result.002 file - promoters60/1381818
ttaaaaaaa

SEQ ID NO: 108457 - DNA, 9 bp, Unknown
  misc_feature (1)..( 9): Result.002 file - promoters60/1381818
caaaacaat

SEQ ID NO: 108458 - DNA, 9 bp, Unknown
  misc_feature (1)..( 9): Result.002 file - promoters60/1381818
tcaaacaaa

SEQ ID NO: 108459 - DNA, 9 bp, Unknown
  misc_feature (1)..( 9): Result.002 file - promoters60/1381818
caaaacatc

SEQ ID NO: 108460 - DNA, 12 bp, Unknown
  misc_feature (1)..( 12): Result.002 file - promoters60/1381818
ccactatataag

SEQ ID NO: 108461 - DNA, 12 bp, Unknown
  misc_feature (1)..( 12): Result.002 file - promoters60/1381818
ccattatatata

SEQ ID NO: 108462 - DNA, 12 bp, Unknown
  misc_feature (1)..( 12): Result.002 file - promoters60/1381818
cttgtatatata

SEQ ID NO: 108463 - DNA, 12 bp, Unknown
  misc_feature (1)..( 12): Result.002 file - promoters60/1381818
cgcctatatata

SEQ ID NO: 108464 - DNA, 12 bp, Unknown
  misc_feature (1)..( 12): Result.002 file - promoters60/1381818
gtgagatataat

SEQ ID NO: 108465 - DNA, 12 bp, Unknown
  misc_feature (1)..( 12): Result.002 file - promoters60/1381818
gcgctatttaag

SEQ ID NO: 108466 - DNA, 12 bp, Unknown
  misc_feature (1)..( 12): Result.002 file - promoters60/1381818
tttttaaaaatt

SEQ ID NO: 108467 - DNA, 12 bp, Unknown
  misc_feature (1)..( 12): Result.002 file - promoters60/1381818
gggctaaaaatg

SEQ ID NO: 108468 - DNA, 12 bp, Unknown
  misc_feature (1)..( 12): Result.002 file - promoters60/1381818
agtttcaaatac

SEQ ID NO: 108469 - DNA, 12 bp, Unknown
  misc_feature (1)..( 12): Result.002 file - promoters60/1381818
gttttaaatcat

SEQ ID NO: 108470 - DNA, 12 bp, Unknown
  misc_feature (1)..( 12): Result.002 file - promoters60/1381818
gtttccaatatg

SEQ ID NO: 108471 - DNA, 12 bp, Unknown
  misc_feature (1)..( 12): Result.002 file - promoters60/1381818
agagtaaagtga

SEQ ID NO: 108472 - DNA, 12 bp, Unknown
  misc_feature (1)..( 12): Result.002 file - promoters60/1381818
agatcaaatagg

SEQ ID NO: 108473 - DNA, 10 bp, Unknown
  misc_feature (1)..( 10): Result.002 file - promoters60/1381818
gaattcttta

SEQ ID NO: 108474 - DNA, 10 bp, Unknown
  misc_feature (1)..( 10): Result.002 file - promoters60/1381818
taattatttt

SEQ ID NO: 108475 - DNA, 10 bp, Unknown
  misc_feature (1)..( 10): Result.002 file - promoters60/1381818
acattttttt

SEQ ID NO: 108476 - DNA, 10 bp, Unknown
  misc_feature (1)..( 10): Result.002 file - promoters60/1381818
taattctttt

SEQ ID NO: 108477 - DNA, 10 bp, Unknown
  misc_feature (1)..( 10): Result.002 file - promoters60/1381818
atattattag

SEQ ID NO: 108478 - DNA, 10 bp, Unknown
  misc_feature (1)..( 10): Result.002 file - promoters60/1381818
ttattatatt

SEQ ID NO: 108479 - DNA, 10 bp, Unknown
  misc_feature (1)..( 10): Result.002 file - promoters60/1381818
atattattag

SEQ ID NO: 108480 - DNA, 11 bp, Unknown
  misc_feature (1)..( 11): Result.002 file - promoters60/1381818
gacttttgttc

SEQ ID NO: 108481 - DNA, 9 bp, Unknown
  misc_feature (1)..( 9): Result.002 file - promoters60/1381818
aaaaataaa

SEQ ID NO: 108482 - DNA, 9 bp, Unknown
  misc_feature (1)..( 9): Result.002 file - promoters60/1381818
aaaattaat

SEQ ID NO: 108483 - DNA, 9 bp, Unknown
  misc_feature (1)..( 9): Result.002 file - promoters60/1381818
taaaataca

SEQ ID NO: 108484 - DNA, 9 bp, Unknown
  misc_feature (1)..( 9): Result.002 file - promoters60/1381818
aaaaattta

SEQ ID NO: 108485 - DNA, 9 bp, Unknown
  misc_feature (1)..( 9): Result.002 file - promoters60/1381818
gataatatt

SEQ ID NO: 108486 - DNA, 9 bp, Unknown
  misc_feature (1)..( 9): Result.002 file - promoters60/1381818
tttaatatg

SEQ ID NO: 108487 - DNA, 10 bp, Unknown
  misc_feature (1)..( 10): Result.002 file - promoters60/1381818
aaataaaagc

SEQ ID NO: 108488 - DNA, 10 bp, Unknown
  misc_feature (1)..( 10): Result.002 file - promoters60/1381818
caataaaatt

SEQ ID NO: 108489 - DNA, 10 bp, Unknown
  misc_feature (1)..( 10): Result.002 file - promoters60/1381818
ttataaaata

SEQ ID NO: 108490 - DNA, 10 bp, Unknown
  misc_feature (1)..( 10): Result.002 file - promoters60/1381818
agataatatt

SEQ ID NO: 108491 - DNA, 11 bp, Unknown
  misc_feature (1)..( 11): Result.002 file - promoters60/1381818
atttacaaact

SEQ ID NO: 108492 - DNA, 11 bp, Unknown
  misc_feature (1)..( 11): Result.002 file - promoters60/1381818
taatatgaaga

SEQ ID NO: 108493 - DNA, 11 bp, Unknown
  misc_feature (1)..( 11): Result.002 file - promoters60/1381818
atgtttgttta

SEQ ID NO: 108494 - DNA, 11 bp, Unknown
  misc_feature (1)..( 11): Result.002 file - promoters60/1381818
ctttttatttc

SEQ ID NO: 108495 - DNA, 11 bp, Unknown
  misc_feature (1)..( 11): Result.002 file - promoters60/1381818
acttttgtttc

SEQ ID NO: 108496 - DNA, 11 bp, Unknown
  misc_feature (1)..( 11): Result.002 file - promoters60/1381818
acatttttttc

SEQ ID NO: 108497 - DNA, 11 bp, Unknown
  misc_feature (1)..( 11): Result.002 file - promoters60/1381818
ttaattctttt

SEQ ID NO: 108498 - DNA, 11 bp, Unknown
  misc_feature (1)..( 11): Result.002 file - promoters60/1381818
gacttttgttc

SEQ ID NO: 108499 - DNA, 8 bp, Unknown
  misc_feature (1)..( 8): Result.002 file - promoters60/1381896
ttggtttt

SEQ ID NO: 108500 - DNA, 8 bp, Unknown
  misc_feature (1)..( 8): Result.002 file - promoters60/1381896
ttggtttt

SEQ ID NO: 108501 - DNA, 6 bp, Unknown
  misc_feature (1)..( 6): Result.002 file - promoters60/1381896
ctgatg

SEQ ID NO: 108502 - DNA, 6 bp, Unknown
  misc_feature (1)..( 6): Result.002 file - promoters60/1381896
ctgatg

SEQ ID NO: 108503 - DNA, 7 bp, Unknown
  misc_feature (1)..( 7): Result.002 file - promoters60/1381896
ttagaaa

SEQ ID NO: 108504 - DNA, 7 bp, Unknown
  misc_feature (1)..( 7): Result.002 file - promoters60/1381896
ttataaa

SEQ ID NO: 108505 - DNA, 8 bp, Unknown
  misc_feature (1)..( 8): Result.002 file - promoters60/1381896
aaatactc

SEQ ID NO: 108506 - DNA, 8 bp, Unknown
  misc_feature (1)..( 8): Result.002 file - promoters60/1381896
aaagacta

SEQ ID NO: 108507 - DNA, 8 bp, Unknown
  misc_feature (1)..( 8): Result.002 file - promoters60/1381896
ggagacta

SEQ ID NO: 108508 - DNA, 8 bp, Unknown
  misc_feature (1)..( 8): Result.002 file - promoters60/1381896
ctcatgta

SEQ ID NO: 108509 - DNA, 8 bp, Unknown
  misc_feature (1)..( 8): Result.002 file - promoters60/1381896
ctcttgta

SEQ ID NO: 108510 - DNA, 7 bp, Unknown
  misc_feature (1)..( 7): Result.002 file - promoters60/1381896
ttaagaa

SEQ ID NO: 108511 - DNA, 7 bp, Unknown
  misc_feature (1)..( 7): Result.002 file - promoters60/1381896
ttaagat

SEQ ID NO: 108512 - DNA, 7 bp, Unknown
  misc_feature (1)..( 7): Result.002 file - promoters60/1381896
ctaagaa

SEQ ID NO: 108513 - DNA, 10 bp, Unknown
  misc_feature (1)..( 10): Result.002 file - promoters60/1381896
gaatatatat

SEQ ID NO: 108514 - DNA, 10 bp, Unknown
  misc_feature (1)..( 10): Result.002 file - promoters60/1381896
agatatttat

SEQ ID NO: 108515 - DNA, 10 bp, Unknown
  misc_feature (1)..( 10): Result.002 file - promoters60/1381896
agacattcgc

SEQ ID NO: 108516 - DNA, 6 bp, Unknown
  misc_feature (1)..( 6): Result.002 file - promoters60/1381896
ttgaat

SEQ ID NO: 108517 - DNA, 6 bp, Unknown
  misc_feature (1)..( 6): Result.002 file - promoters60/1381896
ttgaat

SEQ ID NO: 108518 - DNA, 7 bp, Unknown
  misc_feature (1)..( 7): Result.002 file - promoters60/1381896
ttctctt

SEQ ID NO: 108519 - DNA, 7 bp, Unknown
  misc_feature (1)..( 7): Result.002 file - promoters60/1381896
ttctctt

SEQ ID NO: 108520 - DNA, 7 bp, Unknown
  misc_feature (1)..( 7): Result.002 file - promoters60/1381896
aaattca

SEQ ID NO: 108521 - DNA, 7 bp, Unknown
  misc_feature (1)..( 7): Result.002 file - promoters60/1381896
aaaatca

SEQ ID NO: 108522 - DNA, 6 bp, Unknown
  misc_feature (1)..( 6): Result.002 file - promoters60/1381896
atgtct

SEQ ID NO: 108523 - DNA, 6 bp, Unknown
  misc_feature (1)..( 6): Result.002 file - promoters60/1381896
atgtct

SEQ ID NO: 108524 - DNA, 7 bp, Unknown
  misc_feature (1)..( 7): Result.002 file - promoters60/1381896
tgtacaa

SEQ ID NO: 108525 - DNA, 7 bp, Unknown
  misc_feature (1)..( 7): Result.002 file - promoters60/1381896
tgttcaa

SEQ ID NO: 108526 - DNA, 7 bp, Unknown
  misc_feature (1)..( 7): Result.002 file - promoters60/1381896
accagac

SEQ ID NO: 108527 - DNA, 7 bp, Unknown
  misc_feature (1)..( 7): Result.002 file - promoters60/1381896
accagac

SEQ ID NO: 108528 - DNA, 7 bp, Unknown
  misc_feature (1)..( 7): Result.002 file - promoters60/1381896
ctttgga

SEQ ID NO: 108529 - DNA, 7 bp, Unknown
  misc_feature (1)..( 7): Result.002 file - promoters60/1381896
cttagga

SEQ ID NO: 108530 - DNA, 7 bp, Unknown
  misc_feature (1)..( 7): Result.002 file - promoters60/1381896
ctatcta

SEQ ID NO: 108531 - DNA, 7 bp, Unknown
  misc_feature (1)..( 7): Result.002 file - promoters60/1381896
ctaccta

SEQ ID NO: 108532 - DNA, 8 bp, Unknown
  misc_feature (1)..( 8): Result.002 file - promoters60/1381896
ttgtagta

SEQ ID NO: 108533 - DNA, 8 bp, Unknown
  misc_feature (1)..( 8): Result.002 file - promoters60/1381896
ttgaagta

SEQ ID NO: 108534 - DNA, 17 bp, Unknown
  misc_feature (1)..( 17): Result.002 file - promoters60/1381926
acacattaatagtgcag

SEQ ID NO: 108535 - DNA, 17 bp, Unknown
  misc_feature (1)..( 17): Result.002 file - promoters60/1381926
tattattaataagtgat

SEQ ID NO: 108536 - DNA, 17 bp, Unknown
  misc_feature (1)..( 17): Result.002 file - promoters60/1381926
gcctattaatgatttca

SEQ ID NO: 108537 - DNA, 17 bp, Unknown
  misc_feature (1)..( 17): Result.002 file - promoters60/1381926
gcccattattgatttca

SEQ ID NO: 108538 - DNA, 10 bp, Unknown
  misc_feature (1)..( 10): Result.002 file - promoters60/1381926
gaaaaagata

SEQ ID NO: 108539 - DNA, 10 bp, Unknown
  misc_feature (1)..( 10): Result.002 file - promoters60/1381926
gaaatagatt

SEQ ID NO: 108540 - DNA, 10 bp, Unknown
  misc_feature (1)..( 10): Result.002 file - promoters60/1381926
ttagtagatt

SEQ ID NO: 108541 - DNA, 10 bp, Unknown
  misc_feature (1)..( 10): Result.002 file - promoters60/1381926
tatataaatt

SEQ ID NO: 108542 - DNA, 18 bp, Unknown
  misc_feature (1)..( 18): Result.002 file - promoters60/1381926
gcccattattgatttcac

SEQ ID NO: 108543 - DNA, 18 bp, Unknown
  misc_feature (1)..( 18): Result.002 file - promoters60/1381926
gattgaatgtgatttacg

SEQ ID NO: 108544 - DNA, 18 bp, Unknown
  misc_feature (1)..( 18): Result.002 file - promoters60/1381926
gcctattaatgatttcat

SEQ ID NO: 108545 - DNA, 18 bp, Unknown
  misc_feature (1)..( 18): Result.002 file - promoters60/1381926
ataatattgtgttttacg

SEQ ID NO: 108546 - DNA, 7 bp, Unknown
  misc_feature (1)..( 7): Result.002 file - promoters60/1382119
gaggaga

SEQ ID NO: 108547 - DNA, 7 bp, Unknown
  misc_feature (1)..( 7): Result.002 file - promoters60/1382119
gaggaga

SEQ ID NO: 108548 - DNA, 6 bp, Unknown
  misc_feature (1)..( 6): Result.002 file - promoters60/1382119
tttctt

SEQ ID NO: 108549 - DNA, 6 bp, Unknown
  misc_feature (1)..( 6): Result.002 file - promoters60/1382119
tttctt

SEQ ID NO: 108550 - DNA, 8 bp, Unknown
  misc_feature (1)..( 8): Result.002 file - promoters60/1382119
attcacca

SEQ ID NO: 108551 - DNA, 8 bp, Unknown
  misc_feature (1)..( 8): Result.002 file - promoters60/1382119
attcacca

SEQ ID NO: 108552 - DNA, 7 bp, Unknown
  misc_feature (1)..( 7): Result.002 file - promoters60/1382119
aatgaaa

SEQ ID NO: 108553 - DNA, 7 bp, Unknown
  misc_feature (1)..( 7): Result.002 file - promoters60/1382119
aattaaa

SEQ ID NO: 108554 - DNA, 8 bp, Unknown
  misc_feature (1)..( 8): Result.002 file - promoters60/1382119
acagagaa

SEQ ID NO: 108555 - DNA, 8 bp, Unknown
  misc_feature (1)..( 8): Result.002 file - promoters60/1382119
acaaagaa

SEQ ID NO: 108556 - DNA, 6 bp, Unknown
  misc_feature (1)..( 6): Result.002 file - promoters60/1382119
aaaata

SEQ ID NO: 108557 - DNA, 6 bp, Unknown
  misc_feature (1)..( 6): Result.002 file - promoters60/1382119
aaaata

SEQ ID NO: 108558 - DNA, 10 bp, Unknown
  misc_feature (1)..( 10): Result.002 file - promoters60/1382119
aataaataaa

SEQ ID NO: 108559 - DNA, 10 bp, Unknown
  misc_feature (1)..( 10): Result.002 file - promoters60/1382119
tataaataaa

SEQ ID NO: 108560 - DNA, 10 bp, Unknown
  misc_feature (1)..( 10): Result.002 file - promoters60/1382119
tataaagaac

SEQ ID NO: 108561 - DNA, 6 bp, Unknown
  misc_feature (1)..( 6): Result.002 file - promoters60/1382119
caaaag

SEQ ID NO: 108562 - DNA, 6 bp, Unknown
  misc_feature (1)..( 6): Result.002 file - promoters60/1382119
caaaag

SEQ ID NO: 108563 - DNA, 8 bp, Unknown
  misc_feature (1)..( 8): Result.002 file - promoters60/1382119
ttctttct

SEQ ID NO: 108564 - DNA, 8 bp, Unknown
  misc_feature (1)..( 8): Result.002 file - promoters60/1382119
ttctctct

SEQ ID NO: 108565 - DNA, 8 bp, Unknown
  misc_feature (1)..( 8): Result.002 file - promoters60/1382119
tattacca

SEQ ID NO: 108566 - DNA, 8 bp, Unknown
  misc_feature (1)..( 8): Result.002 file - promoters60/1382119
tataacca

SEQ ID NO: 108567 - DNA, 8 bp, Unknown
  misc_feature (1)..( 8): Result.002 file - promoters60/1382119
gttttcgt

SEQ ID NO: 108568 - DNA, 8 bp, Unknown
  misc_feature (1)..( 8): Result.002 file - promoters60/1382119
gttatcgt

SEQ ID NO: 108569 - DNA, 8 bp, Unknown
  misc_feature (1)..( 8): Result.002 file - promoters60/1382119
aaaacaaa

SEQ ID NO: 108570 - DNA, 8 bp, Unknown
  misc_feature (1)..( 8): Result.002 file - promoters60/1382119
aaaataaa

SEQ ID NO: 108571 - DNA, 7 bp, Unknown
  misc_feature (1)..( 7): Result.002 file - promoters60/1382134
tgaaatt

SEQ ID NO: 108572 - DNA, 7 bp, Unknown
  misc_feature (1)..( 7): Result.002 file - promoters60/1382134
tgatatt

SEQ ID NO: 108573 - DNA, 7 bp, Unknown
  misc_feature (1)..( 7): Result.002 file - promoters60/1382134
taaacat

SEQ ID NO: 108574 - DNA, 7 bp, Unknown
  misc_feature (1)..( 7): Result.002 file - promoters60/1382134
taaacat

SEQ ID NO: 108575 - DNA, 6 bp, Unknown
  misc_feature (1)..( 6): Result.002 file - promoters60/1382134
ttaact

SEQ ID NO: 108576 - DNA, 6 bp, Unknown
  misc_feature (1)..( 6): Result.002 file - promoters60/1382134
ttaact

SEQ ID NO: 108577 - DNA, 6 bp, Unknown
  misc_feature (1)..( 6): Result.002 file - promoters60/1382134
taaaat

SEQ ID NO: 108578 - DNA, 6 bp, Unknown
  misc_feature (1)..( 6): Result.002 file - promoters60/1382134
taaaat

SEQ ID NO: 108579 - DNA, 8 bp, Unknown
  misc_feature (1)..( 8): Result.002 file - promoters60/1382134
agatttta

SEQ ID NO: 108580 - DNA, 8 bp, Unknown
  misc_feature (1)..( 8): Result.002 file - promoters60/1382134
agatttta

SEQ ID NO: 108581 - DNA, 6 bp, Unknown
  misc_feature (1)..( 6): Result.002 file - promoters60/1382134
taataa

SEQ ID NO: 108582 - DNA, 6 bp, Unknown
  misc_feature (1)..( 6): Result.002 file - promoters60/1382134
taataa

SEQ ID NO: 108583 - DNA, 7 bp, Unknown
  misc_feature (1)..( 7): Result.002 file - promoters60/1382134
aatatat

SEQ ID NO: 108584 - DNA, 7 bp, Unknown
  misc_feature (1)..( 7): Result.002 file - promoters60/1382134
aatatat

SEQ ID NO: 108585 - DNA, 7 bp, Unknown
  misc_feature (1)..( 7): Result.002 file - promoters60/1382134
taccaaa

SEQ ID NO: 108586 - DNA, 7 bp, Unknown
  misc_feature (1)..( 7): Result.002 file - promoters60/1382134
taccaaa

SEQ ID NO: 108587 - DNA, 10 bp, Unknown
  misc_feature (1)..( 10): Result.002 file - promoters60/1382134
acactttttc

SEQ ID NO: 108588 - DNA, 10 bp, Unknown
  misc_feature (1)..( 10): Result.002 file - promoters60/1382134
acaattttta

SEQ ID NO: 108589 - DNA, 10 bp, Unknown
  misc_feature (1)..( 10): Result.002 file - promoters60/1382134
ttggttttta

SEQ ID NO: 108590 - DNA, 6 bp, Unknown
  misc_feature (1)..( 6): Result.002 file - promoters60/1382134
cttcta

SEQ ID NO: 108591 - DNA, 6 bp, Unknown
  misc_feature (1)..( 6): Result.002 file - promoters60/1382134
cttcta

SEQ ID NO: 108592 - DNA, 7 bp, Unknown
  misc_feature (1)..( 7): Result.002 file - promoters60/1382134
cacgtga

SEQ ID NO: 108593 - DNA, 7 bp, Unknown
  misc_feature (1)..( 7): Result.002 file - promoters60/1382134
cacttga

SEQ ID NO: 108594 - DNA, 6 bp, Unknown
  misc_feature (1)..( 6): Result.002 file - promoters60/1382134
aaaaat

SEQ ID NO: 108595 - DNA, 6 bp, Unknown
  misc_feature (1)..( 6): Result.002 file - promoters60/1382134
aaaaat

SEQ ID NO: 108596 - DNA, 6 bp, Unknown
  misc_feature (1)..( 6): Result.002 file - promoters60/1382134
gatgat

SEQ ID NO: 108597 - DNA, 6 bp, Unknown
  misc_feature (1)..( 6): Result.002 file - promoters60/1382134
gatgat

SEQ ID NO: 108598 - DNA, 13 bp, Unknown
  misc_feature (1)..( 13): Result.002 file - promoters60/1382134
atattttaagatt

SEQ ID NO: 108599 - DNA, 13 bp, Unknown
  misc_feature (1)..( 13): Result.002 file - promoters60/1382134
ataatttaaaatt

SEQ ID NO: 108600 - DNA, 8 bp, Unknown
  misc_feature (1)..( 8): Result.002 file - promoters60/1382134
agacgtgt

SEQ ID NO: 108601 - DNA, 8 bp, Unknown
  misc_feature (1)..( 8): Result.002 file - promoters60/1382134
agacgtgt

SEQ ID NO: 108602 - DNA, 6 bp, Unknown
  misc_feature (1)..( 6): Result.002 file - promoters60/1382134
taaaat

SEQ ID NO: 108603 - DNA, 6 bp, Unknown
  misc_feature (1)..( 6): Result.002 file - promoters60/1382134
taaaat

SEQ ID NO: 108604 - DNA, 6 bp, Unknown
  misc_feature (1)..( 6): Result.002 file - promoters60/1382134
aatgtt

SEQ ID NO: 108605 - DNA, 6 bp, Unknown
  misc_feature (1)..( 6): Result.002 file - promoters60/1382134
aatgtt

SEQ ID NO: 108606 - DNA, 6 bp, Unknown
  misc_feature (1)..( 6): Result.002 file - promoters60/1382134
ttaatt

SEQ ID NO: 108607 - DNA, 6 bp, Unknown
  misc_feature (1)..( 6): Result.002 file - promoters60/1382134
ttaatt

SEQ ID NO: 108608 - DNA, 7 bp, Unknown
  misc_feature (1)..( 7): Result.002 file - promoters60/1382134
aatttaa

SEQ ID NO: 108609 - DNA, 7 bp, Unknown
  misc_feature (1)..( 7): Result.002 file - promoters60/1382134
aatttaa

SEQ ID NO: 108610 - DNA, 6 bp, Unknown
  misc_feature (1)..( 6): Result.002 file - promoters60/1382134
ttttaa

SEQ ID NO: 108611 - DNA, 6 bp, Unknown
  misc_feature (1)..( 6): Result.002 file - promoters60/1382134
ttttaa

SEQ ID NO: 108612 - DNA, 9 bp, Unknown
  misc_feature (1)..( 9): Result.002 file - promoters60/1382134
tcaaaataa

SEQ ID NO: 108613 - DNA, 9 bp, Unknown
  misc_feature (1)..( 9): Result.002 file - promoters60/1382134
tcacaataa

SEQ ID NO: 108614 - DNA, 7 bp, Unknown
  misc_feature (1)..( 7): Result.002 file - promoters60/1382134
ataaata

SEQ ID NO: 108615 - DNA, 7 bp, Unknown
  misc_feature (1)..( 7): Result.002 file - promoters60/1382134
atatata

SEQ ID NO: 108616 - DNA, 9 bp, Unknown
  misc_feature (1)..( 9): Result.002 file - promoters60/1382281
attaaatga

SEQ ID NO: 108617 - DNA, 9 bp, Unknown
  misc_feature (1)..( 9): Result.002 file - promoters60/1382281
tgtaaatgt

SEQ ID NO: 108618 - DNA, 9 bp, Unknown
  misc_feature (1)..( 9): Result.002 file - promoters60/1382281
attaaatga

SEQ ID NO: 108619 - DNA, 9 bp, Unknown
  misc_feature (1)..( 9): Result.002 file - promoters60/1382281
aaaataaat

SEQ ID NO: 108620 - DNA, 9 bp, Unknown
  misc_feature (1)..( 9): Result.002 file - promoters60/1382281
aaaataaat

SEQ ID NO: 108621 - DNA, 9 bp, Unknown
  misc_feature (1)..( 9): Result.002 file - promoters60/1382281
aaaagatat

SEQ ID NO: 108622 - DNA, 11 bp, Unknown
  misc_feature (1)..( 11): Result.002 file - promoters60/1382281
ttttcgaaaaa

SEQ ID NO: 108623 - DNA, 11 bp, Unknown
  misc_feature (1)..( 11): Result.002 file - promoters60/1382281
ctttcgacatt

SEQ ID NO: 108624 - DNA, 11 bp, Unknown
  misc_feature (1)..( 11): Result.002 file - promoters60/1382281
ttttcgaaaaa

SEQ ID NO: 108625 - DNA, 10 bp, Unknown
  misc_feature (1)..( 10): Result.002 file - promoters60/1382302
gtttgagtcc

SEQ ID NO: 108626 - DNA, 10 bp, Unknown
  misc_feature (1)..( 10): Result.002 file - promoters60/1382302
gttggagttt

SEQ ID NO: 108627 - DNA, 10 bp, Unknown
  misc_feature (1)..( 10): Result.002 file - promoters60/1382302
tttgaagttt

SEQ ID NO: 108628 - DNA, 10 bp, Unknown
  misc_feature (1)..( 10): Result.002 file - promoters60/1382302
atttataaac

SEQ ID NO: 108629 - DNA, 10 bp, Unknown
  misc_feature (1)..( 10): Result.002 file - promoters60/1382302
gattataaac

SEQ ID NO: 108630 - DNA, 10 bp, Unknown
  misc_feature (1)..( 10): Result.002 file - promoters60/1382302
atttatatta

SEQ ID NO: 108631 - DNA, 9 bp, Unknown
  misc_feature (1)..( 9): Result.002 file - promoters60/1382302
ttatagagt

SEQ ID NO: 108632 - DNA, 9 bp, Unknown
  misc_feature (1)..( 9): Result.002 file - promoters60/1382302
taataaagt

SEQ ID NO: 108633 - DNA, 9 bp, Unknown
  misc_feature (1)..( 9): Result.002 file - promoters60/1382302
taatacagt

SEQ ID NO: 108634 - DNA, 9 bp, Unknown
  misc_feature (1)..( 9): Result.002 file - promoters60/1382302
taaaacaaa

SEQ ID NO: 108635 - DNA, 12 bp, Unknown
  misc_feature (1)..( 12): Result.002 file - promoters60/1382302
ctatttctctaa

SEQ ID NO: 108636 - DNA, 12 bp, Unknown
  misc_feature (1)..( 12): Result.002 file - promoters60/1382302
ctatttgtctca

SEQ ID NO: 108637 - DNA, 12 bp, Unknown
  misc_feature (1)..( 12): Result.002 file - promoters60/1382302
tgtattgtttca

SEQ ID NO: 108638 - DNA, 10 bp, Unknown
  misc_feature (1)..( 10): Result.002 file - promoters60/1382302
gatttataat

SEQ ID NO: 108639 - DNA, 10 bp, Unknown
  misc_feature (1)..( 10): Result.002 file - promoters60/1382302
attttataat

SEQ ID NO: 108640 - DNA, 10 bp, Unknown
  misc_feature (1)..( 10): Result.002 file - promoters60/1382302
attttattct

SEQ ID NO: 108641 - DNA, 7 bp, Unknown
  misc_feature (1)..( 7): Result.002 file - promoters60/1382302
aaacttg

SEQ ID NO: 108642 - DNA, 7 bp, Unknown
  misc_feature (1)..( 7): Result.002 file - promoters60/1382302
aaaattg

SEQ ID NO: 108643 - DNA, 7 bp, Unknown
  misc_feature (1)..( 7): Result.002 file - promoters60/1382302
taaattg

SEQ ID NO: 108644 - DNA, 8 bp, Unknown
  misc_feature (1)..( 8): Result.002 file - promoters60/1382302
gttttatt

SEQ ID NO: 108645 - DNA, 8 bp, Unknown
  misc_feature (1)..( 8): Result.002 file - promoters60/1382302
attttatt

SEQ ID NO: 108646 - DNA, 8 bp, Unknown
  misc_feature (1)..( 8): Result.002 file - promoters60/1382302
attttata

SEQ ID NO: 108647 - DNA, 9 bp, Unknown
  misc_feature (1)..( 9): Result.002 file - promoters60/1382302
agactttgg

SEQ ID NO: 108648 - DNA, 9 bp, Unknown
  misc_feature (1)..( 9): Result.002 file - promoters60/1382302
agattttat

SEQ ID NO: 108649 - DNA, 9 bp, Unknown
  misc_feature (1)..( 9): Result.002 file - promoters60/1382302
atattttat

SEQ ID NO: 108650 - DNA, 10 bp, Unknown
  misc_feature (1)..( 10): Result.002 file - promoters60/1382302
atacaatgaa

SEQ ID NO: 108651 - DNA, 10 bp, Unknown
  misc_feature (1)..( 10): Result.002 file - promoters60/1382302
atataattta

SEQ ID NO: 108652 - DNA, 11 bp, Unknown
  misc_feature (1)..( 11): Result.002 file - promoters60/1382302
atagatatttt

SEQ ID NO: 108653 - DNA, 6 bp, Unknown
  misc_feature (1)..( 6): Result.002 file - promoters60/1382302
ttttct

SEQ ID NO: 108654 - DNA, 6 bp, Unknown
  misc_feature (1)..( 6): Result.002 file - promoters60/1382302
ttttct

SEQ ID NO: 108655 - DNA, 6 bp, Unknown
  misc_feature (1)..( 6): Result.002 file - promoters60/1382302
ttttct

SEQ ID NO: 108656 - DNA, 8 bp, Unknown
  misc_feature (1)..( 8): Result.002 file - promoters60/1382713
atgactac

SEQ ID NO: 108657 - DNA, 8 bp, Unknown
  misc_feature (1)..( 8): Result.002 file - promoters60/1382713
atgactta

SEQ ID NO: 108658 - DNA, 8 bp, Unknown
  misc_feature (1)..( 8): Result.002 file - promoters60/1382713
ttgattta

SEQ ID NO: 108659 - DNA, 7 bp, Unknown
  misc_feature (1)..( 7): Result.002 file - promoters60/1382713
attgtgt

SEQ ID NO: 108660 - DNA, 7 bp, Unknown
  misc_feature (1)..( 7): Result.002 file - promoters60/1382713
attctgt

SEQ ID NO: 108661 - DNA, 7 bp, Unknown
  misc_feature (1)..( 7): Result.002 file - promoters60/1382713
tttgtgt

SEQ ID NO: 108662 - DNA, 8 bp, Unknown
  misc_feature (1)..( 8): Result.002 file - promoters60/1382713
atttttca

SEQ ID NO: 108663 - DNA, 8 bp, Unknown
  misc_feature (1)..( 8): Result.002 file - promoters60/1382713
attattct

SEQ ID NO: 108664 - DNA, 8 bp, Unknown
  misc_feature (1)..( 8): Result.002 file - promoters60/1382713
cttattct

SEQ ID NO: 108665 - DNA, 8 bp, Unknown
  misc_feature (1)..( 8): Result.002 file - promoters60/1382713
ggaataaa

SEQ ID NO: 108666 - DNA, 8 bp, Unknown
  misc_feature (1)..( 8): Result.002 file - promoters60/1382713
tgaagaaa

SEQ ID NO: 108667 - DNA, 8 bp, Unknown
  misc_feature (1)..( 8): Result.002 file - promoters60/1382713
tgaagaat

SEQ ID NO: 108668 - DNA, 10 bp, Unknown
  misc_feature (1)..( 10): Result.002 file - promoters60/1382959
agaaagaaag

SEQ ID NO: 108669 - DNA, 10 bp, Unknown
  misc_feature (1)..( 10): Result.002 file - promoters60/1382959
gtaaataaat

SEQ ID NO: 108670 - DNA, 10 bp, Unknown
  misc_feature (1)..( 10): Result.002 file - promoters60/1382959
aaaaagaacg

SEQ ID NO: 108671 - DNA, 10 bp, Unknown
  misc_feature (1)..( 10): Result.002 file - promoters60/1382959
gctaataaat

SEQ ID NO: 108672 - DNA, 10 bp, Unknown
  misc_feature (1)..( 10): Result.002 file - promoters60/1382959
gtaaataatt

SEQ ID NO: 108673 - DNA, 10 bp, Unknown
  misc_feature (1)..( 10): Result.002 file - promoters60/1382959
gctaataaat

SEQ ID NO: 108674 - DNA, 10 bp, Unknown
  misc_feature (1)..( 10): Result.002 file - promoters60/1382959
acaaataaac

SEQ ID NO: 108675 - DNA, 10 bp, Unknown
  misc_feature (1)..( 10): Result.002 file - promoters60/1382959
gtaaataaat

SEQ ID NO: 108676 - DNA, 10 bp, Unknown
  misc_feature (1)..( 10): Result.002 file - promoters60/1382959
acacataatg

SEQ ID NO: 108677 - DNA, 10 bp, Unknown
  misc_feature (1)..( 10): Result.002 file - promoters60/1382959
gtaaataatt

SEQ ID NO: 108678 - DNA, 10 bp, Unknown
  misc_feature (1)..( 10): Result.002 file - promoters60/1382959
gtatatatgt

SEQ ID NO: 108679 - DNA, 7 bp, Unknown
  misc_feature (1)..( 7): Result.002 file - promoters60/1383074
tagactt

SEQ ID NO: 108680 - DNA, 7 bp, Unknown
  misc_feature (1)..( 7): Result.002 file - promoters60/1383074
tagactt

SEQ ID NO: 108681 - DNA, 7 bp, Unknown
  misc_feature (1)..( 7): Result.002 file - promoters60/1383074
ggtattg

SEQ ID NO: 108682 - DNA, 7 bp, Unknown
  misc_feature (1)..( 7): Result.002 file - promoters60/1383074
ggttttg

SEQ ID NO: 108683 - DNA, 10 bp, Unknown
  misc_feature (1)..( 10): Result.002 file - promoters60/1383074
atatatatat

SEQ ID NO: 108684 - DNA, 10 bp, Unknown
  misc_feature (1)..( 10): Result.002 file - promoters60/1383074
atacatataa

SEQ ID NO: 108685 - DNA, 10 bp, Unknown
  misc_feature (1)..( 10): Result.002 file - promoters60/1383074
tttcatttaa

SEQ ID NO: 108686 - DNA, 6 bp, Unknown
  misc_feature (1)..( 6): Result.002 file - promoters60/1383074
tatgaa

SEQ ID NO: 108687 - DNA, 6 bp, Unknown
  misc_feature (1)..( 6): Result.002 file - promoters60/1383074
tatgaa

SEQ ID NO: 108688 - DNA, 10 bp, Unknown
  misc_feature (1)..( 10): Result.002 file - promoters60/1383074
aaatacaaag

SEQ ID NO: 108689 - DNA, 10 bp, Unknown
  misc_feature (1)..( 10): Result.002 file - promoters60/1383074
atttacaaag

SEQ ID NO: 108690 - DNA, 10 bp, Unknown
  misc_feature (1)..( 10): Result.002 file - promoters60/1383074
aaataaaaat

SEQ ID NO: 108691 - DNA, 7 bp, Unknown
  misc_feature (1)..( 7): Result.002 file - promoters60/1383074
caataat

SEQ ID NO: 108692 - DNA, 7 bp, Unknown
  misc_feature (1)..( 7): Result.002 file - promoters60/1383074
caacaat

SEQ ID NO: 108693 - DNA, 7 bp, Unknown
  misc_feature (1)..( 7): Result.002 file - promoters60/1383074
aaataat

SEQ ID NO: 108694 - DNA, 7 bp, Unknown
  misc_feature (1)..( 7): Result.002 file - promoters60/1383074
aaaaaat

SEQ ID NO: 108695 - DNA, 7 bp, Unknown
  misc_feature (1)..( 7): Result.002 file - promoters60/1383074
aaaaaaa

SEQ ID NO: 108696 - DNA, 8 bp, Unknown
  misc_feature (1)..( 8): Result.002 file - promoters60/1383074
aaataaaa

SEQ ID NO: 108697 - DNA, 11 bp, Unknown
  misc_feature (1)..( 11): Result.002 file - promoters60/1383074
atcaaaagttc

SEQ ID NO: 108698 - DNA, 11 bp, Unknown
  misc_feature (1)..( 11): Result.002 file - promoters60/1383074
aaaaaaaattc

SEQ ID NO: 108699 - DNA, 11 bp, Unknown
  misc_feature (1)..( 11): Result.002 file - promoters60/1383074
aaataaaatat

SEQ ID NO: 108700 - DNA, 7 bp, Unknown
  misc_feature (1)..( 7): Result.002 file - promoters60/1383074
ttgtttt

SEQ ID NO: 108701 - DNA, 7 bp, Unknown
  misc_feature (1)..( 7): Result.002 file - promoters60/1383074
ttgtttt

SEQ ID NO: 108702 - DNA, 7 bp, Unknown
  misc_feature (1)..( 7): Result.002 file - promoters60/1383074
tgatata

SEQ ID NO: 108703 - DNA, 7 bp, Unknown
  misc_feature (1)..( 7): Result.002 file - promoters60/1383074
tgacata

SEQ ID NO: 108704 - DNA, 7 bp, Unknown
  misc_feature (1)..( 7): Result.002 file - promoters60/1383074
atattgt

SEQ ID NO: 108705 - DNA, 7 bp, Unknown
  misc_feature (1)..( 7): Result.002 file - promoters60/1383074
atattgt

SEQ ID NO: 108706 - DNA, 7 bp, Unknown
  misc_feature (1)..( 7): Result.002 file - promoters60/1383074
cataaat

SEQ ID NO: 108707 - DNA, 7 bp, Unknown
  misc_feature (1)..( 7): Result.002 file - promoters60/1383074
catgaat

SEQ ID NO: 108708 - DNA, 8 bp, Unknown
  misc_feature (1)..( 8): Result.002 file - promoters60/1383074
gatcgaag

SEQ ID NO: 108709 - DNA, 8 bp, Unknown
  misc_feature (1)..( 8): Result.002 file - promoters60/1383074
gattgaag

SEQ ID NO: 108710 - DNA, 7 bp, Unknown
  misc_feature (1)..( 7): Result.002 file - promoters60/1383074
aagaatg

SEQ ID NO: 108711 - DNA, 7 bp, Unknown
  misc_feature (1)..( 7): Result.002 file - promoters60/1383074
aaggatg

SEQ ID NO: 108712 - DNA, 7 bp, Unknown
  misc_feature (1)..( 7): Result.002 file - promoters60/1383074
gtatctt

SEQ ID NO: 108713 - DNA, 7 bp, Unknown
  misc_feature (1)..( 7): Result.002 file - promoters60/1383074
gtagctt

SEQ ID NO: 108714 - DNA, 9 bp, Unknown
  misc_feature (1)..( 9): Result.002 file - promoters60/1383074
aagtgaaca

SEQ ID NO: 108715 - DNA, 9 bp, Unknown
  misc_feature (1)..( 9): Result.002 file - promoters60/1383074
aagtaaaca

SEQ ID NO: 108716 - DNA, 6 bp, Unknown
  misc_feature (1)..( 6): Result.002 file - promoters60/1383074
attata

SEQ ID NO: 108717 - DNA, 6 bp, Unknown
  misc_feature (1)..( 6): Result.002 file - promoters60/1383074
attata

SEQ ID NO: 108718 - DNA, 8 bp, Unknown
  misc_feature (1)..( 8): Result.002 file - promoters60/1383074
aaaaaaaa

SEQ ID NO: 108719 - DNA, 8 bp, Unknown
  misc_feature (1)..( 8): Result.002 file - promoters60/1383074
aaataaaa

SEQ ID NO: 108720 - DNA, 7 bp, Unknown
  misc_feature (1)..( 7): Result.002 file - promoters60/1383074
ttggttt

SEQ ID NO: 108721 - DNA, 7 bp, Unknown
  misc_feature (1)..( 7): Result.002 file - promoters60/1383074
ttgtttt

SEQ ID NO: 108722 - DNA, 6 bp, Unknown
  misc_feature (1)..( 6): Result.002 file - promoters60/1383214
cataat

SEQ ID NO: 108723 - DNA, 6 bp, Unknown
  misc_feature (1)..( 6): Result.002 file - promoters60/1383214
cataat

SEQ ID NO: 108724 - DNA, 6 bp, Unknown
  misc_feature (1)..( 6): Result.002 file - promoters60/1383214
tggttt

SEQ ID NO: 108725 - DNA, 6 bp, Unknown
  misc_feature (1)..( 6): Result.002 file - promoters60/1383214
tggttt

SEQ ID NO: 108726 - DNA, 7 bp, Unknown
  misc_feature (1)..( 7): Result.002 file - promoters60/1383214
accagaa

SEQ ID NO: 108727 - DNA, 7 bp, Unknown
  misc_feature (1)..( 7): Result.002 file - promoters60/1383214
acccgaa

SEQ ID NO: 108728 - DNA, 7 bp, Unknown
  misc_feature (1)..( 7): Result.002 file - promoters60/1383214
tcagaac

SEQ ID NO: 108729 - DNA, 7 bp, Unknown
  misc_feature (1)..( 7): Result.002 file - promoters60/1383214
tcaaaac

SEQ ID NO: 108730 - DNA, 8 bp, Unknown
  misc_feature (1)..( 8): Result.002 file - promoters60/1383214
ttttattt

SEQ ID NO: 108731 - DNA, 8 bp, Unknown
  misc_feature (1)..( 8): Result.002 file - promoters60/1383214
tttcattt

SEQ ID NO: 108732 - DNA, 7 bp, Unknown
  misc_feature (1)..( 7): Result.002 file - promoters60/1383214
aaaaatt

SEQ ID NO: 108733 - DNA, 7 bp, Unknown
  misc_feature (1)..( 7): Result.002 file - promoters60/1383214
aaagatt

SEQ ID NO: 108734 - DNA, 8 bp, Unknown
  misc_feature (1)..( 8): Result.002 file - promoters60/1383214
atatataa

SEQ ID NO: 108735 - DNA, 8 bp, Unknown
  misc_feature (1)..( 8): Result.002 file - promoters60/1383214
ataaataa

SEQ ID NO: 108736 - DNA, 12 bp, Unknown
  misc_feature (1)..( 12): Result.002 file - promoters60/1383214
atatctataaag

SEQ ID NO: 108737 - DNA, 12 bp, Unknown
  misc_feature (1)..( 12): Result.002 file - promoters60/1383214
ctatatatattc

SEQ ID NO: 108738 - DNA, 12 bp, Unknown
  misc_feature (1)..( 12): Result.002 file - promoters60/1383214
atatatataaag

SEQ ID NO: 108739 - DNA, 9 bp, Unknown
  misc_feature (1)..( 9): Result.002 file - promoters60/1383214
tttgagtta

SEQ ID NO: 108740 - DNA, 9 bp, Unknown
  misc_feature (1)..( 9): Result.002 file - promoters60/1383214
tttaagttt

SEQ ID NO: 108741 - DNA, 9 bp, Unknown
  misc_feature (1)..( 9): Result.002 file - promoters60/1383214
cataaattt

SEQ ID NO: 108742 - DNA, 9 bp, Unknown
  misc_feature (1)..( 9): Result.002 file - promoters60/1383214
acatggttt

SEQ ID NO: 108743 - DNA, 9 bp, Unknown
  misc_feature (1)..( 9): Result.002 file - promoters60/1383214
acatgtttt

SEQ ID NO: 108744 - DNA, 7 bp, Unknown
  misc_feature (1)..( 7): Result.002 file - promoters60/1383214
aaacata

SEQ ID NO: 108745 - DNA, 7 bp, Unknown
  misc_feature (1)..( 7): Result.002 file - promoters60/1383214
aaatata

SEQ ID NO: 108746 - DNA, 7 bp, Unknown
  misc_feature (1)..( 7): Result.002 file - promoters60/1383214
atataca

SEQ ID NO: 108747 - DNA, 7 bp, Unknown
  misc_feature (1)..( 7): Result.002 file - promoters60/1383214
atataca

SEQ ID NO: 108748 - DNA, 7 bp, Unknown
  misc_feature (1)..( 7): Result.002 file - promoters60/1383214
ttaagtt

SEQ ID NO: 108749 - DNA, 7 bp, Unknown
  misc_feature (1)..( 7): Result.002 file - promoters60/1383214
ttaagtt

SEQ ID NO: 108750 - DNA, 7 bp, Unknown
  misc_feature (1)..( 7): Result.002 file - promoters60/1383214
taaaact

SEQ ID NO: 108751 - DNA, 7 bp, Unknown
  misc_feature (1)..( 7): Result.002 file - promoters60/1383214
taacact

SEQ ID NO: 108752 - DNA, 7 bp, Unknown
  misc_feature (1)..( 7): Result.002 file - promoters60/1383214
aaaatca

SEQ ID NO: 108753 - DNA, 7 bp, Unknown
  misc_feature (1)..( 7): Result.002 file - promoters60/1383214
aaaatca

SEQ ID NO: 108754 - DNA, 8 bp, Unknown
  misc_feature (1)..( 8): Result.002 file - promoters60/1383214
atttacat

SEQ ID NO: 108755 - DNA, 8 bp, Unknown
  misc_feature (1)..( 8): Result.002 file - promoters60/1383214
attcacat

SEQ ID NO: 108756 - DNA, 6 bp, Unknown
  misc_feature (1)..( 6): Result.002 file - promoters60/1383214
atattt

SEQ ID NO: 108757 - DNA, 6 bp, Unknown
  misc_feature (1)..( 6): Result.002 file - promoters60/1383214
atattt

SEQ ID NO: 108758 - DNA, 7 bp, Unknown
  misc_feature (1)..( 7): Result.002 file - promoters60/1383214
tcataaa

SEQ ID NO: 108759 - DNA, 7 bp, Unknown
  misc_feature (1)..( 7): Result.002 file - promoters60/1383214
tcaaaaa

SEQ ID NO: 108760 - DNA, 6 bp, Unknown
  misc_feature (1)..( 6): Result.002 file - promoters60/1383214
attgct

SEQ ID NO: 108761 - DNA, 6 bp, Unknown
  misc_feature (1)..( 6): Result.002 file - promoters60/1383214
attgct

SEQ ID NO: 108762 - DNA, 6 bp, Unknown
  misc_feature (1)..( 6): Result.002 file - promoters60/1383214
atctaa

SEQ ID NO: 108763 - DNA, 6 bp, Unknown
  misc_feature (1)..( 6): Result.002 file - promoters60/1383214
atctaa

SEQ ID NO: 108764 - DNA, 7 bp, Unknown
  misc_feature (1)..( 7): Result.002 file - promoters60/1383214
aaccacc

SEQ ID NO: 108765 - DNA, 7 bp, Unknown
  misc_feature (1)..( 7): Result.002 file - promoters60/1383214
aaccacc

SEQ ID NO: 108766 - DNA, 7 bp, Unknown
  misc_feature (1)..( 7): Result.002 file - promoters60/1383214
atggtca

SEQ ID NO: 108767 - DNA, 7 bp, Unknown
  misc_feature (1)..( 7): Result.002 file - promoters60/1383214
atggtca

SEQ ID NO: 108768 - DNA, 8 bp, Unknown
  misc_feature (1)..( 8): Result.002 file - promoters60/1383214
agaacaat

SEQ ID NO: 108769 - DNA, 8 bp, Unknown
  misc_feature (1)..( 8): Result.002 file - promoters60/1383214
agaccaat

SEQ ID NO: 108770 - DNA, 10 bp, Unknown
  misc_feature (1)..( 10): Result.002 file - promoters60/1383312
tggaaacaat

SEQ ID NO: 108771 - DNA, 10 bp, Unknown
  misc_feature (1)..( 10): Result.002 file - promoters60/1383312
tggagacagc

SEQ ID NO: 108772 - DNA, 10 bp, Unknown
  misc_feature (1)..( 10): Result.002 file - promoters60/1383312
ttgaatcaat

SEQ ID NO: 108773 - DNA, 12 bp, Unknown
  misc_feature (1)..( 12): Result.002 file - promoters60/1383312
gtaatttctttt

SEQ ID NO: 108774 - DNA, 11 bp, Unknown
  misc_feature (1)..( 11): Result.002 file - promoters60/1383312
taatctcttgt

SEQ ID NO: 108775 - DNA, 12 bp, Unknown
  misc_feature (1)..( 12): Result.002 file - promoters60/1383312
ctgatttgtttt

SEQ ID NO: 108776 - DNA, 12 bp, Unknown
  misc_feature (1)..( 12): Result.002 file - promoters60/1383312
ttgatttagggt

SEQ ID NO: 108777 - DNA, 8 bp, Unknown
  misc_feature (1)..( 8): Result.002 file - promoters60/1383312
acaatttt

SEQ ID NO: 108778 - DNA, 8 bp, Unknown
  misc_feature (1)..( 8): Result.002 file - promoters60/1383312
tcaacttt

SEQ ID NO: 108779 - DNA, 8 bp, Unknown
  misc_feature (1)..( 8): Result.002 file - promoters60/1383312
tcaacttc

SEQ ID NO: 108780 - DNA, 11 bp, Unknown
  misc_feature (1)..( 11): Result.002 file - promoters60/1383341
gtataggaaat

SEQ ID NO: 108781 - DNA, 11 bp, Unknown
  misc_feature (1)..( 11): Result.002 file - promoters60/1383341
aaataagaatg

SEQ ID NO: 108782 - DNA, 11 bp, Unknown
  misc_feature (1)..( 11): Result.002 file - promoters60/1383341
aaatagtaaat

SEQ ID NO: 108783 - DNA, 11 bp, Unknown
  misc_feature (1)..( 11): Result.002 file - promoters60/1383341
aaaaaagaaat

SEQ ID NO: 108784 - DNA, 11 bp, Unknown
  misc_feature (1)..( 11): Result.002 file - promoters60/1383341
atttaaaaata

SEQ ID NO: 108785 - DNA, 11 bp, Unknown
  misc_feature (1)..( 11): Result.002 file - promoters60/1383341
atttaaaaatt

SEQ ID NO: 108786 - DNA, 15 bp, Unknown
  misc_feature (1)..( 15): Result.002 file - promoters60/1383341
aaggaaagtaattat

SEQ ID NO: 108787 - DNA, 15 bp, Unknown
  misc_feature (1)..( 15): Result.002 file - promoters60/1383341
ctaaaaagtaaacaa

SEQ ID NO: 108788 - DNA, 15 bp, Unknown
  misc_feature (1)..( 15): Result.002 file - promoters60/1383341
cgttaaattaacgaa

SEQ ID NO: 108789 - DNA, 15 bp, Unknown
  misc_feature (1)..( 15): Result.002 file - promoters60/1383341
ctaaaaagtgggacc

SEQ ID NO: 108790 - DNA, 15 bp, Unknown
  misc_feature (1)..( 15): Result.002 file - promoters60/1383341
ataaaaaaaaacttt

SEQ ID NO: 108791 - DNA, 15 bp, Unknown
  misc_feature (1)..( 15): Result.002 file - promoters60/1383341
taaaaaagaaataaa

SEQ ID NO: 108792 - DNA, 11 bp, Unknown
  misc_feature (1)..( 11): Result.002 file - promoters60/1383341
attttaatctc

SEQ ID NO: 108793 - DNA, 11 bp, Unknown
  misc_feature (1)..( 11): Result.002 file - promoters60/1383341
attataaaata

SEQ ID NO: 108794 - DNA, 11 bp, Unknown
  misc_feature (1)..( 11): Result.002 file - promoters60/1383341
tttttattcta

SEQ ID NO: 108795 - DNA, 12 bp, Unknown
  misc_feature (1)..( 12): Result.002 file - promoters60/1383341
ggtatcaaacac

SEQ ID NO: 108796 - DNA, 12 bp, Unknown
  misc_feature (1)..( 12): Result.002 file - promoters60/1383341
tgttgtattcta

SEQ ID NO: 108797 - DNA, 12 bp, Unknown
  misc_feature (1)..( 12): Result.002 file - promoters60/1383341
ctttttacggcg

SEQ ID NO: 108798 - DNA, 9 bp, Unknown
  misc_feature (1)..( 9): Result.002 file - promoters60/1383341
ctttaattt

SEQ ID NO: 108799 - DNA, 9 bp, Unknown
  misc_feature (1)..( 9): Result.002 file - promoters60/1383341
gtttaatga

SEQ ID NO: 108800 - DNA, 9 bp, Unknown
  misc_feature (1)..( 9): Result.002 file - promoters60/1383341
tttttattc

SEQ ID NO: 108801 - DNA, 9 bp, Unknown
  misc_feature (1)..( 9): Result.002 file - promoters60/1383341
cttgaataa

SEQ ID NO: 108802 - DNA, 9 bp, Unknown
  misc_feature (1)..( 9): Result.002 file - promoters60/1383341
cgttaatgt

SEQ ID NO: 108803 - DNA, 9 bp, Unknown
  misc_feature (1)..( 9): Result.002 file - promoters60/1383341
aattaatct

SEQ ID NO: 108804 - DNA, 9 bp, Unknown
  misc_feature (1)..( 9): Result.002 file - promoters60/1383341
aaatgaaaa

SEQ ID NO: 108805 - DNA, 9 bp, Unknown
  misc_feature (1)..( 9): Result.002 file - promoters60/1383341
aaaagaaat

SEQ ID NO: 108806 - DNA, 9 bp, Unknown
  misc_feature (1)..( 9): Result.002 file - promoters60/1383341
aaatcaaat

SEQ ID NO: 108807 - DNA, 9 bp, Unknown
  misc_feature (1)..( 9): Result.002 file - promoters60/1383341
atatgaaaa

SEQ ID NO: 108808 - DNA, 9 bp, Unknown
  misc_feature (1)..( 9): Result.002 file - promoters60/1383341
aaaaaaaat

SEQ ID NO: 108809 - DNA, 9 bp, Unknown
  misc_feature (1)..( 9): Result.002 file - promoters60/1383341
tttaaaaat

SEQ ID NO: 108810 - DNA, 9 bp, Unknown
  misc_feature (1)..( 9): Result.002 file - promoters60/1383341
tgaaaaatg

SEQ ID NO: 108811 - DNA, 9 bp, Unknown
  misc_feature (1)..( 9): Result.002 file - promoters60/1383341
ttaaaaata

SEQ ID NO: 108812 - DNA, 9 bp, Unknown
  misc_feature (1)..( 9): Result.002 file - promoters60/1383341
atgaaaatg

SEQ ID NO: 108813 - DNA, 9 bp, Unknown
  misc_feature (1)..( 9): Result.002 file - promoters60/1383341
ataagaatg

SEQ ID NO: 108814 - DNA, 9 bp, Unknown
  misc_feature (1)..( 9): Result.002 file - promoters60/1383341
ttaaaaatt

SEQ ID NO: 108815 - DNA, 9 bp, Unknown
  misc_feature (1)..( 9): Result.002 file - promoters60/1383341
ttataaacc

SEQ ID NO: 108816 - DNA, 12 bp, Unknown
  misc_feature (1)..( 12): Result.002 file - promoters60/1383341
tttgaaatggta

SEQ ID NO: 108817 - DNA, 12 bp, Unknown
  misc_feature (1)..( 12): Result.002 file - promoters60/1383341
tttaaaaattcg

SEQ ID NO: 108818 - DNA, 12 bp, Unknown
  misc_feature (1)..( 12): Result.002 file - promoters60/1383341
ggtgaaatagta

SEQ ID NO: 108819 - DNA, 13 bp, Unknown
  misc_feature (1)..( 13): Result.002 file - promoters60/1383341
aataagaatgtca

SEQ ID NO: 108820 - DNA, 13 bp, Unknown
  misc_feature (1)..( 13): Result.002 file - promoters60/1383341
ttagtaaatagtt

SEQ ID NO: 108821 - DNA, 13 bp, Unknown
  misc_feature (1)..( 13): Result.002 file - promoters60/1383341
aataaaaaactca

SEQ ID NO: 108822 - DNA, 12 bp, Unknown
  misc_feature (1)..( 12): Result.002 file - promoters60/1383341
taacaaaaaaaa

SEQ ID NO: 108823 - DNA, 12 bp, Unknown
  misc_feature (1)..( 12): Result.002 file - promoters60/1383341
gtccaaaaaaga

SEQ ID NO: 108824 - DNA, 12 bp, Unknown
  misc_feature (1)..( 12): Result.002 file - promoters60/1383341
taataaaaaact

SEQ ID NO: 108825 - DNA, 12 bp, Unknown
  misc_feature (1)..( 12): Result.002 file - promoters60/1383341
ttataaaaaaga

SEQ ID NO: 108826 - DNA, 12 bp, Unknown
  misc_feature (1)..( 12): Result.002 file - promoters60/1383341
ctggaaacactt

SEQ ID NO: 108827 - DNA, 12 bp, Unknown
  misc_feature (1)..( 12): Result.002 file - promoters60/1383341
atttaaaaattc

SEQ ID NO: 108828 - DNA, 11 bp, Unknown
  misc_feature (1)..( 11): Result.002 file - promoters60/1383485
ccagaattaag

SEQ ID NO: 108829 - DNA, 11 bp, Unknown
  misc_feature (1)..( 11): Result.002 file - promoters60/1383485
ccataattagt

SEQ ID NO: 108830 - DNA, 11 bp, Unknown
  misc_feature (1)..( 11): Result.002 file - promoters60/1383485
atgtaattaag

SEQ ID NO: 108831 - DNA, 11 bp, Unknown
  misc_feature (1)..( 11): Result.002 file - promoters60/1383485
aaatacttaag

SEQ ID NO: 108832 - DNA, 11 bp, Unknown
  misc_feature (1)..( 11): Result.002 file - promoters60/1383485
tcataattttg

SEQ ID NO: 108833 - DNA, 9 bp, Unknown
  misc_feature (1)..( 9): Result.002 file - promoters60/1383485
tgtaaaaat

SEQ ID NO: 108834 - DNA, 9 bp, Unknown
  misc_feature (1)..( 9): Result.002 file - promoters60/1383485
tgtaaataa

SEQ ID NO: 108835 - DNA, 9 bp, Unknown
  misc_feature (1)..( 9): Result.002 file - promoters60/1383485
agtaaaatt

SEQ ID NO: 108836 - DNA, 9 bp, Unknown
  misc_feature (1)..( 9): Result.002 file - promoters60/1383485
ggtacataa

SEQ ID NO: 108837 - DNA, 11 bp, Unknown
  misc_feature (1)..( 11): Result.002 file - promoters60/1383514
aaatacattta

SEQ ID NO: 108838 - DNA, 11 bp, Unknown
  misc_feature (1)..( 11): Result.002 file - promoters60/1383514
aaatacttttt

SEQ ID NO: 108839 - DNA, 11 bp, Unknown
  misc_feature (1)..( 11): Result.002 file - promoters60/1383514
aataacagtta

SEQ ID NO: 108840 - DNA, 10 bp, Unknown
  misc_feature (1)..( 10): Result.002 file - promoters60/1383514
atataaaata

SEQ ID NO: 108841 - DNA, 10 bp, Unknown
  misc_feature (1)..( 10): Result.002 file - promoters60/1383514
gaataaaatg

SEQ ID NO: 108842 - DNA, 10 bp, Unknown
  misc_feature (1)..( 10): Result.002 file - promoters60/1383514
cagtaaaata

SEQ ID NO: 108843 - DNA, 10 bp, Unknown
  misc_feature (1)..( 10): Result.002 file - promoters60/1383514
cagtaaaaaa

SEQ ID NO: 108844 - DNA, 8 bp, Unknown
  misc_feature (1)..( 8): Result.002 file - promoters60/1383514
catataat

SEQ ID NO: 108845 - DNA, 8 bp, Unknown
  misc_feature (1)..( 8): Result.002 file - promoters60/1383514
catctaaa

SEQ ID NO: 108846 - DNA, 8 bp, Unknown
  misc_feature (1)..( 8): Result.002 file - promoters60/1383514
tgtctaaa

SEQ ID NO: 108847 - DNA, 8 bp, Unknown
  misc_feature (1)..( 8): Result.002 file - promoters60/1383514
taacaaac

SEQ ID NO: 108848 - DNA, 8 bp, Unknown
  misc_feature (1)..( 8): Result.002 file - promoters60/1383514
taaaaaaa

SEQ ID NO: 108849 - DNA, 8 bp, Unknown
  misc_feature (1)..( 8): Result.002 file - promoters60/1383514
aaacaaca

SEQ ID NO: 108850 - DNA, 8 bp, Unknown
  misc_feature (1)..( 8): Result.002 file - promoters60/1383514
ataaatac

SEQ ID NO: 108851 - DNA, 8 bp, Unknown
  misc_feature (1)..( 8): Result.002 file - promoters60/1383514
ataaatag

SEQ ID NO: 108852 - DNA, 8 bp, Unknown
  misc_feature (1)..( 8): Result.002 file - promoters60/1383514
ataaatac

SEQ ID NO: 108853 - DNA, 7 bp, Unknown
  misc_feature (1)..( 7): Result.002 file - promoters60/1383514
tttctta

SEQ ID NO: 108854 - DNA, 7 bp, Unknown
  misc_feature (1)..( 7): Result.002 file - promoters60/1383514
tttgtta

SEQ ID NO: 108855 - DNA, 7 bp, Unknown
  misc_feature (1)..( 7): Result.002 file - promoters60/1383514
tttgtta

SEQ ID NO: 108856 - DNA, 8 bp, Unknown
  misc_feature (1)..( 8): Result.002 file - promoters60/1383514
ataacttt

SEQ ID NO: 108857 - DNA, 8 bp, Unknown
  misc_feature (1)..( 8): Result.002 file - promoters60/1383514
atatctta

SEQ ID NO: 108858 - DNA, 8 bp, Unknown
  misc_feature (1)..( 8): Result.002 file - promoters60/1383514
tgatctta

SEQ ID NO: 108859 - DNA, 7 bp, Unknown
  misc_feature (1)..( 7): Result.002 file - promoters60/1383514
aattaaa

SEQ ID NO: 108860 - DNA, 7 bp, Unknown
  misc_feature (1)..( 7): Result.002 file - promoters60/1383514
aataaaa

SEQ ID NO: 108861 - DNA, 7 bp, Unknown
  misc_feature (1)..( 7): Result.002 file - promoters60/1383514
aatcaaa

SEQ ID NO: 108862 - DNA, 14 bp, Unknown
  misc_feature (1)..( 14): Result.002 file - promoters60/1383552
aaagcaaaacacat

SEQ ID NO: 108863 - DNA, 14 bp, Unknown
  misc_feature (1)..( 14): Result.002 file - promoters60/1383552
tccacaaaacatcc

SEQ ID NO: 108864 - DNA, 14 bp, Unknown
  misc_feature (1)..( 14): Result.002 file - promoters60/1383552
acgccaaaagacac

SEQ ID NO: 108865 - DNA, 14 bp, Unknown
  misc_feature (1)..( 14): Result.002 file - promoters60/1383552
tccacgaaactact

SEQ ID NO: 108866 - DNA, 14 bp, Unknown
  misc_feature (1)..( 14): Result.002 file - promoters60/1383552
aactacaaatatcg

SEQ ID NO: 108867 - DNA, 14 bp, Unknown
  misc_feature (1)..( 14): Result.002 file - promoters60/1383552
tcttaaggatatcg

SEQ ID NO: 108868 - DNA, 14 bp, Unknown
  misc_feature (1)..( 14): Result.002 file - promoters60/1383552
gctataagacagta

SEQ ID NO: 108869 - DNA, 13 bp, Unknown
  misc_feature (1)..( 13): Result.002 file - promoters60/1383552
acacatacaaacg

SEQ ID NO: 108870 - DNA, 13 bp, Unknown
  misc_feature (1)..( 13): Result.002 file - promoters60/1383552
atacatacagatc

SEQ ID NO: 108871 - DNA, 13 bp, Unknown
  misc_feature (1)..( 13): Result.002 file - promoters60/1383552
tagcatacaaacg

SEQ ID NO: 108872 - DNA, 13 bp, Unknown
  misc_feature (1)..( 13): Result.002 file - promoters60/1383552
ccaactacaaata

SEQ ID NO: 108873 - DNA, 13 bp, Unknown
  misc_feature (1)..( 13): Result.002 file - promoters60/1383552
cacaaaacatcct

SEQ ID NO: 108874 - DNA, 13 bp, Unknown
  misc_feature (1)..( 13): Result.002 file - promoters60/1383552
caaaagacacgtt

SEQ ID NO: 108875 - DNA, 8 bp, Unknown
  misc_feature (1)..( 8): Result.002 file - promoters60/1383569
atttgaat

SEQ ID NO: 108876 - DNA, 8 bp, Unknown
  misc_feature (1)..( 8): Result.002 file - promoters60/1383569
attttaat

SEQ ID NO: 108877 - DNA, 8 bp, Unknown
  misc_feature (1)..( 8): Result.002 file - promoters60/1383569
attttaaa

SEQ ID NO: 108878 - DNA, 8 bp, Unknown
  misc_feature (1)..( 8): Result.002 file - promoters60/1383569
attttaca

SEQ ID NO: 108879 - DNA, 14 bp, Unknown
  misc_feature (1)..( 14): Result.002 file - promoters60/1383569
ataatagtttaaaa

SEQ ID NO: 108880 - DNA, 14 bp, Unknown
  misc_feature (1)..( 14): Result.002 file - promoters60/1383569
atattagctggtgc

SEQ ID NO: 108881 - DNA, 14 bp, Unknown
  misc_feature (1)..( 14): Result.002 file - promoters60/1383569
ccattggctggtgc

SEQ ID NO: 108882 - DNA, 7 bp, Unknown
  misc_feature (1)..( 7): Result.002 file - promoters60/1383569
gaagatg

SEQ ID NO: 108883 - DNA, 7 bp, Unknown
  misc_feature (1)..( 7): Result.002 file - promoters60/1383569
taagatg

SEQ ID NO: 108884 - DNA, 7 bp, Unknown
  misc_feature (1)..( 7): Result.002 file - promoters60/1383569
taagatt

SEQ ID NO: 108885 - DNA, 11 bp, Unknown
  misc_feature (1)..( 11): Result.002 file - promoters60/1383569
aatgaaatagt

SEQ ID NO: 108886 - DNA, 11 bp, Unknown
  misc_feature (1)..( 11): Result.002 file - promoters60/1383569
taagaaatagt

SEQ ID NO: 108887 - DNA, 11 bp, Unknown
  misc_feature (1)..( 11): Result.002 file - promoters60/1383569
aataaaataaa

SEQ ID NO: 108888 - DNA, 7 bp, Unknown
  misc_feature (1)..( 7): Result.002 file - promoters60/1383569
atttaaa

SEQ ID NO: 108889 - DNA, 7 bp, Unknown
  misc_feature (1)..( 7): Result.002 file - promoters60/1383569
gtttaaa

SEQ ID NO: 108890 - DNA, 7 bp, Unknown
  misc_feature (1)..( 7): Result.002 file - promoters60/1383569
atttaaa

SEQ ID NO: 108891 - DNA, 10 bp, Unknown
  misc_feature (1)..( 10): Result.002 file - promoters60/1383569
aatataaact

SEQ ID NO: 108892 - DNA, 10 bp, Unknown
  misc_feature (1)..( 10): Result.002 file - promoters60/1383569
agtttaaact

SEQ ID NO: 108893 - DNA, 10 bp, Unknown
  misc_feature (1)..( 10): Result.002 file - promoters60/1383569
aatttaaaca

SEQ ID NO: 108894 - DNA, 13 bp, Unknown
  misc_feature (1)..( 13): Result.002 file - promoters60/1383569
aatattaaaataa

SEQ ID NO: 108895 - DNA, 13 bp, Unknown
  misc_feature (1)..( 13): Result.002 file - promoters60/1383569
aatattaatataa

SEQ ID NO: 108896 - DNA, 13 bp, Unknown
  misc_feature (1)..( 13): Result.002 file - promoters60/1383569
aatttaaacagaa

SEQ ID NO: 108897 - DNA, 7 bp, Unknown
  misc_feature (1)..( 7): Result.002 file - promoters60/1383569
aattgat

SEQ ID NO: 108898 - DNA, 7 bp, Unknown
  misc_feature (1)..( 7): Result.002 file - promoters60/1383569
gattgat

SEQ ID NO: 108899 - DNA, 7 bp, Unknown
  misc_feature (1)..( 7): Result.002 file - promoters60/1383569
gattgaa

SEQ ID NO: 108900 - DNA, 13 bp, Unknown
  misc_feature (1)..( 13): Result.002 file - promoters60/1383661
gagactgcatcat

SEQ ID NO: 108901 - DNA, 13 bp, Unknown
  misc_feature (1)..( 13): Result.002 file - promoters60/1383661
atggctgaatctt

SEQ ID NO: 108902 - DNA, 13 bp, Unknown
  misc_feature (1)..( 13): Result.002 file - promoters60/1383661
agacatgaatcag

SEQ ID NO: 108903 - DNA, 13 bp, Unknown
  misc_feature (1)..( 13): Result.002 file - promoters60/1383661
gctccagaagcag

SEQ ID NO: 108904 - DNA, 13 bp, Unknown
  misc_feature (1)..( 13): Result.002 file - promoters60/1383661
atggttgaactca

SEQ ID NO: 108905 - DNA, 14 bp, Unknown
  misc_feature (1)..( 14): Result.002 file - promoters60/1384016
aaagcaaaacacat

SEQ ID NO: 108906 - DNA, 14 bp, Unknown
  misc_feature (1)..( 14): Result.002 file - promoters60/1384016
tccacaaaacatcc

SEQ ID NO: 108907 - DNA, 14 bp, Unknown
  misc_feature (1)..( 14): Result.002 file - promoters60/1384016
tacataaaacaaaa

SEQ ID NO: 108908 - DNA, 14 bp, Unknown
  misc_feature (1)..( 14): Result.002 file - promoters60/1384016
tggagcaaataaat

SEQ ID NO: 108909 - DNA, 14 bp, Unknown
  misc_feature (1)..( 14): Result.002 file - promoters60/1384016
tccacgaaactact

SEQ ID NO: 108910 - DNA, 14 bp, Unknown
  misc_feature (1)..( 14): Result.002 file - promoters60/1384016
gctataagacagta

SEQ ID NO: 108911 - DNA, 7 bp, Unknown
  misc_feature (1)..( 7): Result.002 file - promoters60/1384161
aattttg

SEQ ID NO: 108912 - DNA, 7 bp, Unknown
  misc_feature (1)..( 7): Result.002 file - promoters60/1384161
aatgttg

SEQ ID NO: 108913 - DNA, 12 bp, Unknown
  misc_feature (1)..( 12): Result.002 file - promoters60/1384161
cctgctttaaat

SEQ ID NO: 108914 - DNA, 12 bp, Unknown
  misc_feature (1)..( 12): Result.002 file - promoters60/1384161
tttgctataaat

SEQ ID NO: 108915 - DNA, 12 bp, Unknown
  misc_feature (1)..( 12): Result.002 file - promoters60/1384161
ccttcttccagg

SEQ ID NO: 108916 - DNA, 13 bp, Unknown
  misc_feature (1)..( 13): Result.002 file - promoters60/1384161
tctttttaatttt

SEQ ID NO: 108917 - DNA, 13 bp, Unknown
  misc_feature (1)..( 13): Result.002 file - promoters60/1384161
tctttttaatttt

SEQ ID NO: 108918 - DNA, 13 bp, Unknown
  misc_feature (1)..( 13): Result.002 file - promoters60/1384161
tgctgctaatttg

SEQ ID NO: 108919 - DNA, 7 bp, Unknown
  misc_feature (1)..( 7): Result.002 file - promoters60/1384161
aatatct

SEQ ID NO: 108920 - DNA, 7 bp, Unknown
  misc_feature (1)..( 7): Result.002 file - promoters60/1384161
aatatct

SEQ ID NO: 108921 - DNA, 6 bp, Unknown
  misc_feature (1)..( 6): Result.002 file - promoters60/1384161
ctaaat

SEQ ID NO: 108922 - DNA, 6 bp, Unknown
  misc_feature (1)..( 6): Result.002 file - promoters60/1384161
ctaaat

SEQ ID NO: 108923 - DNA, 7 bp, Unknown
  misc_feature (1)..( 7): Result.002 file - promoters60/1384161
ctgcaaa

SEQ ID NO: 108924 - DNA, 7 bp, Unknown
  misc_feature (1)..( 7): Result.002 file - promoters60/1384161
ctgtaaa

SEQ ID NO: 108925 - DNA, 9 bp, Unknown
  misc_feature (1)..( 9): Result.002 file - promoters60/1384161
taaaattgt

SEQ ID NO: 108926 - DNA, 9 bp, Unknown
  misc_feature (1)..( 9): Result.002 file - promoters60/1384161
taaaaatgt

SEQ ID NO: 108927 - DNA, 6 bp, Unknown
  misc_feature (1)..( 6): Result.002 file - promoters60/1384161
tgttga

SEQ ID NO: 108928 - DNA, 6 bp, Unknown
  misc_feature (1)..( 6): Result.002 file - promoters60/1384161
tgttga

SEQ ID NO: 108929 - DNA, 8 bp, Unknown
  misc_feature (1)..( 8): Result.002 file - promoters60/1384161
cctgaact

SEQ ID NO: 108930 - DNA, 8 bp, Unknown
  misc_feature (1)..( 8): Result.002 file - promoters60/1384161
tttgaact

SEQ ID NO: 108931 - DNA, 8 bp, Unknown
  misc_feature (1)..( 8): Result.002 file - promoters60/1384161
ttttaact

SEQ ID NO: 108932 - DNA, 6 bp, Unknown
  misc_feature (1)..( 6): Result.002 file - promoters60/1384161
cagttg

SEQ ID NO: 108933 - DNA, 6 bp, Unknown
  misc_feature (1)..( 6): Result.002 file - promoters60/1384161
cagttg

SEQ ID NO: 108934 - DNA, 8 bp, Unknown
  misc_feature (1)..( 8): Result.002 file - promoters60/1384161
gtttatta

SEQ ID NO: 108935 - DNA, 8 bp, Unknown
  misc_feature (1)..( 8): Result.002 file - promoters60/1384161
gtttctta

SEQ ID NO: 108936 - DNA, 7 bp, Unknown
  misc_feature (1)..( 7): Result.002 file - promoters60/1384161
tttagct

SEQ ID NO: 108937 - DNA, 7 bp, Unknown
  misc_feature (1)..( 7): Result.002 file - promoters60/1384161
tttagct

SEQ ID NO: 108938 - DNA, 6 bp, Unknown
  misc_feature (1)..( 6): Result.002 file - promoters60/1384161
tctata

SEQ ID NO: 108939 - DNA, 6 bp, Unknown
  misc_feature (1)..( 6): Result.002 file - promoters60/1384161
tctata

SEQ ID NO: 108940 - DNA, 8 bp, Unknown
  misc_feature (1)..( 8): Result.002 file - promoters60/1384161
atattttt

SEQ ID NO: 108941 - DNA, 8 bp, Unknown
  misc_feature (1)..( 8): Result.002 file - promoters60/1384161
atagtttt

SEQ ID NO: 108942 - DNA, 9 bp, Unknown
  misc_feature (1)..( 9): Result.002 file - promoters60/1384161
ttttcttag

SEQ ID NO: 108943 - DNA, 9 bp, Unknown
  misc_feature (1)..( 9): Result.002 file - promoters60/1384161
tttccttag

SEQ ID NO: 108944 - DNA, 7 bp, Unknown
  misc_feature (1)..( 7): Result.002 file - promoters60/1384161
tatatgt

SEQ ID NO: 108945 - DNA, 7 bp, Unknown
  misc_feature (1)..( 7): Result.002 file - promoters60/1384161
tatttgt

SEQ ID NO: 108946 - DNA, 8 bp, Unknown
  misc_feature (1)..( 8): Result.002 file - promoters60/1384161
attgattt

SEQ ID NO: 108947 - DNA, 8 bp, Unknown
  misc_feature (1)..( 8): Result.002 file - promoters60/1384161
atttattt

SEQ ID NO: 108948 - DNA, 15 bp, Unknown
  misc_feature (1)..( 15): Result.002 file - promoters60/1384169
cttaaagaaatgtta

SEQ ID NO: 108949 - DNA, 15 bp, Unknown
  misc_feature (1)..( 15): Result.002 file - promoters60/1384169
aaggaagaaacaaga

SEQ ID NO: 108950 - DNA, 15 bp, Unknown
  misc_feature (1)..( 15): Result.002 file - promoters60/1384169
tttatagaaatatta

SEQ ID NO: 108951 - DNA, 15 bp, Unknown
  misc_feature (1)..( 15): Result.002 file - promoters60/1384169
cttatcaaaaaacgg

SEQ ID NO: 108952 - DNA, 15 bp, Unknown
  misc_feature (1)..( 15): Result.002 file - promoters60/1384169
cttatcagagtataa

SEQ ID NO: 108953 - DNA, 15 bp, Unknown
  misc_feature (1)..( 15): Result.002 file - promoters60/1384169
gtcaaagattaaacc

SEQ ID NO: 108954 - DNA, 8 bp, Unknown
  misc_feature (1)..( 8): Result.002 file - promoters60/1384261
taatattt

SEQ ID NO: 108955 - DNA, 8 bp, Unknown
  misc_feature (1)..( 8): Result.002 file - promoters60/1384261
tgatattt

SEQ ID NO: 108956 - DNA, 8 bp, Unknown
  misc_feature (1)..( 8): Result.002 file - promoters60/1384261
taacatta

SEQ ID NO: 108957 - DNA, 8 bp, Unknown
  misc_feature (1)..( 8): Result.002 file - promoters60/1384261
aaaaaagg

SEQ ID NO: 108958 - DNA, 8 bp, Unknown
  misc_feature (1)..( 8): Result.002 file - promoters60/1384261
aaaaaaat

SEQ ID NO: 108959 - DNA, 8 bp, Unknown
  misc_feature (1)..( 8): Result.002 file - promoters60/1384261
aaaatatc

SEQ ID NO: 108960 - DNA, 6 bp, Unknown
  misc_feature (1)..( 6): Result.002 file - promoters60/1384261
aattta

SEQ ID NO: 108961 - DNA, 6 bp, Unknown
  misc_feature (1)..( 6): Result.002 file - promoters60/1384261
aattta

SEQ ID NO: 108962 - DNA, 6 bp, Unknown
  misc_feature (1)..( 6): Result.002 file - promoters60/1384261
caaata

SEQ ID NO: 108963 - DNA, 6 bp, Unknown
  misc_feature (1)..( 6): Result.002 file - promoters60/1384261
caaata

SEQ ID NO: 108964 - DNA, 8 bp, Unknown
  misc_feature (1)..( 8): Result.002 file - promoters60/1384261
ccaaaata

SEQ ID NO: 108965 - DNA, 8 bp, Unknown
  misc_feature (1)..( 8): Result.002 file - promoters60/1384261
ccaaaata

SEQ ID NO: 108966 - DNA, 6 bp, Unknown
  misc_feature (1)..( 6): Result.002 file - promoters60/1384261
aattta

SEQ ID NO: 108967 - DNA, 6 bp, Unknown
  misc_feature (1)..( 6): Result.002 file - promoters60/1384261
aattta

SEQ ID NO: 108968 - DNA, 10 bp, Unknown
  misc_feature (1)..( 10): Result.002 file - promoters60/1384261
aaaaatttca

SEQ ID NO: 108969 - DNA, 10 bp, Unknown
  misc_feature (1)..( 10): Result.002 file - promoters60/1384261
aaaaataaaa

SEQ ID NO: 108970 - DNA, 10 bp, Unknown
  misc_feature (1)..( 10): Result.002 file - promoters60/1384261
aaaaatattt

SEQ ID NO: 108971 - DNA, 6 bp, Unknown
  misc_feature (1)..( 6): Result.002 file - promoters60/1384261
taaaaa

SEQ ID NO: 108972 - DNA, 6 bp, Unknown
  misc_feature (1)..( 6): Result.002 file - promoters60/1384261
taaaaa

SEQ ID NO: 108973 - DNA, 9 bp, Unknown
  misc_feature (1)..( 9): Result.002 file - promoters60/1384261
attttattc

SEQ ID NO: 108974 - DNA, 9 bp, Unknown
  misc_feature (1)..( 9): Result.002 file - promoters60/1384261
atttcattc

SEQ ID NO: 108975 - DNA, 7 bp, Unknown
  misc_feature (1)..( 7): Result.002 file - promoters60/1384261
attgacc

SEQ ID NO: 108976 - DNA, 7 bp, Unknown
  misc_feature (1)..( 7): Result.002 file - promoters60/1384261
attaacc

SEQ ID NO: 108977 - DNA, 7 bp, Unknown
  misc_feature (1)..( 7): Result.002 file - promoters60/1384261
aaacaga

SEQ ID NO: 108978 - DNA, 7 bp, Unknown
  misc_feature (1)..( 7): Result.002 file - promoters60/1384261
aaagaga

SEQ ID NO: 108979 - DNA, 6 bp, Unknown
  misc_feature (1)..( 6): Result.002 file - promoters60/1384261
aaaatg

SEQ ID NO: 108980 - DNA, 6 bp, Unknown
  misc_feature (1)..( 6): Result.002 file - promoters60/1384261
aaaatg

SEQ ID NO: 108981 - DNA, 7 bp, Unknown
  misc_feature (1)..( 7): Result.002 file - promoters60/1384261
aatcttt

SEQ ID NO: 108982 - DNA, 7 bp, Unknown
  misc_feature (1)..( 7): Result.002 file - promoters60/1384261
aatcttt

SEQ ID NO: 108983 - DNA, 7 bp, Unknown
  misc_feature (1)..( 7): Result.002 file - promoters60/1384261
actaaaa

SEQ ID NO: 108984 - DNA, 7 bp, Unknown
  misc_feature (1)..( 7): Result.002 file - promoters60/1384261
actaaaa

SEQ ID NO: 108985 - DNA, 6 bp, Unknown
  misc_feature (1)..( 6): Result.002 file - promoters60/1384261
aaaatt

SEQ ID NO: 108986 - DNA, 6 bp, Unknown
  misc_feature (1)..( 6): Result.002 file - promoters60/1384261
aaaatt

SEQ ID NO: 108987 - DNA, 11 bp, Unknown
  misc_feature (1)..( 11): Result.002 file - promoters60/1384261
aaagtgaatat

SEQ ID NO: 108988 - DNA, 11 bp, Unknown
  misc_feature (1)..( 11): Result.002 file - promoters60/1384261
aaaatgattat

SEQ ID NO: 108989 - DNA, 7 bp, Unknown
  misc_feature (1)..( 7): Result.002 file - promoters60/1384261
acatatc

SEQ ID NO: 108990 - DNA, 7 bp, Unknown
  misc_feature (1)..( 7): Result.002 file - promoters60/1384261
acagatc

SEQ ID NO: 108991 - DNA, 8 bp, Unknown
  misc_feature (1)..( 8): Result.002 file - promoters60/1384261
tattaaat

SEQ ID NO: 108992 - DNA, 8 bp, Unknown
  misc_feature (1)..( 8): Result.002 file - promoters60/1384261
tatgaaat

SEQ ID NO: 108993 - DNA, 7 bp, Unknown
  misc_feature (1)..( 7): Result.002 file - promoters60/1384261
ctctctt

SEQ ID NO: 108994 - DNA, 7 bp, Unknown
  misc_feature (1)..( 7): Result.002 file - promoters60/1384261
ctccctt

SEQ ID NO: 108995 - DNA, 7 bp, Unknown
  misc_feature (1)..( 7): Result.002 file - promoters60/1384261
aaatagt

SEQ ID NO: 108996 - DNA, 7 bp, Unknown
  misc_feature (1)..( 7): Result.002 file - promoters60/1384261
aaaaagt

SEQ ID NO: 108997 - DNA, 9 bp, Unknown
  misc_feature (1)..( 9): Result.002 file - promoters60/1384329
tcatggatc

SEQ ID NO: 108998 - DNA, 9 bp, Unknown
  misc_feature (1)..( 9): Result.002 file - promoters60/1384329
gtatgaatc

SEQ ID NO: 108999 - DNA, 9 bp, Unknown
  misc_feature (1)..( 9): Result.002 file - promoters60/1384329
gtatgaact

SEQ ID NO: 109000 - DNA, 9 bp, Unknown
  misc_feature (1)..( 9): Result.002 file - promoters60/1384329
actaaaaca

SEQ ID NO: 109001 - DNA, 9 bp, Unknown
  misc_feature (1)..( 9): Result.002 file - promoters60/1384329
aataataca

SEQ ID NO: 109002 - DNA, 9 bp, Unknown
  misc_feature (1)..( 9): Result.002 file - promoters60/1384329
tggaaaaca

SEQ ID NO: 109003 - DNA, 9 bp, Unknown
  misc_feature (1)..( 9): Result.002 file - promoters60/1384329
aatattaca

SEQ ID NO: 109004 - DNA, 7 bp, Unknown
  misc_feature (1)..( 7): Result.002 file - promoters60/1384329
tgaccaa

SEQ ID NO: 109005 - DNA, 7 bp, Unknown
  misc_feature (1)..( 7): Result.002 file - promoters60/1384329
tgaccaa

SEQ ID NO: 109006 - DNA, 7 bp, Unknown
  misc_feature (1)..( 7): Result.002 file - promoters60/1384329
tgatcaa

SEQ ID NO: 109007 - DNA, 7 bp, Unknown
  misc_feature (1)..( 7): Result.002 file - promoters60/1384329
cgaccaa

SEQ ID NO: 109008 - DNA, 7 bp, Unknown
  misc_feature (1)..( 7): Result.002 file - promoters60/1384329
tgaccaa

SEQ ID NO: 109009 - DNA, 7 bp, Unknown
  misc_feature (1)..( 7): Result.002 file - promoters60/1384329
tgatcaa

SEQ ID NO: 109010 - DNA, 7 bp, Unknown
  misc_feature (1)..( 7): Result.002 file - promoters60/1384329
ggaaaaa

SEQ ID NO: 109011 - DNA, 7 bp, Unknown
  misc_feature (1)..( 7): Result.002 file - promoters60/1384329
agaaaaa

SEQ ID NO: 109012 - DNA, 7 bp, Unknown
  misc_feature (1)..( 7): Result.002 file - promoters60/1384329
ggaaaac

SEQ ID NO: 109013 - DNA, 11 bp, Unknown
  misc_feature (1)..( 11): Result.002 file - promoters60/1385347
aaactgtgaaa

SEQ ID NO: 109014 - DNA, 11 bp, Unknown
  misc_feature (1)..( 11): Result.002 file - promoters60/1385347
aaaatgtgaaa

SEQ ID NO: 109015 - DNA, 11 bp, Unknown
  misc_feature (1)..( 11): Result.002 file - promoters60/1385347
aaaataatttt

SEQ ID NO: 109016 - DNA, 12 bp, Unknown
  misc_feature (1)..( 12): Result.002 file - promoters60/1385347
ttgatagtttag

SEQ ID NO: 109017 - DNA, 8 bp, Unknown
  misc_feature (1)..( 8): Result.002 file - promoters60/1385347
aatgtgat

SEQ ID NO: 109018 - DNA, 8 bp, Unknown
  misc_feature (1)..( 8): Result.002 file - promoters60/1385347
tttgtgat

SEQ ID NO: 109019 - DNA, 8 bp, Unknown
  misc_feature (1)..( 8): Result.002 file - promoters60/1385347
tttttgag

SEQ ID NO: 109020 - DNA, 8 bp, Unknown
  misc_feature (1)..( 8): Result.002 file - promoters60/1385347
tttttgcc

SEQ ID NO: 109021 - DNA, 7 bp, Unknown
  misc_feature (1)..( 7): Result.002 file - promoters60/1385347
attttac

SEQ ID NO: 109022 - DNA, 7 bp, Unknown
  misc_feature (1)..( 7): Result.002 file - promoters60/1385347
attttaa

SEQ ID NO: 109023 - DNA, 8 bp, Unknown
  misc_feature (1)..( 8): Result.002 file - promoters60/1385347
tgttttaa

SEQ ID NO: 109024 - DNA, 9 bp, Unknown
  misc_feature (1)..( 9): Result.002 file - promoters60/1385347
atgttgtaa

SEQ ID NO: 109025 - DNA, 8 bp, Unknown
  misc_feature (1)..( 8): Result.002 file - promoters60/1385347
atgaaatg

SEQ ID NO: 109026 - DNA, 8 bp, Unknown
  misc_feature (1)..( 8): Result.002 file - promoters60/1385347
ctgaaatt

SEQ ID NO: 109027 - DNA, 8 bp, Unknown
  misc_feature (1)..( 8): Result.002 file - promoters60/1385347
ttgatatg

SEQ ID NO: 109028 - DNA, 8 bp, Unknown
  misc_feature (1)..( 8): Result.002 file - promoters60/1385347
ctgcaatt

SEQ ID NO: 109029 - DNA, 10 bp, Unknown
  misc_feature (1)..( 10): Result.002 file - promoters60/1385347
ttttaatact

SEQ ID NO: 109030 - DNA, 10 bp, Unknown
  misc_feature (1)..( 10): Result.002 file - promoters60/1385347
ttttaatatt

SEQ ID NO: 109031 - DNA, 10 bp, Unknown
  misc_feature (1)..( 10): Result.002 file - promoters60/1385347
aactaagact

SEQ ID NO: 109032 - DNA, 10 bp, Unknown
  misc_feature (1)..( 10): Result.002 file - promoters60/1385347
ttttaagtag

SEQ ID NO: 109033 - DNA, 7 bp, Unknown
  misc_feature (1)..( 7): Result.002 file - promoters60/1385376
attgttg

SEQ ID NO: 109034 - DNA, 7 bp, Unknown
  misc_feature (1)..( 7): Result.002 file - promoters60/1385376
attgttg

SEQ ID NO: 109035 - DNA, 9 bp, Unknown
  misc_feature (1)..( 9): Result.002 file - promoters60/1385376
taaaaaatt

SEQ ID NO: 109036 - DNA, 9 bp, Unknown
  misc_feature (1)..( 9): Result.002 file - promoters60/1385376
taaaagatt

SEQ ID NO: 109037 - DNA, 9 bp, Unknown
  misc_feature (1)..( 9): Result.002 file - promoters60/1385376
gataagatt

SEQ ID NO: 109038 - DNA, 7 bp, Unknown
  misc_feature (1)..( 7): Result.002 file - promoters60/1385376
ttggttt

SEQ ID NO: 109039 - DNA, 7 bp, Unknown
  misc_feature (1)..( 7): Result.002 file - promoters60/1385376
ttgattt

SEQ ID NO: 109040 - DNA, 7 bp, Unknown
  misc_feature (1)..( 7): Result.002 file - promoters60/1385376
ttggttg

SEQ ID NO: 109041 - DNA, 9 bp, Unknown
  misc_feature (1)..( 9): Result.002 file - promoters60/1385376
tttgatttt

SEQ ID NO: 109042 - DNA, 9 bp, Unknown
  misc_feature (1)..( 9): Result.002 file - promoters60/1385376
tttggtttt

SEQ ID NO: 109043 - DNA, 9 bp, Unknown
  misc_feature (1)..( 9): Result.002 file - promoters60/1385376
cttggttgg

SEQ ID NO: 109044 - DNA, 7 bp, Unknown
  misc_feature (1)..( 7): Result.002 file - promoters60/1385376
aaagaga

SEQ ID NO: 109045 - DNA, 7 bp, Unknown
  misc_feature (1)..( 7): Result.002 file - promoters60/1385376
aaagaga

SEQ ID NO: 109046 - DNA, 8 bp, Unknown
  misc_feature (1)..( 8): Result.002 file - promoters60/1385376
taaatagt

SEQ ID NO: 109047 - DNA, 8 bp, Unknown
  misc_feature (1)..( 8): Result.002 file - promoters60/1385376
taaatagt

SEQ ID NO: 109048 - DNA, 8 bp, Unknown
  misc_feature (1)..( 8): Result.002 file - promoters60/1385376
gaaacaat

SEQ ID NO: 109049 - DNA, 8 bp, Unknown
  misc_feature (1)..( 8): Result.002 file - promoters60/1385376
gaagcaat

SEQ ID NO: 109050 - DNA, 7 bp, Unknown
  misc_feature (1)..( 7): Result.002 file - promoters60/1385376
ataattg

SEQ ID NO: 109051 - DNA, 7 bp, Unknown
  misc_feature (1)..( 7): Result.002 file - promoters60/1385376
ataattg

SEQ ID NO: 109052 - DNA, 6 bp, Unknown
  misc_feature (1)..( 6): Result.002 file - promoters60/1385376
ttttga

SEQ ID NO: 109053 - DNA, 6 bp, Unknown
  misc_feature (1)..( 6): Result.002 file - promoters60/1385376
ttttga

SEQ ID NO: 109054 - DNA, 7 bp, Unknown
  misc_feature (1)..( 7): Result.002 file - promoters60/1385376
tgagatt

SEQ ID NO: 109055 - DNA, 7 bp, Unknown
  misc_feature (1)..( 7): Result.002 file - promoters60/1385376
tgatatt

SEQ ID NO: 109056 - DNA, 6 bp, Unknown
  misc_feature (1)..( 6): Result.002 file - promoters60/1385376
ttggaa

SEQ ID NO: 109057 - DNA, 6 bp, Unknown
  misc_feature (1)..( 6): Result.002 file - promoters60/1385376
ttggaa

SEQ ID NO: 109058 - DNA, 8 bp, Unknown
  misc_feature (1)..( 8): Result.002 file - promoters60/1385376
gaaaatga

SEQ ID NO: 109059 - DNA, 8 bp, Unknown
  misc_feature (1)..( 8): Result.002 file - promoters60/1385376
gaaagtga

SEQ ID NO: 109060 - DNA, 10 bp, Unknown
  misc_feature (1)..( 10): Result.002 file - promoters60/1385376
ttgtggttca

SEQ ID NO: 109061 - DNA, 10 bp, Unknown
  misc_feature (1)..( 10): Result.002 file - promoters60/1385376
ttgaggttca

SEQ ID NO: 109062 - DNA, 9 bp, Unknown
  misc_feature (1)..( 9): Result.002 file - promoters60/1385376
agagggcaa

SEQ ID NO: 109063 - DNA, 9 bp, Unknown
  misc_feature (1)..( 9): Result.002 file - promoters60/1385376
agagagcaa

SEQ ID NO: 109064 - DNA, 7 bp, Unknown
  misc_feature (1)..( 7): Result.002 file - promoters60/1385376
ttgggaa

SEQ ID NO: 109065 - DNA, 7 bp, Unknown
  misc_feature (1)..( 7): Result.002 file - promoters60/1385376
ttgagaa

SEQ ID NO: 109066 - DNA, 6 bp, Unknown
  misc_feature (1)..( 6): Result.002 file - promoters60/1385376
tcttat

SEQ ID NO: 109067 - DNA, 6 bp, Unknown
  misc_feature (1)..( 6): Result.002 file - promoters60/1385376
tcttat

SEQ ID NO: 109068 - DNA, 7 bp, Unknown
  misc_feature (1)..( 7): Result.002 file - promoters60/1385376
aagctgt

SEQ ID NO: 109069 - DNA, 7 bp, Unknown
  misc_feature (1)..( 7): Result.002 file - promoters60/1385376
aagttgt

SEQ ID NO: 109070 - DNA, 8 bp, Unknown
  misc_feature (1)..( 8): Result.002 file - promoters60/1385376
cctcagaa

SEQ ID NO: 109071 - DNA, 8 bp, Unknown
  misc_feature (1)..( 8): Result.002 file - promoters60/1385376
cctaagaa

SEQ ID NO: 109072 - DNA, 13 bp, Unknown
  misc_feature (1)..( 13): Result.002 file - promoters60/1385376
ttgaatcaatatt

SEQ ID NO: 109073 - DNA, 13 bp, Unknown
  misc_feature (1)..( 13): Result.002 file - promoters60/1385376
ttgattcaaaatt

SEQ ID NO: 109074 - DNA, 7 bp, Unknown
  misc_feature (1)..( 7): Result.002 file - promoters60/1385376
tggattt

SEQ ID NO: 109075 - DNA, 7 bp, Unknown
  misc_feature (1)..( 7): Result.002 file - promoters60/1385376
tggattt

SEQ ID NO: 109076 - DNA, 6 bp, Unknown
  misc_feature (1)..( 6): Result.002 file - promoters60/1385376
ttaacc

SEQ ID NO: 109077 - DNA, 6 bp, Unknown
  misc_feature (1)..( 6): Result.002 file - promoters60/1385376
ttaacc

SEQ ID NO: 109078 - DNA, 7 bp, Unknown
  misc_feature (1)..( 7): Result.002 file - promoters60/1385376
ctcactc

SEQ ID NO: 109079 - DNA, 7 bp, Unknown
  misc_feature (1)..( 7): Result.002 file - promoters60/1385376
ctcgctc

SEQ ID NO: 109080 - DNA, 6 bp, Unknown
  misc_feature (1)..( 6): Result.002 file - promoters60/1385376
atttct

SEQ ID NO: 109081 - DNA, 6 bp, Unknown
  misc_feature (1)..( 6): Result.002 file - promoters60/1385376
atttct

SEQ ID NO: 109082 - DNA, 11 bp, Unknown
  misc_feature (1)..( 11): Result.002 file - promoters60/1386215
accaaaattgt

SEQ ID NO: 109083 - DNA, 11 bp, Unknown
  misc_feature (1)..( 11): Result.002 file - promoters60/1386215
ggaaaaattac

SEQ ID NO: 109084 - DNA, 11 bp, Unknown
  misc_feature (1)..( 11): Result.002 file - promoters60/1386215
ttcaaaatttt

SEQ ID NO: 109085 - DNA, 11 bp, Unknown
  misc_feature (1)..( 11): Result.002 file - promoters60/1386215
ttcataatttg

SEQ ID NO: 109086 - DNA, 11 bp, Unknown
  misc_feature (1)..( 11): Result.002 file - promoters60/1386215
aatgtaatttg

SEQ ID NO: 109087 - DNA, 10 bp, Unknown
  misc_feature (1)..( 10): Result.002 file - promoters60/1386215
tttttttcac

SEQ ID NO: 109088 - DNA, 10 bp, Unknown
  misc_feature (1)..( 10): Result.002 file - promoters60/1386215
gctttatcac

SEQ ID NO: 109089 - DNA, 10 bp, Unknown
  misc_feature (1)..( 10): Result.002 file - promoters60/1386215
gattttttgt

SEQ ID NO: 109090 - DNA, 10 bp, Unknown
  misc_feature (1)..( 10): Result.002 file - promoters60/1386215
gctgtatagg

SEQ ID NO: 109091 - DNA, 10 bp, Unknown
  misc_feature (1)..( 10): Result.002 file - promoters60/1386215
accaatttaa

SEQ ID NO: 109092 - DNA, 10 bp, Unknown
  misc_feature (1)..( 10): Result.002 file - promoters60/1386215
tccaatttcc

SEQ ID NO: 109093 - DNA, 10 bp, Unknown
  misc_feature (1)..( 10): Result.002 file - promoters60/1386215
tccaatgttt

SEQ ID NO: 109094 - DNA, 10 bp, Unknown
  misc_feature (1)..( 10): Result.002 file - promoters60/1386215
ccaaatgtcc

SEQ ID NO: 109095 - DNA, 10 bp, Unknown
  misc_feature (1)..( 10): Result.002 file - promoters60/1386215
caaatgttgc

SEQ ID NO: 109096 - DNA, 10 bp, Unknown
  misc_feature (1)..( 10): Result.002 file - promoters60/1386215
aaaatgtgaa

SEQ ID NO: 109097 - DNA, 10 bp, Unknown
  misc_feature (1)..( 10): Result.002 file - promoters60/1386215
aaaatttgaa

SEQ ID NO: 109098 - DNA, 10 bp, Unknown
  misc_feature (1)..( 10): Result.002 file - promoters60/1386215
acaatgtgaa

SEQ ID NO: 109099 - DNA, 10 bp, Unknown
  misc_feature (1)..( 10): Result.002 file - promoters60/1386215
agaatttgac

SEQ ID NO: 109100 - DNA, 9 bp, Unknown
  misc_feature (1)..( 9): Result.002 file - promoters60/1386215
catttgtaa

SEQ ID NO: 109101 - DNA, 9 bp, Unknown
  misc_feature (1)..( 9): Result.002 file - promoters60/1386215
tttttgtat

SEQ ID NO: 109102 - DNA, 9 bp, Unknown
  misc_feature (1)..( 9): Result.002 file - promoters60/1386215
ttcttgtaa

SEQ ID NO: 109103 - DNA, 9 bp, Unknown
  misc_feature (1)..( 9): Result.002 file - promoters60/1386215
gatttgtac

SEQ ID NO: 109104 - DNA, 9 bp, Unknown
  misc_feature (1)..( 9): Result.002 file - promoters60/1386215
gatttgaga

SEQ ID NO: 109105 - DNA, 10 bp, Unknown
  misc_feature (1)..( 10): Result.002 file - promoters60/1386215
aaaatttgaa

SEQ ID NO: 109106 - DNA, 10 bp, Unknown
  misc_feature (1)..( 10): Result.002 file - promoters60/1386215
acaatgtgaa

SEQ ID NO: 109107 - DNA, 10 bp, Unknown
  misc_feature (1)..( 10): Result.002 file - promoters60/1386215
agaatttgac

SEQ ID NO: 109108 - DNA, 10 bp, Unknown
  misc_feature (1)..( 10): Result.002 file - promoters60/1386215
aaaatgtgaa

SEQ ID NO: 109109 - DNA, 6 bp, Unknown
  misc_feature (1)..( 6): Result.002 file - promoters60/1386628
gaacat

SEQ ID NO: 109110 - DNA, 6 bp, Unknown
  misc_feature (1)..( 6): Result.002 file - promoters60/1386628
gaacat

SEQ ID NO: 109111 - DNA, 6 bp, Unknown
  misc_feature (1)..( 6): Result.002 file - promoters60/1386628
gaacat

SEQ ID NO: 109112 - DNA, 9 bp, Unknown
  misc_feature (1)..( 9): Result.002 file - promoters60/1386628
gttttttat

SEQ ID NO: 109113 - DNA, 9 bp, Unknown
  misc_feature (1)..( 9): Result.002 file - promoters60/1386628
atttcttac

SEQ ID NO: 109114 - DNA, 9 bp, Unknown
  misc_feature (1)..( 9): Result.002 file - promoters60/1386628
atttcttac

SEQ ID NO: 109115 - DNA, 9 bp, Unknown
  misc_feature (1)..( 9): Result.002 file - promoters60/1386628
aagatgaga

SEQ ID NO: 109116 - DNA, 9 bp, Unknown
  misc_feature (1)..( 9): Result.002 file - promoters60/1386628
aagatgcta

SEQ ID NO: 109117 - DNA, 9 bp, Unknown
  misc_feature (1)..( 9): Result.002 file - promoters60/1386628
gagattcta

SEQ ID NO: 109118 - DNA, 6 bp, Unknown
  misc_feature (1)..( 6): Result.002 file - promoters60/1386778
tgtttt

SEQ ID NO: 109119 - DNA, 6 bp, Unknown
  misc_feature (1)..( 6): Result.002 file - promoters60/1386778
tgtttt

SEQ ID NO: 109120 - DNA, 6 bp, Unknown
  misc_feature (1)..( 6): Result.002 file - promoters60/1386778
gtaatc

SEQ ID NO: 109121 - DNA, 6 bp, Unknown
  misc_feature (1)..( 6): Result.002 file - promoters60/1386778
gtaatc

SEQ ID NO: 109122 - DNA, 7 bp, Unknown
  misc_feature (1)..( 7): Result.002 file - promoters60/1386778
aagaaat

SEQ ID NO: 109123 - DNA, 7 bp, Unknown
  misc_feature (1)..( 7): Result.002 file - promoters60/1386778
aagcaat

SEQ ID NO: 109124 - DNA, 9 bp, Unknown
  misc_feature (1)..( 9): Result.002 file - promoters60/1386778
aaacaaaaa

SEQ ID NO: 109125 - DNA, 9 bp, Unknown
  misc_feature (1)..( 9): Result.002 file - promoters60/1386778
aaagaaagc

SEQ ID NO: 109126 - DNA, 9 bp, Unknown
  misc_feature (1)..( 9): Result.002 file - promoters60/1386778
aaacaaaaa

SEQ ID NO: 109127 - DNA, 9 bp, Unknown
  misc_feature (1)..( 9): Result.002 file - promoters60/1386778
acaaagaac

SEQ ID NO: 109128 - DNA, 9 bp, Unknown
  misc_feature (1)..( 9): Result.002 file - promoters60/1386778
gaaaagaaa

SEQ ID NO: 109129 - DNA, 10 bp, Unknown
  misc_feature (1)..( 10): Result.002 file - promoters60/1386778
ggaaatgaaa

SEQ ID NO: 109130 - DNA, 14 bp, Unknown
  misc_feature (1)..( 14): Result.002 file - promoters60/1386778
taataaaaaaaagg

SEQ ID NO: 109131 - DNA, 14 bp, Unknown
  misc_feature (1)..( 14): Result.002 file - promoters60/1386778
gtatataaacaagg

SEQ ID NO: 109132 - DNA, 14 bp, Unknown
  misc_feature (1)..( 14): Result.002 file - promoters60/1386778
gtatatatttattt

SEQ ID NO: 109133 - DNA, 7 bp, Unknown
  misc_feature (1)..( 7): Result.002 file - promoters60/1386778
tgagctt

SEQ ID NO: 109134 - DNA, 7 bp, Unknown
  misc_feature (1)..( 7): Result.002 file - promoters60/1386778
tgagctt

SEQ ID NO: 109135 - DNA, 7 bp, Unknown
  misc_feature (1)..( 7): Result.002 file - promoters60/1386778
gaaagat

SEQ ID NO: 109136 - DNA, 7 bp, Unknown
  misc_feature (1)..( 7): Result.002 file - promoters60/1386778
gaaagat

SEQ ID NO: 109137 - DNA, 6 bp, Unknown
  misc_feature (1)..( 6): Result.002 file - promoters60/1386778
ttttaa

SEQ ID NO: 109138 - DNA, 6 bp, Unknown
  misc_feature (1)..( 6): Result.002 file - promoters60/1386778
ttttaa

SEQ ID NO: 109139 - DNA, 7 bp, Unknown
  misc_feature (1)..( 7): Result.002 file - promoters60/1386778
aaaaatt

SEQ ID NO: 109140 - DNA, 7 bp, Unknown
  misc_feature (1)..( 7): Result.002 file - promoters60/1386778
aaacatt

SEQ ID NO: 109141 - DNA, 11 bp, Unknown
  misc_feature (1)..( 11): Result.002 file - promoters60/1386778
ccattttttta

SEQ ID NO: 109142 - DNA, 11 bp, Unknown
  misc_feature (1)..( 11): Result.002 file - promoters60/1386778
ccaatttgtta

SEQ ID NO: 109143 - DNA, 6 bp, Unknown
  misc_feature (1)..( 6): Result.002 file - promoters60/1386778
ataatt

SEQ ID NO: 109144 - DNA, 6 bp, Unknown
  misc_feature (1)..( 6): Result.002 file - promoters60/1386778
ataatt

SEQ ID NO: 109145 - DNA, 7 bp, Unknown
  misc_feature (1)..( 7): Result.002 file - promoters60/1386778
tttgggc

SEQ ID NO: 109146 - DNA, 7 bp, Unknown
  misc_feature (1)..( 7): Result.002 file - promoters60/1386778
tttaggc

SEQ ID NO: 109147 - DNA, 6 bp, Unknown
  misc_feature (1)..( 6): Result.002 file - promoters60/1386778
agtaaa

SEQ ID NO: 109148 - DNA, 6 bp, Unknown
  misc_feature (1)..( 6): Result.002 file - promoters60/1386778
agtaaa

SEQ ID NO: 109149 - DNA, 7 bp, Unknown
  misc_feature (1)..( 7): Result.002 file - promoters60/1386778
aatcggg

SEQ ID NO: 109150 - DNA, 7 bp, Unknown
  misc_feature (1)..( 7): Result.002 file - promoters60/1386778
aattggg

SEQ ID NO: 109151 - DNA, 7 bp, Unknown
  misc_feature (1)..( 7): Result.002 file - promoters60/1386778
cccacta

SEQ ID NO: 109152 - DNA, 7 bp, Unknown
  misc_feature (1)..( 7): Result.002 file - promoters60/1386778
cccacta

SEQ ID NO: 109153 - DNA, 9 bp, Unknown
  misc_feature (1)..( 9): Result.002 file - promoters60/1386778
aaagaaaag

SEQ ID NO: 109154 - DNA, 9 bp, Unknown
  misc_feature (1)..( 9): Result.002 file - promoters60/1386778
aaagtaaag

SEQ ID NO: 109155 - DNA, 8 bp, Unknown
  misc_feature (1)..( 8): Result.002 file - promoters60/1386786
attcttta

SEQ ID NO: 109156 - DNA, 8 bp, Unknown
  misc_feature (1)..( 8): Result.002 file - promoters60/1386786
attcttta

SEQ ID NO: 109157 - DNA, 8 bp, Unknown
  misc_feature (1)..( 8): Result.002 file - promoters60/1386786
tttacttt

SEQ ID NO: 109158 - DNA, 8 bp, Unknown
  misc_feature (1)..( 8): Result.002 file - promoters60/1386786
ttttcttt

SEQ ID NO: 109159 - DNA, 8 bp, Unknown
  misc_feature (1)..( 8): Result.002 file - promoters60/1386786
ccgagctg

SEQ ID NO: 109160 - DNA, 8 bp, Unknown
  misc_feature (1)..( 8): Result.002 file - promoters60/1386786
ccgtgctg

SEQ ID NO: 109161 - DNA, 6 bp, Unknown
  misc_feature (1)..( 6): Result.002 file - promoters60/1386786
attgtt

SEQ ID NO: 109162 - DNA, 6 bp, Unknown
  misc_feature (1)..( 6): Result.002 file - promoters60/1386786
attgtt

SEQ ID NO: 109163 - DNA, 6 bp, Unknown
  misc_feature (1)..( 6): Result.002 file - promoters60/1386786
agtttt

SEQ ID NO: 109164 - DNA, 6 bp, Unknown
  misc_feature (1)..( 6): Result.002 file - promoters60/1386786
agtttt

SEQ ID NO: 109165 - DNA, 8 bp, Unknown
  misc_feature (1)..( 8): Result.002 file - promoters60/1386786
ttttaatt

SEQ ID NO: 109166 - DNA, 8 bp, Unknown
  misc_feature (1)..( 8): Result.002 file - promoters60/1386786
ttttcatt

SEQ ID NO: 109167 - DNA, 6 bp, Unknown
  misc_feature (1)..( 6): Result.002 file - promoters60/1386786
actttt

SEQ ID NO: 109168 - DNA, 6 bp, Unknown
  misc_feature (1)..( 6): Result.002 file - promoters60/1386786
actttt

SEQ ID NO: 109169 - DNA, 9 bp, Unknown
  misc_feature (1)..( 9): Result.002 file - promoters60/1386786
aaaggaatt

SEQ ID NO: 109170 - DNA, 9 bp, Unknown
  misc_feature (1)..( 9): Result.002 file - promoters60/1386786
aaacgaatt

SEQ ID NO: 109171 - DNA, 9 bp, Unknown
  misc_feature (1)..( 9): Result.002 file - promoters60/1386786
aatctgagc

SEQ ID NO: 109172 - DNA, 9 bp, Unknown
  misc_feature (1)..( 9): Result.002 file - promoters60/1386786
aatcagagc

SEQ ID NO: 109173 - DNA, 7 bp, Unknown
  misc_feature (1)..( 7): Result.002 file - promoters60/1386786
cggagag

SEQ ID NO: 109174 - DNA, 7 bp, Unknown
  misc_feature (1)..( 7): Result.002 file - promoters60/1386786
cggcgag

SEQ ID NO: 109175 - DNA, 6 bp, Unknown
  misc_feature (1)..( 6): Result.002 file - promoters60/1386786
ttatct

SEQ ID NO: 109176 - DNA, 6 bp, Unknown
  misc_feature (1)..( 6): Result.002 file - promoters60/1386786
ttatct

SEQ ID NO: 109177 - DNA, 6 bp, Unknown
  misc_feature (1)..( 6): Result.002 file - promoters60/1386786
gattaa

SEQ ID NO: 109178 - DNA, 6 bp, Unknown
  misc_feature (1)..( 6): Result.002 file - promoters60/1386786
gattaa

SEQ ID NO: 109179 - DNA, 6 bp, Unknown
  misc_feature (1)..( 6): Result.002 file - promoters60/1386861
gttata

SEQ ID NO: 109180 - DNA, 6 bp, Unknown
  misc_feature (1)..( 6): Result.002 file - promoters60/1386861
gttata

SEQ ID NO: 109181 - DNA, 7 bp, Unknown
  misc_feature (1)..( 7): Result.002 file - promoters60/1386861
tttgttt

SEQ ID NO: 109182 - DNA, 7 bp, Unknown
  misc_feature (1)..( 7): Result.002 file - promoters60/1386861
tttgttt

SEQ ID NO: 109183 - DNA, 9 bp, Unknown
  misc_feature (1)..( 9): Result.002 file - promoters60/1386861
tttattttc

SEQ ID NO: 109184 - DNA, 9 bp, Unknown
  misc_feature (1)..( 9): Result.002 file - promoters60/1386861
ttttttttt

SEQ ID NO: 109185 - DNA, 9 bp, Unknown
  misc_feature (1)..( 9): Result.002 file - promoters60/1386861
gctatgttc

SEQ ID NO: 109186 - DNA, 6 bp, Unknown
  misc_feature (1)..( 6): Result.002 file - promoters60/1386861
tataaa

SEQ ID NO: 109187 - DNA, 6 bp, Unknown
  misc_feature (1)..( 6): Result.002 file - promoters60/1386861
tataaa

SEQ ID NO: 109188 - DNA, 7 bp, Unknown
  misc_feature (1)..( 7): Result.002 file - promoters60/1386861
tgaattt

SEQ ID NO: 109189 - DNA, 7 bp, Unknown
  misc_feature (1)..( 7): Result.002 file - promoters60/1386861
tgacttt

SEQ ID NO: 109190 - DNA, 7 bp, Unknown
  misc_feature (1)..( 7): Result.002 file - promoters60/1386861
catttga

SEQ ID NO: 109191 - DNA, 7 bp, Unknown
  misc_feature (1)..( 7): Result.002 file - promoters60/1386861
catatga

SEQ ID NO: 109192 - DNA, 7 bp, Unknown
  misc_feature (1)..( 7): Result.002 file - promoters60/1386861
aacctta

SEQ ID NO: 109193 - DNA, 7 bp, Unknown
  misc_feature (1)..( 7): Result.002 file - promoters60/1386861
aacttta

SEQ ID NO: 109194 - DNA, 7 bp, Unknown
  misc_feature (1)..( 7): Result.002 file - promoters60/1386861
atttata

SEQ ID NO: 109195 - DNA, 7 bp, Unknown
  misc_feature (1)..( 7): Result.002 file - promoters60/1386861
attgata

SEQ ID NO: 109196 - DNA, 6 bp, Unknown
  misc_feature (1)..( 6): Result.002 file - promoters60/1386861
cagaaa

SEQ ID NO: 109197 - DNA, 6 bp, Unknown
  misc_feature (1)..( 6): Result.002 file - promoters60/1386861
cagaaa

SEQ ID NO: 109198 - DNA, 9 bp, Unknown
  misc_feature (1)..( 9): Result.002 file - promoters60/1386861
tcatcggtg

SEQ ID NO: 109199 - DNA, 9 bp, Unknown
  misc_feature (1)..( 9): Result.002 file - promoters60/1386861
tcatctgtg

SEQ ID NO: 109200 - DNA, 7 bp, Unknown
  misc_feature (1)..( 7): Result.002 file - promoters60/1386861
gagatct

SEQ ID NO: 109201 - DNA, 7 bp, Unknown
  misc_feature (1)..( 7): Result.002 file - promoters60/1386861
gagttct

SEQ ID NO: 109202 - DNA, 6 bp, Unknown
  misc_feature (1)..( 6): Result.002 file - promoters60/1386861
tttcta

SEQ ID NO: 109203 - DNA, 6 bp, Unknown
  misc_feature (1)..( 6): Result.002 file - promoters60/1386861
tttcta

SEQ ID NO: 109204 - DNA, 6 bp, Unknown
  misc_feature (1)..( 6): Result.002 file - promoters60/1386861
tcttta

SEQ ID NO: 109205 - DNA, 6 bp, Unknown
  misc_feature (1)..( 6): Result.002 file - promoters60/1386861
tcttta

SEQ ID NO: 109206 - DNA, 6 bp, Unknown
  misc_feature (1)..( 6): Result.002 file - promoters60/1386861
taaaga

SEQ ID NO: 109207 - DNA, 6 bp, Unknown
  misc_feature (1)..( 6): Result.002 file - promoters60/1386861
taaaga

SEQ ID NO: 109208 - DNA, 7 bp, Unknown
  misc_feature (1)..( 7): Result.002 file - promoters60/1386861
aagtata

SEQ ID NO: 109209 - DNA, 7 bp, Unknown
  misc_feature (1)..( 7): Result.002 file - promoters60/1386861
aaggata

SEQ ID NO: 109210 - DNA, 9 bp, Unknown
  misc_feature (1)..( 9): Result.002 file - promoters60/1387072
aaacaaaaa

SEQ ID NO: 109211 - DNA, 9 bp, Unknown
  misc_feature (1)..( 9): Result.002 file - promoters60/1387072
aaagaaaca

SEQ ID NO: 109212 - DNA, 9 bp, Unknown
  misc_feature (1)..( 9): Result.002 file - promoters60/1387072
aaagaaaaa

SEQ ID NO: 109213 - DNA, 9 bp, Unknown
  misc_feature (1)..( 9): Result.002 file - promoters60/1387072
ttatttgga

SEQ ID NO: 109214 - DNA, 9 bp, Unknown
  misc_feature (1)..( 9): Result.002 file - promoters60/1387072
atatttgtt

SEQ ID NO: 109215 - DNA, 9 bp, Unknown
  misc_feature (1)..( 9): Result.002 file - promoters60/1387072
ttatgtgga

SEQ ID NO: 109216 - DNA, 7 bp, Unknown
  misc_feature (1)..( 7): Result.002 file - promoters60/1387072
tataaat

SEQ ID NO: 109217 - DNA, 7 bp, Unknown
  misc_feature (1)..( 7): Result.002 file - promoters60/1387072
tataaat

SEQ ID NO: 109218 - DNA, 7 bp, Unknown
  misc_feature (1)..( 7): Result.002 file - promoters60/1387072
tataaaa

SEQ ID NO: 109219 - DNA, 11 bp, Unknown
  misc_feature (1)..( 11): Result.002 file - promoters60/1387123
tgtttgaccat

SEQ ID NO: 109220 - DNA, 11 bp, Unknown
  misc_feature (1)..( 11): Result.002 file - promoters60/1387123
tatttgaacat

SEQ ID NO: 109221 - DNA, 11 bp, Unknown
  misc_feature (1)..( 11): Result.002 file - promoters60/1387123
tgtgtgagttc

SEQ ID NO: 109222 - DNA, 8 bp, Unknown
  misc_feature (1)..( 8): Result.002 file - promoters60/1387123
taacgaac

SEQ ID NO: 109223 - DNA, 8 bp, Unknown
  misc_feature (1)..( 8): Result.002 file - promoters60/1387123
caacgaaa

SEQ ID NO: 109224 - DNA, 8 bp, Unknown
  misc_feature (1)..( 8): Result.002 file - promoters60/1387123
caactaaa

SEQ ID NO: 109225 - DNA, 10 bp, Unknown
  misc_feature (1)..( 10): Result.002 file - promoters60/1387123
aaatcatttt

SEQ ID NO: 109226 - DNA, 10 bp, Unknown
  misc_feature (1)..( 10): Result.002 file - promoters60/1387123
aaataatttt

SEQ ID NO: 109227 - DNA, 10 bp, Unknown
  misc_feature (1)..( 10): Result.002 file - promoters60/1387123
caatcatatt

SEQ ID NO: 109228 - DNA, 10 bp, Unknown
  misc_feature (1)..( 10): Result.002 file - promoters60/1387123
ctatcataat

SEQ ID NO: 109229 - DNA, 9 bp, Unknown
  misc_feature (1)..( 9): Result.002 file - promoters60/1387123
ataggaaat

SEQ ID NO: 109230 - DNA, 9 bp, Unknown
  misc_feature (1)..( 9): Result.002 file - promoters60/1387123
ataagaaaa

SEQ ID NO: 109231 - DNA, 9 bp, Unknown
  misc_feature (1)..( 9): Result.002 file - promoters60/1387123
ataataaaa

SEQ ID NO: 109232 - DNA, 9 bp, Unknown
  misc_feature (1)..( 9): Result.002 file - promoters60/1387123
tcaaccata

SEQ ID NO: 109233 - DNA, 9 bp, Unknown
  misc_feature (1)..( 9): Result.002 file - promoters60/1387123
tcaatcata

SEQ ID NO: 109234 - DNA, 9 bp, Unknown
  misc_feature (1)..( 9): Result.002 file - promoters60/1387123
actatcata

SEQ ID NO: 109235 - DNA, 9 bp, Unknown
  misc_feature (1)..( 9): Result.002 file - promoters60/1387123
taatttatt

SEQ ID NO: 109236 - DNA, 9 bp, Unknown
  misc_feature (1)..( 9): Result.002 file - promoters60/1387123
taatttcat

SEQ ID NO: 109237 - DNA, 9 bp, Unknown
  misc_feature (1)..( 9): Result.002 file - promoters60/1387123
aaatttcat

SEQ ID NO: 109238 - DNA, 9 bp, Unknown
  misc_feature (1)..( 9): Result.002 file - promoters60/1387123
taattttca

SEQ ID NO: 109239 - DNA, 9 bp, Unknown
  misc_feature (1)..( 9): Result.002 file - promoters60/1387123
ataatatgt

SEQ ID NO: 109240 - DNA, 9 bp, Unknown
  misc_feature (1)..( 9): Result.002 file - promoters60/1387123
ataataaaa

SEQ ID NO: 109241 - DNA, 9 bp, Unknown
  misc_feature (1)..( 9): Result.002 file - promoters60/1387123
ataagaaaa

SEQ ID NO: 109242 - DNA, 8 bp, Unknown
  misc_feature (1)..( 8): Result.002 file - promoters60/1387123
gaatttct

SEQ ID NO: 109243 - DNA, 8 bp, Unknown
  misc_feature (1)..( 8): Result.002 file - promoters60/1387123
aaatatct

SEQ ID NO: 109244 - DNA, 8 bp, Unknown
  misc_feature (1)..( 8): Result.002 file - promoters60/1387123
aaatatcc

SEQ ID NO: 109245 - DNA, 7 bp, Unknown
  misc_feature (1)..( 7): Result.002 file - promoters60/1387123
tatcata

SEQ ID NO: 109246 - DNA, 7 bp, Unknown
  misc_feature (1)..( 7): Result.002 file - promoters60/1387123
tattata

SEQ ID NO: 109247 - DNA, 7 bp, Unknown
  misc_feature (1)..( 7): Result.002 file - promoters60/1387123
aatcata

SEQ ID NO: 109248 - DNA, 8 bp, Unknown
  misc_feature (1)..( 8): Result.002 file - promoters60/1387123
taataaag

SEQ ID NO: 109249 - DNA, 8 bp, Unknown
  misc_feature (1)..( 8): Result.002 file - promoters60/1387123
taatcaag

SEQ ID NO: 109250 - DNA, 8 bp, Unknown
  misc_feature (1)..( 8): Result.002 file - promoters60/1387123
taacaaaa

SEQ ID NO: 109251 - DNA, 12 bp, Unknown
  misc_feature (1)..( 12): Result.002 file - promoters60/1387123
ataaattaatgc

SEQ ID NO: 109252 - DNA, 12 bp, Unknown
  misc_feature (1)..( 12): Result.002 file - promoters60/1387123
atatattaatgt

SEQ ID NO: 109253 - DNA, 12 bp, Unknown
  misc_feature (1)..( 12): Result.002 file - promoters60/1387123
tttggttattgt

SEQ ID NO: 109254 - DNA, 6 bp, Unknown
  misc_feature (1)..( 6): Result.002 file - promoters60/1387191
caaaaa

SEQ ID NO: 109255 - DNA, 6 bp, Unknown
  misc_feature (1)..( 6): Result.002 file - promoters60/1387191
caaaaa

SEQ ID NO: 109256 - DNA, 6 bp, Unknown
  misc_feature (1)..( 6): Result.002 file - promoters60/1387191
caaaaa

SEQ ID NO: 109257 - DNA, 6 bp, Unknown
  misc_feature (1)..( 6): Result.002 file - promoters60/1387191
caaaaa

SEQ ID NO: 109258 - DNA, 8 bp, Unknown
  misc_feature (1)..( 8): Result.002 file - promoters60/1387191
tactcaaa

SEQ ID NO: 109259 - DNA, 8 bp, Unknown
  misc_feature (1)..( 8): Result.002 file - promoters60/1387191
tacttaaa

SEQ ID NO: 109260 - DNA, 6 bp, Unknown
  misc_feature (1)..( 6): Result.002 file - promoters60/1387191
tttacc

SEQ ID NO: 109261 - DNA, 6 bp, Unknown
  misc_feature (1)..( 6): Result.002 file - promoters60/1387191
tttacc

SEQ ID NO: 109262 - DNA, 6 bp, Unknown
  misc_feature (1)..( 6): Result.002 file - promoters60/1387191
ctcaaa

SEQ ID NO: 109263 - DNA, 6 bp, Unknown
  misc_feature (1)..( 6): Result.002 file - promoters60/1387191
ctcaaa

SEQ ID NO: 109264 - DNA, 7 bp, Unknown
  misc_feature (1)..( 7): Result.002 file - promoters60/1387191
aatctgg

SEQ ID NO: 109265 - DNA, 7 bp, Unknown
  misc_feature (1)..( 7): Result.002 file - promoters60/1387191
aatttgg

SEQ ID NO: 109266 - DNA, 6 bp, Unknown
  misc_feature (1)..( 6): Result.002 file - promoters60/1387191
aaaatt

SEQ ID NO: 109267 - DNA, 6 bp, Unknown
  misc_feature (1)..( 6): Result.002 file - promoters60/1387191
aaaatt

SEQ ID NO: 109268 - DNA, 9 bp, Unknown
  misc_feature (1)..( 9): Result.002 file - promoters60/1387191
ggtctaaaa

SEQ ID NO: 109269 - DNA, 9 bp, Unknown
  misc_feature (1)..( 9): Result.002 file - promoters60/1387191
ggtcttaaa

SEQ ID NO: 109270 - DNA, 6 bp, Unknown
  misc_feature (1)..( 6): Result.002 file - promoters60/1387191
gaaccg

SEQ ID NO: 109271 - DNA, 6 bp, Unknown
  misc_feature (1)..( 6): Result.002 file - promoters60/1387191
gaaccg

SEQ ID NO: 109272 - DNA, 7 bp, Unknown
  misc_feature (1)..( 7): Result.002 file - promoters60/1387191
ccctatt

SEQ ID NO: 109273 - DNA, 7 bp, Unknown
  misc_feature (1)..( 7): Result.002 file - promoters60/1387191
cccgatt

SEQ ID NO: 109274 - DNA, 7 bp, Unknown
  misc_feature (1)..( 7): Result.002 file - promoters60/1387191
ttaaaaa

SEQ ID NO: 109275 - DNA, 7 bp, Unknown
  misc_feature (1)..( 7): Result.002 file - promoters60/1387191
ttacaaa

SEQ ID NO: 109276 - DNA, 10 bp, Unknown
  misc_feature (1)..( 10): Result.002 file - promoters60/1387191
gtaaacattt

SEQ ID NO: 109277 - DNA, 10 bp, Unknown
  misc_feature (1)..( 10): Result.002 file - promoters60/1387191
gtaaagattt

SEQ ID NO: 109278 - DNA, 8 bp, Unknown
  misc_feature (1)..( 8): Result.002 file - promoters60/1387191
aaggttag

SEQ ID NO: 109279 - DNA, 8 bp, Unknown
  misc_feature (1)..( 8): Result.002 file - promoters60/1387191
aaggatag

SEQ ID NO: 109280 - DNA, 6 bp, Unknown
  misc_feature (1)..( 6): Result.002 file - promoters60/1387211
tcatct

SEQ ID NO: 109281 - DNA, 6 bp, Unknown
  misc_feature (1)..( 6): Result.002 file - promoters60/1387211
tcatct

SEQ ID NO: 109282 - DNA, 8 bp, Unknown
  misc_feature (1)..( 8): Result.002 file - promoters60/1387211
attctaaa

SEQ ID NO: 109283 - DNA, 8 bp, Unknown
  misc_feature (1)..( 8): Result.002 file - promoters60/1387211
attttaat

SEQ ID NO: 109284 - DNA, 8 bp, Unknown
  misc_feature (1)..( 8): Result.002 file - promoters60/1387211
ttttcaat

SEQ ID NO: 109285 - DNA, 9 bp, Unknown
  misc_feature (1)..( 9): Result.002 file - promoters60/1387211
tatgtgtgt

SEQ ID NO: 109286 - DNA, 9 bp, Unknown
  misc_feature (1)..( 9): Result.002 file - promoters60/1387211
tatgtatgt

SEQ ID NO: 109287 - DNA, 7 bp, Unknown
  misc_feature (1)..( 7): Result.002 file - promoters60/1387211
acaaaac

SEQ ID NO: 109288 - DNA, 7 bp, Unknown
  misc_feature (1)..( 7): Result.002 file - promoters60/1387211
acaaaat

SEQ ID NO: 109289 - DNA, 7 bp, Unknown
  misc_feature (1)..( 7): Result.002 file - promoters60/1387211
acaaaac

SEQ ID NO: 109290 - DNA, 7 bp, Unknown
  misc_feature (1)..( 7): Result.002 file - promoters60/1387211
aaacagt

SEQ ID NO: 109291 - DNA, 7 bp, Unknown
  misc_feature (1)..( 7): Result.002 file - promoters60/1387211
aaatagt

SEQ ID NO: 109292 - DNA, 10 bp, Unknown
  misc_feature (1)..( 10): Result.002 file - promoters60/1387211
gctttagata

SEQ ID NO: 109293 - DNA, 10 bp, Unknown
  misc_feature (1)..( 10): Result.002 file - promoters60/1387211
gctttggata

SEQ ID NO: 109294 - DNA, 7 bp, Unknown
  misc_feature (1)..( 7): Result.002 file - promoters60/1387211
ctggata

SEQ ID NO: 109295 - DNA, 7 bp, Unknown
  misc_feature (1)..( 7): Result.002 file - promoters60/1387211
ctgaata

SEQ ID NO: 109296 - DNA, 6 bp, Unknown
  misc_feature (1)..( 6): Result.002 file - promoters60/1387211
aaaaaa

SEQ ID NO: 109297 - DNA, 6 bp, Unknown
  misc_feature (1)..( 6): Result.002 file - promoters60/1387211
aaaaaa

SEQ ID NO: 109298 - DNA, 7 bp, Unknown
  misc_feature (1)..( 7): Result.002 file - promoters60/1387211
aaattat

SEQ ID NO: 109299 - DNA, 7 bp, Unknown
  misc_feature (1)..( 7): Result.002 file - promoters60/1387211
aaaatat

SEQ ID NO: 109300 - DNA, 9 bp, Unknown
  misc_feature (1)..( 9): Result.002 file - promoters60/1387211
aagtcaaaa

SEQ ID NO: 109301 - DNA, 9 bp, Unknown
  misc_feature (1)..( 9): Result.002 file - promoters60/1387211
aagacaaaa

SEQ ID NO: 109302 - DNA, 9 bp, Unknown
  misc_feature (1)..( 9): Result.002 file - promoters60/1387211
ctctctgtt

SEQ ID NO: 109303 - DNA, 9 bp, Unknown
  misc_feature (1)..( 9): Result.002 file - promoters60/1387211
ctctttgtt

SEQ ID NO: 109304 - DNA, 9 bp, Unknown
  misc_feature (1)..( 9): Result.002 file - promoters60/1387211
aattcaact

SEQ ID NO: 109305 - DNA, 9 bp, Unknown
  misc_feature (1)..( 9): Result.002 file - promoters60/1387211
aattaaact

SEQ ID NO: 109306 - DNA, 7 bp, Unknown
  misc_feature (1)..( 7): Result.002 file - promoters60/1387211
attttat

SEQ ID NO: 109307 - DNA, 7 bp, Unknown
  misc_feature (1)..( 7): Result.002 file - promoters60/1387211
attatat

SEQ ID NO: 109308 - DNA, 7 bp, Unknown
  misc_feature (1)..( 7): Result.002 file - promoters60/1387211
attttca

SEQ ID NO: 109309 - DNA, 7 bp, Unknown
  misc_feature (1)..( 7): Result.002 file - promoters60/1387211
attttca

SEQ ID NO: 109310 - DNA, 6 bp, Unknown
  misc_feature (1)..( 6): Result.002 file - promoters60/1387211
tcaatt

SEQ ID NO: 109311 - DNA, 6 bp, Unknown
  misc_feature (1)..( 6): Result.002 file - promoters60/1387211
tcaatt

SEQ ID NO: 109312 - DNA, 9 bp, Unknown
  misc_feature (1)..( 9): Result.002 file - promoters60/1387211
aaaatgaaa

SEQ ID NO: 109313 - DNA, 9 bp, Unknown
  misc_feature (1)..( 9): Result.002 file - promoters60/1387211
aaaaagaaa

SEQ ID NO: 109314 - DNA, 13 bp, Unknown
  misc_feature (1)..( 13): Result.002 file - promoters60/1387349
atttccatcgaat

SEQ ID NO: 109315 - DNA, 13 bp, Unknown
  misc_feature (1)..( 13): Result.002 file - promoters60/1387349
aaacaaatcaaat

SEQ ID NO: 109316 - DNA, 13 bp, Unknown
  misc_feature (1)..( 13): Result.002 file - promoters60/1387349
aaagaaaccaatt

SEQ ID NO: 109317 - DNA, 13 bp, Unknown
  misc_feature (1)..( 13): Result.002 file - promoters60/1387349
tatcaaaccaatg

SEQ ID NO: 109318 - DNA, 13 bp, Unknown
  misc_feature (1)..( 13): Result.002 file - promoters60/1387349
tcagaaacagtaa

SEQ ID NO: 109319 - DNA, 13 bp, Unknown
  misc_feature (1)..( 13): Result.002 file - promoters60/1387349
tcacaaagactaa

SEQ ID NO: 109320 - DNA, 10 bp, Unknown
  misc_feature (1)..( 10): Result.002 file - promoters60/1387349
ccacaaaaca

SEQ ID NO: 109321 - DNA, 10 bp, Unknown
  misc_feature (1)..( 10): Result.002 file - promoters60/1387349
acacaaagta

SEQ ID NO: 109322 - DNA, 10 bp, Unknown
  misc_feature (1)..( 10): Result.002 file - promoters60/1387349
tcacaaagac

SEQ ID NO: 109323 - DNA, 10 bp, Unknown
  misc_feature (1)..( 10): Result.002 file - promoters60/1387349
aaacaaaaac

SEQ ID NO: 109324 - DNA, 10 bp, Unknown
  misc_feature (1)..( 10): Result.002 file - promoters60/1387349
ctaaaaactc

SEQ ID NO: 109325 - DNA, 10 bp, Unknown
  misc_feature (1)..( 10): Result.002 file - promoters60/1387349
ctagaaaccg

SEQ ID NO: 109326 - DNA, 9 bp, Unknown
  misc_feature (1)..( 9): Result.002 file - promoters60/1387349
tcatagata

SEQ ID NO: 109327 - DNA, 9 bp, Unknown
  misc_feature (1)..( 9): Result.002 file - promoters60/1387349
tcaaagaat

SEQ ID NO: 109328 - DNA, 9 bp, Unknown
  misc_feature (1)..( 9): Result.002 file - promoters60/1387349
acaaagact

SEQ ID NO: 109329 - DNA, 9 bp, Unknown
  misc_feature (1)..( 9): Result.002 file - promoters60/1387349
tcaaaggtc

SEQ ID NO: 109330 - DNA, 9 bp, Unknown
  misc_feature (1)..( 9): Result.002 file - promoters60/1387349
taaaataat

SEQ ID NO: 109331 - DNA, 9 bp, Unknown
  misc_feature (1)..( 9): Result.002 file - promoters60/1387349
gcaatggtt

SEQ ID NO: 109332 - DNA, 12 bp, Unknown
  misc_feature (1)..( 12): Result.002 file - promoters60/1387349
tatgtaatgaat

SEQ ID NO: 109333 - DNA, 12 bp, Unknown
  misc_feature (1)..( 12): Result.002 file - promoters60/1387349
aatgtactgaaa

SEQ ID NO: 109334 - DNA, 13 bp, Unknown
  misc_feature (1)..( 13): Result.002 file - promoters60/1387349
gaagaaactgaaa

SEQ ID NO: 109335 - DNA, 12 bp, Unknown
  misc_feature (1)..( 12): Result.002 file - promoters60/1387349
aatgtacttatc

SEQ ID NO: 109336 - DNA, 12 bp, Unknown
  misc_feature (1)..( 12): Result.002 file - promoters60/1387349
attaaattgaac

SEQ ID NO: 109337 - DNA, 13 bp, Unknown
  misc_feature (1)..( 13): Result.002 file - promoters60/1387349
tcagaatctgatg

SEQ ID NO: 109338 - DNA, 6 bp, Unknown
  misc_feature (1)..( 6): Result.002 file - promoters60/1387356
agttta

SEQ ID NO: 109339 - DNA, 6 bp, Unknown
  misc_feature (1)..( 6): Result.002 file - promoters60/1387356
agttta

SEQ ID NO: 109340 - DNA, 7 bp, Unknown
  misc_feature (1)..( 7): Result.002 file - promoters60/1387356
aaaagtt

SEQ ID NO: 109341 - DNA, 7 bp, Unknown
  misc_feature (1)..( 7): Result.002 file - promoters60/1387356
aaaagtt

SEQ ID NO: 109342 - DNA, 6 bp, Unknown
  misc_feature (1)..( 6): Result.002 file - promoters60/1387356
ttaaaa

SEQ ID NO: 109343 - DNA, 6 bp, Unknown
  misc_feature (1)..( 6): Result.002 file - promoters60/1387356
ttaaaa

SEQ ID NO: 109344 - DNA, 6 bp, Unknown
  misc_feature (1)..( 6): Result.002 file - promoters60/1387356
ttaaaa

SEQ ID NO: 109345 - DNA, 6 bp, Unknown
  misc_feature (1)..( 6): Result.002 file - promoters60/1387356
caaaag

SEQ ID NO: 109346 - DNA, 6 bp, Unknown
  misc_feature (1)..( 6): Result.002 file - promoters60/1387356
caaaag

SEQ ID NO: 109347 - DNA, 9 bp, Unknown
  misc_feature (1)..( 9): Result.002 file - promoters60/1387356
aaacctctt

SEQ ID NO: 109348 - DNA, 9 bp, Unknown
  misc_feature (1)..( 9): Result.002 file - promoters60/1387356
aaacatctt

SEQ ID NO: 109349 - DNA, 6 bp, Unknown
  misc_feature (1)..( 6): Result.002 file - promoters60/1387356
caataa

SEQ ID NO: 109350 - DNA, 6 bp, Unknown
  misc_feature (1)..( 6): Result.002 file - promoters60/1387356
caataa

SEQ ID NO: 109351 - DNA, 6 bp, Unknown
  misc_feature (1)..( 6): Result.002 file - promoters60/1387356
gatttt

SEQ ID NO: 109352 - DNA, 6 bp, Unknown
  misc_feature (1)..( 6): Result.002 file - promoters60/1387356
gatttt

SEQ ID NO: 109353 - DNA, 6 bp, Unknown
  misc_feature (1)..( 6): Result.002 file - promoters60/1387356
acacgt

SEQ ID NO: 109354 - DNA, 6 bp, Unknown
  misc_feature (1)..( 6): Result.002 file - promoters60/1387356
acacgt

SEQ ID NO: 109355 - DNA, 11 bp, Unknown
  misc_feature (1)..( 11): Result.002 file - promoters60/1387356
catgtaaaaat

SEQ ID NO: 109356 - DNA, 11 bp, Unknown
  misc_feature (1)..( 11): Result.002 file - promoters60/1387356
aaactaagaat

SEQ ID NO: 109357 - DNA, 11 bp, Unknown
  misc_feature (1)..( 11): Result.002 file - promoters60/1387356
agagtaaaaaa

SEQ ID NO: 109358 - DNA, 6 bp, Unknown
  misc_feature (1)..( 6): Result.002 file - promoters60/1387356
aatgta

SEQ ID NO: 109359 - DNA, 6 bp, Unknown
  misc_feature (1)..( 6): Result.002 file - promoters60/1387356
aatgta

SEQ ID NO: 109360 - DNA, 7 bp, Unknown
  misc_feature (1)..( 7): Result.002 file - promoters60/1387356
catttaa

SEQ ID NO: 109361 - DNA, 7 bp, Unknown
  misc_feature (1)..( 7): Result.002 file - promoters60/1387356
catttaa

SEQ ID NO: 109362 - DNA, 10 bp, Unknown
  misc_feature (1)..( 10): Result.002 file - promoters60/1387356
taaagatttt

SEQ ID NO: 109363 - DNA, 10 bp, Unknown
  misc_feature (1)..( 10): Result.002 file - promoters60/1387356
taaaaatttt

SEQ ID NO: 109364 - DNA, 6 bp, Unknown
  misc_feature (1)..( 6): Result.002 file - promoters60/1387356
ataatt

SEQ ID NO: 109365 - DNA, 6 bp, Unknown
  misc_feature (1)..( 6): Result.002 file - promoters60/1387356
ataatt

SEQ ID NO: 109366 - DNA, 6 bp, Unknown
  misc_feature (1)..( 6): Result.002 file - promoters60/1387356
atacaa

SEQ ID NO: 109367 - DNA, 6 bp, Unknown
  misc_feature (1)..( 6): Result.002 file - promoters60/1387356
atacaa

SEQ ID NO: 109368 - DNA, 6 bp, Unknown
  misc_feature (1)..( 6): Result.002 file - promoters60/1387356
atattt

SEQ ID NO: 109369 - DNA, 6 bp, Unknown
  misc_feature (1)..( 6): Result.002 file - promoters60/1387356
atattt

SEQ ID NO: 109370 - DNA, 13 bp, Unknown
  misc_feature (1)..( 13): Result.002 file - promoters60/1387356
aaagatagacaga

SEQ ID NO: 109371 - DNA, 13 bp, Unknown
  misc_feature (1)..( 13): Result.002 file - promoters60/1387356
aaagaaagaaaga

SEQ ID NO: 109372 - DNA, 7 bp, Unknown
  misc_feature (1)..( 7): Result.002 file - promoters60/1387356
ttataaa

SEQ ID NO: 109373 - DNA, 7 bp, Unknown
  misc_feature (1)..( 7): Result.002 file - promoters60/1387356
ttataaa

SEQ ID NO: 109374 - DNA, 8 bp, Unknown
  misc_feature (1)..( 8): Result.002 file - promoters60/1387417
ctttactg

SEQ ID NO: 109375 - DNA, 8 bp, Unknown
  misc_feature (1)..( 8): Result.002 file - promoters60/1387417
attttctg

SEQ ID NO: 109376 - DNA, 8 bp, Unknown
  misc_feature (1)..( 8): Result.002 file - promoters60/1387417
attttcaa

SEQ ID NO: 109377 - DNA, 7 bp, Unknown
  misc_feature (1)..( 7): Result.002 file - promoters60/1387417
ttcttat

SEQ ID NO: 109378 - DNA, 7 bp, Unknown
  misc_feature (1)..( 7): Result.002 file - promoters60/1387417
ttcatat

SEQ ID NO: 109379 - DNA, 7 bp, Unknown
  misc_feature (1)..( 7): Result.002 file - promoters60/1387417
ttcttac

SEQ ID NO: 109380 - DNA, 9 bp, Unknown
  misc_feature (1)..( 9): Result.002 file - promoters60/1387417
catgatttc

SEQ ID NO: 109381 - DNA, 9 bp, Unknown
  misc_feature (1)..( 9): Result.002 file - promoters60/1387417
aatgttttc

SEQ ID NO: 109382 - DNA, 9 bp, Unknown
  misc_feature (1)..( 9): Result.002 file - promoters60/1387417
aatgctttg

SEQ ID NO: 109383 - DNA, 8 bp, Unknown
  misc_feature (1)..( 8): Result.002 file - promoters60/1387417
aatgatcg

SEQ ID NO: 109384 - DNA, 8 bp, Unknown
  misc_feature (1)..( 8): Result.002 file - promoters60/1387417
tgtgatcg

SEQ ID NO: 109385 - DNA, 8 bp, Unknown
  misc_feature (1)..( 8): Result.002 file - promoters60/1387417
tgtaatcg

SEQ ID NO: 109386 - DNA, 9 bp, Unknown
  misc_feature (1)..( 9): Result.002 file - promoters60/1387417
ttttgctaa

SEQ ID NO: 109387 - DNA, 9 bp, Unknown
  misc_feature (1)..( 9): Result.002 file - promoters60/1387417
ttttgcttc

SEQ ID NO: 109388 - DNA, 9 bp, Unknown
  misc_feature (1)..( 9): Result.002 file - promoters60/1387417
atttggtaa

SEQ ID NO: 109389 - DNA, 8 bp, Unknown
  misc_feature (1)..( 8): Result.002 file - promoters60/1387429
gttctatt

SEQ ID NO: 109390 - DNA, 8 bp, Unknown
  misc_feature (1)..( 8): Result.002 file - promoters60/1387429
gttttatt

SEQ ID NO: 109391 - DNA, 7 bp, Unknown
  misc_feature (1)..( 7): Result.002 file - promoters60/1387429
cctggtt

SEQ ID NO: 109392 - DNA, 7 bp, Unknown
  misc_feature (1)..( 7): Result.002 file - promoters60/1387429
cctagtt

SEQ ID NO: 109393 - DNA, 8 bp, Unknown
  misc_feature (1)..( 8): Result.002 file - promoters60/1387429
caaattat

SEQ ID NO: 109394 - DNA, 8 bp, Unknown
  misc_feature (1)..( 8): Result.002 file - promoters60/1387429
caatttat

SEQ ID NO: 109395 - DNA, 8 bp, Unknown
  misc_feature (1)..( 8): Result.002 file - promoters60/1387429
gaaattag

SEQ ID NO: 109396 - DNA, 7 bp, Unknown
  misc_feature (1)..( 7): Result.002 file - promoters60/1387429
acttaat

SEQ ID NO: 109397 - DNA, 7 bp, Unknown
  misc_feature (1)..( 7): Result.002 file - promoters60/1387429
actcaat

SEQ ID NO: 109398 - DNA, 8 bp, Unknown
  misc_feature (1)..( 8): Result.002 file - promoters60/1387429
tgtaactt

SEQ ID NO: 109399 - DNA, 8 bp, Unknown
  misc_feature (1)..( 8): Result.002 file - promoters60/1387429
tgttactt

SEQ ID NO: 109400 - DNA, 9 bp, Unknown
  misc_feature (1)..( 9): Result.002 file - promoters60/1387429
aataatttc

SEQ ID NO: 109401 - DNA, 9 bp, Unknown
  misc_feature (1)..( 9): Result.002 file - promoters60/1387429
aatgatttg

SEQ ID NO: 109402 - DNA, 9 bp, Unknown
  misc_feature (1)..( 9): Result.002 file - promoters60/1387429
cttgaattg

SEQ ID NO: 109403 - DNA, 6 bp, Unknown
  misc_feature (1)..( 6): Result.002 file - promoters60/1387429
aaaatt

SEQ ID NO: 109404 - DNA, 6 bp, Unknown
  misc_feature (1)..( 6): Result.002 file - promoters60/1387429
aaaatt

SEQ ID NO: 109405 - DNA, 10 bp, Unknown
  misc_feature (1)..( 10): Result.002 file - promoters60/1387429
taaaattaaa

SEQ ID NO: 109406 - DNA, 10 bp, Unknown
  misc_feature (1)..( 10): Result.002 file - promoters60/1387429
taatattaaa

SEQ ID NO: 109407 - DNA, 10 bp, Unknown
  misc_feature (1)..( 10): Result.002 file - promoters60/1387429
gaatattttt

SEQ ID NO: 109408 - DNA, 8 bp, Unknown
  misc_feature (1)..( 8): Result.002 file - promoters60/1387429
aaaagcct

SEQ ID NO: 109409 - DNA, 8 bp, Unknown
  misc_feature (1)..( 8): Result.002 file - promoters60/1387429
aaaaacct

SEQ ID NO: 109410 - DNA, 7 bp, Unknown
  misc_feature (1)..( 7): Result.002 file - promoters60/1387429
aaattgg

SEQ ID NO: 109411 - DNA, 7 bp, Unknown
  misc_feature (1)..( 7): Result.002 file - promoters60/1387429
aaattgg

SEQ ID NO: 109412 - DNA, 7 bp, Unknown
  misc_feature (1)..( 7): Result.002 file - promoters60/1387429
tagtaaa

SEQ ID NO: 109413 - DNA, 7 bp, Unknown
  misc_feature (1)..( 7): Result.002 file - promoters60/1387429
tagaaaa

SEQ ID NO: 109414 - DNA, 7 bp, Unknown
  misc_feature (1)..( 7): Result.002 file - promoters60/1387429
accgcca

SEQ ID NO: 109415 - DNA, 7 bp, Unknown
  misc_feature (1)..( 7): Result.002 file - promoters60/1387429
accgcca

SEQ ID NO: 109416 - DNA, 6 bp, Unknown
  misc_feature (1)..( 6): Result.002 file - promoters60/1387429
cataaa

SEQ ID NO: 109417 - DNA, 6 bp, Unknown
  misc_feature (1)..( 6): Result.002 file - promoters60/1387429
cataaa

SEQ ID NO: 109418 - DNA, 8 bp, Unknown
  misc_feature (1)..( 8): Result.002 file - promoters60/1387429
agtaagaa

SEQ ID NO: 109419 - DNA, 8 bp, Unknown
  misc_feature (1)..( 8): Result.002 file - promoters60/1387429
agtaagaa

SEQ ID NO: 109420 - DNA, 6 bp, Unknown
  misc_feature (1)..( 6): Result.002 file - promoters60/1387429
taagag

SEQ ID NO: 109421 - DNA, 6 bp, Unknown
  misc_feature (1)..( 6): Result.002 file - promoters60/1387429
taagag

SEQ ID NO: 109422 - DNA, 7 bp, Unknown
  misc_feature (1)..( 7): Result.002 file - promoters60/1387429
taatttc

SEQ ID NO: 109423 - DNA, 7 bp, Unknown
  misc_feature (1)..( 7): Result.002 file - promoters60/1387429
taaattc

SEQ ID NO: 109424 - DNA, 9 bp, Unknown
  misc_feature (1)..( 9): Result.002 file - promoters60/1387429
cgattgaat

SEQ ID NO: 109425 - DNA, 9 bp, Unknown
  misc_feature (1)..( 9): Result.002 file - promoters60/1387429
cgattaaat

SEQ ID NO: 109426 - DNA, 9 bp, Unknown
  misc_feature (1)..( 9): Result.002 file - promoters60/1387429
aattttcga

SEQ ID NO: 109427 - DNA, 9 bp, Unknown
  misc_feature (1)..( 9): Result.002 file - promoters60/1387429
aatttgcga

SEQ ID NO: 109428 - DNA, 7 bp, Unknown
  misc_feature (1)..( 7): Result.002 file - promoters60/1387429
tttggaa

SEQ ID NO: 109429 - DNA, 7 bp, Unknown
  misc_feature (1)..( 7): Result.002 file - promoters60/1387429
tttagaa

SEQ ID NO: 109430 - DNA, 8 bp, Unknown
  misc_feature (1)..( 8): Result.002 file - promoters60/1387429
attttaat

SEQ ID NO: 109431 - DNA, 8 bp, Unknown
  misc_feature (1)..( 8): Result.002 file - promoters60/1387429
atttaaat

SEQ ID NO: 109432 - DNA, 12 bp, Unknown
  misc_feature (1)..( 12): Result.002 file - promoters60/1387429
tgaaatatttaa

SEQ ID NO: 109433 - DNA, 12 bp, Unknown
  misc_feature (1)..( 12): Result.002 file - promoters60/1387429
tgaaatagttaa

SEQ ID NO: 109434 - DNA, 12 bp, Unknown
  misc_feature (1)..( 12): Result.002 file - promoters60/1387429
gaaaatagaaga

SEQ ID NO: 109435 - DNA, 6 bp, Unknown
  misc_feature (1)..( 6): Result.002 file - promoters60/1387429
caactt

SEQ ID NO: 109436 - DNA, 6 bp, Unknown
  misc_feature (1)..( 6): Result.002 file - promoters60/1387429
caactt

SEQ ID NO: 109437 - DNA, 7 bp, Unknown
  misc_feature (1)..( 7): Result.002 file - promoters60/1387429
agattgg

SEQ ID NO: 109438 - DNA, 7 bp, Unknown
  misc_feature (1)..( 7): Result.002 file - promoters60/1387429
agattgg

SEQ ID NO: 109439 - DNA, 7 bp, Unknown
  misc_feature (1)..( 7): Result.002 file - promoters60/1387429
ttttctt

SEQ ID NO: 109440 - DNA, 7 bp, Unknown
  misc_feature (1)..( 7): Result.002 file - promoters60/1387429
ttttctt

SEQ ID NO: 109441 - DNA, 6 bp, Unknown
  misc_feature (1)..( 6): Result.002 file - promoters60/1387429
aatgga

SEQ ID NO: 109442 - DNA, 6 bp, Unknown
  misc_feature (1)..( 6): Result.002 file - promoters60/1387429
aatgga

SEQ ID NO: 109443 - DNA, 8 bp, Unknown
  misc_feature (1)..( 8): Result.002 file - promoters60/1387429
gaaattag

SEQ ID NO: 109444 - DNA, 8 bp, Unknown
  misc_feature (1)..( 8): Result.002 file - promoters60/1387429
gaatttag

SEQ ID NO: 109445 - DNA, 6 bp, Unknown
  misc_feature (1)..( 6): Result.002 file - promoters60/1387429
aaaaat

SEQ ID NO: 109446 - DNA, 6 bp, Unknown
  misc_feature (1)..( 6): Result.002 file - promoters60/1387429
aaaaat

SEQ ID NO: 109447 - DNA, 6 bp, Unknown
  misc_feature (1)..( 6): Result.002 file - promoters60/1387429
atttta

SEQ ID NO: 109448 - DNA, 6 bp, Unknown
  misc_feature (1)..( 6): Result.002 file - promoters60/1387429
atttta

SEQ ID NO: 109449 - DNA, 13 bp, Unknown
  misc_feature (1)..( 13): Result.002 file - promoters60/1387449
taaactcttttga

SEQ ID NO: 109450 - DNA, 13 bp, Unknown
  misc_feature (1)..( 13): Result.002 file - promoters60/1387449
tttactatttata

SEQ ID NO: 109451 - DNA, 13 bp, Unknown
  misc_feature (1)..( 13): Result.002 file - promoters60/1387449
tttaatatatatt

SEQ ID NO: 109452 - DNA, 13 bp, Unknown
  misc_feature (1)..( 13): Result.002 file - promoters60/1387449
tgggctttttaac

SEQ ID NO: 109453 - DNA, 13 bp, Unknown
  misc_feature (1)..( 13): Result.002 file - promoters60/1387449
tatccttttcaat

SEQ ID NO: 109454 - DNA, 13 bp, Unknown
  misc_feature (1)..( 13): Result.002 file - promoters60/1387449
gatattatttttt

SEQ ID NO: 109455 - DNA, 13 bp, Unknown
  misc_feature (1)..( 13): Result.002 file - promoters60/1387449
taatttttttcta

SEQ ID NO: 109456 - DNA, 13 bp, Unknown
  misc_feature (1)..( 13): Result.002 file - promoters60/1387449
taatgtttttcta

SEQ ID NO: 109457 - DNA, 13 bp, Unknown
  misc_feature (1)..( 13): Result.002 file - promoters60/1387449
cttggtttttcta

SEQ ID NO: 109458 - DNA, 13 bp, Unknown
  misc_feature (1)..( 13): Result.002 file - promoters60/1387449
taatcttttgggg

SEQ ID NO: 109459 - DNA, 13 bp, Unknown
  misc_feature (1)..( 13): Result.002 file - promoters60/1387449
ttattttttgttc

SEQ ID NO: 109460 - DNA, 13 bp, Unknown
  misc_feature (1)..( 13): Result.002 file - promoters60/1387449
atatatttaaata

SEQ ID NO: 109461 - DNA, 6 bp, Unknown
  misc_feature (1)..( 6): Result.002 file - promoters60/1387524
ttgtgg

SEQ ID NO: 109462 - DNA, 6 bp, Unknown
  misc_feature (1)..( 6): Result.002 file - promoters60/1387524
ttgtgg

SEQ ID NO: 109463 - DNA, 14 bp, Unknown
  misc_feature (1)..( 14): Result.002 file - promoters60/1387524
cttttttcttctaa

SEQ ID NO: 109464 - DNA, 14 bp, Unknown
  misc_feature (1)..( 14): Result.002 file - promoters60/1387524
ctttattcttctaa

SEQ ID NO: 109465 - DNA, 8 bp, Unknown
  misc_feature (1)..( 8): Result.002 file - promoters60/1387524
tgtgccta

SEQ ID NO: 109466 - DNA, 8 bp, Unknown
  misc_feature (1)..( 8): Result.002 file - promoters60/1387524
tgttccta

SEQ ID NO: 109467 - DNA, 8 bp, Unknown
  misc_feature (1)..( 8): Result.002 file - promoters60/1387524
agaaaaca

SEQ ID NO: 109468 - DNA, 8 bp, Unknown
  misc_feature (1)..( 8): Result.002 file - promoters60/1387524
ggaaaacc

SEQ ID NO: 109469 - DNA, 8 bp, Unknown
  misc_feature (1)..( 8): Result.002 file - promoters60/1387524
agaaaaaa

SEQ ID NO: 109470 - DNA, 6 bp, Unknown
  misc_feature (1)..( 6): Result.002 file - promoters60/1387524
gtaaaa

SEQ ID NO: 109471 - DNA, 6 bp, Unknown
  misc_feature (1)..( 6): Result.002 file - promoters60/1387524
gtaaaa

SEQ ID NO: 109472 - DNA, 7 bp, Unknown
  misc_feature (1)..( 7): Result.002 file - promoters60/1387524
aaataga

SEQ ID NO: 109473 - DNA, 7 bp, Unknown
  misc_feature (1)..( 7): Result.002 file - promoters60/1387524
aaaaaga

SEQ ID NO: 109474 - DNA, 10 bp, Unknown
  misc_feature (1)..( 10): Result.002 file - promoters60/1387524
agggataaaa

SEQ ID NO: 109475 - DNA, 10 bp, Unknown
  misc_feature (1)..( 10): Result.002 file - promoters60/1387524
aggggtaaaa

SEQ ID NO: 109476 - DNA, 10 bp, Unknown
  misc_feature (1)..( 10): Result.002 file - promoters60/1387524
attaataaaa

SEQ ID NO: 109477 - DNA, 7 bp, Unknown
  misc_feature (1)..( 7): Result.002 file - promoters60/1387524
tggccct

SEQ ID NO: 109478 - DNA, 7 bp, Unknown
  misc_feature (1)..( 7): Result.002 file - promoters60/1387524
tgggcct

SEQ ID NO: 109479 - DNA, 6 bp, Unknown
  misc_feature (1)..( 6): Result.002 file - promoters60/1387524
gtcctt

SEQ ID NO: 109480 - DNA, 6 bp, Unknown
  misc_feature (1)..( 6): Result.002 file - promoters60/1387524
gtcctt

SEQ ID NO: 109481 - DNA, 8 bp, Unknown
  misc_feature (1)..( 8): Result.002 file - promoters60/1387524
ttatgtat

SEQ ID NO: 109482 - DNA, 8 bp, Unknown
  misc_feature (1)..( 8): Result.002 file - promoters60/1387524
ttatctat

SEQ ID NO: 109483 - DNA, 6 bp, Unknown
  misc_feature (1)..( 6): Result.002 file - promoters60/1387524
gaaccc

SEQ ID NO: 109484 - DNA, 6 bp, Unknown
  misc_feature (1)..( 6): Result.002 file - promoters60/1387524
gaaccc

SEQ ID NO: 109485 - DNA, 8 bp, Unknown
  misc_feature (1)..( 8): Result.002 file - promoters60/1387524
gtctaaat

SEQ ID NO: 109486 - DNA, 8 bp, Unknown
  misc_feature (1)..( 8): Result.002 file - promoters60/1387524
gtctaaat

SEQ ID NO: 109487 - DNA, 6 bp, Unknown
  misc_feature (1)..( 6): Result.002 file - promoters60/1387524
agtaaa

SEQ ID NO: 109488 - DNA, 6 bp, Unknown
  misc_feature (1)..( 6): Result.002 file - promoters60/1387524
agtaaa

SEQ ID NO: 109489 - DNA, 7 bp, Unknown
  misc_feature (1)..( 7): Result.002 file - promoters60/1387524
aatcggg

SEQ ID NO: 109490 - DNA, 7 bp, Unknown
  misc_feature (1)..( 7): Result.002 file - promoters60/1387524
aattggg

SEQ ID NO: 109491 - DNA, 8 bp, Unknown
  misc_feature (1)..( 8): Result.002 file - promoters60/1387524
gaaagaaa

SEQ ID NO: 109492 - DNA, 8 bp, Unknown
  misc_feature (1)..( 8): Result.002 file - promoters60/1387524
gaaacaaa

SEQ ID NO: 109493 - DNA, 10 bp, Unknown
  misc_feature (1)..( 10): Result.002 file - promoters60/1387524
ggaaaagaaa

SEQ ID NO: 109494 - DNA, 10 bp, Unknown
  misc_feature (1)..( 10): Result.002 file - promoters60/1387524
ggaaatgaaa

SEQ ID NO: 109495 - DNA, 7 bp, Unknown
  misc_feature (1)..( 7): Result.002 file - promoters60/1387524
cccacta

SEQ ID NO: 109496 - DNA, 7 bp, Unknown
  misc_feature (1)..( 7): Result.002 file - promoters60/1387524
cccacta

SEQ ID NO: 109497 - DNA, 9 bp, Unknown
  misc_feature (1)..( 9): Result.002 file - promoters60/1387524
aaagaaaag

SEQ ID NO: 109498 - DNA, 9 bp, Unknown
  misc_feature (1)..( 9): Result.002 file - promoters60/1387524
aaagtaaag

SEQ ID NO: 109499 - DNA, 7 bp, Unknown
  misc_feature (1)..( 7): Result.002 file - promoters60/1387524
gtatata

SEQ ID NO: 109500 - DNA, 7 bp, Unknown
  misc_feature (1)..( 7): Result.002 file - promoters60/1387524
gtatata

SEQ ID NO: 109501 - DNA, 9 bp, Unknown
  misc_feature (1)..( 9): Result.002 file - promoters60/1387601
tatttaatg

SEQ ID NO: 109502 - DNA, 9 bp, Unknown
  misc_feature (1)..( 9): Result.002 file - promoters60/1387601
ggtttgatg

SEQ ID NO: 109503 - DNA, 9 bp, Unknown
  misc_feature (1)..( 9): Result.002 file - promoters60/1387601
ggtgtgatt

SEQ ID NO: 109504 - DNA, 11 bp, Unknown
  misc_feature (1)..( 11): Result.002 file - promoters60/1387601
tccaaacagag

SEQ ID NO: 109505 - DNA, 11 bp, Unknown
  misc_feature (1)..( 11): Result.002 file - promoters60/1387601
tccaaacagat

SEQ ID NO: 109506 - DNA, 11 bp, Unknown
  misc_feature (1)..( 11): Result.002 file - promoters60/1387601
ttaaaaaagag

SEQ ID NO: 109507 - DNA, 9 bp, Unknown
  misc_feature (1)..( 9): Result.002 file - promoters60/1387616
aaaaataaa

SEQ ID NO: 109508 - DNA, 9 bp, Unknown
  misc_feature (1)..( 9): Result.002 file - promoters60/1387616
aaacatata

SEQ ID NO: 109509 - DNA, 9 bp, Unknown
  misc_feature (1)..( 9): Result.002 file - promoters60/1387616
aaaattaat

SEQ ID NO: 109510 - DNA, 9 bp, Unknown
  misc_feature (1)..( 9): Result.002 file - promoters60/1387616
aaagaaaga

SEQ ID NO: 109511 - DNA, 10 bp, Unknown
  misc_feature (1)..( 10): Result.002 file - promoters60/1387616
ataaaataca

SEQ ID NO: 109512 - DNA, 10 bp, Unknown
  misc_feature (1)..( 10): Result.002 file - promoters60/1387616
agataatatt

SEQ ID NO: 109513 - DNA, 10 bp, Unknown
  misc_feature (1)..( 10): Result.002 file - promoters60/1387616
aataaatctt

SEQ ID NO: 109514 - DNA, 10 bp, Unknown
  misc_feature (1)..( 10): Result.002 file - promoters60/1387616
caatattatt

SEQ ID NO: 109515 - DNA, 11 bp, Unknown
  misc_feature (1)..( 11): Result.002 file - promoters60/1387616
aataaataaaa

SEQ ID NO: 109516 - DNA, 11 bp, Unknown
  misc_feature (1)..( 11): Result.002 file - promoters60/1387616
tttaattaaac

SEQ ID NO: 109517 - DNA, 11 bp, Unknown
  misc_feature (1)..( 11): Result.002 file - promoters60/1387616
aaacaataaaa

SEQ ID NO: 109518 - DNA, 11 bp, Unknown
  misc_feature (1)..( 11): Result.002 file - promoters60/1387616
gagaaagaaag

SEQ ID NO: 109519 - DNA, 11 bp, Unknown
  misc_feature (1)..( 11): Result.002 file - promoters60/1387616
acattataaaa

SEQ ID NO: 109520 - DNA, 11 bp, Unknown
  misc_feature (1)..( 11): Result.002 file - promoters60/1387616
tccgaataaat

SEQ ID NO: 109521 - DNA, 11 bp, Unknown
  misc_feature (1)..( 11): Result.002 file - promoters60/1387616
tttcatttcca

SEQ ID NO: 109522 - DNA, 10 bp, Unknown
  misc_feature (1)..( 10): Result.002 file - promoters60/1387616
atattattag

SEQ ID NO: 109523 - DNA, 10 bp, Unknown
  misc_feature (1)..( 10): Result.002 file - promoters60/1387616
atattaataa

SEQ ID NO: 109524 - DNA, 10 bp, Unknown
  misc_feature (1)..( 10): Result.002 file - promoters60/1387616
atattattag

SEQ ID NO: 109525 - DNA, 10 bp, Unknown
  misc_feature (1)..( 10): Result.002 file - promoters60/1387616
ttattatatt

SEQ ID NO: 109526 - DNA, 10 bp, Unknown
  misc_feature (1)..( 10): Result.002 file - promoters60/1387616
atataattat

SEQ ID NO: 109527 - DNA, 10 bp, Unknown
  misc_feature (1)..( 10): Result.002 file - promoters60/1387616
atattattaa

SEQ ID NO: 109528 - DNA, 10 bp, Unknown
  misc_feature (1)..( 10): Result.002 file - promoters60/1387616
atacaatgaa

SEQ ID NO: 109529 - DNA, 9 bp, Unknown
  misc_feature (1)..( 9): Result.002 file - promoters60/1387616
aattaaaat

SEQ ID NO: 109530 - DNA, 9 bp, Unknown
  misc_feature (1)..( 9): Result.002 file - promoters60/1387616
aatgaaaaa

SEQ ID NO: 109531 - DNA, 9 bp, Unknown
  misc_feature (1)..( 9): Result.002 file - promoters60/1387616
cgttaaaaa

SEQ ID NO: 109532 - DNA, 9 bp, Unknown
  misc_feature (1)..( 9): Result.002 file - promoters60/1387616
aataaaaaa

SEQ ID NO: 109533 - DNA, 9 bp, Unknown
  misc_feature (1)..( 9): Result.002 file - promoters60/1387616
gatgaaacc

SEQ ID NO: 109534 - DNA, 9 bp, Unknown
  misc_feature (1)..( 9): Result.002 file - promoters60/1387616
cagaaaaaa

SEQ ID NO: 109535 - DNA, 12 bp, Unknown
  misc_feature (1)..( 12): Result.002 file - promoters60/1387616
aaaatattaacc

SEQ ID NO: 109536 - DNA, 12 bp, Unknown
  misc_feature (1)..( 12): Result.002 file - promoters60/1387616
taaaaattaaat

SEQ ID NO: 109537 - DNA, 12 bp, Unknown
  misc_feature (1)..( 12): Result.002 file - promoters60/1387616
gtaaaatttcat

SEQ ID NO: 109538 - DNA, 12 bp, Unknown
  misc_feature (1)..( 12): Result.002 file - promoters60/1387616
gtaaaattccca

SEQ ID NO: 109539 - DNA, 12 bp, Unknown
  misc_feature (1)..( 12): Result.002 file - promoters60/1387616
taacaattctaa

SEQ ID NO: 109540 - DNA, 12 bp, Unknown
  misc_feature (1)..( 12): Result.002 file - promoters60/1387616
gaatgattaaat

SEQ ID NO: 109541 - DNA, 10 bp, Unknown
  misc_feature (1)..( 10): Result.002 file - promoters60/1387616
aaataaataa

SEQ ID NO: 109542 - DNA, 10 bp, Unknown
  misc_feature (1)..( 10): Result.002 file - promoters60/1387616
caataaaatt

SEQ ID NO: 109543 - DNA, 10 bp, Unknown
  misc_feature (1)..( 10): Result.002 file - promoters60/1387616
aaagaaagag

SEQ ID NO: 109544 - DNA, 10 bp, Unknown
  misc_feature (1)..( 10): Result.002 file - promoters60/1387616
gaataaatct

SEQ ID NO: 109545 - DNA, 10 bp, Unknown
  misc_feature (1)..( 10): Result.002 file - promoters60/1387616
agataatatt

SEQ ID NO: 109546 - DNA, 10 bp, Unknown
  misc_feature (1)..( 10): Result.002 file - promoters60/1387616
caatattatt

SEQ ID NO: 109547 - DNA, 14 bp, Unknown
  misc_feature (1)..( 14): Result.002 file - promoters60/1387616
tgaaaaacaaacgt

SEQ ID NO: 109548 - DNA, 14 bp, Unknown
  misc_feature (1)..( 14): Result.002 file - promoters60/1387616
ctataaataaattt

SEQ ID NO: 109549 - DNA, 14 bp, Unknown
  misc_feature (1)..( 14): Result.002 file - promoters60/1387616
agtcaaacaaatgt

SEQ ID NO: 109550 - DNA, 14 bp, Unknown
  misc_feature (1)..( 14): Result.002 file - promoters60/1387616
ttttaaaaaaagaa

SEQ ID NO: 109551 - DNA, 14 bp, Unknown
  misc_feature (1)..( 14): Result.002 file - promoters60/1387616
atgtatatattaat

SEQ ID NO: 109552 - DNA, 14 bp, Unknown
  misc_feature (1)..( 14): Result.002 file - promoters60/1387616
gtcaatattattaa

SEQ ID NO: 109553 - DNA, 14 bp, Unknown
  misc_feature (1)..( 14): Result.002 file - promoters60/1387616
ctggtcataaatgt

SEQ ID NO: 109554 - DNA, 14 bp, Unknown
  misc_feature (1)..( 14): Result.002 file - promoters60/1387616
ttagaaacagactt

SEQ ID NO: 109555 - DNA, 11 bp, Unknown
  misc_feature (1)..( 11): Result.002 file - promoters60/1387616
aacatatagta

SEQ ID NO: 109556 - DNA, 11 bp, Unknown
  misc_feature (1)..( 11): Result.002 file - promoters60/1387616
aaaatatcgta

SEQ ID NO: 109557 - DNA, 11 bp, Unknown
  misc_feature (1)..( 11): Result.002 file - promoters60/1387616
ataatatttca

SEQ ID NO: 109558 - DNA, 11 bp, Unknown
  misc_feature (1)..( 11): Result.002 file - promoters60/1387616
aaaatacagta

SEQ ID NO: 109559 - DNA, 11 bp, Unknown
  misc_feature (1)..( 11): Result.002 file - promoters60/1387616
tcaatattatt

SEQ ID NO: 109560 - DNA, 11 bp, Unknown
  misc_feature (1)..( 11): Result.002 file - promoters60/1387616
agagtaccgta

SEQ ID NO: 109561 - DNA, 12 bp, Unknown
  misc_feature (1)..( 12): Result.002 file - promoters60/1387616
taatctatatgt

SEQ ID NO: 109562 - DNA, 12 bp, Unknown
  misc_feature (1)..( 12): Result.002 file - promoters60/1387616
ttttctataaat

SEQ ID NO: 109563 - DNA, 12 bp, Unknown
  misc_feature (1)..( 12): Result.002 file - promoters60/1387616
aaatgtatcctt

SEQ ID NO: 109564 - DNA, 12 bp, Unknown
  misc_feature (1)..( 12): Result.002 file - promoters60/1387616
ttaactacatgt

SEQ ID NO: 109565 - DNA, 12 bp, Unknown
  misc_feature (1)..( 12): Result.002 file - promoters60/1387616
aaatgtttgtct

SEQ ID NO: 109566 - DNA, 12 bp, Unknown
  misc_feature (1)..( 12): Result.002 file - promoters60/1387616
cagacttcatat

SEQ ID NO: 109567 - DNA, 8 bp, Unknown
  misc_feature (1)..( 8): Result.002 file - promoters60/1387649
gctaggtt

SEQ ID NO: 109568 - DNA, 8 bp, Unknown
  misc_feature (1)..( 8): Result.002 file - promoters60/1387649
gctatgtt

SEQ ID NO: 109569 - DNA, 7 bp, Unknown
  misc_feature (1)..( 7): Result.002 file - promoters60/1387649
ttagatt

SEQ ID NO: 109570 - DNA, 7 bp, Unknown
  misc_feature (1)..( 7): Result.002 file - promoters60/1387649
ttaaatt

SEQ ID NO: 109571 - DNA, 6 bp, Unknown
  misc_feature (1)..( 6): Result.002 file - promoters60/1387649
aaaatg

SEQ ID NO: 109572 - DNA, 6 bp, Unknown
  misc_feature (1)..( 6): Result.002 file - promoters60/1387649
aaaatg

SEQ ID NO: 109573 - DNA, 7 bp, Unknown
  misc_feature (1)..( 7): Result.002 file - promoters60/1387649
aaaggtt

SEQ ID NO: 109574 - DNA, 7 bp, Unknown
  misc_feature (1)..( 7): Result.002 file - promoters60/1387649
aaatgtt

SEQ ID NO: 109575 - DNA, 6 bp, Unknown
  misc_feature (1)..( 6): Result.002 file - promoters60/1387649
taataa

SEQ ID NO: 109576 - DNA, 6 bp, Unknown
  misc_feature (1)..( 6): Result.002 file - promoters60/1387649
taataa

SEQ ID NO: 109577 - DNA, 6 bp, Unknown
  misc_feature (1)..( 6): Result.002 file - promoters60/1387649
tgtcaa

SEQ ID NO: 109578 - DNA, 6 bp, Unknown
  misc_feature (1)..( 6): Result.002 file - promoters60/1387649
tgtcaa

SEQ ID NO: 109579 - DNA, 6 bp, Unknown
  misc_feature (1)..( 6): Result.002 file - promoters60/1387649
tcaatt

SEQ ID NO: 109580 - DNA, 6 bp, Unknown
  misc_feature (1)..( 6): Result.002 file - promoters60/1387649
tcaatt

SEQ ID NO: 109581 - DNA, 7 bp, Unknown
  misc_feature (1)..( 7): Result.002 file - promoters60/1387649
taccata

SEQ ID NO: 109582 - DNA, 7 bp, Unknown
  misc_feature (1)..( 7): Result.002 file - promoters60/1387649
tacgata

SEQ ID NO: 109583 - DNA, 7 bp, Unknown
  misc_feature (1)..( 7): Result.002 file - promoters60/1387649
caaccac

SEQ ID NO: 109584 - DNA, 7 bp, Unknown
  misc_feature (1)..( 7): Result.002 file - promoters60/1387649
caaccac

SEQ ID NO: 109585 - DNA, 6 bp, Unknown
  misc_feature (1)..( 6): Result.002 file - promoters60/1387649
ggctga

SEQ ID NO: 109586 - DNA, 6 bp, Unknown
  misc_feature (1)..( 6): Result.002 file - promoters60/1387649
ggctga

SEQ ID NO: 109587 - DNA, 11 bp, Unknown
  misc_feature (1)..( 11): Result.002 file - promoters60/1387649
aggttctcaga

SEQ ID NO: 109588 - DNA, 11 bp, Unknown
  misc_feature (1)..( 11): Result.002 file - promoters60/1387649
agggtctgaga

SEQ ID NO: 109589 - DNA, 6 bp, Unknown
  misc_feature (1)..( 6): Result.002 file - promoters60/1387649
agattt

SEQ ID NO: 109590 - DNA, 6 bp, Unknown
  misc_feature (1)..( 6): Result.002 file - promoters60/1387649
agattt

SEQ ID NO: 109591 - DNA, 8 bp, Unknown
  misc_feature (1)..( 8): Result.002 file - promoters60/1387671
catataaa

SEQ ID NO: 109592 - DNA, 8 bp, Unknown
  misc_feature (1)..( 8): Result.002 file - promoters60/1387671
catatata

SEQ ID NO: 109593 - DNA, 8 bp, Unknown
  misc_feature (1)..( 8): Result.002 file - promoters60/1387671
tatataaa

SEQ ID NO: 109594 - DNA, 8 bp, Unknown
  misc_feature (1)..( 8): Result.002 file - promoters60/1387671
tatatata

SEQ ID NO: 109595 - DNA, 8 bp, Unknown
  misc_feature (1)..( 8): Result.002 file - promoters60/1387671
tatagata

SEQ ID NO: 109596 - DNA, 8 bp, Unknown
  misc_feature (1)..( 8): Result.002 file - promoters60/1387671
aatacact

SEQ ID NO: 109597 - DNA, 9 bp, Unknown
  misc_feature (1)..( 9): Result.002 file - promoters60/1387671
aataaatta

SEQ ID NO: 109598 - DNA, 9 bp, Unknown
  misc_feature (1)..( 9): Result.002 file - promoters60/1387671
aatacattc

SEQ ID NO: 109599 - DNA, 9 bp, Unknown
  misc_feature (1)..( 9): Result.002 file - promoters60/1387671
aaaaaaagt

SEQ ID NO: 109600 - DNA, 9 bp, Unknown
  misc_feature (1)..( 9): Result.002 file - promoters60/1387671
aatacattt

SEQ ID NO: 109601 - DNA, 9 bp, Unknown
  misc_feature (1)..( 9): Result.002 file - promoters60/1387671
aatacatac

SEQ ID NO: 109602 - DNA, 9 bp, Unknown
  misc_feature (1)..( 9): Result.002 file - promoters60/1387671
taaacattt

SEQ ID NO: 109603 - DNA, 6 bp, Unknown
  misc_feature (1)..( 6): Result.002 file - promoters60/1387793
ttttac

SEQ ID NO: 109604 - DNA, 6 bp, Unknown
  misc_feature (1)..( 6): Result.002 file - promoters60/1387793
ttttac

SEQ ID NO: 109605 - DNA, 6 bp, Unknown
  misc_feature (1)..( 6): Result.002 file - promoters60/1387793
aaaacc

SEQ ID NO: 109606 - DNA, 6 bp, Unknown
  misc_feature (1)..( 6): Result.002 file - promoters60/1387793
aaaacc

SEQ ID NO: 109607 - DNA, 8 bp, Unknown
  misc_feature (1)..( 8): Result.002 file - promoters60/1387793
aaaaaaca

SEQ ID NO: 109608 - DNA, 8 bp, Unknown
  misc_feature (1)..( 8): Result.002 file - promoters60/1387793
aaagaaca

SEQ ID NO: 109609 - DNA, 8 bp, Unknown
  misc_feature (1)..( 8): Result.002 file - promoters60/1387793
caaaaaaa

SEQ ID NO: 109610 - DNA, 8 bp, Unknown
  misc_feature (1)..( 8): Result.002 file - promoters60/1387793
caagaaag

SEQ ID NO: 109611 - DNA, 8 bp, Unknown
  misc_feature (1)..( 8): Result.002 file - promoters60/1387793
taaaaaaa

SEQ ID NO: 109612 - DNA, 7 bp, Unknown
  misc_feature (1)..( 7): Result.002 file - promoters60/1387793
taaattt

SEQ ID NO: 109613 - DNA, 7 bp, Unknown
  misc_feature (1)..( 7): Result.002 file - promoters60/1387793
taatttt

SEQ ID NO: 109614 - DNA, 7 bp, Unknown
  misc_feature (1)..( 7): Result.002 file - promoters60/1387793
ttttgtt

SEQ ID NO: 109615 - DNA, 7 bp, Unknown
  misc_feature (1)..( 7): Result.002 file - promoters60/1387793
ttttgtt

SEQ ID NO: 109616 - DNA, 7 bp, Unknown
  misc_feature (1)..( 7): Result.002 file - promoters60/1387793
ttaaaat

SEQ ID NO: 109617 - DNA, 7 bp, Unknown
  misc_feature (1)..( 7): Result.002 file - promoters60/1387793
ttataat

SEQ ID NO: 109618 - DNA, 8 bp, Unknown
  misc_feature (1)..( 8): Result.002 file - promoters60/1387793
atataatt

SEQ ID NO: 109619 - DNA, 8 bp, Unknown
  misc_feature (1)..( 8): Result.002 file - promoters60/1387793
atataatt

SEQ ID NO: 109620 - DNA, 6 bp, Unknown
  misc_feature (1)..( 6): Result.002 file - promoters60/1387793
gaaaaa

SEQ ID NO: 109621 - DNA, 6 bp, Unknown
  misc_feature (1)..( 6): Result.002 file - promoters60/1387793
gaaaaa

SEQ ID NO: 109622 - DNA, 7 bp, Unknown
  misc_feature (1)..( 7): Result.002 file - promoters60/1387793
aaaatat

SEQ ID NO: 109623 - DNA, 7 bp, Unknown
  misc_feature (1)..( 7): Result.002 file - promoters60/1387793
aaactat

SEQ ID NO: 109624 - DNA, 6 bp, Unknown
  misc_feature (1)..( 6): Result.002 file - promoters60/1387793
aaaact

SEQ ID NO: 109625 - DNA, 6 bp, Unknown
  misc_feature (1)..( 6): Result.002 file - promoters60/1387793
aaaact

SEQ ID NO: 109626 - DNA, 11 bp, Unknown
  misc_feature (1)..( 11): Result.002 file - promoters60/1387793
ctttataaaaa

SEQ ID NO: 109627 - DNA, 11 bp, Unknown
  misc_feature (1)..( 11): Result.002 file - promoters60/1387793
ctttaaaaaaa

SEQ ID NO: 109628 - DNA, 7 bp, Unknown
  misc_feature (1)..( 7): Result.002 file - promoters60/1387793
aaaaatt

SEQ ID NO: 109629 - DNA, 7 bp, Unknown
  misc_feature (1)..( 7): Result.002 file - promoters60/1387793
aaatatt

SEQ ID NO: 109630 - DNA, 6 bp, Unknown
  misc_feature (1)..( 6): Result.002 file - promoters60/1387793
gtgtac

SEQ ID NO: 109631 - DNA, 6 bp, Unknown
  misc_feature (1)..( 6): Result.002 file - promoters60/1387793
gtgtac

SEQ ID NO: 109632 - DNA, 10 bp, Unknown
  misc_feature (1)..( 10): Result.002 file - promoters60/1387793
aaccgtggga

SEQ ID NO: 109633 - DNA, 10 bp, Unknown
  misc_feature (1)..( 10): Result.002 file - promoters60/1387793
aaccgtcgga

SEQ ID NO: 109634 - DNA, 9 bp, Unknown
  misc_feature (1)..( 9): Result.002 file - promoters60/1387793
aaaagggca

SEQ ID NO: 109635 - DNA, 9 bp, Unknown
  misc_feature (1)..( 9): Result.002 file - promoters60/1387793
aaaagggca

SEQ ID NO: 109636 - DNA, 6 bp, Unknown
  misc_feature (1)..( 6): Result.002 file - promoters60/1387793
ttaaaa

SEQ ID NO: 109637 - DNA, 6 bp, Unknown
  misc_feature (1)..( 6): Result.002 file - promoters60/1387793
ttaaaa

SEQ ID NO: 109638 - DNA, 8 bp, Unknown
  misc_feature (1)..( 8): Result.002 file - promoters60/1387818
aacaaaaa

SEQ ID NO: 109639 - DNA, 8 bp, Unknown
  misc_feature (1)..( 8): Result.002 file - promoters60/1387818
cacagaaa

SEQ ID NO: 109640 - DNA, 8 bp, Unknown
  misc_feature (1)..( 8): Result.002 file - promoters60/1387818
aacgaaat

SEQ ID NO: 109641 - DNA, 8 bp, Unknown
  misc_feature (1)..( 8): Result.002 file - promoters60/1387818
gacataaa

SEQ ID NO: 109642 - DNA, 9 bp, Unknown
  misc_feature (1)..( 9): Result.002 file - promoters60/1387818
tcatagata

SEQ ID NO: 109643 - DNA, 9 bp, Unknown
  misc_feature (1)..( 9): Result.002 file - promoters60/1387818
tcaaagaat

SEQ ID NO: 109644 - DNA, 9 bp, Unknown
  misc_feature (1)..( 9): Result.002 file - promoters60/1387818
ttaaagaat

SEQ ID NO: 109645 - DNA, 9 bp, Unknown
  misc_feature (1)..( 9): Result.002 file - promoters60/1387818
ctaacgaaa

SEQ ID NO: 109646 - DNA, 9 bp, Unknown
  misc_feature (1)..( 9): Result.002 file - promoters60/1387818
acttaaaat

SEQ ID NO: 109647 - DNA, 9 bp, Unknown
  misc_feature (1)..( 9): Result.002 file - promoters60/1387818
actaaaaac

SEQ ID NO: 109648 - DNA, 9 bp, Unknown
  misc_feature (1)..( 9): Result.002 file - promoters60/1387818
ggtaaaatc

SEQ ID NO: 109649 - DNA, 9 bp, Unknown
  misc_feature (1)..( 9): Result.002 file - promoters60/1387818
aataaaaaa

SEQ ID NO: 109650 - DNA, 9 bp, Unknown
  misc_feature (1)..( 9): Result.002 file - promoters60/1387818
aaatttttc

SEQ ID NO: 109651 - DNA, 9 bp, Unknown
  misc_feature (1)..( 9): Result.002 file - promoters60/1387818
caatatttc

SEQ ID NO: 109652 - DNA, 9 bp, Unknown
  misc_feature (1)..( 9): Result.002 file - promoters60/1387818
aaagtttcc

SEQ ID NO: 109653 - DNA, 9 bp, Unknown
  misc_feature (1)..( 9): Result.002 file - promoters60/1387818
aaagttgaa

SEQ ID NO: 109654 - DNA, 10 bp, Unknown
  misc_feature (1)..( 10): Result.002 file - promoters60/1387818
gaagagtata

SEQ ID NO: 109655 - DNA, 10 bp, Unknown
  misc_feature (1)..( 10): Result.002 file - promoters60/1387818
taagaatata

SEQ ID NO: 109656 - DNA, 10 bp, Unknown
  misc_feature (1)..( 10): Result.002 file - promoters60/1387818
taacaatggg

SEQ ID NO: 109657 - DNA, 10 bp, Unknown
  misc_feature (1)..( 10): Result.002 file - promoters60/1387818
taagaagaat

SEQ ID NO: 109658 - DNA, 13 bp, Unknown
  misc_feature (1)..( 13): Result.002 file - promoters60/1387818
tttagtaatataa

SEQ ID NO: 109659 - DNA, 13 bp, Unknown
  misc_feature (1)..( 13): Result.002 file - promoters60/1387818
tttattaaaatgc

SEQ ID NO: 109660 - DNA, 13 bp, Unknown
  misc_feature (1)..( 13): Result.002 file - promoters60/1387818
aatagaaatatgt

SEQ ID NO: 109661 - DNA, 13 bp, Unknown
  misc_feature (1)..( 13): Result.002 file - promoters60/1387818
actaagaatgtgt

SEQ ID NO: 109662 - DNA, 10 bp, Unknown
  misc_feature (1)..( 10): Result.002 file - promoters60/1387906
tttgaaggtt

SEQ ID NO: 109663 - DNA, 10 bp, Unknown
  misc_feature (1)..( 10): Result.002 file - promoters60/1387906
gaggaaggtg

SEQ ID NO: 109664 - DNA, 10 bp, Unknown
  misc_feature (1)..( 10): Result.002 file - promoters60/1387906
ttttaaggtt

SEQ ID NO: 109665 - DNA, 7 bp, Unknown
  misc_feature (1)..( 7): Result.002 file - promoters60/1387906
gaaaata

SEQ ID NO: 109666 - DNA, 7 bp, Unknown
  misc_feature (1)..( 7): Result.002 file - promoters60/1387906
gaaaatg

SEQ ID NO: 109667 - DNA, 7 bp, Unknown
  misc_feature (1)..( 7): Result.002 file - promoters60/1387906
taaaata

SEQ ID NO: 109668 - DNA, 11 bp, Unknown
  misc_feature (1)..( 11): Result.002 file - promoters60/1387906
atataacaaca

SEQ ID NO: 109669 - DNA, 11 bp, Unknown
  misc_feature (1)..( 11): Result.002 file - promoters60/1387906
ttttaataaca

SEQ ID NO: 109670 - DNA, 11 bp, Unknown
  misc_feature (1)..( 11): Result.002 file - promoters60/1387906
ttttactaact

SEQ ID NO: 109671 - DNA, 10 bp, Unknown
  misc_feature (1)..( 10): Result.002 file - promoters60/1387906
taaatttgtt

SEQ ID NO: 109672 - DNA, 10 bp, Unknown
  misc_feature (1)..( 10): Result.002 file - promoters60/1387906
aaaatctgtt

SEQ ID NO: 109673 - DNA, 10 bp, Unknown
  misc_feature (1)..( 10): Result.002 file - promoters60/1387906
aaaatcgaac

SEQ ID NO: 109674 - DNA, 9 bp, Unknown
  misc_feature (1)..( 9): Result.002 file - promoters60/1387906
ctttataat

SEQ ID NO: 109675 - DNA, 9 bp, Unknown
  misc_feature (1)..( 9): Result.002 file - promoters60/1387906
cattaaaat

SEQ ID NO: 109676 - DNA, 10 bp, Unknown
  misc_feature (1)..( 10): Result.002 file - promoters60/1387906
acttcataga

SEQ ID NO: 109677 - DNA, 10 bp, Unknown
  misc_feature (1)..( 10): Result.002 file - promoters60/1387947
ttttggaaga

SEQ ID NO: 109678 - DNA, 10 bp, Unknown
  misc_feature (1)..( 10): Result.002 file - promoters60/1387947
aattgtaaga

SEQ ID NO: 109679 - DNA, 10 bp, Unknown
  misc_feature (1)..( 10): Result.002 file - promoters60/1387947
ttttagaata

SEQ ID NO: 109680 - DNA, 7 bp, Unknown
  misc_feature (1)..( 7): Result.002 file - promoters60/1387947
tgtagaa

SEQ ID NO: 109681 - DNA, 7 bp, Unknown
  misc_feature (1)..( 7): Result.002 file - promoters60/1387947
tgtagaa

SEQ ID NO: 109682 - DNA, 6 bp, Unknown
  misc_feature (1)..( 6): Result.002 file - promoters60/1387947
acaatt

SEQ ID NO: 109683 - DNA, 6 bp, Unknown
  misc_feature (1)..( 6): Result.002 file - promoters60/1387947
acaatt

SEQ ID NO: 109684 - DNA, 7 bp, Unknown
  misc_feature (1)..( 7): Result.002 file - promoters60/1387947
attttaa

SEQ ID NO: 109685 - DNA, 7 bp, Unknown
  misc_feature (1)..( 7): Result.002 file - promoters60/1387947
attttaa

SEQ ID NO: 109686 - DNA, 7 bp, Unknown
  misc_feature (1)..( 7): Result.002 file - promoters60/1387947
attaact

SEQ ID NO: 109687 - DNA, 7 bp, Unknown
  misc_feature (1)..( 7): Result.002 file - promoters60/1387947
attaact

SEQ ID NO: 109688 - DNA, 8 bp, Unknown
  misc_feature (1)..( 8): Result.002 file - promoters60/1387947
tggttcta

SEQ ID NO: 109689 - DNA, 8 bp, Unknown
  misc_feature (1)..( 8): Result.002 file - promoters60/1387947
tgggtcta

SEQ ID NO: 109690 - DNA, 6 bp, Unknown
  misc_feature (1)..( 6): Result.002 file - promoters60/1387947
aaaact

SEQ ID NO: 109691 - DNA, 6 bp, Unknown
  misc_feature (1)..( 6): Result.002 file - promoters60/1387947
aaaact

SEQ ID NO: 109692 - DNA, 6 bp, Unknown
  misc_feature (1)..( 6): Result.002 file - promoters60/1387947
gaaaaa

SEQ ID NO: 109693 - DNA, 6 bp, Unknown
  misc_feature (1)..( 6): Result.002 file - promoters60/1387947
gaaaaa

SEQ ID NO: 109694 - DNA, 7 bp, Unknown
  misc_feature (1)..( 7): Result.002 file - promoters60/1387947
aaaagaa

SEQ ID NO: 109695 - DNA, 7 bp, Unknown
  misc_feature (1)..( 7): Result.002 file - promoters60/1387947
aaacgaa

SEQ ID NO: 109696 - DNA, 9 bp, Unknown
  misc_feature (1)..( 9): Result.002 file - promoters60/1387947
agaaagaaa

SEQ ID NO: 109697 - DNA, 9 bp, Unknown
  misc_feature (1)..( 9): Result.002 file - promoters60/1387947
agacagaaa

SEQ ID NO: 109698 - DNA, 9 bp, Unknown
  misc_feature (1)..( 9): Result.002 file - promoters60/1387947
taacaaaaa

SEQ ID NO: 109699 - DNA, 7 bp, Unknown
  misc_feature (1)..( 7): Result.002 file - promoters60/1387947
gaaggaa

SEQ ID NO: 109700 - DNA, 7 bp, Unknown
  misc_feature (1)..( 7): Result.002 file - promoters60/1387947
gaaagaa

SEQ ID NO: 109701 - DNA, 8 bp, Unknown
  misc_feature (1)..( 8): Result.002 file - promoters60/1387947
gttagtta

SEQ ID NO: 109702 - DNA, 8 bp, Unknown
  misc_feature (1)..( 8): Result.002 file - promoters60/1387947
gttactta

SEQ ID NO: 109703 - DNA, 8 bp, Unknown
  misc_feature (1)..( 8): Result.002 file - promoters60/1387947
aatactta

SEQ ID NO: 109704 - DNA, 6 bp, Unknown
  misc_feature (1)..( 6): Result.002 file - promoters60/1387947
accatt

SEQ ID NO: 109705 - DNA, 6 bp, Unknown
  misc_feature (1)..( 6): Result.002 file - promoters60/1387947
accatt

SEQ ID NO: 109706 - DNA, 7 bp, Unknown
  misc_feature (1)..( 7): Result.002 file - promoters60/1387947
agaagtt

SEQ ID NO: 109707 - DNA, 7 bp, Unknown
  misc_feature (1)..( 7): Result.002 file - promoters60/1387947
agacgtt

SEQ ID NO: 109708 - DNA, 7 bp, Unknown
  misc_feature (1)..( 7): Result.002 file - promoters60/1387947
aatttta

SEQ ID NO: 109709 - DNA, 7 bp, Unknown
  misc_feature (1)..( 7): Result.002 file - promoters60/1387947
aatatta

SEQ ID NO: 109710 - DNA, 7 bp, Unknown
  misc_feature (1)..( 7): Result.002 file - promoters60/1387947
aaataaa

SEQ ID NO: 109711 - DNA, 7 bp, Unknown
  misc_feature (1)..( 7): Result.002 file - promoters60/1387947
aaaaaaa

SEQ ID NO: 109712 - DNA, 8 bp, Unknown
  misc_feature (1)..( 8): Result.002 file - promoters60/1387947
aaacttta

SEQ ID NO: 109713 - DNA, 8 bp, Unknown
  misc_feature (1)..( 8): Result.002 file - promoters60/1387947
aaacgtta

SEQ ID NO: 109714 - DNA, 6 bp, Unknown
  misc_feature (1)..( 6): Result.002 file - promoters60/1387947
taaacg

SEQ ID NO: 109715 - DNA, 6 bp, Unknown
  misc_feature (1)..( 6): Result.002 file - promoters60/1387947
taaacg

SEQ ID NO: 109716 - DNA, 11 bp, Unknown
  misc_feature (1)..( 11): Result.002 file - promoters60/1388009
tatgaaaatat

SEQ ID NO: 109717 - DNA, 11 bp, Unknown
  misc_feature (1)..( 11): Result.002 file - promoters60/1388009
tattaaagtat

SEQ ID NO: 109718 - DNA, 11 bp, Unknown
  misc_feature (1)..( 11): Result.002 file - promoters60/1388009
tattaaattat

SEQ ID NO: 109719 - DNA, 7 bp, Unknown
  misc_feature (1)..( 7): Result.002 file - promoters60/1388009
atatttt

SEQ ID NO: 109720 - DNA, 7 bp, Unknown
  misc_feature (1)..( 7): Result.002 file - promoters60/1388009
atatttt

SEQ ID NO: 109721 - DNA, 7 bp, Unknown
  misc_feature (1)..( 7): Result.002 file - promoters60/1388009
atatttt

SEQ ID NO: 109722 - DNA, 7 bp, Unknown
  misc_feature (1)..( 7): Result.002 file - promoters60/1388009
tttttac

SEQ ID NO: 109723 - DNA, 7 bp, Unknown
  misc_feature (1)..( 7): Result.002 file - promoters60/1388009
attttac

SEQ ID NO: 109724 - DNA, 7 bp, Unknown
  misc_feature (1)..( 7): Result.002 file - promoters60/1388009
attttag

SEQ ID NO: 109725 - DNA, 8 bp, Unknown
  misc_feature (1)..( 8): Result.002 file - promoters60/1388009
cttctgtt

SEQ ID NO: 109726 - DNA, 8 bp, Unknown
  misc_feature (1)..( 8): Result.002 file - promoters60/1388009
cttttgtt

SEQ ID NO: 109727 - DNA, 10 bp, Unknown
  misc_feature (1)..( 10): Result.002 file - promoters60/1388009
cgaaatcata

SEQ ID NO: 109728 - DNA, 10 bp, Unknown
  misc_feature (1)..( 10): Result.002 file - promoters60/1388009
acaaataata

SEQ ID NO: 109729 - DNA, 10 bp, Unknown
  misc_feature (1)..( 10): Result.002 file - promoters60/1388009
cgaattcaaa

SEQ ID NO: 109730 - DNA, 6 bp, Unknown
  misc_feature (1)..( 6): Result.002 file - promoters60/1388009
gtaaca

SEQ ID NO: 109731 - DNA, 6 bp, Unknown
  misc_feature (1)..( 6): Result.002 file - promoters60/1388009
gtaaca

SEQ ID NO: 109732 - DNA, 7 bp, Unknown
  misc_feature (1)..( 7): Result.002 file - promoters60/1388009
ctatatg

SEQ ID NO: 109733 - DNA, 7 bp, Unknown
  misc_feature (1)..( 7): Result.002 file - promoters60/1388009
ctatata

SEQ ID NO: 109734 - DNA, 7 bp, Unknown
  misc_feature (1)..( 7): Result.002 file - promoters60/1388009
ttatatg

SEQ ID NO: 109735 - DNA, 9 bp, Unknown
  misc_feature (1)..( 9): Result.002 file - promoters60/1388009
acattataa

SEQ ID NO: 109736 - DNA, 9 bp, Unknown
  misc_feature (1)..( 9): Result.002 file - promoters60/1388009
aaattataa

SEQ ID NO: 109737 - DNA, 9 bp, Unknown
  misc_feature (1)..( 9): Result.002 file - promoters60/1388009
aaattatta

SEQ ID NO: 109738 - DNA, 6 bp, Unknown
  misc_feature (1)..( 6): Result.002 file - promoters60/1388009
gtatat

SEQ ID NO: 109739 - DNA, 6 bp, Unknown
  misc_feature (1)..( 6): Result.002 file - promoters60/1388009
gtatat

SEQ ID NO: 109740 - DNA, 8 bp, Unknown
  misc_feature (1)..( 8): Result.002 file - promoters60/1388009
attttact

SEQ ID NO: 109741 - DNA, 8 bp, Unknown
  misc_feature (1)..( 8): Result.002 file - promoters60/1388009
attttact

SEQ ID NO: 109742 - DNA, 8 bp, Unknown
  misc_feature (1)..( 8): Result.002 file - promoters60/1388009
tgctaacc

SEQ ID NO: 109743 - DNA, 8 bp, Unknown
  misc_feature (1)..( 8): Result.002 file - promoters60/1388009
tgcttacc

SEQ ID NO: 109744 - DNA, 7 bp, Unknown
  misc_feature (1)..( 7): Result.002 file - promoters60/1388009
ttactaa

SEQ ID NO: 109745 - DNA, 7 bp, Unknown
  misc_feature (1)..( 7): Result.002 file - promoters60/1388009
ttattaa

SEQ ID NO: 109746 - DNA, 8 bp, Unknown
  misc_feature (1)..( 8): Result.002 file - promoters60/1388009
taatttta

SEQ ID NO: 109747 - DNA, 8 bp, Unknown
  misc_feature (1)..( 8): Result.002 file - promoters60/1388009
taatttta

SEQ ID NO: 109748 - DNA, 8 bp, Unknown
  misc_feature (1)..( 8): Result.002 file - promoters60/1388009
agtcggtc

SEQ ID NO: 109749 - DNA, 8 bp, Unknown
  misc_feature (1)..( 8): Result.002 file - promoters60/1388009
agtctgtc

SEQ ID NO: 109750 - DNA, 6 bp, Unknown
  misc_feature (1)..( 6): Result.002 file - promoters60/1388009
gaattc

SEQ ID NO: 109751 - DNA, 6 bp, Unknown
  misc_feature (1)..( 6): Result.002 file - promoters60/1388009
gaattc

SEQ ID NO: 109752 - DNA, 6 bp, Unknown
  misc_feature (1)..( 6): Result.002 file - promoters60/1388009
atattt

SEQ ID NO: 109753 - DNA, 6 bp, Unknown
  misc_feature (1)..( 6): Result.002 file - promoters60/1388009
atattt

SEQ ID NO: 109754 - DNA, 6 bp, Unknown
  misc_feature (1)..( 6): Result.002 file - promoters60/1388009
taatat

SEQ ID NO: 109755 - DNA, 6 bp, Unknown
  misc_feature (1)..( 6): Result.002 file - promoters60/1388009
taatat

SEQ ID NO: 109756 - DNA, 6 bp, Unknown
  misc_feature (1)..( 6): Result.002 file - promoters60/1388069
tattgt

SEQ ID NO: 109757 - DNA, 6 bp, Unknown
  misc_feature (1)..( 6): Result.002 file - promoters60/1388069
tattgt

SEQ ID NO: 109758 - DNA, 7 bp, Unknown
  misc_feature (1)..( 7): Result.002 file - promoters60/1388069
aaattta

SEQ ID NO: 109759 - DNA, 7 bp, Unknown
  misc_feature (1)..( 7): Result.002 file - promoters60/1388069
aaactta

SEQ ID NO: 109760 - DNA, 6 bp, Unknown
  misc_feature (1)..( 6): Result.002 file - promoters60/1388069
tagaaa

SEQ ID NO: 109761 - DNA, 6 bp, Unknown
  misc_feature (1)..( 6): Result.002 file - promoters60/1388069
tagaaa

SEQ ID NO: 109762 - DNA, 10 bp, Unknown
  misc_feature (1)..( 10): Result.002 file - promoters60/1388069
caattgaaaa

SEQ ID NO: 109763 - DNA, 10 bp, Unknown
  misc_feature (1)..( 10): Result.002 file - promoters60/1388069
caattaaaaa

SEQ ID NO: 109764 - DNA, 10 bp, Unknown
  misc_feature (1)..( 10): Result.002 file - promoters60/1388069
taaataaacc

SEQ ID NO: 109765 - DNA, 8 bp, Unknown
  misc_feature (1)..( 8): Result.002 file - promoters60/1388069
tttataat

SEQ ID NO: 109766 - DNA, 8 bp, Unknown
  misc_feature (1)..( 8): Result.002 file - promoters60/1388069
tttctaat

SEQ ID NO: 109767 - DNA, 6 bp, Unknown
  misc_feature (1)..( 6): Result.002 file - promoters60/1388069
agatat

SEQ ID NO: 109768 - DNA, 6 bp, Unknown
  misc_feature (1)..( 6): Result.002 file - promoters60/1388069
agatat

SEQ ID NO: 109769 - DNA, 6 bp, Unknown
  misc_feature (1)..( 6): Result.002 file - promoters60/1388069
aaagat

SEQ ID NO: 109770 - DNA, 6 bp, Unknown
  misc_feature (1)..( 6): Result.002 file - promoters60/1388069
aaagat

SEQ ID NO: 109771 - DNA, 6 bp, Unknown
  misc_feature (1)..( 6): Result.002 file - promoters60/1388069
tctaag

SEQ ID NO: 109772 - DNA, 6 bp, Unknown
  misc_feature (1)..( 6): Result.002 file - promoters60/1388069
tctaag

SEQ ID NO: 109773 - DNA, 6 bp, Unknown
  misc_feature (1)..( 6): Result.002 file - promoters60/1388069
aaaaat

SEQ ID NO: 109774 - DNA, 6 bp, Unknown
  misc_feature (1)..( 6): Result.002 file - promoters60/1388069
aaaaat

SEQ ID NO: 109775 - DNA, 7 bp, Unknown
  misc_feature (1)..( 7): Result.002 file - promoters60/1388069
tttgaag

SEQ ID NO: 109776 - DNA, 7 bp, Unknown
  misc_feature (1)..( 7): Result.002 file - promoters60/1388069
ttttaag

SEQ ID NO: 109777 - DNA, 8 bp, Unknown
  misc_feature (1)..( 8): Result.002 file - promoters60/1388069
aaactaac

SEQ ID NO: 109778 - DNA, 8 bp, Unknown
  misc_feature (1)..( 8): Result.002 file - promoters60/1388069
aaaccaac

SEQ ID NO: 109779 - DNA, 7 bp, Unknown
  misc_feature (1)..( 7): Result.002 file - promoters60/1388069
cttcaag

SEQ ID NO: 109780 - DNA, 7 bp, Unknown
  misc_feature (1)..( 7): Result.002 file - promoters60/1388069
cttcaag

SEQ ID NO: 109781 - DNA, 8 bp, Unknown
  misc_feature (1)..( 8): Result.002 file - promoters60/1388069
atcttcct

SEQ ID NO: 109782 - DNA, 8 bp, Unknown
  misc_feature (1)..( 8): Result.002 file - promoters60/1388069
atcttcct

SEQ ID NO: 109783 - DNA, 8 bp, Unknown
  misc_feature (1)..( 8): Result.002 file - promoters60/1388545
aaataaat

SEQ ID NO: 109784 - DNA, 8 bp, Unknown
  misc_feature (1)..( 8): Result.002 file - promoters60/1388545
aaagaaaa

SEQ ID NO: 109785 - DNA, 9 bp, Unknown
  misc_feature (1)..( 9): Result.002 file - promoters60/1388545
aagagaaaa

SEQ ID NO: 109786 - DNA, 19 bp, Unknown
  misc_feature (1)..( 19): Result.002 file - promoters60/1388793
aacaaactacaaaagttta

SEQ ID NO: 109787 - DNA, 13 bp, Unknown
  misc_feature (1)..( 13): Result.002 file - promoters60/1388793
cagaaaatgtttt

SEQ ID NO: 109788 - DNA, 19 bp, Unknown
  misc_feature (1)..( 19): Result.002 file - promoters60/1388793
agtttagggaaaatggatc

SEQ ID NO: 109789 - DNA, 19 bp, Unknown
  misc_feature (1)..( 19): Result.002 file - promoters60/1388793
ccaacacattcaatatttt

SEQ ID NO: 109790 - DNA, 15 bp, Unknown
  misc_feature (1)..( 15): Result.002 file - promoters60/1388793
atcactgatccaaca

SEQ ID NO: 109791 - DNA, 15 bp, Unknown
  misc_feature (1)..( 15): Result.002 file - promoters60/1388793
atcactgatccaaca

SEQ ID NO: 109792 - DNA, 15 bp, Unknown
  misc_feature (1)..( 15): Result.002 file - promoters60/1388793
atcactgatccaaca

SEQ ID NO: 109793 - DNA, 7 bp, Unknown
  misc_feature (1)..( 7): Result.002 file - promoters60/1388793
aattatc

SEQ ID NO: 109794 - DNA, 7 bp, Unknown
  misc_feature (1)..( 7): Result.002 file - promoters60/1388793
cattatc

SEQ ID NO: 109795 - DNA, 7 bp, Unknown
  misc_feature (1)..( 7): Result.002 file - promoters60/1388793
cattata

SEQ ID NO: 109796 - DNA, 7 bp, Unknown
  misc_feature (1)..( 7): Result.002 file - promoters60/1388793
aattatc

SEQ ID NO: 109797 - DNA, 7 bp, Unknown
  misc_feature (1)..( 7): Result.002 file - promoters60/1388808
attttaa

SEQ ID NO: 109798 - DNA, 7 bp, Unknown
  misc_feature (1)..( 7): Result.002 file - promoters60/1388808
attttaa

SEQ ID NO: 109799 - DNA, 7 bp, Unknown
  misc_feature (1)..( 7): Result.002 file - promoters60/1388808
aatattg

SEQ ID NO: 109800 - DNA, 7 bp, Unknown
  misc_feature (1)..( 7): Result.002 file - promoters60/1388808
aatgttg

SEQ ID NO: 109801 - DNA, 7 bp, Unknown
  misc_feature (1)..( 7): Result.002 file - promoters60/1388808
atcctac

SEQ ID NO: 109802 - DNA, 7 bp, Unknown
  misc_feature (1)..( 7): Result.002 file - promoters60/1388808
atcttac

SEQ ID NO: 109803 - DNA, 6 bp, Unknown
  misc_feature (1)..( 6): Result.002 file - promoters60/1388808
tttttt

SEQ ID NO: 109804 - DNA, 6 bp, Unknown
  misc_feature (1)..( 6): Result.002 file - promoters60/1388808
tttttt

SEQ ID NO: 109805 - DNA, 6 bp, Unknown
  misc_feature (1)..( 6): Result.002 file - promoters60/1388808
attttg

SEQ ID NO: 109806 - DNA, 6 bp, Unknown
  misc_feature (1)..( 6): Result.002 file - promoters60/1388808
attttg

SEQ ID NO: 109807 - DNA, 6 bp, Unknown
  misc_feature (1)..( 6): Result.002 file - promoters60/1388808
atttgt

SEQ ID NO: 109808 - DNA, 6 bp, Unknown
  misc_feature (1)..( 6): Result.002 file - promoters60/1388808
atttgt

SEQ ID NO: 109809 - DNA, 7 bp, Unknown
  misc_feature (1)..( 7): Result.002 file - promoters60/1388808
atgtttt

SEQ ID NO: 109810 - DNA, 7 bp, Unknown
  misc_feature (1)..( 7): Result.002 file - promoters60/1388808
atgattt

SEQ ID NO: 109811 - DNA, 7 bp, Unknown
  misc_feature (1)..( 7): Result.002 file - promoters60/1388808
tgttttg

SEQ ID NO: 109812 - DNA, 7 bp, Unknown
  misc_feature (1)..( 7): Result.002 file - promoters60/1388808
tgttttg

SEQ ID NO: 109813 - DNA, 6 bp, Unknown
  misc_feature (1)..( 6): Result.002 file - promoters60/1388808
aaaatt

SEQ ID NO: 109814 - DNA, 6 bp, Unknown
  misc_feature (1)..( 6): Result.002 file - promoters60/1388808
aaaatt

SEQ ID NO: 109815 - DNA, 6 bp, Unknown
  misc_feature (1)..( 6): Result.002 file - promoters60/1388808
tctcaa

SEQ ID NO: 109816 - DNA, 6 bp, Unknown
  misc_feature (1)..( 6): Result.002 file - promoters60/1388808
tctcaa

SEQ ID NO: 109817 - DNA, 6 bp, Unknown
  misc_feature (1)..( 6): Result.002 file - promoters60/1388808
tagttt

SEQ ID NO: 109818 - DNA, 6 bp, Unknown
  misc_feature (1)..( 6): Result.002 file - promoters60/1388808
tagttt

SEQ ID NO: 109819 - DNA, 6 bp, Unknown
  misc_feature (1)..( 6): Result.002 file - promoters60/1388808
gtggat

SEQ ID NO: 109820 - DNA, 6 bp, Unknown
  misc_feature (1)..( 6): Result.002 file - promoters60/1388808
gtggat

SEQ ID NO: 109821 - DNA, 6 bp, Unknown
  misc_feature (1)..( 6): Result.002 file - promoters60/1388808
tttgca

SEQ ID NO: 109822 - DNA, 6 bp, Unknown
  misc_feature (1)..( 6): Result.002 file - promoters60/1388808
tttgca

SEQ ID NO: 109823 - DNA, 7 bp, Unknown
  misc_feature (1)..( 7): Result.002 file - promoters60/1388808
aaaagag

SEQ ID NO: 109824 - DNA, 7 bp, Unknown
  misc_feature (1)..( 7): Result.002 file - promoters60/1388808
aaaagag

SEQ ID NO: 109825 - DNA, 6 bp, Unknown
  misc_feature (1)..( 6): Result.002 file - promoters60/1388808
aaaata

SEQ ID NO: 109826 - DNA, 6 bp, Unknown
  misc_feature (1)..( 6): Result.002 file - promoters60/1388808
aaaata

SEQ ID NO: 109827 - DNA, 8 bp, Unknown
  misc_feature (1)..( 8): Result.002 file - promoters60/1388808
ttagagat

SEQ ID NO: 109828 - DNA, 8 bp, Unknown
  misc_feature (1)..( 8): Result.002 file - promoters60/1388808
ttatagat

SEQ ID NO: 109829 - DNA, 7 bp, Unknown
  misc_feature (1)..( 7): Result.002 file - promoters60/1388808
tttgtaa

SEQ ID NO: 109830 - DNA, 7 bp, Unknown
  misc_feature (1)..( 7): Result.002 file - promoters60/1388808
tttataa

SEQ ID NO: 109831 - DNA, 7 bp, Unknown
  misc_feature (1)..( 7): Result.002 file - promoters60/1388808
aaccgtc

SEQ ID NO: 109832 - DNA, 7 bp, Unknown
  misc_feature (1)..( 7): Result.002 file - promoters60/1388808
aacagtc

SEQ ID NO: 109833 - DNA, 7 bp, Unknown
  misc_feature (1)..( 7): Result.002 file - promoters60/1388808
ttaaaaa

SEQ ID NO: 109834 - DNA, 7 bp, Unknown
  misc_feature (1)..( 7): Result.002 file - promoters60/1388808
ttaaaaa

SEQ ID NO: 109835 - DNA, 8 bp, Unknown
  misc_feature (1)..( 8): Result.002 file - promoters60/1388808
tcaaaaaa

SEQ ID NO: 109836 - DNA, 8 bp, Unknown
  misc_feature (1)..( 8): Result.002 file - promoters60/1388808
tcaaaaaa

SEQ ID NO: 109837 - DNA, 7 bp, Unknown
  misc_feature (1)..( 7): Result.002 file - promoters60/1388808
agtgcgg

SEQ ID NO: 109838 - DNA, 7 bp, Unknown
  misc_feature (1)..( 7): Result.002 file - promoters60/1388808
agttcgg

SEQ ID NO: 109839 - DNA, 7 bp, Unknown
  misc_feature (1)..( 7): Result.002 file - promoters60/1388864
gttagaa

SEQ ID NO: 109840 - DNA, 7 bp, Unknown
  misc_feature (1)..( 7): Result.002 file - promoters60/1388864
gttagaa

SEQ ID NO: 109841 - DNA, 7 bp, Unknown
  misc_feature (1)..( 7): Result.002 file - promoters60/1388864
aaattaa

SEQ ID NO: 109842 - DNA, 7 bp, Unknown
  misc_feature (1)..( 7): Result.002 file - promoters60/1388864
aaattaa

SEQ ID NO: 109843 - DNA, 7 bp, Unknown
  misc_feature (1)..( 7): Result.002 file - promoters60/1388864
ctcagag

SEQ ID NO: 109844 - DNA, 7 bp, Unknown
  misc_feature (1)..( 7): Result.002 file - promoters60/1388864
ctcagaa

SEQ ID NO: 109845 - DNA, 7 bp, Unknown
  misc_feature (1)..( 7): Result.002 file - promoters60/1388864
ctcggaa

SEQ ID NO: 109846 - DNA, 8 bp, Unknown
  misc_feature (1)..( 8): Result.002 file - promoters60/1388864
ttgaaaga

SEQ ID NO: 109847 - DNA, 8 bp, Unknown
  misc_feature (1)..( 8): Result.002 file - promoters60/1388864
ttggaaga

SEQ ID NO: 109848 - DNA, 8 bp, Unknown
  misc_feature (1)..( 8): Result.002 file - promoters60/1388864
agaaaaga

SEQ ID NO: 109849 - DNA, 8 bp, Unknown
  misc_feature (1)..( 8): Result.002 file - promoters60/1388864
agaataga

SEQ ID NO: 109850 - DNA, 7 bp, Unknown
  misc_feature (1)..( 7): Result.002 file - promoters60/1388864
aagaaac

SEQ ID NO: 109851 - DNA, 7 bp, Unknown
  misc_feature (1)..( 7): Result.002 file - promoters60/1388864
aagaaac

SEQ ID NO: 109852 - DNA, 8 bp, Unknown
  misc_feature (1)..( 8): Result.002 file - promoters60/1388864
gaataagt

SEQ ID NO: 109853 - DNA, 8 bp, Unknown
  misc_feature (1)..( 8): Result.002 file - promoters60/1388864
gaaaaagt

SEQ ID NO: 109854 - DNA, 6 bp, Unknown
  misc_feature (1)..( 6): Result.002 file - promoters60/1388864
gttgtg

SEQ ID NO: 109855 - DNA, 6 bp, Unknown
  misc_feature (1)..( 6): Result.002 file - promoters60/1388864
gttgtg

SEQ ID NO: 109856 - DNA, 9 bp, Unknown
  misc_feature (1)..( 9): Result.002 file - promoters60/1388864
gatcaggaa

SEQ ID NO: 109857 - DNA, 9 bp, Unknown
  misc_feature (1)..( 9): Result.002 file - promoters60/1388864
gatctggaa

SEQ ID NO: 109858 - DNA, 8 bp, Unknown
  misc_feature (1)..( 8): Result.002 file - promoters60/1388864
atttggac

SEQ ID NO: 109859 - DNA, 8 bp, Unknown
  misc_feature (1)..( 8): Result.002 file - promoters60/1388864
attttgac

SEQ ID NO: 109860 - DNA, 11 bp, Unknown
  misc_feature (1)..( 11): Result.002 file - promoters60/1388872
atatcatccaa

SEQ ID NO: 109861 - DNA, 11 bp, Unknown
  misc_feature (1)..( 11): Result.002 file - promoters60/1388872
ataacattttt

SEQ ID NO: 109862 - DNA, 11 bp, Unknown
  misc_feature (1)..( 11): Result.002 file - promoters60/1388872
ttaagattttt

SEQ ID NO: 109863 - DNA, 11 bp, Unknown
  misc_feature (1)..( 11): Result.002 file - promoters60/1388872
ttagaattttt

SEQ ID NO: 109864 - DNA, 7 bp, Unknown
  misc_feature (1)..( 7): Result.002 file - promoters60/1388872
aaatatt

SEQ ID NO: 109865 - DNA, 7 bp, Unknown
  misc_feature (1)..( 7): Result.002 file - promoters60/1388872
caatatt

SEQ ID NO: 109866 - DNA, 8 bp, Unknown
  misc_feature (1)..( 8): Result.002 file - promoters60/1388872
aaattatg

SEQ ID NO: 109867 - DNA, 9 bp, Unknown
  misc_feature (1)..( 9): Result.002 file - promoters60/1388872
ataagatta

SEQ ID NO: 109868 - DNA, 9 bp, Unknown
  misc_feature (1)..( 9): Result.002 file - promoters60/1388872
ttaacattc

SEQ ID NO: 109869 - DNA, 9 bp, Unknown
  misc_feature (1)..( 9): Result.002 file - promoters60/1388872
ataatatta

SEQ ID NO: 109870 - DNA, 9 bp, Unknown
  misc_feature (1)..( 9): Result.002 file - promoters60/1388872
aatttggct

SEQ ID NO: 109871 - DNA, 9 bp, Unknown
  misc_feature (1)..( 9): Result.002 file - promoters60/1388872
aatgtggtg

SEQ ID NO: 109872 - DNA, 9 bp, Unknown
  misc_feature (1)..( 9): Result.002 file - promoters60/1388872
aattttgct

SEQ ID NO: 109873 - DNA, 9 bp, Unknown
  misc_feature (1)..( 9): Result.002 file - promoters60/1388872
aattttttt

SEQ ID NO: 109874 - DNA, 7 bp, Unknown
  misc_feature (1)..( 7): Result.002 file - promoters60/1388872
aattttg

SEQ ID NO: 109875 - DNA, 7 bp, Unknown
  misc_feature (1)..( 7): Result.002 file - promoters60/1388872
aattttt

SEQ ID NO: 109876 - DNA, 7 bp, Unknown
  misc_feature (1)..( 7): Result.002 file - promoters60/1388872
aattttt

SEQ ID NO: 109877 - DNA, 7 bp, Unknown
  misc_feature (1)..( 7): Result.002 file - promoters60/1388872
gattttt

SEQ ID NO: 109878 - DNA, 8 bp, Unknown
  misc_feature (1)..( 8): Result.002 file - promoters60/1388872
gtttttgt

SEQ ID NO: 109879 - DNA, 8 bp, Unknown
  misc_feature (1)..( 8): Result.002 file - promoters60/1388872
gttattgt

SEQ ID NO: 109880 - DNA, 8 bp, Unknown
  misc_feature (1)..( 8): Result.002 file - promoters60/1388872
tttaatgt

SEQ ID NO: 109881 - DNA, 7 bp, Unknown
  misc_feature (1)..( 7): Result.002 file - promoters60/1388872
ataaaac

SEQ ID NO: 109882 - DNA, 7 bp, Unknown
  misc_feature (1)..( 7): Result.002 file - promoters60/1388872
ataaaat

SEQ ID NO: 109883 - DNA, 7 bp, Unknown
  misc_feature (1)..( 7): Result.002 file - promoters60/1388872
ttaaaat

SEQ ID NO: 109884 - DNA, 9 bp, Unknown
  misc_feature (1)..( 9): Result.002 file - promoters60/1388872
atcatcttc

SEQ ID NO: 109885 - DNA, 9 bp, Unknown
  misc_feature (1)..( 9): Result.002 file - promoters60/1388872
caaatcttc

SEQ ID NO: 109886 - DNA, 9 bp, Unknown
  misc_feature (1)..( 9): Result.002 file - promoters60/1388872
caaaacttt

SEQ ID NO: 109887 - DNA, 9 bp, Unknown
  misc_feature (1)..( 9): Result.002 file - promoters60/1388872
tttaatcag

SEQ ID NO: 109888 - DNA, 9 bp, Unknown
  misc_feature (1)..( 9): Result.002 file - promoters60/1388872
tttattcag

SEQ ID NO: 109889 - DNA, 9 bp, Unknown
  misc_feature (1)..( 9): Result.002 file - promoters60/1388872
gttattcga

SEQ ID NO: 109890 - DNA, 12 bp, Unknown
  misc_feature (1)..( 12): Result.002 file - promoters60/1388973
ttataaaaccct

SEQ ID NO: 109891 - DNA, 12 bp, Unknown
  misc_feature (1)..( 12): Result.002 file - promoters60/1388973
atataaatccct

SEQ ID NO: 109892 - DNA, 12 bp, Unknown
  misc_feature (1)..( 12): Result.002 file - promoters60/1388973
ttataaataatc

SEQ ID NO: 109893 - DNA, 12 bp, Unknown
  misc_feature (1)..( 12): Result.002 file - promoters60/1388973
ctataaaacttg

SEQ ID NO: 109894 - DNA, 13 bp, Unknown
  misc_feature (1)..( 13): Result.002 file - promoters60/1388973
ttatttaaggccc

SEQ ID NO: 109895 - DNA, 13 bp, Unknown
  misc_feature (1)..( 13): Result.002 file - promoters60/1388973
tatataaagttcc

SEQ ID NO: 109896 - DNA, 12 bp, Unknown
  misc_feature (1)..( 12): Result.002 file - promoters60/1389243
taatttaatatt

SEQ ID NO: 109897 - DNA, 12 bp, Unknown
  misc_feature (1)..( 12): Result.002 file - promoters60/1389243
tcagttaataaa

SEQ ID NO: 109898 - DNA, 12 bp, Unknown
  misc_feature (1)..( 12): Result.002 file - promoters60/1389243
tcttttgataca

SEQ ID NO: 109899 - DNA, 12 bp, Unknown
  misc_feature (1)..( 12): Result.002 file - promoters60/1389243
taatttaatgca

SEQ ID NO: 109900 - DNA, 12 bp, Unknown
  misc_feature (1)..( 12): Result.002 file - promoters60/1389243
ggattaaatata

SEQ ID NO: 109901 - DNA, 12 bp, Unknown
  misc_feature (1)..( 12): Result.002 file - promoters60/1389243
gcacacaatata

SEQ ID NO: 109902 - DNA, 6 bp, Unknown
  misc_feature (1)..( 6): Result.002 file - promoters60/1389279
tctttt

SEQ ID NO: 109903 - DNA, 6 bp, Unknown
  misc_feature (1)..( 6): Result.002 file - promoters60/1389279
tctttt

SEQ ID NO: 109904 - DNA, 12 bp, Unknown
  misc_feature (1)..( 12): Result.002 file - promoters60/1389279
ttttcttatttt

SEQ ID NO: 109905 - DNA, 12 bp, Unknown
  misc_feature (1)..( 12): Result.002 file - promoters60/1389279
ttttcttacttt

SEQ ID NO: 109906 - DNA, 7 bp, Unknown
  misc_feature (1)..( 7): Result.002 file - promoters60/1389279
tggcata

SEQ ID NO: 109907 - DNA, 7 bp, Unknown
  misc_feature (1)..( 7): Result.002 file - promoters60/1389279
tggtata

SEQ ID NO: 109908 - DNA, 7 bp, Unknown
  misc_feature (1)..( 7): Result.002 file - promoters60/1389279
aattttg

SEQ ID NO: 109909 - DNA, 7 bp, Unknown
  misc_feature (1)..( 7): Result.002 file - promoters60/1389279
aattttg

SEQ ID NO: 109910 - DNA, 7 bp, Unknown
  misc_feature (1)..( 7): Result.002 file - promoters60/1389279
caatgta

SEQ ID NO: 109911 - DNA, 7 bp, Unknown
  misc_feature (1)..( 7): Result.002 file - promoters60/1389279
caatgtt

SEQ ID NO: 109912 - DNA, 7 bp, Unknown
  misc_feature (1)..( 7): Result.002 file - promoters60/1389279
gaatgtt

SEQ ID NO: 109913 - DNA, 7 bp, Unknown
  misc_feature (1)..( 7): Result.002 file - promoters60/1389279
ggaaaaa

SEQ ID NO: 109914 - DNA, 7 bp, Unknown
  misc_feature (1)..( 7): Result.002 file - promoters60/1389279
agaaaaa

SEQ ID NO: 109915 - DNA, 8 bp, Unknown
  misc_feature (1)..( 8): Result.002 file - promoters60/1389279
agacaaaa

SEQ ID NO: 109916 - DNA, 7 bp, Unknown
  misc_feature (1)..( 7): Result.002 file - promoters60/1389279
acaaaaa

SEQ ID NO: 109917 - DNA, 7 bp, Unknown
  misc_feature (1)..( 7): Result.002 file - promoters60/1389279
acaaaaa

SEQ ID NO: 109918 - DNA, 7 bp, Unknown
  misc_feature (1)..( 7): Result.002 file - promoters60/1389279
gcaaaaa

SEQ ID NO: 109919 - DNA, 8 bp, Unknown
  misc_feature (1)..( 8): Result.002 file - promoters60/1389279
tatatata

SEQ ID NO: 109920 - DNA, 8 bp, Unknown
  misc_feature (1)..( 8): Result.002 file - promoters60/1389279
tatatata

SEQ ID NO: 109921 - DNA, 8 bp, Unknown
  misc_feature (1)..( 8): Result.002 file - promoters60/1389279
tatatata

SEQ ID NO: 109922 - DNA, 6 bp, Unknown
  misc_feature (1)..( 6): Result.002 file - promoters60/1389279
aaagaa

SEQ ID NO: 109923 - DNA, 6 bp, Unknown
  misc_feature (1)..( 6): Result.002 file - promoters60/1389279
aaagaa

SEQ ID NO: 109924 - DNA, 9 bp, Unknown
  misc_feature (1)..( 9): Result.002 file - promoters60/1389279
atgttccag

SEQ ID NO: 109925 - DNA, 9 bp, Unknown
  misc_feature (1)..( 9): Result.002 file - promoters60/1389279
atgtttcag

SEQ ID NO: 109926 - DNA, 6 bp, Unknown
  misc_feature (1)..( 6): Result.002 file - promoters60/1389279
acaaga

SEQ ID NO: 109927 - DNA, 6 bp, Unknown
  misc_feature (1)..( 6): Result.002 file - promoters60/1389279
acaaga

SEQ ID NO: 109928 - DNA, 9 bp, Unknown
  misc_feature (1)..( 9): Result.002 file - promoters60/1389279
aatacaagt

SEQ ID NO: 109929 - DNA, 9 bp, Unknown
  misc_feature (1)..( 9): Result.002 file - promoters60/1389279
aaaacaagt

SEQ ID NO: 109930 - DNA, 9 bp, Unknown
  misc_feature (1)..( 9): Result.002 file - promoters60/1389279
aaaataagc

SEQ ID NO: 109931 - DNA, 6 bp, Unknown
  misc_feature (1)..( 6): Result.002 file - promoters60/1389279
aaaaaa

SEQ ID NO: 109932 - DNA, 6 bp, Unknown
  misc_feature (1)..( 6): Result.002 file - promoters60/1389279
aaaaaa

SEQ ID NO: 109933 - DNA, 6 bp, Unknown
  misc_feature (1)..( 6): Result.002 file - promoters60/1389279
aacaat

SEQ ID NO: 109934 - DNA, 6 bp, Unknown
  misc_feature (1)..( 6): Result.002 file - promoters60/1389279
aacaat

SEQ ID NO: 109935 - DNA, 8 bp, Unknown
  misc_feature (1)..( 8): Result.002 file - promoters60/1389330
taaataaa

SEQ ID NO: 109936 - DNA, 8 bp, Unknown
  misc_feature (1)..( 8): Result.002 file - promoters60/1389330
taaaaaaa

SEQ ID NO: 109937 - DNA, 7 bp, Unknown
  misc_feature (1)..( 7): Result.002 file - promoters60/1389330
atagtct

SEQ ID NO: 109938 - DNA, 7 bp, Unknown
  misc_feature (1)..( 7): Result.002 file - promoters60/1389330
ataatct

SEQ ID NO: 109939 - DNA, 8 bp, Unknown
  misc_feature (1)..( 8): Result.002 file - promoters60/1389330
aaatattt

SEQ ID NO: 109940 - DNA, 8 bp, Unknown
  misc_feature (1)..( 8): Result.002 file - promoters60/1389330
aaatgttt

SEQ ID NO: 109941 - DNA, 6 bp, Unknown
  misc_feature (1)..( 6): Result.002 file - promoters60/1389330
tttaaa

SEQ ID NO: 109942 - DNA, 6 bp, Unknown
  misc_feature (1)..( 6): Result.002 file - promoters60/1389330
tttaaa

SEQ ID NO: 109943 - DNA, 6 bp, Unknown
  misc_feature (1)..( 6): Result.002 file - promoters60/1389330
tttaaa

SEQ ID NO: 109944 - DNA, 7 bp, Unknown
  misc_feature (1)..( 7): Result.002 file - promoters60/1389330
tgtaatg

SEQ ID NO: 109945 - DNA, 7 bp, Unknown
  misc_feature (1)..( 7): Result.002 file - promoters60/1389330
tgtgatg

SEQ ID NO: 109946 - DNA, 6 bp, Unknown
  misc_feature (1)..( 6): Result.002 file - promoters60/1389330
ccaaaa

SEQ ID NO: 109947 - DNA, 6 bp, Unknown
  misc_feature (1)..( 6): Result.002 file - promoters60/1389330
ccaaaa

SEQ ID NO: 109948 - DNA, 8 bp, Unknown
  misc_feature (1)..( 8): Result.002 file - promoters60/1389330
aaaatgaa

SEQ ID NO: 109949 - DNA, 8 bp, Unknown
  misc_feature (1)..( 8): Result.002 file - promoters60/1389330
aaattgaa

SEQ ID NO: 109950 - DNA, 10 bp, Unknown
  misc_feature (1)..( 10): Result.002 file - promoters60/1389330
acatatctca

SEQ ID NO: 109951 - DNA, 10 bp, Unknown
  misc_feature (1)..( 10): Result.002 file - promoters60/1389330
acatatttca

SEQ ID NO: 109952 - DNA, 7 bp, Unknown
  misc_feature (1)..( 7): Result.002 file - promoters60/1389330
gaaaaat

SEQ ID NO: 109953 - DNA, 7 bp, Unknown
  misc_feature (1)..( 7): Result.002 file - promoters60/1389330
gaataat

SEQ ID NO: 109954 - DNA, 7 bp, Unknown
  misc_feature (1)..( 7): Result.002 file - promoters60/1389330
ttgtcaa

SEQ ID NO: 109955 - DNA, 7 bp, Unknown
  misc_feature (1)..( 7): Result.002 file - promoters60/1389330
ttgacaa

SEQ ID NO: 109956 - DNA, 8 bp, Unknown
  misc_feature (1)..( 8): Result.002 file - promoters60/1389330
aacaataa

SEQ ID NO: 109957 - DNA, 8 bp, Unknown
  misc_feature (1)..( 8): Result.002 file - promoters60/1389330
aactataa

SEQ ID NO: 109958 - DNA, 10 bp, Unknown
  misc_feature (1)..( 10): Result.002 file - promoters60/1389330
gtaacaataa

SEQ ID NO: 109959 - DNA, 10 bp, Unknown
  misc_feature (1)..( 10): Result.002 file - promoters60/1389330
ttaacaataa

SEQ ID NO: 109960 - DNA, 10 bp, Unknown
  misc_feature (1)..( 10): Result.002 file - promoters60/1389330
gtaataatta

SEQ ID NO: 109961 - DNA, 7 bp, Unknown
  misc_feature (1)..( 7): Result.002 file - promoters60/1389330
aaactca

SEQ ID NO: 109962 - DNA, 7 bp, Unknown
  misc_feature (1)..( 7): Result.002 file - promoters60/1389330
aaaatca

SEQ ID NO: 109963 - DNA, 7 bp, Unknown
  misc_feature (1)..( 7): Result.002 file - promoters60/1389330
ctcaaaa

SEQ ID NO: 109964 - DNA, 7 bp, Unknown
  misc_feature (1)..( 7): Result.002 file - promoters60/1389330
ctcaaaa

SEQ ID NO: 109965 - DNA, 7 bp, Unknown
  misc_feature (1)..( 7): Result.002 file - promoters60/1389330
gacaaga

SEQ ID NO: 109966 - DNA, 7 bp, Unknown
  misc_feature (1)..( 7): Result.002 file - promoters60/1389330
gacgaga

SEQ ID NO: 109967 - DNA, 8 bp, Unknown
  misc_feature (1)..( 8): Result.002 file - promoters60/1389330
tttattag

SEQ ID NO: 109968 - DNA, 8 bp, Unknown
  misc_feature (1)..( 8): Result.002 file - promoters60/1389330
tttattag

SEQ ID NO: 109969 - DNA, 10 bp, Unknown
  misc_feature (1)..( 10): Result.002 file - promoters60/1389330
tttttttatt

SEQ ID NO: 109970 - DNA, 10 bp, Unknown
  misc_feature (1)..( 10): Result.002 file - promoters60/1389330
ttttcttatt

SEQ ID NO: 109971 - DNA, 7 bp, Unknown
  misc_feature (1)..( 7): Result.002 file - promoters60/1389330
attaaat

SEQ ID NO: 109972 - DNA, 7 bp, Unknown
  misc_feature (1)..( 7): Result.002 file - promoters60/1389330
atttaat

SEQ ID NO: 109973 - DNA, 7 bp, Unknown
  misc_feature (1)..( 7): Result.002 file - promoters60/1389330
aaatata

SEQ ID NO: 109974 - DNA, 7 bp, Unknown
  misc_feature (1)..( 7): Result.002 file - promoters60/1389330
aaaaata

SEQ ID NO: 109975 - DNA, 6 bp, Unknown
  misc_feature (1)..( 6): Result.002 file - promoters60/1389330
caaaaa

SEQ ID NO: 109976 - DNA, 6 bp, Unknown
  misc_feature (1)..( 6): Result.002 file - promoters60/1389330
caaaaa

SEQ ID NO: 109977 - DNA, 6 bp, Unknown
  misc_feature (1)..( 6): Result.002 file - promoters60/1389330
tagata

SEQ ID NO: 109978 - DNA, 6 bp, Unknown
  misc_feature (1)..( 6): Result.002 file - promoters60/1389330
tagata

SEQ ID NO: 109979 - DNA, 7 bp, Unknown
  misc_feature (1)..( 7): Result.002 file - promoters60/1389330
aattaga

SEQ ID NO: 109980 - DNA, 7 bp, Unknown
  misc_feature (1)..( 7): Result.002 file - promoters60/1389330
aataaga

SEQ ID NO: 109981 - DNA, 10 bp, Unknown
  misc_feature (1)..( 10): Result.002 file - promoters60/1389330
ttaggcccat

SEQ ID NO: 109982 - DNA, 10 bp, Unknown
  misc_feature (1)..( 10): Result.002 file - promoters60/1389330
ttaggcccat

SEQ ID NO: 109983 - DNA, 6 bp, Unknown
  misc_feature (1)..( 6): Result.002 file - promoters60/1389330
ggccca

SEQ ID NO: 109984 - DNA, 6 bp, Unknown
  misc_feature (1)..( 6): Result.002 file - promoters60/1389330
ggccca

SEQ ID NO: 109985 - DNA, 6 bp, Unknown
  misc_feature (1)..( 6): Result.002 file - promoters60/1389330
tctcat

SEQ ID NO: 109986 - DNA, 6 bp, Unknown
  misc_feature (1)..( 6): Result.002 file - promoters60/1389330
tctcat

SEQ ID NO: 109987 - DNA, 8 bp, Unknown
  misc_feature (1)..( 8): Result.002 file - promoters60/1389330
ttgtaacc

SEQ ID NO: 109988 - DNA, 8 bp, Unknown
  misc_feature (1)..( 8): Result.002 file - promoters60/1389330
ttgttacc

SEQ ID NO: 109989 - DNA, 9 bp, Unknown
  misc_feature (1)..( 9): Result.002 file - promoters60/1389330
tgtaacaaa

SEQ ID NO: 109990 - DNA, 9 bp, Unknown
  misc_feature (1)..( 9): Result.002 file - promoters60/1389330
tgtaccaaa

SEQ ID NO: 109991 - DNA, 6 bp, Unknown
  misc_feature (1)..( 6): Result.002 file - promoters60/1389330
tatttt

SEQ ID NO: 109992 - DNA, 6 bp, Unknown
  misc_feature (1)..( 6): Result.002 file - promoters60/1389330
tatttt

SEQ ID NO: 109993 - DNA, 7 bp, Unknown
  misc_feature (1)..( 7): Result.002 file - promoters60/1389330
aagatat

SEQ ID NO: 109994 - DNA, 7 bp, Unknown
  misc_feature (1)..( 7): Result.002 file - promoters60/1389330
aagatat

SEQ ID NO: 109995 - DNA, 6 bp, Unknown
  misc_feature (1)..( 6): Result.002 file - promoters60/1389330
catcat

SEQ ID NO: 109996 - DNA, 6 bp, Unknown
  misc_feature (1)..( 6): Result.002 file - promoters60/1389330
catcat

SEQ ID NO: 109997 - DNA, 11 bp, Unknown
  misc_feature (1)..( 11): Result.002 file - promoters60/1390240
gaaaaaaagtt

SEQ ID NO: 109998 - DNA, 11 bp, Unknown
  misc_feature (1)..( 11): Result.002 file - promoters60/1390240
gaaaaaagttt

SEQ ID NO: 109999 - DNA, 12 bp, Unknown
  misc_feature (1)..( 12): Result.002 file - promoters60/1390240
caaacaaatcaa

SEQ ID NO: 110000 - DNA, 12 bp, Unknown
  misc_feature (1)..( 12): Result.002 file - promoters60/1390240
caaagaaaggtc

SEQ ID NO: 110001 - DNA, 12 bp, Unknown
  misc_feature (1)..( 12): Result.002 file - promoters60/1390240
caaaaaattact

SEQ ID NO: 110002 - DNA, 12 bp, Unknown
  misc_feature (1)..( 12): Result.002 file - promoters60/1390240
ccggaaaattta

SEQ ID NO: 110003 - DNA, 12 bp, Unknown
  misc_feature (1)..( 12): Result.002 file - promoters60/1390240
tcattaatcctt

SEQ ID NO: 110004 - DNA, 7 bp, Unknown
  misc_feature (1)..( 7): Result.002 file - promoters60/1390376
ttccctt

SEQ ID NO: 110005 - DNA, 7 bp, Unknown
  misc_feature (1)..( 7): Result.002 file - promoters60/1390376
ttcgctt

SEQ ID NO: 110006 - DNA, 6 bp, Unknown
  misc_feature (1)..( 6): Result.002 file - promoters60/1390376
ctttct

SEQ ID NO: 110007 - DNA, 6 bp, Unknown
  misc_feature (1)..( 6): Result.002 file - promoters60/1390376
ctttct

SEQ ID NO: 110008 - DNA, 6 bp, Unknown
  misc_feature (1)..( 6): Result.002 file - promoters60/1390376
ttctct

SEQ ID NO: 110009 - DNA, 6 bp, Unknown
  misc_feature (1)..( 6): Result.002 file - promoters60/1390376
ttctct

SEQ ID NO: 110010 - DNA, 6 bp, Unknown
  misc_feature (1)..( 6): Result.002 file - promoters60/1390376
ttctat

SEQ ID NO: 110011 - DNA, 6 bp, Unknown
  misc_feature (1)..( 6): Result.002 file - promoters60/1390376
ttctat

SEQ ID NO: 110012 - DNA, 7 bp, Unknown
  misc_feature (1)..( 7): Result.002 file - promoters60/1390376
tatctat

SEQ ID NO: 110013 - DNA, 7 bp, Unknown
  misc_feature (1)..( 7): Result.002 file - promoters60/1390376
tatctat

SEQ ID NO: 110014 - DNA, 7 bp, Unknown
  misc_feature (1)..( 7): Result.002 file - promoters60/1390376
atagtgt

SEQ ID NO: 110015 - DNA, 7 bp, Unknown
  misc_feature (1)..( 7): Result.002 file - promoters60/1390376
atattgt

SEQ ID NO: 110016 - DNA, 6 bp, Unknown
  misc_feature (1)..( 6): Result.002 file - promoters60/1390376
aacttg

SEQ ID NO: 110017 - DNA, 6 bp, Unknown
  misc_feature (1)..( 6): Result.002 file - promoters60/1390376
aacttg

SEQ ID NO: 110018 - DNA, 6 bp, Unknown
  misc_feature (1)..( 6): Result.002 file - promoters60/1390376
tcatat

SEQ ID NO: 110019 - DNA, 6 bp, Unknown
  misc_feature (1)..( 6): Result.002 file - promoters60/1390376
tcatat

SEQ ID NO: 110020 - DNA, 7 bp, Unknown
  misc_feature (1)..( 7): Result.002 file - promoters60/1390376
ttatgta

SEQ ID NO: 110021 - DNA, 7 bp, Unknown
  misc_feature (1)..( 7): Result.002 file - promoters60/1390376
ttacgta

SEQ ID NO: 110022 - DNA, 7 bp, Unknown
  misc_feature (1)..( 7): Result.002 file - promoters60/1390376
ctggtta

SEQ ID NO: 110023 - DNA, 7 bp, Unknown
  misc_feature (1)..( 7): Result.002 file - promoters60/1390376
ctgatta

SEQ ID NO: 110024 - DNA, 6 bp, Unknown
  misc_feature (1)..( 6): Result.002 file - promoters60/1390376
atcatt

SEQ ID NO: 110025 - DNA, 6 bp, Unknown
  misc_feature (1)..( 6): Result.002 file - promoters60/1390376
atcatt

SEQ ID NO: 110026 - DNA, 11 bp, Unknown
  misc_feature (1)..( 11): Result.002 file - promoters60/1390376
ttactgaagtt

SEQ ID NO: 110027 - DNA, 11 bp, Unknown
  misc_feature (1)..( 11): Result.002 file - promoters60/1390376
ttagtgatgtt

SEQ ID NO: 110028 - DNA, 7 bp, Unknown
  misc_feature (1)..( 7): Result.002 file - promoters60/1390376
ttttcat

SEQ ID NO: 110029 - DNA, 7 bp, Unknown
  misc_feature (1)..( 7): Result.002 file - promoters60/1390376
tttccat

SEQ ID NO: 110030 - DNA, 8 bp, Unknown
  misc_feature (1)..( 8): Result.002 file - promoters60/1390376
atcttgtg

SEQ ID NO: 110031 - DNA, 8 bp, Unknown
  misc_feature (1)..( 8): Result.002 file - promoters60/1390376
atctcgtg

SEQ ID NO: 110032 - DNA, 10 bp, Unknown
  misc_feature (1)..( 10): Result.002 file - promoters60/1391420
tgagaagatt

SEQ ID NO: 110033 - DNA, 10 bp, Unknown
  misc_feature (1)..( 10): Result.002 file - promoters60/1391420
aagaaagatt

SEQ ID NO: 110034 - DNA, 10 bp, Unknown
  misc_feature (1)..( 10): Result.002 file - promoters60/1391420
aagaaagatt

SEQ ID NO: 110035 - DNA, 10 bp, Unknown
  misc_feature (1)..( 10): Result.002 file - promoters60/1391420
ctagaagatt

SEQ ID NO: 110036 - DNA, 10 bp, Unknown
  misc_feature (1)..( 10): Result.002 file - promoters60/1391420
gagaaaaaaa

SEQ ID NO: 110037 - DNA, 10 bp, Unknown
  misc_feature (1)..( 10): Result.002 file - promoters60/1391420
gaataagaaa

SEQ ID NO: 110038 - DNA, 12 bp, Unknown
  misc_feature (1)..( 12): Result.002 file - promoters60/1391420
tgattagatttt

SEQ ID NO: 110039 - DNA, 12 bp, Unknown
  misc_feature (1)..( 12): Result.002 file - promoters60/1391420
aagaaagatttg

SEQ ID NO: 110040 - DNA, 12 bp, Unknown
  misc_feature (1)..( 12): Result.002 file - promoters60/1391420
ctagaagatttt

SEQ ID NO: 110041 - DNA, 12 bp, Unknown
  misc_feature (1)..( 12): Result.002 file - promoters60/1391420
ggatatgatttt

SEQ ID NO: 110042 - DNA, 12 bp, Unknown
  misc_feature (1)..( 12): Result.002 file - promoters60/1391420
aagaaagattct

SEQ ID NO: 110043 - DNA, 13 bp, Unknown
  misc_feature (1)..( 13): Result.002 file - promoters60/1391420
attaggctttaat

SEQ ID NO: 110044 - DNA, 13 bp, Unknown
  misc_feature (1)..( 13): Result.002 file - promoters60/1391420
aatgggctttagt

SEQ ID NO: 110045 - DNA, 13 bp, Unknown
  misc_feature (1)..( 13): Result.002 file - promoters60/1391420
attgggcttggcc

SEQ ID NO: 110046 - DNA, 13 bp, Unknown
  misc_feature (1)..( 13): Result.002 file - promoters60/1391420
tttgggccaactt

SEQ ID NO: 110047 - DNA, 13 bp, Unknown
  misc_feature (1)..( 13): Result.002 file - promoters60/1391420
aatgggctgggcc

SEQ ID NO: 110048 - DNA, 8 bp, Unknown
  misc_feature (1)..( 8): Result.002 file - promoters60/1391420
aatgggcc

SEQ ID NO: 110049 - DNA, 8 bp, Unknown
  misc_feature (1)..( 8): Result.002 file - promoters60/1391420
tttgggcc

SEQ ID NO: 110050 - DNA, 8 bp, Unknown
  misc_feature (1)..( 8): Result.002 file - promoters60/1391420
aatgggct

SEQ ID NO: 110051 - DNA, 8 bp, Unknown
  misc_feature (1)..( 8): Result.002 file - promoters60/1391420
aatgggct

SEQ ID NO: 110052 - DNA, 8 bp, Unknown
  misc_feature (1)..( 8): Result.002 file - promoters60/1391420
attgggct

SEQ ID NO: 110053 - DNA, 9 bp, Unknown
  misc_feature (1)..( 9): Result.002 file - promoters60/1391420
cgaaaaaag

SEQ ID NO: 110054 - DNA, 9 bp, Unknown
  misc_feature (1)..( 9): Result.002 file - promoters60/1391420
agaagaaag

SEQ ID NO: 110055 - DNA, 9 bp, Unknown
  misc_feature (1)..( 9): Result.002 file - promoters60/1391420
agaaaaaaa

SEQ ID NO: 110056 - DNA, 9 bp, Unknown
  misc_feature (1)..( 9): Result.002 file - promoters60/1391420
agaagattt

SEQ ID NO: 110057 - DNA, 9 bp, Unknown
  misc_feature (1)..( 9): Result.002 file - promoters60/1391420
ataagaaac

SEQ ID NO: 110058 - DNA, 9 bp, Unknown
  misc_feature (1)..( 9): Result.002 file - promoters60/1391420
ttaacaaaa

SEQ ID NO: 110059 - DNA, 9 bp, Unknown
  misc_feature (1)..( 9): Result.002 file - promoters60/1391420
gtaaaaaaa

SEQ ID NO: 110060 - DNA, 9 bp, Unknown
  misc_feature (1)..( 9): Result.002 file - promoters60/1391420
gtaaaaggt

SEQ ID NO: 110061 - DNA, 9 bp, Unknown
  misc_feature (1)..( 9): Result.002 file - promoters60/1391420
ccaaataaa

SEQ ID NO: 110062 - DNA, 9 bp, Unknown
  misc_feature (1)..( 9): Result.002 file - promoters60/1391420
tcaattaat

SEQ ID NO: 110063 - DNA, 7 bp, Unknown
  misc_feature (1)..( 7): Result.002 file - promoters60/1393104
ttagcct

SEQ ID NO: 110064 - DNA, 7 bp, Unknown
  misc_feature (1)..( 7): Result.002 file - promoters60/1393104
ttaccct

SEQ ID NO: 110065 - DNA, 6 bp, Unknown
  misc_feature (1)..( 6): Result.002 file - promoters60/1393104
taaccg

SEQ ID NO: 110066 - DNA, 6 bp, Unknown
  misc_feature (1)..( 6): Result.002 file - promoters60/1393104
taaccg

SEQ ID NO: 110067 - DNA, 6 bp, Unknown
  misc_feature (1)..( 6): Result.002 file - promoters60/1393104
gttaaa

SEQ ID NO: 110068 - DNA, 6 bp, Unknown
  misc_feature (1)..( 6): Result.002 file - promoters60/1393104
gttaaa

SEQ ID NO: 110069 - DNA, 7 bp, Unknown
  misc_feature (1)..( 7): Result.002 file - promoters60/1393104
caaagtc

SEQ ID NO: 110070 - DNA, 7 bp, Unknown
  misc_feature (1)..( 7): Result.002 file - promoters60/1393104
caatgtc

SEQ ID NO: 110071 - DNA, 8 bp, Unknown
  misc_feature (1)..( 8): Result.002 file - promoters60/1393104
atattttc

SEQ ID NO: 110072 - DNA, 8 bp, Unknown
  misc_feature (1)..( 8): Result.002 file - promoters60/1393104
atatcttc

SEQ ID NO: 110073 - DNA, 6 bp, Unknown
  misc_feature (1)..( 6): Result.002 file - promoters60/1393104
gagata

SEQ ID NO: 110074 - DNA, 6 bp, Unknown
  misc_feature (1)..( 6): Result.002 file - promoters60/1393104
gagata

SEQ ID NO: 110075 - DNA, 7 bp, Unknown
  misc_feature (1)..( 7): Result.002 file - promoters60/1393104
atgtggt

SEQ ID NO: 110076 - DNA, 7 bp, Unknown
  misc_feature (1)..( 7): Result.002 file - promoters60/1393104
atgtgga

SEQ ID NO: 110077 - DNA, 7 bp, Unknown
  misc_feature (1)..( 7): Result.002 file - promoters60/1393104
atgagga

SEQ ID NO: 110078 - DNA, 7 bp, Unknown
  misc_feature (1)..( 7): Result.002 file - promoters60/1393104
agctaat

SEQ ID NO: 110079 - DNA, 7 bp, Unknown
  misc_feature (1)..( 7): Result.002 file - promoters60/1393104
agcaaat

SEQ ID NO: 110080 - DNA, 6 bp, Unknown
  misc_feature (1)..( 6): Result.002 file - promoters60/1393104
aatgct

SEQ ID NO: 110081 - DNA, 6 bp, Unknown
  misc_feature (1)..( 6): Result.002 file - promoters60/1393104
aatgct

SEQ ID NO: 110082 - DNA, 7 bp, Unknown
  misc_feature (1)..( 7): Result.002 file - promoters60/1393104
caatcta

SEQ ID NO: 110083 - DNA, 7 bp, Unknown
  misc_feature (1)..( 7): Result.002 file - promoters60/1393104
caatcta

SEQ ID NO: 110084 - DNA, 8 bp, Unknown
  misc_feature (1)..( 8): Result.002 file - promoters60/1393104
atttcaaa

SEQ ID NO: 110085 - DNA, 8 bp, Unknown
  misc_feature (1)..( 8): Result.002 file - promoters60/1393104
atttcaaa

SEQ ID NO: 110086 - DNA, 8 bp, Unknown
  misc_feature (1)..( 8): Result.002 file - promoters60/1393104
tttgggaa

SEQ ID NO: 110087 - DNA, 8 bp, Unknown
  misc_feature (1)..( 8): Result.002 file - promoters60/1393104
tttgcgaa

SEQ ID NO: 110088 - DNA, 10 bp, Unknown
  misc_feature (1)..( 10): Result.002 file - promoters60/1393104
ttcaagaaga

SEQ ID NO: 110089 - DNA, 10 bp, Unknown
  misc_feature (1)..( 10): Result.002 file - promoters60/1393104
ttcaagaaga

SEQ ID NO: 110090 - DNA, 6 bp, Unknown
  misc_feature (1)..( 6): Result.002 file - promoters60/1393104
cgttga

SEQ ID NO: 110091 - DNA, 6 bp, Unknown
  misc_feature (1)..( 6): Result.002 file - promoters60/1393104
cgttga

SEQ ID NO: 110092 - DNA, 9 bp, Unknown
  misc_feature (1)..( 9): Result.002 file - promoters60/1393104
aatcaagat

SEQ ID NO: 110093 - DNA, 9 bp, Unknown
  misc_feature (1)..( 9): Result.002 file - promoters60/1393104
aataaagat

SEQ ID NO: 110094 - DNA, 9 bp, Unknown
  misc_feature (1)..( 9): Result.002 file - promoters60/1393139
tagattacc

SEQ ID NO: 110095 - DNA, 9 bp, Unknown
  misc_feature (1)..( 9): Result.002 file - promoters60/1393139
tagatttgg

SEQ ID NO: 110096 - DNA, 9 bp, Unknown
  misc_feature (1)..( 9): Result.002 file - promoters60/1393139
aagatttga

SEQ ID NO: 110097 - DNA, 9 bp, Unknown
  misc_feature (1)..( 9): Result.002 file - promoters60/1393139
acaatttga

SEQ ID NO: 110098 - DNA, 7 bp, Unknown
  misc_feature (1)..( 7): Result.002 file - promoters60/1393139
cttcatt

SEQ ID NO: 110099 - DNA, 7 bp, Unknown
  misc_feature (1)..( 7): Result.002 file - promoters60/1393139
cttcatc

SEQ ID NO: 110100 - DNA, 7 bp, Unknown
  misc_feature (1)..( 7): Result.002 file - promoters60/1393139
ctttatt

SEQ ID NO: 110101 - DNA, 7 bp, Unknown
  misc_feature (1)..( 7): Result.002 file - promoters60/1393139
atttatt

SEQ ID NO: 110102 - DNA, 13 bp, Unknown
  misc_feature (1)..( 13): Result.002 file - promoters60/1393139
tctacttttggta

SEQ ID NO: 110103 - DNA, 13 bp, Unknown
  misc_feature (1)..( 13): Result.002 file - promoters60/1393139
tcttcttttgtca

SEQ ID NO: 110104 - DNA, 13 bp, Unknown
  misc_feature (1)..( 13): Result.002 file - promoters60/1393139
ttaactttttagt

SEQ ID NO: 110105 - DNA, 13 bp, Unknown
  misc_feature (1)..( 13): Result.002 file - promoters60/1393139
ataacttttgagt

SEQ ID NO: 110106 - DNA, 11 bp, Unknown
  misc_feature (1)..( 11): Result.002 file - promoters60/1393139
gatacaatacc

SEQ ID NO: 110107 - DNA, 11 bp, Unknown
  misc_feature (1)..( 11): Result.002 file - promoters60/1393139
aataaaatacg

SEQ ID NO: 110108 - DNA, 11 bp, Unknown
  misc_feature (1)..( 11): Result.002 file - promoters60/1393139
aataaaagcca

SEQ ID NO: 110109 - DNA, 11 bp, Unknown
  misc_feature (1)..( 11): Result.002 file - promoters60/1393139
tttcaaagacg

SEQ ID NO: 110110 - DNA, 11 bp, Unknown
  misc_feature (1)..( 11): Result.002 file - promoters60/1393139
aatacaagttg

SEQ ID NO: 110111 - DNA, 12 bp, Unknown
  misc_feature (1)..( 12): Result.002 file - promoters60/1393139
tttatagaaaga

SEQ ID NO: 110112 - DNA, 12 bp, Unknown
  misc_feature (1)..( 12): Result.002 file - promoters60/1393139
tttatagaaaaa

SEQ ID NO: 110113 - DNA, 12 bp, Unknown
  misc_feature (1)..( 12): Result.002 file - promoters60/1393139
tttatatattag

SEQ ID NO: 110114 - DNA, 12 bp, Unknown
  misc_feature (1)..( 12): Result.002 file - promoters60/1393139
cgcaaagaaaat

SEQ ID NO: 110115 - DNA, 12 bp, Unknown
  misc_feature (1)..( 12): Result.002 file - promoters60/1393139
ataaaagaaaat

SEQ ID NO: 110116 - DNA, 10 bp, Unknown
  misc_feature (1)..( 10): Result.002 file - promoters60/1393139
agaataataa

SEQ ID NO: 110117 - DNA, 10 bp, Unknown
  misc_feature (1)..( 10): Result.002 file - promoters60/1393139
aagttaataa

SEQ ID NO: 110118 - DNA, 10 bp, Unknown
  misc_feature (1)..( 10): Result.002 file - promoters60/1393139
tgaataataa

SEQ ID NO: 110119 - DNA, 10 bp, Unknown
  misc_feature (1)..( 10): Result.002 file - promoters60/1393139
tgagtaatga

SEQ ID NO: 110120 - DNA, 8 bp, Unknown
  misc_feature (1)..( 8): Result.002 file - promoters60/1393181
tcactaat

SEQ ID NO: 110121 - DNA, 8 bp, Unknown
  misc_feature (1)..( 8): Result.002 file - promoters60/1393181
taactaat

SEQ ID NO: 110122 - DNA, 8 bp, Unknown
  misc_feature (1)..( 8): Result.002 file - promoters60/1393181
ctactata

SEQ ID NO: 110123 - DNA, 16 bp, Unknown
  misc_feature (1)..( 16): Result.002 file - promoters60/1393181
attaaaaaaaaaatct

SEQ ID NO: 110124 - DNA, 16 bp, Unknown
  misc_feature (1)..( 16): Result.002 file - promoters60/1393181
attataaaaaaagtct

SEQ ID NO: 110125 - DNA, 16 bp, Unknown
  misc_feature (1)..( 16): Result.002 file - promoters60/1393181
taaaaaaaaaaaaaaa

SEQ ID NO: 110126 - DNA, 8 bp, Unknown
  misc_feature (1)..( 8): Result.002 file - promoters60/1393181
aaattttt

SEQ ID NO: 110127 - DNA, 8 bp, Unknown
  misc_feature (1)..( 8): Result.002 file - promoters60/1393181
aaatcttt

SEQ ID NO: 110128 - DNA, 8 bp, Unknown
  misc_feature (1)..( 8): Result.002 file - promoters60/1393181
ttttaaat

SEQ ID NO: 110129 - DNA, 8 bp, Unknown
  misc_feature (1)..( 8): Result.002 file - promoters60/1393181
tttaaaat

SEQ ID NO: 110130 - DNA, 9 bp, Unknown
  misc_feature (1)..( 9): Result.002 file - promoters60/1393181
tttgtaatg

SEQ ID NO: 110131 - DNA, 7 bp, Unknown
  misc_feature (1)..( 7): Result.002 file - promoters60/1393181
tattatt

SEQ ID NO: 110132 - DNA, 7 bp, Unknown
  misc_feature (1)..( 7): Result.002 file - promoters60/1393181
tataatt

SEQ ID NO: 110133 - DNA, 9 bp, Unknown
  misc_feature (1)..( 9): Result.002 file - promoters60/1393181
ttacctaaa

SEQ ID NO: 110134 - DNA, 9 bp, Unknown
  misc_feature (1)..( 9): Result.002 file - promoters60/1393181
ttacccaaa

SEQ ID NO: 110135 - DNA, 7 bp, Unknown
  misc_feature (1)..( 7): Result.002 file - promoters60/1393181
ctatctt

SEQ ID NO: 110136 - DNA, 7 bp, Unknown
  misc_feature (1)..( 7): Result.002 file - promoters60/1393181
ctatctt

SEQ ID NO: 110137 - DNA, 9 bp, Unknown
  misc_feature (1)..( 9): Result.002 file - promoters60/1393181
ttcttttta

SEQ ID NO: 110138 - DNA, 9 bp, Unknown
  misc_feature (1)..( 9): Result.002 file - promoters60/1393181
ttcttttta

SEQ ID NO: 110139 - DNA, 8 bp, Unknown
  misc_feature (1)..( 8): Result.002 file - promoters60/1393181
aaagatgt

SEQ ID NO: 110140 - DNA, 8 bp, Unknown
  misc_feature (1)..( 8): Result.002 file - promoters60/1393181
aaatatgt

SEQ ID NO: 110141 - DNA, 7 bp, Unknown
  misc_feature (1)..( 7): Result.002 file - promoters60/1393181
accagct

SEQ ID NO: 110142 - DNA, 7 bp, Unknown
  misc_feature (1)..( 7): Result.002 file - promoters60/1393181
accagct

SEQ ID NO: 110143 - DNA, 11 bp, Unknown
  misc_feature (1)..( 11): Result.002 file - promoters60/1393181
tcaacctctct

SEQ ID NO: 110144 - DNA, 11 bp, Unknown
  misc_feature (1)..( 11): Result.002 file - promoters60/1393181
tcaccctctct

SEQ ID NO: 110145 - DNA, 6 bp, Unknown
  misc_feature (1)..( 6): Result.002 file - promoters60/1393181
caatta

SEQ ID NO: 110146 - DNA, 6 bp, Unknown
  misc_feature (1)..( 6): Result.002 file - promoters60/1393181
caatta

SEQ ID NO: 110147 - DNA, 6 bp, Unknown
  misc_feature (1)..( 6): Result.002 file - promoters60/1393181
ggtttt

SEQ ID NO: 110148 - DNA, 6 bp, Unknown
  misc_feature (1)..( 6): Result.002 file - promoters60/1393181
ggtttt

SEQ ID NO: 110149 - DNA, 7 bp, Unknown
  misc_feature (1)..( 7): Result.002 file - promoters60/1393181
ttttgtc

SEQ ID NO: 110150 - DNA, 7 bp, Unknown
  misc_feature (1)..( 7): Result.002 file - promoters60/1393181
ttttgtc

SEQ ID NO: 110151 - DNA, 7 bp, Unknown
  misc_feature (1)..( 7): Result.002 file - promoters60/1393181
agatgat

SEQ ID NO: 110152 - DNA, 7 bp, Unknown
  misc_feature (1)..( 7): Result.002 file - promoters60/1393181
agaggat

SEQ ID NO: 110153 - DNA, 7 bp, Unknown
  misc_feature (1)..( 7): Result.002 file - promoters60/1393181
ttacaag

SEQ ID NO: 110154 - DNA, 7 bp, Unknown
  misc_feature (1)..( 7): Result.002 file - promoters60/1393181
ttataag

SEQ ID NO: 110155 - DNA, 8 bp, Unknown
  misc_feature (1)..( 8): Result.002 file - promoters60/1393181
caagatta

SEQ ID NO: 110156 - DNA, 8 bp, Unknown
  misc_feature (1)..( 8): Result.002 file - promoters60/1393181
caaaatta

SEQ ID NO: 110157 - DNA, 9 bp, Unknown
  misc_feature (1)..( 9): Result.002 file - promoters60/1393181
taaataaat

SEQ ID NO: 110158 - DNA, 9 bp, Unknown
  misc_feature (1)..( 9): Result.002 file - promoters60/1393181
taaataaat

SEQ ID NO: 110159 - DNA, 15 bp, Unknown
  misc_feature (1)..( 15): Result.002 file - promoters60/1393187
taatgcatgtgatgc

SEQ ID NO: 110160 - DNA, 15 bp, Unknown
  misc_feature (1)..( 15): Result.002 file - promoters60/1393187
taatgcatgtgatgc

SEQ ID NO: 110161 - DNA, 7 bp, Unknown
  misc_feature (1)..( 7): Result.002 file - promoters60/1393187
caatttt

SEQ ID NO: 110162 - DNA, 7 bp, Unknown
  misc_feature (1)..( 7): Result.002 file - promoters60/1393187
caacttt

SEQ ID NO: 110163 - DNA, 7 bp, Unknown
  misc_feature (1)..( 7): Result.002 file - promoters60/1393187
aattttg

SEQ ID NO: 110164 - DNA, 7 bp, Unknown
  misc_feature (1)..( 7): Result.002 file - promoters60/1393187
aattttg

SEQ ID NO: 110165 - DNA, 6 bp, Unknown
  misc_feature (1)..( 6): Result.002 file - promoters60/1393187
atcaac

SEQ ID NO: 110166 - DNA, 6 bp, Unknown
  misc_feature (1)..( 6): Result.002 file - promoters60/1393187
atcaac

SEQ ID NO: 110167 - DNA, 8 bp, Unknown
  misc_feature (1)..( 8): Result.002 file - promoters60/1393187
actaaatc

SEQ ID NO: 110168 - DNA, 8 bp, Unknown
  misc_feature (1)..( 8): Result.002 file - promoters60/1393187
aataaatc

SEQ ID NO: 110169 - DNA, 8 bp, Unknown
  misc_feature (1)..( 8): Result.002 file - promoters60/1393187
aataaata

SEQ ID NO: 110170 - DNA, 7 bp, Unknown
  misc_feature (1)..( 7): Result.002 file - promoters60/1393187
aactaag

SEQ ID NO: 110171 - DNA, 7 bp, Unknown
  misc_feature (1)..( 7): Result.002 file - promoters60/1393187
aactaaa

SEQ ID NO: 110172 - DNA, 7 bp, Unknown
  misc_feature (1)..( 7): Result.002 file - promoters60/1393187
gactaaa

SEQ ID NO: 110173 - DNA, 6 bp, Unknown
  misc_feature (1)..( 6): Result.002 file - promoters60/1393187
tttttt

SEQ ID NO: 110174 - DNA, 6 bp, Unknown
  misc_feature (1)..( 6): Result.002 file - promoters60/1393187
tttttt

SEQ ID NO: 110175 - DNA, 7 bp, Unknown
  misc_feature (1)..( 7): Result.002 file - promoters60/1393187
aattatt

SEQ ID NO: 110176 - DNA, 7 bp, Unknown
  misc_feature (1)..( 7): Result.002 file - promoters60/1393187
aattatt

SEQ ID NO: 110177 - DNA, 6 bp, Unknown
  misc_feature (1)..( 6): Result.002 file - promoters60/1393187
attatt

SEQ ID NO: 110178 - DNA, 6 bp, Unknown
  misc_feature (1)..( 6): Result.002 file - promoters60/1393187
attatt

SEQ ID NO: 110179 - DNA, 9 bp, Unknown
  misc_feature (1)..( 9): Result.002 file - promoters60/1393187
attagtcga

SEQ ID NO: 110180 - DNA, 9 bp, Unknown
  misc_feature (1)..( 9): Result.002 file - promoters60/1393187
attattcga

SEQ ID NO: 110181 - DNA, 7 bp, Unknown
  misc_feature (1)..( 7): Result.002 file - promoters60/1393187
taaaaga

SEQ ID NO: 110182 - DNA, 7 bp, Unknown
  misc_feature (1)..( 7): Result.002 file - promoters60/1393187
taaaagg

SEQ ID NO: 110183 - DNA, 7 bp, Unknown
  misc_feature (1)..( 7): Result.002 file - promoters60/1393187
aaaaaga

SEQ ID NO: 110184 - DNA, 9 bp, Unknown
  misc_feature (1)..( 9): Result.002 file - promoters60/1393187
aaaaaagaa

SEQ ID NO: 110185 - DNA, 9 bp, Unknown
  misc_feature (1)..( 9): Result.002 file - promoters60/1393187
aaaaaaaga

SEQ ID NO: 110186 - DNA, 10 bp, Unknown
  misc_feature (1)..( 10): Result.002 file - promoters60/1393187
aaagaaagaa

SEQ ID NO: 110187 - DNA, 6 bp, Unknown
  misc_feature (1)..( 6): Result.002 file - promoters60/1393187
tggatt

SEQ ID NO: 110188 - DNA, 6 bp, Unknown
  misc_feature (1)..( 6): Result.002 file - promoters60/1393187
tggatt

SEQ ID NO: 110189 - DNA, 6 bp, Unknown
  misc_feature (1)..( 6): Result.002 file - promoters60/1393187
gatttt

SEQ ID NO: 110190 - DNA, 6 bp, Unknown
  misc_feature (1)..( 6): Result.002 file - promoters60/1393187
gatttt

SEQ ID NO: 110191 - DNA, 6 bp, Unknown
  misc_feature (1)..( 6): Result.002 file - promoters60/1393187
cacgtg

SEQ ID NO: 110192 - DNA, 6 bp, Unknown
  misc_feature (1)..( 6): Result.002 file - promoters60/1393187
cacgtg

SEQ ID NO: 110193 - DNA, 7 bp, Unknown
  misc_feature (1)..( 7): Result.002 file - promoters60/1393187
aataaat

SEQ ID NO: 110194 - DNA, 7 bp, Unknown
  misc_feature (1)..( 7): Result.002 file - promoters60/1393187
aatcaat

SEQ ID NO: 110195 - DNA, 8 bp, Unknown
  misc_feature (1)..( 8): Result.002 file - promoters60/1393187
atttgaat

SEQ ID NO: 110196 - DNA, 8 bp, Unknown
  misc_feature (1)..( 8): Result.002 file - promoters60/1393187
atttaaat

SEQ ID NO: 110197 - DNA, 8 bp, Unknown
  misc_feature (1)..( 8): Result.002 file - promoters60/1393187
atttgaat

SEQ ID NO: 110198 - DNA, 6 bp, Unknown
  misc_feature (1)..( 6): Result.002 file - promoters60/1393187
aaattt

SEQ ID NO: 110199 - DNA, 6 bp, Unknown
  misc_feature (1)..( 6): Result.002 file - promoters60/1393187
aaattt

SEQ ID NO: 110200 - DNA, 6 bp, Unknown
  misc_feature (1)..( 6): Result.002 file - promoters60/1393187
aaattt

SEQ ID NO: 110201 - DNA, 8 bp, Unknown
  misc_feature (1)..( 8): Result.002 file - promoters60/1393187
ggactaat

SEQ ID NO: 110202 - DNA, 8 bp, Unknown
  misc_feature (1)..( 8): Result.002 file - promoters60/1393187
ggactaaa

SEQ ID NO: 110203 - DNA, 8 bp, Unknown
  misc_feature (1)..( 8): Result.002 file - promoters60/1393187
caactaaa

SEQ ID NO: 110204 - DNA, 7 bp, Unknown
  misc_feature (1)..( 7): Result.002 file - promoters60/1393187
aaatttt

SEQ ID NO: 110205 - DNA, 7 bp, Unknown
  misc_feature (1)..( 7): Result.002 file - promoters60/1393187
aaatttt

SEQ ID NO: 110206 - DNA, 7 bp, Unknown
  misc_feature (1)..( 7): Result.002 file - promoters60/1393187
ataaaag

SEQ ID NO: 110207 - DNA, 7 bp, Unknown
  misc_feature (1)..( 7): Result.002 file - promoters60/1393187
atataag

SEQ ID NO: 110208 - DNA, 7 bp, Unknown
  misc_feature (1)..( 7): Result.002 file - promoters60/1393187
ataaaag

SEQ ID NO: 110209 - DNA, 6 bp, Unknown
  misc_feature (1)..( 6): Result.002 file - promoters60/1393187
ctatta

SEQ ID NO: 110210 - DNA, 6 bp, Unknown
  misc_feature (1)..( 6): Result.002 file - promoters60/1393187
ctatta

SEQ ID NO: 110211 - DNA, 7 bp, Unknown
  misc_feature (1)..( 7): Result.002 file - promoters60/1393187
gactaat

SEQ ID NO: 110212 - DNA, 7 bp, Unknown
  misc_feature (1)..( 7): Result.002 file - promoters60/1393187
gacaaat

SEQ ID NO: 110213 - DNA, 9 bp, Unknown
  misc_feature (1)..( 9): Result.002 file - promoters60/1393187
gagaaaatt

SEQ ID NO: 110214 - DNA, 9 bp, Unknown
  misc_feature (1)..( 9): Result.002 file - promoters60/1393187
gagataatt

SEQ ID NO: 110215 - DNA, 8 bp, Unknown
  misc_feature (1)..( 8): Result.002 file - promoters60/1393187
tctaacat

SEQ ID NO: 110216 - DNA, 8 bp, Unknown
  misc_feature (1)..( 8): Result.002 file - promoters60/1393187
tctaacat

SEQ ID NO: 110217 - DNA, 9 bp, Unknown
  misc_feature (1)..( 9): Result.002 file - promoters60/1393290
agacaactc

SEQ ID NO: 110218 - DNA, 9 bp, Unknown
  misc_feature (1)..( 9): Result.002 file - promoters60/1393290
gaacaactc

SEQ ID NO: 110219 - DNA, 9 bp, Unknown
  misc_feature (1)..( 9): Result.002 file - promoters60/1393290
gaataacat

SEQ ID NO: 110220 - DNA, 10 bp, Unknown
  misc_feature (1)..( 10): Result.002 file - promoters60/1393290
aaggcccaat

SEQ ID NO: 110221 - DNA, 10 bp, Unknown
  misc_feature (1)..( 10): Result.002 file - promoters60/1393290
aaggcccaat

SEQ ID NO: 110222 - DNA, 10 bp, Unknown
  misc_feature (1)..( 10): Result.002 file - promoters60/1393290
aaagcccaaa

SEQ ID NO: 110223 - DNA, 12 bp, Unknown
  misc_feature (1)..( 12): Result.002 file - promoters60/1393326
aattttcatcaa

SEQ ID NO: 110224 - DNA, 12 bp, Unknown
  misc_feature (1)..( 12): Result.002 file - promoters60/1393326
aattttagttat

SEQ ID NO: 110225 - DNA, 12 bp, Unknown
  misc_feature (1)..( 12): Result.002 file - promoters60/1393326
tattttcttttt

SEQ ID NO: 110226 - DNA, 12 bp, Unknown
  misc_feature (1)..( 12): Result.002 file - promoters60/1393326
cgtttttttttt

SEQ ID NO: 110227 - DNA, 9 bp, Unknown
  misc_feature (1)..( 9): Result.002 file - promoters60/1393326
cttttaata

SEQ ID NO: 110228 - DNA, 9 bp, Unknown
  misc_feature (1)..( 9): Result.002 file - promoters60/1393326
gttttaatc

SEQ ID NO: 110229 - DNA, 9 bp, Unknown
  misc_feature (1)..( 9): Result.002 file - promoters60/1393326
ctttttata

SEQ ID NO: 110230 - DNA, 9 bp, Unknown
  misc_feature (1)..( 9): Result.002 file - promoters60/1393326
tttttaatt

SEQ ID NO: 110231 - DNA, 11 bp, Unknown
  misc_feature (1)..( 11): Result.002 file - promoters60/1393326
atctttatttg

SEQ ID NO: 110232 - DNA, 11 bp, Unknown
  misc_feature (1)..( 11): Result.002 file - promoters60/1393326
taatttgtttg

SEQ ID NO: 110233 - DNA, 11 bp, Unknown
  misc_feature (1)..( 11): Result.002 file - promoters60/1393326
agatttgttag

SEQ ID NO: 110234 - DNA, 11 bp, Unknown
  misc_feature (1)..( 11): Result.002 file - promoters60/1393326
agattttttac

SEQ ID NO: 110235 - DNA, 7 bp, Unknown
  misc_feature (1)..( 7): Result.002 file - promoters60/1393326
aacaaat

SEQ ID NO: 110236 - DNA, 7 bp, Unknown
  misc_feature (1)..( 7): Result.002 file - promoters60/1393326
cacaaat

SEQ ID NO: 110237 - DNA, 7 bp, Unknown
  misc_feature (1)..( 7): Result.002 file - promoters60/1393326
gaaaaaa

SEQ ID NO: 110238 - DNA, 7 bp, Unknown
  misc_feature (1)..( 7): Result.002 file - promoters60/1393326
gaaaaag

SEQ ID NO: 110239 - DNA, 10 bp, Unknown
  misc_feature (1)..( 10): Result.002 file - promoters60/1393326
aaataaagtt

SEQ ID NO: 110240 - DNA, 10 bp, Unknown
  misc_feature (1)..( 10): Result.002 file - promoters60/1393326
gcttaaagtg

SEQ ID NO: 110241 - DNA, 10 bp, Unknown
  misc_feature (1)..( 10): Result.002 file - promoters60/1393326
aaataaggtt

SEQ ID NO: 110242 - DNA, 10 bp, Unknown
  misc_feature (1)..( 10): Result.002 file - promoters60/1393326
caacaaagtt

SEQ ID NO: 110243 - DNA, 8 bp, Unknown
  misc_feature (1)..( 8): Result.002 file - promoters60/1393326
cagaaaat

SEQ ID NO: 110244 - DNA, 8 bp, Unknown
  misc_feature (1)..( 8): Result.002 file - promoters60/1393326
aagaaaac

SEQ ID NO: 110245 - DNA, 8 bp, Unknown
  misc_feature (1)..( 8): Result.002 file - promoters60/1393326
atgaaaat

SEQ ID NO: 110246 - DNA, 8 bp, Unknown
  misc_feature (1)..( 8): Result.002 file - promoters60/1393326
aagaaacg

SEQ ID NO: 110247 - DNA, 10 bp, Unknown
  misc_feature (1)..( 10): Result.002 file - promoters60/1393383
gtcgaaatta

SEQ ID NO: 110248 - DNA, 10 bp, Unknown
  misc_feature (1)..( 10): Result.002 file - promoters60/1393383
atcgtaatca

SEQ ID NO: 110249 - DNA, 10 bp, Unknown
  misc_feature (1)..( 10): Result.002 file - promoters60/1393383
gtccaaaggc

SEQ ID NO: 110250 - DNA, 10 bp, Unknown
  misc_feature (1)..( 10): Result.002 file - promoters60/1393383
ttcgagattg

SEQ ID NO: 110251 - DNA, 10 bp, Unknown
  misc_feature (1)..( 10): Result.002 file - promoters60/1393383
caccaaagca

SEQ ID NO: 110252 - DNA, 10 bp, Unknown
  misc_feature (1)..( 10): Result.002 file - promoters60/1393383
aaccaaagaa

SEQ ID NO: 110253 - DNA, 10 bp, Unknown
  misc_feature (1)..( 10): Result.002 file - promoters60/1393383
tttgagtttg

SEQ ID NO: 110254 - DNA, 10 bp, Unknown
  misc_feature (1)..( 10): Result.002 file - promoters60/1393383
tgaatcaaat

SEQ ID NO: 110255 - DNA, 10 bp, Unknown
  misc_feature (1)..( 10): Result.002 file - promoters60/1393383
tacatctaat

SEQ ID NO: 110256 - DNA, 10 bp, Unknown
  misc_feature (1)..( 10): Result.002 file - promoters60/1393383
ctaatcaatt

SEQ ID NO: 110257 - DNA, 10 bp, Unknown
  misc_feature (1)..( 10): Result.002 file - promoters60/1393383
taaataaaag

SEQ ID NO: 110258 - DNA, 10 bp, Unknown
  misc_feature (1)..( 10): Result.002 file - promoters60/1393383
taaataatta

SEQ ID NO: 110259 - DNA, 10 bp, Unknown
  misc_feature (1)..( 10): Result.002 file - promoters60/1393383
aaaataaact

SEQ ID NO: 110260 - DNA, 9 bp, Unknown
  misc_feature (1)..( 9): Result.002 file - promoters60/1393478
gttgataat

SEQ ID NO: 110261 - DNA, 9 bp, Unknown
  misc_feature (1)..( 9): Result.002 file - promoters60/1393478
gttaatata

SEQ ID NO: 110262 - DNA, 9 bp, Unknown
  misc_feature (1)..( 9): Result.002 file - promoters60/1393478
tataagata

SEQ ID NO: 110263 - DNA, 9 bp, Unknown
  misc_feature (1)..( 9): Result.002 file - promoters60/1393478
attaataat

SEQ ID NO: 110264 - DNA, 10 bp, Unknown
  misc_feature (1)..( 10): Result.002 file - promoters60/1393478
tgataaatat

SEQ ID NO: 110265 - DNA, 10 bp, Unknown
  misc_feature (1)..( 10): Result.002 file - promoters60/1393478
aattaaatat

SEQ ID NO: 110266 - DNA, 10 bp, Unknown
  misc_feature (1)..( 10): Result.002 file - promoters60/1393478
tgatgaattc

SEQ ID NO: 110267 - DNA, 10 bp, Unknown
  misc_feature (1)..( 10): Result.002 file - promoters60/1393478
tactatttat

SEQ ID NO: 110268 - DNA, 10 bp, Unknown
  misc_feature (1)..( 10): Result.002 file - promoters60/1393478
tacaattttt

SEQ ID NO: 110269 - DNA, 10 bp, Unknown
  misc_feature (1)..( 10): Result.002 file - promoters60/1393478
ctttatatat

SEQ ID NO: 110270 - DNA, 7 bp, Unknown
  misc_feature (1)..( 7): Result.002 file - promoters60/1393478
atttttt

SEQ ID NO: 110271 - DNA, 7 bp, Unknown
  misc_feature (1)..( 7): Result.002 file - promoters60/1393478
atttttc

SEQ ID NO: 110272 - DNA, 7 bp, Unknown
  misc_feature (1)..( 7): Result.002 file - promoters60/1393478
gtttttt

SEQ ID NO: 110273 - DNA, 11 bp, Unknown
  misc_feature (1)..( 11): Result.002 file - promoters60/1393478
ttttttaatac

SEQ ID NO: 110274 - DNA, 11 bp, Unknown
  misc_feature (1)..( 11): Result.002 file - promoters60/1393478
ccttttaaaaa

SEQ ID NO: 110275 - DNA, 11 bp, Unknown
  misc_feature (1)..( 11): Result.002 file - promoters60/1393478
gattttaaata

SEQ ID NO: 110276 - DNA, 11 bp, Unknown
  misc_feature (1)..( 11): Result.002 file - promoters60/1393478
ttttttactaa

SEQ ID NO: 110277 - DNA, 7 bp, Unknown
  misc_feature (1)..( 7): Result.002 file - promoters60/1393478
taaatgc

SEQ ID NO: 110278 - DNA, 7 bp, Unknown
  misc_feature (1)..( 7): Result.002 file - promoters60/1393478
taaatgt

SEQ ID NO: 110279 - DNA, 7 bp, Unknown
  misc_feature (1)..( 7): Result.002 file - promoters60/1393478
gaaatgc

SEQ ID NO: 110280 - DNA, 8 bp, Unknown
  misc_feature (1)..( 8): Result.002 file - promoters60/1393478
aagacttt

SEQ ID NO: 110281 - DNA, 8 bp, Unknown
  misc_feature (1)..( 8): Result.002 file - promoters60/1393478
ttgacttt

SEQ ID NO: 110282 - DNA, 8 bp, Unknown
  misc_feature (1)..( 8): Result.002 file - promoters60/1393478
ttgatttt

SEQ ID NO: 110283 - DNA, 8 bp, Unknown
  misc_feature (1)..( 8): Result.002 file - promoters60/1393478
attgtttt

SEQ ID NO: 110284 - DNA, 8 bp, Unknown
  misc_feature (1)..( 8): Result.002 file - promoters60/1393478
tttgtttg

SEQ ID NO: 110285 - DNA, 8 bp, Unknown
  misc_feature (1)..( 8): Result.002 file - promoters60/1393478
attttttt

SEQ ID NO: 110286 - DNA, 9 bp, Unknown
  misc_feature (1)..( 9): Result.002 file - promoters60/1393478
tgttttgat

SEQ ID NO: 110287 - DNA, 9 bp, Unknown
  misc_feature (1)..( 9): Result.002 file - promoters60/1393478
ttgtttgat

SEQ ID NO: 110288 - DNA, 9 bp, Unknown
  misc_feature (1)..( 9): Result.002 file - promoters60/1393478
ttgcttgat

SEQ ID NO: 110289 - DNA, 8 bp, Unknown
  misc_feature (1)..( 8): Result.002 file - promoters60/1393478
ataacaca

SEQ ID NO: 110290 - DNA, 8 bp, Unknown
  misc_feature (1)..( 8): Result.002 file - promoters60/1393478
ctaacaca

SEQ ID NO: 110291 - DNA, 9 bp, Unknown
  misc_feature (1)..( 9): Result.002 file - promoters60/1393478
ataatcaca

SEQ ID NO: 110292 - DNA, 8 bp, Unknown
  misc_feature (1)..( 8): Result.002 file - promoters60/1393478
atattatg

SEQ ID NO: 110293 - DNA, 8 bp, Unknown
  misc_feature (1)..( 8): Result.002 file - promoters60/1393478
atatgatg

SEQ ID NO: 110294 - DNA, 8 bp, Unknown
  misc_feature (1)..( 8): Result.002 file - promoters60/1393478
atagtatt

SEQ ID NO: 110295 - DNA, 8 bp, Unknown
  misc_feature (1)..( 8): Result.002 file - promoters60/1393478
aatcttat

SEQ ID NO: 110296 - DNA, 8 bp, Unknown
  misc_feature (1)..( 8): Result.002 file - promoters60/1393478
catcttat

SEQ ID NO: 110297 - DNA, 8 bp, Unknown
  misc_feature (1)..( 8): Result.002 file - promoters60/1393478
aatcttca

SEQ ID NO: 110298 - DNA, 7 bp, Unknown
  misc_feature (1)..( 7): Result.002 file - promoters60/1393478
ataataa

SEQ ID NO: 110299 - DNA, 7 bp, Unknown
  misc_feature (1)..( 7): Result.002 file - promoters60/1393478
ttaataa

SEQ ID NO: 110300 - DNA, 7 bp, Unknown
  misc_feature (1)..( 7): Result.002 file - promoters60/1393478
ttaatat

SEQ ID NO: 110301 - DNA, 7 bp, Unknown
  misc_feature (1)..( 7): Result.002 file - promoters60/1393478
taataat

SEQ ID NO: 110302 - DNA, 7 bp, Unknown
  misc_feature (1)..( 7): Result.002 file - promoters60/1393478
taataac

SEQ ID NO: 110303 - DNA, 7 bp, Unknown
  misc_feature (1)..( 7): Result.002 file - promoters60/1393478
taacaac

SEQ ID NO: 110304 - DNA, 9 bp, Unknown
  misc_feature (1)..( 9): Result.002 file - promoters60/1393478
agccacaca

SEQ ID NO: 110305 - DNA, 9 bp, Unknown
  misc_feature (1)..( 9): Result.002 file - promoters60/1393478
aaacacaca

SEQ ID NO: 110306 - DNA, 9 bp, Unknown
  misc_feature (1)..( 9): Result.002 file - promoters60/1393478
aaaaacacg

SEQ ID NO: 110307 - DNA, 9 bp, Unknown
  misc_feature (1)..( 9): Result.002 file - promoters60/1393478
ttttaatac

SEQ ID NO: 110308 - DNA, 9 bp, Unknown
  misc_feature (1)..( 9): Result.002 file - promoters60/1393478
tttttatat

SEQ ID NO: 110309 - DNA, 9 bp, Unknown
  misc_feature (1)..( 9): Result.002 file - promoters60/1393478
tagttatat

SEQ ID NO: 110310 - DNA, 13 bp, Unknown
  misc_feature (1)..( 13): Result.002 file - promoters60/1393492
acagctcagaata

SEQ ID NO: 110311 - DNA, 13 bp, Unknown
  misc_feature (1)..( 13): Result.002 file - promoters60/1393492
ccttttcataatt

SEQ ID NO: 110312 - DNA, 13 bp, Unknown
  misc_feature (1)..( 13): Result.002 file - promoters60/1393492
cctttttataatc

SEQ ID NO: 110313 - DNA, 13 bp, Unknown
  misc_feature (1)..( 13): Result.002 file - promoters60/1393492
tttttttgtatcc

SEQ ID NO: 110314 - DNA, 13 bp, Unknown
  misc_feature (1)..( 13): Result.002 file - promoters60/1393492
gctttttcttctt

SEQ ID NO: 110315 - DNA, 13 bp, Unknown
  misc_feature (1)..( 13): Result.002 file - promoters60/1393492
ctgttatgtctcc

SEQ ID NO: 110316 - DNA, 10 bp, Unknown
  misc_feature (1)..( 10): Result.002 file - promoters60/1393492
caatattttt

SEQ ID NO: 110317 - DNA, 10 bp, Unknown
  misc_feature (1)..( 10): Result.002 file - promoters60/1393492
taatatttaa

SEQ ID NO: 110318 - DNA, 10 bp, Unknown
  misc_feature (1)..( 10): Result.002 file - promoters60/1393492
caaaattact

SEQ ID NO: 110319 - DNA, 10 bp, Unknown
  misc_feature (1)..( 10): Result.002 file - promoters60/1393492
caatatacac

SEQ ID NO: 110320 - DNA, 10 bp, Unknown
  misc_feature (1)..( 10): Result.002 file - promoters60/1393492
tgctatctaa

SEQ ID NO: 110321 - DNA, 10 bp, Unknown
  misc_feature (1)..( 10): Result.002 file - promoters60/1393492
tggtatttac

SEQ ID NO: 110322 - DNA, 15 bp, Unknown
  misc_feature (1)..( 15): Result.002 file - promoters60/1393492
attttattttttgat

SEQ ID NO: 110323 - DNA, 15 bp, Unknown
  misc_feature (1)..( 15): Result.002 file - promoters60/1393492
gtagcattgtttatg

SEQ ID NO: 110324 - DNA, 15 bp, Unknown
  misc_feature (1)..( 15): Result.002 file - promoters60/1393492
tctatattgtttaaa

SEQ ID NO: 110325 - DNA, 15 bp, Unknown
  misc_feature (1)..( 15): Result.002 file - promoters60/1393492
caaacattttttgac

SEQ ID NO: 110326 - DNA, 15 bp, Unknown
  misc_feature (1)..( 15): Result.002 file - promoters60/1393492
tttcttttgttttcg

SEQ ID NO: 110327 - DNA, 15 bp, Unknown
  misc_feature (1)..( 15): Result.002 file - promoters60/1393492
acatttatttatgat

SEQ ID NO: 110328 - DNA, 9 bp, Unknown
  misc_feature (1)..( 9): Result.002 file - promoters60/1393498
atgtcaaaa

SEQ ID NO: 110329 - DNA, 9 bp, Unknown
  misc_feature (1)..( 9): Result.002 file - promoters60/1393498
atgtccaaa

SEQ ID NO: 110330 - DNA, 7 bp, Unknown
  misc_feature (1)..( 7): Result.002 file - promoters60/1393498
aaataat

SEQ ID NO: 110331 - DNA, 7 bp, Unknown
  misc_feature (1)..( 7): Result.002 file - promoters60/1393498
aaataat

SEQ ID NO: 110332 - DNA, 8 bp, Unknown
  misc_feature (1)..( 8): Result.002 file - promoters60/1393498
acattttt

SEQ ID NO: 110333 - DNA, 8 bp, Unknown
  misc_feature (1)..( 8): Result.002 file - promoters60/1393498
acaatttt

SEQ ID NO: 110334 - DNA, 10 bp, Unknown
  misc_feature (1)..( 10): Result.002 file - promoters60/1393498
atattattat

SEQ ID NO: 110335 - DNA, 10 bp, Unknown
  misc_feature (1)..( 10): Result.002 file - promoters60/1393498
atattaaatg

SEQ ID NO: 110336 - DNA, 10 bp, Unknown
  misc_feature (1)..( 10): Result.002 file - promoters60/1393498
ttattaaatg

SEQ ID NO: 110337 - DNA, 6 bp, Unknown
  misc_feature (1)..( 6): Result.002 file - promoters60/1393498
aaattt

SEQ ID NO: 110338 - DNA, 6 bp, Unknown
  misc_feature (1)..( 6): Result.002 file - promoters60/1393498
aaattt

SEQ ID NO: 110339 - DNA, 7 bp, Unknown
  misc_feature (1)..( 7): Result.002 file - promoters60/1393498
gaatatt

SEQ ID NO: 110340 - DNA, 7 bp, Unknown
  misc_feature (1)..( 7): Result.002 file - promoters60/1393498
gaaaatt

SEQ ID NO: 110341 - DNA, 7 bp, Unknown
  misc_feature (1)..( 7): Result.002 file - promoters60/1393498
aaactgt

SEQ ID NO: 110342 - DNA, 7 bp, Unknown
  misc_feature (1)..( 7): Result.002 file - promoters60/1393498
aaattgt

SEQ ID NO: 110343 - DNA, 6 bp, Unknown
  misc_feature (1)..( 6): Result.002 file - promoters60/1393498
tttaga

SEQ ID NO: 110344 - DNA, 6 bp, Unknown
  misc_feature (1)..( 6): Result.002 file - promoters60/1393498
tttaga

SEQ ID NO: 110345 - DNA, 12 bp, Unknown
  misc_feature (1)..( 12): Result.002 file - promoters60/1393498
tttatacaacaa

SEQ ID NO: 110346 - DNA, 12 bp, Unknown
  misc_feature (1)..( 12): Result.002 file - promoters60/1393498
tttctacagcaa

SEQ ID NO: 110347 - DNA, 8 bp, Unknown
  misc_feature (1)..( 8): Result.002 file - promoters60/1393498
tctaaggc

SEQ ID NO: 110348 - DNA, 8 bp, Unknown
  misc_feature (1)..( 8): Result.002 file - promoters60/1393498
tctacggc

SEQ ID NO: 110349 - DNA, 6 bp, Unknown
  misc_feature (1)..( 6): Result.002 file - promoters60/1393498
tttttt

SEQ ID NO: 110350 - DNA, 6 bp, Unknown
  misc_feature (1)..( 6): Result.002 file - promoters60/1393498
tttttt

SEQ ID NO: 110351 - DNA, 6 bp, Unknown
  misc_feature (1)..( 6): Result.002 file - promoters60/1393498
taagga

SEQ ID NO: 110352 - DNA, 6 bp, Unknown
  misc_feature (1)..( 6): Result.002 file - promoters60/1393498
taagga

SEQ ID NO: 110353 - DNA, 8 bp, Unknown
  misc_feature (1)..( 8): Result.002 file - promoters60/1393498
ttaatatt

SEQ ID NO: 110354 - DNA, 8 bp, Unknown
  misc_feature (1)..( 8): Result.002 file - promoters60/1393498
ttaaaatt

SEQ ID NO: 110355 - DNA, 10 bp, Unknown
  misc_feature (1)..( 10): Result.002 file - promoters60/1393498
ttattattct

SEQ ID NO: 110356 - DNA, 10 bp, Unknown
  misc_feature (1)..( 10): Result.002 file - promoters60/1393498
ttattaaatg

SEQ ID NO: 110357 - DNA, 10 bp, Unknown
  misc_feature (1)..( 10): Result.002 file - promoters60/1393498
atattaaatg

SEQ ID NO: 110358 - DNA, 7 bp, Unknown
  misc_feature (1)..( 7): Result.002 file - promoters60/1393498
actgtag

SEQ ID NO: 110359 - DNA, 7 bp, Unknown
  misc_feature (1)..( 7): Result.002 file - promoters60/1393498
actgtag

SEQ ID NO: 110360 - DNA, 7 bp, Unknown
  misc_feature (1)..( 7): Result.002 file - promoters60/1393498
gtgtatg

SEQ ID NO: 110361 - DNA, 7 bp, Unknown
  misc_feature (1)..( 7): Result.002 file - promoters60/1393498
gtgcatg

SEQ ID NO: 110362 - DNA, 14 bp, Unknown
  misc_feature (1)..( 14): Result.002 file - promoters60/1393498
taaaaacatgattt

SEQ ID NO: 110363 - DNA, 14 bp, Unknown
  misc_feature (1)..( 14): Result.002 file - promoters60/1393498
taataacaggattt

SEQ ID NO: 110364 - DNA, 8 bp, Unknown
  misc_feature (1)..( 8): Result.002 file - promoters60/1393498
ttcagaga

SEQ ID NO: 110365 - DNA, 8 bp, Unknown
  misc_feature (1)..( 8): Result.002 file - promoters60/1393498
ttcataga

SEQ ID NO: 110366 - DNA, 7 bp, Unknown
  misc_feature (1)..( 7): Result.002 file - promoters60/1393498
tcaaaat

SEQ ID NO: 110367 - DNA, 7 bp, Unknown
  misc_feature (1)..( 7): Result.002 file - promoters60/1393498
tcaaaat

SEQ ID NO: 110368 - DNA, 7 bp, Unknown
  misc_feature (1)..( 7): Result.002 file - promoters60/1393545
atcgaca

SEQ ID NO: 110369 - DNA, 7 bp, Unknown
  misc_feature (1)..( 7): Result.002 file - promoters60/1393545
atcaaca

SEQ ID NO: 110370 - DNA, 6 bp, Unknown
  misc_feature (1)..( 6): Result.002 file - promoters60/1393545
aatcta

SEQ ID NO: 110371 - DNA, 6 bp, Unknown
  misc_feature (1)..( 6): Result.002 file - promoters60/1393545
aatcta

SEQ ID NO: 110372 - DNA, 6 bp, Unknown
  misc_feature (1)..( 6): Result.002 file - promoters60/1393545
tagctc

SEQ ID NO: 110373 - DNA, 6 bp, Unknown
  misc_feature (1)..( 6): Result.002 file - promoters60/1393545
tagctc

SEQ ID NO: 110374 - DNA, 6 bp, Unknown
  misc_feature (1)..( 6): Result.002 file - promoters60/1393545
tagctc

SEQ ID NO: 110375 - DNA, 8 bp, Unknown
  misc_feature (1)..( 8): Result.002 file - promoters60/1393545
atttgcta

SEQ ID NO: 110376 - DNA, 8 bp, Unknown
  misc_feature (1)..( 8): Result.002 file - promoters60/1393545
attcgcta

SEQ ID NO: 110377 - DNA, 7 bp, Unknown
  misc_feature (1)..( 7): Result.002 file - promoters60/1393545
gcagaag

SEQ ID NO: 110378 - DNA, 7 bp, Unknown
  misc_feature (1)..( 7): Result.002 file - promoters60/1393545
gcaaaag

SEQ ID NO: 110379 - DNA, 6 bp, Unknown
  misc_feature (1)..( 6): Result.002 file - promoters60/1393545
cattag

SEQ ID NO: 110380 - DNA, 6 bp, Unknown
  misc_feature (1)..( 6): Result.002 file - promoters60/1393545
cattag

SEQ ID NO: 110381 - DNA, 8 bp, Unknown
  misc_feature (1)..( 8): Result.002 file - promoters60/1393545
tggctctg

SEQ ID NO: 110382 - DNA, 8 bp, Unknown
  misc_feature (1)..( 8): Result.002 file - promoters60/1393545
tggctctg

SEQ ID NO: 110383 - DNA, 7 bp, Unknown
  misc_feature (1)..( 7): Result.002 file - promoters60/1393545
ctgtgat

SEQ ID NO: 110384 - DNA, 7 bp, Unknown
  misc_feature (1)..( 7): Result.002 file - promoters60/1393545
ctgagat

SEQ ID NO: 110385 - DNA, 8 bp, Unknown
  misc_feature (1)..( 8): Result.002 file - promoters60/1393545
tttttttt

SEQ ID NO: 110386 - DNA, 8 bp, Unknown
  misc_feature (1)..( 8): Result.002 file - promoters60/1393545
ttttgttt

SEQ ID NO: 110387 - DNA, 8 bp, Unknown
  misc_feature (1)..( 8): Result.002 file - promoters60/1393545
ttgtctat

SEQ ID NO: 110388 - DNA, 8 bp, Unknown
  misc_feature (1)..( 8): Result.002 file - promoters60/1393545
ttgtatat

SEQ ID NO: 110389 - DNA, 6 bp, Unknown
  misc_feature (1)..( 6): Result.002 file - promoters60/1393545
tatatt

SEQ ID NO: 110390 - DNA, 6 bp, Unknown
  misc_feature (1)..( 6): Result.002 file - promoters60/1393545
tatatt

SEQ ID NO: 110391 - DNA, 6 bp, Unknown
  misc_feature (1)..( 6): Result.002 file - promoters60/1393545
tattat

SEQ ID NO: 110392 - DNA, 6 bp, Unknown
  misc_feature (1)..( 6): Result.002 file - promoters60/1393545
tattat

SEQ ID NO: 110393 - DNA, 8 bp, Unknown
  misc_feature (1)..( 8): Result.002 file - promoters60/1393545
atttttca

SEQ ID NO: 110394 - DNA, 8 bp, Unknown
  misc_feature (1)..( 8): Result.002 file - promoters60/1393545
atttttca

SEQ ID NO: 110395 - DNA, 6 bp, Unknown
  misc_feature (1)..( 6): Result.002 file - promoters60/1393545
agctac

SEQ ID NO: 110396 - DNA, 6 bp, Unknown
  misc_feature (1)..( 6): Result.002 file - promoters60/1393545
agctac

SEQ ID NO: 110397 - DNA, 9 bp, Unknown
  misc_feature (1)..( 9): Result.002 file - promoters60/1393596
ttttttttg

SEQ ID NO: 110398 - DNA, 9 bp, Unknown
  misc_feature (1)..( 9): Result.002 file - promoters60/1393596
attttattg

SEQ ID NO: 110399 - DNA, 9 bp, Unknown
  misc_feature (1)..( 9): Result.002 file - promoters60/1393596
attttacca

SEQ ID NO: 110400 - DNA, 6 bp, Unknown
  misc_feature (1)..( 6): Result.002 file - promoters60/1393596
ttcttg

SEQ ID NO: 110401 - DNA, 6 bp, Unknown
  misc_feature (1)..( 6): Result.002 file - promoters60/1393596
ttcttg

SEQ ID NO: 110402 - DNA, 11 bp, Unknown
  misc_feature (1)..( 11): Result.002 file - promoters60/1393596
tgtattctctt

SEQ ID NO: 110403 - DNA, 11 bp, Unknown
  misc_feature (1)..( 11): Result.002 file - promoters60/1393596
tgttttctctt

SEQ ID NO: 110404 - DNA, 11 bp, Unknown
  misc_feature (1)..( 11): Result.002 file - promoters60/1393596
acgtttatata

SEQ ID NO: 110405 - DNA, 14 bp, Unknown
  misc_feature (1)..( 14): Result.002 file - promoters60/1393596
ataatcttttgttg

SEQ ID NO: 110406 - DNA, 14 bp, Unknown
  misc_feature (1)..( 14): Result.002 file - promoters60/1393596
tttctcttttcttg

SEQ ID NO: 110407 - DNA, 14 bp, Unknown
  misc_feature (1)..( 14): Result.002 file - promoters60/1393596
ataatattttttag

SEQ ID NO: 110408 - DNA, 7 bp, Unknown
  misc_feature (1)..( 7): Result.002 file - promoters60/1393596
aatgtgt

SEQ ID NO: 110409 - DNA, 7 bp, Unknown
  misc_feature (1)..( 7): Result.002 file - promoters60/1393596
aatatgt

SEQ ID NO: 110410 - DNA, 9 bp, Unknown
  misc_feature (1)..( 9): Result.002 file - promoters60/1393596
attttattg

SEQ ID NO: 110411 - DNA, 9 bp, Unknown
  misc_feature (1)..( 9): Result.002 file - promoters60/1393596
attatattg

SEQ ID NO: 110412 - DNA, 6 bp, Unknown
  misc_feature (1)..( 6): Result.002 file - promoters60/1393596
ccctct

SEQ ID NO: 110413 - DNA, 6 bp, Unknown
  misc_feature (1)..( 6): Result.002 file - promoters60/1393596
ccctct

SEQ ID NO: 110414 - DNA, 10 bp, Unknown
  misc_feature (1)..( 10): Result.002 file - promoters60/1393596
tttttttttt

SEQ ID NO: 110415 - DNA, 10 bp, Unknown
  misc_feature (1)..( 10): Result.002 file - promoters60/1393596
tttttttttt

SEQ ID NO: 110416 - DNA, 8 bp, Unknown
  misc_feature (1)..( 8): Result.002 file - promoters60/1393596
agataatc

SEQ ID NO: 110417 - DNA, 8 bp, Unknown
  misc_feature (1)..( 8): Result.002 file - promoters60/1393596
agaaaatc

SEQ ID NO: 110418 - DNA, 7 bp, Unknown
  misc_feature (1)..( 7): Result.002 file - promoters60/1393596
ttcagaa

SEQ ID NO: 110419 - DNA, 7 bp, Unknown
  misc_feature (1)..( 7): Result.002 file - promoters60/1393596
ttcggaa

SEQ ID NO: 110420 - DNA, 11 bp, Unknown
  misc_feature (1)..( 11): Result.002 file - promoters60/1393596
tttcttaaaaa

SEQ ID NO: 110421 - DNA, 11 bp, Unknown
  misc_feature (1)..( 11): Result.002 file - promoters60/1393596
tttcataaaaa

SEQ ID NO: 110422 - DNA, 6 bp, Unknown
  misc_feature (1)..( 6): Result.002 file - promoters60/1393596
agtctc

SEQ ID NO: 110423 - DNA, 6 bp, Unknown
  misc_feature (1)..( 6): Result.002 file - promoters60/1393596
agtctc

SEQ ID NO: 110424 - DNA, 9 bp, Unknown
  misc_feature (1)..( 9): Result.002 file - promoters60/1393596
tattagaca

SEQ ID NO: 110425 - DNA, 9 bp, Unknown
  misc_feature (1)..( 9): Result.002 file - promoters60/1393596
tattacaca

SEQ ID NO: 110426 - DNA, 13 bp, Unknown
  misc_feature (1)..( 13): Result.002 file - promoters60/1393596
actgtaaattacg

SEQ ID NO: 110427 - DNA, 13 bp, Unknown
  misc_feature (1)..( 13): Result.002 file - promoters60/1393596
actttaaattacg

SEQ ID NO: 110428 - DNA, 6 bp, Unknown
  misc_feature (1)..( 6): Result.002 file - promoters60/1393596
gaaaat

SEQ ID NO: 110429 - DNA, 6 bp, Unknown
  misc_feature (1)..( 6): Result.002 file - promoters60/1393596
gaaaat

SEQ ID NO: 110430 - DNA, 7 bp, Unknown
  misc_feature (1)..( 7): Result.002 file - promoters60/1393596
actgatt

SEQ ID NO: 110431 - DNA, 7 bp, Unknown
  misc_feature (1)..( 7): Result.002 file - promoters60/1393596
acttatt

SEQ ID NO: 110432 - DNA, 7 bp, Unknown
  misc_feature (1)..( 7): Result.002 file - promoters60/1393596
ttcttct

SEQ ID NO: 110433 - DNA, 7 bp, Unknown
  misc_feature (1)..( 7): Result.002 file - promoters60/1393596
ttcttct

SEQ ID NO: 110434 - DNA, 6 bp, Unknown
  misc_feature (1)..( 6): Result.002 file - promoters60/1393596
aatctc

SEQ ID NO: 110435 - DNA, 6 bp, Unknown
  misc_feature (1)..( 6): Result.002 file - promoters60/1393596
aatctc

SEQ ID NO: 110436 - DNA, 6 bp, Unknown
  misc_feature (1)..( 6): Result.002 file - promoters60/1393651
tatatg

SEQ ID NO: 110437 - DNA, 6 bp, Unknown
  misc_feature (1)..( 6): Result.002 file - promoters60/1393651
tatatg

SEQ ID NO: 110438 - DNA, 6 bp, Unknown
  misc_feature (1)..( 6): Result.002 file - promoters60/1393651
gtttgg

SEQ ID NO: 110439 - DNA, 6 bp, Unknown
  misc_feature (1)..( 6): Result.002 file - promoters60/1393651
gtttgg

SEQ ID NO: 110440 - DNA, 6 bp, Unknown
  misc_feature (1)..( 6): Result.002 file - promoters60/1393651
gccttt

SEQ ID NO: 110441 - DNA, 6 bp, Unknown
  misc_feature (1)..( 6): Result.002 file - promoters60/1393651
gccttt

SEQ ID NO: 110442 - DNA, 7 bp, Unknown
  misc_feature (1)..( 7): Result.002 file - promoters60/1393651
attgttt

SEQ ID NO: 110443 - DNA, 7 bp, Unknown
  misc_feature (1)..( 7): Result.002 file - promoters60/1393651
attattt

SEQ ID NO: 110444 - DNA, 7 bp, Unknown
  misc_feature (1)..( 7): Result.002 file - promoters60/1393651
aacgaaa

SEQ ID NO: 110445 - DNA, 7 bp, Unknown
  misc_feature (1)..( 7): Result.002 file - promoters60/1393651
aaccaaa

SEQ ID NO: 110446 - DNA, 8 bp, Unknown
  misc_feature (1)..( 8): Result.002 file - promoters60/1393651
aaatcaaa

SEQ ID NO: 110447 - DNA, 8 bp, Unknown
  misc_feature (1)..( 8): Result.002 file - promoters60/1393651
aaatgaaa

SEQ ID NO: 110448 - DNA, 8 bp, Unknown
  misc_feature (1)..( 8): Result.002 file - promoters60/1393651
caataaaa

SEQ ID NO: 110449 - DNA, 6 bp, Unknown
  misc_feature (1)..( 6): Result.002 file - promoters60/1393651
aaataa

SEQ ID NO: 110450 - DNA, 6 bp, Unknown
  misc_feature (1)..( 6): Result.002 file - promoters60/1393651
aaataa

SEQ ID NO: 110451 - DNA, 8 bp, Unknown
  misc_feature (1)..( 8): Result.002 file - promoters60/1393651
aaattgga

SEQ ID NO: 110452 - DNA, 8 bp, Unknown
  misc_feature (1)..( 8): Result.002 file - promoters60/1393651
aaattgga

SEQ ID NO: 110453 - DNA, 6 bp, Unknown
  misc_feature (1)..( 6): Result.002 file - promoters60/1393651
ggaaga

SEQ ID NO: 110454 - DNA, 6 bp, Unknown
  misc_feature (1)..( 6): Result.002 file - promoters60/1393651
ggaaga

SEQ ID NO: 110455 - DNA, 6 bp, Unknown
  misc_feature (1)..( 6): Result.002 file - promoters60/1393651
catcac

SEQ ID NO: 110456 - DNA, 6 bp, Unknown
  misc_feature (1)..( 6): Result.002 file - promoters60/1393651
catcac

SEQ ID NO: 110457 - DNA, 6 bp, Unknown
  misc_feature (1)..( 6): Result.002 file - promoters60/1393651
ttccat

SEQ ID NO: 110458 - DNA, 6 bp, Unknown
  misc_feature (1)..( 6): Result.002 file - promoters60/1393651
ttccat

SEQ ID NO: 110459 - DNA, 7 bp, Unknown
  misc_feature (1)..( 7): Result.002 file - promoters60/1393651
tatttta

SEQ ID NO: 110460 - DNA, 7 bp, Unknown
  misc_feature (1)..( 7): Result.002 file - promoters60/1393651
tatatta

SEQ ID NO: 110461 - DNA, 6 bp, Unknown
  misc_feature (1)..( 6): Result.002 file - promoters60/1393651
ataaaa

SEQ ID NO: 110462 - DNA, 6 bp, Unknown
  misc_feature (1)..( 6): Result.002 file - promoters60/1393651
ataaaa

SEQ ID NO: 110463 - DNA, 9 bp, Unknown
  misc_feature (1)..( 9): Result.002 file - promoters60/1393651
atataacat

SEQ ID NO: 110464 - DNA, 9 bp, Unknown
  misc_feature (1)..( 9): Result.002 file - promoters60/1393651
atatgacat

SEQ ID NO: 110465 - DNA, 6 bp, Unknown
  misc_feature (1)..( 6): Result.002 file - promoters60/1393651
aatctt

SEQ ID NO: 110466 - DNA, 6 bp, Unknown
  misc_feature (1)..( 6): Result.002 file - promoters60/1393651
aatctt

SEQ ID NO: 110467 - DNA, 8 bp, Unknown
  misc_feature (1)..( 8): Result.002 file - promoters60/1393651
attaaata

SEQ ID NO: 110468 - DNA, 8 bp, Unknown
  misc_feature (1)..( 8): Result.002 file - promoters60/1393651
attatata

SEQ ID NO: 110469 - DNA, 12 bp, Unknown
  misc_feature (1)..( 12): Result.002 file - promoters60/1393684
ataatttgagtt

SEQ ID NO: 110470 - DNA, 12 bp, Unknown
  misc_feature (1)..( 12): Result.002 file - promoters60/1393684
atatttttagta

SEQ ID NO: 110471 - DNA, 12 bp, Unknown
  misc_feature (1)..( 12): Result.002 file - promoters60/1393684
agcctttaagtt

SEQ ID NO: 110472 - DNA, 8 bp, Unknown
  misc_feature (1)..( 8): Result.002 file - promoters60/1393684
aggaggaa

SEQ ID NO: 110473 - DNA, 8 bp, Unknown
  misc_feature (1)..( 8): Result.002 file - promoters60/1393684
aggaggaa

SEQ ID NO: 110474 - DNA, 6 bp, Unknown
  misc_feature (1)..( 6): Result.002 file - promoters60/1393684
gaaaat

SEQ ID NO: 110475 - DNA, 6 bp, Unknown
  misc_feature (1)..( 6): Result.002 file - promoters60/1393684
gaaaat

SEQ ID NO: 110476 - DNA, 6 bp, Unknown
  misc_feature (1)..( 6): Result.002 file - promoters60/1393684
aggtct

SEQ ID NO: 110477 - DNA, 6 bp, Unknown
  misc_feature (1)..( 6): Result.002 file - promoters60/1393684
aggtct

SEQ ID NO: 110478 - DNA, 7 bp, Unknown
  misc_feature (1)..( 7): Result.002 file - promoters60/1393684
gttacaa

SEQ ID NO: 110479 - DNA, 7 bp, Unknown
  misc_feature (1)..( 7): Result.002 file - promoters60/1393684
gttacaa

SEQ ID NO: 110480 - DNA, 7 bp, Unknown
  misc_feature (1)..( 7): Result.002 file - promoters60/1393684
taattaa

SEQ ID NO: 110481 - DNA, 7 bp, Unknown
  misc_feature (1)..( 7): Result.002 file - promoters60/1393684
taattaa

SEQ ID NO: 110482 - DNA, 12 bp, Unknown
  misc_feature (1)..( 12): Result.002 file - promoters60/1393684
taaaaagaaaaa

SEQ ID NO: 110483 - DNA, 12 bp, Unknown
  misc_feature (1)..( 12): Result.002 file - promoters60/1393684
taaaaagaaaaa

SEQ ID NO: 110484 - DNA, 12 bp, Unknown
  misc_feature (1)..( 12): Result.002 file - promoters60/1393684
aaaaaaaaaaag

SEQ ID NO: 110485 - DNA, 9 bp, Unknown
  misc_feature (1)..( 9): Result.002 file - promoters60/1393684
acatggttt

SEQ ID NO: 110486 - DNA, 9 bp, Unknown
  misc_feature (1)..( 9): Result.002 file - promoters60/1393684
acatgtttt

SEQ ID NO: 110487 - DNA, 7 bp, Unknown
  misc_feature (1)..( 7): Result.002 file - promoters60/1393684
aaacata

SEQ ID NO: 110488 - DNA, 7 bp, Unknown
  misc_feature (1)..( 7): Result.002 file - promoters60/1393684
aaatata

SEQ ID NO: 110489 - DNA, 7 bp, Unknown
  misc_feature (1)..( 7): Result.002 file - promoters60/1393684
atataca

SEQ ID NO: 110490 - DNA, 7 bp, Unknown
  misc_feature (1)..( 7): Result.002 file - promoters60/1393684
atataca

SEQ ID NO: 110491 - DNA, 7 bp, Unknown
  misc_feature (1)..( 7): Result.002 file - promoters60/1393684
ttaagtt

SEQ ID NO: 110492 - DNA, 7 bp, Unknown
  misc_feature (1)..( 7): Result.002 file - promoters60/1393684
ttaagtt

SEQ ID NO: 110493 - DNA, 7 bp, Unknown
  misc_feature (1)..( 7): Result.002 file - promoters60/1393684
taaaact

SEQ ID NO: 110494 - DNA, 7 bp, Unknown
  misc_feature (1)..( 7): Result.002 file - promoters60/1393684
taacact

SEQ ID NO: 110495 - DNA, 12 bp, Unknown
  misc_feature (1)..( 12): Result.002 file - promoters60/1393684
atatctataaag

SEQ ID NO: 110496 - DNA, 12 bp, Unknown
  misc_feature (1)..( 12): Result.002 file - promoters60/1393684
atatatataaag

SEQ ID NO: 110497 - DNA, 10 bp, Unknown
  misc_feature (1)..( 10): Result.002 file - promoters60/1393684
acatatgatt

SEQ ID NO: 110498 - DNA, 10 bp, Unknown
  misc_feature (1)..( 10): Result.002 file - promoters60/1393684
acataagatt

SEQ ID NO: 110499 - DNA, 8 bp, Unknown
  misc_feature (1)..( 8): Result.002 file - promoters60/1393684
atttacat

SEQ ID NO: 110500 - DNA, 8 bp, Unknown
  misc_feature (1)..( 8): Result.002 file - promoters60/1393684
attcacat

SEQ ID NO: 110501 - DNA, 6 bp, Unknown
  misc_feature (1)..( 6): Result.002 file - promoters60/1393684
tttcaa

SEQ ID NO: 110502 - DNA, 6 bp, Unknown
  misc_feature (1)..( 6): Result.002 file - promoters60/1393684
tttcaa

SEQ ID NO: 110503 - DNA, 7 bp, Unknown
  misc_feature (1)..( 7): Result.002 file - promoters60/1393684
attttag

SEQ ID NO: 110504 - DNA, 7 bp, Unknown
  misc_feature (1)..( 7): Result.002 file - promoters60/1393684
attttag

SEQ ID NO: 110505 - DNA, 8 bp, Unknown
  misc_feature (1)..( 8): Result.002 file - promoters60/1393684
aagtgttt

SEQ ID NO: 110506 - DNA, 8 bp, Unknown
  misc_feature (1)..( 8): Result.002 file - promoters60/1393684
aagttttt

SEQ ID NO: 110507 - DNA, 8 bp, Unknown
  misc_feature (1)..( 8): Result.002 file - promoters60/1393684
tttattta

SEQ ID NO: 110508 - DNA, 8 bp, Unknown
  misc_feature (1)..( 8): Result.002 file - promoters60/1393684
ttttttta

SEQ ID NO: 110509 - DNA, 6 bp, Unknown
  misc_feature (1)..( 6): Result.002 file - promoters60/1393684
taaacg

SEQ ID NO: 110510 - DNA, 6 bp, Unknown
  misc_feature (1)..( 6): Result.002 file - promoters60/1393684
taaacg

SEQ ID NO: 110511 - DNA, 9 bp, Unknown
  misc_feature (1)..( 9): Result.002 file - promoters60/1393684
atattacca

SEQ ID NO: 110512 - DNA, 9 bp, Unknown
  misc_feature (1)..( 9): Result.002 file - promoters60/1393684
atatttcca

SEQ ID NO: 110513 - DNA, 11 bp, Unknown
  misc_feature (1)..( 11): Result.002 file - promoters60/1393684
caaaatttcaa

SEQ ID NO: 110514 - DNA, 11 bp, Unknown
  misc_feature (1)..( 11): Result.002 file - promoters60/1393684
caaaatgtcaa

SEQ ID NO: 110515 - DNA, 6 bp, Unknown
  misc_feature (1)..( 6): Result.002 file - promoters60/1393684
aaacat

SEQ ID NO: 110516 - DNA, 6 bp, Unknown
  misc_feature (1)..( 6): Result.002 file - promoters60/1393684
aaacat

SEQ ID NO: 110517 - DNA, 9 bp, Unknown
  misc_feature (1)..( 9): Result.002 file - promoters60/1393684
caaaatcta

SEQ ID NO: 110518 - DNA, 9 bp, Unknown
  misc_feature (1)..( 9): Result.002 file - promoters60/1393684
caaaaccta

SEQ ID NO: 110519 - DNA, 12 bp, Unknown
  misc_feature (1)..( 12): Result.002 file - promoters60/1393751
tactcacatatg

SEQ ID NO: 110520 - DNA, 12 bp, Unknown
  misc_feature (1)..( 12): Result.002 file - promoters60/1393751
tactaacatatg

SEQ ID NO: 110521 - DNA, 12 bp, Unknown
  misc_feature (1)..( 12): Result.002 file - promoters60/1393751
aactcaccggag

SEQ ID NO: 110522 - DNA, 12 bp, Unknown
  misc_feature (1)..( 12): Result.002 file - promoters60/1393751
tcaaaacataat

SEQ ID NO: 110523 - DNA, 6 bp, Unknown
  misc_feature (1)..( 6): Result.002 file - promoters60/1393761
tttttt

SEQ ID NO: 110524 - DNA, 6 bp, Unknown
  misc_feature (1)..( 6): Result.002 file - promoters60/1393761
tttttt

SEQ ID NO: 110525 - DNA, 6 bp, Unknown
  misc_feature (1)..( 6): Result.002 file - promoters60/1393761
tttttt

SEQ ID NO: 110526 - DNA, 9 bp, Unknown
  misc_feature (1)..( 9): Result.002 file - promoters60/1393761
aaatgaaat

SEQ ID NO: 110527 - DNA, 9 bp, Unknown
  misc_feature (1)..( 9): Result.002 file - promoters60/1393761
aaataaaat

SEQ ID NO: 110528 - DNA, 9 bp, Unknown
  misc_feature (1)..( 9): Result.002 file - promoters60/1393761
aaacgaaaa

SEQ ID NO: 110529 - DNA, 9 bp, Unknown
  misc_feature (1)..( 9): Result.002 file - promoters60/1393761
ttcggttag

SEQ ID NO: 110530 - DNA, 9 bp, Unknown
  misc_feature (1)..( 9): Result.002 file - promoters60/1393761
ttctgtttt

SEQ ID NO: 110531 - DNA, 9 bp, Unknown
  misc_feature (1)..( 9): Result.002 file - promoters60/1393761
ttctatttt

SEQ ID NO: 110532 - DNA, 9 bp, Unknown
  misc_feature (1)..( 9): Result.002 file - promoters60/1393761
aagctaaat

SEQ ID NO: 110533 - DNA, 9 bp, Unknown
  misc_feature (1)..( 9): Result.002 file - promoters60/1393761
aagttaata

SEQ ID NO: 110534 - DNA, 9 bp, Unknown
  misc_feature (1)..( 9): Result.002 file - promoters60/1393761
cagttaata

SEQ ID NO: 110535 - DNA, 11 bp, Unknown
  misc_feature (1)..( 11): Result.002 file - promoters60/1393761
attttcttaat

SEQ ID NO: 110536 - DNA, 11 bp, Unknown
  misc_feature (1)..( 11): Result.002 file - promoters60/1393761
attttcaatct

SEQ ID NO: 110537 - DNA, 11 bp, Unknown
  misc_feature (1)..( 11): Result.002 file - promoters60/1393761
tttttcataat

SEQ ID NO: 110538 - DNA, 10 bp, Unknown
  misc_feature (1)..( 10): Result.002 file - promoters60/1393761
ttttcttaat

SEQ ID NO: 110539 - DNA, 10 bp, Unknown
  misc_feature (1)..( 10): Result.002 file - promoters60/1393761
caatcttaaa

SEQ ID NO: 110540 - DNA, 10 bp, Unknown
  misc_feature (1)..( 10): Result.002 file - promoters60/1393761
ttttcataat

SEQ ID NO: 110541 - DNA, 7 bp, Unknown
  misc_feature (1)..( 7): Result.002 file - promoters60/1393761
ttaattt

SEQ ID NO: 110542 - DNA, 7 bp, Unknown
  misc_feature (1)..( 7): Result.002 file - promoters60/1393761
ttatttt

SEQ ID NO: 110543 - DNA, 7 bp, Unknown
  misc_feature (1)..( 7): Result.002 file - promoters60/1393761
ctatttt

SEQ ID NO: 110544 - DNA, 11 bp, Unknown
  misc_feature (1)..( 11): Result.002 file - promoters60/1393777
ttattttatat

SEQ ID NO: 110545 - DNA, 11 bp, Unknown
  misc_feature (1)..( 11): Result.002 file - promoters60/1393777
atatttttagc

SEQ ID NO: 110546 - DNA, 11 bp, Unknown
  misc_feature (1)..( 11): Result.002 file - promoters60/1393777
ttattttatat

SEQ ID NO: 110547 - DNA, 12 bp, Unknown
  misc_feature (1)..( 12): Result.002 file - promoters60/1393777
aaattgttaatg

SEQ ID NO: 110548 - DNA, 8 bp, Unknown
  misc_feature (1)..( 8): Result.002 file - promoters60/1393777
gtttttaa

SEQ ID NO: 110549 - DNA, 8 bp, Unknown
  misc_feature (1)..( 8): Result.002 file - promoters60/1393777
atttttag

SEQ ID NO: 110550 - DNA, 8 bp, Unknown
  misc_feature (1)..( 8): Result.002 file - promoters60/1393777
gtttataa

SEQ ID NO: 110551 - DNA, 8 bp, Unknown
  misc_feature (1)..( 8): Result.002 file - promoters60/1393777
attgttaa

SEQ ID NO: 110552 - DNA, 7 bp, Unknown
  misc_feature (1)..( 7): Result.002 file - promoters60/1393777
attatat

SEQ ID NO: 110553 - DNA, 7 bp, Unknown
  misc_feature (1)..( 7): Result.002 file - promoters60/1393777
tttatat

SEQ ID NO: 110554 - DNA, 7 bp, Unknown
  misc_feature (1)..( 7): Result.002 file - promoters60/1393777
tttttat

SEQ ID NO: 110555 - DNA, 9 bp, Unknown
  misc_feature (1)..( 9): Result.002 file - promoters60/1393777
agttttatt

SEQ ID NO: 110556 - DNA, 9 bp, Unknown
  misc_feature (1)..( 9): Result.002 file - promoters60/1393777
gcttttatt

SEQ ID NO: 110557 - DNA, 9 bp, Unknown
  misc_feature (1)..( 9): Result.002 file - promoters60/1393777
agttttaac

SEQ ID NO: 110558 - DNA, 8 bp, Unknown
  misc_feature (1)..( 8): Result.002 file - promoters60/1393777
ttttattt

SEQ ID NO: 110559 - DNA, 8 bp, Unknown
  misc_feature (1)..( 8): Result.002 file - promoters60/1393777
atttattt

SEQ ID NO: 110560 - DNA, 8 bp, Unknown
  misc_feature (1)..( 8): Result.002 file - promoters60/1393777
ctttattt

SEQ ID NO: 110561 - DNA, 8 bp, Unknown
  misc_feature (1)..( 8): Result.002 file - promoters60/1393777
attttttt

SEQ ID NO: 110562 - DNA, 8 bp, Unknown
  misc_feature (1)..( 8): Result.002 file - promoters60/1393777
tttttgat

SEQ ID NO: 110563 - DNA, 8 bp, Unknown
  misc_feature (1)..( 8): Result.002 file - promoters60/1393777
tttatgat

SEQ ID NO: 110564 - DNA, 9 bp, Unknown
  misc_feature (1)..( 9): Result.002 file - promoters60/1393777
tttcttgta

SEQ ID NO: 110565 - DNA, 10 bp, Unknown
  misc_feature (1)..( 10): Result.002 file - promoters60/1393777
ttgttatttt

SEQ ID NO: 110566 - DNA, 7 bp, Unknown
  misc_feature (1)..( 7): Result.002 file - promoters60/1393777
atttaaa

SEQ ID NO: 110567 - DNA, 7 bp, Unknown
  misc_feature (1)..( 7): Result.002 file - promoters60/1393777
attaaaa

SEQ ID NO: 110568 - DNA, 7 bp, Unknown
  misc_feature (1)..( 7): Result.002 file - promoters60/1393777
attaaac

SEQ ID NO: 110569 - DNA, 7 bp, Unknown
  misc_feature (1)..( 7): Result.002 file - promoters60/1393777
aataaaa

SEQ ID NO: 110570 - DNA, 10 bp, Unknown
  misc_feature (1)..( 10): Result.002 file - promoters60/1393777
aattttattt

SEQ ID NO: 110571 - DNA, 10 bp, Unknown
  misc_feature (1)..( 10): Result.002 file - promoters60/1393777
ctctttattt

SEQ ID NO: 110572 - DNA, 10 bp, Unknown
  misc_feature (1)..( 10): Result.002 file - promoters60/1393777
tattttatct

SEQ ID NO: 110573 - DNA, 10 bp, Unknown
  misc_feature (1)..( 10): Result.002 file - promoters60/1393777
tattttaatc

SEQ ID NO: 110574 - DNA, 10 bp, Unknown
  misc_feature (1)..( 10): Result.002 file - promoters60/1393777
aaaaatgttt

SEQ ID NO: 110575 - DNA, 10 bp, Unknown
  misc_feature (1)..( 10): Result.002 file - promoters60/1393777
aaaattgtta

SEQ ID NO: 110576 - DNA, 10 bp, Unknown
  misc_feature (1)..( 10): Result.002 file - promoters60/1393777
catattttta

SEQ ID NO: 110577 - DNA, 11 bp, Unknown
  misc_feature (1)..( 11): Result.002 file - promoters60/1393777
ttaagtattat

SEQ ID NO: 110578 - DNA, 11 bp, Unknown
  misc_feature (1)..( 11): Result.002 file - promoters60/1393777
ttaaggattaa

SEQ ID NO: 110579 - DNA, 11 bp, Unknown
  misc_feature (1)..( 11): Result.002 file - promoters60/1393777
ttctagattaa

SEQ ID NO: 110580 - DNA, 9 bp, Unknown
  misc_feature (1)..( 9): Result.002 file - promoters60/1393777
ccaatcagt

SEQ ID NO: 110581 - DNA, 9 bp, Unknown
  misc_feature (1)..( 9): Result.002 file - promoters60/1393777
ataataagt

SEQ ID NO: 110582 - DNA, 9 bp, Unknown
  misc_feature (1)..( 9): Result.002 file - promoters60/1393777
ccactcatt

SEQ ID NO: 110583 - DNA, 9 bp, Unknown
  misc_feature (1)..( 9): Result.002 file - promoters60/1393777
attaaaaac

SEQ ID NO: 110584 - DNA, 9 bp, Unknown
  misc_feature (1)..( 9): Result.002 file - promoters60/1393777
gaaaaaaac

SEQ ID NO: 110585 - DNA, 9 bp, Unknown
  misc_feature (1)..( 9): Result.002 file - promoters60/1393777
attaaaaat

SEQ ID NO: 110586 - DNA, 7 bp, Unknown
  misc_feature (1)..( 7): Result.002 file - promoters60/1393777
aacaaat

SEQ ID NO: 110587 - DNA, 7 bp, Unknown
  misc_feature (1)..( 7): Result.002 file - promoters60/1393777
aacaaat

SEQ ID NO: 110588 - DNA, 7 bp, Unknown
  misc_feature (1)..( 7): Result.002 file - promoters60/1393777
aacaaag

SEQ ID NO: 110589 - DNA, 9 bp, Unknown
  misc_feature (1)..( 9): Result.002 file - promoters60/1393777
aattaataa

SEQ ID NO: 110590 - DNA, 9 bp, Unknown
  misc_feature (1)..( 9): Result.002 file - promoters60/1393777
aatttataa

SEQ ID NO: 110591 - DNA, 9 bp, Unknown
  misc_feature (1)..( 9): Result.002 file - promoters60/1393777
tatttattt

SEQ ID NO: 110592 - DNA, 10 bp, Unknown
  misc_feature (1)..( 10): Result.002 file - promoters60/1393787
aaaagttatg

SEQ ID NO: 110593 - DNA, 10 bp, Unknown
  misc_feature (1)..( 10): Result.002 file - promoters60/1393787
cttagttata

SEQ ID NO: 110594 - DNA, 10 bp, Unknown
  misc_feature (1)..( 10): Result.002 file - promoters60/1393787
aaaagttatg

SEQ ID NO: 110595 - DNA, 10 bp, Unknown
  misc_feature (1)..( 10): Result.002 file - promoters60/1393787
taaaattagc

SEQ ID NO: 110596 - DNA, 9 bp, Unknown
  misc_feature (1)..( 9): Result.002 file - promoters60/1393787
taaattata

SEQ ID NO: 110597 - DNA, 10 bp, Unknown
  misc_feature (1)..( 10): Result.002 file - promoters60/1393787
ataatttact

SEQ ID NO: 110598 - DNA, 7 bp, Unknown
  misc_feature (1)..( 7): Result.002 file - promoters60/1393787
aatgatt

SEQ ID NO: 110599 - DNA, 7 bp, Unknown
  misc_feature (1)..( 7): Result.002 file - promoters60/1393802
gtcctca

SEQ ID NO: 110600 - DNA, 7 bp, Unknown
  misc_feature (1)..( 7): Result.002 file - promoters60/1393802
gtcgtca

SEQ ID NO: 110601 - DNA, 7 bp, Unknown
  misc_feature (1)..( 7): Result.002 file - promoters60/1393802
agagata

SEQ ID NO: 110602 - DNA, 7 bp, Unknown
  misc_feature (1)..( 7): Result.002 file - promoters60/1393802
agatata

SEQ ID NO: 110603 - DNA, 9 bp, Unknown
  misc_feature (1)..( 9): Result.002 file - promoters60/1393802
ttttaattt

SEQ ID NO: 110604 - DNA, 9 bp, Unknown
  misc_feature (1)..( 9): Result.002 file - promoters60/1393802
ttttcattt

SEQ ID NO: 110605 - DNA, 9 bp, Unknown
  misc_feature (1)..( 9): Result.002 file - promoters60/1393802
aacagtttt

SEQ ID NO: 110606 - DNA, 9 bp, Unknown
  misc_feature (1)..( 9): Result.002 file - promoters60/1393802
aacattttt

SEQ ID NO: 110607 - DNA, 6 bp, Unknown
  misc_feature (1)..( 6): Result.002 file - promoters60/1393802
ttttac

SEQ ID NO: 110608 - DNA, 6 bp, Unknown
  misc_feature (1)..( 6): Result.002 file - promoters60/1393802
ttttac

SEQ ID NO: 110609 - DNA, 6 bp, Unknown
  misc_feature (1)..( 6): Result.002 file - promoters60/1393802
caaaaa

SEQ ID NO: 110610 - DNA, 6 bp, Unknown
  misc_feature (1)..( 6): Result.002 file - promoters60/1393802
caaaaa

SEQ ID NO: 110611 - DNA, 6 bp, Unknown
  misc_feature (1)..( 6): Result.002 file - promoters60/1393802
attttt

SEQ ID NO: 110612 - DNA, 6 bp, Unknown
  misc_feature (1)..( 6): Result.002 file - promoters60/1393802
attttt

SEQ ID NO: 110613 - DNA, 11 bp, Unknown
  misc_feature (1)..( 11): Result.002 file - promoters60/1393802
taaccaaaaaa

SEQ ID NO: 110614 - DNA, 11 bp, Unknown
  misc_feature (1)..( 11): Result.002 file - promoters60/1393802
taacctaaaaa

SEQ ID NO: 110615 - DNA, 6 bp, Unknown
  misc_feature (1)..( 6): Result.002 file - promoters60/1393802
atgcac

SEQ ID NO: 110616 - DNA, 6 bp, Unknown
  misc_feature (1)..( 6): Result.002 file - promoters60/1393802
atgcac

SEQ ID NO: 110617 - DNA, 7 bp, Unknown
  misc_feature (1)..( 7): Result.002 file - promoters60/1393802
ctttgaa

SEQ ID NO: 110618 - DNA, 7 bp, Unknown
  misc_feature (1)..( 7): Result.002 file - promoters60/1393802
cttagaa

SEQ ID NO: 110619 - DNA, 8 bp, Unknown
  misc_feature (1)..( 8): Result.002 file - promoters60/1393802
gaaatctt

SEQ ID NO: 110620 - DNA, 8 bp, Unknown
  misc_feature (1)..( 8): Result.002 file - promoters60/1393802
gaaacctt

SEQ ID NO: 110621 - DNA, 9 bp, Unknown
  misc_feature (1)..( 9): Result.002 file - promoters60/1393802
aaacataaa

SEQ ID NO: 110622 - DNA, 9 bp, Unknown
  misc_feature (1)..( 9): Result.002 file - promoters60/1393802
aaacacaaa

SEQ ID NO: 110623 - DNA, 11 bp, Unknown
  misc_feature (1)..( 11): Result.002 file - promoters60/1393802
aaagttagaga

SEQ ID NO: 110624 - DNA, 11 bp, Unknown
  misc_feature (1)..( 11): Result.002 file - promoters60/1393802
aaagttcatct

SEQ ID NO: 110625 - DNA, 11 bp, Unknown
  misc_feature (1)..( 11): Result.002 file - promoters60/1393802
aaacttcatct

SEQ ID NO: 110626 - DNA, 6 bp, Unknown
  misc_feature (1)..( 6): Result.002 file - promoters60/1393802
atattt

SEQ ID NO: 110627 - DNA, 6 bp, Unknown
  misc_feature (1)..( 6): Result.002 file - promoters60/1393802
atattt

SEQ ID NO: 110628 - DNA, 7 bp, Unknown
  misc_feature (1)..( 7): Result.002 file - promoters60/1393802
agaaaaa

SEQ ID NO: 110629 - DNA, 7 bp, Unknown
  misc_feature (1)..( 7): Result.002 file - promoters60/1393802
agaaaaa

SEQ ID NO: 110630 - DNA, 7 bp, Unknown
  misc_feature (1)..( 7): Result.002 file - promoters60/1393802
gttaaaa

SEQ ID NO: 110631 - DNA, 7 bp, Unknown
  misc_feature (1)..( 7): Result.002 file - promoters60/1393802
gttcaaa

SEQ ID NO: 110632 - DNA, 8 bp, Unknown
  misc_feature (1)..( 8): Result.002 file - promoters60/1393802
tgattatt

SEQ ID NO: 110633 - DNA, 8 bp, Unknown
  misc_feature (1)..( 8): Result.002 file - promoters60/1393802
tgaatatt

SEQ ID NO: 110634 - DNA, 7 bp, Unknown
  misc_feature (1)..( 7): Result.002 file - promoters60/1393802
tattgtt

SEQ ID NO: 110635 - DNA, 7 bp, Unknown
  misc_feature (1)..( 7): Result.002 file - promoters60/1393802
tatagtt

SEQ ID NO: 110636 - DNA, 7 bp, Unknown
  misc_feature (1)..( 7): Result.002 file - promoters60/1393802
tatatgt

SEQ ID NO: 110637 - DNA, 7 bp, Unknown
  misc_feature (1)..( 7): Result.002 file - promoters60/1393802
tatgtgt

SEQ ID NO: 110638 - DNA, 7 bp, Unknown
  misc_feature (1)..( 7): Result.002 file - promoters60/1393802
taagatt

SEQ ID NO: 110639 - DNA, 7 bp, Unknown
  misc_feature (1)..( 7): Result.002 file - promoters60/1393802
taagatt

SEQ ID NO: 110640 - DNA, 7 bp, Unknown
  misc_feature (1)..( 7): Result.002 file - promoters60/1393802
tggttat

SEQ ID NO: 110641 - DNA, 7 bp, Unknown
  misc_feature (1)..( 7): Result.002 file - promoters60/1393802
tggatat

SEQ ID NO: 110642 - DNA, 8 bp, Unknown
  misc_feature (1)..( 8): Result.002 file - promoters60/1393802
attgtttt

SEQ ID NO: 110643 - DNA, 8 bp, Unknown
  misc_feature (1)..( 8): Result.002 file - promoters60/1393802
attttttt

SEQ ID NO: 110644 - DNA, 11 bp, Unknown
  misc_feature (1)..( 11): Result.002 file - promoters60/1393805
attttaatctc

SEQ ID NO: 110645 - DNA, 11 bp, Unknown
  misc_feature (1)..( 11): Result.002 file - promoters60/1393805
tttttattcta

SEQ ID NO: 110646 - DNA, 11 bp, Unknown
  misc_feature (1)..( 11): Result.002 file - promoters60/1393805
gttgtattcta

SEQ ID NO: 110647 - DNA, 11 bp, Unknown
  misc_feature (1)..( 11): Result.002 file - promoters60/1393805
caattaatctc

SEQ ID NO: 110648 - DNA, 11 bp, Unknown
  misc_feature (1)..( 11): Result.002 file - promoters60/1393805
tttttacggcg

SEQ ID NO: 110649 - DNA, 11 bp, Unknown
  misc_feature (1)..( 11): Result.002 file - promoters60/1393805
acattgatcca

SEQ ID NO: 110650 - DNA, 9 bp, Unknown
  misc_feature (1)..( 9): Result.002 file - promoters60/1393845
gttataatt

SEQ ID NO: 110651 - DNA, 9 bp, Unknown
  misc_feature (1)..( 9): Result.002 file - promoters60/1393845
attaaaata

SEQ ID NO: 110652 - DNA, 9 bp, Unknown
  misc_feature (1)..( 9): Result.002 file - promoters60/1393845
attataatt

SEQ ID NO: 110653 - DNA, 9 bp, Unknown
  misc_feature (1)..( 9): Result.002 file - promoters60/1393845
cttaatata

SEQ ID NO: 110654 - DNA, 11 bp, Unknown
  misc_feature (1)..( 11): Result.002 file - promoters60/1393845
attcaaaatga

SEQ ID NO: 110655 - DNA, 11 bp, Unknown
  misc_feature (1)..( 11): Result.002 file - promoters60/1393845
attcgaaatgg

SEQ ID NO: 110656 - DNA, 11 bp, Unknown
  misc_feature (1)..( 11): Result.002 file - promoters60/1393845
cttcaaagaaa

SEQ ID NO: 110657 - DNA, 11 bp, Unknown
  misc_feature (1)..( 11): Result.002 file - promoters60/1393845
tacagaaatgg

SEQ ID NO: 110658 - DNA, 12 bp, Unknown
  misc_feature (1)..( 12): Result.002 file - promoters60/1393845
aaaattaaaata

SEQ ID NO: 110659 - DNA, 12 bp, Unknown
  misc_feature (1)..( 12): Result.002 file - promoters60/1393845
aattctaaaatc

SEQ ID NO: 110660 - DNA, 12 bp, Unknown
  misc_feature (1)..( 12): Result.002 file - promoters60/1393845
aattcttaaatt

SEQ ID NO: 110661 - DNA, 12 bp, Unknown
  misc_feature (1)..( 12): Result.002 file - promoters60/1393845
ctttattaaatt

SEQ ID NO: 110662 - DNA, 11 bp, Unknown
  misc_feature (1)..( 11): Result.002 file - promoters60/1393845
tattattacaa

SEQ ID NO: 110663 - DNA, 11 bp, Unknown
  misc_feature (1)..( 11): Result.002 file - promoters60/1393845
aattcttaaat

SEQ ID NO: 110664 - DNA, 11 bp, Unknown
  misc_feature (1)..( 11): Result.002 file - promoters60/1393845
ctttattaaat

SEQ ID NO: 110665 - DNA, 11 bp, Unknown
  misc_feature (1)..( 11): Result.002 file - promoters60/1393845
aattctaaaat

SEQ ID NO: 110666 - DNA, 6 bp, Unknown
  misc_feature (1)..( 6): Result.002 file - promoters60/1394110
tttaaa

SEQ ID NO: 110667 - DNA, 6 bp, Unknown
  misc_feature (1)..( 6): Result.002 file - promoters60/1394110
tttaaa

SEQ ID NO: 110668 - DNA, 7 bp, Unknown
  misc_feature (1)..( 7): Result.002 file - promoters60/1394110
cacatat

SEQ ID NO: 110669 - DNA, 7 bp, Unknown
  misc_feature (1)..( 7): Result.002 file - promoters60/1394110
cacttat

SEQ ID NO: 110670 - DNA, 8 bp, Unknown
  misc_feature (1)..( 8): Result.002 file - promoters60/1394110
attaataa

SEQ ID NO: 110671 - DNA, 8 bp, Unknown
  misc_feature (1)..( 8): Result.002 file - promoters60/1394110
atttataa

SEQ ID NO: 110672 - DNA, 8 bp, Unknown
  misc_feature (1)..( 8): Result.002 file - promoters60/1394110
aaattaaa

SEQ ID NO: 110673 - DNA, 8 bp, Unknown
  misc_feature (1)..( 8): Result.002 file - promoters60/1394110
aaactaaa

SEQ ID NO: 110674 - DNA, 10 bp, Unknown
  misc_feature (1)..( 10): Result.002 file - promoters60/1394110
ttttcaaaaa

SEQ ID NO: 110675 - DNA, 10 bp, Unknown
  misc_feature (1)..( 10): Result.002 file - promoters60/1394110
ttttccaaat

SEQ ID NO: 110676 - DNA, 10 bp, Unknown
  misc_feature (1)..( 10): Result.002 file - promoters60/1394110
acgtcaaaaa

SEQ ID NO: 110677 - DNA, 8 bp, Unknown
  misc_feature (1)..( 8): Result.002 file - promoters60/1394110
taatttaa

SEQ ID NO: 110678 - DNA, 8 bp, Unknown
  misc_feature (1)..( 8): Result.002 file - promoters60/1394110
taatgtaa

SEQ ID NO: 110679 - DNA, 6 bp, Unknown
  misc_feature (1)..( 6): Result.002 file - promoters60/1394110
aaacat

SEQ ID NO: 110680 - DNA, 6 bp, Unknown
  misc_feature (1)..( 6): Result.002 file - promoters60/1394110
aaacat

SEQ ID NO: 110681 - DNA, 7 bp, Unknown
  misc_feature (1)..( 7): Result.002 file - promoters60/1394110
taatata

SEQ ID NO: 110682 - DNA, 7 bp, Unknown
  misc_feature (1)..( 7): Result.002 file - promoters60/1394110
taatata

SEQ ID NO: 110683 - DNA, 7 bp, Unknown
  misc_feature (1)..( 7): Result.002 file - promoters60/1394110
aagactc

SEQ ID NO: 110684 - DNA, 7 bp, Unknown
  misc_feature (1)..( 7): Result.002 file - promoters60/1394110
aagactc

SEQ ID NO: 110685 - DNA, 7 bp, Unknown
  misc_feature (1)..( 7): Result.002 file - promoters60/1394110
atactaa

SEQ ID NO: 110686 - DNA, 7 bp, Unknown
  misc_feature (1)..( 7): Result.002 file - promoters60/1394110
atattaa

SEQ ID NO: 110687 - DNA, 13 bp, Unknown
  misc_feature (1)..( 13): Result.002 file - promoters60/1394110
aaaagactaaaac

SEQ ID NO: 110688 - DNA, 13 bp, Unknown
  misc_feature (1)..( 13): Result.002 file - promoters60/1394110
attaaggtaaaac

SEQ ID NO: 110689 - DNA, 13 bp, Unknown
  misc_feature (1)..( 13): Result.002 file - promoters60/1394110
aaaagagtaaaaa

SEQ ID NO: 110690 - DNA, 8 bp, Unknown
  misc_feature (1)..( 8): Result.002 file - promoters60/1394110
aaaaagac

SEQ ID NO: 110691 - DNA, 8 bp, Unknown
  misc_feature (1)..( 8): Result.002 file - promoters60/1394110
taaaagac

SEQ ID NO: 110692 - DNA, 8 bp, Unknown
  misc_feature (1)..( 8): Result.002 file - promoters60/1394110
aaaaagaa

SEQ ID NO: 110693 - DNA, 6 bp, Unknown
  misc_feature (1)..( 6): Result.002 file - promoters60/1394110
tcttgg

SEQ ID NO: 110694 - DNA, 6 bp, Unknown
  misc_feature (1)..( 6): Result.002 file - promoters60/1394110
tcttgg

SEQ ID NO: 110695 - DNA, 7 bp, Unknown
  misc_feature (1)..( 7): Result.002 file - promoters60/1394110
cacttgt

SEQ ID NO: 110696 - DNA, 7 bp, Unknown
  misc_feature (1)..( 7): Result.002 file - promoters60/1394110
cacttgt

SEQ ID NO: 110697 - DNA, 6 bp, Unknown
  misc_feature (1)..( 6): Result.002 file - promoters60/1394110
acattt

SEQ ID NO: 110698 - DNA, 6 bp, Unknown
  misc_feature (1)..( 6): Result.002 file - promoters60/1394110
acattt

SEQ ID NO: 110699 - DNA, 7 bp, Unknown
  misc_feature (1)..( 7): Result.002 file - promoters60/1394110
tatgtgt

SEQ ID NO: 110700 - DNA, 7 bp, Unknown
  misc_feature (1)..( 7): Result.002 file - promoters60/1394110
tatttgt

SEQ ID NO: 110701 - DNA, 8 bp, Unknown
  misc_feature (1)..( 8): Result.002 file - promoters60/1394110
gtttcttt

SEQ ID NO: 110702 - DNA, 8 bp, Unknown
  misc_feature (1)..( 8): Result.002 file - promoters60/1394110
gtttattt

SEQ ID NO: 110703 - DNA, 9 bp, Unknown
  misc_feature (1)..( 9): Result.002 file - promoters60/1394110
aaaatcaag

SEQ ID NO: 110704 - DNA, 9 bp, Unknown
  misc_feature (1)..( 9): Result.002 file - promoters60/1394110
aaaatcaag

SEQ ID NO: 110705 - DNA, 8 bp, Unknown
  misc_feature (1)..( 8): Result.002 file - promoters60/1394110
cttaatat

SEQ ID NO: 110706 - DNA, 8 bp, Unknown
  misc_feature (1)..( 8): Result.002 file - promoters60/1394110
cttcatat

SEQ ID NO: 110707 - DNA, 7 bp, Unknown
  misc_feature (1)..( 7): Result.002 file - promoters60/1394110
caaatac

SEQ ID NO: 110708 - DNA, 7 bp, Unknown
  misc_feature (1)..( 7): Result.002 file - promoters60/1394110
caattac

SEQ ID NO: 110709 - DNA, 7 bp, Unknown
  misc_feature (1)..( 7): Result.002 file - promoters60/1394110
attatca

SEQ ID NO: 110710 - DNA, 7 bp, Unknown
  misc_feature (1)..( 7): Result.002 file - promoters60/1394110
attttca

SEQ ID NO: 110711 - DNA, 6 bp, Unknown
  misc_feature (1)..( 6): Result.002 file - promoters60/1394110
aataaa

SEQ ID NO: 110712 - DNA, 6 bp, Unknown
  misc_feature (1)..( 6): Result.002 file - promoters60/1394110
aataaa

SEQ ID NO: 110713 - DNA, 7 bp, Unknown
  misc_feature (1)..( 7): Result.002 file - promoters60/1394110
aaacaaa

SEQ ID NO: 110714 - DNA, 7 bp, Unknown
  misc_feature (1)..( 7): Result.002 file - promoters60/1394110
aaagaaa

SEQ ID NO: 110715 - DNA, 6 bp, Unknown
  misc_feature (1)..( 6): Result.002 file - promoters60/1394110
aataaa

SEQ ID NO: 110716 - DNA, 6 bp, Unknown
  misc_feature (1)..( 6): Result.002 file - promoters60/1394110
aataaa

SEQ ID NO: 110717 - DNA, 6 bp, Unknown
  misc_feature (1)..( 6): Result.002 file - promoters60/1394110
agacaa

SEQ ID NO: 110718 - DNA, 6 bp, Unknown
  misc_feature (1)..( 6): Result.002 file - promoters60/1394110
agacaa

SEQ ID NO: 110719 - DNA, 9 bp, Unknown
  misc_feature (1)..( 9): Result.002 file - promoters60/1394110
gagacaacc

SEQ ID NO: 110720 - DNA, 9 bp, Unknown
  misc_feature (1)..( 9): Result.002 file - promoters60/1394110
gagaaaacc

SEQ ID NO: 110721 - DNA, 6 bp, Unknown
  misc_feature (1)..( 6): Result.002 file - promoters60/1394178
ttcaca

SEQ ID NO: 110722 - DNA, 6 bp, Unknown
  misc_feature (1)..( 6): Result.002 file - promoters60/1394178
ttcaca

SEQ ID NO: 110723 - DNA, 8 bp, Unknown
  misc_feature (1)..( 8): Result.002 file - promoters60/1394178
tgaatgaa

SEQ ID NO: 110724 - DNA, 8 bp, Unknown
  misc_feature (1)..( 8): Result.002 file - promoters60/1394178
tgattgaa

SEQ ID NO: 110725 - DNA, 6 bp, Unknown
  misc_feature (1)..( 6): Result.002 file - promoters60/1394178
gccaag

SEQ ID NO: 110726 - DNA, 6 bp, Unknown
  misc_feature (1)..( 6): Result.002 file - promoters60/1394178
gccaag

SEQ ID NO: 110727 - DNA, 8 bp, Unknown
  misc_feature (1)..( 8): Result.002 file - promoters60/1394178
tggagagg

SEQ ID NO: 110728 - DNA, 8 bp, Unknown
  misc_feature (1)..( 8): Result.002 file - promoters60/1394178
tggaaagg

SEQ ID NO: 110729 - DNA, 12 bp, Unknown
  misc_feature (1)..( 12): Result.002 file - promoters60/1394178
aaatctctcatt

SEQ ID NO: 110730 - DNA, 12 bp, Unknown
  misc_feature (1)..( 12): Result.002 file - promoters60/1394178
aaatttctgatt

SEQ ID NO: 110731 - DNA, 8 bp, Unknown
  misc_feature (1)..( 8): Result.002 file - promoters60/1394178
tttcttaa

SEQ ID NO: 110732 - DNA, 8 bp, Unknown
  misc_feature (1)..( 8): Result.002 file - promoters60/1394178
tttattaa

SEQ ID NO: 110733 - DNA, 9 bp, Unknown
  misc_feature (1)..( 9): Result.002 file - promoters60/1394178
tttttttct

SEQ ID NO: 110734 - DNA, 9 bp, Unknown
  misc_feature (1)..( 9): Result.002 file - promoters60/1394178
ttttattct

SEQ ID NO: 110735 - DNA, 9 bp, Unknown
  misc_feature (1)..( 9): Result.002 file - promoters60/1394178
tttttctta

SEQ ID NO: 110736 - DNA, 9 bp, Unknown
  misc_feature (1)..( 9): Result.002 file - promoters60/1394178
tttttttta

SEQ ID NO: 110737 - DNA, 7 bp, Unknown
  misc_feature (1)..( 7): Result.002 file - promoters60/1394178
aatgtaa

SEQ ID NO: 110738 - DNA, 7 bp, Unknown
  misc_feature (1)..( 7): Result.002 file - promoters60/1394178
aatataa

SEQ ID NO: 110739 - DNA, 7 bp, Unknown
  misc_feature (1)..( 7): Result.002 file - promoters60/1394178
gtatcaa

SEQ ID NO: 110740 - DNA, 7 bp, Unknown
  misc_feature (1)..( 7): Result.002 file - promoters60/1394178
gtatcaa

SEQ ID NO: 110741 - DNA, 9 bp, Unknown
  misc_feature (1)..( 9): Result.002 file - promoters60/1394178
aattaccaa

SEQ ID NO: 110742 - DNA, 9 bp, Unknown
  misc_feature (1)..( 9): Result.002 file - promoters60/1394178
aataaccaa

SEQ ID NO: 110743 - DNA, 8 bp, Unknown
  misc_feature (1)..( 8): Result.002 file - promoters60/1394178
cagctatt

SEQ ID NO: 110744 - DNA, 8 bp, Unknown
  misc_feature (1)..( 8): Result.002 file - promoters60/1394178
cagttatt

SEQ ID NO: 110745 - DNA, 7 bp, Unknown
  misc_feature (1)..( 7): Result.002 file - promoters60/1394178
attgttg

SEQ ID NO: 110746 - DNA, 7 bp, Unknown
  misc_feature (1)..( 7): Result.002 file - promoters60/1394178
atttttg

SEQ ID NO: 110747 - DNA, 8 bp, Unknown
  misc_feature (1)..( 8): Result.002 file - promoters60/1394178
catataaa

SEQ ID NO: 110748 - DNA, 8 bp, Unknown
  misc_feature (1)..( 8): Result.002 file - promoters60/1394178
cataaaaa

SEQ ID NO: 110749 - DNA, 7 bp, Unknown
  misc_feature (1)..( 7): Result.002 file - promoters60/1394178
acagatt

SEQ ID NO: 110750 - DNA, 7 bp, Unknown
  misc_feature (1)..( 7): Result.002 file - promoters60/1394178
acatatt

SEQ ID NO: 110751 - DNA, 7 bp, Unknown
  misc_feature (1)..( 7): Result.002 file - promoters60/1394178
tttagtt

SEQ ID NO: 110752 - DNA, 7 bp, Unknown
  misc_feature (1)..( 7): Result.002 file - promoters60/1394178
ttttgtt

SEQ ID NO: 110753 - DNA, 8 bp, Unknown
  misc_feature (1)..( 8): Result.002 file - promoters60/1394178
ttcacaaa

SEQ ID NO: 110754 - DNA, 8 bp, Unknown
  misc_feature (1)..( 8): Result.002 file - promoters60/1394178
ttcaaaaa

SEQ ID NO: 110755 - DNA, 8 bp, Unknown
  misc_feature (1)..( 8): Result.002 file - promoters60/1394302
ttgttaaa

SEQ ID NO: 110756 - DNA, 8 bp, Unknown
  misc_feature (1)..( 8): Result.002 file - promoters60/1394302
ttgttaat

SEQ ID NO: 110757 - DNA, 8 bp, Unknown
  misc_feature (1)..( 8): Result.002 file - promoters60/1394302
acgttaat

SEQ ID NO: 110758 - DNA, 17 bp, Unknown
  misc_feature (1)..( 17): Result.002 file - promoters60/1394302
actgtttaaaaagaaaa

SEQ ID NO: 110759 - DNA, 17 bp, Unknown
  misc_feature (1)..( 17): Result.002 file - promoters60/1394302
tatgttaaaaaataaaa

SEQ ID NO: 110760 - DNA, 17 bp, Unknown
  misc_feature (1)..( 17): Result.002 file - promoters60/1394302
actttttctatcaaggt

SEQ ID NO: 110761 - DNA, 9 bp, Unknown
  misc_feature (1)..( 9): Result.002 file - promoters60/1394327
caaaacttt

SEQ ID NO: 110762 - DNA, 9 bp, Unknown
  misc_feature (1)..( 9): Result.002 file - promoters60/1394327
caagactta

SEQ ID NO: 110763 - DNA, 9 bp, Unknown
  misc_feature (1)..( 9): Result.002 file - promoters60/1394327
gaaaatttt

SEQ ID NO: 110764 - DNA, 6 bp, Unknown
  misc_feature (1)..( 6): Result.002 file - promoters60/1394327
ataatt

SEQ ID NO: 110765 - DNA, 6 bp, Unknown
  misc_feature (1)..( 6): Result.002 file - promoters60/1394327
ataatt

SEQ ID NO: 110766 - DNA, 6 bp, Unknown
  misc_feature (1)..( 6): Result.002 file - promoters60/1394327
tttctt

SEQ ID NO: 110767 - DNA, 6 bp, Unknown
  misc_feature (1)..( 6): Result.002 file - promoters60/1394327
tttctt

SEQ ID NO: 110768 - DNA, 7 bp, Unknown
  misc_feature (1)..( 7): Result.002 file - promoters60/1394327
ccaagct

SEQ ID NO: 110769 - DNA, 7 bp, Unknown
  misc_feature (1)..( 7): Result.002 file - promoters60/1394327
ccaagct

SEQ ID NO: 110770 - DNA, 7 bp, Unknown
  misc_feature (1)..( 7): Result.002 file - promoters60/1394327
gctttta

SEQ ID NO: 110771 - DNA, 7 bp, Unknown
  misc_feature (1)..( 7): Result.002 file - promoters60/1394327
gctttta

SEQ ID NO: 110772 - DNA, 8 bp, Unknown
  misc_feature (1)..( 8): Result.002 file - promoters60/1394327
tgttatct

SEQ ID NO: 110773 - DNA, 8 bp, Unknown
  misc_feature (1)..( 8): Result.002 file - promoters60/1394327
tgttctct

SEQ ID NO: 110774 - DNA, 7 bp, Unknown
  misc_feature (1)..( 7): Result.002 file - promoters60/1394327
tcatata

SEQ ID NO: 110775 - DNA, 7 bp, Unknown
  misc_feature (1)..( 7): Result.002 file - promoters60/1394327
tcacata

SEQ ID NO: 110776 - DNA, 7 bp, Unknown
  misc_feature (1)..( 7): Result.002 file - promoters60/1394327
ttttcaa

SEQ ID NO: 110777 - DNA, 7 bp, Unknown
  misc_feature (1)..( 7): Result.002 file - promoters60/1394327
ttttcaa

SEQ ID NO: 110778 - DNA, 6 bp, Unknown
  misc_feature (1)..( 6): Result.002 file - promoters60/1394327
ccatat

SEQ ID NO: 110779 - DNA, 6 bp, Unknown
  misc_feature (1)..( 6): Result.002 file - promoters60/1394327
ccatat

SEQ ID NO: 110780 - DNA, 6 bp, Unknown
  misc_feature (1)..( 6): Result.002 file - promoters60/1394327
aagtct

SEQ ID NO: 110781 - DNA, 6 bp, Unknown
  misc_feature (1)..( 6): Result.002 file - promoters60/1394327
aagtct

SEQ ID NO: 110782 - DNA, 6 bp, Unknown
  misc_feature (1)..( 6): Result.002 file - promoters60/1394327
tcttct

SEQ ID NO: 110783 - DNA, 6 bp, Unknown
  misc_feature (1)..( 6): Result.002 file - promoters60/1394327
tcttct

SEQ ID NO: 110784 - DNA, 7 bp, Unknown
  misc_feature (1)..( 7): Result.002 file - promoters60/1394327
agatttt

SEQ ID NO: 110785 - DNA, 7 bp, Unknown
  misc_feature (1)..( 7): Result.002 file - promoters60/1394327
agaattt

SEQ ID NO: 110786 - DNA, 7 bp, Unknown
  misc_feature (1)..( 7): Result.002 file - promoters60/1394327
caaccat

SEQ ID NO: 110787 - DNA, 7 bp, Unknown
  misc_feature (1)..( 7): Result.002 file - promoters60/1394327
caaacat

SEQ ID NO: 110788 - DNA, 7 bp, Unknown
  misc_feature (1)..( 7): Result.002 file - promoters60/1394327
tcctaat

SEQ ID NO: 110789 - DNA, 7 bp, Unknown
  misc_feature (1)..( 7): Result.002 file - promoters60/1394327
tccaaat

SEQ ID NO: 110790 - DNA, 7 bp, Unknown
  misc_feature (1)..( 7): Result.002 file - promoters60/1394327
aaagatg

SEQ ID NO: 110791 - DNA, 7 bp, Unknown
  misc_feature (1)..( 7): Result.002 file - promoters60/1394327
aaagatg

SEQ ID NO: 110792 - DNA, 6 bp, Unknown
  misc_feature (1)..( 6): Result.002 file - promoters60/1394327
gcaaaa

SEQ ID NO: 110793 - DNA, 6 bp, Unknown
  misc_feature (1)..( 6): Result.002 file - promoters60/1394327
gcaaaa

SEQ ID NO: 110794 - DNA, 7 bp, Unknown
  misc_feature (1)..( 7): Result.002 file - promoters60/1394327
ataggga

SEQ ID NO: 110795 - DNA, 7 bp, Unknown
  misc_feature (1)..( 7): Result.002 file - promoters60/1394327
atatgga

SEQ ID NO: 110796 - DNA, 9 bp, Unknown
  misc_feature (1)..( 9): Result.002 file - promoters60/1394465
agttgtttt

SEQ ID NO: 110797 - DNA, 9 bp, Unknown
  misc_feature (1)..( 9): Result.002 file - promoters60/1394465
atttgattt

SEQ ID NO: 110798 - DNA, 9 bp, Unknown
  misc_feature (1)..( 9): Result.002 file - promoters60/1394465
atttaattt

SEQ ID NO: 110799 - DNA, 8 bp, Unknown
  misc_feature (1)..( 8): Result.002 file - promoters60/1394465
tttttata

SEQ ID NO: 110800 - DNA, 8 bp, Unknown
  misc_feature (1)..( 8): Result.002 file - promoters60/1394465
atttgata

SEQ ID NO: 110801 - DNA, 8 bp, Unknown
  misc_feature (1)..( 8): Result.002 file - promoters60/1394465
atttgatt

SEQ ID NO: 110802 - DNA, 9 bp, Unknown
  misc_feature (1)..( 9): Result.002 file - promoters60/1394465
catcgtctt

SEQ ID NO: 110803 - DNA, 9 bp, Unknown
  misc_feature (1)..( 9): Result.002 file - promoters60/1394465
catcttcta

SEQ ID NO: 110804 - DNA, 9 bp, Unknown
  misc_feature (1)..( 9): Result.002 file - promoters60/1394465
tgccgtctt

SEQ ID NO: 110805 - DNA, 9 bp, Unknown
  misc_feature (1)..( 9): Result.002 file - promoters60/1394480
aaactttaa

SEQ ID NO: 110806 - DNA, 9 bp, Unknown
  misc_feature (1)..( 9): Result.002 file - promoters60/1394480
aaaatttct

SEQ ID NO: 110807 - DNA, 9 bp, Unknown
  misc_feature (1)..( 9): Result.002 file - promoters60/1394480
aaaatctct

SEQ ID NO: 110808 - DNA, 8 bp, Unknown
  misc_feature (1)..( 8): Result.002 file - promoters60/1394480
tttgaaac

SEQ ID NO: 110809 - DNA, 8 bp, Unknown
  misc_feature (1)..( 8): Result.002 file - promoters60/1394480
tgtgaaac

SEQ ID NO: 110810 - DNA, 8 bp, Unknown
  misc_feature (1)..( 8): Result.002 file - promoters60/1394480
tgtgaaaa

SEQ ID NO: 110811 - DNA, 9 bp, Unknown
  misc_feature (1)..( 9): Result.002 file - promoters60/1394480
gatatttct

SEQ ID NO: 110812 - DNA, 9 bp, Unknown
  misc_feature (1)..( 9): Result.002 file - promoters60/1394480
aaaatttct

SEQ ID NO: 110813 - DNA, 9 bp, Unknown
  misc_feature (1)..( 9): Result.002 file - promoters60/1394480
aaaatctct

SEQ ID NO: 110814 - DNA, 9 bp, Unknown
  misc_feature (1)..( 9): Result.002 file - promoters60/1394480
tttcaaaat

SEQ ID NO: 110815 - DNA, 9 bp, Unknown
  misc_feature (1)..( 9): Result.002 file - promoters60/1394480
tatcaaaat

SEQ ID NO: 110816 - DNA, 9 bp, Unknown
  misc_feature (1)..( 9): Result.002 file - promoters60/1394480
ttttaaaat

SEQ ID NO: 110817 - DNA, 6 bp, Unknown
  misc_feature (1)..( 6): Result.002 file - promoters60/1394480
taacat

SEQ ID NO: 110818 - DNA, 6 bp, Unknown
  misc_feature (1)..( 6): Result.002 file - promoters60/1394480
taacat

SEQ ID NO: 110819 - DNA, 7 bp, Unknown
  misc_feature (1)..( 7): Result.002 file - promoters60/1394480
aaaatat

SEQ ID NO: 110820 - DNA, 7 bp, Unknown
  misc_feature (1)..( 7): Result.002 file - promoters60/1394480
aaattat

SEQ ID NO: 110821 - DNA, 8 bp, Unknown
  misc_feature (1)..( 8): Result.002 file - promoters60/1394480
taattaaa

SEQ ID NO: 110822 - DNA, 8 bp, Unknown
  misc_feature (1)..( 8): Result.002 file - promoters60/1394480
taactaaa

SEQ ID NO: 110823 - DNA, 6 bp, Unknown
  misc_feature (1)..( 6): Result.002 file - promoters60/1394480
aatcaa

SEQ ID NO: 110824 - DNA, 6 bp, Unknown
  misc_feature (1)..( 6): Result.002 file - promoters60/1394480
aatcaa

SEQ ID NO: 110825 - DNA, 14 bp, Unknown
  misc_feature (1)..( 14): Result.002 file - promoters60/1394480
tcaataaatacaca

SEQ ID NO: 110826 - DNA, 14 bp, Unknown
  misc_feature (1)..( 14): Result.002 file - promoters60/1394480
tcaataaatagaca

SEQ ID NO: 110827 - DNA, 7 bp, Unknown
  misc_feature (1)..( 7): Result.002 file - promoters60/1394480
aaataaa

SEQ ID NO: 110828 - DNA, 7 bp, Unknown
  misc_feature (1)..( 7): Result.002 file - promoters60/1394480
aaaaaaa

SEQ ID NO: 110829 - DNA, 9 bp, Unknown
  misc_feature (1)..( 9): Result.002 file - promoters60/1394480
ctgttttca

SEQ ID NO: 110830 - DNA, 9 bp, Unknown
  misc_feature (1)..( 9): Result.002 file - promoters60/1394480
ctgctttca

SEQ ID NO: 110831 - DNA, 7 bp, Unknown
  misc_feature (1)..( 7): Result.002 file - promoters60/1394480
attttgg

SEQ ID NO: 110832 - DNA, 7 bp, Unknown
  misc_feature (1)..( 7): Result.002 file - promoters60/1394480
attttgg

SEQ ID NO: 110833 - DNA, 8 bp, Unknown
  misc_feature (1)..( 8): Result.002 file - promoters60/1394480
tcaaattt

SEQ ID NO: 110834 - DNA, 8 bp, Unknown
  misc_feature (1)..( 8): Result.002 file - promoters60/1394480
tcaatttt

SEQ ID NO: 110835 - DNA, 7 bp, Unknown
  misc_feature (1)..( 7): Result.002 file - promoters60/1394480
gtaatgg

SEQ ID NO: 110836 - DNA, 7 bp, Unknown
  misc_feature (1)..( 7): Result.002 file - promoters60/1394480
gtattgg

SEQ ID NO: 110837 - DNA, 6 bp, Unknown
  misc_feature (1)..( 6): Result.002 file - promoters60/1394480
aaaatg

SEQ ID NO: 110838 - DNA, 6 bp, Unknown
  misc_feature (1)..( 6): Result.002 file - promoters60/1394480
aaaatg

SEQ ID NO: 110839 - DNA, 6 bp, Unknown
  misc_feature (1)..( 6): Result.002 file - promoters60/1394480
aagatt

SEQ ID NO: 110840 - DNA, 6 bp, Unknown
  misc_feature (1)..( 6): Result.002 file - promoters60/1394480
aagatt

SEQ ID NO: 110841 - DNA, 8 bp, Unknown
  misc_feature (1)..( 8): Result.002 file - promoters60/1394480
atgtaaac

SEQ ID NO: 110842 - DNA, 8 bp, Unknown
  misc_feature (1)..( 8): Result.002 file - promoters60/1394480
atgtcaac

SEQ ID NO: 110843 - DNA, 7 bp, Unknown
  misc_feature (1)..( 7): Result.002 file - promoters60/1394480
gaaaaat

SEQ ID NO: 110844 - DNA, 7 bp, Unknown
  misc_feature (1)..( 7): Result.002 file - promoters60/1394480
gaagaat

SEQ ID NO: 110845 - DNA, 7 bp, Unknown
  misc_feature (1)..( 7): Result.002 file - promoters60/1394480
caaaatt

SEQ ID NO: 110846 - DNA, 7 bp, Unknown
  misc_feature (1)..( 7): Result.002 file - promoters60/1394480
caatatt

SEQ ID NO: 110847 - DNA, 7 bp, Unknown
  misc_feature (1)..( 7): Result.002 file - promoters60/1394480
acaactt

SEQ ID NO: 110848 - DNA, 7 bp, Unknown
  misc_feature (1)..( 7): Result.002 file - promoters60/1394480
acatctt

SEQ ID NO: 110849 - DNA, 7 bp, Unknown
  misc_feature (1)..( 7): Result.002 file - promoters60/1394480
tttattt

SEQ ID NO: 110850 - DNA, 7 bp, Unknown
  misc_feature (1)..( 7): Result.002 file - promoters60/1394480
ttttttt

SEQ ID NO: 110851 - DNA, 6 bp, Unknown
  misc_feature (1)..( 6): Result.002 file - promoters60/1394480
ttggtt

SEQ ID NO: 110852 - DNA, 6 bp, Unknown
  misc_feature (1)..( 6): Result.002 file - promoters60/1394480
ttggtt

SEQ ID NO: 110853 - DNA, 6 bp, Unknown
  misc_feature (1)..( 6): Result.002 file - promoters60/1394480
aaaagt

SEQ ID NO: 110854 - DNA, 6 bp, Unknown
  misc_feature (1)..( 6): Result.002 file - promoters60/1394480
aaaagt

SEQ ID NO: 110855 - DNA, 12 bp, Unknown
  misc_feature (1)..( 12): Result.002 file - promoters60/1394510
ttaagagttaag

SEQ ID NO: 110856 - DNA, 12 bp, Unknown
  misc_feature (1)..( 12): Result.002 file - promoters60/1394510
ttaatagttttt

SEQ ID NO: 110857 - DNA, 12 bp, Unknown
  misc_feature (1)..( 12): Result.002 file - promoters60/1394510
ttaagatttttg

SEQ ID NO: 110858 - DNA, 12 bp, Unknown
  misc_feature (1)..( 12): Result.002 file - promoters60/1394510
ataacatttttt

SEQ ID NO: 110859 - DNA, 12 bp, Unknown
  misc_feature (1)..( 12): Result.002 file - promoters60/1394510
ttagaatttttt

SEQ ID NO: 110860 - DNA, 14 bp, Unknown
  misc_feature (1)..( 14): Result.002 file - promoters60/1394510
acatttaactttat

SEQ ID NO: 110861 - DNA, 14 bp, Unknown
  misc_feature (1)..( 14): Result.002 file - promoters60/1394510
acacaaaactatat

SEQ ID NO: 110862 - DNA, 14 bp, Unknown
  misc_feature (1)..( 14): Result.002 file - promoters60/1394510
acatgtaatttttc

SEQ ID NO: 110863 - DNA, 14 bp, Unknown
  misc_feature (1)..( 14): Result.002 file - promoters60/1394510
agaataaactaatt

SEQ ID NO: 110864 - DNA, 11 bp, Unknown
  misc_feature (1)..( 11): Result.002 file - promoters60/1394510
atatcatccaa

SEQ ID NO: 110865 - DNA, 11 bp, Unknown
  misc_feature (1)..( 11): Result.002 file - promoters60/1394510
ataacattttt

SEQ ID NO: 110866 - DNA, 11 bp, Unknown
  misc_feature (1)..( 11): Result.002 file - promoters60/1394510
ttaagattttt

SEQ ID NO: 110867 - DNA, 11 bp, Unknown
  misc_feature (1)..( 11): Result.002 file - promoters60/1394510
ttagaattttt

SEQ ID NO: 110868 - DNA, 11 bp, Unknown
  misc_feature (1)..( 11): Result.002 file - promoters60/1394510
tggagactttg

SEQ ID NO: 110869 - DNA, 9 bp, Unknown
  misc_feature (1)..( 9): Result.002 file - promoters60/1394510
aatttggct

SEQ ID NO: 110870 - DNA, 9 bp, Unknown
  misc_feature (1)..( 9): Result.002 file - promoters60/1394510
aatgtggtg

SEQ ID NO: 110871 - DNA, 9 bp, Unknown
  misc_feature (1)..( 9): Result.002 file - promoters60/1394510
aattttgct

SEQ ID NO: 110872 - DNA, 9 bp, Unknown
  misc_feature (1)..( 9): Result.002 file - promoters60/1394510
aattttttt

SEQ ID NO: 110873 - DNA, 9 bp, Unknown
  misc_feature (1)..( 9): Result.002 file - promoters60/1394510
tctttactg

SEQ ID NO: 110874 - DNA, 9 bp, Unknown
  misc_feature (1)..( 9): Result.002 file - promoters60/1394510
ccaattttg

SEQ ID NO: 110875 - DNA, 9 bp, Unknown
  misc_feature (1)..( 9): Result.002 file - promoters60/1394510
agaattttt

SEQ ID NO: 110876 - DNA, 8 bp, Unknown
  misc_feature (1)..( 8): Result.002 file - promoters60/1394510
aaattttt

SEQ ID NO: 110877 - DNA, 9 bp, Unknown
  misc_feature (1)..( 9): Result.002 file - promoters60/1394510
aagattttt

SEQ ID NO: 110878 - DNA, 9 bp, Unknown
  misc_feature (1)..( 9): Result.002 file - promoters60/1394510
agactttgg

SEQ ID NO: 110879 - DNA, 15 bp, Unknown
  misc_feature (1)..( 15): Result.002 file - promoters60/1394592
tgtcatattcgtcgc

SEQ ID NO: 110880 - DNA, 15 bp, Unknown
  misc_feature (1)..( 15): Result.002 file - promoters60/1394592
gttcaaattcaaaat

SEQ ID NO: 110881 - DNA, 15 bp, Unknown
  misc_feature (1)..( 15): Result.002 file - promoters60/1394592
tgtcacattccatct

SEQ ID NO: 110882 - DNA, 15 bp, Unknown
  misc_feature (1)..( 15): Result.002 file - promoters60/1394592
tgaaaaattcaacaa

SEQ ID NO: 110883 - DNA, 15 bp, Unknown
  misc_feature (1)..( 15): Result.002 file - promoters60/1394592
gtacgacttcgacaa

SEQ ID NO: 110884 - DNA, 15 bp, Unknown
  misc_feature (1)..( 15): Result.002 file - promoters60/1394592
ataaaaatttgaaaa

SEQ ID NO: 110885 - DNA, 20 bp, Unknown
  misc_feature (1)..( 20): Result.002 file - promoters60/1394592
gagacgtttttaagattttt

SEQ ID NO: 110886 - DNA, 20 bp, Unknown
  misc_feature (1)..( 20): Result.002 file - promoters60/1394592
tgaatttttttataacaaat

SEQ ID NO: 110887 - DNA, 20 bp, Unknown
  misc_feature (1)..( 20): Result.002 file - promoters60/1394592
aaggaaattttaatcaacaa

SEQ ID NO: 110888 - DNA, 20 bp, Unknown
  misc_feature (1)..( 20): Result.002 file - promoters60/1394592
atgatatttttttgttttct

SEQ ID NO: 110889 - DNA, 20 bp, Unknown
  misc_feature (1)..( 20): Result.002 file - promoters60/1394592
gaaatattattcaataataa

SEQ ID NO: 110890 - DNA, 20 bp, Unknown
  misc_feature (1)..( 20): Result.002 file - promoters60/1394592
tctctgctttgaattttgac

SEQ ID NO: 110891 - DNA, 10 bp, Unknown
  misc_feature (1)..( 10): Result.002 file - promoters60/1394625
caaattcaaa

SEQ ID NO: 110892 - DNA, 10 bp, Unknown
  misc_feature (1)..( 10): Result.002 file - promoters60/1394625
caaattaaaa

SEQ ID NO: 110893 - DNA, 10 bp, Unknown
  misc_feature (1)..( 10): Result.002 file - promoters60/1394625
ataatttaaa

SEQ ID NO: 110894 - DNA, 8 bp, Unknown
  misc_feature (1)..( 8): Result.002 file - promoters60/1394625
ttttaatt

SEQ ID NO: 110895 - DNA, 8 bp, Unknown
  misc_feature (1)..( 8): Result.002 file - promoters60/1394625
ttttaaat

SEQ ID NO: 110896 - DNA, 8 bp, Unknown
  misc_feature (1)..( 8): Result.002 file - promoters60/1394625
tttcattt

SEQ ID NO: 110897 - DNA, 7 bp, Unknown
  misc_feature (1)..( 7): Result.002 file - promoters60/1394625
taatttt

SEQ ID NO: 110898 - DNA, 7 bp, Unknown
  misc_feature (1)..( 7): Result.002 file - promoters60/1394625
aaatttt

SEQ ID NO: 110899 - DNA, 7 bp, Unknown
  misc_feature (1)..( 7): Result.002 file - promoters60/1394625
taattta

SEQ ID NO: 110900 - DNA, 6 bp, Unknown
  misc_feature (1)..( 6): Result.002 file - promoters60/1394625
ttggta

SEQ ID NO: 110901 - DNA, 6 bp, Unknown
  misc_feature (1)..( 6): Result.002 file - promoters60/1394625
ttggta

SEQ ID NO: 110902 - DNA, 11 bp, Unknown
  misc_feature (1)..( 11): Result.002 file - promoters60/1394625
atttaataaaa

SEQ ID NO: 110903 - DNA, 11 bp, Unknown
  misc_feature (1)..( 11): Result.002 file - promoters60/1394625
atttaatcaaa

SEQ ID NO: 110904 - DNA, 11 bp, Unknown
  misc_feature (1)..( 11): Result.002 file - promoters60/1394625
gaagcataaaa

SEQ ID NO: 110905 - DNA, 6 bp, Unknown
  misc_feature (1)..( 6): Result.002 file - promoters60/1394625
aaaacg

SEQ ID NO: 110906 - DNA, 6 bp, Unknown
  misc_feature (1)..( 6): Result.002 file - promoters60/1394625
aaaacg

SEQ ID NO: 110907 - DNA, 6 bp, Unknown
  misc_feature (1)..( 6): Result.002 file - promoters60/1394625
tgggaa

SEQ ID NO: 110908 - DNA, 6 bp, Unknown
  misc_feature (1)..( 6): Result.002 file - promoters60/1394625
tgggaa

SEQ ID NO: 110909 - DNA, 9 bp, Unknown
  misc_feature (1)..( 9): Result.002 file - promoters60/1394625
taaaccatt

SEQ ID NO: 110910 - DNA, 9 bp, Unknown
  misc_feature (1)..( 9): Result.002 file - promoters60/1394625
taatccatt

SEQ ID NO: 110911 - DNA, 6 bp, Unknown
  misc_feature (1)..( 6): Result.002 file - promoters60/1394625
gaataa

SEQ ID NO: 110912 - DNA, 6 bp, Unknown
  misc_feature (1)..( 6): Result.002 file - promoters60/1394625
gaataa

SEQ ID NO: 110913 - DNA, 17 bp, Unknown
  misc_feature (1)..( 17): Result.002 file - promoters60/1394625
gatcataatttgcattc

SEQ ID NO: 110914 - DNA, 17 bp, Unknown
  misc_feature (1)..( 17): Result.002 file - promoters60/1394625
gattataaaaaaagtct

SEQ ID NO: 110915 - DNA, 17 bp, Unknown
  misc_feature (1)..( 17): Result.002 file - promoters60/1394625
aattaaaaaaaaaatct

SEQ ID NO: 110916 - DNA, 9 bp, Unknown
  misc_feature (1)..( 9): Result.002 file - promoters60/1394625
ttttttata

SEQ ID NO: 110917 - DNA, 9 bp, Unknown
  misc_feature (1)..( 9): Result.002 file - promoters60/1394625
tttcttata

SEQ ID NO: 110918 - DNA, 8 bp, Unknown
  misc_feature (1)..( 8): Result.002 file - promoters60/1394625
tatatatt

SEQ ID NO: 110919 - DNA, 8 bp, Unknown
  misc_feature (1)..( 8): Result.002 file - promoters60/1394625
tataaatt

SEQ ID NO: 110920 - DNA, 7 bp, Unknown
  misc_feature (1)..( 7): Result.002 file - promoters60/1394625
attcctt

SEQ ID NO: 110921 - DNA, 7 bp, Unknown
  misc_feature (1)..( 7): Result.002 file - promoters60/1394625
attactt

SEQ ID NO: 110922 - DNA, 9 bp, Unknown
  misc_feature (1)..( 9): Result.002 file - promoters60/1394625
aaaatttat

SEQ ID NO: 110923 - DNA, 9 bp, Unknown
  misc_feature (1)..( 9): Result.002 file - promoters60/1394625
aaaatatat

SEQ ID NO: 110924 - DNA, 6 bp, Unknown
  misc_feature (1)..( 6): Result.002 file - promoters60/1394625
tatata

SEQ ID NO: 110925 - DNA, 6 bp, Unknown
  misc_feature (1)..( 6): Result.002 file - promoters60/1394625
tatata

SEQ ID NO: 110926 - DNA, 6 bp, Unknown
  misc_feature (1)..( 6): Result.002 file - promoters60/1394625
aaattt

SEQ ID NO: 110927 - DNA, 6 bp, Unknown
  misc_feature (1)..( 6): Result.002 file - promoters60/1394625
aaattt

SEQ ID NO: 110928 - DNA, 7 bp, Unknown
  misc_feature (1)..( 7): Result.002 file - promoters60/1394625
aaaataa

SEQ ID NO: 110929 - DNA, 7 bp, Unknown
  misc_feature (1)..( 7): Result.002 file - promoters60/1394625
aaaatat

SEQ ID NO: 110930 - DNA, 8 bp, Unknown
  misc_feature (1)..( 8): Result.002 file - promoters60/1394625
aaagatgt

SEQ ID NO: 110931 - DNA, 7 bp, Unknown
  misc_feature (1)..( 7): Result.002 file - promoters60/1394625
taaataa

SEQ ID NO: 110932 - DNA, 7 bp, Unknown
  misc_feature (1)..( 7): Result.002 file - promoters60/1394625
taattaa

SEQ ID NO: 110933 - DNA, 11 bp, Unknown
  misc_feature (1)..( 11): Result.002 file - promoters60/1394625
ctcattctctt

SEQ ID NO: 110934 - DNA, 11 bp, Unknown
  misc_feature (1)..( 11): Result.002 file - promoters60/1394625
ctctttccctt

SEQ ID NO: 110935 - DNA, 6 bp, Unknown
  misc_feature (1)..( 6): Result.002 file - promoters60/1394625
actaat

SEQ ID NO: 110936 - DNA, 6 bp, Unknown
  misc_feature (1)..( 6): Result.002 file - promoters60/1394625
actaat

SEQ ID NO: 110937 - DNA, 7 bp, Unknown
  misc_feature (1)..( 7): Result.002 file - promoters60/1394625
tattatt

SEQ ID NO: 110938 - DNA, 7 bp, Unknown
  misc_feature (1)..( 7): Result.002 file - promoters60/1394625
tataatt

SEQ ID NO: 110939 - DNA, 9 bp, Unknown
  misc_feature (1)..( 9): Result.002 file - promoters60/1394625
ttacctaaa

SEQ ID NO: 110940 - DNA, 9 bp, Unknown
  misc_feature (1)..( 9): Result.002 file - promoters60/1394625
ttacccaaa

SEQ ID NO: 110941 - DNA, 7 bp, Unknown
  misc_feature (1)..( 7): Result.002 file - promoters60/1394625
ctatctt

SEQ ID NO: 110942 - DNA, 7 bp, Unknown
  misc_feature (1)..( 7): Result.002 file - promoters60/1394625
ctatctt

SEQ ID NO: 110943 - DNA, 9 bp, Unknown
  misc_feature (1)..( 9): Result.002 file - promoters60/1394625
ttcttttta

SEQ ID NO: 110944 - DNA, 9 bp, Unknown
  misc_feature (1)..( 9): Result.002 file - promoters60/1394625
ttcttttta

SEQ ID NO: 110945 - DNA, 7 bp, Unknown
  misc_feature (1)..( 7): Result.002 file - promoters60/1394625
accagct

SEQ ID NO: 110946 - DNA, 7 bp, Unknown
  misc_feature (1)..( 7): Result.002 file - promoters60/1394625
accagct

SEQ ID NO: 110947 - DNA, 11 bp, Unknown
  misc_feature (1)..( 11): Result.002 file - promoters60/1394625
tcaacctctct

SEQ ID NO: 110948 - DNA, 11 bp, Unknown
  misc_feature (1)..( 11): Result.002 file - promoters60/1394625
tcaccctctct

SEQ ID NO: 110949 - DNA, 12 bp, Unknown
  misc_feature (1)..( 12): Result.002 file - promoters60/1394643
gttttatatatt

SEQ ID NO: 110950 - DNA, 12 bp, Unknown
  misc_feature (1)..( 12): Result.002 file - promoters60/1394643
gttatatgtatt

SEQ ID NO: 110951 - DNA, 12 bp, Unknown
  misc_feature (1)..( 12): Result.002 file - promoters60/1394643
cttctatataac

SEQ ID NO: 110952 - DNA, 6 bp, Unknown
  misc_feature (1)..( 6): Result.002 file - promoters60/1394643
ttaata

SEQ ID NO: 110953 - DNA, 6 bp, Unknown
  misc_feature (1)..( 6): Result.002 file - promoters60/1394643
ttaata

SEQ ID NO: 110954 - DNA, 7 bp, Unknown
  misc_feature (1)..( 7): Result.002 file - promoters60/1394643
tttggtt

SEQ ID NO: 110955 - DNA, 7 bp, Unknown
  misc_feature (1)..( 7): Result.002 file - promoters60/1394643
tttagtt

SEQ ID NO: 110956 - DNA, 8 bp, Unknown
  misc_feature (1)..( 8): Result.002 file - promoters60/1394643
tttgccgt

SEQ ID NO: 110957 - DNA, 8 bp, Unknown
  misc_feature (1)..( 8): Result.002 file - promoters60/1394643
tttgtcgt

SEQ ID NO: 110958 - DNA, 9 bp, Unknown
  misc_feature (1)..( 9): Result.002 file - promoters60/1394643
tatttagga

SEQ ID NO: 110959 - DNA, 9 bp, Unknown
  misc_feature (1)..( 9): Result.002 file - promoters60/1394643
tatttggga

SEQ ID NO: 110960 - DNA, 9 bp, Unknown
  misc_feature (1)..( 9): Result.002 file - promoters60/1394643
tgattttct

SEQ ID NO: 110961 - DNA, 9 bp, Unknown
  misc_feature (1)..( 9): Result.002 file - promoters60/1394643
tgagtttct

SEQ ID NO: 110962 - DNA, 6 bp, Unknown
  misc_feature (1)..( 6): Result.002 file - promoters60/1394643
tttttc

SEQ ID NO: 110963 - DNA, 6 bp, Unknown
  misc_feature (1)..( 6): Result.002 file - promoters60/1394643
tttttc

SEQ ID NO: 110964 - DNA, 6 bp, Unknown
  misc_feature (1)..( 6): Result.002 file - promoters60/1394643
gggaaa

SEQ ID NO: 110965 - DNA, 6 bp, Unknown
  misc_feature (1)..( 6): Result.002 file - promoters60/1394643
gggaaa

SEQ ID NO: 110966 - DNA, 6 bp, Unknown
  misc_feature (1)..( 6): Result.002 file - promoters60/1394643
tccatg

SEQ ID NO: 110967 - DNA, 6 bp, Unknown
  misc_feature (1)..( 6): Result.002 file - promoters60/1394643
tccatg

SEQ ID NO: 110968 - DNA, 8 bp, Unknown
  misc_feature (1)..( 8): Result.002 file - promoters60/1394643
ttttttct

SEQ ID NO: 110969 - DNA, 8 bp, Unknown
  misc_feature (1)..( 8): Result.002 file - promoters60/1394643
tttcttct

SEQ ID NO: 110970 - DNA, 12 bp, Unknown
  misc_feature (1)..( 12): Result.002 file - promoters60/1394643
atgctattaaat

SEQ ID NO: 110971 - DNA, 12 bp, Unknown
  misc_feature (1)..( 12): Result.002 file - promoters60/1394643
atgctcttaaat

SEQ ID NO: 110972 - DNA, 6 bp, Unknown
  misc_feature (1)..( 6): Result.002 file - promoters60/1394643
aatatt

SEQ ID NO: 110973 - DNA, 6 bp, Unknown
  misc_feature (1)..( 6): Result.002 file - promoters60/1394643
aatatt

SEQ ID NO: 110974 - DNA, 6 bp, Unknown
  misc_feature (1)..( 6): Result.002 file - promoters60/1394643
acttat

SEQ ID NO: 110975 - DNA, 6 bp, Unknown
  misc_feature (1)..( 6): Result.002 file - promoters60/1394643
acttat

SEQ ID NO: 110976 - DNA, 7 bp, Unknown
  misc_feature (1)..( 7): Result.002 file - promoters60/1394643
tactaaa

SEQ ID NO: 110977 - DNA, 7 bp, Unknown
  misc_feature (1)..( 7): Result.002 file - promoters60/1394643
tacaaaa

SEQ ID NO: 110978 - DNA, 6 bp, Unknown
  misc_feature (1)..( 6): Result.002 file - promoters60/1394643
catcgt

SEQ ID NO: 110979 - DNA, 6 bp, Unknown
  misc_feature (1)..( 6): Result.002 file - promoters60/1394643
catcgt

SEQ ID NO: 110980 - DNA, 7 bp, Unknown
  misc_feature (1)..( 7): Result.002 file - promoters60/1394643
tcttatt

SEQ ID NO: 110981 - DNA, 7 bp, Unknown
  misc_feature (1)..( 7): Result.002 file - promoters60/1394643
tcttatt

SEQ ID NO: 110982 - DNA, 7 bp, Unknown
  misc_feature (1)..( 7): Result.002 file - promoters60/1394676
tttgtag

SEQ ID NO: 110983 - DNA, 7 bp, Unknown
  misc_feature (1)..( 7): Result.002 file - promoters60/1394676
tttctag

SEQ ID NO: 110984 - DNA, 6 bp, Unknown
  misc_feature (1)..( 6): Result.002 file - promoters60/1394676
attaag

SEQ ID NO: 110985 - DNA, 6 bp, Unknown
  misc_feature (1)..( 6): Result.002 file - promoters60/1394676
attaag

SEQ ID NO: 110986 - DNA, 9 bp, Unknown
  misc_feature (1)..( 9): Result.002 file - promoters60/1394676
tttggttga

SEQ ID NO: 110987 - DNA, 9 bp, Unknown
  misc_feature (1)..( 9): Result.002 file - promoters60/1394676
tttgtttga

SEQ ID NO: 110988 - DNA, 9 bp, Unknown
  misc_feature (1)..( 9): Result.002 file - promoters60/1394676
tttgatttt

SEQ ID NO: 110989 - DNA, 7 bp, Unknown
  misc_feature (1)..( 7): Result.002 file - promoters60/1394676
ggctgaa

SEQ ID NO: 110990 - DNA, 7 bp, Unknown
  misc_feature (1)..( 7): Result.002 file - promoters60/1394676
ggctgaa

SEQ ID NO: 110991 - DNA, 7 bp, Unknown
  misc_feature (1)..( 7): Result.002 file - promoters60/1394676
aaagtta

SEQ ID NO: 110992 - DNA, 7 bp, Unknown
  misc_feature (1)..( 7): Result.002 file - promoters60/1394676
aaaatta

SEQ ID NO: 110993 - DNA, 7 bp, Unknown
  misc_feature (1)..( 7): Result.002 file - promoters60/1394676
attgaaa

SEQ ID NO: 110994 - DNA, 7 bp, Unknown
  misc_feature (1)..( 7): Result.002 file - promoters60/1394676
attaaaa

SEQ ID NO: 110995 - DNA, 7 bp, Unknown
  misc_feature (1)..( 7): Result.002 file - promoters60/1394676
attactg

SEQ ID NO: 110996 - DNA, 7 bp, Unknown
  misc_feature (1)..( 7): Result.002 file - promoters60/1394676
attactg

SEQ ID NO: 110997 - DNA, 10 bp, Unknown
  misc_feature (1)..( 10): Result.002 file - promoters60/1394676
accaaactta

SEQ ID NO: 110998 - DNA, 10 bp, Unknown
  misc_feature (1)..( 10): Result.002 file - promoters60/1394676
accaaattta

SEQ ID NO: 110999 - DNA, 8 bp, Unknown
  misc_feature (1)..( 8): Result.002 file - promoters60/1394676
ctgatttg

SEQ ID NO: 111000 - DNA, 8 bp, Unknown
  misc_feature (1)..( 8): Result.002 file - promoters60/1394676
ctggtttg

SEQ ID NO: 111001 - DNA, 7 bp, Unknown
  misc_feature (1)..( 7): Result.002 file - promoters60/1394676
tatcatt

SEQ ID NO: 111002 - DNA, 7 bp, Unknown
  misc_feature (1)..( 7): Result.002 file - promoters60/1394676
tatgatt

SEQ ID NO: 111003 - DNA, 7 bp, Unknown
  misc_feature (1)..( 7): Result.002 file - promoters60/1394676
gaatttg

SEQ ID NO: 111004 - DNA, 7 bp, Unknown
  misc_feature (1)..( 7): Result.002 file - promoters60/1394676
gaatttg

SEQ ID NO: 111005 - DNA, 7 bp, Unknown
  misc_feature (1)..( 7): Result.002 file - promoters60/1394676
ttagatc

SEQ ID NO: 111006 - DNA, 7 bp, Unknown
  misc_feature (1)..( 7): Result.002 file - promoters60/1394676
ttatatc

SEQ ID NO: 111007 - DNA, 6 bp, Unknown
  misc_feature (1)..( 6): Result.002 file - promoters60/1394676
catttg

SEQ ID NO: 111008 - DNA, 6 bp, Unknown
  misc_feature (1)..( 6): Result.002 file - promoters60/1394676
catttg

SEQ ID NO: 111009 - DNA, 16 bp, Unknown
  misc_feature (1)..( 16): Result.002 file - promoters60/1394697
taaactaatttctatc

SEQ ID NO: 111010 - DNA, 16 bp, Unknown
  misc_feature (1)..( 16): Result.002 file - promoters60/1394697
ggtcttaaattcttct

SEQ ID NO: 111011 - DNA, 16 bp, Unknown
  misc_feature (1)..( 16): Result.002 file - promoters60/1394697
gaaaacaatttatatt

SEQ ID NO: 111012 - DNA, 16 bp, Unknown
  misc_feature (1)..( 16): Result.002 file - promoters60/1394697
caatttaatttcttca

SEQ ID NO: 111013 - DNA, 16 bp, Unknown
  misc_feature (1)..( 16): Result.002 file - promoters60/1394697
gcaactaatttgtcag

SEQ ID NO: 111014 - DNA, 16 bp, Unknown
  misc_feature (1)..( 16): Result.002 file - promoters60/1394697
agcacttttttttatt

SEQ ID NO: 111015 - DNA, 16 bp, Unknown
  misc_feature (1)..( 16): Result.002 file - promoters60/1394697
gcaaataattcgttat

SEQ ID NO: 111016 - DNA, 20 bp, Unknown
  misc_feature (1)..( 20): Result.002 file - promoters60/1394697
accgacctaataattaggta

SEQ ID NO: 111017 - DNA, 20 bp, Unknown
  misc_feature (1)..( 20): Result.002 file - promoters60/1394697
aagggtctaaaaatctatat

SEQ ID NO: 111018 - DNA, 20 bp, Unknown
  misc_feature (1)..( 20): Result.002 file - promoters60/1394697
tattattcaataataaaaca

SEQ ID NO: 111019 - DNA, 20 bp, Unknown
  misc_feature (1)..( 20): Result.002 file - promoters60/1394697
aatttttttataacaaatca

SEQ ID NO: 111020 - DNA, 21 bp, Unknown
  misc_feature (1)..( 21): Result.002 file - promoters60/1394697
gaaattttaatcaacaataat

SEQ ID NO: 111021 - DNA, 21 bp, Unknown
  misc_feature (1)..( 21): Result.002 file - promoters60/1394697
ctgctttgaattttgacttaa

SEQ ID NO: 111022 - DNA, 21 bp, Unknown
  misc_feature (1)..( 21): Result.002 file - promoters60/1394697
gagatagaataaaacaagaat

SEQ ID NO: 111023 - DNA, 12 bp, Unknown
  misc_feature (1)..( 12): Result.002 file - promoters60/1394697
taaggaaagtct

SEQ ID NO: 111024 - DNA, 12 bp, Unknown
  misc_feature (1)..( 12): Result.002 file - promoters60/1394697
cccgaaaaatct

SEQ ID NO: 111025 - DNA, 12 bp, Unknown
  misc_feature (1)..( 12): Result.002 file - promoters60/1394697
agtttaaacagt

SEQ ID NO: 111026 - DNA, 12 bp, Unknown
  misc_feature (1)..( 12): Result.002 file - promoters60/1394697
atccaaaaataa

SEQ ID NO: 111027 - DNA, 12 bp, Unknown
  misc_feature (1)..( 12): Result.002 file - promoters60/1394697
aaataaaaatca

SEQ ID NO: 111028 - DNA, 12 bp, Unknown
  misc_feature (1)..( 12): Result.002 file - promoters60/1394697
aattaaaaacta

SEQ ID NO: 111029 - DNA, 8 bp, Unknown
  misc_feature (1)..( 8): Result.002 file - promoters60/1394697
gaaacttg

SEQ ID NO: 111030 - DNA, 8 bp, Unknown
  misc_feature (1)..( 8): Result.002 file - promoters60/1394697
aaaaattg

SEQ ID NO: 111031 - DNA, 8 bp, Unknown
  misc_feature (1)..( 8): Result.002 file - promoters60/1394697
aaaacttt

SEQ ID NO: 111032 - DNA, 8 bp, Unknown
  misc_feature (1)..( 8): Result.002 file - promoters60/1394697
gaatctta

SEQ ID NO: 111033 - DNA, 8 bp, Unknown
  misc_feature (1)..( 8): Result.002 file - promoters60/1394697
caaaattt

SEQ ID NO: 111034 - DNA, 8 bp, Unknown
  misc_feature (1)..( 8): Result.002 file - promoters60/1394697
caaattta

SEQ ID NO: 111035 - DNA, 12 bp, Unknown
  misc_feature (1)..( 12): Result.002 file - promoters60/1394697
atactcaaatat

SEQ ID NO: 111036 - DNA, 12 bp, Unknown
  misc_feature (1)..( 12): Result.002 file - promoters60/1394697
ataatcattatc

SEQ ID NO: 111037 - DNA, 12 bp, Unknown
  misc_feature (1)..( 12): Result.002 file - promoters60/1394697
ataattattcat

SEQ ID NO: 111038 - DNA, 12 bp, Unknown
  misc_feature (1)..( 12): Result.002 file - promoters60/1394697
aaaattatttta

SEQ ID NO: 111039 - DNA, 12 bp, Unknown
  misc_feature (1)..( 12): Result.002 file - promoters60/1394697
caacttatttta

SEQ ID NO: 111040 - DNA, 12 bp, Unknown
  misc_feature (1)..( 12): Result.002 file - promoters60/1394697
ataaatatatct

SEQ ID NO: 111041 - DNA, 11 bp, Unknown
  misc_feature (1)..( 11): Result.002 file - promoters60/1394697
tattttattca

SEQ ID NO: 111042 - DNA, 11 bp, Unknown
  misc_feature (1)..( 11): Result.002 file - promoters60/1394697
tattttatgaa

SEQ ID NO: 111043 - DNA, 11 bp, Unknown
  misc_feature (1)..( 11): Result.002 file - promoters60/1394697
tattttaattt

SEQ ID NO: 111044 - DNA, 11 bp, Unknown
  misc_feature (1)..( 11): Result.002 file - promoters60/1394697
ctttttgtgac

SEQ ID NO: 111045 - DNA, 11 bp, Unknown
  misc_feature (1)..( 11): Result.002 file - promoters60/1394697
atttttgtgac

SEQ ID NO: 111046 - DNA, 11 bp, Unknown
  misc_feature (1)..( 11): Result.002 file - promoters60/1394697
agttttgaatt

SEQ ID NO: 111047 - DNA, 13 bp, Unknown
  misc_feature (1)..( 13): Result.002 file - promoters60/1394697
atattttattcaa

SEQ ID NO: 111048 - DNA, 13 bp, Unknown
  misc_feature (1)..( 13): Result.002 file - promoters60/1394697
cataattattcat

SEQ ID NO: 111049 - DNA, 13 bp, Unknown
  misc_feature (1)..( 13): Result.002 file - promoters60/1394697
tattttaattttg

SEQ ID NO: 111050 - DNA, 14 bp, Unknown
  misc_feature (1)..( 14): Result.002 file - promoters60/1394697
tcattattattatt

SEQ ID NO: 111051 - DNA, 14 bp, Unknown
  misc_feature (1)..( 14): Result.002 file - promoters60/1394697
tcttcactattaga

SEQ ID NO: 111052 - DNA, 14 bp, Unknown
  misc_feature (1)..( 14): Result.002 file - promoters60/1394697
agttttgaattcat

SEQ ID NO: 111053 - DNA, 7 bp, Unknown
  misc_feature (1)..( 7): Result.002 file - promoters60/1394795
attaact

SEQ ID NO: 111054 - DNA, 7 bp, Unknown
  misc_feature (1)..( 7): Result.002 file - promoters60/1394795
attgact

SEQ ID NO: 111055 - DNA, 9 bp, Unknown
  misc_feature (1)..( 9): Result.002 file - promoters60/1394795
aaacttttt

SEQ ID NO: 111056 - DNA, 9 bp, Unknown
  misc_feature (1)..( 9): Result.002 file - promoters60/1394795
aaacttttt

SEQ ID NO: 111057 - DNA, 9 bp, Unknown
  misc_feature (1)..( 9): Result.002 file - promoters60/1394795
aaacttttg

SEQ ID NO: 111058 - DNA, 6 bp, Unknown
  misc_feature (1)..( 6): Result.002 file - promoters60/1394795
tttcta

SEQ ID NO: 111059 - DNA, 6 bp, Unknown
  misc_feature (1)..( 6): Result.002 file - promoters60/1394795
tttcta

SEQ ID NO: 111060 - DNA, 7 bp, Unknown
  misc_feature (1)..( 7): Result.002 file - promoters60/1394795
taaaaaa

SEQ ID NO: 111061 - DNA, 7 bp, Unknown
  misc_feature (1)..( 7): Result.002 file - promoters60/1394795
taacaaa

SEQ ID NO: 111062 - DNA, 6 bp, Unknown
  misc_feature (1)..( 6): Result.002 file - promoters60/1394795
gcataa

SEQ ID NO: 111063 - DNA, 6 bp, Unknown
  misc_feature (1)..( 6): Result.002 file - promoters60/1394795
gcataa

SEQ ID NO: 111064 - DNA, 9 bp, Unknown
  misc_feature (1)..( 9): Result.002 file - promoters60/1394795
gaatctctt

SEQ ID NO: 111065 - DNA, 9 bp, Unknown
  misc_feature (1)..( 9): Result.002 file - promoters60/1394795
gaatctctt

SEQ ID NO: 111066 - DNA, 8 bp, Unknown
  misc_feature (1)..( 8): Result.002 file - promoters60/1394795
attttttt

SEQ ID NO: 111067 - DNA, 8 bp, Unknown
  misc_feature (1)..( 8): Result.002 file - promoters60/1394795
attttttt

SEQ ID NO: 111068 - DNA, 6 bp, Unknown
  misc_feature (1)..( 6): Result.002 file - promoters60/1394795
ttttct

SEQ ID NO: 111069 - DNA, 6 bp, Unknown
  misc_feature (1)..( 6): Result.002 file - promoters60/1394795
ttttct

SEQ ID NO: 111070 - DNA, 7 bp, Unknown
  misc_feature (1)..( 7): Result.002 file - promoters60/1394795
gatgaaa

SEQ ID NO: 111071 - DNA, 7 bp, Unknown
  misc_feature (1)..( 7): Result.002 file - promoters60/1394795
gataaaa

SEQ ID NO: 111072 - DNA, 8 bp, Unknown
  misc_feature (1)..( 8): Result.002 file - promoters60/1394795
tatgtatt

SEQ ID NO: 111073 - DNA, 8 bp, Unknown
  misc_feature (1)..( 8): Result.002 file - promoters60/1394795
tatatatt

SEQ ID NO: 111074 - DNA, 7 bp, Unknown
  misc_feature (1)..( 7): Result.002 file - promoters60/1394795
actatta

SEQ ID NO: 111075 - DNA, 7 bp, Unknown
  misc_feature (1)..( 7): Result.002 file - promoters60/1394795
actttta

SEQ ID NO: 111076 - DNA, 9 bp, Unknown
  misc_feature (1)..( 9): Result.002 file - promoters60/1394795
ttatttaaa

SEQ ID NO: 111077 - DNA, 9 bp, Unknown
  misc_feature (1)..( 9): Result.002 file - promoters60/1394795
acttttaaa

SEQ ID NO: 111078 - DNA, 9 bp, Unknown
  misc_feature (1)..( 9): Result.002 file - promoters60/1394795
tattttaaa

SEQ ID NO: 111079 - DNA, 6 bp, Unknown
  misc_feature (1)..( 6): Result.002 file - promoters60/1394795
ttttat

SEQ ID NO: 111080 - DNA, 6 bp, Unknown
  misc_feature (1)..( 6): Result.002 file - promoters60/1394795
ttttat

SEQ ID NO: 111081 - DNA, 6 bp, Unknown
  misc_feature (1)..( 6): Result.002 file - promoters60/1394795
attttt

SEQ ID NO: 111082 - DNA, 6 bp, Unknown
  misc_feature (1)..( 6): Result.002 file - promoters60/1394795
attttt

SEQ ID NO: 111083 - DNA, 6 bp, Unknown
  misc_feature (1)..( 6): Result.002 file - promoters60/1394795
ttctgc

SEQ ID NO: 111084 - DNA, 6 bp, Unknown
  misc_feature (1)..( 6): Result.002 file - promoters60/1394795
ttctgc

SEQ ID NO: 111085 - DNA, 8 bp, Unknown
  misc_feature (1)..( 8): Result.002 file - promoters60/1394795
catataaa

SEQ ID NO: 111086 - DNA, 8 bp, Unknown
  misc_feature (1)..( 8): Result.002 file - promoters60/1394795
tatataaa

SEQ ID NO: 111087 - DNA, 8 bp, Unknown
  misc_feature (1)..( 8): Result.002 file - promoters60/1394795
tatatagc

SEQ ID NO: 111088 - DNA, 6 bp, Unknown
  misc_feature (1)..( 6): Result.002 file - promoters60/1394795
aacttt

SEQ ID NO: 111089 - DNA, 6 bp, Unknown
  misc_feature (1)..( 6): Result.002 file - promoters60/1394795
aacttt

SEQ ID NO: 111090 - DNA, 6 bp, Unknown
  misc_feature (1)..( 6): Result.002 file - promoters60/1394795
tataaa

SEQ ID NO: 111091 - DNA, 6 bp, Unknown
  misc_feature (1)..( 6): Result.002 file - promoters60/1394795
tataaa

SEQ ID NO: 111092 - DNA, 7 bp, Unknown
  misc_feature (1)..( 7): Result.002 file - promoters60/1394795
tcttttt

SEQ ID NO: 111093 - DNA, 7 bp, Unknown
  misc_feature (1)..( 7): Result.002 file - promoters60/1394795
tcttttt

SEQ ID NO: 111094 - DNA, 8 bp, Unknown
  misc_feature (1)..( 8): Result.002 file - promoters60/1394795
tatttttt

SEQ ID NO: 111095 - DNA, 8 bp, Unknown
  misc_feature (1)..( 8): Result.002 file - promoters60/1394795
tatgtttt

SEQ ID NO: 111096 - DNA, 7 bp, Unknown
  misc_feature (1)..( 7): Result.002 file - promoters60/1394795
tctagtt

SEQ ID NO: 111097 - DNA, 7 bp, Unknown
  misc_feature (1)..( 7): Result.002 file - promoters60/1394795
tctagtt

SEQ ID NO: 111098 - DNA, 6 bp, Unknown
  misc_feature (1)..( 6): Result.002 file - promoters60/1394795
taaaat

SEQ ID NO: 111099 - DNA, 6 bp, Unknown
  misc_feature (1)..( 6): Result.002 file - promoters60/1394795
taaaat

SEQ ID NO: 111100 - DNA, 7 bp, Unknown
  misc_feature (1)..( 7): Result.002 file - promoters60/1394795
aaaatat

SEQ ID NO: 111101 - DNA, 7 bp, Unknown
  misc_feature (1)..( 7): Result.002 file - promoters60/1394795
aaaatat

SEQ ID NO: 111102 - DNA, 6 bp, Unknown
  misc_feature (1)..( 6): Result.002 file - promoters60/1394795
ttttga

SEQ ID NO: 111103 - DNA, 6 bp, Unknown
  misc_feature (1)..( 6): Result.002 file - promoters60/1394795
ttttga

SEQ ID NO: 111104 - DNA, 6 bp, Unknown
  misc_feature (1)..( 6): Result.002 file - promoters60/1394795
ttttaa

SEQ ID NO: 111105 - DNA, 6 bp, Unknown
  misc_feature (1)..( 6): Result.002 file - promoters60/1394795
ttttaa

SEQ ID NO: 111106 - DNA, 8 bp, Unknown
  misc_feature (1)..( 8): Result.002 file - promoters60/1394795
aacattag

SEQ ID NO: 111107 - DNA, 8 bp, Unknown
  misc_feature (1)..( 8): Result.002 file - promoters60/1394795
aacactag

SEQ ID NO: 111108 - DNA, 6 bp, Unknown
  misc_feature (1)..( 6): Result.002 file - promoters60/1394795
caaatg

SEQ ID NO: 111109 - DNA, 6 bp, Unknown
  misc_feature (1)..( 6): Result.002 file - promoters60/1394795
caaatg

SEQ ID NO: 111110 - DNA, 7 bp, Unknown
  misc_feature (1)..( 7): Result.002 file - promoters60/1394795
aagctca

SEQ ID NO: 111111 - DNA, 7 bp, Unknown
  misc_feature (1)..( 7): Result.002 file - promoters60/1394795
aagatca

SEQ ID NO: 111112 - DNA, 6 bp, Unknown
  misc_feature (1)..( 6): Result.002 file - promoters60/1394795
ctgaca

SEQ ID NO: 111113 - DNA, 6 bp, Unknown
  misc_feature (1)..( 6): Result.002 file - promoters60/1394795
ctgaca

SEQ ID NO: 111114 - DNA, 17 bp, Unknown
  misc_feature (1)..( 17): Result.002 file - promoters60/1394836
acacattaatagtgcag

SEQ ID NO: 111115 - DNA, 17 bp, Unknown
  misc_feature (1)..( 17): Result.002 file - promoters60/1394836
gcctattaatgatttca

SEQ ID NO: 111116 - DNA, 17 bp, Unknown
  misc_feature (1)..( 17): Result.002 file - promoters60/1394836
gcccattattgatttca

SEQ ID NO: 111117 - DNA, 17 bp, Unknown
  misc_feature (1)..( 17): Result.002 file - promoters60/1394836
ccgaattattgacgttc

SEQ ID NO: 111118 - DNA, 9 bp, Unknown
  misc_feature (1)..( 9): Result.002 file - promoters60/1394884
aattttttt

SEQ ID NO: 111119 - DNA, 9 bp, Unknown
  misc_feature (1)..( 9): Result.002 file - promoters60/1394884
cattttttt

SEQ ID NO: 111120 - DNA, 9 bp, Unknown
  misc_feature (1)..( 9): Result.002 file - promoters60/1394884
aattttaat

SEQ ID NO: 111121 - DNA, 8 bp, Unknown
  misc_feature (1)..( 8): Result.002 file - promoters60/1394884
gtttattt

SEQ ID NO: 111122 - DNA, 8 bp, Unknown
  misc_feature (1)..( 8): Result.002 file - promoters60/1394884
atttgttt

SEQ ID NO: 111123 - DNA, 8 bp, Unknown
  misc_feature (1)..( 8): Result.002 file - promoters60/1394884
atttgtat

SEQ ID NO: 111124 - DNA, 9 bp, Unknown
  misc_feature (1)..( 9): Result.002 file - promoters60/1394884
ttctcttag

SEQ ID NO: 111125 - DNA, 9 bp, Unknown
  misc_feature (1)..( 9): Result.002 file - promoters60/1394884
taatcttag

SEQ ID NO: 111126 - DNA, 9 bp, Unknown
  misc_feature (1)..( 9): Result.002 file - promoters60/1394884
taatattaa

SEQ ID NO: 111127 - DNA, 6 bp, Unknown
  misc_feature (1)..( 6): Result.002 file - promoters60/1394884
tataat

SEQ ID NO: 111128 - DNA, 6 bp, Unknown
  misc_feature (1)..( 6): Result.002 file - promoters60/1394884
tataat

SEQ ID NO: 111129 - DNA, 6 bp, Unknown
  misc_feature (1)..( 6): Result.002 file - promoters60/1394884
tataat

SEQ ID NO: 111130 - DNA, 11 bp, Unknown
  misc_feature (1)..( 11): Result.002 file - promoters60/1394884
aagtttatata

SEQ ID NO: 111131 - DNA, 11 bp, Unknown
  misc_feature (1)..( 11): Result.002 file - promoters60/1394884
aagtatatata

SEQ ID NO: 111132 - DNA, 11 bp, Unknown
  misc_feature (1)..( 11): Result.002 file - promoters60/1394884
tcatttgtata

SEQ ID NO: 111133 - DNA, 11 bp, Unknown
  misc_feature (1)..( 11): Result.002 file - promoters60/1394884
gaatttgtttg

SEQ ID NO: 111134 - DNA, 6 bp, Unknown
  misc_feature (1)..( 6): Result.002 file - promoters60/1394884
atttaa

SEQ ID NO: 111135 - DNA, 6 bp, Unknown
  misc_feature (1)..( 6): Result.002 file - promoters60/1394884
atttaa

SEQ ID NO: 111136 - DNA, 6 bp, Unknown
  misc_feature (1)..( 6): Result.002 file - promoters60/1394884
atttaa

SEQ ID NO: 111137 - DNA, 10 bp, Unknown
  misc_feature (1)..( 10): Result.002 file - promoters60/1394884
gaattatatt

SEQ ID NO: 111138 - DNA, 10 bp, Unknown
  misc_feature (1)..( 10): Result.002 file - promoters60/1394884
gaaatatata

SEQ ID NO: 111139 - DNA, 10 bp, Unknown
  misc_feature (1)..( 10): Result.002 file - promoters60/1394884
ttcttatatc

SEQ ID NO: 111140 - DNA, 10 bp, Unknown
  misc_feature (1)..( 10): Result.002 file - promoters60/1394884
aaattagatc

SEQ ID NO: 111141 - DNA, 9 bp, Unknown
  misc_feature (1)..( 9): Result.002 file - promoters60/1394884
atttctata

SEQ ID NO: 111142 - DNA, 9 bp, Unknown
  misc_feature (1)..( 9): Result.002 file - promoters60/1394884
atttgtata

SEQ ID NO: 111143 - DNA, 9 bp, Unknown
  misc_feature (1)..( 9): Result.002 file - promoters60/1394884
atttgtttg

SEQ ID NO: 111144 - DNA, 7 bp, Unknown
  misc_feature (1)..( 7): Result.002 file - promoters60/1394884
aatttat

SEQ ID NO: 111145 - DNA, 7 bp, Unknown
  misc_feature (1)..( 7): Result.002 file - promoters60/1394884
aatttaa

SEQ ID NO: 111146 - DNA, 7 bp, Unknown
  misc_feature (1)..( 7): Result.002 file - promoters60/1394884
tatttaa

SEQ ID NO: 111147 - DNA, 8 bp, Unknown
  misc_feature (1)..( 8): Result.002 file - promoters60/1395001
ttgtattc

SEQ ID NO: 111148 - DNA, 8 bp, Unknown
  misc_feature (1)..( 8): Result.002 file - promoters60/1395001
ttggatta

SEQ ID NO: 111149 - DNA, 8 bp, Unknown
  misc_feature (1)..( 8): Result.002 file - promoters60/1395001
ttgttttc

SEQ ID NO: 111150 - DNA, 7 bp, Unknown
  misc_feature (1)..( 7): Result.002 file - promoters60/1395027
ttatata

SEQ ID NO: 111151 - DNA, 7 bp, Unknown
  misc_feature (1)..( 7): Result.002 file - promoters60/1395027
ttaaata

SEQ ID NO: 111152 - DNA, 7 bp, Unknown
  misc_feature (1)..( 7): Result.002 file - promoters60/1395027
ccaattt

SEQ ID NO: 111153 - DNA, 7 bp, Unknown
  misc_feature (1)..( 7): Result.002 file - promoters60/1395027
ccatttt

SEQ ID NO: 111154 - DNA, 7 bp, Unknown
  misc_feature (1)..( 7): Result.002 file - promoters60/1395027
tttgtat

SEQ ID NO: 111155 - DNA, 7 bp, Unknown
  misc_feature (1)..( 7): Result.002 file - promoters60/1395027
tttctat

SEQ ID NO: 111156 - DNA, 8 bp, Unknown
  misc_feature (1)..( 8): Result.002 file - promoters60/1395027
aaaaaaaa

SEQ ID NO: 111157 - DNA, 8 bp, Unknown
  misc_feature (1)..( 8): Result.002 file - promoters60/1395027
aaaacaaa

SEQ ID NO: 111158 - DNA, 8 bp, Unknown
  misc_feature (1)..( 8): Result.002 file - promoters60/1395027
aaagcaaa

SEQ ID NO: 111159 - DNA, 6 bp, Unknown
  misc_feature (1)..( 6): Result.002 file - promoters60/1395027
gatttt

SEQ ID NO: 111160 - DNA, 6 bp, Unknown
  misc_feature (1)..( 6): Result.002 file - promoters60/1395027
gatttt

SEQ ID NO: 111161 - DNA, 7 bp, Unknown
  misc_feature (1)..( 7): Result.002 file - promoters60/1395027
cattttt

SEQ ID NO: 111162 - DNA, 7 bp, Unknown
  misc_feature (1)..( 7): Result.002 file - promoters60/1395027
cattttt

SEQ ID NO: 111163 - DNA, 13 bp, Unknown
  misc_feature (1)..( 13): Result.002 file - promoters60/1395027
agtttgaaatata

SEQ ID NO: 111164 - DNA, 13 bp, Unknown
  misc_feature (1)..( 13): Result.002 file - promoters60/1395027
ctaccaaaaaata

SEQ ID NO: 111165 - DNA, 13 bp, Unknown
  misc_feature (1)..( 13): Result.002 file - promoters60/1395027
aatacaaaatatg

SEQ ID NO: 111166 - DNA, 7 bp, Unknown
  misc_feature (1)..( 7): Result.002 file - promoters60/1395027
agaaaat

SEQ ID NO: 111167 - DNA, 7 bp, Unknown
  misc_feature (1)..( 7): Result.002 file - promoters60/1395027
agaaaat

SEQ ID NO: 111168 - DNA, 7 bp, Unknown
  misc_feature (1)..( 7): Result.002 file - promoters60/1395027
agccaat

SEQ ID NO: 111169 - DNA, 7 bp, Unknown
  misc_feature (1)..( 7): Result.002 file - promoters60/1395027
agcaaat

SEQ ID NO: 111170 - DNA, 7 bp, Unknown
  misc_feature (1)..( 7): Result.002 file - promoters60/1395027
ttaaagt

SEQ ID NO: 111171 - DNA, 7 bp, Unknown
  misc_feature (1)..( 7): Result.002 file - promoters60/1395027
ttatagt

SEQ ID NO: 111172 - DNA, 9 bp, Unknown
  misc_feature (1)..( 9): Result.002 file - promoters60/1395027
aaaactaat

SEQ ID NO: 111173 - DNA, 9 bp, Unknown
  misc_feature (1)..( 9): Result.002 file - promoters60/1395027
taaactaat

SEQ ID NO: 111174 - DNA, 9 bp, Unknown
  misc_feature (1)..( 9): Result.002 file - promoters60/1395027
taatctatg

SEQ ID NO: 111175 - DNA, 10 bp, Unknown
  misc_feature (1)..( 10): Result.002 file - promoters60/1395027
ataaattata

SEQ ID NO: 111176 - DNA, 10 bp, Unknown
  misc_feature (1)..( 10): Result.002 file - promoters60/1395027
ataaataata

SEQ ID NO: 111177 - DNA, 10 bp, Unknown
  misc_feature (1)..( 10): Result.002 file - promoters60/1395027
ggaaataatc

SEQ ID NO: 111178 - DNA, 7 bp, Unknown
  misc_feature (1)..( 7): Result.002 file - promoters60/1395027
ttggtct

SEQ ID NO: 111179 - DNA, 7 bp, Unknown
  misc_feature (1)..( 7): Result.002 file - promoters60/1395027
ttggtct

SEQ ID NO: 111180 - DNA, 6 bp, Unknown
  misc_feature (1)..( 6): Result.002 file - promoters60/1395027
aaataa

SEQ ID NO: 111181 - DNA, 6 bp, Unknown
  misc_feature (1)..( 6): Result.002 file - promoters60/1395027
aaataa

SEQ ID NO: 111182 - DNA, 7 bp, Unknown
  misc_feature (1)..( 7): Result.002 file - promoters60/1395027
atacaaa

SEQ ID NO: 111183 - DNA, 7 bp, Unknown
  misc_feature (1)..( 7): Result.002 file - promoters60/1395027
atacaaa

SEQ ID NO: 111184 - DNA, 7 bp, Unknown
  misc_feature (1)..( 7): Result.002 file - promoters60/1395027
tattatt

SEQ ID NO: 111185 - DNA, 7 bp, Unknown
  misc_feature (1)..( 7): Result.002 file - promoters60/1395027
tataatt

SEQ ID NO: 111186 - DNA, 8 bp, Unknown
  misc_feature (1)..( 8): Result.002 file - promoters60/1395027
acaatttg

SEQ ID NO: 111187 - DNA, 8 bp, Unknown
  misc_feature (1)..( 8): Result.002 file - promoters60/1395027
acaaattg

SEQ ID NO: 111188 - DNA, 7 bp, Unknown
  misc_feature (1)..( 7): Result.002 file - promoters60/1395066
gcaatag

SEQ ID NO: 111189 - DNA, 7 bp, Unknown
  misc_feature (1)..( 7): Result.002 file - promoters60/1395066
gcaatat

SEQ ID NO: 111190 - DNA, 7 bp, Unknown
  misc_feature (1)..( 7): Result.002 file - promoters60/1395066
tcaatag

SEQ ID NO: 111191 - DNA, 7 bp, Unknown
  misc_feature (1)..( 7): Result.002 file - promoters60/1395066
aaactat

SEQ ID NO: 111192 - DNA, 7 bp, Unknown
  misc_feature (1)..( 7): Result.002 file - promoters60/1395066
aaactat

SEQ ID NO: 111193 - DNA, 7 bp, Unknown
  misc_feature (1)..( 7): Result.002 file - promoters60/1395066
aaactac

SEQ ID NO: 111194 - DNA, 6 bp, Unknown
  misc_feature (1)..( 6): Result.002 file - promoters60/1395066
aaaata

SEQ ID NO: 111195 - DNA, 6 bp, Unknown
  misc_feature (1)..( 6): Result.002 file - promoters60/1395066
aaaata

SEQ ID NO: 111196 - DNA, 11 bp, Unknown
  misc_feature (1)..( 11): Result.002 file - promoters60/1395066
aaaaagtaact

SEQ ID NO: 111197 - DNA, 11 bp, Unknown
  misc_feature (1)..( 11): Result.002 file - promoters60/1395066
aaaaagagacc

SEQ ID NO: 111198 - DNA, 11 bp, Unknown
  misc_feature (1)..( 11): Result.002 file - promoters60/1395066
taaaagagacc

SEQ ID NO: 111199 - DNA, 6 bp, Unknown
  misc_feature (1)..( 6): Result.002 file - promoters60/1395066
gaattt

SEQ ID NO: 111200 - DNA, 6 bp, Unknown
  misc_feature (1)..( 6): Result.002 file - promoters60/1395066
gaattt

SEQ ID NO: 111201 - DNA, 8 bp, Unknown
  misc_feature (1)..( 8): Result.002 file - promoters60/1395066
atagttga

SEQ ID NO: 111202 - DNA, 8 bp, Unknown
  misc_feature (1)..( 8): Result.002 file - promoters60/1395066
aaagttga

SEQ ID NO: 111203 - DNA, 8 bp, Unknown
  misc_feature (1)..( 8): Result.002 file - promoters60/1395066
aaagttgt

SEQ ID NO: 111204 - DNA, 9 bp, Unknown
  misc_feature (1)..( 9): Result.002 file - promoters60/1395066
atttattta

SEQ ID NO: 111205 - DNA, 9 bp, Unknown
  misc_feature (1)..( 9): Result.002 file - promoters60/1395066
atttaatta

SEQ ID NO: 111206 - DNA, 7 bp, Unknown
  misc_feature (1)..( 7): Result.002 file - promoters60/1395066
actatag

SEQ ID NO: 111207 - DNA, 7 bp, Unknown
  misc_feature (1)..( 7): Result.002 file - promoters60/1395066
actatag

SEQ ID NO: 111208 - DNA, 7 bp, Unknown
  misc_feature (1)..( 7): Result.002 file - promoters60/1395066
tattctt

SEQ ID NO: 111209 - DNA, 7 bp, Unknown
  misc_feature (1)..( 7): Result.002 file - promoters60/1395066
tattctt

SEQ ID NO: 111210 - DNA, 7 bp, Unknown
  misc_feature (1)..( 7): Result.002 file - promoters60/1395066
tgtgaaa

SEQ ID NO: 111211 - DNA, 7 bp, Unknown
  misc_feature (1)..( 7): Result.002 file - promoters60/1395066
tgtgaaa

SEQ ID NO: 111212 - DNA, 9 bp, Unknown
  misc_feature (1)..( 9): Result.002 file - promoters60/1395066
tttattcaa

SEQ ID NO: 111213 - DNA, 9 bp, Unknown
  misc_feature (1)..( 9): Result.002 file - promoters60/1395066
tttattcaa

SEQ ID NO: 111214 - DNA, 6 bp, Unknown
  misc_feature (1)..( 6): Result.002 file - promoters60/1395066
ttatct

SEQ ID NO: 111215 - DNA, 6 bp, Unknown
  misc_feature (1)..( 6): Result.002 file - promoters60/1395066
ttatct

SEQ ID NO: 111216 - DNA, 9 bp, Unknown
  misc_feature (1)..( 9): Result.002 file - promoters60/1395066
gaaaactat

SEQ ID NO: 111217 - DNA, 9 bp, Unknown
  misc_feature (1)..( 9): Result.002 file - promoters60/1395066
gaaagctat

SEQ ID NO: 111218 - DNA, 10 bp, Unknown
  misc_feature (1)..( 10): Result.002 file - promoters60/1395066
ctagacatcc

SEQ ID NO: 111219 - DNA, 10 bp, Unknown
  misc_feature (1)..( 10): Result.002 file - promoters60/1395066
ctagacatcc

SEQ ID NO: 111220 - DNA, 15 bp, Unknown
  misc_feature (1)..( 15): Result.002 file - promoters60/1395066
ttagcttattgacgt

SEQ ID NO: 111221 - DNA, 15 bp, Unknown
  misc_feature (1)..( 15): Result.002 file - promoters60/1395066
ttagcttattgacgt

SEQ ID NO: 111222 - DNA, 7 bp, Unknown
  misc_feature (1)..( 7): Result.002 file - promoters60/1395066
tagtttg

SEQ ID NO: 111223 - DNA, 7 bp, Unknown
  misc_feature (1)..( 7): Result.002 file - promoters60/1395066
tagtttg

SEQ ID NO: 111224 - DNA, 15 bp, Unknown
  misc_feature (1)..( 15): Result.002 file - promoters60/1395066
tttgaaagatgcatc

SEQ ID NO: 111225 - DNA, 15 bp, Unknown
  misc_feature (1)..( 15): Result.002 file - promoters60/1395066
tttgaaagatgcatc

SEQ ID NO: 111226 - DNA, 28 bp, Unknown
  misc_feature (1)..( 28): Result.002 file - promoters60/1395066
agacctactcagataggtaaaagtagaa

SEQ ID NO: 111227 - DNA, 28 bp, Unknown
  misc_feature (1)..( 28): Result.002 file - promoters60/1395066
agaactactcagacaggtaaaagtagaa

SEQ ID NO: 111228 - DNA, 6 bp, Unknown
  misc_feature (1)..( 6): Result.002 file - promoters60/1395066
gtgtga

SEQ ID NO: 111229 - DNA, 6 bp, Unknown
  misc_feature (1)..( 6): Result.002 file - promoters60/1395066
gtgtga

SEQ ID NO: 111230 - DNA, 11 bp, Unknown
  misc_feature (1)..( 11): Result.002 file - promoters60/1395066
attatatttta

SEQ ID NO: 111231 - DNA, 11 bp, Unknown
  misc_feature (1)..( 11): Result.002 file - promoters60/1395066
attgtatgtta

SEQ ID NO: 111232 - DNA, 6 bp, Unknown
  misc_feature (1)..( 6): Result.002 file - promoters60/1395066
taaact

SEQ ID NO: 111233 - DNA, 6 bp, Unknown
  misc_feature (1)..( 6): Result.002 file - promoters60/1395066
taaact

SEQ ID NO: 111234 - DNA, 10 bp, Unknown
  misc_feature (1)..( 10): Result.002 file - promoters60/1395066
aagatatata

SEQ ID NO: 111235 - DNA, 10 bp, Unknown
  misc_feature (1)..( 10): Result.002 file - promoters60/1395066
aagatatata

SEQ ID NO: 111236 - DNA, 16 bp, Unknown
  misc_feature (1)..( 16): Result.002 file - promoters60/1395066
aatggaagataaaaac

SEQ ID NO: 111237 - DNA, 16 bp, Unknown
  misc_feature (1)..( 16): Result.002 file - promoters60/1395066
aatggtagataaaaac

SEQ ID NO: 111238 - DNA, 8 bp, Unknown
  misc_feature (1)..( 8): Result.002 file - promoters60/1395066
ttagtctg

SEQ ID NO: 111239 - DNA, 8 bp, Unknown
  misc_feature (1)..( 8): Result.002 file - promoters60/1395066
ttagtctg

SEQ ID NO: 111240 - DNA, 14 bp, Unknown
  misc_feature (1)..( 14): Result.002 file - promoters60/1395066
tttggaactgagta

SEQ ID NO: 111241 - DNA, 14 bp, Unknown
  misc_feature (1)..( 14): Result.002 file - promoters60/1395066
tttggaaatgagta

SEQ ID NO: 111242 - DNA, 22 bp, Unknown
  misc_feature (1)..( 22): Result.002 file - promoters60/1395066
agatatttgcatcttgagttac

SEQ ID NO: 111243 - DNA, 22 bp, Unknown
  misc_feature (1)..( 22): Result.002 file - promoters60/1395066
agatattggcatctagagttac

SEQ ID NO: 111244 - DNA, 9 bp, Unknown
  misc_feature (1)..( 9): Result.002 file - promoters60/1395066
taccatgga

SEQ ID NO: 111245 - DNA, 9 bp, Unknown
  misc_feature (1)..( 9): Result.002 file - promoters60/1395066
tactatgga

SEQ ID NO: 111246 - DNA, 8 bp, Unknown
  misc_feature (1)..( 8): Result.002 file - promoters60/1395066
caaaagtc

SEQ ID NO: 111247 - DNA, 8 bp, Unknown
  misc_feature (1)..( 8): Result.002 file - promoters60/1395066
caaaagtc

SEQ ID NO: 111248 - DNA, 13 bp, Unknown
  misc_feature (1)..( 13): Result.002 file - promoters60/1395066
gtgaaaatgctac

SEQ ID NO: 111249 - DNA, 13 bp, Unknown
  misc_feature (1)..( 13): Result.002 file - promoters60/1395066
gtgaaaatgttac

SEQ ID NO: 111250 - DNA, 11 bp, Unknown
  misc_feature (1)..( 11): Result.002 file - promoters60/1395066
aagcatttaca

SEQ ID NO: 111251 - DNA, 11 bp, Unknown
  misc_feature (1)..( 11): Result.002 file - promoters60/1395066
aagcatttaca

SEQ ID NO: 111252 - DNA, 10 bp, Unknown
  misc_feature (1)..( 10): Result.002 file - promoters60/1395066
cggtcaaaaa

SEQ ID NO: 111253 - DNA, 10 bp, Unknown
  misc_feature (1)..( 10): Result.002 file - promoters60/1395066
cggtaaaaaa

SEQ ID NO: 111254 - DNA, 12 bp, Unknown
  misc_feature (1)..( 12): Result.002 file - promoters60/1395095
actcccaaaaat

SEQ ID NO: 111255 - DNA, 12 bp, Unknown
  misc_feature (1)..( 12): Result.002 file - promoters60/1395095
actcctaaaata

SEQ ID NO: 111256 - DNA, 12 bp, Unknown
  misc_feature (1)..( 12): Result.002 file - promoters60/1395095
cagagtaaaatg

SEQ ID NO: 111257 - DNA, 12 bp, Unknown
  misc_feature (1)..( 12): Result.002 file - promoters60/1395095
taggagaaaatg

SEQ ID NO: 111258 - DNA, 10 bp, Unknown
  misc_feature (1)..( 10): Result.002 file - promoters60/1395095
aaaaataaga

SEQ ID NO: 111259 - DNA, 10 bp, Unknown
  misc_feature (1)..( 10): Result.002 file - promoters60/1395095
taaaataatc

SEQ ID NO: 111260 - DNA, 10 bp, Unknown
  misc_feature (1)..( 10): Result.002 file - promoters60/1395095
gaaaatgatc

SEQ ID NO: 111261 - DNA, 10 bp, Unknown
  misc_feature (1)..( 10): Result.002 file - promoters60/1395095
taaaatgcga

SEQ ID NO: 111262 - DNA, 7 bp, Unknown
  misc_feature (1)..( 7): Result.002 file - promoters60/1395095
catagat

SEQ ID NO: 111263 - DNA, 7 bp, Unknown
  misc_feature (1)..( 7): Result.002 file - promoters60/1395095
aatagat

SEQ ID NO: 111264 - DNA, 7 bp, Unknown
  misc_feature (1)..( 7): Result.002 file - promoters60/1395095
aatcgat

SEQ ID NO: 111265 - DNA, 9 bp, Unknown
  misc_feature (1)..( 9): Result.002 file - promoters60/1395095
atttatttc

SEQ ID NO: 111266 - DNA, 9 bp, Unknown
  misc_feature (1)..( 9): Result.002 file - promoters60/1395095
ttttctttc

SEQ ID NO: 111267 - DNA, 9 bp, Unknown
  misc_feature (1)..( 9): Result.002 file - promoters60/1395095
ctttgtttt

SEQ ID NO: 111268 - DNA, 9 bp, Unknown
  misc_feature (1)..( 9): Result.002 file - promoters60/1395095
ctttgtcct

SEQ ID NO: 111269 - DNA, 8 bp, Unknown
  misc_feature (1)..( 8): Result.002 file - promoters60/1395095
aaaaaaag

SEQ ID NO: 111270 - DNA, 8 bp, Unknown
  misc_feature (1)..( 8): Result.002 file - promoters60/1395095
caaagaag

SEQ ID NO: 111271 - DNA, 8 bp, Unknown
  misc_feature (1)..( 8): Result.002 file - promoters60/1395095
gaaaaaaa

SEQ ID NO: 111272 - DNA, 11 bp, Unknown
  misc_feature (1)..( 11): Result.002 file - promoters60/1395095
caacttttttt

SEQ ID NO: 111273 - DNA, 11 bp, Unknown
  misc_feature (1)..( 11): Result.002 file - promoters60/1395095
caaattttttt

SEQ ID NO: 111274 - DNA, 11 bp, Unknown
  misc_feature (1)..( 11): Result.002 file - promoters60/1395095
tacatttttta

SEQ ID NO: 111275 - DNA, 8 bp, Unknown
  misc_feature (1)..( 8): Result.002 file - promoters60/1395095
caagtctt

SEQ ID NO: 111276 - DNA, 8 bp, Unknown
  misc_feature (1)..( 8): Result.002 file - promoters60/1395095
aaagtctt

SEQ ID NO: 111277 - DNA, 8 bp, Unknown
  misc_feature (1)..( 8): Result.002 file - promoters60/1395095
aaattctg

SEQ ID NO: 111278 - DNA, 8 bp, Unknown
  misc_feature (1)..( 8): Result.002 file - promoters60/1395095
aaaatctc

SEQ ID NO: 111279 - DNA, 8 bp, Unknown
  misc_feature (1)..( 8): Result.002 file - promoters60/1395095
catatttt

SEQ ID NO: 111280 - DNA, 8 bp, Unknown
  misc_feature (1)..( 8): Result.002 file - promoters60/1395095
catttttt

SEQ ID NO: 111281 - DNA, 8 bp, Unknown
  misc_feature (1)..( 8): Result.002 file - promoters60/1395095
aatttttt

SEQ ID NO: 111282 - DNA, 8 bp, Unknown
  misc_feature (1)..( 8): Result.002 file - promoters60/1395095
aaaattca

SEQ ID NO: 111283 - DNA, 8 bp, Unknown
  misc_feature (1)..( 8): Result.002 file - promoters60/1395095
aaaattct

SEQ ID NO: 111284 - DNA, 8 bp, Unknown
  misc_feature (1)..( 8): Result.002 file - promoters60/1395095
taaagtct

SEQ ID NO: 111285 - DNA, 8 bp, Unknown
  misc_feature (1)..( 8): Result.002 file - promoters60/1395095
aaaaatct

SEQ ID NO: 111286 - DNA, 8 bp, Unknown
  misc_feature (1)..( 8): Result.002 file - promoters60/1395095
tataaatt

SEQ ID NO: 111287 - DNA, 8 bp, Unknown
  misc_feature (1)..( 8): Result.002 file - promoters60/1395095
tataaacc

SEQ ID NO: 111288 - DNA, 8 bp, Unknown
  misc_feature (1)..( 8): Result.002 file - promoters60/1395095
cataaatg

SEQ ID NO: 111289 - DNA, 8 bp, Unknown
  misc_feature (1)..( 8): Result.002 file - promoters60/1395095
aataaaaa

SEQ ID NO: 111290 - DNA, 7 bp, Unknown
  misc_feature (1)..( 7): Result.002 file - promoters60/1395215
aatgaca

SEQ ID NO: 111291 - DNA, 7 bp, Unknown
  misc_feature (1)..( 7): Result.002 file - promoters60/1395215
aattaca

SEQ ID NO: 111292 - DNA, 6 bp, Unknown
  misc_feature (1)..( 6): Result.002 file - promoters60/1395215
attcaa

SEQ ID NO: 111293 - DNA, 6 bp, Unknown
  misc_feature (1)..( 6): Result.002 file - promoters60/1395215
attcaa

SEQ ID NO: 111294 - DNA, 7 bp, Unknown
  misc_feature (1)..( 7): Result.002 file - promoters60/1395215
aaaattg

SEQ ID NO: 111295 - DNA, 7 bp, Unknown
  misc_feature (1)..( 7): Result.002 file - promoters60/1395215
aaagttg

SEQ ID NO: 111296 - DNA, 8 bp, Unknown
  misc_feature (1)..( 8): Result.002 file - promoters60/1395215
ttgttagt

SEQ ID NO: 111297 - DNA, 8 bp, Unknown
  misc_feature (1)..( 8): Result.002 file - promoters60/1395215
ttgctagt

SEQ ID NO: 111298 - DNA, 8 bp, Unknown
  misc_feature (1)..( 8): Result.002 file - promoters60/1395215
ttgttatc

SEQ ID NO: 111299 - DNA, 8 bp, Unknown
  misc_feature (1)..( 8): Result.002 file - promoters60/1395215
taatctcc

SEQ ID NO: 111300 - DNA, 8 bp, Unknown
  misc_feature (1)..( 8): Result.002 file - promoters60/1395215
taatttcc

SEQ ID NO: 111301 - DNA, 8 bp, Unknown
  misc_feature (1)..( 8): Result.002 file - promoters60/1395215
taaacaga

SEQ ID NO: 111302 - DNA, 8 bp, Unknown
  misc_feature (1)..( 8): Result.002 file - promoters60/1395215
taaaaaga

SEQ ID NO: 111303 - DNA, 6 bp, Unknown
  misc_feature (1)..( 6): Result.002 file - promoters60/1395215
gagaac

SEQ ID NO: 111304 - DNA, 6 bp, Unknown
  misc_feature (1)..( 6): Result.002 file - promoters60/1395215
gagaac

SEQ ID NO: 111305 - DNA, 8 bp, Unknown
  misc_feature (1)..( 8): Result.002 file - promoters60/1395215
aaaacaac

SEQ ID NO: 111306 - DNA, 8 bp, Unknown
  misc_feature (1)..( 8): Result.002 file - promoters60/1395215
gaaacaaa

SEQ ID NO: 111307 - DNA, 8 bp, Unknown
  misc_feature (1)..( 8): Result.002 file - promoters60/1395215
gaaagaaa

SEQ ID NO: 111308 - DNA, 6 bp, Unknown
  misc_feature (1)..( 6): Result.002 file - promoters60/1395215
tattaa

SEQ ID NO: 111309 - DNA, 6 bp, Unknown
  misc_feature (1)..( 6): Result.002 file - promoters60/1395215
tattaa

SEQ ID NO: 111310 - DNA, 6 bp, Unknown
  misc_feature (1)..( 6): Result.002 file - promoters60/1395215
ttatct

SEQ ID NO: 111311 - DNA, 6 bp, Unknown
  misc_feature (1)..( 6): Result.002 file - promoters60/1395215
ttatct

SEQ ID NO: 111312 - DNA, 6 bp, Unknown
  misc_feature (1)..( 6): Result.002 file - promoters60/1395215
attgtg

SEQ ID NO: 111313 - DNA, 6 bp, Unknown
  misc_feature (1)..( 6): Result.002 file - promoters60/1395215
attgtg

SEQ ID NO: 111314 - DNA, 6 bp, Unknown
  misc_feature (1)..( 6): Result.002 file - promoters60/1395215
taataa

SEQ ID NO: 111315 - DNA, 6 bp, Unknown
  misc_feature (1)..( 6): Result.002 file - promoters60/1395215
taataa

SEQ ID NO: 111316 - DNA, 6 bp, Unknown
  misc_feature (1)..( 6): Result.002 file - promoters60/1395215
agtaaa

SEQ ID NO: 111317 - DNA, 6 bp, Unknown
  misc_feature (1)..( 6): Result.002 file - promoters60/1395215
agtaaa

SEQ ID NO: 111318 - DNA, 7 bp, Unknown
  misc_feature (1)..( 7): Result.002 file - promoters60/1395215
aatcggg

SEQ ID NO: 111319 - DNA, 7 bp, Unknown
  misc_feature (1)..( 7): Result.002 file - promoters60/1395215
aattggg

SEQ ID NO: 111320 - DNA, 10 bp, Unknown
  misc_feature (1)..( 10): Result.002 file - promoters60/1395215
ggaaaagaaa

SEQ ID NO: 111321 - DNA, 10 bp, Unknown
  misc_feature (1)..( 10): Result.002 file - promoters60/1395215
ggaaatgaaa

SEQ ID NO: 111322 - DNA, 7 bp, Unknown
  misc_feature (1)..( 7): Result.002 file - promoters60/1395215
cccacta

SEQ ID NO: 111323 - DNA, 7 bp, Unknown
  misc_feature (1)..( 7): Result.002 file - promoters60/1395215
cccacta

SEQ ID NO: 111324 - DNA, 9 bp, Unknown
  misc_feature (1)..( 9): Result.002 file - promoters60/1395215
aaagaaaag

SEQ ID NO: 111325 - DNA, 9 bp, Unknown
  misc_feature (1)..( 9): Result.002 file - promoters60/1395215
aaagtaaag

SEQ ID NO: 111326 - DNA, 7 bp, Unknown
  misc_feature (1)..( 7): Result.002 file - promoters60/1395215
gtatata

SEQ ID NO: 111327 - DNA, 7 bp, Unknown
  misc_feature (1)..( 7): Result.002 file - promoters60/1395215
gtatata

SEQ ID NO: 111328 - DNA, 7 bp, Unknown
  misc_feature (1)..( 7): Result.002 file - promoters60/1395254
ttaggaa

SEQ ID NO: 111329 - DNA, 7 bp, Unknown
  misc_feature (1)..( 7): Result.002 file - promoters60/1395254
ttaagaa

SEQ ID NO: 111330 - DNA, 7 bp, Unknown
  misc_feature (1)..( 7): Result.002 file - promoters60/1395254
tttgctt

SEQ ID NO: 111331 - DNA, 7 bp, Unknown
  misc_feature (1)..( 7): Result.002 file - promoters60/1395254
tttgctt

SEQ ID NO: 111332 - DNA, 10 bp, Unknown
  misc_feature (1)..( 10): Result.002 file - promoters60/1395254
actttttaaa

SEQ ID NO: 111333 - DNA, 10 bp, Unknown
  misc_feature (1)..( 10): Result.002 file - promoters60/1395254
acttttgaaa

SEQ ID NO: 111334 - DNA, 8 bp, Unknown
  misc_feature (1)..( 8): Result.002 file - promoters60/1395254
atttttat

SEQ ID NO: 111335 - DNA, 8 bp, Unknown
  misc_feature (1)..( 8): Result.002 file - promoters60/1395254
attcttat

SEQ ID NO: 111336 - DNA, 9 bp, Unknown
  misc_feature (1)..( 9): Result.002 file - promoters60/1395254
ttttctatt

SEQ ID NO: 111337 - DNA, 9 bp, Unknown
  misc_feature (1)..( 9): Result.002 file - promoters60/1395254
ttttttatt

SEQ ID NO: 111338 - DNA, 9 bp, Unknown
  misc_feature (1)..( 9): Result.002 file - promoters60/1395254
cgtttaatt

SEQ ID NO: 111339 - DNA, 8 bp, Unknown
  misc_feature (1)..( 8): Result.002 file - promoters60/1395254
tctcgtta

SEQ ID NO: 111340 - DNA, 8 bp, Unknown
  misc_feature (1)..( 8): Result.002 file - promoters60/1395254
tctcttta

SEQ ID NO: 111341 - DNA, 6 bp, Unknown
  misc_feature (1)..( 6): Result.002 file - promoters60/1395254
atcttg

SEQ ID NO: 111342 - DNA, 6 bp, Unknown
  misc_feature (1)..( 6): Result.002 file - promoters60/1395254
atcttg

SEQ ID NO: 111343 - DNA, 7 bp, Unknown
  misc_feature (1)..( 7): Result.002 file - promoters60/1395254
ttgtttg

SEQ ID NO: 111344 - DNA, 7 bp, Unknown
  misc_feature (1)..( 7): Result.002 file - promoters60/1395254
ttgtttg

SEQ ID NO: 111345 - DNA, 8 bp, Unknown
  misc_feature (1)..( 8): Result.002 file - promoters60/1395254
gagctctc

SEQ ID NO: 111346 - DNA, 8 bp, Unknown
  misc_feature (1)..( 8): Result.002 file - promoters60/1395254
gagatctc

SEQ ID NO: 111347 - DNA, 6 bp, Unknown
  misc_feature (1)..( 6): Result.002 file - promoters60/1395254
tttata

SEQ ID NO: 111348 - DNA, 6 bp, Unknown
  misc_feature (1)..( 6): Result.002 file - promoters60/1395254
tttata

SEQ ID NO: 111349 - DNA, 7 bp, Unknown
  misc_feature (1)..( 7): Result.002 file - promoters60/1395254
taattta

SEQ ID NO: 111350 - DNA, 7 bp, Unknown
  misc_feature (1)..( 7): Result.002 file - promoters60/1395254
taagtta

SEQ ID NO: 111351 - DNA, 7 bp, Unknown
  misc_feature (1)..( 7): Result.002 file - promoters60/1395254
gaaatga

SEQ ID NO: 111352 - DNA, 7 bp, Unknown
  misc_feature (1)..( 7): Result.002 file - promoters60/1395254
gaagtga

SEQ ID NO: 111353 - DNA, 9 bp, Unknown
  misc_feature (1)..( 9): Result.002 file - promoters60/1395254
tctatttaa

SEQ ID NO: 111354 - DNA, 9 bp, Unknown
  misc_feature (1)..( 9): Result.002 file - promoters60/1395254
tctaattaa

SEQ ID NO: 111355 - DNA, 6 bp, Unknown
  misc_feature (1)..( 6): Result.002 file - promoters60/1395254
aaacag

SEQ ID NO: 111356 - DNA, 6 bp, Unknown
  misc_feature (1)..( 6): Result.002 file - promoters60/1395254
aaacag

SEQ ID NO: 111357 - DNA, 6 bp, Unknown
  misc_feature (1)..( 6): Result.002 file - promoters60/1395254
tccact

SEQ ID NO: 111358 - DNA, 6 bp, Unknown
  misc_feature (1)..( 6): Result.002 file - promoters60/1395254
tccact

SEQ ID NO: 111359 - DNA, 8 bp, Unknown
  misc_feature (1)..( 8): Result.002 file - promoters60/1395254
attaatga

SEQ ID NO: 111360 - DNA, 8 bp, Unknown
  misc_feature (1)..( 8): Result.002 file - promoters60/1395254
attgatga

SEQ ID NO: 111361 - DNA, 7 bp, Unknown
  misc_feature (1)..( 7): Result.002 file - promoters60/1395254
taacaga

SEQ ID NO: 111362 - DNA, 7 bp, Unknown
  misc_feature (1)..( 7): Result.002 file - promoters60/1395254
taacaga

SEQ ID NO: 111363 - DNA, 6 bp, Unknown
  misc_feature (1)..( 6): Result.002 file - promoters60/1395254
cgggtc

SEQ ID NO: 111364 - DNA, 6 bp, Unknown
  misc_feature (1)..( 6): Result.002 file - promoters60/1395254
cgggtc

SEQ ID NO: 111365 - DNA, 10 bp, Unknown
  misc_feature (1)..( 10): Result.002 file - promoters60/1395485
ataataattt

SEQ ID NO: 111366 - DNA, 10 bp, Unknown
  misc_feature (1)..( 10): Result.002 file - promoters60/1395485
atagtaattt

SEQ ID NO: 111367 - DNA, 12 bp, Unknown
  misc_feature (1)..( 12): Result.002 file - promoters60/1395485
taatctttttgt

SEQ ID NO: 111368 - DNA, 12 bp, Unknown
  misc_feature (1)..( 12): Result.002 file - promoters60/1395485
atgacttcttgg

SEQ ID NO: 111369 - DNA, 12 bp, Unknown
  misc_feature (1)..( 12): Result.002 file - promoters60/1395485
taagctttctgt

SEQ ID NO: 111370 - DNA, 7 bp, Unknown
  misc_feature (1)..( 7): Result.002 file - promoters60/1395485
catagat

SEQ ID NO: 111371 - DNA, 7 bp, Unknown
  misc_feature (1)..( 7): Result.002 file - promoters60/1395485
catcgat

SEQ ID NO: 111372 - DNA, 7 bp, Unknown
  misc_feature (1)..( 7): Result.002 file - promoters60/1395485
atcattt

SEQ ID NO: 111373 - DNA, 7 bp, Unknown
  misc_feature (1)..( 7): Result.002 file - promoters60/1395485
atcgttt

SEQ ID NO: 111374 - DNA, 8 bp, Unknown
  misc_feature (1)..( 8): Result.002 file - promoters60/1395485
actaaatt

SEQ ID NO: 111375 - DNA, 8 bp, Unknown
  misc_feature (1)..( 8): Result.002 file - promoters60/1395485
actacatt

SEQ ID NO: 111376 - DNA, 8 bp, Unknown
  misc_feature (1)..( 8): Result.002 file - promoters60/1395485
aggccctt

SEQ ID NO: 111377 - DNA, 8 bp, Unknown
  misc_feature (1)..( 8): Result.002 file - promoters60/1395485
aggcactt

SEQ ID NO: 111378 - DNA, 7 bp, Unknown
  misc_feature (1)..( 7): Result.002 file - promoters60/1395485
gaaaaat

SEQ ID NO: 111379 - DNA, 7 bp, Unknown
  misc_feature (1)..( 7): Result.002 file - promoters60/1395485
gaacaat

SEQ ID NO: 111380 - DNA, 8 bp, Unknown
  misc_feature (1)..( 8): Result.002 file - promoters60/1395485
tgtttact

SEQ ID NO: 111381 - DNA, 8 bp, Unknown
  misc_feature (1)..( 8): Result.002 file - promoters60/1395485
tgtttact

SEQ ID NO: 111382 - DNA, 8 bp, Unknown
  misc_feature (1)..( 8): Result.002 file - promoters60/1395485
tgttaatc

SEQ ID NO: 111383 - DNA, 8 bp, Unknown
  misc_feature (1)..( 8): Result.002 file - promoters60/1395485
tgtttatc

SEQ ID NO: 111384 - DNA, 8 bp, Unknown
  misc_feature (1)..( 8): Result.002 file - promoters60/1395485
aaagtctc

SEQ ID NO: 111385 - DNA, 8 bp, Unknown
  misc_feature (1)..( 8): Result.002 file - promoters60/1395485
aaaatctc

SEQ ID NO: 111386 - DNA, 6 bp, Unknown
  misc_feature (1)..( 6): Result.002 file - promoters60/1395485
cttctt

SEQ ID NO: 111387 - DNA, 6 bp, Unknown
  misc_feature (1)..( 6): Result.002 file - promoters60/1395485
cttctt

SEQ ID NO: 111388 - DNA, 6 bp, Unknown
  misc_feature (1)..( 6): Result.002 file - promoters60/1395485
catctc

SEQ ID NO: 111389 - DNA, 6 bp, Unknown
  misc_feature (1)..( 6): Result.002 file - promoters60/1395485
catctc

SEQ ID NO: 111390 - DNA, 6 bp, Unknown
  misc_feature (1)..( 6): Result.002 file - promoters60/1395485
agtttt

SEQ ID NO: 111391 - DNA, 6 bp, Unknown
  misc_feature (1)..( 6): Result.002 file - promoters60/1395485
agtttt

SEQ ID NO: 111392 - DNA, 7 bp, Unknown
  misc_feature (1)..( 7): Result.002 file - promoters60/1395485
acataaa

SEQ ID NO: 111393 - DNA, 7 bp, Unknown
  misc_feature (1)..( 7): Result.002 file - promoters60/1395485
acaaaaa

SEQ ID NO: 111394 - DNA, 7 bp, Unknown
  misc_feature (1)..( 7): Result.002 file - promoters60/1395568
gagaaat

SEQ ID NO: 111395 - DNA, 7 bp, Unknown
  misc_feature (1)..( 7): Result.002 file - promoters60/1395568
gagaaat

SEQ ID NO: 111396 - DNA, 7 bp, Unknown
  misc_feature (1)..( 7): Result.002 file - promoters60/1395568
aaaagga

SEQ ID NO: 111397 - DNA, 7 bp, Unknown
  misc_feature (1)..( 7): Result.002 file - promoters60/1395568
aaaagga

SEQ ID NO: 111398 - DNA, 9 bp, Unknown
  misc_feature (1)..( 9): Result.002 file - promoters60/1395568
tgtatataa

SEQ ID NO: 111399 - DNA, 9 bp, Unknown
  misc_feature (1)..( 9): Result.002 file - promoters60/1395568
tgtaaataa

SEQ ID NO: 111400 - DNA, 8 bp, Unknown
  misc_feature (1)..( 8): Result.002 file - promoters60/1395568
cagtctaa

SEQ ID NO: 111401 - DNA, 8 bp, Unknown
  misc_feature (1)..( 8): Result.002 file - promoters60/1395568
cagtataa

SEQ ID NO: 111402 - DNA, 6 bp, Unknown
  misc_feature (1)..( 6): Result.002 file - promoters60/1395568
aaatgt

SEQ ID NO: 111403 - DNA, 6 bp, Unknown
  misc_feature (1)..( 6): Result.002 file - promoters60/1395568
aaatgt

SEQ ID NO: 111404 - DNA, 8 bp, Unknown
  misc_feature (1)..( 8): Result.002 file - promoters60/1395568
ggcggcga

SEQ ID NO: 111405 - DNA, 8 bp, Unknown
  misc_feature (1)..( 8): Result.002 file - promoters60/1395568
ggcggcga

SEQ ID NO: 111406 - DNA, 7 bp, Unknown
  misc_feature (1)..( 7): Result.002 file - promoters60/1395568
gagccaa

SEQ ID NO: 111407 - DNA, 7 bp, Unknown
  misc_feature (1)..( 7): Result.002 file - promoters60/1395568
gagtcaa

SEQ ID NO: 111408 - DNA, 8 bp, Unknown
  misc_feature (1)..( 8): Result.002 file - promoters60/1395568
atctatat

SEQ ID NO: 111409 - DNA, 8 bp, Unknown
  misc_feature (1)..( 8): Result.002 file - promoters60/1395568
atctctat

SEQ ID NO: 111410 - DNA, 6 bp, Unknown
  misc_feature (1)..( 6): Result.002 file - promoters60/1395568
gataat

SEQ ID NO: 111411 - DNA, 6 bp, Unknown
  misc_feature (1)..( 6): Result.002 file - promoters60/1395568
gataat

SEQ ID NO: 111412 - DNA, 7 bp, Unknown
  misc_feature (1)..( 7): Result.002 file - promoters60/1395636
tttttac

SEQ ID NO: 111413 - DNA, 7 bp, Unknown
  misc_feature (1)..( 7): Result.002 file - promoters60/1395636
gttttac

SEQ ID NO: 111414 - DNA, 7 bp, Unknown
  misc_feature (1)..( 7): Result.002 file - promoters60/1395636
tttttat

SEQ ID NO: 111415 - DNA, 7 bp, Unknown
  misc_feature (1)..( 7): Result.002 file - promoters60/1395636
tttttat

SEQ ID NO: 111416 - DNA, 13 bp, Unknown
  misc_feature (1)..( 13): Result.002 file - promoters60/1395636
ctcctataaattg

SEQ ID NO: 111417 - DNA, 13 bp, Unknown
  misc_feature (1)..( 13): Result.002 file - promoters60/1395636
ggtgtataaattg

SEQ ID NO: 111418 - DNA, 13 bp, Unknown
  misc_feature (1)..( 13): Result.002 file - promoters60/1395636
ttagtataaataa

SEQ ID NO: 111419 - DNA, 13 bp, Unknown
  misc_feature (1)..( 13): Result.002 file - promoters60/1395636
ctcttatatattc

SEQ ID NO: 111420 - DNA, 11 bp, Unknown
  misc_feature (1)..( 11): Result.002 file - promoters60/1395636
aaatatgaaat

SEQ ID NO: 111421 - DNA, 11 bp, Unknown
  misc_feature (1)..( 11): Result.002 file - promoters60/1395636
aaatttgacct

SEQ ID NO: 111422 - DNA, 11 bp, Unknown
  misc_feature (1)..( 11): Result.002 file - promoters60/1395636
atataggaata

SEQ ID NO: 111423 - DNA, 11 bp, Unknown
  misc_feature (1)..( 11): Result.002 file - promoters60/1395636
agatagtaata

SEQ ID NO: 111424 - DNA, 8 bp, Unknown
  misc_feature (1)..( 8): Result.002 file - promoters60/1395781
taaaaaat

SEQ ID NO: 111425 - DNA, 8 bp, Unknown
  misc_feature (1)..( 8): Result.002 file - promoters60/1395781
taaaaaaa

SEQ ID NO: 111426 - DNA, 8 bp, Unknown
  misc_feature (1)..( 8): Result.002 file - promoters60/1395781
aaaagaat

SEQ ID NO: 111427 - DNA, 8 bp, Unknown
  misc_feature (1)..( 8): Result.002 file - promoters60/1395781
tgaaaaat

SEQ ID NO: 111428 - DNA, 10 bp, Unknown
  misc_feature (1)..( 10): Result.002 file - promoters60/1395781
tcaaaaatta

SEQ ID NO: 111429 - DNA, 10 bp, Unknown
  misc_feature (1)..( 10): Result.002 file - promoters60/1395781
tcaaaaatct

SEQ ID NO: 111430 - DNA, 10 bp, Unknown
  misc_feature (1)..( 10): Result.002 file - promoters60/1395781
aagaaaattg

SEQ ID NO: 111431 - DNA, 10 bp, Unknown
  misc_feature (1)..( 10): Result.002 file - promoters60/1395781
gacaaagtga

SEQ ID NO: 111432 - DNA, 10 bp, Unknown
  misc_feature (1)..( 10): Result.002 file - promoters60/1395781
tattattgtc

SEQ ID NO: 111433 - DNA, 10 bp, Unknown
  misc_feature (1)..( 10): Result.002 file - promoters60/1395781
catttttgtc

SEQ ID NO: 111434 - DNA, 10 bp, Unknown
  misc_feature (1)..( 10): Result.002 file - promoters60/1395781
ttaatttgtc

SEQ ID NO: 111435 - DNA, 10 bp, Unknown
  misc_feature (1)..( 10): Result.002 file - promoters60/1395781
catttttgtg

SEQ ID NO: 111436 - DNA, 10 bp, Unknown
  misc_feature (1)..( 10): Result.002 file - promoters60/1395781
aaaatgtcgc

SEQ ID NO: 111437 - DNA, 10 bp, Unknown
  misc_feature (1)..( 10): Result.002 file - promoters60/1395781
taaatgttag

SEQ ID NO: 111438 - DNA, 10 bp, Unknown
  misc_feature (1)..( 10): Result.002 file - promoters60/1395781
taaatgatgc

SEQ ID NO: 111439 - DNA, 10 bp, Unknown
  misc_feature (1)..( 10): Result.002 file - promoters60/1395781
agaattttag

SEQ ID NO: 111440 - DNA, 11 bp, Unknown
  misc_feature (1)..( 11): Result.002 file - promoters60/1395781
tctatataaac

SEQ ID NO: 111441 - DNA, 11 bp, Unknown
  misc_feature (1)..( 11): Result.002 file - promoters60/1395781
tctatataaac

SEQ ID NO: 111442 - DNA, 11 bp, Unknown
  misc_feature (1)..( 11): Result.002 file - promoters60/1395781
tagctataaaa

SEQ ID NO: 111443 - DNA, 11 bp, Unknown
  misc_feature (1)..( 11): Result.002 file - promoters60/1395781
cctacaaaatc

SEQ ID NO: 111444 - DNA, 12 bp, Unknown
  misc_feature (1)..( 12): Result.002 file - promoters60/1395781
atggatctacac

SEQ ID NO: 111445 - DNA, 12 bp, Unknown
  misc_feature (1)..( 12): Result.002 file - promoters60/1395781
cttgatgtacat

SEQ ID NO: 111446 - DNA, 12 bp, Unknown
  misc_feature (1)..( 12): Result.002 file - promoters60/1395781
cttgatgtcttt

SEQ ID NO: 111447 - DNA, 12 bp, Unknown
  misc_feature (1)..( 12): Result.002 file - promoters60/1395781
gtggtcgtacat

SEQ ID NO: 111448 - DNA, 15 bp, Unknown
  misc_feature (1)..( 15): Result.002 file - promoters60/1395824
aatattttcaaaatc

SEQ ID NO: 111449 - DNA, 15 bp, Unknown
  misc_feature (1)..( 15): Result.002 file - promoters60/1395824
aataattttaaaaaa

SEQ ID NO: 111450 - DNA, 15 bp, Unknown
  misc_feature (1)..( 15): Result.002 file - promoters60/1395824
aggttaatcacaatg

SEQ ID NO: 111451 - DNA, 16 bp, Unknown
  misc_feature (1)..( 16): Result.002 file - promoters60/1395824
tacatgattaaacatt

SEQ ID NO: 111452 - DNA, 16 bp, Unknown
  misc_feature (1)..( 16): Result.002 file - promoters60/1395824
caaataagcaaaaatg

SEQ ID NO: 111453 - DNA, 10 bp, Unknown
  misc_feature (1)..( 10): Result.002 file - promoters60/1395824
aacaatcatc

SEQ ID NO: 111454 - DNA, 10 bp, Unknown
  misc_feature (1)..( 10): Result.002 file - promoters60/1395824
cacaaacata

SEQ ID NO: 111455 - DNA, 10 bp, Unknown
  misc_feature (1)..( 10): Result.002 file - promoters60/1395824
ttcaaatata

SEQ ID NO: 111456 - DNA, 10 bp, Unknown
  misc_feature (1)..( 10): Result.002 file - promoters60/1395824
ttcagataaa

SEQ ID NO: 111457 - DNA, 10 bp, Unknown
  misc_feature (1)..( 10): Result.002 file - promoters60/1395824
gacagacaga

SEQ ID NO: 111458 - DNA, 12 bp, Unknown
  misc_feature (1)..( 12): Result.002 file - promoters60/1395824
tagcagtaatca

SEQ ID NO: 111459 - DNA, 12 bp, Unknown
  misc_feature (1)..( 12): Result.002 file - promoters60/1395824
atgcaataaacg

SEQ ID NO: 111460 - DNA, 12 bp, Unknown
  misc_feature (1)..( 12): Result.002 file - promoters60/1395824
aagcaataaaag

SEQ ID NO: 111461 - DNA, 12 bp, Unknown
  misc_feature (1)..( 12): Result.002 file - promoters60/1395824
atgcgataaacg

SEQ ID NO: 111462 - DNA, 13 bp, Unknown
  misc_feature (1)..( 13): Result.002 file - promoters60/1395824
ttagttacataat

SEQ ID NO: 111463 - DNA, 13 bp, Unknown
  misc_feature (1)..( 13): Result.002 file - promoters60/1395824
aaacatacttaaa

SEQ ID NO: 111464 - DNA, 13 bp, Unknown
  misc_feature (1)..( 13): Result.002 file - promoters60/1395824
ctagtcacaaaat

SEQ ID NO: 111465 - DNA, 13 bp, Unknown
  misc_feature (1)..( 13): Result.002 file - promoters60/1395824
ctaatcacctcgt

SEQ ID NO: 111466 - DNA, 10 bp, Unknown
  misc_feature (1)..( 10): Result.002 file - promoters60/1395824
ttcaaatata

SEQ ID NO: 111467 - DNA, 10 bp, Unknown
  misc_feature (1)..( 10): Result.002 file - promoters60/1395824
gagaaagata

SEQ ID NO: 111468 - DNA, 10 bp, Unknown
  misc_feature (1)..( 10): Result.002 file - promoters60/1395824
cacaaacata

SEQ ID NO: 111469 - DNA, 10 bp, Unknown
  misc_feature (1)..( 10): Result.002 file - promoters60/1395824
ttcagataaa

SEQ ID NO: 111470 - DNA, 8 bp, Unknown
  misc_feature (1)..( 8): Result.002 file - promoters60/1395832
ttatataa

SEQ ID NO: 111471 - DNA, 8 bp, Unknown
  misc_feature (1)..( 8): Result.002 file - promoters60/1395832
ttagataa

SEQ ID NO: 111472 - DNA, 8 bp, Unknown
  misc_feature (1)..( 8): Result.002 file - promoters60/1395832
gtatataa

SEQ ID NO: 111473 - DNA, 12 bp, Unknown
  misc_feature (1)..( 12): Result.002 file - promoters60/1395832
tgaaaaagtaat

SEQ ID NO: 111474 - DNA, 12 bp, Unknown
  misc_feature (1)..( 12): Result.002 file - promoters60/1395832
tcaaaaggtatc

SEQ ID NO: 111475 - DNA, 12 bp, Unknown
  misc_feature (1)..( 12): Result.002 file - promoters60/1395832
tgataaactaat

SEQ ID NO: 111476 - DNA, 7 bp, Unknown
  misc_feature (1)..( 7): Result.002 file - promoters60/1395832
tatgtaa

SEQ ID NO: 111477 - DNA, 7 bp, Unknown
  misc_feature (1)..( 7): Result.002 file - promoters60/1395832
tatttaa

SEQ ID NO: 111478 - DNA, 7 bp, Unknown
  misc_feature (1)..( 7): Result.002 file - promoters60/1395832
gatttaa

SEQ ID NO: 111479 - DNA, 8 bp, Unknown
  misc_feature (1)..( 8): Result.002 file - promoters60/1395839
ggacaaaa

SEQ ID NO: 111480 - DNA, 8 bp, Unknown
  misc_feature (1)..( 8): Result.002 file - promoters60/1395839
ggataaaa

SEQ ID NO: 111481 - DNA, 8 bp, Unknown
  misc_feature (1)..( 8): Result.002 file - promoters60/1395839
ggataact

SEQ ID NO: 111482 - DNA, 7 bp, Unknown
  misc_feature (1)..( 7): Result.002 file - promoters60/1395839
aaaatga

SEQ ID NO: 111483 - DNA, 7 bp, Unknown
  misc_feature (1)..( 7): Result.002 file - promoters60/1395839
caaatga

SEQ ID NO: 111484 - DNA, 8 bp, Unknown
  misc_feature (1)..( 8): Result.002 file - promoters60/1395839
taaattga

SEQ ID NO: 111485 - DNA, 9 bp, Unknown
  misc_feature (1)..( 9): Result.002 file - promoters60/1395839
taactaaaa

SEQ ID NO: 111486 - DNA, 9 bp, Unknown
  misc_feature (1)..( 9): Result.002 file - promoters60/1395839
taaataaat

SEQ ID NO: 111487 - DNA, 9 bp, Unknown
  misc_feature (1)..( 9): Result.002 file - promoters60/1395839
aaacaaaaa

SEQ ID NO: 111488 - DNA, 11 bp, Unknown
  misc_feature (1)..( 11): Result.002 file - promoters60/1395839
atttttgtttg

SEQ ID NO: 111489 - DNA, 11 bp, Unknown
  misc_feature (1)..( 11): Result.002 file - promoters60/1395839
atttctgtttg

SEQ ID NO: 111490 - DNA, 11 bp, Unknown
  misc_feature (1)..( 11): Result.002 file - promoters60/1395839
ggttttgtttt

SEQ ID NO: 111491 - DNA, 9 bp, Unknown
  misc_feature (1)..( 9): Result.002 file - promoters60/1395839
aaagaacaa

SEQ ID NO: 111492 - DNA, 9 bp, Unknown
  misc_feature (1)..( 9): Result.002 file - promoters60/1395839
aaataactt

SEQ ID NO: 111493 - DNA, 9 bp, Unknown
  misc_feature (1)..( 9): Result.002 file - promoters60/1395839
aaatatctt

SEQ ID NO: 111494 - DNA, 6 bp, Unknown
  misc_feature (1)..( 6): Result.002 file - promoters60/1395958
accaaa

SEQ ID NO: 111495 - DNA, 6 bp, Unknown
  misc_feature (1)..( 6): Result.002 file - promoters60/1395958
accaaa

SEQ ID NO: 111496 - DNA, 7 bp, Unknown
  misc_feature (1)..( 7): Result.002 file - promoters60/1395958
taaaaat

SEQ ID NO: 111497 - DNA, 7 bp, Unknown
  misc_feature (1)..( 7): Result.002 file - promoters60/1395958
taaaaat

SEQ ID NO: 111498 - DNA, 6 bp, Unknown
  misc_feature (1)..( 6): Result.002 file - promoters60/1395958
aaaaat

SEQ ID NO: 111499 - DNA, 6 bp, Unknown
  misc_feature (1)..( 6): Result.002 file - promoters60/1395958
aaaaat

SEQ ID NO: 111500 - DNA, 7 bp, Unknown
  misc_feature (1)..( 7): Result.002 file - promoters60/1395958
attttaa

SEQ ID NO: 111501 - DNA, 7 bp, Unknown
  misc_feature (1)..( 7): Result.002 file - promoters60/1395958
attttaa

SEQ ID NO: 111502 - DNA, 6 bp, Unknown
  misc_feature (1)..( 6): Result.002 file - promoters60/1395958
gtaaaa

SEQ ID NO: 111503 - DNA, 6 bp, Unknown
  misc_feature (1)..( 6): Result.002 file - promoters60/1395958
gtaaaa

SEQ ID NO: 111504 - DNA, 6 bp, Unknown
  misc_feature (1)..( 6): Result.002 file - promoters60/1395958
cgaata

SEQ ID NO: 111505 - DNA, 6 bp, Unknown
  misc_feature (1)..( 6): Result.002 file - promoters60/1395958
cgaata

SEQ ID NO: 111506 - DNA, 6 bp, Unknown
  misc_feature (1)..( 6): Result.002 file - promoters60/1395958
ctgaaa

SEQ ID NO: 111507 - DNA, 6 bp, Unknown
  misc_feature (1)..( 6): Result.002 file - promoters60/1395958
ctgaaa

SEQ ID NO: 111508 - DNA, 6 bp, Unknown
  misc_feature (1)..( 6): Result.002 file - promoters60/1395958
tgttta

SEQ ID NO: 111509 - DNA, 6 bp, Unknown
  misc_feature (1)..( 6): Result.002 file - promoters60/1395958
tgttta

SEQ ID NO: 111510 - DNA, 11 bp, Unknown
  misc_feature (1)..( 11): Result.002 file - promoters60/1395958
gttaacaagtc

SEQ ID NO: 111511 - DNA, 11 bp, Unknown
  misc_feature (1)..( 11): Result.002 file - promoters60/1395958
gttgacatgtc

SEQ ID NO: 111512 - DNA, 6 bp, Unknown
  misc_feature (1)..( 6): Result.002 file - promoters60/1395958
agaaat

SEQ ID NO: 111513 - DNA, 6 bp, Unknown
  misc_feature (1)..( 6): Result.002 file - promoters60/1395958
agaaat

SEQ ID NO: 111514 - DNA, 9 bp, Unknown
  misc_feature (1)..( 9): Result.002 file - promoters60/1395958
taatcaaag

SEQ ID NO: 111515 - DNA, 9 bp, Unknown
  misc_feature (1)..( 9): Result.002 file - promoters60/1395958
taatcgaag

SEQ ID NO: 111516 - DNA, 7 bp, Unknown
  misc_feature (1)..( 7): Result.002 file - promoters60/1395958
ttaattt

SEQ ID NO: 111517 - DNA, 7 bp, Unknown
  misc_feature (1)..( 7): Result.002 file - promoters60/1395958
ttagttt

SEQ ID NO: 111518 - DNA, 7 bp, Unknown
  misc_feature (1)..( 7): Result.002 file - promoters60/1395958
tttgaaa

SEQ ID NO: 111519 - DNA, 7 bp, Unknown
  misc_feature (1)..( 7): Result.002 file - promoters60/1395958
tttcaaa

SEQ ID NO: 111520 - DNA, 8 bp, Unknown
  misc_feature (1)..( 8): Result.002 file - promoters60/1395958
aaaggtga

SEQ ID NO: 111521 - DNA, 8 bp, Unknown
  misc_feature (1)..( 8): Result.002 file - promoters60/1395958
aaaggtga

SEQ ID NO: 111522 - DNA, 6 bp, Unknown
  misc_feature (1)..( 6): Result.002 file - promoters60/1395958
tttcga

SEQ ID NO: 111523 - DNA, 6 bp, Unknown
  misc_feature (1)..( 6): Result.002 file - promoters60/1395958
tttcga

SEQ ID NO: 111524 - DNA, 8 bp, Unknown
  misc_feature (1)..( 8): Result.002 file - promoters60/1395958
tagcgaat

SEQ ID NO: 111525 - DNA, 8 bp, Unknown
  misc_feature (1)..( 8): Result.002 file - promoters60/1395958
tagagaat

SEQ ID NO: 111526 - DNA, 8 bp, Unknown
  misc_feature (1)..( 8): Result.002 file - promoters60/1395958
aactaaaa

SEQ ID NO: 111527 - DNA, 8 bp, Unknown
  misc_feature (1)..( 8): Result.002 file - promoters60/1395958
aacaaaaa

SEQ ID NO: 111528 - DNA, 6 bp, Unknown
  misc_feature (1)..( 6): Result.002 file - promoters60/1395958
aaaaca

SEQ ID NO: 111529 - DNA, 6 bp, Unknown
  misc_feature (1)..( 6): Result.002 file - promoters60/1395958
aaaaca

SEQ ID NO: 111530 - DNA, 7 bp, Unknown
  misc_feature (1)..( 7): Result.002 file - promoters60/1395958
gaaaaat

SEQ ID NO: 111531 - DNA, 7 bp, Unknown
  misc_feature (1)..( 7): Result.002 file - promoters60/1395958
gaagaat

SEQ ID NO: 111532 - DNA, 7 bp, Unknown
  misc_feature (1)..( 7): Result.002 file - promoters60/1395958
attacag

SEQ ID NO: 111533 - DNA, 7 bp, Unknown
  misc_feature (1)..( 7): Result.002 file - promoters60/1395958
atttcag

SEQ ID NO: 111534 - DNA, 7 bp, Unknown
  misc_feature (1)..( 7): Result.002 file - promoters60/1395958
cgctgtt

SEQ ID NO: 111535 - DNA, 7 bp, Unknown
  misc_feature (1)..( 7): Result.002 file - promoters60/1395958
cgctgtt

SEQ ID NO: 111536 - DNA, 8 bp, Unknown
  misc_feature (1)..( 8): Result.002 file - promoters60/1395972
aattggta

SEQ ID NO: 111537 - DNA, 8 bp, Unknown
  misc_feature (1)..( 8): Result.002 file - promoters60/1395972
aattagta

SEQ ID NO: 111538 - DNA, 7 bp, Unknown
  misc_feature (1)..( 7): Result.002 file - promoters60/1395972
taacata

SEQ ID NO: 111539 - DNA, 7 bp, Unknown
  misc_feature (1)..( 7): Result.002 file - promoters60/1395972
taaaata

SEQ ID NO: 111540 - DNA, 6 bp, Unknown
  misc_feature (1)..( 6): Result.002 file - promoters60/1395972
actaaa

SEQ ID NO: 111541 - DNA, 6 bp, Unknown
  misc_feature (1)..( 6): Result.002 file - promoters60/1395972
actaaa

SEQ ID NO: 111542 - DNA, 9 bp, Unknown
  misc_feature (1)..( 9): Result.002 file - promoters60/1395972
tcacttaca

SEQ ID NO: 111543 - DNA, 9 bp, Unknown
  misc_feature (1)..( 9): Result.002 file - promoters60/1395972
tcacgtaca

SEQ ID NO: 111544 - DNA, 11 bp, Unknown
  misc_feature (1)..( 11): Result.002 file - promoters60/1395972
tttaaataaaa

SEQ ID NO: 111545 - DNA, 11 bp, Unknown
  misc_feature (1)..( 11): Result.002 file - promoters60/1395972
ttcaaataaaa

SEQ ID NO: 111546 - DNA, 11 bp, Unknown
  misc_feature (1)..( 11): Result.002 file - promoters60/1395972
ttctaatatcc

SEQ ID NO: 111547 - DNA, 7 bp, Unknown
  misc_feature (1)..( 7): Result.002 file - promoters60/1395972
gcaaaac

SEQ ID NO: 111548 - DNA, 7 bp, Unknown
  misc_feature (1)..( 7): Result.002 file - promoters60/1395972
gcaaaac

SEQ ID NO: 111549 - DNA, 8 bp, Unknown
  misc_feature (1)..( 8): Result.002 file - promoters60/1395972
aaaatagt

SEQ ID NO: 111550 - DNA, 8 bp, Unknown
  misc_feature (1)..( 8): Result.002 file - promoters60/1395972
aaaatagc

SEQ ID NO: 111551 - DNA, 8 bp, Unknown
  misc_feature (1)..( 8): Result.002 file - promoters60/1395972
aaaaagca

SEQ ID NO: 111552 - DNA, 6 bp, Unknown
  misc_feature (1)..( 6): Result.002 file - promoters60/1395972
ttatat

SEQ ID NO: 111553 - DNA, 6 bp, Unknown
  misc_feature (1)..( 6): Result.002 file - promoters60/1395972
ttatat

SEQ ID NO: 111554 - DNA, 6 bp, Unknown
  misc_feature (1)..( 6): Result.002 file - promoters60/1395972
ataaaa

SEQ ID NO: 111555 - DNA, 6 bp, Unknown
  misc_feature (1)..( 6): Result.002 file - promoters60/1395972
ataaaa

SEQ ID NO: 111556 - DNA, 6 bp, Unknown
  misc_feature (1)..( 6): Result.002 file - promoters60/1395972
aagaaa

SEQ ID NO: 111557 - DNA, 6 bp, Unknown
  misc_feature (1)..( 6): Result.002 file - promoters60/1395972
aagaaa

SEQ ID NO: 111558 - DNA, 9 bp, Unknown
  misc_feature (1)..( 9): Result.002 file - promoters60/1395972
aaaactcaa

SEQ ID NO: 111559 - DNA, 9 bp, Unknown
  misc_feature (1)..( 9): Result.002 file - promoters60/1395972
aaacctcaa

SEQ ID NO: 111560 - DNA, 9 bp, Unknown
  misc_feature (1)..( 9): Result.002 file - promoters60/1395972
aaataaaaa

SEQ ID NO: 111561 - DNA, 9 bp, Unknown
  misc_feature (1)..( 9): Result.002 file - promoters60/1395972
aaaaaaaaa

SEQ ID NO: 111562 - DNA, 9 bp, Unknown
  misc_feature (1)..( 9): Result.002 file - promoters60/1395972
catataact

SEQ ID NO: 111563 - DNA, 9 bp, Unknown
  misc_feature (1)..( 9): Result.002 file - promoters60/1395972
catatcact

SEQ ID NO: 111564 - DNA, 8 bp, Unknown
  misc_feature (1)..( 8): Result.002 file - promoters60/1395972
taaagatt

SEQ ID NO: 111565 - DNA, 8 bp, Unknown
  misc_feature (1)..( 8): Result.002 file - promoters60/1395972
taaacatt

SEQ ID NO: 111566 - DNA, 6 bp, Unknown
  misc_feature (1)..( 6): Result.002 file - promoters60/1395972
attttc

SEQ ID NO: 111567 - DNA, 6 bp, Unknown
  misc_feature (1)..( 6): Result.002 file - promoters60/1395972
attttc

SEQ ID NO: 111568 - DNA, 6 bp, Unknown
  misc_feature (1)..( 6): Result.002 file - promoters60/1395972
caaaat

SEQ ID NO: 111569 - DNA, 6 bp, Unknown
  misc_feature (1)..( 6): Result.002 file - promoters60/1395972
caaaat

SEQ ID NO: 111570 - DNA, 7 bp, Unknown
  misc_feature (1)..( 7): Result.002 file - promoters60/1395972
tatcttc

SEQ ID NO: 111571 - DNA, 7 bp, Unknown
  misc_feature (1)..( 7): Result.002 file - promoters60/1395972
tatgttc

SEQ ID NO: 111572 - DNA, 8 bp, Unknown
  misc_feature (1)..( 8): Result.002 file - promoters60/1395972
ttggcaaa

SEQ ID NO: 111573 - DNA, 8 bp, Unknown
  misc_feature (1)..( 8): Result.002 file - promoters60/1395972
ttgccaaa

SEQ ID NO: 111574 - DNA, 6 bp, Unknown
  misc_feature (1)..( 6): Result.002 file - promoters60/1395972
caaaat

SEQ ID NO: 111575 - DNA, 6 bp, Unknown
  misc_feature (1)..( 6): Result.002 file - promoters60/1395972
caaaat

SEQ ID NO: 111576 - DNA, 6 bp, Unknown
  misc_feature (1)..( 6): Result.002 file - promoters60/1395972
agacaa

SEQ ID NO: 111577 - DNA, 6 bp, Unknown
  misc_feature (1)..( 6): Result.002 file - promoters60/1395972
agacaa

SEQ ID NO: 111578 - DNA, 6 bp, Unknown
  misc_feature (1)..( 6): Result.002 file - promoters60/1395972
agctaa

SEQ ID NO: 111579 - DNA, 6 bp, Unknown
  misc_feature (1)..( 6): Result.002 file - promoters60/1395972
agctaa

SEQ ID NO: 111580 - DNA, 12 bp, Unknown
  misc_feature (1)..( 12): Result.002 file - promoters60/1395972
aaataaatggaa

SEQ ID NO: 111581 - DNA, 12 bp, Unknown
  misc_feature (1)..( 12): Result.002 file - promoters60/1395972
aaagaaagggaa

SEQ ID NO: 111582 - DNA, 9 bp, Unknown
  misc_feature (1)..( 9): Result.002 file - promoters60/1395972
acattttca

SEQ ID NO: 111583 - DNA, 9 bp, Unknown
  misc_feature (1)..( 9): Result.002 file - promoters60/1395972
acattttca

SEQ ID NO: 111584 - DNA, 6 bp, Unknown
  misc_feature (1)..( 6): Result.002 file - promoters60/1395972
tcttct

SEQ ID NO: 111585 - DNA, 6 bp, Unknown
  misc_feature (1)..( 6): Result.002 file - promoters60/1395972
tcttct

SEQ ID NO: 111586 - DNA, 6 bp, Unknown
  misc_feature (1)..( 6): Result.002 file - promoters60/1395972
tcaaaa

SEQ ID NO: 111587 - DNA, 6 bp, Unknown
  misc_feature (1)..( 6): Result.002 file - promoters60/1395972
tcaaaa

SEQ ID NO: 111588 - DNA, 6 bp, Unknown
  misc_feature (1)..( 6): Result.002 file - promoters60/1395972
agaaag

SEQ ID NO: 111589 - DNA, 6 bp, Unknown
  misc_feature (1)..( 6): Result.002 file - promoters60/1395972
agaaag

SEQ ID NO: 111590 - DNA, 7 bp, Unknown
  misc_feature (1)..( 7): Result.002 file - promoters60/1395972
aagaaaa

SEQ ID NO: 111591 - DNA, 7 bp, Unknown
  misc_feature (1)..( 7): Result.002 file - promoters60/1395972
aagaaaa

SEQ ID NO: 111592 - DNA, 7 bp, Unknown
  misc_feature (1)..( 7): Result.002 file - promoters60/1395972
aaataaa

SEQ ID NO: 111593 - DNA, 7 bp, Unknown
  misc_feature (1)..( 7): Result.002 file - promoters60/1395972
aaataaa

SEQ ID NO: 111594 - DNA, 7 bp, Unknown
  misc_feature (1)..( 7): Result.002 file - promoters60/1395972
atatatg

SEQ ID NO: 111595 - DNA, 7 bp, Unknown
  misc_feature (1)..( 7): Result.002 file - promoters60/1395972
ataaatg

SEQ ID NO: 111596 - DNA, 9 bp, Unknown
  misc_feature (1)..( 9): Result.002 file - promoters60/1396038
cctctttcc

SEQ ID NO: 111597 - DNA, 9 bp, Unknown
  misc_feature (1)..( 9): Result.002 file - promoters60/1396038
cctttttat

SEQ ID NO: 111598 - DNA, 9 bp, Unknown
  misc_feature (1)..( 9): Result.002 file - promoters60/1396038
actctttca

SEQ ID NO: 111599 - DNA, 9 bp, Unknown
  misc_feature (1)..( 9): Result.002 file - promoters60/1396038
tcttttttt

SEQ ID NO: 111600 - DNA, 10 bp, Unknown
  misc_feature (1)..( 10): Result.002 file - promoters60/1396038
tatttatttc

SEQ ID NO: 111601 - DNA, 10 bp, Unknown
  misc_feature (1)..( 10): Result.002 file - promoters60/1396038
tttctttctg

SEQ ID NO: 111602 - DNA, 8 bp, Unknown
  misc_feature (1)..( 8): Result.002 file - promoters60/1396038
tatatata

SEQ ID NO: 111603 - DNA, 8 bp, Unknown
  misc_feature (1)..( 8): Result.002 file - promoters60/1396038
tatataaa

SEQ ID NO: 111604 - DNA, 8 bp, Unknown
  misc_feature (1)..( 8): Result.002 file - promoters60/1396038
tataaata

SEQ ID NO: 111605 - DNA, 8 bp, Unknown
  misc_feature (1)..( 8): Result.002 file - promoters60/1396038
tatatata

SEQ ID NO: 111606 - DNA, 8 bp, Unknown
  misc_feature (1)..( 8): Result.002 file - promoters60/1396038
tataaata

SEQ ID NO: 111607 - DNA, 8 bp, Unknown
  misc_feature (1)..( 8): Result.002 file - promoters60/1396038
gatataat

SEQ ID NO: 111608 - DNA, 18 bp, Unknown
  misc_feature (1)..( 18): Result.002 file - promoters60/1396038
tgcttcgtagattgcgtg

SEQ ID NO: 111609 - DNA, 18 bp, Unknown
  misc_feature (1)..( 18): Result.002 file - promoters60/1396038
ttttttttagtttgtgtg

SEQ ID NO: 111610 - DNA, 18 bp, Unknown
  misc_feature (1)..( 18): Result.002 file - promoters60/1396038
cagtttttattttttatt

SEQ ID NO: 111611 - DNA, 18 bp, Unknown
  misc_feature (1)..( 18): Result.002 file - promoters60/1396038
cagcttttattaaaaaaa

SEQ ID NO: 111612 - DNA, 18 bp, Unknown
  misc_feature (1)..( 18): Result.002 file - promoters60/1396038
ggtctttgattagcaaat

SEQ ID NO: 111613 - DNA, 18 bp, Unknown
  misc_feature (1)..( 18): Result.002 file - promoters60/1396038
caacatttatgaaatttg

SEQ ID NO: 111614 - DNA, 11 bp, Unknown
  misc_feature (1)..( 11): Result.002 file - promoters60/1396085
ttaaattttaa

SEQ ID NO: 111615 - DNA, 11 bp, Unknown
  misc_feature (1)..( 11): Result.002 file - promoters60/1396085
acaaatttgtt

SEQ ID NO: 111616 - DNA, 11 bp, Unknown
  misc_feature (1)..( 11): Result.002 file - promoters60/1396085
taaaattttca

SEQ ID NO: 111617 - DNA, 11 bp, Unknown
  misc_feature (1)..( 11): Result.002 file - promoters60/1396085
ttaaatatgtt

SEQ ID NO: 111618 - DNA, 11 bp, Unknown
  misc_feature (1)..( 11): Result.002 file - promoters60/1396085
acatattttcg

SEQ ID NO: 111619 - DNA, 11 bp, Unknown
  misc_feature (1)..( 11): Result.002 file - promoters60/1396085
ctctattttcc

SEQ ID NO: 111620 - DNA, 11 bp, Unknown
  misc_feature (1)..( 11): Result.002 file - promoters60/1396085
ataaataacat

SEQ ID NO: 111621 - DNA, 13 bp, Unknown
  misc_feature (1)..( 13): Result.002 file - promoters60/1396085
tcacatatttgaa

SEQ ID NO: 111622 - DNA, 13 bp, Unknown
  misc_feature (1)..( 13): Result.002 file - promoters60/1396085
atacatattagta

SEQ ID NO: 111623 - DNA, 13 bp, Unknown
  misc_feature (1)..( 13): Result.002 file - promoters60/1396085
aatcatcttaaat

SEQ ID NO: 111624 - DNA, 13 bp, Unknown
  misc_feature (1)..( 13): Result.002 file - promoters60/1396085
ataaataaacaaa

SEQ ID NO: 111625 - DNA, 13 bp, Unknown
  misc_feature (1)..( 13): Result.002 file - promoters60/1396085
tatcatattgttg

SEQ ID NO: 111626 - DNA, 14 bp, Unknown
  misc_feature (1)..( 14): Result.002 file - promoters60/1396085
gtgcataattaaac

SEQ ID NO: 111627 - DNA, 11 bp, Unknown
  misc_feature (1)..( 11): Result.002 file - promoters60/1396085
attgtacttat

SEQ ID NO: 111628 - DNA, 11 bp, Unknown
  misc_feature (1)..( 11): Result.002 file - promoters60/1396085
tttggactgtg

SEQ ID NO: 111629 - DNA, 11 bp, Unknown
  misc_feature (1)..( 11): Result.002 file - promoters60/1396085
cttgtacacgc

SEQ ID NO: 111630 - DNA, 11 bp, Unknown
  misc_feature (1)..( 11): Result.002 file - promoters60/1396085
tttgaacttat

SEQ ID NO: 111631 - DNA, 11 bp, Unknown
  misc_feature (1)..( 11): Result.002 file - promoters60/1396085
attttaccgac

SEQ ID NO: 111632 - DNA, 11 bp, Unknown
  misc_feature (1)..( 11): Result.002 file - promoters60/1396085
tttgaataatt

SEQ ID NO: 111633 - DNA, 12 bp, Unknown
  misc_feature (1)..( 12): Result.002 file - promoters60/1396085
attttaatctct

SEQ ID NO: 111634 - DNA, 12 bp, Unknown
  misc_feature (1)..( 12): Result.002 file - promoters60/1396085
tttttattctat

SEQ ID NO: 111635 - DNA, 12 bp, Unknown
  misc_feature (1)..( 12): Result.002 file - promoters60/1396085
accttaatcttt

SEQ ID NO: 111636 - DNA, 12 bp, Unknown
  misc_feature (1)..( 12): Result.002 file - promoters60/1396085
gttgtattctaa

SEQ ID NO: 111637 - DNA, 12 bp, Unknown
  misc_feature (1)..( 12): Result.002 file - promoters60/1396085
tctttgttcaac

SEQ ID NO: 111638 - DNA, 12 bp, Unknown
  misc_feature (1)..( 12): Result.002 file - promoters60/1396085
tttttacggcgt

SEQ ID NO: 111639 - DNA, 12 bp, Unknown
  misc_feature (1)..( 12): Result.002 file - promoters60/1396085
aaaaaaatcttt

SEQ ID NO: 111640 - DNA, 9 bp, Unknown
  misc_feature (1)..( 9): Result.002 file - promoters60/1396085
atatatctt

SEQ ID NO: 111641 - DNA, 9 bp, Unknown
  misc_feature (1)..( 9): Result.002 file - promoters60/1396085
ataaatctt

SEQ ID NO: 111642 - DNA, 10 bp, Unknown
  misc_feature (1)..( 10): Result.002 file - promoters60/1396085
ttatcatatt

SEQ ID NO: 111643 - DNA, 10 bp, Unknown
  misc_feature (1)..( 10): Result.002 file - promoters60/1396085
ataaattaat

SEQ ID NO: 111644 - DNA, 10 bp, Unknown
  misc_feature (1)..( 10): Result.002 file - promoters60/1396085
ttaatttata

SEQ ID NO: 111645 - DNA, 10 bp, Unknown
  misc_feature (1)..( 10): Result.002 file - promoters60/1396085
ataaaacttg

SEQ ID NO: 111646 - DNA, 10 bp, Unknown
  misc_feature (1)..( 10): Result.002 file - promoters60/1396085
atattacccc

SEQ ID NO: 111647 - DNA, 10 bp, Unknown
  misc_feature (1)..( 10): Result.002 file - promoters60/1396085
gcttcttatt

SEQ ID NO: 111648 - DNA, 10 bp, Unknown
  misc_feature (1)..( 10): Result.002 file - promoters60/1396085
atttcttaat

SEQ ID NO: 111649 - DNA, 10 bp, Unknown
  misc_feature (1)..( 10): Result.002 file - promoters60/1396085
aattctcaat

SEQ ID NO: 111650 - DNA, 10 bp, Unknown
  misc_feature (1)..( 10): Result.002 file - promoters60/1396085
tttttttagt

SEQ ID NO: 111651 - DNA, 10 bp, Unknown
  misc_feature (1)..( 10): Result.002 file - promoters60/1396085
atttcttctc

SEQ ID NO: 111652 - DNA, 10 bp, Unknown
  misc_feature (1)..( 10): Result.002 file - promoters60/1396085
atttctttgt

SEQ ID NO: 111653 - DNA, 12 bp, Unknown
  misc_feature (1)..( 12): Result.002 file - promoters60/1396085
aaatttgttgta

SEQ ID NO: 111654 - DNA, 12 bp, Unknown
  misc_feature (1)..( 12): Result.002 file - promoters60/1396085
ttctttgttcaa

SEQ ID NO: 111655 - DNA, 12 bp, Unknown
  misc_feature (1)..( 12): Result.002 file - promoters60/1396085
aaatatgttaac

SEQ ID NO: 111656 - DNA, 12 bp, Unknown
  misc_feature (1)..( 12): Result.002 file - promoters60/1396085
atctttgtagta

SEQ ID NO: 111657 - DNA, 12 bp, Unknown
  misc_feature (1)..( 12): Result.002 file - promoters60/1396085
atttttattcta

SEQ ID NO: 111658 - DNA, 12 bp, Unknown
  misc_feature (1)..( 12): Result.002 file - promoters60/1396085
aaataaataaca

SEQ ID NO: 111659 - DNA, 8 bp, Unknown
  misc_feature (1)..( 8): Result.002 file - promoters60/1396085
atatattc

SEQ ID NO: 111660 - DNA, 8 bp, Unknown
  misc_feature (1)..( 8): Result.002 file - promoters60/1396085
ctattttc

SEQ ID NO: 111661 - DNA, 8 bp, Unknown
  misc_feature (1)..( 8): Result.002 file - promoters60/1396085
atatatat

SEQ ID NO: 111662 - DNA, 8 bp, Unknown
  misc_feature (1)..( 8): Result.002 file - promoters60/1396085
atattttc

SEQ ID NO: 111663 - DNA, 8 bp, Unknown
  misc_feature (1)..( 8): Result.002 file - promoters60/1396085
ttatgcta

SEQ ID NO: 111664 - DNA, 8 bp, Unknown
  misc_feature (1)..( 8): Result.002 file - promoters60/1396085
ttctattt

SEQ ID NO: 111665 - DNA, 11 bp, Unknown
  misc_feature (1)..( 11): Result.002 file - promoters60/1396085
aatagttaagt

SEQ ID NO: 111666 - DNA, 11 bp, Unknown
  misc_feature (1)..( 11): Result.002 file - promoters60/1396085
gatatttagga

SEQ ID NO: 111667 - DNA, 11 bp, Unknown
  misc_feature (1)..( 11): Result.002 file - promoters60/1396085
cataattaaac

SEQ ID NO: 111668 - DNA, 11 bp, Unknown
  misc_feature (1)..( 11): Result.002 file - promoters60/1396085
actatttacat

SEQ ID NO: 111669 - DNA, 11 bp, Unknown
  misc_feature (1)..( 11): Result.002 file - promoters60/1396085
cctaattaacc

SEQ ID NO: 111670 - DNA, 11 bp, Unknown
  misc_feature (1)..( 11): Result.002 file - promoters60/1396085
caaaattaaat

SEQ ID NO: 111671 - DNA, 11 bp, Unknown
  misc_feature (1)..( 11): Result.002 file - promoters60/1396085
cataaataaac

SEQ ID NO: 111672 - DNA, 13 bp, Unknown
  misc_feature (1)..( 13): Result.002 file - promoters60/1396085
agaccaattctca

SEQ ID NO: 111673 - DNA, 13 bp, Unknown
  misc_feature (1)..( 13): Result.002 file - promoters60/1396085
ttaccatttcttt

SEQ ID NO: 111674 - DNA, 13 bp, Unknown
  misc_feature (1)..( 13): Result.002 file - promoters60/1396085
ccttacttttttt

SEQ ID NO: 111675 - DNA, 13 bp, Unknown
  misc_feature (1)..( 13): Result.002 file - promoters60/1396085
ttactctttctat

SEQ ID NO: 111676 - DNA, 13 bp, Unknown
  misc_feature (1)..( 13): Result.002 file - promoters60/1396085
ttgacattttttt

SEQ ID NO: 111677 - DNA, 13 bp, Unknown
  misc_feature (1)..( 13): Result.002 file - promoters60/1396085
atcccattttccc

SEQ ID NO: 111678 - DNA, 7 bp, Unknown
  misc_feature (1)..( 7): Result.002 file - promoters60/1396104
tatcaaa

SEQ ID NO: 111679 - DNA, 7 bp, Unknown
  misc_feature (1)..( 7): Result.002 file - promoters60/1396104
tatcaaa

SEQ ID NO: 111680 - DNA, 7 bp, Unknown
  misc_feature (1)..( 7): Result.002 file - promoters60/1396104
gatcaaa

SEQ ID NO: 111681 - DNA, 6 bp, Unknown
  misc_feature (1)..( 6): Result.002 file - promoters60/1396123
aatata

SEQ ID NO: 111682 - DNA, 6 bp, Unknown
  misc_feature (1)..( 6): Result.002 file - promoters60/1396123
aatata

SEQ ID NO: 111683 - DNA, 7 bp, Unknown
  misc_feature (1)..( 7): Result.002 file - promoters60/1396123
ttattat

SEQ ID NO: 111684 - DNA, 7 bp, Unknown
  misc_feature (1)..( 7): Result.002 file - promoters60/1396123
ttaatat

SEQ ID NO: 111685 - DNA, 6 bp, Unknown
  misc_feature (1)..( 6): Result.002 file - promoters60/1396123
tattaa

SEQ ID NO: 111686 - DNA, 6 bp, Unknown
  misc_feature (1)..( 6): Result.002 file - promoters60/1396123
tattaa

SEQ ID NO: 111687 - DNA, 6 bp, Unknown
  misc_feature (1)..( 6): Result.002 file - promoters60/1396123
tatatt

SEQ ID NO: 111688 - DNA, 6 bp, Unknown
  misc_feature (1)..( 6): Result.002 file - promoters60/1396123
tatatt

SEQ ID NO: 111689 - DNA, 7 bp, Unknown
  misc_feature (1)..( 7): Result.002 file - promoters60/1396123
attatca

SEQ ID NO: 111690 - DNA, 7 bp, Unknown
  misc_feature (1)..( 7): Result.002 file - promoters60/1396123
attatca

SEQ ID NO: 111691 - DNA, 6 bp, Unknown
  misc_feature (1)..( 6): Result.002 file - promoters60/1396123
aataaa

SEQ ID NO: 111692 - DNA, 6 bp, Unknown
  misc_feature (1)..( 6): Result.002 file - promoters60/1396123
aataaa

SEQ ID NO: 111693 - DNA, 11 bp, Unknown
  misc_feature (1)..( 11): Result.002 file - promoters60/1396123
ataaactcaaa

SEQ ID NO: 111694 - DNA, 11 bp, Unknown
  misc_feature (1)..( 11): Result.002 file - promoters60/1396123
ataaacgcaaa

SEQ ID NO: 111695 - DNA, 8 bp, Unknown
  misc_feature (1)..( 8): Result.002 file - promoters60/1396123
ctgaaata

SEQ ID NO: 111696 - DNA, 8 bp, Unknown
  misc_feature (1)..( 8): Result.002 file - promoters60/1396123
ctgaaata

SEQ ID NO: 111697 - DNA, 6 bp, Unknown
  misc_feature (1)..( 6): Result.002 file - promoters60/1396123
aaacct

SEQ ID NO: 111698 - DNA, 6 bp, Unknown
  misc_feature (1)..( 6): Result.002 file - promoters60/1396123
aaacct

SEQ ID NO: 111699 - DNA, 6 bp, Unknown
  misc_feature (1)..( 6): Result.002 file - promoters60/1396123
aaatag

SEQ ID NO: 111700 - DNA, 6 bp, Unknown
  misc_feature (1)..( 6): Result.002 file - promoters60/1396123
aaatag

SEQ ID NO: 111701 - DNA, 6 bp, Unknown
  misc_feature (1)..( 6): Result.002 file - promoters60/1396123
aacacg

SEQ ID NO: 111702 - DNA, 6 bp, Unknown
  misc_feature (1)..( 6): Result.002 file - promoters60/1396123
aacacg

SEQ ID NO: 111703 - DNA, 9 bp, Unknown
  misc_feature (1)..( 9): Result.002 file - promoters60/1396123
aatactttg

SEQ ID NO: 111704 - DNA, 9 bp, Unknown
  misc_feature (1)..( 9): Result.002 file - promoters60/1396123
aattctttg

SEQ ID NO: 111705 - DNA, 7 bp, Unknown
  misc_feature (1)..( 7): Result.002 file - promoters60/1396123
acagaaa

SEQ ID NO: 111706 - DNA, 7 bp, Unknown
  misc_feature (1)..( 7): Result.002 file - promoters60/1396123
acaaaaa

SEQ ID NO: 111707 - DNA, 8 bp, Unknown
  misc_feature (1)..( 8): Result.002 file - promoters60/1396123
aaaaaata

SEQ ID NO: 111708 - DNA, 8 bp, Unknown
  misc_feature (1)..( 8): Result.002 file - promoters60/1396123
aaaaaata

SEQ ID NO: 111709 - DNA, 7 bp, Unknown
  misc_feature (1)..( 7): Result.002 file - promoters60/1396123
atatagg

SEQ ID NO: 111710 - DNA, 7 bp, Unknown
  misc_feature (1)..( 7): Result.002 file - promoters60/1396123
atagagg

SEQ ID NO: 111711 - DNA, 6 bp, Unknown
  misc_feature (1)..( 6): Result.002 file - promoters60/1396123
tgaaga

SEQ ID NO: 111712 - DNA, 6 bp, Unknown
  misc_feature (1)..( 6): Result.002 file - promoters60/1396123
tgaaga

SEQ ID NO: 111713 - DNA, 7 bp, Unknown
  misc_feature (1)..( 7): Result.002 file - promoters60/1396123
atcaaag

SEQ ID NO: 111714 - DNA, 7 bp, Unknown
  misc_feature (1)..( 7): Result.002 file - promoters60/1396123
atcaaag

SEQ ID NO: 111715 - DNA, 7 bp, Unknown
  misc_feature (1)..( 7): Result.002 file - promoters60/1396123
acatatg

SEQ ID NO: 111716 - DNA, 7 bp, Unknown
  misc_feature (1)..( 7): Result.002 file - promoters60/1396123
acacatg

SEQ ID NO: 111717 - DNA, 7 bp, Unknown
  misc_feature (1)..( 7): Result.002 file - promoters60/1396123
ttagatc

SEQ ID NO: 111718 - DNA, 7 bp, Unknown
  misc_feature (1)..( 7): Result.002 file - promoters60/1396123
ttagatc

SEQ ID NO: 111719 - DNA, 6 bp, Unknown
  misc_feature (1)..( 6): Result.002 file - promoters60/1396123
tgtttc

SEQ ID NO: 111720 - DNA, 6 bp, Unknown
  misc_feature (1)..( 6): Result.002 file - promoters60/1396123
tgtttc

SEQ ID NO: 111721 - DNA, 6 bp, Unknown
  misc_feature (1)..( 6): Result.002 file - promoters60/1396123
ttcact

SEQ ID NO: 111722 - DNA, 6 bp, Unknown
  misc_feature (1)..( 6): Result.002 file - promoters60/1396123
ttcact

SEQ ID NO: 111723 - DNA, 9 bp, Unknown
  misc_feature (1)..( 9): Result.002 file - promoters60/1396123
ggaccactt

SEQ ID NO: 111724 - DNA, 9 bp, Unknown
  misc_feature (1)..( 9): Result.002 file - promoters60/1396123
ggaacactt

SEQ ID NO: 111725 - DNA, 14 bp, Unknown
  misc_feature (1)..( 14): Result.002 file - promoters60/1396127
ataaagtaatttaa

SEQ ID NO: 111726 - DNA, 14 bp, Unknown
  misc_feature (1)..( 14): Result.002 file - promoters60/1396127
aaacagtagtttcc

SEQ ID NO: 111727 - DNA, 14 bp, Unknown
  misc_feature (1)..( 14): Result.002 file - promoters60/1396127
ataaattaattaat

SEQ ID NO: 111728 - DNA, 14 bp, Unknown
  misc_feature (1)..( 14): Result.002 file - promoters60/1396127
tttgttgagtttcg

SEQ ID NO: 111729 - DNA, 14 bp, Unknown
  misc_feature (1)..( 14): Result.002 file - promoters60/1396127
tcaagataaataaa

SEQ ID NO: 111730 - DNA, 14 bp, Unknown
  misc_feature (1)..( 14): Result.002 file - promoters60/1396127
tacgaaaaaaaaaa

SEQ ID NO: 111731 - DNA, 9 bp, Unknown
  misc_feature (1)..( 9): Result.002 file - promoters60/1396127
aaattttaa

SEQ ID NO: 111732 - DNA, 9 bp, Unknown
  misc_feature (1)..( 9): Result.002 file - promoters60/1396127
aaatttgtt

SEQ ID NO: 111733 - DNA, 9 bp, Unknown
  misc_feature (1)..( 9): Result.002 file - promoters60/1396127
taattttgt

SEQ ID NO: 111734 - DNA, 9 bp, Unknown
  misc_feature (1)..( 9): Result.002 file - promoters60/1396127
aaatatgtt

SEQ ID NO: 111735 - DNA, 9 bp, Unknown
  misc_feature (1)..( 9): Result.002 file - promoters60/1396127
gaatgataa

SEQ ID NO: 111736 - DNA, 9 bp, Unknown
  misc_feature (1)..( 9): Result.002 file - promoters60/1396127
gtattttac

SEQ ID NO: 111737 - DNA, 12 bp, Unknown
  misc_feature (1)..( 12): Result.002 file - promoters60/1396147
aattaactatta

SEQ ID NO: 111738 - DNA, 12 bp, Unknown
  misc_feature (1)..( 12): Result.002 file - promoters60/1396147
atattactttta

SEQ ID NO: 111739 - DNA, 12 bp, Unknown
  misc_feature (1)..( 12): Result.002 file - promoters60/1396147
atcttaatttca

SEQ ID NO: 111740 - DNA, 12 bp, Unknown
  misc_feature (1)..( 12): Result.002 file - promoters60/1396147
atcctaatcaac

SEQ ID NO: 111741 - DNA, 13 bp, Unknown
  misc_feature (1)..( 13): Result.002 file - promoters60/1396151
aagaaacaagctt

SEQ ID NO: 111742 - DNA, 13 bp, Unknown
  misc_feature (1)..( 13): Result.002 file - promoters60/1396151
ttgaatcaatatt

SEQ ID NO: 111743 - DNA, 13 bp, Unknown
  misc_feature (1)..( 13): Result.002 file - promoters60/1396151
ttgattcaaaatt

SEQ ID NO: 111744 - DNA, 7 bp, Unknown
  misc_feature (1)..( 7): Result.002 file - promoters60/1396151
tatgcaa

SEQ ID NO: 111745 - DNA, 7 bp, Unknown
  misc_feature (1)..( 7): Result.002 file - promoters60/1396151
tatccaa

SEQ ID NO: 111746 - DNA, 7 bp, Unknown
  misc_feature (1)..( 7): Result.002 file - promoters60/1396151
tttcatt

SEQ ID NO: 111747 - DNA, 7 bp, Unknown
  misc_feature (1)..( 7): Result.002 file - promoters60/1396151
tttgatt

SEQ ID NO: 111748 - DNA, 8 bp, Unknown
  misc_feature (1)..( 8): Result.002 file - promoters60/1396151
aattaatg

SEQ ID NO: 111749 - DNA, 8 bp, Unknown
  misc_feature (1)..( 8): Result.002 file - promoters60/1396151
aattgatg

SEQ ID NO: 111750 - DNA, 6 bp, Unknown
  misc_feature (1)..( 6): Result.002 file - promoters60/1396151
ggttat

SEQ ID NO: 111751 - DNA, 6 bp, Unknown
  misc_feature (1)..( 6): Result.002 file - promoters60/1396151
ggttat

SEQ ID NO: 111752 - DNA, 7 bp, Unknown
  misc_feature (1)..( 7): Result.002 file - promoters60/1396151
gatttcc

SEQ ID NO: 111753 - DNA, 7 bp, Unknown
  misc_feature (1)..( 7): Result.002 file - promoters60/1396151
gatttcc

SEQ ID NO: 111754 - DNA, 13 bp, Unknown
  misc_feature (1)..( 13): Result.002 file - promoters60/1396151
ttcaaaccctccc

SEQ ID NO: 111755 - DNA, 13 bp, Unknown
  misc_feature (1)..( 13): Result.002 file - promoters60/1396151
ttcaaaattctct

SEQ ID NO: 111756 - DNA, 13 bp, Unknown
  misc_feature (1)..( 13): Result.002 file - promoters60/1396151
ttgaatcaatatt

SEQ ID NO: 111757 - DNA, 7 bp, Unknown
  misc_feature (1)..( 7): Result.002 file - promoters60/1396151
agaactc

SEQ ID NO: 111758 - DNA, 7 bp, Unknown
  misc_feature (1)..( 7): Result.002 file - promoters60/1396151
agagctc

SEQ ID NO: 111759 - DNA, 7 bp, Unknown
  misc_feature (1)..( 7): Result.002 file - promoters60/1396151
tatttca

SEQ ID NO: 111760 - DNA, 7 bp, Unknown
  misc_feature (1)..( 7): Result.002 file - promoters60/1396151
tatttct

SEQ ID NO: 111761 - DNA, 7 bp, Unknown
  misc_feature (1)..( 7): Result.002 file - promoters60/1396151
aatttct

SEQ ID NO: 111762 - DNA, 6 bp, Unknown
  misc_feature (1)..( 6): Result.002 file - promoters60/1396151
ttaatt

SEQ ID NO: 111763 - DNA, 6 bp, Unknown
  misc_feature (1)..( 6): Result.002 file - promoters60/1396151
ttaatt

SEQ ID NO: 111764 - DNA, 7 bp, Unknown
  misc_feature (1)..( 7): Result.002 file - promoters60/1396151
tggattt

SEQ ID NO: 111765 - DNA, 7 bp, Unknown
  misc_feature (1)..( 7): Result.002 file - promoters60/1396151
tggattt

SEQ ID NO: 111766 - DNA, 6 bp, Unknown
  misc_feature (1)..( 6): Result.002 file - promoters60/1396151
aagatt

SEQ ID NO: 111767 - DNA, 6 bp, Unknown
  misc_feature (1)..( 6): Result.002 file - promoters60/1396151
aagatt

SEQ ID NO: 111768 - DNA, 6 bp, Unknown
  misc_feature (1)..( 6): Result.002 file - promoters60/1396151
ttggtt

SEQ ID NO: 111769 - DNA, 6 bp, Unknown
  misc_feature (1)..( 6): Result.002 file - promoters60/1396151
ttggtt

SEQ ID NO: 111770 - DNA, 6 bp, Unknown
  misc_feature (1)..( 6): Result.002 file - promoters60/1396151
ttaacc

SEQ ID NO: 111771 - DNA, 6 bp, Unknown
  misc_feature (1)..( 6): Result.002 file - promoters60/1396151
ttaacc

SEQ ID NO: 111772 - DNA, 7 bp, Unknown
  misc_feature (1)..( 7): Result.002 file - promoters60/1396151
ctcactc

SEQ ID NO: 111773 - DNA, 7 bp, Unknown
  misc_feature (1)..( 7): Result.002 file - promoters60/1396151
ctcgctc

SEQ ID NO: 111774 - DNA, 7 bp, Unknown
  misc_feature (1)..( 7): Result.002 file - promoters60/1396182
ttttgct

SEQ ID NO: 111775 - DNA, 7 bp, Unknown
  misc_feature (1)..( 7): Result.002 file - promoters60/1396182
ttttgct

SEQ ID NO: 111776 - DNA, 6 bp, Unknown
  misc_feature (1)..( 6): Result.002 file - promoters60/1396182
cttgtg

SEQ ID NO: 111777 - DNA, 6 bp, Unknown
  misc_feature (1)..( 6): Result.002 file - promoters60/1396182
cttgtg

SEQ ID NO: 111778 - DNA, 9 bp, Unknown
  misc_feature (1)..( 9): Result.002 file - promoters60/1396182
aagaataag

SEQ ID NO: 111779 - DNA, 9 bp, Unknown
  misc_feature (1)..( 9): Result.002 file - promoters60/1396182
gttaataag

SEQ ID NO: 111780 - DNA, 9 bp, Unknown
  misc_feature (1)..( 9): Result.002 file - promoters60/1396182
aagagtaaa

SEQ ID NO: 111781 - DNA, 8 bp, Unknown
  misc_feature (1)..( 8): Result.002 file - promoters60/1396182
ttttttct

SEQ ID NO: 111782 - DNA, 8 bp, Unknown
  misc_feature (1)..( 8): Result.002 file - promoters60/1396182
tttattct

SEQ ID NO: 111783 - DNA, 7 bp, Unknown
  misc_feature (1)..( 7): Result.002 file - promoters60/1396182
ttctaat

SEQ ID NO: 111784 - DNA, 7 bp, Unknown
  misc_feature (1)..( 7): Result.002 file - promoters60/1396182
ttctaat

SEQ ID NO: 111785 - DNA, 7 bp, Unknown
  misc_feature (1)..( 7): Result.002 file - promoters60/1396182
aaaacaa

SEQ ID NO: 111786 - DNA, 7 bp, Unknown
  misc_feature (1)..( 7): Result.002 file - promoters60/1396182
aaagcaa

SEQ ID NO: 111787 - DNA, 7 bp, Unknown
  misc_feature (1)..( 7): Result.002 file - promoters60/1396182
gaaacaa

SEQ ID NO: 111788 - DNA, 7 bp, Unknown
  misc_feature (1)..( 7): Result.002 file - promoters60/1396182
acttgat

SEQ ID NO: 111789 - DNA, 7 bp, Unknown
  misc_feature (1)..( 7): Result.002 file - promoters60/1396182
actagat

SEQ ID NO: 111790 - DNA, 6 bp, Unknown
  misc_feature (1)..( 6): Result.002 file - promoters60/1396182
atattt

SEQ ID NO: 111791 - DNA, 6 bp, Unknown
  misc_feature (1)..( 6): Result.002 file - promoters60/1396182
atattt

SEQ ID NO: 111792 - DNA, 7 bp, Unknown
  misc_feature (1)..( 7): Result.002 file - promoters60/1396182
atagctt

SEQ ID NO: 111793 - DNA, 7 bp, Unknown
  misc_feature (1)..( 7): Result.002 file - promoters60/1396182
ataactt

SEQ ID NO: 111794 - DNA, 6 bp, Unknown
  misc_feature (1)..( 6): Result.002 file - promoters60/1396182
tccaaa

SEQ ID NO: 111795 - DNA, 6 bp, Unknown
  misc_feature (1)..( 6): Result.002 file - promoters60/1396182
tccaaa

SEQ ID NO: 111796 - DNA, 7 bp, Unknown
  misc_feature (1)..( 7): Result.002 file - promoters60/1396182
cttgaaa

SEQ ID NO: 111797 - DNA, 7 bp, Unknown
  misc_feature (1)..( 7): Result.002 file - promoters60/1396182
cttgaaa

SEQ ID NO: 111798 - DNA, 9 bp, Unknown
  misc_feature (1)..( 9): Result.002 file - promoters60/1396182
attgtgatt

SEQ ID NO: 111799 - DNA, 9 bp, Unknown
  misc_feature (1)..( 9): Result.002 file - promoters60/1396182
attgttatt

SEQ ID NO: 111800 - DNA, 11 bp, Unknown
  misc_feature (1)..( 11): Result.002 file - promoters60/1396182
tagtatgcaat

SEQ ID NO: 111801 - DNA, 11 bp, Unknown
  misc_feature (1)..( 11): Result.002 file - promoters60/1396182
ggaaatgaaat

SEQ ID NO: 111802 - DNA, 11 bp, Unknown
  misc_feature (1)..( 11): Result.002 file - promoters60/1396182
ggaaaagaaaa

SEQ ID NO: 111803 - DNA, 7 bp, Unknown
  misc_feature (1)..( 7): Result.002 file - promoters60/1396182
tcttttg

SEQ ID NO: 111804 - DNA, 7 bp, Unknown
  misc_feature (1)..( 7): Result.002 file - promoters60/1396182
tctattg

SEQ ID NO: 111805 - DNA, 8 bp, Unknown
  misc_feature (1)..( 8): Result.002 file - promoters60/1396182
aaaaggaa

SEQ ID NO: 111806 - DNA, 8 bp, Unknown
  misc_feature (1)..( 8): Result.002 file - promoters60/1396182
aaaaagaa

SEQ ID NO: 111807 - DNA, 7 bp, Unknown
  misc_feature (1)..( 7): Result.002 file - promoters60/1396182
ctatata

SEQ ID NO: 111808 - DNA, 7 bp, Unknown
  misc_feature (1)..( 7): Result.002 file - promoters60/1396182
gtatata

SEQ ID NO: 111809 - DNA, 7 bp, Unknown
  misc_feature (1)..( 7): Result.002 file - promoters60/1396182
gtatata

SEQ ID NO: 111810 - DNA, 7 bp, Unknown
  misc_feature (1)..( 7): Result.002 file - promoters60/1396182
aatcggg

SEQ ID NO: 111811 - DNA, 7 bp, Unknown
  misc_feature (1)..( 7): Result.002 file - promoters60/1396182
aattggg

SEQ ID NO: 111812 - DNA, 7 bp, Unknown
  misc_feature (1)..( 7): Result.002 file - promoters60/1396182
cccacta

SEQ ID NO: 111813 - DNA, 7 bp, Unknown
  misc_feature (1)..( 7): Result.002 file - promoters60/1396182
cccacta

SEQ ID NO: 111814 - DNA, 9 bp, Unknown
  misc_feature (1)..( 9): Result.002 file - promoters60/1396182
aaagaaaag

SEQ ID NO: 111815 - DNA, 9 bp, Unknown
  misc_feature (1)..( 9): Result.002 file - promoters60/1396182
aaagtaaag

SEQ ID NO: 111816 - DNA, 10 bp, Unknown
  misc_feature (1)..( 10): Result.002 file - promoters60/1396238
aaaaatgaag

SEQ ID NO: 111817 - DNA, 10 bp, Unknown
  misc_feature (1)..( 10): Result.002 file - promoters60/1396238
ccaaatgaca

SEQ ID NO: 111818 - DNA, 11 bp, Unknown
  misc_feature (1)..( 11): Result.002 file - promoters60/1396238
caaatatgaca

SEQ ID NO: 111819 - DNA, 11 bp, Unknown
  misc_feature (1)..( 11): Result.002 file - promoters60/1396238
gaacaattaca

SEQ ID NO: 111820 - DNA, 11 bp, Unknown
  misc_feature (1)..( 11): Result.002 file - promoters60/1396238
acagacagaaa

SEQ ID NO: 111821 - DNA, 11 bp, Unknown
  misc_feature (1)..( 11): Result.002 file - promoters60/1396238
acaaacataac

SEQ ID NO: 111822 - DNA, 11 bp, Unknown
  misc_feature (1)..( 11): Result.002 file - promoters60/1396238
agagagataga

SEQ ID NO: 111823 - DNA, 8 bp, Unknown
  misc_feature (1)..( 8): Result.002 file - promoters60/1396238
ataatatg

SEQ ID NO: 111824 - DNA, 8 bp, Unknown
  misc_feature (1)..( 8): Result.002 file - promoters60/1396238
ataataag

SEQ ID NO: 111825 - DNA, 8 bp, Unknown
  misc_feature (1)..( 8): Result.002 file - promoters60/1396238
ctaataag

SEQ ID NO: 111826 - DNA, 7 bp, Unknown
  misc_feature (1)..( 7): Result.002 file - promoters60/1396238
taatggg

SEQ ID NO: 111827 - DNA, 7 bp, Unknown
  misc_feature (1)..( 7): Result.002 file - promoters60/1396238
taaaggg

SEQ ID NO: 111828 - DNA, 7 bp, Unknown
  misc_feature (1)..( 7): Result.002 file - promoters60/1396238
taaaggc

SEQ ID NO: 111829 - DNA, 9 bp, Unknown
  misc_feature (1)..( 9): Result.002 file - promoters60/1396238
aatgacaac

SEQ ID NO: 111830 - DNA, 9 bp, Unknown
  misc_feature (1)..( 9): Result.002 file - promoters60/1396238
tatgacaac

SEQ ID NO: 111831 - DNA, 9 bp, Unknown
  misc_feature (1)..( 9): Result.002 file - promoters60/1396238
aattacatg

SEQ ID NO: 111832 - DNA, 9 bp, Unknown
  misc_feature (1)..( 9): Result.002 file - promoters60/1396238
tatgtgtgc

SEQ ID NO: 111833 - DNA, 9 bp, Unknown
  misc_feature (1)..( 9): Result.002 file - promoters60/1396238
tatttgtaa

SEQ ID NO: 111834 - DNA, 9 bp, Unknown
  misc_feature (1)..( 9): Result.002 file - promoters60/1396238
gctttgtaa

SEQ ID NO: 111835 - DNA, 9 bp, Unknown
  misc_feature (1)..( 9): Result.002 file - promoters60/1396238
tatatacga

SEQ ID NO: 111836 - DNA, 9 bp, Unknown
  misc_feature (1)..( 9): Result.002 file - promoters60/1396238
aatatacga

SEQ ID NO: 111837 - DNA, 9 bp, Unknown
  misc_feature (1)..( 9): Result.002 file - promoters60/1396238
tatataaac

SEQ ID NO: 111838 - DNA, 11 bp, Unknown
  misc_feature (1)..( 11): Result.002 file - promoters60/1396256
acgtttcattt

SEQ ID NO: 111839 - DNA, 11 bp, Unknown
  misc_feature (1)..( 11): Result.002 file - promoters60/1396256
aaatttaattt

SEQ ID NO: 111840 - DNA, 11 bp, Unknown
  misc_feature (1)..( 11): Result.002 file - promoters60/1396256
ccagttcgttt

SEQ ID NO: 111841 - DNA, 11 bp, Unknown
  misc_feature (1)..( 11): Result.002 file - promoters60/1396256
aaaattaaatc

SEQ ID NO: 111842 - DNA, 9 bp, Unknown
  misc_feature (1)..( 9): Result.002 file - promoters60/1396256
ttgttgttt

SEQ ID NO: 111843 - DNA, 9 bp, Unknown
  misc_feature (1)..( 9): Result.002 file - promoters60/1396256
ttgttgtta

SEQ ID NO: 111844 - DNA, 9 bp, Unknown
  misc_feature (1)..( 9): Result.002 file - promoters60/1396256
acgttcttt

SEQ ID NO: 111845 - DNA, 9 bp, Unknown
  misc_feature (1)..( 9): Result.002 file - promoters60/1396256
ttatagttt

SEQ ID NO: 111846 - DNA, 12 bp, Unknown
  misc_feature (1)..( 12): Result.002 file - promoters60/1396256
tcctataataaa

SEQ ID NO: 111847 - DNA, 12 bp, Unknown
  misc_feature (1)..( 12): Result.002 file - promoters60/1396256
gcctttaaaaaa

SEQ ID NO: 111848 - DNA, 12 bp, Unknown
  misc_feature (1)..( 12): Result.002 file - promoters60/1396256
tcctataaatat

SEQ ID NO: 111849 - DNA, 12 bp, Unknown
  misc_feature (1)..( 12): Result.002 file - promoters60/1396256
ttcaacaaaaag

SEQ ID NO: 111850 - DNA, 10 bp, Unknown
  misc_feature (1)..( 10): Result.002 file - promoters60/1396256
gaattttttt

SEQ ID NO: 111851 - DNA, 10 bp, Unknown
  misc_feature (1)..( 10): Result.002 file - promoters60/1396256
tcttttattt

SEQ ID NO: 111852 - DNA, 10 bp, Unknown
  misc_feature (1)..( 10): Result.002 file - promoters60/1396256
aattttataa

SEQ ID NO: 111853 - DNA, 10 bp, Unknown
  misc_feature (1)..( 10): Result.002 file - promoters60/1396256
aatcttactc

SEQ ID NO: 111854 - DNA, 10 bp, Unknown
  misc_feature (1)..( 10): Result.002 file - promoters60/1396256
catcttactc

SEQ ID NO: 111855 - DNA, 10 bp, Unknown
  misc_feature (1)..( 10): Result.002 file - promoters60/1396256
gaatctcttc

SEQ ID NO: 111856 - DNA, 10 bp, Unknown
  misc_feature (1)..( 10): Result.002 file - promoters60/1396256
taatatctca

SEQ ID NO: 111857 - DNA, 10 bp, Unknown
  misc_feature (1)..( 10): Result.002 file - promoters60/1396256
taatgtctcg

SEQ ID NO: 111858 - DNA, 10 bp, Unknown
  misc_feature (1)..( 10): Result.002 file - promoters60/1396256
tgatggctcg

SEQ ID NO: 111859 - DNA, 10 bp, Unknown
  misc_feature (1)..( 10): Result.002 file - promoters60/1396256
aatttttttc

SEQ ID NO: 111860 - DNA, 10 bp, Unknown
  misc_feature (1)..( 10): Result.002 file - promoters60/1396256
aattttataa

SEQ ID NO: 111861 - DNA, 10 bp, Unknown
  misc_feature (1)..( 10): Result.002 file - promoters60/1396256
aatcttactc

SEQ ID NO: 111862 - DNA, 10 bp, Unknown
  misc_feature (1)..( 10): Result.002 file - promoters60/1396256
catcttactc

SEQ ID NO: 111863 - DNA, 8 bp, Unknown
  misc_feature (1)..( 8): Result.002 file - promoters60/1396256
gacaaagt

SEQ ID NO: 111864 - DNA, 8 bp, Unknown
  misc_feature (1)..( 8): Result.002 file - promoters60/1396256
gacaaaaa

SEQ ID NO: 111865 - DNA, 8 bp, Unknown
  misc_feature (1)..( 8): Result.002 file - promoters60/1396256
cacaaaaa

SEQ ID NO: 111866 - DNA, 8 bp, Unknown
  misc_feature (1)..( 8): Result.002 file - promoters60/1396256
cacaaata

SEQ ID NO: 111867 - DNA, 8 bp, Unknown
  misc_feature (1)..( 8): Result.002 file - promoters60/1396256
taaataaa

SEQ ID NO: 111868 - DNA, 8 bp, Unknown
  misc_feature (1)..( 8): Result.002 file - promoters60/1396256
caaaaaaa

SEQ ID NO: 111869 - DNA, 8 bp, Unknown
  misc_feature (1)..( 8): Result.002 file - promoters60/1396256
cacaaaaa

SEQ ID NO: 111870 - DNA, 8 bp, Unknown
  misc_feature (1)..( 8): Result.002 file - promoters60/1396256
cacaaata

SEQ ID NO: 111871 - DNA, 7 bp, Unknown
  misc_feature (1)..( 7): Result.002 file - promoters60/1396296
tatttaa

SEQ ID NO: 111872 - DNA, 7 bp, Unknown
  misc_feature (1)..( 7): Result.002 file - promoters60/1396296
tatctaa

SEQ ID NO: 111873 - DNA, 7 bp, Unknown
  misc_feature (1)..( 7): Result.002 file - promoters60/1396296
atatttg

SEQ ID NO: 111874 - DNA, 7 bp, Unknown
  misc_feature (1)..( 7): Result.002 file - promoters60/1396296
atatttg

SEQ ID NO: 111875 - DNA, 7 bp, Unknown
  misc_feature (1)..( 7): Result.002 file - promoters60/1396296
tttgaag

SEQ ID NO: 111876 - DNA, 7 bp, Unknown
  misc_feature (1)..( 7): Result.002 file - promoters60/1396296
tttgaat

SEQ ID NO: 111877 - DNA, 7 bp, Unknown
  misc_feature (1)..( 7): Result.002 file - promoters60/1396296
tttcaag

SEQ ID NO: 111878 - DNA, 6 bp, Unknown
  misc_feature (1)..( 6): Result.002 file - promoters60/1396296
tttttt

SEQ ID NO: 111879 - DNA, 6 bp, Unknown
  misc_feature (1)..( 6): Result.002 file - promoters60/1396296
tttttt

SEQ ID NO: 111880 - DNA, 7 bp, Unknown
  misc_feature (1)..( 7): Result.002 file - promoters60/1396296
tttgttt

SEQ ID NO: 111881 - DNA, 11 bp, Unknown
  misc_feature (1)..( 11): Result.002 file - promoters60/1396296
agacagaaaga

SEQ ID NO: 111882 - DNA, 11 bp, Unknown
  misc_feature (1)..( 11): Result.002 file - promoters60/1396296
agagagataga

SEQ ID NO: 111883 - DNA, 6 bp, Unknown
  misc_feature (1)..( 6): Result.002 file - promoters60/1396296
taataa

SEQ ID NO: 111884 - DNA, 6 bp, Unknown
  misc_feature (1)..( 6): Result.002 file - promoters60/1396296
taataa

SEQ ID NO: 111885 - DNA, 9 bp, Unknown
  misc_feature (1)..( 9): Result.002 file - promoters60/1396296
ataaacgaa

SEQ ID NO: 111886 - DNA, 9 bp, Unknown
  misc_feature (1)..( 9): Result.002 file - promoters60/1396296
ataaatgaa

SEQ ID NO: 111887 - DNA, 8 bp, Unknown
  misc_feature (1)..( 8): Result.002 file - promoters60/1396296
ctaatcac

SEQ ID NO: 111888 - DNA, 8 bp, Unknown
  misc_feature (1)..( 8): Result.002 file - promoters60/1396296
ctagtcac

SEQ ID NO: 111889 - DNA, 7 bp, Unknown
  misc_feature (1)..( 7): Result.002 file - promoters60/1396296
taatggg

SEQ ID NO: 111890 - DNA, 7 bp, Unknown
  misc_feature (1)..( 7): Result.002 file - promoters60/1396296
taaaggg

SEQ ID NO: 111891 - DNA, 6 bp, Unknown
  misc_feature (1)..( 6): Result.002 file - promoters60/1396296
tctctc

SEQ ID NO: 111892 - DNA, 6 bp, Unknown
  misc_feature (1)..( 6): Result.002 file - promoters60/1396296
tctctc

SEQ ID NO: 111893 - DNA, 6 bp, Unknown
  misc_feature (1)..( 6): Result.002 file - promoters60/1396296
tcatat

SEQ ID NO: 111894 - DNA, 6 bp, Unknown
  misc_feature (1)..( 6): Result.002 file - promoters60/1396296
tcatat

SEQ ID NO: 111895 - DNA, 6 bp, Unknown
  misc_feature (1)..( 6): Result.002 file - promoters60/1396296
acaatt

SEQ ID NO: 111896 - DNA, 6 bp, Unknown
  misc_feature (1)..( 6): Result.002 file - promoters60/1396296
acaatt

SEQ ID NO: 111897 - DNA, 6 bp, Unknown
  misc_feature (1)..( 6): Result.002 file - promoters60/1396296
atgatt

SEQ ID NO: 111898 - DNA, 6 bp, Unknown
  misc_feature (1)..( 6): Result.002 file - promoters60/1396296
atgatt

SEQ ID NO: 111899 - DNA, 8 bp, Unknown
  misc_feature (1)..( 8): Result.002 file - promoters60/1396296
atacaagt

SEQ ID NO: 111900 - DNA, 8 bp, Unknown
  misc_feature (1)..( 8): Result.002 file - promoters60/1396296
ataaaagt

SEQ ID NO: 111901 - DNA, 8 bp, Unknown
  misc_feature (1)..( 8): Result.002 file - promoters60/1396296
ttttcttt

SEQ ID NO: 111902 - DNA, 8 bp, Unknown
  misc_feature (1)..( 8): Result.002 file - promoters60/1396296
ttttcttt

SEQ ID NO: 111903 - DNA, 6 bp, Unknown
  misc_feature (1)..( 6): Result.002 file - promoters60/1396296
aaataa

SEQ ID NO: 111904 - DNA, 6 bp, Unknown
  misc_feature (1)..( 6): Result.002 file - promoters60/1396296
aaataa

SEQ ID NO: 111905 - DNA, 6 bp, Unknown
  misc_feature (1)..( 6): Result.002 file - promoters60/1396296
aattta

SEQ ID NO: 111906 - DNA, 6 bp, Unknown
  misc_feature (1)..( 6): Result.002 file - promoters60/1396296
aattta

SEQ ID NO: 111907 - DNA, 6 bp, Unknown
  misc_feature (1)..( 6): Result.002 file - promoters60/1396296
ttttct

SEQ ID NO: 111908 - DNA, 6 bp, Unknown
  misc_feature (1)..( 6): Result.002 file - promoters60/1396296
ttttct

SEQ ID NO: 111909 - DNA, 10 bp, Unknown
  misc_feature (1)..( 10): Result.002 file - promoters60/1396308
taaaaatgaa

SEQ ID NO: 111910 - DNA, 10 bp, Unknown
  misc_feature (1)..( 10): Result.002 file - promoters60/1396308
taaaaagtct

SEQ ID NO: 111911 - DNA, 10 bp, Unknown
  misc_feature (1)..( 10): Result.002 file - promoters60/1396308
aaaaaaagaa

SEQ ID NO: 111912 - DNA, 10 bp, Unknown
  misc_feature (1)..( 10): Result.002 file - promoters60/1396308
caaaaatctt

SEQ ID NO: 111913 - DNA, 10 bp, Unknown
  misc_feature (1)..( 10): Result.002 file - promoters60/1396308
gaaaaagggt

SEQ ID NO: 111914 - DNA, 14 bp, Unknown
  misc_feature (1)..( 14): Result.002 file - promoters60/1396308
actcataataaata

SEQ ID NO: 111915 - DNA, 14 bp, Unknown
  misc_feature (1)..( 14): Result.002 file - promoters60/1396308
tcatataatagtaa

SEQ ID NO: 111916 - DNA, 14 bp, Unknown
  misc_feature (1)..( 14): Result.002 file - promoters60/1396308
atttataatataat

SEQ ID NO: 111917 - DNA, 14 bp, Unknown
  misc_feature (1)..( 14): Result.002 file - promoters60/1396308
acttataatgaatt

SEQ ID NO: 111918 - DNA, 14 bp, Unknown
  misc_feature (1)..( 14): Result.002 file - promoters60/1396308
taaaataaggaatt

SEQ ID NO: 111919 - DNA, 14 bp, Unknown
  misc_feature (1)..( 14): Result.002 file - promoters60/1396308
atatataataaata

SEQ ID NO: 111920 - DNA, 14 bp, Unknown
  misc_feature (1)..( 14): Result.002 file - promoters60/1396308
aagcataaaaaata

SEQ ID NO: 111921 - DNA, 14 bp, Unknown
  misc_feature (1)..( 14): Result.002 file - promoters60/1396308
aattattatacttc

SEQ ID NO: 111922 - DNA, 14 bp, Unknown
  misc_feature (1)..( 14): Result.002 file - promoters60/1396308
tcatataattatct

SEQ ID NO: 111923 - DNA, 14 bp, Unknown
  misc_feature (1)..( 14): Result.002 file - promoters60/1396308
cagtttaataacaa

SEQ ID NO: 111924 - DNA, 14 bp, Unknown
  misc_feature (1)..( 14): Result.002 file - promoters60/1396308
gcctaaaatataat

SEQ ID NO: 111925 - DNA, 14 bp, Unknown
  misc_feature (1)..( 14): Result.002 file - promoters60/1396308
tcatataacaattt

SEQ ID NO: 111926 - DNA, 11 bp, Unknown
  misc_feature (1)..( 11): Result.002 file - promoters60/1396308
tgtatatatat

SEQ ID NO: 111927 - DNA, 11 bp, Unknown
  misc_feature (1)..( 11): Result.002 file - promoters60/1396308
aaaataaatag

SEQ ID NO: 111928 - DNA, 11 bp, Unknown
  misc_feature (1)..( 11): Result.002 file - promoters60/1396308
aaaatatataa

SEQ ID NO: 111929 - DNA, 11 bp, Unknown
  misc_feature (1)..( 11): Result.002 file - promoters60/1396308
agaataaaaat

SEQ ID NO: 111930 - DNA, 11 bp, Unknown
  misc_feature (1)..( 11): Result.002 file - promoters60/1396308
aaaatataata

SEQ ID NO: 111931 - DNA, 12 bp, Unknown
  misc_feature (1)..( 12): Result.002 file - promoters60/1396308
tagaaattaata

SEQ ID NO: 111932 - DNA, 12 bp, Unknown
  misc_feature (1)..( 12): Result.002 file - promoters60/1396308
agataattaagt

SEQ ID NO: 111933 - DNA, 11 bp, Unknown
  misc_feature (1)..( 11): Result.002 file - promoters60/1396308
taaaatcaata

SEQ ID NO: 111934 - DNA, 11 bp, Unknown
  misc_feature (1)..( 11): Result.002 file - promoters60/1396308
tttaattatta

SEQ ID NO: 111935 - DNA, 12 bp, Unknown
  misc_feature (1)..( 12): Result.002 file - promoters60/1396308
ataacatcactt

SEQ ID NO: 111936 - DNA, 12 bp, Unknown
  misc_feature (1)..( 12): Result.002 file - promoters60/1396308
ggtacatcactg

SEQ ID NO: 111937 - DNA, 13 bp, Unknown
  misc_feature (1)..( 13): Result.002 file - promoters60/1396308
tttgttatataag

SEQ ID NO: 111938 - DNA, 13 bp, Unknown
  misc_feature (1)..( 13): Result.002 file - promoters60/1396308
tcctttatatatt

SEQ ID NO: 111939 - DNA, 13 bp, Unknown
  misc_feature (1)..( 13): Result.002 file - promoters60/1396308
cttattatataga

SEQ ID NO: 111940 - DNA, 13 bp, Unknown
  misc_feature (1)..( 13): Result.002 file - promoters60/1396308
cgtcccataaaga

SEQ ID NO: 111941 - DNA, 13 bp, Unknown
  misc_feature (1)..( 13): Result.002 file - promoters60/1396308
cgtcctataaata

SEQ ID NO: 111942 - DNA, 10 bp, Unknown
  misc_feature (1)..( 10): Result.002 file - promoters60/1396308
ttttatcaca

SEQ ID NO: 111943 - DNA, 10 bp, Unknown
  misc_feature (1)..( 10): Result.002 file - promoters60/1396308
ttttgtcaac

SEQ ID NO: 111944 - DNA, 10 bp, Unknown
  misc_feature (1)..( 10): Result.002 file - promoters60/1396308
ctttatccta

SEQ ID NO: 111945 - DNA, 10 bp, Unknown
  misc_feature (1)..( 10): Result.002 file - promoters60/1396308
gtataacaat

SEQ ID NO: 111946 - DNA, 10 bp, Unknown
  misc_feature (1)..( 10): Result.002 file - promoters60/1396308
gtgtaaacga

SEQ ID NO: 111947 - DNA, 10 bp, Unknown
  misc_feature (1)..( 10): Result.002 file - promoters60/1396308
ttttgtatct

SEQ ID NO: 111948 - DNA, 10 bp, Unknown
  misc_feature (1)..( 10): Result.002 file - promoters60/1396308
tcaatcaaaa

SEQ ID NO: 111949 - DNA, 10 bp, Unknown
  misc_feature (1)..( 10): Result.002 file - promoters60/1396308
caaatcaaat

SEQ ID NO: 111950 - DNA, 11 bp, Unknown
  misc_feature (1)..( 11): Result.002 file - promoters60/1396308
ttgatccaaac

SEQ ID NO: 111951 - DNA, 11 bp, Unknown
  misc_feature (1)..( 11): Result.002 file - promoters60/1396308
tcaattaaaag

SEQ ID NO: 111952 - DNA, 11 bp, Unknown
  misc_feature (1)..( 11): Result.002 file - promoters60/1396308
acctttcaaat

SEQ ID NO: 111953 - DNA, 11 bp, Unknown
  misc_feature (1)..( 11): Result.002 file - promoters60/1396308
attatcctaac

SEQ ID NO: 111954 - DNA, 8 bp, Unknown
  misc_feature (1)..( 8): Result.002 file - promoters60/1396308
ttttgttt

SEQ ID NO: 111955 - DNA, 8 bp, Unknown
  misc_feature (1)..( 8): Result.002 file - promoters60/1396308
ttttgtat

SEQ ID NO: 111956 - DNA, 8 bp, Unknown
  misc_feature (1)..( 8): Result.002 file - promoters60/1396308
atttgttt

SEQ ID NO: 111957 - DNA, 8 bp, Unknown
  misc_feature (1)..( 8): Result.002 file - promoters60/1396308
ctttgttg

SEQ ID NO: 111958 - DNA, 8 bp, Unknown
  misc_feature (1)..( 8): Result.002 file - promoters60/1396308
atttattt

SEQ ID NO: 111959 - DNA, 9 bp, Unknown
  misc_feature (1)..( 9): Result.002 file - promoters60/1396312
aaaaataaa

SEQ ID NO: 111960 - DNA, 9 bp, Unknown
  misc_feature (1)..( 9): Result.002 file - promoters60/1396312
attaataaa

SEQ ID NO: 111961 - DNA, 9 bp, Unknown
  misc_feature (1)..( 9): Result.002 file - promoters60/1396312
ttaaataaa

SEQ ID NO: 111962 - DNA, 9 bp, Unknown
  misc_feature (1)..( 9): Result.002 file - promoters60/1396312
gaaaattaa

SEQ ID NO: 111963 - DNA, 9 bp, Unknown
  misc_feature (1)..( 9): Result.002 file - promoters60/1396312
gaaaattcc

SEQ ID NO: 111964 - DNA, 11 bp, Unknown
  misc_feature (1)..( 11): Result.002 file - promoters60/1396312
atattaacctt

SEQ ID NO: 111965 - DNA, 11 bp, Unknown
  misc_feature (1)..( 11): Result.002 file - promoters60/1396312
tttttaacctt

SEQ ID NO: 111966 - DNA, 11 bp, Unknown
  misc_feature (1)..( 11): Result.002 file - promoters60/1396312
ttattaacatt

SEQ ID NO: 111967 - DNA, 11 bp, Unknown
  misc_feature (1)..( 11): Result.002 file - promoters60/1396312
tttttaacaaa

SEQ ID NO: 111968 - DNA, 10 bp, Unknown
  misc_feature (1)..( 10): Result.002 file - promoters60/1396312
ccttgagttt

SEQ ID NO: 111969 - DNA, 10 bp, Unknown
  misc_feature (1)..( 10): Result.002 file - promoters60/1396312
gattgtgtta

SEQ ID NO: 111970 - DNA, 10 bp, Unknown
  misc_feature (1)..( 10): Result.002 file - promoters60/1396312
gattgatttt

SEQ ID NO: 111971 - DNA, 10 bp, Unknown
  misc_feature (1)..( 10): Result.002 file - promoters60/1396312
gatggattat

SEQ ID NO: 111972 - DNA, 10 bp, Unknown
  misc_feature (1)..( 10): Result.002 file - promoters60/1396312
agaggattac

SEQ ID NO: 111973 - DNA, 10 bp, Unknown
  misc_feature (1)..( 10): Result.002 file - promoters60/1396312
taacgaaaaa

SEQ ID NO: 111974 - DNA, 10 bp, Unknown
  misc_feature (1)..( 10): Result.002 file - promoters60/1396312
aaacaaaaaa

SEQ ID NO: 111975 - DNA, 10 bp, Unknown
  misc_feature (1)..( 10): Result.002 file - promoters60/1396312
aaacatataa

SEQ ID NO: 111976 - DNA, 10 bp, Unknown
  misc_feature (1)..( 10): Result.002 file - promoters60/1396312
tcccaaaaac

SEQ ID NO: 111977 - DNA, 10 bp, Unknown
  misc_feature (1)..( 10): Result.002 file - promoters60/1396312
cgtcaaaaaa

SEQ ID NO: 111978 - DNA, 10 bp, Unknown
  misc_feature (1)..( 10): Result.002 file - promoters60/1396312
aaagcaacta

SEQ ID NO: 111979 - DNA, 10 bp, Unknown
  misc_feature (1)..( 10): Result.002 file - promoters60/1396312
aaagcaaaca

SEQ ID NO: 111980 - DNA, 10 bp, Unknown
  misc_feature (1)..( 10): Result.002 file - promoters60/1396312
aaagaaaatt

SEQ ID NO: 111981 - DNA, 10 bp, Unknown
  misc_feature (1)..( 10): Result.002 file - promoters60/1396312
gatgaaaatt

SEQ ID NO: 111982 - DNA, 9 bp, Unknown
  misc_feature (1)..( 9): Result.002 file - promoters60/1396312
caaaatgaa

SEQ ID NO: 111983 - DNA, 9 bp, Unknown
  misc_feature (1)..( 9): Result.002 file - promoters60/1396312
aaaagtgaa

SEQ ID NO: 111984 - DNA, 9 bp, Unknown
  misc_feature (1)..( 9): Result.002 file - promoters60/1396312
aaaaatgca

SEQ ID NO: 111985 - DNA, 9 bp, Unknown
  misc_feature (1)..( 9): Result.002 file - promoters60/1396312
aaaaatatg

SEQ ID NO: 111986 - DNA, 11 bp, Unknown
  misc_feature (1)..( 11): Result.002 file - promoters60/1396312
taaagaacaaa

SEQ ID NO: 111987 - DNA, 11 bp, Unknown
  misc_feature (1)..( 11): Result.002 file - promoters60/1396312
tatagaaaaaa

SEQ ID NO: 111988 - DNA, 11 bp, Unknown
  misc_feature (1)..( 11): Result.002 file - promoters60/1396312
tattgaaatat

SEQ ID NO: 111989 - DNA, 11 bp, Unknown
  misc_feature (1)..( 11): Result.002 file - promoters60/1396312
aggagaaaaga

SEQ ID NO: 111990 - DNA, 8 bp, Unknown
  misc_feature (1)..( 8): Result.002 file - promoters60/1396312
ggaaaaag

SEQ ID NO: 111991 - DNA, 8 bp, Unknown
  misc_feature (1)..( 8): Result.002 file - promoters60/1396312
tgaaaaag

SEQ ID NO: 111992 - DNA, 8 bp, Unknown
  misc_feature (1)..( 8): Result.002 file - promoters60/1396312
ctaaaaag

SEQ ID NO: 111993 - DNA, 8 bp, Unknown
  misc_feature (1)..( 8): Result.002 file - promoters60/1396312
ggaaaata

SEQ ID NO: 111994 - DNA, 10 bp, Unknown
  misc_feature (1)..( 10): Result.002 file - promoters60/1396354
gctttgttat

SEQ ID NO: 111995 - DNA, 10 bp, Unknown
  misc_feature (1)..( 10): Result.002 file - promoters60/1396354
gctgtgtctt

SEQ ID NO: 111996 - DNA, 10 bp, Unknown
  misc_feature (1)..( 10): Result.002 file - promoters60/1396354
gctctgtaac

SEQ ID NO: 111997 - DNA, 10 bp, Unknown
  misc_feature (1)..( 10): Result.002 file - promoters60/1396354
tgtgtgtctt

SEQ ID NO: 111998 - DNA, 10 bp, Unknown
  misc_feature (1)..( 10): Result.002 file - promoters60/1396354
attgtgtcct

SEQ ID NO: 111999 - DNA, 9 bp, Unknown
  misc_feature (1)..( 9): Result.002 file - promoters60/1396354
aatatatac

SEQ ID NO: 112000 - DNA, 9 bp, Unknown
  misc_feature (1)..( 9): Result.002 file - promoters60/1396354
tctatataa

SEQ ID NO: 112001 - DNA, 9 bp, Unknown
  misc_feature (1)..( 9): Result.002 file - promoters60/1396354
aatatatat

SEQ ID NO: 112002 - DNA, 9 bp, Unknown
  misc_feature (1)..( 9): Result.002 file - promoters60/1396354
actatttaa

SEQ ID NO: 112003 - DNA, 9 bp, Unknown
  misc_feature (1)..( 9): Result.002 file - promoters60/1396354
cctagttac

SEQ ID NO: 112004 - DNA, 13 bp, Unknown
  misc_feature (1)..( 13): Result.002 file - promoters60/1396364
tagttgattcgtt

SEQ ID NO: 112005 - DNA, 13 bp, Unknown
  misc_feature (1)..( 13): Result.002 file - promoters60/1396364
atttttatttgtt

SEQ ID NO: 112006 - DNA, 13 bp, Unknown
  misc_feature (1)..( 13): Result.002 file - promoters60/1396364
tagtttattcgag

SEQ ID NO: 112007 - DNA, 14 bp, Unknown
  misc_feature (1)..( 14): Result.002 file - promoters60/1396364
tgaaatgtttagtt

SEQ ID NO: 112008 - DNA, 8 bp, Unknown
  misc_feature (1)..( 8): Result.002 file - promoters60/1396364
tattaatg

SEQ ID NO: 112009 - DNA, 8 bp, Unknown
  misc_feature (1)..( 8): Result.002 file - promoters60/1396364
tattaata

SEQ ID NO: 112010 - DNA, 8 bp, Unknown
  misc_feature (1)..( 8): Result.002 file - promoters60/1396364
agttaatg

SEQ ID NO: 112011 - DNA, 8 bp, Unknown
  misc_feature (1)..( 8): Result.002 file - promoters60/1396364
ggttaatt

SEQ ID NO: 112012 - DNA, 7 bp, Unknown
  misc_feature (1)..( 7): Result.002 file - promoters60/1396364
aatatta

SEQ ID NO: 112013 - DNA, 7 bp, Unknown
  misc_feature (1)..( 7): Result.002 file - promoters60/1396364
aatattt

SEQ ID NO: 112014 - DNA, 7 bp, Unknown
  misc_feature (1)..( 7): Result.002 file - promoters60/1396364
aatgttt

SEQ ID NO: 112015 - DNA, 7 bp, Unknown
  misc_feature (1)..( 7): Result.002 file - promoters60/1396364
aatgttt

SEQ ID NO: 112016 - DNA, 8 bp, Unknown
  misc_feature (1)..( 8): Result.002 file - promoters60/1396364
tttagtgg

SEQ ID NO: 112017 - DNA, 8 bp, Unknown
  misc_feature (1)..( 8): Result.002 file - promoters60/1396364
tttagtta

SEQ ID NO: 112018 - DNA, 8 bp, Unknown
  misc_feature (1)..( 8): Result.002 file - promoters60/1396364
tttagttt

SEQ ID NO: 112019 - DNA, 8 bp, Unknown
  misc_feature (1)..( 8): Result.002 file - promoters60/1396364
cttatttt

SEQ ID NO: 112020 - DNA, 10 bp, Unknown
  misc_feature (1)..( 10): Result.002 file - promoters60/1396364
tgaagccaaa

SEQ ID NO: 112021 - DNA, 10 bp, Unknown
  misc_feature (1)..( 10): Result.002 file - promoters60/1396364
tgaaaccaac

SEQ ID NO: 112022 - DNA, 10 bp, Unknown
  misc_feature (1)..( 10): Result.002 file - promoters60/1396364
aagaacaaac

SEQ ID NO: 112023 - DNA, 7 bp, Unknown
  misc_feature (1)..( 7): Result.002 file - promoters60/1396364
tttcgat

SEQ ID NO: 112024 - DNA, 7 bp, Unknown
  misc_feature (1)..( 7): Result.002 file - promoters60/1396364
ttttgat

SEQ ID NO: 112025 - DNA, 7 bp, Unknown
  misc_feature (1)..( 7): Result.002 file - promoters60/1396364
ttttgat

SEQ ID NO: 112026 - DNA, 9 bp, Unknown
  misc_feature (1)..( 9): Result.002 file - promoters60/1396364
aatttattt

SEQ ID NO: 112027 - DNA, 9 bp, Unknown
  misc_feature (1)..( 9): Result.002 file - promoters60/1396364
agtttattc

SEQ ID NO: 112028 - DNA, 9 bp, Unknown
  misc_feature (1)..( 9): Result.002 file - promoters60/1396364
aatatattt

SEQ ID NO: 112029 - DNA, 11 bp, Unknown
  misc_feature (1)..( 11): Result.002 file - promoters60/1396364
tacgtaacatg

SEQ ID NO: 112030 - DNA, 11 bp, Unknown
  misc_feature (1)..( 11): Result.002 file - promoters60/1396364
gtattaatatg

SEQ ID NO: 112031 - DNA, 11 bp, Unknown
  misc_feature (1)..( 11): Result.002 file - promoters60/1396364
tacgttacaat

SEQ ID NO: 112032 - DNA, 11 bp, Unknown
  misc_feature (1)..( 11): Result.002 file - promoters60/1396462
gaagaataaca

SEQ ID NO: 112033 - DNA, 11 bp, Unknown
  misc_feature (1)..( 11): Result.002 file - promoters60/1396462
gaacaattaca

SEQ ID NO: 112034 - DNA, 10 bp, Unknown
  misc_feature (1)..( 10): Result.002 file - promoters60/1396462
taaaaagtaa

SEQ ID NO: 112035 - DNA, 10 bp, Unknown
  misc_feature (1)..( 10): Result.002 file - promoters60/1396462
taataagtaa

SEQ ID NO: 112036 - DNA, 10 bp, Unknown
  misc_feature (1)..( 10): Result.002 file - promoters60/1396462
taaaaatatc

SEQ ID NO: 112037 - DNA, 7 bp, Unknown
  misc_feature (1)..( 7): Result.002 file - promoters60/1396462
ataaaac

SEQ ID NO: 112038 - DNA, 7 bp, Unknown
  misc_feature (1)..( 7): Result.002 file - promoters60/1396462
ataaaac

SEQ ID NO: 112039 - DNA, 7 bp, Unknown
  misc_feature (1)..( 7): Result.002 file - promoters60/1396462
ttgtaac

SEQ ID NO: 112040 - DNA, 7 bp, Unknown
  misc_feature (1)..( 7): Result.002 file - promoters60/1396462
ttgtaac

SEQ ID NO: 112041 - DNA, 7 bp, Unknown
  misc_feature (1)..( 7): Result.002 file - promoters60/1396462
aaaacaa

SEQ ID NO: 112042 - DNA, 7 bp, Unknown
  misc_feature (1)..( 7): Result.002 file - promoters60/1396462
aaagcaa

SEQ ID NO: 112043 - DNA, 10 bp, Unknown
  misc_feature (1)..( 10): Result.002 file - promoters60/1396462
aaacaaattt

SEQ ID NO: 112044 - DNA, 10 bp, Unknown
  misc_feature (1)..( 10): Result.002 file - promoters60/1396462
aaagaaagct

SEQ ID NO: 112045 - DNA, 10 bp, Unknown
  misc_feature (1)..( 10): Result.002 file - promoters60/1396462
ctacaatttt

SEQ ID NO: 112046 - DNA, 9 bp, Unknown
  misc_feature (1)..( 9): Result.002 file - promoters60/1396462
ttttgaaaa

SEQ ID NO: 112047 - DNA, 9 bp, Unknown
  misc_feature (1)..( 9): Result.002 file - promoters60/1396462
tttggaaaa

SEQ ID NO: 112048 - DNA, 9 bp, Unknown
  misc_feature (1)..( 9): Result.002 file - promoters60/1396462
ccttgaaac

SEQ ID NO: 112049 - DNA, 9 bp, Unknown
  misc_feature (1)..( 9): Result.002 file - promoters60/1396462
tgaaaaaaa

SEQ ID NO: 112050 - DNA, 9 bp, Unknown
  misc_feature (1)..( 9): Result.002 file - promoters60/1396462
gaaaagaaa

SEQ ID NO: 112051 - DNA, 10 bp, Unknown
  misc_feature (1)..( 10): Result.002 file - promoters60/1396462
ggaaatgaaa

SEQ ID NO: 112052 - DNA, 11 bp, Unknown
  misc_feature (1)..( 11): Result.002 file - promoters60/1396462
aaaaaaaaagt

SEQ ID NO: 112053 - DNA, 11 bp, Unknown
  misc_feature (1)..( 11): Result.002 file - promoters60/1396462
aaaataaaata

SEQ ID NO: 112054 - DNA, 11 bp, Unknown
  misc_feature (1)..( 11): Result.002 file - promoters60/1396462
gaaatgaaata

SEQ ID NO: 112055 - DNA, 13 bp, Unknown
  misc_feature (1)..( 13): Result.002 file - promoters60/1396462
aatcttttttttg

SEQ ID NO: 112056 - DNA, 13 bp, Unknown
  misc_feature (1)..( 13): Result.002 file - promoters60/1396462
aatattttctttg

SEQ ID NO: 112057 - DNA, 8 bp, Unknown
  misc_feature (1)..( 8): Result.002 file - promoters60/1396462
caatataa

SEQ ID NO: 112058 - DNA, 8 bp, Unknown
  misc_feature (1)..( 8): Result.002 file - promoters60/1396462
caaaataa

SEQ ID NO: 112059 - DNA, 6 bp, Unknown
  misc_feature (1)..( 6): Result.002 file - promoters60/1396462
gaaaaa

SEQ ID NO: 112060 - DNA, 6 bp, Unknown
  misc_feature (1)..( 6): Result.002 file - promoters60/1396462
gaaaaa

SEQ ID NO: 112061 - DNA, 9 bp, Unknown
  misc_feature (1)..( 9): Result.002 file - promoters60/1396462
aaaaggaaa

SEQ ID NO: 112062 - DNA, 9 bp, Unknown
  misc_feature (1)..( 9): Result.002 file - promoters60/1396462
aaaaggaga

SEQ ID NO: 112063 - DNA, 9 bp, Unknown
  misc_feature (1)..( 9): Result.002 file - promoters60/1396462
taaagtaaa

SEQ ID NO: 112064 - DNA, 7 bp, Unknown
  misc_feature (1)..( 7): Result.002 file - promoters60/1396462
ttgtgaa

SEQ ID NO: 112065 - DNA, 7 bp, Unknown
  misc_feature (1)..( 7): Result.002 file - promoters60/1396462
ttgagaa

SEQ ID NO: 112066 - DNA, 8 bp, Unknown
  misc_feature (1)..( 8): Result.002 file - promoters60/1396462
tatgtgag

SEQ ID NO: 112067 - DNA, 8 bp, Unknown
  misc_feature (1)..( 8): Result.002 file - promoters60/1396462
tatctgag

SEQ ID NO: 112068 - DNA, 7 bp, Unknown
  misc_feature (1)..( 7): Result.002 file - promoters60/1396462
tttattt

SEQ ID NO: 112069 - DNA, 7 bp, Unknown
  misc_feature (1)..( 7): Result.002 file - promoters60/1396462
tttgttt

SEQ ID NO: 112070 - DNA, 10 bp, Unknown
  misc_feature (1)..( 10): Result.002 file - promoters60/1396462
tttacttaat

SEQ ID NO: 112071 - DNA, 10 bp, Unknown
  misc_feature (1)..( 10): Result.002 file - promoters60/1396462
tttaattaat

SEQ ID NO: 112072 - DNA, 8 bp, Unknown
  misc_feature (1)..( 8): Result.002 file - promoters60/1396462
aatattgt

SEQ ID NO: 112073 - DNA, 8 bp, Unknown
  misc_feature (1)..( 8): Result.002 file - promoters60/1396462
aattttgt

SEQ ID NO: 112074 - DNA, 7 bp, Unknown
  misc_feature (1)..( 7): Result.002 file - promoters60/1396462
aaaaaaa

SEQ ID NO: 112075 - DNA, 7 bp, Unknown
  misc_feature (1)..( 7): Result.002 file - promoters60/1396462
aaaaaaa

SEQ ID NO: 112076 - DNA, 6 bp, Unknown
  misc_feature (1)..( 6): Result.002 file - promoters60/1396462
taataa

SEQ ID NO: 112077 - DNA, 6 bp, Unknown
  misc_feature (1)..( 6): Result.002 file - promoters60/1396462
taataa

SEQ ID NO: 112078 - DNA, 7 bp, Unknown
  misc_feature (1)..( 7): Result.002 file - promoters60/1396462
aatcggg

SEQ ID NO: 112079 - DNA, 7 bp, Unknown
  misc_feature (1)..( 7): Result.002 file - promoters60/1396462
aattggg

SEQ ID NO: 112080 - DNA, 7 bp, Unknown
  misc_feature (1)..( 7): Result.002 file - promoters60/1396462
cccacta

SEQ ID NO: 112081 - DNA, 7 bp, Unknown
  misc_feature (1)..( 7): Result.002 file - promoters60/1396462
cccacta

SEQ ID NO: 112082 - DNA, 7 bp, Unknown
  misc_feature (1)..( 7): Result.002 file - promoters60/1396462
gtatata

SEQ ID NO: 112083 - DNA, 7 bp, Unknown
  misc_feature (1)..( 7): Result.002 file - promoters60/1396462
gtatata

SEQ ID NO: 112084 - DNA, 11 bp, Unknown
  misc_feature (1)..( 11): Result.002 file - promoters60/1396469
ttttcttataa

SEQ ID NO: 112085 - DNA, 11 bp, Unknown
  misc_feature (1)..( 11): Result.002 file - promoters60/1396469
cattcttattt

SEQ ID NO: 112086 - DNA, 11 bp, Unknown
  misc_feature (1)..( 11): Result.002 file - promoters60/1396469
catgctttcaa

SEQ ID NO: 112087 - DNA, 11 bp, Unknown
  misc_feature (1)..( 11): Result.002 file - promoters60/1396469
acaacttattt

SEQ ID NO: 112088 - DNA, 11 bp, Unknown
  misc_feature (1)..( 11): Result.002 file - promoters60/1396469
cgtttttattt

SEQ ID NO: 112089 - DNA, 11 bp, Unknown
  misc_feature (1)..( 11): Result.002 file - promoters60/1396469
taacttacaaa

SEQ ID NO: 112090 - DNA, 11 bp, Unknown
  misc_feature (1)..( 11): Result.002 file - promoters60/1396469
atacttactta

SEQ ID NO: 112091 - DNA, 11 bp, Unknown
  misc_feature (1)..( 11): Result.002 file - promoters60/1396469
ggccttccaaa

SEQ ID NO: 112092 - DNA, 11 bp, Unknown
  misc_feature (1)..( 11): Result.002 file - promoters60/1396469
atacgtacgta

SEQ ID NO: 112093 - DNA, 13 bp, Unknown
  misc_feature (1)..( 13): Result.002 file - promoters60/1396469
tacaatataaaca

SEQ ID NO: 112094 - DNA, 13 bp, Unknown
  misc_feature (1)..( 13): Result.002 file - promoters60/1396469
tcacatattaaca

SEQ ID NO: 112095 - DNA, 13 bp, Unknown
  misc_feature (1)..( 13): Result.002 file - promoters60/1396469
tcatatatataca

SEQ ID NO: 112096 - DNA, 13 bp, Unknown
  misc_feature (1)..( 13): Result.002 file - promoters60/1396469
gtatatataaaga

SEQ ID NO: 112097 - DNA, 13 bp, Unknown
  misc_feature (1)..( 13): Result.002 file - promoters60/1396469
actcatatatatc

SEQ ID NO: 112098 - DNA, 12 bp, Unknown
  misc_feature (1)..( 12): Result.002 file - promoters60/1396469
acttttctttct

SEQ ID NO: 112099 - DNA, 12 bp, Unknown
  misc_feature (1)..( 12): Result.002 file - promoters60/1396469
aattttttttct

SEQ ID NO: 112100 - DNA, 12 bp, Unknown
  misc_feature (1)..( 12): Result.002 file - promoters60/1396469
actttttttaca

SEQ ID NO: 112101 - DNA, 12 bp, Unknown
  misc_feature (1)..( 12): Result.002 file - promoters60/1396469
aatttttagtca

SEQ ID NO: 112102 - DNA, 14 bp, Unknown
  misc_feature (1)..( 14): Result.002 file - promoters60/1396469
tcagatatacattg

SEQ ID NO: 112103 - DNA, 14 bp, Unknown
  misc_feature (1)..( 14): Result.002 file - promoters60/1396469
ttttctataaatta

SEQ ID NO: 112104 - DNA, 14 bp, Unknown
  misc_feature (1)..( 14): Result.002 file - promoters60/1396469
ttttttatagatta

SEQ ID NO: 112105 - DNA, 14 bp, Unknown
  misc_feature (1)..( 14): Result.002 file - promoters60/1396469
agagctaaaaacgg

SEQ ID NO: 112106 - DNA, 7 bp, Unknown
  misc_feature (1)..( 7): Result.002 file - promoters60/1396469
tacgaaa

SEQ ID NO: 112107 - DNA, 7 bp, Unknown
  misc_feature (1)..( 7): Result.002 file - promoters60/1396469
tactaaa

SEQ ID NO: 112108 - DNA, 7 bp, Unknown
  misc_feature (1)..( 7): Result.002 file - promoters60/1396469
aactaaa

SEQ ID NO: 112109 - DNA, 7 bp, Unknown
  misc_feature (1)..( 7): Result.002 file - promoters60/1396469
aactaaa

SEQ ID NO: 112110 - DNA, 14 bp, Unknown
  misc_feature (1)..( 14): Result.002 file - promoters60/1396469
ttttttatagatta

SEQ ID NO: 112111 - DNA, 14 bp, Unknown
  misc_feature (1)..( 14): Result.002 file - promoters60/1396469
ctttatatagagac

SEQ ID NO: 112112 - DNA, 14 bp, Unknown
  misc_feature (1)..( 14): Result.002 file - promoters60/1396469
ttttctataaatta

SEQ ID NO: 112113 - DNA, 14 bp, Unknown
  misc_feature (1)..( 14): Result.002 file - promoters60/1396469
agagctaaaaacgg

SEQ ID NO: 112114 - DNA, 9 bp, Unknown
  misc_feature (1)..( 9): Result.002 file - promoters60/1396469
aactaaacc

SEQ ID NO: 112115 - DNA, 9 bp, Unknown
  misc_feature (1)..( 9): Result.002 file - promoters60/1396469
aactaaacc

SEQ ID NO: 112116 - DNA, 9 bp, Unknown
  misc_feature (1)..( 9): Result.002 file - promoters60/1396469
aactaatca

SEQ ID NO: 112117 - DNA, 9 bp, Unknown
  misc_feature (1)..( 9): Result.002 file - promoters60/1396469
tactaaaga

SEQ ID NO: 112118 - DNA, 13 bp, Unknown
  misc_feature (1)..( 13): Result.002 file - promoters60/1396482
aaaacaaaacata

SEQ ID NO: 112119 - DNA, 13 bp, Unknown
  misc_feature (1)..( 13): Result.002 file - promoters60/1396482
agtttaaaaaata

SEQ ID NO: 112120 - DNA, 13 bp, Unknown
  misc_feature (1)..( 13): Result.002 file - promoters60/1396482
tttagaaacaatg

SEQ ID NO: 112121 - DNA, 13 bp, Unknown
  misc_feature (1)..( 13): Result.002 file - promoters60/1396482
ttaataaattttg

SEQ ID NO: 112122 - DNA, 13 bp, Unknown
  misc_feature (1)..( 13): Result.002 file - promoters60/1396482
tcaattaatcttt

SEQ ID NO: 112123 - DNA, 7 bp, Unknown
  misc_feature (1)..( 7): Result.002 file - promoters60/1396519
gttacaa

SEQ ID NO: 112124 - DNA, 7 bp, Unknown
  misc_feature (1)..( 7): Result.002 file - promoters60/1396519
gttacaa

SEQ ID NO: 112125 - DNA, 7 bp, Unknown
  misc_feature (1)..( 7): Result.002 file - promoters60/1396519
aaaattt

SEQ ID NO: 112126 - DNA, 7 bp, Unknown
  misc_feature (1)..( 7): Result.002 file - promoters60/1396519
aaacttt

SEQ ID NO: 112127 - DNA, 6 bp, Unknown
  misc_feature (1)..( 6): Result.002 file - promoters60/1396519
accaaa

SEQ ID NO: 112128 - DNA, 6 bp, Unknown
  misc_feature (1)..( 6): Result.002 file - promoters60/1396519
accaaa

SEQ ID NO: 112129 - DNA, 6 bp, Unknown
  misc_feature (1)..( 6): Result.002 file - promoters60/1396519
gaaaaa

SEQ ID NO: 112130 - DNA, 6 bp, Unknown
  misc_feature (1)..( 6): Result.002 file - promoters60/1396519
gaaaaa

SEQ ID NO: 112131 - DNA, 7 bp, Unknown
  misc_feature (1)..( 7): Result.002 file - promoters60/1396519
aaataaa

SEQ ID NO: 112132 - DNA, 7 bp, Unknown
  misc_feature (1)..( 7): Result.002 file - promoters60/1396519
aaacaaa

SEQ ID NO: 112133 - DNA, 6 bp, Unknown
  misc_feature (1)..( 6): Result.002 file - promoters60/1396519
caaaaa

SEQ ID NO: 112134 - DNA, 6 bp, Unknown
  misc_feature (1)..( 6): Result.002 file - promoters60/1396519
caaaaa

SEQ ID NO: 112135 - DNA, 8 bp, Unknown
  misc_feature (1)..( 8): Result.002 file - promoters60/1396519
agaataaa

SEQ ID NO: 112136 - DNA, 8 bp, Unknown
  misc_feature (1)..( 8): Result.002 file - promoters60/1396519
agaataaa

SEQ ID NO: 112137 - DNA, 7 bp, Unknown
  misc_feature (1)..( 7): Result.002 file - promoters60/1396519
atataaa

SEQ ID NO: 112138 - DNA, 7 bp, Unknown
  misc_feature (1)..( 7): Result.002 file - promoters60/1396519
atataat

SEQ ID NO: 112139 - DNA, 7 bp, Unknown
  misc_feature (1)..( 7): Result.002 file - promoters60/1396519
atataaa

SEQ ID NO: 112140 - DNA, 6 bp, Unknown
  misc_feature (1)..( 6): Result.002 file - promoters60/1396519
aaaaag

SEQ ID NO: 112141 - DNA, 6 bp, Unknown
  misc_feature (1)..( 6): Result.002 file - promoters60/1396519
aaaaag

SEQ ID NO: 112142 - DNA, 7 bp, Unknown
  misc_feature (1)..( 7): Result.002 file - promoters60/1396519
aagaaat

SEQ ID NO: 112143 - DNA, 7 bp, Unknown
  misc_feature (1)..( 7): Result.002 file - promoters60/1396519
aagcaat

SEQ ID NO: 112144 - DNA, 10 bp, Unknown
  misc_feature (1)..( 10): Result.002 file - promoters60/1396519
gaacataaaa

SEQ ID NO: 112145 - DNA, 10 bp, Unknown
  misc_feature (1)..( 10): Result.002 file - promoters60/1396519
gaaaataaaa

SEQ ID NO: 112146 - DNA, 7 bp, Unknown
  misc_feature (1)..( 7): Result.002 file - promoters60/1396519
aaaataa

SEQ ID NO: 112147 - DNA, 7 bp, Unknown
  misc_feature (1)..( 7): Result.002 file - promoters60/1396519
aaaataa

SEQ ID NO: 112148 - DNA, 8 bp, Unknown
  misc_feature (1)..( 8): Result.002 file - promoters60/1396519
ttttttta

SEQ ID NO: 112149 - DNA, 8 bp, Unknown
  misc_feature (1)..( 8): Result.002 file - promoters60/1396519
tttgttta

SEQ ID NO: 112150 - DNA, 6 bp, Unknown
  misc_feature (1)..( 6): Result.002 file - promoters60/1396519
aagtta

SEQ ID NO: 112151 - DNA, 6 bp, Unknown
  misc_feature (1)..( 6): Result.002 file - promoters60/1396519
aagtta

SEQ ID NO: 112152 - DNA, 9 bp, Unknown
  misc_feature (1)..( 9): Result.002 file - promoters60/1396519
aagtgtaaa

SEQ ID NO: 112153 - DNA, 9 bp, Unknown
  misc_feature (1)..( 9): Result.002 file - promoters60/1396519
aagagtaaa

SEQ ID NO: 112154 - DNA, 11 bp, Unknown
  misc_feature (1)..( 11): Result.002 file - promoters60/1396519
aaacaagctaa

SEQ ID NO: 112155 - DNA, 11 bp, Unknown
  misc_feature (1)..( 11): Result.002 file - promoters60/1396519
aaacaaggtaa

SEQ ID NO: 112156 - DNA, 8 bp, Unknown
  misc_feature (1)..( 8): Result.002 file - promoters60/1396519
agatatag

SEQ ID NO: 112157 - DNA, 8 bp, Unknown
  misc_feature (1)..( 8): Result.002 file - promoters60/1396519
agagatag

SEQ ID NO: 112158 - DNA, 13 bp, Unknown
  misc_feature (1)..( 13): Result.002 file - promoters60/1396519
acatttttagata

SEQ ID NO: 112159 - DNA, 13 bp, Unknown
  misc_feature (1)..( 13): Result.002 file - promoters60/1396519
acattttcagata

SEQ ID NO: 112160 - DNA, 8 bp, Unknown
  misc_feature (1)..( 8): Result.002 file - promoters60/1396519
tgcaggag

SEQ ID NO: 112161 - DNA, 8 bp, Unknown
  misc_feature (1)..( 8): Result.002 file - promoters60/1396519
tgcaggag

SEQ ID NO: 112162 - DNA, 7 bp, Unknown
  misc_feature (1)..( 7): Result.002 file - promoters60/1396519
attcatg

SEQ ID NO: 112163 - DNA, 7 bp, Unknown
  misc_feature (1)..( 7): Result.002 file - promoters60/1396519
atttatg

SEQ ID NO: 112164 - DNA, 7 bp, Unknown
  misc_feature (1)..( 7): Result.002 file - promoters60/1396519
cacgaga

SEQ ID NO: 112165 - DNA, 7 bp, Unknown
  misc_feature (1)..( 7): Result.002 file - promoters60/1396519
cactaga

SEQ ID NO: 112166 - DNA, 6 bp, Unknown
  misc_feature (1)..( 6): Result.002 file - promoters60/1396519
gctaag

SEQ ID NO: 112167 - DNA, 6 bp, Unknown
  misc_feature (1)..( 6): Result.002 file - promoters60/1396519
gctaag

SEQ ID NO: 112168 - DNA, 7 bp, Unknown
  misc_feature (1)..( 7): Result.002 file - promoters60/1396519
aaataaa

SEQ ID NO: 112169 - DNA, 7 bp, Unknown
  misc_feature (1)..( 7): Result.002 file - promoters60/1396519
aaagaaa

SEQ ID NO: 112170 - DNA, 6 bp, Unknown
  misc_feature (1)..( 6): Result.002 file - promoters60/1396519
taaaaa

SEQ ID NO: 112171 - DNA, 6 bp, Unknown
  misc_feature (1)..( 6): Result.002 file - promoters60/1396519
taaaaa

SEQ ID NO: 112172 - DNA, 7 bp, Unknown
  misc_feature (1)..( 7): Result.002 file - promoters60/1396519
agatttc

SEQ ID NO: 112173 - DNA, 7 bp, Unknown
  misc_feature (1)..( 7): Result.002 file - promoters60/1396519
agatttc

SEQ ID NO: 112174 - DNA, 7 bp, Unknown
  misc_feature (1)..( 7): Result.002 file - promoters60/1396767
atgtata

SEQ ID NO: 112175 - DNA, 7 bp, Unknown
  misc_feature (1)..( 7): Result.002 file - promoters60/1396767
atgtata

SEQ ID NO: 112176 - DNA, 7 bp, Unknown
  misc_feature (1)..( 7): Result.002 file - promoters60/1396767
ttttcag

SEQ ID NO: 112177 - DNA, 7 bp, Unknown
  misc_feature (1)..( 7): Result.002 file - promoters60/1396767
tttacag

SEQ ID NO: 112178 - DNA, 7 bp, Unknown
  misc_feature (1)..( 7): Result.002 file - promoters60/1396767
tactatt

SEQ ID NO: 112179 - DNA, 7 bp, Unknown
  misc_feature (1)..( 7): Result.002 file - promoters60/1396767
tacgatt

SEQ ID NO: 112180 - DNA, 8 bp, Unknown
  misc_feature (1)..( 8): Result.002 file - promoters60/1396767
tttgattt

SEQ ID NO: 112181 - DNA, 8 bp, Unknown
  misc_feature (1)..( 8): Result.002 file - promoters60/1396767
tttgtttt

SEQ ID NO: 112182 - DNA, 7 bp, Unknown
  misc_feature (1)..( 7): Result.002 file - promoters60/1396767
aaaatac

SEQ ID NO: 112183 - DNA, 7 bp, Unknown
  misc_feature (1)..( 7): Result.002 file - promoters60/1396767
aaattac

SEQ ID NO: 112184 - DNA, 9 bp, Unknown
  misc_feature (1)..( 9): Result.002 file - promoters60/1396767
taaacaaaa

SEQ ID NO: 112185 - DNA, 9 bp, Unknown
  misc_feature (1)..( 9): Result.002 file - promoters60/1396767
caaactaaa

SEQ ID NO: 112186 - DNA, 9 bp, Unknown
  misc_feature (1)..( 9): Result.002 file - promoters60/1396767
caagctaga

SEQ ID NO: 112187 - DNA, 8 bp, Unknown
  misc_feature (1)..( 8): Result.002 file - promoters60/1396767
tgttttaa

SEQ ID NO: 112188 - DNA, 8 bp, Unknown
  misc_feature (1)..( 8): Result.002 file - promoters60/1396767
tgttgtaa

SEQ ID NO: 112189 - DNA, 7 bp, Unknown
  misc_feature (1)..( 7): Result.002 file - promoters60/1396767
aaaaaaa

SEQ ID NO: 112190 - DNA, 7 bp, Unknown
  misc_feature (1)..( 7): Result.002 file - promoters60/1396767
aaagaaa

SEQ ID NO: 112191 - DNA, 8 bp, Unknown
  misc_feature (1)..( 8): Result.002 file - promoters60/1396767
gttagaaa

SEQ ID NO: 112192 - DNA, 8 bp, Unknown
  misc_feature (1)..( 8): Result.002 file - promoters60/1396767
cttacaaa

SEQ ID NO: 112193 - DNA, 8 bp, Unknown
  misc_feature (1)..( 8): Result.002 file - promoters60/1396767
cttacatt

SEQ ID NO: 112194 - DNA, 7 bp, Unknown
  misc_feature (1)..( 7): Result.002 file - promoters60/1396767
aagaaaa

SEQ ID NO: 112195 - DNA, 7 bp, Unknown
  misc_feature (1)..( 7): Result.002 file - promoters60/1396767
aagaaaa

SEQ ID NO: 112196 - DNA, 6 bp, Unknown
  misc_feature (1)..( 6): Result.002 file - promoters60/1396767
gccttg

SEQ ID NO: 112197 - DNA, 6 bp, Unknown
  misc_feature (1)..( 6): Result.002 file - promoters60/1396767
gccttg

SEQ ID NO: 112198 - DNA, 8 bp, Unknown
  misc_feature (1)..( 8): Result.002 file - promoters60/1396767
aaacttaa

SEQ ID NO: 112199 - DNA, 8 bp, Unknown
  misc_feature (1)..( 8): Result.002 file - promoters60/1396767
aaagttaa

SEQ ID NO: 112200 - DNA, 8 bp, Unknown
  misc_feature (1)..( 8): Result.002 file - promoters60/1396767
ttggtgaa

SEQ ID NO: 112201 - DNA, 8 bp, Unknown
  misc_feature (1)..( 8): Result.002 file - promoters60/1396767
ttgatgaa

SEQ ID NO: 112202 - DNA, 8 bp, Unknown
  misc_feature (1)..( 8): Result.002 file - promoters60/1396767
agctttac

SEQ ID NO: 112203 - DNA, 8 bp, Unknown
  misc_feature (1)..( 8): Result.002 file - promoters60/1396767
agccttac

SEQ ID NO: 112204 - DNA, 6 bp, Unknown
  misc_feature (1)..( 6): Result.002 file - promoters60/1396767
ttgcaa

SEQ ID NO: 112205 - DNA, 6 bp, Unknown
  misc_feature (1)..( 6): Result.002 file - promoters60/1396767
ttgcaa

SEQ ID NO: 112206 - DNA, 6 bp, Unknown
  misc_feature (1)..( 6): Result.002 file - promoters60/1396767
ttttga

SEQ ID NO: 112207 - DNA, 6 bp, Unknown
  misc_feature (1)..( 6): Result.002 file - promoters60/1396767
ttttga

SEQ ID NO: 112208 - DNA, 8 bp, Unknown
  misc_feature (1)..( 8): Result.002 file - promoters60/1396767
agaaaaga

SEQ ID NO: 112209 - DNA, 8 bp, Unknown
  misc_feature (1)..( 8): Result.002 file - promoters60/1396767
agaacaga

SEQ ID NO: 112210 - DNA, 9 bp, Unknown
  misc_feature (1)..( 9): Result.002 file - promoters60/1396816
agattagaa

SEQ ID NO: 112211 - DNA, 9 bp, Unknown
  misc_feature (1)..( 9): Result.002 file - promoters60/1396816
agatcagat

SEQ ID NO: 112212 - DNA, 9 bp, Unknown
  misc_feature (1)..( 9): Result.002 file - promoters60/1396816
taatttgaa

SEQ ID NO: 112213 - DNA, 9 bp, Unknown
  misc_feature (1)..( 9): Result.002 file - promoters60/1396816
tgatttgag

SEQ ID NO: 112214 - DNA, 10 bp, Unknown
  misc_feature (1)..( 10): Result.002 file - promoters60/1396816
gatgacaaac

SEQ ID NO: 112215 - DNA, 10 bp, Unknown
  misc_feature (1)..( 10): Result.002 file - promoters60/1396816
catgacaaga

SEQ ID NO: 112216 - DNA, 10 bp, Unknown
  misc_feature (1)..( 10): Result.002 file - promoters60/1396816
gacgagaaag

SEQ ID NO: 112217 - DNA, 11 bp, Unknown
  misc_feature (1)..( 11): Result.002 file - promoters60/1396816
agagagcaagg

SEQ ID NO: 112218 - DNA, 6 bp, Unknown
  misc_feature (1)..( 6): Result.002 file - promoters60/1396951
atttgc

SEQ ID NO: 112219 - DNA, 6 bp, Unknown
  misc_feature (1)..( 6): Result.002 file - promoters60/1396951
atttgc

SEQ ID NO: 112220 - DNA, 6 bp, Unknown
  misc_feature (1)..( 6): Result.002 file - promoters60/1396951
aaaaat

SEQ ID NO: 112221 - DNA, 6 bp, Unknown
  misc_feature (1)..( 6): Result.002 file - promoters60/1396951
aaaaat

SEQ ID NO: 112222 - DNA, 6 bp, Unknown
  misc_feature (1)..( 6): Result.002 file - promoters60/1396951
ttcaaa

SEQ ID NO: 112223 - DNA, 6 bp, Unknown
  misc_feature (1)..( 6): Result.002 file - promoters60/1396951
ttcaaa

SEQ ID NO: 112224 - DNA, 7 bp, Unknown
  misc_feature (1)..( 7): Result.002 file - promoters60/1396951
aaatttc

SEQ ID NO: 112225 - DNA, 7 bp, Unknown
  misc_feature (1)..( 7): Result.002 file - promoters60/1396951
aaacttc

SEQ ID NO: 112226 - DNA, 6 bp, Unknown
  misc_feature (1)..( 6): Result.002 file - promoters60/1396951
agaaga

SEQ ID NO: 112227 - DNA, 6 bp, Unknown
  misc_feature (1)..( 6): Result.002 file - promoters60/1396951
agaaga

SEQ ID NO: 112228 - DNA, 6 bp, Unknown
  misc_feature (1)..( 6): Result.002 file - promoters60/1396951
aaatgc

SEQ ID NO: 112229 - DNA, 6 bp, Unknown
  misc_feature (1)..( 6): Result.002 file - promoters60/1396951
aaatgc

SEQ ID NO: 112230 - DNA, 8 bp, Unknown
  misc_feature (1)..( 8): Result.002 file - promoters60/1396951
aaaatgta

SEQ ID NO: 112231 - DNA, 8 bp, Unknown
  misc_feature (1)..( 8): Result.002 file - promoters60/1396951
aaattgta

SEQ ID NO: 112232 - DNA, 7 bp, Unknown
  misc_feature (1)..( 7): Result.002 file - promoters60/1396951
acagtta

SEQ ID NO: 112233 - DNA, 7 bp, Unknown
  misc_feature (1)..( 7): Result.002 file - promoters60/1396951
acaatta

SEQ ID NO: 112234 - DNA, 8 bp, Unknown
  misc_feature (1)..( 8): Result.002 file - promoters60/1396951
tcttcttc

SEQ ID NO: 112235 - DNA, 8 bp, Unknown
  misc_feature (1)..( 8): Result.002 file - promoters60/1396951
tcttcttc

SEQ ID NO: 112236 - DNA, 6 bp, Unknown
  misc_feature (1)..( 6): Result.002 file - promoters60/1396951
aaaaat

SEQ ID NO: 112237 - DNA, 6 bp, Unknown
  misc_feature (1)..( 6): Result.002 file - promoters60/1396951
aaaaat

SEQ ID NO: 112238 - DNA, 8 bp, Unknown
  misc_feature (1)..( 8): Result.002 file - promoters60/1396951
attaattt

SEQ ID NO: 112239 - DNA, 8 bp, Unknown
  misc_feature (1)..( 8): Result.002 file - promoters60/1396951
atttattt

SEQ ID NO: 112240 - DNA, 8 bp, Unknown
  misc_feature (1)..( 8): Result.002 file - promoters60/1396951
gtttggtt

SEQ ID NO: 112241 - DNA, 8 bp, Unknown
  misc_feature (1)..( 8): Result.002 file - promoters60/1396951
gttaggtt

SEQ ID NO: 112242 - DNA, 6 bp, Unknown
  misc_feature (1)..( 6): Result.002 file - promoters60/1396951
ttatat

SEQ ID NO: 112243 - DNA, 6 bp, Unknown
  misc_feature (1)..( 6): Result.002 file - promoters60/1396951
ttatat

SEQ ID NO: 112244 - DNA, 7 bp, Unknown
  misc_feature (1)..( 7): Result.002 file - promoters60/1396951
aaaagta

SEQ ID NO: 112245 - DNA, 7 bp, Unknown
  misc_feature (1)..( 7): Result.002 file - promoters60/1396951
aaaagta

SEQ ID NO: 112246 - DNA, 7 bp, Unknown
  misc_feature (1)..( 7): Result.002 file - promoters60/1396951
gtagtat

SEQ ID NO: 112247 - DNA, 7 bp, Unknown
  misc_feature (1)..( 7): Result.002 file - promoters60/1396951
gtaatat

SEQ ID NO: 112248 - DNA, 10 bp, Unknown
  misc_feature (1)..( 10): Result.002 file - promoters60/1396951
aaaatacaac

SEQ ID NO: 112249 - DNA, 10 bp, Unknown
  misc_feature (1)..( 10): Result.002 file - promoters60/1396951
aaaatataac

SEQ ID NO: 112250 - DNA, 7 bp, Unknown
  misc_feature (1)..( 7): Result.002 file - promoters60/1396951
attaaat

SEQ ID NO: 112251 - DNA, 7 bp, Unknown
  misc_feature (1)..( 7): Result.002 file - promoters60/1396951
atttaat

SEQ ID NO: 112252 - DNA, 10 bp, Unknown
  misc_feature (1)..( 10): Result.002 file - promoters60/1396951
taagaaataa

SEQ ID NO: 112253 - DNA, 10 bp, Unknown
  misc_feature (1)..( 10): Result.002 file - promoters60/1396951
taataaataa

SEQ ID NO: 112254 - DNA, 6 bp, Unknown
  misc_feature (1)..( 6): Result.002 file - promoters60/1396951
aataat

SEQ ID NO: 112255 - DNA, 6 bp, Unknown
  misc_feature (1)..( 6): Result.002 file - promoters60/1396951
aataat

SEQ ID NO: 112256 - DNA, 7 bp, Unknown
  misc_feature (1)..( 7): Result.002 file - promoters60/1396951
tttaata

SEQ ID NO: 112257 - DNA, 7 bp, Unknown
  misc_feature (1)..( 7): Result.002 file - promoters60/1396951
tttgata

SEQ ID NO: 112258 - DNA, 8 bp, Unknown
  misc_feature (1)..( 8): Result.002 file - promoters60/1396951
acttgatt

SEQ ID NO: 112259 - DNA, 8 bp, Unknown
  misc_feature (1)..( 8): Result.002 file - promoters60/1396951
actttatt

SEQ ID NO: 112260 - DNA, 11 bp, Unknown
  misc_feature (1)..( 11): Result.002 file - promoters60/1396951
ccaaaatcaca

SEQ ID NO: 112261 - DNA, 11 bp, Unknown
  misc_feature (1)..( 11): Result.002 file - promoters60/1396951
ccaaaatcaca

SEQ ID NO: 112262 - DNA, 9 bp, Unknown
  misc_feature (1)..( 9): Result.002 file - promoters60/1397029
taatcgttt

SEQ ID NO: 112263 - DNA, 9 bp, Unknown
  misc_feature (1)..( 9): Result.002 file - promoters60/1397029
taagcgtag

SEQ ID NO: 112264 - DNA, 9 bp, Unknown
  misc_feature (1)..( 9): Result.002 file - promoters60/1397029
caatccttt

SEQ ID NO: 112265 - DNA, 7 bp, Unknown
  misc_feature (1)..( 7): Result.002 file - promoters60/1397029
ttttagt

SEQ ID NO: 112266 - DNA, 7 bp, Unknown
  misc_feature (1)..( 7): Result.002 file - promoters60/1397029
gtttagt

SEQ ID NO: 112267 - DNA, 7 bp, Unknown
  misc_feature (1)..( 7): Result.002 file - promoters60/1397029
ttttaga

SEQ ID NO: 112268 - DNA, 12 bp, Unknown
  misc_feature (1)..( 12): Result.002 file - promoters60/1397029
cgggtttatgtt

SEQ ID NO: 112269 - DNA, 12 bp, Unknown
  misc_feature (1)..( 12): Result.002 file - promoters60/1397029
aacctttatgta

SEQ ID NO: 112270 - DNA, 12 bp, Unknown
  misc_feature (1)..( 12): Result.002 file - promoters60/1397029
aacttttaagta

SEQ ID NO: 112271 - DNA, 10 bp, Unknown
  misc_feature (1)..( 10): Result.002 file - promoters60/1397029
tttcgatgta

SEQ ID NO: 112272 - DNA, 10 bp, Unknown
  misc_feature (1)..( 10): Result.002 file - promoters60/1397029
ttttgatttg

SEQ ID NO: 112273 - DNA, 10 bp, Unknown
  misc_feature (1)..( 10): Result.002 file - promoters60/1397029
ctttgctttg

SEQ ID NO: 112274 - DNA, 12 bp, Unknown
  misc_feature (1)..( 12): Result.002 file - promoters60/1397029
ttattttcagta

SEQ ID NO: 112275 - DNA, 12 bp, Unknown
  misc_feature (1)..( 12): Result.002 file - promoters60/1397029
aacttttaagta

SEQ ID NO: 112276 - DNA, 12 bp, Unknown
  misc_feature (1)..( 12): Result.002 file - promoters60/1397029
aacctttatgta

SEQ ID NO: 112277 - DNA, 7 bp, Unknown
  misc_feature (1)..( 7): Result.002 file - promoters60/1397033
aacggag

SEQ ID NO: 112278 - DNA, 7 bp, Unknown
  misc_feature (1)..( 7): Result.002 file - promoters60/1397033
aacagag

SEQ ID NO: 112279 - DNA, 6 bp, Unknown
  misc_feature (1)..( 6): Result.002 file - promoters60/1397033
tttctc

SEQ ID NO: 112280 - DNA, 6 bp, Unknown
  misc_feature (1)..( 6): Result.002 file - promoters60/1397033
tttctc

SEQ ID NO: 112281 - DNA, 6 bp, Unknown
  misc_feature (1)..( 6): Result.002 file - promoters60/1397033
tttgtc

SEQ ID NO: 112282 - DNA, 6 bp, Unknown
  misc_feature (1)..( 6): Result.002 file - promoters60/1397033
tttgtc

SEQ ID NO: 112283 - DNA, 7 bp, Unknown
  misc_feature (1)..( 7): Result.002 file - promoters60/1397033
agagtca

SEQ ID NO: 112284 - DNA, 7 bp, Unknown
  misc_feature (1)..( 7): Result.002 file - promoters60/1397033
agagtca

SEQ ID NO: 112285 - DNA, 7 bp, Unknown
  misc_feature (1)..( 7): Result.002 file - promoters60/1397033
aaggaaa

SEQ ID NO: 112286 - DNA, 7 bp, Unknown
  misc_feature (1)..( 7): Result.002 file - promoters60/1397033
aagcaaa

SEQ ID NO: 112287 - DNA, 7 bp, Unknown
  misc_feature (1)..( 7): Result.002 file - promoters60/1397033
aaaattc

SEQ ID NO: 112288 - DNA, 7 bp, Unknown
  misc_feature (1)..( 7): Result.002 file - promoters60/1397033
aaatttc

SEQ ID NO: 112289 - DNA, 11 bp, Unknown
  misc_feature (1)..( 11): Result.002 file - promoters60/1397033
atataaggaca

SEQ ID NO: 112290 - DNA, 11 bp, Unknown
  misc_feature (1)..( 11): Result.002 file - promoters60/1397033
atagaagtaca

SEQ ID NO: 112291 - DNA, 8 bp, Unknown
  misc_feature (1)..( 8): Result.002 file - promoters60/1397033
atcttgaa

SEQ ID NO: 112292 - DNA, 8 bp, Unknown
  misc_feature (1)..( 8): Result.002 file - promoters60/1397033
atctggaa

SEQ ID NO: 112293 - DNA, 13 bp, Unknown
  misc_feature (1)..( 13): Result.002 file - promoters60/1397033
attctcgcacgaa

SEQ ID NO: 112294 - DNA, 13 bp, Unknown
  misc_feature (1)..( 13): Result.002 file - promoters60/1397033
attttcgctcgaa

SEQ ID NO: 112295 - DNA, 6 bp, Unknown
  misc_feature (1)..( 6): Result.002 file - promoters60/1397033
ttctct

SEQ ID NO: 112296 - DNA, 6 bp, Unknown
  misc_feature (1)..( 6): Result.002 file - promoters60/1397033
ttctct

SEQ ID NO: 112297 - DNA, 6 bp, Unknown
  misc_feature (1)..( 6): Result.002 file - promoters60/1397033
aaataa

SEQ ID NO: 112298 - DNA, 6 bp, Unknown
  misc_feature (1)..( 6): Result.002 file - promoters60/1397033
aaataa

SEQ ID NO: 112299 - DNA, 7 bp, Unknown
  misc_feature (1)..( 7): Result.002 file - promoters60/1397033
attcttt

SEQ ID NO: 112300 - DNA, 7 bp, Unknown
  misc_feature (1)..( 7): Result.002 file - promoters60/1397033
atttttt

SEQ ID NO: 112301 - DNA, 7 bp, Unknown
  misc_feature (1)..( 7): Result.002 file - promoters60/1397033
atttttc

SEQ ID NO: 112302 - DNA, 6 bp, Unknown
  misc_feature (1)..( 6): Result.002 file - promoters60/1397033
ttcatt

SEQ ID NO: 112303 - DNA, 6 bp, Unknown
  misc_feature (1)..( 6): Result.002 file - promoters60/1397033
ttcatt

SEQ ID NO: 112304 - DNA, 11 bp, Unknown
  misc_feature (1)..( 11): Result.002 file - promoters60/1397080
ttccatcgaat

SEQ ID NO: 112305 - DNA, 11 bp, Unknown
  misc_feature (1)..( 11): Result.002 file - promoters60/1397080
acaaatcaaat

SEQ ID NO: 112306 - DNA, 11 bp, Unknown
  misc_feature (1)..( 11): Result.002 file - promoters60/1397080
ctccaacgaac

SEQ ID NO: 112307 - DNA, 11 bp, Unknown
  misc_feature (1)..( 11): Result.002 file - promoters60/1397080
gaaaaacaaaa

SEQ ID NO: 112308 - DNA, 11 bp, Unknown
  misc_feature (1)..( 11): Result.002 file - promoters60/1397080
taaaaacgggt

SEQ ID NO: 112309 - DNA, 11 bp, Unknown
  misc_feature (1)..( 11): Result.002 file - promoters60/1397080
gaataacgata

SEQ ID NO: 112310 - DNA, 11 bp, Unknown
  misc_feature (1)..( 11): Result.002 file - promoters60/1397080
ctccgacgtgt

SEQ ID NO: 112311 - DNA, 13 bp, Unknown
  misc_feature (1)..( 13): Result.002 file - promoters60/1397080
aactacacatagt

SEQ ID NO: 112312 - DNA, 13 bp, Unknown
  misc_feature (1)..( 13): Result.002 file - promoters60/1397080
agctaaacaaaaa

SEQ ID NO: 112313 - DNA, 13 bp, Unknown
  misc_feature (1)..( 13): Result.002 file - promoters60/1397080
tgaaaaacaaaat

SEQ ID NO: 112314 - DNA, 13 bp, Unknown
  misc_feature (1)..( 13): Result.002 file - promoters60/1397080
ggaaaaagaaaaa

SEQ ID NO: 112315 - DNA, 13 bp, Unknown
  misc_feature (1)..( 13): Result.002 file - promoters60/1397080
ggataaacatgca

SEQ ID NO: 112316 - DNA, 13 bp, Unknown
  misc_feature (1)..( 13): Result.002 file - promoters60/1397080
aagtaaaaaagat

SEQ ID NO: 112317 - DNA, 13 bp, Unknown
  misc_feature (1)..( 13): Result.002 file - promoters60/1397080
cagaatttttgcg

SEQ ID NO: 112318 - DNA, 13 bp, Unknown
  misc_feature (1)..( 13): Result.002 file - promoters60/1397080
aaaaatatttgat

SEQ ID NO: 112319 - DNA, 13 bp, Unknown
  misc_feature (1)..( 13): Result.002 file - promoters60/1397080
ctaccttttacga

SEQ ID NO: 112320 - DNA, 13 bp, Unknown
  misc_feature (1)..( 13): Result.002 file - promoters60/1397080
aaaagtataaaaa

SEQ ID NO: 112321 - DNA, 13 bp, Unknown
  misc_feature (1)..( 13): Result.002 file - promoters60/1397080
aaaaacaaggaat

SEQ ID NO: 112322 - DNA, 13 bp, Unknown
  misc_feature (1)..( 13): Result.002 file - promoters60/1397080
aaaaagaaaaaga

SEQ ID NO: 112323 - DNA, 10 bp, Unknown
  misc_feature (1)..( 10): Result.002 file - promoters60/1397111
tttttctttt

SEQ ID NO: 112324 - DNA, 10 bp, Unknown
  misc_feature (1)..( 10): Result.002 file - promoters60/1397111
tttttttttt

SEQ ID NO: 112325 - DNA, 10 bp, Unknown
  misc_feature (1)..( 10): Result.002 file - promoters60/1397111
tttgtcttat

SEQ ID NO: 112326 - DNA, 10 bp, Unknown
  misc_feature (1)..( 10): Result.002 file - promoters60/1397111
cttttgttgt

SEQ ID NO: 112327 - DNA, 8 bp, Unknown
  misc_feature (1)..( 8): Result.002 file - promoters60/1397111
aaaattgc

SEQ ID NO: 112328 - DNA, 8 bp, Unknown
  misc_feature (1)..( 8): Result.002 file - promoters60/1397111
aaaatttc

SEQ ID NO: 112329 - DNA, 8 bp, Unknown
  misc_feature (1)..( 8): Result.002 file - promoters60/1397111
aaaatttt

SEQ ID NO: 112330 - DNA, 8 bp, Unknown
  misc_feature (1)..( 8): Result.002 file - promoters60/1397111
aaagttct

SEQ ID NO: 112331 - DNA, 8 bp, Unknown
  misc_feature (1)..( 8): Result.002 file - promoters60/1397111
cataaaat

SEQ ID NO: 112332 - DNA, 8 bp, Unknown
  misc_feature (1)..( 8): Result.002 file - promoters60/1397111
aataaaaa

SEQ ID NO: 112333 - DNA, 8 bp, Unknown
  misc_feature (1)..( 8): Result.002 file - promoters60/1397111
catgaaag

SEQ ID NO: 112334 - DNA, 8 bp, Unknown
  misc_feature (1)..( 8): Result.002 file - promoters60/1397111
aattaaaa

SEQ ID NO: 112335 - DNA, 11 bp, Unknown
  misc_feature (1)..( 11): Result.002 file - promoters60/1397111
ataaatttatt

SEQ ID NO: 112336 - DNA, 11 bp, Unknown
  misc_feature (1)..( 11): Result.002 file - promoters60/1397111
atcaatttata

SEQ ID NO: 112337 - DNA, 11 bp, Unknown
  misc_feature (1)..( 11): Result.002 file - promoters60/1397111
tgagttttatt

SEQ ID NO: 112338 - DNA, 12 bp, Unknown
  misc_feature (1)..( 12): Result.002 file - promoters60/1397111
ttgtgtttgatt

SEQ ID NO: 112339 - DNA, 12 bp, Unknown
  misc_feature (1)..( 12): Result.002 file - promoters60/1397111
tttgatggttaa

SEQ ID NO: 112340 - DNA, 12 bp, Unknown
  misc_feature (1)..( 12): Result.002 file - promoters60/1397111
atatatgtttat

SEQ ID NO: 112341 - DNA, 12 bp, Unknown
  misc_feature (1)..( 12): Result.002 file - promoters60/1397111
tttgagggtaca

SEQ ID NO: 112342 - DNA, 12 bp, Unknown
  misc_feature (1)..( 12): Result.002 file - promoters60/1397111
tttattgtttat

SEQ ID NO: 112343 - DNA, 8 bp, Unknown
  misc_feature (1)..( 8): Result.002 file - promoters60/1397111
ttgtttcc

SEQ ID NO: 112344 - DNA, 8 bp, Unknown
  misc_feature (1)..( 8): Result.002 file - promoters60/1397111
ttgtttat

SEQ ID NO: 112345 - DNA, 8 bp, Unknown
  misc_feature (1)..( 8): Result.002 file - promoters60/1397111
ttgattag

SEQ ID NO: 112346 - DNA, 8 bp, Unknown
  misc_feature (1)..( 8): Result.002 file - promoters60/1397111
atgtttat

SEQ ID NO: 112347 - DNA, 9 bp, Unknown
  misc_feature (1)..( 9): Result.002 file - promoters60/1397125
aaaaacaaa

SEQ ID NO: 112348 - DNA, 9 bp, Unknown
  misc_feature (1)..( 9): Result.002 file - promoters60/1397125
gaaaaaaaa

SEQ ID NO: 112349 - DNA, 9 bp, Unknown
  misc_feature (1)..( 9): Result.002 file - promoters60/1397125
tcaaacaaa

SEQ ID NO: 112350 - DNA, 9 bp, Unknown
  misc_feature (1)..( 9): Result.002 file - promoters60/1397125
ttaaaaaaa

SEQ ID NO: 112351 - DNA, 9 bp, Unknown
  misc_feature (1)..( 9): Result.002 file - promoters60/1397125
taaaaaata

SEQ ID NO: 112352 - DNA, 9 bp, Unknown
  misc_feature (1)..( 9): Result.002 file - promoters60/1397125
taaaaagtt

SEQ ID NO: 112353 - DNA, 12 bp, Unknown
  misc_feature (1)..( 12): Result.002 file - promoters60/1397125
aaactacatatt

SEQ ID NO: 112354 - DNA, 12 bp, Unknown
  misc_feature (1)..( 12): Result.002 file - promoters60/1397125
aataaacatatt

SEQ ID NO: 112355 - DNA, 12 bp, Unknown
  misc_feature (1)..( 12): Result.002 file - promoters60/1397125
cccaaaaataag

SEQ ID NO: 112356 - DNA, 12 bp, Unknown
  misc_feature (1)..( 12): Result.002 file - promoters60/1397125
cccacaaacagt

SEQ ID NO: 112357 - DNA, 12 bp, Unknown
  misc_feature (1)..( 12): Result.002 file - promoters60/1397125
aagaaaaatcta

SEQ ID NO: 112358 - DNA, 12 bp, Unknown
  misc_feature (1)..( 12): Result.002 file - promoters60/1397125
tcctaaaatcaa

SEQ ID NO: 112359 - DNA, 6 bp, Unknown
  misc_feature (1)..( 6): Result.002 file - promoters60/1397130
gagatt

SEQ ID NO: 112360 - DNA, 6 bp, Unknown
  misc_feature (1)..( 6): Result.002 file - promoters60/1397130
gagatt

SEQ ID NO: 112361 - DNA, 7 bp, Unknown
  misc_feature (1)..( 7): Result.002 file - promoters60/1397130
gagagaa

SEQ ID NO: 112362 - DNA, 7 bp, Unknown
  misc_feature (1)..( 7): Result.002 file - promoters60/1397130
gagagaa

SEQ ID NO: 112363 - DNA, 6 bp, Unknown
  misc_feature (1)..( 6): Result.002 file - promoters60/1397130
tgatct

SEQ ID NO: 112364 - DNA, 6 bp, Unknown
  misc_feature (1)..( 6): Result.002 file - promoters60/1397130
tgatct

SEQ ID NO: 112365 - DNA, 10 bp, Unknown
  misc_feature (1)..( 10): Result.002 file - promoters60/1397130
aattaagggc

SEQ ID NO: 112366 - DNA, 10 bp, Unknown
  misc_feature (1)..( 10): Result.002 file - promoters60/1397130
aattatgggc

SEQ ID NO: 112367 - DNA, 7 bp, Unknown
  misc_feature (1)..( 7): Result.002 file - promoters60/1397130
agcacaa

SEQ ID NO: 112368 - DNA, 7 bp, Unknown
  misc_feature (1)..( 7): Result.002 file - promoters60/1397130
agcccaa

SEQ ID NO: 112369 - DNA, 6 bp, Unknown
  misc_feature (1)..( 6): Result.002 file - promoters60/1397130
ttattt

SEQ ID NO: 112370 - DNA, 6 bp, Unknown
  misc_feature (1)..( 6): Result.002 file - promoters60/1397130
ttattt

SEQ ID NO: 112371 - DNA, 7 bp, Unknown
  misc_feature (1)..( 7): Result.002 file - promoters60/1397130
aatctaa

SEQ ID NO: 112372 - DNA, 7 bp, Unknown
  misc_feature (1)..( 7): Result.002 file - promoters60/1397130
aatttaa

SEQ ID NO: 112373 - DNA, 8 bp, Unknown
  misc_feature (1)..( 8): Result.002 file - promoters60/1397130
cttctggt

SEQ ID NO: 112374 - DNA, 8 bp, Unknown
  misc_feature (1)..( 8): Result.002 file - promoters60/1397130
tttccggt

SEQ ID NO: 112375 - DNA, 8 bp, Unknown
  misc_feature (1)..( 8): Result.002 file - promoters60/1397130
tttccggg

SEQ ID NO: 112376 - DNA, 9 bp, Unknown
  misc_feature (1)..( 9): Result.002 file - promoters60/1397130
tatttgggg

SEQ ID NO: 112377 - DNA, 9 bp, Unknown
  misc_feature (1)..( 9): Result.002 file - promoters60/1397130
tatgtggtc

SEQ ID NO: 112378 - DNA, 9 bp, Unknown
  misc_feature (1)..( 9): Result.002 file - promoters60/1397130
attgtagtc

SEQ ID NO: 112379 - DNA, 7 bp, Unknown
  misc_feature (1)..( 7): Result.002 file - promoters60/1397130
tatgaat

SEQ ID NO: 112380 - DNA, 7 bp, Unknown
  misc_feature (1)..( 7): Result.002 file - promoters60/1397130
tataaat

SEQ ID NO: 112381 - DNA, 6 bp, Unknown
  misc_feature (1)..( 6): Result.002 file - promoters60/1397130
gaagag

SEQ ID NO: 112382 - DNA, 6 bp, Unknown
  misc_feature (1)..( 6): Result.002 file - promoters60/1397130
gaagag

SEQ ID NO: 112383 - DNA, 8 bp, Unknown
  misc_feature (1)..( 8): Result.002 file - promoters60/1397130
tccgttgc

SEQ ID NO: 112384 - DNA, 8 bp, Unknown
  misc_feature (1)..( 8): Result.002 file - promoters60/1397130
tccggtgc

SEQ ID NO: 112385 - DNA, 7 bp, Unknown
  misc_feature (1)..( 7): Result.002 file - promoters60/1397130
acgaaaa

SEQ ID NO: 112386 - DNA, 7 bp, Unknown
  misc_feature (1)..( 7): Result.002 file - promoters60/1397130
acgcaaa

SEQ ID NO: 112387 - DNA, 6 bp, Unknown
  misc_feature (1)..( 6): Result.002 file - promoters60/1397130
agattt

SEQ ID NO: 112388 - DNA, 6 bp, Unknown
  misc_feature (1)..( 6): Result.002 file - promoters60/1397130
agattt

SEQ ID NO: 112389 - DNA, 8 bp, Unknown
  misc_feature (1)..( 8): Result.002 file - promoters60/1397130
aaacagaa

SEQ ID NO: 112390 - DNA, 8 bp, Unknown
  misc_feature (1)..( 8): Result.002 file - promoters60/1397130
aaagagaa

SEQ ID NO: 112391 - DNA, 8 bp, Unknown
  misc_feature (1)..( 8): Result.002 file - promoters60/1397130
atattttc

SEQ ID NO: 112392 - DNA, 8 bp, Unknown
  misc_feature (1)..( 8): Result.002 file - promoters60/1397130
ataatttc

SEQ ID NO: 112393 - DNA, 7 bp, Unknown
  misc_feature (1)..( 7): Result.002 file - promoters60/1397178
tttttta

SEQ ID NO: 112394 - DNA, 7 bp, Unknown
  misc_feature (1)..( 7): Result.002 file - promoters60/1397178
tttatta

SEQ ID NO: 112395 - DNA, 8 bp, Unknown
  misc_feature (1)..( 8): Result.002 file - promoters60/1397178
tttatcta

SEQ ID NO: 112396 - DNA, 8 bp, Unknown
  misc_feature (1)..( 8): Result.002 file - promoters60/1397178
tttttcta

SEQ ID NO: 112397 - DNA, 6 bp, Unknown
  misc_feature (1)..( 6): Result.002 file - promoters60/1397178
attttt

SEQ ID NO: 112398 - DNA, 6 bp, Unknown
  misc_feature (1)..( 6): Result.002 file - promoters60/1397178
attttt

SEQ ID NO: 112399 - DNA, 8 bp, Unknown
  misc_feature (1)..( 8): Result.002 file - promoters60/1397178
aaagattt

SEQ ID NO: 112400 - DNA, 8 bp, Unknown
  misc_feature (1)..( 8): Result.002 file - promoters60/1397178
aaagattt

SEQ ID NO: 112401 - DNA, 8 bp, Unknown
  misc_feature (1)..( 8): Result.002 file - promoters60/1397178
taagattg

SEQ ID NO: 112402 - DNA, 8 bp, Unknown
  misc_feature (1)..( 8): Result.002 file - promoters60/1397178
ggtatttg

SEQ ID NO: 112403 - DNA, 8 bp, Unknown
  misc_feature (1)..( 8): Result.002 file - promoters60/1397178
ggtgtttg

SEQ ID NO: 112404 - DNA, 6 bp, Unknown
  misc_feature (1)..( 6): Result.002 file - promoters60/1397178
atgaat

SEQ ID NO: 112405 - DNA, 6 bp, Unknown
  misc_feature (1)..( 6): Result.002 file - promoters60/1397178
atgaat

SEQ ID NO: 112406 - DNA, 7 bp, Unknown
  misc_feature (1)..( 7): Result.002 file - promoters60/1397178
ttacaat

SEQ ID NO: 112407 - DNA, 7 bp, Unknown
  misc_feature (1)..( 7): Result.002 file - promoters60/1397178
ttataat

SEQ ID NO: 112408 - DNA, 9 bp, Unknown
  misc_feature (1)..( 9): Result.002 file - promoters60/1397178
aattataaa

SEQ ID NO: 112409 - DNA, 9 bp, Unknown
  misc_feature (1)..( 9): Result.002 file - promoters60/1397178
aattttaac

SEQ ID NO: 112410 - DNA, 9 bp, Unknown
  misc_feature (1)..( 9): Result.002 file - promoters60/1397178
cctttgacc

SEQ ID NO: 112411 - DNA, 14 bp, Unknown
  misc_feature (1)..( 14): Result.002 file - promoters60/1397178
aatttctcccaaaa

SEQ ID NO: 112412 - DNA, 14 bp, Unknown
  misc_feature (1)..( 14): Result.002 file - promoters60/1397178
aatttctgccaaaa

SEQ ID NO: 112413 - DNA, 14 bp, Unknown
  misc_feature (1)..( 14): Result.002 file - promoters60/1397178
tatttctcttatcc

SEQ ID NO: 112414 - DNA, 8 bp, Unknown
  misc_feature (1)..( 8): Result.002 file - promoters60/1397178
ataaactt

SEQ ID NO: 112415 - DNA, 8 bp, Unknown
  misc_feature (1)..( 8): Result.002 file - promoters60/1397178
ttaacctt

SEQ ID NO: 112416 - DNA, 8 bp, Unknown
  misc_feature (1)..( 8): Result.002 file - promoters60/1397178
ttaaccct

SEQ ID NO: 112417 - DNA, 13 bp, Unknown
  misc_feature (1)..( 13): Result.002 file - promoters60/1397178
ttgaatcaatatt

SEQ ID NO: 112418 - DNA, 13 bp, Unknown
  misc_feature (1)..( 13): Result.002 file - promoters60/1397178
ttgattcaaaatt

SEQ ID NO: 112419 - DNA, 7 bp, Unknown
  misc_feature (1)..( 7): Result.002 file - promoters60/1397178
tggattt

SEQ ID NO: 112420 - DNA, 7 bp, Unknown
  misc_feature (1)..( 7): Result.002 file - promoters60/1397178
tggattt

SEQ ID NO: 112421 - DNA, 6 bp, Unknown
  misc_feature (1)..( 6): Result.002 file - promoters60/1397178
ttggtt

SEQ ID NO: 112422 - DNA, 6 bp, Unknown
  misc_feature (1)..( 6): Result.002 file - promoters60/1397178
ttggtt

SEQ ID NO: 112423 - DNA, 7 bp, Unknown
  misc_feature (1)..( 7): Result.002 file - promoters60/1397178
ctcactc

SEQ ID NO: 112424 - DNA, 7 bp, Unknown
  misc_feature (1)..( 7): Result.002 file - promoters60/1397178
ctcgctc

SEQ ID NO: 112425 - DNA, 15 bp, Unknown
  misc_feature (1)..( 15): Result.002 file - promoters60/1397203
tttaacattgatata

SEQ ID NO: 112426 - DNA, 15 bp, Unknown
  misc_feature (1)..( 15): Result.002 file - promoters60/1397203
ttttacacaaatttg

SEQ ID NO: 112427 - DNA, 15 bp, Unknown
  misc_feature (1)..( 15): Result.002 file - promoters60/1397203
gttaacaaaaacttt

SEQ ID NO: 112428 - DNA, 15 bp, Unknown
  misc_feature (1)..( 15): Result.002 file - promoters60/1397203
aataacattaaaaaa

SEQ ID NO: 112429 - DNA, 15 bp, Unknown
  misc_feature (1)..( 15): Result.002 file - promoters60/1397203
gtcgacattataaaa

SEQ ID NO: 112430 - DNA, 15 bp, Unknown
  misc_feature (1)..( 15): Result.002 file - promoters60/1397203
gttatcaattaatct

SEQ ID NO: 112431 - DNA, 9 bp, Unknown
  misc_feature (1)..( 9): Result.002 file - promoters60/1397203
tataaaaaa

SEQ ID NO: 112432 - DNA, 9 bp, Unknown
  misc_feature (1)..( 9): Result.002 file - promoters60/1397203
tctaaaaag

SEQ ID NO: 112433 - DNA, 9 bp, Unknown
  misc_feature (1)..( 9): Result.002 file - promoters60/1397203
tatcaaaca

SEQ ID NO: 112434 - DNA, 9 bp, Unknown
  misc_feature (1)..( 9): Result.002 file - promoters60/1397203
taacaaaaa

SEQ ID NO: 112435 - DNA, 9 bp, Unknown
  misc_feature (1)..( 9): Result.002 file - promoters60/1397203
taaaaaaat

SEQ ID NO: 112436 - DNA, 9 bp, Unknown
  misc_feature (1)..( 9): Result.002 file - promoters60/1397203
tataaaata

SEQ ID NO: 112437 - DNA, 12 bp, Unknown
  misc_feature (1)..( 12): Result.002 file - promoters60/1397203
aaaacaacccaa

SEQ ID NO: 112438 - DNA, 12 bp, Unknown
  misc_feature (1)..( 12): Result.002 file - promoters60/1397203
gcaacaacaatc

SEQ ID NO: 112439 - DNA, 12 bp, Unknown
  misc_feature (1)..( 12): Result.002 file - promoters60/1397203
taaaaaactcaa

SEQ ID NO: 112440 - DNA, 12 bp, Unknown
  misc_feature (1)..( 12): Result.002 file - promoters60/1397203
caaaaaagaaat

SEQ ID NO: 112441 - DNA, 12 bp, Unknown
  misc_feature (1)..( 12): Result.002 file - promoters60/1397203
gaaacacttatc

SEQ ID NO: 112442 - DNA, 12 bp, Unknown
  misc_feature (1)..( 12): Result.002 file - promoters60/1397203
taaaaattcgtg

SEQ ID NO: 112443 - DNA, 12 bp, Unknown
  misc_feature (1)..( 12): Result.002 file - promoters60/1397203
taaactctatca

SEQ ID NO: 112444 - DNA, 15 bp, Unknown
  misc_feature (1)..( 15): Result.002 file - promoters60/1397203
gtcattaaattcaaa

SEQ ID NO: 112445 - DNA, 15 bp, Unknown
  misc_feature (1)..( 15): Result.002 file - promoters60/1397203
ttcataaaatctata

SEQ ID NO: 112446 - DNA, 16 bp, Unknown
  misc_feature (1)..( 16): Result.002 file - promoters60/1397203
cgacatttaatcaaat

SEQ ID NO: 112447 - DNA, 16 bp, Unknown
  misc_feature (1)..( 16): Result.002 file - promoters60/1397203
ggagatttaacaaatt

SEQ ID NO: 112448 - DNA, 15 bp, Unknown
  misc_feature (1)..( 15): Result.002 file - promoters60/1397203
ttcataaactctata

SEQ ID NO: 112449 - DNA, 16 bp, Unknown
  misc_feature (1)..( 16): Result.002 file - promoters60/1397203
ttctataacgtagtga

SEQ ID NO: 112450 - DNA, 7 bp, Unknown
  misc_feature (1)..( 7): Result.002 file - promoters60/1397332
aactcag

SEQ ID NO: 112451 - DNA, 7 bp, Unknown
  misc_feature (1)..( 7): Result.002 file - promoters60/1397332
aactcag

SEQ ID NO: 112452 - DNA, 6 bp, Unknown
  misc_feature (1)..( 6): Result.002 file - promoters60/1397332
tttcga

SEQ ID NO: 112453 - DNA, 6 bp, Unknown
  misc_feature (1)..( 6): Result.002 file - promoters60/1397332
tttcga

SEQ ID NO: 112454 - DNA, 7 bp, Unknown
  misc_feature (1)..( 7): Result.002 file - promoters60/1397332
caataac

SEQ ID NO: 112455 - DNA, 7 bp, Unknown
  misc_feature (1)..( 7): Result.002 file - promoters60/1397332
caaaaac

SEQ ID NO: 112456 - DNA, 7 bp, Unknown
  misc_feature (1)..( 7): Result.002 file - promoters60/1397332
acattgt

SEQ ID NO: 112457 - DNA, 7 bp, Unknown
  misc_feature (1)..( 7): Result.002 file - promoters60/1397332
acattgt

SEQ ID NO: 112458 - DNA, 7 bp, Unknown
  misc_feature (1)..( 7): Result.002 file - promoters60/1397332
aaatcaa

SEQ ID NO: 112459 - DNA, 7 bp, Unknown
  misc_feature (1)..( 7): Result.002 file - promoters60/1397332
aaaccaa

SEQ ID NO: 112460 - DNA, 11 bp, Unknown
  misc_feature (1)..( 11): Result.002 file - promoters60/1397332
ccctctaaacc

SEQ ID NO: 112461 - DNA, 11 bp, Unknown
  misc_feature (1)..( 11): Result.002 file - promoters60/1397332
cccactaaacc

SEQ ID NO: 112462 - DNA, 11 bp, Unknown
  misc_feature (1)..( 11): Result.002 file - promoters60/1397332
atgtttaaacc

SEQ ID NO: 112463 - DNA, 7 bp, Unknown
  misc_feature (1)..( 7): Result.002 file - promoters60/1397332
agaagag

SEQ ID NO: 112464 - DNA, 7 bp, Unknown
  misc_feature (1)..( 7): Result.002 file - promoters60/1397332
agacgag

SEQ ID NO: 112465 - DNA, 10 bp, Unknown
  misc_feature (1)..( 10): Result.002 file - promoters60/1397332
aaataaaaaa

SEQ ID NO: 112466 - DNA, 10 bp, Unknown
  misc_feature (1)..( 10): Result.002 file - promoters60/1397332
aaagaaaaaa

SEQ ID NO: 112467 - DNA, 6 bp, Unknown
  misc_feature (1)..( 6): Result.002 file - promoters60/1397332
gatgtt

SEQ ID NO: 112468 - DNA, 6 bp, Unknown
  misc_feature (1)..( 6): Result.002 file - promoters60/1397332
gatgtt

SEQ ID NO: 112469 - DNA, 7 bp, Unknown
  misc_feature (1)..( 7): Result.002 file - promoters60/1397332
catcact

SEQ ID NO: 112470 - DNA, 7 bp, Unknown
  misc_feature (1)..( 7): Result.002 file - promoters60/1397332
cattact

SEQ ID NO: 112471 - DNA, 9 bp, Unknown
  misc_feature (1)..( 9): Result.002 file - promoters60/1397332
tagctttgt

SEQ ID NO: 112472 - DNA, 9 bp, Unknown
  misc_feature (1)..( 9): Result.002 file - promoters60/1397332
tagcattgt

SEQ ID NO: 112473 - DNA, 7 bp, Unknown
  misc_feature (1)..( 7): Result.002 file - promoters60/1397332
tagggtt

SEQ ID NO: 112474 - DNA, 7 bp, Unknown
  misc_feature (1)..( 7): Result.002 file - promoters60/1397332
tagggtt

SEQ ID NO: 112475 - DNA, 9 bp, Unknown
  misc_feature (1)..( 9): Result.002 file - promoters60/1397332
tttaattaa

SEQ ID NO: 112476 - DNA, 9 bp, Unknown
  misc_feature (1)..( 9): Result.002 file - promoters60/1397332
tttacttaa

SEQ ID NO: 112477 - DNA, 8 bp, Unknown
  misc_feature (1)..( 8): Result.002 file - promoters60/1397332
atttgtta

SEQ ID NO: 112478 - DNA, 8 bp, Unknown
  misc_feature (1)..( 8): Result.002 file - promoters60/1397332
atttttta

SEQ ID NO: 112479 - DNA, 6 bp, Unknown
  misc_feature (1)..( 6): Result.002 file - promoters60/1397332
gaaccc

SEQ ID NO: 112480 - DNA, 6 bp, Unknown
  misc_feature (1)..( 6): Result.002 file - promoters60/1397332
gaaccc

SEQ ID NO: 112481 - DNA, 7 bp, Unknown
  misc_feature (1)..( 7): Result.002 file - promoters60/1397332
attaata

SEQ ID NO: 112482 - DNA, 7 bp, Unknown
  misc_feature (1)..( 7): Result.002 file - promoters60/1397332
atttata

SEQ ID NO: 112483 - DNA, 13 bp, Unknown
  misc_feature (1)..( 13): Result.002 file - promoters60/1397350
gtctcatggattc

SEQ ID NO: 112484 - DNA, 13 bp, Unknown
  misc_feature (1)..( 13): Result.002 file - promoters60/1397350
gtttcaaggattc

SEQ ID NO: 112485 - DNA, 13 bp, Unknown
  misc_feature (1)..( 13): Result.002 file - promoters60/1397350
gtctgatggataa

SEQ ID NO: 112486 - DNA, 7 bp, Unknown
  misc_feature (1)..( 7): Result.002 file - promoters60/1397350
aataaca

SEQ ID NO: 112487 - DNA, 7 bp, Unknown
  misc_feature (1)..( 7): Result.002 file - promoters60/1397350
aattaca

SEQ ID NO: 112488 - DNA, 7 bp, Unknown
  misc_feature (1)..( 7): Result.002 file - promoters60/1397350
aacaatt

SEQ ID NO: 112489 - DNA, 7 bp, Unknown
  misc_feature (1)..( 7): Result.002 file - promoters60/1397350
aacaatt

SEQ ID NO: 112490 - DNA, 6 bp, Unknown
  misc_feature (1)..( 6): Result.002 file - promoters60/1397350
ttaaac

SEQ ID NO: 112491 - DNA, 6 bp, Unknown
  misc_feature (1)..( 6): Result.002 file - promoters60/1397350
ttaaac

SEQ ID NO: 112492 - DNA, 7 bp, Unknown
  misc_feature (1)..( 7): Result.002 file - promoters60/1397350
aaatatt

SEQ ID NO: 112493 - DNA, 7 bp, Unknown
  misc_feature (1)..( 7): Result.002 file - promoters60/1397350
aaacatt

SEQ ID NO: 112494 - DNA, 6 bp, Unknown
  misc_feature (1)..( 6): Result.002 file - promoters60/1397350
ttaata

SEQ ID NO: 112495 - DNA, 6 bp, Unknown
  misc_feature (1)..( 6): Result.002 file - promoters60/1397350
ttaata

SEQ ID NO: 112496 - DNA, 7 bp, Unknown
  misc_feature (1)..( 7): Result.002 file - promoters60/1397350
aaatcgt

SEQ ID NO: 112497 - DNA, 7 bp, Unknown
  misc_feature (1)..( 7): Result.002 file - promoters60/1397350
aaaacgt

SEQ ID NO: 112498 - DNA, 7 bp, Unknown
  misc_feature (1)..( 7): Result.002 file - promoters60/1397350
taaaatc

SEQ ID NO: 112499 - DNA, 7 bp, Unknown
  misc_feature (1)..( 7): Result.002 file - promoters60/1397350
taatatc

SEQ ID NO: 112500 - DNA, 7 bp, Unknown
  misc_feature (1)..( 7): Result.002 file - promoters60/1397350
aaaccaa

SEQ ID NO: 112501 - DNA, 7 bp, Unknown
  misc_feature (1)..( 7): Result.002 file - promoters60/1397350
aaagcaa

SEQ ID NO: 112502 - DNA, 6 bp, Unknown
  misc_feature (1)..( 6): Result.002 file - promoters60/1397350
aatgaa

SEQ ID NO: 112503 - DNA, 6 bp, Unknown
  misc_feature (1)..( 6): Result.002 file - promoters60/1397350
aatgaa

SEQ ID NO: 112504 - DNA, 7 bp, Unknown
  misc_feature (1)..( 7): Result.002 file - promoters60/1397350
gttcaga

SEQ ID NO: 112505 - DNA, 7 bp, Unknown
  misc_feature (1)..( 7): Result.002 file - promoters60/1397350
gttaaga

SEQ ID NO: 112506 - DNA, 6 bp, Unknown
  misc_feature (1)..( 6): Result.002 file - promoters60/1397350
aaaacc

SEQ ID NO: 112507 - DNA, 6 bp, Unknown
  misc_feature (1)..( 6): Result.002 file - promoters60/1397350
aaaacc

SEQ ID NO: 112508 - DNA, 7 bp, Unknown
  misc_feature (1)..( 7): Result.002 file - promoters60/1397350
ttgcaag

SEQ ID NO: 112509 - DNA, 7 bp, Unknown
  misc_feature (1)..( 7): Result.002 file - promoters60/1397350
ttgcaag

SEQ ID NO: 112510 - DNA, 6 bp, Unknown
  misc_feature (1)..( 6): Result.002 file - promoters60/1397350
taaaaa

SEQ ID NO: 112511 - DNA, 6 bp, Unknown
  misc_feature (1)..( 6): Result.002 file - promoters60/1397350
taaaaa

SEQ ID NO: 112512 - DNA, 7 bp, Unknown
  misc_feature (1)..( 7): Result.002 file - promoters60/1397350
aaataca

SEQ ID NO: 112513 - DNA, 7 bp, Unknown
  misc_feature (1)..( 7): Result.002 file - promoters60/1397350
aaaaaca

SEQ ID NO: 112514 - DNA, 7 bp, Unknown
  misc_feature (1)..( 7): Result.002 file - promoters60/1397350
gaataaa

SEQ ID NO: 112515 - DNA, 7 bp, Unknown
  misc_feature (1)..( 7): Result.002 file - promoters60/1397350
gaaaaaa

SEQ ID NO: 112516 - DNA, 6 bp, Unknown
  misc_feature (1)..( 6): Result.002 file - promoters60/1397350
agtaaa

SEQ ID NO: 112517 - DNA, 6 bp, Unknown
  misc_feature (1)..( 6): Result.002 file - promoters60/1397350
agtaaa

SEQ ID NO: 112518 - DNA, 7 bp, Unknown
  misc_feature (1)..( 7): Result.002 file - promoters60/1397350
aatcggg

SEQ ID NO: 112519 - DNA, 7 bp, Unknown
  misc_feature (1)..( 7): Result.002 file - promoters60/1397350
aattggg

SEQ ID NO: 112520 - DNA, 8 bp, Unknown
  misc_feature (1)..( 8): Result.002 file - promoters60/1397350
gaaagaaa

SEQ ID NO: 112521 - DNA, 8 bp, Unknown
  misc_feature (1)..( 8): Result.002 file - promoters60/1397350
gaaacaaa

SEQ ID NO: 112522 - DNA, 10 bp, Unknown
  misc_feature (1)..( 10): Result.002 file - promoters60/1397350
ggaaaagaaa

SEQ ID NO: 112523 - DNA, 10 bp, Unknown
  misc_feature (1)..( 10): Result.002 file - promoters60/1397350
ggaaatgaaa

SEQ ID NO: 112524 - DNA, 7 bp, Unknown
  misc_feature (1)..( 7): Result.002 file - promoters60/1397350
cccacta

SEQ ID NO: 112525 - DNA, 7 bp, Unknown
  misc_feature (1)..( 7): Result.002 file - promoters60/1397350
cccacta

SEQ ID NO: 112526 - DNA, 9 bp, Unknown
  misc_feature (1)..( 9): Result.002 file - promoters60/1397350
aaagaaaag

SEQ ID NO: 112527 - DNA, 9 bp, Unknown
  misc_feature (1)..( 9): Result.002 file - promoters60/1397350
aaagtaaag

SEQ ID NO: 112528 - DNA, 7 bp, Unknown
  misc_feature (1)..( 7): Result.002 file - promoters60/1397350
gtatata

SEQ ID NO: 112529 - DNA, 7 bp, Unknown
  misc_feature (1)..( 7): Result.002 file - promoters60/1397350
gtatata

SEQ ID NO: 112530 - DNA, 8 bp, Unknown
  misc_feature (1)..( 8): Result.002 file - promoters60/1397425
tactaagg

SEQ ID NO: 112531 - DNA, 8 bp, Unknown
  misc_feature (1)..( 8): Result.002 file - promoters60/1397425
tactgagg

SEQ ID NO: 112532 - DNA, 6 bp, Unknown
  misc_feature (1)..( 6): Result.002 file - promoters60/1397425
taattt

SEQ ID NO: 112533 - DNA, 6 bp, Unknown
  misc_feature (1)..( 6): Result.002 file - promoters60/1397425
taattt

SEQ ID NO: 112534 - DNA, 8 bp, Unknown
  misc_feature (1)..( 8): Result.002 file - promoters60/1397425
atatgtaa

SEQ ID NO: 112535 - DNA, 8 bp, Unknown
  misc_feature (1)..( 8): Result.002 file - promoters60/1397425
gtatataa

SEQ ID NO: 112536 - DNA, 8 bp, Unknown
  misc_feature (1)..( 8): Result.002 file - promoters60/1397425
ataagtat

SEQ ID NO: 112537 - DNA, 7 bp, Unknown
  misc_feature (1)..( 7): Result.002 file - promoters60/1397425
ttaaaat

SEQ ID NO: 112538 - DNA, 7 bp, Unknown
  misc_feature (1)..( 7): Result.002 file - promoters60/1397425
ttagaat

SEQ ID NO: 112539 - DNA, 8 bp, Unknown
  misc_feature (1)..( 8): Result.002 file - promoters60/1397425
tcatgatt

SEQ ID NO: 112540 - DNA, 8 bp, Unknown
  misc_feature (1)..( 8): Result.002 file - promoters60/1397425
tcataatt

SEQ ID NO: 112541 - DNA, 8 bp, Unknown
  misc_feature (1)..( 8): Result.002 file - promoters60/1397425
tcataata

SEQ ID NO: 112542 - DNA, 6 bp, Unknown
  misc_feature (1)..( 6): Result.002 file - promoters60/1397425
ttttct

SEQ ID NO: 112543 - DNA, 6 bp, Unknown
  misc_feature (1)..( 6): Result.002 file - promoters60/1397425
ttttct

SEQ ID NO: 112544 - DNA, 6 bp, Unknown
  misc_feature (1)..( 6): Result.002 file - promoters60/1397425
ttacct

SEQ ID NO: 112545 - DNA, 6 bp, Unknown
  misc_feature (1)..( 6): Result.002 file - promoters60/1397425
ttacct

SEQ ID NO: 112546 - DNA, 6 bp, Unknown
  misc_feature (1)..( 6): Result.002 file - promoters60/1397425
attgtt

SEQ ID NO: 112547 - DNA, 6 bp, Unknown
  misc_feature (1)..( 6): Result.002 file - promoters60/1397425
attgtt

SEQ ID NO: 112548 - DNA, 9 bp, Unknown
  misc_feature (1)..( 9): Result.002 file - promoters60/1397500
aatgctaaa

SEQ ID NO: 112549 - DNA, 9 bp, Unknown
  misc_feature (1)..( 9): Result.002 file - promoters60/1397500
gctgctaat

SEQ ID NO: 112550 - DNA, 9 bp, Unknown
  misc_feature (1)..( 9): Result.002 file - promoters60/1397500
agtgccaat

SEQ ID NO: 112551 - DNA, 9 bp, Unknown
  misc_feature (1)..( 9): Result.002 file - promoters60/1397500
agttccaac

SEQ ID NO: 112552 - DNA, 10 bp, Unknown
  misc_feature (1)..( 10): Result.002 file - promoters60/1397500
aattttttaa

SEQ ID NO: 112553 - DNA, 10 bp, Unknown
  misc_feature (1)..( 10): Result.002 file - promoters60/1397500
aatttttggc

SEQ ID NO: 112554 - DNA, 10 bp, Unknown
  misc_feature (1)..( 10): Result.002 file - promoters60/1397500
gattttataa

SEQ ID NO: 112555 - DNA, 10 bp, Unknown
  misc_feature (1)..( 10): Result.002 file - promoters60/1397500
tattttttgg

SEQ ID NO: 112556 - DNA, 10 bp, Unknown
  misc_feature (1)..( 10): Result.002 file - promoters60/1397500
acaaacatgg

SEQ ID NO: 112557 - DNA, 10 bp, Unknown
  misc_feature (1)..( 10): Result.002 file - promoters60/1397500
ccaatcataa

SEQ ID NO: 112558 - DNA, 10 bp, Unknown
  misc_feature (1)..( 10): Result.002 file - promoters60/1397500
ataattatat

SEQ ID NO: 112559 - DNA, 10 bp, Unknown
  misc_feature (1)..( 10): Result.002 file - promoters60/1397500
taaatgatat

SEQ ID NO: 112560 - DNA, 10 bp, Unknown
  misc_feature (1)..( 10): Result.002 file - promoters60/1397500
ccaatcgcaa

SEQ ID NO: 112561 - DNA, 12 bp, Unknown
  misc_feature (1)..( 12): Result.002 file - promoters60/1397500
tcttaaaagttt

SEQ ID NO: 112562 - DNA, 12 bp, Unknown
  misc_feature (1)..( 12): Result.002 file - promoters60/1397500
acataaaaattt

SEQ ID NO: 112563 - DNA, 12 bp, Unknown
  misc_feature (1)..( 12): Result.002 file - promoters60/1397500
atataaaggata

SEQ ID NO: 112564 - DNA, 12 bp, Unknown
  misc_feature (1)..( 12): Result.002 file - promoters60/1397500
ggtgaaaaattc

SEQ ID NO: 112565 - DNA, 10 bp, Unknown
  misc_feature (1)..( 10): Result.002 file - promoters60/1397500
ttttttataa

SEQ ID NO: 112566 - DNA, 10 bp, Unknown
  misc_feature (1)..( 10): Result.002 file - promoters60/1397500
ggaattataa

SEQ ID NO: 112567 - DNA, 10 bp, Unknown
  misc_feature (1)..( 10): Result.002 file - promoters60/1397500
taaatcatat

SEQ ID NO: 112568 - DNA, 10 bp, Unknown
  misc_feature (1)..( 10): Result.002 file - promoters60/1397500
taaatcaaat

SEQ ID NO: 112569 - DNA, 6 bp, Unknown
  misc_feature (1)..( 6): Result.002 file - promoters60/1397556
attcac

SEQ ID NO: 112570 - DNA, 6 bp, Unknown
  misc_feature (1)..( 6): Result.002 file - promoters60/1397556
attcac

SEQ ID NO: 112571 - DNA, 6 bp, Unknown
  misc_feature (1)..( 6): Result.002 file - promoters60/1397556
caaata

SEQ ID NO: 112572 - DNA, 6 bp, Unknown
  misc_feature (1)..( 6): Result.002 file - promoters60/1397556
caaata

SEQ ID NO: 112573 - DNA, 8 bp, Unknown
  misc_feature (1)..( 8): Result.002 file - promoters60/1397556
ataataat

SEQ ID NO: 112574 - DNA, 8 bp, Unknown
  misc_feature (1)..( 8): Result.002 file - promoters60/1397556
ataacaat

SEQ ID NO: 112575 - DNA, 6 bp, Unknown
  misc_feature (1)..( 6): Result.002 file - promoters60/1397556
ctttca

SEQ ID NO: 112576 - DNA, 6 bp, Unknown
  misc_feature (1)..( 6): Result.002 file - promoters60/1397556
ctttca

SEQ ID NO: 112577 - DNA, 6 bp, Unknown
  misc_feature (1)..( 6): Result.002 file - promoters60/1397556
aataac

SEQ ID NO: 112578 - DNA, 6 bp, Unknown
  misc_feature (1)..( 6): Result.002 file - promoters60/1397556
aataac

SEQ ID NO: 112579 - DNA, 7 bp, Unknown
  misc_feature (1)..( 7): Result.002 file - promoters60/1397556
aaagaat

SEQ ID NO: 112580 - DNA, 7 bp, Unknown
  misc_feature (1)..( 7): Result.002 file - promoters60/1397556
aaacaat

SEQ ID NO: 112581 - DNA, 11 bp, Unknown
  misc_feature (1)..( 11): Result.002 file - promoters60/1397556
agtttttttgc

SEQ ID NO: 112582 - DNA, 11 bp, Unknown
  misc_feature (1)..( 11): Result.002 file - promoters60/1397556
agttattttgc

SEQ ID NO: 112583 - DNA, 7 bp, Unknown
  misc_feature (1)..( 7): Result.002 file - promoters60/1397556
tctgtga

SEQ ID NO: 112584 - DNA, 7 bp, Unknown
  misc_feature (1)..( 7): Result.002 file - promoters60/1397556
tctgtga

SEQ ID NO: 112585 - DNA, 7 bp, Unknown
  misc_feature (1)..( 7): Result.002 file - promoters60/1397556
acgatta

SEQ ID NO: 112586 - DNA, 7 bp, Unknown
  misc_feature (1)..( 7): Result.002 file - promoters60/1397556
acggtta

SEQ ID NO: 112587 - DNA, 8 bp, Unknown
  misc_feature (1)..( 8): Result.002 file - promoters60/1397556
ataatttt

SEQ ID NO: 112588 - DNA, 8 bp, Unknown
  misc_feature (1)..( 8): Result.002 file - promoters60/1397556
atagtttt

SEQ ID NO: 112589 - DNA, 8 bp, Unknown
  misc_feature (1)..( 8): Result.002 file - promoters60/1397556
ttttctgc

SEQ ID NO: 112590 - DNA, 8 bp, Unknown
  misc_feature (1)..( 8): Result.002 file - promoters60/1397556
ttttttgc

SEQ ID NO: 112591 - DNA, 6 bp, Unknown
  misc_feature (1)..( 6): Result.002 file - promoters60/1397556
ctcttc

SEQ ID NO: 112592 - DNA, 6 bp, Unknown
  misc_feature (1)..( 6): Result.002 file - promoters60/1397556
ctcttc

SEQ ID NO: 112593 - DNA, 8 bp, Unknown
  misc_feature (1)..( 8): Result.002 file - promoters60/1397568
caatctaa

SEQ ID NO: 112594 - DNA, 8 bp, Unknown
  misc_feature (1)..( 8): Result.002 file - promoters60/1397568
caatttaa

SEQ ID NO: 112595 - DNA, 6 bp, Unknown
  misc_feature (1)..( 6): Result.002 file - promoters60/1397568
taagtt

SEQ ID NO: 112596 - DNA, 6 bp, Unknown
  misc_feature (1)..( 6): Result.002 file - promoters60/1397568
taagtt

SEQ ID NO: 112597 - DNA, 9 bp, Unknown
  misc_feature (1)..( 9): Result.002 file - promoters60/1397568
aacaacaat

SEQ ID NO: 112598 - DNA, 9 bp, Unknown
  misc_feature (1)..( 9): Result.002 file - promoters60/1397568
aacaagaat

SEQ ID NO: 112599 - DNA, 6 bp, Unknown
  misc_feature (1)..( 6): Result.002 file - promoters60/1397568
caaatt

SEQ ID NO: 112600 - DNA, 6 bp, Unknown
  misc_feature (1)..( 6): Result.002 file - promoters60/1397568
caaatt

SEQ ID NO: 112601 - DNA, 7 bp, Unknown
  misc_feature (1)..( 7): Result.002 file - promoters60/1397568
atttgaa

SEQ ID NO: 112602 - DNA, 7 bp, Unknown
  misc_feature (1)..( 7): Result.002 file - promoters60/1397568
atttgaa

SEQ ID NO: 112603 - DNA, 7 bp, Unknown
  misc_feature (1)..( 7): Result.002 file - promoters60/1397568
ttcaaat

SEQ ID NO: 112604 - DNA, 7 bp, Unknown
  misc_feature (1)..( 7): Result.002 file - promoters60/1397568
ttccaat

SEQ ID NO: 112605 - DNA, 7 bp, Unknown
  misc_feature (1)..( 7): Result.002 file - promoters60/1397568
ttgagct

SEQ ID NO: 112606 - DNA, 7 bp, Unknown
  misc_feature (1)..( 7): Result.002 file - promoters60/1397568
ttgggct

SEQ ID NO: 112607 - DNA, 8 bp, Unknown
  misc_feature (1)..( 8): Result.002 file - promoters60/1397568
aaaacata

SEQ ID NO: 112608 - DNA, 8 bp, Unknown
  misc_feature (1)..( 8): Result.002 file - promoters60/1397568
aaaacata

SEQ ID NO: 112609 - DNA, 6 bp, Unknown
  misc_feature (1)..( 6): Result.002 file - promoters60/1397568
ataaat

SEQ ID NO: 112610 - DNA, 6 bp, Unknown
  misc_feature (1)..( 6): Result.002 file - promoters60/1397568
ataaat

SEQ ID NO: 112611 - DNA, 6 bp, Unknown
  misc_feature (1)..( 6): Result.002 file - promoters60/1397568
gatgac

SEQ ID NO: 112612 - DNA, 6 bp, Unknown
  misc_feature (1)..( 6): Result.002 file - promoters60/1397568
gatgac

SEQ ID NO: 112613 - DNA, 7 bp, Unknown
  misc_feature (1)..( 7): Result.002 file - promoters60/1397568
catttga

SEQ ID NO: 112614 - DNA, 7 bp, Unknown
  misc_feature (1)..( 7): Result.002 file - promoters60/1397568
catttga

SEQ ID NO: 112615 - DNA, 6 bp, Unknown
  misc_feature (1)..( 6): Result.002 file - promoters60/1397568
tgacac

SEQ ID NO: 112616 - DNA, 6 bp, Unknown
  misc_feature (1)..( 6): Result.002 file - promoters60/1397568
tgacac

SEQ ID NO: 112617 - DNA, 9 bp, Unknown
  misc_feature (1)..( 9): Result.002 file - promoters60/1397568
actagattc

SEQ ID NO: 112618 - DNA, 9 bp, Unknown
  misc_feature (1)..( 9): Result.002 file - promoters60/1397568
actagcttc

SEQ ID NO: 112619 - DNA, 7 bp, Unknown
  misc_feature (1)..( 7): Result.002 file - promoters60/1397568
aaggcaa

SEQ ID NO: 112620 - DNA, 7 bp, Unknown
  misc_feature (1)..( 7): Result.002 file - promoters60/1397568
aagccaa

SEQ ID NO: 112621 - DNA, 9 bp, Unknown
  misc_feature (1)..( 9): Result.002 file - promoters60/1397568
caatatcaa

SEQ ID NO: 112622 - DNA, 9 bp, Unknown
  misc_feature (1)..( 9): Result.002 file - promoters60/1397568
caagatcaa

SEQ ID NO: 112623 - DNA, 10 bp, Unknown
  misc_feature (1)..( 10): Result.002 file - promoters60/1397568
tttgaatttt

SEQ ID NO: 112624 - DNA, 10 bp, Unknown
  misc_feature (1)..( 10): Result.002 file - promoters60/1397568
tttcaatttt

SEQ ID NO: 112625 - DNA, 10 bp, Unknown
  misc_feature (1)..( 10): Result.002 file - promoters60/1397568
aacttttgat

SEQ ID NO: 112626 - DNA, 10 bp, Unknown
  misc_feature (1)..( 10): Result.002 file - promoters60/1397568
aacttttgat

SEQ ID NO: 112627 - DNA, 6 bp, Unknown
  misc_feature (1)..( 6): Result.002 file - promoters60/1397568
tttata

SEQ ID NO: 112628 - DNA, 6 bp, Unknown
  misc_feature (1)..( 6): Result.002 file - promoters60/1397568
tttata

SEQ ID NO: 112629 - DNA, 7 bp, Unknown
  misc_feature (1)..( 7): Result.002 file - promoters60/1397568
tttaaaa

SEQ ID NO: 112630 - DNA, 7 bp, Unknown
  misc_feature (1)..( 7): Result.002 file - promoters60/1397568
tttcaaa

SEQ ID NO: 112631 - DNA, 8 bp, Unknown
  misc_feature (1)..( 8): Result.002 file - promoters60/1397568
gatttaag

SEQ ID NO: 112632 - DNA, 8 bp, Unknown
  misc_feature (1)..( 8): Result.002 file - promoters60/1397568
gattcaag

SEQ ID NO: 112633 - DNA, 8 bp, Unknown
  misc_feature (1)..( 8): Result.002 file - promoters60/1397568
aatcttct

SEQ ID NO: 112634 - DNA, 8 bp, Unknown
  misc_feature (1)..( 8): Result.002 file - promoters60/1397568
aattttct

SEQ ID NO: 112635 - DNA, 7 bp, Unknown
  misc_feature (1)..( 7): Result.002 file - promoters60/1397568
tatgtaa

SEQ ID NO: 112636 - DNA, 7 bp, Unknown
  misc_feature (1)..( 7): Result.002 file - promoters60/1397568
tatataa

SEQ ID NO: 112637 - DNA, 10 bp, Unknown
  misc_feature (1)..( 10): Result.002 file - promoters60/1397568
atttaacttt

SEQ ID NO: 112638 - DNA, 10 bp, Unknown
  misc_feature (1)..( 10): Result.002 file - promoters60/1397568
atttcacttt

SEQ ID NO: 112639 - DNA, 7 bp, Unknown
  misc_feature (1)..( 7): Result.002 file - promoters60/1397568
caaaaat

SEQ ID NO: 112640 - DNA, 7 bp, Unknown
  misc_feature (1)..( 7): Result.002 file - promoters60/1397568
caataat

SEQ ID NO: 112641 - DNA, 9 bp, Unknown
  misc_feature (1)..( 9): Result.002 file - promoters60/1397568
tgacagttt

SEQ ID NO: 112642 - DNA, 9 bp, Unknown
  misc_feature (1)..( 9): Result.002 file - promoters60/1397568
tgacaattt

SEQ ID NO: 112643 - DNA, 8 bp, Unknown
  misc_feature (1)..( 8): Result.002 file - promoters60/1397568
taaactgt

SEQ ID NO: 112644 - DNA, 8 bp, Unknown
  misc_feature (1)..( 8): Result.002 file - promoters60/1397568
taacctgt

SEQ ID NO: 112645 - DNA, 9 bp, Unknown
  misc_feature (1)..( 9): Result.002 file - promoters60/1397568
gctttttaa

SEQ ID NO: 112646 - DNA, 9 bp, Unknown
  misc_feature (1)..( 9): Result.002 file - promoters60/1397568
gcttattaa

SEQ ID NO: 112647 - DNA, 7 bp, Unknown
  misc_feature (1)..( 7): Result.002 file - promoters60/1397590
ttatttt

SEQ ID NO: 112648 - DNA, 7 bp, Unknown
  misc_feature (1)..( 7): Result.002 file - promoters60/1397590
atatttt

SEQ ID NO: 112649 - DNA, 7 bp, Unknown
  misc_feature (1)..( 7): Result.002 file - promoters60/1397590
ttatttc

SEQ ID NO: 112650 - DNA, 6 bp, Unknown
  misc_feature (1)..( 6): Result.002 file - promoters60/1397590
taacaa

SEQ ID NO: 112651 - DNA, 6 bp, Unknown
  misc_feature (1)..( 6): Result.002 file - promoters60/1397590
taacaa

SEQ ID NO: 112652 - DNA, 8 bp, Unknown
  misc_feature (1)..( 8): Result.002 file - promoters60/1397590
atttaaaa

SEQ ID NO: 112653 - DNA, 8 bp, Unknown
  misc_feature (1)..( 8): Result.002 file - promoters60/1397590
atttaata

SEQ ID NO: 112654 - DNA, 8 bp, Unknown
  misc_feature (1)..( 8): Result.002 file - promoters60/1397590
attaaaaa

SEQ ID NO: 112655 - DNA, 6 bp, Unknown
  misc_feature (1)..( 6): Result.002 file - promoters60/1397590
taatta

SEQ ID NO: 112656 - DNA, 6 bp, Unknown
  misc_feature (1)..( 6): Result.002 file - promoters60/1397590
taatta

SEQ ID NO: 112657 - DNA, 7 bp, Unknown
  misc_feature (1)..( 7): Result.002 file - promoters60/1397590
gatgata

SEQ ID NO: 112658 - DNA, 7 bp, Unknown
  misc_feature (1)..( 7): Result.002 file - promoters60/1397590
gataata

SEQ ID NO: 112659 - DNA, 7 bp, Unknown
  misc_feature (1)..( 7): Result.002 file - promoters60/1397590
ttaaaaa

SEQ ID NO: 112660 - DNA, 7 bp, Unknown
  misc_feature (1)..( 7): Result.002 file - promoters60/1397590
ttacaaa

SEQ ID NO: 112661 - DNA, 6 bp, Unknown
  misc_feature (1)..( 6): Result.002 file - promoters60/1397590
aataaa

SEQ ID NO: 112662 - DNA, 6 bp, Unknown
  misc_feature (1)..( 6): Result.002 file - promoters60/1397590
aataaa

SEQ ID NO: 112663 - DNA, 12 bp, Unknown
  misc_feature (1)..( 12): Result.002 file - promoters60/1397590
ttcctatatatc

SEQ ID NO: 112664 - DNA, 12 bp, Unknown
  misc_feature (1)..( 12): Result.002 file - promoters60/1397590
ctcctataaatt

SEQ ID NO: 112665 - DNA, 12 bp, Unknown
  misc_feature (1)..( 12): Result.002 file - promoters60/1397590
ctcttatatatt

SEQ ID NO: 112666 - DNA, 7 bp, Unknown
  misc_feature (1)..( 7): Result.002 file - promoters60/1397590
agcccat

SEQ ID NO: 112667 - DNA, 7 bp, Unknown
  misc_feature (1)..( 7): Result.002 file - promoters60/1397590
agcacat

SEQ ID NO: 112668 - DNA, 7 bp, Unknown
  misc_feature (1)..( 7): Result.002 file - promoters60/1397590
tatttct

SEQ ID NO: 112669 - DNA, 7 bp, Unknown
  misc_feature (1)..( 7): Result.002 file - promoters60/1397590
tatatct

SEQ ID NO: 112670 - DNA, 10 bp, Unknown
  misc_feature (1)..( 10): Result.002 file - promoters60/1397590
atattttaac

SEQ ID NO: 112671 - DNA, 10 bp, Unknown
  misc_feature (1)..( 10): Result.002 file - promoters60/1397590
atagtttaac

SEQ ID NO: 112672 - DNA, 7 bp, Unknown
  misc_feature (1)..( 7): Result.002 file - promoters60/1397590
aaggaaa

SEQ ID NO: 112673 - DNA, 7 bp, Unknown
  misc_feature (1)..( 7): Result.002 file - promoters60/1397590
aagtaaa

SEQ ID NO: 112674 - DNA, 8 bp, Unknown
  misc_feature (1)..( 8): Result.002 file - promoters60/1397590
aactattt

SEQ ID NO: 112675 - DNA, 8 bp, Unknown
  misc_feature (1)..( 8): Result.002 file - promoters60/1397590
aacttttt

SEQ ID NO: 112676 - DNA, 6 bp, Unknown
  misc_feature (1)..( 6): Result.002 file - promoters60/1397590
ttaggc

SEQ ID NO: 112677 - DNA, 6 bp, Unknown
  misc_feature (1)..( 6): Result.002 file - promoters60/1397590
ttaggc

SEQ ID NO: 112678 - DNA, 12 bp, Unknown
  misc_feature (1)..( 12): Result.002 file - promoters60/1397590
ttcctatatatc

SEQ ID NO: 112679 - DNA, 12 bp, Unknown
  misc_feature (1)..( 12): Result.002 file - promoters60/1397590
ctcttatatatt

SEQ ID NO: 112680 - DNA, 12 bp, Unknown
  misc_feature (1)..( 12): Result.002 file - promoters60/1397590
ctcctataaatt

SEQ ID NO: 112681 - DNA, 6 bp, Unknown
  misc_feature (1)..( 6): Result.002 file - promoters60/1397590
ttttta

SEQ ID NO: 112682 - DNA, 6 bp, Unknown
  misc_feature (1)..( 6): Result.002 file - promoters60/1397590
ttttta

SEQ ID NO: 112683 - DNA, 7 bp, Unknown
  misc_feature (1)..( 7): Result.002 file - promoters60/1397590
atatatt

SEQ ID NO: 112684 - DNA, 7 bp, Unknown
  misc_feature (1)..( 7): Result.002 file - promoters60/1397590
atagatt

SEQ ID NO: 112685 - DNA, 7 bp, Unknown
  misc_feature (1)..( 7): Result.002 file - promoters60/1397590
atttcca

SEQ ID NO: 112686 - DNA, 7 bp, Unknown
  misc_feature (1)..( 7): Result.002 file - promoters60/1397590
attacca

SEQ ID NO: 112687 - DNA, 10 bp, Unknown
  misc_feature (1)..( 10): Result.002 file - promoters60/1397590
aagatatatg

SEQ ID NO: 112688 - DNA, 10 bp, Unknown
  misc_feature (1)..( 10): Result.002 file - promoters60/1397590
aagaaatatg

SEQ ID NO: 112689 - DNA, 7 bp, Unknown
  misc_feature (1)..( 7): Result.002 file - promoters60/1397590
atatgaa

SEQ ID NO: 112690 - DNA, 7 bp, Unknown
  misc_feature (1)..( 7): Result.002 file - promoters60/1397590
ataggaa

SEQ ID NO: 112691 - DNA, 7 bp, Unknown
  misc_feature (1)..( 7): Result.002 file - promoters60/1397590
aaaacaa

SEQ ID NO: 112692 - DNA, 7 bp, Unknown
  misc_feature (1)..( 7): Result.002 file - promoters60/1397590
aaagcaa

SEQ ID NO: 112693 - DNA, 12 bp, Unknown
  misc_feature (1)..( 12): Result.002 file - promoters60/1397590
aaaagaagaaag

SEQ ID NO: 112694 - DNA, 12 bp, Unknown
  misc_feature (1)..( 12): Result.002 file - promoters60/1397590
aaacgaagaaag

SEQ ID NO: 112695 - DNA, 8 bp, Unknown
  misc_feature (1)..( 8): Result.002 file - promoters60/1397594
gaataatt

SEQ ID NO: 112696 - DNA, 8 bp, Unknown
  misc_feature (1)..( 8): Result.002 file - promoters60/1397594
gaacaatt

SEQ ID NO: 112697 - DNA, 8 bp, Unknown
  misc_feature (1)..( 8): Result.002 file - promoters60/1397594
ttgttgaa

SEQ ID NO: 112698 - DNA, 8 bp, Unknown
  misc_feature (1)..( 8): Result.002 file - promoters60/1397594
ttgtggaa

SEQ ID NO: 112699 - DNA, 6 bp, Unknown
  misc_feature (1)..( 6): Result.002 file - promoters60/1397594
gttctt

SEQ ID NO: 112700 - DNA, 6 bp, Unknown
  misc_feature (1)..( 6): Result.002 file - promoters60/1397594
gttctt

SEQ ID NO: 112701 - DNA, 9 bp, Unknown
  misc_feature (1)..( 9): Result.002 file - promoters60/1397594
ccttgtttt

SEQ ID NO: 112702 - DNA, 9 bp, Unknown
  misc_feature (1)..( 9): Result.002 file - promoters60/1397594
cctcgttgt

SEQ ID NO: 112703 - DNA, 9 bp, Unknown
  misc_feature (1)..( 9): Result.002 file - promoters60/1397594
cttcggtgt

SEQ ID NO: 112704 - DNA, 7 bp, Unknown
  misc_feature (1)..( 7): Result.002 file - promoters60/1397594
tttgttt

SEQ ID NO: 112705 - DNA, 7 bp, Unknown
  misc_feature (1)..( 7): Result.002 file - promoters60/1397594
tttcttt

SEQ ID NO: 112706 - DNA, 6 bp, Unknown
  misc_feature (1)..( 6): Result.002 file - promoters60/1397594
tcacaa

SEQ ID NO: 112707 - DNA, 6 bp, Unknown
  misc_feature (1)..( 6): Result.002 file - promoters60/1397594
tcacaa

SEQ ID NO: 112708 - DNA, 6 bp, Unknown
  misc_feature (1)..( 6): Result.002 file - promoters60/1397594
ttgcca

SEQ ID NO: 112709 - DNA, 6 bp, Unknown
  misc_feature (1)..( 6): Result.002 file - promoters60/1397594
ttgcca

SEQ ID NO: 112710 - DNA, 8 bp, Unknown
  misc_feature (1)..( 8): Result.002 file - promoters60/1397594
ccacaatc

SEQ ID NO: 112711 - DNA, 8 bp, Unknown
  misc_feature (1)..( 8): Result.002 file - promoters60/1397594
ccaaaatc

SEQ ID NO: 112712 - DNA, 6 bp, Unknown
  misc_feature (1)..( 6): Result.002 file - promoters60/1397594
tctttg

SEQ ID NO: 112713 - DNA, 6 bp, Unknown
  misc_feature (1)..( 6): Result.002 file - promoters60/1397594
tctttg

SEQ ID NO: 112714 - DNA, 9 bp, Unknown
  misc_feature (1)..( 9): Result.002 file - promoters60/1397594
tgggttttg

SEQ ID NO: 112715 - DNA, 9 bp, Unknown
  misc_feature (1)..( 9): Result.002 file - promoters60/1397594
tggattttg

SEQ ID NO: 112716 - DNA, 6 bp, Unknown
  misc_feature (1)..( 6): Result.002 file - promoters60/1397594
attctt

SEQ ID NO: 112717 - DNA, 6 bp, Unknown
  misc_feature (1)..( 6): Result.002 file - promoters60/1397594
attctt

SEQ ID NO: 112718 - DNA, 8 bp, Unknown
  misc_feature (1)..( 8): Result.002 file - promoters60/1397594
tgtaatcg

SEQ ID NO: 112719 - DNA, 8 bp, Unknown
  misc_feature (1)..( 8): Result.002 file - promoters60/1397594
tgtgatcg

SEQ ID NO: 112720 - DNA, 6 bp, Unknown
  misc_feature (1)..( 6): Result.002 file - promoters60/1397594
caggag

SEQ ID NO: 112721 - DNA, 6 bp, Unknown
  misc_feature (1)..( 6): Result.002 file - promoters60/1397594
caggag

SEQ ID NO: 112722 - DNA, 6 bp, Unknown
  misc_feature (1)..( 6): Result.002 file - promoters60/1397594
tatgtt

SEQ ID NO: 112723 - DNA, 6 bp, Unknown
  misc_feature (1)..( 6): Result.002 file - promoters60/1397594
tatgtt

SEQ ID NO: 112724 - DNA, 6 bp, Unknown
  misc_feature (1)..( 6): Result.002 file - promoters60/1397594
agggaa

SEQ ID NO: 112725 - DNA, 6 bp, Unknown
  misc_feature (1)..( 6): Result.002 file - promoters60/1397594
agggaa

SEQ ID NO: 112726 - DNA, 9 bp, Unknown
  misc_feature (1)..( 9): Result.002 file - promoters60/1397700
tcttgtaat

SEQ ID NO: 112727 - DNA, 9 bp, Unknown
  misc_feature (1)..( 9): Result.002 file - promoters60/1397700
aattgtaat

SEQ ID NO: 112728 - DNA, 9 bp, Unknown
  misc_feature (1)..( 9): Result.002 file - promoters60/1397700
aatagtact

SEQ ID NO: 112729 - DNA, 10 bp, Unknown
  misc_feature (1)..( 10): Result.002 file - promoters60/1397700
aactttgaaa

SEQ ID NO: 112730 - DNA, 10 bp, Unknown
  misc_feature (1)..( 10): Result.002 file - promoters60/1397700
ttatttcaaa

SEQ ID NO: 112731 - DNA, 10 bp, Unknown
  misc_feature (1)..( 10): Result.002 file - promoters60/1397700
aactttaaaa

SEQ ID NO: 112732 - DNA, 10 bp, Unknown
  misc_feature (1)..( 10): Result.002 file - promoters60/1397700
aaattacaaa

SEQ ID NO: 112733 - DNA, 8 bp, Unknown
  misc_feature (1)..( 8): Result.002 file - promoters60/1397700
attaaagc

SEQ ID NO: 112734 - DNA, 8 bp, Unknown
  misc_feature (1)..( 8): Result.002 file - promoters60/1397700
attcaaga

SEQ ID NO: 112735 - DNA, 8 bp, Unknown
  misc_feature (1)..( 8): Result.002 file - promoters60/1397700
tttctaga

SEQ ID NO: 112736 - DNA, 8 bp, Unknown
  misc_feature (1)..( 8): Result.002 file - promoters60/1397700
gaaccaat

SEQ ID NO: 112737 - DNA, 8 bp, Unknown
  misc_feature (1)..( 8): Result.002 file - promoters60/1397700
gaaacaaa

SEQ ID NO: 112738 - DNA, 8 bp, Unknown
  misc_feature (1)..( 8): Result.002 file - promoters60/1397700
taaacaaa

SEQ ID NO: 112739 - DNA, 7 bp, Unknown
  misc_feature (1)..( 7): Result.002 file - promoters60/1397700
tttcttg

SEQ ID NO: 112740 - DNA, 7 bp, Unknown
  misc_feature (1)..( 7): Result.002 file - promoters60/1397700
tttctta

SEQ ID NO: 112741 - DNA, 7 bp, Unknown
  misc_feature (1)..( 7): Result.002 file - promoters60/1397700
tttcttg

SEQ ID NO: 112742 - DNA, 8 bp, Unknown
  misc_feature (1)..( 8): Result.002 file - promoters60/1397700
attgaaat

SEQ ID NO: 112743 - DNA, 8 bp, Unknown
  misc_feature (1)..( 8): Result.002 file - promoters60/1397700
tttgcaat

SEQ ID NO: 112744 - DNA, 8 bp, Unknown
  misc_feature (1)..( 8): Result.002 file - promoters60/1397700
attaaaag

SEQ ID NO: 112745 - DNA, 9 bp, Unknown
  misc_feature (1)..( 9): Result.002 file - promoters60/1397700
taagatagc

SEQ ID NO: 112746 - DNA, 9 bp, Unknown
  misc_feature (1)..( 9): Result.002 file - promoters60/1397700
taatatata

SEQ ID NO: 112747 - DNA, 9 bp, Unknown
  misc_feature (1)..( 9): Result.002 file - promoters60/1397700
ttatatata

SEQ ID NO: 112748 - DNA, 7 bp, Unknown
  misc_feature (1)..( 7): Result.002 file - promoters60/1397700
ctctctg

SEQ ID NO: 112749 - DNA, 7 bp, Unknown
  misc_feature (1)..( 7): Result.002 file - promoters60/1397700
ttctctg

SEQ ID NO: 112750 - DNA, 7 bp, Unknown
  misc_feature (1)..( 7): Result.002 file - promoters60/1397700
ttctctt

SEQ ID NO: 112751 - DNA, 9 bp, Unknown
  misc_feature (1)..( 9): Result.002 file - promoters60/1397700
caatcaaaa

SEQ ID NO: 112752 - DNA, 9 bp, Unknown
  misc_feature (1)..( 9): Result.002 file - promoters60/1397700
caattaaat

SEQ ID NO: 112753 - DNA, 9 bp, Unknown
  misc_feature (1)..( 9): Result.002 file - promoters60/1397700
tccttaaat

SEQ ID NO: 112754 - DNA, 7 bp, Unknown
  misc_feature (1)..( 7): Result.002 file - promoters60/1397700
atgtttg

SEQ ID NO: 112755 - DNA, 7 bp, Unknown
  misc_feature (1)..( 7): Result.002 file - promoters60/1397700
gtgtttg

SEQ ID NO: 112756 - DNA, 7 bp, Unknown
  misc_feature (1)..( 7): Result.002 file - promoters60/1397700
gtgattg

SEQ ID NO: 112757 - DNA, 11 bp, Unknown
  misc_feature (1)..( 11): Result.002 file - promoters60/1397700
taaagtgaagt

SEQ ID NO: 112758 - DNA, 11 bp, Unknown
  misc_feature (1)..( 11): Result.002 file - promoters60/1397700
taaagtcaaaa

SEQ ID NO: 112759 - DNA, 11 bp, Unknown
  misc_feature (1)..( 11): Result.002 file - promoters60/1397700
aaaaatcaaaa

SEQ ID NO: 112760 - DNA, 10 bp, Unknown
  misc_feature (1)..( 10): Result.002 file - promoters60/1397700
gaagtcatat

SEQ ID NO: 112761 - DNA, 10 bp, Unknown
  misc_feature (1)..( 10): Result.002 file - promoters60/1397700
aaagtcaaaa

SEQ ID NO: 112762 - DNA, 10 bp, Unknown
  misc_feature (1)..( 10): Result.002 file - promoters60/1397700
aaaatcaaaa

SEQ ID NO: 112763 - DNA, 9 bp, Unknown
  misc_feature (1)..( 9): Result.002 file - promoters60/1397753
aatattttg

SEQ ID NO: 112764 - DNA, 9 bp, Unknown
  misc_feature (1)..( 9): Result.002 file - promoters60/1397753
gttattttt

SEQ ID NO: 112765 - DNA, 9 bp, Unknown
  misc_feature (1)..( 9): Result.002 file - promoters60/1397753
aataatttg

SEQ ID NO: 112766 - DNA, 9 bp, Unknown
  misc_feature (1)..( 9): Result.002 file - promoters60/1397753
aataattta

SEQ ID NO: 112767 - DNA, 10 bp, Unknown
  misc_feature (1)..( 10): Result.002 file - promoters60/1397753
aatattttgg

SEQ ID NO: 112768 - DNA, 10 bp, Unknown
  misc_feature (1)..( 10): Result.002 file - promoters60/1397753
tattttttgg

SEQ ID NO: 112769 - DNA, 10 bp, Unknown
  misc_feature (1)..( 10): Result.002 file - promoters60/1397753
aataatttga

SEQ ID NO: 112770 - DNA, 10 bp, Unknown
  misc_feature (1)..( 10): Result.002 file - promoters60/1397753
aatattttta

SEQ ID NO: 112771 - DNA, 15 bp, Unknown
  misc_feature (1)..( 15): Result.002 file - promoters60/1397753
tttggggtttgattc

SEQ ID NO: 112772 - DNA, 15 bp, Unknown
  misc_feature (1)..( 15): Result.002 file - promoters60/1397753
tttgggattttctta

SEQ ID NO: 112773 - DNA, 15 bp, Unknown
  misc_feature (1)..( 15): Result.002 file - promoters60/1397753
tgtatgatttcctta

SEQ ID NO: 112774 - DNA, 15 bp, Unknown
  misc_feature (1)..( 15): Result.002 file - promoters60/1397753
ataatgttttagtgg

SEQ ID NO: 112775 - DNA, 13 bp, Unknown
  misc_feature (1)..( 13): Result.002 file - promoters60/1397753
gtaccaaactaaa

SEQ ID NO: 112776 - DNA, 13 bp, Unknown
  misc_feature (1)..( 13): Result.002 file - promoters60/1397753
tttctaaaataat

SEQ ID NO: 112777 - DNA, 13 bp, Unknown
  misc_feature (1)..( 13): Result.002 file - promoters60/1397753
ttctcaaattgtt

SEQ ID NO: 112778 - DNA, 13 bp, Unknown
  misc_feature (1)..( 13): Result.002 file - promoters60/1397753
agaagaaaaaaat

SEQ ID NO: 112779 - DNA, 10 bp, Unknown
  misc_feature (1)..( 10): Result.002 file - promoters60/1397821
gaattgatgt

SEQ ID NO: 112780 - DNA, 10 bp, Unknown
  misc_feature (1)..( 10): Result.002 file - promoters60/1397821
gaattgatta

SEQ ID NO: 112781 - DNA, 10 bp, Unknown
  misc_feature (1)..( 10): Result.002 file - promoters60/1397821
gaaatgaaat

SEQ ID NO: 112782 - DNA, 10 bp, Unknown
  misc_feature (1)..( 10): Result.002 file - promoters60/1397821
tctttggtta

SEQ ID NO: 112783 - DNA, 10 bp, Unknown
  misc_feature (1)..( 10): Result.002 file - promoters60/1397821
taattcattg

SEQ ID NO: 112784 - DNA, 11 bp, Unknown
  misc_feature (1)..( 11): Result.002 file - promoters60/1397821
gtcttttcaaa

SEQ ID NO: 112785 - DNA, 11 bp, Unknown
  misc_feature (1)..( 11): Result.002 file - promoters60/1397821
gtccttttacc

SEQ ID NO: 112786 - DNA, 11 bp, Unknown
  misc_feature (1)..( 11): Result.002 file - promoters60/1397821
atcttttcaat

SEQ ID NO: 112787 - DNA, 11 bp, Unknown
  misc_feature (1)..( 11): Result.002 file - promoters60/1397821
ctattttaata

SEQ ID NO: 112788 - DNA, 11 bp, Unknown
  misc_feature (1)..( 11): Result.002 file - promoters60/1397821
ttctgttcgta

SEQ ID NO: 112789 - DNA, 11 bp, Unknown
  misc_feature (1)..( 11): Result.002 file - promoters60/1397821
tcaagtttgag

SEQ ID NO: 112790 - DNA, 11 bp, Unknown
  misc_feature (1)..( 11): Result.002 file - promoters60/1397821
tcaattttgct

SEQ ID NO: 112791 - DNA, 11 bp, Unknown
  misc_feature (1)..( 11): Result.002 file - promoters60/1397821
aagagtctgat

SEQ ID NO: 112792 - DNA, 11 bp, Unknown
  misc_feature (1)..( 11): Result.002 file - promoters60/1397821
ctaattttaat

SEQ ID NO: 112793 - DNA, 11 bp, Unknown
  misc_feature (1)..( 11): Result.002 file - promoters60/1397821
acgagcctgat

SEQ ID NO: 112794 - DNA, 9 bp, Unknown
  misc_feature (1)..( 9): Result.002 file - promoters60/1397821
aaaacattg

SEQ ID NO: 112795 - DNA, 9 bp, Unknown
  misc_feature (1)..( 9): Result.002 file - promoters60/1397821
aaaacagtg

SEQ ID NO: 112796 - DNA, 9 bp, Unknown
  misc_feature (1)..( 9): Result.002 file - promoters60/1397821
aaaaaattc

SEQ ID NO: 112797 - DNA, 9 bp, Unknown
  misc_feature (1)..( 9): Result.002 file - promoters60/1397821
aaaacattg

SEQ ID NO: 112798 - DNA, 9 bp, Unknown
  misc_feature (1)..( 9): Result.002 file - promoters60/1397821
aaaataata

SEQ ID NO: 112799 - DNA, 10 bp, Unknown
  misc_feature (1)..( 10): Result.002 file - promoters60/1397867
tttggtttct

SEQ ID NO: 112800 - DNA, 10 bp, Unknown
  misc_feature (1)..( 10): Result.002 file - promoters60/1397867
tttggattct

SEQ ID NO: 112801 - DNA, 10 bp, Unknown
  misc_feature (1)..( 10): Result.002 file - promoters60/1397867
tttgatttta

SEQ ID NO: 112802 - DNA, 10 bp, Unknown
  misc_feature (1)..( 10): Result.002 file - promoters60/1397867
aatggtttta

SEQ ID NO: 112803 - DNA, 10 bp, Unknown
  misc_feature (1)..( 10): Result.002 file - promoters60/1397867
aatgatttca

SEQ ID NO: 112804 - DNA, 10 bp, Unknown
  misc_feature (1)..( 10): Result.002 file - promoters60/1397867
tatgaattct

SEQ ID NO: 112805 - DNA, 10 bp, Unknown
  misc_feature (1)..( 10): Result.002 file - promoters60/1397867
aatggttaat

SEQ ID NO: 112806 - DNA, 10 bp, Unknown
  misc_feature (1)..( 10): Result.002 file - promoters60/1397867
acttcatatg

SEQ ID NO: 112807 - DNA, 10 bp, Unknown
  misc_feature (1)..( 10): Result.002 file - promoters60/1397867
gattcatata

SEQ ID NO: 112808 - DNA, 10 bp, Unknown
  misc_feature (1)..( 10): Result.002 file - promoters60/1397867
tcatcagatg

SEQ ID NO: 112809 - DNA, 10 bp, Unknown
  misc_feature (1)..( 10): Result.002 file - promoters60/1397867
agagcatata

SEQ ID NO: 112810 - DNA, 10 bp, Unknown
  misc_feature (1)..( 10): Result.002 file - promoters60/1397867
cattcatcct

SEQ ID NO: 112811 - DNA, 10 bp, Unknown
  misc_feature (1)..( 10): Result.002 file - promoters60/1397867
cattcaatga

SEQ ID NO: 112812 - DNA, 8 bp, Unknown
  misc_feature (1)..( 8): Result.002 file - promoters60/1397898
ttgtttat

SEQ ID NO: 112813 - DNA, 8 bp, Unknown
  misc_feature (1)..( 8): Result.002 file - promoters60/1397898
ttgtgtat

SEQ ID NO: 112814 - DNA, 7 bp, Unknown
  misc_feature (1)..( 7): Result.002 file - promoters60/1397898
tgtagtt

SEQ ID NO: 112815 - DNA, 7 bp, Unknown
  misc_feature (1)..( 7): Result.002 file - promoters60/1397898
tgtagtt

SEQ ID NO: 112816 - DNA, 6 bp, Unknown
  misc_feature (1)..( 6): Result.002 file - promoters60/1397898
aattct

SEQ ID NO: 112817 - DNA, 6 bp, Unknown
  misc_feature (1)..( 6): Result.002 file - promoters60/1397898
aattct

SEQ ID NO: 112818 - DNA, 6 bp, Unknown
  misc_feature (1)..( 6): Result.002 file - promoters60/1397898
tacata

SEQ ID NO: 112819 - DNA, 6 bp, Unknown
  misc_feature (1)..( 6): Result.002 file - promoters60/1397898
tacata

SEQ ID NO: 112820 - DNA, 8 bp, Unknown
  misc_feature (1)..( 8): Result.002 file - promoters60/1397898
gaattatt

SEQ ID NO: 112821 - DNA, 8 bp, Unknown
  misc_feature (1)..( 8): Result.002 file - promoters60/1397898
gaatgatt

SEQ ID NO: 112822 - DNA, 8 bp, Unknown
  misc_feature (1)..( 8): Result.002 file - promoters60/1397898
taatgata

SEQ ID NO: 112823 - DNA, 7 bp, Unknown
  misc_feature (1)..( 7): Result.002 file - promoters60/1397898
caaggag

SEQ ID NO: 112824 - DNA, 7 bp, Unknown
  misc_feature (1)..( 7): Result.002 file - promoters60/1397898
caacgag

SEQ ID NO: 112825 - DNA, 7 bp, Unknown
  misc_feature (1)..( 7): Result.002 file - promoters60/1397898
atggttg

SEQ ID NO: 112826 - DNA, 7 bp, Unknown
  misc_feature (1)..( 7): Result.002 file - promoters60/1397898
atggttg

SEQ ID NO: 112827 - DNA, 6 bp, Unknown
  misc_feature (1)..( 6): Result.002 file - promoters60/1397898
ttgctg

SEQ ID NO: 112828 - DNA, 6 bp, Unknown
  misc_feature (1)..( 6): Result.002 file - promoters60/1397898
ttgctg

SEQ ID NO: 112829 - DNA, 7 bp, Unknown
  misc_feature (1)..( 7): Result.002 file - promoters60/1397898
tttaaca

SEQ ID NO: 112830 - DNA, 7 bp, Unknown
  misc_feature (1)..( 7): Result.002 file - promoters60/1397898
tttaaca

SEQ ID NO: 112831 - DNA, 11 bp, Unknown
  misc_feature (1)..( 11): Result.002 file - promoters60/1397898
tccttttgtgc

SEQ ID NO: 112832 - DNA, 11 bp, Unknown
  misc_feature (1)..( 11): Result.002 file - promoters60/1397898
tccctttctgc

SEQ ID NO: 112833 - DNA, 10 bp, Unknown
  misc_feature (1)..( 10): Result.002 file - promoters60/1397919
tgtaacaatt

SEQ ID NO: 112834 - DNA, 10 bp, Unknown
  misc_feature (1)..( 10): Result.002 file - promoters60/1397919
aataacaaca

SEQ ID NO: 112835 - DNA, 10 bp, Unknown
  misc_feature (1)..( 10): Result.002 file - promoters60/1397919
tgtgacatgg

SEQ ID NO: 112836 - DNA, 10 bp, Unknown
  misc_feature (1)..( 10): Result.002 file - promoters60/1397919
agtgacaaga

SEQ ID NO: 112837 - DNA, 10 bp, Unknown
  misc_feature (1)..( 10): Result.002 file - promoters60/1397919
gataagaaca

SEQ ID NO: 112838 - DNA, 10 bp, Unknown
  misc_feature (1)..( 10): Result.002 file - promoters60/1397919
atagagaagc

SEQ ID NO: 112839 - DNA, 8 bp, Unknown
  misc_feature (1)..( 8): Result.002 file - promoters60/1397923
cttttttt

SEQ ID NO: 112840 - DNA, 8 bp, Unknown
  misc_feature (1)..( 8): Result.002 file - promoters60/1397923
attttttt

SEQ ID NO: 112841 - DNA, 8 bp, Unknown
  misc_feature (1)..( 8): Result.002 file - promoters60/1397923
ctttttta

SEQ ID NO: 112842 - DNA, 8 bp, Unknown
  misc_feature (1)..( 8): Result.002 file - promoters60/1397923
tttataaa

SEQ ID NO: 112843 - DNA, 8 bp, Unknown
  misc_feature (1)..( 8): Result.002 file - promoters60/1397923
tttgtaaa

SEQ ID NO: 112844 - DNA, 8 bp, Unknown
  misc_feature (1)..( 8): Result.002 file - promoters60/1397923
tttatatt

SEQ ID NO: 112845 - DNA, 8 bp, Unknown
  misc_feature (1)..( 8): Result.002 file - promoters60/1397923
aaaagttt

SEQ ID NO: 112846 - DNA, 8 bp, Unknown
  misc_feature (1)..( 8): Result.002 file - promoters60/1397923
taaatttt

SEQ ID NO: 112847 - DNA, 8 bp, Unknown
  misc_feature (1)..( 8): Result.002 file - promoters60/1397923
aaaatttg

SEQ ID NO: 112848 - DNA, 16 bp, Unknown
  misc_feature (1)..( 16): Result.002 file - promoters60/1397923
taacgaaagtgacatt

SEQ ID NO: 112849 - DNA, 16 bp, Unknown
  misc_feature (1)..( 16): Result.002 file - promoters60/1397923
taacaaaactgacaac

SEQ ID NO: 112850 - DNA, 16 bp, Unknown
  misc_feature (1)..( 16): Result.002 file - promoters60/1397923
taaatcatatgatatt

SEQ ID NO: 112851 - DNA, 7 bp, Unknown
  misc_feature (1)..( 7): Result.002 file - promoters60/1397923
aaacaaa

SEQ ID NO: 112852 - DNA, 7 bp, Unknown
  misc_feature (1)..( 7): Result.002 file - promoters60/1397923
aaaaaaa

SEQ ID NO: 112853 - DNA, 7 bp, Unknown
  misc_feature (1)..( 7): Result.002 file - promoters60/1397923
aaaaaaa

SEQ ID NO: 112854 - DNA, 9 bp, Unknown
  misc_feature (1)..( 9): Result.002 file - promoters60/1397923
attttgttt

SEQ ID NO: 112855 - DNA, 9 bp, Unknown
  misc_feature (1)..( 9): Result.002 file - promoters60/1397923
ctttttttt

SEQ ID NO: 112856 - DNA, 9 bp, Unknown
  misc_feature (1)..( 9): Result.002 file - promoters60/1397923
attttgttg

SEQ ID NO: 112857 - DNA, 9 bp, Unknown
  misc_feature (1)..( 9): Result.002 file - promoters60/1397923
aaataaaaa

SEQ ID NO: 112858 - DNA, 9 bp, Unknown
  misc_feature (1)..( 9): Result.002 file - promoters60/1397923
aaacaaaaa

SEQ ID NO: 112859 - DNA, 9 bp, Unknown
  misc_feature (1)..( 9): Result.002 file - promoters60/1397923
aaagaacag

SEQ ID NO: 112860 - DNA, 10 bp, Unknown
  misc_feature (1)..( 10): Result.002 file - promoters60/1397923
tttaaatata

SEQ ID NO: 112861 - DNA, 10 bp, Unknown
  misc_feature (1)..( 10): Result.002 file - promoters60/1397923
aataattata

SEQ ID NO: 112862 - DNA, 10 bp, Unknown
  misc_feature (1)..( 10): Result.002 file - promoters60/1397923
tttcaattct

SEQ ID NO: 112863 - DNA, 13 bp, Unknown
  misc_feature (1)..( 13): Result.002 file - promoters60/1397923
aaaactttatcct

SEQ ID NO: 112864 - DNA, 13 bp, Unknown
  misc_feature (1)..( 13): Result.002 file - promoters60/1397923
aaaaatttgaaaa

SEQ ID NO: 112865 - DNA, 13 bp, Unknown
  misc_feature (1)..( 13): Result.002 file - promoters60/1397923
gtaaatttgtaaa

SEQ ID NO: 112866 - DNA, 10 bp, Unknown
  misc_feature (1)..( 10): Result.002 file - promoters60/1397923
tcctttgaac

SEQ ID NO: 112867 - DNA, 10 bp, Unknown
  misc_feature (1)..( 10): Result.002 file - promoters60/1397923
aaatttgaaa

SEQ ID NO: 112868 - DNA, 11 bp, Unknown
  misc_feature (1)..( 11): Result.002 file - promoters60/1397923
aaatttgtaaa

SEQ ID NO: 112869 - DNA, 7 bp, Unknown
  misc_feature (1)..( 7): Result.002 file - promoters60/1397923
attttac

SEQ ID NO: 112870 - DNA, 7 bp, Unknown
  misc_feature (1)..( 7): Result.002 file - promoters60/1397923
attttat

SEQ ID NO: 112871 - DNA, 7 bp, Unknown
  misc_feature (1)..( 7): Result.002 file - promoters60/1397923
cttttac

SEQ ID NO: 112872 - DNA, 8 bp, Unknown
  misc_feature (1)..( 8): Result.002 file - promoters60/1398081
ttatatca

SEQ ID NO: 112873 - DNA, 8 bp, Unknown
  misc_feature (1)..( 8): Result.002 file - promoters60/1398081
tcatatca

SEQ ID NO: 112874 - DNA, 8 bp, Unknown
  misc_feature (1)..( 8): Result.002 file - promoters60/1398081
ttagatcg

SEQ ID NO: 112875 - DNA, 8 bp, Unknown
  misc_feature (1)..( 8): Result.002 file - promoters60/1398081
agataagt

SEQ ID NO: 112876 - DNA, 8 bp, Unknown
  misc_feature (1)..( 8): Result.002 file - promoters60/1398081
taataagt

SEQ ID NO: 112877 - DNA, 8 bp, Unknown
  misc_feature (1)..( 8): Result.002 file - promoters60/1398081
agagaaga

SEQ ID NO: 112878 - DNA, 6 bp, Unknown
  misc_feature (1)..( 6): Result.002 file - promoters60/1398081
agtaaa

SEQ ID NO: 112879 - DNA, 6 bp, Unknown
  misc_feature (1)..( 6): Result.002 file - promoters60/1398081
agtaaa

SEQ ID NO: 112880 - DNA, 6 bp, Unknown
  misc_feature (1)..( 6): Result.002 file - promoters60/1398081
agtaaa

SEQ ID NO: 112881 - DNA, 14 bp, Unknown
  misc_feature (1)..( 14): Result.002 file - promoters60/1398081
caacaaaatttggt

SEQ ID NO: 112882 - DNA, 14 bp, Unknown
  misc_feature (1)..( 14): Result.002 file - promoters60/1398081
caataaaagttgca

SEQ ID NO: 112883 - DNA, 14 bp, Unknown
  misc_feature (1)..( 14): Result.002 file - promoters60/1398081
cctacaattttgtt

SEQ ID NO: 112884 - DNA, 14 bp, Unknown
  misc_feature (1)..( 14): Result.002 file - promoters60/1398081
atacataattcata

SEQ ID NO: 112885 - DNA, 15 bp, Unknown
  misc_feature (1)..( 15): Result.002 file - promoters60/1398081
attggttatcttttg

SEQ ID NO: 112886 - DNA, 15 bp, Unknown
  misc_feature (1)..( 15): Result.002 file - promoters60/1398081
atttgttatctattg

SEQ ID NO: 112887 - DNA, 15 bp, Unknown
  misc_feature (1)..( 15): Result.002 file - promoters60/1398081
ctaggatatttttta

SEQ ID NO: 112888 - DNA, 15 bp, Unknown
  misc_feature (1)..( 15): Result.002 file - promoters60/1398081
atgaagaatattttc

SEQ ID NO: 112889 - DNA, 9 bp, Unknown
  misc_feature (1)..( 9): Result.002 file - promoters60/1398081
ttagatatg

SEQ ID NO: 112890 - DNA, 9 bp, Unknown
  misc_feature (1)..( 9): Result.002 file - promoters60/1398081
ttaaataaa

SEQ ID NO: 112891 - DNA, 9 bp, Unknown
  misc_feature (1)..( 9): Result.002 file - promoters60/1398081
caaaataaa

SEQ ID NO: 112892 - DNA, 11 bp, Unknown
  misc_feature (1)..( 11): Result.002 file - promoters60/1398114
aggagagatga

SEQ ID NO: 112893 - DNA, 11 bp, Unknown
  misc_feature (1)..( 11): Result.002 file - promoters60/1398114
cctagagattg

SEQ ID NO: 112894 - DNA, 11 bp, Unknown
  misc_feature (1)..( 11): Result.002 file - promoters60/1398114
gacagagttga

SEQ ID NO: 112895 - DNA, 11 bp, Unknown
  misc_feature (1)..( 11): Result.002 file - promoters60/1398114
caaagaaatga

SEQ ID NO: 112896 - DNA, 11 bp, Unknown
  misc_feature (1)..( 11): Result.002 file - promoters60/1398114
caaacaaatca

SEQ ID NO: 112897 - DNA, 11 bp, Unknown
  misc_feature (1)..( 11): Result.002 file - promoters60/1398114
caaagaaaggt

SEQ ID NO: 112898 - DNA, 11 bp, Unknown
  misc_feature (1)..( 11): Result.002 file - promoters60/1398114
tatagagttgg

SEQ ID NO: 112899 - DNA, 9 bp, Unknown
  misc_feature (1)..( 9): Result.002 file - promoters60/1398114
aaagaacct

SEQ ID NO: 112900 - DNA, 9 bp, Unknown
  misc_feature (1)..( 9): Result.002 file - promoters60/1398114
ctagatcct

SEQ ID NO: 112901 - DNA, 9 bp, Unknown
  misc_feature (1)..( 9): Result.002 file - promoters60/1398114
aaataactg

SEQ ID NO: 112902 - DNA, 9 bp, Unknown
  misc_feature (1)..( 9): Result.002 file - promoters60/1398114
tcataactt

SEQ ID NO: 112903 - DNA, 9 bp, Unknown
  misc_feature (1)..( 9): Result.002 file - promoters60/1398114
taataactc

SEQ ID NO: 112904 - DNA, 9 bp, Unknown
  misc_feature (1)..( 9): Result.002 file - promoters60/1398114
aaataaaat

SEQ ID NO: 112905 - DNA, 14 bp, Unknown
  misc_feature (1)..( 14): Result.002 file - promoters60/1398114
agagttgaatttag

SEQ ID NO: 112906 - DNA, 14 bp, Unknown
  misc_feature (1)..( 14): Result.002 file - promoters60/1398114
ttagtggaaattat

SEQ ID NO: 112907 - DNA, 14 bp, Unknown
  misc_feature (1)..( 14): Result.002 file - promoters60/1398114
tcactggcaatgtt

SEQ ID NO: 112908 - DNA, 14 bp, Unknown
  misc_feature (1)..( 14): Result.002 file - promoters60/1398114
ttactgggttagat

SEQ ID NO: 112909 - DNA, 14 bp, Unknown
  misc_feature (1)..( 14): Result.002 file - promoters60/1398114
aaagcccaaattaa

SEQ ID NO: 112910 - DNA, 14 bp, Unknown
  misc_feature (1)..( 14): Result.002 file - promoters60/1398114
tcagacaaaaataa

SEQ ID NO: 112911 - DNA, 14 bp, Unknown
  misc_feature (1)..( 14): Result.002 file - promoters60/1398114
acaatccaaaggga

SEQ ID NO: 112912 - DNA, 14 bp, Unknown
  misc_feature (1)..( 14): Result.002 file - promoters60/1398114
caaatcgaaatcga

SEQ ID NO: 112913 - DNA, 14 bp, Unknown
  misc_feature (1)..( 14): Result.002 file - promoters60/1398114
caaaaccaaagaaa

SEQ ID NO: 112914 - DNA, 14 bp, Unknown
  misc_feature (1)..( 14): Result.002 file - promoters60/1398114
gcataacaaaaaat

SEQ ID NO: 112915 - DNA, 14 bp, Unknown
  misc_feature (1)..( 14): Result.002 file - promoters60/1398114
gagttggatagctt

SEQ ID NO: 112916 - DNA, 14 bp, Unknown
  misc_feature (1)..( 14): Result.002 file - promoters60/1398114
gtcttacaaagaaa

SEQ ID NO: 112917 - DNA, 9 bp, Unknown
  misc_feature (1)..( 9): Result.002 file - promoters60/1398124
caattattt

SEQ ID NO: 112918 - DNA, 9 bp, Unknown
  misc_feature (1)..( 9): Result.002 file - promoters60/1398124
gcattgttt

SEQ ID NO: 112919 - DNA, 9 bp, Unknown
  misc_feature (1)..( 9): Result.002 file - promoters60/1398124
caaatataa

SEQ ID NO: 112920 - DNA, 9 bp, Unknown
  misc_feature (1)..( 9): Result.002 file - promoters60/1398124
aaaatattt

SEQ ID NO: 112921 - DNA, 11 bp, Unknown
  misc_feature (1)..( 11): Result.002 file - promoters60/1398124
tgttatattaa

SEQ ID NO: 112922 - DNA, 11 bp, Unknown
  misc_feature (1)..( 11): Result.002 file - promoters60/1398124
acttattttat

SEQ ID NO: 112923 - DNA, 11 bp, Unknown
  misc_feature (1)..( 11): Result.002 file - promoters60/1398124
aattattttaa

SEQ ID NO: 112924 - DNA, 11 bp, Unknown
  misc_feature (1)..( 11): Result.002 file - promoters60/1398124
acttgtttcaa

SEQ ID NO: 112925 - DNA, 11 bp, Unknown
  misc_feature (1)..( 11): Result.002 file - promoters60/1398124
ttttgaattca

SEQ ID NO: 112926 - DNA, 11 bp, Unknown
  misc_feature (1)..( 11): Result.002 file - promoters60/1398124
ttatgtattca

SEQ ID NO: 112927 - DNA, 11 bp, Unknown
  misc_feature (1)..( 11): Result.002 file - promoters60/1398124
ttaagtagatt

SEQ ID NO: 112928 - DNA, 11 bp, Unknown
  misc_feature (1)..( 11): Result.002 file - promoters60/1398124
ataattagttt

SEQ ID NO: 112929 - DNA, 11 bp, Unknown
  misc_feature (1)..( 11): Result.002 file - promoters60/1398124
cgaagaagatt

SEQ ID NO: 112930 - DNA, 7 bp, Unknown
  misc_feature (1)..( 7): Result.002 file - promoters60/1398270
cgatttt

SEQ ID NO: 112931 - DNA, 7 bp, Unknown
  misc_feature (1)..( 7): Result.002 file - promoters60/1398270
cgaattt

SEQ ID NO: 112932 - DNA, 7 bp, Unknown
  misc_feature (1)..( 7): Result.002 file - promoters60/1398270
tgcaaac

SEQ ID NO: 112933 - DNA, 7 bp, Unknown
  misc_feature (1)..( 7): Result.002 file - promoters60/1398270
tgcaaac

SEQ ID NO: 112934 - DNA, 9 bp, Unknown
  misc_feature (1)..( 9): Result.002 file - promoters60/1398270
tagaatgga

SEQ ID NO: 112935 - DNA, 9 bp, Unknown
  misc_feature (1)..( 9): Result.002 file - promoters60/1398270
tagaacgga

SEQ ID NO: 112936 - DNA, 7 bp, Unknown
  misc_feature (1)..( 7): Result.002 file - promoters60/1398270
aaacgat

SEQ ID NO: 112937 - DNA, 7 bp, Unknown
  misc_feature (1)..( 7): Result.002 file - promoters60/1398270
aaacgat

SEQ ID NO: 112938 - DNA, 6 bp, Unknown
  misc_feature (1)..( 6): Result.002 file - promoters60/1398270
aaagag

SEQ ID NO: 112939 - DNA, 6 bp, Unknown
  misc_feature (1)..( 6): Result.002 file - promoters60/1398270
aaagag

SEQ ID NO: 112940 - DNA, 6 bp, Unknown
  misc_feature (1)..( 6): Result.002 file - promoters60/1398270
ctcagt

SEQ ID NO: 112941 - DNA, 6 bp, Unknown
  misc_feature (1)..( 6): Result.002 file - promoters60/1398270
ctcagt

SEQ ID NO: 112942 - DNA, 6 bp, Unknown
  misc_feature (1)..( 6): Result.002 file - promoters60/1398270
ttttgt

SEQ ID NO: 112943 - DNA, 6 bp, Unknown
  misc_feature (1)..( 6): Result.002 file - promoters60/1398270
ttttgt

SEQ ID NO: 112944 - DNA, 6 bp, Unknown
  misc_feature (1)..( 6): Result.002 file - promoters60/1398270
taacta

SEQ ID NO: 112945 - DNA, 6 bp, Unknown
  misc_feature (1)..( 6): Result.002 file - promoters60/1398270
taacta

SEQ ID NO: 112946 - DNA, 6 bp, Unknown
  misc_feature (1)..( 6): Result.002 file - promoters60/1398270
tgactc

SEQ ID NO: 112947 - DNA, 6 bp, Unknown
  misc_feature (1)..( 6): Result.002 file - promoters60/1398270
tgactc

SEQ ID NO: 112948 - DNA, 7 bp, Unknown
  misc_feature (1)..( 7): Result.002 file - promoters60/1398270
aaaccaa

SEQ ID NO: 112949 - DNA, 7 bp, Unknown
  misc_feature (1)..( 7): Result.002 file - promoters60/1398270
aaaccaa

SEQ ID NO: 112950 - DNA, 6 bp, Unknown
  misc_feature (1)..( 6): Result.002 file - promoters60/1398270
gaaaaa

SEQ ID NO: 112951 - DNA, 6 bp, Unknown
  misc_feature (1)..( 6): Result.002 file - promoters60/1398270
gaaaaa

SEQ ID NO: 112952 - DNA, 9 bp, Unknown
  misc_feature (1)..( 9): Result.002 file - promoters60/1398270
agattataa

SEQ ID NO: 112953 - DNA, 9 bp, Unknown
  misc_feature (1)..( 9): Result.002 file - promoters60/1398270
agataataa

SEQ ID NO: 112954 - DNA, 7 bp, Unknown
  misc_feature (1)..( 7): Result.002 file - promoters60/1398270
ttaataa

SEQ ID NO: 112955 - DNA, 7 bp, Unknown
  misc_feature (1)..( 7): Result.002 file - promoters60/1398270
ttaataa

SEQ ID NO: 112956 - DNA, 7 bp, Unknown
  misc_feature (1)..( 7): Result.002 file - promoters60/1398270
ttctaaa

SEQ ID NO: 112957 - DNA, 7 bp, Unknown
  misc_feature (1)..( 7): Result.002 file - promoters60/1398270
ttccaaa

SEQ ID NO: 112958 - DNA, 6 bp, Unknown
  misc_feature (1)..( 6): Result.002 file - promoters60/1398270
ccaaac

SEQ ID NO: 112959 - DNA, 6 bp, Unknown
  misc_feature (1)..( 6): Result.002 file - promoters60/1398270
ccaaac

SEQ ID NO: 112960 - DNA, 6 bp, Unknown
  misc_feature (1)..( 6): Result.002 file - promoters60/1398270
ggtttt

SEQ ID NO: 112961 - DNA, 6 bp, Unknown
  misc_feature (1)..( 6): Result.002 file - promoters60/1398270
ggtttt

SEQ ID NO: 112962 - DNA, 6 bp, Unknown
  misc_feature (1)..( 6): Result.002 file - promoters60/1398270
ttaatt

SEQ ID NO: 112963 - DNA, 6 bp, Unknown
  misc_feature (1)..( 6): Result.002 file - promoters60/1398270
ttaatt

SEQ ID NO: 112964 - DNA, 8 bp, Unknown
  misc_feature (1)..( 8): Result.002 file - promoters60/1398270
gttagtat

SEQ ID NO: 112965 - DNA, 8 bp, Unknown
  misc_feature (1)..( 8): Result.002 file - promoters60/1398270
gttcgtat

SEQ ID NO: 112966 - DNA, 6 bp, Unknown
  misc_feature (1)..( 6): Result.002 file - promoters60/1398270
ttggcg

SEQ ID NO: 112967 - DNA, 6 bp, Unknown
  misc_feature (1)..( 6): Result.002 file - promoters60/1398270
ttggcg

SEQ ID NO: 112968 - DNA, 7 bp, Unknown
  misc_feature (1)..( 7): Result.002 file - promoters60/1398270
atattta

SEQ ID NO: 112969 - DNA, 7 bp, Unknown
  misc_feature (1)..( 7): Result.002 file - promoters60/1398270
atattta

SEQ ID NO: 112970 - DNA, 7 bp, Unknown
  misc_feature (1)..( 7): Result.002 file - promoters60/1398328
acgcagc

SEQ ID NO: 112971 - DNA, 7 bp, Unknown
  misc_feature (1)..( 7): Result.002 file - promoters60/1398328
acgaagc

SEQ ID NO: 112972 - DNA, 7 bp, Unknown
  misc_feature (1)..( 7): Result.002 file - promoters60/1398328
caatttt

SEQ ID NO: 112973 - DNA, 7 bp, Unknown
  misc_feature (1)..( 7): Result.002 file - promoters60/1398328
caatttt

SEQ ID NO: 112974 - DNA, 6 bp, Unknown
  misc_feature (1)..( 6): Result.002 file - promoters60/1398328
gaaaaa

SEQ ID NO: 112975 - DNA, 6 bp, Unknown
  misc_feature (1)..( 6): Result.002 file - promoters60/1398328
gaaaaa

SEQ ID NO: 112976 - DNA, 6 bp, Unknown
  misc_feature (1)..( 6): Result.002 file - promoters60/1398328
taataa

SEQ ID NO: 112977 - DNA, 6 bp, Unknown
  misc_feature (1)..( 6): Result.002 file - promoters60/1398328
taataa

SEQ ID NO: 112978 - DNA, 9 bp, Unknown
  misc_feature (1)..( 9): Result.002 file - promoters60/1398328
agaacccta

SEQ ID NO: 112979 - DNA, 9 bp, Unknown
  misc_feature (1)..( 9): Result.002 file - promoters60/1398328
agaacgcta

SEQ ID NO: 112980 - DNA, 6 bp, Unknown
  misc_feature (1)..( 6): Result.002 file - promoters60/1398328
attgag

SEQ ID NO: 112981 - DNA, 6 bp, Unknown
  misc_feature (1)..( 6): Result.002 file - promoters60/1398328
attgag

SEQ ID NO: 112982 - DNA, 7 bp, Unknown
  misc_feature (1)..( 7): Result.002 file - promoters60/1398328
gataatt

SEQ ID NO: 112983 - DNA, 7 bp, Unknown
  misc_feature (1)..( 7): Result.002 file - promoters60/1398328
gataatt

SEQ ID NO: 112984 - DNA, 6 bp, Unknown
  misc_feature (1)..( 6): Result.002 file - promoters60/1398328
tccttg

SEQ ID NO: 112985 - DNA, 6 bp, Unknown
  misc_feature (1)..( 6): Result.002 file - promoters60/1398328
tccttg

SEQ ID NO: 112986 - DNA, 6 bp, Unknown
  misc_feature (1)..( 6): Result.002 file - promoters60/1398328
aattaa

SEQ ID NO: 112987 - DNA, 6 bp, Unknown
  misc_feature (1)..( 6): Result.002 file - promoters60/1398328
aattaa

SEQ ID NO: 112988 - DNA, 7 bp, Unknown
  misc_feature (1)..( 7): Result.002 file - promoters60/1398328
gatgaca

SEQ ID NO: 112989 - DNA, 7 bp, Unknown
  misc_feature (1)..( 7): Result.002 file - promoters60/1398328
gataaca

SEQ ID NO: 112990 - DNA, 7 bp, Unknown
  misc_feature (1)..( 7): Result.002 file - promoters60/1398328
ttatttc

SEQ ID NO: 112991 - DNA, 7 bp, Unknown
  misc_feature (1)..( 7): Result.002 file - promoters60/1398328
ttagttc

SEQ ID NO: 112992 - DNA, 6 bp, Unknown
  misc_feature (1)..( 6): Result.002 file - promoters60/1398328
ttatat

SEQ ID NO: 112993 - DNA, 6 bp, Unknown
  misc_feature (1)..( 6): Result.002 file - promoters60/1398328
ttatat

SEQ ID NO: 112994 - DNA, 7 bp, Unknown
  misc_feature (1)..( 7): Result.002 file - promoters60/1398328
aaacatt

SEQ ID NO: 112995 - DNA, 7 bp, Unknown
  misc_feature (1)..( 7): Result.002 file - promoters60/1398328
aaaaatt

SEQ ID NO: 112996 - DNA, 9 bp, Unknown
  misc_feature (1)..( 9): Result.002 file - promoters60/1398328
ttgtataaa

SEQ ID NO: 112997 - DNA, 9 bp, Unknown
  misc_feature (1)..( 9): Result.002 file - promoters60/1398328
ttgtataaa

SEQ ID NO: 112998 - DNA, 7 bp, Unknown
  misc_feature (1)..( 7): Result.002 file - promoters60/1398328
aatcgag

SEQ ID NO: 112999 - DNA, 7 bp, Unknown
  misc_feature (1)..( 7): Result.002 file - promoters60/1398328
aatggag

SEQ ID NO: 113000 - DNA, 6 bp, Unknown
  misc_feature (1)..( 6): Result.002 file - promoters60/1398337
taaaga

SEQ ID NO: 113001 - DNA, 6 bp, Unknown
  misc_feature (1)..( 6): Result.002 file - promoters60/1398337
taaaga

SEQ ID NO: 113002 - DNA, 7 bp, Unknown
  misc_feature (1)..( 7): Result.002 file - promoters60/1398337
attgttg

SEQ ID NO: 113003 - DNA, 7 bp, Unknown
  misc_feature (1)..( 7): Result.002 file - promoters60/1398337
atttttg

SEQ ID NO: 113004 - DNA, 6 bp, Unknown
  misc_feature (1)..( 6): Result.002 file - promoters60/1398337
agagag

SEQ ID NO: 113005 - DNA, 6 bp, Unknown
  misc_feature (1)..( 6): Result.002 file - promoters60/1398337
agagag

SEQ ID NO: 113006 - DNA, 8 bp, Unknown
  misc_feature (1)..( 8): Result.002 file - promoters60/1398337
ttttcatt

SEQ ID NO: 113007 - DNA, 8 bp, Unknown
  misc_feature (1)..( 8): Result.002 file - promoters60/1398337
ttttaatt

SEQ ID NO: 113008 - DNA, 11 bp, Unknown
  misc_feature (1)..( 11): Result.002 file - promoters60/1398337
taaacacaaac

SEQ ID NO: 113009 - DNA, 11 bp, Unknown
  misc_feature (1)..( 11): Result.002 file - promoters60/1398337
gaaacaaaaac

SEQ ID NO: 113010 - DNA, 11 bp, Unknown
  misc_feature (1)..( 11): Result.002 file - promoters60/1398337
gaaagaaagct

SEQ ID NO: 113011 - DNA, 6 bp, Unknown
  misc_feature (1)..( 6): Result.002 file - promoters60/1398337
aaccaa

SEQ ID NO: 113012 - DNA, 6 bp, Unknown
  misc_feature (1)..( 6): Result.002 file - promoters60/1398337
aaccaa

SEQ ID NO: 113013 - DNA, 7 bp, Unknown
  misc_feature (1)..( 7): Result.002 file - promoters60/1398337
ttgcctc

SEQ ID NO: 113014 - DNA, 7 bp, Unknown
  misc_feature (1)..( 7): Result.002 file - promoters60/1398337
ttgactc

SEQ ID NO: 113015 - DNA, 6 bp, Unknown
  misc_feature (1)..( 6): Result.002 file - promoters60/1398337
aaagaa

SEQ ID NO: 113016 - DNA, 6 bp, Unknown
  misc_feature (1)..( 6): Result.002 file - promoters60/1398337
aaagaa

SEQ ID NO: 113017 - DNA, 6 bp, Unknown
  misc_feature (1)..( 6): Result.002 file - promoters60/1398337
taattg

SEQ ID NO: 113018 - DNA, 6 bp, Unknown
  misc_feature (1)..( 6): Result.002 file - promoters60/1398337
taattg

SEQ ID NO: 113019 - DNA, 6 bp, Unknown
  misc_feature (1)..( 6): Result.002 file - promoters60/1398337
aataaa

SEQ ID NO: 113020 - DNA, 6 bp, Unknown
  misc_feature (1)..( 6): Result.002 file - promoters60/1398337
aataaa

SEQ ID NO: 113021 - DNA, 6 bp, Unknown
  misc_feature (1)..( 6): Result.002 file - promoters60/1398337
agtaaa

SEQ ID NO: 113022 - DNA, 6 bp, Unknown
  misc_feature (1)..( 6): Result.002 file - promoters60/1398337
agtaaa

SEQ ID NO: 113023 - DNA, 7 bp, Unknown
  misc_feature (1)..( 7): Result.002 file - promoters60/1398337
aatcggg

SEQ ID NO: 113024 - DNA, 7 bp, Unknown
  misc_feature (1)..( 7): Result.002 file - promoters60/1398337
aattggg

SEQ ID NO: 113025 - DNA, 10 bp, Unknown
  misc_feature (1)..( 10): Result.002 file - promoters60/1398337
ggaaaagaaa

SEQ ID NO: 113026 - DNA, 10 bp, Unknown
  misc_feature (1)..( 10): Result.002 file - promoters60/1398337
ggaaatgaaa

SEQ ID NO: 113027 - DNA, 7 bp, Unknown
  misc_feature (1)..( 7): Result.002 file - promoters60/1398337
cccacta

SEQ ID NO: 113028 - DNA, 7 bp, Unknown
  misc_feature (1)..( 7): Result.002 file - promoters60/1398337
cccacta

SEQ ID NO: 113029 - DNA, 9 bp, Unknown
  misc_feature (1)..( 9): Result.002 file - promoters60/1398337
aaagaaaag

SEQ ID NO: 113030 - DNA, 9 bp, Unknown
  misc_feature (1)..( 9): Result.002 file - promoters60/1398337
aaagtaaag

SEQ ID NO: 113031 - DNA, 7 bp, Unknown
  misc_feature (1)..( 7): Result.002 file - promoters60/1398337
gtatata

SEQ ID NO: 113032 - DNA, 7 bp, Unknown
  misc_feature (1)..( 7): Result.002 file - promoters60/1398337
gtatata

SEQ ID NO: 113033 - DNA, 8 bp, Unknown
  misc_feature (1)..( 8): Result.002 file - promoters60/1398345
gatttgta

SEQ ID NO: 113034 - DNA, 8 bp, Unknown
  misc_feature (1)..( 8): Result.002 file - promoters60/1398345
gattggta

SEQ ID NO: 113035 - DNA, 8 bp, Unknown
  misc_feature (1)..( 8): Result.002 file - promoters60/1398345
aaaaatat

SEQ ID NO: 113036 - DNA, 8 bp, Unknown
  misc_feature (1)..( 8): Result.002 file - promoters60/1398345
aaaaatat

SEQ ID NO: 113037 - DNA, 8 bp, Unknown
  misc_feature (1)..( 8): Result.002 file - promoters60/1398345
aaacatat

SEQ ID NO: 113038 - DNA, 6 bp, Unknown
  misc_feature (1)..( 6): Result.002 file - promoters60/1398345
tcatca

SEQ ID NO: 113039 - DNA, 6 bp, Unknown
  misc_feature (1)..( 6): Result.002 file - promoters60/1398345
tcatca

SEQ ID NO: 113040 - DNA, 7 bp, Unknown
  misc_feature (1)..( 7): Result.002 file - promoters60/1398345
cacccct

SEQ ID NO: 113041 - DNA, 7 bp, Unknown
  misc_feature (1)..( 7): Result.002 file - promoters60/1398345
cactcct

SEQ ID NO: 113042 - DNA, 7 bp, Unknown
  misc_feature (1)..( 7): Result.002 file - promoters60/1398345
ctataaa

SEQ ID NO: 113043 - DNA, 7 bp, Unknown
  misc_feature (1)..( 7): Result.002 file - promoters60/1398345
ctataaa

SEQ ID NO: 113044 - DNA, 6 bp, Unknown
  misc_feature (1)..( 6): Result.002 file - promoters60/1398345
cggttt

SEQ ID NO: 113045 - DNA, 6 bp, Unknown
  misc_feature (1)..( 6): Result.002 file - promoters60/1398345
cggttt

SEQ ID NO: 113046 - DNA, 7 bp, Unknown
  misc_feature (1)..( 7): Result.002 file - promoters60/1398345
tttgagc

SEQ ID NO: 113047 - DNA, 7 bp, Unknown
  misc_feature (1)..( 7): Result.002 file - promoters60/1398345
tttaagc

SEQ ID NO: 113048 - DNA, 6 bp, Unknown
  misc_feature (1)..( 6): Result.002 file - promoters60/1398345
gtttgg

SEQ ID NO: 113049 - DNA, 6 bp, Unknown
  misc_feature (1)..( 6): Result.002 file - promoters60/1398345
gtttgg

SEQ ID NO: 113050 - DNA, 6 bp, Unknown
  misc_feature (1)..( 6): Result.002 file - promoters60/1398345
aagaaa

SEQ ID NO: 113051 - DNA, 6 bp, Unknown
  misc_feature (1)..( 6): Result.002 file - promoters60/1398345
aagaaa

SEQ ID NO: 113052 - DNA, 10 bp, Unknown
  misc_feature (1)..( 10): Result.002 file - promoters60/1398401
tcatatgcat

SEQ ID NO: 113053 - DNA, 10 bp, Unknown
  misc_feature (1)..( 10): Result.002 file - promoters60/1398401
acatgtgcat

SEQ ID NO: 113054 - DNA, 10 bp, Unknown
  misc_feature (1)..( 10): Result.002 file - promoters60/1398401
tcagatgtac

SEQ ID NO: 113055 - DNA, 10 bp, Unknown
  misc_feature (1)..( 10): Result.002 file - promoters60/1398401
tcaaaaaacg

SEQ ID NO: 113056 - DNA, 10 bp, Unknown
  misc_feature (1)..( 10): Result.002 file - promoters60/1398401
gtaaaatacg

SEQ ID NO: 113057 - DNA, 10 bp, Unknown
  misc_feature (1)..( 10): Result.002 file - promoters60/1398401
gtagaatgta

SEQ ID NO: 113058 - DNA, 7 bp, Unknown
  misc_feature (1)..( 7): Result.002 file - promoters60/1398401
agaaaga

SEQ ID NO: 113059 - DNA, 7 bp, Unknown
  misc_feature (1)..( 7): Result.002 file - promoters60/1398401
agaaagt

SEQ ID NO: 113060 - DNA, 7 bp, Unknown
  misc_feature (1)..( 7): Result.002 file - promoters60/1398401
ggaaagt

SEQ ID NO: 113061 - DNA, 8 bp, Unknown
  misc_feature (1)..( 8): Result.002 file - promoters60/1398401
atttgtaa

SEQ ID NO: 113062 - DNA, 8 bp, Unknown
  misc_feature (1)..( 8): Result.002 file - promoters60/1398401
atttgtat

SEQ ID NO: 113063 - DNA, 8 bp, Unknown
  misc_feature (1)..( 8): Result.002 file - promoters60/1398401
atttctat

SEQ ID NO: 113064 - DNA, 9 bp, Unknown
  misc_feature (1)..( 9): Result.002 file - promoters60/1398401
ttgtagttt

SEQ ID NO: 113065 - DNA, 9 bp, Unknown
  misc_feature (1)..( 9): Result.002 file - promoters60/1398401
aggtacttt

SEQ ID NO: 113066 - DNA, 9 bp, Unknown
  misc_feature (1)..( 9): Result.002 file - promoters60/1398401
aggaactaa

SEQ ID NO: 113067 - DNA, 9 bp, Unknown
  misc_feature (1)..( 9): Result.002 file - promoters60/1398401
gaaatagtt

SEQ ID NO: 113068 - DNA, 9 bp, Unknown
  misc_feature (1)..( 9): Result.002 file - promoters60/1398401
gaaattgtt

SEQ ID NO: 113069 - DNA, 9 bp, Unknown
  misc_feature (1)..( 9): Result.002 file - promoters60/1398401
gaaatatct

SEQ ID NO: 113070 - DNA, 9 bp, Unknown
  misc_feature (1)..( 9): Result.002 file - promoters60/1398401
ttacgaaat

SEQ ID NO: 113071 - DNA, 9 bp, Unknown
  misc_feature (1)..( 9): Result.002 file - promoters60/1398401
ttaagaaga

SEQ ID NO: 113072 - DNA, 9 bp, Unknown
  misc_feature (1)..( 9): Result.002 file - promoters60/1398401
ttaaaaaga

SEQ ID NO: 113073 - DNA, 13 bp, Unknown
  misc_feature (1)..( 13): Result.002 file - promoters60/1398444
aaaaaaaataact

SEQ ID NO: 113074 - DNA, 13 bp, Unknown
  misc_feature (1)..( 13): Result.002 file - promoters60/1398444
ggctaaactaact

SEQ ID NO: 113075 - DNA, 13 bp, Unknown
  misc_feature (1)..( 13): Result.002 file - promoters60/1398444
aaagaaaataaac

SEQ ID NO: 113076 - DNA, 9 bp, Unknown
  misc_feature (1)..( 9): Result.002 file - promoters60/1398444
attgaagct

SEQ ID NO: 113077 - DNA, 9 bp, Unknown
  misc_feature (1)..( 9): Result.002 file - promoters60/1398444
attcaaggt

SEQ ID NO: 113078 - DNA, 9 bp, Unknown
  misc_feature (1)..( 9): Result.002 file - promoters60/1398444
tatgatgct

SEQ ID NO: 113079 - DNA, 15 bp, Unknown
  misc_feature (1)..( 15): Result.002 file - promoters60/1398444
tccttaataaacaat

SEQ ID NO: 113080 - DNA, 15 bp, Unknown
  misc_feature (1)..( 15): Result.002 file - promoters60/1398444
aatttaaaaaataat

SEQ ID NO: 113081 - DNA, 15 bp, Unknown
  misc_feature (1)..( 15): Result.002 file - promoters60/1398444
aatctaaaattacaa

SEQ ID NO: 113082 - DNA, 7 bp, Unknown
  misc_feature (1)..( 7): Result.002 file - promoters60/1398444
ggaatga

SEQ ID NO: 113083 - DNA, 7 bp, Unknown
  misc_feature (1)..( 7): Result.002 file - promoters60/1398444
ggattga

SEQ ID NO: 113084 - DNA, 7 bp, Unknown
  misc_feature (1)..( 7): Result.002 file - promoters60/1398444
tgattga

SEQ ID NO: 113085 - DNA, 7 bp, Unknown
  misc_feature (1)..( 7): Result.002 file - promoters60/1398444
aatgatt

SEQ ID NO: 113086 - DNA, 7 bp, Unknown
  misc_feature (1)..( 7): Result.002 file - promoters60/1398444
tatgatt

SEQ ID NO: 113087 - DNA, 7 bp, Unknown
  misc_feature (1)..( 7): Result.002 file - promoters60/1398444
tataatt

SEQ ID NO: 113088 - DNA, 11 bp, Unknown
  misc_feature (1)..( 11): Result.002 file - promoters60/1398444
aaagtataaat

SEQ ID NO: 113089 - DNA, 11 bp, Unknown
  misc_feature (1)..( 11): Result.002 file - promoters60/1398444
aaattataaat

SEQ ID NO: 113090 - DNA, 11 bp, Unknown
  misc_feature (1)..( 11): Result.002 file - promoters60/1398444
aaactattata

SEQ ID NO: 113091 - DNA, 10 bp, Unknown
  misc_feature (1)..( 10): Result.002 file - promoters60/1398444
gattaaaatg

SEQ ID NO: 113092 - DNA, 10 bp, Unknown
  misc_feature (1)..( 10): Result.002 file - promoters60/1398444
gatgaaaaat

SEQ ID NO: 113093 - DNA, 10 bp, Unknown
  misc_feature (1)..( 10): Result.002 file - promoters60/1398444
ggttaatatg

SEQ ID NO: 113094 - DNA, 8 bp, Unknown
  misc_feature (1)..( 8): Result.002 file - promoters60/1398444
tctaattt

SEQ ID NO: 113095 - DNA, 8 bp, Unknown
  misc_feature (1)..( 8): Result.002 file - promoters60/1398444
tctagttt

SEQ ID NO: 113096 - DNA, 8 bp, Unknown
  misc_feature (1)..( 8): Result.002 file - promoters60/1398444
tataattt

SEQ ID NO: 113097 - DNA, 9 bp, Unknown
  misc_feature (1)..( 9): Result.002 file - promoters60/1398444
gaaacaaag

SEQ ID NO: 113098 - DNA, 9 bp, Unknown
  misc_feature (1)..( 9): Result.002 file - promoters60/1398444
ctgacaaag

SEQ ID NO: 113099 - DNA, 9 bp, Unknown
  misc_feature (1)..( 9): Result.002 file - promoters60/1398444
gaaataaac

SEQ ID NO: 113100 - DNA, 8 bp, Unknown
  misc_feature (1)..( 8): Result.002 file - promoters60/1398558
ttatataa

SEQ ID NO: 113101 - DNA, 8 bp, Unknown
  misc_feature (1)..( 8): Result.002 file - promoters60/1398558
ttagataa

SEQ ID NO: 113102 - DNA, 8 bp, Unknown
  misc_feature (1)..( 8): Result.002 file - promoters60/1398558
gtatataa

SEQ ID NO: 113103 - DNA, 12 bp, Unknown
  misc_feature (1)..( 12): Result.002 file - promoters60/1398558
tgaaaaagtaat

SEQ ID NO: 113104 - DNA, 12 bp, Unknown
  misc_feature (1)..( 12): Result.002 file - promoters60/1398558
tcaaaaggtatc

SEQ ID NO: 113105 - DNA, 12 bp, Unknown
  misc_feature (1)..( 12): Result.002 file - promoters60/1398558
tgataaactaat

SEQ ID NO: 113106 - DNA, 7 bp, Unknown
  misc_feature (1)..( 7): Result.002 file - promoters60/1398558
tatgtaa

SEQ ID NO: 113107 - DNA, 7 bp, Unknown
  misc_feature (1)..( 7): Result.002 file - promoters60/1398558
tatttaa

SEQ ID NO: 113108 - DNA, 7 bp, Unknown
  misc_feature (1)..( 7): Result.002 file - promoters60/1398558
gatttaa

SEQ ID NO: 113109 - DNA, 11 bp, Unknown
  misc_feature (1)..( 11): Result.002 file - promoters60/1398565
tttgtatttta

SEQ ID NO: 113110 - DNA, 11 bp, Unknown
  misc_feature (1)..( 11): Result.002 file - promoters60/1398565
tttctatacaa

SEQ ID NO: 113111 - DNA, 11 bp, Unknown
  misc_feature (1)..( 11): Result.002 file - promoters60/1398565
actgtagttta

SEQ ID NO: 113112 - DNA, 7 bp, Unknown
  misc_feature (1)..( 7): Result.002 file - promoters60/1398565
tatttaa

SEQ ID NO: 113113 - DNA, 7 bp, Unknown
  misc_feature (1)..( 7): Result.002 file - promoters60/1398565
tatgtaa

SEQ ID NO: 113114 - DNA, 7 bp, Unknown
  misc_feature (1)..( 7): Result.002 file - promoters60/1398565
ttacttg

SEQ ID NO: 113115 - DNA, 7 bp, Unknown
  misc_feature (1)..( 7): Result.002 file - promoters60/1398565
ttatttg

SEQ ID NO: 113116 - DNA, 7 bp, Unknown
  misc_feature (1)..( 7): Result.002 file - promoters60/1398565
tctaatt

SEQ ID NO: 113117 - DNA, 7 bp, Unknown
  misc_feature (1)..( 7): Result.002 file - promoters60/1398565
tctgatt

SEQ ID NO: 113118 - DNA, 8 bp, Unknown
  misc_feature (1)..( 8): Result.002 file - promoters60/1398565
acaaacca

SEQ ID NO: 113119 - DNA, 8 bp, Unknown
  misc_feature (1)..( 8): Result.002 file - promoters60/1398565
acacacca

SEQ ID NO: 113120 - DNA, 7 bp, Unknown
  misc_feature (1)..( 7): Result.002 file - promoters60/1398565
aagcata

SEQ ID NO: 113121 - DNA, 7 bp, Unknown
  misc_feature (1)..( 7): Result.002 file - promoters60/1398565
aagtata

SEQ ID NO: 113122 - DNA, 13 bp, Unknown
  misc_feature (1)..( 13): Result.002 file - promoters60/1398565
aatctaaaaacta

SEQ ID NO: 113123 - DNA, 13 bp, Unknown
  misc_feature (1)..( 13): Result.002 file - promoters60/1398565
aatataaaaatat

SEQ ID NO: 113124 - DNA, 13 bp, Unknown
  misc_feature (1)..( 13): Result.002 file - promoters60/1398565
tatatgaaaatat

SEQ ID NO: 113125 - DNA, 7 bp, Unknown
  misc_feature (1)..( 7): Result.002 file - promoters60/1398565
ttttaaa

SEQ ID NO: 113126 - DNA, 7 bp, Unknown
  misc_feature (1)..( 7): Result.002 file - promoters60/1398565
tttcaaa

SEQ ID NO: 113127 - DNA, 8 bp, Unknown
  misc_feature (1)..( 8): Result.002 file - promoters60/1398565
atatatat

SEQ ID NO: 113128 - DNA, 8 bp, Unknown
  misc_feature (1)..( 8): Result.002 file - promoters60/1398565
atatatat

SEQ ID NO: 113129 - DNA, 8 bp, Unknown
  misc_feature (1)..( 8): Result.002 file - promoters60/1398565
gtatataa

SEQ ID NO: 113130 - DNA, 7 bp, Unknown
  misc_feature (1)..( 7): Result.002 file - promoters60/1398565
aagaaaa

SEQ ID NO: 113131 - DNA, 7 bp, Unknown
  misc_feature (1)..( 7): Result.002 file - promoters60/1398565
aagcaaa

SEQ ID NO: 113132 - DNA, 6 bp, Unknown
  misc_feature (1)..( 6): Result.002 file - promoters60/1398565
caaaaa

SEQ ID NO: 113133 - DNA, 6 bp, Unknown
  misc_feature (1)..( 6): Result.002 file - promoters60/1398565
caaaaa

SEQ ID NO: 113134 - DNA, 7 bp, Unknown
  misc_feature (1)..( 7): Result.002 file - promoters60/1398565
aaacaaa

SEQ ID NO: 113135 - DNA, 7 bp, Unknown
  misc_feature (1)..( 7): Result.002 file - promoters60/1398565
aaacaaa

SEQ ID NO: 113136 - DNA, 6 bp, Unknown
  misc_feature (1)..( 6): Result.002 file - promoters60/1398565
aatata

SEQ ID NO: 113137 - DNA, 6 bp, Unknown
  misc_feature (1)..( 6): Result.002 file - promoters60/1398565
aatata

SEQ ID NO: 113138 - DNA, 7 bp, Unknown
  misc_feature (1)..( 7): Result.002 file - promoters60/1398565
aatgaat

SEQ ID NO: 113139 - DNA, 7 bp, Unknown
  misc_feature (1)..( 7): Result.002 file - promoters60/1398565
aataaat

SEQ ID NO: 113140 - DNA, 6 bp, Unknown
  misc_feature (1)..( 6): Result.002 file - promoters60/1398565
gataga

SEQ ID NO: 113141 - DNA, 6 bp, Unknown
  misc_feature (1)..( 6): Result.002 file - promoters60/1398565
gataga

SEQ ID NO: 113142 - DNA, 7 bp, Unknown
  misc_feature (1)..( 7): Result.002 file - promoters60/1398565
aaattca

SEQ ID NO: 113143 - DNA, 7 bp, Unknown
  misc_feature (1)..( 7): Result.002 file - promoters60/1398565
aaactca

SEQ ID NO: 113144 - DNA, 9 bp, Unknown
  misc_feature (1)..( 9): Result.002 file - promoters60/1398704
accgttcat

SEQ ID NO: 113145 - DNA, 9 bp, Unknown
  misc_feature (1)..( 9): Result.002 file - promoters60/1398704
tccgatcat

SEQ ID NO: 113146 - DNA, 9 bp, Unknown
  misc_feature (1)..( 9): Result.002 file - promoters60/1398704
accgttaaa

SEQ ID NO: 113147 - DNA, 6 bp, Unknown
  misc_feature (1)..( 6): Result.002 file - promoters60/1398704
tatatc

SEQ ID NO: 113148 - DNA, 6 bp, Unknown
  misc_feature (1)..( 6): Result.002 file - promoters60/1398704
tatatc

SEQ ID NO: 113149 - DNA, 7 bp, Unknown
  misc_feature (1)..( 7): Result.002 file - promoters60/1398704
ttagtgt

SEQ ID NO: 113150 - DNA, 7 bp, Unknown
  misc_feature (1)..( 7): Result.002 file - promoters60/1398704
ttattgt

SEQ ID NO: 113151 - DNA, 7 bp, Unknown
  misc_feature (1)..( 7): Result.002 file - promoters60/1398704
ttttcta

SEQ ID NO: 113152 - DNA, 7 bp, Unknown
  misc_feature (1)..( 7): Result.002 file - promoters60/1398704
tttccta

SEQ ID NO: 113153 - DNA, 6 bp, Unknown
  misc_feature (1)..( 6): Result.002 file - promoters60/1398704
gtcttc

SEQ ID NO: 113154 - DNA, 6 bp, Unknown
  misc_feature (1)..( 6): Result.002 file - promoters60/1398704
gtcttc

SEQ ID NO: 113155 - DNA, 7 bp, Unknown
  misc_feature (1)..( 7): Result.002 file - promoters60/1398704
catacaa

SEQ ID NO: 113156 - DNA, 7 bp, Unknown
  misc_feature (1)..( 7): Result.002 file - promoters60/1398704
cattcaa

SEQ ID NO: 113157 - DNA, 7 bp, Unknown
  misc_feature (1)..( 7): Result.002 file - promoters60/1398704
caataca

SEQ ID NO: 113158 - DNA, 7 bp, Unknown
  misc_feature (1)..( 7): Result.002 file - promoters60/1398704
caaaaca

SEQ ID NO: 113159 - DNA, 7 bp, Unknown
  misc_feature (1)..( 7): Result.002 file - promoters60/1398704
aacacga

SEQ ID NO: 113160 - DNA, 7 bp, Unknown
  misc_feature (1)..( 7): Result.002 file - promoters60/1398704
aactcga

SEQ ID NO: 113161 - DNA, 7 bp, Unknown
  misc_feature (1)..( 7): Result.002 file - promoters60/1398704
ttcttct

SEQ ID NO: 113162 - DNA, 7 bp, Unknown
  misc_feature (1)..( 7): Result.002 file - promoters60/1398704
ttcttct

SEQ ID NO: 113163 - DNA, 7 bp, Unknown
  misc_feature (1)..( 7): Result.002 file - promoters60/1398704
ccaatag

SEQ ID NO: 113164 - DNA, 7 bp, Unknown
  misc_feature (1)..( 7): Result.002 file - promoters60/1398704
ccattag

SEQ ID NO: 113165 - DNA, 6 bp, Unknown
  misc_feature (1)..( 6): Result.002 file - promoters60/1398704
tttttg

SEQ ID NO: 113166 - DNA, 6 bp, Unknown
  misc_feature (1)..( 6): Result.002 file - promoters60/1398704
tttttg

SEQ ID NO: 113167 - DNA, 11 bp, Unknown
  misc_feature (1)..( 11): Result.002 file - promoters60/1398704
attgttgtttt

SEQ ID NO: 113168 - DNA, 11 bp, Unknown
  misc_feature (1)..( 11): Result.002 file - promoters60/1398704
attgttttttt

SEQ ID NO: 113169 - DNA, 7 bp, Unknown
  misc_feature (1)..( 7): Result.002 file - promoters60/1398704
aaaaaag

SEQ ID NO: 113170 - DNA, 7 bp, Unknown
  misc_feature (1)..( 7): Result.002 file - promoters60/1398704
aaagaag

SEQ ID NO: 113171 - DNA, 7 bp, Unknown
  misc_feature (1)..( 7): Result.002 file - promoters60/1398704
acacaat

SEQ ID NO: 113172 - DNA, 7 bp, Unknown
  misc_feature (1)..( 7): Result.002 file - promoters60/1398704
acaaaat

SEQ ID NO: 113173 - DNA, 8 bp, Unknown
  misc_feature (1)..( 8): Result.002 file - promoters60/1398704
aattttgg

SEQ ID NO: 113174 - DNA, 8 bp, Unknown
  misc_feature (1)..( 8): Result.002 file - promoters60/1398704
aattttgg

SEQ ID NO: 113175 - DNA, 8 bp, Unknown
  misc_feature (1)..( 8): Result.002 file - promoters60/1398737
ttagcttt

SEQ ID NO: 113176 - DNA, 8 bp, Unknown
  misc_feature (1)..( 8): Result.002 file - promoters60/1398737
ttagattt

SEQ ID NO: 113177 - DNA, 8 bp, Unknown
  misc_feature (1)..( 8): Result.002 file - promoters60/1398737
ttagatca

SEQ ID NO: 113178 - DNA, 8 bp, Unknown
  misc_feature (1)..( 8): Result.002 file - promoters60/1398737
ttatattg

SEQ ID NO: 113179 - DNA, 10 bp, Unknown
  misc_feature (1)..( 10): Result.002 file - promoters60/1398737
ctataaaaat

SEQ ID NO: 113180 - DNA, 10 bp, Unknown
  misc_feature (1)..( 10): Result.002 file - promoters60/1398737
ctatcaaatg

SEQ ID NO: 113181 - DNA, 10 bp, Unknown
  misc_feature (1)..( 10): Result.002 file - promoters60/1398737
ctaaaaaaat

SEQ ID NO: 113182 - DNA, 10 bp, Unknown
  misc_feature (1)..( 10): Result.002 file - promoters60/1398737
ttatagaaag

SEQ ID NO: 113183 - DNA, 11 bp, Unknown
  misc_feature (1)..( 11): Result.002 file - promoters60/1398737
gtcaataaaag

SEQ ID NO: 113184 - DNA, 11 bp, Unknown
  misc_feature (1)..( 11): Result.002 file - promoters60/1398737
gtcaataaaaa

SEQ ID NO: 113185 - DNA, 11 bp, Unknown
  misc_feature (1)..( 11): Result.002 file - promoters60/1398737
gcttttaaaaa

SEQ ID NO: 113186 - DNA, 11 bp, Unknown
  misc_feature (1)..( 11): Result.002 file - promoters60/1398737
ccctttgaaat

SEQ ID NO: 113187 - DNA, 11 bp, Unknown
  misc_feature (1)..( 11): Result.002 file - promoters60/1398737
accaaatttaa

SEQ ID NO: 113188 - DNA, 11 bp, Unknown
  misc_feature (1)..( 11): Result.002 file - promoters60/1398737
gtcaattttga

SEQ ID NO: 113189 - DNA, 11 bp, Unknown
  misc_feature (1)..( 11): Result.002 file - promoters60/1398737
cttaatttata

SEQ ID NO: 113190 - DNA, 11 bp, Unknown
  misc_feature (1)..( 11): Result.002 file - promoters60/1398737
cttactttata

SEQ ID NO: 113191 - DNA, 11 bp, Unknown
  misc_feature (1)..( 11): Result.002 file - promoters60/1398737
tttatagaaag

SEQ ID NO: 113192 - DNA, 11 bp, Unknown
  misc_feature (1)..( 11): Result.002 file - promoters60/1398737
tttatagaaaa

SEQ ID NO: 113193 - DNA, 11 bp, Unknown
  misc_feature (1)..( 11): Result.002 file - promoters60/1398737
tttatatatta

SEQ ID NO: 113194 - DNA, 11 bp, Unknown
  misc_feature (1)..( 11): Result.002 file - promoters60/1398737
tgacaagaaaa

SEQ ID NO: 113195 - DNA, 9 bp, Unknown
  misc_feature (1)..( 9): Result.002 file - promoters60/1398737
cattggtta

SEQ ID NO: 113196 - DNA, 9 bp, Unknown
  misc_feature (1)..( 9): Result.002 file - promoters60/1398737
gattagttt

SEQ ID NO: 113197 - DNA, 9 bp, Unknown
  misc_feature (1)..( 9): Result.002 file - promoters60/1398737
gatcagtac

SEQ ID NO: 113198 - DNA, 9 bp, Unknown
  misc_feature (1)..( 9): Result.002 file - promoters60/1398737
atttatttt

SEQ ID NO: 113199 - DNA, 8 bp, Unknown
  misc_feature (1)..( 8): Result.002 file - promoters60/1398784
aattgagt

SEQ ID NO: 113200 - DNA, 8 bp, Unknown
  misc_feature (1)..( 8): Result.002 file - promoters60/1398784
aattaagt

SEQ ID NO: 113201 - DNA, 7 bp, Unknown
  misc_feature (1)..( 7): Result.002 file - promoters60/1398784
gaagcaa

SEQ ID NO: 113202 - DNA, 7 bp, Unknown
  misc_feature (1)..( 7): Result.002 file - promoters60/1398784
gaaacaa

SEQ ID NO: 113203 - DNA, 11 bp, Unknown
  misc_feature (1)..( 11): Result.002 file - promoters60/1398784
gaaaactaaag

SEQ ID NO: 113204 - DNA, 11 bp, Unknown
  misc_feature (1)..( 11): Result.002 file - promoters60/1398784
gaaaattaaag

SEQ ID NO: 113205 - DNA, 11 bp, Unknown
  misc_feature (1)..( 11): Result.002 file - promoters60/1398784
caaaacttaaa

SEQ ID NO: 113206 - DNA, 8 bp, Unknown
  misc_feature (1)..( 8): Result.002 file - promoters60/1398784
aaatcaat

SEQ ID NO: 113207 - DNA, 8 bp, Unknown
  misc_feature (1)..( 8): Result.002 file - promoters60/1398784
aaatgaat

SEQ ID NO: 113208 - DNA, 7 bp, Unknown
  misc_feature (1)..( 7): Result.002 file - promoters60/1398784
aaaattt

SEQ ID NO: 113209 - DNA, 7 bp, Unknown
  misc_feature (1)..( 7): Result.002 file - promoters60/1398784
aaagttt

SEQ ID NO: 113210 - DNA, 10 bp, Unknown
  misc_feature (1)..( 10): Result.002 file - promoters60/1398784
aaagaaaaat

SEQ ID NO: 113211 - DNA, 10 bp, Unknown
  misc_feature (1)..( 10): Result.002 file - promoters60/1398784
gaagaaagaa

SEQ ID NO: 113212 - DNA, 11 bp, Unknown
  misc_feature (1)..( 11): Result.002 file - promoters60/1398784
aaagtaaaatc

SEQ ID NO: 113213 - DNA, 6 bp, Unknown
  misc_feature (1)..( 6): Result.002 file - promoters60/1398784
tttttc

SEQ ID NO: 113214 - DNA, 6 bp, Unknown
  misc_feature (1)..( 6): Result.002 file - promoters60/1398784
tttttc

SEQ ID NO: 113215 - DNA, 6 bp, Unknown
  misc_feature (1)..( 6): Result.002 file - promoters60/1398784
ggaaat

SEQ ID NO: 113216 - DNA, 6 bp, Unknown
  misc_feature (1)..( 6): Result.002 file - promoters60/1398784
ggaaat

SEQ ID NO: 113217 - DNA, 7 bp, Unknown
  misc_feature (1)..( 7): Result.002 file - promoters60/1398784
ctaaaat

SEQ ID NO: 113218 - DNA, 7 bp, Unknown
  misc_feature (1)..( 7): Result.002 file - promoters60/1398784
ataaaat

SEQ ID NO: 113219 - DNA, 7 bp, Unknown
  misc_feature (1)..( 7): Result.002 file - promoters60/1398784
ataaaat

SEQ ID NO: 113220 - DNA, 6 bp, Unknown
  misc_feature (1)..( 6): Result.002 file - promoters60/1398784
ttaaga

SEQ ID NO: 113221 - DNA, 6 bp, Unknown
  misc_feature (1)..( 6): Result.002 file - promoters60/1398784
ttaaga

SEQ ID NO: 113222 - DNA, 7 bp, Unknown
  misc_feature (1)..( 7): Result.002 file - promoters60/1398784
aaatttg

SEQ ID NO: 113223 - DNA, 7 bp, Unknown
  misc_feature (1)..( 7): Result.002 file - promoters60/1398784
aaaattg

SEQ ID NO: 113224 - DNA, 6 bp, Unknown
  misc_feature (1)..( 6): Result.002 file - promoters60/1398784
ccaatt

SEQ ID NO: 113225 - DNA, 6 bp, Unknown
  misc_feature (1)..( 6): Result.002 file - promoters60/1398784
ccaatt

SEQ ID NO: 113226 - DNA, 7 bp, Unknown
  misc_feature (1)..( 7): Result.002 file - promoters60/1398784
ttggaat

SEQ ID NO: 113227 - DNA, 7 bp, Unknown
  misc_feature (1)..( 7): Result.002 file - promoters60/1398784
ttgaaat

SEQ ID NO: 113228 - DNA, 6 bp, Unknown
  misc_feature (1)..( 6): Result.002 file - promoters60/1398784
aatccg

SEQ ID NO: 113229 - DNA, 6 bp, Unknown
  misc_feature (1)..( 6): Result.002 file - promoters60/1398784
aatccg

SEQ ID NO: 113230 - DNA, 6 bp, Unknown
  misc_feature (1)..( 6): Result.002 file - promoters60/1398784
agaagt

SEQ ID NO: 113231 - DNA, 6 bp, Unknown
  misc_feature (1)..( 6): Result.002 file - promoters60/1398784
agaagt

SEQ ID NO: 113232 - DNA, 6 bp, Unknown
  misc_feature (1)..( 6): Result.002 file - promoters60/1398784
aaatga

SEQ ID NO: 113233 - DNA, 6 bp, Unknown
  misc_feature (1)..( 6): Result.002 file - promoters60/1398784
aaatga

SEQ ID NO: 113234 - DNA, 6 bp, Unknown
  misc_feature (1)..( 6): Result.002 file - promoters60/1398784
taaaaa

SEQ ID NO: 113235 - DNA, 6 bp, Unknown
  misc_feature (1)..( 6): Result.002 file - promoters60/1398784
taaaaa

SEQ ID NO: 113236 - DNA, 6 bp, Unknown
  misc_feature (1)..( 6): Result.002 file - promoters60/1398784
aaaatt

SEQ ID NO: 113237 - DNA, 6 bp, Unknown
  misc_feature (1)..( 6): Result.002 file - promoters60/1398784
aaaatt

SEQ ID NO: 113238 - DNA, 8 bp, Unknown
  misc_feature (1)..( 8): Result.002 file - promoters60/1398784
tttcaaat

SEQ ID NO: 113239 - DNA, 8 bp, Unknown
  misc_feature (1)..( 8): Result.002 file - promoters60/1398784
tttcaaat

SEQ ID NO: 113240 - DNA, 6 bp, Unknown
  misc_feature (1)..( 6): Result.002 file - promoters60/1398784
ttttcc

SEQ ID NO: 113241 - DNA, 6 bp, Unknown
  misc_feature (1)..( 6): Result.002 file - promoters60/1398784
ttttcc

SEQ ID NO: 113242 - DNA, 6 bp, Unknown
  misc_feature (1)..( 6): Result.002 file - promoters60/1398799
tgttct

SEQ ID NO: 113243 - DNA, 6 bp, Unknown
  misc_feature (1)..( 6): Result.002 file - promoters60/1398799
tgttct

SEQ ID NO: 113244 - DNA, 6 bp, Unknown
  misc_feature (1)..( 6): Result.002 file - promoters60/1398799
tgttct

SEQ ID NO: 113245 - DNA, 7 bp, Unknown
  misc_feature (1)..( 7): Result.002 file - promoters60/1398799
agatata

SEQ ID NO: 113246 - DNA, 7 bp, Unknown
  misc_feature (1)..( 7): Result.002 file - promoters60/1398799
agatata

SEQ ID NO: 113247 - DNA, 11 bp, Unknown
  misc_feature (1)..( 11): Result.002 file - promoters60/1398799
ataaacaagaa

SEQ ID NO: 113248 - DNA, 11 bp, Unknown
  misc_feature (1)..( 11): Result.002 file - promoters60/1398799
ataaccaagaa

SEQ ID NO: 113249 - DNA, 10 bp, Unknown
  misc_feature (1)..( 10): Result.002 file - promoters60/1398799
cattcatttg

SEQ ID NO: 113250 - DNA, 10 bp, Unknown
  misc_feature (1)..( 10): Result.002 file - promoters60/1398799
gagtcatttg

SEQ ID NO: 113251 - DNA, 10 bp, Unknown
  misc_feature (1)..( 10): Result.002 file - promoters60/1398799
gagtaattgt

SEQ ID NO: 113252 - DNA, 8 bp, Unknown
  misc_feature (1)..( 8): Result.002 file - promoters60/1398799
attattac

SEQ ID NO: 113253 - DNA, 8 bp, Unknown
  misc_feature (1)..( 8): Result.002 file - promoters60/1398799
attactac

SEQ ID NO: 113254 - DNA, 6 bp, Unknown
  misc_feature (1)..( 6): Result.002 file - promoters60/1398799
acataa

SEQ ID NO: 113255 - DNA, 6 bp, Unknown
  misc_feature (1)..( 6): Result.002 file - promoters60/1398799
acataa

SEQ ID NO: 113256 - DNA, 9 bp, Unknown
  misc_feature (1)..( 9): Result.002 file - promoters60/1398799
ttaaaaacc

SEQ ID NO: 113257 - DNA, 9 bp, Unknown
  misc_feature (1)..( 9): Result.002 file - promoters60/1398799
ataaatacc

SEQ ID NO: 113258 - DNA, 9 bp, Unknown
  misc_feature (1)..( 9): Result.002 file - promoters60/1398799
ataaatctt

SEQ ID NO: 113259 - DNA, 7 bp, Unknown
  misc_feature (1)..( 7): Result.002 file - promoters60/1398799
gctgctg

SEQ ID NO: 113260 - DNA, 7 bp, Unknown
  misc_feature (1)..( 7): Result.002 file - promoters60/1398799
gctgctg

SEQ ID NO: 113261 - DNA, 9 bp, Unknown
  misc_feature (1)..( 9): Result.002 file - promoters60/1398799
tttaagtct

SEQ ID NO: 113262 - DNA, 9 bp, Unknown
  misc_feature (1)..( 9): Result.002 file - promoters60/1398799
tttaactct

SEQ ID NO: 113263 - DNA, 8 bp, Unknown
  misc_feature (1)..( 8): Result.002 file - promoters60/1398799
gtctacga

SEQ ID NO: 113264 - DNA, 8 bp, Unknown
  misc_feature (1)..( 8): Result.002 file - promoters60/1398799
gtcttcga

SEQ ID NO: 113265 - DNA, 8 bp, Unknown
  misc_feature (1)..( 8): Result.002 file - promoters60/1398799
aatcaagt

SEQ ID NO: 113266 - DNA, 8 bp, Unknown
  misc_feature (1)..( 8): Result.002 file - promoters60/1398799
aattaagt

SEQ ID NO: 113267 - DNA, 9 bp, Unknown
  misc_feature (1)..( 9): Result.002 file - promoters60/1398799
tgggcccat

SEQ ID NO: 113268 - DNA, 9 bp, Unknown
  misc_feature (1)..( 9): Result.002 file - promoters60/1398799
tgggcccat

SEQ ID NO: 113269 - DNA, 7 bp, Unknown
  misc_feature (1)..( 7): Result.002 file - promoters60/1398799
cctttgt

SEQ ID NO: 113270 - DNA, 7 bp, Unknown
  misc_feature (1)..( 7): Result.002 file - promoters60/1398799
cctctgt

SEQ ID NO: 113271 - DNA, 8 bp, Unknown
  misc_feature (1)..( 8): Result.002 file - promoters60/1398799
accctttt

SEQ ID NO: 113272 - DNA, 8 bp, Unknown
  misc_feature (1)..( 8): Result.002 file - promoters60/1398799
accttttt

SEQ ID NO: 113273 - DNA, 7 bp, Unknown
  misc_feature (1)..( 7): Result.002 file - promoters60/1398799
gttatga

SEQ ID NO: 113274 - DNA, 7 bp, Unknown
  misc_feature (1)..( 7): Result.002 file - promoters60/1398799
gttttga

SEQ ID NO: 113275 - DNA, 8 bp, Unknown
  misc_feature (1)..( 8): Result.002 file - promoters60/1398799
cttcatta

SEQ ID NO: 113276 - DNA, 8 bp, Unknown
  misc_feature (1)..( 8): Result.002 file - promoters60/1398799
ctttatta

SEQ ID NO: 113277 - DNA, 6 bp, Unknown
  misc_feature (1)..( 6): Result.002 file - promoters60/1398846
tttact

SEQ ID NO: 113278 - DNA, 6 bp, Unknown
  misc_feature (1)..( 6): Result.002 file - promoters60/1398846
tttact

SEQ ID NO: 113279 - DNA, 6 bp, Unknown
  misc_feature (1)..( 6): Result.002 file - promoters60/1398846
gtttct

SEQ ID NO: 113280 - DNA, 6 bp, Unknown
  misc_feature (1)..( 6): Result.002 file - promoters60/1398846
gtttct

SEQ ID NO: 113281 - DNA, 7 bp, Unknown
  misc_feature (1)..( 7): Result.002 file - promoters60/1398846
tttgtta

SEQ ID NO: 113282 - DNA, 7 bp, Unknown
  misc_feature (1)..( 7): Result.002 file - promoters60/1398846
tttgtta

SEQ ID NO: 113283 - DNA, 7 bp, Unknown
  misc_feature (1)..( 7): Result.002 file - promoters60/1398846
attgtta

SEQ ID NO: 113284 - DNA, 7 bp, Unknown
  misc_feature (1)..( 7): Result.002 file - promoters60/1398846
tatacca

SEQ ID NO: 113285 - DNA, 7 bp, Unknown
  misc_feature (1)..( 7): Result.002 file - promoters60/1398846
tatacca

SEQ ID NO: 113286 - DNA, 6 bp, Unknown
  misc_feature (1)..( 6): Result.002 file - promoters60/1398846
tcctat

SEQ ID NO: 113287 - DNA, 6 bp, Unknown
  misc_feature (1)..( 6): Result.002 file - promoters60/1398846
tcctat

SEQ ID NO: 113288 - DNA, 6 bp, Unknown
  misc_feature (1)..( 6): Result.002 file - promoters60/1398846
aaaaat

SEQ ID NO: 113289 - DNA, 6 bp, Unknown
  misc_feature (1)..( 6): Result.002 file - promoters60/1398846
aaaaat

SEQ ID NO: 113290 - DNA, 6 bp, Unknown
  misc_feature (1)..( 6): Result.002 file - promoters60/1398846
taaact

SEQ ID NO: 113291 - DNA, 6 bp, Unknown
  misc_feature (1)..( 6): Result.002 file - promoters60/1398846
taaact

SEQ ID NO: 113292 - DNA, 6 bp, Unknown
  misc_feature (1)..( 6): Result.002 file - promoters60/1398846
attaat

SEQ ID NO: 113293 - DNA, 6 bp, Unknown
  misc_feature (1)..( 6): Result.002 file - promoters60/1398846
attaat

SEQ ID NO: 113294 - DNA, 9 bp, Unknown
  misc_feature (1)..( 9): Result.002 file - promoters60/1398846
ttaattaga

SEQ ID NO: 113295 - DNA, 9 bp, Unknown
  misc_feature (1)..( 9): Result.002 file - promoters60/1398846
ttaattaaa

SEQ ID NO: 113296 - DNA, 9 bp, Unknown
  misc_feature (1)..( 9): Result.002 file - promoters60/1398846
taaattaaa

SEQ ID NO: 113297 - DNA, 11 bp, Unknown
  misc_feature (1)..( 11): Result.002 file - promoters60/1398846
atatatataaa

SEQ ID NO: 113298 - DNA, 11 bp, Unknown
  misc_feature (1)..( 11): Result.002 file - promoters60/1398846
atatatataaa

SEQ ID NO: 113299 - DNA, 6 bp, Unknown
  misc_feature (1)..( 6): Result.002 file - promoters60/1398846
ttatta

SEQ ID NO: 113300 - DNA, 6 bp, Unknown
  misc_feature (1)..( 6): Result.002 file - promoters60/1398846
ttatta

SEQ ID NO: 113301 - DNA, 7 bp, Unknown
  misc_feature (1)..( 7): Result.002 file - promoters60/1398846
tctcatt

SEQ ID NO: 113302 - DNA, 7 bp, Unknown
  misc_feature (1)..( 7): Result.002 file - promoters60/1398846
tctaatt

SEQ ID NO: 113303 - DNA, 7 bp, Unknown
  misc_feature (1)..( 7): Result.002 file - promoters60/1398846
aaagaaa

SEQ ID NO: 113304 - DNA, 7 bp, Unknown
  misc_feature (1)..( 7): Result.002 file - promoters60/1398846
aaaaaaa

SEQ ID NO: 113305 - DNA, 7 bp, Unknown
  misc_feature (1)..( 7): Result.002 file - promoters60/1398846
ctacccc

SEQ ID NO: 113306 - DNA, 7 bp, Unknown
  misc_feature (1)..( 7): Result.002 file - promoters60/1398846
ctaaccc

SEQ ID NO: 113307 - DNA, 6 bp, Unknown
  misc_feature (1)..( 6): Result.002 file - promoters60/1398846
tcaccc

SEQ ID NO: 113308 - DNA, 6 bp, Unknown
  misc_feature (1)..( 6): Result.002 file - promoters60/1398846
tcaccc

SEQ ID NO: 113309 - DNA, 6 bp, Unknown
  misc_feature (1)..( 6): Result.002 file - promoters60/1398846
attaaa

SEQ ID NO: 113310 - DNA, 6 bp, Unknown
  misc_feature (1)..( 6): Result.002 file - promoters60/1398846
attaaa

SEQ ID NO: 113311 - DNA, 6 bp, Unknown
  misc_feature (1)..( 6): Result.002 file - promoters60/1398846
gaaaaa

SEQ ID NO: 113312 - DNA, 6 bp, Unknown
  misc_feature (1)..( 6): Result.002 file - promoters60/1398846
gaaaaa

SEQ ID NO: 113313 - DNA, 8 bp, Unknown
  misc_feature (1)..( 8): Result.002 file - promoters60/1398846
ttagctta

SEQ ID NO: 113314 - DNA, 8 bp, Unknown
  misc_feature (1)..( 8): Result.002 file - promoters60/1398846
ttagctta

SEQ ID NO: 113315 - DNA, 6 bp, Unknown
  misc_feature (1)..( 6): Result.002 file - promoters60/1398846
ttttca

SEQ ID NO: 113316 - DNA, 6 bp, Unknown
  misc_feature (1)..( 6): Result.002 file - promoters60/1398846
ttttca

SEQ ID NO: 113317 - DNA, 7 bp, Unknown
  misc_feature (1)..( 7): Result.002 file - promoters60/1398846
aagaaac

SEQ ID NO: 113318 - DNA, 7 bp, Unknown
  misc_feature (1)..( 7): Result.002 file - promoters60/1398846
aagaaac

SEQ ID NO: 113319 - DNA, 14 bp, Unknown
  misc_feature (1)..( 14): Result.002 file - promoters60/1399037
catatttgaaatag

SEQ ID NO: 113320 - DNA, 14 bp, Unknown
  misc_feature (1)..( 14): Result.002 file - promoters60/1399037
attctttgaactta

SEQ ID NO: 113321 - DNA, 14 bp, Unknown
  misc_feature (1)..( 14): Result.002 file - promoters60/1399037
aatattcgaaatgg

SEQ ID NO: 113322 - DNA, 14 bp, Unknown
  misc_feature (1)..( 14): Result.002 file - promoters60/1399037
acaatttgaactgt

SEQ ID NO: 113323 - DNA, 14 bp, Unknown
  misc_feature (1)..( 14): Result.002 file - promoters60/1399037
attattttaactta

SEQ ID NO: 113324 - DNA, 14 bp, Unknown
  misc_feature (1)..( 14): Result.002 file - promoters60/1399037
gatcttggaagcaa

SEQ ID NO: 113325 - DNA, 8 bp, Unknown
  misc_feature (1)..( 8): Result.002 file - promoters60/1399074
cgtataga

SEQ ID NO: 113326 - DNA, 8 bp, Unknown
  misc_feature (1)..( 8): Result.002 file - promoters60/1399074
agtaaaga

SEQ ID NO: 113327 - DNA, 8 bp, Unknown
  misc_feature (1)..( 8): Result.002 file - promoters60/1399074
agtaaaaa

SEQ ID NO: 113328 - DNA, 7 bp, Unknown
  misc_feature (1)..( 7): Result.002 file - promoters60/1399074
ttggaac

SEQ ID NO: 113329 - DNA, 7 bp, Unknown
  misc_feature (1)..( 7): Result.002 file - promoters60/1399074
ttgtaac

SEQ ID NO: 113330 - DNA, 10 bp, Unknown
  misc_feature (1)..( 10): Result.002 file - promoters60/1399074
ttaaggaagc

SEQ ID NO: 113331 - DNA, 10 bp, Unknown
  misc_feature (1)..( 10): Result.002 file - promoters60/1399074
gaaagaaagc

SEQ ID NO: 113332 - DNA, 10 bp, Unknown
  misc_feature (1)..( 10): Result.002 file - promoters60/1399074
gaaacaaaaa

SEQ ID NO: 113333 - DNA, 10 bp, Unknown
  misc_feature (1)..( 10): Result.002 file - promoters60/1399074
ggagaagcat

SEQ ID NO: 113334 - DNA, 10 bp, Unknown
  misc_feature (1)..( 10): Result.002 file - promoters60/1399074
ggaaaagaaa

SEQ ID NO: 113335 - DNA, 10 bp, Unknown
  misc_feature (1)..( 10): Result.002 file - promoters60/1399074
ggaaatgaaa

SEQ ID NO: 113336 - DNA, 6 bp, Unknown
  misc_feature (1)..( 6): Result.002 file - promoters60/1399074
agggaa

SEQ ID NO: 113337 - DNA, 6 bp, Unknown
  misc_feature (1)..( 6): Result.002 file - promoters60/1399074
agggaa

SEQ ID NO: 113338 - DNA, 6 bp, Unknown
  misc_feature (1)..( 6): Result.002 file - promoters60/1399074
taaagg

SEQ ID NO: 113339 - DNA, 6 bp, Unknown
  misc_feature (1)..( 6): Result.002 file - promoters60/1399074
taaagg

SEQ ID NO: 113340 - DNA, 7 bp, Unknown
  misc_feature (1)..( 7): Result.002 file - promoters60/1399074
gatctgg

SEQ ID NO: 113341 - DNA, 7 bp, Unknown
  misc_feature (1)..( 7): Result.002 file - promoters60/1399074
gatatgg

SEQ ID NO: 113342 - DNA, 7 bp, Unknown
  misc_feature (1)..( 7): Result.002 file - promoters60/1399074
ttgagtc

SEQ ID NO: 113343 - DNA, 7 bp, Unknown
  misc_feature (1)..( 7): Result.002 file - promoters60/1399074
ttgggtc

SEQ ID NO: 113344 - DNA, 6 bp, Unknown
  misc_feature (1)..( 6): Result.002 file - promoters60/1399074
ctgttc

SEQ ID NO: 113345 - DNA, 6 bp, Unknown
  misc_feature (1)..( 6): Result.002 file - promoters60/1399074
ctgttc

SEQ ID NO: 113346 - DNA, 7 bp, Unknown
  misc_feature (1)..( 7): Result.002 file - promoters60/1399074
aatcggg

SEQ ID NO: 113347 - DNA, 7 bp, Unknown
  misc_feature (1)..( 7): Result.002 file - promoters60/1399074
aattggg

SEQ ID NO: 113348 - DNA, 7 bp, Unknown
  misc_feature (1)..( 7): Result.002 file - promoters60/1399074
cccacta

SEQ ID NO: 113349 - DNA, 7 bp, Unknown
  misc_feature (1)..( 7): Result.002 file - promoters60/1399074
cccacta

SEQ ID NO: 113350 - DNA, 9 bp, Unknown
  misc_feature (1)..( 9): Result.002 file - promoters60/1399074
aaagaaaag

SEQ ID NO: 113351 - DNA, 9 bp, Unknown
  misc_feature (1)..( 9): Result.002 file - promoters60/1399074
aaagtaaag

SEQ ID NO: 113352 - DNA, 7 bp, Unknown
  misc_feature (1)..( 7): Result.002 file - promoters60/1399074
gtatata

SEQ ID NO: 113353 - DNA, 7 bp, Unknown
  misc_feature (1)..( 7): Result.002 file - promoters60/1399074
gtatata

SEQ ID NO: 113354 - DNA, 9 bp, Unknown
  misc_feature (1)..( 9): Result.002 file - promoters60/1399140
tttggtttg

SEQ ID NO: 113355 - DNA, 9 bp, Unknown
  misc_feature (1)..( 9): Result.002 file - promoters60/1399140
tttgttttc

SEQ ID NO: 113356 - DNA, 9 bp, Unknown
  misc_feature (1)..( 9): Result.002 file - promoters60/1399140
attgttttc

SEQ ID NO: 113357 - DNA, 9 bp, Unknown
  misc_feature (1)..( 9): Result.002 file - promoters60/1399140
tcagttttc

SEQ ID NO: 113358 - DNA, 8 bp, Unknown
  misc_feature (1)..( 8): Result.002 file - promoters60/1399265
aatttttt

SEQ ID NO: 113359 - DNA, 8 bp, Unknown
  misc_feature (1)..( 8): Result.002 file - promoters60/1399265
aatattta

SEQ ID NO: 113360 - DNA, 8 bp, Unknown
  misc_feature (1)..( 8): Result.002 file - promoters60/1399265
aattttga

SEQ ID NO: 113361 - DNA, 8 bp, Unknown
  misc_feature (1)..( 8): Result.002 file - promoters60/1399265
agtattta

SEQ ID NO: 113362 - DNA, 8 bp, Unknown
  misc_feature (1)..( 8): Result.002 file - promoters60/1399265
aatcttgt

SEQ ID NO: 113363 - DNA, 8 bp, Unknown
  misc_feature (1)..( 8): Result.002 file - promoters60/1399265
ttttttaa

SEQ ID NO: 113364 - DNA, 8 bp, Unknown
  misc_feature (1)..( 8): Result.002 file - promoters60/1399265
tttattaa

SEQ ID NO: 113365 - DNA, 9 bp, Unknown
  misc_feature (1)..( 9): Result.002 file - promoters60/1399265
gttatatat

SEQ ID NO: 113366 - DNA, 9 bp, Unknown
  misc_feature (1)..( 9): Result.002 file - promoters60/1399265
aatatataa

SEQ ID NO: 113367 - DNA, 9 bp, Unknown
  misc_feature (1)..( 9): Result.002 file - promoters60/1399265
ttaaaaaat

SEQ ID NO: 113368 - DNA, 9 bp, Unknown
  misc_feature (1)..( 9): Result.002 file - promoters60/1399265
ttataaact

SEQ ID NO: 113369 - DNA, 9 bp, Unknown
  misc_feature (1)..( 9): Result.002 file - promoters60/1399265
ataaaaatt

SEQ ID NO: 113370 - DNA, 9 bp, Unknown
  misc_feature (1)..( 9): Result.002 file - promoters60/1399265
tgaaaaatt

SEQ ID NO: 113371 - DNA, 14 bp, Unknown
  misc_feature (1)..( 14): Result.002 file - promoters60/1399265
tctatttttagtta

SEQ ID NO: 113372 - DNA, 14 bp, Unknown
  misc_feature (1)..( 14): Result.002 file - promoters60/1399265
aatatttttagttt

SEQ ID NO: 113373 - DNA, 14 bp, Unknown
  misc_feature (1)..( 14): Result.002 file - promoters60/1399265
cttattttatgaaa

SEQ ID NO: 113374 - DNA, 14 bp, Unknown
  misc_feature (1)..( 14): Result.002 file - promoters60/1399265
tttaatttcttcac

SEQ ID NO: 113375 - DNA, 14 bp, Unknown
  misc_feature (1)..( 14): Result.002 file - promoters60/1399265
tttatattataaaa

SEQ ID NO: 113376 - DNA, 11 bp, Unknown
  misc_feature (1)..( 11): Result.002 file - promoters60/1399265
aattgttttaa

SEQ ID NO: 113377 - DNA, 11 bp, Unknown
  misc_feature (1)..( 11): Result.002 file - promoters60/1399265
gattttttttt

SEQ ID NO: 113378 - DNA, 11 bp, Unknown
  misc_feature (1)..( 11): Result.002 file - promoters60/1399265
atgtgttgtaa

SEQ ID NO: 113379 - DNA, 11 bp, Unknown
  misc_feature (1)..( 11): Result.002 file - promoters60/1399265
aatggttcaat

SEQ ID NO: 113380 - DNA, 9 bp, Unknown
  misc_feature (1)..( 9): Result.002 file - promoters60/1399265
tattattgt

SEQ ID NO: 113381 - DNA, 9 bp, Unknown
  misc_feature (1)..( 9): Result.002 file - promoters60/1399265
tattattta

SEQ ID NO: 113382 - DNA, 9 bp, Unknown
  misc_feature (1)..( 9): Result.002 file - promoters60/1399265
acttatttt

SEQ ID NO: 113383 - DNA, 9 bp, Unknown
  misc_feature (1)..( 9): Result.002 file - promoters60/1399265
tatcatttt

SEQ ID NO: 113384 - DNA, 9 bp, Unknown
  misc_feature (1)..( 9): Result.002 file - promoters60/1399265
aaatatttt

SEQ ID NO: 113385 - DNA, 7 bp, Unknown
  misc_feature (1)..( 7): Result.002 file - promoters60/1399265
ttatttt

SEQ ID NO: 113386 - DNA, 7 bp, Unknown
  misc_feature (1)..( 7): Result.002 file - promoters60/1399265
ctatttt

SEQ ID NO: 113387 - DNA, 7 bp, Unknown
  misc_feature (1)..( 7): Result.002 file - promoters60/1399265
ttatttt

SEQ ID NO: 113388 - DNA, 7 bp, Unknown
  misc_feature (1)..( 7): Result.002 file - promoters60/1399265
atatttt

SEQ ID NO: 113389 - DNA, 8 bp, Unknown
  misc_feature (1)..( 8): Result.002 file - promoters60/1399265
atttcttt

SEQ ID NO: 113390 - DNA, 8 bp, Unknown
  misc_feature (1)..( 8): Result.002 file - promoters60/1399265
cttttttt

SEQ ID NO: 113391 - DNA, 8 bp, Unknown
  misc_feature (1)..( 8): Result.002 file - promoters60/1399265
attttttt

SEQ ID NO: 113392 - DNA, 8 bp, Unknown
  misc_feature (1)..( 8): Result.002 file - promoters60/1399265
atttttca

SEQ ID NO: 113393 - DNA, 9 bp, Unknown
  misc_feature (1)..( 9): Result.002 file - promoters60/1399265
tttataagc

SEQ ID NO: 113394 - DNA, 9 bp, Unknown
  misc_feature (1)..( 9): Result.002 file - promoters60/1399265
tatataagt

SEQ ID NO: 113395 - DNA, 9 bp, Unknown
  misc_feature (1)..( 9): Result.002 file - promoters60/1399265
tttttaaag

SEQ ID NO: 113396 - DNA, 9 bp, Unknown
  misc_feature (1)..( 9): Result.002 file - promoters60/1399265
gttttaaaa

SEQ ID NO: 113397 - DNA, 9 bp, Unknown
  misc_feature (1)..( 9): Result.002 file - promoters60/1399265
ttttttggg

SEQ ID NO: 113398 - DNA, 12 bp, Unknown
  misc_feature (1)..( 12): Result.002 file - promoters60/1399265
cttttattttgc

SEQ ID NO: 113399 - DNA, 12 bp, Unknown
  misc_feature (1)..( 12): Result.002 file - promoters60/1399265
agttatttttgc

SEQ ID NO: 113400 - DNA, 12 bp, Unknown
  misc_feature (1)..( 12): Result.002 file - promoters60/1399265
tttgaattttga

SEQ ID NO: 113401 - DNA, 13 bp, Unknown
  misc_feature (1)..( 13): Result.002 file - promoters60/1399265
ctattttttctgc

SEQ ID NO: 113402 - DNA, 13 bp, Unknown
  misc_feature (1)..( 13): Result.002 file - promoters60/1399265
tttttgttttctt

SEQ ID NO: 113403 - DNA, 7 bp, Unknown
  misc_feature (1)..( 7): Result.002 file - promoters60/1399265
atacaaa

SEQ ID NO: 113404 - DNA, 7 bp, Unknown
  misc_feature (1)..( 7): Result.002 file - promoters60/1399265
ataaaaa

SEQ ID NO: 113405 - DNA, 7 bp, Unknown
  misc_feature (1)..( 7): Result.002 file - promoters60/1399265
aaaaaaa

SEQ ID NO: 113406 - DNA, 7 bp, Unknown
  misc_feature (1)..( 7): Result.002 file - promoters60/1399265
tgaaaaa

SEQ ID NO: 113407 - DNA, 7 bp, Unknown
  misc_feature (1)..( 7): Result.002 file - promoters60/1399265
ataaaac

SEQ ID NO: 113408 - DNA, 13 bp, Unknown
  misc_feature (1)..( 13): Result.002 file - promoters60/1399265
aaatataggcgcc

SEQ ID NO: 113409 - DNA, 13 bp, Unknown
  misc_feature (1)..( 13): Result.002 file - promoters60/1399265
taatataaataat

SEQ ID NO: 113410 - DNA, 13 bp, Unknown
  misc_feature (1)..( 13): Result.002 file - promoters60/1399265
caataaaaataat

SEQ ID NO: 113411 - DNA, 14 bp, Unknown
  misc_feature (1)..( 14): Result.002 file - promoters60/1399265
aaatgatatgagaa

SEQ ID NO: 113412 - DNA, 8 bp, Unknown
  misc_feature (1)..( 8): Result.002 file - promoters60/1399265
tctgtttt

SEQ ID NO: 113413 - DNA, 8 bp, Unknown
  misc_feature (1)..( 8): Result.002 file - promoters60/1399265
tctttttt

SEQ ID NO: 113414 - DNA, 6 bp, Unknown
  misc_feature (1)..( 6): Result.002 file - promoters60/1399265
tgtttt

SEQ ID NO: 113415 - DNA, 8 bp, Unknown
  misc_feature (1)..( 8): Result.002 file - promoters60/1399265
actttttt

SEQ ID NO: 113416 - DNA, 9 bp, Unknown
  misc_feature (1)..( 9): Result.002 file - promoters60/1399265
ttagaaaaa

SEQ ID NO: 113417 - DNA, 9 bp, Unknown
  misc_feature (1)..( 9): Result.002 file - promoters60/1399265
ttataaaac

SEQ ID NO: 113418 - DNA, 9 bp, Unknown
  misc_feature (1)..( 9): Result.002 file - promoters60/1399265
tctgaaaaa

SEQ ID NO: 113419 - DNA, 9 bp, Unknown
  misc_feature (1)..( 9): Result.002 file - promoters60/1399265
tcataaaaa

SEQ ID NO: 113420 - DNA, 7 bp, Unknown
  misc_feature (1)..( 7): Result.002 file - promoters60/1399277
aaaacaa

SEQ ID NO: 113421 - DNA, 7 bp, Unknown
  misc_feature (1)..( 7): Result.002 file - promoters60/1399277
aaaacaa

SEQ ID NO: 113422 - DNA, 6 bp, Unknown
  misc_feature (1)..( 6): Result.002 file - promoters60/1399277
attatt

SEQ ID NO: 113423 - DNA, 6 bp, Unknown
  misc_feature (1)..( 6): Result.002 file - promoters60/1399277
attatt

SEQ ID NO: 113424 - DNA, 6 bp, Unknown
  misc_feature (1)..( 6): Result.002 file - promoters60/1399277
aataaa

SEQ ID NO: 113425 - DNA, 6 bp, Unknown
  misc_feature (1)..( 6): Result.002 file - promoters60/1399277
aataaa

SEQ ID NO: 113426 - DNA, 6 bp, Unknown
  misc_feature (1)..( 6): Result.002 file - promoters60/1399277
acaatt

SEQ ID NO: 113427 - DNA, 6 bp, Unknown
  misc_feature (1)..( 6): Result.002 file - promoters60/1399277
acaatt

SEQ ID NO: 113428 - DNA, 16 bp, Unknown
  misc_feature (1)..( 16): Result.002 file - promoters60/1399277
taaacacaaaaatttt

SEQ ID NO: 113429 - DNA, 16 bp, Unknown
  misc_feature (1)..( 16): Result.002 file - promoters60/1399277
taatcacaaaaacttt

SEQ ID NO: 113430 - DNA, 16 bp, Unknown
  misc_feature (1)..( 16): Result.002 file - promoters60/1399277
taaacacaaaagttca

SEQ ID NO: 113431 - DNA, 8 bp, Unknown
  misc_feature (1)..( 8): Result.002 file - promoters60/1399277
ttataaaa

SEQ ID NO: 113432 - DNA, 8 bp, Unknown
  misc_feature (1)..( 8): Result.002 file - promoters60/1399277
ttacaaaa

SEQ ID NO: 113433 - DNA, 8 bp, Unknown
  misc_feature (1)..( 8): Result.002 file - promoters60/1399277
acacaaaa

SEQ ID NO: 113434 - DNA, 6 bp, Unknown
  misc_feature (1)..( 6): Result.002 file - promoters60/1399277
ttttat

SEQ ID NO: 113435 - DNA, 6 bp, Unknown
  misc_feature (1)..( 6): Result.002 file - promoters60/1399277
ttttat

SEQ ID NO: 113436 - DNA, 8 bp, Unknown
  misc_feature (1)..( 8): Result.002 file - promoters60/1399277
atttttta

SEQ ID NO: 113437 - DNA, 8 bp, Unknown
  misc_feature (1)..( 8): Result.002 file - promoters60/1399277
ctttctta

SEQ ID NO: 113438 - DNA, 8 bp, Unknown
  misc_feature (1)..( 8): Result.002 file - promoters60/1399277
attttttt

SEQ ID NO: 113439 - DNA, 6 bp, Unknown
  misc_feature (1)..( 6): Result.002 file - promoters60/1399277
gataaa

SEQ ID NO: 113440 - DNA, 6 bp, Unknown
  misc_feature (1)..( 6): Result.002 file - promoters60/1399277
gataaa

SEQ ID NO: 113441 - DNA, 10 bp, Unknown
  misc_feature (1)..( 10): Result.002 file - promoters60/1399277
gaataaccac

SEQ ID NO: 113442 - DNA, 10 bp, Unknown
  misc_feature (1)..( 10): Result.002 file - promoters60/1399277
gaacaactcc

SEQ ID NO: 113443 - DNA, 10 bp, Unknown
  misc_feature (1)..( 10): Result.002 file - promoters60/1399277
acatacccac

SEQ ID NO: 113444 - DNA, 6 bp, Unknown
  misc_feature (1)..( 6): Result.002 file - promoters60/1399277
accaat

SEQ ID NO: 113445 - DNA, 6 bp, Unknown
  misc_feature (1)..( 6): Result.002 file - promoters60/1399277
accaat

SEQ ID NO: 113446 - DNA, 7 bp, Unknown
  misc_feature (1)..( 7): Result.002 file - promoters60/1399277
aaacttt

SEQ ID NO: 113447 - DNA, 7 bp, Unknown
  misc_feature (1)..( 7): Result.002 file - promoters60/1399277
aaacttt

SEQ ID NO: 113448 - DNA, 6 bp, Unknown
  misc_feature (1)..( 6): Result.002 file - promoters60/1399277
aaatca

SEQ ID NO: 113449 - DNA, 6 bp, Unknown
  misc_feature (1)..( 6): Result.002 file - promoters60/1399277
aaatca

SEQ ID NO: 113450 - DNA, 7 bp, Unknown
  misc_feature (1)..( 7): Result.002 file - promoters60/1399277
aagattt

SEQ ID NO: 113451 - DNA, 7 bp, Unknown
  misc_feature (1)..( 7): Result.002 file - promoters60/1399277
aagattt

SEQ ID NO: 113452 - DNA, 6 bp, Unknown
  misc_feature (1)..( 6): Result.002 file - promoters60/1399277
acatat

SEQ ID NO: 113453 - DNA, 6 bp, Unknown
  misc_feature (1)..( 6): Result.002 file - promoters60/1399277
acatat

SEQ ID NO: 113454 - DNA, 9 bp, Unknown
  misc_feature (1)..( 9): Result.002 file - promoters60/1399277
tcaacgtga

SEQ ID NO: 113455 - DNA, 9 bp, Unknown
  misc_feature (1)..( 9): Result.002 file - promoters60/1399277
tcaaagtga

SEQ ID NO: 113456 - DNA, 9 bp, Unknown
  misc_feature (1)..( 9): Result.002 file - promoters60/1399277
tttattaaa

SEQ ID NO: 113457 - DNA, 9 bp, Unknown
  misc_feature (1)..( 9): Result.002 file - promoters60/1399277
ttttttaaa

SEQ ID NO: 113458 - DNA, 7 bp, Unknown
  misc_feature (1)..( 7): Result.002 file - promoters60/1399277
aaaagtt

SEQ ID NO: 113459 - DNA, 7 bp, Unknown
  misc_feature (1)..( 7): Result.002 file - promoters60/1399277
aaaagtt

SEQ ID NO: 113460 - DNA, 14 bp, Unknown
  misc_feature (1)..( 14): Result.002 file - promoters60/1399325
atcacatatttgaa

SEQ ID NO: 113461 - DNA, 14 bp, Unknown
  misc_feature (1)..( 14): Result.002 file - promoters60/1399325
gatacatattagta

SEQ ID NO: 113462 - DNA, 14 bp, Unknown
  misc_feature (1)..( 14): Result.002 file - promoters60/1399325
aaatcatcttaaat

SEQ ID NO: 113463 - DNA, 14 bp, Unknown
  misc_feature (1)..( 14): Result.002 file - promoters60/1399325
gataaataaactta

SEQ ID NO: 113464 - DNA, 14 bp, Unknown
  misc_feature (1)..( 14): Result.002 file - promoters60/1399325
agagaatctgaaat

SEQ ID NO: 113465 - DNA, 14 bp, Unknown
  misc_feature (1)..( 14): Result.002 file - promoters60/1399325
gattaattcttttc

SEQ ID NO: 113466 - DNA, 7 bp, Unknown
  misc_feature (1)..( 7): Result.002 file - promoters60/1399417
cgattcc

SEQ ID NO: 113467 - DNA, 7 bp, Unknown
  misc_feature (1)..( 7): Result.002 file - promoters60/1399417
cgattcc

SEQ ID NO: 113468 - DNA, 7 bp, Unknown
  misc_feature (1)..( 7): Result.002 file - promoters60/1399417
agagaaa

SEQ ID NO: 113469 - DNA, 7 bp, Unknown
  misc_feature (1)..( 7): Result.002 file - promoters60/1399417
agaaaaa

SEQ ID NO: 113470 - DNA, 11 bp, Unknown
  misc_feature (1)..( 11): Result.002 file - promoters60/1399417
agctagtgaga

SEQ ID NO: 113471 - DNA, 11 bp, Unknown
  misc_feature (1)..( 11): Result.002 file - promoters60/1399417
agctagagaga

SEQ ID NO: 113472 - DNA, 6 bp, Unknown
  misc_feature (1)..( 6): Result.002 file - promoters60/1399417
gttttg

SEQ ID NO: 113473 - DNA, 6 bp, Unknown
  misc_feature (1)..( 6): Result.002 file - promoters60/1399417
gttttg

SEQ ID NO: 113474 - DNA, 6 bp, Unknown
  misc_feature (1)..( 6): Result.002 file - promoters60/1399417
tcgaaa

SEQ ID NO: 113475 - DNA, 6 bp, Unknown
  misc_feature (1)..( 6): Result.002 file - promoters60/1399417
tcgaaa

SEQ ID NO: 113476 - DNA, 7 bp, Unknown
  misc_feature (1)..( 7): Result.002 file - promoters60/1399417
atctgag

SEQ ID NO: 113477 - DNA, 7 bp, Unknown
  misc_feature (1)..( 7): Result.002 file - promoters60/1399417
atctgag

SEQ ID NO: 113478 - DNA, 8 bp, Unknown
  misc_feature (1)..( 8): Result.002 file - promoters60/1399417
gaatcaac

SEQ ID NO: 113479 - DNA, 8 bp, Unknown
  misc_feature (1)..( 8): Result.002 file - promoters60/1399417
gaaacaaa

SEQ ID NO: 113480 - DNA, 9 bp, Unknown
  misc_feature (1)..( 9): Result.002 file - promoters60/1399417
gaacacaaa

SEQ ID NO: 113481 - DNA, 6 bp, Unknown
  misc_feature (1)..( 6): Result.002 file - promoters60/1399417
attgtg

SEQ ID NO: 113482 - DNA, 6 bp, Unknown
  misc_feature (1)..( 6): Result.002 file - promoters60/1399417
attgtg

SEQ ID NO: 113483 - DNA, 6 bp, Unknown
  misc_feature (1)..( 6): Result.002 file - promoters60/1399417
tgttcg

SEQ ID NO: 113484 - DNA, 6 bp, Unknown
  misc_feature (1)..( 6): Result.002 file - promoters60/1399417
tgttcg

SEQ ID NO: 113485 - DNA, 6 bp, Unknown
  misc_feature (1)..( 6): Result.002 file - promoters60/1399417
tctgtt

SEQ ID NO: 113486 - DNA, 6 bp, Unknown
  misc_feature (1)..( 6): Result.002 file - promoters60/1399417
tctgtt

SEQ ID NO: 113487 - DNA, 7 bp, Unknown
  misc_feature (1)..( 7): Result.002 file - promoters60/1399417
ataaaaa

SEQ ID NO: 113488 - DNA, 7 bp, Unknown
  misc_feature (1)..( 7): Result.002 file - promoters60/1399417
ataaaaa

SEQ ID NO: 113489 - DNA, 6 bp, Unknown
  misc_feature (1)..( 6): Result.002 file - promoters60/1399417
atatat

SEQ ID NO: 113490 - DNA, 6 bp, Unknown
  misc_feature (1)..( 6): Result.002 file - promoters60/1399417
atatat

SEQ ID NO: 113491 - DNA, 9 bp, Unknown
  misc_feature (1)..( 9): Result.002 file - promoters60/1399417
gagcctgat

SEQ ID NO: 113492 - DNA, 9 bp, Unknown
  misc_feature (1)..( 9): Result.002 file - promoters60/1399417
gagtctgat

SEQ ID NO: 113493 - DNA, 6 bp, Unknown
  misc_feature (1)..( 6): Result.002 file - promoters60/1399417
aattgc

SEQ ID NO: 113494 - DNA, 6 bp, Unknown
  misc_feature (1)..( 6): Result.002 file - promoters60/1399417
aattgc

SEQ ID NO: 113495 - DNA, 6 bp, Unknown
  misc_feature (1)..( 6): Result.002 file - promoters60/1399417
tccaaa

SEQ ID NO: 113496 - DNA, 6 bp, Unknown
  misc_feature (1)..( 6): Result.002 file - promoters60/1399417
tccaaa

SEQ ID NO: 113497 - DNA, 6 bp, Unknown
  misc_feature (1)..( 6): Result.002 file - promoters60/1399417
aaacga

SEQ ID NO: 113498 - DNA, 6 bp, Unknown
  misc_feature (1)..( 6): Result.002 file - promoters60/1399417
aaacga

SEQ ID NO: 113499 - DNA, 6 bp, Unknown
  misc_feature (1)..( 6): Result.002 file - promoters60/1399417
tctaaa

SEQ ID NO: 113500 - DNA, 6 bp, Unknown
  misc_feature (1)..( 6): Result.002 file - promoters60/1399417
tctaaa

SEQ ID NO: 113501 - DNA, 6 bp, Unknown
  misc_feature (1)..( 6): Result.002 file - promoters60/1399417
ttgact

SEQ ID NO: 113502 - DNA, 6 bp, Unknown
  misc_feature (1)..( 6): Result.002 file - promoters60/1399417
ttgact

SEQ ID NO: 113503 - DNA, 8 bp, Unknown
  misc_feature (1)..( 8): Result.002 file - promoters60/1399417
ccaagacg

SEQ ID NO: 113504 - DNA, 8 bp, Unknown
  misc_feature (1)..( 8): Result.002 file - promoters60/1399417
ccaagacg

SEQ ID NO: 113505 - DNA, 7 bp, Unknown
  misc_feature (1)..( 7): Result.002 file - promoters60/1399417
aggccca

SEQ ID NO: 113506 - DNA, 7 bp, Unknown
  misc_feature (1)..( 7): Result.002 file - promoters60/1399417
aggccca

SEQ ID NO: 113507 - DNA, 8 bp, Unknown
  misc_feature (1)..( 8): Result.002 file - promoters60/1399541
atttcttc

SEQ ID NO: 113508 - DNA, 8 bp, Unknown
  misc_feature (1)..( 8): Result.002 file - promoters60/1399541
atttctcc

SEQ ID NO: 113509 - DNA, 8 bp, Unknown
  misc_feature (1)..( 8): Result.002 file - promoters60/1399541
gtttcttc

SEQ ID NO: 113510 - DNA, 7 bp, Unknown
  misc_feature (1)..( 7): Result.002 file - promoters60/1399541
tcatatt

SEQ ID NO: 113511 - DNA, 7 bp, Unknown
  misc_feature (1)..( 7): Result.002 file - promoters60/1399541
tcaaatt

SEQ ID NO: 113512 - DNA, 8 bp, Unknown
  misc_feature (1)..( 8): Result.002 file - promoters60/1399541
ccagtatt

SEQ ID NO: 113513 - DNA, 8 bp, Unknown
  misc_feature (1)..( 8): Result.002 file - promoters60/1399541
ccagtatt

SEQ ID NO: 113514 - DNA, 6 bp, Unknown
  misc_feature (1)..( 6): Result.002 file - promoters60/1399541
tttttt

SEQ ID NO: 113515 - DNA, 6 bp, Unknown
  misc_feature (1)..( 6): Result.002 file - promoters60/1399541
tttttt

SEQ ID NO: 113516 - DNA, 7 bp, Unknown
  misc_feature (1)..( 7): Result.002 file - promoters60/1399541
ttctttt

SEQ ID NO: 113517 - DNA, 7 bp, Unknown
  misc_feature (1)..( 7): Result.002 file - promoters60/1399541
ttctttt

SEQ ID NO: 113518 - DNA, 8 bp, Unknown
  misc_feature (1)..( 8): Result.002 file - promoters60/1399541
aggtaatt

SEQ ID NO: 113519 - DNA, 8 bp, Unknown
  misc_feature (1)..( 8): Result.002 file - promoters60/1399541
aggcaatt

SEQ ID NO: 113520 - DNA, 7 bp, Unknown
  misc_feature (1)..( 7): Result.002 file - promoters60/1399541
attagtt

SEQ ID NO: 113521 - DNA, 7 bp, Unknown
  misc_feature (1)..( 7): Result.002 file - promoters60/1399541
atttgtt

SEQ ID NO: 113522 - DNA, 6 bp, Unknown
  misc_feature (1)..( 6): Result.002 file - promoters60/1399541
tgttgg

SEQ ID NO: 113523 - DNA, 6 bp, Unknown
  misc_feature (1)..( 6): Result.002 file - promoters60/1399541
tgttgg

SEQ ID NO: 113524 - DNA, 6 bp, Unknown
  misc_feature (1)..( 6): Result.002 file - promoters60/1399541
actcct

SEQ ID NO: 113525 - DNA, 6 bp, Unknown
  misc_feature (1)..( 6): Result.002 file - promoters60/1399541
actcct

SEQ ID NO: 113526 - DNA, 7 bp, Unknown
  misc_feature (1)..( 7): Result.002 file - promoters60/1399541
ccttttc

SEQ ID NO: 113527 - DNA, 7 bp, Unknown
  misc_feature (1)..( 7): Result.002 file - promoters60/1399541
cctcttc

SEQ ID NO: 113528 - DNA, 7 bp, Unknown
  misc_feature (1)..( 7): Result.002 file - promoters60/1399541
cttttgt

SEQ ID NO: 113529 - DNA, 7 bp, Unknown
  misc_feature (1)..( 7): Result.002 file - promoters60/1399541
cttttgt

SEQ ID NO: 113530 - DNA, 6 bp, Unknown
  misc_feature (1)..( 6): Result.002 file - promoters60/1399541
gaaaaa

SEQ ID NO: 113531 - DNA, 6 bp, Unknown
  misc_feature (1)..( 6): Result.002 file - promoters60/1399541
gaaaaa

SEQ ID NO: 113532 - DNA, 8 bp, Unknown
  misc_feature (1)..( 8): Result.002 file - promoters60/1399541
aaaccact

SEQ ID NO: 113533 - DNA, 8 bp, Unknown
  misc_feature (1)..( 8): Result.002 file - promoters60/1399541
aaacgact

SEQ ID NO: 113534 - DNA, 8 bp, Unknown
  misc_feature (1)..( 8): Result.002 file - promoters60/1399634
tatacata

SEQ ID NO: 113535 - DNA, 8 bp, Unknown
  misc_feature (1)..( 8): Result.002 file - promoters60/1399634
tattcata

SEQ ID NO: 113536 - DNA, 9 bp, Unknown
  misc_feature (1)..( 9): Result.002 file - promoters60/1399634
tcgaagtag

SEQ ID NO: 113537 - DNA, 9 bp, Unknown
  misc_feature (1)..( 9): Result.002 file - promoters60/1399634
tcgaaatag

SEQ ID NO: 113538 - DNA, 9 bp, Unknown
  misc_feature (1)..( 9): Result.002 file - promoters60/1399634
gcgcaatta

SEQ ID NO: 113539 - DNA, 9 bp, Unknown
  misc_feature (1)..( 9): Result.002 file - promoters60/1399634
gcgcaatta

SEQ ID NO: 113540 - DNA, 6 bp, Unknown
  misc_feature (1)..( 6): Result.002 file - promoters60/1399634
taaaca

SEQ ID NO: 113541 - DNA, 6 bp, Unknown
  misc_feature (1)..( 6): Result.002 file - promoters60/1399634
taaaca

SEQ ID NO: 113542 - DNA, 8 bp, Unknown
  misc_feature (1)..( 8): Result.002 file - promoters60/1399634
attattta

SEQ ID NO: 113543 - DNA, 8 bp, Unknown
  misc_feature (1)..( 8): Result.002 file - promoters60/1399634
atttttta

SEQ ID NO: 113544 - DNA, 6 bp, Unknown
  misc_feature (1)..( 6): Result.002 file - promoters60/1399634
tttctc

SEQ ID NO: 113545 - DNA, 6 bp, Unknown
  misc_feature (1)..( 6): Result.002 file - promoters60/1399634
tttctc

SEQ ID NO: 113546 - DNA, 6 bp, Unknown
  misc_feature (1)..( 6): Result.002 file - promoters60/1399634
aatttt

SEQ ID NO: 113547 - DNA, 6 bp, Unknown
  misc_feature (1)..( 6): Result.002 file - promoters60/1399634
aatttt

SEQ ID NO: 113548 - DNA, 7 bp, Unknown
  misc_feature (1)..( 7): Result.002 file - promoters60/1399634
atatata

SEQ ID NO: 113549 - DNA, 7 bp, Unknown
  misc_feature (1)..( 7): Result.002 file - promoters60/1399634
atacata

SEQ ID NO: 113550 - DNA, 8 bp, Unknown
  misc_feature (1)..( 8): Result.002 file - promoters60/1399634
acatgcat

SEQ ID NO: 113551 - DNA, 8 bp, Unknown
  misc_feature (1)..( 8): Result.002 file - promoters60/1399634
acatacat

SEQ ID NO: 113552 - DNA, 7 bp, Unknown
  misc_feature (1)..( 7): Result.002 file - promoters60/1399634
atagtag

SEQ ID NO: 113553 - DNA, 7 bp, Unknown
  misc_feature (1)..( 7): Result.002 file - promoters60/1399634
atactag

SEQ ID NO: 113554 - DNA, 7 bp, Unknown
  misc_feature (1)..( 7): Result.002 file - promoters60/1399634
catttat

SEQ ID NO: 113555 - DNA, 7 bp, Unknown
  misc_feature (1)..( 7): Result.002 file - promoters60/1399634
catctat

SEQ ID NO: 113556 - DNA, 7 bp, Unknown
  misc_feature (1)..( 7): Result.002 file - promoters60/1399634
acatttc

SEQ ID NO: 113557 - DNA, 7 bp, Unknown
  misc_feature (1)..( 7): Result.002 file - promoters60/1399634
acatttc

SEQ ID NO: 113558 - DNA, 7 bp, Unknown
  misc_feature (1)..( 7): Result.002 file - promoters60/1399634
tcacata

SEQ ID NO: 113559 - DNA, 7 bp, Unknown
  misc_feature (1)..( 7): Result.002 file - promoters60/1399634
tcatata

SEQ ID NO: 113560 - DNA, 6 bp, Unknown
  misc_feature (1)..( 6): Result.002 file - promoters60/1399634
atttat

SEQ ID NO: 113561 - DNA, 6 bp, Unknown
  misc_feature (1)..( 6): Result.002 file - promoters60/1399634
atttat

SEQ ID NO: 113562 - DNA, 6 bp, Unknown
  misc_feature (1)..( 6): Result.002 file - promoters60/1399634
taataa

SEQ ID NO: 113563 - DNA, 6 bp, Unknown
  misc_feature (1)..( 6): Result.002 file - promoters60/1399634
taataa

SEQ ID NO: 113564 - DNA, 6 bp, Unknown
  misc_feature (1)..( 6): Result.002 file - promoters60/1399634
tcgatc

SEQ ID NO: 113565 - DNA, 6 bp, Unknown
  misc_feature (1)..( 6): Result.002 file - promoters60/1399634
tcgatc

SEQ ID NO: 113566 - DNA, 6 bp, Unknown
  misc_feature (1)..( 6): Result.002 file - promoters60/1399634
tagatt

SEQ ID NO: 113567 - DNA, 6 bp, Unknown
  misc_feature (1)..( 6): Result.002 file - promoters60/1399634
tagatt

SEQ ID NO: 113568 - DNA, 7 bp, Unknown
  misc_feature (1)..( 7): Result.002 file - promoters60/1399709
attgaga

SEQ ID NO: 113569 - DNA, 7 bp, Unknown
  misc_feature (1)..( 7): Result.002 file - promoters60/1399709
attaaga

SEQ ID NO: 113570 - DNA, 6 bp, Unknown
  misc_feature (1)..( 6): Result.002 file - promoters60/1399709
cttttt

SEQ ID NO: 113571 - DNA, 6 bp, Unknown
  misc_feature (1)..( 6): Result.002 file - promoters60/1399709
cttttt

SEQ ID NO: 113572 - DNA, 6 bp, Unknown
  misc_feature (1)..( 6): Result.002 file - promoters60/1399709
gacatc

SEQ ID NO: 113573 - DNA, 6 bp, Unknown
  misc_feature (1)..( 6): Result.002 file - promoters60/1399709
gacatc

SEQ ID NO: 113574 - DNA, 7 bp, Unknown
  misc_feature (1)..( 7): Result.002 file - promoters60/1399709
aaggaaa

SEQ ID NO: 113575 - DNA, 7 bp, Unknown
  misc_feature (1)..( 7): Result.002 file - promoters60/1399709
aagtaaa

SEQ ID NO: 113576 - DNA, 8 bp, Unknown
  misc_feature (1)..( 8): Result.002 file - promoters60/1399709
gaagatcg

SEQ ID NO: 113577 - DNA, 8 bp, Unknown
  misc_feature (1)..( 8): Result.002 file - promoters60/1399709
gaagttcg

SEQ ID NO: 113578 - DNA, 6 bp, Unknown
  misc_feature (1)..( 6): Result.002 file - promoters60/1399709
gtttcg

SEQ ID NO: 113579 - DNA, 6 bp, Unknown
  misc_feature (1)..( 6): Result.002 file - promoters60/1399709
gtttcg

SEQ ID NO: 113580 - DNA, 6 bp, Unknown
  misc_feature (1)..( 6): Result.002 file - promoters60/1399709
aggcct

SEQ ID NO: 113581 - DNA, 6 bp, Unknown
  misc_feature (1)..( 6): Result.002 file - promoters60/1399709
aggcct

SEQ ID NO: 113582 - DNA, 7 bp, Unknown
  misc_feature (1)..( 7): Result.002 file - promoters60/1399709
tatcatt

SEQ ID NO: 113583 - DNA, 7 bp, Unknown
  misc_feature (1)..( 7): Result.002 file - promoters60/1399709
tatgatt

SEQ ID NO: 113584 - DNA, 7 bp, Unknown
  misc_feature (1)..( 7): Result.002 file - promoters60/1399709
gaatttg

SEQ ID NO: 113585 - DNA, 7 bp, Unknown
  misc_feature (1)..( 7): Result.002 file - promoters60/1399709
gaatttg

SEQ ID NO: 113586 - DNA, 7 bp, Unknown
  misc_feature (1)..( 7): Result.002 file - promoters60/1399709
tttgatt

SEQ ID NO: 113587 - DNA, 7 bp, Unknown
  misc_feature (1)..( 7): Result.002 file - promoters60/1399709
tttgatt

SEQ ID NO: 113588 - DNA, 7 bp, Unknown
  misc_feature (1)..( 7): Result.002 file - promoters60/1399709
ttagatc

SEQ ID NO: 113589 - DNA, 7 bp, Unknown
  misc_feature (1)..( 7): Result.002 file - promoters60/1399709
ttatatc

SEQ ID NO: 113590 - DNA, 6 bp, Unknown
  misc_feature (1)..( 6): Result.002 file - promoters60/1399709
catttg

SEQ ID NO: 113591 - DNA, 6 bp, Unknown
  misc_feature (1)..( 6): Result.002 file - promoters60/1399709
catttg

SEQ ID NO: 113592 - DNA, 11 bp, Unknown
  misc_feature (1)..( 11): Result.002 file - promoters60/1399726
cagtccttgca

SEQ ID NO: 113593 - DNA, 11 bp, Unknown
  misc_feature (1)..( 11): Result.002 file - promoters60/1399726
cagttctttaa

SEQ ID NO: 113594 - DNA, 12 bp, Unknown
  misc_feature (1)..( 12): Result.002 file - promoters60/1399726
aaattcattaat

SEQ ID NO: 113595 - DNA, 12 bp, Unknown
  misc_feature (1)..( 12): Result.002 file - promoters60/1399726
agatttattcat

SEQ ID NO: 113596 - DNA, 12 bp, Unknown
  misc_feature (1)..( 12): Result.002 file - promoters60/1399726
aaatttattatt

SEQ ID NO: 113597 - DNA, 11 bp, Unknown
  misc_feature (1)..( 11): Result.002 file - promoters60/1399726
ccaattcattt

SEQ ID NO: 113598 - DNA, 11 bp, Unknown
  misc_feature (1)..( 11): Result.002 file - promoters60/1399726
ctaattcacaa

SEQ ID NO: 113599 - DNA, 11 bp, Unknown
  misc_feature (1)..( 11): Result.002 file - promoters60/1399726
ccaattaattt

SEQ ID NO: 113600 - DNA, 11 bp, Unknown
  misc_feature (1)..( 11): Result.002 file - promoters60/1399726
aaaattccttt

SEQ ID NO: 113601 - DNA, 11 bp, Unknown
  misc_feature (1)..( 11): Result.002 file - promoters60/1399726
tatattgacac

SEQ ID NO: 113602 - DNA, 11 bp, Unknown
  misc_feature (1)..( 11): Result.002 file - promoters60/1399726
gtaataaatga

SEQ ID NO: 113603 - DNA, 12 bp, Unknown
  misc_feature (1)..( 12): Result.002 file - promoters60/1399726
aacaaattcttt

SEQ ID NO: 113604 - DNA, 12 bp, Unknown
  misc_feature (1)..( 12): Result.002 file - promoters60/1399726
atcaaattaatg

SEQ ID NO: 113605 - DNA, 12 bp, Unknown
  misc_feature (1)..( 12): Result.002 file - promoters60/1399726
ggcaaactctga

SEQ ID NO: 113606 - DNA, 12 bp, Unknown
  misc_feature (1)..( 12): Result.002 file - promoters60/1399726
atccaatgataa

SEQ ID NO: 113607 - DNA, 12 bp, Unknown
  misc_feature (1)..( 12): Result.002 file - promoters60/1399726
cacacactatga

SEQ ID NO: 113608 - DNA, 12 bp, Unknown
  misc_feature (1)..( 12): Result.002 file - promoters60/1399726
catataaagtac

SEQ ID NO: 113609 - DNA, 12 bp, Unknown
  misc_feature (1)..( 12): Result.002 file - promoters60/1399726
tagataaattac

SEQ ID NO: 113610 - DNA, 12 bp, Unknown
  misc_feature (1)..( 12): Result.002 file - promoters60/1399726
agtacaaaatac

SEQ ID NO: 113611 - DNA, 12 bp, Unknown
  misc_feature (1)..( 12): Result.002 file - promoters60/1399726
ctgataaatttt

SEQ ID NO: 113612 - DNA, 12 bp, Unknown
  misc_feature (1)..( 12): Result.002 file - promoters60/1399726
tagaaaaagttg

SEQ ID NO: 113613 - DNA, 12 bp, Unknown
  misc_feature (1)..( 12): Result.002 file - promoters60/1399726
atttcaaaattt

SEQ ID NO: 113614 - DNA, 14 bp, Unknown
  misc_feature (1)..( 14): Result.002 file - promoters60/1399726
caaactaattcaca

SEQ ID NO: 113615 - DNA, 14 bp, Unknown
  misc_feature (1)..( 14): Result.002 file - promoters60/1399726
ccaactaagactga

SEQ ID NO: 113616 - DNA, 14 bp, Unknown
  misc_feature (1)..( 14): Result.002 file - promoters60/1399726
gaaagtaataaatg

SEQ ID NO: 113617 - DNA, 14 bp, Unknown
  misc_feature (1)..( 14): Result.002 file - promoters60/1399726
ccaattaattttct

SEQ ID NO: 113618 - DNA, 14 bp, Unknown
  misc_feature (1)..( 14): Result.002 file - promoters60/1399726
aacattaattttct

SEQ ID NO: 113619 - DNA, 12 bp, Unknown
  misc_feature (1)..( 12): Result.002 file - promoters60/1399726
ctgataaatttt

SEQ ID NO: 113620 - DNA, 12 bp, Unknown
  misc_feature (1)..( 12): Result.002 file - promoters60/1399726
tttcaaaattta

SEQ ID NO: 113621 - DNA, 12 bp, Unknown
  misc_feature (1)..( 12): Result.002 file - promoters60/1399726
tagataaattac

SEQ ID NO: 113622 - DNA, 12 bp, Unknown
  misc_feature (1)..( 12): Result.002 file - promoters60/1399726
tagaaaaagttg

SEQ ID NO: 113623 - DNA, 12 bp, Unknown
  misc_feature (1)..( 12): Result.002 file - promoters60/1399726
gtacaaaataca

SEQ ID NO: 113624 - DNA, 8 bp, Unknown
  misc_feature (1)..( 8): Result.002 file - promoters60/1403210
aaaaaagt

SEQ ID NO: 113625 - DNA, 8 bp, Unknown
  misc_feature (1)..( 8): Result.002 file - promoters60/1403210
aaataagt

SEQ ID NO: 113626 - DNA, 7 bp, Unknown
  misc_feature (1)..( 7): Result.002 file - promoters60/1403210
aagaaag

SEQ ID NO: 113627 - DNA, 7 bp, Unknown
  misc_feature (1)..( 7): Result.002 file - promoters60/1403210
aagtaag

SEQ ID NO: 113628 - DNA, 10 bp, Unknown
  misc_feature (1)..( 10): Result.002 file - promoters60/1403210
tgagtataat

SEQ ID NO: 113629 - DNA, 10 bp, Unknown
  misc_feature (1)..( 10): Result.002 file - promoters60/1403210
tgagtaaaat

SEQ ID NO: 113630 - DNA, 7 bp, Unknown
  misc_feature (1)..( 7): Result.002 file - promoters60/1403210
ttgaaaa

SEQ ID NO: 113631 - DNA, 7 bp, Unknown
  misc_feature (1)..( 7): Result.002 file - promoters60/1403210
ttgaaat

SEQ ID NO: 113632 - DNA, 7 bp, Unknown
  misc_feature (1)..( 7): Result.002 file - promoters60/1403210
tttaaaa

SEQ ID NO: 113633 - DNA, 9 bp, Unknown
  misc_feature (1)..( 9): Result.002 file - promoters60/1403210
tggttttct

SEQ ID NO: 113634 - DNA, 9 bp, Unknown
  misc_feature (1)..( 9): Result.002 file - promoters60/1403210
tggctttct

SEQ ID NO: 113635 - DNA, 7 bp, Unknown
  misc_feature (1)..( 7): Result.002 file - promoters60/1403210
aaagttt

SEQ ID NO: 113636 - DNA, 7 bp, Unknown
  misc_feature (1)..( 7): Result.002 file - promoters60/1403210
aaaattt

SEQ ID NO: 113637 - DNA, 6 bp, Unknown
  misc_feature (1)..( 6): Result.002 file - promoters60/1403210
ttgaga

SEQ ID NO: 113638 - DNA, 6 bp, Unknown
  misc_feature (1)..( 6): Result.002 file - promoters60/1403210
ttgaga

SEQ ID NO: 113639 - DNA, 7 bp, Unknown
  misc_feature (1)..( 7): Result.002 file - promoters60/1403210
tttaggg

SEQ ID NO: 113640 - DNA, 7 bp, Unknown
  misc_feature (1)..( 7): Result.002 file - promoters60/1403210
tttgggg

SEQ ID NO: 113641 - DNA, 8 bp, Unknown
  misc_feature (1)..( 8): Result.002 file - promoters60/1403210
ttttgatt

SEQ ID NO: 113642 - DNA, 8 bp, Unknown
  misc_feature (1)..( 8): Result.002 file - promoters60/1403210
ttttcatt

SEQ ID NO: 113643 - DNA, 7 bp, Unknown
  misc_feature (1)..( 7): Result.002 file - promoters60/1403210
tgatgaa

SEQ ID NO: 113644 - DNA, 7 bp, Unknown
  misc_feature (1)..( 7): Result.002 file - promoters60/1403210
tgatgaa

SEQ ID NO: 113645 - DNA, 8 bp, Unknown
  misc_feature (1)..( 8): Result.002 file - promoters60/1403210
atcaactt

SEQ ID NO: 113646 - DNA, 8 bp, Unknown
  misc_feature (1)..( 8): Result.002 file - promoters60/1403210
atcatctt

SEQ ID NO: 113647 - DNA, 10 bp, Unknown
  misc_feature (1)..( 10): Result.002 file - promoters60/1403210
tttttaattt

SEQ ID NO: 113648 - DNA, 10 bp, Unknown
  misc_feature (1)..( 10): Result.002 file - promoters60/1403210
tttttatttt

SEQ ID NO: 113649 - DNA, 9 bp, Unknown
  misc_feature (1)..( 9): Result.002 file - promoters60/1403210
atggatact

SEQ ID NO: 113650 - DNA, 9 bp, Unknown
  misc_feature (1)..( 9): Result.002 file - promoters60/1403210
atggttact

SEQ ID NO: 113651 - DNA, 7 bp, Unknown
  misc_feature (1)..( 7): Result.002 file - promoters60/1403210
tttactc

SEQ ID NO: 113652 - DNA, 7 bp, Unknown
  misc_feature (1)..( 7): Result.002 file - promoters60/1403210
tttactc

SEQ ID NO: 113653 - DNA, 8 bp, Unknown
  misc_feature (1)..( 8): Result.002 file - promoters60/1403210
ttctcttc

SEQ ID NO: 113654 - DNA, 8 bp, Unknown
  misc_feature (1)..( 8): Result.002 file - promoters60/1403210
ttctgttc

SEQ ID NO: 113655 - DNA, 6 bp, Unknown
  misc_feature (1)..( 6): Result.002 file - promoters60/1403210
tttctt

SEQ ID NO: 113656 - DNA, 6 bp, Unknown
  misc_feature (1)..( 6): Result.002 file - promoters60/1403210
tttctt

SEQ ID NO: 113657 - DNA, 10 bp, Unknown
  misc_feature (1)..( 10): Result.002 file - promoters60/1411578
atgagaatcc

SEQ ID NO: 113658 - DNA, 10 bp, Unknown
  misc_feature (1)..( 10): Result.002 file - promoters60/1411578
atgagaactc

SEQ ID NO: 113659 - DNA, 7 bp, Unknown
  misc_feature (1)..( 7): Result.002 file - promoters60/1411578
agaagag

SEQ ID NO: 113660 - DNA, 8 bp, Unknown
  misc_feature (1)..( 8): Result.002 file - promoters60/1411578
agaagatg

SEQ ID NO: 113661 - DNA, 8 bp, Unknown
  misc_feature (1)..( 8): Result.002 file - promoters60/1411578
cgaatatg

SEQ ID NO: 113662 - DNA, 8 bp, Unknown
  misc_feature (1)..( 8): Result.002 file - promoters60/1411578
agaagagt

SEQ ID NO: 113663 - DNA, 9 bp, Unknown
  misc_feature (1)..( 9): Result.002 file - promoters60/1411578
acattgttt

SEQ ID NO: 113664 - DNA, 9 bp, Unknown
  misc_feature (1)..( 9): Result.002 file - promoters60/1411578
cgatttttt

SEQ ID NO: 113665 - DNA, 9 bp, Unknown
  misc_feature (1)..( 9): Result.002 file - promoters60/1411578
acattgtta

SEQ ID NO: 113666 - DNA, 7 bp, Unknown
  misc_feature (1)..( 7): Result.002 file - promoters60/1411578
aaactta

SEQ ID NO: 113667 - DNA, 7 bp, Unknown
  misc_feature (1)..( 7): Result.002 file - promoters60/1411578
aaactta

SEQ ID NO: 113668 - DNA, 7 bp, Unknown
  misc_feature (1)..( 7): Result.002 file - promoters60/1411578
aaattta

SEQ ID NO: 113669 - DNA, 6 bp, Unknown
  misc_feature (1)..( 6): Result.002 file - promoters60/1411598
aaaaga

SEQ ID NO: 113670 - DNA, 6 bp, Unknown
  misc_feature (1)..( 6): Result.002 file - promoters60/1411598
aaaaga

SEQ ID NO: 113671 - DNA, 7 bp, Unknown
  misc_feature (1)..( 7): Result.002 file - promoters60/1411598
acaaaaa

SEQ ID NO: 113672 - DNA, 7 bp, Unknown
  misc_feature (1)..( 7): Result.002 file - promoters60/1411598
acaaaaa

SEQ ID NO: 113673 - DNA, 6 bp, Unknown
  misc_feature (1)..( 6): Result.002 file - promoters60/1411598
cttgaa

SEQ ID NO: 113674 - DNA, 6 bp, Unknown
  misc_feature (1)..( 6): Result.002 file - promoters60/1411598
cttgaa

SEQ ID NO: 113675 - DNA, 8 bp, Unknown
  misc_feature (1)..( 8): Result.002 file - promoters60/1411598
ttagaaaa

SEQ ID NO: 113676 - DNA, 8 bp, Unknown
  misc_feature (1)..( 8): Result.002 file - promoters60/1411598
ttaaaaaa

SEQ ID NO: 113677 - DNA, 6 bp, Unknown
  misc_feature (1)..( 6): Result.002 file - promoters60/1411598
tacttt

SEQ ID NO: 113678 - DNA, 6 bp, Unknown
  misc_feature (1)..( 6): Result.002 file - promoters60/1411598
tacttt

SEQ ID NO: 113679 - DNA, 7 bp, Unknown
  misc_feature (1)..( 7): Result.002 file - promoters60/1411598
acaaaaa

SEQ ID NO: 113680 - DNA, 7 bp, Unknown
  misc_feature (1)..( 7): Result.002 file - promoters60/1411598
acataaa

SEQ ID NO: 113681 - DNA, 7 bp, Unknown
  misc_feature (1)..( 7): Result.002 file - promoters60/1411598
ccataaa

SEQ ID NO: 113682 - DNA, 8 bp, Unknown
  misc_feature (1)..( 8): Result.002 file - promoters60/1411598
aggatgtt

SEQ ID NO: 113683 - DNA, 8 bp, Unknown
  misc_feature (1)..( 8): Result.002 file - promoters60/1411598
aggaagtt

SEQ ID NO: 113684 - DNA, 6 bp, Unknown
  misc_feature (1)..( 6): Result.002 file - promoters60/1411598
caaaat

SEQ ID NO: 113685 - DNA, 6 bp, Unknown
  misc_feature (1)..( 6): Result.002 file - promoters60/1411598
caaaat

SEQ ID NO: 113686 - DNA, 9 bp, Unknown
  misc_feature (1)..( 9): Result.002 file - promoters60/1411598
tacccaaat

SEQ ID NO: 113687 - DNA, 9 bp, Unknown
  misc_feature (1)..( 9): Result.002 file - promoters60/1411598
taccccaat

SEQ ID NO: 113688 - DNA, 9 bp, Unknown
  misc_feature (1)..( 9): Result.002 file - promoters60/1411598
atatgattt

SEQ ID NO: 113689 - DNA, 9 bp, Unknown
  misc_feature (1)..( 9): Result.002 file - promoters60/1411598
atatgattt

SEQ ID NO: 113690 - DNA, 8 bp, Unknown
  misc_feature (1)..( 8): Result.002 file - promoters60/1411598
ttctatct

SEQ ID NO: 113691 - DNA, 8 bp, Unknown
  misc_feature (1)..( 8): Result.002 file - promoters60/1411598
ttctttct

SEQ ID NO: 113692 - DNA, 7 bp, Unknown
  misc_feature (1)..( 7): Result.002 file - promoters60/1411598
cttagaa

SEQ ID NO: 113693 - DNA, 7 bp, Unknown
  misc_feature (1)..( 7): Result.002 file - promoters60/1411598
cttcgaa

SEQ ID NO: 113694 - DNA, 7 bp, Unknown
  misc_feature (1)..( 7): Result.002 file - promoters60/1411598
gaaaaat

SEQ ID NO: 113695 - DNA, 7 bp, Unknown
  misc_feature (1)..( 7): Result.002 file - promoters60/1411598
gaaaaat

SEQ ID NO: 113696 - DNA, 6 bp, Unknown
  misc_feature (1)..( 6): Result.002 file - promoters60/1411598
attgga

SEQ ID NO: 113697 - DNA, 6 bp, Unknown
  misc_feature (1)..( 6): Result.002 file - promoters60/1411598
attgga

SEQ ID NO: 113698 - DNA, 6 bp, Unknown
  misc_feature (1)..( 6): Result.002 file - promoters60/1411598
agttgg

SEQ ID NO: 113699 - DNA, 6 bp, Unknown
  misc_feature (1)..( 6): Result.002 file - promoters60/1411598
agttgg

SEQ ID NO: 113700 - DNA, 6 bp, Unknown
  misc_feature (1)..( 6): Result.002 file - promoters60/1411598
tttaat

SEQ ID NO: 113701 - DNA, 6 bp, Unknown
  misc_feature (1)..( 6): Result.002 file - promoters60/1411598
tttaat

SEQ ID NO: 113702 - DNA, 6 bp, Unknown
  misc_feature (1)..( 6): Result.002 file - promoters60/1411598
ttgatt

SEQ ID NO: 113703 - DNA, 6 bp, Unknown
  misc_feature (1)..( 6): Result.002 file - promoters60/1411598
ttgatt

SEQ ID NO: 113704 - DNA, 9 bp, Unknown
  misc_feature (1)..( 9): Result.002 file - promoters60/1411616
ttttgaaat

SEQ ID NO: 113705 - DNA, 9 bp, Unknown
  misc_feature (1)..( 9): Result.002 file - promoters60/1411616
tttagaaga

SEQ ID NO: 113706 - DNA, 9 bp, Unknown
  misc_feature (1)..( 9): Result.002 file - promoters60/1411616
tgtagaaga

SEQ ID NO: 113707 - DNA, 7 bp, Unknown
  misc_feature (1)..( 7): Result.002 file - promoters60/1411616
caaataa

SEQ ID NO: 113708 - DNA, 7 bp, Unknown
  misc_feature (1)..( 7): Result.002 file - promoters60/1411616
aaaataa

SEQ ID NO: 113709 - DNA, 8 bp, Unknown
  misc_feature (1)..( 8): Result.002 file - promoters60/1411616
aaacatat

SEQ ID NO: 113710 - DNA, 8 bp, Unknown
  misc_feature (1)..( 8): Result.002 file - promoters60/1411616
taaaacag

SEQ ID NO: 113711 - DNA, 8 bp, Unknown
  misc_feature (1)..( 8): Result.002 file - promoters60/1411616
aaaatcag

SEQ ID NO: 113712 - DNA, 8 bp, Unknown
  misc_feature (1)..( 8): Result.002 file - promoters60/1411616
aaaatcct

SEQ ID NO: 113713 - DNA, 14 bp, Unknown
  misc_feature (1)..( 14): Result.002 file - promoters60/1411616
aacaaatttgtttt

SEQ ID NO: 113714 - DNA, 14 bp, Unknown
  misc_feature (1)..( 14): Result.002 file - promoters60/1411616
tagtaacatgtttt

SEQ ID NO: 113715 - DNA, 14 bp, Unknown
  misc_feature (1)..( 14): Result.002 file - promoters60/1411616
aaaaaacttgtttt

SEQ ID NO: 113716 - DNA, 14 bp, Unknown
  misc_feature (1)..( 14): Result.002 file - promoters60/1411616
aaaaaactaaaata

SEQ ID NO: 113717 - DNA, 9 bp, Unknown
  misc_feature (1)..( 9): Result.002 file - promoters60/1411616
ttttcattt

SEQ ID NO: 113718 - DNA, 9 bp, Unknown
  misc_feature (1)..( 9): Result.002 file - promoters60/1411616
cttttattt

SEQ ID NO: 113719 - DNA, 9 bp, Unknown
  misc_feature (1)..( 9): Result.002 file - promoters60/1411616
attttaatt

SEQ ID NO: 113720 - DNA, 9 bp, Unknown
  misc_feature (1)..( 9): Result.002 file - promoters60/1411616
attttcatt

SEQ ID NO: 113721 - DNA, 9 bp, Unknown
  misc_feature (1)..( 9): Result.002 file - promoters60/1411616
attttcgta

SEQ ID NO: 113722 - DNA, 9 bp, Unknown
  misc_feature (1)..( 9): Result.002 file - promoters60/1411616
attttaatt

SEQ ID NO: 113723 - DNA, 8 bp, Unknown
  misc_feature (1)..( 8): Result.002 file - promoters60/1411616
agaacata

SEQ ID NO: 113724 - DNA, 8 bp, Unknown
  misc_feature (1)..( 8): Result.002 file - promoters60/1411616
cgaaaata

SEQ ID NO: 113725 - DNA, 8 bp, Unknown
  misc_feature (1)..( 8): Result.002 file - promoters60/1411616
agaagata

SEQ ID NO: 113726 - DNA, 7 bp, Unknown
  misc_feature (1)..( 7): Result.002 file - promoters60/1411616
aaacaaa

SEQ ID NO: 113727 - DNA, 7 bp, Unknown
  misc_feature (1)..( 7): Result.002 file - promoters60/1411616
aaaaaaa

SEQ ID NO: 113728 - DNA, 7 bp, Unknown
  misc_feature (1)..( 7): Result.002 file - promoters60/1411616
aaaaaac

SEQ ID NO: 113729 - DNA, 8 bp, Unknown
  misc_feature (1)..( 8): Result.002 file - promoters60/1411616
aattattt

SEQ ID NO: 113730 - DNA, 8 bp, Unknown
  misc_feature (1)..( 8): Result.002 file - promoters60/1411616
tattattt

SEQ ID NO: 113731 - DNA, 8 bp, Unknown
  misc_feature (1)..( 8): Result.002 file - promoters60/1411616
tattgttt

SEQ ID NO: 113732 - DNA, 8 bp, Unknown
  misc_feature (1)..( 8): Result.002 file - promoters60/1411616
actaaaga

SEQ ID NO: 113733 - DNA, 8 bp, Unknown
  misc_feature (1)..( 8): Result.002 file - promoters60/1411616
tataaaga

SEQ ID NO: 113734 - DNA, 8 bp, Unknown
  misc_feature (1)..( 8): Result.002 file - promoters60/1411616
tataaaga

SEQ ID NO: 113735 - DNA, 7 bp, Unknown
  misc_feature (1)..( 7): Result.002 file - promoters60/1413159
tttgggt

SEQ ID NO: 113736 - DNA, 7 bp, Unknown
  misc_feature (1)..( 7): Result.002 file - promoters60/1413159
tttaggt

SEQ ID NO: 113737 - DNA, 7 bp, Unknown
  misc_feature (1)..( 7): Result.002 file - promoters60/1413159
acaaagg

SEQ ID NO: 113738 - DNA, 7 bp, Unknown
  misc_feature (1)..( 7): Result.002 file - promoters60/1413159
acaaagg

SEQ ID NO: 113739 - DNA, 7 bp, Unknown
  misc_feature (1)..( 7): Result.002 file - promoters60/1413159
ttttgtt

SEQ ID NO: 113740 - DNA, 7 bp, Unknown
  misc_feature (1)..( 7): Result.002 file - promoters60/1413159
tttggtt

SEQ ID NO: 113741 - DNA, 7 bp, Unknown
  misc_feature (1)..( 7): Result.002 file - promoters60/1413159
ttgtgat

SEQ ID NO: 113742 - DNA, 7 bp, Unknown
  misc_feature (1)..( 7): Result.002 file - promoters60/1413159
ctgtgat

SEQ ID NO: 113743 - DNA, 7 bp, Unknown
  misc_feature (1)..( 7): Result.002 file - promoters60/1413159
ttgtgaa

SEQ ID NO: 113744 - DNA, 7 bp, Unknown
  misc_feature (1)..( 7): Result.002 file - promoters60/1413159
aaacgat

SEQ ID NO: 113745 - DNA, 7 bp, Unknown
  misc_feature (1)..( 7): Result.002 file - promoters60/1413159
aaaagat

SEQ ID NO: 113746 - DNA, 6 bp, Unknown
  misc_feature (1)..( 6): Result.002 file - promoters60/1413159
tggaga

SEQ ID NO: 113747 - DNA, 6 bp, Unknown
  misc_feature (1)..( 6): Result.002 file - promoters60/1413159
tggaga

SEQ ID NO: 113748 - DNA, 7 bp, Unknown
  misc_feature (1)..( 7): Result.002 file - promoters60/1413159
gaagcta

SEQ ID NO: 113749 - DNA, 7 bp, Unknown
  misc_feature (1)..( 7): Result.002 file - promoters60/1413159
gaagcta

SEQ ID NO: 113750 - DNA, 6 bp, Unknown
  misc_feature (1)..( 6): Result.002 file - promoters60/1413159
atgaaa

SEQ ID NO: 113751 - DNA, 6 bp, Unknown
  misc_feature (1)..( 6): Result.002 file - promoters60/1413159
atgaaa

SEQ ID NO: 113752 - DNA, 6 bp, Unknown
  misc_feature (1)..( 6): Result.002 file - promoters60/1413159
acactt

SEQ ID NO: 113753 - DNA, 6 bp, Unknown
  misc_feature (1)..( 6): Result.002 file - promoters60/1413159
acactt

SEQ ID NO: 113754 - DNA, 7 bp, Unknown
  misc_feature (1)..( 7): Result.002 file - promoters60/1413159
tgttttg

SEQ ID NO: 113755 - DNA, 7 bp, Unknown
  misc_feature (1)..( 7): Result.002 file - promoters60/1413159
tgtcttg

SEQ ID NO: 113756 - DNA, 8 bp, Unknown
  misc_feature (1)..( 8): Result.002 file - promoters60/1413159
ttactttt

SEQ ID NO: 113757 - DNA, 8 bp, Unknown
  misc_feature (1)..( 8): Result.002 file - promoters60/1413159
ttacattt

SEQ ID NO: 113758 - DNA, 6 bp, Unknown
  misc_feature (1)..( 6): Result.002 file - promoters60/1413159
ttataa

SEQ ID NO: 113759 - DNA, 6 bp, Unknown
  misc_feature (1)..( 6): Result.002 file - promoters60/1413159
ttataa

SEQ ID NO: 113760 - DNA, 10 bp, Unknown
  misc_feature (1)..( 10): Result.002 file - promoters60/1413159
atataacaaa

SEQ ID NO: 113761 - DNA, 10 bp, Unknown
  misc_feature (1)..( 10): Result.002 file - promoters60/1413159
atacaacaaa

SEQ ID NO: 113762 - DNA, 11 bp, Unknown
  misc_feature (1)..( 11): Result.002 file - promoters60/1413191
actattttgac

SEQ ID NO: 113763 - DNA, 11 bp, Unknown
  misc_feature (1)..( 11): Result.002 file - promoters60/1413191
tgtgttttgac

SEQ ID NO: 113764 - DNA, 11 bp, Unknown
  misc_feature (1)..( 11): Result.002 file - promoters60/1413191
acttttttgtt

SEQ ID NO: 113765 - DNA, 11 bp, Unknown
  misc_feature (1)..( 11): Result.002 file - promoters60/1413191
tttatgttgtt

SEQ ID NO: 113766 - DNA, 11 bp, Unknown
  misc_feature (1)..( 11): Result.002 file - promoters60/1413191
taaatgttgca

SEQ ID NO: 113767 - DNA, 11 bp, Unknown
  misc_feature (1)..( 11): Result.002 file - promoters60/1413191
tctttttttgg

SEQ ID NO: 113768 - DNA, 9 bp, Unknown
  misc_feature (1)..( 9): Result.002 file - promoters60/1413191
gatataaga

SEQ ID NO: 113769 - DNA, 9 bp, Unknown
  misc_feature (1)..( 9): Result.002 file - promoters60/1413191
gatttaaaa

SEQ ID NO: 113770 - DNA, 9 bp, Unknown
  misc_feature (1)..( 9): Result.002 file - promoters60/1413191
aattcaaaa

SEQ ID NO: 113771 - DNA, 9 bp, Unknown
  misc_feature (1)..( 9): Result.002 file - promoters60/1413191
aatttaatg

SEQ ID NO: 113772 - DNA, 9 bp, Unknown
  misc_feature (1)..( 9): Result.002 file - promoters60/1413191
tatttaaac

SEQ ID NO: 113773 - DNA, 9 bp, Unknown
  misc_feature (1)..( 9): Result.002 file - promoters60/1413191
gctttaatt

SEQ ID NO: 113774 - DNA, 9 bp, Unknown
  misc_feature (1)..( 9): Result.002 file - promoters60/1413211
gtcagatca

SEQ ID NO: 113775 - DNA, 9 bp, Unknown
  misc_feature (1)..( 9): Result.002 file - promoters60/1413211
gtcggatca

SEQ ID NO: 113776 - DNA, 9 bp, Unknown
  misc_feature (1)..( 9): Result.002 file - promoters60/1413211
atagtcaac

SEQ ID NO: 113777 - DNA, 9 bp, Unknown
  misc_feature (1)..( 9): Result.002 file - promoters60/1413211
ttagtcata

SEQ ID NO: 113778 - DNA, 9 bp, Unknown
  misc_feature (1)..( 9): Result.002 file - promoters60/1413211
ataatcaac

SEQ ID NO: 113779 - DNA, 6 bp, Unknown
  misc_feature (1)..( 6): Result.002 file - promoters60/1413211
aataat

SEQ ID NO: 113780 - DNA, 6 bp, Unknown
  misc_feature (1)..( 6): Result.002 file - promoters60/1413211
aataat

SEQ ID NO: 113781 - DNA, 7 bp, Unknown
  misc_feature (1)..( 7): Result.002 file - promoters60/1413211
tctaatt

SEQ ID NO: 113782 - DNA, 7 bp, Unknown
  misc_feature (1)..( 7): Result.002 file - promoters60/1413211
tctaatt

SEQ ID NO: 113783 - DNA, 9 bp, Unknown
  misc_feature (1)..( 9): Result.002 file - promoters60/1413211
aaaatagaa

SEQ ID NO: 113784 - DNA, 9 bp, Unknown
  misc_feature (1)..( 9): Result.002 file - promoters60/1413211
aaaaaagaa

SEQ ID NO: 113785 - DNA, 7 bp, Unknown
  misc_feature (1)..( 7): Result.002 file - promoters60/1413211
ccaacat

SEQ ID NO: 113786 - DNA, 7 bp, Unknown
  misc_feature (1)..( 7): Result.002 file - promoters60/1413211
ccaacat

SEQ ID NO: 113787 - DNA, 6 bp, Unknown
  misc_feature (1)..( 6): Result.002 file - promoters60/1413211
taattt

SEQ ID NO: 113788 - DNA, 6 bp, Unknown
  misc_feature (1)..( 6): Result.002 file - promoters60/1413211
taattt

SEQ ID NO: 113789 - DNA, 13 bp, Unknown
  misc_feature (1)..( 13): Result.002 file - promoters60/1413211
tgatgaaaaggat

SEQ ID NO: 113790 - DNA, 13 bp, Unknown
  misc_feature (1)..( 13): Result.002 file - promoters60/1413211
tgatgtaaatgat

SEQ ID NO: 113791 - DNA, 13 bp, Unknown
  misc_feature (1)..( 13): Result.002 file - promoters60/1413211
aatttaaaatgaa

SEQ ID NO: 113792 - DNA, 7 bp, Unknown
  misc_feature (1)..( 7): Result.002 file - promoters60/1413211
gacaaaa

SEQ ID NO: 113793 - DNA, 7 bp, Unknown
  misc_feature (1)..( 7): Result.002 file - promoters60/1413211
gacaaaa

SEQ ID NO: 113794 - DNA, 6 bp, Unknown
  misc_feature (1)..( 6): Result.002 file - promoters60/1413211
aaaagg

SEQ ID NO: 113795 - DNA, 6 bp, Unknown
  misc_feature (1)..( 6): Result.002 file - promoters60/1413211
aaaagg

SEQ ID NO: 113796 - DNA, 6 bp, Unknown
  misc_feature (1)..( 6): Result.002 file - promoters60/1413211
ctactt

SEQ ID NO: 113797 - DNA, 6 bp, Unknown
  misc_feature (1)..( 6): Result.002 file - promoters60/1413211
ctactt

SEQ ID NO: 113798 - DNA, 7 bp, Unknown
  misc_feature (1)..( 7): Result.002 file - promoters60/1413211
ctctact

SEQ ID NO: 113799 - DNA, 7 bp, Unknown
  misc_feature (1)..( 7): Result.002 file - promoters60/1413211
ctctact

SEQ ID NO: 113800 - DNA, 6 bp, Unknown
  misc_feature (1)..( 6): Result.002 file - promoters60/1413211
atttaa

SEQ ID NO: 113801 - DNA, 6 bp, Unknown
  misc_feature (1)..( 6): Result.002 file - promoters60/1413211
atttaa

SEQ ID NO: 113802 - DNA, 7 bp, Unknown
  misc_feature (1)..( 7): Result.002 file - promoters60/1413211
ccatatc

SEQ ID NO: 113803 - DNA, 7 bp, Unknown
  misc_feature (1)..( 7): Result.002 file - promoters60/1413211
ccaaatc

SEQ ID NO: 113804 - DNA, 8 bp, Unknown
  misc_feature (1)..( 8): Result.002 file - promoters60/1413211
tctgtttt

SEQ ID NO: 113805 - DNA, 8 bp, Unknown
  misc_feature (1)..( 8): Result.002 file - promoters60/1413211
tctggttt

SEQ ID NO: 113806 - DNA, 7 bp, Unknown
  misc_feature (1)..( 7): Result.002 file - promoters60/1413211
aaactat

SEQ ID NO: 113807 - DNA, 7 bp, Unknown
  misc_feature (1)..( 7): Result.002 file - promoters60/1413211
aaattat

SEQ ID NO: 113808 - DNA, 7 bp, Unknown
  misc_feature (1)..( 7): Result.002 file - promoters60/1413211
taaatta

SEQ ID NO: 113809 - DNA, 7 bp, Unknown
  misc_feature (1)..( 7): Result.002 file - promoters60/1413211
taattta

SEQ ID NO: 113810 - DNA, 6 bp, Unknown
  misc_feature (1)..( 6): Result.002 file - promoters60/1420853
tttagt

SEQ ID NO: 113811 - DNA, 6 bp, Unknown
  misc_feature (1)..( 6): Result.002 file - promoters60/1420853
tttagt

SEQ ID NO: 113812 - DNA, 7 bp, Unknown
  misc_feature (1)..( 7): Result.002 file - promoters60/1420853
gaaaata

SEQ ID NO: 113813 - DNA, 7 bp, Unknown
  misc_feature (1)..( 7): Result.002 file - promoters60/1420853
gaacata

SEQ ID NO: 113814 - DNA, 8 bp, Unknown
  misc_feature (1)..( 8): Result.002 file - promoters60/1420853
ttctacat

SEQ ID NO: 113815 - DNA, 8 bp, Unknown
  misc_feature (1)..( 8): Result.002 file - promoters60/1420853
ttcgacat

SEQ ID NO: 113816 - DNA, 8 bp, Unknown
  misc_feature (1)..( 8): Result.002 file - promoters60/1420853
tatggttt

SEQ ID NO: 113817 - DNA, 8 bp, Unknown
  misc_feature (1)..( 8): Result.002 file - promoters60/1420853
tatgtttt

SEQ ID NO: 113818 - DNA, 9 bp, Unknown
  misc_feature (1)..( 9): Result.002 file - promoters60/1420853
cgtatttaa

SEQ ID NO: 113819 - DNA, 9 bp, Unknown
  misc_feature (1)..( 9): Result.002 file - promoters60/1420853
cgtatgtaa

SEQ ID NO: 113820 - DNA, 8 bp, Unknown
  misc_feature (1)..( 8): Result.002 file - promoters60/1420853
aatataat

SEQ ID NO: 113821 - DNA, 8 bp, Unknown
  misc_feature (1)..( 8): Result.002 file - promoters60/1420853
aatttaat

SEQ ID NO: 113822 - DNA, 8 bp, Unknown
  misc_feature (1)..( 8): Result.002 file - promoters60/1420853
aggcttta

SEQ ID NO: 113823 - DNA, 8 bp, Unknown
  misc_feature (1)..( 8): Result.002 file - promoters60/1420853
aggattta

SEQ ID NO: 113824 - DNA, 6 bp, Unknown
  misc_feature (1)..( 6): Result.002 file - promoters60/1420853
aaatat

SEQ ID NO: 113825 - DNA, 6 bp, Unknown
  misc_feature (1)..( 6): Result.002 file - promoters60/1420853
aaatat

SEQ ID NO: 113826 - DNA, 7 bp, Unknown
  misc_feature (1)..( 7): Result.002 file - promoters60/1420853
cagcctt

SEQ ID NO: 113827 - DNA, 7 bp, Unknown
  misc_feature (1)..( 7): Result.002 file - promoters60/1420853
cagcctt

SEQ ID NO: 113828 - DNA, 6 bp, Unknown
  misc_feature (1)..( 6): Result.002 file - promoters60/1420853
tataca

SEQ ID NO: 113829 - DNA, 6 bp, Unknown
  misc_feature (1)..( 6): Result.002 file - promoters60/1420853
tataca

SEQ ID NO: 113830 - DNA, 7 bp, Unknown
  misc_feature (1)..( 7): Result.002 file - promoters60/1420853
ttagatc

SEQ ID NO: 113831 - DNA, 7 bp, Unknown
  misc_feature (1)..( 7): Result.002 file - promoters60/1420853
ttagatc

SEQ ID NO: 113832 - DNA, 8 bp, Unknown
  misc_feature (1)..( 8): Result.002 file - promoters60/1420853
taattgta

SEQ ID NO: 113833 - DNA, 8 bp, Unknown
  misc_feature (1)..( 8): Result.002 file - promoters60/1420853
taaatgta

SEQ ID NO: 113834 - DNA, 6 bp, Unknown
  misc_feature (1)..( 6): Result.002 file - promoters60/1420853
atgtct

SEQ ID NO: 113835 - DNA, 6 bp, Unknown
  misc_feature (1)..( 6): Result.002 file - promoters60/1420853
atgtct

SEQ ID NO: 113836 - DNA, 7 bp, Unknown
  misc_feature (1)..( 7): Result.002 file - promoters60/1420853
ttggaga

SEQ ID NO: 113837 - DNA, 7 bp, Unknown
  misc_feature (1)..( 7): Result.002 file - promoters60/1420853
ttggaga

SEQ ID NO: 113838 - DNA, 6 bp, Unknown
  misc_feature (1)..( 6): Result.002 file - promoters60/1420853
gaagat

SEQ ID NO: 113839 - DNA, 6 bp, Unknown
  misc_feature (1)..( 6): Result.002 file - promoters60/1420853
gaagat

SEQ ID NO: 113840 - DNA, 6 bp, Unknown
  misc_feature (1)..( 6): Result.002 file - promoters60/1420853
gatcga

SEQ ID NO: 113841 - DNA, 6 bp, Unknown
  misc_feature (1)..( 6): Result.002 file - promoters60/1420853
gatcga

SEQ ID NO: 113842 - DNA, 6 bp, Unknown
  misc_feature (1)..( 6): Result.002 file - promoters60/1420853
aaatgc

SEQ ID NO: 113843 - DNA, 6 bp, Unknown
  misc_feature (1)..( 6): Result.002 file - promoters60/1420853
aaatgc

SEQ ID NO: 113844 - DNA, 8 bp, Unknown
  misc_feature (1)..( 8): Result.002 file - promoters60/1420853
ggatttgt

SEQ ID NO: 113845 - DNA, 8 bp, Unknown
  misc_feature (1)..( 8): Result.002 file - promoters60/1420853
ggacttgt

SEQ ID NO: 113846 - DNA, 10 bp, Unknown
  misc_feature (1)..( 10): Result.002 file - promoters60/1440865
gaaaaaaaga

SEQ ID NO: 113847 - DNA, 10 bp, Unknown
  misc_feature (1)..( 10): Result.002 file - promoters60/1440865
taaaaataga

SEQ ID NO: 113848 - DNA, 10 bp, Unknown
  misc_feature (1)..( 10): Result.002 file - promoters60/1440865
gaaaaatgta

SEQ ID NO: 113849 - DNA, 6 bp, Unknown
  misc_feature (1)..( 6): Result.002 file - promoters60/1440865
agaaaa

SEQ ID NO: 113850 - DNA, 6 bp, Unknown
  misc_feature (1)..( 6): Result.002 file - promoters60/1440865
agaaaa

SEQ ID NO: 113851 - DNA, 6 bp, Unknown
  misc_feature (1)..( 6): Result.002 file - promoters60/1440865
aacaga

SEQ ID NO: 113852 - DNA, 6 bp, Unknown
  misc_feature (1)..( 6): Result.002 file - promoters60/1440865
aacaga

SEQ ID NO: 113853 - DNA, 7 bp, Unknown
  misc_feature (1)..( 7): Result.002 file - promoters60/1440865
aataaaa

SEQ ID NO: 113854 - DNA, 7 bp, Unknown
  misc_feature (1)..( 7): Result.002 file - promoters60/1440865
aataaaa

SEQ ID NO: 113855 - DNA, 7 bp, Unknown
  misc_feature (1)..( 7): Result.002 file - promoters60/1440865
accgaaa

SEQ ID NO: 113856 - DNA, 7 bp, Unknown
  misc_feature (1)..( 7): Result.002 file - promoters60/1440865
accaaaa

SEQ ID NO: 113857 - DNA, 6 bp, Unknown
  misc_feature (1)..( 6): Result.002 file - promoters60/1440865
aaaaag

SEQ ID NO: 113858 - DNA, 6 bp, Unknown
  misc_feature (1)..( 6): Result.002 file - promoters60/1440865
aaaaag

SEQ ID NO: 113859 - DNA, 7 bp, Unknown
  misc_feature (1)..( 7): Result.002 file - promoters60/1440865
attacgt

SEQ ID NO: 113860 - DNA, 7 bp, Unknown
  misc_feature (1)..( 7): Result.002 file - promoters60/1440865
attccgt

SEQ ID NO: 113861 - DNA, 9 bp, Unknown
  misc_feature (1)..( 9): Result.002 file - promoters60/1440865
aaattgaat

SEQ ID NO: 113862 - DNA, 9 bp, Unknown
  misc_feature (1)..( 9): Result.002 file - promoters60/1440865
aaaatgaat

SEQ ID NO: 113863 - DNA, 10 bp, Unknown
  misc_feature (1)..( 10): Result.002 file - promoters60/1440865
aatatgaaat

SEQ ID NO: 113864 - DNA, 10 bp, Unknown
  misc_feature (1)..( 10): Result.002 file - promoters60/1440865
aatttgaaat

SEQ ID NO: 113865 - DNA, 12 bp, Unknown
  misc_feature (1)..( 12): Result.002 file - promoters60/1440865
taccaaataaat

SEQ ID NO: 113866 - DNA, 12 bp, Unknown
  misc_feature (1)..( 12): Result.002 file - promoters60/1440865
tacaaaaaaaat

SEQ ID NO: 113867 - DNA, 6 bp, Unknown
  misc_feature (1)..( 6): Result.002 file - promoters60/1440865
aactaa

SEQ ID NO: 113868 - DNA, 6 bp, Unknown
  misc_feature (1)..( 6): Result.002 file - promoters60/1440865
aactaa

SEQ ID NO: 113869 - DNA, 7 bp, Unknown
  misc_feature (1)..( 7): Result.002 file - promoters60/1440865
agcaagt

SEQ ID NO: 113870 - DNA, 7 bp, Unknown
  misc_feature (1)..( 7): Result.002 file - promoters60/1440865
agcgagt

SEQ ID NO: 113871 - DNA, 7 bp, Unknown
  misc_feature (1)..( 7): Result.002 file - promoters60/1440865
taagatt

SEQ ID NO: 113872 - DNA, 7 bp, Unknown
  misc_feature (1)..( 7): Result.002 file - promoters60/1440865
taacatt

SEQ ID NO: 113873 - DNA, 6 bp, Unknown
  misc_feature (1)..( 6): Result.002 file - promoters60/1440865
aaaaaa

SEQ ID NO: 113874 - DNA, 6 bp, Unknown
  misc_feature (1)..( 6): Result.002 file - promoters60/1440865
aaaaaa

SEQ ID NO: 113875 - DNA, 7 bp, Unknown
  misc_feature (1)..( 7): Result.002 file - promoters60/1440865
tcataag

SEQ ID NO: 113876 - DNA, 7 bp, Unknown
  misc_feature (1)..( 7): Result.002 file - promoters60/1440865
tcaaaag

SEQ ID NO: 113877 - DNA, 7 bp, Unknown
  misc_feature (1)..( 7): Result.002 file - promoters60/1440865
caaaaag

SEQ ID NO: 113878 - DNA, 7 bp, Unknown
  misc_feature (1)..( 7): Result.002 file - promoters60/1440865
caataag

SEQ ID NO: 113879 - DNA, 6 bp, Unknown
  misc_feature (1)..( 6): Result.002 file - promoters60/1440865
aatata

SEQ ID NO: 113880 - DNA, 6 bp, Unknown
  misc_feature (1)..( 6): Result.002 file - promoters60/1440865
aatata

SEQ ID NO: 113881 - DNA, 7 bp, Unknown
  misc_feature (1)..( 7): Result.002 file - promoters60/1440865
gacattt

SEQ ID NO: 113882 - DNA, 7 bp, Unknown
  misc_feature (1)..( 7): Result.002 file - promoters60/1440865
gaccttt

SEQ ID NO: 113883 - DNA, 9 bp, Unknown
  misc_feature (1)..( 9): Result.002 file - promoters60/1440873
caaaaaaac

SEQ ID NO: 113884 - DNA, 9 bp, Unknown
  misc_feature (1)..( 9): Result.002 file - promoters60/1440873
caacaaaac

SEQ ID NO: 113885 - DNA, 10 bp, Unknown
  misc_feature (1)..( 10): Result.002 file - promoters60/1440873
aatcctaatc

SEQ ID NO: 113886 - DNA, 10 bp, Unknown
  misc_feature (1)..( 10): Result.002 file - promoters60/1440873
aatcataata

SEQ ID NO: 113887 - DNA, 10 bp, Unknown
  misc_feature (1)..( 10): Result.002 file - promoters60/1440873
ttccataata

SEQ ID NO: 113888 - DNA, 7 bp, Unknown
  misc_feature (1)..( 7): Result.002 file - promoters60/1440873
tgaacag

SEQ ID NO: 113889 - DNA, 7 bp, Unknown
  misc_feature (1)..( 7): Result.002 file - promoters60/1440873
tgaacag

SEQ ID NO: 113890 - DNA, 6 bp, Unknown
  misc_feature (1)..( 6): Result.002 file - promoters60/1440873
actcaa

SEQ ID NO: 113891 - DNA, 6 bp, Unknown
  misc_feature (1)..( 6): Result.002 file - promoters60/1440873
actcaa

SEQ ID NO: 113892 - DNA, 7 bp, Unknown
  misc_feature (1)..( 7): Result.002 file - promoters60/1440873
caacgta

SEQ ID NO: 113893 - DNA, 7 bp, Unknown
  misc_feature (1)..( 7): Result.002 file - promoters60/1440873
caaggta

SEQ ID NO: 113894 - DNA, 8 bp, Unknown
  misc_feature (1)..( 8): Result.002 file - promoters60/1440873
ttagacac

SEQ ID NO: 113895 - DNA, 8 bp, Unknown
  misc_feature (1)..( 8): Result.002 file - promoters60/1440873
ttagacac

SEQ ID NO: 113896 - DNA, 9 bp, Unknown
  misc_feature (1)..( 9): Result.002 file - promoters60/1440873
acagtttgt

SEQ ID NO: 113897 - DNA, 9 bp, Unknown
  misc_feature (1)..( 9): Result.002 file - promoters60/1440873
acattttgt

SEQ ID NO: 113898 - DNA, 7 bp, Unknown
  misc_feature (1)..( 7): Result.002 file - promoters60/1440873
tcaccaa

SEQ ID NO: 113899 - DNA, 7 bp, Unknown
  misc_feature (1)..( 7): Result.002 file - promoters60/1440873
tcaacaa

SEQ ID NO: 113900 - DNA, 7 bp, Unknown
  misc_feature (1)..( 7): Result.002 file - promoters60/1440873
aaatttt

SEQ ID NO: 113901 - DNA, 7 bp, Unknown
  misc_feature (1)..( 7): Result.002 file - promoters60/1440873
aaatttt

SEQ ID NO: 113902 - DNA, 6 bp, Unknown
  misc_feature (1)..( 6): Result.002 file - promoters60/1440873
tctttc

SEQ ID NO: 113903 - DNA, 6 bp, Unknown
  misc_feature (1)..( 6): Result.002 file - promoters60/1440873
tctttc

SEQ ID NO: 113904 - DNA, 7 bp, Unknown
  misc_feature (1)..( 7): Result.002 file - promoters60/1440873
taataat

SEQ ID NO: 113905 - DNA, 7 bp, Unknown
  misc_feature (1)..( 7): Result.002 file - promoters60/1440873
taagaat

SEQ ID NO: 113906 - DNA, 8 bp, Unknown
  misc_feature (1)..( 8): Result.002 file - promoters60/1440873
caaactta

SEQ ID NO: 113907 - DNA, 8 bp, Unknown
  misc_feature (1)..( 8): Result.002 file - promoters60/1440873
caatctta

SEQ ID NO: 113908 - DNA, 8 bp, Unknown
  misc_feature (1)..( 8): Result.002 file - promoters60/1440920
ttgagata

SEQ ID NO: 113909 - DNA, 8 bp, Unknown
  misc_feature (1)..( 8): Result.002 file - promoters60/1440920
ttgacata

SEQ ID NO: 113910 - DNA, 10 bp, Unknown
  misc_feature (1)..( 10): Result.002 file - promoters60/1440920
aaaattcttg

SEQ ID NO: 113911 - DNA, 10 bp, Unknown
  misc_feature (1)..( 10): Result.002 file - promoters60/1440920
aaacttcttg

SEQ ID NO: 113912 - DNA, 6 bp, Unknown
  misc_feature (1)..( 6): Result.002 file - promoters60/1440920
aaacaa

SEQ ID NO: 113913 - DNA, 6 bp, Unknown
  misc_feature (1)..( 6): Result.002 file - promoters60/1440920
aaacaa

SEQ ID NO: 113914 - DNA, 7 bp, Unknown
  misc_feature (1)..( 7): Result.002 file - promoters60/1440920
aaaaaat

SEQ ID NO: 113915 - DNA, 7 bp, Unknown
  misc_feature (1)..( 7): Result.002 file - promoters60/1440920
aaataat

SEQ ID NO: 113916 - DNA, 7 bp, Unknown
  misc_feature (1)..( 7): Result.002 file - promoters60/1440920
atagaat

SEQ ID NO: 113917 - DNA, 7 bp, Unknown
  misc_feature (1)..( 7): Result.002 file - promoters60/1440920
ataaaat

SEQ ID NO: 113918 - DNA, 8 bp, Unknown
  misc_feature (1)..( 8): Result.002 file - promoters60/1440920
aaacaaaa

SEQ ID NO: 113919 - DNA, 8 bp, Unknown
  misc_feature (1)..( 8): Result.002 file - promoters60/1440920
aaacgaaa

SEQ ID NO: 113920 - DNA, 7 bp, Unknown
  misc_feature (1)..( 7): Result.002 file - promoters60/1440920
aaaaaga

SEQ ID NO: 113921 - DNA, 7 bp, Unknown
  misc_feature (1)..( 7): Result.002 file - promoters60/1440920
aaagaga

SEQ ID NO: 113922 - DNA, 8 bp, Unknown
  misc_feature (1)..( 8): Result.002 file - promoters60/1440920
gtgtactt

SEQ ID NO: 113923 - DNA, 8 bp, Unknown
  misc_feature (1)..( 8): Result.002 file - promoters60/1440920
gtgaactt

SEQ ID NO: 113924 - DNA, 13 bp, Unknown
  misc_feature (1)..( 13): Result.002 file - promoters60/1440920
aaagtctccacat

SEQ ID NO: 113925 - DNA, 13 bp, Unknown
  misc_feature (1)..( 13): Result.002 file - promoters60/1440920
aaattctctacat

SEQ ID NO: 113926 - DNA, 6 bp, Unknown
  misc_feature (1)..( 6): Result.002 file - promoters60/1440920
aatgct

SEQ ID NO: 113927 - DNA, 6 bp, Unknown
  misc_feature (1)..( 6): Result.002 file - promoters60/1440920
aatgct

SEQ ID NO: 113928 - DNA, 6 bp, Unknown
  misc_feature (1)..( 6): Result.002 file - promoters60/1440920
atttga

SEQ ID NO: 113929 - DNA, 6 bp, Unknown
  misc_feature (1)..( 6): Result.002 file - promoters60/1440920
atttga

SEQ ID NO: 113930 - DNA, 11 bp, Unknown
  misc_feature (1)..( 11): Result.002 file - promoters60/1440967
attaaaaaaaa

SEQ ID NO: 113931 - DNA, 11 bp, Unknown
  misc_feature (1)..( 11): Result.002 file - promoters60/1440967
attcaaaacct

SEQ ID NO: 113932 - DNA, 12 bp, Unknown
  misc_feature (1)..( 12): Result.002 file - promoters60/1440967
attataaaaaag

SEQ ID NO: 113933 - DNA, 12 bp, Unknown
  misc_feature (1)..( 12): Result.002 file - promoters60/1440967
atccaaaaagaa

SEQ ID NO: 113934 - DNA, 9 bp, Unknown
  misc_feature (1)..( 9): Result.002 file - promoters60/1440967
aattaactt

SEQ ID NO: 113935 - DNA, 9 bp, Unknown
  misc_feature (1)..( 9): Result.002 file - promoters60/1440967
cattaacat

SEQ ID NO: 113936 - DNA, 9 bp, Unknown
  misc_feature (1)..( 9): Result.002 file - promoters60/1440967
aatcaactt

SEQ ID NO: 113937 - DNA, 9 bp, Unknown
  misc_feature (1)..( 9): Result.002 file - promoters60/1440967
tcttatcat

SEQ ID NO: 113938 - DNA, 11 bp, Unknown
  misc_feature (1)..( 11): Result.002 file - promoters60/1441000
aaattgctaag

SEQ ID NO: 113939 - DNA, 11 bp, Unknown
  misc_feature (1)..( 11): Result.002 file - promoters60/1441000
caatttctaca

SEQ ID NO: 113940 - DNA, 12 bp, Unknown
  misc_feature (1)..( 12): Result.002 file - promoters60/1441000
caagttgttaag

SEQ ID NO: 113941 - DNA, 12 bp, Unknown
  misc_feature (1)..( 12): Result.002 file - promoters60/1441000
caagttccgagg

SEQ ID NO: 113942 - DNA, 9 bp, Unknown
  misc_feature (1)..( 9): Result.002 file - promoters60/1441000
acaaaacat

SEQ ID NO: 113943 - DNA, 9 bp, Unknown
  misc_feature (1)..( 9): Result.002 file - promoters60/1441000
acaaagcat

SEQ ID NO: 113944 - DNA, 9 bp, Unknown
  misc_feature (1)..( 9): Result.002 file - promoters60/1441000
tcaaaaccg

SEQ ID NO: 113945 - DNA, 9 bp, Unknown
  misc_feature (1)..( 9): Result.002 file - promoters60/1441000
tcaaaattc

SEQ ID NO: 113946 - DNA, 7 bp, Unknown
  misc_feature (1)..( 7): Result.002 file - promoters60/1441020
tagaaag

SEQ ID NO: 113947 - DNA, 7 bp, Unknown
  misc_feature (1)..( 7): Result.002 file - promoters60/1441020
tagcaag

SEQ ID NO: 113948 - DNA, 6 bp, Unknown
  misc_feature (1)..( 6): Result.002 file - promoters60/1441020
atcaaa

SEQ ID NO: 113949 - DNA, 6 bp, Unknown
  misc_feature (1)..( 6): Result.002 file - promoters60/1441020
atcaaa

SEQ ID NO: 113950 - DNA, 6 bp, Unknown
  misc_feature (1)..( 6): Result.002 file - promoters60/1441020
atttgg

SEQ ID NO: 113951 - DNA, 6 bp, Unknown
  misc_feature (1)..( 6): Result.002 file - promoters60/1441020
atttgg

SEQ ID NO: 113952 - DNA, 6 bp, Unknown
  misc_feature (1)..( 6): Result.002 file - promoters60/1441020
atttga

SEQ ID NO: 113953 - DNA, 6 bp, Unknown
  misc_feature (1)..( 6): Result.002 file - promoters60/1441020
atttga

SEQ ID NO: 113954 - DNA, 7 bp, Unknown
  misc_feature (1)..( 7): Result.002 file - promoters60/1441020
agaatga

SEQ ID NO: 113955 - DNA, 7 bp, Unknown
  misc_feature (1)..( 7): Result.002 file - promoters60/1441020
agattga

SEQ ID NO: 113956 - DNA, 8 bp, Unknown
  misc_feature (1)..( 8): Result.002 file - promoters60/1441020
aattgaaa

SEQ ID NO: 113957 - DNA, 8 bp, Unknown
  misc_feature (1)..( 8): Result.002 file - promoters60/1441020
aatttaaa

SEQ ID NO: 113958 - DNA, 7 bp, Unknown
  misc_feature (1)..( 7): Result.002 file - promoters60/1441020
gcccaat

SEQ ID NO: 113959 - DNA, 7 bp, Unknown
  misc_feature (1)..( 7): Result.002 file - promoters60/1441020
gcctaat

SEQ ID NO: 113960 - DNA, 6 bp, Unknown
  misc_feature (1)..( 6): Result.002 file - promoters60/1441020
actttt

SEQ ID NO: 113961 - DNA, 6 bp, Unknown
  misc_feature (1)..( 6): Result.002 file - promoters60/1441020
actttt

SEQ ID NO: 113962 - DNA, 6 bp, Unknown
  misc_feature (1)..( 6): Result.002 file - promoters60/1441020
attctc

SEQ ID NO: 113963 - DNA, 6 bp, Unknown
  misc_feature (1)..( 6): Result.002 file - promoters60/1441020
attctc

SEQ ID NO: 113964 - DNA, 6 bp, Unknown
  misc_feature (1)..( 6): Result.002 file - promoters60/1441020
aatttg

SEQ ID NO: 113965 - DNA, 6 bp, Unknown
  misc_feature (1)..( 6): Result.002 file - promoters60/1441020
aatttg

SEQ ID NO: 113966 - DNA, 9 bp, Unknown
  misc_feature (1)..( 9): Result.002 file - promoters60/1441020
gattgcaaa

SEQ ID NO: 113967 - DNA, 9 bp, Unknown
  misc_feature (1)..( 9): Result.002 file - promoters60/1441020
gatggcaaa

SEQ ID NO: 113968 - DNA, 7 bp, Unknown
  misc_feature (1)..( 7): Result.002 file - promoters60/1441020
tgggctc

SEQ ID NO: 113969 - DNA, 7 bp, Unknown
  misc_feature (1)..( 7): Result.002 file - promoters60/1441020
tgggctc

SEQ ID NO: 113970 - DNA, 6 bp, Unknown
  misc_feature (1)..( 6): Result.002 file - promoters60/1441020
gattca

SEQ ID NO: 113971 - DNA, 6 bp, Unknown
  misc_feature (1)..( 6): Result.002 file - promoters60/1441020
gattca

SEQ ID NO: 113972 - DNA, 14 bp, Unknown
  misc_feature (1)..( 14): Result.002 file - promoters60/1441044
ttttttatagatta

SEQ ID NO: 113973 - DNA, 14 bp, Unknown
  misc_feature (1)..( 14): Result.002 file - promoters60/1441044
ctttatatagagac

SEQ ID NO: 113974 - DNA, 14 bp, Unknown
  misc_feature (1)..( 14): Result.002 file - promoters60/1441044
ttttctataaatta

SEQ ID NO: 113975 - DNA, 14 bp, Unknown
  misc_feature (1)..( 14): Result.002 file - promoters60/1441044
agagctaaaaacgg

SEQ ID NO: 113976 - DNA, 12 bp, Unknown
  misc_feature (1)..( 12): Result.002 file - promoters60/1441044
aatcacatatta

SEQ ID NO: 113977 - DNA, 12 bp, Unknown
  misc_feature (1)..( 12): Result.002 file - promoters60/1441044
actcatatatat

SEQ ID NO: 113978 - DNA, 12 bp, Unknown
  misc_feature (1)..( 12): Result.002 file - promoters60/1441044
actcatatatat

SEQ ID NO: 113979 - DNA, 12 bp, Unknown
  misc_feature (1)..( 12): Result.002 file - promoters60/1441044
acgtatatataa

SEQ ID NO: 113980 - DNA, 13 bp, Unknown
  misc_feature (1)..( 13): Result.002 file - promoters60/1441044
tcaaatttttttt

SEQ ID NO: 113981 - DNA, 13 bp, Unknown
  misc_feature (1)..( 13): Result.002 file - promoters60/1441044
acaaacttttttt

SEQ ID NO: 113982 - DNA, 13 bp, Unknown
  misc_feature (1)..( 13): Result.002 file - promoters60/1441044
accaatttttagt

SEQ ID NO: 113983 - DNA, 13 bp, Unknown
  misc_feature (1)..( 13): Result.002 file - promoters60/1441044
acaaacattaaga

SEQ ID NO: 113984 - DNA, 9 bp, Unknown
  misc_feature (1)..( 9): Result.002 file - promoters60/1441044
aactaaacc

SEQ ID NO: 113985 - DNA, 9 bp, Unknown
  misc_feature (1)..( 9): Result.002 file - promoters60/1441044
aactaaacc

SEQ ID NO: 113986 - DNA, 9 bp, Unknown
  misc_feature (1)..( 9): Result.002 file - promoters60/1441044
aactaatca

SEQ ID NO: 113987 - DNA, 9 bp, Unknown
  misc_feature (1)..( 9): Result.002 file - promoters60/1441044
tactaaaga

SEQ ID NO: 113988 - DNA, 9 bp, Unknown
  misc_feature (1)..( 9): Result.002 file - promoters60/1441134
ttttccttt

SEQ ID NO: 113989 - DNA, 9 bp, Unknown
  misc_feature (1)..( 9): Result.002 file - promoters60/1441134
tttttcttt

SEQ ID NO: 113990 - DNA, 6 bp, Unknown
  misc_feature (1)..( 6): Result.002 file - promoters60/1441134
ctttca

SEQ ID NO: 113991 - DNA, 6 bp, Unknown
  misc_feature (1)..( 6): Result.002 file - promoters60/1441134
ctttca

SEQ ID NO: 113992 - DNA, 7 bp, Unknown
  misc_feature (1)..( 7): Result.002 file - promoters60/1441134
tgatctt

SEQ ID NO: 113993 - DNA, 7 bp, Unknown
  misc_feature (1)..( 7): Result.002 file - promoters60/1441134
tgaactt

SEQ ID NO: 113994 - DNA, 8 bp, Unknown
  misc_feature (1)..( 8): Result.002 file - promoters60/1441134
tatttaca

SEQ ID NO: 113995 - DNA, 8 bp, Unknown
  misc_feature (1)..( 8): Result.002 file - promoters60/1441134
tatataca

SEQ ID NO: 113996 - DNA, 6 bp, Unknown
  misc_feature (1)..( 6): Result.002 file - promoters60/1441134
atatta

SEQ ID NO: 113997 - DNA, 6 bp, Unknown
  misc_feature (1)..( 6): Result.002 file - promoters60/1441134
atatta

SEQ ID NO: 113998 - DNA, 8 bp, Unknown
  misc_feature (1)..( 8): Result.002 file - promoters60/1441134
attaacaa

SEQ ID NO: 113999 - DNA, 8 bp, Unknown
  misc_feature (1)..( 8): Result.002 file - promoters60/1441134
attaacac

SEQ ID NO: 114000 - DNA, 8 bp, Unknown
  misc_feature (1)..( 8): Result.002 file - promoters60/1441134
tttaacaa

SEQ ID NO: 114001 - DNA, 6 bp, Unknown
  misc_feature (1)..( 6): Result.002 file - promoters60/1441134
aaattt

SEQ ID NO: 114002 - DNA, 6 bp, Unknown
  misc_feature (1)..( 6): Result.002 file - promoters60/1441134
aaattt

SEQ ID NO: 114003 - DNA, 6 bp, Unknown
  misc_feature (1)..( 6): Result.002 file - promoters60/1441134
ctttca

SEQ ID NO: 114004 - DNA, 6 bp, Unknown
  misc_feature (1)..( 6): Result.002 file - promoters60/1441134
ctttca

SEQ ID NO: 114005 - DNA, 9 bp, Unknown
  misc_feature (1)..( 9): Result.002 file - promoters60/1441134
aacacaatg

SEQ ID NO: 114006 - DNA, 9 bp, Unknown
  misc_feature (1)..( 9): Result.002 file - promoters60/1441134
aactcaatg

SEQ ID NO: 114007 - DNA, 6 bp, Unknown
  misc_feature (1)..( 6): Result.002 file - promoters60/1441134
caaaaa

SEQ ID NO: 114008 - DNA, 6 bp, Unknown
  misc_feature (1)..( 6): Result.002 file - promoters60/1441134
caaaaa

SEQ ID NO: 114009 - DNA, 7 bp, Unknown
  misc_feature (1)..( 7): Result.002 file - promoters60/1441134
tcttgtg

SEQ ID NO: 114010 - DNA, 7 bp, Unknown
  misc_feature (1)..( 7): Result.002 file - promoters60/1441134
tctagtg

SEQ ID NO: 114011 - DNA, 7 bp, Unknown
  misc_feature (1)..( 7): Result.002 file - promoters60/1441134
aaaaata

SEQ ID NO: 114012 - DNA, 7 bp, Unknown
  misc_feature (1)..( 7): Result.002 file - promoters60/1441134
aaaaata

SEQ ID NO: 114013 - DNA, 6 bp, Unknown
  misc_feature (1)..( 6): Result.002 file - promoters60/1441134
aacttt

SEQ ID NO: 114014 - DNA, 6 bp, Unknown
  misc_feature (1)..( 6): Result.002 file - promoters60/1441134
aacttt

SEQ ID NO: 114015 - DNA, 7 bp, Unknown
  misc_feature (1)..( 7): Result.002 file - promoters60/1441134
ttacaat

SEQ ID NO: 114016 - DNA, 7 bp, Unknown
  misc_feature (1)..( 7): Result.002 file - promoters60/1441134
ttataat

SEQ ID NO: 114017 - DNA, 9 bp, Unknown
  misc_feature (1)..( 9): Result.002 file - promoters60/1441170
atattaaat

SEQ ID NO: 114018 - DNA, 9 bp, Unknown
  misc_feature (1)..( 9): Result.002 file - promoters60/1441170
tttttaaat

SEQ ID NO: 114019 - DNA, 9 bp, Unknown
  misc_feature (1)..( 9): Result.002 file - promoters60/1441170
tttttcaat

SEQ ID NO: 114020 - DNA, 12 bp, Unknown
  misc_feature (1)..( 12): Result.002 file - promoters60/1441170
tataagtcaatt

SEQ ID NO: 114021 - DNA, 12 bp, Unknown
  misc_feature (1)..( 12): Result.002 file - promoters60/1441170
tattagtaaata

SEQ ID NO: 114022 - DNA, 12 bp, Unknown
  misc_feature (1)..( 12): Result.002 file - promoters60/1441170
cttttttcaatt

SEQ ID NO: 114023 - DNA, 6 bp, Unknown
  misc_feature (1)..( 6): Result.002 file - promoters60/1441170
aatttg

SEQ ID NO: 114024 - DNA, 6 bp, Unknown
  misc_feature (1)..( 6): Result.002 file - promoters60/1441170
aatttg

SEQ ID NO: 114025 - DNA, 6 bp, Unknown
  misc_feature (1)..( 6): Result.002 file - promoters60/1441170
tttaaa

SEQ ID NO: 114026 - DNA, 6 bp, Unknown
  misc_feature (1)..( 6): Result.002 file - promoters60/1441170
tttaaa

SEQ ID NO: 114027 - DNA, 8 bp, Unknown
  misc_feature (1)..( 8): Result.002 file - promoters60/1441170
aaaccaaa

SEQ ID NO: 114028 - DNA, 8 bp, Unknown
  misc_feature (1)..( 8): Result.002 file - promoters60/1441170
aaatcaaa

SEQ ID NO: 114029 - DNA, 9 bp, Unknown
  misc_feature (1)..( 9): Result.002 file - promoters60/1441170
aaagtcacg

SEQ ID NO: 114030 - DNA, 7 bp, Unknown
  misc_feature (1)..( 7): Result.002 file - promoters60/1441170
gaataaa

SEQ ID NO: 114031 - DNA, 7 bp, Unknown
  misc_feature (1)..( 7): Result.002 file - promoters60/1441170
gaacaaa

SEQ ID NO: 114032 - DNA, 8 bp, Unknown
  misc_feature (1)..( 8): Result.002 file - promoters60/1441170
aaacaata

SEQ ID NO: 114033 - DNA, 8 bp, Unknown
  misc_feature (1)..( 8): Result.002 file - promoters60/1441170
aaaccata

SEQ ID NO: 114034 - DNA, 8 bp, Unknown
  misc_feature (1)..( 8): Result.002 file - promoters60/1441170
agtcttac

SEQ ID NO: 114035 - DNA, 8 bp, Unknown
  misc_feature (1)..( 8): Result.002 file - promoters60/1441170
agttttac

SEQ ID NO: 114036 - DNA, 6 bp, Unknown
  misc_feature (1)..( 6): Result.002 file - promoters60/1441170
taagag

SEQ ID NO: 114037 - DNA, 6 bp, Unknown
  misc_feature (1)..( 6): Result.002 file - promoters60/1441170
taagag

SEQ ID NO: 114038 - DNA, 6 bp, Unknown
  misc_feature (1)..( 6): Result.002 file - promoters60/1441170
taaaag

SEQ ID NO: 114039 - DNA, 6 bp, Unknown
  misc_feature (1)..( 6): Result.002 file - promoters60/1441170
taaaag

SEQ ID NO: 114040 - DNA, 7 bp, Unknown
  misc_feature (1)..( 7): Result.002 file - promoters60/1441170
tttgttt

SEQ ID NO: 114041 - DNA, 7 bp, Unknown
  misc_feature (1)..( 7): Result.002 file - promoters60/1441170
tttattt

SEQ ID NO: 114042 - DNA, 6 bp, Unknown
  misc_feature (1)..( 6): Result.002 file - promoters60/1441170
actttc

SEQ ID NO: 114043 - DNA, 6 bp, Unknown
  misc_feature (1)..( 6): Result.002 file - promoters60/1441170
actttc

SEQ ID NO: 114044 - DNA, 9 bp, Unknown
  misc_feature (1)..( 9): Result.002 file - promoters60/1441170
ggataaaca

SEQ ID NO: 114045 - DNA, 9 bp, Unknown
  misc_feature (1)..( 9): Result.002 file - promoters60/1441170
ggataaaca

SEQ ID NO: 114046 - DNA, 10 bp, Unknown
  misc_feature (1)..( 10): Result.002 file - promoters60/1441184
gattgtgagt

SEQ ID NO: 114047 - DNA, 10 bp, Unknown
  misc_feature (1)..( 10): Result.002 file - promoters60/1441184
aattgtgtct

SEQ ID NO: 114048 - DNA, 10 bp, Unknown
  misc_feature (1)..( 10): Result.002 file - promoters60/1441184
cgttgagagc

SEQ ID NO: 114049 - DNA, 10 bp, Unknown
  misc_feature (1)..( 10): Result.002 file - promoters60/1441184
tattgtgttt

SEQ ID NO: 114050 - DNA, 10 bp, Unknown
  misc_feature (1)..( 10): Result.002 file - promoters60/1441184
tattgggttt

SEQ ID NO: 114051 - DNA, 10 bp, Unknown
  misc_feature (1)..( 10): Result.002 file - promoters60/1441184
aattatgtgg

SEQ ID NO: 114052 - DNA, 11 bp, Unknown
  misc_feature (1)..( 11): Result.002 file - promoters60/1441184
aactattttga

SEQ ID NO: 114053 - DNA, 11 bp, Unknown
  misc_feature (1)..( 11): Result.002 file - promoters60/1441184
gcatattttat

SEQ ID NO: 114054 - DNA, 11 bp, Unknown
  misc_feature (1)..( 11): Result.002 file - promoters60/1441184
gttgattttga

SEQ ID NO: 114055 - DNA, 12 bp, Unknown
  misc_feature (1)..( 12): Result.002 file - promoters60/1441184
acgcatctttgt

SEQ ID NO: 114056 - DNA, 12 bp, Unknown
  misc_feature (1)..( 12): Result.002 file - promoters60/1441184
cataattttaaa

SEQ ID NO: 114057 - DNA, 12 bp, Unknown
  misc_feature (1)..( 12): Result.002 file - promoters60/1441184
tcataatattag

SEQ ID NO: 114058 - DNA, 12 bp, Unknown
  misc_feature (1)..( 12): Result.002 file - promoters60/1441184
ctagaattttct

SEQ ID NO: 114059 - DNA, 13 bp, Unknown
  misc_feature (1)..( 13): Result.002 file - promoters60/1441184
tttgcttacaatt

SEQ ID NO: 114060 - DNA, 13 bp, Unknown
  misc_feature (1)..( 13): Result.002 file - promoters60/1441184
gttgtttatataa

SEQ ID NO: 114061 - DNA, 13 bp, Unknown
  misc_feature (1)..( 13): Result.002 file - promoters60/1441184
catgtttaatctg

SEQ ID NO: 114062 - DNA, 13 bp, Unknown
  misc_feature (1)..( 13): Result.002 file - promoters60/1441184
catctttttgaac

SEQ ID NO: 114063 - DNA, 13 bp, Unknown
  misc_feature (1)..( 13): Result.002 file - promoters60/1441184
aaagttaaataaa

SEQ ID NO: 114064 - DNA, 13 bp, Unknown
  misc_feature (1)..( 13): Result.002 file - promoters60/1441184
catatttagcagc

SEQ ID NO: 114065 - DNA, 13 bp, Unknown
  misc_feature (1)..( 13): Result.002 file - promoters60/1441184
tggatttaacagc

SEQ ID NO: 114066 - DNA, 10 bp, Unknown
  misc_feature (1)..( 10): Result.002 file - promoters60/1441184
atgtataaaa

SEQ ID NO: 114067 - DNA, 10 bp, Unknown
  misc_feature (1)..( 10): Result.002 file - promoters60/1441184
gtatataaat

SEQ ID NO: 114068 - DNA, 10 bp, Unknown
  misc_feature (1)..( 10): Result.002 file - promoters60/1441184
gtatataaat

SEQ ID NO: 114069 - DNA, 10 bp, Unknown
  misc_feature (1)..( 10): Result.002 file - promoters60/1441184
ctatataaaa

SEQ ID NO: 114070 - DNA, 10 bp, Unknown
  misc_feature (1)..( 10): Result.002 file - promoters60/1441184
atgtataaaa

SEQ ID NO: 114071 - DNA, 10 bp, Unknown
  misc_feature (1)..( 10): Result.002 file - promoters60/1441184
tcttataaat

SEQ ID NO: 114072 - DNA, 7 bp, Unknown
  misc_feature (1)..( 7): Result.002 file - promoters60/1441190
catgtat

SEQ ID NO: 114073 - DNA, 7 bp, Unknown
  misc_feature (1)..( 7): Result.002 file - promoters60/1441190
catatat

SEQ ID NO: 114074 - DNA, 7 bp, Unknown
  misc_feature (1)..( 7): Result.002 file - promoters60/1441190
aatatat

SEQ ID NO: 114075 - DNA, 7 bp, Unknown
  misc_feature (1)..( 7): Result.002 file - promoters60/1441190
tatatat

SEQ ID NO: 114076 - DNA, 10 bp, Unknown
  misc_feature (1)..( 10): Result.002 file - promoters60/1441237
caaaatttgt

SEQ ID NO: 114077 - DNA, 10 bp, Unknown
  misc_feature (1)..( 10): Result.002 file - promoters60/1441237
caatatttta

SEQ ID NO: 114078 - DNA, 10 bp, Unknown
  misc_feature (1)..( 10): Result.002 file - promoters60/1441237
gaatatgttt

SEQ ID NO: 114079 - DNA, 10 bp, Unknown
  misc_feature (1)..( 10): Result.002 file - promoters60/1441237
aattatttta

SEQ ID NO: 114080 - DNA, 11 bp, Unknown
  misc_feature (1)..( 11): Result.002 file - promoters60/1441237
atttagtttga

SEQ ID NO: 114081 - DNA, 11 bp, Unknown
  misc_feature (1)..( 11): Result.002 file - promoters60/1441237
aactattttta

SEQ ID NO: 114082 - DNA, 9 bp, Unknown
  misc_feature (1)..( 9): Result.002 file - promoters60/1441237
gttattttt

SEQ ID NO: 114083 - DNA, 9 bp, Unknown
  misc_feature (1)..( 9): Result.002 file - promoters60/1441237
actattttt

SEQ ID NO: 114084 - DNA, 9 bp, Unknown
  misc_feature (1)..( 9): Result.002 file - promoters60/1441237
tttagtttg

SEQ ID NO: 114085 - DNA, 9 bp, Unknown
  misc_feature (1)..( 9): Result.002 file - promoters60/1441237
gtttttttt

SEQ ID NO: 114086 - DNA, 9 bp, Unknown
  misc_feature (1)..( 9): Result.002 file - promoters60/1441237
attatttta

SEQ ID NO: 114087 - DNA, 9 bp, Unknown
  misc_feature (1)..( 9): Result.002 file - promoters60/1441237
attattagt

SEQ ID NO: 114088 - DNA, 9 bp, Unknown
  misc_feature (1)..( 9): Result.002 file - promoters60/1441237
aatatttta

SEQ ID NO: 114089 - DNA, 10 bp, Unknown
  misc_feature (1)..( 10): Result.002 file - promoters60/1441237
ttatataaac

SEQ ID NO: 114090 - DNA, 10 bp, Unknown
  misc_feature (1)..( 10): Result.002 file - promoters60/1441237
atatatacat

SEQ ID NO: 114091 - DNA, 10 bp, Unknown
  misc_feature (1)..( 10): Result.002 file - promoters60/1441237
gtatataaac

SEQ ID NO: 114092 - DNA, 10 bp, Unknown
  misc_feature (1)..( 10): Result.002 file - promoters60/1441237
ataaatatcc

SEQ ID NO: 114093 - DNA, 10 bp, Unknown
  misc_feature (1)..( 10): Result.002 file - promoters60/1441237
ataaataaaa

SEQ ID NO: 114094 - DNA, 10 bp, Unknown
  misc_feature (1)..( 10): Result.002 file - promoters60/1441237
ctataaaatc

SEQ ID NO: 114095 - DNA, 10 bp, Unknown
  misc_feature (1)..( 10): Result.002 file - promoters60/1441237
tataaacaaa

SEQ ID NO: 114096 - DNA, 10 bp, Unknown
  misc_feature (1)..( 10): Result.002 file - promoters60/1441237
tataaataaa

SEQ ID NO: 114097 - DNA, 10 bp, Unknown
  misc_feature (1)..( 10): Result.002 file - promoters60/1441237
tataaaatca

SEQ ID NO: 114098 - DNA, 10 bp, Unknown
  misc_feature (1)..( 10): Result.002 file - promoters60/1441237
cataaaagca

SEQ ID NO: 114099 - DNA, 10 bp, Unknown
  misc_feature (1)..( 10): Result.002 file - promoters60/1441237
gataaatatc

SEQ ID NO: 114100 - DNA, 10 bp, Unknown
  misc_feature (1)..( 10): Result.002 file - promoters60/1441237
tataaactct

SEQ ID NO: 114101 - DNA, 9 bp, Unknown
  misc_feature (1)..( 9): Result.002 file - promoters60/1441249
ttatacata

SEQ ID NO: 114102 - DNA, 9 bp, Unknown
  misc_feature (1)..( 9): Result.002 file - promoters60/1441249
ttatacata

SEQ ID NO: 114103 - DNA, 6 bp, Unknown
  misc_feature (1)..( 6): Result.002 file - promoters60/1441249
tgatat

SEQ ID NO: 114104 - DNA, 6 bp, Unknown
  misc_feature (1)..( 6): Result.002 file - promoters60/1441249
tgatat

SEQ ID NO: 114105 - DNA, 6 bp, Unknown
  misc_feature (1)..( 6): Result.002 file - promoters60/1441249
aaatat

SEQ ID NO: 114106 - DNA, 6 bp, Unknown
  misc_feature (1)..( 6): Result.002 file - promoters60/1441249
aaatat

SEQ ID NO: 114107 - DNA, 7 bp, Unknown
  misc_feature (1)..( 7): Result.002 file - promoters60/1441249
ttcgtaa

SEQ ID NO: 114108 - DNA, 7 bp, Unknown
  misc_feature (1)..( 7): Result.002 file - promoters60/1441249
ttcgtaa

SEQ ID NO: 114109 - DNA, 7 bp, Unknown
  misc_feature (1)..( 7): Result.002 file - promoters60/1441249
tgaccat

SEQ ID NO: 114110 - DNA, 7 bp, Unknown
  misc_feature (1)..( 7): Result.002 file - promoters60/1441249
tgatcat

SEQ ID NO: 114111 - DNA, 10 bp, Unknown
  misc_feature (1)..( 10): Result.002 file - promoters60/1441249
ttttattttt

SEQ ID NO: 114112 - DNA, 10 bp, Unknown
  misc_feature (1)..( 10): Result.002 file - promoters60/1441249
tttttttttt

SEQ ID NO: 114113 - DNA, 7 bp, Unknown
  misc_feature (1)..( 7): Result.002 file - promoters60/1441249
tttaaga

SEQ ID NO: 114114 - DNA, 7 bp, Unknown
  misc_feature (1)..( 7): Result.002 file - promoters60/1441249
ttttaga

SEQ ID NO: 114115 - DNA, 7 bp, Unknown
  misc_feature (1)..( 7): Result.002 file - promoters60/1441249
attcaag

SEQ ID NO: 114116 - DNA, 7 bp, Unknown
  misc_feature (1)..( 7): Result.002 file - promoters60/1441249
attgaag

SEQ ID NO: 114117 - DNA, 8 bp, Unknown
  misc_feature (1)..( 8): Result.002 file - promoters60/1441249
gtgtgttt

SEQ ID NO: 114118 - DNA, 8 bp, Unknown
  misc_feature (1)..( 8): Result.002 file - promoters60/1441249
gtgtcttt

SEQ ID NO: 114119 - DNA, 6 bp, Unknown
  misc_feature (1)..( 6): Result.002 file - promoters60/1441249
cttcaa

SEQ ID NO: 114120 - DNA, 6 bp, Unknown
  misc_feature (1)..( 6): Result.002 file - promoters60/1441249
cttcaa

SEQ ID NO: 114121 - DNA, 6 bp, Unknown
  misc_feature (1)..( 6): Result.002 file - promoters60/1441249
aatata

SEQ ID NO: 114122 - DNA, 6 bp, Unknown
  misc_feature (1)..( 6): Result.002 file - promoters60/1441249
aatata

SEQ ID NO: 114123 - DNA, 7 bp, Unknown
  misc_feature (1)..( 7): Result.002 file - promoters60/1441249
aaattac

SEQ ID NO: 114124 - DNA, 7 bp, Unknown
  misc_feature (1)..( 7): Result.002 file - promoters60/1441249
aaattat

SEQ ID NO: 114125 - DNA, 7 bp, Unknown
  misc_feature (1)..( 7): Result.002 file - promoters60/1441249
aaaatat

SEQ ID NO: 114126 - DNA, 8 bp, Unknown
  misc_feature (1)..( 8): Result.002 file - promoters60/1441249
actctaaa

SEQ ID NO: 114127 - DNA, 8 bp, Unknown
  misc_feature (1)..( 8): Result.002 file - promoters60/1441249
actttaaa

SEQ ID NO: 114128 - DNA, 8 bp, Unknown
  misc_feature (1)..( 8): Result.002 file - promoters60/1441249
tttttaaa

SEQ ID NO: 114129 - DNA, 9 bp, Unknown
  misc_feature (1)..( 9): Result.002 file - promoters60/1441249
caatcatcc

SEQ ID NO: 114130 - DNA, 9 bp, Unknown
  misc_feature (1)..( 9): Result.002 file - promoters60/1441249
caataatcc

SEQ ID NO: 114131 - DNA, 7 bp, Unknown
  misc_feature (1)..( 7): Result.002 file - promoters60/1441249
aatcatg

SEQ ID NO: 114132 - DNA, 7 bp, Unknown
  misc_feature (1)..( 7): Result.002 file - promoters60/1441249
aattatg

SEQ ID NO: 114133 - DNA, 6 bp, Unknown
  misc_feature (1)..( 6): Result.002 file - promoters60/1441249
acataa

SEQ ID NO: 114134 - DNA, 6 bp, Unknown
  misc_feature (1)..( 6): Result.002 file - promoters60/1441249
acataa

SEQ ID NO: 114135 - DNA, 6 bp, Unknown
  misc_feature (1)..( 6): Result.002 file - promoters60/1441249
caaaat

SEQ ID NO: 114136 - DNA, 6 bp, Unknown
  misc_feature (1)..( 6): Result.002 file - promoters60/1441249
caaaat

SEQ ID NO: 114137 - DNA, 8 bp, Unknown
  misc_feature (1)..( 8): Result.002 file - promoters60/1441249
aaagtaaa

SEQ ID NO: 114138 - DNA, 8 bp, Unknown
  misc_feature (1)..( 8): Result.002 file - promoters60/1441249
aaagcaaa

SEQ ID NO: 114139 - DNA, 8 bp, Unknown
  misc_feature (1)..( 8): Result.002 file - promoters60/1441291
tatgatgg

SEQ ID NO: 114140 - DNA, 8 bp, Unknown
  misc_feature (1)..( 8): Result.002 file - promoters60/1441291
tatgttgg

SEQ ID NO: 114141 - DNA, 9 bp, Unknown
  misc_feature (1)..( 9): Result.002 file - promoters60/1441291
ataatctta

SEQ ID NO: 114142 - DNA, 9 bp, Unknown
  misc_feature (1)..( 9): Result.002 file - promoters60/1441291
ataacctta

SEQ ID NO: 114143 - DNA, 8 bp, Unknown
  misc_feature (1)..( 8): Result.002 file - promoters60/1441291
agaaccaa

SEQ ID NO: 114144 - DNA, 8 bp, Unknown
  misc_feature (1)..( 8): Result.002 file - promoters60/1441291
agaaccaa

SEQ ID NO: 114145 - DNA, 6 bp, Unknown
  misc_feature (1)..( 6): Result.002 file - promoters60/1441291
ggctga

SEQ ID NO: 114146 - DNA, 6 bp, Unknown
  misc_feature (1)..( 6): Result.002 file - promoters60/1441291
ggctga

SEQ ID NO: 114147 - DNA, 11 bp, Unknown
  misc_feature (1)..( 11): Result.002 file - promoters60/1441291
aggttctcaga

SEQ ID NO: 114148 - DNA, 11 bp, Unknown
  misc_feature (1)..( 11): Result.002 file - promoters60/1441291
agggtctgaga

SEQ ID NO: 114149 - DNA, 6 bp, Unknown
  misc_feature (1)..( 6): Result.002 file - promoters60/1441291
agattt

SEQ ID NO: 114150 - DNA, 6 bp, Unknown
  misc_feature (1)..( 6): Result.002 file - promoters60/1441291
agattt

SEQ ID NO: 114151 - DNA, 8 bp, Unknown
  misc_feature (1)..( 8): Result.002 file - promoters60/1441395
atgataat

SEQ ID NO: 114152 - DNA, 8 bp, Unknown
  misc_feature (1)..( 8): Result.002 file - promoters60/1441395
atgttaaa

SEQ ID NO: 114153 - DNA, 9 bp, Unknown
  misc_feature (1)..( 9): Result.002 file - promoters60/1441395
ttgttcaaa

SEQ ID NO: 114154 - DNA, 11 bp, Unknown
  misc_feature (1)..( 11): Result.002 file - promoters60/1441395
acagaataaaa

SEQ ID NO: 114155 - DNA, 11 bp, Unknown
  misc_feature (1)..( 11): Result.002 file - promoters60/1441395
aaagaatcaaa

SEQ ID NO: 114156 - DNA, 11 bp, Unknown
  misc_feature (1)..( 11): Result.002 file - promoters60/1441395
aaaaaatcaaa

SEQ ID NO: 114157 - DNA, 11 bp, Unknown
  misc_feature (1)..( 11): Result.002 file - promoters60/1441395
ataaaaccaag

SEQ ID NO: 114158 - DNA, 8 bp, Unknown
  misc_feature (1)..( 8): Result.002 file - promoters60/1441395
tatttaaa

SEQ ID NO: 114159 - DNA, 8 bp, Unknown
  misc_feature (1)..( 8): Result.002 file - promoters60/1441395
aattaaaa

SEQ ID NO: 114160 - DNA, 8 bp, Unknown
  misc_feature (1)..( 8): Result.002 file - promoters60/1441395
tatataag

SEQ ID NO: 114161 - DNA, 8 bp, Unknown
  misc_feature (1)..( 8): Result.002 file - promoters60/1441395
tctataag

SEQ ID NO: 114162 - DNA, 7 bp, Unknown
  misc_feature (1)..( 7): Result.002 file - promoters60/1441395
aaatcaa

SEQ ID NO: 114163 - DNA, 7 bp, Unknown
  misc_feature (1)..( 7): Result.002 file - promoters60/1441395
aaaccaa

SEQ ID NO: 114164 - DNA, 7 bp, Unknown
  misc_feature (1)..( 7): Result.002 file - promoters60/1441395
aaatcaa

SEQ ID NO: 114165 - DNA, 6 bp, Unknown
  misc_feature (1)..( 6): Result.002 file - promoters60/1441460
agccag

SEQ ID NO: 114166 - DNA, 6 bp, Unknown
  misc_feature (1)..( 6): Result.002 file - promoters60/1441460
agccag

SEQ ID NO: 114167 - DNA, 7 bp, Unknown
  misc_feature (1)..( 7): Result.002 file - promoters60/1441460
gaagcca

SEQ ID NO: 114168 - DNA, 7 bp, Unknown
  misc_feature (1)..( 7): Result.002 file - promoters60/1441460
gaaacca

SEQ ID NO: 114169 - DNA, 7 bp, Unknown
  misc_feature (1)..( 7): Result.002 file - promoters60/1441460
ttaggat

SEQ ID NO: 114170 - DNA, 7 bp, Unknown
  misc_feature (1)..( 7): Result.002 file - promoters60/1441460
ttatgat

SEQ ID NO: 114171 - DNA, 12 bp, Unknown
  misc_feature (1)..( 12): Result.002 file - promoters60/1441460
atattcatgatc

SEQ ID NO: 114172 - DNA, 12 bp, Unknown
  misc_feature (1)..( 12): Result.002 file - promoters60/1441460
cctttcttgaaa

SEQ ID NO: 114173 - DNA, 12 bp, Unknown
  misc_feature (1)..( 12): Result.002 file - promoters60/1441460
atattaatgatc

SEQ ID NO: 114174 - DNA, 10 bp, Unknown
  misc_feature (1)..( 10): Result.002 file - promoters60/1441460
gaagaaatga

SEQ ID NO: 114175 - DNA, 10 bp, Unknown
  misc_feature (1)..( 10): Result.002 file - promoters60/1441460
gaaaaaatga

SEQ ID NO: 114176 - DNA, 6 bp, Unknown
  misc_feature (1)..( 6): Result.002 file - promoters60/1441460
aaacga

SEQ ID NO: 114177 - DNA, 6 bp, Unknown
  misc_feature (1)..( 6): Result.002 file - promoters60/1441460
aaacga

SEQ ID NO: 114178 - DNA, 9 bp, Unknown
  misc_feature (1)..( 9): Result.002 file - promoters60/1441460
tatgatttc

SEQ ID NO: 114179 - DNA, 9 bp, Unknown
  misc_feature (1)..( 9): Result.002 file - promoters60/1441460
aatgttttg

SEQ ID NO: 114180 - DNA, 9 bp, Unknown
  misc_feature (1)..( 9): Result.002 file - promoters60/1441460
aattttttg

SEQ ID NO: 114181 - DNA, 8 bp, Unknown
  misc_feature (1)..( 8): Result.002 file - promoters60/1441460
ctttggtt

SEQ ID NO: 114182 - DNA, 8 bp, Unknown
  misc_feature (1)..( 8): Result.002 file - promoters60/1441460
gttttgtt

SEQ ID NO: 114183 - DNA, 8 bp, Unknown
  misc_feature (1)..( 8): Result.002 file - promoters60/1441460
gttatgtt

SEQ ID NO: 114184 - DNA, 8 bp, Unknown
  misc_feature (1)..( 8): Result.002 file - promoters60/1441460
atatgaga

SEQ ID NO: 114185 - DNA, 8 bp, Unknown
  misc_feature (1)..( 8): Result.002 file - promoters60/1441460
atatcaga

SEQ ID NO: 114186 - DNA, 9 bp, Unknown
  misc_feature (1)..( 9): Result.002 file - promoters60/1441460
tttgtttta

SEQ ID NO: 114187 - DNA, 9 bp, Unknown
  misc_feature (1)..( 9): Result.002 file - promoters60/1441460
tttatttta

SEQ ID NO: 114188 - DNA, 8 bp, Unknown
  misc_feature (1)..( 8): Result.002 file - promoters60/1441460
accacatt

SEQ ID NO: 114189 - DNA, 8 bp, Unknown
  misc_feature (1)..( 8): Result.002 file - promoters60/1441460
accaaatt

SEQ ID NO: 114190 - DNA, 6 bp, Unknown
  misc_feature (1)..( 6): Result.002 file - promoters60/1441460
agagaa

SEQ ID NO: 114191 - DNA, 6 bp, Unknown
  misc_feature (1)..( 6): Result.002 file - promoters60/1441460
agagaa

SEQ ID NO: 114192 - DNA, 7 bp, Unknown
  misc_feature (1)..( 7): Result.002 file - promoters60/1441460
tttaagt

SEQ ID NO: 114193 - DNA, 7 bp, Unknown
  misc_feature (1)..( 7): Result.002 file - promoters60/1441460
tttgagt

SEQ ID NO: 114194 - DNA, 8 bp, Unknown
  misc_feature (1)..( 8): Result.002 file - promoters60/1441460
ttttttgt

SEQ ID NO: 114195 - DNA, 8 bp, Unknown
  misc_feature (1)..( 8): Result.002 file - promoters60/1441460
tttcttgt

SEQ ID NO: 114196 - DNA, 7 bp, Unknown
  misc_feature (1)..( 7): Result.002 file - promoters60/1441460
gagaatt

SEQ ID NO: 114197 - DNA, 7 bp, Unknown
  misc_feature (1)..( 7): Result.002 file - promoters60/1441460
gaggatt

SEQ ID NO: 114198 - DNA, 6 bp, Unknown
  misc_feature (1)..( 6): Result.002 file - promoters60/1441460
aagcaa

SEQ ID NO: 114199 - DNA, 6 bp, Unknown
  misc_feature (1)..( 6): Result.002 file - promoters60/1441460
aagcaa

SEQ ID NO: 114200 - DNA, 6 bp, Unknown
  misc_feature (1)..( 6): Result.002 file - promoters60/1441460
aagggt

SEQ ID NO: 114201 - DNA, 6 bp, Unknown
  misc_feature (1)..( 6): Result.002 file - promoters60/1441460
aagggt

SEQ ID NO: 114202 - DNA, 7 bp, Unknown
  misc_feature (1)..( 7): Result.002 file - promoters60/1441465
agaaaaa

SEQ ID NO: 114203 - DNA, 7 bp, Unknown
  misc_feature (1)..( 7): Result.002 file - promoters60/1441465
agacaaa

SEQ ID NO: 114204 - DNA, 6 bp, Unknown
  misc_feature (1)..( 6): Result.002 file - promoters60/1441465
tgcaaa

SEQ ID NO: 114205 - DNA, 6 bp, Unknown
  misc_feature (1)..( 6): Result.002 file - promoters60/1441465
tgcaaa

SEQ ID NO: 114206 - DNA, 6 bp, Unknown
  misc_feature (1)..( 6): Result.002 file - promoters60/1441465
ttatcg

SEQ ID NO: 114207 - DNA, 6 bp, Unknown
  misc_feature (1)..( 6): Result.002 file - promoters60/1441465
ttatcg

SEQ ID NO: 114208 - DNA, 7 bp, Unknown
  misc_feature (1)..( 7): Result.002 file - promoters60/1441465
tataaaa

SEQ ID NO: 114209 - DNA, 7 bp, Unknown
  misc_feature (1)..( 7): Result.002 file - promoters60/1441465
tataaaa

SEQ ID NO: 114210 - DNA, 12 bp, Unknown
  misc_feature (1)..( 12): Result.002 file - promoters60/1441465
aaacaattcgtc

SEQ ID NO: 114211 - DNA, 12 bp, Unknown
  misc_feature (1)..( 12): Result.002 file - promoters60/1441465
aaaaaattggtc

SEQ ID NO: 114212 - DNA, 6 bp, Unknown
  misc_feature (1)..( 6): Result.002 file - promoters60/1441465
agattt

SEQ ID NO: 114213 - DNA, 6 bp, Unknown
  misc_feature (1)..( 6): Result.002 file - promoters60/1441465
agattt

SEQ ID NO: 114214 - DNA, 7 bp, Unknown
  misc_feature (1)..( 7): Result.002 file - promoters60/1441465
taaccga

SEQ ID NO: 114215 - DNA, 7 bp, Unknown
  misc_feature (1)..( 7): Result.002 file - promoters60/1441465
taagcga

SEQ ID NO: 114216 - DNA, 6 bp, Unknown
  misc_feature (1)..( 6): Result.002 file - promoters60/1441465
aaattt

SEQ ID NO: 114217 - DNA, 6 bp, Unknown
  misc_feature (1)..( 6): Result.002 file - promoters60/1441465
aaattt

SEQ ID NO: 114218 - DNA, 7 bp, Unknown
  misc_feature (1)..( 7): Result.002 file - promoters60/1441465
attttct

SEQ ID NO: 114219 - DNA, 7 bp, Unknown
  misc_feature (1)..( 7): Result.002 file - promoters60/1441465
attttct

SEQ ID NO: 114220 - DNA, 8 bp, Unknown
  misc_feature (1)..( 8): Result.002 file - promoters60/1441465
aacacaaa

SEQ ID NO: 114221 - DNA, 8 bp, Unknown
  misc_feature (1)..( 8): Result.002 file - promoters60/1441465
aacagaaa

SEQ ID NO: 114222 - DNA, 7 bp, Unknown
  misc_feature (1)..( 7): Result.002 file - promoters60/1441465
caaacca

SEQ ID NO: 114223 - DNA, 7 bp, Unknown
  misc_feature (1)..( 7): Result.002 file - promoters60/1441465
caatcca

SEQ ID NO: 114224 - DNA, 6 bp, Unknown
  misc_feature (1)..( 6): Result.002 file - promoters60/1441465
catttt

SEQ ID NO: 114225 - DNA, 6 bp, Unknown
  misc_feature (1)..( 6): Result.002 file - promoters60/1441465
catttt

SEQ ID NO: 114226 - DNA, 7 bp, Unknown
  misc_feature (1)..( 7): Result.002 file - promoters60/1441465
ttttcat

SEQ ID NO: 114227 - DNA, 7 bp, Unknown
  misc_feature (1)..( 7): Result.002 file - promoters60/1441465
ttttcat

SEQ ID NO: 114228 - DNA, 8 bp, Unknown
  misc_feature (1)..( 8): Result.002 file - promoters60/1441465
tttcttta

SEQ ID NO: 114229 - DNA, 8 bp, Unknown
  misc_feature (1)..( 8): Result.002 file - promoters60/1441465
tttcttta

SEQ ID NO: 114230 - DNA, 6 bp, Unknown
  misc_feature (1)..( 6): Result.002 file - promoters60/1441465
ttatac

SEQ ID NO: 114231 - DNA, 6 bp, Unknown
  misc_feature (1)..( 6): Result.002 file - promoters60/1441465
ttatac

SEQ ID NO: 114232 - DNA, 6 bp, Unknown
  misc_feature (1)..( 6): Result.002 file - promoters60/1441465
gtgata

SEQ ID NO: 114233 - DNA, 6 bp, Unknown
  misc_feature (1)..( 6): Result.002 file - promoters60/1441465
gtgata

SEQ ID NO: 114234 - DNA, 8 bp, Unknown
  misc_feature (1)..( 8): Result.002 file - promoters60/1441533
ttacgtat

SEQ ID NO: 114235 - DNA, 8 bp, Unknown
  misc_feature (1)..( 8): Result.002 file - promoters60/1441533
ttacatat

SEQ ID NO: 114236 - DNA, 7 bp, Unknown
  misc_feature (1)..( 7): Result.002 file - promoters60/1441533
acaattt

SEQ ID NO: 114237 - DNA, 7 bp, Unknown
  misc_feature (1)..( 7): Result.002 file - promoters60/1441533
acatttt

SEQ ID NO: 114238 - DNA, 7 bp, Unknown
  misc_feature (1)..( 7): Result.002 file - promoters60/1441533
ccacaat

SEQ ID NO: 114239 - DNA, 7 bp, Unknown
  misc_feature (1)..( 7): Result.002 file - promoters60/1441533
ccaaaat

SEQ ID NO: 114240 - DNA, 6 bp, Unknown
  misc_feature (1)..( 6): Result.002 file - promoters60/1441533
ggtttt

SEQ ID NO: 114241 - DNA, 6 bp, Unknown
  misc_feature (1)..( 6): Result.002 file - promoters60/1441533
ggtttt

SEQ ID NO: 114242 - DNA, 6 bp, Unknown
  misc_feature (1)..( 6): Result.002 file - promoters60/1441533
ttttga

SEQ ID NO: 114243 - DNA, 6 bp, Unknown
  misc_feature (1)..( 6): Result.002 file - promoters60/1441533
ttttga

SEQ ID NO: 114244 - DNA, 9 bp, Unknown
  misc_feature (1)..( 9): Result.002 file - promoters60/1441533
atttttttt

SEQ ID NO: 114245 - DNA, 9 bp, Unknown
  misc_feature (1)..( 9): Result.002 file - promoters60/1441533
attattttt

SEQ ID NO: 114246 - DNA, 6 bp, Unknown
  misc_feature (1)..( 6): Result.002 file - promoters60/1441533
aaatga

SEQ ID NO: 114247 - DNA, 6 bp, Unknown
  misc_feature (1)..( 6): Result.002 file - promoters60/1441533
aaatga

SEQ ID NO: 114248 - DNA, 7 bp, Unknown
  misc_feature (1)..( 7): Result.002 file - promoters60/1441533
aagctgt

SEQ ID NO: 114249 - DNA, 7 bp, Unknown
  misc_feature (1)..( 7): Result.002 file - promoters60/1441533
aagatgt

SEQ ID NO: 114250 - DNA, 7 bp, Unknown
  misc_feature (1)..( 7): Result.002 file - promoters60/1441533
acgtgga

SEQ ID NO: 114251 - DNA, 7 bp, Unknown
  misc_feature (1)..( 7): Result.002 file - promoters60/1441533
acgagga

SEQ ID NO: 114252 - DNA, 9 bp, Unknown
  misc_feature (1)..( 9): Result.002 file - promoters60/1441533
atataaata

SEQ ID NO: 114253 - DNA, 9 bp, Unknown
  misc_feature (1)..( 9): Result.002 file - promoters60/1441533
atataaata

SEQ ID NO: 114254 - DNA, 8 bp, Unknown
  misc_feature (1)..( 8): Result.002 file - promoters60/1441533
ttttcctt

SEQ ID NO: 114255 - DNA, 8 bp, Unknown
  misc_feature (1)..( 8): Result.002 file - promoters60/1441533
ttttactt

SEQ ID NO: 114256 - DNA, 7 bp, Unknown
  misc_feature (1)..( 7): Result.002 file - promoters60/1441533
acgcact

SEQ ID NO: 114257 - DNA, 7 bp, Unknown
  misc_feature (1)..( 7): Result.002 file - promoters60/1441533
acgaact

SEQ ID NO: 114258 - DNA, 7 bp, Unknown
  misc_feature (1)..( 7): Result.002 file - promoters60/1441533
tatctcg

SEQ ID NO: 114259 - DNA, 7 bp, Unknown
  misc_feature (1)..( 7): Result.002 file - promoters60/1441533
tatgtcg

SEQ ID NO: 114260 - DNA, 8 bp, Unknown
  misc_feature (1)..( 8): Result.002 file - promoters60/1441533
attttcac

SEQ ID NO: 114261 - DNA, 8 bp, Unknown
  misc_feature (1)..( 8): Result.002 file - promoters60/1441533
atttgcac

SEQ ID NO: 114262 - DNA, 7 bp, Unknown
  misc_feature (1)..( 7): Result.002 file - promoters60/1441533
ttaatat

SEQ ID NO: 114263 - DNA, 7 bp, Unknown
  misc_feature (1)..( 7): Result.002 file - promoters60/1441533
ttaatat

SEQ ID NO: 114264 - DNA, 6 bp, Unknown
  misc_feature (1)..( 6): Result.002 file - promoters60/1441533
aatata

SEQ ID NO: 114265 - DNA, 6 bp, Unknown
  misc_feature (1)..( 6): Result.002 file - promoters60/1441533
aatata

SEQ ID NO: 114266 - DNA, 7 bp, Unknown
  misc_feature (1)..( 7): Result.002 file - promoters60/1441533
tgactaa

SEQ ID NO: 114267 - DNA, 7 bp, Unknown
  misc_feature (1)..( 7): Result.002 file - promoters60/1441533
tgattaa

SEQ ID NO: 114268 - DNA, 6 bp, Unknown
  misc_feature (1)..( 6): Result.002 file - promoters60/1441533
tactcg

SEQ ID NO: 114269 - DNA, 6 bp, Unknown
  misc_feature (1)..( 6): Result.002 file - promoters60/1441533
tactcg

SEQ ID NO: 114270 - DNA, 6 bp, Unknown
  misc_feature (1)..( 6): Result.002 file - promoters60/1441533
tatact

SEQ ID NO: 114271 - DNA, 6 bp, Unknown
  misc_feature (1)..( 6): Result.002 file - promoters60/1441533
tatact

SEQ ID NO: 114272 - DNA, 6 bp, Unknown
  misc_feature (1)..( 6): Result.002 file - promoters60/1441533
tttgtt

SEQ ID NO: 114273 - DNA, 6 bp, Unknown
  misc_feature (1)..( 6): Result.002 file - promoters60/1441533
tttgtt

SEQ ID NO: 114274 - DNA, 7 bp, Unknown
  misc_feature (1)..( 7): Result.002 file - promoters60/1441533
aaaaaaa

SEQ ID NO: 114275 - DNA, 7 bp, Unknown
  misc_feature (1)..( 7): Result.002 file - promoters60/1441533
aaaaaaa

SEQ ID NO: 114276 - DNA, 7 bp, Unknown
  misc_feature (1)..( 7): Result.002 file - promoters60/1441533
aacattt

SEQ ID NO: 114277 - DNA, 7 bp, Unknown
  misc_feature (1)..( 7): Result.002 file - promoters60/1441533
aacattt

SEQ ID NO: 114278 - DNA, 10 bp, Unknown
  misc_feature (1)..( 10): Result.002 file - promoters60/1441533
aaactagaaa

SEQ ID NO: 114279 - DNA, 10 bp, Unknown
  misc_feature (1)..( 10): Result.002 file - promoters60/1441533
aaactaaaaa

SEQ ID NO: 114280 - DNA, 9 bp, Unknown
  misc_feature (1)..( 9): Result.002 file - promoters60/1441533
agaaaaaaa

SEQ ID NO: 114281 - DNA, 9 bp, Unknown
  misc_feature (1)..( 9): Result.002 file - promoters60/1441533
agaataaaa

SEQ ID NO: 114282 - DNA, 7 bp, Unknown
  misc_feature (1)..( 7): Result.002 file - promoters60/1441533
tagtaaa

SEQ ID NO: 114283 - DNA, 7 bp, Unknown
  misc_feature (1)..( 7): Result.002 file - promoters60/1441533
taggaaa

SEQ ID NO: 114284 - DNA, 6 bp, Unknown
  misc_feature (1)..( 6): Result.002 file - promoters60/1441539
tatata

SEQ ID NO: 114285 - DNA, 6 bp, Unknown
  misc_feature (1)..( 6): Result.002 file - promoters60/1441539
tatata

SEQ ID NO: 114286 - DNA, 6 bp, Unknown
  misc_feature (1)..( 6): Result.002 file - promoters60/1441539
tttgac

SEQ ID NO: 114287 - DNA, 6 bp, Unknown
  misc_feature (1)..( 6): Result.002 file - promoters60/1441539
tttgac

SEQ ID NO: 114288 - DNA, 8 bp, Unknown
  misc_feature (1)..( 8): Result.002 file - promoters60/1441539
ttgggaaa

SEQ ID NO: 114289 - DNA, 8 bp, Unknown
  misc_feature (1)..( 8): Result.002 file - promoters60/1441539
ttgtgaaa

SEQ ID NO: 114290 - DNA, 7 bp, Unknown
  misc_feature (1)..( 7): Result.002 file - promoters60/1441539
tgatttg

SEQ ID NO: 114291 - DNA, 7 bp, Unknown
  misc_feature (1)..( 7): Result.002 file - promoters60/1441539
tgaattg

SEQ ID NO: 114292 - DNA, 8 bp, Unknown
  misc_feature (1)..( 8): Result.002 file - promoters60/1441539
ttttcttt

SEQ ID NO: 114293 - DNA, 8 bp, Unknown
  misc_feature (1)..( 8): Result.002 file - promoters60/1441539
ttttgttt

SEQ ID NO: 114294 - DNA, 6 bp, Unknown
  misc_feature (1)..( 6): Result.002 file - promoters60/1441539
aacaaa

SEQ ID NO: 114295 - DNA, 6 bp, Unknown
  misc_feature (1)..( 6): Result.002 file - promoters60/1441539
aacaaa

SEQ ID NO: 114296 - DNA, 7 bp, Unknown
  misc_feature (1)..( 7): Result.002 file - promoters60/1441539
aaacatt

SEQ ID NO: 114297 - DNA, 7 bp, Unknown
  misc_feature (1)..( 7): Result.002 file - promoters60/1441539
aaacatt

SEQ ID NO: 114298 - DNA, 6 bp, Unknown
  misc_feature (1)..( 6): Result.002 file - promoters60/1441539
aaaaag

SEQ ID NO: 114299 - DNA, 6 bp, Unknown
  misc_feature (1)..( 6): Result.002 file - promoters60/1441539
aaaaag

SEQ ID NO: 114300 - DNA, 7 bp, Unknown
  misc_feature (1)..( 7): Result.002 file - promoters60/1441539
aaagctt

SEQ ID NO: 114301 - DNA, 7 bp, Unknown
  misc_feature (1)..( 7): Result.002 file - promoters60/1441539
aaaactt

SEQ ID NO: 114302 - DNA, 6 bp, Unknown
  misc_feature (1)..( 6): Result.002 file - promoters60/1441539
aaccct

SEQ ID NO: 114303 - DNA, 6 bp, Unknown
  misc_feature (1)..( 6): Result.002 file - promoters60/1441539
aaccct

SEQ ID NO: 114304 - DNA, 9 bp, Unknown
  misc_feature (1)..( 9): Result.002 file - promoters60/1441539
atggctgaa

SEQ ID NO: 114305 - DNA, 9 bp, Unknown
  misc_feature (1)..( 9): Result.002 file - promoters60/1441539
atggttgaa

SEQ ID NO: 114306 - DNA, 7 bp, Unknown
  misc_feature (1)..( 7): Result.002 file - promoters60/1441539
aagtaaa

SEQ ID NO: 114307 - DNA, 7 bp, Unknown
  misc_feature (1)..( 7): Result.002 file - promoters60/1441539
aagaaaa

SEQ ID NO: 114308 - DNA, 8 bp, Unknown
  misc_feature (1)..( 8): Result.002 file - promoters60/1441569
ttacgtat

SEQ ID NO: 114309 - DNA, 8 bp, Unknown
  misc_feature (1)..( 8): Result.002 file - promoters60/1441569
ttacatat

SEQ ID NO: 114310 - DNA, 7 bp, Unknown
  misc_feature (1)..( 7): Result.002 file - promoters60/1441569
acaattt

SEQ ID NO: 114311 - DNA, 7 bp, Unknown
  misc_feature (1)..( 7): Result.002 file - promoters60/1441569
acatttt

SEQ ID NO: 114312 - DNA, 7 bp, Unknown
  misc_feature (1)..( 7): Result.002 file - promoters60/1441569
ccacaat

SEQ ID NO: 114313 - DNA, 7 bp, Unknown
  misc_feature (1)..( 7): Result.002 file - promoters60/1441569
ccaaaat

SEQ ID NO: 114314 - DNA, 6 bp, Unknown
  misc_feature (1)..( 6): Result.002 file - promoters60/1441569
ggtttt

SEQ ID NO: 114315 - DNA, 6 bp, Unknown
  misc_feature (1)..( 6): Result.002 file - promoters60/1441569
ggtttt

SEQ ID NO: 114316 - DNA, 6 bp, Unknown
  misc_feature (1)..( 6): Result.002 file - promoters60/1441569
ttttga

SEQ ID NO: 114317 - DNA, 6 bp, Unknown
  misc_feature (1)..( 6): Result.002 file - promoters60/1441569
ttttga

SEQ ID NO: 114318 - DNA, 9 bp, Unknown
  misc_feature (1)..( 9): Result.002 file - promoters60/1441569
atttttttt

SEQ ID NO: 114319 - DNA, 9 bp, Unknown
  misc_feature (1)..( 9): Result.002 file - promoters60/1441569
attattttt

SEQ ID NO: 114320 - DNA, 9 bp, Unknown
  misc_feature (1)..( 9): Result.002 file - promoters60/1441569
gtttttttt

SEQ ID NO: 114321 - DNA, 6 bp, Unknown
  misc_feature (1)..( 6): Result.002 file - promoters60/1441569
aaatga

SEQ ID NO: 114322 - DNA, 6 bp, Unknown
  misc_feature (1)..( 6): Result.002 file - promoters60/1441569
aaatga

SEQ ID NO: 114323 - DNA, 7 bp, Unknown
  misc_feature (1)..( 7): Result.002 file - promoters60/1441569
aagctgt

SEQ ID NO: 114324 - DNA, 7 bp, Unknown
  misc_feature (1)..( 7): Result.002 file - promoters60/1441569
aagatgt

SEQ ID NO: 114325 - DNA, 7 bp, Unknown
  misc_feature (1)..( 7): Result.002 file - promoters60/1441569
acgtgga

SEQ ID NO: 114326 - DNA, 7 bp, Unknown
  misc_feature (1)..( 7): Result.002 file - promoters60/1441569
acgagga

SEQ ID NO: 114327 - DNA, 9 bp, Unknown
  misc_feature (1)..( 9): Result.002 file - promoters60/1441569
atataaata

SEQ ID NO: 114328 - DNA, 9 bp, Unknown
  misc_feature (1)..( 9): Result.002 file - promoters60/1441569
atataaata

SEQ ID NO: 114329 - DNA, 8 bp, Unknown
  misc_feature (1)..( 8): Result.002 file - promoters60/1441569
gaaactac

SEQ ID NO: 114330 - DNA, 8 bp, Unknown
  misc_feature (1)..( 8): Result.002 file - promoters60/1441569
gaaattac

SEQ ID NO: 114331 - DNA, 8 bp, Unknown
  misc_feature (1)..( 8): Result.002 file - promoters60/1441569
aattttgt

SEQ ID NO: 114332 - DNA, 8 bp, Unknown
  misc_feature (1)..( 8): Result.002 file - promoters60/1441569
aattttgt

SEQ ID NO: 114333 - DNA, 6 bp, Unknown
  misc_feature (1)..( 6): Result.002 file - promoters60/1441569
gttatt

SEQ ID NO: 114334 - DNA, 6 bp, Unknown
  misc_feature (1)..( 6): Result.002 file - promoters60/1441569
gttatt

SEQ ID NO: 114335 - DNA, 7 bp, Unknown
  misc_feature (1)..( 7): Result.002 file - promoters60/1441569
gaatatt

SEQ ID NO: 114336 - DNA, 7 bp, Unknown
  misc_feature (1)..( 7): Result.002 file - promoters60/1441569
gaaaatt

SEQ ID NO: 114337 - DNA, 7 bp, Unknown
  misc_feature (1)..( 7): Result.002 file - promoters60/1441569
acgcata

SEQ ID NO: 114338 - DNA, 7 bp, Unknown
  misc_feature (1)..( 7): Result.002 file - promoters60/1441569
acgaata

SEQ ID NO: 114339 - DNA, 6 bp, Unknown
  misc_feature (1)..( 6): Result.002 file - promoters60/1441569
aaaaca

SEQ ID NO: 114340 - DNA, 6 bp, Unknown
  misc_feature (1)..( 6): Result.002 file - promoters60/1441569
aaaaca

SEQ ID NO: 114341 - DNA, 6 bp, Unknown
  misc_feature (1)..( 6): Result.002 file - promoters60/1441569
gtaacc

SEQ ID NO: 114342 - DNA, 6 bp, Unknown
  misc_feature (1)..( 6): Result.002 file - promoters60/1441569
gtaacc

SEQ ID NO: 114343 - DNA, 8 bp, Unknown
  misc_feature (1)..( 8): Result.002 file - promoters60/1441569
atagaaat

SEQ ID NO: 114344 - DNA, 8 bp, Unknown
  misc_feature (1)..( 8): Result.002 file - promoters60/1441569
atagaaat

SEQ ID NO: 114345 - DNA, 11 bp, Unknown
  misc_feature (1)..( 11): Result.002 file - promoters60/1441569
aattacaaaaa

SEQ ID NO: 114346 - DNA, 11 bp, Unknown
  misc_feature (1)..( 11): Result.002 file - promoters60/1441569
aatcacaaaaa

SEQ ID NO: 114347 - DNA, 6 bp, Unknown
  misc_feature (1)..( 6): Result.002 file - promoters60/1441569
ctcagt

SEQ ID NO: 114348 - DNA, 6 bp, Unknown
  misc_feature (1)..( 6): Result.002 file - promoters60/1441569
ctcagt

SEQ ID NO: 114349 - DNA, 7 bp, Unknown
  misc_feature (1)..( 7): Result.002 file - promoters60/1441569
tttctta

SEQ ID NO: 114350 - DNA, 7 bp, Unknown
  misc_feature (1)..( 7): Result.002 file - promoters60/1441569
tttctta

SEQ ID NO: 114351 - DNA, 6 bp, Unknown
  misc_feature (1)..( 6): Result.002 file - promoters60/1441569
tttcta

SEQ ID NO: 114352 - DNA, 6 bp, Unknown
  misc_feature (1)..( 6): Result.002 file - promoters60/1441569
tttcta

SEQ ID NO: 114353 - DNA, 7 bp, Unknown
  misc_feature (1)..( 7): Result.002 file - promoters60/1441569
caaataa

SEQ ID NO: 114354 - DNA, 7 bp, Unknown
  misc_feature (1)..( 7): Result.002 file - promoters60/1441569
caactaa

SEQ ID NO: 114355 - DNA, 9 bp, Unknown
  misc_feature (1)..( 9): Result.002 file - promoters60/1441569
cttgttcaa

SEQ ID NO: 114356 - DNA, 9 bp, Unknown
  misc_feature (1)..( 9): Result.002 file - promoters60/1441569
cttgtacaa

SEQ ID NO: 114357 - DNA, 6 bp, Unknown
  misc_feature (1)..( 6): Result.002 file - promoters60/1441569
ttggtt

SEQ ID NO: 114358 - DNA, 6 bp, Unknown
  misc_feature (1)..( 6): Result.002 file - promoters60/1441569
ttggtt

SEQ ID NO: 114359 - DNA, 6 bp, Unknown
  misc_feature (1)..( 6): Result.002 file - promoters60/1441569
cataaa

SEQ ID NO: 114360 - DNA, 6 bp, Unknown
  misc_feature (1)..( 6): Result.002 file - promoters60/1441569
cataaa

SEQ ID NO: 114361 - DNA, 6 bp, Unknown
  misc_feature (1)..( 6): Result.002 file - promoters60/1441569
ttttaa

SEQ ID NO: 114362 - DNA, 6 bp, Unknown
  misc_feature (1)..( 6): Result.002 file - promoters60/1441569
ttttaa

SEQ ID NO: 114363 - DNA, 11 bp, Unknown
  misc_feature (1)..( 11): Result.002 file - promoters60/1441657
atcttctgtct

SEQ ID NO: 114364 - DNA, 11 bp, Unknown
  misc_feature (1)..( 11): Result.002 file - promoters60/1441657
cacttgtgttt

SEQ ID NO: 114365 - DNA, 11 bp, Unknown
  misc_feature (1)..( 11): Result.002 file - promoters60/1441657
atcttctaaaa

SEQ ID NO: 114366 - DNA, 11 bp, Unknown
  misc_feature (1)..( 11): Result.002 file - promoters60/1441657
taattgtattt

SEQ ID NO: 114367 - DNA, 9 bp, Unknown
  misc_feature (1)..( 9): Result.002 file - promoters60/1441657
ccaaacaaa

SEQ ID NO: 114368 - DNA, 9 bp, Unknown
  misc_feature (1)..( 9): Result.002 file - promoters60/1441657
ccaaaccca

SEQ ID NO: 114369 - DNA, 9 bp, Unknown
  misc_feature (1)..( 9): Result.002 file - promoters60/1441657
tcaaacctg

SEQ ID NO: 114370 - DNA, 9 bp, Unknown
  misc_feature (1)..( 9): Result.002 file - promoters60/1441657
agaaagctg

SEQ ID NO: 114371 - DNA, 12 bp, Unknown
  misc_feature (1)..( 12): Result.002 file - promoters60/1441657
ataatttgcaag

SEQ ID NO: 114372 - DNA, 12 bp, Unknown
  misc_feature (1)..( 12): Result.002 file - promoters60/1441657
ataatttcgagg

SEQ ID NO: 114373 - DNA, 12 bp, Unknown
  misc_feature (1)..( 12): Result.002 file - promoters60/1441657
ttaatttgatag

SEQ ID NO: 114374 - DNA, 12 bp, Unknown
  misc_feature (1)..( 12): Result.002 file - promoters60/1441657
cccatttgattt

SEQ ID NO: 114375 - DNA, 8 bp, Unknown
  misc_feature (1)..( 8): Result.002 file - promoters60/1441665
gaaaaaaa

SEQ ID NO: 114376 - DNA, 8 bp, Unknown
  misc_feature (1)..( 8): Result.002 file - promoters60/1441665
gaaaaaag

SEQ ID NO: 114377 - DNA, 9 bp, Unknown
  misc_feature (1)..( 9): Result.002 file - promoters60/1441665
caaacaaat

SEQ ID NO: 114378 - DNA, 9 bp, Unknown
  misc_feature (1)..( 9): Result.002 file - promoters60/1441665
caaagaaag

SEQ ID NO: 114379 - DNA, 9 bp, Unknown
  misc_feature (1)..( 9): Result.002 file - promoters60/1441665
caaacacaa

SEQ ID NO: 114380 - DNA, 9 bp, Unknown
  misc_feature (1)..( 9): Result.002 file - promoters60/1441665
caaggaaag

SEQ ID NO: 114381 - DNA, 9 bp, Unknown
  misc_feature (1)..( 9): Result.002 file - promoters60/1441665
caacgaata

SEQ ID NO: 114382 - DNA, 15 bp, Unknown
  misc_feature (1)..( 15): Result.002 file - promoters60/1441665
acaatgggctgggcc

SEQ ID NO: 114383 - DNA, 15 bp, Unknown
  misc_feature (1)..( 15): Result.002 file - promoters60/1441665
caaatgggcctaatt

SEQ ID NO: 114384 - DNA, 15 bp, Unknown
  misc_feature (1)..( 15): Result.002 file - promoters60/1441665
gaaataggcccaaca

SEQ ID NO: 114385 - DNA, 15 bp, Unknown
  misc_feature (1)..( 15): Result.002 file - promoters60/1441665
ttaatgggccgaatt

SEQ ID NO: 114386 - DNA, 15 bp, Unknown
  misc_feature (1)..( 15): Result.002 file - promoters60/1441665
agtttgggccaactt

SEQ ID NO: 114387 - DNA, 15 bp, Unknown
  misc_feature (1)..( 15): Result.002 file - promoters60/1441665
taaaaaggcccatta

SEQ ID NO: 114388 - DNA, 15 bp, Unknown
  misc_feature (1)..( 15): Result.002 file - promoters60/1441665
taaaaaatatctgaa

SEQ ID NO: 114389 - DNA, 15 bp, Unknown
  misc_feature (1)..( 15): Result.002 file - promoters60/1441665
ccaaacggctaggat

SEQ ID NO: 114390 - DNA, 11 bp, Unknown
  misc_feature (1)..( 11): Result.002 file - promoters60/1441814
tctttgcttac

SEQ ID NO: 114391 - DNA, 11 bp, Unknown
  misc_feature (1)..( 11): Result.002 file - promoters60/1441814
gtttttctttt

SEQ ID NO: 114392 - DNA, 11 bp, Unknown
  misc_feature (1)..( 11): Result.002 file - promoters60/1441814
aagttgtttat

SEQ ID NO: 114393 - DNA, 11 bp, Unknown
  misc_feature (1)..( 11): Result.002 file - promoters60/1441814
aattttattta

SEQ ID NO: 114394 - DNA, 11 bp, Unknown
  misc_feature (1)..( 11): Result.002 file - promoters60/1441814
tattttatgta

SEQ ID NO: 114395 - DNA, 11 bp, Unknown
  misc_feature (1)..( 11): Result.002 file - promoters60/1441814
aatcttaatat

SEQ ID NO: 114396 - DNA, 11 bp, Unknown
  misc_feature (1)..( 11): Result.002 file - promoters60/1441814
ttcatgtttaa

SEQ ID NO: 114397 - DNA, 11 bp, Unknown
  misc_feature (1)..( 11): Result.002 file - promoters60/1441814
ccacatattta

SEQ ID NO: 114398 - DNA, 10 bp, Unknown
  misc_feature (1)..( 10): Result.002 file - promoters60/1441814
gcatatcctt

SEQ ID NO: 114399 - DNA, 10 bp, Unknown
  misc_feature (1)..( 10): Result.002 file - promoters60/1441814
atgtattctt

SEQ ID NO: 114400 - DNA, 10 bp, Unknown
  misc_feature (1)..( 10): Result.002 file - promoters60/1441814
aaatatccgg

SEQ ID NO: 114401 - DNA, 10 bp, Unknown
  misc_feature (1)..( 10): Result.002 file - promoters60/1441814
aattattctg

SEQ ID NO: 114402 - DNA, 10 bp, Unknown
  misc_feature (1)..( 10): Result.002 file - promoters60/1441814
gtttactcta

SEQ ID NO: 114403 - DNA, 10 bp, Unknown
  misc_feature (1)..( 10): Result.002 file - promoters60/1441814
aaatatctaa

SEQ ID NO: 114404 - DNA, 15 bp, Unknown
  misc_feature (1)..( 15): Result.002 file - promoters60/1441814
tagagattgtgagtc

SEQ ID NO: 114405 - DNA, 15 bp, Unknown
  misc_feature (1)..( 15): Result.002 file - promoters60/1441814
gcccctttgagagga

SEQ ID NO: 114406 - DNA, 15 bp, Unknown
  misc_feature (1)..( 15): Result.002 file - promoters60/1441814
cgtgtattgtgtttt

SEQ ID NO: 114407 - DNA, 15 bp, Unknown
  misc_feature (1)..( 15): Result.002 file - promoters60/1441814
taatgtttgagtgga

SEQ ID NO: 114408 - DNA, 15 bp, Unknown
  misc_feature (1)..( 15): Result.002 file - promoters60/1441814
taatgttagagtgga

SEQ ID NO: 114409 - DNA, 15 bp, Unknown
  misc_feature (1)..( 15): Result.002 file - promoters60/1441814
taattttatttttaa

SEQ ID NO: 114410 - DNA, 8 bp, Unknown
  misc_feature (1)..( 8): Result.002 file - promoters60/1441814
tattttga

SEQ ID NO: 114411 - DNA, 8 bp, Unknown
  misc_feature (1)..( 8): Result.002 file - promoters60/1441814
tattttat

SEQ ID NO: 114412 - DNA, 8 bp, Unknown
  misc_feature (1)..( 8): Result.002 file - promoters60/1441814
tattatat

SEQ ID NO: 114413 - DNA, 9 bp, Unknown
  misc_feature (1)..( 9): Result.002 file - promoters60/1441814
tatatatga

SEQ ID NO: 114414 - DNA, 9 bp, Unknown
  misc_feature (1)..( 9): Result.002 file - promoters60/1441814
aattttaaa

SEQ ID NO: 114415 - DNA, 9 bp, Unknown
  misc_feature (1)..( 9): Result.002 file - promoters60/1441814
ttcatatga

SEQ ID NO: 114416 - DNA, 9 bp, Unknown
  misc_feature (1)..( 9): Result.002 file - promoters60/1441814
gaattttct

SEQ ID NO: 114417 - DNA, 14 bp, Unknown
  misc_feature (1)..( 14): Result.002 file - promoters60/1441814
caacaatgtacaaa

SEQ ID NO: 114418 - DNA, 14 bp, Unknown
  misc_feature (1)..( 14): Result.002 file - promoters60/1441814
caataatttacatt

SEQ ID NO: 114419 - DNA, 14 bp, Unknown
  misc_feature (1)..( 14): Result.002 file - promoters60/1441814
ttacaatttacaat

SEQ ID NO: 114420 - DNA, 14 bp, Unknown
  misc_feature (1)..( 14): Result.002 file - promoters60/1441814
gaataataaaatgt

SEQ ID NO: 114421 - DNA, 14 bp, Unknown
  misc_feature (1)..( 14): Result.002 file - promoters60/1441814
atttaatttaatat

SEQ ID NO: 114422 - DNA, 14 bp, Unknown
  misc_feature (1)..( 14): Result.002 file - promoters60/1441814
attggattaaatat

SEQ ID NO: 114423 - DNA, 14 bp, Unknown
  misc_feature (1)..( 14): Result.002 file - promoters60/1441814
tgaaaatttatacg

SEQ ID NO: 114424 - DNA, 14 bp, Unknown
  misc_feature (1)..( 14): Result.002 file - promoters60/1441814
aaataaatagatac

SEQ ID NO: 114425 - DNA, 15 bp, Unknown
  misc_feature (1)..( 15): Result.002 file - promoters60/1441814
tgtaataattaaagt

SEQ ID NO: 114426 - DNA, 15 bp, Unknown
  misc_feature (1)..( 15): Result.002 file - promoters60/1441814
accaataatggcccc

SEQ ID NO: 114427 - DNA, 15 bp, Unknown
  misc_feature (1)..( 15): Result.002 file - promoters60/1441814
taaaataattcttag

SEQ ID NO: 114428 - DNA, 16 bp, Unknown
  misc_feature (1)..( 16): Result.002 file - promoters60/1441814
agtggatattgggttt

SEQ ID NO: 114429 - DNA, 16 bp, Unknown
  misc_feature (1)..( 16): Result.002 file - promoters60/1441814
ataaactaattatgtg

SEQ ID NO: 114430 - DNA, 16 bp, Unknown
  misc_feature (1)..( 16): Result.002 file - promoters60/1441814
aacaaaaaattactct

SEQ ID NO: 114431 - DNA, 16 bp, Unknown
  misc_feature (1)..( 16): Result.002 file - promoters60/1441814
gtcgtgtattgtgttt

SEQ ID NO: 114432 - DNA, 10 bp, Unknown
  misc_feature (1)..( 10): Result.002 file - promoters60/1441814
gcattttgag

SEQ ID NO: 114433 - DNA, 10 bp, Unknown
  misc_feature (1)..( 10): Result.002 file - promoters60/1441814
tcatttttat

SEQ ID NO: 114434 - DNA, 10 bp, Unknown
  misc_feature (1)..( 10): Result.002 file - promoters60/1441814
agattttgtt

SEQ ID NO: 114435 - DNA, 10 bp, Unknown
  misc_feature (1)..( 10): Result.002 file - promoters60/1441814
caattttgtt

SEQ ID NO: 114436 - DNA, 10 bp, Unknown
  misc_feature (1)..( 10): Result.002 file - promoters60/1441814
aaatttttat

SEQ ID NO: 114437 - DNA, 10 bp, Unknown
  misc_feature (1)..( 10): Result.002 file - promoters60/1441814
aaactttaga

SEQ ID NO: 114438 - DNA, 10 bp, Unknown
  misc_feature (1)..( 10): Result.002 file - promoters60/1441814
taatattagt

SEQ ID NO: 114439 - DNA, 10 bp, Unknown
  misc_feature (1)..( 10): Result.002 file - promoters60/1441814
taatattagt

SEQ ID NO: 114440 - DNA, 10 bp, Unknown
  misc_feature (1)..( 10): Result.002 file - promoters60/1441814
taattttaaa

SEQ ID NO: 114441 - DNA, 10 bp, Unknown
  misc_feature (1)..( 10): Result.002 file - promoters60/1441814
tcatatgagt

SEQ ID NO: 114442 - DNA, 10 bp, Unknown
  misc_feature (1)..( 10): Result.002 file - promoters60/1441814
atattttatc

SEQ ID NO: 114443 - DNA, 10 bp, Unknown
  misc_feature (1)..( 10): Result.002 file - promoters60/1441814
gaattttctg

SEQ ID NO: 114444 - DNA, 12 bp, Unknown
  misc_feature (1)..( 12): Result.002 file - promoters60/1441835
tgccattttctt

SEQ ID NO: 114445 - DNA, 12 bp, Unknown
  misc_feature (1)..( 12): Result.002 file - promoters60/1441835
tctcatttttgg

SEQ ID NO: 114446 - DNA, 12 bp, Unknown
  misc_feature (1)..( 12): Result.002 file - promoters60/1441835
aataatttactt

SEQ ID NO: 114447 - DNA, 11 bp, Unknown
  misc_feature (1)..( 11): Result.002 file - promoters60/1441835
taaattataat

SEQ ID NO: 114448 - DNA, 12 bp, Unknown
  misc_feature (1)..( 12): Result.002 file - promoters60/1441835
taaaattagcag

SEQ ID NO: 114449 - DNA, 12 bp, Unknown
  misc_feature (1)..( 12): Result.002 file - promoters60/1441835
ctcagtttctcg

SEQ ID NO: 114450 - DNA, 12 bp, Unknown
  misc_feature (1)..( 12): Result.002 file - promoters60/1441841
cttcacatgaaa

SEQ ID NO: 114451 - DNA, 12 bp, Unknown
  misc_feature (1)..( 12): Result.002 file - promoters60/1441841
tctcacacgaag

SEQ ID NO: 114452 - DNA, 12 bp, Unknown
  misc_feature (1)..( 12): Result.002 file - promoters60/1441841
gaactaatgaaa

SEQ ID NO: 114453 - DNA, 12 bp, Unknown
  misc_feature (1)..( 12): Result.002 file - promoters60/1441841
tcttacacgtta

SEQ ID NO: 114454 - DNA, 10 bp, Unknown
  misc_feature (1)..( 10): Result.002 file - promoters60/1441841
aaaaggtttt

SEQ ID NO: 114455 - DNA, 10 bp, Unknown
  misc_feature (1)..( 10): Result.002 file - promoters60/1441841
aaaatgtttt

SEQ ID NO: 114456 - DNA, 10 bp, Unknown
  misc_feature (1)..( 10): Result.002 file - promoters60/1441841
acaatatttg

SEQ ID NO: 114457 - DNA, 8 bp, Unknown
  misc_feature (1)..( 8): Result.002 file - promoters60/1441841
cttggttc

SEQ ID NO: 114458 - DNA, 8 bp, Unknown
  misc_feature (1)..( 8): Result.002 file - promoters60/1441841
gttgtttc

SEQ ID NO: 114459 - DNA, 8 bp, Unknown
  misc_feature (1)..( 8): Result.002 file - promoters60/1441841
tttgtttg

SEQ ID NO: 114460 - DNA, 8 bp, Unknown
  misc_feature (1)..( 8): Result.002 file - promoters60/1441841
tttattta

SEQ ID NO: 114461 - DNA, 14 bp, Unknown
  misc_feature (1)..( 14): Result.002 file - promoters60/1441841
acatagttactaat

SEQ ID NO: 114462 - DNA, 14 bp, Unknown
  misc_feature (1)..( 14): Result.002 file - promoters60/1441841
tcattgtttaattt

SEQ ID NO: 114463 - DNA, 14 bp, Unknown
  misc_feature (1)..( 14): Result.002 file - promoters60/1441841
tcattttttaattt

SEQ ID NO: 114464 - DNA, 14 bp, Unknown
  misc_feature (1)..( 14): Result.002 file - promoters60/1441841
aaatttgttataac

SEQ ID NO: 114465 - DNA, 7 bp, Unknown
  misc_feature (1)..( 7): Result.002 file - promoters60/1441841
cttttaa

SEQ ID NO: 114466 - DNA, 7 bp, Unknown
  misc_feature (1)..( 7): Result.002 file - promoters60/1441841
cttctaa

SEQ ID NO: 114467 - DNA, 7 bp, Unknown
  misc_feature (1)..( 7): Result.002 file - promoters60/1441841
tttctaa

SEQ ID NO: 114468 - DNA, 8 bp, Unknown
  misc_feature (1)..( 8): Result.002 file - promoters60/1441841
ttttgttg

SEQ ID NO: 114469 - DNA, 8 bp, Unknown
  misc_feature (1)..( 8): Result.002 file - promoters60/1441841
ttttgttt

SEQ ID NO: 114470 - DNA, 8 bp, Unknown
  misc_feature (1)..( 8): Result.002 file - promoters60/1441841
atttattt

SEQ ID NO: 114471 - DNA, 6 bp, Unknown
  misc_feature (1)..( 6): Result.002 file - promoters60/1441851
ttgaga

SEQ ID NO: 114472 - DNA, 6 bp, Unknown
  misc_feature (1)..( 6): Result.002 file - promoters60/1441851
ttgaga

SEQ ID NO: 114473 - DNA, 10 bp, Unknown
  misc_feature (1)..( 10): Result.002 file - promoters60/1441851
taacgtttaa

SEQ ID NO: 114474 - DNA, 10 bp, Unknown
  misc_feature (1)..( 10): Result.002 file - promoters60/1441851
taacgtttaa

SEQ ID NO: 114475 - DNA, 6 bp, Unknown
  misc_feature (1)..( 6): Result.002 file - promoters60/1441851
aacatt

SEQ ID NO: 114476 - DNA, 6 bp, Unknown
  misc_feature (1)..( 6): Result.002 file - promoters60/1441851
aacatt

SEQ ID NO: 114477 - DNA, 7 bp, Unknown
  misc_feature (1)..( 7): Result.002 file - promoters60/1441851
ttcaaag

SEQ ID NO: 114478 - DNA, 7 bp, Unknown
  misc_feature (1)..( 7): Result.002 file - promoters60/1441851
ttcaaag

SEQ ID NO: 114479 - DNA, 7 bp, Unknown
  misc_feature (1)..( 7): Result.002 file - promoters60/1441851
aagaact

SEQ ID NO: 114480 - DNA, 7 bp, Unknown
  misc_feature (1)..( 7): Result.002 file - promoters60/1441851
aagtact

SEQ ID NO: 114481 - DNA, 7 bp, Unknown
  misc_feature (1)..( 7): Result.002 file - promoters60/1441851
agtaaac

SEQ ID NO: 114482 - DNA, 7 bp, Unknown
  misc_feature (1)..( 7): Result.002 file - promoters60/1441851
agttaac

SEQ ID NO: 114483 - DNA, 7 bp, Unknown
  misc_feature (1)..( 7): Result.002 file - promoters60/1441851
attcata

SEQ ID NO: 114484 - DNA, 7 bp, Unknown
  misc_feature (1)..( 7): Result.002 file - promoters60/1441851
attcata

SEQ ID NO: 114485 - DNA, 6 bp, Unknown
  misc_feature (1)..( 6): Result.002 file - promoters60/1441851
taacat

SEQ ID NO: 114486 - DNA, 6 bp, Unknown
  misc_feature (1)..( 6): Result.002 file - promoters60/1441851
taacat

SEQ ID NO: 114487 - DNA, 10 bp, Unknown
  misc_feature (1)..( 10): Result.002 file - promoters60/1441851
agtctagaaa

SEQ ID NO: 114488 - DNA, 10 bp, Unknown
  misc_feature (1)..( 10): Result.002 file - promoters60/1441851
agtctaaaaa

SEQ ID NO: 114489 - DNA, 9 bp, Unknown
  misc_feature (1)..( 9): Result.002 file - promoters60/1441851
ataattttt

SEQ ID NO: 114490 - DNA, 9 bp, Unknown
  misc_feature (1)..( 9): Result.002 file - promoters60/1441851
ataatgttt

SEQ ID NO: 114491 - DNA, 7 bp, Unknown
  misc_feature (1)..( 7): Result.002 file - promoters60/1441851
atagata

SEQ ID NO: 114492 - DNA, 7 bp, Unknown
  misc_feature (1)..( 7): Result.002 file - promoters60/1441851
atatata

SEQ ID NO: 114493 - DNA, 7 bp, Unknown
  misc_feature (1)..( 7): Result.002 file - promoters60/1441851
atgtaat

SEQ ID NO: 114494 - DNA, 7 bp, Unknown
  misc_feature (1)..( 7): Result.002 file - promoters60/1441851
atggaat

SEQ ID NO: 114495 - DNA, 7 bp, Unknown
  misc_feature (1)..( 7): Result.002 file - promoters60/1441851
acctaat

SEQ ID NO: 114496 - DNA, 7 bp, Unknown
  misc_feature (1)..( 7): Result.002 file - promoters60/1441851
accaaat

SEQ ID NO: 114497 - DNA, 6 bp, Unknown
  misc_feature (1)..( 6): Result.002 file - promoters60/1441851
tattat

SEQ ID NO: 114498 - DNA, 6 bp, Unknown
  misc_feature (1)..( 6): Result.002 file - promoters60/1441851
tattat

SEQ ID NO: 114499 - DNA, 6 bp, Unknown
  misc_feature (1)..( 6): Result.002 file - promoters60/1441851
aaaaaa

SEQ ID NO: 114500 - DNA, 6 bp, Unknown
  misc_feature (1)..( 6): Result.002 file - promoters60/1441851
aaaaaa

SEQ ID NO: 114501 - DNA, 6 bp, Unknown
  misc_feature (1)..( 6): Result.002 file - promoters60/1441851
gtcaaa

SEQ ID NO: 114502 - DNA, 6 bp, Unknown
  misc_feature (1)..( 6): Result.002 file - promoters60/1441851
gtcaaa

SEQ ID NO: 114503 - DNA, 6 bp, Unknown
  misc_feature (1)..( 6): Result.002 file - promoters60/1441851
ggcgag

SEQ ID NO: 114504 - DNA, 6 bp, Unknown
  misc_feature (1)..( 6): Result.002 file - promoters60/1441851
ggcgag

SEQ ID NO: 114505 - DNA, 13 bp, Unknown
  misc_feature (1)..( 13): Result.002 file - promoters60/1441859
tttttttttcttc

SEQ ID NO: 114506 - DNA, 13 bp, Unknown
  misc_feature (1)..( 13): Result.002 file - promoters60/1441859
tatagttttctgt

SEQ ID NO: 114507 - DNA, 13 bp, Unknown
  misc_feature (1)..( 13): Result.002 file - promoters60/1441859
ttttgttttcctt

SEQ ID NO: 114508 - DNA, 13 bp, Unknown
  misc_feature (1)..( 13): Result.002 file - promoters60/1441859
acaatttttcaat

SEQ ID NO: 114509 - DNA, 13 bp, Unknown
  misc_feature (1)..( 13): Result.002 file - promoters60/1441859
cacaattttgttg

SEQ ID NO: 114510 - DNA, 13 bp, Unknown
  misc_feature (1)..( 13): Result.002 file - promoters60/1441859
atttattttgtaa

SEQ ID NO: 114511 - DNA, 16 bp, Unknown
  misc_feature (1)..( 16): Result.002 file - promoters60/1441859
aacaatgatttaatac

SEQ ID NO: 114512 - DNA, 16 bp, Unknown
  misc_feature (1)..( 16): Result.002 file - promoters60/1441859
taccaaaattaaatgc

SEQ ID NO: 114513 - DNA, 16 bp, Unknown
  misc_feature (1)..( 16): Result.002 file - promoters60/1441859
tactaaaatgaaatga

SEQ ID NO: 114514 - DNA, 16 bp, Unknown
  misc_feature (1)..( 16): Result.002 file - promoters60/1441859
acgaggggcaaaatgt

SEQ ID NO: 114515 - DNA, 16 bp, Unknown
  misc_feature (1)..( 16): Result.002 file - promoters60/1441859
aaagcaattgaaatgt

SEQ ID NO: 114516 - DNA, 16 bp, Unknown
  misc_feature (1)..( 16): Result.002 file - promoters60/1441859
aaaaaaaaaaaaagaa

SEQ ID NO: 114517 - DNA, 16 bp, Unknown
  misc_feature (1)..( 16): Result.002 file - promoters60/1441859
ttttaaaaaaaaagtt

SEQ ID NO: 114518 - DNA, 10 bp, Unknown
  misc_feature (1)..( 10): Result.002 file - promoters60/1441859
cttttttttt

SEQ ID NO: 114519 - DNA, 10 bp, Unknown
  misc_feature (1)..( 10): Result.002 file - promoters60/1441859
gttttgtttt

SEQ ID NO: 114520 - DNA, 10 bp, Unknown
  misc_feature (1)..( 10): Result.002 file - promoters60/1441859
gttttgaatt

SEQ ID NO: 114521 - DNA, 10 bp, Unknown
  misc_feature (1)..( 10): Result.002 file - promoters60/1441859
attttgttgt

SEQ ID NO: 114522 - DNA, 10 bp, Unknown
  misc_feature (1)..( 10): Result.002 file - promoters60/1441859
attttgtaat

SEQ ID NO: 114523 - DNA, 10 bp, Unknown
  misc_feature (1)..( 10): Result.002 file - promoters60/1441859
ttttagttga

SEQ ID NO: 114524 - DNA, 14 bp, Unknown
  misc_feature (1)..( 14): Result.002 file - promoters60/1441859
ttgtcacaagtttt

SEQ ID NO: 114525 - DNA, 14 bp, Unknown
  misc_feature (1)..( 14): Result.002 file - promoters60/1441859
aaaaaaaaagttta

SEQ ID NO: 114526 - DNA, 14 bp, Unknown
  misc_feature (1)..( 14): Result.002 file - promoters60/1441859
tgtgtcaaagtttt

SEQ ID NO: 114527 - DNA, 14 bp, Unknown
  misc_feature (1)..( 14): Result.002 file - promoters60/1441859
ttctaaatagttga

SEQ ID NO: 114528 - DNA, 14 bp, Unknown
  misc_feature (1)..( 14): Result.002 file - promoters60/1441859
aaaaagaaagttaa

SEQ ID NO: 114529 - DNA, 14 bp, Unknown
  misc_feature (1)..( 14): Result.002 file - promoters60/1441859
attacgaaagtgac

SEQ ID NO: 114530 - DNA, 12 bp, Unknown
  misc_feature (1)..( 12): Result.002 file - promoters60/1441912
gtatatatataa

SEQ ID NO: 114531 - DNA, 12 bp, Unknown
  misc_feature (1)..( 12): Result.002 file - promoters60/1441912
atatttatatag

SEQ ID NO: 114532 - DNA, 12 bp, Unknown
  misc_feature (1)..( 12): Result.002 file - promoters60/1441912
caataaaaagca

SEQ ID NO: 114533 - DNA, 12 bp, Unknown
  misc_feature (1)..( 12): Result.002 file - promoters60/1441912
acagttaaatag

SEQ ID NO: 114534 - DNA, 12 bp, Unknown
  misc_feature (1)..( 12): Result.002 file - promoters60/1441912
atatttgtatca

SEQ ID NO: 114535 - DNA, 12 bp, Unknown
  misc_feature (1)..( 12): Result.002 file - promoters60/1441912
tctgttaaaatc

SEQ ID NO: 114536 - DNA, 9 bp, Unknown
  misc_feature (1)..( 9): Result.002 file - promoters60/1441912
ataataaac

SEQ ID NO: 114537 - DNA, 9 bp, Unknown
  misc_feature (1)..( 9): Result.002 file - promoters60/1441912
ccaataaag

SEQ ID NO: 114538 - DNA, 9 bp, Unknown
  misc_feature (1)..( 9): Result.002 file - promoters60/1441912
gtaataata

SEQ ID NO: 114539 - DNA, 9 bp, Unknown
  misc_feature (1)..( 9): Result.002 file - promoters60/1441912
atactaaaa

SEQ ID NO: 114540 - DNA, 9 bp, Unknown
  misc_feature (1)..( 9): Result.002 file - promoters60/1441912
ttaataaaa

SEQ ID NO: 114541 - DNA, 9 bp, Unknown
  misc_feature (1)..( 9): Result.002 file - promoters60/1441912
catataaaa

SEQ ID NO: 114542 - DNA, 8 bp, Unknown
  misc_feature (1)..( 8): Result.002 file - promoters60/1441937
taaaaatc

SEQ ID NO: 114543 - DNA, 8 bp, Unknown
  misc_feature (1)..( 8): Result.002 file - promoters60/1441937
taacaata

SEQ ID NO: 114544 - DNA, 8 bp, Unknown
  misc_feature (1)..( 8): Result.002 file - promoters60/1441937
ttaaaatc

SEQ ID NO: 114545 - DNA, 8 bp, Unknown
  misc_feature (1)..( 8): Result.002 file - promoters60/1441937
ctgtgttg

SEQ ID NO: 114546 - DNA, 8 bp, Unknown
  misc_feature (1)..( 8): Result.002 file - promoters60/1441937
atgtcttg

SEQ ID NO: 114547 - DNA, 8 bp, Unknown
  misc_feature (1)..( 8): Result.002 file - promoters60/1441937
ctgtgtct

SEQ ID NO: 114548 - DNA, 8 bp, Unknown
  misc_feature (1)..( 8): Result.002 file - promoters60/1441937
tcttgttt

SEQ ID NO: 114549 - DNA, 8 bp, Unknown
  misc_feature (1)..( 8): Result.002 file - promoters60/1441937
tcttattt

SEQ ID NO: 114550 - DNA, 8 bp, Unknown
  misc_feature (1)..( 8): Result.002 file - promoters60/1441937
tctggttg

SEQ ID NO: 114551 - DNA, 8 bp, Unknown
  misc_feature (1)..( 8): Result.002 file - promoters60/1441937
caatttat

SEQ ID NO: 114552 - DNA, 8 bp, Unknown
  misc_feature (1)..( 8): Result.002 file - promoters60/1441937
caatttgc

SEQ ID NO: 114553 - DNA, 8 bp, Unknown
  misc_feature (1)..( 8): Result.002 file - promoters60/1441937
taatgtat

SEQ ID NO: 114554 - DNA, 8 bp, Unknown
  misc_feature (1)..( 8): Result.002 file - promoters60/1441985
ttacgtat

SEQ ID NO: 114555 - DNA, 8 bp, Unknown
  misc_feature (1)..( 8): Result.002 file - promoters60/1441985
ttacatat

SEQ ID NO: 114556 - DNA, 7 bp, Unknown
  misc_feature (1)..( 7): Result.002 file - promoters60/1441985
acaattt

SEQ ID NO: 114557 - DNA, 7 bp, Unknown
  misc_feature (1)..( 7): Result.002 file - promoters60/1441985
acatttt

SEQ ID NO: 114558 - DNA, 7 bp, Unknown
  misc_feature (1)..( 7): Result.002 file - promoters60/1441985
ccacaat

SEQ ID NO: 114559 - DNA, 7 bp, Unknown
  misc_feature (1)..( 7): Result.002 file - promoters60/1441985
ccaaaat

SEQ ID NO: 114560 - DNA, 6 bp, Unknown
  misc_feature (1)..( 6): Result.002 file - promoters60/1441985
ggtttt

SEQ ID NO: 114561 - DNA, 6 bp, Unknown
  misc_feature (1)..( 6): Result.002 file - promoters60/1441985
ggtttt

SEQ ID NO: 114562 - DNA, 6 bp, Unknown
  misc_feature (1)..( 6): Result.002 file - promoters60/1441985
ttttga

SEQ ID NO: 114563 - DNA, 6 bp, Unknown
  misc_feature (1)..( 6): Result.002 file - promoters60/1441985
ttttga

SEQ ID NO: 114564 - DNA, 9 bp, Unknown
  misc_feature (1)..( 9): Result.002 file - promoters60/1441985
atttttttt

SEQ ID NO: 114565 - DNA, 9 bp, Unknown
  misc_feature (1)..( 9): Result.002 file - promoters60/1441985
attattttt

SEQ ID NO: 114566 - DNA, 9 bp, Unknown
  misc_feature (1)..( 9): Result.002 file - promoters60/1441985
gtttttttt

SEQ ID NO: 114567 - DNA, 6 bp, Unknown
  misc_feature (1)..( 6): Result.002 file - promoters60/1441985
aaatga

SEQ ID NO: 114568 - DNA, 6 bp, Unknown
  misc_feature (1)..( 6): Result.002 file - promoters60/1441985
aaatga

SEQ ID NO: 114569 - DNA, 7 bp, Unknown
  misc_feature (1)..( 7): Result.002 file - promoters60/1441985
aagctgt

SEQ ID NO: 114570 - DNA, 7 bp, Unknown
  misc_feature (1)..( 7): Result.002 file - promoters60/1441985
aagatgt

SEQ ID NO: 114571 - DNA, 7 bp, Unknown
  misc_feature (1)..( 7): Result.002 file - promoters60/1441985
acgtgga

SEQ ID NO: 114572 - DNA, 7 bp, Unknown
  misc_feature (1)..( 7): Result.002 file - promoters60/1441985
acgagga

SEQ ID NO: 114573 - DNA, 9 bp, Unknown
  misc_feature (1)..( 9): Result.002 file - promoters60/1441985
atataaata

SEQ ID NO: 114574 - DNA, 9 bp, Unknown
  misc_feature (1)..( 9): Result.002 file - promoters60/1441985
atataaata

SEQ ID NO: 114575 - DNA, 8 bp, Unknown
  misc_feature (1)..( 8): Result.002 file - promoters60/1441985
gaaactac

SEQ ID NO: 114576 - DNA, 8 bp, Unknown
  misc_feature (1)..( 8): Result.002 file - promoters60/1441985
gaaattac

SEQ ID NO: 114577 - DNA, 8 bp, Unknown
  misc_feature (1)..( 8): Result.002 file - promoters60/1441985
aattttgt

SEQ ID NO: 114578 - DNA, 8 bp, Unknown
  misc_feature (1)..( 8): Result.002 file - promoters60/1441985
aattttgt

SEQ ID NO: 114579 - DNA, 6 bp, Unknown
  misc_feature (1)..( 6): Result.002 file - promoters60/1441985
gttatt

SEQ ID NO: 114580 - DNA, 6 bp, Unknown
  misc_feature (1)..( 6): Result.002 file - promoters60/1441985
gttatt

SEQ ID NO: 114581 - DNA, 7 bp, Unknown
  misc_feature (1)..( 7): Result.002 file - promoters60/1441985
gaatatt

SEQ ID NO: 114582 - DNA, 7 bp, Unknown
  misc_feature (1)..( 7): Result.002 file - promoters60/1441985
gaaaatt

SEQ ID NO: 114583 - DNA, 7 bp, Unknown
  misc_feature (1)..( 7): Result.002 file - promoters60/1441985
acgcata

SEQ ID NO: 114584 - DNA, 7 bp, Unknown
  misc_feature (1)..( 7): Result.002 file - promoters60/1441985
acgaata

SEQ ID NO: 114585 - DNA, 6 bp, Unknown
  misc_feature (1)..( 6): Result.002 file - promoters60/1441985
aaaaca

SEQ ID NO: 114586 - DNA, 6 bp, Unknown
  misc_feature (1)..( 6): Result.002 file - promoters60/1441985
aaaaca

SEQ ID NO: 114587 - DNA, 6 bp, Unknown
  misc_feature (1)..( 6): Result.002 file - promoters60/1441985
gtaacc

SEQ ID NO: 114588 - DNA, 6 bp, Unknown
  misc_feature (1)..( 6): Result.002 file - promoters60/1441985
gtaacc

SEQ ID NO: 114589 - DNA, 8 bp, Unknown
  misc_feature (1)..( 8): Result.002 file - promoters60/1441985
atagaaat

SEQ ID NO: 114590 - DNA, 8 bp, Unknown
  misc_feature (1)..( 8): Result.002 file - promoters60/1441985
atagaaat

SEQ ID NO: 114591 - DNA, 11 bp, Unknown
  misc_feature (1)..( 11): Result.002 file - promoters60/1441985
aattacaaaaa

SEQ ID NO: 114592 - DNA, 11 bp, Unknown
  misc_feature (1)..( 11): Result.002 file - promoters60/1441985
aatcacaaaaa

SEQ ID NO: 114593 - DNA, 6 bp, Unknown
  misc_feature (1)..( 6): Result.002 file - promoters60/1441985
ctcagt

SEQ ID NO: 114594 - DNA, 6 bp, Unknown
  misc_feature (1)..( 6): Result.002 file - promoters60/1441985
ctcagt

SEQ ID NO: 114595 - DNA, 7 bp, Unknown
  misc_feature (1)..( 7): Result.002 file - promoters60/1441985
tttctta

SEQ ID NO: 114596 - DNA, 7 bp, Unknown
  misc_feature (1)..( 7): Result.002 file - promoters60/1441985
tttctta

SEQ ID NO: 114597 - DNA, 6 bp, Unknown
  misc_feature (1)..( 6): Result.002 file - promoters60/1441985
tttcta

SEQ ID NO: 114598 - DNA, 6 bp, Unknown
  misc_feature (1)..( 6): Result.002 file - promoters60/1441985
tttcta

SEQ ID NO: 114599 - DNA, 7 bp, Unknown
  misc_feature (1)..( 7): Result.002 file - promoters60/1441985
caaataa

SEQ ID NO: 114600 - DNA, 7 bp, Unknown
  misc_feature (1)..( 7): Result.002 file - promoters60/1441985
caactaa

SEQ ID NO: 114601 - DNA, 9 bp, Unknown
  misc_feature (1)..( 9): Result.002 file - promoters60/1441985
cttgttcaa

SEQ ID NO: 114602 - DNA, 9 bp, Unknown
  misc_feature (1)..( 9): Result.002 file - promoters60/1441985
cttgtacaa

SEQ ID NO: 114603 - DNA, 6 bp, Unknown
  misc_feature (1)..( 6): Result.002 file - promoters60/1441985
ttggtt

SEQ ID NO: 114604 - DNA, 6 bp, Unknown
  misc_feature (1)..( 6): Result.002 file - promoters60/1441985
ttggtt

SEQ ID NO: 114605 - DNA, 6 bp, Unknown
  misc_feature (1)..( 6): Result.002 file - promoters60/1441985
cataaa

SEQ ID NO: 114606 - DNA, 6 bp, Unknown
  misc_feature (1)..( 6): Result.002 file - promoters60/1441985
cataaa

SEQ ID NO: 114607 - DNA, 6 bp, Unknown
  misc_feature (1)..( 6): Result.002 file - promoters60/1441985
ttttaa

SEQ ID NO: 114608 - DNA, 6 bp, Unknown
  misc_feature (1)..( 6): Result.002 file - promoters60/1441985
ttttaa

SEQ ID NO: 114609 - DNA, 11 bp, Unknown
  misc_feature (1)..( 11): Result.002 file - promoters60/1441990
catatatactt

SEQ ID NO: 114610 - DNA, 11 bp, Unknown
  misc_feature (1)..( 11): Result.002 file - promoters60/1441990
tatatatataa

SEQ ID NO: 114611 - DNA, 11 bp, Unknown
  misc_feature (1)..( 11): Result.002 file - promoters60/1441990
tttatatagat

SEQ ID NO: 114612 - DNA, 11 bp, Unknown
  misc_feature (1)..( 11): Result.002 file - promoters60/1441990
agtatataaat

SEQ ID NO: 114613 - DNA, 11 bp, Unknown
  misc_feature (1)..( 11): Result.002 file - promoters60/1441990
gttaaatagca

SEQ ID NO: 114614 - DNA, 11 bp, Unknown
  misc_feature (1)..( 11): Result.002 file - promoters60/1441990
aataaaaagca

SEQ ID NO: 114615 - DNA, 11 bp, Unknown
  misc_feature (1)..( 11): Result.002 file - promoters60/1441990
gttaaaatcgt

SEQ ID NO: 114616 - DNA, 15 bp, Unknown
  misc_feature (1)..( 15): Result.002 file - promoters60/1441990
ttaggatagatagac

SEQ ID NO: 114617 - DNA, 15 bp, Unknown
  misc_feature (1)..( 15): Result.002 file - promoters60/1441990
cgacaataaataata

SEQ ID NO: 114618 - DNA, 15 bp, Unknown
  misc_feature (1)..( 15): Result.002 file - promoters60/1441990
cgagaatacatacag

SEQ ID NO: 114619 - DNA, 15 bp, Unknown
  misc_feature (1)..( 15): Result.002 file - promoters60/1441990
tgagaatcattaatc

SEQ ID NO: 114620 - DNA, 15 bp, Unknown
  misc_feature (1)..( 15): Result.002 file - promoters60/1441990
agagcatataagtaa

SEQ ID NO: 114621 - DNA, 15 bp, Unknown
  misc_feature (1)..( 15): Result.002 file - promoters60/1441990
aaaacaaaaattata

SEQ ID NO: 114622 - DNA, 17 bp, Unknown
  misc_feature (1)..( 17): Result.002 file - promoters60/1441990
aatacatacagatccac

SEQ ID NO: 114623 - DNA, 17 bp, Unknown
  misc_feature (1)..( 17): Result.002 file - promoters60/1441990
agtacataaaacaaaaa

SEQ ID NO: 114624 - DNA, 17 bp, Unknown
  misc_feature (1)..( 17): Result.002 file - promoters60/1441990
aatccatcaacagtagc

SEQ ID NO: 114625 - DNA, 17 bp, Unknown
  misc_feature (1)..( 17): Result.002 file - promoters60/1441990
tttacaaaaaaaaaaaa

SEQ ID NO: 114626 - DNA, 17 bp, Unknown
  misc_feature (1)..( 17): Result.002 file - promoters60/1441990
catacaaacgacacaat

SEQ ID NO: 114627 - DNA, 17 bp, Unknown
  misc_feature (1)..( 17): Result.002 file - promoters60/1441990
actacaaatatcgaatc

SEQ ID NO: 114628 - DNA, 7 bp, Unknown
  misc_feature (1)..( 7): Result.002 file - promoters60/1442104
actagat

SEQ ID NO: 114629 - DNA, 7 bp, Unknown
  misc_feature (1)..( 7): Result.002 file - promoters60/1442104
acttgat

SEQ ID NO: 114630 - DNA, 6 bp, Unknown
  misc_feature (1)..( 6): Result.002 file - promoters60/1442104
aataat

SEQ ID NO: 114631 - DNA, 6 bp, Unknown
  misc_feature (1)..( 6): Result.002 file - promoters60/1442104
aataat

SEQ ID NO: 114632 - DNA, 6 bp, Unknown
  misc_feature (1)..( 6): Result.002 file - promoters60/1442104
ttgtgg

SEQ ID NO: 114633 - DNA, 6 bp, Unknown
  misc_feature (1)..( 6): Result.002 file - promoters60/1442104
ttgtgg

SEQ ID NO: 114634 - DNA, 7 bp, Unknown
  misc_feature (1)..( 7): Result.002 file - promoters60/1442104
tataaat

SEQ ID NO: 114635 - DNA, 7 bp, Unknown
  misc_feature (1)..( 7): Result.002 file - promoters60/1442104
tataaat

SEQ ID NO: 114636 - DNA, 13 bp, Unknown
  misc_feature (1)..( 13): Result.002 file - promoters60/1442104
attcttcgacctt

SEQ ID NO: 114637 - DNA, 13 bp, Unknown
  misc_feature (1)..( 13): Result.002 file - promoters60/1442104
attattcgatctt

SEQ ID NO: 114638 - DNA, 6 bp, Unknown
  misc_feature (1)..( 6): Result.002 file - promoters60/1442104
tttgaa

SEQ ID NO: 114639 - DNA, 6 bp, Unknown
  misc_feature (1)..( 6): Result.002 file - promoters60/1442104
tttgaa

SEQ ID NO: 114640 - DNA, 6 bp, Unknown
  misc_feature (1)..( 6): Result.002 file - promoters60/1442104
taattt

SEQ ID NO: 114641 - DNA, 6 bp, Unknown
  misc_feature (1)..( 6): Result.002 file - promoters60/1442104
taattt

SEQ ID NO: 114642 - DNA, 7 bp, Unknown
  misc_feature (1)..( 7): Result.002 file - promoters60/1442104
aaacaaa

SEQ ID NO: 114643 - DNA, 7 bp, Unknown
  misc_feature (1)..( 7): Result.002 file - promoters60/1442104
aaataaa

SEQ ID NO: 114644 - DNA, 6 bp, Unknown
  misc_feature (1)..( 6): Result.002 file - promoters60/1442104
tttatc

SEQ ID NO: 114645 - DNA, 6 bp, Unknown
  misc_feature (1)..( 6): Result.002 file - promoters60/1442104
tttatc

SEQ ID NO: 114646 - DNA, 7 bp, Unknown
  misc_feature (1)..( 7): Result.002 file - promoters60/1442104
tctccca

SEQ ID NO: 114647 - DNA, 7 bp, Unknown
  misc_feature (1)..( 7): Result.002 file - promoters60/1442104
tcttcca

SEQ ID NO: 114648 - DNA, 6 bp, Unknown
  misc_feature (1)..( 6): Result.002 file - promoters60/1442104
acaatt

SEQ ID NO: 114649 - DNA, 6 bp, Unknown
  misc_feature (1)..( 6): Result.002 file - promoters60/1442104
acaatt

SEQ ID NO: 114650 - DNA, 7 bp, Unknown
  misc_feature (1)..( 7): Result.002 file - promoters60/1442104
attactt

SEQ ID NO: 114651 - DNA, 7 bp, Unknown
  misc_feature (1)..( 7): Result.002 file - promoters60/1442104
atttctt

SEQ ID NO: 114652 - DNA, 6 bp, Unknown
  misc_feature (1)..( 6): Result.002 file - promoters60/1442104
ccgaca

SEQ ID NO: 114653 - DNA, 6 bp, Unknown
  misc_feature (1)..( 6): Result.002 file - promoters60/1442104
ccgaca

SEQ ID NO: 114654 - DNA, 8 bp, Unknown
  misc_feature (1)..( 8): Result.002 file - promoters60/1442104
attgtgat

SEQ ID NO: 114655 - DNA, 8 bp, Unknown
  misc_feature (1)..( 8): Result.002 file - promoters60/1442104
attttgat

SEQ ID NO: 114656 - DNA, 6 bp, Unknown
  misc_feature (1)..( 6): Result.002 file - promoters60/1442104
ttttaa

SEQ ID NO: 114657 - DNA, 6 bp, Unknown
  misc_feature (1)..( 6): Result.002 file - promoters60/1442104
ttttaa

SEQ ID NO: 114658 - DNA, 12 bp, Unknown
  misc_feature (1)..( 12): Result.002 file - promoters60/1442156
ttattgttttct

SEQ ID NO: 114659 - DNA, 12 bp, Unknown
  misc_feature (1)..( 12): Result.002 file - promoters60/1442156
atatagttataa

SEQ ID NO: 114660 - DNA, 12 bp, Unknown
  misc_feature (1)..( 12): Result.002 file - promoters60/1442156
aaataattaaac

SEQ ID NO: 114661 - DNA, 12 bp, Unknown
  misc_feature (1)..( 12): Result.002 file - promoters60/1442156
aaatagtttcaa

SEQ ID NO: 114662 - DNA, 12 bp, Unknown
  misc_feature (1)..( 12): Result.002 file - promoters60/1442156
agaaagaatcaa

SEQ ID NO: 114663 - DNA, 12 bp, Unknown
  misc_feature (1)..( 12): Result.002 file - promoters60/1442156
aaaaagttgcaa

SEQ ID NO: 114664 - DNA, 18 bp, Unknown
  misc_feature (1)..( 18): Result.002 file - promoters60/1442156
tggcattttcttgagtca

SEQ ID NO: 114665 - DNA, 18 bp, Unknown
  misc_feature (1)..( 18): Result.002 file - promoters60/1442156
cctttatttcttctactt

SEQ ID NO: 114666 - DNA, 18 bp, Unknown
  misc_feature (1)..( 18): Result.002 file - promoters60/1442156
attttatttctcctactt

SEQ ID NO: 114667 - DNA, 18 bp, Unknown
  misc_feature (1)..( 18): Result.002 file - promoters60/1442156
attttattacagacagat

SEQ ID NO: 114668 - DNA, 10 bp, Unknown
  misc_feature (1)..( 10): Result.002 file - promoters60/1442156
actttcttct

SEQ ID NO: 114669 - DNA, 10 bp, Unknown
  misc_feature (1)..( 10): Result.002 file - promoters60/1442156
ttcgtcttct

SEQ ID NO: 114670 - DNA, 10 bp, Unknown
  misc_feature (1)..( 10): Result.002 file - promoters60/1442156
aacttcttca

SEQ ID NO: 114671 - DNA, 10 bp, Unknown
  misc_feature (1)..( 10): Result.002 file - promoters60/1442156
ttcttcttct

SEQ ID NO: 114672 - DNA, 8 bp, Unknown
  misc_feature (1)..( 8): Result.002 file - promoters60/1442156
ttttgagt

SEQ ID NO: 114673 - DNA, 8 bp, Unknown
  misc_feature (1)..( 8): Result.002 file - promoters60/1442156
attttagt

SEQ ID NO: 114674 - DNA, 8 bp, Unknown
  misc_feature (1)..( 8): Result.002 file - promoters60/1442156
attttaaa

SEQ ID NO: 114675 - DNA, 8 bp, Unknown
  misc_feature (1)..( 8): Result.002 file - promoters60/1442156
attctaga

SEQ ID NO: 114676 - DNA, 9 bp, Unknown
  misc_feature (1)..( 9): Result.002 file - promoters60/1442156
cacaaatat

SEQ ID NO: 114677 - DNA, 9 bp, Unknown
  misc_feature (1)..( 9): Result.002 file - promoters60/1442156
aacaaataa

SEQ ID NO: 114678 - DNA, 9 bp, Unknown
  misc_feature (1)..( 9): Result.002 file - promoters60/1442156
aacgaatca

SEQ ID NO: 114679 - DNA, 9 bp, Unknown
  misc_feature (1)..( 9): Result.002 file - promoters60/1442156
ttcaagtaa

SEQ ID NO: 114680 - DNA, 9 bp, Unknown
  misc_feature (1)..( 9): Result.002 file - promoters60/1442156
aaagaatca

SEQ ID NO: 114681 - DNA, 10 bp, Unknown
  misc_feature (1)..( 10): Result.002 file - promoters60/1442156
ttttttccta

SEQ ID NO: 114682 - DNA, 10 bp, Unknown
  misc_feature (1)..( 10): Result.002 file - promoters60/1442156
cagtttgcta

SEQ ID NO: 114683 - DNA, 11 bp, Unknown
  misc_feature (1)..( 11): Result.002 file - promoters60/1442156
tttttatccac

SEQ ID NO: 114684 - DNA, 11 bp, Unknown
  misc_feature (1)..( 11): Result.002 file - promoters60/1442156
cgtttatctga

SEQ ID NO: 114685 - DNA, 11 bp, Unknown
  misc_feature (1)..( 11): Result.002 file - promoters60/1442156
gaaaaagtctt

SEQ ID NO: 114686 - DNA, 11 bp, Unknown
  misc_feature (1)..( 11): Result.002 file - promoters60/1442156
gaaaaaaaaaa

SEQ ID NO: 114687 - DNA, 11 bp, Unknown
  misc_feature (1)..( 11): Result.002 file - promoters60/1442156
aaaaaaggaat

SEQ ID NO: 114688 - DNA, 11 bp, Unknown
  misc_feature (1)..( 11): Result.002 file - promoters60/1442156
caaaaaataat

SEQ ID NO: 114689 - DNA, 11 bp, Unknown
  misc_feature (1)..( 11): Result.002 file - promoters60/1442156
ctaaaagataa

SEQ ID NO: 114690 - DNA, 12 bp, Unknown
  misc_feature (1)..( 12): Result.002 file - promoters60/1442156
taaacaaaatca

SEQ ID NO: 114691 - DNA, 11 bp, Unknown
  misc_feature (1)..( 11): Result.002 file - promoters60/1442156
taatctgaaat

SEQ ID NO: 114692 - DNA, 11 bp, Unknown
  misc_feature (1)..( 11): Result.002 file - promoters60/1442156
agatctaaaat

SEQ ID NO: 114693 - DNA, 11 bp, Unknown
  misc_feature (1)..( 11): Result.002 file - promoters60/1442156
ttatctgaaaa

SEQ ID NO: 114694 - DNA, 11 bp, Unknown
  misc_feature (1)..( 11): Result.002 file - promoters60/1442156
ttagctggctt

SEQ ID NO: 114695 - DNA, 8 bp, Unknown
  misc_feature (1)..( 8): Result.002 file - promoters60/1442156
aaaaataa

SEQ ID NO: 114696 - DNA, 8 bp, Unknown
  misc_feature (1)..( 8): Result.002 file - promoters60/1442156
caaaatag

SEQ ID NO: 114697 - DNA, 9 bp, Unknown
  misc_feature (1)..( 9): Result.002 file - promoters60/1442156
aaaagataa

SEQ ID NO: 114698 - DNA, 9 bp, Unknown
  misc_feature (1)..( 9): Result.002 file - promoters60/1442156
agaaaataa

SEQ ID NO: 114699 - DNA, 7 bp, Unknown
  misc_feature (1)..( 7): Result.002 file - promoters60/1442156
cacgtgt

SEQ ID NO: 114700 - DNA, 7 bp, Unknown
  misc_feature (1)..( 7): Result.002 file - promoters60/1442156
cacgtgc

SEQ ID NO: 114701 - DNA, 7 bp, Unknown
  misc_feature (1)..( 7): Result.002 file - promoters60/1442156
cacgtgg

SEQ ID NO: 114702 - DNA, 7 bp, Unknown
  misc_feature (1)..( 7): Result.002 file - promoters60/1442156
cacatgc

SEQ ID NO: 114703 - DNA, 7 bp, Unknown
  misc_feature (1)..( 7): Result.002 file - promoters60/1442179
tcaacaa

SEQ ID NO: 114704 - DNA, 7 bp, Unknown
  misc_feature (1)..( 7): Result.002 file - promoters60/1442179
tcatcaa

SEQ ID NO: 114705 - DNA, 7 bp, Unknown
  misc_feature (1)..( 7): Result.002 file - promoters60/1442179
gatcaag

SEQ ID NO: 114706 - DNA, 7 bp, Unknown
  misc_feature (1)..( 7): Result.002 file - promoters60/1442179
gattaag

SEQ ID NO: 114707 - DNA, 9 bp, Unknown
  misc_feature (1)..( 9): Result.002 file - promoters60/1442179
gagttcttg

SEQ ID NO: 114708 - DNA, 9 bp, Unknown
  misc_feature (1)..( 9): Result.002 file - promoters60/1442179
gagctcttg

SEQ ID NO: 114709 - DNA, 7 bp, Unknown
  misc_feature (1)..( 7): Result.002 file - promoters60/1442179
aattgta

SEQ ID NO: 114710 - DNA, 7 bp, Unknown
  misc_feature (1)..( 7): Result.002 file - promoters60/1442179
aatagta

SEQ ID NO: 114711 - DNA, 7 bp, Unknown
  misc_feature (1)..( 7): Result.002 file - promoters60/1442179
attattt

SEQ ID NO: 114712 - DNA, 7 bp, Unknown
  misc_feature (1)..( 7): Result.002 file - promoters60/1442179
atttttt

SEQ ID NO: 114713 - DNA, 6 bp, Unknown
  misc_feature (1)..( 6): Result.002 file - promoters60/1442179
ggatat

SEQ ID NO: 114714 - DNA, 6 bp, Unknown
  misc_feature (1)..( 6): Result.002 file - promoters60/1442179
ggatat

SEQ ID NO: 114715 - DNA, 7 bp, Unknown
  misc_feature (1)..( 7): Result.002 file - promoters60/1442179
tttttaa

SEQ ID NO: 114716 - DNA, 7 bp, Unknown
  misc_feature (1)..( 7): Result.002 file - promoters60/1442179
tttttaa

SEQ ID NO: 114717 - DNA, 7 bp, Unknown
  misc_feature (1)..( 7): Result.002 file - promoters60/1442179
taaaaat

SEQ ID NO: 114718 - DNA, 7 bp, Unknown
  misc_feature (1)..( 7): Result.002 file - promoters60/1442179
taagaat

SEQ ID NO: 114719 - DNA, 6 bp, Unknown
  misc_feature (1)..( 6): Result.002 file - promoters60/1442179
cgagcc

SEQ ID NO: 114720 - DNA, 6 bp, Unknown
  misc_feature (1)..( 6): Result.002 file - promoters60/1442179
cgagcc

SEQ ID NO: 114721 - DNA, 6 bp, Unknown
  misc_feature (1)..( 6): Result.002 file - promoters60/1442179
aaatcg

SEQ ID NO: 114722 - DNA, 6 bp, Unknown
  misc_feature (1)..( 6): Result.002 file - promoters60/1442179
aaatcg

SEQ ID NO: 114723 - DNA, 9 bp, Unknown
  misc_feature (1)..( 9): Result.002 file - promoters60/1442179
gtttgtgtt

SEQ ID NO: 114724 - DNA, 9 bp, Unknown
  misc_feature (1)..( 9): Result.002 file - promoters60/1442179
gttggtgtt

SEQ ID NO: 114725 - DNA, 8 bp, Unknown
  misc_feature (1)..( 8): Result.002 file - promoters60/1442179
gtttcaga

SEQ ID NO: 114726 - DNA, 8 bp, Unknown
  misc_feature (1)..( 8): Result.002 file - promoters60/1442179
gtttaaga

SEQ ID NO: 114727 - DNA, 7 bp, Unknown
  misc_feature (1)..( 7): Result.002 file - promoters60/1442189
cttttta

SEQ ID NO: 114728 - DNA, 7 bp, Unknown
  misc_feature (1)..( 7): Result.002 file - promoters60/1442189
cttatta

SEQ ID NO: 114729 - DNA, 12 bp, Unknown
  misc_feature (1)..( 12): Result.002 file - promoters60/1442189
ataagtatctca

SEQ ID NO: 114730 - DNA, 12 bp, Unknown
  misc_feature (1)..( 12): Result.002 file - promoters60/1442189
gaaaatatatca

SEQ ID NO: 114731 - DNA, 12 bp, Unknown
  misc_feature (1)..( 12): Result.002 file - promoters60/1442189
aaaaatataatt

SEQ ID NO: 114732 - DNA, 10 bp, Unknown
  misc_feature (1)..( 10): Result.002 file - promoters60/1442189
aaaaactaga

SEQ ID NO: 114733 - DNA, 10 bp, Unknown
  misc_feature (1)..( 10): Result.002 file - promoters60/1442189
aaaaattagt

SEQ ID NO: 114734 - DNA, 10 bp, Unknown
  misc_feature (1)..( 10): Result.002 file - promoters60/1442189
ggctactaga

SEQ ID NO: 114735 - DNA, 7 bp, Unknown
  misc_feature (1)..( 7): Result.002 file - promoters60/1442189
caataaa

SEQ ID NO: 114736 - DNA, 7 bp, Unknown
  misc_feature (1)..( 7): Result.002 file - promoters60/1442189
caataat

SEQ ID NO: 114737 - DNA, 7 bp, Unknown
  misc_feature (1)..( 7): Result.002 file - promoters60/1442189
caaaaaa

SEQ ID NO: 114738 - DNA, 6 bp, Unknown
  misc_feature (1)..( 6): Result.002 file - promoters60/1442189
aagata

SEQ ID NO: 114739 - DNA, 6 bp, Unknown
  misc_feature (1)..( 6): Result.002 file - promoters60/1442189
aagata

SEQ ID NO: 114740 - DNA, 6 bp, Unknown
  misc_feature (1)..( 6): Result.002 file - promoters60/1442189
aagata

SEQ ID NO: 114741 - DNA, 6 bp, Unknown
  misc_feature (1)..( 6): Result.002 file - promoters60/1442189
ttttcc

SEQ ID NO: 114742 - DNA, 6 bp, Unknown
  misc_feature (1)..( 6): Result.002 file - promoters60/1442189
ttttcc

SEQ ID NO: 114743 - DNA, 6 bp, Unknown
  misc_feature (1)..( 6): Result.002 file - promoters60/1442189
ttaaaa

SEQ ID NO: 114744 - DNA, 6 bp, Unknown
  misc_feature (1)..( 6): Result.002 file - promoters60/1442189
ttaaaa

SEQ ID NO: 114745 - DNA, 6 bp, Unknown
  misc_feature (1)..( 6): Result.002 file - promoters60/1442189
atataa

SEQ ID NO: 114746 - DNA, 6 bp, Unknown
  misc_feature (1)..( 6): Result.002 file - promoters60/1442189
atataa

SEQ ID NO: 114747 - DNA, 6 bp, Unknown
  misc_feature (1)..( 6): Result.002 file - promoters60/1442189
ataaac

SEQ ID NO: 114748 - DNA, 6 bp, Unknown
  misc_feature (1)..( 6): Result.002 file - promoters60/1442189
ataaac

SEQ ID NO: 114749 - DNA, 7 bp, Unknown
  misc_feature (1)..( 7): Result.002 file - promoters60/1442189
gtgtgat

SEQ ID NO: 114750 - DNA, 7 bp, Unknown
  misc_feature (1)..( 7): Result.002 file - promoters60/1442189
gtgggat

SEQ ID NO: 114751 - DNA, 6 bp, Unknown
  misc_feature (1)..( 6): Result.002 file - promoters60/1442189
aaaaat

SEQ ID NO: 114752 - DNA, 6 bp, Unknown
  misc_feature (1)..( 6): Result.002 file - promoters60/1442189
aaaaat

SEQ ID NO: 114753 - DNA, 9 bp, Unknown
  misc_feature (1)..( 9): Result.002 file - promoters60/1442189
aaatgaaga

SEQ ID NO: 114754 - DNA, 9 bp, Unknown
  misc_feature (1)..( 9): Result.002 file - promoters60/1442189
aaacgaaga

SEQ ID NO: 114755 - DNA, 7 bp, Unknown
  misc_feature (1)..( 7): Result.002 file - promoters60/1442189
attttaa

SEQ ID NO: 114756 - DNA, 7 bp, Unknown
  misc_feature (1)..( 7): Result.002 file - promoters60/1442189
attctaa

SEQ ID NO: 114757 - DNA, 6 bp, Unknown
  misc_feature (1)..( 6): Result.002 file - promoters60/1442189
aacgga

SEQ ID NO: 114758 - DNA, 6 bp, Unknown
  misc_feature (1)..( 6): Result.002 file - promoters60/1442189
aacgga

SEQ ID NO: 114759 - DNA, 8 bp, Unknown
  misc_feature (1)..( 8): Result.002 file - promoters60/1442189
aaaatata

SEQ ID NO: 114760 - DNA, 8 bp, Unknown
  misc_feature (1)..( 8): Result.002 file - promoters60/1442189
aaaatata

SEQ ID NO: 114761 - DNA, 6 bp, Unknown
  misc_feature (1)..( 6): Result.002 file - promoters60/1442189
tttgaa

SEQ ID NO: 114762 - DNA, 6 bp, Unknown
  misc_feature (1)..( 6): Result.002 file - promoters60/1442189
tttgaa

SEQ ID NO: 114763 - DNA, 7 bp, Unknown
  misc_feature (1)..( 7): Result.002 file - promoters60/1442189
tatcgca

SEQ ID NO: 114764 - DNA, 7 bp, Unknown
  misc_feature (1)..( 7): Result.002 file - promoters60/1442189
tattgca

SEQ ID NO: 114765 - DNA, 8 bp, Unknown
  misc_feature (1)..( 8): Result.002 file - promoters60/1442189
agatgcac

SEQ ID NO: 114766 - DNA, 8 bp, Unknown
  misc_feature (1)..( 8): Result.002 file - promoters60/1442189
agatccac

SEQ ID NO: 114767 - DNA, 13 bp, Unknown
  misc_feature (1)..( 13): Result.002 file - promoters60/1442189
ttttctctctttc

SEQ ID NO: 114768 - DNA, 13 bp, Unknown
  misc_feature (1)..( 13): Result.002 file - promoters60/1442189
ttttctctcattc

SEQ ID NO: 114769 - DNA, 8 bp, Unknown
  misc_feature (1)..( 8): Result.002 file - promoters60/1442240
tgcataat

SEQ ID NO: 114770 - DNA, 8 bp, Unknown
  misc_feature (1)..( 8): Result.002 file - promoters60/1442240
agcataag

SEQ ID NO: 114771 - DNA, 8 bp, Unknown
  misc_feature (1)..( 8): Result.002 file - promoters60/1442240
tgcatatg

SEQ ID NO: 114772 - DNA, 8 bp, Unknown
  misc_feature (1)..( 8): Result.002 file - promoters60/1442240
tccataat

SEQ ID NO: 114773 - DNA, 10 bp, Unknown
  misc_feature (1)..( 10): Result.002 file - promoters60/1442240
cgaatctctt

SEQ ID NO: 114774 - DNA, 10 bp, Unknown
  misc_feature (1)..( 10): Result.002 file - promoters60/1442240
ggaatctctt

SEQ ID NO: 114775 - DNA, 10 bp, Unknown
  misc_feature (1)..( 10): Result.002 file - promoters60/1442240
tgaatctaag

SEQ ID NO: 114776 - DNA, 10 bp, Unknown
  misc_feature (1)..( 10): Result.002 file - promoters60/1442240
tgaatcaatc

SEQ ID NO: 114777 - DNA, 13 bp, Unknown
  misc_feature (1)..( 13): Result.002 file - promoters60/1442240
caattttttttac

SEQ ID NO: 114778 - DNA, 13 bp, Unknown
  misc_feature (1)..( 13): Result.002 file - promoters60/1442240
agatttttttaaa

SEQ ID NO: 114779 - DNA, 13 bp, Unknown
  misc_feature (1)..( 13): Result.002 file - promoters60/1442240
agattttcaaagc

SEQ ID NO: 114780 - DNA, 13 bp, Unknown
  misc_feature (1)..( 13): Result.002 file - promoters60/1442240
atattgtcaaagc

SEQ ID NO: 114781 - DNA, 12 bp, Unknown
  misc_feature (1)..( 12): Result.002 file - promoters60/1442240
agtgtttcatat

SEQ ID NO: 114782 - DNA, 12 bp, Unknown
  misc_feature (1)..( 12): Result.002 file - promoters60/1442240
agtttttgatat

SEQ ID NO: 114783 - DNA, 12 bp, Unknown
  misc_feature (1)..( 12): Result.002 file - promoters60/1442240
gccgtttgataa

SEQ ID NO: 114784 - DNA, 12 bp, Unknown
  misc_feature (1)..( 12): Result.002 file - promoters60/1442240
tcattttgacat

SEQ ID NO: 114785 - DNA, 12 bp, Unknown
  misc_feature (1)..( 12): Result.002 file - promoters60/1442240
agttttcttttc

SEQ ID NO: 114786 - DNA, 9 bp, Unknown
  misc_feature (1)..( 9): Result.002 file - promoters60/1442240
cattttcaa

SEQ ID NO: 114787 - DNA, 9 bp, Unknown
  misc_feature (1)..( 9): Result.002 file - promoters60/1442240
tggtttcaa

SEQ ID NO: 114788 - DNA, 10 bp, Unknown
  misc_feature (1)..( 10): Result.002 file - promoters60/1442240
atattgtcaa

SEQ ID NO: 114789 - DNA, 10 bp, Unknown
  misc_feature (1)..( 10): Result.002 file - promoters60/1442240
agattttcaa

SEQ ID NO: 114790 - DNA, 10 bp, Unknown
  misc_feature (1)..( 10): Result.002 file - promoters60/1442240
agattttttt

SEQ ID NO: 114791 - DNA, 10 bp, Unknown
  misc_feature (1)..( 10): Result.002 file - promoters60/1442240
tcattttcaa

SEQ ID NO: 114792 - DNA, 10 bp, Unknown
  misc_feature (1)..( 10): Result.002 file - promoters60/1442240
tcattttgga

SEQ ID NO: 114793 - DNA, 10 bp, Unknown
  misc_feature (1)..( 10): Result.002 file - promoters60/1442240
agattttcaa

SEQ ID NO: 114794 - DNA, 10 bp, Unknown
  misc_feature (1)..( 10): Result.002 file - promoters60/1442240
agattttttt

SEQ ID NO: 114795 - DNA, 9 bp, Unknown
  misc_feature (1)..( 9): Result.002 file - promoters60/1442240
atccatata

SEQ ID NO: 114796 - DNA, 9 bp, Unknown
  misc_feature (1)..( 9): Result.002 file - promoters60/1442240
atcaatatt

SEQ ID NO: 114797 - DNA, 9 bp, Unknown
  misc_feature (1)..( 9): Result.002 file - promoters60/1442240
atcaacaaa

SEQ ID NO: 114798 - DNA, 9 bp, Unknown
  misc_feature (1)..( 9): Result.002 file - promoters60/1442240
tgtaacaaa

SEQ ID NO: 114799 - DNA, 9 bp, Unknown
  misc_feature (1)..( 9): Result.002 file - promoters60/1442244
ggatcatta

SEQ ID NO: 114800 - DNA, 9 bp, Unknown
  misc_feature (1)..( 9): Result.002 file - promoters60/1442244
acatcttta

SEQ ID NO: 114801 - DNA, 9 bp, Unknown
  misc_feature (1)..( 9): Result.002 file - promoters60/1442244
acatctttg

SEQ ID NO: 114802 - DNA, 12 bp, Unknown
  misc_feature (1)..( 12): Result.002 file - promoters60/1442244
gcagttacaaaa

SEQ ID NO: 114803 - DNA, 12 bp, Unknown
  misc_feature (1)..( 12): Result.002 file - promoters60/1442244
ttctttaaaaaa

SEQ ID NO: 114804 - DNA, 12 bp, Unknown
  misc_feature (1)..( 12): Result.002 file - promoters60/1442244
gcagttccaata

SEQ ID NO: 114805 - DNA, 8 bp, Unknown
  misc_feature (1)..( 8): Result.002 file - promoters60/1442244
attaaaaa

SEQ ID NO: 114806 - DNA, 8 bp, Unknown
  misc_feature (1)..( 8): Result.002 file - promoters60/1442244
attgaaaa

SEQ ID NO: 114807 - DNA, 8 bp, Unknown
  misc_feature (1)..( 8): Result.002 file - promoters60/1442244
attaaaag

SEQ ID NO: 114808 - DNA, 12 bp, Unknown
  misc_feature (1)..( 12): Result.002 file - promoters60/1442244
aagtaataacac

SEQ ID NO: 114809 - DNA, 12 bp, Unknown
  misc_feature (1)..( 12): Result.002 file - promoters60/1442244
atgtaatgacac

SEQ ID NO: 114810 - DNA, 12 bp, Unknown
  misc_feature (1)..( 12): Result.002 file - promoters60/1442244
atggaatagatc

SEQ ID NO: 114811 - DNA, 8 bp, Unknown
  misc_feature (1)..( 8): Result.002 file - promoters60/1442244
tataaaaa

SEQ ID NO: 114812 - DNA, 8 bp, Unknown
  misc_feature (1)..( 8): Result.002 file - promoters60/1442244
attaaaaa

SEQ ID NO: 114813 - DNA, 8 bp, Unknown
  misc_feature (1)..( 8): Result.002 file - promoters60/1442244
tataaaag

SEQ ID NO: 114814 - DNA, 12 bp, Unknown
  misc_feature (1)..( 12): Result.002 file - promoters60/1442244
aaaagaaacaaa

SEQ ID NO: 114815 - DNA, 12 bp, Unknown
  misc_feature (1)..( 12): Result.002 file - promoters60/1442244
aaaagaaaaaaa

SEQ ID NO: 114816 - DNA, 12 bp, Unknown
  misc_feature (1)..( 12): Result.002 file - promoters60/1442244
caattaaaaaag

SEQ ID NO: 114817 - DNA, 11 bp, Unknown
  misc_feature (1)..( 11): Result.002 file - promoters60/1442316
caaataaaaca

SEQ ID NO: 114818 - DNA, 11 bp, Unknown
  misc_feature (1)..( 11): Result.002 file - promoters60/1442316
aaaagaaaaca

SEQ ID NO: 114819 - DNA, 11 bp, Unknown
  misc_feature (1)..( 11): Result.002 file - promoters60/1442316
gaaataacaat

SEQ ID NO: 114820 - DNA, 11 bp, Unknown
  misc_feature (1)..( 11): Result.002 file - promoters60/1442316
aaaagaatctc

SEQ ID NO: 114821 - DNA, 11 bp, Unknown
  misc_feature (1)..( 11): Result.002 file - promoters60/1442316
gattgaaaact

SEQ ID NO: 114822 - DNA, 12 bp, Unknown
  misc_feature (1)..( 12): Result.002 file - promoters60/1442316
attaaaacaaat

SEQ ID NO: 114823 - DNA, 12 bp, Unknown
  misc_feature (1)..( 12): Result.002 file - promoters60/1442316
aataaaagaaaa

SEQ ID NO: 114824 - DNA, 12 bp, Unknown
  misc_feature (1)..( 12): Result.002 file - promoters60/1442316
atttaaataaat

SEQ ID NO: 114825 - DNA, 12 bp, Unknown
  misc_feature (1)..( 12): Result.002 file - promoters60/1442316
aattaataaaaa

SEQ ID NO: 114826 - DNA, 12 bp, Unknown
  misc_feature (1)..( 12): Result.002 file - promoters60/1442316
gcccaattaaaa

SEQ ID NO: 114827 - DNA, 10 bp, Unknown
  misc_feature (1)..( 10): Result.002 file - promoters60/1442316
taacaaataa

SEQ ID NO: 114828 - DNA, 10 bp, Unknown
  misc_feature (1)..( 10): Result.002 file - promoters60/1442316
taacaattga

SEQ ID NO: 114829 - DNA, 10 bp, Unknown
  misc_feature (1)..( 10): Result.002 file - promoters60/1442316
aaacaatttt

SEQ ID NO: 114830 - DNA, 10 bp, Unknown
  misc_feature (1)..( 10): Result.002 file - promoters60/1442316
ttacaaattt

SEQ ID NO: 114831 - DNA, 10 bp, Unknown
  misc_feature (1)..( 10): Result.002 file - promoters60/1442316
gattgtaatt

SEQ ID NO: 114832 - DNA, 10 bp, Unknown
  misc_feature (1)..( 10): Result.002 file - promoters60/1442316
ttttgcaatt

SEQ ID NO: 114833 - DNA, 10 bp, Unknown
  misc_feature (1)..( 10): Result.002 file - promoters60/1442316
aattataagc

SEQ ID NO: 114834 - DNA, 10 bp, Unknown
  misc_feature (1)..( 10): Result.002 file - promoters60/1442316
aatcatagta

SEQ ID NO: 114835 - DNA, 17 bp, Unknown
  misc_feature (1)..( 17): Result.002 file - promoters60/1442326
acaatgggctgggccta

SEQ ID NO: 114836 - DNA, 17 bp, Unknown
  misc_feature (1)..( 17): Result.002 file - promoters60/1442326
gaaataggcccaacaaa

SEQ ID NO: 114837 - DNA, 17 bp, Unknown
  misc_feature (1)..( 17): Result.002 file - promoters60/1442326
taaaaaggcccattata

SEQ ID NO: 114838 - DNA, 17 bp, Unknown
  misc_feature (1)..( 17): Result.002 file - promoters60/1442326
aaataaagcccattata

SEQ ID NO: 114839 - DNA, 17 bp, Unknown
  misc_feature (1)..( 17): Result.002 file - promoters60/1442326
taaaaaatatctgaaac

SEQ ID NO: 114840 - DNA, 17 bp, Unknown
  misc_feature (1)..( 17): Result.002 file - promoters60/1442326
ccaaacggctaggatta

SEQ ID NO: 114841 - DNA, 12 bp, Unknown
  misc_feature (1)..( 12): Result.002 file - promoters60/1442326
aaaaaagttatg

SEQ ID NO: 114842 - DNA, 12 bp, Unknown
  misc_feature (1)..( 12): Result.002 file - promoters60/1442326
tcaaaagttatg

SEQ ID NO: 114843 - DNA, 12 bp, Unknown
  misc_feature (1)..( 12): Result.002 file - promoters60/1442326
accaaagaaagg

SEQ ID NO: 114844 - DNA, 12 bp, Unknown
  misc_feature (1)..( 12): Result.002 file - promoters60/1442326
aaaaaagtataa

SEQ ID NO: 114845 - DNA, 12 bp, Unknown
  misc_feature (1)..( 12): Result.002 file - promoters60/1442326
atcaaacaaatc

SEQ ID NO: 114846 - DNA, 12 bp, Unknown
  misc_feature (1)..( 12): Result.002 file - promoters60/1442326
cacaacgaataa

SEQ ID NO: 114847 - DNA, 12 bp, Unknown
  misc_feature (1)..( 12): Result.002 file - promoters60/1442326
aatgtagaaatc

SEQ ID NO: 114848 - DNA, 9 bp, Unknown
  misc_feature (1)..( 9): Result.002 file - promoters60/1442326
gaaaaaaag

SEQ ID NO: 114849 - DNA, 9 bp, Unknown
  misc_feature (1)..( 9): Result.002 file - promoters60/1442326
caaacaaat

SEQ ID NO: 114850 - DNA, 9 bp, Unknown
  misc_feature (1)..( 9): Result.002 file - promoters60/1442326
caaagaaag

SEQ ID NO: 114851 - DNA, 9 bp, Unknown
  misc_feature (1)..( 9): Result.002 file - promoters60/1442326
caaaaaaaa

SEQ ID NO: 114852 - DNA, 9 bp, Unknown
  misc_feature (1)..( 9): Result.002 file - promoters60/1442326
caaacacaa

SEQ ID NO: 114853 - DNA, 9 bp, Unknown
  misc_feature (1)..( 9): Result.002 file - promoters60/1442326
caacgaata

SEQ ID NO: 114854 - DNA, 8 bp, Unknown
  misc_feature (1)..( 8): Result.002 file - promoters60/1442326
gaattgac

SEQ ID NO: 114855 - DNA, 8 bp, Unknown
  misc_feature (1)..( 8): Result.002 file - promoters60/1442326
gaaatgac

SEQ ID NO: 114856 - DNA, 8 bp, Unknown
  misc_feature (1)..( 8): Result.002 file - promoters60/1442326
caaacgac

SEQ ID NO: 114857 - DNA, 8 bp, Unknown
  misc_feature (1)..( 8): Result.002 file - promoters60/1442326
caaaagac

SEQ ID NO: 114858 - DNA, 8 bp, Unknown
  misc_feature (1)..( 8): Result.002 file - promoters60/1442326
caaaagtt

SEQ ID NO: 114859 - DNA, 8 bp, Unknown
  misc_feature (1)..( 8): Result.002 file - promoters60/1442326
aaaaagat

SEQ ID NO: 114860 - DNA, 11 bp, Unknown
  misc_feature (1)..( 11): Result.002 file - promoters60/1442408
ataaaattaat

SEQ ID NO: 114861 - DNA, 11 bp, Unknown
  misc_feature (1)..( 11): Result.002 file - promoters60/1442408
ataatatttca

SEQ ID NO: 114862 - DNA, 11 bp, Unknown
  misc_feature (1)..( 11): Result.002 file - promoters60/1442408
aaaaaatcaaa

SEQ ID NO: 114863 - DNA, 11 bp, Unknown
  misc_feature (1)..( 11): Result.002 file - promoters60/1442408
atattattaac

SEQ ID NO: 114864 - DNA, 11 bp, Unknown
  misc_feature (1)..( 11): Result.002 file - promoters60/1442408
ccaacattcag

SEQ ID NO: 114865 - DNA, 11 bp, Unknown
  misc_feature (1)..( 11): Result.002 file - promoters60/1442408
tgaatattttc

SEQ ID NO: 114866 - DNA, 11 bp, Unknown
  misc_feature (1)..( 11): Result.002 file - promoters60/1442408
tatatatttca

SEQ ID NO: 114867 - DNA, 11 bp, Unknown
  misc_feature (1)..( 11): Result.002 file - promoters60/1442408
gttatattgac

SEQ ID NO: 114868 - DNA, 13 bp, Unknown
  misc_feature (1)..( 13): Result.002 file - promoters60/1442408
aaataaatttttg

SEQ ID NO: 114869 - DNA, 13 bp, Unknown
  misc_feature (1)..( 13): Result.002 file - promoters60/1442408
aaacaaatgtttg

SEQ ID NO: 114870 - DNA, 13 bp, Unknown
  misc_feature (1)..( 13): Result.002 file - promoters60/1442408
tcataaatgtatc

SEQ ID NO: 114871 - DNA, 13 bp, Unknown
  misc_feature (1)..( 13): Result.002 file - promoters60/1442408
ctttaagtttccg

SEQ ID NO: 114872 - DNA, 13 bp, Unknown
  misc_feature (1)..( 13): Result.002 file - promoters60/1442408
catgaaatttaca

SEQ ID NO: 114873 - DNA, 13 bp, Unknown
  misc_feature (1)..( 13): Result.002 file - promoters60/1442408
ggtcaaatggatc

SEQ ID NO: 114874 - DNA, 9 bp, Unknown
  misc_feature (1)..( 9): Result.002 file - promoters60/1442408
ttaatattt

SEQ ID NO: 114875 - DNA, 9 bp, Unknown
  misc_feature (1)..( 9): Result.002 file - promoters60/1442408
tcaatatta

SEQ ID NO: 114876 - DNA, 9 bp, Unknown
  misc_feature (1)..( 9): Result.002 file - promoters60/1442408
ataatattt

SEQ ID NO: 114877 - DNA, 9 bp, Unknown
  misc_feature (1)..( 9): Result.002 file - promoters60/1442408
ccaacattc

SEQ ID NO: 114878 - DNA, 9 bp, Unknown
  misc_feature (1)..( 9): Result.002 file - promoters60/1442408
tgaatattt

SEQ ID NO: 114879 - DNA, 9 bp, Unknown
  misc_feature (1)..( 9): Result.002 file - promoters60/1442408
tatatattt

SEQ ID NO: 114880 - DNA, 9 bp, Unknown
  misc_feature (1)..( 9): Result.002 file - promoters60/1442408
gttatattg

SEQ ID NO: 114881 - DNA, 9 bp, Unknown
  misc_feature (1)..( 9): Result.002 file - promoters60/1442408
tatatcaaa

SEQ ID NO: 114882 - DNA, 9 bp, Unknown
  misc_feature (1)..( 9): Result.002 file - promoters60/1442408
attataaaa

SEQ ID NO: 114883 - DNA, 9 bp, Unknown
  misc_feature (1)..( 9): Result.002 file - promoters60/1442408
tatatttca

SEQ ID NO: 114884 - DNA, 9 bp, Unknown
  misc_feature (1)..( 9): Result.002 file - promoters60/1442408
tctatttct

SEQ ID NO: 114885 - DNA, 9 bp, Unknown
  misc_feature (1)..( 9): Result.002 file - promoters60/1442408
aatattttc

SEQ ID NO: 114886 - DNA, 9 bp, Unknown
  misc_feature (1)..( 9): Result.002 file - promoters60/1442408
tatattgac

SEQ ID NO: 114887 - DNA, 10 bp, Unknown
  misc_feature (1)..( 10): Result.002 file - promoters60/1442408
aaaccaatgt

SEQ ID NO: 114888 - DNA, 10 bp, Unknown
  misc_feature (1)..( 10): Result.002 file - promoters60/1442408
aaatcaaata

SEQ ID NO: 114889 - DNA, 11 bp, Unknown
  misc_feature (1)..( 11): Result.002 file - promoters60/1442408
aaattcaatgt

SEQ ID NO: 114890 - DNA, 11 bp, Unknown
  misc_feature (1)..( 11): Result.002 file - promoters60/1442408
tatatcagatt

SEQ ID NO: 114891 - DNA, 11 bp, Unknown
  misc_feature (1)..( 11): Result.002 file - promoters60/1442408
taatccaacgg

SEQ ID NO: 114892 - DNA, 11 bp, Unknown
  misc_feature (1)..( 11): Result.002 file - promoters60/1442408
ttaatcaatgg

SEQ ID NO: 114893 - DNA, 7 bp, Unknown
  misc_feature (1)..( 7): Result.002 file - promoters60/1442427
gtcgaaa

SEQ ID NO: 114894 - DNA, 7 bp, Unknown
  misc_feature (1)..( 7): Result.002 file - promoters60/1442427
gtctaaa

SEQ ID NO: 114895 - DNA, 7 bp, Unknown
  misc_feature (1)..( 7): Result.002 file - promoters60/1442427
aaacatt

SEQ ID NO: 114896 - DNA, 7 bp, Unknown
  misc_feature (1)..( 7): Result.002 file - promoters60/1442427
aaatatt

SEQ ID NO: 114897 - DNA, 10 bp, Unknown
  misc_feature (1)..( 10): Result.002 file - promoters60/1442427
taaatttgct

SEQ ID NO: 114898 - DNA, 10 bp, Unknown
  misc_feature (1)..( 10): Result.002 file - promoters60/1442427
taaatttaaa

SEQ ID NO: 114899 - DNA, 10 bp, Unknown
  misc_feature (1)..( 10): Result.002 file - promoters60/1442427
tgaatctgct

SEQ ID NO: 114900 - DNA, 9 bp, Unknown
  misc_feature (1)..( 9): Result.002 file - promoters60/1442427
tcagttaga

SEQ ID NO: 114901 - DNA, 9 bp, Unknown
  misc_feature (1)..( 9): Result.002 file - promoters60/1442427
tcagtaaga

SEQ ID NO: 114902 - DNA, 7 bp, Unknown
  misc_feature (1)..( 7): Result.002 file - promoters60/1442427
tttattg

SEQ ID NO: 114903 - DNA, 7 bp, Unknown
  misc_feature (1)..( 7): Result.002 file - promoters60/1442427
tttcttg

SEQ ID NO: 114904 - DNA, 7 bp, Unknown
  misc_feature (1)..( 7): Result.002 file - promoters60/1442427
tgaaaaa

SEQ ID NO: 114905 - DNA, 7 bp, Unknown
  misc_feature (1)..( 7): Result.002 file - promoters60/1442427
tgaaaaa

SEQ ID NO: 114906 - DNA, 6 bp, Unknown
  misc_feature (1)..( 6): Result.002 file - promoters60/1442427
aatatt

SEQ ID NO: 114907 - DNA, 6 bp, Unknown
  misc_feature (1)..( 6): Result.002 file - promoters60/1442427
aatatt

SEQ ID NO: 114908 - DNA, 12 bp, Unknown
  misc_feature (1)..( 12): Result.002 file - promoters60/1442427
ttagtttggtct

SEQ ID NO: 114909 - DNA, 12 bp, Unknown
  misc_feature (1)..( 12): Result.002 file - promoters60/1442427
ttagtttgttct

SEQ ID NO: 114910 - DNA, 6 bp, Unknown
  misc_feature (1)..( 6): Result.002 file - promoters60/1442427
ttttat

SEQ ID NO: 114911 - DNA, 6 bp, Unknown
  misc_feature (1)..( 6): Result.002 file - promoters60/1442427
ttttat

SEQ ID NO: 114912 - DNA, 9 bp, Unknown
  misc_feature (1)..( 9): Result.002 file - promoters60/1442427
attataaga

SEQ ID NO: 114913 - DNA, 9 bp, Unknown
  misc_feature (1)..( 9): Result.002 file - promoters60/1442427
attagaaga

SEQ ID NO: 114914 - DNA, 6 bp, Unknown
  misc_feature (1)..( 6): Result.002 file - promoters60/1442452
atgttt

SEQ ID NO: 114915 - DNA, 6 bp, Unknown
  misc_feature (1)..( 6): Result.002 file - promoters60/1442452
atgttt

SEQ ID NO: 114916 - DNA, 18 bp, Unknown
  misc_feature (1)..( 18): Result.002 file - promoters60/1442452
tttgtattttagagaaat

SEQ ID NO: 114917 - DNA, 18 bp, Unknown
  misc_feature (1)..( 18): Result.002 file - promoters60/1442452
aatcatgtttagaaaaat

SEQ ID NO: 114918 - DNA, 18 bp, Unknown
  misc_feature (1)..( 18): Result.002 file - promoters60/1442452
tttatattttagctgtct

SEQ ID NO: 114919 - DNA, 11 bp, Unknown
  misc_feature (1)..( 11): Result.002 file - promoters60/1442452
ttttgaagaat

SEQ ID NO: 114920 - DNA, 11 bp, Unknown
  misc_feature (1)..( 11): Result.002 file - promoters60/1442452
ttttgatgaat

SEQ ID NO: 114921 - DNA, 11 bp, Unknown
  misc_feature (1)..( 11): Result.002 file - promoters60/1442452
atttccataaa

SEQ ID NO: 114922 - DNA, 11 bp, Unknown
  misc_feature (1)..( 11): Result.002 file - promoters60/1442452
attttcataaa

SEQ ID NO: 114923 - DNA, 9 bp, Unknown
  misc_feature (1)..( 9): Result.002 file - promoters60/1442452
aaatgttag

SEQ ID NO: 114924 - DNA, 9 bp, Unknown
  misc_feature (1)..( 9): Result.002 file - promoters60/1442452
aaattttaa

SEQ ID NO: 114925 - DNA, 10 bp, Unknown
  misc_feature (1)..( 10): Result.002 file - promoters60/1442452
aaactgttag

SEQ ID NO: 114926 - DNA, 6 bp, Unknown
  misc_feature (1)..( 6): Result.002 file - promoters60/1442452
taaaat

SEQ ID NO: 114927 - DNA, 6 bp, Unknown
  misc_feature (1)..( 6): Result.002 file - promoters60/1442452
taaaat

SEQ ID NO: 114928 - DNA, 7 bp, Unknown
  misc_feature (1)..( 7): Result.002 file - promoters60/1442452
attaaag

SEQ ID NO: 114929 - DNA, 7 bp, Unknown
  misc_feature (1)..( 7): Result.002 file - promoters60/1442452
attcaag

SEQ ID NO: 114930 - DNA, 11 bp, Unknown
  misc_feature (1)..( 11): Result.002 file - promoters60/1442452
atcgaacagca

SEQ ID NO: 114931 - DNA, 11 bp, Unknown
  misc_feature (1)..( 11): Result.002 file - promoters60/1442452
atccaacggca

SEQ ID NO: 114932 - DNA, 11 bp, Unknown
  misc_feature (1)..( 11): Result.002 file - promoters60/1442452
tttcaacggtt

SEQ ID NO: 114933 - DNA, 7 bp, Unknown
  misc_feature (1)..( 7): Result.002 file - promoters60/1442452
tccacgt

SEQ ID NO: 114934 - DNA, 7 bp, Unknown
  misc_feature (1)..( 7): Result.002 file - promoters60/1442452
tccgcgt

SEQ ID NO: 114935 - DNA, 8 bp, Unknown
  misc_feature (1)..( 8): Result.002 file - promoters60/1442452
tatataaa

SEQ ID NO: 114936 - DNA, 8 bp, Unknown
  misc_feature (1)..( 8): Result.002 file - promoters60/1442452
tatataat

SEQ ID NO: 114937 - DNA, 8 bp, Unknown
  misc_feature (1)..( 8): Result.002 file - promoters60/1442452
actataaa

SEQ ID NO: 114938 - DNA, 10 bp, Unknown
  misc_feature (1)..( 10): Result.002 file - promoters60/1442452
tataaacaaa

SEQ ID NO: 114939 - DNA, 10 bp, Unknown
  misc_feature (1)..( 10): Result.002 file - promoters60/1442452
aataaccaaa

SEQ ID NO: 114940 - DNA, 10 bp, Unknown
  misc_feature (1)..( 10): Result.002 file - promoters60/1442452
tataaaatca

SEQ ID NO: 114941 - DNA, 6 bp, Unknown
  misc_feature (1)..( 6): Result.002 file - promoters60/1442452
aaattc

SEQ ID NO: 114942 - DNA, 6 bp, Unknown
  misc_feature (1)..( 6): Result.002 file - promoters60/1442452
aaattc

SEQ ID NO: 114943 - DNA, 7 bp, Unknown
  misc_feature (1)..( 7): Result.002 file - promoters60/1442452
tttgaaa

SEQ ID NO: 114944 - DNA, 7 bp, Unknown
  misc_feature (1)..( 7): Result.002 file - promoters60/1442452
ttttaaa

SEQ ID NO: 114945 - DNA, 7 bp, Unknown
  misc_feature (1)..( 7): Result.002 file - promoters60/1442452
actttgt

SEQ ID NO: 114946 - DNA, 7 bp, Unknown
  misc_feature (1)..( 7): Result.002 file - promoters60/1442452
actctgt

SEQ ID NO: 114947 - DNA, 6 bp, Unknown
  misc_feature (1)..( 6): Result.002 file - promoters60/1442452
atctcc

SEQ ID NO: 114948 - DNA, 6 bp, Unknown
  misc_feature (1)..( 6): Result.002 file - promoters60/1442452
atctcc

SEQ ID NO: 114949 - DNA, 8 bp, Unknown
  misc_feature (1)..( 8): Result.002 file - promoters60/1442452
atccgcgt

SEQ ID NO: 114950 - DNA, 8 bp, Unknown
  misc_feature (1)..( 8): Result.002 file - promoters60/1442452
atcctcgt

SEQ ID NO: 114951 - DNA, 14 bp, Unknown
  misc_feature (1)..( 14): Result.002 file - promoters60/1442452
taactaatcagatc

SEQ ID NO: 114952 - DNA, 14 bp, Unknown
  misc_feature (1)..( 14): Result.002 file - promoters60/1442452
taaccaatcatatc

SEQ ID NO: 114953 - DNA, 6 bp, Unknown
  misc_feature (1)..( 6): Result.002 file - promoters60/1442452
tattct

SEQ ID NO: 114954 - DNA, 6 bp, Unknown
  misc_feature (1)..( 6): Result.002 file - promoters60/1442452
tattct

SEQ ID NO: 114955 - DNA, 9 bp, Unknown
  misc_feature (1)..( 9): Result.002 file - promoters60/1442452
aatacgaca

SEQ ID NO: 114956 - DNA, 9 bp, Unknown
  misc_feature (1)..( 9): Result.002 file - promoters60/1442452
aatacaaca

SEQ ID NO: 114957 - DNA, 7 bp, Unknown
  misc_feature (1)..( 7): Result.002 file - promoters60/1442452
atactat

SEQ ID NO: 114958 - DNA, 7 bp, Unknown
  misc_feature (1)..( 7): Result.002 file - promoters60/1442452
atattat

SEQ ID NO: 114959 - DNA, 8 bp, Unknown
  misc_feature (1)..( 8): Result.002 file - promoters60/1442452
agatgtgt

SEQ ID NO: 114960 - DNA, 8 bp, Unknown
  misc_feature (1)..( 8): Result.002 file - promoters60/1442452
agatatgt

SEQ ID NO: 114961 - DNA, 15 bp, Unknown
  misc_feature (1)..( 15): Result.002 file - promoters60/1442452
ttataaaccgtcgat

SEQ ID NO: 114962 - DNA, 15 bp, Unknown
  misc_feature (1)..( 15): Result.002 file - promoters60/1442452
ttataaaccgtcgat

SEQ ID NO: 114963 - DNA, 8 bp, Unknown
  misc_feature (1)..( 8): Result.002 file - promoters60/1442468
gttgtttc

SEQ ID NO: 114964 - DNA, 8 bp, Unknown
  misc_feature (1)..( 8): Result.002 file - promoters60/1442468
tttggttc

SEQ ID NO: 114965 - DNA, 8 bp, Unknown
  misc_feature (1)..( 8): Result.002 file - promoters60/1442468
gttgtttc

SEQ ID NO: 114966 - DNA, 8 bp, Unknown
  misc_feature (1)..( 8): Result.002 file - promoters60/1442468
tttgtttg

SEQ ID NO: 114967 - DNA, 8 bp, Unknown
  misc_feature (1)..( 8): Result.002 file - promoters60/1442468
tttttttg

SEQ ID NO: 114968 - DNA, 8 bp, Unknown
  misc_feature (1)..( 8): Result.002 file - promoters60/1442468
ttttttta

SEQ ID NO: 114969 - DNA, 12 bp, Unknown
  misc_feature (1)..( 12): Result.002 file - promoters60/1442468
tttggtttttgt

SEQ ID NO: 114970 - DNA, 12 bp, Unknown
  misc_feature (1)..( 12): Result.002 file - promoters60/1442468
ttttgtttttgt

SEQ ID NO: 114971 - DNA, 12 bp, Unknown
  misc_feature (1)..( 12): Result.002 file - promoters60/1442468
tttcgtttctca

SEQ ID NO: 114972 - DNA, 8 bp, Unknown
  misc_feature (1)..( 8): Result.002 file - promoters60/1442468
ctatttga

SEQ ID NO: 114973 - DNA, 8 bp, Unknown
  misc_feature (1)..( 8): Result.002 file - promoters60/1442468
ttatttga

SEQ ID NO: 114974 - DNA, 8 bp, Unknown
  misc_feature (1)..( 8): Result.002 file - promoters60/1442468
ctatctga

SEQ ID NO: 114975 - DNA, 10 bp, Unknown
  misc_feature (1)..( 10): Result.002 file - promoters60/1442468
cgtatgtaaa

SEQ ID NO: 114976 - DNA, 10 bp, Unknown
  misc_feature (1)..( 10): Result.002 file - promoters60/1442468
aaattgtaaa

SEQ ID NO: 114977 - DNA, 10 bp, Unknown
  misc_feature (1)..( 10): Result.002 file - promoters60/1442468
aaattataat

SEQ ID NO: 114978 - DNA, 8 bp, Unknown
  misc_feature (1)..( 8): Result.002 file - promoters60/1442468
ctaaacat

SEQ ID NO: 114979 - DNA, 8 bp, Unknown
  misc_feature (1)..( 8): Result.002 file - promoters60/1442468
ctaaacaa

SEQ ID NO: 114980 - DNA, 8 bp, Unknown
  misc_feature (1)..( 8): Result.002 file - promoters60/1442468
ttaaacat

SEQ ID NO: 114981 - DNA, 14 bp, Unknown
  misc_feature (1)..( 14): Result.002 file - promoters60/1442468
attgctaaaactaa

SEQ ID NO: 114982 - DNA, 14 bp, Unknown
  misc_feature (1)..( 14): Result.002 file - promoters60/1442468
attgccaaaacctc

SEQ ID NO: 114983 - DNA, 14 bp, Unknown
  misc_feature (1)..( 14): Result.002 file - promoters60/1442468
aaaccataaaccct

SEQ ID NO: 114984 - DNA, 7 bp, Unknown
  misc_feature (1)..( 7): Result.002 file - promoters60/1442468
aaaacag

SEQ ID NO: 114985 - DNA, 7 bp, Unknown
  misc_feature (1)..( 7): Result.002 file - promoters60/1442468
gaaacag

SEQ ID NO: 114986 - DNA, 7 bp, Unknown
  misc_feature (1)..( 7): Result.002 file - promoters60/1442468
gaaacaa

SEQ ID NO: 114987 - DNA, 11 bp, Unknown
  misc_feature (1)..( 11): Result.002 file - promoters60/1442504
gagaaaaaaag

SEQ ID NO: 114988 - DNA, 11 bp, Unknown
  misc_feature (1)..( 11): Result.002 file - promoters60/1442504
atcaaacaaat

SEQ ID NO: 114989 - DNA, 11 bp, Unknown
  misc_feature (1)..( 11): Result.002 file - promoters60/1442504
accaaagaaag

SEQ ID NO: 114990 - DNA, 11 bp, Unknown
  misc_feature (1)..( 11): Result.002 file - promoters60/1442504
aacaaaaaaaa

SEQ ID NO: 114991 - DNA, 11 bp, Unknown
  misc_feature (1)..( 11): Result.002 file - promoters60/1442504
atctaacagca

SEQ ID NO: 114992 - DNA, 11 bp, Unknown
  misc_feature (1)..( 11): Result.002 file - promoters60/1442504
tacaaggaaag

SEQ ID NO: 114993 - DNA, 12 bp, Unknown
  misc_feature (1)..( 12): Result.002 file - promoters60/1442649
catcatttttag

SEQ ID NO: 114994 - DNA, 12 bp, Unknown
  misc_feature (1)..( 12): Result.002 file - promoters60/1442649
tatcatttactt

SEQ ID NO: 114995 - DNA, 12 bp, Unknown
  misc_feature (1)..( 12): Result.002 file - promoters60/1442649
aaacattgttag

SEQ ID NO: 114996 - DNA, 12 bp, Unknown
  misc_feature (1)..( 12): Result.002 file - promoters60/1442649
tatcatattgtt

SEQ ID NO: 114997 - DNA, 9 bp, Unknown
  misc_feature (1)..( 9): Result.002 file - promoters60/1442649
cttggtttc

SEQ ID NO: 114998 - DNA, 9 bp, Unknown
  misc_feature (1)..( 9): Result.002 file - promoters60/1442649
tttgttttg

SEQ ID NO: 114999 - DNA, 9 bp, Unknown
  misc_feature (1)..( 9): Result.002 file - promoters60/1442649
tttattttt

SEQ ID NO: 115000 - DNA, 9 bp, Unknown
  misc_feature (1)..( 9): Result.002 file - promoters60/1442649
tctatttat

SEQ ID NO: 115001 - DNA, 8 bp, Unknown
  misc_feature (1)..( 8): Result.002 file - promoters60/1442649
aaacaaat

SEQ ID NO: 115002 - DNA, 8 bp, Unknown
  misc_feature (1)..( 8): Result.002 file - promoters60/1442649
taacaaat

SEQ ID NO: 115003 - DNA, 8 bp, Unknown
  misc_feature (1)..( 8): Result.002 file - promoters60/1442649
aaacaatt

SEQ ID NO: 115004 - DNA, 8 bp, Unknown
  misc_feature (1)..( 8): Result.002 file - promoters60/1442649
taaaaaat

SEQ ID NO: 115005 - DNA, 12 bp, Unknown
  misc_feature (1)..( 12): Result.002 file - promoters60/1442777
tgtaatttctcg

SEQ ID NO: 115006 - DNA, 12 bp, Unknown
  misc_feature (1)..( 12): Result.002 file - promoters60/1442777
tcgcttttatcg

SEQ ID NO: 115007 - DNA, 12 bp, Unknown
  misc_feature (1)..( 12): Result.002 file - promoters60/1442777
caaaatatcttt

SEQ ID NO: 115008 - DNA, 12 bp, Unknown
  misc_feature (1)..( 12): Result.002 file - promoters60/1442777
ataactttatgt

SEQ ID NO: 115009 - DNA, 12 bp, Unknown
  misc_feature (1)..( 12): Result.002 file - promoters60/1442777
atagccaaaatt

SEQ ID NO: 115010 - DNA, 12 bp, Unknown
  misc_feature (1)..( 12): Result.002 file - promoters60/1442777
tgtatcaacatt

SEQ ID NO: 115011 - DNA, 12 bp, Unknown
  misc_feature (1)..( 12): Result.002 file - promoters60/1442777
atagacaaaaac

SEQ ID NO: 115012 - DNA, 12 bp, Unknown
  misc_feature (1)..( 12): Result.002 file - promoters60/1442777
tcattaaacatt

SEQ ID NO: 115013 - DNA, 11 bp, Unknown
  misc_feature (1)..( 11): Result.002 file - promoters60/1442777
taatccaacgg

SEQ ID NO: 115014 - DNA, 11 bp, Unknown
  misc_feature (1)..( 11): Result.002 file - promoters60/1442777
taatctaacgg

SEQ ID NO: 115015 - DNA, 11 bp, Unknown
  misc_feature (1)..( 11): Result.002 file - promoters60/1442777
taatctcaacc

SEQ ID NO: 115016 - DNA, 11 bp, Unknown
  misc_feature (1)..( 11): Result.002 file - promoters60/1442777
taatctcattg

SEQ ID NO: 115017 - DNA, 13 bp, Unknown
  misc_feature (1)..( 13): Result.002 file - promoters60/1442777
tcaggctaaattt

SEQ ID NO: 115018 - DNA, 13 bp, Unknown
  misc_feature (1)..( 13): Result.002 file - promoters60/1442777
tcaagctgaatgg

SEQ ID NO: 115019 - DNA, 13 bp, Unknown
  misc_feature (1)..( 13): Result.002 file - promoters60/1442777
gatgtataacttt

SEQ ID NO: 115020 - DNA, 13 bp, Unknown
  misc_feature (1)..( 13): Result.002 file - promoters60/1442777
catgtataactaa

SEQ ID NO: 115021 - DNA, 13 bp, Unknown
  misc_feature (1)..( 13): Result.002 file - promoters60/1442777
taagtataattgt

SEQ ID NO: 115022 - DNA, 16 bp, Unknown
  misc_feature (1)..( 16): Result.002 file - promoters60/1442777
attttgaaataatttc

SEQ ID NO: 115023 - DNA, 16 bp, Unknown
  misc_feature (1)..( 16): Result.002 file - promoters60/1442777
aacttgaaattaatat

SEQ ID NO: 115024 - DNA, 16 bp, Unknown
  misc_feature (1)..( 16): Result.002 file - promoters60/1442777
attgtgaaataatttt

SEQ ID NO: 115025 - DNA, 16 bp, Unknown
  misc_feature (1)..( 16): Result.002 file - promoters60/1442777
attctaaaatattgtt

SEQ ID NO: 115026 - DNA, 18 bp, Unknown
  misc_feature (1)..( 18): Result.002 file - promoters60/1442777
ttgttatgtaaattttga

SEQ ID NO: 115027 - DNA, 18 bp, Unknown
  misc_feature (1)..( 18): Result.002 file - promoters60/1442777
acttgaaattaatattgt

SEQ ID NO: 115028 - DNA, 18 bp, Unknown
  misc_feature (1)..( 18): Result.002 file - promoters60/1442777
attgtgaaataattttgt

SEQ ID NO: 115029 - DNA, 18 bp, Unknown
  misc_feature (1)..( 18): Result.002 file - promoters60/1442777
taattgttaatcttttga

SEQ ID NO: 115030 - DNA, 9 bp, Unknown
  misc_feature (1)..( 9): Result.002 file - promoters60/1442777
taatgtaat

SEQ ID NO: 115031 - DNA, 9 bp, Unknown
  misc_feature (1)..( 9): Result.002 file - promoters60/1442777
taatgtgac

SEQ ID NO: 115032 - DNA, 9 bp, Unknown
  misc_feature (1)..( 9): Result.002 file - promoters60/1442777
aaatctgat

SEQ ID NO: 115033 - DNA, 9 bp, Unknown
  misc_feature (1)..( 9): Result.002 file - promoters60/1442777
taatgcgac

SEQ ID NO: 115034 - DNA, 11 bp, Unknown
  misc_feature (1)..( 11): Result.002 file - promoters60/1442777
atttgtaactt

SEQ ID NO: 115035 - DNA, 11 bp, Unknown
  misc_feature (1)..( 11): Result.002 file - promoters60/1442777
atgtataactt

SEQ ID NO: 115036 - DNA, 11 bp, Unknown
  misc_feature (1)..( 11): Result.002 file - promoters60/1442777
atgtataacta

SEQ ID NO: 115037 - DNA, 11 bp, Unknown
  misc_feature (1)..( 11): Result.002 file - promoters60/1442777
aagtataattg

SEQ ID NO: 115038 - DNA, 14 bp, Unknown
  misc_feature (1)..( 14): Result.002 file - promoters60/1442777
atgtataactaagc

SEQ ID NO: 115039 - DNA, 14 bp, Unknown
  misc_feature (1)..( 14): Result.002 file - promoters60/1442777
gtccataacttgaa

SEQ ID NO: 115040 - DNA, 14 bp, Unknown
  misc_feature (1)..( 14): Result.002 file - promoters60/1442777
atgtataactttat

SEQ ID NO: 115041 - DNA, 14 bp, Unknown
  misc_feature (1)..( 14): Result.002 file - promoters60/1442777
caaaatatctttat

SEQ ID NO: 115042 - DNA, 11 bp, Unknown
  misc_feature (1)..( 11): Result.002 file - promoters60/1442777
tatatacatga

SEQ ID NO: 115043 - DNA, 11 bp, Unknown
  misc_feature (1)..( 11): Result.002 file - promoters60/1442777
tatataaacaa

SEQ ID NO: 115044 - DNA, 11 bp, Unknown
  misc_feature (1)..( 11): Result.002 file - promoters60/1442777
tatataaatga

SEQ ID NO: 115045 - DNA, 11 bp, Unknown
  misc_feature (1)..( 11): Result.002 file - promoters60/1442777
cctataaatat

SEQ ID NO: 115046 - DNA, 13 bp, Unknown
  misc_feature (1)..( 13): Result.002 file - promoters60/1442880
ctaaaatagtaaa

SEQ ID NO: 115047 - DNA, 13 bp, Unknown
  misc_feature (1)..( 13): Result.002 file - promoters60/1442880
aaataattgtata

SEQ ID NO: 115048 - DNA, 13 bp, Unknown
  misc_feature (1)..( 13): Result.002 file - promoters60/1442880
tcatatttgtata

SEQ ID NO: 115049 - DNA, 13 bp, Unknown
  misc_feature (1)..( 13): Result.002 file - promoters60/1442880
aaagaattgaaca

SEQ ID NO: 115050 - DNA, 10 bp, Unknown
  misc_feature (1)..( 10): Result.002 file - promoters60/1442880
gaaaaagata

SEQ ID NO: 115051 - DNA, 10 bp, Unknown
  misc_feature (1)..( 10): Result.002 file - promoters60/1442880
gaaatagatt

SEQ ID NO: 115052 - DNA, 10 bp, Unknown
  misc_feature (1)..( 10): Result.002 file - promoters60/1442880
ttagtagatt

SEQ ID NO: 115053 - DNA, 10 bp, Unknown
  misc_feature (1)..( 10): Result.002 file - promoters60/1442880
tatataaatt

SEQ ID NO: 115054 - DNA, 10 bp, Unknown
  misc_feature (1)..( 10): Result.002 file - promoters60/1442880
ttactaaaat

SEQ ID NO: 115055 - DNA, 10 bp, Unknown
  misc_feature (1)..( 10): Result.002 file - promoters60/1442880
ttattaattt

SEQ ID NO: 115056 - DNA, 11 bp, Unknown
  misc_feature (1)..( 11): Result.002 file - promoters60/1442880
gaactgaaaga

SEQ ID NO: 115057 - DNA, 11 bp, Unknown
  misc_feature (1)..( 11): Result.002 file - promoters60/1442880
ttgtataaatt

SEQ ID NO: 115058 - DNA, 8 bp, Unknown
  misc_feature (1)..( 8): Result.002 file - promoters60/1442887
cataatta

SEQ ID NO: 115059 - DNA, 8 bp, Unknown
  misc_feature (1)..( 8): Result.002 file - promoters60/1442887
catgatta

SEQ ID NO: 115060 - DNA, 9 bp, Unknown
  misc_feature (1)..( 9): Result.002 file - promoters60/1442887
tcaatcact

SEQ ID NO: 115061 - DNA, 9 bp, Unknown
  misc_feature (1)..( 9): Result.002 file - promoters60/1442887
tcagtcact

SEQ ID NO: 115062 - DNA, 8 bp, Unknown
  misc_feature (1)..( 8): Result.002 file - promoters60/1442887
tttgtttg

SEQ ID NO: 115063 - DNA, 8 bp, Unknown
  misc_feature (1)..( 8): Result.002 file - promoters60/1442887
tttctttg

SEQ ID NO: 115064 - DNA, 9 bp, Unknown
  misc_feature (1)..( 9): Result.002 file - promoters60/1442887
gctaatcac

SEQ ID NO: 115065 - DNA, 9 bp, Unknown
  misc_feature (1)..( 9): Result.002 file - promoters60/1442887
gctagtcac

SEQ ID NO: 115066 - DNA, 6 bp, Unknown
  misc_feature (1)..( 6): Result.002 file - promoters60/1442887
aatgaa

SEQ ID NO: 115067 - DNA, 6 bp, Unknown
  misc_feature (1)..( 6): Result.002 file - promoters60/1442887
aatgaa

SEQ ID NO: 115068 - DNA, 8 bp, Unknown
  misc_feature (1)..( 8): Result.002 file - promoters60/1442887
tattagtt

SEQ ID NO: 115069 - DNA, 8 bp, Unknown
  misc_feature (1)..( 8): Result.002 file - promoters60/1442887
tatttgtt

SEQ ID NO: 115070 - DNA, 7 bp, Unknown
  misc_feature (1)..( 7): Result.002 file - promoters60/1442887
ttagatc

SEQ ID NO: 115071 - DNA, 7 bp, Unknown
  misc_feature (1)..( 7): Result.002 file - promoters60/1442887
ttagatc

SEQ ID NO: 115072 - DNA, 6 bp, Unknown
  misc_feature (1)..( 6): Result.002 file - promoters60/1442887
gaaatc

SEQ ID NO: 115073 - DNA, 6 bp, Unknown
  misc_feature (1)..( 6): Result.002 file - promoters60/1442887
gaaatc

SEQ ID NO: 115074 - DNA, 6 bp, Unknown
  misc_feature (1)..( 6): Result.002 file - promoters60/1442887
ttgaac

SEQ ID NO: 115075 - DNA, 6 bp, Unknown
  misc_feature (1)..( 6): Result.002 file - promoters60/1442887
ttgaac

SEQ ID NO: 115076 - DNA, 6 bp, Unknown
  misc_feature (1)..( 6): Result.002 file - promoters60/1442887
attttg

SEQ ID NO: 115077 - DNA, 6 bp, Unknown
  misc_feature (1)..( 6): Result.002 file - promoters60/1442887
attttg

SEQ ID NO: 115078 - DNA, 6 bp, Unknown
  misc_feature (1)..( 6): Result.002 file - promoters60/1442887
ttgggt

SEQ ID NO: 115079 - DNA, 6 bp, Unknown
  misc_feature (1)..( 6): Result.002 file - promoters60/1442887
ttgggt

SEQ ID NO: 115080 - DNA, 6 bp, Unknown
  misc_feature (1)..( 6): Result.002 file - promoters60/1442887
ttatta

SEQ ID NO: 115081 - DNA, 6 bp, Unknown
  misc_feature (1)..( 6): Result.002 file - promoters60/1442887
ttatta

SEQ ID NO: 115082 - DNA, 6 bp, Unknown
  misc_feature (1)..( 6): Result.002 file - promoters60/1442887
tttgtt

SEQ ID NO: 115083 - DNA, 6 bp, Unknown
  misc_feature (1)..( 6): Result.002 file - promoters60/1442887
tttgtt

SEQ ID NO: 115084 - DNA, 6 bp, Unknown
  misc_feature (1)..( 6): Result.002 file - promoters60/1442887
agtaaa

SEQ ID NO: 115085 - DNA, 6 bp, Unknown
  misc_feature (1)..( 6): Result.002 file - promoters60/1442887
agtaaa

SEQ ID NO: 115086 - DNA, 7 bp, Unknown
  misc_feature (1)..( 7): Result.002 file - promoters60/1442887
aatcggg

SEQ ID NO: 115087 - DNA, 7 bp, Unknown
  misc_feature (1)..( 7): Result.002 file - promoters60/1442887
aattggg

SEQ ID NO: 115088 - DNA, 8 bp, Unknown
  misc_feature (1)..( 8): Result.002 file - promoters60/1442887
gaaagaaa

SEQ ID NO: 115089 - DNA, 8 bp, Unknown
  misc_feature (1)..( 8): Result.002 file - promoters60/1442887
gaaacaaa

SEQ ID NO: 115090 - DNA, 10 bp, Unknown
  misc_feature (1)..( 10): Result.002 file - promoters60/1442887
ggaaaagaaa

SEQ ID NO: 115091 - DNA, 10 bp, Unknown
  misc_feature (1)..( 10): Result.002 file - promoters60/1442887
ggaaatgaaa

SEQ ID NO: 115092 - DNA, 7 bp, Unknown
  misc_feature (1)..( 7): Result.002 file - promoters60/1442887
cccacta

SEQ ID NO: 115093 - DNA, 7 bp, Unknown
  misc_feature (1)..( 7): Result.002 file - promoters60/1442887
cccacta

SEQ ID NO: 115094 - DNA, 9 bp, Unknown
  misc_feature (1)..( 9): Result.002 file - promoters60/1442887
aaagaaaag

SEQ ID NO: 115095 - DNA, 9 bp, Unknown
  misc_feature (1)..( 9): Result.002 file - promoters60/1442887
aaagtaaag

SEQ ID NO: 115096 - DNA, 7 bp, Unknown
  misc_feature (1)..( 7): Result.002 file - promoters60/1442887
gtatata

SEQ ID NO: 115097 - DNA, 7 bp, Unknown
  misc_feature (1)..( 7): Result.002 file - promoters60/1442887
gtatata

SEQ ID NO: 115098 - DNA, 6 bp, Unknown
  misc_feature (1)..( 6): Result.002 file - promoters60/1442945
aaagaa

SEQ ID NO: 115099 - DNA, 6 bp, Unknown
  misc_feature (1)..( 6): Result.002 file - promoters60/1442945
aaagaa

SEQ ID NO: 115100 - DNA, 8 bp, Unknown
  misc_feature (1)..( 8): Result.002 file - promoters60/1442945
attttaat

SEQ ID NO: 115101 - DNA, 8 bp, Unknown
  misc_feature (1)..( 8): Result.002 file - promoters60/1442945
attataat

SEQ ID NO: 115102 - DNA, 8 bp, Unknown
  misc_feature (1)..( 8): Result.002 file - promoters60/1442945
cttttaat

SEQ ID NO: 115103 - DNA, 6 bp, Unknown
  misc_feature (1)..( 6): Result.002 file - promoters60/1442945
aaccaa

SEQ ID NO: 115104 - DNA, 6 bp, Unknown
  misc_feature (1)..( 6): Result.002 file - promoters60/1442945
aaccaa

SEQ ID NO: 115105 - DNA, 6 bp, Unknown
  misc_feature (1)..( 6): Result.002 file - promoters60/1442945
aaaatt

SEQ ID NO: 115106 - DNA, 6 bp, Unknown
  misc_feature (1)..( 6): Result.002 file - promoters60/1442945
aaaatt

SEQ ID NO: 115107 - DNA, 6 bp, Unknown
  misc_feature (1)..( 6): Result.002 file - promoters60/1442945
aaaatt

SEQ ID NO: 115108 - DNA, 9 bp, Unknown
  misc_feature (1)..( 9): Result.002 file - promoters60/1442945
ttcaaattc

SEQ ID NO: 115109 - DNA, 9 bp, Unknown
  misc_feature (1)..( 9): Result.002 file - promoters60/1442945
ttcaaattt

SEQ ID NO: 115110 - DNA, 9 bp, Unknown
  misc_feature (1)..( 9): Result.002 file - promoters60/1442945
ttcaatttc

SEQ ID NO: 115111 - DNA, 8 bp, Unknown
  misc_feature (1)..( 8): Result.002 file - promoters60/1442945
ttagttgg

SEQ ID NO: 115112 - DNA, 8 bp, Unknown
  misc_feature (1)..( 8): Result.002 file - promoters60/1442945
ttagctgg

SEQ ID NO: 115113 - DNA, 9 bp, Unknown
  misc_feature (1)..( 9): Result.002 file - promoters60/1442945
agtaaaatg

SEQ ID NO: 115114 - DNA, 9 bp, Unknown
  misc_feature (1)..( 9): Result.002 file - promoters60/1442945
agtacaatg

SEQ ID NO: 115115 - DNA, 9 bp, Unknown
  misc_feature (1)..( 9): Result.002 file - promoters60/1442945
agtccaacc

SEQ ID NO: 115116 - DNA, 6 bp, Unknown
  misc_feature (1)..( 6): Result.002 file - promoters60/1442945
gaacat

SEQ ID NO: 115117 - DNA, 6 bp, Unknown
  misc_feature (1)..( 6): Result.002 file - promoters60/1442945
gaacat

SEQ ID NO: 115118 - DNA, 6 bp, Unknown
  misc_feature (1)..( 6): Result.002 file - promoters60/1442945
ttattt

SEQ ID NO: 115119 - DNA, 6 bp, Unknown
  misc_feature (1)..( 6): Result.002 file - promoters60/1442945
ttattt

SEQ ID NO: 115120 - DNA, 6 bp, Unknown
  misc_feature (1)..( 6): Result.002 file - promoters60/1442945
tctttt

SEQ ID NO: 115121 - DNA, 6 bp, Unknown
  misc_feature (1)..( 6): Result.002 file - promoters60/1442945
tctttt

SEQ ID NO: 115122 - DNA, 10 bp, Unknown
  misc_feature (1)..( 10): Result.002 file - promoters60/1442945
ttttcattca

SEQ ID NO: 115123 - DNA, 10 bp, Unknown
  misc_feature (1)..( 10): Result.002 file - promoters60/1442945
ttttaattaa

SEQ ID NO: 115124 - DNA, 10 bp, Unknown
  misc_feature (1)..( 10): Result.002 file - promoters60/1442945
acataattaa

SEQ ID NO: 115125 - DNA, 6 bp, Unknown
  misc_feature (1)..( 6): Result.002 file - promoters60/1442945
aatttc

SEQ ID NO: 115126 - DNA, 6 bp, Unknown
  misc_feature (1)..( 6): Result.002 file - promoters60/1442945
aatttc

SEQ ID NO: 115127 - DNA, 8 bp, Unknown
  misc_feature (1)..( 8): Result.002 file - promoters60/1442945
aaaatttc

SEQ ID NO: 115128 - DNA, 8 bp, Unknown
  misc_feature (1)..( 8): Result.002 file - promoters60/1442945
caaatttt

SEQ ID NO: 115129 - DNA, 7 bp, Unknown
  misc_feature (1)..( 7): Result.002 file - promoters60/1442945
tttaata

SEQ ID NO: 115130 - DNA, 7 bp, Unknown
  misc_feature (1)..( 7): Result.002 file - promoters60/1442945
tttaata

SEQ ID NO: 115131 - DNA, 7 bp, Unknown
  misc_feature (1)..( 7): Result.002 file - promoters60/1442945
caaaaac

SEQ ID NO: 115132 - DNA, 7 bp, Unknown
  misc_feature (1)..( 7): Result.002 file - promoters60/1442945
caaaaac

SEQ ID NO: 115133 - DNA, 8 bp, Unknown
  misc_feature (1)..( 8): Result.002 file - promoters60/1442945
aaaagcgc

SEQ ID NO: 115134 - DNA, 8 bp, Unknown
  misc_feature (1)..( 8): Result.002 file - promoters60/1442945
aaacgcgc

SEQ ID NO: 115135 - DNA, 8 bp, Unknown
  misc_feature (1)..( 8): Result.002 file - promoters60/1442945
tatacata

SEQ ID NO: 115136 - DNA, 8 bp, Unknown
  misc_feature (1)..( 8): Result.002 file - promoters60/1442945
tatatata

SEQ ID NO: 115137 - DNA, 7 bp, Unknown
  misc_feature (1)..( 7): Result.002 file - promoters60/1442945
aactgaa

SEQ ID NO: 115138 - DNA, 7 bp, Unknown
  misc_feature (1)..( 7): Result.002 file - promoters60/1442945
aaccgaa

SEQ ID NO: 115139 - DNA, 6 bp, Unknown
  misc_feature (1)..( 6): Result.002 file - promoters60/1442945
aatttt

SEQ ID NO: 115140 - DNA, 6 bp, Unknown
  misc_feature (1)..( 6): Result.002 file - promoters60/1442945
aatttt

SEQ ID NO: 115141 - DNA, 7 bp, Unknown
  misc_feature (1)..( 7): Result.002 file - promoters60/1442945
cataaac

SEQ ID NO: 115142 - DNA, 7 bp, Unknown
  misc_feature (1)..( 7): Result.002 file - promoters60/1442945
cataaac

SEQ ID NO: 115143 - DNA, 6 bp, Unknown
  misc_feature (1)..( 6): Result.002 file - promoters60/1442945
ctcctt

SEQ ID NO: 115144 - DNA, 6 bp, Unknown
  misc_feature (1)..( 6): Result.002 file - promoters60/1442945
ctcctt

SEQ ID NO: 115145 - DNA, 9 bp, Unknown
  misc_feature (1)..( 9): Result.002 file - promoters60/1442945
tttcaattt

SEQ ID NO: 115146 - DNA, 9 bp, Unknown
  misc_feature (1)..( 9): Result.002 file - promoters60/1442945
tttcatttt

SEQ ID NO: 115147 - DNA, 7 bp, Unknown
  misc_feature (1)..( 7): Result.002 file - promoters60/1442945
tttctct

SEQ ID NO: 115148 - DNA, 7 bp, Unknown
  misc_feature (1)..( 7): Result.002 file - promoters60/1442945
tttgtct

SEQ ID NO: 115149 - DNA, 6 bp, Unknown
  misc_feature (1)..( 6): Result.002 file - promoters60/1442945
taacat

SEQ ID NO: 115150 - DNA, 6 bp, Unknown
  misc_feature (1)..( 6): Result.002 file - promoters60/1442945
taacat

SEQ ID NO: 115151 - DNA, 6 bp, Unknown
  misc_feature (1)..( 6): Result.002 file - promoters60/1442945
ttttta

SEQ ID NO: 115152 - DNA, 6 bp, Unknown
  misc_feature (1)..( 6): Result.002 file - promoters60/1442945
ttttta

SEQ ID NO: 115153 - DNA, 6 bp, Unknown
  misc_feature (1)..( 6): Result.002 file - promoters60/1442945
ataata

SEQ ID NO: 115154 - DNA, 6 bp, Unknown
  misc_feature (1)..( 6): Result.002 file - promoters60/1442945
ataata

SEQ ID NO: 115155 - DNA, 8 bp, Unknown
  misc_feature (1)..( 8): Result.002 file - promoters60/1442945
catatata

SEQ ID NO: 115156 - DNA, 8 bp, Unknown
  misc_feature (1)..( 8): Result.002 file - promoters60/1442945
catatata

SEQ ID NO: 115157 - DNA, 9 bp, Unknown
  misc_feature (1)..( 9): Result.002 file - promoters60/1442953
aaataatga

SEQ ID NO: 115158 - DNA, 9 bp, Unknown
  misc_feature (1)..( 9): Result.002 file - promoters60/1442953
aaaaaatct

SEQ ID NO: 115159 - DNA, 9 bp, Unknown
  misc_feature (1)..( 9): Result.002 file - promoters60/1442953
aaacaattt

SEQ ID NO: 115160 - DNA, 9 bp, Unknown
  misc_feature (1)..( 9): Result.002 file - promoters60/1442953
aaaatatct

SEQ ID NO: 115161 - DNA, 9 bp, Unknown
  misc_feature (1)..( 9): Result.002 file - promoters60/1442953
tcaaagaaa

SEQ ID NO: 115162 - DNA, 9 bp, Unknown
  misc_feature (1)..( 9): Result.002 file - promoters60/1442953
acaaacaaa

SEQ ID NO: 115163 - DNA, 9 bp, Unknown
  misc_feature (1)..( 9): Result.002 file - promoters60/1442953
tcaaaggtt

SEQ ID NO: 115164 - DNA, 9 bp, Unknown
  misc_feature (1)..( 9): Result.002 file - promoters60/1442953
tcaaccaat

SEQ ID NO: 115165 - DNA, 7 bp, Unknown
  misc_feature (1)..( 7): Result.002 file - promoters60/1442953
tagaact

SEQ ID NO: 115166 - DNA, 7 bp, Unknown
  misc_feature (1)..( 7): Result.002 file - promoters60/1442953
tagaaca

SEQ ID NO: 115167 - DNA, 7 bp, Unknown
  misc_feature (1)..( 7): Result.002 file - promoters60/1442953
cagaaca

SEQ ID NO: 115168 - DNA, 7 bp, Unknown
  misc_feature (1)..( 7): Result.002 file - promoters60/1442953
aagaaca

SEQ ID NO: 115169 - DNA, 10 bp, Unknown
  misc_feature (1)..( 10): Result.002 file - promoters60/1442953
tttgtctgtt

SEQ ID NO: 115170 - DNA, 10 bp, Unknown
  misc_feature (1)..( 10): Result.002 file - promoters60/1442953
tttgtcggct

SEQ ID NO: 115171 - DNA, 11 bp, Unknown
  misc_feature (1)..( 11): Result.002 file - promoters60/1442953
tttagtcaaaa

SEQ ID NO: 115172 - DNA, 11 bp, Unknown
  misc_feature (1)..( 11): Result.002 file - promoters60/1442953
attagtaaaaa

SEQ ID NO: 115173 - DNA, 9 bp, Unknown
  misc_feature (1)..( 9): Result.002 file - promoters60/1442953
aaaagaggc

SEQ ID NO: 115174 - DNA, 9 bp, Unknown
  misc_feature (1)..( 9): Result.002 file - promoters60/1442953
aaaagaaaa

SEQ ID NO: 115175 - DNA, 9 bp, Unknown
  misc_feature (1)..( 9): Result.002 file - promoters60/1442953
taaataaat

SEQ ID NO: 115176 - DNA, 9 bp, Unknown
  misc_feature (1)..( 9): Result.002 file - promoters60/1442953
aatataaat

SEQ ID NO: 115177 - DNA, 8 bp, Unknown
  misc_feature (1)..( 8): Result.002 file - promoters60/1442967
ataataaa

SEQ ID NO: 115178 - DNA, 8 bp, Unknown
  misc_feature (1)..( 8): Result.002 file - promoters60/1442967
acaataaa

SEQ ID NO: 115179 - DNA, 8 bp, Unknown
  misc_feature (1)..( 8): Result.002 file - promoters60/1442967
acagtaag

SEQ ID NO: 115180 - DNA, 6 bp, Unknown
  misc_feature (1)..( 6): Result.002 file - promoters60/1442967
acaaaa

SEQ ID NO: 115181 - DNA, 6 bp, Unknown
  misc_feature (1)..( 6): Result.002 file - promoters60/1442967
acaaaa

SEQ ID NO: 115182 - DNA, 6 bp, Unknown
  misc_feature (1)..( 6): Result.002 file - promoters60/1442967
tatata

SEQ ID NO: 115183 - DNA, 6 bp, Unknown
  misc_feature (1)..( 6): Result.002 file - promoters60/1442967
tatata

SEQ ID NO: 115184 - DNA, 7 bp, Unknown
  misc_feature (1)..( 7): Result.002 file - promoters60/1442967
tatataa

SEQ ID NO: 115185 - DNA, 7 bp, Unknown
  misc_feature (1)..( 7): Result.002 file - promoters60/1442967
tatttaa

SEQ ID NO: 115186 - DNA, 6 bp, Unknown
  misc_feature (1)..( 6): Result.002 file - promoters60/1442967
aaggtc

SEQ ID NO: 115187 - DNA, 6 bp, Unknown
  misc_feature (1)..( 6): Result.002 file - promoters60/1442967
aaggtc

SEQ ID NO: 115188 - DNA, 10 bp, Unknown
  misc_feature (1)..( 10): Result.002 file - promoters60/1442967
aagtatgact

SEQ ID NO: 115189 - DNA, 10 bp, Unknown
  misc_feature (1)..( 10): Result.002 file - promoters60/1442967
aagtaggact

SEQ ID NO: 115190 - DNA, 8 bp, Unknown
  misc_feature (1)..( 8): Result.002 file - promoters60/1442967
aaagaaac

SEQ ID NO: 115191 - DNA, 8 bp, Unknown
  misc_feature (1)..( 8): Result.002 file - promoters60/1442967
aaagaaac

SEQ ID NO: 115192 - DNA, 6 bp, Unknown
  misc_feature (1)..( 6): Result.002 file - promoters60/1442967
caagaa

SEQ ID NO: 115193 - DNA, 6 bp, Unknown
  misc_feature (1)..( 6): Result.002 file - promoters60/1442967
caagaa

SEQ ID NO: 115194 - DNA, 6 bp, Unknown
  misc_feature (1)..( 6): Result.002 file - promoters60/1442967
tcttct

SEQ ID NO: 115195 - DNA, 6 bp, Unknown
  misc_feature (1)..( 6): Result.002 file - promoters60/1442967
tcttct

SEQ ID NO: 115196 - DNA, 8 bp, Unknown
  misc_feature (1)..( 8): Result.002 file - promoters60/1442967
aacgcaaa

SEQ ID NO: 115197 - DNA, 8 bp, Unknown
  misc_feature (1)..( 8): Result.002 file - promoters60/1442967
aacacaaa

SEQ ID NO: 115198 - DNA, 6 bp, Unknown
  misc_feature (1)..( 6): Result.002 file - promoters60/1442967
tctcac

SEQ ID NO: 115199 - DNA, 6 bp, Unknown
  misc_feature (1)..( 6): Result.002 file - promoters60/1442967
tctcac

SEQ ID NO: 115200 - DNA, 6 bp, Unknown
  misc_feature (1)..( 6): Result.002 file - promoters60/1442967
tctcta

SEQ ID NO: 115201 - DNA, 6 bp, Unknown
  misc_feature (1)..( 6): Result.002 file - promoters60/1442967
tctcta

SEQ ID NO: 115202 - DNA, 6 bp, Unknown
  misc_feature (1)..( 6): Result.002 file - promoters60/1442967
attatc

SEQ ID NO: 115203 - DNA, 6 bp, Unknown
  misc_feature (1)..( 6): Result.002 file - promoters60/1442967
attatc

SEQ ID NO: 115204 - DNA, 6 bp, Unknown
  misc_feature (1)..( 6): Result.002 file - promoters60/1442967
agaaat

SEQ ID NO: 115205 - DNA, 6 bp, Unknown
  misc_feature (1)..( 6): Result.002 file - promoters60/1442967
agaaat

SEQ ID NO: 115206 - DNA, 6 bp, Unknown
  misc_feature (1)..( 6): Result.002 file - promoters60/1442967
tcaaac

SEQ ID NO: 115207 - DNA, 6 bp, Unknown
  misc_feature (1)..( 6): Result.002 file - promoters60/1442967
tcaaac

SEQ ID NO: 115208 - DNA, 6 bp, Unknown
  misc_feature (1)..( 6): Result.002 file - promoters60/1442967
caaagt

SEQ ID NO: 115209 - DNA, 6 bp, Unknown
  misc_feature (1)..( 6): Result.002 file - promoters60/1442967
caaagt

SEQ ID NO: 115210 - DNA, 9 bp, Unknown
  misc_feature (1)..( 9): Result.002 file - promoters60/1442967
aaaggtctc

SEQ ID NO: 115211 - DNA, 9 bp, Unknown
  misc_feature (1)..( 9): Result.002 file - promoters60/1442967
aaaagtctc

SEQ ID NO: 115212 - DNA, 8 bp, Unknown
  misc_feature (1)..( 8): Result.002 file - promoters60/1442967
ctttctat

SEQ ID NO: 115213 - DNA, 8 bp, Unknown
  misc_feature (1)..( 8): Result.002 file - promoters60/1442967
cttactat

SEQ ID NO: 115214 - DNA, 12 bp, Unknown
  misc_feature (1)..( 12): Result.002 file - promoters60/1442975
ctttttgtttat

SEQ ID NO: 115215 - DNA, 12 bp, Unknown
  misc_feature (1)..( 12): Result.002 file - promoters60/1442975
tgatttgtatat

SEQ ID NO: 115216 - DNA, 12 bp, Unknown
  misc_feature (1)..( 12): Result.002 file - promoters60/1442975
cttattgtataa

SEQ ID NO: 115217 - DNA, 6 bp, Unknown
  misc_feature (1)..( 6): Result.002 file - promoters60/1442975
attgaa

SEQ ID NO: 115218 - DNA, 6 bp, Unknown
  misc_feature (1)..( 6): Result.002 file - promoters60/1442975
attgaa

SEQ ID NO: 115219 - DNA, 6 bp, Unknown
  misc_feature (1)..( 6): Result.002 file - promoters60/1442975
tgaaca

SEQ ID NO: 115220 - DNA, 6 bp, Unknown
  misc_feature (1)..( 6): Result.002 file - promoters60/1442975
tgaaca

SEQ ID NO: 115221 - DNA, 7 bp, Unknown
  misc_feature (1)..( 7): Result.002 file - promoters60/1442975
tctacga

SEQ ID NO: 115222 - DNA, 7 bp, Unknown
  misc_feature (1)..( 7): Result.002 file - promoters60/1442975
tcttcga

SEQ ID NO: 115223 - DNA, 7 bp, Unknown
  misc_feature (1)..( 7): Result.002 file - promoters60/1442975
agggttt

SEQ ID NO: 115224 - DNA, 7 bp, Unknown
  misc_feature (1)..( 7): Result.002 file - promoters60/1442975
aggattt

SEQ ID NO: 115225 - DNA, 10 bp, Unknown
  misc_feature (1)..( 10): Result.002 file - promoters60/1442975
gcaggagatg

SEQ ID NO: 115226 - DNA, 10 bp, Unknown
  misc_feature (1)..( 10): Result.002 file - promoters60/1442975
gcaggagatg

SEQ ID NO: 115227 - DNA, 8 bp, Unknown
  misc_feature (1)..( 8): Result.002 file - promoters60/1442975
gctggatt

SEQ ID NO: 115228 - DNA, 8 bp, Unknown
  misc_feature (1)..( 8): Result.002 file - promoters60/1442975
tctgaatt

SEQ ID NO: 115229 - DNA, 8 bp, Unknown
  misc_feature (1)..( 8): Result.002 file - promoters60/1442975
tctgaaca

SEQ ID NO: 115230 - DNA, 6 bp, Unknown
  misc_feature (1)..( 6): Result.002 file - promoters60/1442975
aatcta

SEQ ID NO: 115231 - DNA, 6 bp, Unknown
  misc_feature (1)..( 6): Result.002 file - promoters60/1442975
aatcta

SEQ ID NO: 115232 - DNA, 6 bp, Unknown
  misc_feature (1)..( 6): Result.002 file - promoters60/1442975
catcaa

SEQ ID NO: 115233 - DNA, 6 bp, Unknown
  misc_feature (1)..( 6): Result.002 file - promoters60/1442975
catcaa

SEQ ID NO: 115234 - DNA, 8 bp, Unknown
  misc_feature (1)..( 8): Result.002 file - promoters60/1442975
gattggtg

SEQ ID NO: 115235 - DNA, 8 bp, Unknown
  misc_feature (1)..( 8): Result.002 file - promoters60/1442975
gattcgtg

SEQ ID NO: 115236 - DNA, 7 bp, Unknown
  misc_feature (1)..( 7): Result.002 file - promoters60/1442975
cactgtc

SEQ ID NO: 115237 - DNA, 7 bp, Unknown
  misc_feature (1)..( 7): Result.002 file - promoters60/1442975
cacggtc

SEQ ID NO: 115238 - DNA, 6 bp, Unknown
  misc_feature (1)..( 6): Result.002 file - promoters60/1442975
ggttta

SEQ ID NO: 115239 - DNA, 6 bp, Unknown
  misc_feature (1)..( 6): Result.002 file - promoters60/1442975
ggttta

SEQ ID NO: 115240 - DNA, 6 bp, Unknown
  misc_feature (1)..( 6): Result.002 file - promoters60/1442975
ttgact

SEQ ID NO: 115241 - DNA, 6 bp, Unknown
  misc_feature (1)..( 6): Result.002 file - promoters60/1442975
ttgact

SEQ ID NO: 115242 - DNA, 6 bp, Unknown
  misc_feature (1)..( 6): Result.002 file - promoters60/1442975
ggctgt

SEQ ID NO: 115243 - DNA, 6 bp, Unknown
  misc_feature (1)..( 6): Result.002 file - promoters60/1442975
ggctgt

SEQ ID NO: 115244 - DNA, 9 bp, Unknown
  misc_feature (1)..( 9): Result.002 file - promoters60/1442993
ttctctttt

SEQ ID NO: 115245 - DNA, 9 bp, Unknown
  misc_feature (1)..( 9): Result.002 file - promoters60/1442993
acctctttt

SEQ ID NO: 115246 - DNA, 9 bp, Unknown
  misc_feature (1)..( 9): Result.002 file - promoters60/1442993
ctctctttc

SEQ ID NO: 115247 - DNA, 9 bp, Unknown
  misc_feature (1)..( 9): Result.002 file - promoters60/1442993
accccttag

SEQ ID NO: 115248 - DNA, 8 bp, Unknown
  misc_feature (1)..( 8): Result.002 file - promoters60/1442993
caatttac

SEQ ID NO: 115249 - DNA, 8 bp, Unknown
  misc_feature (1)..( 8): Result.002 file - promoters60/1442993
aaatctac

SEQ ID NO: 115250 - DNA, 8 bp, Unknown
  misc_feature (1)..( 8): Result.002 file - promoters60/1442993
taatttat

SEQ ID NO: 115251 - DNA, 8 bp, Unknown
  misc_feature (1)..( 8): Result.002 file - promoters60/1442993
aaaactat

SEQ ID NO: 115252 - DNA, 13 bp, Unknown
  misc_feature (1)..( 13): Result.002 file - promoters60/1442993
ctaaaatagtaaa

SEQ ID NO: 115253 - DNA, 13 bp, Unknown
  misc_feature (1)..( 13): Result.002 file - promoters60/1442993
aaataattgtata

SEQ ID NO: 115254 - DNA, 13 bp, Unknown
  misc_feature (1)..( 13): Result.002 file - promoters60/1442993
tcatatttgtata

SEQ ID NO: 115255 - DNA, 13 bp, Unknown
  misc_feature (1)..( 13): Result.002 file - promoters60/1442993
aaagaattgaaca

SEQ ID NO: 115256 - DNA, 10 bp, Unknown
  misc_feature (1)..( 10): Result.002 file - promoters60/1442993
gaaaaagata

SEQ ID NO: 115257 - DNA, 10 bp, Unknown
  misc_feature (1)..( 10): Result.002 file - promoters60/1442993
gaaatagatt

SEQ ID NO: 115258 - DNA, 10 bp, Unknown
  misc_feature (1)..( 10): Result.002 file - promoters60/1442993
ttagtagatt

SEQ ID NO: 115259 - DNA, 10 bp, Unknown
  misc_feature (1)..( 10): Result.002 file - promoters60/1442993
tatataaatt

SEQ ID NO: 115260 - DNA, 10 bp, Unknown
  misc_feature (1)..( 10): Result.002 file - promoters60/1442993
ttactaaaat

SEQ ID NO: 115261 - DNA, 10 bp, Unknown
  misc_feature (1)..( 10): Result.002 file - promoters60/1442993
ttattaattt

SEQ ID NO: 115262 - DNA, 11 bp, Unknown
  misc_feature (1)..( 11): Result.002 file - promoters60/1442993
gaactgaaaga

SEQ ID NO: 115263 - DNA, 11 bp, Unknown
  misc_feature (1)..( 11): Result.002 file - promoters60/1442993
ttgtataaatt

SEQ ID NO: 115264 - DNA, 10 bp, Unknown
  misc_feature (1)..( 10): Result.002 file - promoters60/1442993
taatcaattt

SEQ ID NO: 115265 - DNA, 10 bp, Unknown
  misc_feature (1)..( 10): Result.002 file - promoters60/1442993
aaattaatta

SEQ ID NO: 115266 - DNA, 11 bp, Unknown
  misc_feature (1)..( 11): Result.002 file - promoters60/1442993
aatacaacttt

SEQ ID NO: 115267 - DNA, 11 bp, Unknown
  misc_feature (1)..( 11): Result.002 file - promoters60/1442993
taattatcgcc

SEQ ID NO: 115268 - DNA, 7 bp, Unknown
  misc_feature (1)..( 7): Result.002 file - promoters60/1443011
ataagca

SEQ ID NO: 115269 - DNA, 7 bp, Unknown
  misc_feature (1)..( 7): Result.002 file - promoters60/1443011
atatgca

SEQ ID NO: 115270 - DNA, 11 bp, Unknown
  misc_feature (1)..( 11): Result.002 file - promoters60/1443011
aataataatat

SEQ ID NO: 115271 - DNA, 11 bp, Unknown
  misc_feature (1)..( 11): Result.002 file - promoters60/1443011
aattatattat

SEQ ID NO: 115272 - DNA, 11 bp, Unknown
  misc_feature (1)..( 11): Result.002 file - promoters60/1443011
gttaataagta

SEQ ID NO: 115273 - DNA, 6 bp, Unknown
  misc_feature (1)..( 6): Result.002 file - promoters60/1443011
aatcaa

SEQ ID NO: 115274 - DNA, 6 bp, Unknown
  misc_feature (1)..( 6): Result.002 file - promoters60/1443011
aatcaa

SEQ ID NO: 115275 - DNA, 8 bp, Unknown
  misc_feature (1)..( 8): Result.002 file - promoters60/1443011
aaaccgtc

SEQ ID NO: 115276 - DNA, 8 bp, Unknown
  misc_feature (1)..( 8): Result.002 file - promoters60/1443011
aaagcgtc

SEQ ID NO: 115277 - DNA, 7 bp, Unknown
  misc_feature (1)..( 7): Result.002 file - promoters60/1443011
aattatt

SEQ ID NO: 115278 - DNA, 7 bp, Unknown
  misc_feature (1)..( 7): Result.002 file - promoters60/1443011
aataatt

SEQ ID NO: 115279 - DNA, 6 bp, Unknown
  misc_feature (1)..( 6): Result.002 file - promoters60/1443011
taatat

SEQ ID NO: 115280 - DNA, 6 bp, Unknown
  misc_feature (1)..( 6): Result.002 file - promoters60/1443011
taatat

SEQ ID NO: 115281 - DNA, 6 bp, Unknown
  misc_feature (1)..( 6): Result.002 file - promoters60/1443011
tgattg

SEQ ID NO: 115282 - DNA, 6 bp, Unknown
  misc_feature (1)..( 6): Result.002 file - promoters60/1443011
tgattg

SEQ ID NO: 115283 - DNA, 7 bp, Unknown
  misc_feature (1)..( 7): Result.002 file - promoters60/1443011
tttgaag

SEQ ID NO: 115284 - DNA, 7 bp, Unknown
  misc_feature (1)..( 7): Result.002 file - promoters60/1443011
tttcaag

SEQ ID NO: 115285 - DNA, 11 bp, Unknown
  misc_feature (1)..( 11): Result.002 file - promoters60/1443011
agacagaaaga

SEQ ID NO: 115286 - DNA, 11 bp, Unknown
  misc_feature (1)..( 11): Result.002 file - promoters60/1443011
agagagataga

SEQ ID NO: 115287 - DNA, 9 bp, Unknown
  misc_feature (1)..( 9): Result.002 file - promoters60/1443011
ataaacgaa

SEQ ID NO: 115288 - DNA, 9 bp, Unknown
  misc_feature (1)..( 9): Result.002 file - promoters60/1443011
ataaatgaa

SEQ ID NO: 115289 - DNA, 8 bp, Unknown
  misc_feature (1)..( 8): Result.002 file - promoters60/1443011
ctaatcac

SEQ ID NO: 115290 - DNA, 8 bp, Unknown
  misc_feature (1)..( 8): Result.002 file - promoters60/1443011
ctagtcac

SEQ ID NO: 115291 - DNA, 7 bp, Unknown
  misc_feature (1)..( 7): Result.002 file - promoters60/1443011
taatggg

SEQ ID NO: 115292 - DNA, 7 bp, Unknown
  misc_feature (1)..( 7): Result.002 file - promoters60/1443011
taaaggg

SEQ ID NO: 115293 - DNA, 6 bp, Unknown
  misc_feature (1)..( 6): Result.002 file - promoters60/1443011
tctctc

SEQ ID NO: 115294 - DNA, 6 bp, Unknown
  misc_feature (1)..( 6): Result.002 file - promoters60/1443011
tctctc

SEQ ID NO: 115295 - DNA, 6 bp, Unknown
  misc_feature (1)..( 6): Result.002 file - promoters60/1443011
gtaatc

SEQ ID NO: 115296 - DNA, 6 bp, Unknown
  misc_feature (1)..( 6): Result.002 file - promoters60/1443011
gtaatc

SEQ ID NO: 115297 - DNA, 6 bp, Unknown
  misc_feature (1)..( 6): Result.002 file - promoters60/1443011
tatttt

SEQ ID NO: 115298 - DNA, 6 bp, Unknown
  misc_feature (1)..( 6): Result.002 file - promoters60/1443011
tatttt

SEQ ID NO: 115299 - DNA, 6 bp, Unknown
  misc_feature (1)..( 6): Result.002 file - promoters60/1443011
aaataa

SEQ ID NO: 115300 - DNA, 6 bp, Unknown
  misc_feature (1)..( 6): Result.002 file - promoters60/1443011
aaataa

SEQ ID NO: 115301 - DNA, 6 bp, Unknown
  misc_feature (1)..( 6): Result.002 file - promoters60/1443011
acaaaa

SEQ ID NO: 115302 - DNA, 6 bp, Unknown
  misc_feature (1)..( 6): Result.002 file - promoters60/1443011
acaaaa

SEQ ID NO: 115303 - DNA, 6 bp, Unknown
  misc_feature (1)..( 6): Result.002 file - promoters60/1443011
gaaaaa

SEQ ID NO: 115304 - DNA, 6 bp, Unknown
  misc_feature (1)..( 6): Result.002 file - promoters60/1443011
gaaaaa

SEQ ID NO: 115305 - DNA, 12 bp, Unknown
  misc_feature (1)..( 12): Result.002 file - promoters60/1443021
atacaatatatc

SEQ ID NO: 115306 - DNA, 12 bp, Unknown
  misc_feature (1)..( 12): Result.002 file - promoters60/1443021
tcaaaatttatc

SEQ ID NO: 115307 - DNA, 12 bp, Unknown
  misc_feature (1)..( 12): Result.002 file - promoters60/1443021
tcagaatttgga

SEQ ID NO: 115308 - DNA, 7 bp, Unknown
  misc_feature (1)..( 7): Result.002 file - promoters60/1443021
caataaa

SEQ ID NO: 115309 - DNA, 7 bp, Unknown
  misc_feature (1)..( 7): Result.002 file - promoters60/1443021
caacaaa

SEQ ID NO: 115310 - DNA, 8 bp, Unknown
  misc_feature (1)..( 8): Result.002 file - promoters60/1443021
atccaata

SEQ ID NO: 115311 - DNA, 8 bp, Unknown
  misc_feature (1)..( 8): Result.002 file - promoters60/1443021
atcctata

SEQ ID NO: 115312 - DNA, 6 bp, Unknown
  misc_feature (1)..( 6): Result.002 file - promoters60/1443021
tgttca

SEQ ID NO: 115313 - DNA, 6 bp, Unknown
  misc_feature (1)..( 6): Result.002 file - promoters60/1443021
tgttca

SEQ ID NO: 115314 - DNA, 8 bp, Unknown
  misc_feature (1)..( 8): Result.002 file - promoters60/1443021
gtcatttt

SEQ ID NO: 115315 - DNA, 8 bp, Unknown
  misc_feature (1)..( 8): Result.002 file - promoters60/1443021
gtcctttt

SEQ ID NO: 115316 - DNA, 8 bp, Unknown
  misc_feature (1)..( 8): Result.002 file - promoters60/1443021
tcttgact

SEQ ID NO: 115317 - DNA, 8 bp, Unknown
  misc_feature (1)..( 8): Result.002 file - promoters60/1443021
tctggact

SEQ ID NO: 115318 - DNA, 6 bp, Unknown
  misc_feature (1)..( 6): Result.002 file - promoters60/1443021
tatagt

SEQ ID NO: 115319 - DNA, 6 bp, Unknown
  misc_feature (1)..( 6): Result.002 file - promoters60/1443021
tatagt

SEQ ID NO: 115320 - DNA, 7 bp, Unknown
  misc_feature (1)..( 7): Result.002 file - promoters60/1443021
aatgtta

SEQ ID NO: 115321 - DNA, 7 bp, Unknown
  misc_feature (1)..( 7): Result.002 file - promoters60/1443021
aatatta

SEQ ID NO: 115322 - DNA, 6 bp, Unknown
  misc_feature (1)..( 6): Result.002 file - promoters60/1443021
tactgt

SEQ ID NO: 115323 - DNA, 6 bp, Unknown
  misc_feature (1)..( 6): Result.002 file - promoters60/1443021
tactgt

SEQ ID NO: 115324 - DNA, 6 bp, Unknown
  misc_feature (1)..( 6): Result.002 file - promoters60/1443021
ttgaaa

SEQ ID NO: 115325 - DNA, 6 bp, Unknown
  misc_feature (1)..( 6): Result.002 file - promoters60/1443021
ttgaaa

SEQ ID NO: 115326 - DNA, 7 bp, Unknown
  misc_feature (1)..( 7): Result.002 file - promoters60/1443021
cttctcc

SEQ ID NO: 115327 - DNA, 7 bp, Unknown
  misc_feature (1)..( 7): Result.002 file - promoters60/1443021
cttgtcc

SEQ ID NO: 115328 - DNA, 7 bp, Unknown
  misc_feature (1)..( 7): Result.002 file - promoters60/1443021
ttcatgt

SEQ ID NO: 115329 - DNA, 7 bp, Unknown
  misc_feature (1)..( 7): Result.002 file - promoters60/1443021
ttcatgt

SEQ ID NO: 115330 - DNA, 7 bp, Unknown
  misc_feature (1)..( 7): Result.002 file - promoters60/1443021
aagcttt

SEQ ID NO: 115331 - DNA, 7 bp, Unknown
  misc_feature (1)..( 7): Result.002 file - promoters60/1443021
aagattt

SEQ ID NO: 115332 - DNA, 10 bp, Unknown
  misc_feature (1)..( 10): Result.002 file - promoters60/1443021
atattttttt

SEQ ID NO: 115333 - DNA, 10 bp, Unknown
  misc_feature (1)..( 10): Result.002 file - promoters60/1443021
atattttttt

SEQ ID NO: 115334 - DNA, 7 bp, Unknown
  misc_feature (1)..( 7): Result.002 file - promoters60/1443021
tacctca

SEQ ID NO: 115335 - DNA, 7 bp, Unknown
  misc_feature (1)..( 7): Result.002 file - promoters60/1443021
tacctca

SEQ ID NO: 115336 - DNA, 7 bp, Unknown
  misc_feature (1)..( 7): Result.002 file - promoters60/1443021
ttttata

SEQ ID NO: 115337 - DNA, 7 bp, Unknown
  misc_feature (1)..( 7): Result.002 file - promoters60/1443021
tttgata

SEQ ID NO: 115338 - DNA, 9 bp, Unknown
  misc_feature (1)..( 9): Result.002 file - promoters60/1443021
catccttat

SEQ ID NO: 115339 - DNA, 9 bp, Unknown
  misc_feature (1)..( 9): Result.002 file - promoters60/1443021
catcattat

SEQ ID NO: 115340 - DNA, 11 bp, Unknown
  misc_feature (1)..( 11): Result.002 file - promoters60/1443029
agaattgacca

SEQ ID NO: 115341 - DNA, 11 bp, Unknown
  misc_feature (1)..( 11): Result.002 file - promoters60/1443029
tgaattggaat

SEQ ID NO: 115342 - DNA, 11 bp, Unknown
  misc_feature (1)..( 11): Result.002 file - promoters60/1443029
ggaaatgacgt

SEQ ID NO: 115343 - DNA, 11 bp, Unknown
  misc_feature (1)..( 11): Result.002 file - promoters60/1443029
tgatttgcttc

SEQ ID NO: 115344 - DNA, 11 bp, Unknown
  misc_feature (1)..( 11): Result.002 file - promoters60/1443029
agtattagctt

SEQ ID NO: 115345 - DNA, 11 bp, Unknown
  misc_feature (1)..( 11): Result.002 file - promoters60/1443029
ccaaaagacac

SEQ ID NO: 115346 - DNA, 6 bp, Unknown
  misc_feature (1)..( 6): Result.002 file - promoters60/1443075
aacgaa

SEQ ID NO: 115347 - DNA, 6 bp, Unknown
  misc_feature (1)..( 6): Result.002 file - promoters60/1443075
aacgaa

SEQ ID NO: 115348 - DNA, 13 bp, Unknown
  misc_feature (1)..( 13): Result.002 file - promoters60/1443075
aaatcattttttc

SEQ ID NO: 115349 - DNA, 13 bp, Unknown
  misc_feature (1)..( 13): Result.002 file - promoters60/1443075
aaataattttcaa

SEQ ID NO: 115350 - DNA, 13 bp, Unknown
  misc_feature (1)..( 13): Result.002 file - promoters60/1443075
ttggcatttacaa

SEQ ID NO: 115351 - DNA, 8 bp, Unknown
  misc_feature (1)..( 8): Result.002 file - promoters60/1443075
gtgacaaa

SEQ ID NO: 115352 - DNA, 8 bp, Unknown
  misc_feature (1)..( 8): Result.002 file - promoters60/1443075
gtgataaa

SEQ ID NO: 115353 - DNA, 8 bp, Unknown
  misc_feature (1)..( 8): Result.002 file - promoters60/1443075
ataggaaa

SEQ ID NO: 115354 - DNA, 8 bp, Unknown
  misc_feature (1)..( 8): Result.002 file - promoters60/1443075
ataagaaa

SEQ ID NO: 115355 - DNA, 7 bp, Unknown
  misc_feature (1)..( 7): Result.002 file - promoters60/1443075
tgtttga

SEQ ID NO: 115356 - DNA, 7 bp, Unknown
  misc_feature (1)..( 7): Result.002 file - promoters60/1443075
tgtgtga

SEQ ID NO: 115357 - DNA, 11 bp, Unknown
  misc_feature (1)..( 11): Result.002 file - promoters60/1443075
aaaaatgtcta

SEQ ID NO: 115358 - DNA, 11 bp, Unknown
  misc_feature (1)..( 11): Result.002 file - promoters60/1443075
acggatgtcta

SEQ ID NO: 115359 - DNA, 11 bp, Unknown
  misc_feature (1)..( 11): Result.002 file - promoters60/1443075
aaaaaagtcaa

SEQ ID NO: 115360 - DNA, 6 bp, Unknown
  misc_feature (1)..( 6): Result.002 file - promoters60/1443075
ttaaaa

SEQ ID NO: 115361 - DNA, 6 bp, Unknown
  misc_feature (1)..( 6): Result.002 file - promoters60/1443075
ttaaaa

SEQ ID NO: 115362 - DNA, 8 bp, Unknown
  misc_feature (1)..( 8): Result.002 file - promoters60/1443075
aacttaca

SEQ ID NO: 115363 - DNA, 8 bp, Unknown
  misc_feature (1)..( 8): Result.002 file - promoters60/1443075
aactgaca

SEQ ID NO: 115364 - DNA, 9 bp, Unknown
  misc_feature (1)..( 9): Result.002 file - promoters60/1443075
ctataatat

SEQ ID NO: 115365 - DNA, 9 bp, Unknown
  misc_feature (1)..( 9): Result.002 file - promoters60/1443075
ctaaaatat

SEQ ID NO: 115366 - DNA, 10 bp, Unknown
  misc_feature (1)..( 10): Result.002 file - promoters60/1443075
aaaaagaatt

SEQ ID NO: 115367 - DNA, 10 bp, Unknown
  misc_feature (1)..( 10): Result.002 file - promoters60/1443075
aaaaagaaaa

SEQ ID NO: 115368 - DNA, 10 bp, Unknown
  misc_feature (1)..( 10): Result.002 file - promoters60/1443075
acgaagaaaa

SEQ ID NO: 115369 - DNA, 6 bp, Unknown
  misc_feature (1)..( 6): Result.002 file - promoters60/1443075
aagaaa

SEQ ID NO: 115370 - DNA, 6 bp, Unknown
  misc_feature (1)..( 6): Result.002 file - promoters60/1443075
aagaaa

SEQ ID NO: 115371 - DNA, 6 bp, Unknown
  misc_feature (1)..( 6): Result.002 file - promoters60/1443075
aaaaaa

SEQ ID NO: 115372 - DNA, 6 bp, Unknown
  misc_feature (1)..( 6): Result.002 file - promoters60/1443075
aaaaaa

SEQ ID NO: 115373 - DNA, 6 bp, Unknown
  misc_feature (1)..( 6): Result.002 file - promoters60/1443075
taaaaa

SEQ ID NO: 115374 - DNA, 6 bp, Unknown
  misc_feature (1)..( 6): Result.002 file - promoters60/1443075
taaaaa

SEQ ID NO: 115375 - DNA, 6 bp, Unknown
  misc_feature (1)..( 6): Result.002 file - promoters60/1443075
taaata

SEQ ID NO: 115376 - DNA, 6 bp, Unknown
  misc_feature (1)..( 6): Result.002 file - promoters60/1443075
taaata

SEQ ID NO: 115377 - DNA, 11 bp, Unknown
  misc_feature (1)..( 11): Result.002 file - promoters60/1443075
taaacaaaatt

SEQ ID NO: 115378 - DNA, 11 bp, Unknown
  misc_feature (1)..( 11): Result.002 file - promoters60/1443075
taaaaaaaatt

SEQ ID NO: 115379 - DNA, 7 bp, Unknown
  misc_feature (1)..( 7): Result.002 file - promoters60/1443075
ttctttc

SEQ ID NO: 115380 - DNA, 7 bp, Unknown
  misc_feature (1)..( 7): Result.002 file - promoters60/1443075
ttcgttc

SEQ ID NO: 115381 - DNA, 8 bp, Unknown
  misc_feature (1)..( 8): Result.002 file - promoters60/1443075
catttatt

SEQ ID NO: 115382 - DNA, 8 bp, Unknown
  misc_feature (1)..( 8): Result.002 file - promoters60/1443075
cattaatt

SEQ ID NO: 115383 - DNA, 6 bp, Unknown
  misc_feature (1)..( 6): Result.002 file - promoters60/1443075
agaaaa

SEQ ID NO: 115384 - DNA, 6 bp, Unknown
  misc_feature (1)..( 6): Result.002 file - promoters60/1443075
agaaaa

SEQ ID NO: 115385 - DNA, 6 bp, Unknown
  misc_feature (1)..( 6): Result.002 file - promoters60/1443075
aaaaac

SEQ ID NO: 115386 - DNA, 6 bp, Unknown
  misc_feature (1)..( 6): Result.002 file - promoters60/1443075
aaaaac

SEQ ID NO: 115387 - DNA, 11 bp, Unknown
  misc_feature (1)..( 11): Result.002 file - promoters60/1443083
attgtaatcat

SEQ ID NO: 115388 - DNA, 11 bp, Unknown
  misc_feature (1)..( 11): Result.002 file - promoters60/1443083
atgttaaacat

SEQ ID NO: 115389 - DNA, 11 bp, Unknown
  misc_feature (1)..( 11): Result.002 file - promoters60/1443083
atggtaatctc

SEQ ID NO: 115390 - DNA, 11 bp, Unknown
  misc_feature (1)..( 11): Result.002 file - promoters60/1443083
ctgttaaacca

SEQ ID NO: 115391 - DNA, 11 bp, Unknown
  misc_feature (1)..( 11): Result.002 file - promoters60/1443083
ctgataattgt

SEQ ID NO: 115392 - DNA, 11 bp, Unknown
  misc_feature (1)..( 11): Result.002 file - promoters60/1443083
gagttgaacaa

SEQ ID NO: 115393 - DNA, 13 bp, Unknown
  misc_feature (1)..( 13): Result.002 file - promoters60/1443083
cagaatatcacat

SEQ ID NO: 115394 - DNA, 13 bp, Unknown
  misc_feature (1)..( 13): Result.002 file - promoters60/1443083
ctttatataacat

SEQ ID NO: 115395 - DNA, 13 bp, Unknown
  misc_feature (1)..( 13): Result.002 file - promoters60/1443083
tagaaaatcatta

SEQ ID NO: 115396 - DNA, 13 bp, Unknown
  misc_feature (1)..( 13): Result.002 file - promoters60/1443083
tagtaaatagtta

SEQ ID NO: 115397 - DNA, 13 bp, Unknown
  misc_feature (1)..( 13): Result.002 file - promoters60/1443083
gatgaaatcatta

SEQ ID NO: 115398 - DNA, 13 bp, Unknown
  misc_feature (1)..( 13): Result.002 file - promoters60/1443083
aattaaatcatct

SEQ ID NO: 115399 - DNA, 10 bp, Unknown
  misc_feature (1)..( 10): Result.002 file - promoters60/1443114
attgtctttt

SEQ ID NO: 115400 - DNA, 10 bp, Unknown
  misc_feature (1)..( 10): Result.002 file - promoters60/1443114
tttgtatttt

SEQ ID NO: 115401 - DNA, 10 bp, Unknown
  misc_feature (1)..( 10): Result.002 file - promoters60/1443114
attgtcttat

SEQ ID NO: 115402 - DNA, 8 bp, Unknown
  misc_feature (1)..( 8): Result.002 file - promoters60/1443114
gaacaaat

SEQ ID NO: 115403 - DNA, 8 bp, Unknown
  misc_feature (1)..( 8): Result.002 file - promoters60/1443114
gaaaaaac

SEQ ID NO: 115404 - DNA, 8 bp, Unknown
  misc_feature (1)..( 8): Result.002 file - promoters60/1443114
tgacaaat

SEQ ID NO: 115405 - DNA, 12 bp, Unknown
  misc_feature (1)..( 12): Result.002 file - promoters60/1443114
ttccagaacaat

SEQ ID NO: 115406 - DNA, 12 bp, Unknown
  misc_feature (1)..( 12): Result.002 file - promoters60/1443114
actaagaataat

SEQ ID NO: 115407 - DNA, 12 bp, Unknown
  misc_feature (1)..( 12): Result.002 file - promoters60/1443114
aaatctaaaaat

SEQ ID NO: 115408 - DNA, 12 bp, Unknown
  misc_feature (1)..( 12): Result.002 file - promoters60/1443114
accactaagcat

SEQ ID NO: 115409 - DNA, 12 bp, Unknown
  misc_feature (1)..( 12): Result.002 file - promoters60/1443114
aaaactaagaat

SEQ ID NO: 115410 - DNA, 12 bp, Unknown
  misc_feature (1)..( 12): Result.002 file - promoters60/1443114
aaatctaaaaat

SEQ ID NO: 115411 - DNA, 11 bp, Unknown
  misc_feature (1)..( 11): Result.002 file - promoters60/1443114
gcaattagtac

SEQ ID NO: 115412 - DNA, 11 bp, Unknown
  misc_feature (1)..( 11): Result.002 file - promoters60/1443114
gcatttaaatt

SEQ ID NO: 115413 - DNA, 11 bp, Unknown
  misc_feature (1)..( 11): Result.002 file - promoters60/1443114
caatttaaatt

SEQ ID NO: 115414 - DNA, 9 bp, Unknown
  misc_feature (1)..( 9): Result.002 file - promoters60/1443114
aatttattc

SEQ ID NO: 115415 - DNA, 9 bp, Unknown
  misc_feature (1)..( 9): Result.002 file - promoters60/1443114
catttatca

SEQ ID NO: 115416 - DNA, 9 bp, Unknown
  misc_feature (1)..( 9): Result.002 file - promoters60/1443114
cattaatca

SEQ ID NO: 115417 - DNA, 12 bp, Unknown
  misc_feature (1)..( 12): Result.002 file - promoters60/1443114
agaaaaaacaga

SEQ ID NO: 115418 - DNA, 12 bp, Unknown
  misc_feature (1)..( 12): Result.002 file - promoters60/1443114
agaaaaaagtaa

SEQ ID NO: 115419 - DNA, 12 bp, Unknown
  misc_feature (1)..( 12): Result.002 file - promoters60/1443114
acaaaaatgtaa

SEQ ID NO: 115420 - DNA, 12 bp, Unknown
  misc_feature (1)..( 12): Result.002 file - promoters60/1443114
aaaaatggctat

SEQ ID NO: 115421 - DNA, 12 bp, Unknown
  misc_feature (1)..( 12): Result.002 file - promoters60/1443114
aaaaatttattc

SEQ ID NO: 115422 - DNA, 12 bp, Unknown
  misc_feature (1)..( 12): Result.002 file - promoters60/1443114
aaaactaagaat

SEQ ID NO: 115423 - DNA, 11 bp, Unknown
  misc_feature (1)..( 11): Result.002 file - promoters60/1443184
ataatttgagt

SEQ ID NO: 115424 - DNA, 11 bp, Unknown
  misc_feature (1)..( 11): Result.002 file - promoters60/1443184
atatttttagt

SEQ ID NO: 115425 - DNA, 11 bp, Unknown
  misc_feature (1)..( 11): Result.002 file - promoters60/1443184
caaatgtgatt

SEQ ID NO: 115426 - DNA, 8 bp, Unknown
  misc_feature (1)..( 8): Result.002 file - promoters60/1443184
aggaggaa

SEQ ID NO: 115427 - DNA, 8 bp, Unknown
  misc_feature (1)..( 8): Result.002 file - promoters60/1443184
aggaggaa

SEQ ID NO: 115428 - DNA, 8 bp, Unknown
  misc_feature (1)..( 8): Result.002 file - promoters60/1443184
tggaggat

SEQ ID NO: 115429 - DNA, 8 bp, Unknown
  misc_feature (1)..( 8): Result.002 file - promoters60/1443184
gttacaaa

SEQ ID NO: 115430 - DNA, 8 bp, Unknown
  misc_feature (1)..( 8): Result.002 file - promoters60/1443184
gttacaac

SEQ ID NO: 115431 - DNA, 8 bp, Unknown
  misc_feature (1)..( 8): Result.002 file - promoters60/1443184
gttataac

SEQ ID NO: 115432 - DNA, 10 bp, Unknown
  misc_feature (1)..( 10): Result.002 file - promoters60/1443184
aatatataca

SEQ ID NO: 115433 - DNA, 10 bp, Unknown
  misc_feature (1)..( 10): Result.002 file - promoters60/1443184
aatttatcaa

SEQ ID NO: 115434 - DNA, 10 bp, Unknown
  misc_feature (1)..( 10): Result.002 file - promoters60/1443184
agtttatttt

SEQ ID NO: 115435 - DNA, 11 bp, Unknown
  misc_feature (1)..( 11): Result.002 file - promoters60/1443184
agagaaaggat

SEQ ID NO: 115436 - DNA, 11 bp, Unknown
  misc_feature (1)..( 11): Result.002 file - promoters60/1443184
agaaaaattgt

SEQ ID NO: 115437 - DNA, 11 bp, Unknown
  misc_feature (1)..( 11): Result.002 file - promoters60/1443184
aaacaaagatt

SEQ ID NO: 115438 - DNA, 9 bp, Unknown
  misc_feature (1)..( 9): Result.002 file - promoters60/1443184
atctataaa

SEQ ID NO: 115439 - DNA, 9 bp, Unknown
  misc_feature (1)..( 9): Result.002 file - promoters60/1443184
atatataaa

SEQ ID NO: 115440 - DNA, 9 bp, Unknown
  misc_feature (1)..( 9): Result.002 file - promoters60/1443184
ccttataaa

SEQ ID NO: 115441 - DNA, 9 bp, Unknown
  misc_feature (1)..( 9): Result.002 file - promoters60/1443184
ccttttaaa

SEQ ID NO: 115442 - DNA, 18 bp, Unknown
  misc_feature (1)..( 18): Result.002 file - promoters60/1443192
aaaaattattaaagtata

SEQ ID NO: 115443 - DNA, 18 bp, Unknown
  misc_feature (1)..( 18): Result.002 file - promoters60/1443192
aaagattattaaattata

SEQ ID NO: 115444 - DNA, 18 bp, Unknown
  misc_feature (1)..( 18): Result.002 file - promoters60/1443192
tctcatttttaatcaaaa

SEQ ID NO: 115445 - DNA, 18 bp, Unknown
  misc_feature (1)..( 18): Result.002 file - promoters60/1443192
aaaatttatctgtaaatg

SEQ ID NO: 115446 - DNA, 9 bp, Unknown
  misc_feature (1)..( 9): Result.002 file - promoters60/1443192
ttactaata

SEQ ID NO: 115447 - DNA, 9 bp, Unknown
  misc_feature (1)..( 9): Result.002 file - promoters60/1443192
ttattaaag

SEQ ID NO: 115448 - DNA, 9 bp, Unknown
  misc_feature (1)..( 9): Result.002 file - promoters60/1443192
ataccaatc

SEQ ID NO: 115449 - DNA, 9 bp, Unknown
  misc_feature (1)..( 9): Result.002 file - promoters60/1443192
ataataatt

SEQ ID NO: 115450 - DNA, 13 bp, Unknown
  misc_feature (1)..( 13): Result.002 file - promoters60/1443192
ataattttagaga

SEQ ID NO: 115451 - DNA, 13 bp, Unknown
  misc_feature (1)..( 13): Result.002 file - promoters60/1443192
ctaattttaattt

SEQ ID NO: 115452 - DNA, 13 bp, Unknown
  misc_feature (1)..( 13): Result.002 file - promoters60/1443192
ataattatttggt

SEQ ID NO: 115453 - DNA, 13 bp, Unknown
  misc_feature (1)..( 13): Result.002 file - promoters60/1443192
atcattttcattt

SEQ ID NO: 115454 - DNA, 7 bp, Unknown
  misc_feature (1)..( 7): Result.002 file - promoters60/1443192
attttac

SEQ ID NO: 115455 - DNA, 7 bp, Unknown
  misc_feature (1)..( 7): Result.002 file - promoters60/1443192
attttag

SEQ ID NO: 115456 - DNA, 7 bp, Unknown
  misc_feature (1)..( 7): Result.002 file - promoters60/1443192
tttttac

SEQ ID NO: 115457 - DNA, 10 bp, Unknown
  misc_feature (1)..( 10): Result.002 file - promoters60/1443192
ctatatatat

SEQ ID NO: 115458 - DNA, 10 bp, Unknown
  misc_feature (1)..( 10): Result.002 file - promoters60/1443192
ttatttatat

SEQ ID NO: 115459 - DNA, 10 bp, Unknown
  misc_feature (1)..( 10): Result.002 file - promoters60/1443192
ctatataaac

SEQ ID NO: 115460 - DNA, 10 bp, Unknown
  misc_feature (1)..( 10): Result.002 file - promoters60/1443192
gtctataaat

SEQ ID NO: 115461 - DNA, 7 bp, Unknown
  misc_feature (1)..( 7): Result.002 file - promoters60/1443192
aatttta

SEQ ID NO: 115462 - DNA, 7 bp, Unknown
  misc_feature (1)..( 7): Result.002 file - promoters60/1443192
aattttt

SEQ ID NO: 115463 - DNA, 7 bp, Unknown
  misc_feature (1)..( 7): Result.002 file - promoters60/1443192
aatgtta

SEQ ID NO: 115464 - DNA, 8 bp, Unknown
  misc_feature (1)..( 8): Result.002 file - promoters60/1443192
taatagaa

SEQ ID NO: 115465 - DNA, 8 bp, Unknown
  misc_feature (1)..( 8): Result.002 file - promoters60/1443192
taattgaa

SEQ ID NO: 115466 - DNA, 8 bp, Unknown
  misc_feature (1)..( 8): Result.002 file - promoters60/1443192
aaattatt

SEQ ID NO: 115467 - DNA, 7 bp, Unknown
  misc_feature (1)..( 7): Result.002 file - promoters60/1443192
gaaaaat

SEQ ID NO: 115468 - DNA, 7 bp, Unknown
  misc_feature (1)..( 7): Result.002 file - promoters60/1443192
gaaaaaa

SEQ ID NO: 115469 - DNA, 7 bp, Unknown
  misc_feature (1)..( 7): Result.002 file - promoters60/1443192
taaaaat

SEQ ID NO: 115470 - DNA, 9 bp, Unknown
  misc_feature (1)..( 9): Result.002 file - promoters60/1443256
aatttttgt

SEQ ID NO: 115471 - DNA, 9 bp, Unknown
  misc_feature (1)..( 9): Result.002 file - promoters60/1443256
cattattga

SEQ ID NO: 115472 - DNA, 9 bp, Unknown
  misc_feature (1)..( 9): Result.002 file - promoters60/1443256
atttactga

SEQ ID NO: 115473 - DNA, 9 bp, Unknown
  misc_feature (1)..( 9): Result.002 file - promoters60/1443256
cattataac

SEQ ID NO: 115474 - DNA, 10 bp, Unknown
  misc_feature (1)..( 10): Result.002 file - promoters60/1443271
aaaatatata

SEQ ID NO: 115475 - DNA, 10 bp, Unknown
  misc_feature (1)..( 10): Result.002 file - promoters60/1443271
aaactatata

SEQ ID NO: 115476 - DNA, 9 bp, Unknown
  misc_feature (1)..( 9): Result.002 file - promoters60/1443271
ccataaaaa

SEQ ID NO: 115477 - DNA, 9 bp, Unknown
  misc_feature (1)..( 9): Result.002 file - promoters60/1443271
cggtaaaaa

SEQ ID NO: 115478 - DNA, 9 bp, Unknown
  misc_feature (1)..( 9): Result.002 file - promoters60/1443271
cattaaatc

SEQ ID NO: 115479 - DNA, 7 bp, Unknown
  misc_feature (1)..( 7): Result.002 file - promoters60/1443271
aaaatat

SEQ ID NO: 115480 - DNA, 7 bp, Unknown
  misc_feature (1)..( 7): Result.002 file - promoters60/1443271
aaactat

SEQ ID NO: 115481 - DNA, 8 bp, Unknown
  misc_feature (1)..( 8): Result.002 file - promoters60/1443271
attttttt

SEQ ID NO: 115482 - DNA, 8 bp, Unknown
  misc_feature (1)..( 8): Result.002 file - promoters60/1443271
atttcttt

SEQ ID NO: 115483 - DNA, 8 bp, Unknown
  misc_feature (1)..( 8): Result.002 file - promoters60/1443271
tgtttttc

SEQ ID NO: 115484 - DNA, 8 bp, Unknown
  misc_feature (1)..( 8): Result.002 file - promoters60/1443271
tgttttta

SEQ ID NO: 115485 - DNA, 8 bp, Unknown
  misc_feature (1)..( 8): Result.002 file - promoters60/1443271
tctttttc

SEQ ID NO: 115486 - DNA, 7 bp, Unknown
  misc_feature (1)..( 7): Result.002 file - promoters60/1443271
tttaaag

SEQ ID NO: 115487 - DNA, 7 bp, Unknown
  misc_feature (1)..( 7): Result.002 file - promoters60/1443271
tttaaag

SEQ ID NO: 115488 - DNA, 6 bp, Unknown
  misc_feature (1)..( 6): Result.002 file - promoters60/1443271
aaacca

SEQ ID NO: 115489 - DNA, 6 bp, Unknown
  misc_feature (1)..( 6): Result.002 file - promoters60/1443271
aaacca

SEQ ID NO: 115490 - DNA, 7 bp, Unknown
  misc_feature (1)..( 7): Result.002 file - promoters60/1443271
tttattg

SEQ ID NO: 115491 - DNA, 7 bp, Unknown
  misc_feature (1)..( 7): Result.002 file - promoters60/1443271
tttattg

SEQ ID NO: 115492 - DNA, 9 bp, Unknown
  misc_feature (1)..( 9): Result.002 file - promoters60/1443271
tgtataagc

SEQ ID NO: 115493 - DNA, 9 bp, Unknown
  misc_feature (1)..( 9): Result.002 file - promoters60/1443271
tgtataagc

SEQ ID NO: 115494 - DNA, 8 bp, Unknown
  misc_feature (1)..( 8): Result.002 file - promoters60/1443271
aaaaatta

SEQ ID NO: 115495 - DNA, 8 bp, Unknown
  misc_feature (1)..( 8): Result.002 file - promoters60/1443271
aaaaatta

SEQ ID NO: 115496 - DNA, 8 bp, Unknown
  misc_feature (1)..( 8): Result.002 file - promoters60/1443271
aaacatta

SEQ ID NO: 115497 - DNA, 6 bp, Unknown
  misc_feature (1)..( 6): Result.002 file - promoters60/1443271
gttaaa

SEQ ID NO: 115498 - DNA, 6 bp, Unknown
  misc_feature (1)..( 6): Result.002 file - promoters60/1443271
gttaaa

SEQ ID NO: 115499 - DNA, 6 bp, Unknown
  misc_feature (1)..( 6): Result.002 file - promoters60/1443271
tgaaat

SEQ ID NO: 115500 - DNA, 6 bp, Unknown
  misc_feature (1)..( 6): Result.002 file - promoters60/1443271
tgaaat

SEQ ID NO: 115501 - DNA, 8 bp, Unknown
  misc_feature (1)..( 8): Result.002 file - promoters60/1443271
ttttgttt

SEQ ID NO: 115502 - DNA, 8 bp, Unknown
  misc_feature (1)..( 8): Result.002 file - promoters60/1443271
ttttattt

SEQ ID NO: 115503 - DNA, 6 bp, Unknown
  misc_feature (1)..( 6): Result.002 file - promoters60/1443271
tttaaa

SEQ ID NO: 115504 - DNA, 6 bp, Unknown
  misc_feature (1)..( 6): Result.002 file - promoters60/1443271
tttaaa

SEQ ID NO: 115505 - DNA, 7 bp, Unknown
  misc_feature (1)..( 7): Result.002 file - promoters60/1443271
tctcaat

SEQ ID NO: 115506 - DNA, 7 bp, Unknown
  misc_feature (1)..( 7): Result.002 file - promoters60/1443271
tcttaat

SEQ ID NO: 115507 - DNA, 9 bp, Unknown
  misc_feature (1)..( 9): Result.002 file - promoters60/1443271
ttttaattt

SEQ ID NO: 115508 - DNA, 9 bp, Unknown
  misc_feature (1)..( 9): Result.002 file - promoters60/1443271
gtttaattt

SEQ ID NO: 115509 - DNA, 9 bp, Unknown
  misc_feature (1)..( 9): Result.002 file - promoters60/1443271
gtttaaacc

SEQ ID NO: 115510 - DNA, 6 bp, Unknown
  misc_feature (1)..( 6): Result.002 file - promoters60/1443271
ttaatt

SEQ ID NO: 115511 - DNA, 6 bp, Unknown
  misc_feature (1)..( 6): Result.002 file - promoters60/1443271
ttaatt

SEQ ID NO: 115512 - DNA, 6 bp, Unknown
  misc_feature (1)..( 6): Result.002 file - promoters60/1443271
atcact

SEQ ID NO: 115513 - DNA, 6 bp, Unknown
  misc_feature (1)..( 6): Result.002 file - promoters60/1443271
atcact

SEQ ID NO: 115514 - DNA, 9 bp, Unknown
  misc_feature (1)..( 9): Result.002 file - promoters60/1443271
caaatatat

SEQ ID NO: 115515 - DNA, 9 bp, Unknown
  misc_feature (1)..( 9): Result.002 file - promoters60/1443271
caaatatat

SEQ ID NO: 115516 - DNA, 7 bp, Unknown
  misc_feature (1)..( 7): Result.002 file - promoters60/1443271
tgtggat

SEQ ID NO: 115517 - DNA, 7 bp, Unknown
  misc_feature (1)..( 7): Result.002 file - promoters60/1443271
tgtagat

SEQ ID NO: 115518 - DNA, 8 bp, Unknown
  misc_feature (1)..( 8): Result.002 file - promoters60/1443271
aatcttat

SEQ ID NO: 115519 - DNA, 8 bp, Unknown
  misc_feature (1)..( 8): Result.002 file - promoters60/1443271
aattttat

SEQ ID NO: 115520 - DNA, 6 bp, Unknown
  misc_feature (1)..( 6): Result.002 file - promoters60/1443271
ctatta

SEQ ID NO: 115521 - DNA, 6 bp, Unknown
  misc_feature (1)..( 6): Result.002 file - promoters60/1443271
ctatta

SEQ ID NO: 115522 - DNA, 9 bp, Unknown
  misc_feature (1)..( 9): Result.002 file - promoters60/1443271
ccatatata

SEQ ID NO: 115523 - DNA, 9 bp, Unknown
  misc_feature (1)..( 9): Result.002 file - promoters60/1443271
ccatctata

SEQ ID NO: 115524 - DNA, 9 bp, Unknown
  misc_feature (1)..( 9): Result.002 file - promoters60/1443276
aatttaata

SEQ ID NO: 115525 - DNA, 9 bp, Unknown
  misc_feature (1)..( 9): Result.002 file - promoters60/1443276
catttaatg

SEQ ID NO: 115526 - DNA, 9 bp, Unknown
  misc_feature (1)..( 9): Result.002 file - promoters60/1443276
aatttaata

SEQ ID NO: 115527 - DNA, 7 bp, Unknown
  misc_feature (1)..( 7): Result.002 file - promoters60/1443276
atgaacg

SEQ ID NO: 115528 - DNA, 7 bp, Unknown
  misc_feature (1)..( 7): Result.002 file - promoters60/1443276
atgaacg

SEQ ID NO: 115529 - DNA, 6 bp, Unknown
  misc_feature (1)..( 6): Result.002 file - promoters60/1443276
caacga

SEQ ID NO: 115530 - DNA, 6 bp, Unknown
  misc_feature (1)..( 6): Result.002 file - promoters60/1443276
caacga

SEQ ID NO: 115531 - DNA, 6 bp, Unknown
  misc_feature (1)..( 6): Result.002 file - promoters60/1443276
ttgata

SEQ ID NO: 115532 - DNA, 6 bp, Unknown
  misc_feature (1)..( 6): Result.002 file - promoters60/1443276
ttgata

SEQ ID NO: 115533 - DNA, 8 bp, Unknown
  misc_feature (1)..( 8): Result.002 file - promoters60/1443276
aaaaggaa

SEQ ID NO: 115534 - DNA, 8 bp, Unknown
  misc_feature (1)..( 8): Result.002 file - promoters60/1443276
aaatggaa

SEQ ID NO: 115535 - DNA, 7 bp, Unknown
  misc_feature (1)..( 7): Result.002 file - promoters60/1443276
tttgtgt

SEQ ID NO: 115536 - DNA, 7 bp, Unknown
  misc_feature (1)..( 7): Result.002 file - promoters60/1443276
tttttgt

SEQ ID NO: 115537 - DNA, 10 bp, Unknown
  misc_feature (1)..( 10): Result.002 file - promoters60/1443276
cgttattatg

SEQ ID NO: 115538 - DNA, 10 bp, Unknown
  misc_feature (1)..( 10): Result.002 file - promoters60/1443276
aaatattatt

SEQ ID NO: 115539 - DNA, 10 bp, Unknown
  misc_feature (1)..( 10): Result.002 file - promoters60/1443276
aaataatatt

SEQ ID NO: 115540 - DNA, 7 bp, Unknown
  misc_feature (1)..( 7): Result.002 file - promoters60/1443276
cgacttg

SEQ ID NO: 115541 - DNA, 7 bp, Unknown
  misc_feature (1)..( 7): Result.002 file - promoters60/1443276
cgaattg

SEQ ID NO: 115542 - DNA, 7 bp, Unknown
  misc_feature (1)..( 7): Result.002 file - promoters60/1443276
ataaaac

SEQ ID NO: 115543 - DNA, 7 bp, Unknown
  misc_feature (1)..( 7): Result.002 file - promoters60/1443276
atacaac

SEQ ID NO: 115544 - DNA, 6 bp, Unknown
  misc_feature (1)..( 6): Result.002 file - promoters60/1443276
accaaa

SEQ ID NO: 115545 - DNA, 6 bp, Unknown
  misc_feature (1)..( 6): Result.002 file - promoters60/1443276
accaaa

SEQ ID NO: 115546 - DNA, 9 bp, Unknown
  misc_feature (1)..( 9): Result.002 file - promoters60/1443276
gactaaaag

SEQ ID NO: 115547 - DNA, 9 bp, Unknown
  misc_feature (1)..( 9): Result.002 file - promoters60/1443276
gactataag

SEQ ID NO: 115548 - DNA, 6 bp, Unknown
  misc_feature (1)..( 6): Result.002 file - promoters60/1443276
aagtct

SEQ ID NO: 115549 - DNA, 6 bp, Unknown
  misc_feature (1)..( 6): Result.002 file - promoters60/1443276
aagtct

SEQ ID NO: 115550 - DNA, 8 bp, Unknown
  misc_feature (1)..( 8): Result.002 file - promoters60/1443276
tcaataaa

SEQ ID NO: 115551 - DNA, 8 bp, Unknown
  misc_feature (1)..( 8): Result.002 file - promoters60/1443276
tcattaaa

SEQ ID NO: 115552 - DNA, 6 bp, Unknown
  misc_feature (1)..( 6): Result.002 file - promoters60/1443276
aaaaaa

SEQ ID NO: 115553 - DNA, 6 bp, Unknown
  misc_feature (1)..( 6): Result.002 file - promoters60/1443276
aaaaaa

SEQ ID NO: 115554 - DNA, 6 bp, Unknown
  misc_feature (1)..( 6): Result.002 file - promoters60/1443276
aaaaat

SEQ ID NO: 115555 - DNA, 6 bp, Unknown
  misc_feature (1)..( 6): Result.002 file - promoters60/1443276
aaaaat

SEQ ID NO: 115556 - DNA, 6 bp, Unknown
  misc_feature (1)..( 6): Result.002 file - promoters60/1443276
gaagac

SEQ ID NO: 115557 - DNA, 6 bp, Unknown
  misc_feature (1)..( 6): Result.002 file - promoters60/1443276
gaagac

SEQ ID NO: 115558 - DNA, 6 bp, Unknown
  misc_feature (1)..( 6): Result.002 file - promoters60/1443276
aaataa

SEQ ID NO: 115559 - DNA, 6 bp, Unknown
  misc_feature (1)..( 6): Result.002 file - promoters60/1443276
aaataa

SEQ ID NO: 115560 - DNA, 9 bp, Unknown
  misc_feature (1)..( 9): Result.002 file - promoters60/1443276
agcatttaa

SEQ ID NO: 115561 - DNA, 9 bp, Unknown
  misc_feature (1)..( 9): Result.002 file - promoters60/1443276
agcttttaa

SEQ ID NO: 115562 - DNA, 8 bp, Unknown
  misc_feature (1)..( 8): Result.002 file - promoters60/1443276
tataaaaa

SEQ ID NO: 115563 - DNA, 8 bp, Unknown
  misc_feature (1)..( 8): Result.002 file - promoters60/1443276
tatataaa

SEQ ID NO: 115564 - DNA, 8 bp, Unknown
  misc_feature (1)..( 8): Result.002 file - promoters60/1443306
tttttaat

SEQ ID NO: 115565 - DNA, 8 bp, Unknown
  misc_feature (1)..( 8): Result.002 file - promoters60/1443306
tttgtaat

SEQ ID NO: 115566 - DNA, 8 bp, Unknown
  misc_feature (1)..( 8): Result.002 file - promoters60/1443306
tttgtaac

SEQ ID NO: 115567 - DNA, 12 bp, Unknown
  misc_feature (1)..( 12): Result.002 file - promoters60/1443306
taagatattttt

SEQ ID NO: 115568 - DNA, 12 bp, Unknown
  misc_feature (1)..( 12): Result.002 file - promoters60/1443306
aaaaatatattt

SEQ ID NO: 115569 - DNA, 12 bp, Unknown
  misc_feature (1)..( 12): Result.002 file - promoters60/1443306
taaaatacttta

SEQ ID NO: 115570 - DNA, 7 bp, Unknown
  misc_feature (1)..( 7): Result.002 file - promoters60/1443306
tttattt

SEQ ID NO: 115571 - DNA, 7 bp, Unknown
  misc_feature (1)..( 7): Result.002 file - promoters60/1443306
tttcttt

SEQ ID NO: 115572 - DNA, 7 bp, Unknown
  misc_feature (1)..( 7): Result.002 file - promoters60/1443306
ttcattt

SEQ ID NO: 115573 - DNA, 7 bp, Unknown
  misc_feature (1)..( 7): Result.002 file - promoters60/1443306
cataaac

SEQ ID NO: 115574 - DNA, 7 bp, Unknown
  misc_feature (1)..( 7): Result.002 file - promoters60/1443306
cataaat

SEQ ID NO: 115575 - DNA, 7 bp, Unknown
  misc_feature (1)..( 7): Result.002 file - promoters60/1443306
cataaac

SEQ ID NO: 115576 - DNA, 12 bp, Unknown
  misc_feature (1)..( 12): Result.002 file - promoters60/1443306
ttcatataaata

SEQ ID NO: 115577 - DNA, 12 bp, Unknown
  misc_feature (1)..( 12): Result.002 file - promoters60/1443306
taactataaata

SEQ ID NO: 115578 - DNA, 12 bp, Unknown
  misc_feature (1)..( 12): Result.002 file - promoters60/1443306
tatatataaata

SEQ ID NO: 115579 - DNA, 12 bp, Unknown
  misc_feature (1)..( 12): Result.002 file - promoters60/1443306
aatctataaaaa

SEQ ID NO: 115580 - DNA, 11 bp, Unknown
  misc_feature (1)..( 11): Result.002 file - promoters60/1443306
tcaattttttt

SEQ ID NO: 115581 - DNA, 11 bp, Unknown
  misc_feature (1)..( 11): Result.002 file - promoters60/1443306
ctaattttagc

SEQ ID NO: 115582 - DNA, 11 bp, Unknown
  misc_feature (1)..( 11): Result.002 file - promoters60/1443306
attatttttac

SEQ ID NO: 115583 - DNA, 9 bp, Unknown
  misc_feature (1)..( 9): Result.002 file - promoters60/1443338
aattacaat

SEQ ID NO: 115584 - DNA, 9 bp, Unknown
  misc_feature (1)..( 9): Result.002 file - promoters60/1443338
tcttataat

SEQ ID NO: 115585 - DNA, 9 bp, Unknown
  misc_feature (1)..( 9): Result.002 file - promoters60/1443338
tcttataaa

SEQ ID NO: 115586 - DNA, 7 bp, Unknown
  misc_feature (1)..( 7): Result.002 file - promoters60/1443338
acatcaa

SEQ ID NO: 115587 - DNA, 7 bp, Unknown
  misc_feature (1)..( 7): Result.002 file - promoters60/1443338
acaccaa

SEQ ID NO: 115588 - DNA, 8 bp, Unknown
  misc_feature (1)..( 8): Result.002 file - promoters60/1443338
acttatat

SEQ ID NO: 115589 - DNA, 8 bp, Unknown
  misc_feature (1)..( 8): Result.002 file - promoters60/1443338
tcttataa

SEQ ID NO: 115590 - DNA, 8 bp, Unknown
  misc_feature (1)..( 8): Result.002 file - promoters60/1443338
tcttataa

SEQ ID NO: 115591 - DNA, 8 bp, Unknown
  misc_feature (1)..( 8): Result.002 file - promoters60/1443338
aaaacaca

SEQ ID NO: 115592 - DNA, 8 bp, Unknown
  misc_feature (1)..( 8): Result.002 file - promoters60/1443338
aaaacaca

SEQ ID NO: 115593 - DNA, 8 bp, Unknown
  misc_feature (1)..( 8): Result.002 file - promoters60/1443338
caagcttt

SEQ ID NO: 115594 - DNA, 8 bp, Unknown
  misc_feature (1)..( 8): Result.002 file - promoters60/1443338
caaacttt

SEQ ID NO: 115595 - DNA, 6 bp, Unknown
  misc_feature (1)..( 6): Result.002 file - promoters60/1443338
aatatt

SEQ ID NO: 115596 - DNA, 6 bp, Unknown
  misc_feature (1)..( 6): Result.002 file - promoters60/1443338
aatatt

SEQ ID NO: 115597 - DNA, 6 bp, Unknown
  misc_feature (1)..( 6): Result.002 file - promoters60/1443338
atcaaa

SEQ ID NO: 115598 - DNA, 6 bp, Unknown
  misc_feature (1)..( 6): Result.002 file - promoters60/1443338
atcaaa

SEQ ID NO: 115599 - DNA, 7 bp, Unknown
  misc_feature (1)..( 7): Result.002 file - promoters60/1443338
caaatcc

SEQ ID NO: 115600 - DNA, 7 bp, Unknown
  misc_feature (1)..( 7): Result.002 file - promoters60/1443338
caagtcc

SEQ ID NO: 115601 - DNA, 7 bp, Unknown
  misc_feature (1)..( 7): Result.002 file - promoters60/1443338
cacaaga

SEQ ID NO: 115602 - DNA, 7 bp, Unknown
  misc_feature (1)..( 7): Result.002 file - promoters60/1443338
cacgaga

SEQ ID NO: 115603 - DNA, 8 bp, Unknown
  misc_feature (1)..( 8): Result.002 file - promoters60/1443338
ctcgcttc

SEQ ID NO: 115604 - DNA, 8 bp, Unknown
  misc_feature (1)..( 8): Result.002 file - promoters60/1443338
ctcgcttc

SEQ ID NO: 115605 - DNA, 8 bp, Unknown
  misc_feature (1)..( 8): Result.002 file - promoters60/1443338
cttctcga

SEQ ID NO: 115606 - DNA, 8 bp, Unknown
  misc_feature (1)..( 8): Result.002 file - promoters60/1443338
cttctcga

SEQ ID NO: 115607 - DNA, 14 bp, Unknown
  misc_feature (1)..( 14): Result.002 file - promoters60/1443349
tgcattagttcttc

SEQ ID NO: 115608 - DNA, 14 bp, Unknown
  misc_feature (1)..( 14): Result.002 file - promoters60/1443349
taaatttgttatgt

SEQ ID NO: 115609 - DNA, 14 bp, Unknown
  misc_feature (1)..( 14): Result.002 file - promoters60/1443349
gttattagttaacc

SEQ ID NO: 115610 - DNA, 14 bp, Unknown
  misc_feature (1)..( 14): Result.002 file - promoters60/1443349
taaattttttaaaa

SEQ ID NO: 115611 - DNA, 14 bp, Unknown
  misc_feature (1)..( 14): Result.002 file - promoters60/1443349
tatacgttttaaaa

SEQ ID NO: 115612 - DNA, 14 bp, Unknown
  misc_feature (1)..( 14): Result.002 file - promoters60/1443349
gaaatttcctcgct

SEQ ID NO: 115613 - DNA, 12 bp, Unknown
  misc_feature (1)..( 12): Result.002 file - promoters60/1443349
ttttgaagaatt

SEQ ID NO: 115614 - DNA, 12 bp, Unknown
  misc_feature (1)..( 12): Result.002 file - promoters60/1443349
ggtttaagcatt

SEQ ID NO: 115615 - DNA, 12 bp, Unknown
  misc_feature (1)..( 12): Result.002 file - promoters60/1443349
ttttgatgaatg

SEQ ID NO: 115616 - DNA, 12 bp, Unknown
  misc_feature (1)..( 12): Result.002 file - promoters60/1443349
tgatgaagaagg

SEQ ID NO: 115617 - DNA, 12 bp, Unknown
  misc_feature (1)..( 12): Result.002 file - promoters60/1443349
atttgctgaata

SEQ ID NO: 115618 - DNA, 12 bp, Unknown
  misc_feature (1)..( 12): Result.002 file - promoters60/1443349
aaaagatgaagt

SEQ ID NO: 115619 - DNA, 12 bp, Unknown
  misc_feature (1)..( 12): Result.002 file - promoters60/1443349
tttcgatgtata

SEQ ID NO: 115620 - DNA, 19 bp, Unknown
  misc_feature (1)..( 19): Result.002 file - promoters60/1443349
atttccataaaaatgttag

SEQ ID NO: 115621 - DNA, 19 bp, Unknown
  misc_feature (1)..( 19): Result.002 file - promoters60/1443349
gaagaaatataaatacgac

SEQ ID NO: 115622 - DNA, 19 bp, Unknown
  misc_feature (1)..( 19): Result.002 file - promoters60/1443349
attttcataaattttaaaa

SEQ ID NO: 115623 - DNA, 19 bp, Unknown
  misc_feature (1)..( 19): Result.002 file - promoters60/1443349
aatttcatccttattttct

SEQ ID NO: 115624 - DNA, 19 bp, Unknown
  misc_feature (1)..( 19): Result.002 file - promoters60/1443349
tttaaaatatatggatagt

SEQ ID NO: 115625 - DNA, 19 bp, Unknown
  misc_feature (1)..( 19): Result.002 file - promoters60/1443349
tgagaaatagatttgaaaa

SEQ ID NO: 115626 - DNA, 19 bp, Unknown
  misc_feature (1)..( 19): Result.002 file - promoters60/1443349
aagcccagaaaaagctgat

SEQ ID NO: 115627 - DNA, 19 bp, Unknown
  misc_feature (1)..( 19): Result.002 file - promoters60/1443349
gataggaaaaagttgttac

SEQ ID NO: 115628 - DNA, 19 bp, Unknown
  misc_feature (1)..( 19): Result.002 file - promoters60/1443349
aaaaaaaaaaagagaagaa

SEQ ID NO: 115629 - DNA, 19 bp, Unknown
  misc_feature (1)..( 19): Result.002 file - promoters60/1443349
gcccagaaaaagctgattg

SEQ ID NO: 115630 - DNA, 19 bp, Unknown
  misc_feature (1)..( 19): Result.002 file - promoters60/1443349
gatttgaaaaacagacaac

SEQ ID NO: 115631 - DNA, 19 bp, Unknown
  misc_feature (1)..( 19): Result.002 file - promoters60/1443349
gatagtaaaaaaagagatc

SEQ ID NO: 115632 - DNA, 19 bp, Unknown
  misc_feature (1)..( 19): Result.002 file - promoters60/1443349
attttcataaattttaaaa

SEQ ID NO: 115633 - DNA, 13 bp, Unknown
  misc_feature (1)..( 13): Result.002 file - promoters60/1443349
ctcttatataaac

SEQ ID NO: 115634 - DNA, 13 bp, Unknown
  misc_feature (1)..( 13): Result.002 file - promoters60/1443349
ctcttatatataa

SEQ ID NO: 115635 - DNA, 13 bp, Unknown
  misc_feature (1)..( 13): Result.002 file - promoters60/1443349
agtatatataata

SEQ ID NO: 115636 - DNA, 13 bp, Unknown
  misc_feature (1)..( 13): Result.002 file - promoters60/1443349
acagtatataaac

SEQ ID NO: 115637 - DNA, 13 bp, Unknown
  misc_feature (1)..( 13): Result.002 file - promoters60/1443349
cttgtatataaat

SEQ ID NO: 115638 - DNA, 13 bp, Unknown
  misc_feature (1)..( 13): Result.002 file - promoters60/1443349
acgataaatatcc

SEQ ID NO: 115639 - DNA, 13 bp, Unknown
  misc_feature (1)..( 13): Result.002 file - promoters60/1443349
tttataaataaaa

SEQ ID NO: 115640 - DNA, 19 bp, Unknown
  misc_feature (1)..( 19): Result.002 file - promoters60/1443349
ataaaaatgttagatagga

SEQ ID NO: 115641 - DNA, 19 bp, Unknown
  misc_feature (1)..( 19): Result.002 file - promoters60/1443349
tcataaattttaaaattat

SEQ ID NO: 115642 - DNA, 19 bp, Unknown
  misc_feature (1)..( 19): Result.002 file - promoters60/1443349
tgttaaatatgaatattac

SEQ ID NO: 115643 - DNA, 20 bp, Unknown
  misc_feature (1)..( 20): Result.002 file - promoters60/1443349
atgtaaattttgaaataatt

SEQ ID NO: 115644 - DNA, 20 bp, Unknown
  misc_feature (1)..( 20): Result.002 file - promoters60/1443349
tgagaaatagatttgaaaaa

SEQ ID NO: 115645 - DNA, 20 bp, Unknown
  misc_feature (1)..( 20): Result.002 file - promoters60/1443349
ttttaaattttttaaaatat

SEQ ID NO: 115646 - DNA, 20 bp, Unknown
  misc_feature (1)..( 20): Result.002 file - promoters60/1443349
aaaaaaaaagagaagaaaaa

SEQ ID NO: 115647 - DNA, 9 bp, Unknown
  misc_feature (1)..( 9): Result.002 file - promoters60/1443349
cattaaagt

SEQ ID NO: 115648 - DNA, 9 bp, Unknown
  misc_feature (1)..( 9): Result.002 file - promoters60/1443349
aattcaagc

SEQ ID NO: 115649 - DNA, 9 bp, Unknown
  misc_feature (1)..( 9): Result.002 file - promoters60/1443349
cattaataa

SEQ ID NO: 115650 - DNA, 9 bp, Unknown
  misc_feature (1)..( 9): Result.002 file - promoters60/1443349
gatttatac

SEQ ID NO: 115651 - DNA, 9 bp, Unknown
  misc_feature (1)..( 9): Result.002 file - promoters60/1443349
aattaataa

SEQ ID NO: 115652 - DNA, 9 bp, Unknown
  misc_feature (1)..( 9): Result.002 file - promoters60/1443349
aattcactc

SEQ ID NO: 115653 - DNA, 12 bp, Unknown
  misc_feature (1)..( 12): Result.002 file - promoters60/1443349
tatataaacaaa

SEQ ID NO: 115654 - DNA, 12 bp, Unknown
  misc_feature (1)..( 12): Result.002 file - promoters60/1443349
ataataaccaaa

SEQ ID NO: 115655 - DNA, 12 bp, Unknown
  misc_feature (1)..( 12): Result.002 file - promoters60/1443349
tatataaactct

SEQ ID NO: 115656 - DNA, 12 bp, Unknown
  misc_feature (1)..( 12): Result.002 file - promoters60/1443349
tttataaataaa

SEQ ID NO: 115657 - DNA, 12 bp, Unknown
  misc_feature (1)..( 12): Result.002 file - promoters60/1443349
tatataaatgac

SEQ ID NO: 115658 - DNA, 12 bp, Unknown
  misc_feature (1)..( 12): Result.002 file - promoters60/1443349
tatataaacaaa

SEQ ID NO: 115659 - DNA, 10 bp, Unknown
  misc_feature (1)..( 10): Result.002 file - promoters60/1443349
caaaatttgt

SEQ ID NO: 115660 - DNA, 10 bp, Unknown
  misc_feature (1)..( 10): Result.002 file - promoters60/1443349
caatatttta

SEQ ID NO: 115661 - DNA, 10 bp, Unknown
  misc_feature (1)..( 10): Result.002 file - promoters60/1443349
gaatatgttt

SEQ ID NO: 115662 - DNA, 10 bp, Unknown
  misc_feature (1)..( 10): Result.002 file - promoters60/1443349
aattatttta

SEQ ID NO: 115663 - DNA, 11 bp, Unknown
  misc_feature (1)..( 11): Result.002 file - promoters60/1443349
atttagtttga

SEQ ID NO: 115664 - DNA, 11 bp, Unknown
  misc_feature (1)..( 11): Result.002 file - promoters60/1443349
agatagtatat

SEQ ID NO: 115665 - DNA, 8 bp, Unknown
  misc_feature (1)..( 8): Result.002 file - promoters60/1443356
actgatta

SEQ ID NO: 115666 - DNA, 8 bp, Unknown
  misc_feature (1)..( 8): Result.002 file - promoters60/1443356
actaattt

SEQ ID NO: 115667 - DNA, 8 bp, Unknown
  misc_feature (1)..( 8): Result.002 file - promoters60/1443356
ggtaattt

SEQ ID NO: 115668 - DNA, 6 bp, Unknown
  misc_feature (1)..( 6): Result.002 file - promoters60/1443356
attact

SEQ ID NO: 115669 - DNA, 6 bp, Unknown
  misc_feature (1)..( 6): Result.002 file - promoters60/1443356
attact

SEQ ID NO: 115670 - DNA, 6 bp, Unknown
  misc_feature (1)..( 6): Result.002 file - promoters60/1443356
taataa

SEQ ID NO: 115671 - DNA, 6 bp, Unknown
  misc_feature (1)..( 6): Result.002 file - promoters60/1443356
taataa

SEQ ID NO: 115672 - DNA, 6 bp, Unknown
  misc_feature (1)..( 6): Result.002 file - promoters60/1443356
atattt

SEQ ID NO: 115673 - DNA, 6 bp, Unknown
  misc_feature (1)..( 6): Result.002 file - promoters60/1443356
atattt

SEQ ID NO: 115674 - DNA, 8 bp, Unknown
  misc_feature (1)..( 8): Result.002 file - promoters60/1443356
ttaaaaga

SEQ ID NO: 115675 - DNA, 8 bp, Unknown
  misc_feature (1)..( 8): Result.002 file - promoters60/1443356
ttagaagt

SEQ ID NO: 115676 - DNA, 8 bp, Unknown
  misc_feature (1)..( 8): Result.002 file - promoters60/1443356
ataacaga

SEQ ID NO: 115677 - DNA, 6 bp, Unknown
  misc_feature (1)..( 6): Result.002 file - promoters60/1443356
tacaat

SEQ ID NO: 115678 - DNA, 6 bp, Unknown
  misc_feature (1)..( 6): Result.002 file - promoters60/1443356
tacaat

SEQ ID NO: 115679 - DNA, 7 bp, Unknown
  misc_feature (1)..( 7): Result.002 file - promoters60/1443356
tttcttt

SEQ ID NO: 115680 - DNA, 7 bp, Unknown
  misc_feature (1)..( 7): Result.002 file - promoters60/1443356
tttattt

SEQ ID NO: 115681 - DNA, 7 bp, Unknown
  misc_feature (1)..( 7): Result.002 file - promoters60/1443356
aatgtat

SEQ ID NO: 115682 - DNA, 7 bp, Unknown
  misc_feature (1)..( 7): Result.002 file - promoters60/1443356
aatatat

SEQ ID NO: 115683 - DNA, 7 bp, Unknown
  misc_feature (1)..( 7): Result.002 file - promoters60/1443356
tatccct

SEQ ID NO: 115684 - DNA, 7 bp, Unknown
  misc_feature (1)..( 7): Result.002 file - promoters60/1443356
tatacct

SEQ ID NO: 115685 - DNA, 7 bp, Unknown
  misc_feature (1)..( 7): Result.002 file - promoters60/1443356
caggtat

SEQ ID NO: 115686 - DNA, 7 bp, Unknown
  misc_feature (1)..( 7): Result.002 file - promoters60/1443356
cagttat

SEQ ID NO: 115687 - DNA, 7 bp, Unknown
  misc_feature (1)..( 7): Result.002 file - promoters60/1443356
tgacaat

SEQ ID NO: 115688 - DNA, 7 bp, Unknown
  misc_feature (1)..( 7): Result.002 file - promoters60/1443356
tgacaat

SEQ ID NO: 115689 - DNA, 7 bp, Unknown
  misc_feature (1)..( 7): Result.002 file - promoters60/1443356
atctgcc

SEQ ID NO: 115690 - DNA, 7 bp, Unknown
  misc_feature (1)..( 7): Result.002 file - promoters60/1443356
atcggcc

SEQ ID NO: 115691 - DNA, 6 bp, Unknown
  misc_feature (1)..( 6): Result.002 file - promoters60/1443356
aggttt

SEQ ID NO: 115692 - DNA, 6 bp, Unknown
  misc_feature (1)..( 6): Result.002 file - promoters60/1443356
aggttt

SEQ ID NO: 115693 - DNA, 6 bp, Unknown
  misc_feature (1)..( 6): Result.002 file - promoters60/1443356
ggtaat

SEQ ID NO: 115694 - DNA, 6 bp, Unknown
  misc_feature (1)..( 6): Result.002 file - promoters60/1443356
ggtaat

SEQ ID NO: 115695 - DNA, 7 bp, Unknown
  misc_feature (1)..( 7): Result.002 file - promoters60/1443356
aatctat

SEQ ID NO: 115696 - DNA, 7 bp, Unknown
  misc_feature (1)..( 7): Result.002 file - promoters60/1443356
aatgtat

SEQ ID NO: 115697 - DNA, 7 bp, Unknown
  misc_feature (1)..( 7): Result.002 file - promoters60/1443356
aatttat

SEQ ID NO: 115698 - DNA, 7 bp, Unknown
  misc_feature (1)..( 7): Result.002 file - promoters60/1443356
atgggga

SEQ ID NO: 115699 - DNA, 7 bp, Unknown
  misc_feature (1)..( 7): Result.002 file - promoters60/1443356
atgcgga

SEQ ID NO: 115700 - DNA, 7 bp, Unknown
  misc_feature (1)..( 7): Result.002 file - promoters60/1443356
cttggct

SEQ ID NO: 115701 - DNA, 7 bp, Unknown
  misc_feature (1)..( 7): Result.002 file - promoters60/1443356
ctttgct

SEQ ID NO: 115702 - DNA, 6 bp, Unknown
  misc_feature (1)..( 6): Result.002 file - promoters60/1443356
atttaa

SEQ ID NO: 115703 - DNA, 6 bp, Unknown
  misc_feature (1)..( 6): Result.002 file - promoters60/1443356
atttaa

SEQ ID NO: 115704 - DNA, 8 bp, Unknown
  misc_feature (1)..( 8): Result.002 file - promoters60/1443356
atttttac

SEQ ID NO: 115705 - DNA, 8 bp, Unknown
  misc_feature (1)..( 8): Result.002 file - promoters60/1443356
attcttac

SEQ ID NO: 115706 - DNA, 6 bp, Unknown
  misc_feature (1)..( 6): Result.002 file - promoters60/1443356
aaatgt

SEQ ID NO: 115707 - DNA, 6 bp, Unknown
  misc_feature (1)..( 6): Result.002 file - promoters60/1443356
aaatgt

SEQ ID NO: 115708 - DNA, 7 bp, Unknown
  misc_feature (1)..( 7): Result.002 file - promoters60/1443356
atttttg

SEQ ID NO: 115709 - DNA, 7 bp, Unknown
  misc_feature (1)..( 7): Result.002 file - promoters60/1443356
atttttg

SEQ ID NO: 115710 - DNA, 6 bp, Unknown
  misc_feature (1)..( 6): Result.002 file - promoters60/1443356
gtcaat

SEQ ID NO: 115711 - DNA, 6 bp, Unknown
  misc_feature (1)..( 6): Result.002 file - promoters60/1443356
gtcaat

SEQ ID NO: 115712 - DNA, 6 bp, Unknown
  misc_feature (1)..( 6): Result.002 file - promoters60/1443356
aattca

SEQ ID NO: 115713 - DNA, 6 bp, Unknown
  misc_feature (1)..( 6): Result.002 file - promoters60/1443356
aattca

SEQ ID NO: 115714 - DNA, 7 bp, Unknown
  misc_feature (1)..( 7): Result.002 file - promoters60/1443356
aatctct

SEQ ID NO: 115715 - DNA, 7 bp, Unknown
  misc_feature (1)..( 7): Result.002 file - promoters60/1443356
aatgtct

SEQ ID NO: 115716 - DNA, 6 bp, Unknown
  misc_feature (1)..( 6): Result.002 file - promoters60/1443356
tttgtt

SEQ ID NO: 115717 - DNA, 6 bp, Unknown
  misc_feature (1)..( 6): Result.002 file - promoters60/1443356
tttgtt

SEQ ID NO: 115718 - DNA, 6 bp, Unknown
  misc_feature (1)..( 6): Result.002 file - promoters60/1443387
ggtaga

SEQ ID NO: 115719 - DNA, 6 bp, Unknown
  misc_feature (1)..( 6): Result.002 file - promoters60/1443387
ggtaga

SEQ ID NO: 115720 - DNA, 7 bp, Unknown
  misc_feature (1)..( 7): Result.002 file - promoters60/1443387
aaggaaa

SEQ ID NO: 115721 - DNA, 7 bp, Unknown
  misc_feature (1)..( 7): Result.002 file - promoters60/1443387
aagaaaa

SEQ ID NO: 115722 - DNA, 6 bp, Unknown
  misc_feature (1)..( 6): Result.002 file - promoters60/1443387
ccatat

SEQ ID NO: 115723 - DNA, 6 bp, Unknown
  misc_feature (1)..( 6): Result.002 file - promoters60/1443387
ccatat

SEQ ID NO: 115724 - DNA, 6 bp, Unknown
  misc_feature (1)..( 6): Result.002 file - promoters60/1443387
tataaa

SEQ ID NO: 115725 - DNA, 6 bp, Unknown
  misc_feature (1)..( 6): Result.002 file - promoters60/1443387
tataaa

SEQ ID NO: 115726 - DNA, 6 bp, Unknown
  misc_feature (1)..( 6): Result.002 file - promoters60/1443387
gttttg

SEQ ID NO: 115727 - DNA, 6 bp, Unknown
  misc_feature (1)..( 6): Result.002 file - promoters60/1443387
gttttg

SEQ ID NO: 115728 - DNA, 8 bp, Unknown
  misc_feature (1)..( 8): Result.002 file - promoters60/1443387
ttttaaat

SEQ ID NO: 115729 - DNA, 8 bp, Unknown
  misc_feature (1)..( 8): Result.002 file - promoters60/1443387
ctttaaaa

SEQ ID NO: 115730 - DNA, 7 bp, Unknown
  misc_feature (1)..( 7): Result.002 file - promoters60/1443387
tcataaa

SEQ ID NO: 115731 - DNA, 7 bp, Unknown
  misc_feature (1)..( 7): Result.002 file - promoters60/1443387
tcagaaa

SEQ ID NO: 115732 - DNA, 8 bp, Unknown
  misc_feature (1)..( 8): Result.002 file - promoters60/1443387
aaatgggc

SEQ ID NO: 115733 - DNA, 8 bp, Unknown
  misc_feature (1)..( 8): Result.002 file - promoters60/1443387
aaaagggc

SEQ ID NO: 115734 - DNA, 8 bp, Unknown
  misc_feature (1)..( 8): Result.002 file - promoters60/1443387
aaaaaaac

SEQ ID NO: 115735 - DNA, 8 bp, Unknown
  misc_feature (1)..( 8): Result.002 file - promoters60/1443387
aaaataac

SEQ ID NO: 115736 - DNA, 11 bp, Unknown
  misc_feature (1)..( 11): Result.002 file - promoters60/1443387
atcaaatgcaa

SEQ ID NO: 115737 - DNA, 11 bp, Unknown
  misc_feature (1)..( 11): Result.002 file - promoters60/1443387
atctaattcaa

SEQ ID NO: 115738 - DNA, 7 bp, Unknown
  misc_feature (1)..( 7): Result.002 file - promoters60/1443387
aaaattg

SEQ ID NO: 115739 - DNA, 7 bp, Unknown
  misc_feature (1)..( 7): Result.002 file - promoters60/1443387
aaaattg

SEQ ID NO: 115740 - DNA, 11 bp, Unknown
  misc_feature (1)..( 11): Result.002 file - promoters60/1443418
gtttaaaaatt

SEQ ID NO: 115741 - DNA, 11 bp, Unknown
  misc_feature (1)..( 11): Result.002 file - promoters60/1443418
gtgtaacaatt

SEQ ID NO: 115742 - DNA, 11 bp, Unknown
  misc_feature (1)..( 11): Result.002 file - promoters60/1443418
ttggtaaaatt

SEQ ID NO: 115743 - DNA, 11 bp, Unknown
  misc_feature (1)..( 11): Result.002 file - promoters60/1443418
aacccaaaatt

SEQ ID NO: 115744 - DNA, 11 bp, Unknown
  misc_feature (1)..( 11): Result.002 file - promoters60/1443418
gttaaaaaatt

SEQ ID NO: 115745 - DNA, 11 bp, Unknown
  misc_feature (1)..( 11): Result.002 file - promoters60/1443418
ttgtcacaagt

SEQ ID NO: 115746 - DNA, 14 bp, Unknown
  misc_feature (1)..( 14): Result.002 file - promoters60/1443418
taaataaatttttg

SEQ ID NO: 115747 - DNA, 14 bp, Unknown
  misc_feature (1)..( 14): Result.002 file - promoters60/1443418
taaaaaaagaagaa

SEQ ID NO: 115748 - DNA, 14 bp, Unknown
  misc_feature (1)..( 14): Result.002 file - promoters60/1443418
caaacaaatgtttg

SEQ ID NO: 115749 - DNA, 14 bp, Unknown
  misc_feature (1)..( 14): Result.002 file - promoters60/1443418
tcaataaaaaaaaa

SEQ ID NO: 115750 - DNA, 14 bp, Unknown
  misc_feature (1)..( 14): Result.002 file - promoters60/1443418
caaaaaaattcacg

SEQ ID NO: 115751 - DNA, 14 bp, Unknown
  misc_feature (1)..( 14): Result.002 file - promoters60/1443418
tacatacatatact

SEQ ID NO: 115752 - DNA, 14 bp, Unknown
  misc_feature (1)..( 14): Result.002 file - promoters60/1443418
tcattaacatgata

SEQ ID NO: 115753 - DNA, 14 bp, Unknown
  misc_feature (1)..( 14): Result.002 file - promoters60/1443418
aaaatacaaaacgt

SEQ ID NO: 115754 - DNA, 13 bp, Unknown
  misc_feature (1)..( 13): Result.002 file - promoters60/1443418
tttttatttcttt

SEQ ID NO: 115755 - DNA, 13 bp, Unknown
  misc_feature (1)..( 13): Result.002 file - promoters60/1443418
taattattttgca

SEQ ID NO: 115756 - DNA, 13 bp, Unknown
  misc_feature (1)..( 13): Result.002 file - promoters60/1443418
ggattaattcttt

SEQ ID NO: 115757 - DNA, 13 bp, Unknown
  misc_feature (1)..( 13): Result.002 file - promoters60/1443418
attttattataaa

SEQ ID NO: 115758 - DNA, 13 bp, Unknown
  misc_feature (1)..( 13): Result.002 file - promoters60/1443418
tttttattgccgc

SEQ ID NO: 115759 - DNA, 13 bp, Unknown
  misc_feature (1)..( 13): Result.002 file - promoters60/1443418
tcattatttttac

SEQ ID NO: 115760 - DNA, 21 bp, Unknown
  misc_feature (1)..( 21): Result.002 file - promoters60/1443418
gcaaattattcacacatgttg

SEQ ID NO: 115761 - DNA, 21 bp, Unknown
  misc_feature (1)..( 21): Result.002 file - promoters60/1443418
ccaaaatatctaaacactaat

SEQ ID NO: 115762 - DNA, 21 bp, Unknown
  misc_feature (1)..( 21): Result.002 file - promoters60/1443418
attaattattcatacaagttg

SEQ ID NO: 115763 - DNA, 21 bp, Unknown
  misc_feature (1)..( 21): Result.002 file - promoters60/1443418
caaaattagcgagtaggataa

SEQ ID NO: 115764 - DNA, 21 bp, Unknown
  misc_feature (1)..( 21): Result.002 file - promoters60/1443418
gtaaaataatacactactttt

SEQ ID NO: 115765 - DNA, 21 bp, Unknown
  misc_feature (1)..( 21): Result.002 file - promoters60/1443418
gtaagatattttcctttcgaa

SEQ ID NO: 115766 - DNA, 14 bp, Unknown
  misc_feature (1)..( 14): Result.002 file - promoters60/1443418
aaattttaataaac

SEQ ID NO: 115767 - DNA, 14 bp, Unknown
  misc_feature (1)..( 14): Result.002 file - promoters60/1443418
aaattataaactaa

SEQ ID NO: 115768 - DNA, 14 bp, Unknown
  misc_feature (1)..( 14): Result.002 file - promoters60/1443418
tgagtttaatcttc

SEQ ID NO: 115769 - DNA, 14 bp, Unknown
  misc_feature (1)..( 14): Result.002 file - promoters60/1443418
taatgttaacacaa

SEQ ID NO: 115770 - DNA, 14 bp, Unknown
  misc_feature (1)..( 14): Result.002 file - promoters60/1443418
cctaattaacctta

SEQ ID NO: 115771 - DNA, 14 bp, Unknown
  misc_feature (1)..( 14): Result.002 file - promoters60/1443418
ttattataaagtta

SEQ ID NO: 115772 - DNA, 11 bp, Unknown
  misc_feature (1)..( 11): Result.002 file - promoters60/1443418
aatgaaattca

SEQ ID NO: 115773 - DNA, 11 bp, Unknown
  misc_feature (1)..( 11): Result.002 file - promoters60/1443418
aatgatattcg

SEQ ID NO: 115774 - DNA, 11 bp, Unknown
  misc_feature (1)..( 11): Result.002 file - promoters60/1443418
aaaaaaattca

SEQ ID NO: 115775 - DNA, 11 bp, Unknown
  misc_feature (1)..( 11): Result.002 file - promoters60/1443418
tttgatatata

SEQ ID NO: 115776 - DNA, 11 bp, Unknown
  misc_feature (1)..( 11): Result.002 file - promoters60/1443418
tttgctatcta

SEQ ID NO: 115777 - DNA, 11 bp, Unknown
  misc_feature (1)..( 11): Result.002 file - promoters60/1443418
taaaacattga

SEQ ID NO: 115778 - DNA, 11 bp, Unknown
  misc_feature (1)..( 11): Result.002 file - promoters60/1443418
gatcaaatagg

SEQ ID NO: 115779 - DNA, 11 bp, Unknown
  misc_feature (1)..( 11): Result.002 file - promoters60/1443418
tttcaaataca

SEQ ID NO: 115780 - DNA, 11 bp, Unknown
  misc_feature (1)..( 11): Result.002 file - promoters60/1443418
ttacaaataaa

SEQ ID NO: 115781 - DNA, 11 bp, Unknown
  misc_feature (1)..( 11): Result.002 file - promoters60/1443418
gattaaattgg

SEQ ID NO: 115782 - DNA, 11 bp, Unknown
  misc_feature (1)..( 11): Result.002 file - promoters60/1443418
atttaaaagtt

SEQ ID NO: 115783 - DNA, 11 bp, Unknown
  misc_feature (1)..( 11): Result.002 file - promoters60/1443418
tttaaaacaaa

SEQ ID NO: 115784 - DNA, 14 bp, Unknown
  misc_feature (1)..( 14): Result.002 file - promoters60/1443433
ctcttatataaaca

SEQ ID NO: 115785 - DNA, 14 bp, Unknown
  misc_feature (1)..( 14): Result.002 file - promoters60/1443433
ctcttatatataaa

SEQ ID NO: 115786 - DNA, 14 bp, Unknown
  misc_feature (1)..( 14): Result.002 file - promoters60/1443433
acagtatataaact

SEQ ID NO: 115787 - DNA, 14 bp, Unknown
  misc_feature (1)..( 14): Result.002 file - promoters60/1443433
gttttatatattaa

SEQ ID NO: 115788 - DNA, 14 bp, Unknown
  misc_feature (1)..( 14): Result.002 file - promoters60/1443433
tacctataaatatc

SEQ ID NO: 115789 - DNA, 14 bp, Unknown
  misc_feature (1)..( 14): Result.002 file - promoters60/1443433
aaaaaatagactct

SEQ ID NO: 115790 - DNA, 17 bp, Unknown
  misc_feature (1)..( 17): Result.002 file - promoters60/1443433
tgaaaacttataattat

SEQ ID NO: 115791 - DNA, 17 bp, Unknown
  misc_feature (1)..( 17): Result.002 file - promoters60/1443433
tactaacatatgattgt

SEQ ID NO: 115792 - DNA, 17 bp, Unknown
  misc_feature (1)..( 17): Result.002 file - promoters60/1443433
aatatctttataagtat

SEQ ID NO: 115793 - DNA, 17 bp, Unknown
  misc_feature (1)..( 17): Result.002 file - promoters60/1443433
tactcacatatgggcct

SEQ ID NO: 115794 - DNA, 7 bp, Unknown
  misc_feature (1)..( 7): Result.002 file - promoters60/1443433
aactcac

SEQ ID NO: 115795 - DNA, 20 bp, Unknown
  misc_feature (1)..( 20): Result.002 file - promoters60/1443433
tcctcgcttcataacaaaat

SEQ ID NO: 115796 - DNA, 6 bp, Unknown
  misc_feature (1)..( 6): Result.002 file - promoters60/1443475
ttgaat

SEQ ID NO: 115797 - DNA, 6 bp, Unknown
  misc_feature (1)..( 6): Result.002 file - promoters60/1443475
ttgaat

SEQ ID NO: 115798 - DNA, 8 bp, Unknown
  misc_feature (1)..( 8): Result.002 file - promoters60/1443475
caagtttt

SEQ ID NO: 115799 - DNA, 8 bp, Unknown
  misc_feature (1)..( 8): Result.002 file - promoters60/1443475
caagttta

SEQ ID NO: 115800 - DNA, 8 bp, Unknown
  misc_feature (1)..( 8): Result.002 file - promoters60/1443475
ccagtttt

SEQ ID NO: 115801 - DNA, 6 bp, Unknown
  misc_feature (1)..( 6): Result.002 file - promoters60/1443475
tatgta

SEQ ID NO: 115802 - DNA, 6 bp, Unknown
  misc_feature (1)..( 6): Result.002 file - promoters60/1443475
tatgta

SEQ ID NO: 115803 - DNA, 7 bp, Unknown
  misc_feature (1)..( 7): Result.002 file - promoters60/1443475
ttttctc

SEQ ID NO: 115804 - DNA, 7 bp, Unknown
  misc_feature (1)..( 7): Result.002 file - promoters60/1443475
ttttctc

SEQ ID NO: 115805 - DNA, 8 bp, Unknown
  misc_feature (1)..( 8): Result.002 file - promoters60/1443475
ttatgaat

SEQ ID NO: 115806 - DNA, 8 bp, Unknown
  misc_feature (1)..( 8): Result.002 file - promoters60/1443475
ttatcaat

SEQ ID NO: 115807 - DNA, 6 bp, Unknown
  misc_feature (1)..( 6): Result.002 file - promoters60/1443475
gttaaa

SEQ ID NO: 115808 - DNA, 6 bp, Unknown
  misc_feature (1)..( 6): Result.002 file - promoters60/1443475
gttaaa

SEQ ID NO: 115809 - DNA, 7 bp, Unknown
  misc_feature (1)..( 7): Result.002 file - promoters60/1443475
attagtt

SEQ ID NO: 115810 - DNA, 7 bp, Unknown
  misc_feature (1)..( 7): Result.002 file - promoters60/1443475
attcgtt

SEQ ID NO: 115811 - DNA, 6 bp, Unknown
  misc_feature (1)..( 6): Result.002 file - promoters60/1443475
atcaga

SEQ ID NO: 115812 - DNA, 6 bp, Unknown
  misc_feature (1)..( 6): Result.002 file - promoters60/1443475
atcaga

SEQ ID NO: 115813 - DNA, 7 bp, Unknown
  misc_feature (1)..( 7): Result.002 file - promoters60/1443475
ttttttt

SEQ ID NO: 115814 - DNA, 7 bp, Unknown
  misc_feature (1)..( 7): Result.002 file - promoters60/1443475
ttttttc

SEQ ID NO: 115815 - DNA, 7 bp, Unknown
  misc_feature (1)..( 7): Result.002 file - promoters60/1443475
ttttttc

SEQ ID NO: 115816 - DNA, 6 bp, Unknown
  misc_feature (1)..( 6): Result.002 file - promoters60/1443475
taaatc

SEQ ID NO: 115817 - DNA, 6 bp, Unknown
  misc_feature (1)..( 6): Result.002 file - promoters60/1443475
taaatc

SEQ ID NO: 115818 - DNA, 6 bp, Unknown
  misc_feature (1)..( 6): Result.002 file - promoters60/1443475
actatt

SEQ ID NO: 115819 - DNA, 6 bp, Unknown
  misc_feature (1)..( 6): Result.002 file - promoters60/1443475
actatt

SEQ ID NO: 115820 - DNA, 6 bp, Unknown
  misc_feature (1)..( 6): Result.002 file - promoters60/1443475
cgaaac

SEQ ID NO: 115821 - DNA, 6 bp, Unknown
  misc_feature (1)..( 6): Result.002 file - promoters60/1443475
cgaaac

SEQ ID NO: 115822 - DNA, 6 bp, Unknown
  misc_feature (1)..( 6): Result.002 file - promoters60/1443475
gaaaga

SEQ ID NO: 115823 - DNA, 6 bp, Unknown
  misc_feature (1)..( 6): Result.002 file - promoters60/1443475
gaaaga

SEQ ID NO: 115824 - DNA, 6 bp, Unknown
  misc_feature (1)..( 6): Result.002 file - promoters60/1443475
aagaaa

SEQ ID NO: 115825 - DNA, 6 bp, Unknown
  misc_feature (1)..( 6): Result.002 file - promoters60/1443475
aagaaa

SEQ ID NO: 115826 - DNA, 8 bp, Unknown
  misc_feature (1)..( 8): Result.002 file - promoters60/1443475
aaagttct

SEQ ID NO: 115827 - DNA, 8 bp, Unknown
  misc_feature (1)..( 8): Result.002 file - promoters60/1443475
aaaggtct

SEQ ID NO: 115828 - DNA, 6 bp, Unknown
  misc_feature (1)..( 6): Result.002 file - promoters60/1443475
aaaata

SEQ ID NO: 115829 - DNA, 6 bp, Unknown
  misc_feature (1)..( 6): Result.002 file - promoters60/1443475
aaaata

SEQ ID NO: 115830 - DNA, 7 bp, Unknown
  misc_feature (1)..( 7): Result.002 file - promoters60/1443475
gtgtaga

SEQ ID NO: 115831 - DNA, 7 bp, Unknown
  misc_feature (1)..( 7): Result.002 file - promoters60/1443475
gtgaaga

SEQ ID NO: 115832 - DNA, 10 bp, Unknown
  misc_feature (1)..( 10): Result.002 file - promoters60/1443512
gccgtcagcc

SEQ ID NO: 115833 - DNA, 10 bp, Unknown
  misc_feature (1)..( 10): Result.002 file - promoters60/1443512
gccttcactt

SEQ ID NO: 115834 - DNA, 10 bp, Unknown
  misc_feature (1)..( 10): Result.002 file - promoters60/1443512
ttcttaactt

SEQ ID NO: 115835 - DNA, 11 bp, Unknown
  misc_feature (1)..( 11): Result.002 file - promoters60/1443512
aattccgtaac

SEQ ID NO: 115836 - DNA, 11 bp, Unknown
  misc_feature (1)..( 11): Result.002 file - promoters60/1443512
ggatccataac

SEQ ID NO: 115837 - DNA, 11 bp, Unknown
  misc_feature (1)..( 11): Result.002 file - promoters60/1443512
ggacccatttg

SEQ ID NO: 115838 - DNA, 10 bp, Unknown
  misc_feature (1)..( 10): Result.002 file - promoters60/1443633
ggttcttttt

SEQ ID NO: 115839 - DNA, 10 bp, Unknown
  misc_feature (1)..( 10): Result.002 file - promoters60/1443633
tgggcttttt

SEQ ID NO: 115840 - DNA, 10 bp, Unknown
  misc_feature (1)..( 10): Result.002 file - promoters60/1443633
tttcctttgg

SEQ ID NO: 115841 - DNA, 10 bp, Unknown
  misc_feature (1)..( 10): Result.002 file - promoters60/1443633
tttactttgt

SEQ ID NO: 115842 - DNA, 10 bp, Unknown
  misc_feature (1)..( 10): Result.002 file - promoters60/1443633
tgaaagaaaa

SEQ ID NO: 115843 - DNA, 10 bp, Unknown
  misc_feature (1)..( 10): Result.002 file - promoters60/1443633
aaaaagaaca

SEQ ID NO: 115844 - DNA, 10 bp, Unknown
  misc_feature (1)..( 10): Result.002 file - promoters60/1443633
aaaaataacg

SEQ ID NO: 115845 - DNA, 10 bp, Unknown
  misc_feature (1)..( 10): Result.002 file - promoters60/1443633
ggaaatgacg

SEQ ID NO: 115846 - DNA, 12 bp, Unknown
  misc_feature (1)..( 12): Result.002 file - promoters60/1443640
ctagagattgtg

SEQ ID NO: 115847 - DNA, 12 bp, Unknown
  misc_feature (1)..( 12): Result.002 file - promoters60/1443640
attaagattgtg

SEQ ID NO: 115848 - DNA, 12 bp, Unknown
  misc_feature (1)..( 12): Result.002 file - promoters60/1443640
caggagcttggg

SEQ ID NO: 115849 - DNA, 12 bp, Unknown
  misc_feature (1)..( 12): Result.002 file - promoters60/1443640
atttagatttgg

SEQ ID NO: 115850 - DNA, 12 bp, Unknown
  misc_feature (1)..( 12): Result.002 file - promoters60/1443674
tatttatgcaaa

SEQ ID NO: 115851 - DNA, 12 bp, Unknown
  misc_feature (1)..( 12): Result.002 file - promoters60/1443674
aatttatccaaa

SEQ ID NO: 115852 - DNA, 13 bp, Unknown
  misc_feature (1)..( 13): Result.002 file - promoters60/1443674
ctcatatccgaaa

SEQ ID NO: 115853 - DNA, 13 bp, Unknown
  misc_feature (1)..( 13): Result.002 file - promoters60/1443674
aatttaatcaatt

SEQ ID NO: 115854 - DNA, 9 bp, Unknown
  misc_feature (1)..( 9): Result.002 file - promoters60/1443674
aaatagaat

SEQ ID NO: 115855 - DNA, 9 bp, Unknown
  misc_feature (1)..( 9): Result.002 file - promoters60/1443674
aaataaaat

SEQ ID NO: 115856 - DNA, 9 bp, Unknown
  misc_feature (1)..( 9): Result.002 file - promoters60/1443674
ggatataat

SEQ ID NO: 115857 - DNA, 8 bp, Unknown
  misc_feature (1)..( 8): Result.002 file - promoters60/1443674
aaaaaaaa

SEQ ID NO: 115858 - DNA, 8 bp, Unknown
  misc_feature (1)..( 8): Result.002 file - promoters60/1443674
aaaaaaaa

SEQ ID NO: 115859 - DNA, 8 bp, Unknown
  misc_feature (1)..( 8): Result.002 file - promoters60/1443674
aaaaaata

SEQ ID NO: 115860 - DNA, 8 bp, Unknown
  misc_feature (1)..( 8): Result.002 file - promoters60/1443674
acatatta

SEQ ID NO: 115861 - DNA, 8 bp, Unknown
  misc_feature (1)..( 8): Result.002 file - promoters60/1443674
ccatttta

SEQ ID NO: 115862 - DNA, 8 bp, Unknown
  misc_feature (1)..( 8): Result.002 file - promoters60/1443674
acatgtta

SEQ ID NO: 115863 - DNA, 8 bp, Unknown
  misc_feature (1)..( 8): Result.002 file - promoters60/1443687
aaatactt

SEQ ID NO: 115864 - DNA, 8 bp, Unknown
  misc_feature (1)..( 8): Result.002 file - promoters60/1443687
aaacactt

SEQ ID NO: 115865 - DNA, 6 bp, Unknown
  misc_feature (1)..( 6): Result.002 file - promoters60/1443687
atattt

SEQ ID NO: 115866 - DNA, 6 bp, Unknown
  misc_feature (1)..( 6): Result.002 file - promoters60/1443687
atattt

SEQ ID NO: 115867 - DNA, 7 bp, Unknown
  misc_feature (1)..( 7): Result.002 file - promoters60/1443687
aaaatta

SEQ ID NO: 115868 - DNA, 7 bp, Unknown
  misc_feature (1)..( 7): Result.002 file - promoters60/1443687
aaaattt

SEQ ID NO: 115869 - DNA, 7 bp, Unknown
  misc_feature (1)..( 7): Result.002 file - promoters60/1443687
aaacttt

SEQ ID NO: 115870 - DNA, 7 bp, Unknown
  misc_feature (1)..( 7): Result.002 file - promoters60/1443687
gaacaaa

SEQ ID NO: 115871 - DNA, 7 bp, Unknown
  misc_feature (1)..( 7): Result.002 file - promoters60/1443687
gaataaa

SEQ ID NO: 115872 - DNA, 7 bp, Unknown
  misc_feature (1)..( 7): Result.002 file - promoters60/1443687
taacaaa

SEQ ID NO: 115873 - DNA, 6 bp, Unknown
  misc_feature (1)..( 6): Result.002 file - promoters60/1443687
agttta

SEQ ID NO: 115874 - DNA, 6 bp, Unknown
  misc_feature (1)..( 6): Result.002 file - promoters60/1443687
agttta

SEQ ID NO: 115875 - DNA, 9 bp, Unknown
  misc_feature (1)..( 9): Result.002 file - promoters60/1443687
tattttgaa

SEQ ID NO: 115876 - DNA, 9 bp, Unknown
  misc_feature (1)..( 9): Result.002 file - promoters60/1443687
ggttttgaa

SEQ ID NO: 115877 - DNA, 9 bp, Unknown
  misc_feature (1)..( 9): Result.002 file - promoters60/1443687
tattttgtt

SEQ ID NO: 115878 - DNA, 6 bp, Unknown
  misc_feature (1)..( 6): Result.002 file - promoters60/1443687
tgaaaa

SEQ ID NO: 115879 - DNA, 6 bp, Unknown
  misc_feature (1)..( 6): Result.002 file - promoters60/1443687
tgaaaa

SEQ ID NO: 115880 - DNA, 7 bp, Unknown
  misc_feature (1)..( 7): Result.002 file - promoters60/1443687
tcagttt

SEQ ID NO: 115881 - DNA, 7 bp, Unknown
  misc_feature (1)..( 7): Result.002 file - promoters60/1443687
tcacttt

SEQ ID NO: 115882 - DNA, 9 bp, Unknown
  misc_feature (1)..( 9): Result.002 file - promoters60/1443687
ttttgttat

SEQ ID NO: 115883 - DNA, 9 bp, Unknown
  misc_feature (1)..( 9): Result.002 file - promoters60/1443687
tttttttat

SEQ ID NO: 115884 - DNA, 6 bp, Unknown
  misc_feature (1)..( 6): Result.002 file - promoters60/1443687
tatttt

SEQ ID NO: 115885 - DNA, 6 bp, Unknown
  misc_feature (1)..( 6): Result.002 file - promoters60/1443687
tatttt

SEQ ID NO: 115886 - DNA, 7 bp, Unknown
  misc_feature (1)..( 7): Result.002 file - promoters60/1443687
taacata

SEQ ID NO: 115887 - DNA, 7 bp, Unknown
  misc_feature (1)..( 7): Result.002 file - promoters60/1443687
taaaata

SEQ ID NO: 115888 - DNA, 6 bp, Unknown
  misc_feature (1)..( 6): Result.002 file - promoters60/1443687
atcaaa

SEQ ID NO: 115889 - DNA, 6 bp, Unknown
  misc_feature (1)..( 6): Result.002 file - promoters60/1443687
atcaaa

SEQ ID NO: 115890 - DNA, 10 bp, Unknown
  misc_feature (1)..( 10): Result.002 file - promoters60/1443687
gaatattttt

SEQ ID NO: 115891 - DNA, 10 bp, Unknown
  misc_feature (1)..( 10): Result.002 file - promoters60/1443687
gaatattttt

SEQ ID NO: 115892 - DNA, 7 bp, Unknown
  misc_feature (1)..( 7): Result.002 file - promoters60/1443687
attattt

SEQ ID NO: 115893 - DNA, 7 bp, Unknown
  misc_feature (1)..( 7): Result.002 file - promoters60/1443687
attcttt

SEQ ID NO: 115894 - DNA, 6 bp, Unknown
  misc_feature (1)..( 6): Result.002 file - promoters60/1443687
atttgg

SEQ ID NO: 115895 - DNA, 6 bp, Unknown
  misc_feature (1)..( 6): Result.002 file - promoters60/1443687
atttgg

SEQ ID NO: 115896 - DNA, 6 bp, Unknown
  misc_feature (1)..( 6): Result.002 file - promoters60/1443687
tttggt

SEQ ID NO: 115897 - DNA, 6 bp, Unknown
  misc_feature (1)..( 6): Result.002 file - promoters60/1443687
tttggt

SEQ ID NO: 115898 - DNA, 8 bp, Unknown
  misc_feature (1)..( 8): Result.002 file - promoters60/1443687
aaaagccc

SEQ ID NO: 115899 - DNA, 8 bp, Unknown
  misc_feature (1)..( 8): Result.002 file - promoters60/1443687
aaaacccc

SEQ ID NO: 115900 - DNA, 7 bp, Unknown
  misc_feature (1)..( 7): Result.002 file - promoters60/1443687
taattca

SEQ ID NO: 115901 - DNA, 7 bp, Unknown
  misc_feature (1)..( 7): Result.002 file - promoters60/1443687
taattca

SEQ ID NO: 115902 - DNA, 8 bp, Unknown
  misc_feature (1)..( 8): Result.002 file - promoters60/1443687
aaatttat

SEQ ID NO: 115903 - DNA, 8 bp, Unknown
  misc_feature (1)..( 8): Result.002 file - promoters60/1443687
aaacttat

SEQ ID NO: 115904 - DNA, 7 bp, Unknown
  misc_feature (1)..( 7): Result.002 file - promoters60/1443687
tttcaca

SEQ ID NO: 115905 - DNA, 7 bp, Unknown
  misc_feature (1)..( 7): Result.002 file - promoters60/1443687
tttaaca

SEQ ID NO: 115906 - DNA, 7 bp, Unknown
  misc_feature (1)..( 7): Result.002 file - promoters60/1443687
atatcac

SEQ ID NO: 115907 - DNA, 7 bp, Unknown
  misc_feature (1)..( 7): Result.002 file - promoters60/1443687
ataccac

SEQ ID NO: 115908 - DNA, 7 bp, Unknown
  misc_feature (1)..( 7): Result.002 file - promoters60/1443687
tattttt

SEQ ID NO: 115909 - DNA, 7 bp, Unknown
  misc_feature (1)..( 7): Result.002 file - promoters60/1443687
tattttt

SEQ ID NO: 115910 - DNA, 6 bp, Unknown
  misc_feature (1)..( 6): Result.002 file - promoters60/1443687
acttgt

SEQ ID NO: 115911 - DNA, 6 bp, Unknown
  misc_feature (1)..( 6): Result.002 file - promoters60/1443687
acttgt

SEQ ID NO: 115912 - DNA, 6 bp, Unknown
  misc_feature (1)..( 6): Result.002 file - promoters60/1444100
ttatca

SEQ ID NO: 115913 - DNA, 6 bp, Unknown
  misc_feature (1)..( 6): Result.002 file - promoters60/1444100
ttatca

SEQ ID NO: 115914 - DNA, 8 bp, Unknown
  misc_feature (1)..( 8): Result.002 file - promoters60/1444100
ttttattt

SEQ ID NO: 115915 - DNA, 8 bp, Unknown
  misc_feature (1)..( 8): Result.002 file - promoters60/1444100
tttttttt

SEQ ID NO: 115916 - DNA, 8 bp, Unknown
  misc_feature (1)..( 8): Result.002 file - promoters60/1444100
cctacttt

SEQ ID NO: 115917 - DNA, 8 bp, Unknown
  misc_feature (1)..( 8): Result.002 file - promoters60/1444100
cctatttt

SEQ ID NO: 115918 - DNA, 7 bp, Unknown
  misc_feature (1)..( 7): Result.002 file - promoters60/1444100
tttggtt

SEQ ID NO: 115919 - DNA, 7 bp, Unknown
  misc_feature (1)..( 7): Result.002 file - promoters60/1444100
ttttgtt

SEQ ID NO: 115920 - DNA, 7 bp, Unknown
  misc_feature (1)..( 7): Result.002 file - promoters60/1444100
tttctct

SEQ ID NO: 115921 - DNA, 7 bp, Unknown
  misc_feature (1)..( 7): Result.002 file - promoters60/1444100
tttttct

SEQ ID NO: 115922 - DNA, 6 bp, Unknown
  misc_feature (1)..( 6): Result.002 file - promoters60/1444100
cactta

SEQ ID NO: 115923 - DNA, 6 bp, Unknown
  misc_feature (1)..( 6): Result.002 file - promoters60/1444100
cactta

SEQ ID NO: 115924 - DNA, 6 bp, Unknown
  misc_feature (1)..( 6): Result.002 file - promoters60/1444100
gaaagt

SEQ ID NO: 115925 - DNA, 6 bp, Unknown
  misc_feature (1)..( 6): Result.002 file - promoters60/1444100
gaaagt

SEQ ID NO: 115926 - DNA, 9 bp, Unknown
  misc_feature (1)..( 9): Result.002 file - promoters60/1444100
ttgtgatcc

SEQ ID NO: 115927 - DNA, 9 bp, Unknown
  misc_feature (1)..( 9): Result.002 file - promoters60/1444100
ttgggatcc

SEQ ID NO: 115928 - DNA, 8 bp, Unknown
  misc_feature (1)..( 8): Result.002 file - promoters60/1444100
tatgtgtg

SEQ ID NO: 115929 - DNA, 8 bp, Unknown
  misc_feature (1)..( 8): Result.002 file - promoters60/1444100
tatgtgtg

SEQ ID NO: 115930 - DNA, 6 bp, Unknown
  misc_feature (1)..( 6): Result.002 file - promoters60/1444100
ttttca

SEQ ID NO: 115931 - DNA, 6 bp, Unknown
  misc_feature (1)..( 6): Result.002 file - promoters60/1444100
ttttca

SEQ ID NO: 115932 - DNA, 7 bp, Unknown
  misc_feature (1)..( 7): Result.002 file - promoters60/1444100
gttcaaa

SEQ ID NO: 115933 - DNA, 7 bp, Unknown
  misc_feature (1)..( 7): Result.002 file - promoters60/1444100
gttgaaa

SEQ ID NO: 115934 - DNA, 7 bp, Unknown
  misc_feature (1)..( 7): Result.002 file - promoters60/1444100
gcaatga

SEQ ID NO: 115935 - DNA, 7 bp, Unknown
  misc_feature (1)..( 7): Result.002 file - promoters60/1444100
gcaatga

SEQ ID NO: 115936 - DNA, 6 bp, Unknown
  misc_feature (1)..( 6): Result.002 file - promoters60/1444100
tgtttt

SEQ ID NO: 115937 - DNA, 6 bp, Unknown
  misc_feature (1)..( 6): Result.002 file - promoters60/1444100
tgtttt

SEQ ID NO: 115938 - DNA, 6 bp, Unknown
  misc_feature (1)..( 6): Result.002 file - promoters60/1444100
accttc

SEQ ID NO: 115939 - DNA, 6 bp, Unknown
  misc_feature (1)..( 6): Result.002 file - promoters60/1444100
accttc

SEQ ID NO: 115940 - DNA, 6 bp, Unknown
  misc_feature (1)..( 6): Result.002 file - promoters60/1444100
tctttt

SEQ ID NO: 115941 - DNA, 6 bp, Unknown
  misc_feature (1)..( 6): Result.002 file - promoters60/1444100
tctttt

SEQ ID NO: 115942 - DNA, 7 bp, Unknown
  misc_feature (1)..( 7): Result.002 file - promoters60/1444100
ctttatt

SEQ ID NO: 115943 - DNA, 7 bp, Unknown
  misc_feature (1)..( 7): Result.002 file - promoters60/1444100
cttgatt

SEQ ID NO: 115944 - DNA, 7 bp, Unknown
  misc_feature (1)..( 7): Result.002 file - promoters60/1444100
aatataa

SEQ ID NO: 115945 - DNA, 7 bp, Unknown
  misc_feature (1)..( 7): Result.002 file - promoters60/1444100
aatctaa

SEQ ID NO: 115946 - DNA, 7 bp, Unknown
  misc_feature (1)..( 7): Result.002 file - promoters60/1444100
tatcttt

SEQ ID NO: 115947 - DNA, 7 bp, Unknown
  misc_feature (1)..( 7): Result.002 file - promoters60/1444100
tattttt

SEQ ID NO: 115948 - DNA, 7 bp, Unknown
  misc_feature (1)..( 7): Result.002 file - promoters60/1444100
ttttttt

SEQ ID NO: 115949 - DNA, 7 bp, Unknown
  misc_feature (1)..( 7): Result.002 file - promoters60/1444100
tttcttt

SEQ ID NO: 115950 - DNA, 7 bp, Unknown
  misc_feature (1)..( 7): Result.002 file - promoters60/1444100
aattaac

SEQ ID NO: 115951 - DNA, 7 bp, Unknown
  misc_feature (1)..( 7): Result.002 file - promoters60/1444100
aataaac

SEQ ID NO: 115952 - DNA, 8 bp, Unknown
  misc_feature (1)..( 8): Result.002 file - promoters60/1444100
ccgtttta

SEQ ID NO: 115953 - DNA, 8 bp, Unknown
  misc_feature (1)..( 8): Result.002 file - promoters60/1444100
ccgtgtta

SEQ ID NO: 115954 - DNA, 16 bp, Unknown
  misc_feature (1)..( 16): Result.002 file - promoters60/1444131
atacaaaaaaagctag

SEQ ID NO: 115955 - DNA, 16 bp, Unknown
  misc_feature (1)..( 16): Result.002 file - promoters60/1444131
tgacaaataaacatat

SEQ ID NO: 115956 - DNA, 16 bp, Unknown
  misc_feature (1)..( 16): Result.002 file - promoters60/1444131
tgaaaaaacgaatgat

SEQ ID NO: 115957 - DNA, 16 bp, Unknown
  misc_feature (1)..( 16): Result.002 file - promoters60/1444131
gttcaaataataagct

SEQ ID NO: 115958 - DNA, 16 bp, Unknown
  misc_feature (1)..( 16): Result.002 file - promoters60/1444131
ttgataatcaacatat

SEQ ID NO: 115959 - DNA, 16 bp, Unknown
  misc_feature (1)..( 16): Result.002 file - promoters60/1444131
taacaaataattaaac

SEQ ID NO: 115960 - DNA, 13 bp, Unknown
  misc_feature (1)..( 13): Result.002 file - promoters60/1444131
ggatatatcaaac

SEQ ID NO: 115961 - DNA, 13 bp, Unknown
  misc_feature (1)..( 13): Result.002 file - promoters60/1444131
gacattataaaat

SEQ ID NO: 115962 - DNA, 13 bp, Unknown
  misc_feature (1)..( 13): Result.002 file - promoters60/1444131
ttcattataaaaa

SEQ ID NO: 115963 - DNA, 13 bp, Unknown
  misc_feature (1)..( 13): Result.002 file - promoters60/1444131
ttatatatttcac

SEQ ID NO: 115964 - DNA, 13 bp, Unknown
  misc_feature (1)..( 13): Result.002 file - promoters60/1444131
catttaatcaaaa

SEQ ID NO: 115965 - DNA, 13 bp, Unknown
  misc_feature (1)..( 13): Result.002 file - promoters60/1444131
gaccttaaaaaat

SEQ ID NO: 115966 - DNA, 13 bp, Unknown
  misc_feature (1)..( 13): Result.002 file - promoters60/1444131
atgaatattttct

SEQ ID NO: 115967 - DNA, 8 bp, Unknown
  misc_feature (1)..( 8): Result.002 file - promoters60/1444131
ttatttct

SEQ ID NO: 115968 - DNA, 8 bp, Unknown
  misc_feature (1)..( 8): Result.002 file - promoters60/1444131
ttattttg

SEQ ID NO: 115969 - DNA, 8 bp, Unknown
  misc_feature (1)..( 8): Result.002 file - promoters60/1444131
tttttttg

SEQ ID NO: 115970 - DNA, 8 bp, Unknown
  misc_feature (1)..( 8): Result.002 file - promoters60/1444131
tttttttc

SEQ ID NO: 115971 - DNA, 8 bp, Unknown
  misc_feature (1)..( 8): Result.002 file - promoters60/1444131
ttattttg

SEQ ID NO: 115972 - DNA, 8 bp, Unknown
  misc_feature (1)..( 8): Result.002 file - promoters60/1444131
tttttttc

SEQ ID NO: 115973 - DNA, 8 bp, Unknown
  misc_feature (1)..( 8): Result.002 file - promoters60/1444131
atttcttt

SEQ ID NO: 115974 - DNA, 8 bp, Unknown
  misc_feature (1)..( 8): Result.002 file - promoters60/1444131
ttttgttt

SEQ ID NO: 115975 - DNA, 8 bp, Unknown
  misc_feature (1)..( 8): Result.002 file - promoters60/1444131
cttttttt

SEQ ID NO: 115976 - DNA, 8 bp, Unknown
  misc_feature (1)..( 8): Result.002 file - promoters60/1444131
attttttt

SEQ ID NO: 115977 - DNA, 8 bp, Unknown
  misc_feature (1)..( 8): Result.002 file - promoters60/1444131
gttttttt

SEQ ID NO: 115978 - DNA, 8 bp, Unknown
  misc_feature (1)..( 8): Result.002 file - promoters60/1444131
attttgta

SEQ ID NO: 115979 - DNA, 9 bp, Unknown
  misc_feature (1)..( 9): Result.002 file - promoters60/1444131
ttaatattt

SEQ ID NO: 115980 - DNA, 9 bp, Unknown
  misc_feature (1)..( 9): Result.002 file - promoters60/1444131
tcaatatta

SEQ ID NO: 115981 - DNA, 9 bp, Unknown
  misc_feature (1)..( 9): Result.002 file - promoters60/1444131
ccaacattc

SEQ ID NO: 115982 - DNA, 9 bp, Unknown
  misc_feature (1)..( 9): Result.002 file - promoters60/1444131
tgaatattt

SEQ ID NO: 115983 - DNA, 9 bp, Unknown
  misc_feature (1)..( 9): Result.002 file - promoters60/1444131
tcattatca

SEQ ID NO: 115984 - DNA, 9 bp, Unknown
  misc_feature (1)..( 9): Result.002 file - promoters60/1444131
tatatattt

SEQ ID NO: 115985 - DNA, 11 bp, Unknown
  misc_feature (1)..( 11): Result.002 file - promoters60/1444131
tgaccaaactc

SEQ ID NO: 115986 - DNA, 11 bp, Unknown
  misc_feature (1)..( 11): Result.002 file - promoters60/1444131
tgaacaatatt

SEQ ID NO: 115987 - DNA, 11 bp, Unknown
  misc_feature (1)..( 11): Result.002 file - promoters60/1444131
aaaccaaaccg

SEQ ID NO: 115988 - DNA, 11 bp, Unknown
  misc_feature (1)..( 11): Result.002 file - promoters60/1444131
tgaccaaacga

SEQ ID NO: 115989 - DNA, 11 bp, Unknown
  misc_feature (1)..( 11): Result.002 file - promoters60/1444131
caaacaaaatt

SEQ ID NO: 115990 - DNA, 11 bp, Unknown
  misc_feature (1)..( 11): Result.002 file - promoters60/1444131
gtgtcaagcaa

SEQ ID NO: 115991 - DNA, 10 bp, Unknown
  misc_feature (1)..( 10): Result.002 file - promoters60/1444131
agttaaaaaa

SEQ ID NO: 115992 - DNA, 10 bp, Unknown
  misc_feature (1)..( 10): Result.002 file - promoters60/1444131
cgttaaagtt

SEQ ID NO: 115993 - DNA, 11 bp, Unknown
  misc_feature (1)..( 11): Result.002 file - promoters60/1444131
atttacaaaca

SEQ ID NO: 115994 - DNA, 11 bp, Unknown
  misc_feature (1)..( 11): Result.002 file - promoters60/1444131
agttaaaaagt

SEQ ID NO: 115995 - DNA, 11 bp, Unknown
  misc_feature (1)..( 11): Result.002 file - promoters60/1444131
ctttacaacca

SEQ ID NO: 115996 - DNA, 11 bp, Unknown
  misc_feature (1)..( 11): Result.002 file - promoters60/1444131
atttacataca

SEQ ID NO: 115997 - DNA, 10 bp, Unknown
  misc_feature (1)..( 10): Result.002 file - promoters60/1444131
aaaccaatgt

SEQ ID NO: 115998 - DNA, 10 bp, Unknown
  misc_feature (1)..( 10): Result.002 file - promoters60/1444131
aaatcaaata

SEQ ID NO: 115999 - DNA, 10 bp, Unknown
  misc_feature (1)..( 10): Result.002 file - promoters60/1444131
aaatcaatca

SEQ ID NO: 116000 - DNA, 11 bp, Unknown
  misc_feature (1)..( 11): Result.002 file - promoters60/1444131
aaattcaatgt

SEQ ID NO: 116001 - DNA, 11 bp, Unknown
  misc_feature (1)..( 11): Result.002 file - promoters60/1444131
tatatcagatt

SEQ ID NO: 116002 - DNA, 11 bp, Unknown
  misc_feature (1)..( 11): Result.002 file - promoters60/1444131
ttaatcaatgg

SEQ ID NO: 116003 - DNA, 9 bp, Unknown
  misc_feature (1)..( 9): Result.002 file - promoters60/1444131
taaaaaaac

SEQ ID NO: 116004 - DNA, 9 bp, Unknown
  misc_feature (1)..( 9): Result.002 file - promoters60/1444131
gaaaaaaaa

SEQ ID NO: 116005 - DNA, 9 bp, Unknown
  misc_feature (1)..( 9): Result.002 file - promoters60/1444131
gaaaaaaaa

SEQ ID NO: 116006 - DNA, 10 bp, Unknown
  misc_feature (1)..( 10): Result.002 file - promoters60/1444131
taaaagaaaa

SEQ ID NO: 116007 - DNA, 10 bp, Unknown
  misc_feature (1)..( 10): Result.002 file - promoters60/1444131
gaaaaacacg

SEQ ID NO: 116008 - DNA, 10 bp, Unknown
  misc_feature (1)..( 10): Result.002 file - promoters60/1444131
gaacaaagac

SEQ ID NO: 116009 - DNA, 10 bp, Unknown
  misc_feature (1)..( 10): Result.002 file - promoters60/1444137
tgtaaaggtc

SEQ ID NO: 116010 - DNA, 10 bp, Unknown
  misc_feature (1)..( 10): Result.002 file - promoters60/1444137
gataagggta

SEQ ID NO: 116011 - DNA, 10 bp, Unknown
  misc_feature (1)..( 10): Result.002 file - promoters60/1444137
ccagaaggtc

SEQ ID NO: 116012 - DNA, 10 bp, Unknown
  misc_feature (1)..( 10): Result.002 file - promoters60/1444137
gattagggtt

SEQ ID NO: 116013 - DNA, 11 bp, Unknown
  misc_feature (1)..( 11): Result.002 file - promoters60/1444137
aaagtatgact

SEQ ID NO: 116014 - DNA, 11 bp, Unknown
  misc_feature (1)..( 11): Result.002 file - promoters60/1444137
aaattatttct

SEQ ID NO: 116015 - DNA, 11 bp, Unknown
  misc_feature (1)..( 11): Result.002 file - promoters60/1444137
caagtaggact

SEQ ID NO: 116016 - DNA, 8 bp, Unknown
  misc_feature (1)..( 8): Result.002 file - promoters60/1444137
aaagaaac

SEQ ID NO: 116017 - DNA, 8 bp, Unknown
  misc_feature (1)..( 8): Result.002 file - promoters60/1444137
taagaaaa

SEQ ID NO: 116018 - DNA, 8 bp, Unknown
  misc_feature (1)..( 8): Result.002 file - promoters60/1444137
aaagaaac

SEQ ID NO: 116019 - DNA, 10 bp, Unknown
  misc_feature (1)..( 10): Result.002 file - promoters60/1444137
tcaatagtta

SEQ ID NO: 116020 - DNA, 10 bp, Unknown
  misc_feature (1)..( 10): Result.002 file - promoters60/1444137
tcagtagtta

SEQ ID NO: 116021 - DNA, 10 bp, Unknown
  misc_feature (1)..( 10): Result.002 file - promoters60/1444137
tgagtggttt

SEQ ID NO: 116022 - DNA, 8 bp, Unknown
  misc_feature (1)..( 8): Result.002 file - promoters60/1444137
tcttcttc

SEQ ID NO: 116023 - DNA, 8 bp, Unknown
  misc_feature (1)..( 8): Result.002 file - promoters60/1444137
tctccttt

SEQ ID NO: 116024 - DNA, 9 bp, Unknown
  misc_feature (1)..( 9): Result.002 file - promoters60/1444137
tttccattt

SEQ ID NO: 116025 - DNA, 7 bp, Unknown
  misc_feature (1)..( 7): Result.002 file - promoters60/1444137
tctctat

SEQ ID NO: 116026 - DNA, 7 bp, Unknown
  misc_feature (1)..( 7): Result.002 file - promoters60/1444137
tctctaa

SEQ ID NO: 116027 - DNA, 7 bp, Unknown
  misc_feature (1)..( 7): Result.002 file - promoters60/1444137
actctaa

SEQ ID NO: 116028 - DNA, 7 bp, Unknown
  misc_feature (1)..( 7): Result.002 file - promoters60/1444149
ttttgat

SEQ ID NO: 116029 - DNA, 7 bp, Unknown
  misc_feature (1)..( 7): Result.002 file - promoters60/1444149
atttgat

SEQ ID NO: 116030 - DNA, 8 bp, Unknown
  misc_feature (1)..( 8): Result.002 file - promoters60/1444149
attgtgat

SEQ ID NO: 116031 - DNA, 6 bp, Unknown
  misc_feature (1)..( 6): Result.002 file - promoters60/1444149
gacact

SEQ ID NO: 116032 - DNA, 6 bp, Unknown
  misc_feature (1)..( 6): Result.002 file - promoters60/1444149
gacact

SEQ ID NO: 116033 - DNA, 8 bp, Unknown
  misc_feature (1)..( 8): Result.002 file - promoters60/1444149
cggtgatg

SEQ ID NO: 116034 - DNA, 8 bp, Unknown
  misc_feature (1)..( 8): Result.002 file - promoters60/1444149
cggagatg

SEQ ID NO: 116035 - DNA, 8 bp, Unknown
  misc_feature (1)..( 8): Result.002 file - promoters60/1444149
ttgtgaca

SEQ ID NO: 116036 - DNA, 8 bp, Unknown
  misc_feature (1)..( 8): Result.002 file - promoters60/1444149
ttgtaaca

SEQ ID NO: 116037 - DNA, 8 bp, Unknown
  misc_feature (1)..( 8): Result.002 file - promoters60/1444149
ttgtgatg

SEQ ID NO: 116038 - DNA, 8 bp, Unknown
  misc_feature (1)..( 8): Result.002 file - promoters60/1444149
ttgtgatg

SEQ ID NO: 116039 - DNA, 9 bp, Unknown
  misc_feature (1)..( 9): Result.002 file - promoters60/1444149
ccgacactg

SEQ ID NO: 116040 - DNA, 9 bp, Unknown
  misc_feature (1)..( 9): Result.002 file - promoters60/1444149
ccgacagac

SEQ ID NO: 116041 - DNA, 9 bp, Unknown
  misc_feature (1)..( 9): Result.002 file - promoters60/1444149
acgaaagac

SEQ ID NO: 116042 - DNA, 6 bp, Unknown
  misc_feature (1)..( 6): Result.002 file - promoters60/1444149
tatttt

SEQ ID NO: 116043 - DNA, 6 bp, Unknown
  misc_feature (1)..( 6): Result.002 file - promoters60/1444149
tatttt

SEQ ID NO: 116044 - DNA, 9 bp, Unknown
  misc_feature (1)..( 9): Result.002 file - promoters60/1444149
caagatttt

SEQ ID NO: 116045 - DNA, 9 bp, Unknown
  misc_feature (1)..( 9): Result.002 file - promoters60/1444149
caacatttt

SEQ ID NO: 116046 - DNA, 7 bp, Unknown
  misc_feature (1)..( 7): Result.002 file - promoters60/1444149
tttcttt

SEQ ID NO: 116047 - DNA, 7 bp, Unknown
  misc_feature (1)..( 7): Result.002 file - promoters60/1444149
tttattt

SEQ ID NO: 116048 - DNA, 9 bp, Unknown
  misc_feature (1)..( 9): Result.002 file - promoters60/1444149
aaaagtaat

SEQ ID NO: 116049 - DNA, 9 bp, Unknown
  misc_feature (1)..( 9): Result.002 file - promoters60/1444149
aaaagtaat

SEQ ID NO: 116050 - DNA, 6 bp, Unknown
  misc_feature (1)..( 6): Result.002 file - promoters60/1444149
ttagtt

SEQ ID NO: 116051 - DNA, 6 bp, Unknown
  misc_feature (1)..( 6): Result.002 file - promoters60/1444149
ttagtt

SEQ ID NO: 116052 - DNA, 6 bp, Unknown
  misc_feature (1)..( 6): Result.002 file - promoters60/1444149
aagatt

SEQ ID NO: 116053 - DNA, 6 bp, Unknown
  misc_feature (1)..( 6): Result.002 file - promoters60/1444149
aagatt

SEQ ID NO: 116054 - DNA, 6 bp, Unknown
  misc_feature (1)..( 6): Result.002 file - promoters60/1444149
atttga

SEQ ID NO: 116055 - DNA, 6 bp, Unknown
  misc_feature (1)..( 6): Result.002 file - promoters60/1444149
atttga

SEQ ID NO: 116056 - DNA, 8 bp, Unknown
  misc_feature (1)..( 8): Result.002 file - promoters60/1444149
tgacaatt

SEQ ID NO: 116057 - DNA, 8 bp, Unknown
  misc_feature (1)..( 8): Result.002 file - promoters60/1444149
tgactatt

SEQ ID NO: 116058 - DNA, 8 bp, Unknown
  misc_feature (1)..( 8): Result.002 file - promoters60/1444149
aattttct

SEQ ID NO: 116059 - DNA, 8 bp, Unknown
  misc_feature (1)..( 8): Result.002 file - promoters60/1444149
aattttct

SEQ ID NO: 116060 - DNA, 8 bp, Unknown
  misc_feature (1)..( 8): Result.002 file - promoters60/1444156
aattaaaa

SEQ ID NO: 116061 - DNA, 8 bp, Unknown
  misc_feature (1)..( 8): Result.002 file - promoters60/1444156
aatcaaaa

SEQ ID NO: 116062 - DNA, 7 bp, Unknown
  misc_feature (1)..( 7): Result.002 file - promoters60/1444156
tttaatg

SEQ ID NO: 116063 - DNA, 7 bp, Unknown
  misc_feature (1)..( 7): Result.002 file - promoters60/1444156
tttaata

SEQ ID NO: 116064 - DNA, 7 bp, Unknown
  misc_feature (1)..( 7): Result.002 file - promoters60/1444156
gttaata

SEQ ID NO: 116065 - DNA, 6 bp, Unknown
  misc_feature (1)..( 6): Result.002 file - promoters60/1444156
gaaaat

SEQ ID NO: 116066 - DNA, 6 bp, Unknown
  misc_feature (1)..( 6): Result.002 file - promoters60/1444156
gaaaat

SEQ ID NO: 116067 - DNA, 7 bp, Unknown
  misc_feature (1)..( 7): Result.002 file - promoters60/1444156
ttgttaa

SEQ ID NO: 116068 - DNA, 7 bp, Unknown
  misc_feature (1)..( 7): Result.002 file - promoters60/1444156
ttggtaa

SEQ ID NO: 116069 - DNA, 9 bp, Unknown
  misc_feature (1)..( 9): Result.002 file - promoters60/1444156
taaaaccta

SEQ ID NO: 116070 - DNA, 9 bp, Unknown
  misc_feature (1)..( 9): Result.002 file - promoters60/1444156
taaaaacta

SEQ ID NO: 116071 - DNA, 6 bp, Unknown
  misc_feature (1)..( 6): Result.002 file - promoters60/1444156
ttaaac

SEQ ID NO: 116072 - DNA, 6 bp, Unknown
  misc_feature (1)..( 6): Result.002 file - promoters60/1444156
ttaaac

SEQ ID NO: 116073 - DNA, 6 bp, Unknown
  misc_feature (1)..( 6): Result.002 file - promoters60/1444156
tcaaca

SEQ ID NO: 116074 - DNA, 6 bp, Unknown
  misc_feature (1)..( 6): Result.002 file - promoters60/1444156
tcaaca

SEQ ID NO: 116075 - DNA, 6 bp, Unknown
  misc_feature (1)..( 6): Result.002 file - promoters60/1444156
ttttca

SEQ ID NO: 116076 - DNA, 6 bp, Unknown
  misc_feature (1)..( 6): Result.002 file - promoters60/1444156
ttttca

SEQ ID NO: 116077 - DNA, 8 bp, Unknown
  misc_feature (1)..( 8): Result.002 file - promoters60/1444156
tcaaaaag

SEQ ID NO: 116078 - DNA, 8 bp, Unknown
  misc_feature (1)..( 8): Result.002 file - promoters60/1444156
tcaaaaag

SEQ ID NO: 116079 - DNA, 9 bp, Unknown
  misc_feature (1)..( 9): Result.002 file - promoters60/1444156
aaaataaaa

SEQ ID NO: 116080 - DNA, 9 bp, Unknown
  misc_feature (1)..( 9): Result.002 file - promoters60/1444156
aaaataaaa

SEQ ID NO: 116081 - DNA, 6 bp, Unknown
  misc_feature (1)..( 6): Result.002 file - promoters60/1444156
aaaaga

SEQ ID NO: 116082 - DNA, 6 bp, Unknown
  misc_feature (1)..( 6): Result.002 file - promoters60/1444156
aaaaga

SEQ ID NO: 116083 - DNA, 7 bp, Unknown
  misc_feature (1)..( 7): Result.002 file - promoters60/1444156
aaaaaaa

SEQ ID NO: 116084 - DNA, 7 bp, Unknown
  misc_feature (1)..( 7): Result.002 file - promoters60/1444156
aaataaa

SEQ ID NO: 116085 - DNA, 7 bp, Unknown
  misc_feature (1)..( 7): Result.002 file - promoters60/1444156
atggaga

SEQ ID NO: 116086 - DNA, 7 bp, Unknown
  misc_feature (1)..( 7): Result.002 file - promoters60/1444156
atgaaga

SEQ ID NO: 116087 - DNA, 13 bp, Unknown
  misc_feature (1)..( 13): Result.002 file - promoters60/1444156
attttttttttta

SEQ ID NO: 116088 - DNA, 13 bp, Unknown
  misc_feature (1)..( 13): Result.002 file - promoters60/1444156
atttgtttattta

SEQ ID NO: 116089 - DNA, 6 bp, Unknown
  misc_feature (1)..( 6): Result.002 file - promoters60/1444180
tcatat

SEQ ID NO: 116090 - DNA, 6 bp, Unknown
  misc_feature (1)..( 6): Result.002 file - promoters60/1444180
tcatat

SEQ ID NO: 116091 - DNA, 7 bp, Unknown
  misc_feature (1)..( 7): Result.002 file - promoters60/1444180
aaaagct

SEQ ID NO: 116092 - DNA, 7 bp, Unknown
  misc_feature (1)..( 7): Result.002 file - promoters60/1444180
aaatgct

SEQ ID NO: 116093 - DNA, 7 bp, Unknown
  misc_feature (1)..( 7): Result.002 file - promoters60/1444180
ccaaaat

SEQ ID NO: 116094 - DNA, 7 bp, Unknown
  misc_feature (1)..( 7): Result.002 file - promoters60/1444180
ccaaaat

SEQ ID NO: 116095 - DNA, 7 bp, Unknown
  misc_feature (1)..( 7): Result.002 file - promoters60/1444180
gaaatca

SEQ ID NO: 116096 - DNA, 7 bp, Unknown
  misc_feature (1)..( 7): Result.002 file - promoters60/1444180
gaactca

SEQ ID NO: 116097 - DNA, 6 bp, Unknown
  misc_feature (1)..( 6): Result.002 file - promoters60/1444180
atatct

SEQ ID NO: 116098 - DNA, 6 bp, Unknown
  misc_feature (1)..( 6): Result.002 file - promoters60/1444180
atatct

SEQ ID NO: 116099 - DNA, 7 bp, Unknown
  misc_feature (1)..( 7): Result.002 file - promoters60/1444180
gtcaaaa

SEQ ID NO: 116100 - DNA, 7 bp, Unknown
  misc_feature (1)..( 7): Result.002 file - promoters60/1444180
gtctaaa

SEQ ID NO: 116101 - DNA, 6 bp, Unknown
  misc_feature (1)..( 6): Result.002 file - promoters60/1444180
aatggg

SEQ ID NO: 116102 - DNA, 6 bp, Unknown
  misc_feature (1)..( 6): Result.002 file - promoters60/1444180
aatggg

SEQ ID NO: 116103 - DNA, 9 bp, Unknown
  misc_feature (1)..( 9): Result.002 file - promoters60/1444180
gatacaaaa

SEQ ID NO: 116104 - DNA, 9 bp, Unknown
  misc_feature (1)..( 9): Result.002 file - promoters60/1444180
gaaacaaaa

SEQ ID NO: 116105 - DNA, 9 bp, Unknown
  misc_feature (1)..( 9): Result.002 file - promoters60/1444180
gaaagaaag

SEQ ID NO: 116106 - DNA, 6 bp, Unknown
  misc_feature (1)..( 6): Result.002 file - promoters60/1444180
ttaaag

SEQ ID NO: 116107 - DNA, 6 bp, Unknown
  misc_feature (1)..( 6): Result.002 file - promoters60/1444180
ttaaag

SEQ ID NO: 116108 - DNA, 6 bp, Unknown
  misc_feature (1)..( 6): Result.002 file - promoters60/1444180
agtaaa

SEQ ID NO: 116109 - DNA, 6 bp, Unknown
  misc_feature (1)..( 6): Result.002 file - promoters60/1444180
agtaaa

SEQ ID NO: 116110 - DNA, 7 bp, Unknown
  misc_feature (1)..( 7): Result.002 file - promoters60/1444180
aatcggg

SEQ ID NO: 116111 - DNA, 7 bp, Unknown
  misc_feature (1)..( 7): Result.002 file - promoters60/1444180
aattggg

SEQ ID NO: 116112 - DNA, 10 bp, Unknown
  misc_feature (1)..( 10): Result.002 file - promoters60/1444180
ggaaaagaaa

SEQ ID NO: 116113 - DNA, 10 bp, Unknown
  misc_feature (1)..( 10): Result.002 file - promoters60/1444180
ggaaatgaaa

SEQ ID NO: 116114 - DNA, 7 bp, Unknown
  misc_feature (1)..( 7): Result.002 file - promoters60/1444180
cccacta

SEQ ID NO: 116115 - DNA, 7 bp, Unknown
  misc_feature (1)..( 7): Result.002 file - promoters60/1444180
cccacta

SEQ ID NO: 116116 - DNA, 9 bp, Unknown
  misc_feature (1)..( 9): Result.002 file - promoters60/1444180
aaagaaaag

SEQ ID NO: 116117 - DNA, 9 bp, Unknown
  misc_feature (1)..( 9): Result.002 file - promoters60/1444180
aaagtaaag

SEQ ID NO: 116118 - DNA, 7 bp, Unknown
  misc_feature (1)..( 7): Result.002 file - promoters60/1444180
gtatata

SEQ ID NO: 116119 - DNA, 7 bp, Unknown
  misc_feature (1)..( 7): Result.002 file - promoters60/1444180
gtatata

SEQ ID NO: 116120 - DNA, 6 bp, Unknown
  misc_feature (1)..( 6): Result.002 file - promoters60/1444400
acaaac

SEQ ID NO: 116121 - DNA, 6 bp, Unknown
  misc_feature (1)..( 6): Result.002 file - promoters60/1444400
acaaac

SEQ ID NO: 116122 - DNA, 8 bp, Unknown
  misc_feature (1)..( 8): Result.002 file - promoters60/1444400
caaaagta

SEQ ID NO: 116123 - DNA, 8 bp, Unknown
  misc_feature (1)..( 8): Result.002 file - promoters60/1444400
caaacgta

SEQ ID NO: 116124 - DNA, 6 bp, Unknown
  misc_feature (1)..( 6): Result.002 file - promoters60/1444400
aattaa

SEQ ID NO: 116125 - DNA, 6 bp, Unknown
  misc_feature (1)..( 6): Result.002 file - promoters60/1444400
aattaa

SEQ ID NO: 116126 - DNA, 7 bp, Unknown
  misc_feature (1)..( 7): Result.002 file - promoters60/1444400
aattaac

SEQ ID NO: 116127 - DNA, 7 bp, Unknown
  misc_feature (1)..( 7): Result.002 file - promoters60/1444400
aataaac

SEQ ID NO: 116128 - DNA, 7 bp, Unknown
  misc_feature (1)..( 7): Result.002 file - promoters60/1444400
atatata

SEQ ID NO: 116129 - DNA, 7 bp, Unknown
  misc_feature (1)..( 7): Result.002 file - promoters60/1444400
atatata

SEQ ID NO: 116130 - DNA, 6 bp, Unknown
  misc_feature (1)..( 6): Result.002 file - promoters60/1444400
atatat

SEQ ID NO: 116131 - DNA, 6 bp, Unknown
  misc_feature (1)..( 6): Result.002 file - promoters60/1444400
atatat

SEQ ID NO: 116132 - DNA, 14 bp, Unknown
  misc_feature (1)..( 14): Result.002 file - promoters60/1444400
tgtgttcgtttggt

SEQ ID NO: 116133 - DNA, 14 bp, Unknown
  misc_feature (1)..( 14): Result.002 file - promoters60/1444400
gatgttcgtttggt

SEQ ID NO: 116134 - DNA, 14 bp, Unknown
  misc_feature (1)..( 14): Result.002 file - promoters60/1444400
tgtggtcggctaaa

SEQ ID NO: 116135 - DNA, 7 bp, Unknown
  misc_feature (1)..( 7): Result.002 file - promoters60/1444400
tggtcgc

SEQ ID NO: 116136 - DNA, 7 bp, Unknown
  misc_feature (1)..( 7): Result.002 file - promoters60/1444400
tggacgc

SEQ ID NO: 116137 - DNA, 7 bp, Unknown
  misc_feature (1)..( 7): Result.002 file - promoters60/1444400
caaccgc

SEQ ID NO: 116138 - DNA, 7 bp, Unknown
  misc_feature (1)..( 7): Result.002 file - promoters60/1444400
caaacgc

SEQ ID NO: 116139 - DNA, 7 bp, Unknown
  misc_feature (1)..( 7): Result.002 file - promoters60/1444400
gcggcaa

SEQ ID NO: 116140 - DNA, 7 bp, Unknown
  misc_feature (1)..( 7): Result.002 file - promoters60/1444400
gcgacaa

SEQ ID NO: 116141 - DNA, 7 bp, Unknown
  misc_feature (1)..( 7): Result.002 file - promoters60/1444400
tttttca

SEQ ID NO: 116142 - DNA, 7 bp, Unknown
  misc_feature (1)..( 7): Result.002 file - promoters60/1444400
tttttca

SEQ ID NO: 116143 - DNA, 6 bp, Unknown
  misc_feature (1)..( 6): Result.002 file - promoters60/1444400
cccaat

SEQ ID NO: 116144 - DNA, 6 bp, Unknown
  misc_feature (1)..( 6): Result.002 file - promoters60/1444400
cccaat

SEQ ID NO: 116145 - DNA, 6 bp, Unknown
  misc_feature (1)..( 6): Result.002 file - promoters60/1444400
tatgtg

SEQ ID NO: 116146 - DNA, 6 bp, Unknown
  misc_feature (1)..( 6): Result.002 file - promoters60/1444400
tatgtg

SEQ ID NO: 116147 - DNA, 8 bp, Unknown
  misc_feature (1)..( 8): Result.002 file - promoters60/1444400
tatattta

SEQ ID NO: 116148 - DNA, 8 bp, Unknown
  misc_feature (1)..( 8): Result.002 file - promoters60/1444400
tataatta

SEQ ID NO: 116149 - DNA, 9 bp, Unknown
  misc_feature (1)..( 9): Result.002 file - promoters60/1444400
ttgctaata

SEQ ID NO: 116150 - DNA, 9 bp, Unknown
  misc_feature (1)..( 9): Result.002 file - promoters60/1444400
ttggtaata

SEQ ID NO: 116151 - DNA, 8 bp, Unknown
  misc_feature (1)..( 8): Result.002 file - promoters60/1444400
acgtacat

SEQ ID NO: 116152 - DNA, 8 bp, Unknown
  misc_feature (1)..( 8): Result.002 file - promoters60/1444400
acgaacat

SEQ ID NO: 116153 - DNA, 8 bp, Unknown
  misc_feature (1)..( 8): Result.002 file - promoters60/1444400
attatatc

SEQ ID NO: 116154 - DNA, 8 bp, Unknown
  misc_feature (1)..( 8): Result.002 file - promoters60/1444400
attctatc

SEQ ID NO: 116155 - DNA, 12 bp, Unknown
  misc_feature (1)..( 12): Result.002 file - promoters60/1444400
aaacattttatt

SEQ ID NO: 116156 - DNA, 12 bp, Unknown
  misc_feature (1)..( 12): Result.002 file - promoters60/1444400
aaagatttgatt

SEQ ID NO: 116157 - DNA, 6 bp, Unknown
  misc_feature (1)..( 6): Result.002 file - promoters60/1444400
ctacaa

SEQ ID NO: 116158 - DNA, 6 bp, Unknown
  misc_feature (1)..( 6): Result.002 file - promoters60/1444400
ctacaa

SEQ ID NO: 116159 - DNA, 8 bp, Unknown
  misc_feature (1)..( 8): Result.002 file - promoters60/1444400
aaaaccta

SEQ ID NO: 116160 - DNA, 8 bp, Unknown
  misc_feature (1)..( 8): Result.002 file - promoters60/1444400
aaaaccta

SEQ ID NO: 116161 - DNA, 7 bp, Unknown
  misc_feature (1)..( 7): Result.002 file - promoters60/1444448
tgtttta

SEQ ID NO: 116162 - DNA, 7 bp, Unknown
  misc_feature (1)..( 7): Result.002 file - promoters60/1444448
tgtttta

SEQ ID NO: 116163 - DNA, 7 bp, Unknown
  misc_feature (1)..( 7): Result.002 file - promoters60/1444448
tgttttt

SEQ ID NO: 116164 - DNA, 6 bp, Unknown
  misc_feature (1)..( 6): Result.002 file - promoters60/1444448
agaagt

SEQ ID NO: 116165 - DNA, 6 bp, Unknown
  misc_feature (1)..( 6): Result.002 file - promoters60/1444448
agaagt

SEQ ID NO: 116166 - DNA, 6 bp, Unknown
  misc_feature (1)..( 6): Result.002 file - promoters60/1444448
tttaaa

SEQ ID NO: 116167 - DNA, 6 bp, Unknown
  misc_feature (1)..( 6): Result.002 file - promoters60/1444448
tttaaa

SEQ ID NO: 116168 - DNA, 8 bp, Unknown
  misc_feature (1)..( 8): Result.002 file - promoters60/1444448
ataaatta

SEQ ID NO: 116169 - DNA, 8 bp, Unknown
  misc_feature (1)..( 8): Result.002 file - promoters60/1444448
ataaatcg

SEQ ID NO: 116170 - DNA, 8 bp, Unknown
  misc_feature (1)..( 8): Result.002 file - promoters60/1444448
ataaaaaa

SEQ ID NO: 116171 - DNA, 8 bp, Unknown
  misc_feature (1)..( 8): Result.002 file - promoters60/1444448
ttaaattt

SEQ ID NO: 116172 - DNA, 8 bp, Unknown
  misc_feature (1)..( 8): Result.002 file - promoters60/1444448
ctaaattg

SEQ ID NO: 116173 - DNA, 8 bp, Unknown
  misc_feature (1)..( 8): Result.002 file - promoters60/1444448
taaaattc

SEQ ID NO: 116174 - DNA, 7 bp, Unknown
  misc_feature (1)..( 7): Result.002 file - promoters60/1444448
tttttga

SEQ ID NO: 116175 - DNA, 7 bp, Unknown
  misc_feature (1)..( 7): Result.002 file - promoters60/1444448
tttttga

SEQ ID NO: 116176 - DNA, 7 bp, Unknown
  misc_feature (1)..( 7): Result.002 file - promoters60/1444448
tttttgt

SEQ ID NO: 116177 - DNA, 8 bp, Unknown
  misc_feature (1)..( 8): Result.002 file - promoters60/1444448
gtagaatt

SEQ ID NO: 116178 - DNA, 8 bp, Unknown
  misc_feature (1)..( 8): Result.002 file - promoters60/1444448
gtacaatt

SEQ ID NO: 116179 - DNA, 7 bp, Unknown
  misc_feature (1)..( 7): Result.002 file - promoters60/1444448
ttcggtt

SEQ ID NO: 116180 - DNA, 7 bp, Unknown
  misc_feature (1)..( 7): Result.002 file - promoters60/1444448
ttcggtt

SEQ ID NO: 116181 - DNA, 6 bp, Unknown
  misc_feature (1)..( 6): Result.002 file - promoters60/1444448
tttcaa

SEQ ID NO: 116182 - DNA, 6 bp, Unknown
  misc_feature (1)..( 6): Result.002 file - promoters60/1444448
tttcaa

SEQ ID NO: 116183 - DNA, 6 bp, Unknown
  misc_feature (1)..( 6): Result.002 file - promoters60/1444448
ccaata

SEQ ID NO: 116184 - DNA, 6 bp, Unknown
  misc_feature (1)..( 6): Result.002 file - promoters60/1444448
ccaata

SEQ ID NO: 116185 - DNA, 9 bp, Unknown
  misc_feature (1)..( 9): Result.002 file - promoters60/1444448
catttctta

SEQ ID NO: 116186 - DNA, 9 bp, Unknown
  misc_feature (1)..( 9): Result.002 file - promoters60/1444448
cattgctta

SEQ ID NO: 116187 - DNA, 7 bp, Unknown
  misc_feature (1)..( 7): Result.002 file - promoters60/1444448
gttttaa

SEQ ID NO: 116188 - DNA, 7 bp, Unknown
  misc_feature (1)..( 7): Result.002 file - promoters60/1444448
gttctaa

SEQ ID NO: 116189 - DNA, 6 bp, Unknown
  misc_feature (1)..( 6): Result.002 file - promoters60/1444448
taaaat

SEQ ID NO: 116190 - DNA, 6 bp, Unknown
  misc_feature (1)..( 6): Result.002 file - promoters60/1444448
taaaat

SEQ ID NO: 116191 - DNA, 7 bp, Unknown
  misc_feature (1)..( 7): Result.002 file - promoters60/1444448
gaataat

SEQ ID NO: 116192 - DNA, 7 bp, Unknown
  misc_feature (1)..( 7): Result.002 file - promoters60/1444448
gaagaat

SEQ ID NO: 116193 - DNA, 7 bp, Unknown
  misc_feature (1)..( 7): Result.002 file - promoters60/1444448
gattaat

SEQ ID NO: 116194 - DNA, 7 bp, Unknown
  misc_feature (1)..( 7): Result.002 file - promoters60/1444448
gatgaat

SEQ ID NO: 116195 - DNA, 11 bp, Unknown
  misc_feature (1)..( 11): Result.002 file - promoters60/1444460
agatttcttca

SEQ ID NO: 116196 - DNA, 11 bp, Unknown
  misc_feature (1)..( 11): Result.002 file - promoters60/1444460
agctttcttct

SEQ ID NO: 116197 - DNA, 11 bp, Unknown
  misc_feature (1)..( 11): Result.002 file - promoters60/1444460
aattttcttct

SEQ ID NO: 116198 - DNA, 11 bp, Unknown
  misc_feature (1)..( 11): Result.002 file - promoters60/1444460
taatttcttaa

SEQ ID NO: 116199 - DNA, 11 bp, Unknown
  misc_feature (1)..( 11): Result.002 file - promoters60/1444460
taatatcttca

SEQ ID NO: 116200 - DNA, 11 bp, Unknown
  misc_feature (1)..( 11): Result.002 file - promoters60/1444460
ctccatcctca

SEQ ID NO: 116201 - DNA, 10 bp, Unknown
  misc_feature (1)..( 10): Result.002 file - promoters60/1444460
gaaattagtg

SEQ ID NO: 116202 - DNA, 10 bp, Unknown
  misc_feature (1)..( 10): Result.002 file - promoters60/1444460
caaatgagtg

SEQ ID NO: 116203 - DNA, 10 bp, Unknown
  misc_feature (1)..( 10): Result.002 file - promoters60/1444460
caaaagagaa

SEQ ID NO: 116204 - DNA, 10 bp, Unknown
  misc_feature (1)..( 10): Result.002 file - promoters60/1444460
caaaaggtat

SEQ ID NO: 116205 - DNA, 10 bp, Unknown
  misc_feature (1)..( 10): Result.002 file - promoters60/1444460
taaaagatta

SEQ ID NO: 116206 - DNA, 10 bp, Unknown
  misc_feature (1)..( 10): Result.002 file - promoters60/1444460
ggtaagagag

SEQ ID NO: 116207 - DNA, 15 bp, Unknown
  misc_feature (1)..( 15): Result.002 file - promoters60/1444473
ttggttattggaaga

SEQ ID NO: 116208 - DNA, 15 bp, Unknown
  misc_feature (1)..( 15): Result.002 file - promoters60/1444473
cttcttattggaaga

SEQ ID NO: 116209 - DNA, 15 bp, Unknown
  misc_feature (1)..( 15): Result.002 file - promoters60/1444473
catgtttttgctgat

SEQ ID NO: 116210 - DNA, 15 bp, Unknown
  misc_feature (1)..( 15): Result.002 file - promoters60/1444473
catctttttcaccat

SEQ ID NO: 116211 - DNA, 15 bp, Unknown
  misc_feature (1)..( 15): Result.002 file - promoters60/1444473
gctctaattgcttgc

SEQ ID NO: 116212 - DNA, 15 bp, Unknown
  misc_feature (1)..( 15): Result.002 file - promoters60/1444473
attgttttctttggt

SEQ ID NO: 116213 - DNA, 13 bp, Unknown
  misc_feature (1)..( 13): Result.002 file - promoters60/1444473
tcattaatttaga

SEQ ID NO: 116214 - DNA, 13 bp, Unknown
  misc_feature (1)..( 13): Result.002 file - promoters60/1444473
caaaacattgaga

SEQ ID NO: 116215 - DNA, 13 bp, Unknown
  misc_feature (1)..( 13): Result.002 file - promoters60/1444473
ccatgaatttaaa

SEQ ID NO: 116216 - DNA, 13 bp, Unknown
  misc_feature (1)..( 13): Result.002 file - promoters60/1444473
cccacaactttga

SEQ ID NO: 116217 - DNA, 13 bp, Unknown
  misc_feature (1)..( 13): Result.002 file - promoters60/1444473
ccaagaagaaaaa

SEQ ID NO: 116218 - DNA, 13 bp, Unknown
  misc_feature (1)..( 13): Result.002 file - promoters60/1444473
ttatgtatttggg

SEQ ID NO: 116219 - DNA, 18 bp, Unknown
  misc_feature (1)..( 18): Result.002 file - promoters60/1444479
aaaaattattaaagtata

SEQ ID NO: 116220 - DNA, 18 bp, Unknown
  misc_feature (1)..( 18): Result.002 file - promoters60/1444479
aaagattattaaattata

SEQ ID NO: 116221 - DNA, 18 bp, Unknown
  misc_feature (1)..( 18): Result.002 file - promoters60/1444479
tctcatttttaatcaaaa

SEQ ID NO: 116222 - DNA, 18 bp, Unknown
  misc_feature (1)..( 18): Result.002 file - promoters60/1444479
aaaatttatctgtaaatg

SEQ ID NO: 116223 - DNA, 10 bp, Unknown
  misc_feature (1)..( 10): Result.002 file - promoters60/1444479
tttactaata

SEQ ID NO: 116224 - DNA, 10 bp, Unknown
  misc_feature (1)..( 10): Result.002 file - promoters60/1444479
attattaaag

SEQ ID NO: 116225 - DNA, 10 bp, Unknown
  misc_feature (1)..( 10): Result.002 file - promoters60/1444479
aataccaatc

SEQ ID NO: 116226 - DNA, 10 bp, Unknown
  misc_feature (1)..( 10): Result.002 file - promoters60/1444479
tttgctatac

SEQ ID NO: 116227 - DNA, 10 bp, Unknown
  misc_feature (1)..( 10): Result.002 file - promoters60/1444479
tataataatt

SEQ ID NO: 116228 - DNA, 13 bp, Unknown
  misc_feature (1)..( 13): Result.002 file - promoters60/1444479
ataattttagaga

SEQ ID NO: 116229 - DNA, 13 bp, Unknown
  misc_feature (1)..( 13): Result.002 file - promoters60/1444479
ctaattttaattt

SEQ ID NO: 116230 - DNA, 13 bp, Unknown
  misc_feature (1)..( 13): Result.002 file - promoters60/1444479
ataattatttggt

SEQ ID NO: 116231 - DNA, 13 bp, Unknown
  misc_feature (1)..( 13): Result.002 file - promoters60/1444479
atcattttcattt

SEQ ID NO: 116232 - DNA, 13 bp, Unknown
  misc_feature (1)..( 13): Result.002 file - promoters60/1444479
tacattttgtaac

SEQ ID NO: 116233 - DNA, 8 bp, Unknown
  misc_feature (1)..( 8): Result.002 file - promoters60/1444479
cattttac

SEQ ID NO: 116234 - DNA, 8 bp, Unknown
  misc_feature (1)..( 8): Result.002 file - promoters60/1444479
tattttag

SEQ ID NO: 116235 - DNA, 8 bp, Unknown
  misc_feature (1)..( 8): Result.002 file - promoters60/1444479
gtttttac

SEQ ID NO: 116236 - DNA, 8 bp, Unknown
  misc_feature (1)..( 8): Result.002 file - promoters60/1444479
tattttta

SEQ ID NO: 116237 - DNA, 10 bp, Unknown
  misc_feature (1)..( 10): Result.002 file - promoters60/1444479
ctatatatat

SEQ ID NO: 116238 - DNA, 10 bp, Unknown
  misc_feature (1)..( 10): Result.002 file - promoters60/1444479
ttatttatat

SEQ ID NO: 116239 - DNA, 10 bp, Unknown
  misc_feature (1)..( 10): Result.002 file - promoters60/1444479
gtatatataa

SEQ ID NO: 116240 - DNA, 10 bp, Unknown
  misc_feature (1)..( 10): Result.002 file - promoters60/1444479
ctatataaac

SEQ ID NO: 116241 - DNA, 10 bp, Unknown
  misc_feature (1)..( 10): Result.002 file - promoters60/1444479
ctataaatag

SEQ ID NO: 116242 - DNA, 9 bp, Unknown
  misc_feature (1)..( 9): Result.002 file - promoters60/1444479
ctaatttta

SEQ ID NO: 116243 - DNA, 9 bp, Unknown
  misc_feature (1)..( 9): Result.002 file - promoters60/1444479
tcaattttt

SEQ ID NO: 116244 - DNA, 9 bp, Unknown
  misc_feature (1)..( 9): Result.002 file - promoters60/1444479
ctaatttta

SEQ ID NO: 116245 - DNA, 9 bp, Unknown
  misc_feature (1)..( 9): Result.002 file - promoters60/1444479
aaaatgtta

SEQ ID NO: 116246 - DNA, 12 bp, Unknown
  misc_feature (1)..( 12): Result.002 file - promoters60/1444479
caaacaatcatt

SEQ ID NO: 116247 - DNA, 12 bp, Unknown
  misc_feature (1)..( 12): Result.002 file - promoters60/1444479
aaagcaatcaga

SEQ ID NO: 116248 - DNA, 12 bp, Unknown
  misc_feature (1)..( 12): Result.002 file - promoters60/1444479
aaaaaaataatt

SEQ ID NO: 116249 - DNA, 12 bp, Unknown
  misc_feature (1)..( 12): Result.002 file - promoters60/1444479
aaaaaaattgat

SEQ ID NO: 116250 - DNA, 8 bp, Unknown
  misc_feature (1)..( 8): Result.002 file - promoters60/1444479
aattttgt

SEQ ID NO: 116251 - DNA, 8 bp, Unknown
  misc_feature (1)..( 8): Result.002 file - promoters60/1444479
cattttgt

SEQ ID NO: 116252 - DNA, 8 bp, Unknown
  misc_feature (1)..( 8): Result.002 file - promoters60/1444479
cattttca

SEQ ID NO: 116253 - DNA, 9 bp, Unknown
  misc_feature (1)..( 9): Result.002 file - promoters60/1444479
aatcttttt

SEQ ID NO: 116254 - DNA, 9 bp, Unknown
  misc_feature (1)..( 9): Result.002 file - promoters60/1444502
tttgtttgt

SEQ ID NO: 116255 - DNA, 9 bp, Unknown
  misc_feature (1)..( 9): Result.002 file - promoters60/1444502
tttgtttgt

SEQ ID NO: 116256 - DNA, 7 bp, Unknown
  misc_feature (1)..( 7): Result.002 file - promoters60/1444502
gacacgt

SEQ ID NO: 116257 - DNA, 7 bp, Unknown
  misc_feature (1)..( 7): Result.002 file - promoters60/1444502
gactcgt

SEQ ID NO: 116258 - DNA, 6 bp, Unknown
  misc_feature (1)..( 6): Result.002 file - promoters60/1444502
ggcttt

SEQ ID NO: 116259 - DNA, 6 bp, Unknown
  misc_feature (1)..( 6): Result.002 file - promoters60/1444502
ggcttt

SEQ ID NO: 116260 - DNA, 7 bp, Unknown
  misc_feature (1)..( 7): Result.002 file - promoters60/1444502
gaatata

SEQ ID NO: 116261 - DNA, 7 bp, Unknown
  misc_feature (1)..( 7): Result.002 file - promoters60/1444502
gaatata

SEQ ID NO: 116262 - DNA, 7 bp, Unknown
  misc_feature (1)..( 7): Result.002 file - promoters60/1444502
attcttt

SEQ ID NO: 116263 - DNA, 7 bp, Unknown
  misc_feature (1)..( 7): Result.002 file - promoters60/1444502
atttttt

SEQ ID NO: 116264 - DNA, 7 bp, Unknown
  misc_feature (1)..( 7): Result.002 file - promoters60/1444502
aagcaga

SEQ ID NO: 116265 - DNA, 7 bp, Unknown
  misc_feature (1)..( 7): Result.002 file - promoters60/1444502
aagaaga

SEQ ID NO: 116266 - DNA, 9 bp, Unknown
  misc_feature (1)..( 9): Result.002 file - promoters60/1444502
agttggaaa

SEQ ID NO: 116267 - DNA, 9 bp, Unknown
  misc_feature (1)..( 9): Result.002 file - promoters60/1444502
agttgaaaa

SEQ ID NO: 116268 - DNA, 7 bp, Unknown
  misc_feature (1)..( 7): Result.002 file - promoters60/1444502
aggccca

SEQ ID NO: 116269 - DNA, 7 bp, Unknown
  misc_feature (1)..( 7): Result.002 file - promoters60/1444502
aggccca

SEQ ID NO: 116270 - DNA, 6 bp, Unknown
  misc_feature (1)..( 6): Result.002 file - promoters60/1444502
aaagga

SEQ ID NO: 116271 - DNA, 6 bp, Unknown
  misc_feature (1)..( 6): Result.002 file - promoters60/1444502
aaagga

SEQ ID NO: 116272 - DNA, 7 bp, Unknown
  misc_feature (1)..( 7): Result.002 file - promoters60/1444502
tcacttt

SEQ ID NO: 116273 - DNA, 7 bp, Unknown
  misc_feature (1)..( 7): Result.002 file - promoters60/1444502
tcagttt

SEQ ID NO: 116274 - DNA, 8 bp, Unknown
  misc_feature (1)..( 8): Result.002 file - promoters60/1444502
aaaaaaaa

SEQ ID NO: 116275 - DNA, 8 bp, Unknown
  misc_feature (1)..( 8): Result.002 file - promoters60/1444502
aaaaaaaa

SEQ ID NO: 116276 - DNA, 18 bp, Unknown
  misc_feature (1)..( 18): Result.002 file - promoters60/1444506
aaaaattattaaagtata

SEQ ID NO: 116277 - DNA, 18 bp, Unknown
  misc_feature (1)..( 18): Result.002 file - promoters60/1444506
aaagattattaaattata

SEQ ID NO: 116278 - DNA, 18 bp, Unknown
  misc_feature (1)..( 18): Result.002 file - promoters60/1444506
aaaatttatctgtaaatg

SEQ ID NO: 116279 - DNA, 10 bp, Unknown
  misc_feature (1)..( 10): Result.002 file - promoters60/1444506
tttactaata

SEQ ID NO: 116280 - DNA, 10 bp, Unknown
  misc_feature (1)..( 10): Result.002 file - promoters60/1444506
attattaaag

SEQ ID NO: 116281 - DNA, 10 bp, Unknown
  misc_feature (1)..( 10): Result.002 file - promoters60/1444506
tttgctatac

SEQ ID NO: 116282 - DNA, 10 bp, Unknown
  misc_feature (1)..( 10): Result.002 file - promoters60/1444506
tataataatt

SEQ ID NO: 116283 - DNA, 9 bp, Unknown
  misc_feature (1)..( 9): Result.002 file - promoters60/1444506
ataatttta

SEQ ID NO: 116284 - DNA, 9 bp, Unknown
  misc_feature (1)..( 9): Result.002 file - promoters60/1444506
ctaatttta

SEQ ID NO: 116285 - DNA, 9 bp, Unknown
  misc_feature (1)..( 9): Result.002 file - promoters60/1444506
ataattatt

SEQ ID NO: 116286 - DNA, 7 bp, Unknown
  misc_feature (1)..( 7): Result.002 file - promoters60/1444506
catttta

SEQ ID NO: 116287 - DNA, 7 bp, Unknown
  misc_feature (1)..( 7): Result.002 file - promoters60/1444506
tatttta

SEQ ID NO: 116288 - DNA, 7 bp, Unknown
  misc_feature (1)..( 7): Result.002 file - promoters60/1444506
tattttt

SEQ ID NO: 116289 - DNA, 10 bp, Unknown
  misc_feature (1)..( 10): Result.002 file - promoters60/1444506
ctatatatat

SEQ ID NO: 116290 - DNA, 10 bp, Unknown
  misc_feature (1)..( 10): Result.002 file - promoters60/1444506
ttatttatat

SEQ ID NO: 116291 - DNA, 10 bp, Unknown
  misc_feature (1)..( 10): Result.002 file - promoters60/1444506
gtatatataa

SEQ ID NO: 116292 - DNA, 10 bp, Unknown
  misc_feature (1)..( 10): Result.002 file - promoters60/1444506
ctatataaac

SEQ ID NO: 116293 - DNA, 9 bp, Unknown
  misc_feature (1)..( 9): Result.002 file - promoters60/1444506
ctaatttta

SEQ ID NO: 116294 - DNA, 9 bp, Unknown
  misc_feature (1)..( 9): Result.002 file - promoters60/1444506
ctaatttta

SEQ ID NO: 116295 - DNA, 9 bp, Unknown
  misc_feature (1)..( 9): Result.002 file - promoters60/1444506
aaaatgtta

SEQ ID NO: 116296 - DNA, 8 bp, Unknown
  misc_feature (1)..( 8): Result.002 file - promoters60/1444506
ttttgtta

SEQ ID NO: 116297 - DNA, 8 bp, Unknown
  misc_feature (1)..( 8): Result.002 file - promoters60/1444506
atttgtta

SEQ ID NO: 116298 - DNA, 8 bp, Unknown
  misc_feature (1)..( 8): Result.002 file - promoters60/1444506
ttttgttt

SEQ ID NO: 116299 - DNA, 8 bp, Unknown
  misc_feature (1)..( 8): Result.002 file - promoters60/1444506
tcaaaaaa

SEQ ID NO: 116300 - DNA, 8 bp, Unknown
  misc_feature (1)..( 8): Result.002 file - promoters60/1444506
acaaaaaa

SEQ ID NO: 116301 - DNA, 8 bp, Unknown
  misc_feature (1)..( 8): Result.002 file - promoters60/1444506
acaaaact

SEQ ID NO: 116302 - DNA, 11 bp, Unknown
  misc_feature (1)..( 11): Result.002 file - promoters60/1444506
aaacaatcatt

SEQ ID NO: 116303 - DNA, 11 bp, Unknown
  misc_feature (1)..( 11): Result.002 file - promoters60/1444506
aaaaaataatt

SEQ ID NO: 116304 - DNA, 11 bp, Unknown
  misc_feature (1)..( 11): Result.002 file - promoters60/1444506
aaaaaattgat

SEQ ID NO: 116305 - DNA, 8 bp, Unknown
  misc_feature (1)..( 8): Result.002 file - promoters60/1444506
taatagaa

SEQ ID NO: 116306 - DNA, 8 bp, Unknown
  misc_feature (1)..( 8): Result.002 file - promoters60/1444506
taattgaa

SEQ ID NO: 116307 - DNA, 8 bp, Unknown
  misc_feature (1)..( 8): Result.002 file - promoters60/1444506
aaattatt

SEQ ID NO: 116308 - DNA, 9 bp, Unknown
  misc_feature (1)..( 9): Result.002 file - promoters60/1444506
aacatattt

SEQ ID NO: 116309 - DNA, 9 bp, Unknown
  misc_feature (1)..( 9): Result.002 file - promoters60/1444506
aaaatattt

SEQ ID NO: 116310 - DNA, 9 bp, Unknown
  misc_feature (1)..( 9): Result.002 file - promoters60/1444506
aaaacattt

SEQ ID NO: 116311 - DNA, 7 bp, Unknown
  misc_feature (1)..( 7): Result.002 file - promoters60/1444506
attttgt

SEQ ID NO: 116312 - DNA, 7 bp, Unknown
  misc_feature (1)..( 7): Result.002 file - promoters60/1444506
attttgt

SEQ ID NO: 116313 - DNA, 7 bp, Unknown
  misc_feature (1)..( 7): Result.002 file - promoters60/1444506
tttttgt

SEQ ID NO: 116314 - DNA, 8 bp, Unknown
  misc_feature (1)..( 8): Result.002 file - promoters60/1444506
aaaaaaat

SEQ ID NO: 116315 - DNA, 8 bp, Unknown
  misc_feature (1)..( 8): Result.002 file - promoters60/1444506
aaaaaaaa

SEQ ID NO: 116316 - DNA, 8 bp, Unknown
  misc_feature (1)..( 8): Result.002 file - promoters60/1444506
aaaaaaat

SEQ ID NO: 116317 - DNA, 19 bp, Unknown
  misc_feature (1)..( 19): Result.002 file - promoters60/1444514
aaaaattattaaagtatat

SEQ ID NO: 116318 - DNA, 19 bp, Unknown
  misc_feature (1)..( 19): Result.002 file - promoters60/1444514
aaagattattaaattataa

SEQ ID NO: 116319 - DNA, 19 bp, Unknown
  misc_feature (1)..( 19): Result.002 file - promoters60/1444514
gcatcaattgtatgtatat

SEQ ID NO: 116320 - DNA, 19 bp, Unknown
  misc_feature (1)..( 19): Result.002 file - promoters60/1444514
aaaatttatctgtaaatgt

SEQ ID NO: 116321 - DNA, 10 bp, Unknown
  misc_feature (1)..( 10): Result.002 file - promoters60/1444514
tttactaata

SEQ ID NO: 116322 - DNA, 10 bp, Unknown
  misc_feature (1)..( 10): Result.002 file - promoters60/1444514
attattaaag

SEQ ID NO: 116323 - DNA, 10 bp, Unknown
  misc_feature (1)..( 10): Result.002 file - promoters60/1444514
tttgctatac

SEQ ID NO: 116324 - DNA, 10 bp, Unknown
  misc_feature (1)..( 10): Result.002 file - promoters60/1444514
tataataatt

SEQ ID NO: 116325 - DNA, 12 bp, Unknown
  misc_feature (1)..( 12): Result.002 file - promoters60/1444514
cactatatatat

SEQ ID NO: 116326 - DNA, 12 bp, Unknown
  misc_feature (1)..( 12): Result.002 file - promoters60/1444514
atttatttatat

SEQ ID NO: 116327 - DNA, 12 bp, Unknown
  misc_feature (1)..( 12): Result.002 file - promoters60/1444514
tcgtatatataa

SEQ ID NO: 116328 - DNA, 12 bp, Unknown
  misc_feature (1)..( 12): Result.002 file - promoters60/1444514
ctctatataaac

SEQ ID NO: 116329 - DNA, 12 bp, Unknown
  misc_feature (1)..( 12): Result.002 file - promoters60/1444514
tcgtatatgaat

SEQ ID NO: 116330 - DNA, 10 bp, Unknown
  misc_feature (1)..( 10): Result.002 file - promoters60/1444514
ttttaatttt

SEQ ID NO: 116331 - DNA, 10 bp, Unknown
  misc_feature (1)..( 10): Result.002 file - promoters60/1444514
cgttaattac

SEQ ID NO: 116332 - DNA, 10 bp, Unknown
  misc_feature (1)..( 10): Result.002 file - promoters60/1444514
gactaatttt

SEQ ID NO: 116333 - DNA, 10 bp, Unknown
  misc_feature (1)..( 10): Result.002 file - promoters60/1444514
ttttaatctt

SEQ ID NO: 116334 - DNA, 8 bp, Unknown
  misc_feature (1)..( 8): Result.002 file - promoters60/1444514
ttttgtta

SEQ ID NO: 116335 - DNA, 8 bp, Unknown
  misc_feature (1)..( 8): Result.002 file - promoters60/1444514
atttgtta

SEQ ID NO: 116336 - DNA, 8 bp, Unknown
  misc_feature (1)..( 8): Result.002 file - promoters60/1444514
ttttgttt

SEQ ID NO: 116337 - DNA, 8 bp, Unknown
  misc_feature (1)..( 8): Result.002 file - promoters60/1444514
atttgtaa

SEQ ID NO: 116338 - DNA, 10 bp, Unknown
  misc_feature (1)..( 10): Result.002 file - promoters60/1444514
attttgttat

SEQ ID NO: 116339 - DNA, 10 bp, Unknown
  misc_feature (1)..( 10): Result.002 file - promoters60/1444514
gttttgtatt

SEQ ID NO: 116340 - DNA, 10 bp, Unknown
  misc_feature (1)..( 10): Result.002 file - promoters60/1444514
attttgtaac

SEQ ID NO: 116341 - DNA, 10 bp, Unknown
  misc_feature (1)..( 10): Result.002 file - promoters60/1444514
tgtttctatt

SEQ ID NO: 116342 - DNA, 8 bp, Unknown
  misc_feature (1)..( 8): Result.002 file - promoters60/1444629
tattttta

SEQ ID NO: 116343 - DNA, 8 bp, Unknown
  misc_feature (1)..( 8): Result.002 file - promoters60/1444629
gattctta

SEQ ID NO: 116344 - DNA, 8 bp, Unknown
  misc_feature (1)..( 8): Result.002 file - promoters60/1444629
gattcttt

SEQ ID NO: 116345 - DNA, 8 bp, Unknown
  misc_feature (1)..( 8): Result.002 file - promoters60/1444629
gattctag

SEQ ID NO: 116346 - DNA, 11 bp, Unknown
  misc_feature (1)..( 11): Result.002 file - promoters60/1444629
aatctatccac

SEQ ID NO: 116347 - DNA, 11 bp, Unknown
  misc_feature (1)..( 11): Result.002 file - promoters60/1444629
accttatccac

SEQ ID NO: 116348 - DNA, 11 bp, Unknown
  misc_feature (1)..( 11): Result.002 file - promoters60/1444629
accttatccca

SEQ ID NO: 116349 - DNA, 6 bp, Unknown
  misc_feature (1)..( 6): Result.002 file - promoters60/1444629
attatc

SEQ ID NO: 116350 - DNA, 6 bp, Unknown
  misc_feature (1)..( 6): Result.002 file - promoters60/1444629
attatc

SEQ ID NO: 116351 - DNA, 6 bp, Unknown
  misc_feature (1)..( 6): Result.002 file - promoters60/1444629
attatc

SEQ ID NO: 116352 - DNA, 7 bp, Unknown
  misc_feature (1)..( 7): Result.002 file - promoters60/1444629
gttatca

SEQ ID NO: 116353 - DNA, 7 bp, Unknown
  misc_feature (1)..( 7): Result.002 file - promoters60/1444629
attatca

SEQ ID NO: 116354 - DNA, 7 bp, Unknown
  misc_feature (1)..( 7): Result.002 file - promoters60/1444629
attatcg

SEQ ID NO: 116355 - DNA, 8 bp, Unknown
  misc_feature (1)..( 8): Result.002 file - promoters60/1446456
aaataaat

SEQ ID NO: 116356 - DNA, 8 bp, Unknown
  misc_feature (1)..( 8): Result.002 file - promoters60/1446456
caatgaat

SEQ ID NO: 116357 - DNA, 8 bp, Unknown
  misc_feature (1)..( 8): Result.002 file - promoters60/1446456
gaaaaaaa

SEQ ID NO: 116358 - DNA, 8 bp, Unknown
  misc_feature (1)..( 8): Result.002 file - promoters60/1446456
aaataacc

SEQ ID NO: 116359 - DNA, 8 bp, Unknown
  misc_feature (1)..( 8): Result.002 file - promoters60/1446456
caataaaa

SEQ ID NO: 116360 - DNA, 8 bp, Unknown
  misc_feature (1)..( 8): Result.002 file - promoters60/1446456
atttttaa

SEQ ID NO: 116361 - DNA, 8 bp, Unknown
  misc_feature (1)..( 8): Result.002 file - promoters60/1446456
ctttttaa

SEQ ID NO: 116362 - DNA, 8 bp, Unknown
  misc_feature (1)..( 8): Result.002 file - promoters60/1446456
attttttt

SEQ ID NO: 116363 - DNA, 8 bp, Unknown
  misc_feature (1)..( 8): Result.002 file - promoters60/1446456
ctttttat

SEQ ID NO: 116364 - DNA, 8 bp, Unknown
  misc_feature (1)..( 8): Result.002 file - promoters60/1446456
cttttttt

SEQ ID NO: 116365 - DNA, 11 bp, Unknown
  misc_feature (1)..( 11): Result.002 file - promoters60/1446456
tttctatcaac

SEQ ID NO: 116366 - DNA, 11 bp, Unknown
  misc_feature (1)..( 11): Result.002 file - promoters60/1446456
tttctaattcc

SEQ ID NO: 116367 - DNA, 11 bp, Unknown
  misc_feature (1)..( 11): Result.002 file - promoters60/1446456
tttttaactcc

SEQ ID NO: 116368 - DNA, 11 bp, Unknown
  misc_feature (1)..( 11): Result.002 file - promoters60/1446456
tttttaatttt

SEQ ID NO: 116369 - DNA, 8 bp, Unknown
  misc_feature (1)..( 8): Result.002 file - promoters60/1446456
aagaatag

SEQ ID NO: 116370 - DNA, 8 bp, Unknown
  misc_feature (1)..( 8): Result.002 file - promoters60/1446456
aagaatat

SEQ ID NO: 116371 - DNA, 8 bp, Unknown
  misc_feature (1)..( 8): Result.002 file - promoters60/1446456
aagaatta

SEQ ID NO: 116372 - DNA, 8 bp, Unknown
  misc_feature (1)..( 8): Result.002 file - promoters60/1446456
aagattta

SEQ ID NO: 116373 - DNA, 9 bp, Unknown
  misc_feature (1)..( 9): Result.002 file - promoters60/1446456
atacttttt

SEQ ID NO: 116374 - DNA, 9 bp, Unknown
  misc_feature (1)..( 9): Result.002 file - promoters60/1446456
gtacattta

SEQ ID NO: 116375 - DNA, 9 bp, Unknown
  misc_feature (1)..( 9): Result.002 file - promoters60/1446456
atacttttt

SEQ ID NO: 116376 - DNA, 9 bp, Unknown
  misc_feature (1)..( 9): Result.002 file - promoters60/1446456
tcccttttt

SEQ ID NO: 116377 - DNA, 10 bp, Unknown
  misc_feature (1)..( 10): Result.002 file - promoters60/1446456
tttttttctt

SEQ ID NO: 116378 - DNA, 10 bp, Unknown
  misc_feature (1)..( 10): Result.002 file - promoters60/1446456
atttattctt

SEQ ID NO: 116379 - DNA, 10 bp, Unknown
  misc_feature (1)..( 10): Result.002 file - promoters60/1446456
actttttctg

SEQ ID NO: 116380 - DNA, 10 bp, Unknown
  misc_feature (1)..( 10): Result.002 file - promoters60/1446456
ctttttatgg

SEQ ID NO: 116381 - DNA, 8 bp, Unknown
  misc_feature (1)..( 8): Result.002 file - promoters60/1446456
ttgaaatt

SEQ ID NO: 116382 - DNA, 8 bp, Unknown
  misc_feature (1)..( 8): Result.002 file - promoters60/1446456
aagaaatt

SEQ ID NO: 116383 - DNA, 8 bp, Unknown
  misc_feature (1)..( 8): Result.002 file - promoters60/1446456
atgaaatt

SEQ ID NO: 116384 - DNA, 8 bp, Unknown
  misc_feature (1)..( 8): Result.002 file - promoters60/1446456
aagcaatt

SEQ ID NO: 116385 - DNA, 13 bp, Unknown
  misc_feature (1)..( 13): Result.002 file - promoters60/1446636
actcttttgaagt

SEQ ID NO: 116386 - DNA, 13 bp, Unknown
  misc_feature (1)..( 13): Result.002 file - promoters60/1446636
actatttatacat

SEQ ID NO: 116387 - DNA, 13 bp, Unknown
  misc_feature (1)..( 13): Result.002 file - promoters60/1446636
cctattaataaaa

SEQ ID NO: 116388 - DNA, 13 bp, Unknown
  misc_feature (1)..( 13): Result.002 file - promoters60/1446636
gttattaataaat

SEQ ID NO: 116389 - DNA, 13 bp, Unknown
  misc_feature (1)..( 13): Result.002 file - promoters60/1446636
ctgattaatgaat

SEQ ID NO: 116390 - DNA, 13 bp, Unknown
  misc_feature (1)..( 13): Result.002 file - promoters60/1446636
tttataaatattt

SEQ ID NO: 116391 - DNA, 9 bp, Unknown
  misc_feature (1)..( 9): Result.002 file - promoters60/1446636
tgtaataat

SEQ ID NO: 116392 - DNA, 9 bp, Unknown
  misc_feature (1)..( 9): Result.002 file - promoters60/1446636
cataataat

SEQ ID NO: 116393 - DNA, 9 bp, Unknown
  misc_feature (1)..( 9): Result.002 file - promoters60/1446636
attaataaa

SEQ ID NO: 116394 - DNA, 9 bp, Unknown
  misc_feature (1)..( 9): Result.002 file - promoters60/1446636
attaataaa

SEQ ID NO: 116395 - DNA, 10 bp, Unknown
  misc_feature (1)..( 10): Result.002 file - promoters60/1446636
attaatgaat

SEQ ID NO: 116396 - DNA, 10 bp, Unknown
  misc_feature (1)..( 10): Result.002 file - promoters60/1446636
tataaatatt

SEQ ID NO: 116397 - DNA, 12 bp, Unknown
  misc_feature (1)..( 12): Result.002 file - promoters60/1446636
cttttttttttt

SEQ ID NO: 116398 - DNA, 12 bp, Unknown
  misc_feature (1)..( 12): Result.002 file - promoters60/1446636
ctttttgttgtt

SEQ ID NO: 116399 - DNA, 12 bp, Unknown
  misc_feature (1)..( 12): Result.002 file - promoters60/1446636
ctttttttgttt

SEQ ID NO: 116400 - DNA, 12 bp, Unknown
  misc_feature (1)..( 12): Result.002 file - promoters60/1446636
gtttttgtctat

SEQ ID NO: 116401 - DNA, 12 bp, Unknown
  misc_feature (1)..( 12): Result.002 file - promoters60/1446636
gtttttcggtta

SEQ ID NO: 116402 - DNA, 13 bp, Unknown
  misc_feature (1)..( 13): Result.002 file - promoters60/1446636
gttgttttaagaa

SEQ ID NO: 116403 - DNA, 13 bp, Unknown
  misc_feature (1)..( 13): Result.002 file - promoters60/1446636
attgtttcgaaac

SEQ ID NO: 116404 - DNA, 10 bp, Unknown
  misc_feature (1)..( 10): Result.002 file - promoters60/1446975
gataacttta

SEQ ID NO: 116405 - DNA, 10 bp, Unknown
  misc_feature (1)..( 10): Result.002 file - promoters60/1446975
gataacctta

SEQ ID NO: 116406 - DNA, 9 bp, Unknown
  misc_feature (1)..( 9): Result.002 file - promoters60/1446975
aacattttg

SEQ ID NO: 116407 - DNA, 9 bp, Unknown
  misc_feature (1)..( 9): Result.002 file - promoters60/1446975
aacgttttg

SEQ ID NO: 116408 - DNA, 6 bp, Unknown
  misc_feature (1)..( 6): Result.002 file - promoters60/1446975
ctgatt

SEQ ID NO: 116409 - DNA, 6 bp, Unknown
  misc_feature (1)..( 6): Result.002 file - promoters60/1446975
ctgatt

SEQ ID NO: 116410 - DNA, 6 bp, Unknown
  misc_feature (1)..( 6): Result.002 file - promoters60/1446975
gatcta

SEQ ID NO: 116411 - DNA, 6 bp, Unknown
  misc_feature (1)..( 6): Result.002 file - promoters60/1446975
gatcta

SEQ ID NO: 116412 - DNA, 7 bp, Unknown
  misc_feature (1)..( 7): Result.002 file - promoters60/1446975
agaaaga

SEQ ID NO: 116413 - DNA, 7 bp, Unknown
  misc_feature (1)..( 7): Result.002 file - promoters60/1446975
agaaaga

SEQ ID NO: 116414 - DNA, 7 bp, Unknown
  misc_feature (1)..( 7): Result.002 file - promoters60/1446975
tcataat

SEQ ID NO: 116415 - DNA, 7 bp, Unknown
  misc_feature (1)..( 7): Result.002 file - promoters60/1446975
tcataat

SEQ ID NO: 116416 - DNA, 6 bp, Unknown
  misc_feature (1)..( 6): Result.002 file - promoters60/1446975
attgtt

SEQ ID NO: 116417 - DNA, 6 bp, Unknown
  misc_feature (1)..( 6): Result.002 file - promoters60/1446975
attgtt

SEQ ID NO: 116418 - DNA, 6 bp, Unknown
  misc_feature (1)..( 6): Result.002 file - promoters60/1447064
agagca

SEQ ID NO: 116419 - DNA, 6 bp, Unknown
  misc_feature (1)..( 6): Result.002 file - promoters60/1447064
agagca

SEQ ID NO: 116420 - DNA, 6 bp, Unknown
  misc_feature (1)..( 6): Result.002 file - promoters60/1447064
atagag

SEQ ID NO: 116421 - DNA, 6 bp, Unknown
  misc_feature (1)..( 6): Result.002 file - promoters60/1447064
atagag

SEQ ID NO: 116422 - DNA, 7 bp, Unknown
  misc_feature (1)..( 7): Result.002 file - promoters60/1447064
tatcttg

SEQ ID NO: 116423 - DNA, 7 bp, Unknown
  misc_feature (1)..( 7): Result.002 file - promoters60/1447064
tatattg

SEQ ID NO: 116424 - DNA, 6 bp, Unknown
  misc_feature (1)..( 6): Result.002 file - promoters60/1447064
aaagac

SEQ ID NO: 116425 - DNA, 6 bp, Unknown
  misc_feature (1)..( 6): Result.002 file - promoters60/1447064
aaagac

SEQ ID NO: 116426 - DNA, 7 bp, Unknown
  misc_feature (1)..( 7): Result.002 file - promoters60/1447064
taataaa

SEQ ID NO: 116427 - DNA, 7 bp, Unknown
  misc_feature (1)..( 7): Result.002 file - promoters60/1447064
taaaaaa

SEQ ID NO: 116428 - DNA, 6 bp, Unknown
  misc_feature (1)..( 6): Result.002 file - promoters60/1447064
taaaaa

SEQ ID NO: 116429 - DNA, 6 bp, Unknown
  misc_feature (1)..( 6): Result.002 file - promoters60/1447064
taaaaa

SEQ ID NO: 116430 - DNA, 6 bp, Unknown
  misc_feature (1)..( 6): Result.002 file - promoters60/1447064
cttcta

SEQ ID NO: 116431 - DNA, 6 bp, Unknown
  misc_feature (1)..( 6): Result.002 file - promoters60/1447064
cttcta

SEQ ID NO: 116432 - DNA, 7 bp, Unknown
  misc_feature (1)..( 7): Result.002 file - promoters60/1447064
tttctat

SEQ ID NO: 116433 - DNA, 7 bp, Unknown
  misc_feature (1)..( 7): Result.002 file - promoters60/1447064
tttgtat

SEQ ID NO: 116434 - DNA, 7 bp, Unknown
  misc_feature (1)..( 7): Result.002 file - promoters60/1447064
tatattg

SEQ ID NO: 116435 - DNA, 7 bp, Unknown
  misc_feature (1)..( 7): Result.002 file - promoters60/1447064
tatgttg

SEQ ID NO: 116436 - DNA, 8 bp, Unknown
  misc_feature (1)..( 8): Result.002 file - promoters60/1447064
tgttaaaa

SEQ ID NO: 116437 - DNA, 8 bp, Unknown
  misc_feature (1)..( 8): Result.002 file - promoters60/1447064
tgttgaaa

SEQ ID NO: 116438 - DNA, 8 bp, Unknown
  misc_feature (1)..( 8): Result.002 file - promoters60/1447064
cattaaac

SEQ ID NO: 116439 - DNA, 8 bp, Unknown
  misc_feature (1)..( 8): Result.002 file - promoters60/1447064
catttaac

SEQ ID NO: 116440 - DNA, 6 bp, Unknown
  misc_feature (1)..( 6): Result.002 file - promoters60/1447064
tctcca

SEQ ID NO: 116441 - DNA, 6 bp, Unknown
  misc_feature (1)..( 6): Result.002 file - promoters60/1447064
tctcca

SEQ ID NO: 116442 - DNA, 7 bp, Unknown
  misc_feature (1)..( 7): Result.002 file - promoters60/1447064
ccatttt

SEQ ID NO: 116443 - DNA, 7 bp, Unknown
  misc_feature (1)..( 7): Result.002 file - promoters60/1447064
ccatttt

SEQ ID NO: 116444 - DNA, 6 bp, Unknown
  misc_feature (1)..( 6): Result.002 file - promoters60/1447064
ttttca

SEQ ID NO: 116445 - DNA, 6 bp, Unknown
  misc_feature (1)..( 6): Result.002 file - promoters60/1447064
ttttca

SEQ ID NO: 116446 - DNA, 6 bp, Unknown
  misc_feature (1)..( 6): Result.002 file - promoters60/1447064
tgtctt

SEQ ID NO: 116447 - DNA, 6 bp, Unknown
  misc_feature (1)..( 6): Result.002 file - promoters60/1447064
tgtctt

SEQ ID NO: 116448 - DNA, 6 bp, Unknown
  misc_feature (1)..( 6): Result.002 file - promoters60/1447064
caagct

SEQ ID NO: 116449 - DNA, 6 bp, Unknown
  misc_feature (1)..( 6): Result.002 file - promoters60/1447064
caagct

SEQ ID NO: 116450 - DNA, 7 bp, Unknown
  misc_feature (1)..( 7): Result.002 file - promoters60/1447064
ataaata

SEQ ID NO: 116451 - DNA, 7 bp, Unknown
  misc_feature (1)..( 7): Result.002 file - promoters60/1447064
atacata

SEQ ID NO: 116452 - DNA, 12 bp, Unknown
  misc_feature (1)..( 12): Result.002 file - promoters60/1447217
gaaaaaaaaaaa

SEQ ID NO: 116453 - DNA, 12 bp, Unknown
  misc_feature (1)..( 12): Result.002 file - promoters60/1447217
gaaaaaaaaaaa

SEQ ID NO: 116454 - DNA, 12 bp, Unknown
  misc_feature (1)..( 12): Result.002 file - promoters60/1447217
gaaatacaaaaa

SEQ ID NO: 116455 - DNA, 12 bp, Unknown
  misc_feature (1)..( 12): Result.002 file - promoters60/1447217
tataaacaattt

SEQ ID NO: 116456 - DNA, 10 bp, Unknown
  misc_feature (1)..( 10): Result.002 file - promoters60/1447217
tttattatgt

SEQ ID NO: 116457 - DNA, 10 bp, Unknown
  misc_feature (1)..( 10): Result.002 file - promoters60/1447217
catattatgt

SEQ ID NO: 116458 - DNA, 10 bp, Unknown
  misc_feature (1)..( 10): Result.002 file - promoters60/1447217
ttttttaaca

SEQ ID NO: 116459 - DNA, 8 bp, Unknown
  misc_feature (1)..( 8): Result.002 file - promoters60/1447217
tgaacaaa

SEQ ID NO: 116460 - DNA, 8 bp, Unknown
  misc_feature (1)..( 8): Result.002 file - promoters60/1447217
agaataaa

SEQ ID NO: 116461 - DNA, 8 bp, Unknown
  misc_feature (1)..( 8): Result.002 file - promoters60/1447217
agactaag

SEQ ID NO: 116462 - DNA, 9 bp, Unknown
  misc_feature (1)..( 9): Result.002 file - promoters60/1447217
aaaaaaaaa

SEQ ID NO: 116463 - DNA, 9 bp, Unknown
  misc_feature (1)..( 9): Result.002 file - promoters60/1447217
aaaataaaa

SEQ ID NO: 116464 - DNA, 9 bp, Unknown
  misc_feature (1)..( 9): Result.002 file - promoters60/1447217
caaataaat

SEQ ID NO: 116465 - DNA, 10 bp, Unknown
  misc_feature (1)..( 10): Result.002 file - promoters60/1447217
taaaacgagt

SEQ ID NO: 116466 - DNA, 10 bp, Unknown
  misc_feature (1)..( 10): Result.002 file - promoters60/1447217
aaaaaagagt

SEQ ID NO: 116467 - DNA, 10 bp, Unknown
  misc_feature (1)..( 10): Result.002 file - promoters60/1447217
aaaaaagaaa

SEQ ID NO: 116468 - DNA, 8 bp, Unknown
  misc_feature (1)..( 8): Result.002 file - promoters60/1447217
ataaataa

SEQ ID NO: 116469 - DNA, 8 bp, Unknown
  misc_feature (1)..( 8): Result.002 file - promoters60/1447217
ataaataa

SEQ ID NO: 116470 - DNA, 8 bp, Unknown
  misc_feature (1)..( 8): Result.002 file - promoters60/1447217
ataaaaaa

SEQ ID NO: 116471 - DNA, 9 bp, Unknown
  misc_feature (1)..( 9): Result.002 file - promoters60/1447217
ttttgaacg

SEQ ID NO: 116472 - DNA, 9 bp, Unknown
  misc_feature (1)..( 9): Result.002 file - promoters60/1447217
taatgaacg

SEQ ID NO: 116473 - DNA, 9 bp, Unknown
  misc_feature (1)..( 9): Result.002 file - promoters60/1447217
tttttaacg

SEQ ID NO: 116474 - DNA, 9 bp, Unknown
  misc_feature (1)..( 9): Result.002 file - promoters60/1447217
gaaataccc

SEQ ID NO: 116475 - DNA, 9 bp, Unknown
  misc_feature (1)..( 9): Result.002 file - promoters60/1447217
gaaatacaa

SEQ ID NO: 116476 - DNA, 9 bp, Unknown
  misc_feature (1)..( 9): Result.002 file - promoters60/1447217
aaaattcaa

SEQ ID NO: 116477 - DNA, 10 bp, Unknown
  misc_feature (1)..( 10): Result.002 file - promoters60/1447217
caaaacaaaa

SEQ ID NO: 116478 - DNA, 10 bp, Unknown
  misc_feature (1)..( 10): Result.002 file - promoters60/1447217
caaaaaaaaa

SEQ ID NO: 116479 - DNA, 10 bp, Unknown
  misc_feature (1)..( 10): Result.002 file - promoters60/1447217
ataaacaatt

SEQ ID NO: 116480 - DNA, 14 bp, Unknown
  misc_feature (1)..( 14): Result.002 file - promoters60/1447217
gaaatattttaaca

SEQ ID NO: 116481 - DNA, 14 bp, Unknown
  misc_feature (1)..( 14): Result.002 file - promoters60/1447217
gaaataatttagac

SEQ ID NO: 116482 - DNA, 14 bp, Unknown
  misc_feature (1)..( 14): Result.002 file - promoters60/1447217
tcttttttttaaca

SEQ ID NO: 116483 - DNA, 7 bp, Unknown
  misc_feature (1)..( 7): Result.002 file - promoters60/1447217
tataatt

SEQ ID NO: 116484 - DNA, 7 bp, Unknown
  misc_feature (1)..( 7): Result.002 file - promoters60/1447217
gataatt

SEQ ID NO: 116485 - DNA, 7 bp, Unknown
  misc_feature (1)..( 7): Result.002 file - promoters60/1447217
tattatt

SEQ ID NO: 116486 - DNA, 8 bp, Unknown
  misc_feature (1)..( 8): Result.002 file - promoters60/1447321
ttttgaat

SEQ ID NO: 116487 - DNA, 8 bp, Unknown
  misc_feature (1)..( 8): Result.002 file - promoters60/1447321
atttgaat

SEQ ID NO: 116488 - DNA, 8 bp, Unknown
  misc_feature (1)..( 8): Result.002 file - promoters60/1447321
ttttgaca

SEQ ID NO: 116489 - DNA, 9 bp, Unknown
  misc_feature (1)..( 9): Result.002 file - promoters60/1447321
tataataca

SEQ ID NO: 116490 - DNA, 9 bp, Unknown
  misc_feature (1)..( 9): Result.002 file - promoters60/1447321
tattataca

SEQ ID NO: 116491 - DNA, 11 bp, Unknown
  misc_feature (1)..( 11): Result.002 file - promoters60/1447321
aaactgtgaaa

SEQ ID NO: 116492 - DNA, 11 bp, Unknown
  misc_feature (1)..( 11): Result.002 file - promoters60/1447321
aaaatgtgaaa

SEQ ID NO: 116493 - DNA, 11 bp, Unknown
  misc_feature (1)..( 11): Result.002 file - promoters60/1447321
gctttgtgaaa

SEQ ID NO: 116494 - DNA, 7 bp, Unknown
  misc_feature (1)..( 7): Result.002 file - promoters60/1447321
aatctaa

SEQ ID NO: 116495 - DNA, 7 bp, Unknown
  misc_feature (1)..( 7): Result.002 file - promoters60/1447321
aatttaa

SEQ ID NO: 116496 - DNA, 8 bp, Unknown
  misc_feature (1)..( 8): Result.002 file - promoters60/1447321
ccaaattt

SEQ ID NO: 116497 - DNA, 8 bp, Unknown
  misc_feature (1)..( 8): Result.002 file - promoters60/1447321
ccaatttt

SEQ ID NO: 116498 - DNA, 6 bp, Unknown
  misc_feature (1)..( 6): Result.002 file - promoters60/1447321
aatatt

SEQ ID NO: 116499 - DNA, 6 bp, Unknown
  misc_feature (1)..( 6): Result.002 file - promoters60/1447321
aatatt

SEQ ID NO: 116500 - DNA, 9 bp, Unknown
  misc_feature (1)..( 9): Result.002 file - promoters60/1447321
tatataata

SEQ ID NO: 116501 - DNA, 9 bp, Unknown
  misc_feature (1)..( 9): Result.002 file - promoters60/1447321
tataaaata

SEQ ID NO: 116502 - DNA, 8 bp, Unknown
  misc_feature (1)..( 8): Result.002 file - promoters60/1447321
aacccaaa

SEQ ID NO: 116503 - DNA, 8 bp, Unknown
  misc_feature (1)..( 8): Result.002 file - promoters60/1447321
agcccaaa

SEQ ID NO: 116504 - DNA, 8 bp, Unknown
  misc_feature (1)..( 8): Result.002 file - promoters60/1447321
agcccaat

SEQ ID NO: 116505 - DNA, 7 bp, Unknown
  misc_feature (1)..( 7): Result.002 file - promoters60/1447321
aattttc

SEQ ID NO: 116506 - DNA, 7 bp, Unknown
  misc_feature (1)..( 7): Result.002 file - promoters60/1447321
aatcttc

SEQ ID NO: 116507 - DNA, 7 bp, Unknown
  misc_feature (1)..( 7): Result.002 file - promoters60/1447321
tgaattt

SEQ ID NO: 116508 - DNA, 7 bp, Unknown
  misc_feature (1)..( 7): Result.002 file - promoters60/1447321
tgaattt

SEQ ID NO: 116509 - DNA, 9 bp, Unknown
  misc_feature (1)..( 9): Result.002 file - promoters60/1447321
aaagtacat

SEQ ID NO: 116510 - DNA, 9 bp, Unknown
  misc_feature (1)..( 9): Result.002 file - promoters60/1447321
aaagaacat

SEQ ID NO: 116511 - DNA, 6 bp, Unknown
  misc_feature (1)..( 6): Result.002 file - promoters60/1447321
actaaa

SEQ ID NO: 116512 - DNA, 6 bp, Unknown
  misc_feature (1)..( 6): Result.002 file - promoters60/1447321
actaaa

SEQ ID NO: 116513 - DNA, 6 bp, Unknown
  misc_feature (1)..( 6): Result.002 file - promoters60/1447321
ttttgt

SEQ ID NO: 116514 - DNA, 6 bp, Unknown
  misc_feature (1)..( 6): Result.002 file - promoters60/1447321
ttttgt

SEQ ID NO: 116515 - DNA, 6 bp, Unknown
  misc_feature (1)..( 6): Result.002 file - promoters60/1447321
tttaga

SEQ ID NO: 116516 - DNA, 6 bp, Unknown
  misc_feature (1)..( 6): Result.002 file - promoters60/1447321
tttaga

SEQ ID NO: 116517 - DNA, 6 bp, Unknown
  misc_feature (1)..( 6): Result.002 file - promoters60/1447321
ctttta

SEQ ID NO: 116518 - DNA, 6 bp, Unknown
  misc_feature (1)..( 6): Result.002 file - promoters60/1447321
ctttta

SEQ ID NO: 116519 - DNA, 6 bp, Unknown
  misc_feature (1)..( 6): Result.002 file - promoters60/1447321
aatttg

SEQ ID NO: 116520 - DNA, 6 bp, Unknown
  misc_feature (1)..( 6): Result.002 file - promoters60/1447321
aatttg

SEQ ID NO: 116521 - DNA, 9 bp, Unknown
  misc_feature (1)..( 9): Result.002 file - promoters60/1447321
tgtactatt

SEQ ID NO: 116522 - DNA, 9 bp, Unknown
  misc_feature (1)..( 9): Result.002 file - promoters60/1447321
tgtaatatt

SEQ ID NO: 116523 - DNA, 6 bp, Unknown
  misc_feature (1)..( 6): Result.002 file - promoters60/1447321
ctacat

SEQ ID NO: 116524 - DNA, 6 bp, Unknown
  misc_feature (1)..( 6): Result.002 file - promoters60/1447321
ctacat

SEQ ID NO: 116525 - DNA, 7 bp, Unknown
  misc_feature (1)..( 7): Result.002 file - promoters60/1447321
aatttat

SEQ ID NO: 116526 - DNA, 7 bp, Unknown
  misc_feature (1)..( 7): Result.002 file - promoters60/1447321
aatatat

SEQ ID NO: 116527 - DNA, 6 bp, Unknown
  misc_feature (1)..( 6): Result.002 file - promoters60/1447321
tttaat

SEQ ID NO: 116528 - DNA, 6 bp, Unknown
  misc_feature (1)..( 6): Result.002 file - promoters60/1447321
tttaat

SEQ ID NO: 116529 - DNA, 10 bp, Unknown
  misc_feature (1)..( 10): Result.002 file - promoters60/1447321
aaatgtttgt

SEQ ID NO: 116530 - DNA, 10 bp, Unknown
  misc_feature (1)..( 10): Result.002 file - promoters60/1447321
aaatttttgt

SEQ ID NO: 116531 - DNA, 7 bp, Unknown
  misc_feature (1)..( 7): Result.002 file - promoters60/1447321
cctcttc

SEQ ID NO: 116532 - DNA, 7 bp, Unknown
  misc_feature (1)..( 7): Result.002 file - promoters60/1447321
cctgttc

SEQ ID NO: 116533 - DNA, 7 bp, Unknown
  misc_feature (1)..( 7): Result.002 file - promoters60/1447352
taattca

SEQ ID NO: 116534 - DNA, 7 bp, Unknown
  misc_feature (1)..( 7): Result.002 file - promoters60/1447352
gaattca

SEQ ID NO: 116535 - DNA, 7 bp, Unknown
  misc_feature (1)..( 7): Result.002 file - promoters60/1447352
gaattct

SEQ ID NO: 116536 - DNA, 10 bp, Unknown
  misc_feature (1)..( 10): Result.002 file - promoters60/1447352
tttgcgaatt

SEQ ID NO: 116537 - DNA, 10 bp, Unknown
  misc_feature (1)..( 10): Result.002 file - promoters60/1447352
tttgcgaatt

SEQ ID NO: 116538 - DNA, 9 bp, Unknown
  misc_feature (1)..( 9): Result.002 file - promoters60/1447352
ttttggttt

SEQ ID NO: 116539 - DNA, 9 bp, Unknown
  misc_feature (1)..( 9): Result.002 file - promoters60/1447352
ttttgattt

SEQ ID NO: 116540 - DNA, 7 bp, Unknown
  misc_feature (1)..( 7): Result.002 file - promoters60/1447352
aagtttt

SEQ ID NO: 116541 - DNA, 7 bp, Unknown
  misc_feature (1)..( 7): Result.002 file - promoters60/1447352
aagattt

SEQ ID NO: 116542 - DNA, 6 bp, Unknown
  misc_feature (1)..( 6): Result.002 file - promoters60/1447352
aaaatt

SEQ ID NO: 116543 - DNA, 6 bp, Unknown
  misc_feature (1)..( 6): Result.002 file - promoters60/1447352
aaaatt

SEQ ID NO: 116544 - DNA, 7 bp, Unknown
  misc_feature (1)..( 7): Result.002 file - promoters60/1447352
ttgtttt

SEQ ID NO: 116545 - DNA, 7 bp, Unknown
  misc_feature (1)..( 7): Result.002 file - promoters60/1447352
ttgcttt

SEQ ID NO: 116546 - DNA, 7 bp, Unknown
  misc_feature (1)..( 7): Result.002 file - promoters60/1447352
gaatctt

SEQ ID NO: 116547 - DNA, 7 bp, Unknown
  misc_feature (1)..( 7): Result.002 file - promoters60/1447352
gaagctt

SEQ ID NO: 116548 - DNA, 6 bp, Unknown
  misc_feature (1)..( 6): Result.002 file - promoters60/1447352
atggcg

SEQ ID NO: 116549 - DNA, 6 bp, Unknown
  misc_feature (1)..( 6): Result.002 file - promoters60/1447352
atggcg

SEQ ID NO: 116550 - DNA, 9 bp, Unknown
  misc_feature (1)..( 9): Result.002 file - promoters60/1447352
ataatcatc

SEQ ID NO: 116551 - DNA, 9 bp, Unknown
  misc_feature (1)..( 9): Result.002 file - promoters60/1447352
ataatgatc

SEQ ID NO: 116552 - DNA, 6 bp, Unknown
  misc_feature (1)..( 6): Result.002 file - promoters60/1447352
ttgaat

SEQ ID NO: 116553 - DNA, 6 bp, Unknown
  misc_feature (1)..( 6): Result.002 file - promoters60/1447352
ttgaat

SEQ ID NO: 116554 - DNA, 12 bp, Unknown
  misc_feature (1)..( 12): Result.002 file - promoters60/1447352
tattatttggtg

SEQ ID NO: 116555 - DNA, 12 bp, Unknown
  misc_feature (1)..( 12): Result.002 file - promoters60/1447352
attgatttcgtg

SEQ ID NO: 116556 - DNA, 12 bp, Unknown
  misc_feature (1)..( 12): Result.002 file - promoters60/1447352
ttgaattcacgt

SEQ ID NO: 116557 - DNA, 8 bp, Unknown
  misc_feature (1)..( 8): Result.002 file - promoters60/1447352
taaatttg

SEQ ID NO: 116558 - DNA, 8 bp, Unknown
  misc_feature (1)..( 8): Result.002 file - promoters60/1447352
aaaaattg

SEQ ID NO: 116559 - DNA, 8 bp, Unknown
  misc_feature (1)..( 8): Result.002 file - promoters60/1447352
aaaaataa

SEQ ID NO: 116560 - DNA, 6 bp, Unknown
  misc_feature (1)..( 6): Result.002 file - promoters60/1447352
tcttgt

SEQ ID NO: 116561 - DNA, 6 bp, Unknown
  misc_feature (1)..( 6): Result.002 file - promoters60/1447352
tcttgt

SEQ ID NO: 116562 - DNA, 8 bp, Unknown
  misc_feature (1)..( 8): Result.002 file - promoters60/1447352
atgatcag

SEQ ID NO: 116563 - DNA, 8 bp, Unknown
  misc_feature (1)..( 8): Result.002 file - promoters60/1447352
atgaccag

SEQ ID NO: 116564 - DNA, 6 bp, Unknown
  misc_feature (1)..( 6): Result.002 file - promoters60/1447352
taatat

SEQ ID NO: 116565 - DNA, 6 bp, Unknown
  misc_feature (1)..( 6): Result.002 file - promoters60/1447352
taatat

SEQ ID NO: 116566 - DNA, 7 bp, Unknown
  misc_feature (1)..( 7): Result.002 file - promoters60/1447352
ataatgc

SEQ ID NO: 116567 - DNA, 7 bp, Unknown
  misc_feature (1)..( 7): Result.002 file - promoters60/1447352
atagtgc

SEQ ID NO: 116568 - DNA, 6 bp, Unknown
  misc_feature (1)..( 6): Result.002 file - promoters60/1447352
tcatcc

SEQ ID NO: 116569 - DNA, 6 bp, Unknown
  misc_feature (1)..( 6): Result.002 file - promoters60/1447352
tcatcc

SEQ ID NO: 116570 - DNA, 10 bp, Unknown
  misc_feature (1)..( 10): Result.002 file - promoters60/1447352
tccgtcgtga

SEQ ID NO: 116571 - DNA, 10 bp, Unknown
  misc_feature (1)..( 10): Result.002 file - promoters60/1447352
tccctcgtga

SEQ ID NO: 116572 - DNA, 6 bp, Unknown
  misc_feature (1)..( 6): Result.002 file - promoters60/1447352
aaaacc

SEQ ID NO: 116573 - DNA, 6 bp, Unknown
  misc_feature (1)..( 6): Result.002 file - promoters60/1447352
aaaacc

SEQ ID NO: 116574 - DNA, 6 bp, Unknown
  misc_feature (1)..( 6): Result.002 file - promoters60/1447425
tcaatg

SEQ ID NO: 116575 - DNA, 6 bp, Unknown
  misc_feature (1)..( 6): Result.002 file - promoters60/1447425
tcaatg

SEQ ID NO: 116576 - DNA, 6 bp, Unknown
  misc_feature (1)..( 6): Result.002 file - promoters60/1447425
aaaaga

SEQ ID NO: 116577 - DNA, 6 bp, Unknown
  misc_feature (1)..( 6): Result.002 file - promoters60/1447425
aaaaga

SEQ ID NO: 116578 - DNA, 6 bp, Unknown
  misc_feature (1)..( 6): Result.002 file - promoters60/1447425
aatcaa

SEQ ID NO: 116579 - DNA, 6 bp, Unknown
  misc_feature (1)..( 6): Result.002 file - promoters60/1447425
aatcaa

SEQ ID NO: 116580 - DNA, 7 bp, Unknown
  misc_feature (1)..( 7): Result.002 file - promoters60/1447425
atcataa

SEQ ID NO: 116581 - DNA, 7 bp, Unknown
  misc_feature (1)..( 7): Result.002 file - promoters60/1447425
atcttaa

SEQ ID NO: 116582 - DNA, 8 bp, Unknown
  misc_feature (1)..( 8): Result.002 file - promoters60/1447425
ggatttta

SEQ ID NO: 116583 - DNA, 8 bp, Unknown
  misc_feature (1)..( 8): Result.002 file - promoters60/1447425
ggatgtta

SEQ ID NO: 116584 - DNA, 6 bp, Unknown
  misc_feature (1)..( 6): Result.002 file - promoters60/1447425
ctaatg

SEQ ID NO: 116585 - DNA, 6 bp, Unknown
  misc_feature (1)..( 6): Result.002 file - promoters60/1447425
ctaatg

SEQ ID NO: 116586 - DNA, 10 bp, Unknown
  misc_feature (1)..( 10): Result.002 file - promoters60/1447425
aatttggcgg

SEQ ID NO: 116587 - DNA, 10 bp, Unknown
  misc_feature (1)..( 10): Result.002 file - promoters60/1447425
aatttgatag

SEQ ID NO: 116588 - DNA, 10 bp, Unknown
  misc_feature (1)..( 10): Result.002 file - promoters60/1447425
catttgattt

SEQ ID NO: 116589 - DNA, 7 bp, Unknown
  misc_feature (1)..( 7): Result.002 file - promoters60/1447425
gatccag

SEQ ID NO: 116590 - DNA, 7 bp, Unknown
  misc_feature (1)..( 7): Result.002 file - promoters60/1447425
gatacag

SEQ ID NO: 116591 - DNA, 6 bp, Unknown
  misc_feature (1)..( 6): Result.002 file - promoters60/1447425
attcca

SEQ ID NO: 116592 - DNA, 6 bp, Unknown
  misc_feature (1)..( 6): Result.002 file - promoters60/1447425
attcca

SEQ ID NO: 116593 - DNA, 7 bp, Unknown
  misc_feature (1)..( 7): Result.002 file - promoters60/1447425
aaacctg

SEQ ID NO: 116594 - DNA, 7 bp, Unknown
  misc_feature (1)..( 7): Result.002 file - promoters60/1447425
aaagctg

SEQ ID NO: 116595 - DNA, 6 bp, Unknown
  misc_feature (1)..( 6): Result.002 file - promoters60/1447425
tttgac

SEQ ID NO: 116596 - DNA, 6 bp, Unknown
  misc_feature (1)..( 6): Result.002 file - promoters60/1447425
tttgac

SEQ ID NO: 116597 - DNA, 6 bp, Unknown
  misc_feature (1)..( 6): Result.002 file - promoters60/1447425
acggta

SEQ ID NO: 116598 - DNA, 6 bp, Unknown
  misc_feature (1)..( 6): Result.002 file - promoters60/1447425
acggta

SEQ ID NO: 116599 - DNA, 7 bp, Unknown
  misc_feature (1)..( 7): Result.002 file - promoters60/1447425
tcacgtt

SEQ ID NO: 116600 - DNA, 7 bp, Unknown
  misc_feature (1)..( 7): Result.002 file - promoters60/1447425
tcaagtt

SEQ ID NO: 116601 - DNA, 7 bp, Unknown
  misc_feature (1)..( 7): Result.002 file - promoters60/1447591
attgatt

SEQ ID NO: 116602 - DNA, 7 bp, Unknown
  misc_feature (1)..( 7): Result.002 file - promoters60/1447591
tttgatt

SEQ ID NO: 116603 - DNA, 8 bp, Unknown
  misc_feature (1)..( 8): Result.002 file - promoters60/1447591
tttggatc

SEQ ID NO: 116604 - DNA, 10 bp, Unknown
  misc_feature (1)..( 10): Result.002 file - promoters60/1447591
acttacaaaa

SEQ ID NO: 116605 - DNA, 10 bp, Unknown
  misc_feature (1)..( 10): Result.002 file - promoters60/1447591
acaaacaaaa

SEQ ID NO: 116606 - DNA, 10 bp, Unknown
  misc_feature (1)..( 10): Result.002 file - promoters60/1447591
acagacaaaa

SEQ ID NO: 116607 - DNA, 11 bp, Unknown
  misc_feature (1)..( 11): Result.002 file - promoters60/1447591
aaagacagaac

SEQ ID NO: 116608 - DNA, 11 bp, Unknown
  misc_feature (1)..( 11): Result.002 file - promoters60/1447591
acagacaaaac

SEQ ID NO: 116609 - DNA, 11 bp, Unknown
  misc_feature (1)..( 11): Result.002 file - promoters60/1447591
acaaacaaaaa

SEQ ID NO: 116610 - DNA, 7 bp, Unknown
  misc_feature (1)..( 7): Result.002 file - promoters60/1447591
acaaaaa

SEQ ID NO: 116611 - DNA, 7 bp, Unknown
  misc_feature (1)..( 7): Result.002 file - promoters60/1447591
tcaaaaa

SEQ ID NO: 116612 - DNA, 7 bp, Unknown
  misc_feature (1)..( 7): Result.002 file - promoters60/1447591
acaaaag

SEQ ID NO: 116613 - DNA, 12 bp, Unknown
  misc_feature (1)..( 12): Result.002 file - promoters60/1447646
tgaagaagaaga

SEQ ID NO: 116614 - DNA, 12 bp, Unknown
  misc_feature (1)..( 12): Result.002 file - promoters60/1447646
gaaagatgaatt

SEQ ID NO: 116615 - DNA, 12 bp, Unknown
  misc_feature (1)..( 12): Result.002 file - promoters60/1447646
acaagtagaaga

SEQ ID NO: 116616 - DNA, 12 bp, Unknown
  misc_feature (1)..( 12): Result.002 file - promoters60/1447646
ttaagaagcttt

SEQ ID NO: 116617 - DNA, 12 bp, Unknown
  misc_feature (1)..( 12): Result.002 file - promoters60/1447646
gaaagaagttga

SEQ ID NO: 116618 - DNA, 12 bp, Unknown
  misc_feature (1)..( 12): Result.002 file - promoters60/1447646
ttaagaaatgta

SEQ ID NO: 116619 - DNA, 6 bp, Unknown
  misc_feature (1)..( 6): Result.002 file - promoters60/1447686
acaaac

SEQ ID NO: 116620 - DNA, 6 bp, Unknown
  misc_feature (1)..( 6): Result.002 file - promoters60/1447686
acaaac

SEQ ID NO: 116621 - DNA, 6 bp, Unknown
  misc_feature (1)..( 6): Result.002 file - promoters60/1447686
tttgta

SEQ ID NO: 116622 - DNA, 6 bp, Unknown
  misc_feature (1)..( 6): Result.002 file - promoters60/1447686
tttgta

SEQ ID NO: 116623 - DNA, 6 bp, Unknown
  misc_feature (1)..( 6): Result.002 file - promoters60/1447686
atttta

SEQ ID NO: 116624 - DNA, 6 bp, Unknown
  misc_feature (1)..( 6): Result.002 file - promoters60/1447686
atttta

SEQ ID NO: 116625 - DNA, 7 bp, Unknown
  misc_feature (1)..( 7): Result.002 file - promoters60/1447686
agtgctt

SEQ ID NO: 116626 - DNA, 7 bp, Unknown
  misc_feature (1)..( 7): Result.002 file - promoters60/1447686
agttctt

SEQ ID NO: 116627 - DNA, 7 bp, Unknown
  misc_feature (1)..( 7): Result.002 file - promoters60/1447686
ttaaaaa

SEQ ID NO: 116628 - DNA, 7 bp, Unknown
  misc_feature (1)..( 7): Result.002 file - promoters60/1447686
ttaaaaa

SEQ ID NO: 116629 - DNA, 7 bp, Unknown
  misc_feature (1)..( 7): Result.002 file - promoters60/1447686
atataca

SEQ ID NO: 116630 - DNA, 7 bp, Unknown
  misc_feature (1)..( 7): Result.002 file - promoters60/1447686
ataaaca

SEQ ID NO: 116631 - DNA, 9 bp, Unknown
  misc_feature (1)..( 9): Result.002 file - promoters60/1447686
aatatatgt

SEQ ID NO: 116632 - DNA, 9 bp, Unknown
  misc_feature (1)..( 9): Result.002 file - promoters60/1447686
aatatctgt

SEQ ID NO: 116633 - DNA, 6 bp, Unknown
  misc_feature (1)..( 6): Result.002 file - promoters60/1447686
agaatc

SEQ ID NO: 116634 - DNA, 6 bp, Unknown
  misc_feature (1)..( 6): Result.002 file - promoters60/1447686
agaatc

SEQ ID NO: 116635 - DNA, 7 bp, Unknown
  misc_feature (1)..( 7): Result.002 file - promoters60/1447686
aattaag

SEQ ID NO: 116636 - DNA, 7 bp, Unknown
  misc_feature (1)..( 7): Result.002 file - promoters60/1447686
aattaag

SEQ ID NO: 116637 - DNA, 13 bp, Unknown
  misc_feature (1)..( 13): Result.002 file - promoters60/1447953
aaatgtttgtatt

SEQ ID NO: 116638 - DNA, 13 bp, Unknown
  misc_feature (1)..( 13): Result.002 file - promoters60/1447953
ccacaattgtatt

SEQ ID NO: 116639 - DNA, 13 bp, Unknown
  misc_feature (1)..( 13): Result.002 file - promoters60/1447953
caatctttgtatc

SEQ ID NO: 116640 - DNA, 13 bp, Unknown
  misc_feature (1)..( 13): Result.002 file - promoters60/1447953
caatctttgtttt

SEQ ID NO: 116641 - DNA, 9 bp, Unknown
  misc_feature (1)..( 9): Result.002 file - promoters60/1447953
tatttttga

SEQ ID NO: 116642 - DNA, 9 bp, Unknown
  misc_feature (1)..( 9): Result.002 file - promoters60/1447953
tatttatga

SEQ ID NO: 116643 - DNA, 9 bp, Unknown
  misc_feature (1)..( 9): Result.002 file - promoters60/1447953
tattttaat

SEQ ID NO: 116644 - DNA, 9 bp, Unknown
  misc_feature (1)..( 9): Result.002 file - promoters60/1447953
gattttaca

SEQ ID NO: 116645 - DNA, 9 bp, Unknown
  misc_feature (1)..( 9): Result.002 file - promoters60/1447953
gttcttcat

SEQ ID NO: 116646 - DNA, 9 bp, Unknown
  misc_feature (1)..( 9): Result.002 file - promoters60/1447953
attcatcac

SEQ ID NO: 116647 - DNA, 9 bp, Unknown
  misc_feature (1)..( 9): Result.002 file - promoters60/1447953
attctacat

SEQ ID NO: 116648 - DNA, 9 bp, Unknown
  misc_feature (1)..( 9): Result.002 file - promoters60/1447953
attctaaaa

SEQ ID NO: 116649 - DNA, 8 bp, Unknown
  misc_feature (1)..( 8): Result.002 file - promoters60/1447953
aaaaagaa

SEQ ID NO: 116650 - DNA, 8 bp, Unknown
  misc_feature (1)..( 8): Result.002 file - promoters60/1447953
aaaaagct

SEQ ID NO: 116651 - DNA, 8 bp, Unknown
  misc_feature (1)..( 8): Result.002 file - promoters60/1447953
aaaaaatt

SEQ ID NO: 116652 - DNA, 8 bp, Unknown
  misc_feature (1)..( 8): Result.002 file - promoters60/1447953
aaaatgct

SEQ ID NO: 116653 - DNA, 8 bp, Unknown
  misc_feature (1)..( 8): Result.002 file - promoters60/1447953
atctcttc

SEQ ID NO: 116654 - DNA, 8 bp, Unknown
  misc_feature (1)..( 8): Result.002 file - promoters60/1447953
ttctcttc

SEQ ID NO: 116655 - DNA, 8 bp, Unknown
  misc_feature (1)..( 8): Result.002 file - promoters60/1447953
ttcccttg

SEQ ID NO: 116656 - DNA, 8 bp, Unknown
  misc_feature (1)..( 8): Result.002 file - promoters60/1447953
ctcccttc

SEQ ID NO: 116657 - DNA, 11 bp, Unknown
  misc_feature (1)..( 11): Result.002 file - promoters60/1447953
ttataattatg

SEQ ID NO: 116658 - DNA, 11 bp, Unknown
  misc_feature (1)..( 11): Result.002 file - promoters60/1447953
atattattatt

SEQ ID NO: 116659 - DNA, 11 bp, Unknown
  misc_feature (1)..( 11): Result.002 file - promoters60/1447953
ttataagtata

SEQ ID NO: 116660 - DNA, 11 bp, Unknown
  misc_feature (1)..( 11): Result.002 file - promoters60/1447953
atataagtaac

SEQ ID NO: 116661 - DNA, 11 bp, Unknown
  misc_feature (1)..( 11): Result.002 file - promoters60/1447953
caatctttata

SEQ ID NO: 116662 - DNA, 10 bp, Unknown
  misc_feature (1)..( 10): Result.002 file - promoters60/1447953
tatataaaca

SEQ ID NO: 116663 - DNA, 10 bp, Unknown
  misc_feature (1)..( 10): Result.002 file - promoters60/1447953
tataaaaacc

SEQ ID NO: 116664 - DNA, 10 bp, Unknown
  misc_feature (1)..( 10): Result.002 file - promoters60/1447953
tataaatatc

SEQ ID NO: 116665 - DNA, 10 bp, Unknown
  misc_feature (1)..( 10): Result.002 file - promoters60/1447953
gataaatatc

SEQ ID NO: 116666 - DNA, 9 bp, Unknown
  misc_feature (1)..( 9): Result.002 file - promoters60/1447953
atttagttt

SEQ ID NO: 116667 - DNA, 9 bp, Unknown
  misc_feature (1)..( 9): Result.002 file - promoters60/1447953
atttagatt

SEQ ID NO: 116668 - DNA, 9 bp, Unknown
  misc_feature (1)..( 9): Result.002 file - promoters60/1447953
atataatta

SEQ ID NO: 116669 - DNA, 9 bp, Unknown
  misc_feature (1)..( 9): Result.002 file - promoters60/1447953
ctataattt

SEQ ID NO: 116670 - DNA, 14 bp, Unknown
  misc_feature (1)..( 14): Result.002 file - promoters60/1448022
cttccaaaaatgag

SEQ ID NO: 116671 - DNA, 14 bp, Unknown
  misc_feature (1)..( 14): Result.002 file - promoters60/1448022
taagcaaaaaaaat

SEQ ID NO: 116672 - DNA, 14 bp, Unknown
  misc_feature (1)..( 14): Result.002 file - promoters60/1448022
aataaaaaaatata

SEQ ID NO: 116673 - DNA, 14 bp, Unknown
  misc_feature (1)..( 14): Result.002 file - promoters60/1448022
attaagaaaataaa

SEQ ID NO: 116674 - DNA, 10 bp, Unknown
  misc_feature (1)..( 10): Result.002 file - promoters60/1448022
cacaatggac

SEQ ID NO: 116675 - DNA, 10 bp, Unknown
  misc_feature (1)..( 10): Result.002 file - promoters60/1448022
cacaatgtca

SEQ ID NO: 116676 - DNA, 10 bp, Unknown
  misc_feature (1)..( 10): Result.002 file - promoters60/1448022
aacattgtaa

SEQ ID NO: 116677 - DNA, 10 bp, Unknown
  misc_feature (1)..( 10): Result.002 file - promoters60/1448022
aaaattgtaa

SEQ ID NO: 116678 - DNA, 10 bp, Unknown
  misc_feature (1)..( 10): Result.002 file - promoters60/1448022
ttattaattt

SEQ ID NO: 116679 - DNA, 10 bp, Unknown
  misc_feature (1)..( 10): Result.002 file - promoters60/1448022
atatcaatac

SEQ ID NO: 116680 - DNA, 10 bp, Unknown
  misc_feature (1)..( 10): Result.002 file - promoters60/1448022
ttgttacttt

SEQ ID NO: 116681 - DNA, 10 bp, Unknown
  misc_feature (1)..( 10): Result.002 file - promoters60/1448022
atatcaacat

SEQ ID NO: 116682 - DNA, 10 bp, Unknown
  misc_feature (1)..( 10): Result.002 file - promoters60/1448022
aatttatata

SEQ ID NO: 116683 - DNA, 10 bp, Unknown
  misc_feature (1)..( 10): Result.002 file - promoters60/1448022
tacttatatt

SEQ ID NO: 116684 - DNA, 10 bp, Unknown
  misc_feature (1)..( 10): Result.002 file - promoters60/1448022
attttttatc

SEQ ID NO: 116685 - DNA, 10 bp, Unknown
  misc_feature (1)..( 10): Result.002 file - promoters60/1448022
tacttttatt

SEQ ID NO: 116686 - DNA, 11 bp, Unknown
  misc_feature (1)..( 11): Result.002 file - promoters60/1448022
agttttgtata

SEQ ID NO: 116687 - DNA, 9 bp, Unknown
  misc_feature (1)..( 9): Result.002 file - promoters60/1448022
aatatgtaa

SEQ ID NO: 116688 - DNA, 9 bp, Unknown
  misc_feature (1)..( 9): Result.002 file - promoters60/1448022
aatttgttg

SEQ ID NO: 116689 - DNA, 9 bp, Unknown
  misc_feature (1)..( 9): Result.002 file - promoters60/1448022
tatatataa

SEQ ID NO: 116690 - DNA, 9 bp, Unknown
  misc_feature (1)..( 9): Result.002 file - promoters60/1448022
tatttgtta

SEQ ID NO: 116691 - DNA, 16 bp, Unknown
  misc_feature (1)..( 16): Result.002 file - promoters60/1448022
aaaaaatcaaaatcaa

SEQ ID NO: 116692 - DNA, 16 bp, Unknown
  misc_feature (1)..( 16): Result.002 file - promoters60/1448022
tgtcatttaaaaccaa

SEQ ID NO: 116693 - DNA, 16 bp, Unknown
  misc_feature (1)..( 16): Result.002 file - promoters60/1448022
tgattaataaaaaaat

SEQ ID NO: 116694 - DNA, 16 bp, Unknown
  misc_feature (1)..( 16): Result.002 file - promoters60/1448022
tgattaagaaaataaa

SEQ ID NO: 116695 - DNA, 15 bp, Unknown
  misc_feature (1)..( 15): Result.002 file - promoters60/1448022
ttaagcaaaaaaaat

SEQ ID NO: 116696 - DNA, 15 bp, Unknown
  misc_feature (1)..( 15): Result.002 file - promoters60/1448022
ttaagttaaataaat

SEQ ID NO: 116697 - DNA, 15 bp, Unknown
  misc_feature (1)..( 15): Result.002 file - promoters60/1448022
attaagaaaataaat

SEQ ID NO: 116698 - DNA, 15 bp, Unknown
  misc_feature (1)..( 15): Result.002 file - promoters60/1448022
gattaataaaaaaat

SEQ ID NO: 116699 - DNA, 8 bp, Unknown
  misc_feature (1)..( 8): Result.002 file - promoters60/1448022
tttgtaat

SEQ ID NO: 116700 - DNA, 8 bp, Unknown
  misc_feature (1)..( 8): Result.002 file - promoters60/1448022
attgtaat

SEQ ID NO: 116701 - DNA, 8 bp, Unknown
  misc_feature (1)..( 8): Result.002 file - promoters60/1448022
attgtaaa

SEQ ID NO: 116702 - DNA, 8 bp, Unknown
  misc_feature (1)..( 8): Result.002 file - promoters60/1448022
tttctaac

SEQ ID NO: 116703 - DNA, 9 bp, Unknown
  misc_feature (1)..( 9): Result.002 file - promoters60/1448022
atatattta

SEQ ID NO: 116704 - DNA, 9 bp, Unknown
  misc_feature (1)..( 9): Result.002 file - promoters60/1448022
ataaatttt

SEQ ID NO: 116705 - DNA, 9 bp, Unknown
  misc_feature (1)..( 9): Result.002 file - promoters60/1448022
atagattta

SEQ ID NO: 116706 - DNA, 9 bp, Unknown
  misc_feature (1)..( 9): Result.002 file - promoters60/1448022
tatgattta

SEQ ID NO: 116707 - DNA, 9 bp, Unknown
  misc_feature (1)..( 9): Result.002 file - promoters60/1448022
caatcacaa

SEQ ID NO: 116708 - DNA, 9 bp, Unknown
  misc_feature (1)..( 9): Result.002 file - promoters60/1448022
gtatcccaa

SEQ ID NO: 116709 - DNA, 9 bp, Unknown
  misc_feature (1)..( 9): Result.002 file - promoters60/1448022
caaacaccc

SEQ ID NO: 116710 - DNA, 9 bp, Unknown
  misc_feature (1)..( 9): Result.002 file - promoters60/1448022
ttataccaa

SEQ ID NO: 116711 - DNA, 14 bp, Unknown
  misc_feature (1)..( 14): Result.002 file - promoters60/1448022
gctatatctagcat

SEQ ID NO: 116712 - DNA, 14 bp, Unknown
  misc_feature (1)..( 14): Result.002 file - promoters60/1448022
ctattatttagaat

SEQ ID NO: 116713 - DNA, 14 bp, Unknown
  misc_feature (1)..( 14): Result.002 file - promoters60/1448022
aaagtattcagaag

SEQ ID NO: 116714 - DNA, 14 bp, Unknown
  misc_feature (1)..( 14): Result.002 file - promoters60/1448022
ctatgatttaaaat

SEQ ID NO: 116715 - DNA, 16 bp, Unknown
  misc_feature (1)..( 16): Result.002 file - promoters60/1448022
ctctattgttttgaat

SEQ ID NO: 116716 - DNA, 16 bp, Unknown
  misc_feature (1)..( 16): Result.002 file - promoters60/1448022
aaaaattatttttaat

SEQ ID NO: 116717 - DNA, 16 bp, Unknown
  misc_feature (1)..( 16): Result.002 file - promoters60/1448022
tgattttgttttctaa

SEQ ID NO: 116718 - DNA, 16 bp, Unknown
  misc_feature (1)..( 16): Result.002 file - promoters60/1448022
aaaaattataccaaga

SEQ ID NO: 116719 - DNA, 7 bp, Unknown
  misc_feature (1)..( 7): Result.002 file - promoters60/1448078
ttttttc

SEQ ID NO: 116720 - DNA, 7 bp, Unknown
  misc_feature (1)..( 7): Result.002 file - promoters60/1448078
tttcttc

SEQ ID NO: 116721 - DNA, 8 bp, Unknown
  misc_feature (1)..( 8): Result.002 file - promoters60/1448078
aatttgtc

SEQ ID NO: 116722 - DNA, 8 bp, Unknown
  misc_feature (1)..( 8): Result.002 file - promoters60/1448078
aattagtc

SEQ ID NO: 116723 - DNA, 7 bp, Unknown
  misc_feature (1)..( 7): Result.002 file - promoters60/1448078
cattaaa

SEQ ID NO: 116724 - DNA, 7 bp, Unknown
  misc_feature (1)..( 7): Result.002 file - promoters60/1448078
cataaaa

SEQ ID NO: 116725 - DNA, 6 bp, Unknown
  misc_feature (1)..( 6): Result.002 file - promoters60/1448078
aagaag

SEQ ID NO: 116726 - DNA, 6 bp, Unknown
  misc_feature (1)..( 6): Result.002 file - promoters60/1448078
aagaag

SEQ ID NO: 116727 - DNA, 6 bp, Unknown
  misc_feature (1)..( 6): Result.002 file - promoters60/1448078
ccatct

SEQ ID NO: 116728 - DNA, 6 bp, Unknown
  misc_feature (1)..( 6): Result.002 file - promoters60/1448078
ccatct

SEQ ID NO: 116729 - DNA, 6 bp, Unknown
  misc_feature (1)..( 6): Result.002 file - promoters60/1448078
tcactt

SEQ ID NO: 116730 - DNA, 6 bp, Unknown
  misc_feature (1)..( 6): Result.002 file - promoters60/1448078
tcactt

SEQ ID NO: 116731 - DNA, 6 bp, Unknown
  misc_feature (1)..( 6): Result.002 file - promoters60/1448078
tttgat

SEQ ID NO: 116732 - DNA, 6 bp, Unknown
  misc_feature (1)..( 6): Result.002 file - promoters60/1448078
tttgat

SEQ ID NO: 116733 - DNA, 6 bp, Unknown
  misc_feature (1)..( 6): Result.002 file - promoters60/1448078
ttctct

SEQ ID NO: 116734 - DNA, 6 bp, Unknown
  misc_feature (1)..( 6): Result.002 file - promoters60/1448078
ttctct

SEQ ID NO: 116735 - DNA, 6 bp, Unknown
  misc_feature (1)..( 6): Result.002 file - promoters60/1448078
ctcttt

SEQ ID NO: 116736 - DNA, 6 bp, Unknown
  misc_feature (1)..( 6): Result.002 file - promoters60/1448078
ctcttt

SEQ ID NO: 116737 - DNA, 8 bp, Unknown
  misc_feature (1)..( 8): Result.002 file - promoters60/1448078
ctcttttt

SEQ ID NO: 116738 - DNA, 8 bp, Unknown
  misc_feature (1)..( 8): Result.002 file - promoters60/1448078
ctctcttt

SEQ ID NO: 116739 - DNA, 10 bp, Unknown
  misc_feature (1)..( 10): Result.002 file - promoters60/1448078
ttttgattcg

SEQ ID NO: 116740 - DNA, 10 bp, Unknown
  misc_feature (1)..( 10): Result.002 file - promoters60/1448078
ttttgattcc

SEQ ID NO: 116741 - DNA, 10 bp, Unknown
  misc_feature (1)..( 10): Result.002 file - promoters60/1448078
caatgatttg

SEQ ID NO: 116742 - DNA, 6 bp, Unknown
  misc_feature (1)..( 6): Result.002 file - promoters60/1448078
tttcca

SEQ ID NO: 116743 - DNA, 6 bp, Unknown
  misc_feature (1)..( 6): Result.002 file - promoters60/1448078
tttcca

SEQ ID NO: 116744 - DNA, 6 bp, Unknown
  misc_feature (1)..( 6): Result.002 file - promoters60/1448078
aaagat

SEQ ID NO: 116745 - DNA, 6 bp, Unknown
  misc_feature (1)..( 6): Result.002 file - promoters60/1448078
aaagat

SEQ ID NO: 116746 - DNA, 6 bp, Unknown
  misc_feature (1)..( 6): Result.002 file - promoters60/1448078
ctttaa

SEQ ID NO: 116747 - DNA, 6 bp, Unknown
  misc_feature (1)..( 6): Result.002 file - promoters60/1448078
ctttaa

SEQ ID NO: 116748 - DNA, 8 bp, Unknown
  misc_feature (1)..( 8): Result.002 file - promoters60/1448078
tttccttt

SEQ ID NO: 116749 - DNA, 8 bp, Unknown
  misc_feature (1)..( 8): Result.002 file - promoters60/1448078
tttcattt

SEQ ID NO: 116750 - DNA, 6 bp, Unknown
  misc_feature (1)..( 6): Result.002 file - promoters60/1448078
tcttct

SEQ ID NO: 116751 - DNA, 6 bp, Unknown
  misc_feature (1)..( 6): Result.002 file - promoters60/1448078
tcttct

SEQ ID NO: 116752 - DNA, 8 bp, Unknown
  misc_feature (1)..( 8): Result.002 file - promoters60/1448078
tttattaa

SEQ ID NO: 116753 - DNA, 8 bp, Unknown
  misc_feature (1)..( 8): Result.002 file - promoters60/1448078
tttattaa

SEQ ID NO: 116754 - DNA, 10 bp, Unknown
  misc_feature (1)..( 10): Result.002 file - promoters60/1448078
aactttatta

SEQ ID NO: 116755 - DNA, 10 bp, Unknown
  misc_feature (1)..( 10): Result.002 file - promoters60/1448078
aactttactt

SEQ ID NO: 116756 - DNA, 10 bp, Unknown
  misc_feature (1)..( 10): Result.002 file - promoters60/1448078
tccttttctt

SEQ ID NO: 116757 - DNA, 7 bp, Unknown
  misc_feature (1)..( 7): Result.002 file - promoters60/1448078
aaaaaaa

SEQ ID NO: 116758 - DNA, 7 bp, Unknown
  misc_feature (1)..( 7): Result.002 file - promoters60/1448078
aaagaaa

SEQ ID NO: 116759 - DNA, 7 bp, Unknown
  misc_feature (1)..( 7): Result.002 file - promoters60/1448078
acacaaa

SEQ ID NO: 116760 - DNA, 7 bp, Unknown
  misc_feature (1)..( 7): Result.002 file - promoters60/1448078
acagaaa

SEQ ID NO: 116761 - DNA, 6 bp, Unknown
  misc_feature (1)..( 6): Result.002 file - promoters60/1448078
aaaaat

SEQ ID NO: 116762 - DNA, 6 bp, Unknown
  misc_feature (1)..( 6): Result.002 file - promoters60/1448078
aaaaat

SEQ ID NO: 116763 - DNA, 9 bp, Unknown
  misc_feature (1)..( 9): Result.002 file - promoters60/1448078
aaataaaaa

SEQ ID NO: 116764 - DNA, 9 bp, Unknown
  misc_feature (1)..( 9): Result.002 file - promoters60/1448078
aaagaaaaa

SEQ ID NO: 116765 - DNA, 8 bp, Unknown
  misc_feature (1)..( 8): Result.002 file - promoters60/1448078
attatata

SEQ ID NO: 116766 - DNA, 8 bp, Unknown
  misc_feature (1)..( 8): Result.002 file - promoters60/1448078
attagata

SEQ ID NO: 116767 - DNA, 7 bp, Unknown
  misc_feature (1)..( 7): Result.002 file - promoters60/1448078
atttccc

SEQ ID NO: 116768 - DNA, 7 bp, Unknown
  misc_feature (1)..( 7): Result.002 file - promoters60/1448078
attaccc

SEQ ID NO: 116769 - DNA, 6 bp, Unknown
  misc_feature (1)..( 6): Result.002 file - promoters60/1448078
aagaga

SEQ ID NO: 116770 - DNA, 6 bp, Unknown
  misc_feature (1)..( 6): Result.002 file - promoters60/1448078
aagaga

SEQ ID NO: 116771 - DNA, 8 bp, Unknown
  misc_feature (1)..( 8): Result.002 file - promoters60/1448105
ataaataa

SEQ ID NO: 116772 - DNA, 8 bp, Unknown
  misc_feature (1)..( 8): Result.002 file - promoters60/1448105
atatataa

SEQ ID NO: 116773 - DNA, 6 bp, Unknown
  misc_feature (1)..( 6): Result.002 file - promoters60/1448105
aattat

SEQ ID NO: 116774 - DNA, 6 bp, Unknown
  misc_feature (1)..( 6): Result.002 file - promoters60/1448105
aattat

SEQ ID NO: 116775 - DNA, 6 bp, Unknown
  misc_feature (1)..( 6): Result.002 file - promoters60/1448105
tttgtt

SEQ ID NO: 116776 - DNA, 6 bp, Unknown
  misc_feature (1)..( 6): Result.002 file - promoters60/1448105
tttgtt

SEQ ID NO: 116777 - DNA, 6 bp, Unknown
  misc_feature (1)..( 6): Result.002 file - promoters60/1448105
aaattg

SEQ ID NO: 116778 - DNA, 6 bp, Unknown
  misc_feature (1)..( 6): Result.002 file - promoters60/1448105
aaattg

SEQ ID NO: 116779 - DNA, 7 bp, Unknown
  misc_feature (1)..( 7): Result.002 file - promoters60/1448105
aaaaatt

SEQ ID NO: 116780 - DNA, 7 bp, Unknown
  misc_feature (1)..( 7): Result.002 file - promoters60/1448105
aaaaatt

SEQ ID NO: 116781 - DNA, 6 bp, Unknown
  misc_feature (1)..( 6): Result.002 file - promoters60/1448105
tttgat

SEQ ID NO: 116782 - DNA, 6 bp, Unknown
  misc_feature (1)..( 6): Result.002 file - promoters60/1448105
tttgat

SEQ ID NO: 116783 - DNA, 6 bp, Unknown
  misc_feature (1)..( 6): Result.002 file - promoters60/1448105
tcaaat

SEQ ID NO: 116784 - DNA, 6 bp, Unknown
  misc_feature (1)..( 6): Result.002 file - promoters60/1448105
tcaaat

SEQ ID NO: 116785 - DNA, 9 bp, Unknown
  misc_feature (1)..( 9): Result.002 file - promoters60/1448105
taaatatga

SEQ ID NO: 116786 - DNA, 9 bp, Unknown
  misc_feature (1)..( 9): Result.002 file - promoters60/1448105
caaagatga

SEQ ID NO: 116787 - DNA, 9 bp, Unknown
  misc_feature (1)..( 9): Result.002 file - promoters60/1448105
taaataagt

SEQ ID NO: 116788 - DNA, 7 bp, Unknown
  misc_feature (1)..( 7): Result.002 file - promoters60/1448105
aatactt

SEQ ID NO: 116789 - DNA, 7 bp, Unknown
  misc_feature (1)..( 7): Result.002 file - promoters60/1448105
aatactt

SEQ ID NO: 116790 - DNA, 7 bp, Unknown
  misc_feature (1)..( 7): Result.002 file - promoters60/1448105
aaactct

SEQ ID NO: 116791 - DNA, 7 bp, Unknown
  misc_feature (1)..( 7): Result.002 file - promoters60/1448105
aaagtct

SEQ ID NO: 116792 - DNA, 6 bp, Unknown
  misc_feature (1)..( 6): Result.002 file - promoters60/1448105
gttttt

SEQ ID NO: 116793 - DNA, 6 bp, Unknown
  misc_feature (1)..( 6): Result.002 file - promoters60/1448105
gttttt

SEQ ID NO: 116794 - DNA, 8 bp, Unknown
  misc_feature (1)..( 8): Result.002 file - promoters60/1448105
gaaacaga

SEQ ID NO: 116795 - DNA, 8 bp, Unknown
  misc_feature (1)..( 8): Result.002 file - promoters60/1448105
gaaacaga

SEQ ID NO: 116796 - DNA, 7 bp, Unknown
  misc_feature (1)..( 7): Result.002 file - promoters60/1448105
aaagctt

SEQ ID NO: 116797 - DNA, 7 bp, Unknown
  misc_feature (1)..( 7): Result.002 file - promoters60/1448105
aaagctt

SEQ ID NO: 116798 - DNA, 8 bp, Unknown
  misc_feature (1)..( 8): Result.002 file - promoters60/1448105
aatttgat

SEQ ID NO: 116799 - DNA, 8 bp, Unknown
  misc_feature (1)..( 8): Result.002 file - promoters60/1448105
aatatgat

SEQ ID NO: 116800 - DNA, 7 bp, Unknown
  misc_feature (1)..( 7): Result.002 file - promoters60/1448105
ctcaaca

SEQ ID NO: 116801 - DNA, 7 bp, Unknown
  misc_feature (1)..( 7): Result.002 file - promoters60/1448105
ctccaca

SEQ ID NO: 116802 - DNA, 8 bp, Unknown
  misc_feature (1)..( 8): Result.002 file - promoters60/1448105
ataaaaca

SEQ ID NO: 116803 - DNA, 8 bp, Unknown
  misc_feature (1)..( 8): Result.002 file - promoters60/1448105
ataagaca

SEQ ID NO: 116804 - DNA, 8 bp, Unknown
  misc_feature (1)..( 8): Result.002 file - promoters60/1448105
tatatttt

SEQ ID NO: 116805 - DNA, 8 bp, Unknown
  misc_feature (1)..( 8): Result.002 file - promoters60/1448105
tatttttt

SEQ ID NO: 116806 - DNA, 6 bp, Unknown
  misc_feature (1)..( 6): Result.002 file - promoters60/1448105
tatttc

SEQ ID NO: 116807 - DNA, 6 bp, Unknown
  misc_feature (1)..( 6): Result.002 file - promoters60/1448105
tatttc

SEQ ID NO: 116808 - DNA, 8 bp, Unknown
  misc_feature (1)..( 8): Result.002 file - promoters60/1448105
atcatgaa

SEQ ID NO: 116809 - DNA, 8 bp, Unknown
  misc_feature (1)..( 8): Result.002 file - promoters60/1448105
atcaggaa

SEQ ID NO: 116810 - DNA, 8 bp, Unknown
  misc_feature (1)..( 8): Result.002 file - promoters60/1448105
tttaaaag

SEQ ID NO: 116811 - DNA, 8 bp, Unknown
  misc_feature (1)..( 8): Result.002 file - promoters60/1448105
tttaaaag

SEQ ID NO: 116812 - DNA, 6 bp, Unknown
  misc_feature (1)..( 6): Result.002 file - promoters60/1448105
aggttt

SEQ ID NO: 116813 - DNA, 6 bp, Unknown
  misc_feature (1)..( 6): Result.002 file - promoters60/1448105
aggttt

SEQ ID NO: 116814 - DNA, 9 bp, Unknown
  misc_feature (1)..( 9): Result.002 file - promoters60/1448135
tatcttcct

SEQ ID NO: 116815 - DNA, 9 bp, Unknown
  misc_feature (1)..( 9): Result.002 file - promoters60/1448135
aatcctcca

SEQ ID NO: 116816 - DNA, 9 bp, Unknown
  misc_feature (1)..( 9): Result.002 file - promoters60/1448135
tagcttcct

SEQ ID NO: 116817 - DNA, 9 bp, Unknown
  misc_feature (1)..( 9): Result.002 file - promoters60/1448135
aattctcta

SEQ ID NO: 116818 - DNA, 10 bp, Unknown
  misc_feature (1)..( 10): Result.002 file - promoters60/1448135
tgaatgatat

SEQ ID NO: 116819 - DNA, 10 bp, Unknown
  misc_feature (1)..( 10): Result.002 file - promoters60/1448135
tgaatgatga

SEQ ID NO: 116820 - DNA, 10 bp, Unknown
  misc_feature (1)..( 10): Result.002 file - promoters60/1448135
aaaattatat

SEQ ID NO: 116821 - DNA, 10 bp, Unknown
  misc_feature (1)..( 10): Result.002 file - promoters60/1448135
gatattatag

SEQ ID NO: 116822 - DNA, 9 bp, Unknown
  misc_feature (1)..( 9): Result.002 file - promoters60/1448135
atgaataat

SEQ ID NO: 116823 - DNA, 9 bp, Unknown
  misc_feature (1)..( 9): Result.002 file - promoters60/1448135
aagaataaa

SEQ ID NO: 116824 - DNA, 9 bp, Unknown
  misc_feature (1)..( 9): Result.002 file - promoters60/1448135
aagaagaaa

SEQ ID NO: 116825 - DNA, 10 bp, Unknown
  misc_feature (1)..( 10): Result.002 file - promoters60/1448135
gttaatcaaa

SEQ ID NO: 116826 - DNA, 10 bp, Unknown
  misc_feature (1)..( 10): Result.002 file - promoters60/1448135
tatgtaagca

SEQ ID NO: 116827 - DNA, 10 bp, Unknown
  misc_feature (1)..( 10): Result.002 file - promoters60/1448135
tatttaaagc

SEQ ID NO: 116828 - DNA, 10 bp, Unknown
  misc_feature (1)..( 10): Result.002 file - promoters60/1448135
cattcaaagc

SEQ ID NO: 116829 - DNA, 10 bp, Unknown
  misc_feature (1)..( 10): Result.002 file - promoters60/1448135
ttttcaagtt

SEQ ID NO: 116830 - DNA, 10 bp, Unknown
  misc_feature (1)..( 10): Result.002 file - promoters60/1448185
aaggttggat

SEQ ID NO: 116831 - DNA, 10 bp, Unknown
  misc_feature (1)..( 10): Result.002 file - promoters60/1448185
aaggttggat

SEQ ID NO: 116832 - DNA, 6 bp, Unknown
  misc_feature (1)..( 6): Result.002 file - promoters60/1448185
ggataa

SEQ ID NO: 116833 - DNA, 6 bp, Unknown
  misc_feature (1)..( 6): Result.002 file - promoters60/1448185
ggataa

SEQ ID NO: 116834 - DNA, 7 bp, Unknown
  misc_feature (1)..( 7): Result.002 file - promoters60/1448185
gtagtaa

SEQ ID NO: 116835 - DNA, 7 bp, Unknown
  misc_feature (1)..( 7): Result.002 file - promoters60/1448185
gtaataa

SEQ ID NO: 116836 - DNA, 7 bp, Unknown
  misc_feature (1)..( 7): Result.002 file - promoters60/1448185
gatcctc

SEQ ID NO: 116837 - DNA, 7 bp, Unknown
  misc_feature (1)..( 7): Result.002 file - promoters60/1448185
gattctc

SEQ ID NO: 116838 - DNA, 9 bp, Unknown
  misc_feature (1)..( 9): Result.002 file - promoters60/1448185
atctcgatt

SEQ ID NO: 116839 - DNA, 9 bp, Unknown
  misc_feature (1)..( 9): Result.002 file - promoters60/1448185
atcttgatt

SEQ ID NO: 116840 - DNA, 7 bp, Unknown
  misc_feature (1)..( 7): Result.002 file - promoters60/1448185
aaagctt

SEQ ID NO: 116841 - DNA, 7 bp, Unknown
  misc_feature (1)..( 7): Result.002 file - promoters60/1448185
aaagctt

SEQ ID NO: 116842 - DNA, 6 bp, Unknown
  misc_feature (1)..( 6): Result.002 file - promoters60/1448185
atctac

SEQ ID NO: 116843 - DNA, 6 bp, Unknown
  misc_feature (1)..( 6): Result.002 file - promoters60/1448185
atctac

SEQ ID NO: 116844 - DNA, 7 bp, Unknown
  misc_feature (1)..( 7): Result.002 file - promoters60/1448185
tcataat

SEQ ID NO: 116845 - DNA, 7 bp, Unknown
  misc_feature (1)..( 7): Result.002 file - promoters60/1448185
tcataat

SEQ ID NO: 116846 - DNA, 6 bp, Unknown
  misc_feature (1)..( 6): Result.002 file - promoters60/1448185
attgtt

SEQ ID NO: 116847 - DNA, 6 bp, Unknown
  misc_feature (1)..( 6): Result.002 file - promoters60/1448185
attgtt

SEQ ID NO: 116848 - DNA, 9 bp, Unknown
  misc_feature (1)..( 9): Result.002 file - promoters60/1448231
tcaaatcga

SEQ ID NO: 116849 - DNA, 9 bp, Unknown
  misc_feature (1)..( 9): Result.002 file - promoters60/1448231
tcaaatttg

SEQ ID NO: 116850 - DNA, 9 bp, Unknown
  misc_feature (1)..( 9): Result.002 file - promoters60/1448231
tcaattttg

SEQ ID NO: 116851 - DNA, 9 bp, Unknown
  misc_feature (1)..( 9): Result.002 file - promoters60/1448231
acaattttt

SEQ ID NO: 116852 - DNA, 7 bp, Unknown
  misc_feature (1)..( 7): Result.002 file - promoters60/1448231
gaatcag

SEQ ID NO: 116853 - DNA, 7 bp, Unknown
  misc_feature (1)..( 7): Result.002 file - promoters60/1448231
aaatcag

SEQ ID NO: 116854 - DNA, 7 bp, Unknown
  misc_feature (1)..( 7): Result.002 file - promoters60/1448231
gaatcac

SEQ ID NO: 116855 - DNA, 7 bp, Unknown
  misc_feature (1)..( 7): Result.002 file - promoters60/1448231
aaaacag

SEQ ID NO: 116856 - DNA, 9 bp, Unknown
  misc_feature (1)..( 9): Result.002 file - promoters60/1448231
attctaaac

SEQ ID NO: 116857 - DNA, 9 bp, Unknown
  misc_feature (1)..( 9): Result.002 file - promoters60/1448231
tttcttaac

SEQ ID NO: 116858 - DNA, 9 bp, Unknown
  misc_feature (1)..( 9): Result.002 file - promoters60/1448231
attttaacc

SEQ ID NO: 116859 - DNA, 9 bp, Unknown
  misc_feature (1)..( 9): Result.002 file - promoters60/1448231
atgcttaac

SEQ ID NO: 116860 - DNA, 10 bp, Unknown
  misc_feature (1)..( 10): Result.002 file - promoters60/1448231
acaaagtatc

SEQ ID NO: 116861 - DNA, 10 bp, Unknown
  misc_feature (1)..( 10): Result.002 file - promoters60/1448231
taaaagaatc

SEQ ID NO: 116862 - DNA, 10 bp, Unknown
  misc_feature (1)..( 10): Result.002 file - promoters60/1448231
tgaaagaagg

SEQ ID NO: 116863 - DNA, 10 bp, Unknown
  misc_feature (1)..( 10): Result.002 file - promoters60/1448231
taaaagagaa

SEQ ID NO: 116864 - DNA, 14 bp, Unknown
  misc_feature (1)..( 14): Result.002 file - promoters60/1448231
atcgaatcagctaa

SEQ ID NO: 116865 - DNA, 14 bp, Unknown
  misc_feature (1)..( 14): Result.002 file - promoters60/1448231
tatgaatctgctaa

SEQ ID NO: 116866 - DNA, 14 bp, Unknown
  misc_feature (1)..( 14): Result.002 file - promoters60/1448231
tatgaatcatgtca

SEQ ID NO: 116867 - DNA, 14 bp, Unknown
  misc_feature (1)..( 14): Result.002 file - promoters60/1448231
atcaattttgctaa

SEQ ID NO: 116868 - DNA, 8 bp, Unknown
  misc_feature (1)..( 8): Result.002 file - promoters60/1448231
caaaagag

SEQ ID NO: 116869 - DNA, 8 bp, Unknown
  misc_feature (1)..( 8): Result.002 file - promoters60/1448231
caaatgag

SEQ ID NO: 116870 - DNA, 8 bp, Unknown
  misc_feature (1)..( 8): Result.002 file - promoters60/1448231
taaaagat

SEQ ID NO: 116871 - DNA, 8 bp, Unknown
  misc_feature (1)..( 8): Result.002 file - promoters60/1448231
caaatgca

SEQ ID NO: 116872 - DNA, 10 bp, Unknown
  misc_feature (1)..( 10): Result.002 file - promoters60/1448231
cggttgattt

SEQ ID NO: 116873 - DNA, 10 bp, Unknown
  misc_feature (1)..( 10): Result.002 file - promoters60/1448231
tgtttgatta

SEQ ID NO: 116874 - DNA, 10 bp, Unknown
  misc_feature (1)..( 10): Result.002 file - promoters60/1448231
gatttgattt

SEQ ID NO: 116875 - DNA, 10 bp, Unknown
  misc_feature (1)..( 10): Result.002 file - promoters60/1448231
tgtttaattt

SEQ ID NO: 116876 - DNA, 11 bp, Unknown
  misc_feature (1)..( 11): Result.002 file - promoters60/1448231
tttgtctcaat

SEQ ID NO: 116877 - DNA, 11 bp, Unknown
  misc_feature (1)..( 11): Result.002 file - promoters60/1448231
tttttctaaaa

SEQ ID NO: 116878 - DNA, 11 bp, Unknown
  misc_feature (1)..( 11): Result.002 file - promoters60/1448231
ttttgctaaaa

SEQ ID NO: 116879 - DNA, 11 bp, Unknown
  misc_feature (1)..( 11): Result.002 file - promoters60/1448231
atctgctaatg

SEQ ID NO: 116880 - DNA, 10 bp, Unknown
  misc_feature (1)..( 10): Result.002 file - promoters60/1448231
tcgagagtat

SEQ ID NO: 116881 - DNA, 10 bp, Unknown
  misc_feature (1)..( 10): Result.002 file - promoters60/1448231
aacagagtaa

SEQ ID NO: 116882 - DNA, 10 bp, Unknown
  misc_feature (1)..( 10): Result.002 file - promoters60/1448231
ttgagggtac

SEQ ID NO: 116883 - DNA, 10 bp, Unknown
  misc_feature (1)..( 10): Result.002 file - promoters60/1448231
aacagaataa

SEQ ID NO: 116884 - DNA, 9 bp, Unknown
  misc_feature (1)..( 9): Result.002 file - promoters60/1448235
cttgtgttt

SEQ ID NO: 116885 - DNA, 9 bp, Unknown
  misc_feature (1)..( 9): Result.002 file - promoters60/1448235
cttctgttt

SEQ ID NO: 116886 - DNA, 12 bp, Unknown
  misc_feature (1)..( 12): Result.002 file - promoters60/1448235
tttcatctatct

SEQ ID NO: 116887 - DNA, 12 bp, Unknown
  misc_feature (1)..( 12): Result.002 file - promoters60/1448235
tttgatctctct

SEQ ID NO: 116888 - DNA, 11 bp, Unknown
  misc_feature (1)..( 11): Result.002 file - promoters60/1448235
caattggatat

SEQ ID NO: 116889 - DNA, 11 bp, Unknown
  misc_feature (1)..( 11): Result.002 file - promoters60/1448235
caattcgatat

SEQ ID NO: 116890 - DNA, 6 bp, Unknown
  misc_feature (1)..( 6): Result.002 file - promoters60/1448235
gttttt

SEQ ID NO: 116891 - DNA, 6 bp, Unknown
  misc_feature (1)..( 6): Result.002 file - promoters60/1448235
gttttt

SEQ ID NO: 116892 - DNA, 6 bp, Unknown
  misc_feature (1)..( 6): Result.002 file - promoters60/1448235
tataaa

SEQ ID NO: 116893 - DNA, 6 bp, Unknown
  misc_feature (1)..( 6): Result.002 file - promoters60/1448235
tataaa

SEQ ID NO: 116894 - DNA, 13 bp, Unknown
  misc_feature (1)..( 13): Result.002 file - promoters60/1448235
aaattcaaattta

SEQ ID NO: 116895 - DNA, 13 bp, Unknown
  misc_feature (1)..( 13): Result.002 file - promoters60/1448235
aaattaaaactta

SEQ ID NO: 116896 - DNA, 6 bp, Unknown
  misc_feature (1)..( 6): Result.002 file - promoters60/1448235
tttttt

SEQ ID NO: 116897 - DNA, 6 bp, Unknown
  misc_feature (1)..( 6): Result.002 file - promoters60/1448235
tttttt

SEQ ID NO: 116898 - DNA, 8 bp, Unknown
  misc_feature (1)..( 8): Result.002 file - promoters60/1448235
acaaataa

SEQ ID NO: 116899 - DNA, 8 bp, Unknown
  misc_feature (1)..( 8): Result.002 file - promoters60/1448235
acaaataa

SEQ ID NO: 116900 - DNA, 7 bp, Unknown
  misc_feature (1)..( 7): Result.002 file - promoters60/1448235
tttgacc

SEQ ID NO: 116901 - DNA, 7 bp, Unknown
  misc_feature (1)..( 7): Result.002 file - promoters60/1448235
ttttacc

SEQ ID NO: 116902 - DNA, 8 bp, Unknown
  misc_feature (1)..( 8): Result.002 file - promoters60/1448235
tcaaatct

SEQ ID NO: 116903 - DNA, 8 bp, Unknown
  misc_feature (1)..( 8): Result.002 file - promoters60/1448235
tcaagtct

SEQ ID NO: 116904 - DNA, 8 bp, Unknown
  misc_feature (1)..( 8): Result.002 file - promoters60/1448235
atctcaag

SEQ ID NO: 116905 - DNA, 8 bp, Unknown
  misc_feature (1)..( 8): Result.002 file - promoters60/1448235
atctaaag

SEQ ID NO: 116906 - DNA, 6 bp, Unknown
  misc_feature (1)..( 6): Result.002 file - promoters60/1448235
caatct

SEQ ID NO: 116907 - DNA, 6 bp, Unknown
  misc_feature (1)..( 6): Result.002 file - promoters60/1448235
caatct

SEQ ID NO: 116908 - DNA, 8 bp, Unknown
  misc_feature (1)..( 8): Result.002 file - promoters60/1448235
agacgaag

SEQ ID NO: 116909 - DNA, 8 bp, Unknown
  misc_feature (1)..( 8): Result.002 file - promoters60/1448235
agaggaag

SEQ ID NO: 116910 - DNA, 6 bp, Unknown
  misc_feature (1)..( 6): Result.002 file - promoters60/1448235
atctac

SEQ ID NO: 116911 - DNA, 6 bp, Unknown
  misc_feature (1)..( 6): Result.002 file - promoters60/1448235
atctac

SEQ ID NO: 116912 - DNA, 7 bp, Unknown
  misc_feature (1)..( 7): Result.002 file - promoters60/1448235
ttttttt

SEQ ID NO: 116913 - DNA, 7 bp, Unknown
  misc_feature (1)..( 7): Result.002 file - promoters60/1448235
ttttttt

SEQ ID NO: 116914 - DNA, 9 bp, Unknown
  misc_feature (1)..( 9): Result.002 file - promoters60/1448251
aaagtaatc

SEQ ID NO: 116915 - DNA, 9 bp, Unknown
  misc_feature (1)..( 9): Result.002 file - promoters60/1448251
aaaataatc

SEQ ID NO: 116916 - DNA, 9 bp, Unknown
  misc_feature (1)..( 9): Result.002 file - promoters60/1448251
ctaagtttt

SEQ ID NO: 116917 - DNA, 9 bp, Unknown
  misc_feature (1)..( 9): Result.002 file - promoters60/1448251
ctaggtttt

SEQ ID NO: 116918 - DNA, 9 bp, Unknown
  misc_feature (1)..( 9): Result.002 file - promoters60/1448251
tgaagtttt

SEQ ID NO: 116919 - DNA, 10 bp, Unknown
  misc_feature (1)..( 10): Result.002 file - promoters60/1448251
aaataaaaat

SEQ ID NO: 116920 - DNA, 10 bp, Unknown
  misc_feature (1)..( 10): Result.002 file - promoters60/1448251
aaaaaaaaat

SEQ ID NO: 116921 - DNA, 7 bp, Unknown
  misc_feature (1)..( 7): Result.002 file - promoters60/1448251
agtttat

SEQ ID NO: 116922 - DNA, 7 bp, Unknown
  misc_feature (1)..( 7): Result.002 file - promoters60/1448251
agtatat

SEQ ID NO: 116923 - DNA, 7 bp, Unknown
  misc_feature (1)..( 7): Result.002 file - promoters60/1448251
agacaaa

SEQ ID NO: 116924 - DNA, 7 bp, Unknown
  misc_feature (1)..( 7): Result.002 file - promoters60/1448251
agataaa

SEQ ID NO: 116925 - DNA, 8 bp, Unknown
  misc_feature (1)..( 8): Result.002 file - promoters60/1448251
aaaaaatt

SEQ ID NO: 116926 - DNA, 8 bp, Unknown
  misc_feature (1)..( 8): Result.002 file - promoters60/1448251
aaacaatt

SEQ ID NO: 116927 - DNA, 9 bp, Unknown
  misc_feature (1)..( 9): Result.002 file - promoters60/1448251
tatttttag

SEQ ID NO: 116928 - DNA, 9 bp, Unknown
  misc_feature (1)..( 9): Result.002 file - promoters60/1448251
tattattag

SEQ ID NO: 116929 - DNA, 12 bp, Unknown
  misc_feature (1)..( 12): Result.002 file - promoters60/1448251
tttagatgaatt

SEQ ID NO: 116930 - DNA, 12 bp, Unknown
  misc_feature (1)..( 12): Result.002 file - promoters60/1448251
tttaggtgaaac

SEQ ID NO: 116931 - DNA, 12 bp, Unknown
  misc_feature (1)..( 12): Result.002 file - promoters60/1448251
cacttatggatt

SEQ ID NO: 116932 - DNA, 7 bp, Unknown
  misc_feature (1)..( 7): Result.002 file - promoters60/1448251
ggaataa

SEQ ID NO: 116933 - DNA, 7 bp, Unknown
  misc_feature (1)..( 7): Result.002 file - promoters60/1448251
ggattaa

SEQ ID NO: 116934 - DNA, 7 bp, Unknown
  misc_feature (1)..( 7): Result.002 file - promoters60/1448251
ataatta

SEQ ID NO: 116935 - DNA, 7 bp, Unknown
  misc_feature (1)..( 7): Result.002 file - promoters60/1448251
atactta

SEQ ID NO: 116936 - DNA, 11 bp, Unknown
  misc_feature (1)..( 11): Result.002 file - promoters60/1448251
ataaactaaaa

SEQ ID NO: 116937 - DNA, 11 bp, Unknown
  misc_feature (1)..( 11): Result.002 file - promoters60/1448251
atatactcaaa

SEQ ID NO: 116938 - DNA, 9 bp, Unknown
  misc_feature (1)..( 9): Result.002 file - promoters60/1448251
aaataacat

SEQ ID NO: 116939 - DNA, 9 bp, Unknown
  misc_feature (1)..( 9): Result.002 file - promoters60/1448251
aaaaaacat

SEQ ID NO: 116940 - DNA, 6 bp, Unknown
  misc_feature (1)..( 6): Result.002 file - promoters60/1448251
atttta

SEQ ID NO: 116941 - DNA, 6 bp, Unknown
  misc_feature (1)..( 6): Result.002 file - promoters60/1448251
atttta

SEQ ID NO: 116942 - DNA, 6 bp, Unknown
  misc_feature (1)..( 6): Result.002 file - promoters60/1448251
ttttat

SEQ ID NO: 116943 - DNA, 6 bp, Unknown
  misc_feature (1)..( 6): Result.002 file - promoters60/1448251
ttttat

SEQ ID NO: 116944 - DNA, 7 bp, Unknown
  misc_feature (1)..( 7): Result.002 file - promoters60/1448251
tcattta

SEQ ID NO: 116945 - DNA, 7 bp, Unknown
  misc_feature (1)..( 7): Result.002 file - promoters60/1448251
tcactta

SEQ ID NO: 116946 - DNA, 6 bp, Unknown
  misc_feature (1)..( 6): Result.002 file - promoters60/1448251
aaattt

SEQ ID NO: 116947 - DNA, 6 bp, Unknown
  misc_feature (1)..( 6): Result.002 file - promoters60/1448251
aaattt

SEQ ID NO: 116948 - DNA, 7 bp, Unknown
  misc_feature (1)..( 7): Result.002 file - promoters60/1448251
attttaa

SEQ ID NO: 116949 - DNA, 7 bp, Unknown
  misc_feature (1)..( 7): Result.002 file - promoters60/1448251
attttaa

SEQ ID NO: 116950 - DNA, 10 bp, Unknown
  misc_feature (1)..( 10): Result.002 file - promoters60/1448251
caaaaaaaaa

SEQ ID NO: 116951 - DNA, 10 bp, Unknown
  misc_feature (1)..( 10): Result.002 file - promoters60/1448251
ttaaataaaa

SEQ ID NO: 116952 - DNA, 10 bp, Unknown
  misc_feature (1)..( 10): Result.002 file - promoters60/1448251
ttatatatat

SEQ ID NO: 116953 - DNA, 6 bp, Unknown
  misc_feature (1)..( 6): Result.002 file - promoters60/1448251
tggatt

SEQ ID NO: 116954 - DNA, 6 bp, Unknown
  misc_feature (1)..( 6): Result.002 file - promoters60/1448251
tggatt

SEQ ID NO: 116955 - DNA, 6 bp, Unknown
  misc_feature (1)..( 6): Result.002 file - promoters60/1448251
tttgtt

SEQ ID NO: 116956 - DNA, 6 bp, Unknown
  misc_feature (1)..( 6): Result.002 file - promoters60/1448251
tttgtt

SEQ ID NO: 116957 - DNA, 6 bp, Unknown
  misc_feature (1)..( 6): Result.002 file - promoters60/1448251
aaaaat

SEQ ID NO: 116958 - DNA, 6 bp, Unknown
  misc_feature (1)..( 6): Result.002 file - promoters60/1448251
aaaaat

SEQ ID NO: 116959 - DNA, 6 bp, Unknown
  misc_feature (1)..( 6): Result.002 file - promoters60/1448251
aagaga

SEQ ID NO: 116960 - DNA, 6 bp, Unknown
  misc_feature (1)..( 6): Result.002 file - promoters60/1448251
aagaga

SEQ ID NO: 116961 - DNA, 6 bp, Unknown
  misc_feature (1)..( 6): Result.002 file - promoters60/1448251
tttttt

SEQ ID NO: 116962 - DNA, 6 bp, Unknown
  misc_feature (1)..( 6): Result.002 file - promoters60/1448251
tttttt

SEQ ID NO: 116963 - DNA, 7 bp, Unknown
  misc_feature (1)..( 7): Result.002 file - promoters60/1448251
aaaccca

SEQ ID NO: 116964 - DNA, 7 bp, Unknown
  misc_feature (1)..( 7): Result.002 file - promoters60/1448251
aaatcca

SEQ ID NO: 116965 - DNA, 7 bp, Unknown
  misc_feature (1)..( 7): Result.002 file - promoters60/1448251
atacata

SEQ ID NO: 116966 - DNA, 7 bp, Unknown
  misc_feature (1)..( 7): Result.002 file - promoters60/1448251
ataaata

SEQ ID NO: 116967 - DNA, 14 bp, Unknown
  misc_feature (1)..( 14): Result.002 file - promoters60/1450099
tcacatttatttca

SEQ ID NO: 116968 - DNA, 14 bp, Unknown
  misc_feature (1)..( 14): Result.002 file - promoters60/1450099
ttacatttgtcgtt

SEQ ID NO: 116969 - DNA, 14 bp, Unknown
  misc_feature (1)..( 14): Result.002 file - promoters60/1450099
tcaaatttaattac

SEQ ID NO: 116970 - DNA, 14 bp, Unknown
  misc_feature (1)..( 14): Result.002 file - promoters60/1450099
cttattttatgaaa

SEQ ID NO: 116971 - DNA, 10 bp, Unknown
  misc_feature (1)..( 10): Result.002 file - promoters60/1450137
gaaacgtttg

SEQ ID NO: 116972 - DNA, 10 bp, Unknown
  misc_feature (1)..( 10): Result.002 file - promoters60/1450137
ctaacttttg

SEQ ID NO: 116973 - DNA, 10 bp, Unknown
  misc_feature (1)..( 10): Result.002 file - promoters60/1450137
ttaaatttta

SEQ ID NO: 116974 - DNA, 10 bp, Unknown
  misc_feature (1)..( 10): Result.002 file - promoters60/1450137
ttaaatctgt

SEQ ID NO: 116975 - DNA, 11 bp, Unknown
  misc_feature (1)..( 11): Result.002 file - promoters60/1450137
cccatttgcta

SEQ ID NO: 116976 - DNA, 11 bp, Unknown
  misc_feature (1)..( 11): Result.002 file - promoters60/1450137
ccctttttttt

SEQ ID NO: 116977 - DNA, 11 bp, Unknown
  misc_feature (1)..( 11): Result.002 file - promoters60/1450137
aactttttaaa

SEQ ID NO: 116978 - DNA, 11 bp, Unknown
  misc_feature (1)..( 11): Result.002 file - promoters60/1450137
taatttttaaa

SEQ ID NO: 116979 - DNA, 8 bp, Unknown
  misc_feature (1)..( 8): Result.002 file - promoters60/1450204
caaagctt

SEQ ID NO: 116980 - DNA, 8 bp, Unknown
  misc_feature (1)..( 8): Result.002 file - promoters60/1450204
taaagctc

SEQ ID NO: 116981 - DNA, 8 bp, Unknown
  misc_feature (1)..( 8): Result.002 file - promoters60/1450204
caaggctt

SEQ ID NO: 116982 - DNA, 8 bp, Unknown
  misc_feature (1)..( 8): Result.002 file - promoters60/1450204
aaaaactc

SEQ ID NO: 116983 - DNA, 13 bp, Unknown
  misc_feature (1)..( 13): Result.002 file - promoters60/1450204
cattcgaatgcta

SEQ ID NO: 116984 - DNA, 13 bp, Unknown
  misc_feature (1)..( 13): Result.002 file - promoters60/1450204
catttgaattttt

SEQ ID NO: 116985 - DNA, 13 bp, Unknown
  misc_feature (1)..( 13): Result.002 file - promoters60/1450204
gatttgagttttt

SEQ ID NO: 116986 - DNA, 13 bp, Unknown
  misc_feature (1)..( 13): Result.002 file - promoters60/1450204
gatttgtttgcga

SEQ ID NO: 116987 - DNA, 8 bp, Unknown
  misc_feature (1)..( 8): Result.002 file - promoters60/1450224
gtaaacat

SEQ ID NO: 116988 - DNA, 8 bp, Unknown
  misc_feature (1)..( 8): Result.002 file - promoters60/1450224
gtagacat

SEQ ID NO: 116989 - DNA, 6 bp, Unknown
  misc_feature (1)..( 6): Result.002 file - promoters60/1450224
acatat

SEQ ID NO: 116990 - DNA, 6 bp, Unknown
  misc_feature (1)..( 6): Result.002 file - promoters60/1450224
acatat

SEQ ID NO: 116991 - DNA, 7 bp, Unknown
  misc_feature (1)..( 7): Result.002 file - promoters60/1450224
ttttcta

SEQ ID NO: 116992 - DNA, 7 bp, Unknown
  misc_feature (1)..( 7): Result.002 file - promoters60/1450224
ttttcta

SEQ ID NO: 116993 - DNA, 7 bp, Unknown
  misc_feature (1)..( 7): Result.002 file - promoters60/1450224
tttttag

SEQ ID NO: 116994 - DNA, 7 bp, Unknown
  misc_feature (1)..( 7): Result.002 file - promoters60/1450224
ccaattc

SEQ ID NO: 116995 - DNA, 7 bp, Unknown
  misc_feature (1)..( 7): Result.002 file - promoters60/1450224
ccatttc

SEQ ID NO: 116996 - DNA, 8 bp, Unknown
  misc_feature (1)..( 8): Result.002 file - promoters60/1450224
aaatgaaa

SEQ ID NO: 116997 - DNA, 8 bp, Unknown
  misc_feature (1)..( 8): Result.002 file - promoters60/1450224
aaaagaaa

SEQ ID NO: 116998 - DNA, 7 bp, Unknown
  misc_feature (1)..( 7): Result.002 file - promoters60/1450224
tatttta

SEQ ID NO: 116999 - DNA, 7 bp, Unknown
  misc_feature (1)..( 7): Result.002 file - promoters60/1450224
tatttta

SEQ ID NO: 117000 - DNA, 7 bp, Unknown
  misc_feature (1)..( 7): Result.002 file - promoters60/1450224
taaaata

SEQ ID NO: 117001 - DNA, 7 bp, Unknown
  misc_feature (1)..( 7): Result.002 file - promoters60/1450224
taatata

SEQ ID NO: 117002 - DNA, 6 bp, Unknown
  misc_feature (1)..( 6): Result.002 file - promoters60/1450224
aagtta

SEQ ID NO: 117003 - DNA, 6 bp, Unknown
  misc_feature (1)..( 6): Result.002 file - promoters60/1450224
aagtta

SEQ ID NO: 117004 - DNA, 9 bp, Unknown
  misc_feature (1)..( 9): Result.002 file - promoters60/1450224
atttgtaat

SEQ ID NO: 117005 - DNA, 9 bp, Unknown
  misc_feature (1)..( 9): Result.002 file - promoters60/1450224
ttttttaat

SEQ ID NO: 117006 - DNA, 9 bp, Unknown
  misc_feature (1)..( 9): Result.002 file - promoters60/1450224
atttttttt

SEQ ID NO: 117007 - DNA, 8 bp, Unknown
  misc_feature (1)..( 8): Result.002 file - promoters60/1450224
aaaaaaag

SEQ ID NO: 117008 - DNA, 8 bp, Unknown
  misc_feature (1)..( 8): Result.002 file - promoters60/1450224
aaaacaag

SEQ ID NO: 117009 - DNA, 9 bp, Unknown
  misc_feature (1)..( 9): Result.002 file - promoters60/1450224
aaaataatc

SEQ ID NO: 117010 - DNA, 9 bp, Unknown
  misc_feature (1)..( 9): Result.002 file - promoters60/1450224
aaaatgatc

SEQ ID NO: 117011 - DNA, 7 bp, Unknown
  misc_feature (1)..( 7): Result.002 file - promoters60/1450224
aatagat

SEQ ID NO: 117012 - DNA, 7 bp, Unknown
  misc_feature (1)..( 7): Result.002 file - promoters60/1450224
aatcgat

SEQ ID NO: 117013 - DNA, 8 bp, Unknown
  misc_feature (1)..( 8): Result.002 file - promoters60/1450224
gaacacaa

SEQ ID NO: 117014 - DNA, 8 bp, Unknown
  misc_feature (1)..( 8): Result.002 file - promoters60/1450224
gaaaacaa

SEQ ID NO: 117015 - DNA, 7 bp, Unknown
  misc_feature (1)..( 7): Result.002 file - promoters60/1450224
aaaccaa

SEQ ID NO: 117016 - DNA, 7 bp, Unknown
  misc_feature (1)..( 7): Result.002 file - promoters60/1450224
aaaccaa

SEQ ID NO: 117017 - DNA, 8 bp, Unknown
  misc_feature (1)..( 8): Result.002 file - promoters60/1450224
ttttagta

SEQ ID NO: 117018 - DNA, 8 bp, Unknown
  misc_feature (1)..( 8): Result.002 file - promoters60/1450224
tttcagta

SEQ ID NO: 117019 - DNA, 7 bp, Unknown
  misc_feature (1)..( 7): Result.002 file - promoters60/1450224
aaagtct

SEQ ID NO: 117020 - DNA, 7 bp, Unknown
  misc_feature (1)..( 7): Result.002 file - promoters60/1450224
aaattct

SEQ ID NO: 117021 - DNA, 6 bp, Unknown
  misc_feature (1)..( 6): Result.002 file - promoters60/1450224
aaaatc

SEQ ID NO: 117022 - DNA, 6 bp, Unknown
  misc_feature (1)..( 6): Result.002 file - promoters60/1450224
aaaatc

SEQ ID NO: 117023 - DNA, 7 bp, Unknown
  misc_feature (1)..( 7): Result.002 file - promoters60/1450224
cttgcta

SEQ ID NO: 117024 - DNA, 7 bp, Unknown
  misc_feature (1)..( 7): Result.002 file - promoters60/1450224
cttgcta

SEQ ID NO: 117025 - DNA, 7 bp, Unknown
  misc_feature (1)..( 7): Result.002 file - promoters60/1450224
ataaaaa

SEQ ID NO: 117026 - DNA, 7 bp, Unknown
  misc_feature (1)..( 7): Result.002 file - promoters60/1450224
atataaa

SEQ ID NO: 117027 - DNA, 8 bp, Unknown
  misc_feature (1)..( 8): Result.002 file - promoters60/1450309
aaagaaag

SEQ ID NO: 117028 - DNA, 8 bp, Unknown
  misc_feature (1)..( 8): Result.002 file - promoters60/1450309
aaacaaaa

SEQ ID NO: 117029 - DNA, 8 bp, Unknown
  misc_feature (1)..( 8): Result.002 file - promoters60/1450309
ctagaaag

SEQ ID NO: 117030 - DNA, 6 bp, Unknown
  misc_feature (1)..( 6): Result.002 file - promoters60/1450309
ttgttt

SEQ ID NO: 117031 - DNA, 6 bp, Unknown
  misc_feature (1)..( 6): Result.002 file - promoters60/1450309
ttgttt

SEQ ID NO: 117032 - DNA, 6 bp, Unknown
  misc_feature (1)..( 6): Result.002 file - promoters60/1450309
aagtcc

SEQ ID NO: 117033 - DNA, 6 bp, Unknown
  misc_feature (1)..( 6): Result.002 file - promoters60/1450309
aagtcc

SEQ ID NO: 117034 - DNA, 7 bp, Unknown
  misc_feature (1)..( 7): Result.002 file - promoters60/1450309
aagtctt

SEQ ID NO: 117035 - DNA, 7 bp, Unknown
  misc_feature (1)..( 7): Result.002 file - promoters60/1450309
aagtctt

SEQ ID NO: 117036 - DNA, 6 bp, Unknown
  misc_feature (1)..( 6): Result.002 file - promoters60/1450309
tcttca

SEQ ID NO: 117037 - DNA, 6 bp, Unknown
  misc_feature (1)..( 6): Result.002 file - promoters60/1450309
tcttca

SEQ ID NO: 117038 - DNA, 6 bp, Unknown
  misc_feature (1)..( 6): Result.002 file - promoters60/1450309
tcctgg

SEQ ID NO: 117039 - DNA, 6 bp, Unknown
  misc_feature (1)..( 6): Result.002 file - promoters60/1450309
tcctgg

SEQ ID NO: 117040 - DNA, 8 bp, Unknown
  misc_feature (1)..( 8): Result.002 file - promoters60/1450309
ctataaag

SEQ ID NO: 117041 - DNA, 8 bp, Unknown
  misc_feature (1)..( 8): Result.002 file - promoters60/1450309
ctagaaag

SEQ ID NO: 117042 - DNA, 6 bp, Unknown
  misc_feature (1)..( 6): Result.002 file - promoters60/1450309
gagata

SEQ ID NO: 117043 - DNA, 6 bp, Unknown
  misc_feature (1)..( 6): Result.002 file - promoters60/1450309
gagata

SEQ ID NO: 117044 - DNA, 6 bp, Unknown
  misc_feature (1)..( 6): Result.002 file - promoters60/1450309
caagac

SEQ ID NO: 117045 - DNA, 6 bp, Unknown
  misc_feature (1)..( 6): Result.002 file - promoters60/1450309
caagac

SEQ ID NO: 117046 - DNA, 7 bp, Unknown
  misc_feature (1)..( 7): Result.002 file - promoters60/1450309
taatatt

SEQ ID NO: 117047 - DNA, 7 bp, Unknown
  misc_feature (1)..( 7): Result.002 file - promoters60/1450309
taatatt

SEQ ID NO: 117048 - DNA, 8 bp, Unknown
  misc_feature (1)..( 8): Result.002 file - promoters60/1450309
ttttgagt

SEQ ID NO: 117049 - DNA, 8 bp, Unknown
  misc_feature (1)..( 8): Result.002 file - promoters60/1450309
ttttgagt

SEQ ID NO: 117050 - DNA, 7 bp, Unknown
  misc_feature (1)..( 7): Result.002 file - promoters60/1450309
tattttt

SEQ ID NO: 117051 - DNA, 7 bp, Unknown
  misc_feature (1)..( 7): Result.002 file - promoters60/1450309
tattttt

SEQ ID NO: 117052 - DNA, 6 bp, Unknown
  misc_feature (1)..( 6): Result.002 file - promoters60/1450309
agattt

SEQ ID NO: 117053 - DNA, 6 bp, Unknown
  misc_feature (1)..( 6): Result.002 file - promoters60/1450309
agattt

SEQ ID NO: 117054 - DNA, 9 bp, Unknown
  misc_feature (1)..( 9): Result.002 file - promoters60/1450309
attataata

SEQ ID NO: 117055 - DNA, 9 bp, Unknown
  misc_feature (1)..( 9): Result.002 file - promoters60/1450309
attatcata

SEQ ID NO: 117056 - DNA, 6 bp, Unknown
  misc_feature (1)..( 6): Result.002 file - promoters60/1450309
cattaa

SEQ ID NO: 117057 - DNA, 6 bp, Unknown
  misc_feature (1)..( 6): Result.002 file - promoters60/1450309
cattaa

SEQ ID NO: 117058 - DNA, 8 bp, Unknown
  misc_feature (1)..( 8): Result.002 file - promoters60/1450309
aatgttct

SEQ ID NO: 117059 - DNA, 8 bp, Unknown
  misc_feature (1)..( 8): Result.002 file - promoters60/1450309
aatgatct

SEQ ID NO: 117060 - DNA, 7 bp, Unknown
  misc_feature (1)..( 7): Result.002 file - promoters60/1450309
tttacca

SEQ ID NO: 117061 - DNA, 7 bp, Unknown
  misc_feature (1)..( 7): Result.002 file - promoters60/1450309
tttccca

SEQ ID NO: 117062 - DNA, 7 bp, Unknown
  misc_feature (1)..( 7): Result.002 file - promoters60/1450309
tcaactc

SEQ ID NO: 117063 - DNA, 7 bp, Unknown
  misc_feature (1)..( 7): Result.002 file - promoters60/1450309
tcaactc

SEQ ID NO: 117064 - DNA, 9 bp, Unknown
  misc_feature (1)..( 9): Result.002 file - promoters60/1450309
attaaccga

SEQ ID NO: 117065 - DNA, 9 bp, Unknown
  misc_feature (1)..( 9): Result.002 file - promoters60/1450309
atttaccga

SEQ ID NO: 117066 - DNA, 6 bp, Unknown
  misc_feature (1)..( 6): Result.002 file - promoters60/1450309
tttttt

SEQ ID NO: 117067 - DNA, 6 bp, Unknown
  misc_feature (1)..( 6): Result.002 file - promoters60/1450309
tttttt

SEQ ID NO: 117068 - DNA, 7 bp, Unknown
  misc_feature (1)..( 7): Result.002 file - promoters60/1450309
tatttct

SEQ ID NO: 117069 - DNA, 7 bp, Unknown
  misc_feature (1)..( 7): Result.002 file - promoters60/1450309
tatttct

SEQ ID NO: 117070 - DNA, 6 bp, Unknown
  misc_feature (1)..( 6): Result.002 file - promoters60/1450309
tgactt

SEQ ID NO: 117071 - DNA, 6 bp, Unknown
  misc_feature (1)..( 6): Result.002 file - promoters60/1450309
tgactt

SEQ ID NO: 117072 - DNA, 7 bp, Unknown
  misc_feature (1)..( 7): Result.002 file - promoters60/1450321
gtaaagt

SEQ ID NO: 117073 - DNA, 7 bp, Unknown
  misc_feature (1)..( 7): Result.002 file - promoters60/1450321
gtaaagt

SEQ ID NO: 117074 - DNA, 6 bp, Unknown
  misc_feature (1)..( 6): Result.002 file - promoters60/1450321
ttttga

SEQ ID NO: 117075 - DNA, 6 bp, Unknown
  misc_feature (1)..( 6): Result.002 file - promoters60/1450321
ttttga

SEQ ID NO: 117076 - DNA, 8 bp, Unknown
  misc_feature (1)..( 8): Result.002 file - promoters60/1450321
atttttag

SEQ ID NO: 117077 - DNA, 8 bp, Unknown
  misc_feature (1)..( 8): Result.002 file - promoters60/1450321
atttgtag

SEQ ID NO: 117078 - DNA, 7 bp, Unknown
  misc_feature (1)..( 7): Result.002 file - promoters60/1450321
ttatttt

SEQ ID NO: 117079 - DNA, 7 bp, Unknown
  misc_feature (1)..( 7): Result.002 file - promoters60/1450321
ttaattt

SEQ ID NO: 117080 - DNA, 7 bp, Unknown
  misc_feature (1)..( 7): Result.002 file - promoters60/1450321
gacctct

SEQ ID NO: 117081 - DNA, 7 bp, Unknown
  misc_feature (1)..( 7): Result.002 file - promoters60/1450321
gacttct

SEQ ID NO: 117082 - DNA, 6 bp, Unknown
  misc_feature (1)..( 6): Result.002 file - promoters60/1450321
tgagct

SEQ ID NO: 117083 - DNA, 6 bp, Unknown
  misc_feature (1)..( 6): Result.002 file - promoters60/1450321
tgagct

SEQ ID NO: 117084 - DNA, 8 bp, Unknown
  misc_feature (1)..( 8): Result.002 file - promoters60/1450321
gctttctc

SEQ ID NO: 117085 - DNA, 8 bp, Unknown
  misc_feature (1)..( 8): Result.002 file - promoters60/1450321
gcttactc

SEQ ID NO: 117086 - DNA, 8 bp, Unknown
  misc_feature (1)..( 8): Result.002 file - promoters60/1450321
ttagctca

SEQ ID NO: 117087 - DNA, 8 bp, Unknown
  misc_feature (1)..( 8): Result.002 file - promoters60/1450321
ttagttca

SEQ ID NO: 117088 - DNA, 7 bp, Unknown
  misc_feature (1)..( 7): Result.002 file - promoters60/1450321
actcgta

SEQ ID NO: 117089 - DNA, 7 bp, Unknown
  misc_feature (1)..( 7): Result.002 file - promoters60/1450321
actggta

SEQ ID NO: 117090 - DNA, 9 bp, Unknown
  misc_feature (1)..( 9): Result.002 file - promoters60/1450321
tgaaaaact

SEQ ID NO: 117091 - DNA, 9 bp, Unknown
  misc_feature (1)..( 9): Result.002 file - promoters60/1450321
tgaaaaact

SEQ ID NO: 117092 - DNA, 8 bp, Unknown
  misc_feature (1)..( 8): Result.002 file - promoters60/1450321
aatcaagt

SEQ ID NO: 117093 - DNA, 8 bp, Unknown
  misc_feature (1)..( 8): Result.002 file - promoters60/1450321
aatcaagt

SEQ ID NO: 117094 - DNA, 7 bp, Unknown
  misc_feature (1)..( 7): Result.002 file - promoters60/1450321
caaaaaa

SEQ ID NO: 117095 - DNA, 7 bp, Unknown
  misc_feature (1)..( 7): Result.002 file - promoters60/1450321
caacaaa

SEQ ID NO: 117096 - DNA, 6 bp, Unknown
  misc_feature (1)..( 6): Result.002 file - promoters60/1450357
aatact

SEQ ID NO: 117097 - DNA, 6 bp, Unknown
  misc_feature (1)..( 6): Result.002 file - promoters60/1450357
aatact

SEQ ID NO: 117098 - DNA, 8 bp, Unknown
  misc_feature (1)..( 8): Result.002 file - promoters60/1450357
atatataa

SEQ ID NO: 117099 - DNA, 8 bp, Unknown
  misc_feature (1)..( 8): Result.002 file - promoters60/1450357
atagatat

SEQ ID NO: 117100 - DNA, 8 bp, Unknown
  misc_feature (1)..( 8): Result.002 file - promoters60/1450357
ttatataa

SEQ ID NO: 117101 - DNA, 11 bp, Unknown
  misc_feature (1)..( 11): Result.002 file - promoters60/1450357
tttgtttgttt

SEQ ID NO: 117102 - DNA, 11 bp, Unknown
  misc_feature (1)..( 11): Result.002 file - promoters60/1450357
tttctttattt

SEQ ID NO: 117103 - DNA, 7 bp, Unknown
  misc_feature (1)..( 7): Result.002 file - promoters60/1450357
attatca

SEQ ID NO: 117104 - DNA, 7 bp, Unknown
  misc_feature (1)..( 7): Result.002 file - promoters60/1450357
attctca

SEQ ID NO: 117105 - DNA, 7 bp, Unknown
  misc_feature (1)..( 7): Result.002 file - promoters60/1450357
tagaaaa

SEQ ID NO: 117106 - DNA, 7 bp, Unknown
  misc_feature (1)..( 7): Result.002 file - promoters60/1450357
tagaaaa

SEQ ID NO: 117107 - DNA, 7 bp, Unknown
  misc_feature (1)..( 7): Result.002 file - promoters60/1450357
atgtatg

SEQ ID NO: 117108 - DNA, 7 bp, Unknown
  misc_feature (1)..( 7): Result.002 file - promoters60/1450357
atggatg

SEQ ID NO: 117109 - DNA, 12 bp, Unknown
  misc_feature (1)..( 12): Result.002 file - promoters60/1450357
ttttgcaatttt

SEQ ID NO: 117110 - DNA, 12 bp, Unknown
  misc_feature (1)..( 12): Result.002 file - promoters60/1450357
taaggcaaattt

SEQ ID NO: 117111 - DNA, 12 bp, Unknown
  misc_feature (1)..( 12): Result.002 file - promoters60/1450357
taagccaaacgc

SEQ ID NO: 117112 - DNA, 8 bp, Unknown
  misc_feature (1)..( 8): Result.002 file - promoters60/1450357
tattgaaa

SEQ ID NO: 117113 - DNA, 8 bp, Unknown
  misc_feature (1)..( 8): Result.002 file - promoters60/1450357
tattaaaa

SEQ ID NO: 117114 - DNA, 10 bp, Unknown
  misc_feature (1)..( 10): Result.002 file - promoters60/1450357
tttatacaat

SEQ ID NO: 117115 - DNA, 10 bp, Unknown
  misc_feature (1)..( 10): Result.002 file - promoters60/1450357
tttatataat

SEQ ID NO: 117116 - DNA, 6 bp, Unknown
  misc_feature (1)..( 6): Result.002 file - promoters60/1450357
agaaaa

SEQ ID NO: 117117 - DNA, 6 bp, Unknown
  misc_feature (1)..( 6): Result.002 file - promoters60/1450357
agaaaa

SEQ ID NO: 117118 - DNA, 8 bp, Unknown
  misc_feature (1)..( 8): Result.002 file - promoters60/1450357
aaataata

SEQ ID NO: 117119 - DNA, 8 bp, Unknown
  misc_feature (1)..( 8): Result.002 file - promoters60/1450357
aaaaaata

SEQ ID NO: 117120 - DNA, 6 bp, Unknown
  misc_feature (1)..( 6): Result.002 file - promoters60/1450357
ctaaac

SEQ ID NO: 117121 - DNA, 6 bp, Unknown
  misc_feature (1)..( 6): Result.002 file - promoters60/1450357
ctaaac

SEQ ID NO: 117122 - DNA, 6 bp, Unknown
  misc_feature (1)..( 6): Result.002 file - promoters60/1450357
caaaat

SEQ ID NO: 117123 - DNA, 6 bp, Unknown
  misc_feature (1)..( 6): Result.002 file - promoters60/1450357
caaaat

SEQ ID NO: 117124 - DNA, 6 bp, Unknown
  misc_feature (1)..( 6): Result.002 file - promoters60/1450357
ccatac

SEQ ID NO: 117125 - DNA, 6 bp, Unknown
  misc_feature (1)..( 6): Result.002 file - promoters60/1450357
ccatac

SEQ ID NO: 117126 - DNA, 6 bp, Unknown
  misc_feature (1)..( 6): Result.002 file - promoters60/1450357
cacgtg

SEQ ID NO: 117127 - DNA, 6 bp, Unknown
  misc_feature (1)..( 6): Result.002 file - promoters60/1450357
cacgtg

SEQ ID NO: 117128 - DNA, 8 bp, Unknown
  misc_feature (1)..( 8): Result.002 file - promoters60/1450357
atgtcagc

SEQ ID NO: 117129 - DNA, 8 bp, Unknown
  misc_feature (1)..( 8): Result.002 file - promoters60/1450357
atgccagc

SEQ ID NO: 117130 - DNA, 7 bp, Unknown
  misc_feature (1)..( 7): Result.002 file - promoters60/1450357
gtgggat

SEQ ID NO: 117131 - DNA, 7 bp, Unknown
  misc_feature (1)..( 7): Result.002 file - promoters60/1450357
gtgagat

SEQ ID NO: 117132 - DNA, 7 bp, Unknown
  misc_feature (1)..( 7): Result.002 file - promoters60/1450357
gaagaga

SEQ ID NO: 117133 - DNA, 7 bp, Unknown
  misc_feature (1)..( 7): Result.002 file - promoters60/1450357
gaagaga

SEQ ID NO: 117134 - DNA, 7 bp, Unknown
  misc_feature (1)..( 7): Result.002 file - promoters60/1450473
aacattc

SEQ ID NO: 117135 - DNA, 7 bp, Unknown
  misc_feature (1)..( 7): Result.002 file - promoters60/1450473
aacattc

SEQ ID NO: 117136 - DNA, 8 bp, Unknown
  misc_feature (1)..( 8): Result.002 file - promoters60/1450473
aaaagaaa

SEQ ID NO: 117137 - DNA, 8 bp, Unknown
  misc_feature (1)..( 8): Result.002 file - promoters60/1450473
aaaaaaaa

SEQ ID NO: 117138 - DNA, 8 bp, Unknown
  misc_feature (1)..( 8): Result.002 file - promoters60/1450473
gaacaaca

SEQ ID NO: 117139 - DNA, 8 bp, Unknown
  misc_feature (1)..( 8): Result.002 file - promoters60/1450473
gaataaca

SEQ ID NO: 117140 - DNA, 6 bp, Unknown
  misc_feature (1)..( 6): Result.002 file - promoters60/1450473
gaagaa

SEQ ID NO: 117141 - DNA, 6 bp, Unknown
  misc_feature (1)..( 6): Result.002 file - promoters60/1450473
gaagaa

SEQ ID NO: 117142 - DNA, 8 bp, Unknown
  misc_feature (1)..( 8): Result.002 file - promoters60/1450473
agagtttg

SEQ ID NO: 117143 - DNA, 8 bp, Unknown
  misc_feature (1)..( 8): Result.002 file - promoters60/1450473
agattttg

SEQ ID NO: 117144 - DNA, 7 bp, Unknown
  misc_feature (1)..( 7): Result.002 file - promoters60/1450473
aaactgt

SEQ ID NO: 117145 - DNA, 7 bp, Unknown
  misc_feature (1)..( 7): Result.002 file - promoters60/1450473
aaaatgt

SEQ ID NO: 117146 - DNA, 8 bp, Unknown
  misc_feature (1)..( 8): Result.002 file - promoters60/1450473
aatttgct

SEQ ID NO: 117147 - DNA, 8 bp, Unknown
  misc_feature (1)..( 8): Result.002 file - promoters60/1450473
aatctgct

SEQ ID NO: 117148 - DNA, 6 bp, Unknown
  misc_feature (1)..( 6): Result.002 file - promoters60/1450473
aatatt

SEQ ID NO: 117149 - DNA, 6 bp, Unknown
  misc_feature (1)..( 6): Result.002 file - promoters60/1450473
aatatt

SEQ ID NO: 117150 - DNA, 7 bp, Unknown
  misc_feature (1)..( 7): Result.002 file - promoters60/1450473
aatgaga

SEQ ID NO: 117151 - DNA, 7 bp, Unknown
  misc_feature (1)..( 7): Result.002 file - promoters60/1450473
aattaga

SEQ ID NO: 117152 - DNA, 7 bp, Unknown
  misc_feature (1)..( 7): Result.002 file - promoters60/1450473
gaacaaa

SEQ ID NO: 117153 - DNA, 7 bp, Unknown
  misc_feature (1)..( 7): Result.002 file - promoters60/1450473
gaagaaa

SEQ ID NO: 117154 - DNA, 6 bp, Unknown
  misc_feature (1)..( 6): Result.002 file - promoters60/1450473
aaatca

SEQ ID NO: 117155 - DNA, 6 bp, Unknown
  misc_feature (1)..( 6): Result.002 file - promoters60/1450473
aaatca

SEQ ID NO: 117156 - DNA, 7 bp, Unknown
  misc_feature (1)..( 7): Result.002 file - promoters60/1450473
cagaact

SEQ ID NO: 117157 - DNA, 7 bp, Unknown
  misc_feature (1)..( 7): Result.002 file - promoters60/1450473
cagcact

SEQ ID NO: 117158 - DNA, 7 bp, Unknown
  misc_feature (1)..( 7): Result.002 file - promoters60/1450477
aattaaa

SEQ ID NO: 117159 - DNA, 7 bp, Unknown
  misc_feature (1)..( 7): Result.002 file - promoters60/1450477
aatgaaa

SEQ ID NO: 117160 - DNA, 9 bp, Unknown
  misc_feature (1)..( 9): Result.002 file - promoters60/1450477
aagcactta

SEQ ID NO: 117161 - DNA, 9 bp, Unknown
  misc_feature (1)..( 9): Result.002 file - promoters60/1450477
aagcacgaa

SEQ ID NO: 117162 - DNA, 9 bp, Unknown
  misc_feature (1)..( 9): Result.002 file - promoters60/1450477
tagcattta

SEQ ID NO: 117163 - DNA, 9 bp, Unknown
  misc_feature (1)..( 9): Result.002 file - promoters60/1450477
atccctata

SEQ ID NO: 117164 - DNA, 9 bp, Unknown
  misc_feature (1)..( 9): Result.002 file - promoters60/1450477
atctctatt

SEQ ID NO: 117165 - DNA, 9 bp, Unknown
  misc_feature (1)..( 9): Result.002 file - promoters60/1450477
tactccatt

SEQ ID NO: 117166 - DNA, 6 bp, Unknown
  misc_feature (1)..( 6): Result.002 file - promoters60/1450477
caaaag

SEQ ID NO: 117167 - DNA, 6 bp, Unknown
  misc_feature (1)..( 6): Result.002 file - promoters60/1450477
caaaag

SEQ ID NO: 117168 - DNA, 7 bp, Unknown
  misc_feature (1)..( 7): Result.002 file - promoters60/1450477
ttaaaat

SEQ ID NO: 117169 - DNA, 7 bp, Unknown
  misc_feature (1)..( 7): Result.002 file - promoters60/1450477
ttagaat

SEQ ID NO: 117170 - DNA, 6 bp, Unknown
  misc_feature (1)..( 6): Result.002 file - promoters60/1450477
tatata

SEQ ID NO: 117171 - DNA, 6 bp, Unknown
  misc_feature (1)..( 6): Result.002 file - promoters60/1450477
tatata

SEQ ID NO: 117172 - DNA, 7 bp, Unknown
  misc_feature (1)..( 7): Result.002 file - promoters60/1450477
aaattgt

SEQ ID NO: 117173 - DNA, 7 bp, Unknown
  misc_feature (1)..( 7): Result.002 file - promoters60/1450477
aaagtgt

SEQ ID NO: 117174 - DNA, 7 bp, Unknown
  misc_feature (1)..( 7): Result.002 file - promoters60/1450477
tccgtta

SEQ ID NO: 117175 - DNA, 7 bp, Unknown
  misc_feature (1)..( 7): Result.002 file - promoters60/1450477
tccatta

SEQ ID NO: 117176 - DNA, 9 bp, Unknown
  misc_feature (1)..( 9): Result.002 file - promoters60/1450477
taatttaag

SEQ ID NO: 117177 - DNA, 9 bp, Unknown
  misc_feature (1)..( 9): Result.002 file - promoters60/1450477
taattgaag

SEQ ID NO: 117178 - DNA, 9 bp, Unknown
  misc_feature (1)..( 9): Result.002 file - promoters60/1450477
gctttgaag

SEQ ID NO: 117179 - DNA, 6 bp, Unknown
  misc_feature (1)..( 6): Result.002 file - promoters60/1450477
aaagaa

SEQ ID NO: 117180 - DNA, 6 bp, Unknown
  misc_feature (1)..( 6): Result.002 file - promoters60/1450477
aaagaa

SEQ ID NO: 117181 - DNA, 7 bp, Unknown
  misc_feature (1)..( 7): Result.002 file - promoters60/1450477
tagagaa

SEQ ID NO: 117182 - DNA, 7 bp, Unknown
  misc_feature (1)..( 7): Result.002 file - promoters60/1450477
tagagaa

SEQ ID NO: 117183 - DNA, 7 bp, Unknown
  misc_feature (1)..( 7): Result.002 file - promoters60/1450477
aaggaga

SEQ ID NO: 117184 - DNA, 7 bp, Unknown
  misc_feature (1)..( 7): Result.002 file - promoters60/1450477
aagtaga

SEQ ID NO: 117185 - DNA, 7 bp, Unknown
  misc_feature (1)..( 7): Result.002 file - promoters60/1450477
aaagaag

SEQ ID NO: 117186 - DNA, 7 bp, Unknown
  misc_feature (1)..( 7): Result.002 file - promoters60/1450477
aaagaag

SEQ ID NO: 117187 - DNA, 6 bp, Unknown
  misc_feature (1)..( 6): Result.002 file - promoters60/1450477
caaaag

SEQ ID NO: 117188 - DNA, 6 bp, Unknown
  misc_feature (1)..( 6): Result.002 file - promoters60/1450477
caaaag

SEQ ID NO: 117189 - DNA, 6 bp, Unknown
  misc_feature (1)..( 6): Result.002 file - promoters60/1450477
caacac

SEQ ID NO: 117190 - DNA, 6 bp, Unknown
  misc_feature (1)..( 6): Result.002 file - promoters60/1450477
caacac

SEQ ID NO: 117191 - DNA, 8 bp, Unknown
  misc_feature (1)..( 8): Result.002 file - promoters60/1450610
ataataaa

SEQ ID NO: 117192 - DNA, 8 bp, Unknown
  misc_feature (1)..( 8): Result.002 file - promoters60/1450610
ataatata

SEQ ID NO: 117193 - DNA, 8 bp, Unknown
  misc_feature (1)..( 8): Result.002 file - promoters60/1450610
ataaaata

SEQ ID NO: 117194 - DNA, 8 bp, Unknown
  misc_feature (1)..( 8): Result.002 file - promoters60/1450610
catagaaa

SEQ ID NO: 117195 - DNA, 8 bp, Unknown
  misc_feature (1)..( 8): Result.002 file - promoters60/1450610
tatagaat

SEQ ID NO: 117196 - DNA, 8 bp, Unknown
  misc_feature (1)..( 8): Result.002 file - promoters60/1450610
tatataat

SEQ ID NO: 117197 - DNA, 10 bp, Unknown
  misc_feature (1)..( 10): Result.002 file - promoters60/1450610
aatctgcttc

SEQ ID NO: 117198 - DNA, 10 bp, Unknown
  misc_feature (1)..( 10): Result.002 file - promoters60/1450610
aatcttcttc

SEQ ID NO: 117199 - DNA, 10 bp, Unknown
  misc_feature (1)..( 10): Result.002 file - promoters60/1450610
aatctgatgt

SEQ ID NO: 117200 - DNA, 10 bp, Unknown
  misc_feature (1)..( 10): Result.002 file - promoters60/1450610
aatttgaaaa

SEQ ID NO: 117201 - DNA, 12 bp, Unknown
  misc_feature (1)..( 12): Result.002 file - promoters60/1450610
tattcacattta

SEQ ID NO: 117202 - DNA, 12 bp, Unknown
  misc_feature (1)..( 12): Result.002 file - promoters60/1450610
ttatcaaattta

SEQ ID NO: 117203 - DNA, 12 bp, Unknown
  misc_feature (1)..( 12): Result.002 file - promoters60/1450610
ttatgaaacaga

SEQ ID NO: 117204 - DNA, 9 bp, Unknown
  misc_feature (1)..( 9): Result.002 file - promoters60/1450610
taaccatgg

SEQ ID NO: 117205 - DNA, 9 bp, Unknown
  misc_feature (1)..( 9): Result.002 file - promoters60/1450610
taaacatat

SEQ ID NO: 117206 - DNA, 9 bp, Unknown
  misc_feature (1)..( 9): Result.002 file - promoters60/1450610
caaacttat

SEQ ID NO: 117207 - DNA, 9 bp, Unknown
  misc_feature (1)..( 9): Result.002 file - promoters60/1450610
aatcataaa

SEQ ID NO: 117208 - DNA, 9 bp, Unknown
  misc_feature (1)..( 9): Result.002 file - promoters60/1450610
aatgatact

SEQ ID NO: 117209 - DNA, 9 bp, Unknown
  misc_feature (1)..( 9): Result.002 file - promoters60/1450610
aatcagaaa

SEQ ID NO: 117210 - DNA, 10 bp, Unknown
  misc_feature (1)..( 10): Result.002 file - promoters60/1450610
aatcataaaa

SEQ ID NO: 117211 - DNA, 10 bp, Unknown
  misc_feature (1)..( 10): Result.002 file - promoters60/1450610
aaggataaaa

SEQ ID NO: 117212 - DNA, 10 bp, Unknown
  misc_feature (1)..( 10): Result.002 file - promoters60/1450610
aatcagaaat

SEQ ID NO: 117213 - DNA, 10 bp, Unknown
  misc_feature (1)..( 10): Result.002 file - promoters60/1450610
aaagaaaata

SEQ ID NO: 117214 - DNA, 10 bp, Unknown
  misc_feature (1)..( 10): Result.002 file - promoters60/1450610
aaaaaaaata

SEQ ID NO: 117215 - DNA, 10 bp, Unknown
  misc_feature (1)..( 10): Result.002 file - promoters60/1450610
aaaaagattc

SEQ ID NO: 117216 - DNA, 11 bp, Unknown
  misc_feature (1)..( 11): Result.002 file - promoters60/1450625
aattttgatga

SEQ ID NO: 117217 - DNA, 11 bp, Unknown
  misc_feature (1)..( 11): Result.002 file - promoters60/1450625
tattttggtga

SEQ ID NO: 117218 - DNA, 11 bp, Unknown
  misc_feature (1)..( 11): Result.002 file - promoters60/1450625
tttttggattc

SEQ ID NO: 117219 - DNA, 11 bp, Unknown
  misc_feature (1)..( 11): Result.002 file - promoters60/1450625
aattttaataa

SEQ ID NO: 117220 - DNA, 11 bp, Unknown
  misc_feature (1)..( 11): Result.002 file - promoters60/1450625
cattgtaacaa

SEQ ID NO: 117221 - DNA, 8 bp, Unknown
  misc_feature (1)..( 8): Result.002 file - promoters60/1450625
atatatct

SEQ ID NO: 117222 - DNA, 8 bp, Unknown
  misc_feature (1)..( 8): Result.002 file - promoters60/1450625
ttatctct

SEQ ID NO: 117223 - DNA, 8 bp, Unknown
  misc_feature (1)..( 8): Result.002 file - promoters60/1450625
ttatcttg

SEQ ID NO: 117224 - DNA, 8 bp, Unknown
  misc_feature (1)..( 8): Result.002 file - promoters60/1450625
gtatatca

SEQ ID NO: 117225 - DNA, 8 bp, Unknown
  misc_feature (1)..( 8): Result.002 file - promoters60/1450625
atatatat

SEQ ID NO: 117226 - DNA, 11 bp, Unknown
  misc_feature (1)..( 11): Result.002 file - promoters60/1450625
tttattctacc

SEQ ID NO: 117227 - DNA, 11 bp, Unknown
  misc_feature (1)..( 11): Result.002 file - promoters60/1450625
ttttttccgct

SEQ ID NO: 117228 - DNA, 11 bp, Unknown
  misc_feature (1)..( 11): Result.002 file - promoters60/1450625
attattcatgg

SEQ ID NO: 117229 - DNA, 11 bp, Unknown
  misc_feature (1)..( 11): Result.002 file - promoters60/1450625
tttattctttt

SEQ ID NO: 117230 - DNA, 11 bp, Unknown
  misc_feature (1)..( 11): Result.002 file - promoters60/1450625
cgttttcagct

SEQ ID NO: 117231 - DNA, 8 bp, Unknown
  misc_feature (1)..( 8): Result.002 file - promoters60/1450682
tcacattt

SEQ ID NO: 117232 - DNA, 8 bp, Unknown
  misc_feature (1)..( 8): Result.002 file - promoters60/1450682
tcatattt

SEQ ID NO: 117233 - DNA, 6 bp, Unknown
  misc_feature (1)..( 6): Result.002 file - promoters60/1450682
aaaaaa

SEQ ID NO: 117234 - DNA, 6 bp, Unknown
  misc_feature (1)..( 6): Result.002 file - promoters60/1450682
aaaaaa

SEQ ID NO: 117235 - DNA, 8 bp, Unknown
  misc_feature (1)..( 8): Result.002 file - promoters60/1450682
aaatagta

SEQ ID NO: 117236 - DNA, 8 bp, Unknown
  misc_feature (1)..( 8): Result.002 file - promoters60/1450682
aaatggta

SEQ ID NO: 117237 - DNA, 8 bp, Unknown
  misc_feature (1)..( 8): Result.002 file - promoters60/1450682
atatattt

SEQ ID NO: 117238 - DNA, 8 bp, Unknown
  misc_feature (1)..( 8): Result.002 file - promoters60/1450682
atatatac

SEQ ID NO: 117239 - DNA, 8 bp, Unknown
  misc_feature (1)..( 8): Result.002 file - promoters60/1450682
atacatac

SEQ ID NO: 117240 - DNA, 10 bp, Unknown
  misc_feature (1)..( 10): Result.002 file - promoters60/1450682
ataattaaaa

SEQ ID NO: 117241 - DNA, 10 bp, Unknown
  misc_feature (1)..( 10): Result.002 file - promoters60/1450682
ataattcaaa

SEQ ID NO: 117242 - DNA, 6 bp, Unknown
  misc_feature (1)..( 6): Result.002 file - promoters60/1450682
aaacac

SEQ ID NO: 117243 - DNA, 6 bp, Unknown
  misc_feature (1)..( 6): Result.002 file - promoters60/1450682
aaacac

SEQ ID NO: 117244 - DNA, 7 bp, Unknown
  misc_feature (1)..( 7): Result.002 file - promoters60/1450682
atacaat

SEQ ID NO: 117245 - DNA, 7 bp, Unknown
  misc_feature (1)..( 7): Result.002 file - promoters60/1450682
ataaaat

SEQ ID NO: 117246 - DNA, 6 bp, Unknown
  misc_feature (1)..( 6): Result.002 file - promoters60/1450682
tagttt

SEQ ID NO: 117247 - DNA, 6 bp, Unknown
  misc_feature (1)..( 6): Result.002 file - promoters60/1450682
tagttt

SEQ ID NO: 117248 - DNA, 8 bp, Unknown
  misc_feature (1)..( 8): Result.002 file - promoters60/1450682
taaatttt

SEQ ID NO: 117249 - DNA, 8 bp, Unknown
  misc_feature (1)..( 8): Result.002 file - promoters60/1450682
taaatttt

SEQ ID NO: 117250 - DNA, 8 bp, Unknown
  misc_feature (1)..( 8): Result.002 file - promoters60/1450682
tttttaat

SEQ ID NO: 117251 - DNA, 8 bp, Unknown
  misc_feature (1)..( 8): Result.002 file - promoters60/1450682
tttttaat

SEQ ID NO: 117252 - DNA, 6 bp, Unknown
  misc_feature (1)..( 6): Result.002 file - promoters60/1450682
tcatat

SEQ ID NO: 117253 - DNA, 6 bp, Unknown
  misc_feature (1)..( 6): Result.002 file - promoters60/1450682
tcatat

SEQ ID NO: 117254 - DNA, 7 bp, Unknown
  misc_feature (1)..( 7): Result.002 file - promoters60/1450682
ttaggtg

SEQ ID NO: 117255 - DNA, 7 bp, Unknown
  misc_feature (1)..( 7): Result.002 file - promoters60/1450682
ttatgtg

SEQ ID NO: 117256 - DNA, 6 bp, Unknown
  misc_feature (1)..( 6): Result.002 file - promoters60/1450682
ttcaaa

SEQ ID NO: 117257 - DNA, 6 bp, Unknown
  misc_feature (1)..( 6): Result.002 file - promoters60/1450682
ttcaaa

SEQ ID NO: 117258 - DNA, 6 bp, Unknown
  misc_feature (1)..( 6): Result.002 file - promoters60/1450792
gttttt

SEQ ID NO: 117259 - DNA, 6 bp, Unknown
  misc_feature (1)..( 6): Result.002 file - promoters60/1450792
gttttt

SEQ ID NO: 117260 - DNA, 11 bp, Unknown
  misc_feature (1)..( 11): Result.002 file - promoters60/1450792
aacttcaattt

SEQ ID NO: 117261 - DNA, 11 bp, Unknown
  misc_feature (1)..( 11): Result.002 file - promoters60/1450792
aatgccaattt

SEQ ID NO: 117262 - DNA, 11 bp, Unknown
  misc_feature (1)..( 11): Result.002 file - promoters60/1450792
aactacaatta

SEQ ID NO: 117263 - DNA, 6 bp, Unknown
  misc_feature (1)..( 6): Result.002 file - promoters60/1450792
tctttt

SEQ ID NO: 117264 - DNA, 6 bp, Unknown
  misc_feature (1)..( 6): Result.002 file - promoters60/1450792
tctttt

SEQ ID NO: 117265 - DNA, 7 bp, Unknown
  misc_feature (1)..( 7): Result.002 file - promoters60/1450792
aacaatc

SEQ ID NO: 117266 - DNA, 7 bp, Unknown
  misc_feature (1)..( 7): Result.002 file - promoters60/1450792
aacaatc

SEQ ID NO: 117267 - DNA, 8 bp, Unknown
  misc_feature (1)..( 8): Result.002 file - promoters60/1450792
aatcccaa

SEQ ID NO: 117268 - DNA, 8 bp, Unknown
  misc_feature (1)..( 8): Result.002 file - promoters60/1450792
aataccaa

SEQ ID NO: 117269 - DNA, 6 bp, Unknown
  misc_feature (1)..( 6): Result.002 file - promoters60/1450792
tttttt

SEQ ID NO: 117270 - DNA, 6 bp, Unknown
  misc_feature (1)..( 6): Result.002 file - promoters60/1450792
tttttt

SEQ ID NO: 117271 - DNA, 6 bp, Unknown
  misc_feature (1)..( 6): Result.002 file - promoters60/1450792
tttctt

SEQ ID NO: 117272 - DNA, 6 bp, Unknown
  misc_feature (1)..( 6): Result.002 file - promoters60/1450792
tttctt

SEQ ID NO: 117273 - DNA, 8 bp, Unknown
  misc_feature (1)..( 8): Result.002 file - promoters60/1450792
aataactt

SEQ ID NO: 117274 - DNA, 8 bp, Unknown
  misc_feature (1)..( 8): Result.002 file - promoters60/1450792
aattactt

SEQ ID NO: 117275 - DNA, 6 bp, Unknown
  misc_feature (1)..( 6): Result.002 file - promoters60/1450792
tctttt

SEQ ID NO: 117276 - DNA, 6 bp, Unknown
  misc_feature (1)..( 6): Result.002 file - promoters60/1450792
tctttt

SEQ ID NO: 117277 - DNA, 8 bp, Unknown
  misc_feature (1)..( 8): Result.002 file - promoters60/1450792
tgaggttt

SEQ ID NO: 117278 - DNA, 8 bp, Unknown
  misc_feature (1)..( 8): Result.002 file - promoters60/1450792
tgagcttt

SEQ ID NO: 117279 - DNA, 7 bp, Unknown
  misc_feature (1)..( 7): Result.002 file - promoters60/1450792
ccaaatt

SEQ ID NO: 117280 - DNA, 7 bp, Unknown
  misc_feature (1)..( 7): Result.002 file - promoters60/1450792
ccaaatt

SEQ ID NO: 117281 - DNA, 7 bp, Unknown
  misc_feature (1)..( 7): Result.002 file - promoters60/1450792
tttgtat

SEQ ID NO: 117282 - DNA, 7 bp, Unknown
  misc_feature (1)..( 7): Result.002 file - promoters60/1450792
tttatat

SEQ ID NO: 117283 - DNA, 8 bp, Unknown
  misc_feature (1)..( 8): Result.002 file - promoters60/1450792
aaaaagaa

SEQ ID NO: 117284 - DNA, 8 bp, Unknown
  misc_feature (1)..( 8): Result.002 file - promoters60/1450792
aaatagaa

SEQ ID NO: 117285 - DNA, 6 bp, Unknown
  misc_feature (1)..( 6): Result.002 file - promoters60/1450792
agggtc

SEQ ID NO: 117286 - DNA, 6 bp, Unknown
  misc_feature (1)..( 6): Result.002 file - promoters60/1450792
agggtc

SEQ ID NO: 117287 - DNA, 6 bp, Unknown
  misc_feature (1)..( 6): Result.002 file - promoters60/1450792
tgcttt

SEQ ID NO: 117288 - DNA, 6 bp, Unknown
  misc_feature (1)..( 6): Result.002 file - promoters60/1450792
tgcttt

SEQ ID NO: 117289 - DNA, 6 bp, Unknown
  misc_feature (1)..( 6): Result.002 file - promoters60/1450792
tttatt

SEQ ID NO: 117290 - DNA, 6 bp, Unknown
  misc_feature (1)..( 6): Result.002 file - promoters60/1450792
tttatt

SEQ ID NO: 117291 - DNA, 6 bp, Unknown
  misc_feature (1)..( 6): Result.002 file - promoters60/1450792
caacaa

SEQ ID NO: 117292 - DNA, 6 bp, Unknown
  misc_feature (1)..( 6): Result.002 file - promoters60/1450792
caacaa

SEQ ID NO: 117293 - DNA, 6 bp, Unknown
  misc_feature (1)..( 6): Result.002 file - promoters60/1450792
gaaaca

SEQ ID NO: 117294 - DNA, 6 bp, Unknown
  misc_feature (1)..( 6): Result.002 file - promoters60/1450792
gaaaca

SEQ ID NO: 117295 - DNA, 8 bp, Unknown
  misc_feature (1)..( 8): Result.002 file - promoters60/1450792
aaaataag

SEQ ID NO: 117296 - DNA, 8 bp, Unknown
  misc_feature (1)..( 8): Result.002 file - promoters60/1450792
aaattaag

SEQ ID NO: 117297 - DNA, 8 bp, Unknown
  misc_feature (1)..( 8): Result.002 file - promoters60/1450807
taagaaca

SEQ ID NO: 117298 - DNA, 8 bp, Unknown
  misc_feature (1)..( 8): Result.002 file - promoters60/1450807
taaaaaca

SEQ ID NO: 117299 - DNA, 8 bp, Unknown
  misc_feature (1)..( 8): Result.002 file - promoters60/1450807
agagaaca

SEQ ID NO: 117300 - DNA, 8 bp, Unknown
  misc_feature (1)..( 8): Result.002 file - promoters60/1450807
caaaaaca

SEQ ID NO: 117301 - DNA, 10 bp, Unknown
  misc_feature (1)..( 10): Result.002 file - promoters60/1450807
aaatgaatca

SEQ ID NO: 117302 - DNA, 10 bp, Unknown
  misc_feature (1)..( 10): Result.002 file - promoters60/1450807
aaacgaatca

SEQ ID NO: 117303 - DNA, 10 bp, Unknown
  misc_feature (1)..( 10): Result.002 file - promoters60/1450807
aaacgattcc

SEQ ID NO: 117304 - DNA, 10 bp, Unknown
  misc_feature (1)..( 10): Result.002 file - promoters60/1450807
aaacaattat

SEQ ID NO: 117305 - DNA, 9 bp, Unknown
  misc_feature (1)..( 9): Result.002 file - promoters60/1450811
aaagattgt

SEQ ID NO: 117306 - DNA, 9 bp, Unknown
  misc_feature (1)..( 9): Result.002 file - promoters60/1450811
agagattgt

SEQ ID NO: 117307 - DNA, 9 bp, Unknown
  misc_feature (1)..( 9): Result.002 file - promoters60/1450811
aaaaattta

SEQ ID NO: 117308 - DNA, 8 bp, Unknown
  misc_feature (1)..( 8): Result.002 file - promoters60/1450811
ttacaaaa

SEQ ID NO: 117309 - DNA, 8 bp, Unknown
  misc_feature (1)..( 8): Result.002 file - promoters60/1450811
ttacaatg

SEQ ID NO: 117310 - DNA, 8 bp, Unknown
  misc_feature (1)..( 8): Result.002 file - promoters60/1450811
ttataaaa

SEQ ID NO: 117311 - DNA, 9 bp, Unknown
  misc_feature (1)..( 9): Result.002 file - promoters60/1450811
agatattta

SEQ ID NO: 117312 - DNA, 9 bp, Unknown
  misc_feature (1)..( 9): Result.002 file - promoters60/1450811
agatactta

SEQ ID NO: 117313 - DNA, 9 bp, Unknown
  misc_feature (1)..( 9): Result.002 file - promoters60/1450811
ggctactta

SEQ ID NO: 117314 - DNA, 8 bp, Unknown
  misc_feature (1)..( 8): Result.002 file - promoters60/1450811
ccactaaa

SEQ ID NO: 117315 - DNA, 8 bp, Unknown
  misc_feature (1)..( 8): Result.002 file - promoters60/1450811
ccattaat

SEQ ID NO: 117316 - DNA, 8 bp, Unknown
  misc_feature (1)..( 8): Result.002 file - promoters60/1450811
taattaat

SEQ ID NO: 117317 - DNA, 8 bp, Unknown
  misc_feature (1)..( 8): Result.002 file - promoters60/1450811
cagttttc

SEQ ID NO: 117318 - DNA, 8 bp, Unknown
  misc_feature (1)..( 8): Result.002 file - promoters60/1450811
tagttttg

SEQ ID NO: 117319 - DNA, 8 bp, Unknown
  misc_feature (1)..( 8): Result.002 file - promoters60/1450811
tagctttg

SEQ ID NO: 117320 - DNA, 10 bp, Unknown
  misc_feature (1)..( 10): Result.002 file - promoters60/1450811
tcttaatatg

SEQ ID NO: 117321 - DNA, 10 bp, Unknown
  misc_feature (1)..( 10): Result.002 file - promoters60/1450811
tctgaatatg

SEQ ID NO: 117322 - DNA, 10 bp, Unknown
  misc_feature (1)..( 10): Result.002 file - promoters60/1450811
ccttcatatt

SEQ ID NO: 117323 - DNA, 12 bp, Unknown
  misc_feature (1)..( 12): Result.002 file - promoters60/1450863
atggacttgtta

SEQ ID NO: 117324 - DNA, 12 bp, Unknown
  misc_feature (1)..( 12): Result.002 file - promoters60/1450863
atggccttttta

SEQ ID NO: 117325 - DNA, 7 bp, Unknown
  misc_feature (1)..( 7): Result.002 file - promoters60/1450863
actatgt

SEQ ID NO: 117326 - DNA, 7 bp, Unknown
  misc_feature (1)..( 7): Result.002 file - promoters60/1450863
actctgt

SEQ ID NO: 117327 - DNA, 6 bp, Unknown
  misc_feature (1)..( 6): Result.002 file - promoters60/1450863
tgagga

SEQ ID NO: 117328 - DNA, 6 bp, Unknown
  misc_feature (1)..( 6): Result.002 file - promoters60/1450863
tgagga

SEQ ID NO: 117329 - DNA, 7 bp, Unknown
  misc_feature (1)..( 7): Result.002 file - promoters60/1450863
attagtt

SEQ ID NO: 117330 - DNA, 7 bp, Unknown
  misc_feature (1)..( 7): Result.002 file - promoters60/1450863
attagtt

SEQ ID NO: 117331 - DNA, 8 bp, Unknown
  misc_feature (1)..( 8): Result.002 file - promoters60/1450863
ttagtgat

SEQ ID NO: 117332 - DNA, 8 bp, Unknown
  misc_feature (1)..( 8): Result.002 file - promoters60/1450863
ttagtgat

SEQ ID NO: 117333 - DNA, 7 bp, Unknown
  misc_feature (1)..( 7): Result.002 file - promoters60/1450863
tcaaact

SEQ ID NO: 117334 - DNA, 7 bp, Unknown
  misc_feature (1)..( 7): Result.002 file - promoters60/1450863
tcaaact

SEQ ID NO: 117335 - DNA, 9 bp, Unknown
  misc_feature (1)..( 9): Result.002 file - promoters60/1450863
tgtggtttc

SEQ ID NO: 117336 - DNA, 9 bp, Unknown
  misc_feature (1)..( 9): Result.002 file - promoters60/1450863
tgtggtttc

SEQ ID NO: 117337 - DNA, 7 bp, Unknown
  misc_feature (1)..( 7): Result.002 file - promoters60/1450863
aatgttc

SEQ ID NO: 117338 - DNA, 7 bp, Unknown
  misc_feature (1)..( 7): Result.002 file - promoters60/1450863
aatgttc

SEQ ID NO: 117339 - DNA, 7 bp, Unknown
  misc_feature (1)..( 7): Result.002 file - promoters60/1450863
gaaaaag

SEQ ID NO: 117340 - DNA, 7 bp, Unknown
  misc_feature (1)..( 7): Result.002 file - promoters60/1450863
gaagaag

SEQ ID NO: 117341 - DNA, 6 bp, Unknown
  misc_feature (1)..( 6): Result.002 file - promoters60/1455879
attaca

SEQ ID NO: 117342 - DNA, 6 bp, Unknown
  misc_feature (1)..( 6): Result.002 file - promoters60/1455879
attaca

SEQ ID NO: 117343 - DNA, 6 bp, Unknown
  misc_feature (1)..( 6): Result.002 file - promoters60/1455879
tgatta

SEQ ID NO: 117344 - DNA, 6 bp, Unknown
  misc_feature (1)..( 6): Result.002 file - promoters60/1455879
tgatta

SEQ ID NO: 117345 - DNA, 6 bp, Unknown
  misc_feature (1)..( 6): Result.002 file - promoters60/1455879
aaagtt

SEQ ID NO: 117346 - DNA, 6 bp, Unknown
  misc_feature (1)..( 6): Result.002 file - promoters60/1455879
aaagtt

SEQ ID NO: 117347 - DNA, 8 bp, Unknown
  misc_feature (1)..( 8): Result.002 file - promoters60/1455879
agaagatt

SEQ ID NO: 117348 - DNA, 8 bp, Unknown
  misc_feature (1)..( 8): Result.002 file - promoters60/1455879
agaatatt

SEQ ID NO: 117349 - DNA, 8 bp, Unknown
  misc_feature (1)..( 8): Result.002 file - promoters60/1455879
tcataaaa

SEQ ID NO: 117350 - DNA, 8 bp, Unknown
  misc_feature (1)..( 8): Result.002 file - promoters60/1455879
tcacaaaa

SEQ ID NO: 117351 - DNA, 11 bp, Unknown
  misc_feature (1)..( 11): Result.002 file - promoters60/1455879
aaaaaaatgaa

SEQ ID NO: 117352 - DNA, 11 bp, Unknown
  misc_feature (1)..( 11): Result.002 file - promoters60/1455879
aaataaatgaa

SEQ ID NO: 117353 - DNA, 9 bp, Unknown
  misc_feature (1)..( 9): Result.002 file - promoters60/1455879
gaaattatg

SEQ ID NO: 117354 - DNA, 9 bp, Unknown
  misc_feature (1)..( 9): Result.002 file - promoters60/1455879
gaatttatg

SEQ ID NO: 117355 - DNA, 7 bp, Unknown
  misc_feature (1)..( 7): Result.002 file - promoters60/1455879
tttattt

SEQ ID NO: 117356 - DNA, 7 bp, Unknown
  misc_feature (1)..( 7): Result.002 file - promoters60/1455879
tttgttt

SEQ ID NO: 117357 - DNA, 6 bp, Unknown
  misc_feature (1)..( 6): Result.002 file - promoters60/1455879
tattta

SEQ ID NO: 117358 - DNA, 6 bp, Unknown
  misc_feature (1)..( 6): Result.002 file - promoters60/1455879
tattta

SEQ ID NO: 117359 - DNA, 6 bp, Unknown
  misc_feature (1)..( 6): Result.002 file - promoters60/1455879
aaacga

SEQ ID NO: 117360 - DNA, 6 bp, Unknown
  misc_feature (1)..( 6): Result.002 file - promoters60/1455879
aaacga

SEQ ID NO: 117361 - DNA, 7 bp, Unknown
  misc_feature (1)..( 7): Result.002 file - promoters60/1455879
agacatg

SEQ ID NO: 117362 - DNA, 7 bp, Unknown
  misc_feature (1)..( 7): Result.002 file - promoters60/1455879
agatatg

SEQ ID NO: 117363 - DNA, 6 bp, Unknown
  misc_feature (1)..( 6): Result.002 file - promoters60/1455879
agtaaa

SEQ ID NO: 117364 - DNA, 6 bp, Unknown
  misc_feature (1)..( 6): Result.002 file - promoters60/1455879
agtaaa

SEQ ID NO: 117365 - DNA, 7 bp, Unknown
  misc_feature (1)..( 7): Result.002 file - promoters60/1455879
aatcggg

SEQ ID NO: 117366 - DNA, 7 bp, Unknown
  misc_feature (1)..( 7): Result.002 file - promoters60/1455879
aattggg

SEQ ID NO: 117367 - DNA, 8 bp, Unknown
  misc_feature (1)..( 8): Result.002 file - promoters60/1455879
gaaagaaa

SEQ ID NO: 117368 - DNA, 8 bp, Unknown
  misc_feature (1)..( 8): Result.002 file - promoters60/1455879
gaaacaaa

SEQ ID NO: 117369 - DNA, 10 bp, Unknown
  misc_feature (1)..( 10): Result.002 file - promoters60/1455879
ggaaaagaaa

SEQ ID NO: 117370 - DNA, 10 bp, Unknown
  misc_feature (1)..( 10): Result.002 file - promoters60/1455879
ggaaatgaaa

SEQ ID NO: 117371 - DNA, 7 bp, Unknown
  misc_feature (1)..( 7): Result.002 file - promoters60/1455879
cccacta

SEQ ID NO: 117372 - DNA, 7 bp, Unknown
  misc_feature (1)..( 7): Result.002 file - promoters60/1455879
cccacta

SEQ ID NO: 117373 - DNA, 9 bp, Unknown
  misc_feature (1)..( 9): Result.002 file - promoters60/1455879
aaagaaaag

SEQ ID NO: 117374 - DNA, 9 bp, Unknown
  misc_feature (1)..( 9): Result.002 file - promoters60/1455879
aaagtaaag

SEQ ID NO: 117375 - DNA, 7 bp, Unknown
  misc_feature (1)..( 7): Result.002 file - promoters60/1455879
gtatata

SEQ ID NO: 117376 - DNA, 7 bp, Unknown
  misc_feature (1)..( 7): Result.002 file - promoters60/1455879
gtatata

SEQ ID NO: 117377 - DNA, 7 bp, Unknown
  misc_feature (1)..( 7): Result.002 file - promoters60/1455908
aaggtta

SEQ ID NO: 117378 - DNA, 7 bp, Unknown
  misc_feature (1)..( 7): Result.002 file - promoters60/1455908
aagatta

SEQ ID NO: 117379 - DNA, 9 bp, Unknown
  misc_feature (1)..( 9): Result.002 file - promoters60/1455908
tatttgttc

SEQ ID NO: 117380 - DNA, 9 bp, Unknown
  misc_feature (1)..( 9): Result.002 file - promoters60/1455908
gatttattc

SEQ ID NO: 117381 - DNA, 9 bp, Unknown
  misc_feature (1)..( 9): Result.002 file - promoters60/1455908
tatttgtaa

SEQ ID NO: 117382 - DNA, 8 bp, Unknown
  misc_feature (1)..( 8): Result.002 file - promoters60/1455908
atgattca

SEQ ID NO: 117383 - DNA, 8 bp, Unknown
  misc_feature (1)..( 8): Result.002 file - promoters60/1455908
atgaatca

SEQ ID NO: 117384 - DNA, 6 bp, Unknown
  misc_feature (1)..( 6): Result.002 file - promoters60/1455908
aagaaa

SEQ ID NO: 117385 - DNA, 6 bp, Unknown
  misc_feature (1)..( 6): Result.002 file - promoters60/1455908
aagaaa

SEQ ID NO: 117386 - DNA, 9 bp, Unknown
  misc_feature (1)..( 9): Result.002 file - promoters60/1455908
tttcataca

SEQ ID NO: 117387 - DNA, 9 bp, Unknown
  misc_feature (1)..( 9): Result.002 file - promoters60/1455908
tttaataat

SEQ ID NO: 117388 - DNA, 9 bp, Unknown
  misc_feature (1)..( 9): Result.002 file - promoters60/1455908
ggtaataat

SEQ ID NO: 117389 - DNA, 6 bp, Unknown
  misc_feature (1)..( 6): Result.002 file - promoters60/1455908
tataat

SEQ ID NO: 117390 - DNA, 6 bp, Unknown
  misc_feature (1)..( 6): Result.002 file - promoters60/1455908
tataat

SEQ ID NO: 117391 - DNA, 12 bp, Unknown
  misc_feature (1)..( 12): Result.002 file - promoters60/1455908
taatctaagaag

SEQ ID NO: 117392 - DNA, 12 bp, Unknown
  misc_feature (1)..( 12): Result.002 file - promoters60/1455908
taatcttagaag

SEQ ID NO: 117393 - DNA, 7 bp, Unknown
  misc_feature (1)..( 7): Result.002 file - promoters60/1455908
attctat

SEQ ID NO: 117394 - DNA, 7 bp, Unknown
  misc_feature (1)..( 7): Result.002 file - promoters60/1455908
attgtat

SEQ ID NO: 117395 - DNA, 7 bp, Unknown
  misc_feature (1)..( 7): Result.002 file - promoters60/1455908
ataatag

SEQ ID NO: 117396 - DNA, 7 bp, Unknown
  misc_feature (1)..( 7): Result.002 file - promoters60/1455908
atattag

SEQ ID NO: 117397 - DNA, 8 bp, Unknown
  misc_feature (1)..( 8): Result.002 file - promoters60/1455908
tatcatat

SEQ ID NO: 117398 - DNA, 8 bp, Unknown
  misc_feature (1)..( 8): Result.002 file - promoters60/1455908
tataatat

SEQ ID NO: 117399 - DNA, 6 bp, Unknown
  misc_feature (1)..( 6): Result.002 file - promoters60/1455908
attttt

SEQ ID NO: 117400 - DNA, 6 bp, Unknown
  misc_feature (1)..( 6): Result.002 file - promoters60/1455908
attttt

SEQ ID NO: 117401 - DNA, 6 bp, Unknown
  misc_feature (1)..( 6): Result.002 file - promoters60/1455908
catgaa

SEQ ID NO: 117402 - DNA, 6 bp, Unknown
  misc_feature (1)..( 6): Result.002 file - promoters60/1455908
catgaa

SEQ ID NO: 117403 - DNA, 7 bp, Unknown
  misc_feature (1)..( 7): Result.002 file - promoters60/1455908
tattctc

SEQ ID NO: 117404 - DNA, 7 bp, Unknown
  misc_feature (1)..( 7): Result.002 file - promoters60/1455908
tatcctc

SEQ ID NO: 117405 - DNA, 9 bp, Unknown
  misc_feature (1)..( 9): Result.002 file - promoters60/1455908
atttcacaa

SEQ ID NO: 117406 - DNA, 9 bp, Unknown
  misc_feature (1)..( 9): Result.002 file - promoters60/1455908
atttaacaa

SEQ ID NO: 117407 - DNA, 12 bp, Unknown
  misc_feature (1)..( 12): Result.002 file - promoters60/1455908
tagatttattaa

SEQ ID NO: 117408 - DNA, 12 bp, Unknown
  misc_feature (1)..( 12): Result.002 file - promoters60/1455908
tagaattactaa

SEQ ID NO: 117409 - DNA, 6 bp, Unknown
  misc_feature (1)..( 6): Result.002 file - promoters60/1455908
aatttt

SEQ ID NO: 117410 - DNA, 6 bp, Unknown
  misc_feature (1)..( 6): Result.002 file - promoters60/1455908
aatttt

SEQ ID NO: 117411 - DNA, 6 bp, Unknown
  misc_feature (1)..( 6): Result.002 file - promoters60/1455908
atattt

SEQ ID NO: 117412 - DNA, 6 bp, Unknown
  misc_feature (1)..( 6): Result.002 file - promoters60/1455908
atattt

SEQ ID NO: 117413 - DNA, 7 bp, Unknown
  misc_feature (1)..( 7): Result.002 file - promoters60/1455908
tatccaa

SEQ ID NO: 117414 - DNA, 7 bp, Unknown
  misc_feature (1)..( 7): Result.002 file - promoters60/1455908
tatacaa

SEQ ID NO: 117415 - DNA, 11 bp, Unknown
  misc_feature (1)..( 11): Result.002 file - promoters60/1455908
ttttctacaat

SEQ ID NO: 117416 - DNA, 11 bp, Unknown
  misc_feature (1)..( 11): Result.002 file - promoters60/1455908
ttttctaaaat

SEQ ID NO: 117417 - DNA, 7 bp, Unknown
  misc_feature (1)..( 7): Result.002 file - promoters60/1455908
tataatt

SEQ ID NO: 117418 - DNA, 7 bp, Unknown
  misc_feature (1)..( 7): Result.002 file - promoters60/1455908
tatgatt

SEQ ID NO: 117419 - DNA, 6 bp, Unknown
  misc_feature (1)..( 6): Result.002 file - promoters60/1455908
aaaaaa

SEQ ID NO: 117420 - DNA, 6 bp, Unknown
  misc_feature (1)..( 6): Result.002 file - promoters60/1455908
aaaaaa

SEQ ID NO: 117421 - DNA, 8 bp, Unknown
  misc_feature (1)..( 8): Result.002 file - promoters60/1455908
taaatttc

SEQ ID NO: 117422 - DNA, 8 bp, Unknown
  misc_feature (1)..( 8): Result.002 file - promoters60/1455908
taactttc

SEQ ID NO: 117423 - DNA, 7 bp, Unknown
  misc_feature (1)..( 7): Result.002 file - promoters60/1455908
aagagaa

SEQ ID NO: 117424 - DNA, 7 bp, Unknown
  misc_feature (1)..( 7): Result.002 file - promoters60/1455908
aagtgaa

SEQ ID NO: 117425 - DNA, 8 bp, Unknown
  misc_feature (1)..( 8): Result.002 file - promoters60/1455908
atggcttg

SEQ ID NO: 117426 - DNA, 8 bp, Unknown
  misc_feature (1)..( 8): Result.002 file - promoters60/1455908
atgggttg

SEQ ID NO: 117427 - DNA, 11 bp, Unknown
  misc_feature (1)..( 11): Result.002 file - promoters60/1455928
tcacgaataga

SEQ ID NO: 117428 - DNA, 11 bp, Unknown
  misc_feature (1)..( 11): Result.002 file - promoters60/1455928
tcacaaataca

SEQ ID NO: 117429 - DNA, 11 bp, Unknown
  misc_feature (1)..( 11): Result.002 file - promoters60/1455928
atacaaacaca

SEQ ID NO: 117430 - DNA, 12 bp, Unknown
  misc_feature (1)..( 12): Result.002 file - promoters60/1455928
tatataaagaga

SEQ ID NO: 117431 - DNA, 12 bp, Unknown
  misc_feature (1)..( 12): Result.002 file - promoters60/1455928
tgtataaataga

SEQ ID NO: 117432 - DNA, 12 bp, Unknown
  misc_feature (1)..( 12): Result.002 file - promoters60/1455928
tatgtaatcgaa

SEQ ID NO: 117433 - DNA, 8 bp, Unknown
  misc_feature (1)..( 8): Result.002 file - promoters60/1455928
atgtattt

SEQ ID NO: 117434 - DNA, 8 bp, Unknown
  misc_feature (1)..( 8): Result.002 file - promoters60/1455928
ctgtgttt

SEQ ID NO: 117435 - DNA, 8 bp, Unknown
  misc_feature (1)..( 8): Result.002 file - promoters60/1455928
atgtcttt

SEQ ID NO: 117436 - DNA, 8 bp, Unknown
  misc_feature (1)..( 8): Result.002 file - promoters60/1455932
tatagtat

SEQ ID NO: 117437 - DNA, 8 bp, Unknown
  misc_feature (1)..( 8): Result.002 file - promoters60/1455932
aatattat

SEQ ID NO: 117438 - DNA, 8 bp, Unknown
  misc_feature (1)..( 8): Result.002 file - promoters60/1455932
aataaagt

SEQ ID NO: 117439 - DNA, 9 bp, Unknown
  misc_feature (1)..( 9): Result.002 file - promoters60/1455932
atgtttttg

SEQ ID NO: 117440 - DNA, 9 bp, Unknown
  misc_feature (1)..( 9): Result.002 file - promoters60/1455932
tggtttttc

SEQ ID NO: 117441 - DNA, 9 bp, Unknown
  misc_feature (1)..( 9): Result.002 file - promoters60/1455932
atgtctttg

SEQ ID NO: 117442 - DNA, 10 bp, Unknown
  misc_feature (1)..( 10): Result.002 file - promoters60/1455932
atgtttttga

SEQ ID NO: 117443 - DNA, 10 bp, Unknown
  misc_feature (1)..( 10): Result.002 file - promoters60/1455932
tttgttttga

SEQ ID NO: 117444 - DNA, 10 bp, Unknown
  misc_feature (1)..( 10): Result.002 file - promoters60/1455932
atgtctttgt

SEQ ID NO: 117445 - DNA, 8 bp, Unknown
  misc_feature (1)..( 8): Result.002 file - promoters60/1455932
attggtag

SEQ ID NO: 117446 - DNA, 8 bp, Unknown
  misc_feature (1)..( 8): Result.002 file - promoters60/1455932
atttgtat

SEQ ID NO: 117447 - DNA, 8 bp, Unknown
  misc_feature (1)..( 8): Result.002 file - promoters60/1455932
atttttat

SEQ ID NO: 117448 - DNA, 8 bp, Unknown
  misc_feature (1)..( 8): Result.002 file - promoters60/1455932
aaaaactt

SEQ ID NO: 117449 - DNA, 8 bp, Unknown
  misc_feature (1)..( 8): Result.002 file - promoters60/1455932
aaaaacaa

SEQ ID NO: 117450 - DNA, 8 bp, Unknown
  misc_feature (1)..( 8): Result.002 file - promoters60/1455932
taaatcaa

SEQ ID NO: 117451 - DNA, 7 bp, Unknown
  misc_feature (1)..( 7): Result.002 file - promoters60/1455936
ttagtta

SEQ ID NO: 117452 - DNA, 7 bp, Unknown
  misc_feature (1)..( 7): Result.002 file - promoters60/1455936
ttaatta

SEQ ID NO: 117453 - DNA, 7 bp, Unknown
  misc_feature (1)..( 7): Result.002 file - promoters60/1455936
ttagttt

SEQ ID NO: 117454 - DNA, 8 bp, Unknown
  misc_feature (1)..( 8): Result.002 file - promoters60/1455936
aatataaa

SEQ ID NO: 117455 - DNA, 8 bp, Unknown
  misc_feature (1)..( 8): Result.002 file - promoters60/1455936
catataat

SEQ ID NO: 117456 - DNA, 8 bp, Unknown
  misc_feature (1)..( 8): Result.002 file - promoters60/1455936
aatctaaa

SEQ ID NO: 117457 - DNA, 9 bp, Unknown
  misc_feature (1)..( 9): Result.002 file - promoters60/1455936
aaaagctaa

SEQ ID NO: 117458 - DNA, 9 bp, Unknown
  misc_feature (1)..( 9): Result.002 file - promoters60/1455936
aaaagctaa

SEQ ID NO: 117459 - DNA, 9 bp, Unknown
  misc_feature (1)..( 9): Result.002 file - promoters60/1455936
aaatgctct

SEQ ID NO: 117460 - DNA, 7 bp, Unknown
  misc_feature (1)..( 7): Result.002 file - promoters60/1455936
aatttaa

SEQ ID NO: 117461 - DNA, 7 bp, Unknown
  misc_feature (1)..( 7): Result.002 file - promoters60/1455936
aatttag

SEQ ID NO: 117462 - DNA, 7 bp, Unknown
  misc_feature (1)..( 7): Result.002 file - promoters60/1455936
gatttag

SEQ ID NO: 117463 - DNA, 8 bp, Unknown
  misc_feature (1)..( 8): Result.002 file - promoters60/1455936
aaaaatac

SEQ ID NO: 117464 - DNA, 8 bp, Unknown
  misc_feature (1)..( 8): Result.002 file - promoters60/1455936
aaaaataa

SEQ ID NO: 117465 - DNA, 9 bp, Unknown
  misc_feature (1)..( 9): Result.002 file - promoters60/1455936
aaacaataa

SEQ ID NO: 117466 - DNA, 8 bp, Unknown
  misc_feature (1)..( 8): Result.002 file - promoters60/1455936
ctgaaaat

SEQ ID NO: 117467 - DNA, 8 bp, Unknown
  misc_feature (1)..( 8): Result.002 file - promoters60/1455936
atgaaaag

SEQ ID NO: 117468 - DNA, 8 bp, Unknown
  misc_feature (1)..( 8): Result.002 file - promoters60/1455936
atgaaaag

SEQ ID NO: 117469 - DNA, 11 bp, Unknown
  misc_feature (1)..( 11): Result.002 file - promoters60/1455944
aaataaaatgt

SEQ ID NO: 117470 - DNA, 11 bp, Unknown
  misc_feature (1)..( 11): Result.002 file - promoters60/1455944
tgctaaaattg

SEQ ID NO: 117471 - DNA, 11 bp, Unknown
  misc_feature (1)..( 11): Result.002 file - promoters60/1455944
aaagaaaacat

SEQ ID NO: 117472 - DNA, 11 bp, Unknown
  misc_feature (1)..( 11): Result.002 file - promoters60/1455944
acgtaagattg

SEQ ID NO: 117473 - DNA, 11 bp, Unknown
  misc_feature (1)..( 11): Result.002 file - promoters60/1455944
caaaatagatt

SEQ ID NO: 117474 - DNA, 11 bp, Unknown
  misc_feature (1)..( 11): Result.002 file - promoters60/1455944
aaaaaaagaaa

SEQ ID NO: 117475 - DNA, 11 bp, Unknown
  misc_feature (1)..( 11): Result.002 file - promoters60/1455944
caataaagtag

SEQ ID NO: 117476 - DNA, 11 bp, Unknown
  misc_feature (1)..( 11): Result.002 file - promoters60/1455944
aaataaagctt

SEQ ID NO: 117477 - DNA, 11 bp, Unknown
  misc_feature (1)..( 11): Result.002 file - promoters60/1455944
caacaaaatag

SEQ ID NO: 117478 - DNA, 11 bp, Unknown
  misc_feature (1)..( 11): Result.002 file - promoters60/1455944
aaacaaagaaa

SEQ ID NO: 117479 - DNA, 11 bp, Unknown
  misc_feature (1)..( 11): Result.002 file - promoters60/1455944
caataaagtag

SEQ ID NO: 117480 - DNA, 11 bp, Unknown
  misc_feature (1)..( 11): Result.002 file - promoters60/1455944
aaataaagctt

SEQ ID NO: 117481 - DNA, 7 bp, Unknown
  misc_feature (1)..( 7): Result.002 file - promoters60/1455944
aaattaa

SEQ ID NO: 117482 - DNA, 7 bp, Unknown
  misc_feature (1)..( 7): Result.002 file - promoters60/1455944
aaattat

SEQ ID NO: 117483 - DNA, 7 bp, Unknown
  misc_feature (1)..( 7): Result.002 file - promoters60/1455944
aaagtaa

SEQ ID NO: 117484 - DNA, 7 bp, Unknown
  misc_feature (1)..( 7): Result.002 file - promoters60/1455944
aaatatt

SEQ ID NO: 117485 - DNA, 8 bp, Unknown
  misc_feature (1)..( 8): Result.002 file - promoters60/1455944
ggaaaaaa

SEQ ID NO: 117486 - DNA, 8 bp, Unknown
  misc_feature (1)..( 8): Result.002 file - promoters60/1455944
tgaacaaa

SEQ ID NO: 117487 - DNA, 8 bp, Unknown
  misc_feature (1)..( 8): Result.002 file - promoters60/1455944
tgaccaaa

SEQ ID NO: 117488 - DNA, 11 bp, Unknown
  misc_feature (1)..( 11): Result.002 file - promoters60/1455944
gaatctctctg

SEQ ID NO: 117489 - DNA, 11 bp, Unknown
  misc_feature (1)..( 11): Result.002 file - promoters60/1455944
caatcactctc

SEQ ID NO: 117490 - DNA, 11 bp, Unknown
  misc_feature (1)..( 11): Result.002 file - promoters60/1455944
caatccctctc

SEQ ID NO: 117491 - DNA, 10 bp, Unknown
  misc_feature (1)..( 10): Result.002 file - promoters60/1455944
tatatatacc

SEQ ID NO: 117492 - DNA, 10 bp, Unknown
  misc_feature (1)..( 10): Result.002 file - promoters60/1455944
tatataatag

SEQ ID NO: 117493 - DNA, 10 bp, Unknown
  misc_feature (1)..( 10): Result.002 file - promoters60/1455944
tatataaacc

SEQ ID NO: 117494 - DNA, 10 bp, Unknown
  misc_feature (1)..( 10): Result.002 file - promoters60/1455944
tatttaaaca

SEQ ID NO: 117495 - DNA, 9 bp, Unknown
  misc_feature (1)..( 9): Result.002 file - promoters60/1455944
ttgaccagg

SEQ ID NO: 117496 - DNA, 9 bp, Unknown
  misc_feature (1)..( 9): Result.002 file - promoters60/1455944
ttgaccaaa

SEQ ID NO: 117497 - DNA, 9 bp, Unknown
  misc_feature (1)..( 9): Result.002 file - promoters60/1455944
atgaacaaa

SEQ ID NO: 117498 - DNA, 15 bp, Unknown
  misc_feature (1)..( 15): Result.002 file - promoters60/1455956
gcgattagaaacaga

SEQ ID NO: 117499 - DNA, 15 bp, Unknown
  misc_feature (1)..( 15): Result.002 file - promoters60/1455956
cattttaaaaaaaga

SEQ ID NO: 117500 - DNA, 15 bp, Unknown
  misc_feature (1)..( 15): Result.002 file - promoters60/1455956
ttgatgagaacctta

SEQ ID NO: 117501 - DNA, 15 bp, Unknown
  misc_feature (1)..( 15): Result.002 file - promoters60/1455956
tgtattgtaaactag

SEQ ID NO: 117502 - DNA, 15 bp, Unknown
  misc_feature (1)..( 15): Result.002 file - promoters60/1455956
tgtgtgtgaactcgt

SEQ ID NO: 117503 - DNA, 15 bp, Unknown
  misc_feature (1)..( 15): Result.002 file - promoters60/1455956
ttgatgaagaagtca

SEQ ID NO: 117504 - DNA, 15 bp, Unknown
  misc_feature (1)..( 15): Result.002 file - promoters60/1455956
tcggtttgatttcga

SEQ ID NO: 117505 - DNA, 15 bp, Unknown
  misc_feature (1)..( 15): Result.002 file - promoters60/1455956
tttcttggaaattct

SEQ ID NO: 117506 - DNA, 16 bp, Unknown
  misc_feature (1)..( 16): Result.002 file - promoters60/1455972
aatattttcaaaatca

SEQ ID NO: 117507 - DNA, 16 bp, Unknown
  misc_feature (1)..( 16): Result.002 file - promoters60/1455972
aataattttaaaaaag

SEQ ID NO: 117508 - DNA, 16 bp, Unknown
  misc_feature (1)..( 16): Result.002 file - promoters60/1455972
aggttaatcacaatgc

SEQ ID NO: 117509 - DNA, 17 bp, Unknown
  misc_feature (1)..( 17): Result.002 file - promoters60/1455972
tacatgattaaacattc

SEQ ID NO: 117510 - DNA, 17 bp, Unknown
  misc_feature (1)..( 17): Result.002 file - promoters60/1455972
caaataagcaaaaatga

SEQ ID NO: 117511 - DNA, 17 bp, Unknown
  misc_feature (1)..( 17): Result.002 file - promoters60/1455972
aggacagtcaaatatga

SEQ ID NO: 117512 - DNA, 10 bp, Unknown
  misc_feature (1)..( 10): Result.002 file - promoters60/1455972
atagattttt

SEQ ID NO: 117513 - DNA, 10 bp, Unknown
  misc_feature (1)..( 10): Result.002 file - promoters60/1455972
atagaatttt

SEQ ID NO: 117514 - DNA, 10 bp, Unknown
  misc_feature (1)..( 10): Result.002 file - promoters60/1455972
atagcttttc

SEQ ID NO: 117515 - DNA, 10 bp, Unknown
  misc_feature (1)..( 10): Result.002 file - promoters60/1455972
tgagcgttta

SEQ ID NO: 117516 - DNA, 11 bp, Unknown
  misc_feature (1)..( 11): Result.002 file - promoters60/1455972
ttcgattagtt

SEQ ID NO: 117517 - DNA, 11 bp, Unknown
  misc_feature (1)..( 11): Result.002 file - promoters60/1455972
gatgattaggt

SEQ ID NO: 117518 - DNA, 11 bp, Unknown
  misc_feature (1)..( 11): Result.002 file - promoters60/1455972
gatgactagtg

SEQ ID NO: 117519 - DNA, 11 bp, Unknown
  misc_feature (1)..( 11): Result.002 file - promoters60/1455972
atctactagtg

SEQ ID NO: 117520 - DNA, 10 bp, Unknown
  misc_feature (1)..( 10): Result.002 file - promoters60/1455972
aacaatcatc

SEQ ID NO: 117521 - DNA, 10 bp, Unknown
  misc_feature (1)..( 10): Result.002 file - promoters60/1455972
cacaaacata

SEQ ID NO: 117522 - DNA, 10 bp, Unknown
  misc_feature (1)..( 10): Result.002 file - promoters60/1455972
ttcaaatata

SEQ ID NO: 117523 - DNA, 10 bp, Unknown
  misc_feature (1)..( 10): Result.002 file - promoters60/1455972
accatatatt

SEQ ID NO: 117524 - DNA, 10 bp, Unknown
  misc_feature (1)..( 10): Result.002 file - promoters60/1455972
ttcagataaa

SEQ ID NO: 117525 - DNA, 10 bp, Unknown
  misc_feature (1)..( 10): Result.002 file - promoters60/1455972
gacagacaga

SEQ ID NO: 117526 - DNA, 12 bp, Unknown
  misc_feature (1)..( 12): Result.002 file - promoters60/1455972
tagcagtaatca

SEQ ID NO: 117527 - DNA, 12 bp, Unknown
  misc_feature (1)..( 12): Result.002 file - promoters60/1455972
atgcaataaacg

SEQ ID NO: 117528 - DNA, 12 bp, Unknown
  misc_feature (1)..( 12): Result.002 file - promoters60/1455972
aagcaataaaag

SEQ ID NO: 117529 - DNA, 12 bp, Unknown
  misc_feature (1)..( 12): Result.002 file - promoters60/1455972
atgcgataaacg

SEQ ID NO: 117530 - DNA, 13 bp, Unknown
  misc_feature (1)..( 13): Result.002 file - promoters60/1455972
ttagttacataat

SEQ ID NO: 117531 - DNA, 13 bp, Unknown
  misc_feature (1)..( 13): Result.002 file - promoters60/1455972
aaacatacttaaa

SEQ ID NO: 117532 - DNA, 13 bp, Unknown
  misc_feature (1)..( 13): Result.002 file - promoters60/1455972
aaaattagatatt

SEQ ID NO: 117533 - DNA, 13 bp, Unknown
  misc_feature (1)..( 13): Result.002 file - promoters60/1455972
ctagtcacaaaat

SEQ ID NO: 117534 - DNA, 13 bp, Unknown
  misc_feature (1)..( 13): Result.002 file - promoters60/1455972
ctaatcacctcgt

SEQ ID NO: 117535 - DNA, 12 bp, Unknown
  misc_feature (1)..( 12): Result.002 file - promoters60/1455972
ttcaaatatatt

SEQ ID NO: 117536 - DNA, 12 bp, Unknown
  misc_feature (1)..( 12): Result.002 file - promoters60/1455972
gagaaagataat

SEQ ID NO: 117537 - DNA, 12 bp, Unknown
  misc_feature (1)..( 12): Result.002 file - promoters60/1455972
cacaaacataac

SEQ ID NO: 117538 - DNA, 12 bp, Unknown
  misc_feature (1)..( 12): Result.002 file - promoters60/1455972
aaaccatatatt

SEQ ID NO: 117539 - DNA, 12 bp, Unknown
  misc_feature (1)..( 12): Result.002 file - promoters60/1455972
ttcagataaaac

SEQ ID NO: 117540 - DNA, 9 bp, Unknown
  misc_feature (1)..( 9): Result.002 file - promoters60/1455972
atattaaaa

SEQ ID NO: 117541 - DNA, 9 bp, Unknown
  misc_feature (1)..( 9): Result.002 file - promoters60/1455972
ataataagc

SEQ ID NO: 117542 - DNA, 9 bp, Unknown
  misc_feature (1)..( 9): Result.002 file - promoters60/1455972
ataatatgg

SEQ ID NO: 117543 - DNA, 9 bp, Unknown
  misc_feature (1)..( 9): Result.002 file - promoters60/1455972
ctaataagt

SEQ ID NO: 117544 - DNA, 9 bp, Unknown
  misc_feature (1)..( 9): Result.002 file - promoters60/1455972
acaatgagc

SEQ ID NO: 117545 - DNA, 10 bp, Unknown
  misc_feature (1)..( 10): Result.002 file - promoters60/1455972
aaaaatgaag

SEQ ID NO: 117546 - DNA, 10 bp, Unknown
  misc_feature (1)..( 10): Result.002 file - promoters60/1455972
ccaaatgaca

SEQ ID NO: 117547 - DNA, 11 bp, Unknown
  misc_feature (1)..( 11): Result.002 file - promoters60/1455972
caaatatgaca

SEQ ID NO: 117548 - DNA, 11 bp, Unknown
  misc_feature (1)..( 11): Result.002 file - promoters60/1455972
gaacaattaca

SEQ ID NO: 117549 - DNA, 11 bp, Unknown
  misc_feature (1)..( 11): Result.002 file - promoters60/1456000
gacataaattc

SEQ ID NO: 117550 - DNA, 11 bp, Unknown
  misc_feature (1)..( 11): Result.002 file - promoters60/1456000
aacaaaaaaaa

SEQ ID NO: 117551 - DNA, 11 bp, Unknown
  misc_feature (1)..( 11): Result.002 file - promoters60/1456000
aacaaaacaaa

SEQ ID NO: 117552 - DNA, 7 bp, Unknown
  misc_feature (1)..( 7): Result.002 file - promoters60/1456000
tggacaa

SEQ ID NO: 117553 - DNA, 7 bp, Unknown
  misc_feature (1)..( 7): Result.002 file - promoters60/1456000
tggtcaa

SEQ ID NO: 117554 - DNA, 8 bp, Unknown
  misc_feature (1)..( 8): Result.002 file - promoters60/1456000
caaaagaa

SEQ ID NO: 117555 - DNA, 8 bp, Unknown
  misc_feature (1)..( 8): Result.002 file - promoters60/1456000
caacagaa

SEQ ID NO: 117556 - DNA, 8 bp, Unknown
  misc_feature (1)..( 8): Result.002 file - promoters60/1456000
caacagat

SEQ ID NO: 117557 - DNA, 7 bp, Unknown
  misc_feature (1)..( 7): Result.002 file - promoters60/1456000
aaccaaa

SEQ ID NO: 117558 - DNA, 7 bp, Unknown
  misc_feature (1)..( 7): Result.002 file - promoters60/1456000
aaccaaa

SEQ ID NO: 117559 - DNA, 9 bp, Unknown
  misc_feature (1)..( 9): Result.002 file - promoters60/1456000
taaaaaatc

SEQ ID NO: 117560 - DNA, 9 bp, Unknown
  misc_feature (1)..( 9): Result.002 file - promoters60/1456000
aaaacaatc

SEQ ID NO: 117561 - DNA, 9 bp, Unknown
  misc_feature (1)..( 9): Result.002 file - promoters60/1456000
aaaaaaatt

SEQ ID NO: 117562 - DNA, 9 bp, Unknown
  misc_feature (1)..( 9): Result.002 file - promoters60/1456000
aaagaaagt

SEQ ID NO: 117563 - DNA, 9 bp, Unknown
  misc_feature (1)..( 9): Result.002 file - promoters60/1456000
aaacaaaga

SEQ ID NO: 117564 - DNA, 9 bp, Unknown
  misc_feature (1)..( 9): Result.002 file - promoters60/1456000
aaaaaaaaa

SEQ ID NO: 117565 - DNA, 6 bp, Unknown
  misc_feature (1)..( 6): Result.002 file - promoters60/1456000
attaaa

SEQ ID NO: 117566 - DNA, 6 bp, Unknown
  misc_feature (1)..( 6): Result.002 file - promoters60/1456000
attaaa

SEQ ID NO: 117567 - DNA, 6 bp, Unknown
  misc_feature (1)..( 6): Result.002 file - promoters60/1456000
gagaaa

SEQ ID NO: 117568 - DNA, 6 bp, Unknown
  misc_feature (1)..( 6): Result.002 file - promoters60/1456000
gagaaa

SEQ ID NO: 117569 - DNA, 9 bp, Unknown
  misc_feature (1)..( 9): Result.002 file - promoters60/1456000
tggtgacaa

SEQ ID NO: 117570 - DNA, 9 bp, Unknown
  misc_feature (1)..( 9): Result.002 file - promoters60/1456000
tggagacaa

SEQ ID NO: 117571 - DNA, 6 bp, Unknown
  misc_feature (1)..( 6): Result.002 file - promoters60/1456000
ttaaaa

SEQ ID NO: 117572 - DNA, 6 bp, Unknown
  misc_feature (1)..( 6): Result.002 file - promoters60/1456000
ttaaaa

SEQ ID NO: 117573 - DNA, 6 bp, Unknown
  misc_feature (1)..( 6): Result.002 file - promoters60/1456000
ccaaaa

SEQ ID NO: 117574 - DNA, 6 bp, Unknown
  misc_feature (1)..( 6): Result.002 file - promoters60/1456000
ccaaaa

SEQ ID NO: 117575 - DNA, 15 bp, Unknown
  misc_feature (1)..( 15): Result.002 file - promoters60/1456000
aaagaaaaattccaa

SEQ ID NO: 117576 - DNA, 15 bp, Unknown
  misc_feature (1)..( 15): Result.002 file - promoters60/1456000
aaataaaaatcccaa

SEQ ID NO: 117577 - DNA, 13 bp, Unknown
  misc_feature (1)..( 13): Result.002 file - promoters60/1456000
caagaaaaaaaaa

SEQ ID NO: 117578 - DNA, 13 bp, Unknown
  misc_feature (1)..( 13): Result.002 file - promoters60/1456000
caaaaaaaacaaa

SEQ ID NO: 117579 - DNA, 13 bp, Unknown
  misc_feature (1)..( 13): Result.002 file - promoters60/1456000
gagtaaacacatc

SEQ ID NO: 117580 - DNA, 7 bp, Unknown
  misc_feature (1)..( 7): Result.002 file - promoters60/1456000
aacaaaa

SEQ ID NO: 117581 - DNA, 7 bp, Unknown
  misc_feature (1)..( 7): Result.002 file - promoters60/1456000
aacaaaa

SEQ ID NO: 117582 - DNA, 8 bp, Unknown
  misc_feature (1)..( 8): Result.002 file - promoters60/1456000
aaaaaaaa

SEQ ID NO: 117583 - DNA, 8 bp, Unknown
  misc_feature (1)..( 8): Result.002 file - promoters60/1456000
aaaaaaaa

SEQ ID NO: 117584 - DNA, 6 bp, Unknown
  misc_feature (1)..( 6): Result.002 file - promoters60/1456000
acggaa

SEQ ID NO: 117585 - DNA, 6 bp, Unknown
  misc_feature (1)..( 6): Result.002 file - promoters60/1456000
acggaa

SEQ ID NO: 117586 - DNA, 6 bp, Unknown
  misc_feature (1)..( 6): Result.002 file - promoters60/1456000
ttctgg

SEQ ID NO: 117587 - DNA, 6 bp, Unknown
  misc_feature (1)..( 6): Result.002 file - promoters60/1456000
ttctgg

SEQ ID NO: 117588 - DNA, 7 bp, Unknown
  misc_feature (1)..( 7): Result.002 file - promoters60/1456000
acagtag

SEQ ID NO: 117589 - DNA, 7 bp, Unknown
  misc_feature (1)..( 7): Result.002 file - promoters60/1456000
acaatag

SEQ ID NO: 117590 - DNA, 9 bp, Unknown
  misc_feature (1)..( 9): Result.002 file - promoters60/1456000
aaagtcttg

SEQ ID NO: 117591 - DNA, 9 bp, Unknown
  misc_feature (1)..( 9): Result.002 file - promoters60/1456000
aaagtattg

SEQ ID NO: 117592 - DNA, 6 bp, Unknown
  misc_feature (1)..( 6): Result.002 file - promoters60/1456000
gaaaaa

SEQ ID NO: 117593 - DNA, 6 bp, Unknown
  misc_feature (1)..( 6): Result.002 file - promoters60/1456000
gaaaaa

SEQ ID NO: 117594 - DNA, 7 bp, Unknown
  misc_feature (1)..( 7): Result.002 file - promoters60/1456083
tatttat

SEQ ID NO: 117595 - DNA, 7 bp, Unknown
  misc_feature (1)..( 7): Result.002 file - promoters60/1456083
tatatat

SEQ ID NO: 117596 - DNA, 7 bp, Unknown
  misc_feature (1)..( 7): Result.002 file - promoters60/1456083
tatttat

SEQ ID NO: 117597 - DNA, 7 bp, Unknown
  misc_feature (1)..( 7): Result.002 file - promoters60/1456083
tatataa

SEQ ID NO: 117598 - DNA, 7 bp, Unknown
  misc_feature (1)..( 7): Result.002 file - promoters60/1456128
aaacagt

SEQ ID NO: 117599 - DNA, 7 bp, Unknown
  misc_feature (1)..( 7): Result.002 file - promoters60/1456128
aaatagt

SEQ ID NO: 117600 - DNA, 14 bp, Unknown
  misc_feature (1)..( 14): Result.002 file - promoters60/1456128
taagattttattat

SEQ ID NO: 117601 - DNA, 14 bp, Unknown
  misc_feature (1)..( 14): Result.002 file - promoters60/1456128
taagctttttttat

SEQ ID NO: 117602 - DNA, 9 bp, Unknown
  misc_feature (1)..( 9): Result.002 file - promoters60/1456128
tatatagat

SEQ ID NO: 117603 - DNA, 9 bp, Unknown
  misc_feature (1)..( 9): Result.002 file - promoters60/1456128
tatatagat

SEQ ID NO: 117604 - DNA, 10 bp, Unknown
  misc_feature (1)..( 10): Result.002 file - promoters60/1456128
gttttttttt

SEQ ID NO: 117605 - DNA, 10 bp, Unknown
  misc_feature (1)..( 10): Result.002 file - promoters60/1456128
atttatttgt

SEQ ID NO: 117606 - DNA, 10 bp, Unknown
  misc_feature (1)..( 10): Result.002 file - promoters60/1456128
ttttattctc

SEQ ID NO: 117607 - DNA, 6 bp, Unknown
  misc_feature (1)..( 6): Result.002 file - promoters60/1456128
aataaa

SEQ ID NO: 117608 - DNA, 6 bp, Unknown
  misc_feature (1)..( 6): Result.002 file - promoters60/1456128
aataaa

SEQ ID NO: 117609 - DNA, 7 bp, Unknown
  misc_feature (1)..( 7): Result.002 file - promoters60/1456128
aaagaaa

SEQ ID NO: 117610 - DNA, 7 bp, Unknown
  misc_feature (1)..( 7): Result.002 file - promoters60/1456128
aaataaa

SEQ ID NO: 117611 - DNA, 7 bp, Unknown
  misc_feature (1)..( 7): Result.002 file - promoters60/1456128
gaaaaaa

SEQ ID NO: 117612 - DNA, 7 bp, Unknown
  misc_feature (1)..( 7): Result.002 file - promoters60/1456128
gaataaa

SEQ ID NO: 117613 - DNA, 6 bp, Unknown
  misc_feature (1)..( 6): Result.002 file - promoters60/1456128
gaaaaa

SEQ ID NO: 117614 - DNA, 6 bp, Unknown
  misc_feature (1)..( 6): Result.002 file - promoters60/1456128
gaaaaa

SEQ ID NO: 117615 - DNA, 7 bp, Unknown
  misc_feature (1)..( 7): Result.002 file - promoters60/1456128
taaatta

SEQ ID NO: 117616 - DNA, 7 bp, Unknown
  misc_feature (1)..( 7): Result.002 file - promoters60/1456128
taagtta

SEQ ID NO: 117617 - DNA, 9 bp, Unknown
  misc_feature (1)..( 9): Result.002 file - promoters60/1456128
tttattaaa

SEQ ID NO: 117618 - DNA, 9 bp, Unknown
  misc_feature (1)..( 9): Result.002 file - promoters60/1456128
tgtatcaaa

SEQ ID NO: 117619 - DNA, 9 bp, Unknown
  misc_feature (1)..( 9): Result.002 file - promoters60/1456128
tttaataaa

SEQ ID NO: 117620 - DNA, 7 bp, Unknown
  misc_feature (1)..( 7): Result.002 file - promoters60/1456128
agaaaaa

SEQ ID NO: 117621 - DNA, 7 bp, Unknown
  misc_feature (1)..( 7): Result.002 file - promoters60/1456128
agaaaaa

SEQ ID NO: 117622 - DNA, 7 bp, Unknown
  misc_feature (1)..( 7): Result.002 file - promoters60/1456128
agaaaat

SEQ ID NO: 117623 - DNA, 8 bp, Unknown
  misc_feature (1)..( 8): Result.002 file - promoters60/1456128
aaaaaaaa

SEQ ID NO: 117624 - DNA, 8 bp, Unknown
  misc_feature (1)..( 8): Result.002 file - promoters60/1456128
gaaaaaaa

SEQ ID NO: 117625 - DNA, 8 bp, Unknown
  misc_feature (1)..( 8): Result.002 file - promoters60/1456128
gaataaat

SEQ ID NO: 117626 - DNA, 6 bp, Unknown
  misc_feature (1)..( 6): Result.002 file - promoters60/1456128
aacaaa

SEQ ID NO: 117627 - DNA, 6 bp, Unknown
  misc_feature (1)..( 6): Result.002 file - promoters60/1456128
aacaaa

SEQ ID NO: 117628 - DNA, 9 bp, Unknown
  misc_feature (1)..( 9): Result.002 file - promoters60/1456128
cttttttaa

SEQ ID NO: 117629 - DNA, 9 bp, Unknown
  misc_feature (1)..( 9): Result.002 file - promoters60/1456128
ctttattaa

SEQ ID NO: 117630 - DNA, 7 bp, Unknown
  misc_feature (1)..( 7): Result.002 file - promoters60/1456128
taacaac

SEQ ID NO: 117631 - DNA, 7 bp, Unknown
  misc_feature (1)..( 7): Result.002 file - promoters60/1456128
taaaaac

SEQ ID NO: 117632 - DNA, 6 bp, Unknown
  misc_feature (1)..( 6): Result.002 file - promoters60/1456128
atttat

SEQ ID NO: 117633 - DNA, 6 bp, Unknown
  misc_feature (1)..( 6): Result.002 file - promoters60/1456128
atttat

SEQ ID NO: 117634 - DNA, 6 bp, Unknown
  misc_feature (1)..( 6): Result.002 file - promoters60/1456128
aattat

SEQ ID NO: 117635 - DNA, 6 bp, Unknown
  misc_feature (1)..( 6): Result.002 file - promoters60/1456128
aattat

SEQ ID NO: 117636 - DNA, 6 bp, Unknown
  misc_feature (1)..( 6): Result.002 file - promoters60/1456128
tcaaaa

SEQ ID NO: 117637 - DNA, 6 bp, Unknown
  misc_feature (1)..( 6): Result.002 file - promoters60/1456128
tcaaaa

SEQ ID NO: 117638 - DNA, 6 bp, Unknown
  misc_feature (1)..( 6): Result.002 file - promoters60/1456128
gtataa

SEQ ID NO: 117639 - DNA, 6 bp, Unknown
  misc_feature (1)..( 6): Result.002 file - promoters60/1456128
gtataa

SEQ ID NO: 117640 - DNA, 9 bp, Unknown
  misc_feature (1)..( 9): Result.002 file - promoters60/1456128
aaagagtta

SEQ ID NO: 117641 - DNA, 9 bp, Unknown
  misc_feature (1)..( 9): Result.002 file - promoters60/1456128
aaagtgtta

SEQ ID NO: 117642 - DNA, 6 bp, Unknown
  misc_feature (1)..( 6): Result.002 file - promoters60/1456128
aaaaag

SEQ ID NO: 117643 - DNA, 6 bp, Unknown
  misc_feature (1)..( 6): Result.002 file - promoters60/1456128
aaaaag

SEQ ID NO: 117644 - DNA, 7 bp, Unknown
  misc_feature (1)..( 7): Result.002 file - promoters60/1456128
agtcttt

SEQ ID NO: 117645 - DNA, 7 bp, Unknown
  misc_feature (1)..( 7): Result.002 file - promoters60/1456128
agttttt

SEQ ID NO: 117646 - DNA, 8 bp, Unknown
  misc_feature (1)..( 8): Result.002 file - promoters60/1456228
atgattaa

SEQ ID NO: 117647 - DNA, 8 bp, Unknown
  misc_feature (1)..( 8): Result.002 file - promoters60/1456228
atgattaa

SEQ ID NO: 117648 - DNA, 8 bp, Unknown
  misc_feature (1)..( 8): Result.002 file - promoters60/1456228
atagggag

SEQ ID NO: 117649 - DNA, 8 bp, Unknown
  misc_feature (1)..( 8): Result.002 file - promoters60/1456228
atagagag

SEQ ID NO: 117650 - DNA, 8 bp, Unknown
  misc_feature (1)..( 8): Result.002 file - promoters60/1456228
tgttaata

SEQ ID NO: 117651 - DNA, 8 bp, Unknown
  misc_feature (1)..( 8): Result.002 file - promoters60/1456228
tgttaata

SEQ ID NO: 117652 - DNA, 6 bp, Unknown
  misc_feature (1)..( 6): Result.002 file - promoters60/1456228
aaaaag

SEQ ID NO: 117653 - DNA, 6 bp, Unknown
  misc_feature (1)..( 6): Result.002 file - promoters60/1456228
aaaaag

SEQ ID NO: 117654 - DNA, 7 bp, Unknown
  misc_feature (1)..( 7): Result.002 file - promoters60/1456228
aaattaa

SEQ ID NO: 117655 - DNA, 7 bp, Unknown
  misc_feature (1)..( 7): Result.002 file - promoters60/1456228
aaaataa

SEQ ID NO: 117656 - DNA, 8 bp, Unknown
  misc_feature (1)..( 8): Result.002 file - promoters60/1456228
tgaataat

SEQ ID NO: 117657 - DNA, 8 bp, Unknown
  misc_feature (1)..( 8): Result.002 file - promoters60/1456228
tgaagaat

SEQ ID NO: 117658 - DNA, 7 bp, Unknown
  misc_feature (1)..( 7): Result.002 file - promoters60/1456228
tttgcca

SEQ ID NO: 117659 - DNA, 7 bp, Unknown
  misc_feature (1)..( 7): Result.002 file - promoters60/1456228
tttccca

SEQ ID NO: 117660 - DNA, 6 bp, Unknown
  misc_feature (1)..( 6): Result.002 file - promoters60/1456228
gtttat

SEQ ID NO: 117661 - DNA, 6 bp, Unknown
  misc_feature (1)..( 6): Result.002 file - promoters60/1456228
gtttat

SEQ ID NO: 117662 - DNA, 10 bp, Unknown
  misc_feature (1)..( 10): Result.002 file - promoters60/1456228
aaagaaaacc

SEQ ID NO: 117663 - DNA, 10 bp, Unknown
  misc_feature (1)..( 10): Result.002 file - promoters60/1456228
ttggaaaacc

SEQ ID NO: 117664 - DNA, 10 bp, Unknown
  misc_feature (1)..( 10): Result.002 file - promoters60/1456228
aaagaaaaaa

SEQ ID NO: 117665 - DNA, 8 bp, Unknown
  misc_feature (1)..( 8): Result.002 file - promoters60/1456228
tatttaaa

SEQ ID NO: 117666 - DNA, 8 bp, Unknown
  misc_feature (1)..( 8): Result.002 file - promoters60/1456228
tatataaa

SEQ ID NO: 117667 - DNA, 8 bp, Unknown
  misc_feature (1)..( 8): Result.002 file - promoters60/1456228
tatttatt

SEQ ID NO: 117668 - DNA, 6 bp, Unknown
  misc_feature (1)..( 6): Result.002 file - promoters60/1456228
atggat

SEQ ID NO: 117669 - DNA, 6 bp, Unknown
  misc_feature (1)..( 6): Result.002 file - promoters60/1456228
atggat

SEQ ID NO: 117670 - DNA, 8 bp, Unknown
  misc_feature (1)..( 8): Result.002 file - promoters60/1456228
gatacctt

SEQ ID NO: 117671 - DNA, 8 bp, Unknown
  misc_feature (1)..( 8): Result.002 file - promoters60/1456228
gataactt

SEQ ID NO: 117672 - DNA, 8 bp, Unknown
  misc_feature (1)..( 8): Result.002 file - promoters60/1456228
gattgcaa

SEQ ID NO: 117673 - DNA, 8 bp, Unknown
  misc_feature (1)..( 8): Result.002 file - promoters60/1456228
gattccaa

SEQ ID NO: 117674 - DNA, 6 bp, Unknown
  misc_feature (1)..( 6): Result.002 file - promoters60/1456228
tctaaa

SEQ ID NO: 117675 - DNA, 6 bp, Unknown
  misc_feature (1)..( 6): Result.002 file - promoters60/1456228
tctaaa

SEQ ID NO: 117676 - DNA, 7 bp, Unknown
  misc_feature (1)..( 7): Result.002 file - promoters60/1456228
taattaa

SEQ ID NO: 117677 - DNA, 7 bp, Unknown
  misc_feature (1)..( 7): Result.002 file - promoters60/1456228
taattaa

SEQ ID NO: 117678 - DNA, 6 bp, Unknown
  misc_feature (1)..( 6): Result.002 file - promoters60/1456228
caaaaa

SEQ ID NO: 117679 - DNA, 6 bp, Unknown
  misc_feature (1)..( 6): Result.002 file - promoters60/1456228
caaaaa

SEQ ID NO: 117680 - DNA, 10 bp, Unknown
  misc_feature (1)..( 10): Result.002 file - promoters60/1456228
aaatatgaat

SEQ ID NO: 117681 - DNA, 10 bp, Unknown
  misc_feature (1)..( 10): Result.002 file - promoters60/1456228
aaatatctta

SEQ ID NO: 117682 - DNA, 10 bp, Unknown
  misc_feature (1)..( 10): Result.002 file - promoters60/1456228
aaataaaata

SEQ ID NO: 117683 - DNA, 7 bp, Unknown
  misc_feature (1)..( 7): Result.002 file - promoters60/1456228
ttaaata

SEQ ID NO: 117684 - DNA, 7 bp, Unknown
  misc_feature (1)..( 7): Result.002 file - promoters60/1456228
ttagata

SEQ ID NO: 117685 - DNA, 7 bp, Unknown
  misc_feature (1)..( 7): Result.002 file - promoters60/1456228
gtcgcct

SEQ ID NO: 117686 - DNA, 7 bp, Unknown
  misc_feature (1)..( 7): Result.002 file - promoters60/1456228
gtctcct

SEQ ID NO: 117687 - DNA, 6 bp, Unknown
  misc_feature (1)..( 6): Result.002 file - promoters60/1456228
agtaaa

SEQ ID NO: 117688 - DNA, 6 bp, Unknown
  misc_feature (1)..( 6): Result.002 file - promoters60/1456228
agtaaa

SEQ ID NO: 117689 - DNA, 7 bp, Unknown
  misc_feature (1)..( 7): Result.002 file - promoters60/1456228
aatcggg

SEQ ID NO: 117690 - DNA, 7 bp, Unknown
  misc_feature (1)..( 7): Result.002 file - promoters60/1456228
aattggg

SEQ ID NO: 117691 - DNA, 8 bp, Unknown
  misc_feature (1)..( 8): Result.002 file - promoters60/1456228
gaaagaaa

SEQ ID NO: 117692 - DNA, 8 bp, Unknown
  misc_feature (1)..( 8): Result.002 file - promoters60/1456228
gaaacaaa

SEQ ID NO: 117693 - DNA, 10 bp, Unknown
  misc_feature (1)..( 10): Result.002 file - promoters60/1456228
ggaaaagaaa

SEQ ID NO: 117694 - DNA, 10 bp, Unknown
  misc_feature (1)..( 10): Result.002 file - promoters60/1456228
ggaaatgaaa

SEQ ID NO: 117695 - DNA, 7 bp, Unknown
  misc_feature (1)..( 7): Result.002 file - promoters60/1456228
cccacta

SEQ ID NO: 117696 - DNA, 7 bp, Unknown
  misc_feature (1)..( 7): Result.002 file - promoters60/1456228
cccacta

SEQ ID NO: 117697 - DNA, 9 bp, Unknown
  misc_feature (1)..( 9): Result.002 file - promoters60/1456228
aaagaaaag

SEQ ID NO: 117698 - DNA, 9 bp, Unknown
  misc_feature (1)..( 9): Result.002 file - promoters60/1456228
aaagtaaag

SEQ ID NO: 117699 - DNA, 10 bp, Unknown
  misc_feature (1)..( 10): Result.002 file - promoters60/1458991
gaatcattga

SEQ ID NO: 117700 - DNA, 10 bp, Unknown
  misc_feature (1)..( 10): Result.002 file - promoters60/1458991
ttatcactga

SEQ ID NO: 117701 - DNA, 10 bp, Unknown
  misc_feature (1)..( 10): Result.002 file - promoters60/1458991
taattatttt

SEQ ID NO: 117702 - DNA, 10 bp, Unknown
  misc_feature (1)..( 10): Result.002 file - promoters60/1458991
taagtatgct

SEQ ID NO: 117703 - DNA, 12 bp, Unknown
  misc_feature (1)..( 12): Result.002 file - promoters60/1458991
ttgaagtttttg

SEQ ID NO: 117704 - DNA, 12 bp, Unknown
  misc_feature (1)..( 12): Result.002 file - promoters60/1458991
attttttttttg

SEQ ID NO: 117705 - DNA, 12 bp, Unknown
  misc_feature (1)..( 12): Result.002 file - promoters60/1458991
ttgaggtttttt

SEQ ID NO: 117706 - DNA, 12 bp, Unknown
  misc_feature (1)..( 12): Result.002 file - promoters60/1458991
tagaattttttt

SEQ ID NO: 117707 - DNA, 10 bp, Unknown
  misc_feature (1)..( 10): Result.002 file - promoters60/1459039
catatataaa

SEQ ID NO: 117708 - DNA, 10 bp, Unknown
  misc_feature (1)..( 10): Result.002 file - promoters60/1459039
catataaatt

SEQ ID NO: 117709 - DNA, 10 bp, Unknown
  misc_feature (1)..( 10): Result.002 file - promoters60/1459039
aatataaagg

SEQ ID NO: 117710 - DNA, 10 bp, Unknown
  misc_feature (1)..( 10): Result.002 file - promoters60/1459039
actataaaac

SEQ ID NO: 117711 - DNA, 10 bp, Unknown
  misc_feature (1)..( 10): Result.002 file - promoters60/1459039
actataaatt

SEQ ID NO: 117712 - DNA, 10 bp, Unknown
  misc_feature (1)..( 10): Result.002 file - promoters60/1459039
tatataaaga

SEQ ID NO: 117713 - DNA, 10 bp, Unknown
  misc_feature (1)..( 10): Result.002 file - promoters60/1459039
actttaaatt

SEQ ID NO: 117714 - DNA, 13 bp, Unknown
  misc_feature (1)..( 13): Result.002 file - promoters60/1459039
acgatttctgacg

SEQ ID NO: 117715 - DNA, 13 bp, Unknown
  misc_feature (1)..( 13): Result.002 file - promoters60/1459039
acggtttactaag

SEQ ID NO: 117716 - DNA, 13 bp, Unknown
  misc_feature (1)..( 13): Result.002 file - promoters60/1459039
ttggtttagtgag

SEQ ID NO: 117717 - DNA, 13 bp, Unknown
  misc_feature (1)..( 13): Result.002 file - promoters60/1459039
ctttttttgtttc

SEQ ID NO: 117718 - DNA, 13 bp, Unknown
  misc_feature (1)..( 13): Result.002 file - promoters60/1459039
tttactttgtttg

SEQ ID NO: 117719 - DNA, 13 bp, Unknown
  misc_feature (1)..( 13): Result.002 file - promoters60/1459039
tgtcttttctttt

SEQ ID NO: 117720 - DNA, 9 bp, Unknown
  misc_feature (1)..( 9): Result.002 file - promoters60/1459039
taaaaaaaa

SEQ ID NO: 117721 - DNA, 9 bp, Unknown
  misc_feature (1)..( 9): Result.002 file - promoters60/1459039
taaataaat

SEQ ID NO: 117722 - DNA, 9 bp, Unknown
  misc_feature (1)..( 9): Result.002 file - promoters60/1459039
taacaaaat

SEQ ID NO: 117723 - DNA, 9 bp, Unknown
  misc_feature (1)..( 9): Result.002 file - promoters60/1459039
caaaaaact

SEQ ID NO: 117724 - DNA, 9 bp, Unknown
  misc_feature (1)..( 9): Result.002 file - promoters60/1459039
caaacaaat

SEQ ID NO: 117725 - DNA, 9 bp, Unknown
  misc_feature (1)..( 9): Result.002 file - promoters60/1459039
aatataaat

SEQ ID NO: 117726 - DNA, 7 bp, Unknown
  misc_feature (1)..( 7): Result.002 file - promoters60/1459199
agatttt

SEQ ID NO: 117727 - DNA, 7 bp, Unknown
  misc_feature (1)..( 7): Result.002 file - promoters60/1459199
agatttt

SEQ ID NO: 117728 - DNA, 7 bp, Unknown
  misc_feature (1)..( 7): Result.002 file - promoters60/1459199
tttattt

SEQ ID NO: 117729 - DNA, 7 bp, Unknown
  misc_feature (1)..( 7): Result.002 file - promoters60/1459199
tttcttt

SEQ ID NO: 117730 - DNA, 8 bp, Unknown
  misc_feature (1)..( 8): Result.002 file - promoters60/1459199
tttacttg

SEQ ID NO: 117731 - DNA, 8 bp, Unknown
  misc_feature (1)..( 8): Result.002 file - promoters60/1459199
tttatttg

SEQ ID NO: 117732 - DNA, 6 bp, Unknown
  misc_feature (1)..( 6): Result.002 file - promoters60/1459199
tctcgt

SEQ ID NO: 117733 - DNA, 6 bp, Unknown
  misc_feature (1)..( 6): Result.002 file - promoters60/1459199
tctcgt

SEQ ID NO: 117734 - DNA, 7 bp, Unknown
  misc_feature (1)..( 7): Result.002 file - promoters60/1459199
ttaatcg

SEQ ID NO: 117735 - DNA, 7 bp, Unknown
  misc_feature (1)..( 7): Result.002 file - promoters60/1459199
ttactcg

SEQ ID NO: 117736 - DNA, 7 bp, Unknown
  misc_feature (1)..( 7): Result.002 file - promoters60/1459199
acttggg

SEQ ID NO: 117737 - DNA, 7 bp, Unknown
  misc_feature (1)..( 7): Result.002 file - promoters60/1459199
actaggg

SEQ ID NO: 117738 - DNA, 6 bp, Unknown
  misc_feature (1)..( 6): Result.002 file - promoters60/1459199
gtacta

SEQ ID NO: 117739 - DNA, 6 bp, Unknown
  misc_feature (1)..( 6): Result.002 file - promoters60/1459199
gtacta

SEQ ID NO: 117740 - DNA, 7 bp, Unknown
  misc_feature (1)..( 7): Result.002 file - promoters60/1459199
taccacc

SEQ ID NO: 117741 - DNA, 7 bp, Unknown
  misc_feature (1)..( 7): Result.002 file - promoters60/1459199
tactacc

SEQ ID NO: 117742 - DNA, 8 bp, Unknown
  misc_feature (1)..( 8): Result.002 file - promoters60/1459199
accatgta

SEQ ID NO: 117743 - DNA, 8 bp, Unknown
  misc_feature (1)..( 8): Result.002 file - promoters60/1459199
accaagta

SEQ ID NO: 117744 - DNA, 9 bp, Unknown
  misc_feature (1)..( 9): Result.002 file - promoters60/1459199
aatccatga

SEQ ID NO: 117745 - DNA, 9 bp, Unknown
  misc_feature (1)..( 9): Result.002 file - promoters60/1459199
cgtccgtga

SEQ ID NO: 117746 - DNA, 9 bp, Unknown
  misc_feature (1)..( 9): Result.002 file - promoters60/1459199
aatcaatga

SEQ ID NO: 117747 - DNA, 7 bp, Unknown
  misc_feature (1)..( 7): Result.002 file - promoters60/1459199
tttcatt

SEQ ID NO: 117748 - DNA, 7 bp, Unknown
  misc_feature (1)..( 7): Result.002 file - promoters60/1459199
tttcatt

SEQ ID NO: 117749 - DNA, 6 bp, Unknown
  misc_feature (1)..( 6): Result.002 file - promoters60/1459199
ttactc

SEQ ID NO: 117750 - DNA, 6 bp, Unknown
  misc_feature (1)..( 6): Result.002 file - promoters60/1459199
ttactc

SEQ ID NO: 117751 - DNA, 7 bp, Unknown
  misc_feature (1)..( 7): Result.002 file - promoters60/1459199
aaagctt

SEQ ID NO: 117752 - DNA, 7 bp, Unknown
  misc_feature (1)..( 7): Result.002 file - promoters60/1459199
aaagctt

SEQ ID NO: 117753 - DNA, 9 bp, Unknown
  misc_feature (1)..( 9): Result.002 file - promoters60/1459199
tttaacttg

SEQ ID NO: 117754 - DNA, 9 bp, Unknown
  misc_feature (1)..( 9): Result.002 file - promoters60/1459199
tttgactag

SEQ ID NO: 117755 - DNA, 9 bp, Unknown
  misc_feature (1)..( 9): Result.002 file - promoters60/1459199
attgactag

SEQ ID NO: 117756 - DNA, 8 bp, Unknown
  misc_feature (1)..( 8): Result.002 file - promoters60/1459199
tctgatat

SEQ ID NO: 117757 - DNA, 8 bp, Unknown
  misc_feature (1)..( 8): Result.002 file - promoters60/1459199
tctgctat

SEQ ID NO: 117758 - DNA, 11 bp, Unknown
  misc_feature (1)..( 11): Result.002 file - promoters60/1459223
aaatattcaac

SEQ ID NO: 117759 - DNA, 11 bp, Unknown
  misc_feature (1)..( 11): Result.002 file - promoters60/1459223
atatatacaaa

SEQ ID NO: 117760 - DNA, 11 bp, Unknown
  misc_feature (1)..( 11): Result.002 file - promoters60/1459223
aaatatttttt

SEQ ID NO: 117761 - DNA, 11 bp, Unknown
  misc_feature (1)..( 11): Result.002 file - promoters60/1459223
aaaaattacgg

SEQ ID NO: 117762 - DNA, 11 bp, Unknown
  misc_feature (1)..( 11): Result.002 file - promoters60/1459223
acatataaaat

SEQ ID NO: 117763 - DNA, 11 bp, Unknown
  misc_feature (1)..( 11): Result.002 file - promoters60/1459223
ctataaaaaat

SEQ ID NO: 117764 - DNA, 9 bp, Unknown
  misc_feature (1)..( 9): Result.002 file - promoters60/1459223
taaatattc

SEQ ID NO: 117765 - DNA, 9 bp, Unknown
  misc_feature (1)..( 9): Result.002 file - promoters60/1459223
aaaatatcg

SEQ ID NO: 117766 - DNA, 9 bp, Unknown
  misc_feature (1)..( 9): Result.002 file - promoters60/1459223
gaaatattt

SEQ ID NO: 117767 - DNA, 9 bp, Unknown
  misc_feature (1)..( 9): Result.002 file - promoters60/1459223
aaaaaatta

SEQ ID NO: 117768 - DNA, 9 bp, Unknown
  misc_feature (1)..( 9): Result.002 file - promoters60/1459223
aaaacatat

SEQ ID NO: 117769 - DNA, 9 bp, Unknown
  misc_feature (1)..( 9): Result.002 file - promoters60/1459223
caaaaatgt

SEQ ID NO: 117770 - DNA, 15 bp, Unknown
  misc_feature (1)..( 15): Result.002 file - promoters60/1459223
ccacttcttctgctt

SEQ ID NO: 117771 - DNA, 15 bp, Unknown
  misc_feature (1)..( 15): Result.002 file - promoters60/1459223
ccgtgtcttctttgg

SEQ ID NO: 117772 - DNA, 15 bp, Unknown
  misc_feature (1)..( 15): Result.002 file - promoters60/1459223
ttttttcttcttctt

SEQ ID NO: 117773 - DNA, 15 bp, Unknown
  misc_feature (1)..( 15): Result.002 file - promoters60/1459223
tttttttttctcgct

SEQ ID NO: 117774 - DNA, 15 bp, Unknown
  misc_feature (1)..( 15): Result.002 file - promoters60/1459223
ctgtttcttaggaaa

SEQ ID NO: 117775 - DNA, 15 bp, Unknown
  misc_feature (1)..( 15): Result.002 file - promoters60/1459223
gtttttctttctcct

SEQ ID NO: 117776 - DNA, 6 bp, Unknown
  misc_feature (1)..( 6): Result.002 file - promoters60/1460386
acattt

SEQ ID NO: 117777 - DNA, 6 bp, Unknown
  misc_feature (1)..( 6): Result.002 file - promoters60/1460386
acattt

SEQ ID NO: 117778 - DNA, 11 bp, Unknown
  misc_feature (1)..( 11): Result.002 file - promoters60/1460386
ttttactttat

SEQ ID NO: 117779 - DNA, 11 bp, Unknown
  misc_feature (1)..( 11): Result.002 file - promoters60/1460386
ttttagtttat

SEQ ID NO: 117780 - DNA, 15 bp, Unknown
  misc_feature (1)..( 15): Result.002 file - promoters60/1460386
agaaagatttgaaaa

SEQ ID NO: 117781 - DNA, 15 bp, Unknown
  misc_feature (1)..( 15): Result.002 file - promoters60/1460386
tttttttttttaaat

SEQ ID NO: 117782 - DNA, 16 bp, Unknown
  misc_feature (1)..( 16): Result.002 file - promoters60/1460386
agaaagctttggaaaa

SEQ ID NO: 117783 - DNA, 20 bp, Unknown
  misc_feature (1)..( 20): Result.002 file - promoters60/1460386
cagaaagatttgaaaaaatt

SEQ ID NO: 117784 - DNA, 20 bp, Unknown
  misc_feature (1)..( 20): Result.002 file - promoters60/1460386
tttttttaaattaaacaatt

SEQ ID NO: 117785 - DNA, 20 bp, Unknown
  misc_feature (1)..( 20): Result.002 file - promoters60/1460386
agaaagctttggaaaagaaa

SEQ ID NO: 117786 - DNA, 7 bp, Unknown
  misc_feature (1)..( 7): Result.002 file - promoters60/1460386
ggtgtta

SEQ ID NO: 117787 - DNA, 7 bp, Unknown
  misc_feature (1)..( 7): Result.002 file - promoters60/1460386
agtgtta

SEQ ID NO: 117788 - DNA, 7 bp, Unknown
  misc_feature (1)..( 7): Result.002 file - promoters60/1460386
agtgttg

SEQ ID NO: 117789 - DNA, 7 bp, Unknown
  misc_feature (1)..( 7): Result.002 file - promoters60/1460386
tattctt

SEQ ID NO: 117790 - DNA, 7 bp, Unknown
  misc_feature (1)..( 7): Result.002 file - promoters60/1460386
tattctt

SEQ ID NO: 117791 - DNA, 6 bp, Unknown
  misc_feature (1)..( 6): Result.002 file - promoters60/1460386
cggctt

SEQ ID NO: 117792 - DNA, 6 bp, Unknown
  misc_feature (1)..( 6): Result.002 file - promoters60/1460386
cggctt

SEQ ID NO: 117793 - DNA, 6 bp, Unknown
  misc_feature (1)..( 6): Result.002 file - promoters60/1460386
taatat

SEQ ID NO: 117794 - DNA, 6 bp, Unknown
  misc_feature (1)..( 6): Result.002 file - promoters60/1460386
taatat

SEQ ID NO: 117795 - DNA, 7 bp, Unknown
  misc_feature (1)..( 7): Result.002 file - promoters60/1460386
agaaaga

SEQ ID NO: 117796 - DNA, 7 bp, Unknown
  misc_feature (1)..( 7): Result.002 file - promoters60/1460386
agaaaga

SEQ ID NO: 117797 - DNA, 6 bp, Unknown
  misc_feature (1)..( 6): Result.002 file - promoters60/1460386
aagatt

SEQ ID NO: 117798 - DNA, 6 bp, Unknown
  misc_feature (1)..( 6): Result.002 file - promoters60/1460386
aagatt

SEQ ID NO: 117799 - DNA, 7 bp, Unknown
  misc_feature (1)..( 7): Result.002 file - promoters60/1460386
aaaaaca

SEQ ID NO: 117800 - DNA, 7 bp, Unknown
  misc_feature (1)..( 7): Result.002 file - promoters60/1460386
aaagaca

SEQ ID NO: 117801 - DNA, 6 bp, Unknown
  misc_feature (1)..( 6): Result.002 file - promoters60/1460386
ttgcag

SEQ ID NO: 117802 - DNA, 6 bp, Unknown
  misc_feature (1)..( 6): Result.002 file - promoters60/1460386
ttgcag

SEQ ID NO: 117803 - DNA, 7 bp, Unknown
  misc_feature (1)..( 7): Result.002 file - promoters60/1460386
aaaagtt

SEQ ID NO: 117804 - DNA, 7 bp, Unknown
  misc_feature (1)..( 7): Result.002 file - promoters60/1460386
aaaagtt

SEQ ID NO: 117805 - DNA, 8 bp, Unknown
  misc_feature (1)..( 8): Result.002 file - promoters60/1460386
aaattaaa

SEQ ID NO: 117806 - DNA, 8 bp, Unknown
  misc_feature (1)..( 8): Result.002 file - promoters60/1460386
aaaataaa

SEQ ID NO: 117807 - DNA, 7 bp, Unknown
  misc_feature (1)..( 7): Result.002 file - promoters60/1460386
aaaagaa

SEQ ID NO: 117808 - DNA, 7 bp, Unknown
  misc_feature (1)..( 7): Result.002 file - promoters60/1460386
aaatgaa

SEQ ID NO: 117809 - DNA, 7 bp, Unknown
  misc_feature (1)..( 7): Result.002 file - promoters60/1460386
aataaat

SEQ ID NO: 117810 - DNA, 7 bp, Unknown
  misc_feature (1)..( 7): Result.002 file - promoters60/1460386
aataaat

SEQ ID NO: 117811 - DNA, 7 bp, Unknown
  misc_feature (1)..( 7): Result.002 file - promoters60/1460386
tttgcta

SEQ ID NO: 117812 - DNA, 7 bp, Unknown
  misc_feature (1)..( 7): Result.002 file - promoters60/1460386
tttgcta

SEQ ID NO: 117813 - DNA, 8 bp, Unknown
  misc_feature (1)..( 8): Result.002 file - promoters60/1460386
aaaacaaa

SEQ ID NO: 117814 - DNA, 8 bp, Unknown
  misc_feature (1)..( 8): Result.002 file - promoters60/1460386
aaaataaa

SEQ ID NO: 117815 - DNA, 7 bp, Unknown
  misc_feature (1)..( 7): Result.002 file - promoters60/1460386
tttattt

SEQ ID NO: 117816 - DNA, 7 bp, Unknown
  misc_feature (1)..( 7): Result.002 file - promoters60/1460386
tttattt

SEQ ID NO: 117817 - DNA, 6 bp, Unknown
  misc_feature (1)..( 6): Result.002 file - promoters60/1460386
attttt

SEQ ID NO: 117818 - DNA, 6 bp, Unknown
  misc_feature (1)..( 6): Result.002 file - promoters60/1460386
attttt

SEQ ID NO: 117819 - DNA, 6 bp, Unknown
  misc_feature (1)..( 6): Result.002 file - promoters60/1460386
aaaaga

SEQ ID NO: 117820 - DNA, 6 bp, Unknown
  misc_feature (1)..( 6): Result.002 file - promoters60/1460386
aaaaga

SEQ ID NO: 117821 - DNA, 7 bp, Unknown
  misc_feature (1)..( 7): Result.002 file - promoters60/1461720
aaatata

SEQ ID NO: 117822 - DNA, 7 bp, Unknown
  misc_feature (1)..( 7): Result.002 file - promoters60/1461720
aaacata

SEQ ID NO: 117823 - DNA, 7 bp, Unknown
  misc_feature (1)..( 7): Result.002 file - promoters60/1461720
atatata

SEQ ID NO: 117824 - DNA, 10 bp, Unknown
  misc_feature (1)..( 10): Result.002 file - promoters60/1461720
ataagcgaca

SEQ ID NO: 117825 - DNA, 10 bp, Unknown
  misc_feature (1)..( 10): Result.002 file - promoters60/1461720
ataaacgaca

SEQ ID NO: 117826 - DNA, 7 bp, Unknown
  misc_feature (1)..( 7): Result.002 file - promoters60/1461720
aatcgaa

SEQ ID NO: 117827 - DNA, 7 bp, Unknown
  misc_feature (1)..( 7): Result.002 file - promoters60/1461720
aatcgaa

SEQ ID NO: 117828 - DNA, 10 bp, Unknown
  misc_feature (1)..( 10): Result.002 file - promoters60/1461720
atttatttga

SEQ ID NO: 117829 - DNA, 10 bp, Unknown
  misc_feature (1)..( 10): Result.002 file - promoters60/1461720
ctttatatga

SEQ ID NO: 117830 - DNA, 10 bp, Unknown
  misc_feature (1)..( 10): Result.002 file - promoters60/1461720
attaattgta

SEQ ID NO: 117831 - DNA, 6 bp, Unknown
  misc_feature (1)..( 6): Result.002 file - promoters60/1461720
atttgt

SEQ ID NO: 117832 - DNA, 6 bp, Unknown
  misc_feature (1)..( 6): Result.002 file - promoters60/1461720
atttgt

SEQ ID NO: 117833 - DNA, 6 bp, Unknown
  misc_feature (1)..( 6): Result.002 file - promoters60/1461720
gctctg

SEQ ID NO: 117834 - DNA, 6 bp, Unknown
  misc_feature (1)..( 6): Result.002 file - promoters60/1461720
gctctg

SEQ ID NO: 117835 - DNA, 6 bp, Unknown
  misc_feature (1)..( 6): Result.002 file - promoters60/1461720
taataa

SEQ ID NO: 117836 - DNA, 6 bp, Unknown
  misc_feature (1)..( 6): Result.002 file - promoters60/1461720
taataa

SEQ ID NO: 117837 - DNA, 7 bp, Unknown
  misc_feature (1)..( 7): Result.002 file - promoters60/1461720
taagtta

SEQ ID NO: 117838 - DNA, 7 bp, Unknown
  misc_feature (1)..( 7): Result.002 file - promoters60/1461720
taattta

SEQ ID NO: 117839 - DNA, 7 bp, Unknown
  misc_feature (1)..( 7): Result.002 file - promoters60/1461720
atttatt

SEQ ID NO: 117840 - DNA, 7 bp, Unknown
  misc_feature (1)..( 7): Result.002 file - promoters60/1461720
attaatt

SEQ ID NO: 117841 - DNA, 10 bp, Unknown
  misc_feature (1)..( 10): Result.002 file - promoters60/1461720
tagagttatt

SEQ ID NO: 117842 - DNA, 10 bp, Unknown
  misc_feature (1)..( 10): Result.002 file - promoters60/1461720
attagtaatt

SEQ ID NO: 117843 - DNA, 10 bp, Unknown
  misc_feature (1)..( 10): Result.002 file - promoters60/1461720
attaataatt

SEQ ID NO: 117844 - DNA, 7 bp, Unknown
  misc_feature (1)..( 7): Result.002 file - promoters60/1461720
tgataaa

SEQ ID NO: 117845 - DNA, 7 bp, Unknown
  misc_feature (1)..( 7): Result.002 file - promoters60/1461720
tgaaaaa

SEQ ID NO: 117846 - DNA, 6 bp, Unknown
  misc_feature (1)..( 6): Result.002 file - promoters60/1461720
tatcaa

SEQ ID NO: 117847 - DNA, 6 bp, Unknown
  misc_feature (1)..( 6): Result.002 file - promoters60/1461720
tatcaa

SEQ ID NO: 117848 - DNA, 7 bp, Unknown
  misc_feature (1)..( 7): Result.002 file - promoters60/1461720
taatttt

SEQ ID NO: 117849 - DNA, 7 bp, Unknown
  misc_feature (1)..( 7): Result.002 file - promoters60/1461720
taatttt

SEQ ID NO: 117850 - DNA, 6 bp, Unknown
  misc_feature (1)..( 6): Result.002 file - promoters60/1461720
ttagaa

SEQ ID NO: 117851 - DNA, 6 bp, Unknown
  misc_feature (1)..( 6): Result.002 file - promoters60/1461720
ttagaa

SEQ ID NO: 117852 - DNA, 6 bp, Unknown
  misc_feature (1)..( 6): Result.002 file - promoters60/1461720
atattt

SEQ ID NO: 117853 - DNA, 6 bp, Unknown
  misc_feature (1)..( 6): Result.002 file - promoters60/1461720
atattt

SEQ ID NO: 117854 - DNA, 8 bp, Unknown
  misc_feature (1)..( 8): Result.002 file - promoters60/1461720
tagtagta

SEQ ID NO: 117855 - DNA, 8 bp, Unknown
  misc_feature (1)..( 8): Result.002 file - promoters60/1461720
tagaagta

SEQ ID NO: 117856 - DNA, 6 bp, Unknown
  misc_feature (1)..( 6): Result.002 file - promoters60/1461720
taatct

SEQ ID NO: 117857 - DNA, 6 bp, Unknown
  misc_feature (1)..( 6): Result.002 file - promoters60/1461720
taatct

SEQ ID NO: 117858 - DNA, 10 bp, Unknown
  misc_feature (1)..( 10): Result.002 file - promoters60/1461720
gaaatatata

SEQ ID NO: 117859 - DNA, 10 bp, Unknown
  misc_feature (1)..( 10): Result.002 file - promoters60/1461720
gaaatatata

SEQ ID NO: 117860 - DNA, 6 bp, Unknown
  misc_feature (1)..( 6): Result.002 file - promoters60/1461720
aaacat

SEQ ID NO: 117861 - DNA, 6 bp, Unknown
  misc_feature (1)..( 6): Result.002 file - promoters60/1461720
aaacat

SEQ ID NO: 117862 - DNA, 7 bp, Unknown
  misc_feature (1)..( 7): Result.002 file - promoters60/1461720
atatttt

SEQ ID NO: 117863 - DNA, 7 bp, Unknown
  misc_feature (1)..( 7): Result.002 file - promoters60/1461720
ataattt

SEQ ID NO: 117864 - DNA, 10 bp, Unknown
  misc_feature (1)..( 10): Result.002 file - promoters60/1461720
agatatattt

SEQ ID NO: 117865 - DNA, 10 bp, Unknown
  misc_feature (1)..( 10): Result.002 file - promoters60/1461720
agatattttt

SEQ ID NO: 117866 - DNA, 7 bp, Unknown
  misc_feature (1)..( 7): Result.002 file - promoters60/1461756
agaagaa

SEQ ID NO: 117867 - DNA, 7 bp, Unknown
  misc_feature (1)..( 7): Result.002 file - promoters60/1461756
agatgaa

SEQ ID NO: 117868 - DNA, 7 bp, Unknown
  misc_feature (1)..( 7): Result.002 file - promoters60/1461756
agaagag

SEQ ID NO: 117869 - DNA, 6 bp, Unknown
  misc_feature (1)..( 6): Result.002 file - promoters60/1461756
ttgaaa

SEQ ID NO: 117870 - DNA, 6 bp, Unknown
  misc_feature (1)..( 6): Result.002 file - promoters60/1461756
ttgaaa

SEQ ID NO: 117871 - DNA, 6 bp, Unknown
  misc_feature (1)..( 6): Result.002 file - promoters60/1461756
tggtta

SEQ ID NO: 117872 - DNA, 6 bp, Unknown
  misc_feature (1)..( 6): Result.002 file - promoters60/1461756
tggtta

SEQ ID NO: 117873 - DNA, 8 bp, Unknown
  misc_feature (1)..( 8): Result.002 file - promoters60/1461756
atcgagaa

SEQ ID NO: 117874 - DNA, 8 bp, Unknown
  misc_feature (1)..( 8): Result.002 file - promoters60/1461756
atcgcgaa

SEQ ID NO: 117875 - DNA, 6 bp, Unknown
  misc_feature (1)..( 6): Result.002 file - promoters60/1461756
cgattc

SEQ ID NO: 117876 - DNA, 6 bp, Unknown
  misc_feature (1)..( 6): Result.002 file - promoters60/1461756
cgattc

SEQ ID NO: 117877 - DNA, 7 bp, Unknown
  misc_feature (1)..( 7): Result.002 file - promoters60/1461756
tccgaag

SEQ ID NO: 117878 - DNA, 7 bp, Unknown
  misc_feature (1)..( 7): Result.002 file - promoters60/1461756
tccaaag

SEQ ID NO: 117879 - DNA, 7 bp, Unknown
  misc_feature (1)..( 7): Result.002 file - promoters60/1461756
aaaacaa

SEQ ID NO: 117880 - DNA, 7 bp, Unknown
  misc_feature (1)..( 7): Result.002 file - promoters60/1461756
aaaccaa

SEQ ID NO: 117881 - DNA, 6 bp, Unknown
  misc_feature (1)..( 6): Result.002 file - promoters60/1461756
tggata

SEQ ID NO: 117882 - DNA, 6 bp, Unknown
  misc_feature (1)..( 6): Result.002 file - promoters60/1461756
tggata

SEQ ID NO: 117883 - DNA, 6 bp, Unknown
  misc_feature (1)..( 6): Result.002 file - promoters60/1461756
agaact

SEQ ID NO: 117884 - DNA, 6 bp, Unknown
  misc_feature (1)..( 6): Result.002 file - promoters60/1461756
agaact

SEQ ID NO: 117885 - DNA, 6 bp, Unknown
  misc_feature (1)..( 6): Result.002 file - promoters60/1461756
tctgaa

SEQ ID NO: 117886 - DNA, 6 bp, Unknown
  misc_feature (1)..( 6): Result.002 file - promoters60/1461756
tctgaa

SEQ ID NO: 117887 - DNA, 7 bp, Unknown
  misc_feature (1)..( 7): Result.002 file - promoters60/1461756
tgttatt

SEQ ID NO: 117888 - DNA, 7 bp, Unknown
  misc_feature (1)..( 7): Result.002 file - promoters60/1461756
tgttatt

SEQ ID NO: 117889 - DNA, 6 bp, Unknown
  misc_feature (1)..( 6): Result.002 file - promoters60/1461756
gggaaa

SEQ ID NO: 117890 - DNA, 6 bp, Unknown
  misc_feature (1)..( 6): Result.002 file - promoters60/1461756
gggaaa

SEQ ID NO: 117891 - DNA, 6 bp, Unknown
  misc_feature (1)..( 6): Result.002 file - promoters60/1461756
aaatga

SEQ ID NO: 117892 - DNA, 6 bp, Unknown
  misc_feature (1)..( 6): Result.002 file - promoters60/1461756
aaatga

SEQ ID NO: 117893 - DNA, 7 bp, Unknown
  misc_feature (1)..( 7): Result.002 file - promoters60/1461756
attatct

SEQ ID NO: 117894 - DNA, 7 bp, Unknown
  misc_feature (1)..( 7): Result.002 file - promoters60/1461756
attgtct

SEQ ID NO: 117895 - DNA, 12 bp, Unknown
  misc_feature (1)..( 12): Result.002 file - promoters60/1461756
gtccccttctat

SEQ ID NO: 117896 - DNA, 12 bp, Unknown
  misc_feature (1)..( 12): Result.002 file - promoters60/1461756
gtctccttgtat

SEQ ID NO: 117897 - DNA, 9 bp, Unknown
  misc_feature (1)..( 9): Result.002 file - promoters60/1461768
caaaaaaaa

SEQ ID NO: 117898 - DNA, 9 bp, Unknown
  misc_feature (1)..( 9): Result.002 file - promoters60/1461768
gaaaaaaaa

SEQ ID NO: 117899 - DNA, 9 bp, Unknown
  misc_feature (1)..( 9): Result.002 file - promoters60/1461768
taaaagaaa

SEQ ID NO: 117900 - DNA, 9 bp, Unknown
  misc_feature (1)..( 9): Result.002 file - promoters60/1461768
caacaaatc

SEQ ID NO: 117901 - DNA, 11 bp, Unknown
  misc_feature (1)..( 11): Result.002 file - promoters60/1461768
aattcttttat

SEQ ID NO: 117902 - DNA, 11 bp, Unknown
  misc_feature (1)..( 11): Result.002 file - promoters60/1461768
tattatttcag

SEQ ID NO: 117903 - DNA, 12 bp, Unknown
  misc_feature (1)..( 12): Result.002 file - promoters60/1461768
gattctcttatt

SEQ ID NO: 117904 - DNA, 12 bp, Unknown
  misc_feature (1)..( 12): Result.002 file - promoters60/1461768
tattataggaaa

SEQ ID NO: 117905 - DNA, 11 bp, Unknown
  misc_feature (1)..( 11): Result.002 file - promoters60/1461776
aagaaaattga

SEQ ID NO: 117906 - DNA, 11 bp, Unknown
  misc_feature (1)..( 11): Result.002 file - promoters60/1461776
gtcaaatttgt

SEQ ID NO: 117907 - DNA, 11 bp, Unknown
  misc_feature (1)..( 11): Result.002 file - promoters60/1461776
ttgaagattaa

SEQ ID NO: 117908 - DNA, 11 bp, Unknown
  misc_feature (1)..( 11): Result.002 file - promoters60/1461776
aagaaatttgc

SEQ ID NO: 117909 - DNA, 11 bp, Unknown
  misc_feature (1)..( 11): Result.002 file - promoters60/1461776
cccaattttgc

SEQ ID NO: 117910 - DNA, 11 bp, Unknown
  misc_feature (1)..( 11): Result.002 file - promoters60/1461776
cggagttttgc

SEQ ID NO: 117911 - DNA, 13 bp, Unknown
  misc_feature (1)..( 13): Result.002 file - promoters60/1461776
gaactttatatac

SEQ ID NO: 117912 - DNA, 13 bp, Unknown
  misc_feature (1)..( 13): Result.002 file - promoters60/1461776
gtttcatatataa

SEQ ID NO: 117913 - DNA, 13 bp, Unknown
  misc_feature (1)..( 13): Result.002 file - promoters60/1461776
cacccttatattc

SEQ ID NO: 117914 - DNA, 13 bp, Unknown
  misc_feature (1)..( 13): Result.002 file - promoters60/1461776
gtcttataaataa

SEQ ID NO: 117915 - DNA, 13 bp, Unknown
  misc_feature (1)..( 13): Result.002 file - promoters60/1461776
gtcatataaatat

SEQ ID NO: 117916 - DNA, 13 bp, Unknown
  misc_feature (1)..( 13): Result.002 file - promoters60/1461776
atcgattaaattg

SEQ ID NO: 117917 - DNA, 11 bp, Unknown
  misc_feature (1)..( 11): Result.002 file - promoters60/1461776
aatattttgca

SEQ ID NO: 117918 - DNA, 11 bp, Unknown
  misc_feature (1)..( 11): Result.002 file - promoters60/1461776
aattttttgtt

SEQ ID NO: 117919 - DNA, 11 bp, Unknown
  misc_feature (1)..( 11): Result.002 file - promoters60/1461776
catattttgct

SEQ ID NO: 117920 - DNA, 11 bp, Unknown
  misc_feature (1)..( 11): Result.002 file - promoters60/1461776
ccttttttgtt

SEQ ID NO: 117921 - DNA, 11 bp, Unknown
  misc_feature (1)..( 11): Result.002 file - promoters60/1461776
cattttttatc

SEQ ID NO: 117922 - DNA, 7 bp, Unknown
  misc_feature (1)..( 7): Result.002 file - promoters60/1461780
aaatgag

SEQ ID NO: 117923 - DNA, 7 bp, Unknown
  misc_feature (1)..( 7): Result.002 file - promoters60/1461780
aaaagag

SEQ ID NO: 117924 - DNA, 8 bp, Unknown
  misc_feature (1)..( 8): Result.002 file - promoters60/1461780
attctcac

SEQ ID NO: 117925 - DNA, 8 bp, Unknown
  misc_feature (1)..( 8): Result.002 file - promoters60/1461780
attctcac

SEQ ID NO: 117926 - DNA, 11 bp, Unknown
  misc_feature (1)..( 11): Result.002 file - promoters60/1461780
ttttctcttcc

SEQ ID NO: 117927 - DNA, 11 bp, Unknown
  misc_feature (1)..( 11): Result.002 file - promoters60/1461780
tttactccatt

SEQ ID NO: 117928 - DNA, 11 bp, Unknown
  misc_feature (1)..( 11): Result.002 file - promoters60/1461780
aatactcaatt

SEQ ID NO: 117929 - DNA, 12 bp, Unknown
  misc_feature (1)..( 12): Result.002 file - promoters60/1461780
aaccctaaaaaa

SEQ ID NO: 117930 - DNA, 12 bp, Unknown
  misc_feature (1)..( 12): Result.002 file - promoters60/1461780
aaccgtaataaa

SEQ ID NO: 117931 - DNA, 11 bp, Unknown
  misc_feature (1)..( 11): Result.002 file - promoters60/1461780
aaaattaaata

SEQ ID NO: 117932 - DNA, 11 bp, Unknown
  misc_feature (1)..( 11): Result.002 file - promoters60/1461780
aaagttatata

SEQ ID NO: 117933 - DNA, 7 bp, Unknown
  misc_feature (1)..( 7): Result.002 file - promoters60/1461780
cattttt

SEQ ID NO: 117934 - DNA, 7 bp, Unknown
  misc_feature (1)..( 7): Result.002 file - promoters60/1461780
cattttt

SEQ ID NO: 117935 - DNA, 8 bp, Unknown
  misc_feature (1)..( 8): Result.002 file - promoters60/1461780
taattttc

SEQ ID NO: 117936 - DNA, 8 bp, Unknown
  misc_feature (1)..( 8): Result.002 file - promoters60/1461780
taatcttc

SEQ ID NO: 117937 - DNA, 6 bp, Unknown
  misc_feature (1)..( 6): Result.002 file - promoters60/1461780
tttcct

SEQ ID NO: 117938 - DNA, 6 bp, Unknown
  misc_feature (1)..( 6): Result.002 file - promoters60/1461780
tttcct

SEQ ID NO: 117939 - DNA, 8 bp, Unknown
  misc_feature (1)..( 8): Result.002 file - promoters60/1461780
ttcccttt

SEQ ID NO: 117940 - DNA, 8 bp, Unknown
  misc_feature (1)..( 8): Result.002 file - promoters60/1461780
ttcacttt

SEQ ID NO: 117941 - DNA, 7 bp, Unknown
  misc_feature (1)..( 7): Result.002 file - promoters60/1461780
ctcaatt

SEQ ID NO: 117942 - DNA, 7 bp, Unknown
  misc_feature (1)..( 7): Result.002 file - promoters60/1461780
ctcgatt

SEQ ID NO: 117943 - DNA, 7 bp, Unknown
  misc_feature (1)..( 7): Result.002 file - promoters60/1461780
gagcaaa

SEQ ID NO: 117944 - DNA, 7 bp, Unknown
  misc_feature (1)..( 7): Result.002 file - promoters60/1461780
gagtaaa

SEQ ID NO: 117945 - DNA, 7 bp, Unknown
  misc_feature (1)..( 7): Result.002 file - promoters60/1461780
aaaaaaa

SEQ ID NO: 117946 - DNA, 7 bp, Unknown
  misc_feature (1)..( 7): Result.002 file - promoters60/1461780
aaataaa

SEQ ID NO: 117947 - DNA, 6 bp, Unknown
  misc_feature (1)..( 6): Result.002 file - promoters60/1461780
atcttt

SEQ ID NO: 117948 - DNA, 6 bp, Unknown
  misc_feature (1)..( 6): Result.002 file - promoters60/1461780
atcttt

SEQ ID NO: 117949 - DNA, 8 bp, Unknown
  misc_feature (1)..( 8): Result.002 file - promoters60/1461780
cattacat

SEQ ID NO: 117950 - DNA, 8 bp, Unknown
  misc_feature (1)..( 8): Result.002 file - promoters60/1461780
catcacat

SEQ ID NO: 117951 - DNA, 6 bp, Unknown
  misc_feature (1)..( 6): Result.002 file - promoters60/1461780
aagaaa

SEQ ID NO: 117952 - DNA, 6 bp, Unknown
  misc_feature (1)..( 6): Result.002 file - promoters60/1461780
aagaaa

SEQ ID NO: 117953 - DNA, 7 bp, Unknown
  misc_feature (1)..( 7): Result.002 file - promoters60/1461780
agaaagt

SEQ ID NO: 117954 - DNA, 7 bp, Unknown
  misc_feature (1)..( 7): Result.002 file - promoters60/1461780
agatagt

SEQ ID NO: 117955 - DNA, 6 bp, Unknown
  misc_feature (1)..( 6): Result.002 file - promoters60/1461780
aaatgc

SEQ ID NO: 117956 - DNA, 6 bp, Unknown
  misc_feature (1)..( 6): Result.002 file - promoters60/1461780
aaatgc

SEQ ID NO: 117957 - DNA, 7 bp, Unknown
  misc_feature (1)..( 7): Result.002 file - promoters60/1461780
ttataat

SEQ ID NO: 117958 - DNA, 7 bp, Unknown
  misc_feature (1)..( 7): Result.002 file - promoters60/1461780
ttaaaat

SEQ ID NO: 117959 - DNA, 9 bp, Unknown
  misc_feature (1)..( 9): Result.002 file - promoters60/1461791
actcttttg

SEQ ID NO: 117960 - DNA, 9 bp, Unknown
  misc_feature (1)..( 9): Result.002 file - promoters60/1461791
actatttat

SEQ ID NO: 117961 - DNA, 9 bp, Unknown
  misc_feature (1)..( 9): Result.002 file - promoters60/1461791
tttcttttc

SEQ ID NO: 117962 - DNA, 9 bp, Unknown
  misc_feature (1)..( 9): Result.002 file - promoters60/1461791
gttctgttc

SEQ ID NO: 117963 - DNA, 10 bp, Unknown
  misc_feature (1)..( 10): Result.002 file - promoters60/1461791
ggtatatata

SEQ ID NO: 117964 - DNA, 10 bp, Unknown
  misc_feature (1)..( 10): Result.002 file - promoters60/1461791
gatatataaa

SEQ ID NO: 117965 - DNA, 10 bp, Unknown
  misc_feature (1)..( 10): Result.002 file - promoters60/1461791
actataaata

SEQ ID NO: 117966 - DNA, 10 bp, Unknown
  misc_feature (1)..( 10): Result.002 file - promoters60/1461791
tgtatatatt

SEQ ID NO: 117967 - DNA, 10 bp, Unknown
  misc_feature (1)..( 10): Result.002 file - promoters60/1461791
ataatataaa

SEQ ID NO: 117968 - DNA, 10 bp, Unknown
  misc_feature (1)..( 10): Result.002 file - promoters60/1461791
actttaaatt

SEQ ID NO: 117969 - DNA, 11 bp, Unknown
  misc_feature (1)..( 11): Result.002 file - promoters60/1461791
gaatttggaaa

SEQ ID NO: 117970 - DNA, 11 bp, Unknown
  misc_feature (1)..( 11): Result.002 file - promoters60/1461791
gaagttgtgtt

SEQ ID NO: 117971 - DNA, 11 bp, Unknown
  misc_feature (1)..( 11): Result.002 file - promoters60/1461791
taaggtgtgtt

SEQ ID NO: 117972 - DNA, 11 bp, Unknown
  misc_feature (1)..( 11): Result.002 file - promoters60/1461791
gaaattgaaac

SEQ ID NO: 117973 - DNA, 9 bp, Unknown
  misc_feature (1)..( 9): Result.002 file - promoters60/1461791
cttgttttc

SEQ ID NO: 117974 - DNA, 9 bp, Unknown
  misc_feature (1)..( 9): Result.002 file - promoters60/1461791
tttgtttta

SEQ ID NO: 117975 - DNA, 9 bp, Unknown
  misc_feature (1)..( 9): Result.002 file - promoters60/1461791
gaagtttta

SEQ ID NO: 117976 - DNA, 9 bp, Unknown
  misc_feature (1)..( 9): Result.002 file - promoters60/1461791
tttgtttac

SEQ ID NO: 117977 - DNA, 9 bp, Unknown
  misc_feature (1)..( 9): Result.002 file - promoters60/1461791
ctaaaaaaa

SEQ ID NO: 117978 - DNA, 9 bp, Unknown
  misc_feature (1)..( 9): Result.002 file - promoters60/1461791
ttaaataaa

SEQ ID NO: 117979 - DNA, 9 bp, Unknown
  misc_feature (1)..( 9): Result.002 file - promoters60/1461791
tgaaacaaa

SEQ ID NO: 117980 - DNA, 9 bp, Unknown
  misc_feature (1)..( 9): Result.002 file - promoters60/1461791
tgaaacaca

SEQ ID NO: 117981 - DNA, 9 bp, Unknown
  misc_feature (1)..( 9): Result.002 file - promoters60/1461791
gacaataac

SEQ ID NO: 117982 - DNA, 8 bp, Unknown
  misc_feature (1)..( 8): Result.002 file - promoters60/1461795
ttaaatgg

SEQ ID NO: 117983 - DNA, 8 bp, Unknown
  misc_feature (1)..( 8): Result.002 file - promoters60/1461795
ttaaatta

SEQ ID NO: 117984 - DNA, 8 bp, Unknown
  misc_feature (1)..( 8): Result.002 file - promoters60/1461795
ttatatgg

SEQ ID NO: 117985 - DNA, 12 bp, Unknown
  misc_feature (1)..( 12): Result.002 file - promoters60/1461795
gttatatgactt

SEQ ID NO: 117986 - DNA, 12 bp, Unknown
  misc_feature (1)..( 12): Result.002 file - promoters60/1461795
actatttgactt

SEQ ID NO: 117987 - DNA, 12 bp, Unknown
  misc_feature (1)..( 12): Result.002 file - promoters60/1461795
actatttttttt

SEQ ID NO: 117988 - DNA, 7 bp, Unknown
  misc_feature (1)..( 7): Result.002 file - promoters60/1461799
agaagca

SEQ ID NO: 117989 - DNA, 7 bp, Unknown
  misc_feature (1)..( 7): Result.002 file - promoters60/1461799
agaagca

SEQ ID NO: 117990 - DNA, 8 bp, Unknown
  misc_feature (1)..( 8): Result.002 file - promoters60/1461799
ttttattt

SEQ ID NO: 117991 - DNA, 8 bp, Unknown
  misc_feature (1)..( 8): Result.002 file - promoters60/1461799
tttgattt

SEQ ID NO: 117992 - DNA, 9 bp, Unknown
  misc_feature (1)..( 9): Result.002 file - promoters60/1461799
agttccata

SEQ ID NO: 117993 - DNA, 9 bp, Unknown
  misc_feature (1)..( 9): Result.002 file - promoters60/1461799
agtttcata

SEQ ID NO: 117994 - DNA, 7 bp, Unknown
  misc_feature (1)..( 7): Result.002 file - promoters60/1461799
tctttta

SEQ ID NO: 117995 - DNA, 7 bp, Unknown
  misc_feature (1)..( 7): Result.002 file - promoters60/1461799
tctttta

SEQ ID NO: 117996 - DNA, 9 bp, Unknown
  misc_feature (1)..( 9): Result.002 file - promoters60/1461799
tctctggtg

SEQ ID NO: 117997 - DNA, 9 bp, Unknown
  misc_feature (1)..( 9): Result.002 file - promoters60/1461799
tctctcgtg

SEQ ID NO: 117998 - DNA, 6 bp, Unknown
  misc_feature (1)..( 6): Result.002 file - promoters60/1461799
tagact

SEQ ID NO: 117999 - DNA, 6 bp, Unknown
  misc_feature (1)..( 6): Result.002 file - promoters60/1461799
tagact

SEQ ID NO: 118000 - DNA, 6 bp, Unknown
  misc_feature (1)..( 6): Result.002 file - promoters60/1461799
atgttg

SEQ ID NO: 118001 - DNA, 6 bp, Unknown
  misc_feature (1)..( 6): Result.002 file - promoters60/1461799
atgttg

SEQ ID NO: 118002 - DNA, 6 bp, Unknown
  misc_feature (1)..( 6): Result.002 file - promoters60/1461799
gtggtt

SEQ ID NO: 118003 - DNA, 6 bp, Unknown
  misc_feature (1)..( 6): Result.002 file - promoters60/1461799
gtggtt

SEQ ID NO: 118004 - DNA, 6 bp, Unknown
  misc_feature (1)..( 6): Result.002 file - promoters60/1461799
tacaga

SEQ ID NO: 118005 - DNA, 6 bp, Unknown
  misc_feature (1)..( 6): Result.002 file - promoters60/1461799
tacaga

SEQ ID NO: 118006 - DNA, 7 bp, Unknown
  misc_feature (1)..( 7): Result.002 file - promoters60/1461799
ataaact

SEQ ID NO: 118007 - DNA, 7 bp, Unknown
  misc_feature (1)..( 7): Result.002 file - promoters60/1461799
ataaact

SEQ ID NO: 118008 - DNA, 7 bp, Unknown
  misc_feature (1)..( 7): Result.002 file - promoters60/1461799
gagaaga

SEQ ID NO: 118009 - DNA, 7 bp, Unknown
  misc_feature (1)..( 7): Result.002 file - promoters60/1461799
gagaaga

SEQ ID NO: 118010 - DNA, 7 bp, Unknown
  misc_feature (1)..( 7): Result.002 file - promoters60/1461799
aaacagc

SEQ ID NO: 118011 - DNA, 7 bp, Unknown
  misc_feature (1)..( 7): Result.002 file - promoters60/1461799
aaatagc

SEQ ID NO: 118012 - DNA, 7 bp, Unknown
  misc_feature (1)..( 7): Result.002 file - promoters60/1461799
ttctttg

SEQ ID NO: 118013 - DNA, 7 bp, Unknown
  misc_feature (1)..( 7): Result.002 file - promoters60/1461799
ttctttg

SEQ ID NO: 118014 - DNA, 7 bp, Unknown
  misc_feature (1)..( 7): Result.002 file - promoters60/1461799
actcatt

SEQ ID NO: 118015 - DNA, 7 bp, Unknown
  misc_feature (1)..( 7): Result.002 file - promoters60/1461799
actaatt

SEQ ID NO: 118016 - DNA, 6 bp, Unknown
  misc_feature (1)..( 6): Result.002 file - promoters60/1461799
tcgttt

SEQ ID NO: 118017 - DNA, 6 bp, Unknown
  misc_feature (1)..( 6): Result.002 file - promoters60/1461799
tcgttt

SEQ ID NO: 118018 - DNA, 9 bp, Unknown
  misc_feature (1)..( 9): Result.002 file - promoters60/1461803
tcttctttt

SEQ ID NO: 118019 - DNA, 9 bp, Unknown
  misc_feature (1)..( 9): Result.002 file - promoters60/1461803
tcttatttc

SEQ ID NO: 118020 - DNA, 10 bp, Unknown
  misc_feature (1)..( 10): Result.002 file - promoters60/1461803
gattcatttt

SEQ ID NO: 118021 - DNA, 11 bp, Unknown
  misc_feature (1)..( 11): Result.002 file - promoters60/1461803
acttctaatta

SEQ ID NO: 118022 - DNA, 8 bp, Unknown
  misc_feature (1)..( 8): Result.002 file - promoters60/1461803
aaggaaat

SEQ ID NO: 118023 - DNA, 8 bp, Unknown
  misc_feature (1)..( 8): Result.002 file - promoters60/1461803
gaggaaaa

SEQ ID NO: 118024 - DNA, 8 bp, Unknown
  misc_feature (1)..( 8): Result.002 file - promoters60/1461803
aagcaaaa

SEQ ID NO: 118025 - DNA, 9 bp, Unknown
  misc_feature (1)..( 9): Result.002 file - promoters60/1461803
ccgcacaac

SEQ ID NO: 118026 - DNA, 15 bp, Unknown
  misc_feature (1)..( 15): Result.002 file - promoters60/1461803
atggcatataattaa

SEQ ID NO: 118027 - DNA, 15 bp, Unknown
  misc_feature (1)..( 15): Result.002 file - promoters60/1461803
actccatttaatttt

SEQ ID NO: 118028 - DNA, 15 bp, Unknown
  misc_feature (1)..( 15): Result.002 file - promoters60/1461803
ttaaattatgattaa

SEQ ID NO: 118029 - DNA, 15 bp, Unknown
  misc_feature (1)..( 15): Result.002 file - promoters60/1461803
actacatttggagat

SEQ ID NO: 118030 - DNA, 12 bp, Unknown
  misc_feature (1)..( 12): Result.002 file - promoters60/1461803
accaataaaaga

SEQ ID NO: 118031 - DNA, 12 bp, Unknown
  misc_feature (1)..( 12): Result.002 file - promoters60/1461803
tctcataaaaga

SEQ ID NO: 118032 - DNA, 12 bp, Unknown
  misc_feature (1)..( 12): Result.002 file - promoters60/1461803
accaagaaaacc

SEQ ID NO: 118033 - DNA, 12 bp, Unknown
  misc_feature (1)..( 12): Result.002 file - promoters60/1461803
aagaaaaaaaac

SEQ ID NO: 118034 - DNA, 9 bp, Unknown
  misc_feature (1)..( 9): Result.002 file - promoters60/1461803
aataatttt

SEQ ID NO: 118035 - DNA, 9 bp, Unknown
  misc_feature (1)..( 9): Result.002 file - promoters60/1461803
gctaagttt

SEQ ID NO: 118036 - DNA, 9 bp, Unknown
  misc_feature (1)..( 9): Result.002 file - promoters60/1461803
aataattac

SEQ ID NO: 118037 - DNA, 9 bp, Unknown
  misc_feature (1)..( 9): Result.002 file - promoters60/1461803
tatacttat

SEQ ID NO: 118038 - DNA, 9 bp, Unknown
  misc_feature (1)..( 9): Result.002 file - promoters60/1461803
cctaaattt

SEQ ID NO: 118039 - DNA, 10 bp, Unknown
  misc_feature (1)..( 10): Result.002 file - promoters60/1461803
accaataaaa

SEQ ID NO: 118040 - DNA, 10 bp, Unknown
  misc_feature (1)..( 10): Result.002 file - promoters60/1461803
gccaatataa

SEQ ID NO: 118041 - DNA, 10 bp, Unknown
  misc_feature (1)..( 10): Result.002 file - promoters60/1461803
accaagaaaa

SEQ ID NO: 118042 - DNA, 10 bp, Unknown
  misc_feature (1)..( 10): Result.002 file - promoters60/1461803
tctaagaaaa

SEQ ID NO: 118043 - DNA, 10 bp, Unknown
  misc_feature (1)..( 10): Result.002 file - promoters60/1461803
taaaagaaag

SEQ ID NO: 118044 - DNA, 8 bp, Unknown
  misc_feature (1)..( 8): Result.002 file - promoters60/1461803
tattatag

SEQ ID NO: 118045 - DNA, 8 bp, Unknown
  misc_feature (1)..( 8): Result.002 file - promoters60/1461803
tattattt

SEQ ID NO: 118046 - DNA, 8 bp, Unknown
  misc_feature (1)..( 8): Result.002 file - promoters60/1461803
gattcttt

SEQ ID NO: 118047 - DNA, 8 bp, Unknown
  misc_feature (1)..( 8): Result.002 file - promoters60/1461803
gattctct

SEQ ID NO: 118048 - DNA, 8 bp, Unknown
  misc_feature (1)..( 8): Result.002 file - promoters60/1461837
gggattca

SEQ ID NO: 118049 - DNA, 8 bp, Unknown
  misc_feature (1)..( 8): Result.002 file - promoters60/1461837
tggattca

SEQ ID NO: 118050 - DNA, 8 bp, Unknown
  misc_feature (1)..( 8): Result.002 file - promoters60/1461837
tggatttt

SEQ ID NO: 118051 - DNA, 9 bp, Unknown
  misc_feature (1)..( 9): Result.002 file - promoters60/1461837
ttttgttat

SEQ ID NO: 118052 - DNA, 9 bp, Unknown
  misc_feature (1)..( 9): Result.002 file - promoters60/1461837
ttttgttat

SEQ ID NO: 118053 - DNA, 9 bp, Unknown
  misc_feature (1)..( 9): Result.002 file - promoters60/1461837
ctttgttct

SEQ ID NO: 118054 - DNA, 7 bp, Unknown
  misc_feature (1)..( 7): Result.002 file - promoters60/1461837
gatgaat

SEQ ID NO: 118055 - DNA, 7 bp, Unknown
  misc_feature (1)..( 7): Result.002 file - promoters60/1461837
gataaat

SEQ ID NO: 118056 - DNA, 6 bp, Unknown
  misc_feature (1)..( 6): Result.002 file - promoters60/1461837
aaacaa

SEQ ID NO: 118057 - DNA, 6 bp, Unknown
  misc_feature (1)..( 6): Result.002 file - promoters60/1461837
aaacaa

SEQ ID NO: 118058 - DNA, 6 bp, Unknown
  misc_feature (1)..( 6): Result.002 file - promoters60/1461837
agctta

SEQ ID NO: 118059 - DNA, 6 bp, Unknown
  misc_feature (1)..( 6): Result.002 file - promoters60/1461837
agctta

SEQ ID NO: 118060 - DNA, 8 bp, Unknown
  misc_feature (1)..( 8): Result.002 file - promoters60/1461837
ttgataaa

SEQ ID NO: 118061 - DNA, 8 bp, Unknown
  misc_feature (1)..( 8): Result.002 file - promoters60/1461837
ttgataaa

SEQ ID NO: 118062 - DNA, 6 bp, Unknown
  misc_feature (1)..( 6): Result.002 file - promoters60/1461837
aaatat

SEQ ID NO: 118063 - DNA, 6 bp, Unknown
  misc_feature (1)..( 6): Result.002 file - promoters60/1461837
aaatat

SEQ ID NO: 118064 - DNA, 9 bp, Unknown
  misc_feature (1)..( 9): Result.002 file - promoters60/1461837
tcgggggat

SEQ ID NO: 118065 - DNA, 9 bp, Unknown
  misc_feature (1)..( 9): Result.002 file - promoters60/1461837
tcggtggat

SEQ ID NO: 118066 - DNA, 7 bp, Unknown
  misc_feature (1)..( 7): Result.002 file - promoters60/1461837
ttctttc

SEQ ID NO: 118067 - DNA, 7 bp, Unknown
  misc_feature (1)..( 7): Result.002 file - promoters60/1461837
ttccttc

SEQ ID NO: 118068 - DNA, 7 bp, Unknown
  misc_feature (1)..( 7): Result.002 file - promoters60/1461837
agatggg

SEQ ID NO: 118069 - DNA, 7 bp, Unknown
  misc_feature (1)..( 7): Result.002 file - promoters60/1461837
agagggg

SEQ ID NO: 118070 - DNA, 7 bp, Unknown
  misc_feature (1)..( 7): Result.002 file - promoters60/1461837
ataaatt

SEQ ID NO: 118071 - DNA, 7 bp, Unknown
  misc_feature (1)..( 7): Result.002 file - promoters60/1461837
atatatt

SEQ ID NO: 118072 - DNA, 8 bp, Unknown
  misc_feature (1)..( 8): Result.002 file - promoters60/1461837
tattcaaa

SEQ ID NO: 118073 - DNA, 8 bp, Unknown
  misc_feature (1)..( 8): Result.002 file - promoters60/1461837
tatccaaa

SEQ ID NO: 118074 - DNA, 6 bp, Unknown
  misc_feature (1)..( 6): Result.002 file - promoters60/1461837
ctttga

SEQ ID NO: 118075 - DNA, 6 bp, Unknown
  misc_feature (1)..( 6): Result.002 file - promoters60/1461837
ctttga

SEQ ID NO: 118076 - DNA, 6 bp, Unknown
  misc_feature (1)..( 6): Result.002 file - promoters60/1461837
aggtaa

SEQ ID NO: 118077 - DNA, 6 bp, Unknown
  misc_feature (1)..( 6): Result.002 file - promoters60/1461837
aggtaa

SEQ ID NO: 118078 - DNA, 6 bp, Unknown
  misc_feature (1)..( 6): Result.002 file - promoters60/1461837
tgaaag

SEQ ID NO: 118079 - DNA, 6 bp, Unknown
  misc_feature (1)..( 6): Result.002 file - promoters60/1461837
tgaaag

SEQ ID NO: 118080 - DNA, 10 bp, Unknown
  misc_feature (1)..( 10): Result.002 file - promoters60/1461837
aaaaaagttg

SEQ ID NO: 118081 - DNA, 10 bp, Unknown
  misc_feature (1)..( 10): Result.002 file - promoters60/1461837
aaaagagttg

SEQ ID NO: 118082 - DNA, 8 bp, Unknown
  misc_feature (1)..( 8): Result.002 file - promoters60/1461837
aaaacagt

SEQ ID NO: 118083 - DNA, 8 bp, Unknown
  misc_feature (1)..( 8): Result.002 file - promoters60/1461837
aaaaaagt

SEQ ID NO: 118084 - DNA, 7 bp, Unknown
  misc_feature (1)..( 7): Result.002 file - promoters60/1461837
actggga

SEQ ID NO: 118085 - DNA, 7 bp, Unknown
  misc_feature (1)..( 7): Result.002 file - promoters60/1461837
actagga

SEQ ID NO: 118086 - DNA, 6 bp, Unknown
  misc_feature (1)..( 6): Result.002 file - promoters60/1461837
acgaag

SEQ ID NO: 118087 - DNA, 6 bp, Unknown
  misc_feature (1)..( 6): Result.002 file - promoters60/1461837
acgaag

SEQ ID NO: 118088 - DNA, 6 bp, Unknown
  misc_feature (1)..( 6): Result.002 file - promoters60/1461837
aaaaat

SEQ ID NO: 118089 - DNA, 6 bp, Unknown
  misc_feature (1)..( 6): Result.002 file - promoters60/1461837
aaaaat

SEQ ID NO: 118090 - DNA, 6 bp, Unknown
  misc_feature (1)..( 6): Result.002 file - promoters60/1461837
aagaga

SEQ ID NO: 118091 - DNA, 6 bp, Unknown
  misc_feature (1)..( 6): Result.002 file - promoters60/1461837
aagaga

SEQ ID NO: 118092 - DNA, 6 bp, Unknown
  misc_feature (1)..( 6): Result.002 file - promoters60/1461837
tttttt

SEQ ID NO: 118093 - DNA, 6 bp, Unknown
  misc_feature (1)..( 6): Result.002 file - promoters60/1461837
tttttt

SEQ ID NO: 118094 - DNA, 7 bp, Unknown
  misc_feature (1)..( 7): Result.002 file - promoters60/1461837
aaaccca

SEQ ID NO: 118095 - DNA, 7 bp, Unknown
  misc_feature (1)..( 7): Result.002 file - promoters60/1461837
aaatcca

SEQ ID NO: 118096 - DNA, 7 bp, Unknown
  misc_feature (1)..( 7): Result.002 file - promoters60/1461837
ttatata

SEQ ID NO: 118097 - DNA, 7 bp, Unknown
  misc_feature (1)..( 7): Result.002 file - promoters60/1461837
ttaaata

SEQ ID NO: 118098 - DNA, 7 bp, Unknown
  misc_feature (1)..( 7): Result.002 file - promoters60/1461837
atacata

SEQ ID NO: 118099 - DNA, 7 bp, Unknown
  misc_feature (1)..( 7): Result.002 file - promoters60/1461837
ataaata

SEQ ID NO: 118100 - DNA, 6 bp, Unknown
  misc_feature (1)..( 6): Result.002 file - promoters60/1465863
tcgttt

SEQ ID NO: 118101 - DNA, 6 bp, Unknown
  misc_feature (1)..( 6): Result.002 file - promoters60/1465863
tcgttt

SEQ ID NO: 118102 - DNA, 7 bp, Unknown
  misc_feature (1)..( 7): Result.002 file - promoters60/1465863
tcgcttt

SEQ ID NO: 118103 - DNA, 9 bp, Unknown
  misc_feature (1)..( 9): Result.002 file - promoters60/1465863
ttcttagct

SEQ ID NO: 118104 - DNA, 9 bp, Unknown
  misc_feature (1)..( 9): Result.002 file - promoters60/1465863
ttcttatca

SEQ ID NO: 118105 - DNA, 9 bp, Unknown
  misc_feature (1)..( 9): Result.002 file - promoters60/1465863
atctgagct

SEQ ID NO: 118106 - DNA, 9 bp, Unknown
  misc_feature (1)..( 9): Result.002 file - promoters60/1465863
agaaagcgg

SEQ ID NO: 118107 - DNA, 9 bp, Unknown
  misc_feature (1)..( 9): Result.002 file - promoters60/1465863
agaaagctt

SEQ ID NO: 118108 - DNA, 9 bp, Unknown
  misc_feature (1)..( 9): Result.002 file - promoters60/1465863
tgaaacaaa

SEQ ID NO: 118109 - DNA, 8 bp, Unknown
  misc_feature (1)..( 8): Result.002 file - promoters60/1465863
gaaagatt

SEQ ID NO: 118110 - DNA, 8 bp, Unknown
  misc_feature (1)..( 8): Result.002 file - promoters60/1465863
gaaagaaa

SEQ ID NO: 118111 - DNA, 8 bp, Unknown
  misc_feature (1)..( 8): Result.002 file - promoters60/1465863
aaaacatt

SEQ ID NO: 118112 - DNA, 8 bp, Unknown
  misc_feature (1)..( 8): Result.002 file - promoters60/1465863
tccaaagt

SEQ ID NO: 118113 - DNA, 8 bp, Unknown
  misc_feature (1)..( 8): Result.002 file - promoters60/1465863
tccaaagg

SEQ ID NO: 118114 - DNA, 8 bp, Unknown
  misc_feature (1)..( 8): Result.002 file - promoters60/1465863
ctcaaagg

SEQ ID NO: 118115 - DNA, 9 bp, Unknown
  misc_feature (1)..( 9): Result.002 file - promoters60/1465863
ctagggttt

SEQ ID NO: 118116 - DNA, 9 bp, Unknown
  misc_feature (1)..( 9): Result.002 file - promoters60/1465863
ttagggttt

SEQ ID NO: 118117 - DNA, 9 bp, Unknown
  misc_feature (1)..( 9): Result.002 file - promoters60/1465863
ctagggttc

SEQ ID NO: 118118 - DNA, 8 bp, Unknown
  misc_feature (1)..( 8): Result.002 file - promoters60/1465863
agtttaat

SEQ ID NO: 118119 - DNA, 8 bp, Unknown
  misc_feature (1)..( 8): Result.002 file - promoters60/1465863
agtctaaa

SEQ ID NO: 118120 - DNA, 8 bp, Unknown
  misc_feature (1)..( 8): Result.002 file - promoters60/1465863
tttttaat

SEQ ID NO: 118121 - DNA, 9 bp, Unknown
  misc_feature (1)..( 9): Result.002 file - promoters60/1465863
tgatttttc

SEQ ID NO: 118122 - DNA, 9 bp, Unknown
  misc_feature (1)..( 9): Result.002 file - promoters60/1465863
atatttttt

SEQ ID NO: 118123 - DNA, 9 bp, Unknown
  misc_feature (1)..( 9): Result.002 file - promoters60/1465863
atattttct

SEQ ID NO: 118124 - DNA, 10 bp, Unknown
  misc_feature (1)..( 10): Result.002 file - promoters60/1465863
caatttgtta

SEQ ID NO: 118125 - DNA, 9 bp, Unknown
  misc_feature (1)..( 9): Result.002 file - promoters60/1465943
atttgcaac

SEQ ID NO: 118126 - DNA, 9 bp, Unknown
  misc_feature (1)..( 9): Result.002 file - promoters60/1465943
attggcaac

SEQ ID NO: 118127 - DNA, 6 bp, Unknown
  misc_feature (1)..( 6): Result.002 file - promoters60/1465943
atttct

SEQ ID NO: 118128 - DNA, 6 bp, Unknown
  misc_feature (1)..( 6): Result.002 file - promoters60/1465943
atttct

SEQ ID NO: 118129 - DNA, 6 bp, Unknown
  misc_feature (1)..( 6): Result.002 file - promoters60/1465943
aagaga

SEQ ID NO: 118130 - DNA, 6 bp, Unknown
  misc_feature (1)..( 6): Result.002 file - promoters60/1465943
aagaga

SEQ ID NO: 118131 - DNA, 8 bp, Unknown
  misc_feature (1)..( 8): Result.002 file - promoters60/1465943
gcaaaatt

SEQ ID NO: 118132 - DNA, 8 bp, Unknown
  misc_feature (1)..( 8): Result.002 file - promoters60/1465943
gcaaaatt

SEQ ID NO: 118133 - DNA, 8 bp, Unknown
  misc_feature (1)..( 8): Result.002 file - promoters60/1465943
aaacttga

SEQ ID NO: 118134 - DNA, 8 bp, Unknown
  misc_feature (1)..( 8): Result.002 file - promoters60/1465943
aaacctga

SEQ ID NO: 118135 - DNA, 10 bp, Unknown
  misc_feature (1)..( 10): Result.002 file - promoters60/1465943
actcttgata

SEQ ID NO: 118136 - DNA, 10 bp, Unknown
  misc_feature (1)..( 10): Result.002 file - promoters60/1465943
actcttcata

SEQ ID NO: 118137 - DNA, 6 bp, Unknown
  misc_feature (1)..( 6): Result.002 file - promoters60/1465943
ctctcc

SEQ ID NO: 118138 - DNA, 6 bp, Unknown
  misc_feature (1)..( 6): Result.002 file - promoters60/1465943
ctctcc

SEQ ID NO: 118139 - DNA, 11 bp, Unknown
  misc_feature (1)..( 11): Result.002 file - promoters60/1465943
aaacttaacaa

SEQ ID NO: 118140 - DNA, 11 bp, Unknown
  misc_feature (1)..( 11): Result.002 file - promoters60/1465943
aaactaaacaa

SEQ ID NO: 118141 - DNA, 8 bp, Unknown
  misc_feature (1)..( 8): Result.002 file - promoters60/1465943
tgcataaa

SEQ ID NO: 118142 - DNA, 8 bp, Unknown
  misc_feature (1)..( 8): Result.002 file - promoters60/1465943
tgcaaaaa

SEQ ID NO: 118143 - DNA, 9 bp, Unknown
  misc_feature (1)..( 9): Result.002 file - promoters60/1465943
atgaagatt

SEQ ID NO: 118144 - DNA, 9 bp, Unknown
  misc_feature (1)..( 9): Result.002 file - promoters60/1465943
atgaaaatt

SEQ ID NO: 118145 - DNA, 6 bp, Unknown
  misc_feature (1)..( 6): Result.002 file - promoters60/1470582
taaaaa

SEQ ID NO: 118146 - DNA, 6 bp, Unknown
  misc_feature (1)..( 6): Result.002 file - promoters60/1470582
taaaaa

SEQ ID NO: 118147 - DNA, 7 bp, Unknown
  misc_feature (1)..( 7): Result.002 file - promoters60/1470582
aacaaaa

SEQ ID NO: 118148 - DNA, 7 bp, Unknown
  misc_feature (1)..( 7): Result.002 file - promoters60/1470582
aacaaaa

SEQ ID NO: 118149 - DNA, 6 bp, Unknown
  misc_feature (1)..( 6): Result.002 file - promoters60/1470582
tcaaaa

SEQ ID NO: 118150 - DNA, 6 bp, Unknown
  misc_feature (1)..( 6): Result.002 file - promoters60/1470582
tcaaaa

SEQ ID NO: 118151 - DNA, 8 bp, Unknown
  misc_feature (1)..( 8): Result.002 file - promoters60/1470582
aaacattc

SEQ ID NO: 118152 - DNA, 8 bp, Unknown
  misc_feature (1)..( 8): Result.002 file - promoters60/1470582
aaatattc

SEQ ID NO: 118153 - DNA, 9 bp, Unknown
  misc_feature (1)..( 9): Result.002 file - promoters60/1470582
gtttggatt

SEQ ID NO: 118154 - DNA, 9 bp, Unknown
  misc_feature (1)..( 9): Result.002 file - promoters60/1470582
gttttgatt

SEQ ID NO: 118155 - DNA, 6 bp, Unknown
  misc_feature (1)..( 6): Result.002 file - promoters60/1470582
tttaca

SEQ ID NO: 118156 - DNA, 6 bp, Unknown
  misc_feature (1)..( 6): Result.002 file - promoters60/1470582
tttaca

SEQ ID NO: 118157 - DNA, 8 bp, Unknown
  misc_feature (1)..( 8): Result.002 file - promoters60/1470582
atcaaatt

SEQ ID NO: 118158 - DNA, 8 bp, Unknown
  misc_feature (1)..( 8): Result.002 file - promoters60/1470582
atcagatt

SEQ ID NO: 118159 - DNA, 6 bp, Unknown
  misc_feature (1)..( 6): Result.002 file - promoters60/1470582
aagata

SEQ ID NO: 118160 - DNA, 6 bp, Unknown
  misc_feature (1)..( 6): Result.002 file - promoters60/1470582
aagata

SEQ ID NO: 118161 - DNA, 15 bp, Unknown
  misc_feature (1)..( 15): Result.002 file - promoters60/1470903
cccatagctccttaa

SEQ ID NO: 118162 - DNA, 15 bp, Unknown
  misc_feature (1)..( 15): Result.002 file - promoters60/1470903
cccatagctccttaa

SEQ ID NO: 118163 - DNA, 7 bp, Unknown
  misc_feature (1)..( 7): Result.002 file - promoters60/1470903
tttggtt

SEQ ID NO: 118164 - DNA, 7 bp, Unknown
  misc_feature (1)..( 7): Result.002 file - promoters60/1470903
tttggtt

SEQ ID NO: 118165 - DNA, 8 bp, Unknown
  misc_feature (1)..( 8): Result.002 file - promoters60/1470903
gaaaagaa

SEQ ID NO: 118166 - DNA, 8 bp, Unknown
  misc_feature (1)..( 8): Result.002 file - promoters60/1470903
gaagagaa

SEQ ID NO: 118167 - DNA, 8 bp, Unknown
  misc_feature (1)..( 8): Result.002 file - promoters60/1470903
gaagagaa

SEQ ID NO: 118168 - DNA, 14 bp, Unknown
  misc_feature (1)..( 14): Result.002 file - promoters60/1470903
atagcttaccttta

SEQ ID NO: 118169 - DNA, 14 bp, Unknown
  misc_feature (1)..( 14): Result.002 file - promoters60/1470903
ttagcttcagcttc

SEQ ID NO: 118170 - DNA, 14 bp, Unknown
  misc_feature (1)..( 14): Result.002 file - promoters60/1470903
ttagcttcagcttc

SEQ ID NO: 118171 - DNA, 14 bp, Unknown
  misc_feature (1)..( 14): Result.002 file - promoters60/1470903
agagagagagagag

SEQ ID NO: 118172 - DNA, 14 bp, Unknown
  misc_feature (1)..( 14): Result.002 file - promoters60/1470903
agagagagagagag

SEQ ID NO: 118173 - DNA, 14 bp, Unknown
  misc_feature (1)..( 14): Result.002 file - promoters60/1470903
agagagagaggtga

SEQ ID NO: 118174 - DNA, 7 bp, Unknown
  misc_feature (1)..( 7): Result.002 file - promoters60/1470903
agagaag

SEQ ID NO: 118175 - DNA, 7 bp, Unknown
  misc_feature (1)..( 7): Result.002 file - promoters60/1470903
agagaag

SEQ ID NO: 118176 - DNA, 7 bp, Unknown
  misc_feature (1)..( 7): Result.002 file - promoters60/1470903
ggatcaa

SEQ ID NO: 118177 - DNA, 7 bp, Unknown
  misc_feature (1)..( 7): Result.002 file - promoters60/1470903
ggatcaa

SEQ ID NO: 118178 - DNA, 11 bp, Unknown
  misc_feature (1)..( 11): Result.002 file - promoters60/1470903
attcagggttt

SEQ ID NO: 118179 - DNA, 11 bp, Unknown
  misc_feature (1)..( 11): Result.002 file - promoters60/1470903
attcaggtttt

SEQ ID NO: 118180 - DNA, 8 bp, Unknown
  misc_feature (1)..( 8): Result.002 file - promoters60/1470903
aaacgatt

SEQ ID NO: 118181 - DNA, 8 bp, Unknown
  misc_feature (1)..( 8): Result.002 file - promoters60/1470903
aaacaatt

SEQ ID NO: 118182 - DNA, 7 bp, Unknown
  misc_feature (1)..( 7): Result.002 file - promoters60/1470903
aacgcga

SEQ ID NO: 118183 - DNA, 7 bp, Unknown
  misc_feature (1)..( 7): Result.002 file - promoters60/1470903
aacgcga

SEQ ID NO: 118184 - DNA, 8 bp, Unknown
  misc_feature (1)..( 8): Result.002 file - promoters60/1470903
aaagagaa

SEQ ID NO: 118185 - DNA, 8 bp, Unknown
  misc_feature (1)..( 8): Result.002 file - promoters60/1470903
aaagagaa

SEQ ID NO: 118186 - DNA, 8 bp, Unknown
  misc_feature (1)..( 8): Result.002 file - promoters60/1470903
aacgcgaa

SEQ ID NO: 118187 - DNA, 8 bp, Unknown
  misc_feature (1)..( 8): Result.002 file - promoters60/1470903
aacgtgaa

SEQ ID NO: 118188 - DNA, 6 bp, Unknown
  misc_feature (1)..( 6): Result.002 file - promoters60/1470903
ttatat

SEQ ID NO: 118189 - DNA, 6 bp, Unknown
  misc_feature (1)..( 6): Result.002 file - promoters60/1470903
ttatat

SEQ ID NO: 118190 - DNA, 7 bp, Unknown
  misc_feature (1)..( 7): Result.002 file - promoters60/1470903
tttggtt

SEQ ID NO: 118191 - DNA, 7 bp, Unknown
  misc_feature (1)..( 7): Result.002 file - promoters60/1470903
tttggtt

SEQ ID NO: 118192 - DNA, 6 bp, Unknown
  misc_feature (1)..( 6): Result.002 file - promoters60/1470903
tagctt

SEQ ID NO: 118193 - DNA, 6 bp, Unknown
  misc_feature (1)..( 6): Result.002 file - promoters60/1470903
tagctt

SEQ ID NO: 118194 - DNA, 7 bp, Unknown
  misc_feature (1)..( 7): Result.002 file - promoters60/1470903
aacgcga

SEQ ID NO: 118195 - DNA, 7 bp, Unknown
  misc_feature (1)..( 7): Result.002 file - promoters60/1470903
aacgcga

SEQ ID NO: 118196 - DNA, 10 bp, Unknown
  misc_feature (1)..( 10): Result.002 file - promoters60/1470993
gtatatatta

SEQ ID NO: 118197 - DNA, 10 bp, Unknown
  misc_feature (1)..( 10): Result.002 file - promoters60/1470993
gtagatattt

SEQ ID NO: 118198 - DNA, 10 bp, Unknown
  misc_feature (1)..( 10): Result.002 file - promoters60/1470993
gaataaattg

SEQ ID NO: 118199 - DNA, 11 bp, Unknown
  misc_feature (1)..( 11): Result.002 file - promoters60/1470993
gcagatactta

SEQ ID NO: 118200 - DNA, 8 bp, Unknown
  misc_feature (1)..( 8): Result.002 file - promoters60/1470993
tgaagaaa

SEQ ID NO: 118201 - DNA, 8 bp, Unknown
  misc_feature (1)..( 8): Result.002 file - promoters60/1470993
tgatgaat

SEQ ID NO: 118202 - DNA, 8 bp, Unknown
  misc_feature (1)..( 8): Result.002 file - promoters60/1470993
tgatgaat

SEQ ID NO: 118203 - DNA, 8 bp, Unknown
  misc_feature (1)..( 8): Result.002 file - promoters60/1470993
ggataaat

SEQ ID NO: 118204 - DNA, 8 bp, Unknown
  misc_feature (1)..( 8): Result.002 file - promoters60/1470993
agataaaa

SEQ ID NO: 118205 - DNA, 10 bp, Unknown
  misc_feature (1)..( 10): Result.002 file - promoters60/1470993
ttacaaaaag

SEQ ID NO: 118206 - DNA, 10 bp, Unknown
  misc_feature (1)..( 10): Result.002 file - promoters60/1470993
ttagaaaaaa

SEQ ID NO: 118207 - DNA, 10 bp, Unknown
  misc_feature (1)..( 10): Result.002 file - promoters60/1470993
ttataaaaca

SEQ ID NO: 118208 - DNA, 10 bp, Unknown
  misc_feature (1)..( 10): Result.002 file - promoters60/1470993
aaggaaaaaa

SEQ ID NO: 118209 - DNA, 11 bp, Unknown
  misc_feature (1)..( 11): Result.002 file - promoters60/1470993
ccgtacacgtg

SEQ ID NO: 118210 - DNA, 11 bp, Unknown
  misc_feature (1)..( 11): Result.002 file - promoters60/1470993
aggtacacgtg

SEQ ID NO: 118211 - DNA, 11 bp, Unknown
  misc_feature (1)..( 11): Result.002 file - promoters60/1470993
cggttcacgtc

SEQ ID NO: 118212 - DNA, 11 bp, Unknown
  misc_feature (1)..( 11): Result.002 file - promoters60/1470993
cggttcggatt

SEQ ID NO: 118213 - DNA, 9 bp, Unknown
  misc_feature (1)..( 9): Result.002 file - promoters60/1470993
gaaagattg

SEQ ID NO: 118214 - DNA, 9 bp, Unknown
  misc_feature (1)..( 9): Result.002 file - promoters60/1470993
taaagcttg

SEQ ID NO: 118215 - DNA, 9 bp, Unknown
  misc_feature (1)..( 9): Result.002 file - promoters60/1470993
taaaaattt

SEQ ID NO: 118216 - DNA, 9 bp, Unknown
  misc_feature (1)..( 9): Result.002 file - promoters60/1470993
taaaaagga

SEQ ID NO: 118217 - DNA, 9 bp, Unknown
  misc_feature (1)..( 9): Result.002 file - promoters60/1470993
tcccactaa

SEQ ID NO: 118218 - DNA, 9 bp, Unknown
  misc_feature (1)..( 9): Result.002 file - promoters60/1470993
aaccattaa

SEQ ID NO: 118219 - DNA, 9 bp, Unknown
  misc_feature (1)..( 9): Result.002 file - promoters60/1470993
aactattct

SEQ ID NO: 118220 - DNA, 9 bp, Unknown
  misc_feature (1)..( 9): Result.002 file - promoters60/1470993
gtccattag

SEQ ID NO: 118221 - DNA, 8 bp, Unknown
  misc_feature (1)..( 8): Result.002 file - promoters60/1470993
cagttttc

SEQ ID NO: 118222 - DNA, 8 bp, Unknown
  misc_feature (1)..( 8): Result.002 file - promoters60/1470993
tagttttg

SEQ ID NO: 118223 - DNA, 8 bp, Unknown
  misc_feature (1)..( 8): Result.002 file - promoters60/1470993
tcgttttg

SEQ ID NO: 118224 - DNA, 8 bp, Unknown
  misc_feature (1)..( 8): Result.002 file - promoters60/1470993
tagctttg

SEQ ID NO: 118225 - DNA, 14 bp, Unknown
  misc_feature (1)..( 14): Result.002 file - promoters60/1470993
tttgaatttgatga

SEQ ID NO: 118226 - DNA, 14 bp, Unknown
  misc_feature (1)..( 14): Result.002 file - promoters60/1470993
tttaaatgggccta

SEQ ID NO: 118227 - DNA, 14 bp, Unknown
  misc_feature (1)..( 14): Result.002 file - promoters60/1470993
tctgaatatgatga

SEQ ID NO: 118228 - DNA, 14 bp, Unknown
  misc_feature (1)..( 14): Result.002 file - promoters60/1470993
tttaaaatcacatc

SEQ ID NO: 118229 - DNA, 9 bp, Unknown
  misc_feature (1)..( 9): Result.002 file - promoters60/1471001
ctatatata

SEQ ID NO: 118230 - DNA, 9 bp, Unknown
  misc_feature (1)..( 9): Result.002 file - promoters60/1471001
ctatacata

SEQ ID NO: 118231 - DNA, 11 bp, Unknown
  misc_feature (1)..( 11): Result.002 file - promoters60/1471001
tataaaaccaa

SEQ ID NO: 118232 - DNA, 11 bp, Unknown
  misc_feature (1)..( 11): Result.002 file - promoters60/1471001
tatcaaaacaa

SEQ ID NO: 118233 - DNA, 10 bp, Unknown
  misc_feature (1)..( 10): Result.002 file - promoters60/1471001
aaatgttctt

SEQ ID NO: 118234 - DNA, 10 bp, Unknown
  misc_feature (1)..( 10): Result.002 file - promoters60/1471001
tcatgatctt

SEQ ID NO: 118235 - DNA, 10 bp, Unknown
  misc_feature (1)..( 10): Result.002 file - promoters60/1471001
atatcttgat

SEQ ID NO: 118236 - DNA, 6 bp, Unknown
  misc_feature (1)..( 6): Result.002 file - promoters60/1471001
aaatat

SEQ ID NO: 118237 - DNA, 6 bp, Unknown
  misc_feature (1)..( 6): Result.002 file - promoters60/1471001
aaatat

SEQ ID NO: 118238 - DNA, 6 bp, Unknown
  misc_feature (1)..( 6): Result.002 file - promoters60/1471001
aaatat

SEQ ID NO: 118239 - DNA, 7 bp, Unknown
  misc_feature (1)..( 7): Result.002 file - promoters60/1471001
ctacatt

SEQ ID NO: 118240 - DNA, 7 bp, Unknown
  misc_feature (1)..( 7): Result.002 file - promoters60/1471001
ctatatt

SEQ ID NO: 118241 - DNA, 7 bp, Unknown
  misc_feature (1)..( 7): Result.002 file - promoters60/1471001
atatatt

SEQ ID NO: 118242 - DNA, 6 bp, Unknown
  misc_feature (1)..( 6): Result.002 file - promoters60/1471001
tttttt

SEQ ID NO: 118243 - DNA, 6 bp, Unknown
  misc_feature (1)..( 6): Result.002 file - promoters60/1471001
tttttt

SEQ ID NO: 118244 - DNA, 6 bp, Unknown
  misc_feature (1)..( 6): Result.002 file - promoters60/1471001
tttcca

SEQ ID NO: 118245 - DNA, 6 bp, Unknown
  misc_feature (1)..( 6): Result.002 file - promoters60/1471001
tttcca

SEQ ID NO: 118246 - DNA, 7 bp, Unknown
  misc_feature (1)..( 7): Result.002 file - promoters60/1471001
aaactaa

SEQ ID NO: 118247 - DNA, 7 bp, Unknown
  misc_feature (1)..( 7): Result.002 file - promoters60/1471001
aaactaa

SEQ ID NO: 118248 - DNA, 8 bp, Unknown
  misc_feature (1)..( 8): Result.002 file - promoters60/1471001
aaataata

SEQ ID NO: 118249 - DNA, 8 bp, Unknown
  misc_feature (1)..( 8): Result.002 file - promoters60/1471001
aaatgata

SEQ ID NO: 118250 - DNA, 7 bp, Unknown
  misc_feature (1)..( 7): Result.002 file - promoters60/1471001
aattttg

SEQ ID NO: 118251 - DNA, 7 bp, Unknown
  misc_feature (1)..( 7): Result.002 file - promoters60/1471001
aatcttg

SEQ ID NO: 118252 - DNA, 7 bp, Unknown
  misc_feature (1)..( 7): Result.002 file - promoters60/1471001
ttatttt

SEQ ID NO: 118253 - DNA, 7 bp, Unknown
  misc_feature (1)..( 7): Result.002 file - promoters60/1471001
ttaattt

SEQ ID NO: 118254 - DNA, 6 bp, Unknown
  misc_feature (1)..( 6): Result.002 file - promoters60/1471001
attttt

SEQ ID NO: 118255 - DNA, 6 bp, Unknown
  misc_feature (1)..( 6): Result.002 file - promoters60/1471001
attttt

SEQ ID NO: 118256 - DNA, 8 bp, Unknown
  misc_feature (1)..( 8): Result.002 file - promoters60/1471001
gatatgta

SEQ ID NO: 118257 - DNA, 8 bp, Unknown
  misc_feature (1)..( 8): Result.002 file - promoters60/1471001
gatatgta

SEQ ID NO: 118258 - DNA, 6 bp, Unknown
  misc_feature (1)..( 6): Result.002 file - promoters60/1471001
atgaga

SEQ ID NO: 118259 - DNA, 6 bp, Unknown
  misc_feature (1)..( 6): Result.002 file - promoters60/1471001
atgaga

SEQ ID NO: 118260 - DNA, 8 bp, Unknown
  misc_feature (1)..( 8): Result.002 file - promoters60/1471001
tgtgtcaa

SEQ ID NO: 118261 - DNA, 8 bp, Unknown
  misc_feature (1)..( 8): Result.002 file - promoters60/1471001
tgtttcaa

SEQ ID NO: 118262 - DNA, 8 bp, Unknown
  misc_feature (1)..( 8): Result.002 file - promoters60/1471001
caaattaa

SEQ ID NO: 118263 - DNA, 8 bp, Unknown
  misc_feature (1)..( 8): Result.002 file - promoters60/1471001
caatttaa

SEQ ID NO: 118264 - DNA, 8 bp, Unknown
  misc_feature (1)..( 8): Result.002 file - promoters60/1471001
atataatt

SEQ ID NO: 118265 - DNA, 8 bp, Unknown
  misc_feature (1)..( 8): Result.002 file - promoters60/1471001
atatcatt

SEQ ID NO: 118266 - DNA, 9 bp, Unknown
  misc_feature (1)..( 9): Result.002 file - promoters60/1471001
atataatta

SEQ ID NO: 118267 - DNA, 9 bp, Unknown
  misc_feature (1)..( 9): Result.002 file - promoters60/1471001
atatattta

SEQ ID NO: 118268 - DNA, 6 bp, Unknown
  misc_feature (1)..( 6): Result.002 file - promoters60/1471001
aggaaa

SEQ ID NO: 118269 - DNA, 6 bp, Unknown
  misc_feature (1)..( 6): Result.002 file - promoters60/1471001
aggaaa

SEQ ID NO: 118270 - DNA, 7 bp, Unknown
  misc_feature (1)..( 7): Result.002 file - promoters60/1471001
cttttct

SEQ ID NO: 118271 - DNA, 7 bp, Unknown
  misc_feature (1)..( 7): Result.002 file - promoters60/1471001
cttttct

SEQ ID NO: 118272 - DNA, 8 bp, Unknown
  misc_feature (1)..( 8): Result.002 file - promoters60/1471001
aaataaaa

SEQ ID NO: 118273 - DNA, 8 bp, Unknown
  misc_feature (1)..( 8): Result.002 file - promoters60/1471001
aaagaaaa

SEQ ID NO: 118274 - DNA, 6 bp, Unknown
  misc_feature (1)..( 6): Result.002 file - promoters60/1471001
tataaa

SEQ ID NO: 118275 - DNA, 6 bp, Unknown
  misc_feature (1)..( 6): Result.002 file - promoters60/1471001
tataaa

SEQ ID NO: 118276 - DNA, 6 bp, Unknown
  misc_feature (1)..( 6): Result.002 file - promoters60/1471001
gaaaca

SEQ ID NO: 118277 - DNA, 6 bp, Unknown
  misc_feature (1)..( 6): Result.002 file - promoters60/1471001
gaaaca

SEQ ID NO: 118278 - DNA, 6 bp, Unknown
  misc_feature (1)..( 6): Result.002 file - promoters60/1471001
tcaaaa

SEQ ID NO: 118279 - DNA, 6 bp, Unknown
  misc_feature (1)..( 6): Result.002 file - promoters60/1471001
tcaaaa

SEQ ID NO: 118280 - DNA, 9 bp, Unknown
  misc_feature (1)..( 9): Result.002 file - promoters60/1471009
aattaacaa

SEQ ID NO: 118281 - DNA, 9 bp, Unknown
  misc_feature (1)..( 9): Result.002 file - promoters60/1471009
gaataacaa

SEQ ID NO: 118282 - DNA, 9 bp, Unknown
  misc_feature (1)..( 9): Result.002 file - promoters60/1471009
atttaacac

SEQ ID NO: 118283 - DNA, 9 bp, Unknown
  misc_feature (1)..( 9): Result.002 file - promoters60/1471009
aattacagt

SEQ ID NO: 118284 - DNA, 8 bp, Unknown
  misc_feature (1)..( 8): Result.002 file - promoters60/1471009
gttaaaaa

SEQ ID NO: 118285 - DNA, 8 bp, Unknown
  misc_feature (1)..( 8): Result.002 file - promoters60/1471009
attacaaa

SEQ ID NO: 118286 - DNA, 8 bp, Unknown
  misc_feature (1)..( 8): Result.002 file - promoters60/1471009
tttaaaaa

SEQ ID NO: 118287 - DNA, 8 bp, Unknown
  misc_feature (1)..( 8): Result.002 file - promoters60/1471009
tttacaaa

SEQ ID NO: 118288 - DNA, 7 bp, Unknown
  misc_feature (1)..( 7): Result.002 file - promoters60/1471009
aataaac

SEQ ID NO: 118289 - DNA, 7 bp, Unknown
  misc_feature (1)..( 7): Result.002 file - promoters60/1471009
aataaaa

SEQ ID NO: 118290 - DNA, 7 bp, Unknown
  misc_feature (1)..( 7): Result.002 file - promoters60/1471009
tataaac

SEQ ID NO: 118291 - DNA, 7 bp, Unknown
  misc_feature (1)..( 7): Result.002 file - promoters60/1471009
tcctata

SEQ ID NO: 118292 - DNA, 7 bp, Unknown
  misc_feature (1)..( 7): Result.002 file - promoters60/1471009
tcctata

SEQ ID NO: 118293 - DNA, 7 bp, Unknown
  misc_feature (1)..( 7): Result.002 file - promoters60/1471009
tcctata

SEQ ID NO: 118294 - DNA, 10 bp, Unknown
  misc_feature (1)..( 10): Result.002 file - promoters60/1471009
caatatttta

SEQ ID NO: 118295 - DNA, 10 bp, Unknown
  misc_feature (1)..( 10): Result.002 file - promoters60/1471009
caagatttta

SEQ ID NO: 118296 - DNA, 10 bp, Unknown
  misc_feature (1)..( 10): Result.002 file - promoters60/1471009
taagtttttc

SEQ ID NO: 118297 - DNA, 9 bp, Unknown
  misc_feature (1)..( 9): Result.002 file - promoters60/1471041
attaaaatc

SEQ ID NO: 118298 - DNA, 9 bp, Unknown
  misc_feature (1)..( 9): Result.002 file - promoters60/1471041
attaatatc

SEQ ID NO: 118299 - DNA, 9 bp, Unknown
  misc_feature (1)..( 9): Result.002 file - promoters60/1471041
cataaaatc

SEQ ID NO: 118300 - DNA, 9 bp, Unknown
  misc_feature (1)..( 9): Result.002 file - promoters60/1471041
attaattta

SEQ ID NO: 118301 - DNA, 9 bp, Unknown
  misc_feature (1)..( 9): Result.002 file - promoters60/1471041
tttatttta

SEQ ID NO: 118302 - DNA, 9 bp, Unknown
  misc_feature (1)..( 9): Result.002 file - promoters60/1471041
aaaataaaa

SEQ ID NO: 118303 - DNA, 9 bp, Unknown
  misc_feature (1)..( 9): Result.002 file - promoters60/1471041
tagataaaa

SEQ ID NO: 118304 - DNA, 9 bp, Unknown
  misc_feature (1)..( 9): Result.002 file - promoters60/1471041
aaattaaaa

SEQ ID NO: 118305 - DNA, 9 bp, Unknown
  misc_feature (1)..( 9): Result.002 file - promoters60/1471041
cgaatgaaa

SEQ ID NO: 118306 - DNA, 9 bp, Unknown
  misc_feature (1)..( 9): Result.002 file - promoters60/1471041
aaaataaaa

SEQ ID NO: 118307 - DNA, 11 bp, Unknown
  misc_feature (1)..( 11): Result.002 file - promoters60/1471041
caaaaaagaca

SEQ ID NO: 118308 - DNA, 11 bp, Unknown
  misc_feature (1)..( 11): Result.002 file - promoters60/1471041
gaaaaaaaaaa

SEQ ID NO: 118309 - DNA, 11 bp, Unknown
  misc_feature (1)..( 11): Result.002 file - promoters60/1471041
caaaatagaca

SEQ ID NO: 118310 - DNA, 11 bp, Unknown
  misc_feature (1)..( 11): Result.002 file - promoters60/1471041
taaaaaaggaa

SEQ ID NO: 118311 - DNA, 11 bp, Unknown
  misc_feature (1)..( 11): Result.002 file - promoters60/1471041
tgaaatagttt

SEQ ID NO: 118312 - DNA, 7 bp, Unknown
  misc_feature (1)..( 7): Result.002 file - promoters60/1471073
tttgtta

SEQ ID NO: 118313 - DNA, 7 bp, Unknown
  misc_feature (1)..( 7): Result.002 file - promoters60/1471073
tttctta

SEQ ID NO: 118314 - DNA, 6 bp, Unknown
  misc_feature (1)..( 6): Result.002 file - promoters60/1471073
attttt

SEQ ID NO: 118315 - DNA, 6 bp, Unknown
  misc_feature (1)..( 6): Result.002 file - promoters60/1471073
attttt

SEQ ID NO: 118316 - DNA, 8 bp, Unknown
  misc_feature (1)..( 8): Result.002 file - promoters60/1471073
aaaaaata

SEQ ID NO: 118317 - DNA, 8 bp, Unknown
  misc_feature (1)..( 8): Result.002 file - promoters60/1471073
aaaaaata

SEQ ID NO: 118318 - DNA, 8 bp, Unknown
  misc_feature (1)..( 8): Result.002 file - promoters60/1471073
taaaaatt

SEQ ID NO: 118319 - DNA, 7 bp, Unknown
  misc_feature (1)..( 7): Result.002 file - promoters60/1471073
aataaaa

SEQ ID NO: 118320 - DNA, 7 bp, Unknown
  misc_feature (1)..( 7): Result.002 file - promoters60/1471073
gataaaa

SEQ ID NO: 118321 - DNA, 7 bp, Unknown
  misc_feature (1)..( 7): Result.002 file - promoters60/1471073
aataaat

SEQ ID NO: 118322 - DNA, 8 bp, Unknown
  misc_feature (1)..( 8): Result.002 file - promoters60/1471073
ataaaata

SEQ ID NO: 118323 - DNA, 8 bp, Unknown
  misc_feature (1)..( 8): Result.002 file - promoters60/1471073
atataata

SEQ ID NO: 118324 - DNA, 8 bp, Unknown
  misc_feature (1)..( 8): Result.002 file - promoters60/1471073
ttaaaatg

SEQ ID NO: 118325 - DNA, 11 bp, Unknown
  misc_feature (1)..( 11): Result.002 file - promoters60/1471073
tgattaatgaa

SEQ ID NO: 118326 - DNA, 11 bp, Unknown
  misc_feature (1)..( 11): Result.002 file - promoters60/1471073
tgataaatgaa

SEQ ID NO: 118327 - DNA, 6 bp, Unknown
  misc_feature (1)..( 6): Result.002 file - promoters60/1471073
tgaata

SEQ ID NO: 118328 - DNA, 6 bp, Unknown
  misc_feature (1)..( 6): Result.002 file - promoters60/1471073
tgaata

SEQ ID NO: 118329 - DNA, 7 bp, Unknown
  misc_feature (1)..( 7): Result.002 file - promoters60/1471073
attatat

SEQ ID NO: 118330 - DNA, 7 bp, Unknown
  misc_feature (1)..( 7): Result.002 file - promoters60/1471073
attatat

SEQ ID NO: 118331 - DNA, 8 bp, Unknown
  misc_feature (1)..( 8): Result.002 file - promoters60/1471073
aaatttaa

SEQ ID NO: 118332 - DNA, 8 bp, Unknown
  misc_feature (1)..( 8): Result.002 file - promoters60/1471073
aaatataa

SEQ ID NO: 118333 - DNA, 6 bp, Unknown
  misc_feature (1)..( 6): Result.002 file - promoters60/1471073
atttaa

SEQ ID NO: 118334 - DNA, 6 bp, Unknown
  misc_feature (1)..( 6): Result.002 file - promoters60/1471073
atttaa

SEQ ID NO: 118335 - DNA, 6 bp, Unknown
  misc_feature (1)..( 6): Result.002 file - promoters60/1471073
ttctca

SEQ ID NO: 118336 - DNA, 6 bp, Unknown
  misc_feature (1)..( 6): Result.002 file - promoters60/1471073
ttctca

SEQ ID NO: 118337 - DNA, 6 bp, Unknown
  misc_feature (1)..( 6): Result.002 file - promoters60/1471073
aaatca

SEQ ID NO: 118338 - DNA, 6 bp, Unknown
  misc_feature (1)..( 6): Result.002 file - promoters60/1471073
aaatca

SEQ ID NO: 118339 - DNA, 10 bp, Unknown
  misc_feature (1)..( 10): Result.002 file - promoters60/1471073
ataaaatcat

SEQ ID NO: 118340 - DNA, 10 bp, Unknown
  misc_feature (1)..( 10): Result.002 file - promoters60/1471073
agacaatcat

SEQ ID NO: 118341 - DNA, 10 bp, Unknown
  misc_feature (1)..( 10): Result.002 file - promoters60/1471073
ataaaaccat

SEQ ID NO: 118342 - DNA, 6 bp, Unknown
  misc_feature (1)..( 6): Result.002 file - promoters60/1471073
tattaa

SEQ ID NO: 118343 - DNA, 6 bp, Unknown
  misc_feature (1)..( 6): Result.002 file - promoters60/1471073
tattaa

SEQ ID NO: 118344 - DNA, 6 bp, Unknown
  misc_feature (1)..( 6): Result.002 file - promoters60/1471073
aattta

SEQ ID NO: 118345 - DNA, 6 bp, Unknown
  misc_feature (1)..( 6): Result.002 file - promoters60/1471073
aattta

SEQ ID NO: 118346 - DNA, 10 bp, Unknown
  misc_feature (1)..( 10): Result.002 file - promoters60/1471073
acttatttgc

SEQ ID NO: 118347 - DNA, 10 bp, Unknown
  misc_feature (1)..( 10): Result.002 file - promoters60/1471073
tattaattgc

SEQ ID NO: 118348 - DNA, 10 bp, Unknown
  misc_feature (1)..( 10): Result.002 file - promoters60/1471073
atttattttt

SEQ ID NO: 118349 - DNA, 7 bp, Unknown
  misc_feature (1)..( 7): Result.002 file - promoters60/1471073
aaaagtc

SEQ ID NO: 118350 - DNA, 7 bp, Unknown
  misc_feature (1)..( 7): Result.002 file - promoters60/1471073
aaatgtc

SEQ ID NO: 118351 - DNA, 9 bp, Unknown
  misc_feature (1)..( 9): Result.002 file - promoters60/1471073
agtaaccat

SEQ ID NO: 118352 - DNA, 9 bp, Unknown
  misc_feature (1)..( 9): Result.002 file - promoters60/1471073
agtaaccat

SEQ ID NO: 118353 - DNA, 8 bp, Unknown
  misc_feature (1)..( 8): Result.002 file - promoters60/1471073
atactttt

SEQ ID NO: 118354 - DNA, 8 bp, Unknown
  misc_feature (1)..( 8): Result.002 file - promoters60/1471073
ataatttt

SEQ ID NO: 118355 - DNA, 7 bp, Unknown
  misc_feature (1)..( 7): Result.002 file - promoters60/1471073
tacctta

SEQ ID NO: 118356 - DNA, 7 bp, Unknown
  misc_feature (1)..( 7): Result.002 file - promoters60/1471073
tacttta

SEQ ID NO: 118357 - DNA, 6 bp, Unknown
  misc_feature (1)..( 6): Result.002 file - promoters60/1471073
aaaaag

SEQ ID NO: 118358 - DNA, 6 bp, Unknown
  misc_feature (1)..( 6): Result.002 file - promoters60/1471073
aaaaag

SEQ ID NO: 118359 - DNA, 7 bp, Unknown
  misc_feature (1)..( 7): Result.002 file - promoters60/1471073
aagtaaa

SEQ ID NO: 118360 - DNA, 7 bp, Unknown
  misc_feature (1)..( 7): Result.002 file - promoters60/1471073
aagaaaa

SEQ ID NO: 118361 - DNA, 7 bp, Unknown
  misc_feature (1)..( 7): Result.002 file - promoters60/1471073
aaataat

SEQ ID NO: 118362 - DNA, 7 bp, Unknown
  misc_feature (1)..( 7): Result.002 file - promoters60/1471073
aaagaat

SEQ ID NO: 118363 - DNA, 8 bp, Unknown
  misc_feature (1)..( 8): Result.002 file - promoters60/1471073
attcaaat

SEQ ID NO: 118364 - DNA, 8 bp, Unknown
  misc_feature (1)..( 8): Result.002 file - promoters60/1471073
attaaaaa

SEQ ID NO: 118365 - DNA, 9 bp, Unknown
  misc_feature (1)..( 9): Result.002 file - promoters60/1471073
aataataat

SEQ ID NO: 118366 - DNA, 7 bp, Unknown
  misc_feature (1)..( 7): Result.002 file - promoters60/1471073
attaaac

SEQ ID NO: 118367 - DNA, 7 bp, Unknown
  misc_feature (1)..( 7): Result.002 file - promoters60/1471073
attaaac

SEQ ID NO: 118368 - DNA, 6 bp, Unknown
  misc_feature (1)..( 6): Result.002 file - promoters60/1471073
atgttt

SEQ ID NO: 118369 - DNA, 6 bp, Unknown
  misc_feature (1)..( 6): Result.002 file - promoters60/1471073
atgttt

SEQ ID NO: 118370 - DNA, 8 bp, Unknown
  misc_feature (1)..( 8): Result.002 file - promoters60/1471073
aaattaaa

SEQ ID NO: 118371 - DNA, 8 bp, Unknown
  misc_feature (1)..( 8): Result.002 file - promoters60/1471073
aaagtaaa

SEQ ID NO: 118372 - DNA, 7 bp, Unknown
  misc_feature (1)..( 7): Result.002 file - promoters60/1471073
atcatca

SEQ ID NO: 118373 - DNA, 7 bp, Unknown
  misc_feature (1)..( 7): Result.002 file - promoters60/1471073
atcttca

SEQ ID NO: 118374 - DNA, 6 bp, Unknown
  misc_feature (1)..( 6): Result.002 file - promoters60/1471106
atgtca

SEQ ID NO: 118375 - DNA, 6 bp, Unknown
  misc_feature (1)..( 6): Result.002 file - promoters60/1471106
atgtca

SEQ ID NO: 118376 - DNA, 6 bp, Unknown
  misc_feature (1)..( 6): Result.002 file - promoters60/1471106
aaactt

SEQ ID NO: 118377 - DNA, 6 bp, Unknown
  misc_feature (1)..( 6): Result.002 file - promoters60/1471106
aaactt

SEQ ID NO: 118378 - DNA, 7 bp, Unknown
  misc_feature (1)..( 7): Result.002 file - promoters60/1471106
ttataaa

SEQ ID NO: 118379 - DNA, 7 bp, Unknown
  misc_feature (1)..( 7): Result.002 file - promoters60/1471106
ttataaa

SEQ ID NO: 118380 - DNA, 6 bp, Unknown
  misc_feature (1)..( 6): Result.002 file - promoters60/1471106
atgatg

SEQ ID NO: 118381 - DNA, 6 bp, Unknown
  misc_feature (1)..( 6): Result.002 file - promoters60/1471106
atgatg

SEQ ID NO: 118382 - DNA, 9 bp, Unknown
  misc_feature (1)..( 9): Result.002 file - promoters60/1471106
agaagctaa

SEQ ID NO: 118383 - DNA, 9 bp, Unknown
  misc_feature (1)..( 9): Result.002 file - promoters60/1471106
agaagctaa

SEQ ID NO: 118384 - DNA, 6 bp, Unknown
  misc_feature (1)..( 6): Result.002 file - promoters60/1471106
tcagca

SEQ ID NO: 118385 - DNA, 6 bp, Unknown
  misc_feature (1)..( 6): Result.002 file - promoters60/1471106
tcagca

SEQ ID NO: 118386 - DNA, 6 bp, Unknown
  misc_feature (1)..( 6): Result.002 file - promoters60/1471106
aatttg

SEQ ID NO: 118387 - DNA, 6 bp, Unknown
  misc_feature (1)..( 6): Result.002 file - promoters60/1471106
aatttg

SEQ ID NO: 118388 - DNA, 8 bp, Unknown
  misc_feature (1)..( 8): Result.002 file - promoters60/1471106
tttgtttt

SEQ ID NO: 118389 - DNA, 8 bp, Unknown
  misc_feature (1)..( 8): Result.002 file - promoters60/1471106
tttctttt

SEQ ID NO: 118390 - DNA, 6 bp, Unknown
  misc_feature (1)..( 6): Result.002 file - promoters60/1471106
taaaac

SEQ ID NO: 118391 - DNA, 6 bp, Unknown
  misc_feature (1)..( 6): Result.002 file - promoters60/1471106
taaaac

SEQ ID NO: 118392 - DNA, 8 bp, Unknown
  misc_feature (1)..( 8): Result.002 file - promoters60/1471106
taaaaccc

SEQ ID NO: 118393 - DNA, 8 bp, Unknown
  misc_feature (1)..( 8): Result.002 file - promoters60/1471106
taaagccc

SEQ ID NO: 118394 - DNA, 7 bp, Unknown
  misc_feature (1)..( 7): Result.002 file - promoters60/1471106
aactcaa

SEQ ID NO: 118395 - DNA, 7 bp, Unknown
  misc_feature (1)..( 7): Result.002 file - promoters60/1471106
aacacaa

SEQ ID NO: 118396 - DNA, 8 bp, Unknown
  misc_feature (1)..( 8): Result.002 file - promoters60/1471106
acaagctt

SEQ ID NO: 118397 - DNA, 8 bp, Unknown
  misc_feature (1)..( 8): Result.002 file - promoters60/1471106
acatgctt

SEQ ID NO: 118398 - DNA, 8 bp, Unknown
  misc_feature (1)..( 8): Result.002 file - promoters60/1471106
tcaggaat

SEQ ID NO: 118399 - DNA, 8 bp, Unknown
  misc_feature (1)..( 8): Result.002 file - promoters60/1471106
tcaagaat

SEQ ID NO: 118400 - DNA, 8 bp, Unknown
  misc_feature (1)..( 8): Result.002 file - promoters60/1471106
aacaaaat

SEQ ID NO: 118401 - DNA, 8 bp, Unknown
  misc_feature (1)..( 8): Result.002 file - promoters60/1471106
aacataat

SEQ ID NO: 118402 - DNA, 6 bp, Unknown
  misc_feature (1)..( 6): Result.002 file - promoters60/1471106
tttaca

SEQ ID NO: 118403 - DNA, 6 bp, Unknown
  misc_feature (1)..( 6): Result.002 file - promoters60/1471106
tttaca

SEQ ID NO: 118404 - DNA, 6 bp, Unknown
  misc_feature (1)..( 6): Result.002 file - promoters60/1471106
acattt

SEQ ID NO: 118405 - DNA, 6 bp, Unknown
  misc_feature (1)..( 6): Result.002 file - promoters60/1471106
acattt

SEQ ID NO: 118406 - DNA, 6 bp, Unknown
  misc_feature (1)..( 6): Result.002 file - promoters60/1471106
tttgct

SEQ ID NO: 118407 - DNA, 6 bp, Unknown
  misc_feature (1)..( 6): Result.002 file - promoters60/1471106
tttgct

SEQ ID NO: 118408 - DNA, 8 bp, Unknown
  misc_feature (1)..( 8): Result.002 file - promoters60/1471106
agtgaaac

SEQ ID NO: 118409 - DNA, 8 bp, Unknown
  misc_feature (1)..( 8): Result.002 file - promoters60/1471106
agttaaac

SEQ ID NO: 118410 - DNA, 6 bp, Unknown
  misc_feature (1)..( 6): Result.002 file - promoters60/1471106
cccata

SEQ ID NO: 118411 - DNA, 6 bp, Unknown
  misc_feature (1)..( 6): Result.002 file - promoters60/1471106
cccata

SEQ ID NO: 118412 - DNA, 8 bp, Unknown
  misc_feature (1)..( 8): Result.002 file - promoters60/1471140
atataaaa

SEQ ID NO: 118413 - DNA, 8 bp, Unknown
  misc_feature (1)..( 8): Result.002 file - promoters60/1471140
atacaaaa

SEQ ID NO: 118414 - DNA, 8 bp, Unknown
  misc_feature (1)..( 8): Result.002 file - promoters60/1471140
atacaatt

SEQ ID NO: 118415 - DNA, 8 bp, Unknown
  misc_feature (1)..( 8): Result.002 file - promoters60/1471140
ataaaata

SEQ ID NO: 118416 - DNA, 8 bp, Unknown
  misc_feature (1)..( 8): Result.002 file - promoters60/1471140
aaaaaata

SEQ ID NO: 118417 - DNA, 8 bp, Unknown
  misc_feature (1)..( 8): Result.002 file - promoters60/1471140
atacaatt

SEQ ID NO: 118418 - DNA, 8 bp, Unknown
  misc_feature (1)..( 8): Result.002 file - promoters60/1471140
aaacaaaa

SEQ ID NO: 118419 - DNA, 8 bp, Unknown
  misc_feature (1)..( 8): Result.002 file - promoters60/1471140
aaacaaat

SEQ ID NO: 118420 - DNA, 9 bp, Unknown
  misc_feature (1)..( 9): Result.002 file - promoters60/1471140
aaacacaaa

SEQ ID NO: 118421 - DNA, 8 bp, Unknown
  misc_feature (1)..( 8): Result.002 file - promoters60/1471140
tcatttat

SEQ ID NO: 118422 - DNA, 8 bp, Unknown
  misc_feature (1)..( 8): Result.002 file - promoters60/1471140
aaatttat

SEQ ID NO: 118423 - DNA, 8 bp, Unknown
  misc_feature (1)..( 8): Result.002 file - promoters60/1471140
aaatatat

SEQ ID NO: 118424 - DNA, 11 bp, Unknown
  misc_feature (1)..( 11): Result.002 file - promoters60/1471140
gaaatttcaac

SEQ ID NO: 118425 - DNA, 11 bp, Unknown
  misc_feature (1)..( 11): Result.002 file - promoters60/1471140
ttgattttaac

SEQ ID NO: 118426 - DNA, 11 bp, Unknown
  misc_feature (1)..( 11): Result.002 file - promoters60/1471140
gaaatttcagt

SEQ ID NO: 118427 - DNA, 15 bp, Unknown
  misc_feature (1)..( 15): Result.002 file - promoters60/1472778
gcaataagaaatttc

SEQ ID NO: 118428 - DNA, 15 bp, Unknown
  misc_feature (1)..( 15): Result.002 file - promoters60/1472778
tatacaagaaaactc

SEQ ID NO: 118429 - DNA, 15 bp, Unknown
  misc_feature (1)..( 15): Result.002 file - promoters60/1472778
tttttaaaaaagaaa

SEQ ID NO: 118430 - DNA, 15 bp, Unknown
  misc_feature (1)..( 15): Result.002 file - promoters60/1472778
acatgaagacttatt

SEQ ID NO: 118431 - DNA, 15 bp, Unknown
  misc_feature (1)..( 15): Result.002 file - promoters60/1472778
aataaaagaattaaa

SEQ ID NO: 118432 - DNA, 15 bp, Unknown
  misc_feature (1)..( 15): Result.002 file - promoters60/1472778
aaatcaaaatagaca

SEQ ID NO: 118433 - DNA, 11 bp, Unknown
  misc_feature (1)..( 11): Result.002 file - promoters60/1472778
gatttatttcg

SEQ ID NO: 118434 - DNA, 11 bp, Unknown
  misc_feature (1)..( 11): Result.002 file - promoters60/1472778
tttttattcta

SEQ ID NO: 118435 - DNA, 11 bp, Unknown
  misc_feature (1)..( 11): Result.002 file - promoters60/1472778
tatttttttac

SEQ ID NO: 118436 - DNA, 11 bp, Unknown
  misc_feature (1)..( 11): Result.002 file - promoters60/1472778
gatatatacat

SEQ ID NO: 118437 - DNA, 12 bp, Unknown
  misc_feature (1)..( 12): Result.002 file - promoters60/1472778
tatttcatttcc

SEQ ID NO: 118438 - DNA, 12 bp, Unknown
  misc_feature (1)..( 12): Result.002 file - promoters60/1472778
cgtaatgtttca

SEQ ID NO: 118439 - DNA, 12 bp, Unknown
  misc_feature (1)..( 12): Result.002 file - promoters60/1472778
cttttaatatga

SEQ ID NO: 118440 - DNA, 14 bp, Unknown
  misc_feature (1)..( 14): Result.002 file - promoters60/1472778
gtagattgcgtgac

SEQ ID NO: 118441 - DNA, 14 bp, Unknown
  misc_feature (1)..( 14): Result.002 file - promoters60/1472778
ttagtttgtgtgct

SEQ ID NO: 118442 - DNA, 14 bp, Unknown
  misc_feature (1)..( 14): Result.002 file - promoters60/1472778
gtatatttagttgt

SEQ ID NO: 118443 - DNA, 14 bp, Unknown
  misc_feature (1)..( 14): Result.002 file - promoters60/1472778
aaatctcgtgtgca

SEQ ID NO: 118444 - DNA, 14 bp, Unknown
  misc_feature (1)..( 14): Result.002 file - promoters60/1472778
ttaattttcgtttc

SEQ ID NO: 118445 - DNA, 14 bp, Unknown
  misc_feature (1)..( 14): Result.002 file - promoters60/1472778
tcctattttatttt

SEQ ID NO: 118446 - DNA, 12 bp, Unknown
  misc_feature (1)..( 12): Result.002 file - promoters60/1472778
tataaattacaa

SEQ ID NO: 118447 - DNA, 12 bp, Unknown
  misc_feature (1)..( 12): Result.002 file - promoters60/1472778
tataaataacac

SEQ ID NO: 118448 - DNA, 12 bp, Unknown
  misc_feature (1)..( 12): Result.002 file - promoters60/1472778
tatatataaaac

SEQ ID NO: 118449 - DNA, 12 bp, Unknown
  misc_feature (1)..( 12): Result.002 file - promoters60/1472778
tatataacacaa

SEQ ID NO: 118450 - DNA, 12 bp, Unknown
  misc_feature (1)..( 12): Result.002 file - promoters60/1472778
gatataatacag

SEQ ID NO: 118451 - DNA, 12 bp, Unknown
  misc_feature (1)..( 12): Result.002 file - promoters60/1472778
tttaagtaaaat

SEQ ID NO: 118452 - DNA, 11 bp, Unknown
  misc_feature (1)..( 11): Result.002 file - promoters60/1472778
gaaacacttat

SEQ ID NO: 118453 - DNA, 11 bp, Unknown
  misc_feature (1)..( 11): Result.002 file - promoters60/1472778
gatacagttaa

SEQ ID NO: 118454 - DNA, 11 bp, Unknown
  misc_feature (1)..( 11): Result.002 file - promoters60/1472778
gaatcacttct

SEQ ID NO: 118455 - DNA, 11 bp, Unknown
  misc_feature (1)..( 11): Result.002 file - promoters60/1472778
gtttcacatat

SEQ ID NO: 118456 - DNA, 11 bp, Unknown
  misc_feature (1)..( 11): Result.002 file - promoters60/1472778
tataaagttat

SEQ ID NO: 118457 - DNA, 11 bp, Unknown
  misc_feature (1)..( 11): Result.002 file - promoters60/1472778
tctacagttct

SEQ ID NO: 118458 - DNA, 8 bp, Unknown
  misc_feature (1)..( 8): Result.002 file - promoters60/1472799
atcatatt

SEQ ID NO: 118459 - DNA, 8 bp, Unknown
  misc_feature (1)..( 8): Result.002 file - promoters60/1472799
atcatatt

SEQ ID NO: 118460 - DNA, 8 bp, Unknown
  misc_feature (1)..( 8): Result.002 file - promoters60/1472799
atcatatt

SEQ ID NO: 118461 - DNA, 9 bp, Unknown
  misc_feature (1)..( 9): Result.002 file - promoters60/1472799
tttgtagtg

SEQ ID NO: 118462 - DNA, 9 bp, Unknown
  misc_feature (1)..( 9): Result.002 file - promoters60/1472799
attgtagct

SEQ ID NO: 118463 - DNA, 9 bp, Unknown
  misc_feature (1)..( 9): Result.002 file - promoters60/1472799
tttgttgtg

SEQ ID NO: 118464 - DNA, 8 bp, Unknown
  misc_feature (1)..( 8): Result.002 file - promoters60/1472799
tgatttgt

SEQ ID NO: 118465 - DNA, 8 bp, Unknown
  misc_feature (1)..( 8): Result.002 file - promoters60/1472799
agatatgt

SEQ ID NO: 118466 - DNA, 8 bp, Unknown
  misc_feature (1)..( 8): Result.002 file - promoters60/1472799
tgatttgg

SEQ ID NO: 118467 - DNA, 6 bp, Unknown
  misc_feature (1)..( 6): Result.002 file - promoters60/1472799
atattt

SEQ ID NO: 118468 - DNA, 6 bp, Unknown
  misc_feature (1)..( 6): Result.002 file - promoters60/1472799
atattt

SEQ ID NO: 118469 - DNA, 7 bp, Unknown
  misc_feature (1)..( 7): Result.002 file - promoters60/1472799
gtttgtt

SEQ ID NO: 118470 - DNA, 7 bp, Unknown
  misc_feature (1)..( 7): Result.002 file - promoters60/1472799
gtttgtg

SEQ ID NO: 118471 - DNA, 7 bp, Unknown
  misc_feature (1)..( 7): Result.002 file - promoters60/1472799
ttttgtt

SEQ ID NO: 118472 - DNA, 6 bp, Unknown
  misc_feature (1)..( 6): Result.002 file - promoters60/1472799
tgatgt

SEQ ID NO: 118473 - DNA, 6 bp, Unknown
  misc_feature (1)..( 6): Result.002 file - promoters60/1472799
tgatgt

SEQ ID NO: 118474 - DNA, 8 bp, Unknown
  misc_feature (1)..( 8): Result.002 file - promoters60/1472799
tgtttgtt

SEQ ID NO: 118475 - DNA, 8 bp, Unknown
  misc_feature (1)..( 8): Result.002 file - promoters60/1472799
gatttgtt

SEQ ID NO: 118476 - DNA, 8 bp, Unknown
  misc_feature (1)..( 8): Result.002 file - promoters60/1472799
gatatgta

SEQ ID NO: 118477 - DNA, 7 bp, Unknown
  misc_feature (1)..( 7): Result.002 file - promoters60/1472799
gttttgt

SEQ ID NO: 118478 - DNA, 7 bp, Unknown
  misc_feature (1)..( 7): Result.002 file - promoters60/1472799
gttttgt

SEQ ID NO: 118479 - DNA, 7 bp, Unknown
  misc_feature (1)..( 7): Result.002 file - promoters60/1472799
aagaaca

SEQ ID NO: 118480 - DNA, 7 bp, Unknown
  misc_feature (1)..( 7): Result.002 file - promoters60/1472799
aagaaca

SEQ ID NO: 118481 - DNA, 6 bp, Unknown
  misc_feature (1)..( 6): Result.002 file - promoters60/1472799
tgtgat

SEQ ID NO: 118482 - DNA, 6 bp, Unknown
  misc_feature (1)..( 6): Result.002 file - promoters60/1472799
tgtgat

SEQ ID NO: 118483 - DNA, 8 bp, Unknown
  misc_feature (1)..( 8): Result.002 file - promoters60/1472799
atagtttg

SEQ ID NO: 118484 - DNA, 8 bp, Unknown
  misc_feature (1)..( 8): Result.002 file - promoters60/1472799
ataatttg

SEQ ID NO: 118485 - DNA, 8 bp, Unknown
  misc_feature (1)..( 8): Result.002 file - promoters60/1472799
agtatgtt

SEQ ID NO: 118486 - DNA, 8 bp, Unknown
  misc_feature (1)..( 8): Result.002 file - promoters60/1472799
agtttgtt

SEQ ID NO: 118487 - DNA, 6 bp, Unknown
  misc_feature (1)..( 6): Result.002 file - promoters60/1472799
tgtttg

SEQ ID NO: 118488 - DNA, 6 bp, Unknown
  misc_feature (1)..( 6): Result.002 file - promoters60/1472799
tgtttg

SEQ ID NO: 118489 - DNA, 6 bp, Unknown
  misc_feature (1)..( 6): Result.002 file - promoters60/1472799
gagttt

SEQ ID NO: 118490 - DNA, 6 bp, Unknown
  misc_feature (1)..( 6): Result.002 file - promoters60/1472799
gagttt

SEQ ID NO: 118491 - DNA, 6 bp, Unknown
  misc_feature (1)..( 6): Result.002 file - promoters60/1472799
ctgatt

SEQ ID NO: 118492 - DNA, 6 bp, Unknown
  misc_feature (1)..( 6): Result.002 file - promoters60/1472799
ctgatt

SEQ ID NO: 118493 - DNA, 6 bp, Unknown
  misc_feature (1)..( 6): Result.002 file - promoters60/1472799
ttagtt

SEQ ID NO: 118494 - DNA, 6 bp, Unknown
  misc_feature (1)..( 6): Result.002 file - promoters60/1472799
ttagtt

SEQ ID NO: 118495 - DNA, 9 bp, Unknown
  misc_feature (1)..( 9): Result.002 file - promoters60/1473014
gtatataac

SEQ ID NO: 118496 - DNA, 9 bp, Unknown
  misc_feature (1)..( 9): Result.002 file - promoters60/1473014
cactataac

SEQ ID NO: 118497 - DNA, 9 bp, Unknown
  misc_feature (1)..( 9): Result.002 file - promoters60/1473014
atatctaac

SEQ ID NO: 118498 - DNA, 13 bp, Unknown
  misc_feature (1)..( 13): Result.002 file - promoters60/1473014
gcttattcactct

SEQ ID NO: 118499 - DNA, 13 bp, Unknown
  misc_feature (1)..( 13): Result.002 file - promoters60/1473014
acatgttcgctct

SEQ ID NO: 118500 - DNA, 13 bp, Unknown
  misc_feature (1)..( 13): Result.002 file - promoters60/1473014
gcttcttcaccca

SEQ ID NO: 118501 - DNA, 8 bp, Unknown
  misc_feature (1)..( 8): Result.002 file - promoters60/1473014
atttagtt

SEQ ID NO: 118502 - DNA, 8 bp, Unknown
  misc_feature (1)..( 8): Result.002 file - promoters60/1473014
attttgtt

SEQ ID NO: 118503 - DNA, 7 bp, Unknown
  misc_feature (1)..( 7): Result.002 file - promoters60/1473014
atattat

SEQ ID NO: 118504 - DNA, 7 bp, Unknown
  misc_feature (1)..( 7): Result.002 file - promoters60/1473014
ataatat

SEQ ID NO: 118505 - DNA, 6 bp, Unknown
  misc_feature (1)..( 6): Result.002 file - promoters60/1473014
aataat

SEQ ID NO: 118506 - DNA, 6 bp, Unknown
  misc_feature (1)..( 6): Result.002 file - promoters60/1473014
aataat

SEQ ID NO: 118507 - DNA, 10 bp, Unknown
  misc_feature (1)..( 10): Result.002 file - promoters60/1473014
aaaaaaccct

SEQ ID NO: 118508 - DNA, 10 bp, Unknown
  misc_feature (1)..( 10): Result.002 file - promoters60/1473014
ttaaaaccct

SEQ ID NO: 118509 - DNA, 10 bp, Unknown
  misc_feature (1)..( 10): Result.002 file - promoters60/1473014
ttataactaa

SEQ ID NO: 118510 - DNA, 6 bp, Unknown
  misc_feature (1)..( 6): Result.002 file - promoters60/1473014
aagtca

SEQ ID NO: 118511 - DNA, 6 bp, Unknown
  misc_feature (1)..( 6): Result.002 file - promoters60/1473014
aagtca

SEQ ID NO: 118512 - DNA, 13 bp, Unknown
  misc_feature (1)..( 13): Result.002 file - promoters60/1473014
tagtcttttgtgc

SEQ ID NO: 118513 - DNA, 13 bp, Unknown
  misc_feature (1)..( 13): Result.002 file - promoters60/1473014
acccattttctgc

SEQ ID NO: 118514 - DNA, 13 bp, Unknown
  misc_feature (1)..( 13): Result.002 file - promoters60/1473014
cccagtttcattg

SEQ ID NO: 118515 - DNA, 6 bp, Unknown
  misc_feature (1)..( 6): Result.002 file - promoters60/1473014
agaaga

SEQ ID NO: 118516 - DNA, 6 bp, Unknown
  misc_feature (1)..( 6): Result.002 file - promoters60/1473014
agaaga

SEQ ID NO: 118517 - DNA, 6 bp, Unknown
  misc_feature (1)..( 6): Result.002 file - promoters60/1473014
atatta

SEQ ID NO: 118518 - DNA, 6 bp, Unknown
  misc_feature (1)..( 6): Result.002 file - promoters60/1473014
atatta

SEQ ID NO: 118519 - DNA, 7 bp, Unknown
  misc_feature (1)..( 7): Result.002 file - promoters60/1473014
gtataaa

SEQ ID NO: 118520 - DNA, 7 bp, Unknown
  misc_feature (1)..( 7): Result.002 file - promoters60/1473014
gtataaa

SEQ ID NO: 118521 - DNA, 7 bp, Unknown
  misc_feature (1)..( 7): Result.002 file - promoters60/1473014
cataaac

SEQ ID NO: 118522 - DNA, 7 bp, Unknown
  misc_feature (1)..( 7): Result.002 file - promoters60/1473014
catgaac

SEQ ID NO: 118523 - DNA, 7 bp, Unknown
  misc_feature (1)..( 7): Result.002 file - promoters60/1473014
gcgagtt

SEQ ID NO: 118524 - DNA, 7 bp, Unknown
  misc_feature (1)..( 7): Result.002 file - promoters60/1473014
gcgagtt

SEQ ID NO: 118525 - DNA, 12 bp, Unknown
  misc_feature (1)..( 12): Result.002 file - promoters60/1481334
ctagagaggaga

SEQ ID NO: 118526 - DNA, 12 bp, Unknown
  misc_feature (1)..( 12): Result.002 file - promoters60/1481334
ctgaagaagaga

SEQ ID NO: 118527 - DNA, 12 bp, Unknown
  misc_feature (1)..( 12): Result.002 file - promoters60/1481334
ttggagaggaag

SEQ ID NO: 118528 - DNA, 12 bp, Unknown
  misc_feature (1)..( 12): Result.002 file - promoters60/1481334
ttggagagtctt

SEQ ID NO: 118529 - DNA, 8 bp, Unknown
  misc_feature (1)..( 8): Result.002 file - promoters60/1481334
agagagga

SEQ ID NO: 118530 - DNA, 8 bp, Unknown
  misc_feature (1)..( 8): Result.002 file - promoters60/1481334
agagagta

SEQ ID NO: 118531 - DNA, 8 bp, Unknown
  misc_feature (1)..( 8): Result.002 file - promoters60/1481334
ggagagga

SEQ ID NO: 118532 - DNA, 8 bp, Unknown
  misc_feature (1)..( 8): Result.002 file - promoters60/1481334
ggagagtc

SEQ ID NO: 118533 - DNA, 15 bp, Unknown
  misc_feature (1)..( 15): Result.002 file - promoters60/1481334
agaaataaaaccaaa

SEQ ID NO: 118534 - DNA, 15 bp, Unknown
  misc_feature (1)..( 15): Result.002 file - promoters60/1481334
ccgaatcaaacgaaa

SEQ ID NO: 118535 - DNA, 15 bp, Unknown
  misc_feature (1)..( 15): Result.002 file - promoters60/1481334
ataaataatatagtt

SEQ ID NO: 118536 - DNA, 15 bp, Unknown
  misc_feature (1)..( 15): Result.002 file - promoters60/1481334
agaagtaaaggggcg

SEQ ID NO: 118537 - DNA, 12 bp, Unknown
  misc_feature (1)..( 12): Result.002 file - promoters60/1481334
agagaatatagc

SEQ ID NO: 118538 - DNA, 12 bp, Unknown
  misc_feature (1)..( 12): Result.002 file - promoters60/1481334
agagaatattta

SEQ ID NO: 118539 - DNA, 12 bp, Unknown
  misc_feature (1)..( 12): Result.002 file - promoters60/1481334
cgctaattttta

SEQ ID NO: 118540 - DNA, 12 bp, Unknown
  misc_feature (1)..( 12): Result.002 file - promoters60/1481334
ttattatttttt

SEQ ID NO: 118541 - DNA, 6 bp, Unknown
  misc_feature (1)..( 6): Result.002 file - promoters60/1481568
caatta

SEQ ID NO: 118542 - DNA, 6 bp, Unknown
  misc_feature (1)..( 6): Result.002 file - promoters60/1481568
caatta

SEQ ID NO: 118543 - DNA, 7 bp, Unknown
  misc_feature (1)..( 7): Result.002 file - promoters60/1481568
atacaga

SEQ ID NO: 118544 - DNA, 7 bp, Unknown
  misc_feature (1)..( 7): Result.002 file - promoters60/1481568
atagaga

SEQ ID NO: 118545 - DNA, 7 bp, Unknown
  misc_feature (1)..( 7): Result.002 file - promoters60/1481568
aagacat

SEQ ID NO: 118546 - DNA, 7 bp, Unknown
  misc_feature (1)..( 7): Result.002 file - promoters60/1481568
aagacat

SEQ ID NO: 118547 - DNA, 8 bp, Unknown
  misc_feature (1)..( 8): Result.002 file - promoters60/1481568
agacaaaa

SEQ ID NO: 118548 - DNA, 8 bp, Unknown
  misc_feature (1)..( 8): Result.002 file - promoters60/1481568
agataaaa

SEQ ID NO: 118549 - DNA, 7 bp, Unknown
  misc_feature (1)..( 7): Result.002 file - promoters60/1481568
tgaagaa

SEQ ID NO: 118550 - DNA, 7 bp, Unknown
  misc_feature (1)..( 7): Result.002 file - promoters60/1481568
tgaagaa

SEQ ID NO: 118551 - DNA, 6 bp, Unknown
  misc_feature (1)..( 6): Result.002 file - promoters60/1481568
gctagt

SEQ ID NO: 118552 - DNA, 6 bp, Unknown
  misc_feature (1)..( 6): Result.002 file - promoters60/1481568
gctagt

SEQ ID NO: 118553 - DNA, 8 bp, Unknown
  misc_feature (1)..( 8): Result.002 file - promoters60/1481568
agataacc

SEQ ID NO: 118554 - DNA, 8 bp, Unknown
  misc_feature (1)..( 8): Result.002 file - promoters60/1481568
agaaaacc

SEQ ID NO: 118555 - DNA, 10 bp, Unknown
  misc_feature (1)..( 10): Result.002 file - promoters60/1481568
aacgcttttt

SEQ ID NO: 118556 - DNA, 10 bp, Unknown
  misc_feature (1)..( 10): Result.002 file - promoters60/1481568
aacgcgtttt

SEQ ID NO: 118557 - DNA, 6 bp, Unknown
  misc_feature (1)..( 6): Result.002 file - promoters60/1481568
aaaaat

SEQ ID NO: 118558 - DNA, 6 bp, Unknown
  misc_feature (1)..( 6): Result.002 file - promoters60/1481568
aaaaat

SEQ ID NO: 118559 - DNA, 9 bp, Unknown
  misc_feature (1)..( 9): Result.002 file - promoters60/1481568
aagagtaag

SEQ ID NO: 118560 - DNA, 9 bp, Unknown
  misc_feature (1)..( 9): Result.002 file - promoters60/1481568
aagagtaaa

SEQ ID NO: 118561 - DNA, 9 bp, Unknown
  misc_feature (1)..( 9): Result.002 file - promoters60/1481568
ataagtaaa

SEQ ID NO: 118562 - DNA, 8 bp, Unknown
  misc_feature (1)..( 8): Result.002 file - promoters60/1481568
cattttta

SEQ ID NO: 118563 - DNA, 8 bp, Unknown
  misc_feature (1)..( 8): Result.002 file - promoters60/1481568
cattgtta

SEQ ID NO: 118564 - DNA, 10 bp, Unknown
  misc_feature (1)..( 10): Result.002 file - promoters60/1481568
cgaattgaag

SEQ ID NO: 118565 - DNA, 10 bp, Unknown
  misc_feature (1)..( 10): Result.002 file - promoters60/1481568
ggaaatgaaa

SEQ ID NO: 118566 - DNA, 10 bp, Unknown
  misc_feature (1)..( 10): Result.002 file - promoters60/1481568
ggaaaagaaa

SEQ ID NO: 118567 - DNA, 7 bp, Unknown
  misc_feature (1)..( 7): Result.002 file - promoters60/1481568
aaagcaa

SEQ ID NO: 118568 - DNA, 7 bp, Unknown
  misc_feature (1)..( 7): Result.002 file - promoters60/1481568
aaaccaa

SEQ ID NO: 118569 - DNA, 7 bp, Unknown
  misc_feature (1)..( 7): Result.002 file - promoters60/1481568
cgatccc

SEQ ID NO: 118570 - DNA, 7 bp, Unknown
  misc_feature (1)..( 7): Result.002 file - promoters60/1481568
cgaaccc

SEQ ID NO: 118571 - DNA, 7 bp, Unknown
  misc_feature (1)..( 7): Result.002 file - promoters60/1481568
aatcggg

SEQ ID NO: 118572 - DNA, 7 bp, Unknown
  misc_feature (1)..( 7): Result.002 file - promoters60/1481568
aattggg

SEQ ID NO: 118573 - DNA, 8 bp, Unknown
  misc_feature (1)..( 8): Result.002 file - promoters60/1481568
gaaagaaa

SEQ ID NO: 118574 - DNA, 8 bp, Unknown
  misc_feature (1)..( 8): Result.002 file - promoters60/1481568
gaaacaaa

SEQ ID NO: 118575 - DNA, 7 bp, Unknown
  misc_feature (1)..( 7): Result.002 file - promoters60/1481568
cccacta

SEQ ID NO: 118576 - DNA, 7 bp, Unknown
  misc_feature (1)..( 7): Result.002 file - promoters60/1481568
cccacta

SEQ ID NO: 118577 - DNA, 9 bp, Unknown
  misc_feature (1)..( 9): Result.002 file - promoters60/1481568
aaagaaaag

SEQ ID NO: 118578 - DNA, 9 bp, Unknown
  misc_feature (1)..( 9): Result.002 file - promoters60/1481568
aaagtaaag

SEQ ID NO: 118579 - DNA, 7 bp, Unknown
  misc_feature (1)..( 7): Result.002 file - promoters60/1481568
gtatata

SEQ ID NO: 118580 - DNA, 7 bp, Unknown
  misc_feature (1)..( 7): Result.002 file - promoters60/1481568
gtatata

SEQ ID NO: 118581 - DNA, 11 bp, Unknown
  misc_feature (1)..( 11): Result.002 file - promoters60/1481696
gaggattgatg

SEQ ID NO: 118582 - DNA, 11 bp, Unknown
  misc_feature (1)..( 11): Result.002 file - promoters60/1481696
agtgattgatc

SEQ ID NO: 118583 - DNA, 11 bp, Unknown
  misc_feature (1)..( 11): Result.002 file - promoters60/1481696
tgagatttatg

SEQ ID NO: 118584 - DNA, 11 bp, Unknown
  misc_feature (1)..( 11): Result.002 file - promoters60/1481696
aataattaatc

SEQ ID NO: 118585 - DNA, 11 bp, Unknown
  misc_feature (1)..( 11): Result.002 file - promoters60/1481696
tctcattaata

SEQ ID NO: 118586 - DNA, 11 bp, Unknown
  misc_feature (1)..( 11): Result.002 file - promoters60/1481696
tgaaattttca

SEQ ID NO: 118587 - DNA, 13 bp, Unknown
  misc_feature (1)..( 13): Result.002 file - promoters60/1481696
gaatcaaaattaa

SEQ ID NO: 118588 - DNA, 13 bp, Unknown
  misc_feature (1)..( 13): Result.002 file - promoters60/1481696
gaatcagtgatct

SEQ ID NO: 118589 - DNA, 13 bp, Unknown
  misc_feature (1)..( 13): Result.002 file - promoters60/1481696
aaattaaaatttg

SEQ ID NO: 118590 - DNA, 13 bp, Unknown
  misc_feature (1)..( 13): Result.002 file - promoters60/1481696
caaagttgtagca

SEQ ID NO: 118591 - DNA, 13 bp, Unknown
  misc_feature (1)..( 13): Result.002 file - promoters60/1481696
aaaagtttttgta

SEQ ID NO: 118592 - DNA, 13 bp, Unknown
  misc_feature (1)..( 13): Result.002 file - promoters60/1481696
caaataaaatttt

SEQ ID NO: 118593 - DNA, 6 bp, Unknown
  misc_feature (1)..( 6): Result.002 file - promoters60/1482017
atttat

SEQ ID NO: 118594 - DNA, 6 bp, Unknown
  misc_feature (1)..( 6): Result.002 file - promoters60/1482017
atttat

SEQ ID NO: 118595 - DNA, 6 bp, Unknown
  misc_feature (1)..( 6): Result.002 file - promoters60/1482017
atttat

SEQ ID NO: 118596 - DNA, 10 bp, Unknown
  misc_feature (1)..( 10): Result.002 file - promoters60/1482017
gatgatactc

SEQ ID NO: 118597 - DNA, 10 bp, Unknown
  misc_feature (1)..( 10): Result.002 file - promoters60/1482017
ttggatactc

SEQ ID NO: 118598 - DNA, 10 bp, Unknown
  misc_feature (1)..( 10): Result.002 file - promoters60/1482017
gatggtacaa

SEQ ID NO: 118599 - DNA, 8 bp, Unknown
  misc_feature (1)..( 8): Result.002 file - promoters60/1482017
ataaaata

SEQ ID NO: 118600 - DNA, 8 bp, Unknown
  misc_feature (1)..( 8): Result.002 file - promoters60/1482017
atacaatt

SEQ ID NO: 118601 - DNA, 8 bp, Unknown
  misc_feature (1)..( 8): Result.002 file - promoters60/1482017
gtaaaata

SEQ ID NO: 118602 - DNA, 7 bp, Unknown
  misc_feature (1)..( 7): Result.002 file - promoters60/1482017
tctatat

SEQ ID NO: 118603 - DNA, 7 bp, Unknown
  misc_feature (1)..( 7): Result.002 file - promoters60/1482017
tctatat

SEQ ID NO: 118604 - DNA, 7 bp, Unknown
  misc_feature (1)..( 7): Result.002 file - promoters60/1482017
cgtatat

SEQ ID NO: 118605 - DNA, 11 bp, Unknown
  misc_feature (1)..( 11): Result.002 file - promoters60/1482017
tgtttcttacg

SEQ ID NO: 118606 - DNA, 11 bp, Unknown
  misc_feature (1)..( 11): Result.002 file - promoters60/1482017
tttttgttatc

SEQ ID NO: 118607 - DNA, 11 bp, Unknown
  misc_feature (1)..( 11): Result.002 file - promoters60/1482017
tttttgtttgt

SEQ ID NO: 118608 - DNA, 11 bp, Unknown
  misc_feature (1)..( 11): Result.002 file - promoters60/1482017
aatttattaac

SEQ ID NO: 118609 - DNA, 9 bp, Unknown
  misc_feature (1)..( 9): Result.002 file - promoters60/1482017
tttttgttt

SEQ ID NO: 118610 - DNA, 9 bp, Unknown
  misc_feature (1)..( 9): Result.002 file - promoters60/1482017
ttttttttt

SEQ ID NO: 118611 - DNA, 9 bp, Unknown
  misc_feature (1)..( 9): Result.002 file - promoters60/1482017
ttttttcta

SEQ ID NO: 118612 - DNA, 11 bp, Unknown
  misc_feature (1)..( 11): Result.002 file - promoters60/1482201
catcaatgctt

SEQ ID NO: 118613 - DNA, 11 bp, Unknown
  misc_feature (1)..( 11): Result.002 file - promoters60/1482201
catcaattctt

SEQ ID NO: 118614 - DNA, 11 bp, Unknown
  misc_feature (1)..( 11): Result.002 file - promoters60/1482201
ggtcaatgcaa

SEQ ID NO: 118615 - DNA, 11 bp, Unknown
  misc_feature (1)..( 11): Result.002 file - promoters60/1482201
tctcaatttct

SEQ ID NO: 118616 - DNA, 12 bp, Unknown
  misc_feature (1)..( 12): Result.002 file - promoters60/1482201
actcaaattctg

SEQ ID NO: 118617 - DNA, 12 bp, Unknown
  misc_feature (1)..( 12): Result.002 file - promoters60/1482201
attcaattaaaa

SEQ ID NO: 118618 - DNA, 12 bp, Unknown
  misc_feature (1)..( 12): Result.002 file - promoters60/1482201
aaaacaatgaaa

SEQ ID NO: 118619 - DNA, 7 bp, Unknown
  misc_feature (1)..( 7): Result.002 file - promoters60/1482448
ccctaac

SEQ ID NO: 118620 - DNA, 7 bp, Unknown
  misc_feature (1)..( 7): Result.002 file - promoters60/1482448
ccctaac

SEQ ID NO: 118621 - DNA, 9 bp, Unknown
  misc_feature (1)..( 9): Result.002 file - promoters60/1482448
actatatat

SEQ ID NO: 118622 - DNA, 9 bp, Unknown
  misc_feature (1)..( 9): Result.002 file - promoters60/1482448
actatataa

SEQ ID NO: 118623 - DNA, 9 bp, Unknown
  misc_feature (1)..( 9): Result.002 file - promoters60/1482448
ctaatataa

SEQ ID NO: 118624 - DNA, 9 bp, Unknown
  misc_feature (1)..( 9): Result.002 file - promoters60/1482448
aggaaaaaa

SEQ ID NO: 118625 - DNA, 9 bp, Unknown
  misc_feature (1)..( 9): Result.002 file - promoters60/1482448
aggacaaaa

SEQ ID NO: 118626 - DNA, 8 bp, Unknown
  misc_feature (1)..( 8): Result.002 file - promoters60/1482448
tgtaaaac

SEQ ID NO: 118627 - DNA, 8 bp, Unknown
  misc_feature (1)..( 8): Result.002 file - promoters60/1482448
tgtataac

SEQ ID NO: 118628 - DNA, 6 bp, Unknown
  misc_feature (1)..( 6): Result.002 file - promoters60/1482448
attgat

SEQ ID NO: 118629 - DNA, 6 bp, Unknown
  misc_feature (1)..( 6): Result.002 file - promoters60/1482448
attgat

SEQ ID NO: 118630 - DNA, 6 bp, Unknown
  misc_feature (1)..( 6): Result.002 file - promoters60/1482448
attcat

SEQ ID NO: 118631 - DNA, 6 bp, Unknown
  misc_feature (1)..( 6): Result.002 file - promoters60/1482448
attcat

SEQ ID NO: 118632 - DNA, 6 bp, Unknown
  misc_feature (1)..( 6): Result.002 file - promoters60/1482448
atataa

SEQ ID NO: 118633 - DNA, 6 bp, Unknown
  misc_feature (1)..( 6): Result.002 file - promoters60/1482448
atataa

SEQ ID NO: 118634 - DNA, 8 bp, Unknown
  misc_feature (1)..( 8): Result.002 file - promoters60/1482448
tggcaata

SEQ ID NO: 118635 - DNA, 8 bp, Unknown
  misc_feature (1)..( 8): Result.002 file - promoters60/1482448
tggaaata

SEQ ID NO: 118636 - DNA, 7 bp, Unknown
  misc_feature (1)..( 7): Result.002 file - promoters60/1482448
taatttg

SEQ ID NO: 118637 - DNA, 7 bp, Unknown
  misc_feature (1)..( 7): Result.002 file - promoters60/1482448
taatttg

SEQ ID NO: 118638 - DNA, 6 bp, Unknown
  misc_feature (1)..( 6): Result.002 file - promoters60/1482448
aatcaa

SEQ ID NO: 118639 - DNA, 6 bp, Unknown
  misc_feature (1)..( 6): Result.002 file - promoters60/1482448
aatcaa

SEQ ID NO: 118640 - DNA, 8 bp, Unknown
  misc_feature (1)..( 8): Result.002 file - promoters60/1482448
cattttta

SEQ ID NO: 118641 - DNA, 8 bp, Unknown
  misc_feature (1)..( 8): Result.002 file - promoters60/1482448
catttttt

SEQ ID NO: 118642 - DNA, 8 bp, Unknown
  misc_feature (1)..( 8): Result.002 file - promoters60/1482448
tttttttt

SEQ ID NO: 118643 - DNA, 8 bp, Unknown
  misc_feature (1)..( 8): Result.002 file - promoters60/1482448
attgtaag

SEQ ID NO: 118644 - DNA, 8 bp, Unknown
  misc_feature (1)..( 8): Result.002 file - promoters60/1482448
attttaaa

SEQ ID NO: 118645 - DNA, 8 bp, Unknown
  misc_feature (1)..( 8): Result.002 file - promoters60/1482448
cgtttaaa

SEQ ID NO: 118646 - DNA, 8 bp, Unknown
  misc_feature (1)..( 8): Result.002 file - promoters60/1482448
gtagttaa

SEQ ID NO: 118647 - DNA, 8 bp, Unknown
  misc_feature (1)..( 8): Result.002 file - promoters60/1482448
gtatttaa

SEQ ID NO: 118648 - DNA, 6 bp, Unknown
  misc_feature (1)..( 6): Result.002 file - promoters60/1482448
ttttta

SEQ ID NO: 118649 - DNA, 6 bp, Unknown
  misc_feature (1)..( 6): Result.002 file - promoters60/1482448
ttttta

SEQ ID NO: 118650 - DNA, 6 bp, Unknown
  misc_feature (1)..( 6): Result.002 file - promoters60/1482448
aacgta

SEQ ID NO: 118651 - DNA, 6 bp, Unknown
  misc_feature (1)..( 6): Result.002 file - promoters60/1482448
aacgta

SEQ ID NO: 118652 - DNA, 6 bp, Unknown
  misc_feature (1)..( 6): Result.002 file - promoters60/1482448
atttag

SEQ ID NO: 118653 - DNA, 6 bp, Unknown
  misc_feature (1)..( 6): Result.002 file - promoters60/1482448
atttag

SEQ ID NO: 118654 - DNA, 7 bp, Unknown
  misc_feature (1)..( 7): Result.002 file - promoters60/1482448
atccaaa

SEQ ID NO: 118655 - DNA, 7 bp, Unknown
  misc_feature (1)..( 7): Result.002 file - promoters60/1482448
atcgaaa

SEQ ID NO: 118656 - DNA, 10 bp, Unknown
  misc_feature (1)..( 10): Result.002 file - promoters60/1482527
gagtttaggt

SEQ ID NO: 118657 - DNA, 10 bp, Unknown
  misc_feature (1)..( 10): Result.002 file - promoters60/1482527
aatttttggt

SEQ ID NO: 118658 - DNA, 10 bp, Unknown
  misc_feature (1)..( 10): Result.002 file - promoters60/1482527
ttgttttgtc

SEQ ID NO: 118659 - DNA, 11 bp, Unknown
  misc_feature (1)..( 11): Result.002 file - promoters60/1482527
agcttagatat

SEQ ID NO: 118660 - DNA, 11 bp, Unknown
  misc_feature (1)..( 11): Result.002 file - promoters60/1482527
ctcttaaatat

SEQ ID NO: 118661 - DNA, 11 bp, Unknown
  misc_feature (1)..( 11): Result.002 file - promoters60/1482527
ctctgaaacat

SEQ ID NO: 118662 - DNA, 8 bp, Unknown
  misc_feature (1)..( 8): Result.002 file - promoters60/1482527
aatagtta

SEQ ID NO: 118663 - DNA, 8 bp, Unknown
  misc_feature (1)..( 8): Result.002 file - promoters60/1482527
aattgttt

SEQ ID NO: 118664 - DNA, 9 bp, Unknown
  misc_feature (1)..( 9): Result.002 file - promoters60/1482527
ttttggttt

SEQ ID NO: 118665 - DNA, 8 bp, Unknown
  misc_feature (1)..( 8): Result.002 file - promoters60/1482527
cttcttct

SEQ ID NO: 118666 - DNA, 8 bp, Unknown
  misc_feature (1)..( 8): Result.002 file - promoters60/1482527
cttcctct

SEQ ID NO: 118667 - DNA, 8 bp, Unknown
  misc_feature (1)..( 8): Result.002 file - promoters60/1482527
attcatct

SEQ ID NO: 118668 - DNA, 8 bp, Unknown
  misc_feature (1)..( 8): Result.002 file - promoters60/1482527
aaaaattc

SEQ ID NO: 118669 - DNA, 8 bp, Unknown
  misc_feature (1)..( 8): Result.002 file - promoters60/1482527
aaaatttc

SEQ ID NO: 118670 - DNA, 8 bp, Unknown
  misc_feature (1)..( 8): Result.002 file - promoters60/1482527
caaagttc

SEQ ID NO: 118671 - DNA, 6 bp, Unknown
  misc_feature (1)..( 6): Result.002 file - promoters60/1482546
accgac

SEQ ID NO: 118672 - DNA, 6 bp, Unknown
  misc_feature (1)..( 6): Result.002 file - promoters60/1482546
accgac

SEQ ID NO: 118673 - DNA, 7 bp, Unknown
  misc_feature (1)..( 7): Result.002 file - promoters60/1482546
acaaatt

SEQ ID NO: 118674 - DNA, 7 bp, Unknown
  misc_feature (1)..( 7): Result.002 file - promoters60/1482546
acagatt

SEQ ID NO: 118675 - DNA, 7 bp, Unknown
  misc_feature (1)..( 7): Result.002 file - promoters60/1482546
gtcggat

SEQ ID NO: 118676 - DNA, 7 bp, Unknown
  misc_feature (1)..( 7): Result.002 file - promoters60/1482546
gtctgat

SEQ ID NO: 118677 - DNA, 12 bp, Unknown
  misc_feature (1)..( 12): Result.002 file - promoters60/1482546
ctgaagaagaaa

SEQ ID NO: 118678 - DNA, 12 bp, Unknown
  misc_feature (1)..( 12): Result.002 file - promoters60/1482546
ctgaaggagaaa

SEQ ID NO: 118679 - DNA, 9 bp, Unknown
  misc_feature (1)..( 9): Result.002 file - promoters60/1482546
caaaagctt

SEQ ID NO: 118680 - DNA, 9 bp, Unknown
  misc_feature (1)..( 9): Result.002 file - promoters60/1482546
caaaagctt

SEQ ID NO: 118681 - DNA, 7 bp, Unknown
  misc_feature (1)..( 7): Result.002 file - promoters60/1482546
tgataac

SEQ ID NO: 118682 - DNA, 7 bp, Unknown
  misc_feature (1)..( 7): Result.002 file - promoters60/1482546
tgataac

SEQ ID NO: 118683 - DNA, 10 bp, Unknown
  misc_feature (1)..( 10): Result.002 file - promoters60/1482546
gagagtgaaa

SEQ ID NO: 118684 - DNA, 10 bp, Unknown
  misc_feature (1)..( 10): Result.002 file - promoters60/1482546
gagattgaaa

SEQ ID NO: 118685 - DNA, 7 bp, Unknown
  misc_feature (1)..( 7): Result.002 file - promoters60/1482546
gagaaag

SEQ ID NO: 118686 - DNA, 7 bp, Unknown
  misc_feature (1)..( 7): Result.002 file - promoters60/1482546
gagaaag

SEQ ID NO: 118687 - DNA, 7 bp, Unknown
  misc_feature (1)..( 7): Result.002 file - promoters60/1482546
tcagaga

SEQ ID NO: 118688 - DNA, 7 bp, Unknown
  misc_feature (1)..( 7): Result.002 file - promoters60/1482546
tcaaaga

SEQ ID NO: 118689 - DNA, 7 bp, Unknown
  misc_feature (1)..( 7): Result.002 file - promoters60/1482546
aaaggct

SEQ ID NO: 118690 - DNA, 7 bp, Unknown
  misc_feature (1)..( 7): Result.002 file - promoters60/1482546
aaaagct

SEQ ID NO: 118691 - DNA, 11 bp, Unknown
  misc_feature (1)..( 11): Result.002 file - promoters60/1532660
ttaataaaaat

SEQ ID NO: 118692 - DNA, 11 bp, Unknown
  misc_feature (1)..( 11): Result.002 file - promoters60/1532660
ataaaaaaaat

SEQ ID NO: 118693 - DNA, 11 bp, Unknown
  misc_feature (1)..( 11): Result.002 file - promoters60/1532660
actataaaata

SEQ ID NO: 118694 - DNA, 11 bp, Unknown
  misc_feature (1)..( 11): Result.002 file - promoters60/1532660
ttaatcaaata

SEQ ID NO: 118695 - DNA, 11 bp, Unknown
  misc_feature (1)..( 11): Result.002 file - promoters60/1532660
gcgatataaag

SEQ ID NO: 118696 - DNA, 11 bp, Unknown
  misc_feature (1)..( 11): Result.002 file - promoters60/1532660
ctaatcagctg

SEQ ID NO: 118697 - DNA, 11 bp, Unknown
  misc_feature (1)..( 11): Result.002 file - promoters60/1532660
ttattcaagta

SEQ ID NO: 118698 - DNA, 12 bp, Unknown
  misc_feature (1)..( 12): Result.002 file - promoters60/1532821
tactcacatatg

SEQ ID NO: 118699 - DNA, 12 bp, Unknown
  misc_feature (1)..( 12): Result.002 file - promoters60/1532821
tactaacatatg

SEQ ID NO: 118700 - DNA, 12 bp, Unknown
  misc_feature (1)..( 12): Result.002 file - promoters60/1532821
tcaaaacataat

SEQ ID NO: 118701 - DNA, 8 bp, Unknown
  misc_feature (1)..( 8): Result.002 file - promoters60/1532821
caatcttg

SEQ ID NO: 118702 - DNA, 8 bp, Unknown
  misc_feature (1)..( 8): Result.002 file - promoters60/1532821
aaatattg

SEQ ID NO: 118703 - DNA, 9 bp, Unknown
  misc_feature (1)..( 9): Result.002 file - promoters60/1532821
aaattatcc

SEQ ID NO: 118704 - DNA, 12 bp, Unknown
  misc_feature (1)..( 12): Result.002 file - promoters60/1532821
ccaccacttttt

SEQ ID NO: 118705 - DNA, 12 bp, Unknown
  misc_feature (1)..( 12): Result.002 file - promoters60/1532821
ccatcacgcgga

SEQ ID NO: 118706 - DNA, 12 bp, Unknown
  misc_feature (1)..( 12): Result.002 file - promoters60/1532821
atacctcttttt

SEQ ID NO: 118707 - DNA, 7 bp, Unknown
  misc_feature (1)..( 7): Result.002 file - promoters60/1532925
aaagaag

SEQ ID NO: 118708 - DNA, 7 bp, Unknown
  misc_feature (1)..( 7): Result.002 file - promoters60/1532925
aaagaag

SEQ ID NO: 118709 - DNA, 7 bp, Unknown
  misc_feature (1)..( 7): Result.002 file - promoters60/1532925
gatgaaa

SEQ ID NO: 118710 - DNA, 7 bp, Unknown
  misc_feature (1)..( 7): Result.002 file - promoters60/1532925
gatcaaa

SEQ ID NO: 118711 - DNA, 7 bp, Unknown
  misc_feature (1)..( 7): Result.002 file - promoters60/1532925
attgatc

SEQ ID NO: 118712 - DNA, 7 bp, Unknown
  misc_feature (1)..( 7): Result.002 file - promoters60/1532925
attgatc

SEQ ID NO: 118713 - DNA, 9 bp, Unknown
  misc_feature (1)..( 9): Result.002 file - promoters60/1532925
cgtctgatt

SEQ ID NO: 118714 - DNA, 9 bp, Unknown
  misc_feature (1)..( 9): Result.002 file - promoters60/1532925
tttcttatt

SEQ ID NO: 118715 - DNA, 9 bp, Unknown
  misc_feature (1)..( 9): Result.002 file - promoters60/1532925
ttttttacc

SEQ ID NO: 118716 - DNA, 6 bp, Unknown
  misc_feature (1)..( 6): Result.002 file - promoters60/1532925
ttcgtg

SEQ ID NO: 118717 - DNA, 6 bp, Unknown
  misc_feature (1)..( 6): Result.002 file - promoters60/1532925
ttcgtg

SEQ ID NO: 118718 - DNA, 8 bp, Unknown
  misc_feature (1)..( 8): Result.002 file - promoters60/1532925
ttttttat

SEQ ID NO: 118719 - DNA, 8 bp, Unknown
  misc_feature (1)..( 8): Result.002 file - promoters60/1532925
ttttttat

SEQ ID NO: 118720 - DNA, 7 bp, Unknown
  misc_feature (1)..( 7): Result.002 file - promoters60/1532925
ggaaaaa

SEQ ID NO: 118721 - DNA, 7 bp, Unknown
  misc_feature (1)..( 7): Result.002 file - promoters60/1532925
ggataaa

SEQ ID NO: 118722 - DNA, 6 bp, Unknown
  misc_feature (1)..( 6): Result.002 file - promoters60/1532925
ttttag

SEQ ID NO: 118723 - DNA, 6 bp, Unknown
  misc_feature (1)..( 6): Result.002 file - promoters60/1532925
ttttag

SEQ ID NO: 118724 - DNA, 7 bp, Unknown
  misc_feature (1)..( 7): Result.002 file - promoters60/1532925
caagctt

SEQ ID NO: 118725 - DNA, 7 bp, Unknown
  misc_feature (1)..( 7): Result.002 file - promoters60/1532925
caaactt

SEQ ID NO: 118726 - DNA, 6 bp, Unknown
  misc_feature (1)..( 6): Result.002 file - promoters60/1532925
gtgaaa

SEQ ID NO: 118727 - DNA, 6 bp, Unknown
  misc_feature (1)..( 6): Result.002 file - promoters60/1532925
gtgaaa

SEQ ID NO: 118728 - DNA, 7 bp, Unknown
  misc_feature (1)..( 7): Result.002 file - promoters60/1532925
gaatgat

SEQ ID NO: 118729 - DNA, 7 bp, Unknown
  misc_feature (1)..( 7): Result.002 file - promoters60/1532925
gaatgat

SEQ ID NO: 118730 - DNA, 7 bp, Unknown
  misc_feature (1)..( 7): Result.002 file - promoters60/1532925
tgatgtt

SEQ ID NO: 118731 - DNA, 7 bp, Unknown
  misc_feature (1)..( 7): Result.002 file - promoters60/1532925
tgatgtt

SEQ ID NO: 118732 - DNA, 6 bp, Unknown
  misc_feature (1)..( 6): Result.002 file - promoters60/1532925
aataaa

SEQ ID NO: 118733 - DNA, 6 bp, Unknown
  misc_feature (1)..( 6): Result.002 file - promoters60/1532925
aataaa

SEQ ID NO: 118734 - DNA, 8 bp, Unknown
  misc_feature (1)..( 8): Result.002 file - promoters60/1532925
tattttgt

SEQ ID NO: 118735 - DNA, 8 bp, Unknown
  misc_feature (1)..( 8): Result.002 file - promoters60/1532925
tattttgt

SEQ ID NO: 118736 - DNA, 8 bp, Unknown
  misc_feature (1)..( 8): Result.002 file - promoters60/1532925
catgatgt

SEQ ID NO: 118737 - DNA, 8 bp, Unknown
  misc_feature (1)..( 8): Result.002 file - promoters60/1532925
catgttgt

SEQ ID NO: 118738 - DNA, 11 bp, Unknown
  misc_feature (1)..( 11): Result.002 file - promoters60/1532925
ttattattcaa

SEQ ID NO: 118739 - DNA, 11 bp, Unknown
  misc_feature (1)..( 11): Result.002 file - promoters60/1532925
ttagtatacaa

SEQ ID NO: 118740 - DNA, 6 bp, Unknown
  misc_feature (1)..( 6): Result.002 file - promoters60/1532925
attata

SEQ ID NO: 118741 - DNA, 6 bp, Unknown
  misc_feature (1)..( 6): Result.002 file - promoters60/1532925
attata

SEQ ID NO: 118742 - DNA, 6 bp, Unknown
  misc_feature (1)..( 6): Result.002 file - promoters60/1532925
attttt

SEQ ID NO: 118743 - DNA, 6 bp, Unknown
  misc_feature (1)..( 6): Result.002 file - promoters60/1532925
attttt

SEQ ID NO: 118744 - DNA, 6 bp, Unknown
  misc_feature (1)..( 6): Result.002 file - promoters60/1532925
tcaact

SEQ ID NO: 118745 - DNA, 6 bp, Unknown
  misc_feature (1)..( 6): Result.002 file - promoters60/1532925
tcaact

SEQ ID NO: 118746 - DNA, 9 bp, Unknown
  misc_feature (1)..( 9): Result.002 file - promoters60/1532925
agaaaaaaa

SEQ ID NO: 118747 - DNA, 9 bp, Unknown
  misc_feature (1)..( 9): Result.002 file - promoters60/1532925
agaaaaaaa

SEQ ID NO: 118748 - DNA, 7 bp, Unknown
  misc_feature (1)..( 7): Result.002 file - promoters60/1532925
aaaacaa

SEQ ID NO: 118749 - DNA, 7 bp, Unknown
  misc_feature (1)..( 7): Result.002 file - promoters60/1532925
aaaacaa

SEQ ID NO: 118750 - DNA, 7 bp, Unknown
  misc_feature (1)..( 7): Result.002 file - promoters60/1532925
gagaaaa

SEQ ID NO: 118751 - DNA, 7 bp, Unknown
  misc_feature (1)..( 7): Result.002 file - promoters60/1532925
gagaaaa

SEQ ID NO: 118752 - DNA, 10 bp, Unknown
  misc_feature (1)..( 10): Result.002 file - promoters60/1532925
gtttaatata

SEQ ID NO: 118753 - DNA, 10 bp, Unknown
  misc_feature (1)..( 10): Result.002 file - promoters60/1532925
gtttgatata

SEQ ID NO: 118754 - DNA, 6 bp, Unknown
  misc_feature (1)..( 6): Result.002 file - promoters60/1532929
tatcct

SEQ ID NO: 118755 - DNA, 6 bp, Unknown
  misc_feature (1)..( 6): Result.002 file - promoters60/1532929
tatcct

SEQ ID NO: 118756 - DNA, 9 bp, Unknown
  misc_feature (1)..( 9): Result.002 file - promoters60/1532929
cctactttg

SEQ ID NO: 118757 - DNA, 9 bp, Unknown
  misc_feature (1)..( 9): Result.002 file - promoters60/1532929
cctacattg

SEQ ID NO: 118758 - DNA, 9 bp, Unknown
  misc_feature (1)..( 9): Result.002 file - promoters60/1532929
ttaggttat

SEQ ID NO: 118759 - DNA, 9 bp, Unknown
  misc_feature (1)..( 9): Result.002 file - promoters60/1532929
ttagattat

SEQ ID NO: 118760 - DNA, 6 bp, Unknown
  misc_feature (1)..( 6): Result.002 file - promoters60/1532929
tgatct

SEQ ID NO: 118761 - DNA, 6 bp, Unknown
  misc_feature (1)..( 6): Result.002 file - promoters60/1532929
tgatct

SEQ ID NO: 118762 - DNA, 9 bp, Unknown
  misc_feature (1)..( 9): Result.002 file - promoters60/1532929
ttgtttcta

SEQ ID NO: 118763 - DNA, 9 bp, Unknown
  misc_feature (1)..( 9): Result.002 file - promoters60/1532929
ttgtatcta

SEQ ID NO: 118764 - DNA, 7 bp, Unknown
  misc_feature (1)..( 7): Result.002 file - promoters60/1532929
tctattc

SEQ ID NO: 118765 - DNA, 7 bp, Unknown
  misc_feature (1)..( 7): Result.002 file - promoters60/1532929
tctgttc

SEQ ID NO: 118766 - DNA, 7 bp, Unknown
  misc_feature (1)..( 7): Result.002 file - promoters60/1532929
tcattat

SEQ ID NO: 118767 - DNA, 7 bp, Unknown
  misc_feature (1)..( 7): Result.002 file - promoters60/1532929
tcaatat

SEQ ID NO: 118768 - DNA, 7 bp, Unknown
  misc_feature (1)..( 7): Result.002 file - promoters60/1532929
agctctc

SEQ ID NO: 118769 - DNA, 7 bp, Unknown
  misc_feature (1)..( 7): Result.002 file - promoters60/1532929
agctctc

SEQ ID NO: 118770 - DNA, 7 bp, Unknown
  misc_feature (1)..( 7): Result.002 file - promoters60/1532929
gctagtc

SEQ ID NO: 118771 - DNA, 7 bp, Unknown
  misc_feature (1)..( 7): Result.002 file - promoters60/1532929
gctcgtc

SEQ ID NO: 118772 - DNA, 6 bp, Unknown
  misc_feature (1)..( 6): Result.002 file - promoters60/1532929
ggaatc

SEQ ID NO: 118773 - DNA, 6 bp, Unknown
  misc_feature (1)..( 6): Result.002 file - promoters60/1532929
ggaatc

SEQ ID NO: 118774 - DNA, 6 bp, Unknown
  misc_feature (1)..( 6): Result.002 file - promoters60/1532929
tgtttt

SEQ ID NO: 118775 - DNA, 6 bp, Unknown
  misc_feature (1)..( 6): Result.002 file - promoters60/1532929
tgtttt

SEQ ID NO: 118776 - DNA, 6 bp, Unknown
  misc_feature (1)..( 6): Result.002 file - promoters60/1532929
tggtaa

SEQ ID NO: 118777 - DNA, 6 bp, Unknown
  misc_feature (1)..( 6): Result.002 file - promoters60/1532929
tggtaa

SEQ ID NO: 118778 - DNA, 13 bp, Unknown
  misc_feature (1)..( 13): Result.002 file - promoters60/1532929
tctggggaatcgg

SEQ ID NO: 118779 - DNA, 13 bp, Unknown
  misc_feature (1)..( 13): Result.002 file - promoters60/1532929
tctgggaaatcgg

SEQ ID NO: 118780 - DNA, 7 bp, Unknown
  misc_feature (1)..( 7): Result.002 file - promoters60/1532929
atgttat

SEQ ID NO: 118781 - DNA, 7 bp, Unknown
  misc_feature (1)..( 7): Result.002 file - promoters60/1532929
atgttat

SEQ ID NO: 118782 - DNA, 6 bp, Unknown
  misc_feature (1)..( 6): Result.002 file - promoters60/1532929
ttctct

SEQ ID NO: 118783 - DNA, 6 bp, Unknown
  misc_feature (1)..( 6): Result.002 file - promoters60/1532929
ttctct

SEQ ID NO: 118784 - DNA, 11 bp, Unknown
  misc_feature (1)..( 11): Result.002 file - promoters60/1532937
aaagaaaatct

SEQ ID NO: 118785 - DNA, 11 bp, Unknown
  misc_feature (1)..( 11): Result.002 file - promoters60/1532937
gtggaaaatgt

SEQ ID NO: 118786 - DNA, 11 bp, Unknown
  misc_feature (1)..( 11): Result.002 file - promoters60/1532937
taagaaaaaaa

SEQ ID NO: 118787 - DNA, 11 bp, Unknown
  misc_feature (1)..( 11): Result.002 file - promoters60/1532937
aaacaaaacat

SEQ ID NO: 118788 - DNA, 11 bp, Unknown
  misc_feature (1)..( 11): Result.002 file - promoters60/1532937
tacaaaaatgt

SEQ ID NO: 118789 - DNA, 11 bp, Unknown
  misc_feature (1)..( 11): Result.002 file - promoters60/1532937
aaagaaacctg

SEQ ID NO: 118790 - DNA, 8 bp, Unknown
  misc_feature (1)..( 8): Result.002 file - promoters60/1532948
attccatt

SEQ ID NO: 118791 - DNA, 8 bp, Unknown
  misc_feature (1)..( 8): Result.002 file - promoters60/1532948
tttccatt

SEQ ID NO: 118792 - DNA, 8 bp, Unknown
  misc_feature (1)..( 8): Result.002 file - promoters60/1532948
attccaaa

SEQ ID NO: 118793 - DNA, 8 bp, Unknown
  misc_feature (1)..( 8): Result.002 file - promoters60/1532948
tttgtaat

SEQ ID NO: 118794 - DNA, 8 bp, Unknown
  misc_feature (1)..( 8): Result.002 file - promoters60/1532948
attgtaat

SEQ ID NO: 118795 - DNA, 8 bp, Unknown
  misc_feature (1)..( 8): Result.002 file - promoters60/1532948
tttgtaac

SEQ ID NO: 118796 - DNA, 12 bp, Unknown
  misc_feature (1)..( 12): Result.002 file - promoters60/1532948
gttggaatttag

SEQ ID NO: 118797 - DNA, 12 bp, Unknown
  misc_feature (1)..( 12): Result.002 file - promoters60/1532948
aaaagaaattaa

SEQ ID NO: 118798 - DNA, 12 bp, Unknown
  misc_feature (1)..( 12): Result.002 file - promoters60/1532948
aaaagaaaataa

SEQ ID NO: 118799 - DNA, 12 bp, Unknown
  misc_feature (1)..( 12): Result.002 file - promoters60/1532948
aaatgaaatatc

SEQ ID NO: 118800 - DNA, 12 bp, Unknown
  misc_feature (1)..( 12): Result.002 file - promoters60/1532948
ataagacaacac

SEQ ID NO: 118801 - DNA, 12 bp, Unknown
  misc_feature (1)..( 12): Result.002 file - promoters60/1532948
ttgagacaaaaa

SEQ ID NO: 118802 - DNA, 12 bp, Unknown
  misc_feature (1)..( 12): Result.002 file - promoters60/1532948
ttgaaacaaaaa

SEQ ID NO: 118803 - DNA, 12 bp, Unknown
  misc_feature (1)..( 12): Result.002 file - promoters60/1532948
gagaaagaaagc

SEQ ID NO: 118804 - DNA, 9 bp, Unknown
  misc_feature (1)..( 9): Result.002 file - promoters60/1532948
ggagaaaaa

SEQ ID NO: 118805 - DNA, 9 bp, Unknown
  misc_feature (1)..( 9): Result.002 file - promoters60/1532948
atggaaaaa

SEQ ID NO: 118806 - DNA, 9 bp, Unknown
  misc_feature (1)..( 9): Result.002 file - promoters60/1532948
ggagaaaac

SEQ ID NO: 118807 - DNA, 8 bp, Unknown
  misc_feature (1)..( 8): Result.002 file - promoters60/1532948
accaataa

SEQ ID NO: 118808 - DNA, 8 bp, Unknown
  misc_feature (1)..( 8): Result.002 file - promoters60/1532948
cccactaa

SEQ ID NO: 118809 - DNA, 8 bp, Unknown
  misc_feature (1)..( 8): Result.002 file - promoters60/1532948
cccactag

SEQ ID NO: 118810 - DNA, 11 bp, Unknown
  misc_feature (1)..( 11): Result.002 file - promoters60/1532948
taacaagtaaa

SEQ ID NO: 118811 - DNA, 11 bp, Unknown
  misc_feature (1)..( 11): Result.002 file - promoters60/1532948
taataagtaaa

SEQ ID NO: 118812 - DNA, 11 bp, Unknown
  misc_feature (1)..( 11): Result.002 file - promoters60/1532948
gcaagagtaaa

SEQ ID NO: 118813 - DNA, 7 bp, Unknown
  misc_feature (1)..( 7): Result.002 file - promoters60/1532975
ttcatct

SEQ ID NO: 118814 - DNA, 7 bp, Unknown
  misc_feature (1)..( 7): Result.002 file - promoters60/1532975
ttcttct

SEQ ID NO: 118815 - DNA, 6 bp, Unknown
  misc_feature (1)..( 6): Result.002 file - promoters60/1532975
ataaat

SEQ ID NO: 118816 - DNA, 6 bp, Unknown
  misc_feature (1)..( 6): Result.002 file - promoters60/1532975
ataaat

SEQ ID NO: 118817 - DNA, 7 bp, Unknown
  misc_feature (1)..( 7): Result.002 file - promoters60/1532975
aaaacaa

SEQ ID NO: 118818 - DNA, 7 bp, Unknown
  misc_feature (1)..( 7): Result.002 file - promoters60/1532975
aaatcaa

SEQ ID NO: 118819 - DNA, 10 bp, Unknown
  misc_feature (1)..( 10): Result.002 file - promoters60/1532975
aaaaataaag

SEQ ID NO: 118820 - DNA, 10 bp, Unknown
  misc_feature (1)..( 10): Result.002 file - promoters60/1532975
aaaaagaaag

SEQ ID NO: 118821 - DNA, 6 bp, Unknown
  misc_feature (1)..( 6): Result.002 file - promoters60/1532975
taactt

SEQ ID NO: 118822 - DNA, 6 bp, Unknown
  misc_feature (1)..( 6): Result.002 file - promoters60/1532975
taactt

SEQ ID NO: 118823 - DNA, 6 bp, Unknown
  misc_feature (1)..( 6): Result.002 file - promoters60/1532975
ttgcaa

SEQ ID NO: 118824 - DNA, 6 bp, Unknown
  misc_feature (1)..( 6): Result.002 file - promoters60/1532975
ttgcaa

SEQ ID NO: 118825 - DNA, 7 bp, Unknown
  misc_feature (1)..( 7): Result.002 file - promoters60/1532975
taaataa

SEQ ID NO: 118826 - DNA, 7 bp, Unknown
  misc_feature (1)..( 7): Result.002 file - promoters60/1532975
taactaa

SEQ ID NO: 118827 - DNA, 6 bp, Unknown
  misc_feature (1)..( 6): Result.002 file - promoters60/1532975
tctaaa

SEQ ID NO: 118828 - DNA, 6 bp, Unknown
  misc_feature (1)..( 6): Result.002 file - promoters60/1532975
tctaaa

SEQ ID NO: 118829 - DNA, 6 bp, Unknown
  misc_feature (1)..( 6): Result.002 file - promoters60/1532975
agtaaa

SEQ ID NO: 118830 - DNA, 6 bp, Unknown
  misc_feature (1)..( 6): Result.002 file - promoters60/1532975
agtaaa

SEQ ID NO: 118831 - DNA, 7 bp, Unknown
  misc_feature (1)..( 7): Result.002 file - promoters60/1532975
aatcggg

SEQ ID NO: 118832 - DNA, 7 bp, Unknown
  misc_feature (1)..( 7): Result.002 file - promoters60/1532975
aattggg

SEQ ID NO: 118833 - DNA, 8 bp, Unknown
  misc_feature (1)..( 8): Result.002 file - promoters60/1532975
gaaagaaa

SEQ ID NO: 118834 - DNA, 8 bp, Unknown
  misc_feature (1)..( 8): Result.002 file - promoters60/1532975
gaaacaaa

SEQ ID NO: 118835 - DNA, 10 bp, Unknown
  misc_feature (1)..( 10): Result.002 file - promoters60/1532975
ggaaaagaaa

SEQ ID NO: 118836 - DNA, 10 bp, Unknown
  misc_feature (1)..( 10): Result.002 file - promoters60/1532975
ggaaatgaaa

SEQ ID NO: 118837 - DNA, 7 bp, Unknown
  misc_feature (1)..( 7): Result.002 file - promoters60/1532975
cccacta

SEQ ID NO: 118838 - DNA, 7 bp, Unknown
  misc_feature (1)..( 7): Result.002 file - promoters60/1532975
cccacta

SEQ ID NO: 118839 - DNA, 9 bp, Unknown
  misc_feature (1)..( 9): Result.002 file - promoters60/1532975
aaagaaaag

SEQ ID NO: 118840 - DNA, 9 bp, Unknown
  misc_feature (1)..( 9): Result.002 file - promoters60/1532975
aaagtaaag

SEQ ID NO: 118841 - DNA, 7 bp, Unknown
  misc_feature (1)..( 7): Result.002 file - promoters60/1532975
gtatata

SEQ ID NO: 118842 - DNA, 7 bp, Unknown
  misc_feature (1)..( 7): Result.002 file - promoters60/1532975
gtatata

SEQ ID NO: 118843 - DNA, 7 bp, Unknown
  misc_feature (1)..( 7): Result.002 file - promoters60/1533121
tttattt

SEQ ID NO: 118844 - DNA, 7 bp, Unknown
  misc_feature (1)..( 7): Result.002 file - promoters60/1533121
tttattt

SEQ ID NO: 118845 - DNA, 8 bp, Unknown
  misc_feature (1)..( 8): Result.002 file - promoters60/1533121
tttttaac

SEQ ID NO: 118846 - DNA, 8 bp, Unknown
  misc_feature (1)..( 8): Result.002 file - promoters60/1533121
tttctaac

SEQ ID NO: 118847 - DNA, 6 bp, Unknown
  misc_feature (1)..( 6): Result.002 file - promoters60/1533121
agttaa

SEQ ID NO: 118848 - DNA, 6 bp, Unknown
  misc_feature (1)..( 6): Result.002 file - promoters60/1533121
agttaa

SEQ ID NO: 118849 - DNA, 6 bp, Unknown
  misc_feature (1)..( 6): Result.002 file - promoters60/1533121
ttttgg

SEQ ID NO: 118850 - DNA, 6 bp, Unknown
  misc_feature (1)..( 6): Result.002 file - promoters60/1533121
ttttgg

SEQ ID NO: 118851 - DNA, 6 bp, Unknown
  misc_feature (1)..( 6): Result.002 file - promoters60/1533121
aataat

SEQ ID NO: 118852 - DNA, 6 bp, Unknown
  misc_feature (1)..( 6): Result.002 file - promoters60/1533121
aataat

SEQ ID NO: 118853 - DNA, 7 bp, Unknown
  misc_feature (1)..( 7): Result.002 file - promoters60/1533121
taaatta

SEQ ID NO: 118854 - DNA, 7 bp, Unknown
  misc_feature (1)..( 7): Result.002 file - promoters60/1533121
taactta

SEQ ID NO: 118855 - DNA, 11 bp, Unknown
  misc_feature (1)..( 11): Result.002 file - promoters60/1533121
caaaaacatat

SEQ ID NO: 118856 - DNA, 11 bp, Unknown
  misc_feature (1)..( 11): Result.002 file - promoters60/1533121
caaaatcatat

SEQ ID NO: 118857 - DNA, 6 bp, Unknown
  misc_feature (1)..( 6): Result.002 file - promoters60/1533121
acagtt

SEQ ID NO: 118858 - DNA, 6 bp, Unknown
  misc_feature (1)..( 6): Result.002 file - promoters60/1533121
acagtt

SEQ ID NO: 118859 - DNA, 7 bp, Unknown
  misc_feature (1)..( 7): Result.002 file - promoters60/1533121
acaatta

SEQ ID NO: 118860 - DNA, 7 bp, Unknown
  misc_feature (1)..( 7): Result.002 file - promoters60/1533121
acagtta

SEQ ID NO: 118861 - DNA, 6 bp, Unknown
  misc_feature (1)..( 6): Result.002 file - promoters60/1533121
tatgca

SEQ ID NO: 118862 - DNA, 6 bp, Unknown
  misc_feature (1)..( 6): Result.002 file - promoters60/1533121
tatgca

SEQ ID NO: 118863 - DNA, 8 bp, Unknown
  misc_feature (1)..( 8): Result.002 file - promoters60/1533121
cttactaa

SEQ ID NO: 118864 - DNA, 8 bp, Unknown
  misc_feature (1)..( 8): Result.002 file - promoters60/1533121
cttaataa

SEQ ID NO: 118865 - DNA, 6 bp, Unknown
  misc_feature (1)..( 6): Result.002 file - promoters60/1533121
aaaggg

SEQ ID NO: 118866 - DNA, 6 bp, Unknown
  misc_feature (1)..( 6): Result.002 file - promoters60/1533121
aaaggg

SEQ ID NO: 118867 - DNA, 8 bp, Unknown
  misc_feature (1)..( 8): Result.002 file - promoters60/1533121
tggaagaa

SEQ ID NO: 118868 - DNA, 8 bp, Unknown
  misc_feature (1)..( 8): Result.002 file - promoters60/1533121
tggaagaa

SEQ ID NO: 118869 - DNA, 9 bp, Unknown
  misc_feature (1)..( 9): Result.002 file - promoters60/1533159
aaatacaaa

SEQ ID NO: 118870 - DNA, 9 bp, Unknown
  misc_feature (1)..( 9): Result.002 file - promoters60/1533159
tcataaaaa

SEQ ID NO: 118871 - DNA, 9 bp, Unknown
  misc_feature (1)..( 9): Result.002 file - promoters60/1533159
taataaaaa

SEQ ID NO: 118872 - DNA, 9 bp, Unknown
  misc_feature (1)..( 9): Result.002 file - promoters60/1533159
taataaact

SEQ ID NO: 118873 - DNA, 10 bp, Unknown
  misc_feature (1)..( 10): Result.002 file - promoters60/1533159
taatcagaaa

SEQ ID NO: 118874 - DNA, 10 bp, Unknown
  misc_feature (1)..( 10): Result.002 file - promoters60/1533159
tgataaaaga

SEQ ID NO: 118875 - DNA, 10 bp, Unknown
  misc_feature (1)..( 10): Result.002 file - promoters60/1533159
gtatctgaaa

SEQ ID NO: 118876 - DNA, 16 bp, Unknown
  misc_feature (1)..( 16): Result.002 file - promoters60/1533159
gaaatatttttatgtg

SEQ ID NO: 118877 - DNA, 16 bp, Unknown
  misc_feature (1)..( 16): Result.002 file - promoters60/1533159
aaaagattttataata

SEQ ID NO: 118878 - DNA, 16 bp, Unknown
  misc_feature (1)..( 16): Result.002 file - promoters60/1533159
gaaatacgttgaaaga

SEQ ID NO: 118879 - DNA, 16 bp, Unknown
  misc_feature (1)..( 16): Result.002 file - promoters60/1533159
aaaatatatttaatca

SEQ ID NO: 118880 - DNA, 17 bp, Unknown
  misc_feature (1)..( 17): Result.002 file - promoters60/1533159
ctagtgattttaaaaaa

SEQ ID NO: 118881 - DNA, 17 bp, Unknown
  misc_feature (1)..( 17): Result.002 file - promoters60/1533159
taaatgatatgagaact

SEQ ID NO: 118882 - DNA, 17 bp, Unknown
  misc_feature (1)..( 17): Result.002 file - promoters60/1533159
actttttttttaacaaa

SEQ ID NO: 118883 - DNA, 17 bp, Unknown
  misc_feature (1)..( 17): Result.002 file - promoters60/1533159
agtttaatatttaataa

SEQ ID NO: 118884 - DNA, 14 bp, Unknown
  misc_feature (1)..( 14): Result.002 file - promoters60/1533159
aaatatttttatgt

SEQ ID NO: 118885 - DNA, 14 bp, Unknown
  misc_feature (1)..( 14): Result.002 file - promoters60/1533159
aaaagattttataa

SEQ ID NO: 118886 - DNA, 14 bp, Unknown
  misc_feature (1)..( 14): Result.002 file - promoters60/1533159
ctttttttttaaca

SEQ ID NO: 118887 - DNA, 14 bp, Unknown
  misc_feature (1)..( 14): Result.002 file - promoters60/1533159
ttactatttgatgt

SEQ ID NO: 118888 - DNA, 14 bp, Unknown
  misc_feature (1)..( 14): Result.002 file - promoters60/1533159
aaatatatttaatc

SEQ ID NO: 118889 - DNA, 14 bp, Unknown
  misc_feature (1)..( 14): Result.002 file - promoters60/1533159
tagtgattttaaaa

SEQ ID NO: 118890 - DNA, 15 bp, Unknown
  misc_feature (1)..( 15): Result.002 file - promoters60/1533159
gggggtatctgaaaa

SEQ ID NO: 118891 - DNA, 11 bp, Unknown
  misc_feature (1)..( 11): Result.002 file - promoters60/1533159
aaaagatttat

SEQ ID NO: 118892 - DNA, 11 bp, Unknown
  misc_feature (1)..( 11): Result.002 file - promoters60/1533159
taaaaatttga

SEQ ID NO: 118893 - DNA, 11 bp, Unknown
  misc_feature (1)..( 11): Result.002 file - promoters60/1533159
tcctgatttaa

SEQ ID NO: 118894 - DNA, 11 bp, Unknown
  misc_feature (1)..( 11): Result.002 file - promoters60/1533159
gaaaaattcaa

SEQ ID NO: 118895 - DNA, 11 bp, Unknown
  misc_feature (1)..( 11): Result.002 file - promoters60/1533159
gaagaatctga

SEQ ID NO: 118896 - DNA, 11 bp, Unknown
  misc_feature (1)..( 11): Result.002 file - promoters60/1533159
gaaaaaaaaaa

SEQ ID NO: 118897 - DNA, 11 bp, Unknown
  misc_feature (1)..( 11): Result.002 file - promoters60/1533159
ttattatttaa

SEQ ID NO: 118898 - DNA, 11 bp, Unknown
  misc_feature (1)..( 11): Result.002 file - promoters60/1533159
cttatattatg

SEQ ID NO: 118899 - DNA, 11 bp, Unknown
  misc_feature (1)..( 11): Result.002 file - promoters60/1533159
cttaaatttag

SEQ ID NO: 118900 - DNA, 11 bp, Unknown
  misc_feature (1)..( 11): Result.002 file - promoters60/1533159
tttatattatg

SEQ ID NO: 118901 - DNA, 11 bp, Unknown
  misc_feature (1)..( 11): Result.002 file - promoters60/1533159
attctattaat

SEQ ID NO: 118902 - DNA, 11 bp, Unknown
  misc_feature (1)..( 11): Result.002 file - promoters60/1533159
actctattttc

SEQ ID NO: 118903 - DNA, 11 bp, Unknown
  misc_feature (1)..( 11): Result.002 file - promoters60/1533159
gttcaatttaa

SEQ ID NO: 118904 - DNA, 12 bp, Unknown
  misc_feature (1)..( 12): Result.002 file - promoters60/1533159
caactaatttgt

SEQ ID NO: 118905 - DNA, 9 bp, Unknown
  misc_feature (1)..( 9): Result.002 file - promoters60/1533420
gaaagattg

SEQ ID NO: 118906 - DNA, 9 bp, Unknown
  misc_feature (1)..( 9): Result.002 file - promoters60/1533420
gaaagacta

SEQ ID NO: 118907 - DNA, 9 bp, Unknown
  misc_feature (1)..( 9): Result.002 file - promoters60/1533420
taaagcttg

SEQ ID NO: 118908 - DNA, 9 bp, Unknown
  misc_feature (1)..( 9): Result.002 file - promoters60/1533420
taaaaattt

SEQ ID NO: 118909 - DNA, 9 bp, Unknown
  misc_feature (1)..( 9): Result.002 file - promoters60/1533420
taaattttt

SEQ ID NO: 118910 - DNA, 8 bp, Unknown
  misc_feature (1)..( 8): Result.002 file - promoters60/1533420
acattaca

SEQ ID NO: 118911 - DNA, 8 bp, Unknown
  misc_feature (1)..( 8): Result.002 file - promoters60/1533420
acattagg

SEQ ID NO: 118912 - DNA, 8 bp, Unknown
  misc_feature (1)..( 8): Result.002 file - promoters60/1533420
ccattagg

SEQ ID NO: 118913 - DNA, 8 bp, Unknown
  misc_feature (1)..( 8): Result.002 file - promoters60/1533420
ccattaat

SEQ ID NO: 118914 - DNA, 8 bp, Unknown
  misc_feature (1)..( 8): Result.002 file - promoters60/1533420
ttaaattt

SEQ ID NO: 118915 - DNA, 8 bp, Unknown
  misc_feature (1)..( 8): Result.002 file - promoters60/1533420
ctaacttt

SEQ ID NO: 118916 - DNA, 8 bp, Unknown
  misc_feature (1)..( 8): Result.002 file - promoters60/1533420
ttaaatgg

SEQ ID NO: 118917 - DNA, 8 bp, Unknown
  misc_feature (1)..( 8): Result.002 file - promoters60/1533420
aaaaattt

SEQ ID NO: 118918 - DNA, 9 bp, Unknown
  misc_feature (1)..( 9): Result.002 file - promoters60/1533420
ttgttgtat

SEQ ID NO: 118919 - DNA, 9 bp, Unknown
  misc_feature (1)..( 9): Result.002 file - promoters60/1533420
ttggtgtat

SEQ ID NO: 118920 - DNA, 9 bp, Unknown
  misc_feature (1)..( 9): Result.002 file - promoters60/1533420
ttgttttct

SEQ ID NO: 118921 - DNA, 9 bp, Unknown
  misc_feature (1)..( 9): Result.002 file - promoters60/1533420
cagttttcc

SEQ ID NO: 118922 - DNA, 10 bp, Unknown
  misc_feature (1)..( 10): Result.002 file - promoters60/1533533
ataaacaaat

SEQ ID NO: 118923 - DNA, 10 bp, Unknown
  misc_feature (1)..( 10): Result.002 file - promoters60/1533533
tttaacaaat

SEQ ID NO: 118924 - DNA, 10 bp, Unknown
  misc_feature (1)..( 10): Result.002 file - promoters60/1533533
aaaaacaaaa

SEQ ID NO: 118925 - DNA, 10 bp, Unknown
  misc_feature (1)..( 10): Result.002 file - promoters60/1533533
ataaataaaa

SEQ ID NO: 118926 - DNA, 11 bp, Unknown
  misc_feature (1)..( 11): Result.002 file - promoters60/1533533
tcaaatacaag

SEQ ID NO: 118927 - DNA, 11 bp, Unknown
  misc_feature (1)..( 11): Result.002 file - promoters60/1533533
gaaaataagaa

SEQ ID NO: 118928 - DNA, 15 bp, Unknown
  misc_feature (1)..( 15): Result.002 file - promoters60/1533533
ataccaaaattcatt

SEQ ID NO: 118929 - DNA, 15 bp, Unknown
  misc_feature (1)..( 15): Result.002 file - promoters60/1533533
tttttaaaatgcatt

SEQ ID NO: 118930 - DNA, 15 bp, Unknown
  misc_feature (1)..( 15): Result.002 file - promoters60/1533533
atatcaaaattaaac

SEQ ID NO: 118931 - DNA, 15 bp, Unknown
  misc_feature (1)..( 15): Result.002 file - promoters60/1533533
cagctaaaatttcgt

SEQ ID NO: 118932 - DNA, 15 bp, Unknown
  misc_feature (1)..( 15): Result.002 file - promoters60/1533533
ttggtaaaatttcat

SEQ ID NO: 118933 - DNA, 15 bp, Unknown
  misc_feature (1)..( 15): Result.002 file - promoters60/1533533
actggaaactttatg

SEQ ID NO: 118934 - DNA, 10 bp, Unknown
  misc_feature (1)..( 10): Result.002 file - promoters60/1533533
aaataataag

SEQ ID NO: 118935 - DNA, 10 bp, Unknown
  misc_feature (1)..( 10): Result.002 file - promoters60/1533533
aaagaatcaa

SEQ ID NO: 118936 - DNA, 10 bp, Unknown
  misc_feature (1)..( 10): Result.002 file - promoters60/1533533
aaataaacta

SEQ ID NO: 118937 - DNA, 10 bp, Unknown
  misc_feature (1)..( 10): Result.002 file - promoters60/1533533
gaagtatcat

SEQ ID NO: 118938 - DNA, 10 bp, Unknown
  misc_feature (1)..( 10): Result.002 file - promoters60/1533533
accctatcat

SEQ ID NO: 118939 - DNA, 10 bp, Unknown
  misc_feature (1)..( 10): Result.002 file - promoters60/1533533
aaataattaa

SEQ ID NO: 118940 - DNA, 7 bp, Unknown
  misc_feature (1)..( 7): Result.002 file - promoters60/1533750
tttgagg

SEQ ID NO: 118941 - DNA, 7 bp, Unknown
  misc_feature (1)..( 7): Result.002 file - promoters60/1533750
tttaagg

SEQ ID NO: 118942 - DNA, 8 bp, Unknown
  misc_feature (1)..( 8): Result.002 file - promoters60/1533750
taaatagt

SEQ ID NO: 118943 - DNA, 8 bp, Unknown
  misc_feature (1)..( 8): Result.002 file - promoters60/1533750
taattagt

SEQ ID NO: 118944 - DNA, 7 bp, Unknown
  misc_feature (1)..( 7): Result.002 file - promoters60/1533750
aattcag

SEQ ID NO: 118945 - DNA, 7 bp, Unknown
  misc_feature (1)..( 7): Result.002 file - promoters60/1533750
aatgcag

SEQ ID NO: 118946 - DNA, 8 bp, Unknown
  misc_feature (1)..( 8): Result.002 file - promoters60/1533750
gagataag

SEQ ID NO: 118947 - DNA, 8 bp, Unknown
  misc_feature (1)..( 8): Result.002 file - promoters60/1533750
gagacaag

SEQ ID NO: 118948 - DNA, 6 bp, Unknown
  misc_feature (1)..( 6): Result.002 file - promoters60/1533750
gagtaa

SEQ ID NO: 118949 - DNA, 6 bp, Unknown
  misc_feature (1)..( 6): Result.002 file - promoters60/1533750
gagtaa

SEQ ID NO: 118950 - DNA, 9 bp, Unknown
  misc_feature (1)..( 9): Result.002 file - promoters60/1533750
ttagctata

SEQ ID NO: 118951 - DNA, 9 bp, Unknown
  misc_feature (1)..( 9): Result.002 file - promoters60/1533750
ttagttata

SEQ ID NO: 118952 - DNA, 6 bp, Unknown
  misc_feature (1)..( 6): Result.002 file - promoters60/1533750
ttctct

SEQ ID NO: 118953 - DNA, 6 bp, Unknown
  misc_feature (1)..( 6): Result.002 file - promoters60/1533750
ttctct

SEQ ID NO: 118954 - DNA, 6 bp, Unknown
  misc_feature (1)..( 6): Result.002 file - promoters60/1533750
acattc

SEQ ID NO: 118955 - DNA, 6 bp, Unknown
  misc_feature (1)..( 6): Result.002 file - promoters60/1533750
acattc

SEQ ID NO: 118956 - DNA, 7 bp, Unknown
  misc_feature (1)..( 7): Result.002 file - promoters60/1533750
tagaaga

SEQ ID NO: 118957 - DNA, 7 bp, Unknown
  misc_feature (1)..( 7): Result.002 file - promoters60/1533750
cagaaga

SEQ ID NO: 118958 - DNA, 7 bp, Unknown
  misc_feature (1)..( 7): Result.002 file - promoters60/1533750
cagaagt

SEQ ID NO: 118959 - DNA, 7 bp, Unknown
  misc_feature (1)..( 7): Result.002 file - promoters60/1533750
tataatc

SEQ ID NO: 118960 - DNA, 7 bp, Unknown
  misc_feature (1)..( 7): Result.002 file - promoters60/1533750
tatgatc

SEQ ID NO: 118961 - DNA, 7 bp, Unknown
  misc_feature (1)..( 7): Result.002 file - promoters60/1533750
tttcaaa

SEQ ID NO: 118962 - DNA, 7 bp, Unknown
  misc_feature (1)..( 7): Result.002 file - promoters60/1533750
tttcaaa

SEQ ID NO: 118963 - DNA, 7 bp, Unknown
  misc_feature (1)..( 7): Result.002 file - promoters60/1533750
aagtaat

SEQ ID NO: 118964 - DNA, 7 bp, Unknown
  misc_feature (1)..( 7): Result.002 file - promoters60/1533750
aagaaat

SEQ ID NO: 118965 - DNA, 7 bp, Unknown
  misc_feature (1)..( 7): Result.002 file - promoters60/1533750
ccaaaaa

SEQ ID NO: 118966 - DNA, 7 bp, Unknown
  misc_feature (1)..( 7): Result.002 file - promoters60/1533750
ccaaaaa

SEQ ID NO: 118967 - DNA, 7 bp, Unknown
  misc_feature (1)..( 7): Result.002 file - promoters60/1533871
ccaactg

SEQ ID NO: 118968 - DNA, 7 bp, Unknown
  misc_feature (1)..( 7): Result.002 file - promoters60/1533871
ccatctg

SEQ ID NO: 118969 - DNA, 8 bp, Unknown
  misc_feature (1)..( 8): Result.002 file - promoters60/1533871
aaaattta

SEQ ID NO: 118970 - DNA, 8 bp, Unknown
  misc_feature (1)..( 8): Result.002 file - promoters60/1533871
aaacttta

SEQ ID NO: 118971 - DNA, 8 bp, Unknown
  misc_feature (1)..( 8): Result.002 file - promoters60/1533871
ctcagctg

SEQ ID NO: 118972 - DNA, 8 bp, Unknown
  misc_feature (1)..( 8): Result.002 file - promoters60/1533871
ctcatctg

SEQ ID NO: 118973 - DNA, 6 bp, Unknown
  misc_feature (1)..( 6): Result.002 file - promoters60/1533871
catttc

SEQ ID NO: 118974 - DNA, 6 bp, Unknown
  misc_feature (1)..( 6): Result.002 file - promoters60/1533871
catttc

SEQ ID NO: 118975 - DNA, 7 bp, Unknown
  misc_feature (1)..( 7): Result.002 file - promoters60/1533871
ttggctt

SEQ ID NO: 118976 - DNA, 7 bp, Unknown
  misc_feature (1)..( 7): Result.002 file - promoters60/1533871
ttgtctt

SEQ ID NO: 118977 - DNA, 6 bp, Unknown
  misc_feature (1)..( 6): Result.002 file - promoters60/1533871
tctttt

SEQ ID NO: 118978 - DNA, 6 bp, Unknown
  misc_feature (1)..( 6): Result.002 file - promoters60/1533871
tctttt

SEQ ID NO: 118979 - DNA, 8 bp, Unknown
  misc_feature (1)..( 8): Result.002 file - promoters60/1533871
aagtttga

SEQ ID NO: 118980 - DNA, 8 bp, Unknown
  misc_feature (1)..( 8): Result.002 file - promoters60/1533871
aagtgtga

SEQ ID NO: 118981 - DNA, 6 bp, Unknown
  misc_feature (1)..( 6): Result.002 file - promoters60/1533871
attatt

SEQ ID NO: 118982 - DNA, 6 bp, Unknown
  misc_feature (1)..( 6): Result.002 file - promoters60/1533871
attatt

SEQ ID NO: 118983 - DNA, 7 bp, Unknown
  misc_feature (1)..( 7): Result.002 file - promoters60/1533871
tgaccaa

SEQ ID NO: 118984 - DNA, 7 bp, Unknown
  misc_feature (1)..( 7): Result.002 file - promoters60/1533871
tgatcaa

SEQ ID NO: 118985 - DNA, 7 bp, Unknown
  misc_feature (1)..( 7): Result.002 file - promoters60/1533871
ttaagga

SEQ ID NO: 118986 - DNA, 7 bp, Unknown
  misc_feature (1)..( 7): Result.002 file - promoters60/1533871
ttatgga

SEQ ID NO: 118987 - DNA, 6 bp, Unknown
  misc_feature (1)..( 6): Result.002 file - promoters60/1533871
tgattt

SEQ ID NO: 118988 - DNA, 6 bp, Unknown
  misc_feature (1)..( 6): Result.002 file - promoters60/1533871
tgattt

SEQ ID NO: 118989 - DNA, 6 bp, Unknown
  misc_feature (1)..( 6): Result.002 file - promoters60/1533871
ttctgt

SEQ ID NO: 118990 - DNA, 6 bp, Unknown
  misc_feature (1)..( 6): Result.002 file - promoters60/1533871
ttctgt

SEQ ID NO: 118991 - DNA, 6 bp, Unknown
  misc_feature (1)..( 6): Result.002 file - promoters60/1533871
tttcta

SEQ ID NO: 118992 - DNA, 6 bp, Unknown
  misc_feature (1)..( 6): Result.002 file - promoters60/1533871
tttcta

SEQ ID NO: 118993 - DNA, 6 bp, Unknown
  misc_feature (1)..( 6): Result.002 file - promoters60/1533871
agttga

SEQ ID NO: 118994 - DNA, 6 bp, Unknown
  misc_feature (1)..( 6): Result.002 file - promoters60/1533871
agttga

SEQ ID NO: 118995 - DNA, 6 bp, Unknown
  misc_feature (1)..( 6): Result.002 file - promoters60/1533871
tggttt

SEQ ID NO: 118996 - DNA, 6 bp, Unknown
  misc_feature (1)..( 6): Result.002 file - promoters60/1533871
tggttt

SEQ ID NO: 118997 - DNA, 8 bp, Unknown
  misc_feature (1)..( 8): Result.002 file - promoters60/1533912
aaaataga

SEQ ID NO: 118998 - DNA, 8 bp, Unknown
  misc_feature (1)..( 8): Result.002 file - promoters60/1533912
aaaaaaga

SEQ ID NO: 118999 - DNA, 8 bp, Unknown
  misc_feature (1)..( 8): Result.002 file - promoters60/1533912
taaagaga

SEQ ID NO: 119000 - DNA, 8 bp, Unknown
  misc_feature (1)..( 8): Result.002 file - promoters60/1533912
taaataaa

SEQ ID NO: 119001 - DNA, 11 bp, Unknown
  misc_feature (1)..( 11): Result.002 file - promoters60/1533912
gtatatatacc

SEQ ID NO: 119002 - DNA, 11 bp, Unknown
  misc_feature (1)..( 11): Result.002 file - promoters60/1533912
atatatataaa

SEQ ID NO: 119003 - DNA, 11 bp, Unknown
  misc_feature (1)..( 11): Result.002 file - promoters60/1533912
ctatataaacc

SEQ ID NO: 119004 - DNA, 11 bp, Unknown
  misc_feature (1)..( 11): Result.002 file - promoters60/1533912
ttatttaaaca

SEQ ID NO: 119005 - DNA, 11 bp, Unknown
  misc_feature (1)..( 11): Result.002 file - promoters60/1533912
ctaaataaata

SEQ ID NO: 119006 - DNA, 7 bp, Unknown
  misc_feature (1)..( 7): Result.002 file - promoters60/1534151
aaacgag

SEQ ID NO: 119007 - DNA, 7 bp, Unknown
  misc_feature (1)..( 7): Result.002 file - promoters60/1534151
aaaggag

SEQ ID NO: 119008 - DNA, 7 bp, Unknown
  misc_feature (1)..( 7): Result.002 file - promoters60/1534151
aaacgat

SEQ ID NO: 119009 - DNA, 7 bp, Unknown
  misc_feature (1)..( 7): Result.002 file - promoters60/1534151
tgattat

SEQ ID NO: 119010 - DNA, 7 bp, Unknown
  misc_feature (1)..( 7): Result.002 file - promoters60/1534151
tgattaa

SEQ ID NO: 119011 - DNA, 7 bp, Unknown
  misc_feature (1)..( 7): Result.002 file - promoters60/1534151
tgagtaa

SEQ ID NO: 119012 - DNA, 8 bp, Unknown
  misc_feature (1)..( 8): Result.002 file - promoters60/1534151
gctattta

SEQ ID NO: 119013 - DNA, 8 bp, Unknown
  misc_feature (1)..( 8): Result.002 file - promoters60/1534151
tttattta

SEQ ID NO: 119014 - DNA, 8 bp, Unknown
  misc_feature (1)..( 8): Result.002 file - promoters60/1534151
tttatttt

SEQ ID NO: 119015 - DNA, 8 bp, Unknown
  misc_feature (1)..( 8): Result.002 file - promoters60/1534151
ttaacaaa

SEQ ID NO: 119016 - DNA, 8 bp, Unknown
  misc_feature (1)..( 8): Result.002 file - promoters60/1534151
gaaacaaa

SEQ ID NO: 119017 - DNA, 8 bp, Unknown
  misc_feature (1)..( 8): Result.002 file - promoters60/1534151
gaaagaaa

SEQ ID NO: 119018 - DNA, 6 bp, Unknown
  misc_feature (1)..( 6): Result.002 file - promoters60/1534228
attata

SEQ ID NO: 119019 - DNA, 6 bp, Unknown
  misc_feature (1)..( 6): Result.002 file - promoters60/1534228
attata

SEQ ID NO: 119020 - DNA, 10 bp, Unknown
  misc_feature (1)..( 10): Result.002 file - promoters60/1534228
aaaactattc

SEQ ID NO: 119021 - DNA, 10 bp, Unknown
  misc_feature (1)..( 10): Result.002 file - promoters60/1534228
taaactcttc

SEQ ID NO: 119022 - DNA, 10 bp, Unknown
  misc_feature (1)..( 10): Result.002 file - promoters60/1534228
aaaactgata

SEQ ID NO: 119023 - DNA, 11 bp, Unknown
  misc_feature (1)..( 11): Result.002 file - promoters60/1534228
aattaactttt

SEQ ID NO: 119024 - DNA, 11 bp, Unknown
  misc_feature (1)..( 11): Result.002 file - promoters60/1534228
aattaacattt

SEQ ID NO: 119025 - DNA, 7 bp, Unknown
  misc_feature (1)..( 7): Result.002 file - promoters60/1534228
aacaagg

SEQ ID NO: 119026 - DNA, 7 bp, Unknown
  misc_feature (1)..( 7): Result.002 file - promoters60/1534228
aacaagg

SEQ ID NO: 119027 - DNA, 7 bp, Unknown
  misc_feature (1)..( 7): Result.002 file - promoters60/1534228
tacaaaa

SEQ ID NO: 119028 - DNA, 7 bp, Unknown
  misc_feature (1)..( 7): Result.002 file - promoters60/1534228
tacgaaa

SEQ ID NO: 119029 - DNA, 7 bp, Unknown
  misc_feature (1)..( 7): Result.002 file - promoters60/1534228
taattta

SEQ ID NO: 119030 - DNA, 7 bp, Unknown
  misc_feature (1)..( 7): Result.002 file - promoters60/1534228
taatttc

SEQ ID NO: 119031 - DNA, 7 bp, Unknown
  misc_feature (1)..( 7): Result.002 file - promoters60/1534228
aaattta

SEQ ID NO: 119032 - DNA, 7 bp, Unknown
  misc_feature (1)..( 7): Result.002 file - promoters60/1534228
ataaatt

SEQ ID NO: 119033 - DNA, 7 bp, Unknown
  misc_feature (1)..( 7): Result.002 file - promoters60/1534228
ataaatt

SEQ ID NO: 119034 - DNA, 7 bp, Unknown
  misc_feature (1)..( 7): Result.002 file - promoters60/1534228
aaaccaa

SEQ ID NO: 119035 - DNA, 7 bp, Unknown
  misc_feature (1)..( 7): Result.002 file - promoters60/1534228
aaaccaa

SEQ ID NO: 119036 - DNA, 6 bp, Unknown
  misc_feature (1)..( 6): Result.002 file - promoters60/1534228
taattt

SEQ ID NO: 119037 - DNA, 6 bp, Unknown
  misc_feature (1)..( 6): Result.002 file - promoters60/1534228
taattt

SEQ ID NO: 119038 - DNA, 7 bp, Unknown
  misc_feature (1)..( 7): Result.002 file - promoters60/1534228
tattatt

SEQ ID NO: 119039 - DNA, 7 bp, Unknown
  misc_feature (1)..( 7): Result.002 file - promoters60/1534228
tatcatt

SEQ ID NO: 119040 - DNA, 7 bp, Unknown
  misc_feature (1)..( 7): Result.002 file - promoters60/1534228
aaaatgt

SEQ ID NO: 119041 - DNA, 7 bp, Unknown
  misc_feature (1)..( 7): Result.002 file - promoters60/1534228
aaaatgt

SEQ ID NO: 119042 - DNA, 8 bp, Unknown
  misc_feature (1)..( 8): Result.002 file - promoters60/1534228
ttctgatt

SEQ ID NO: 119043 - DNA, 8 bp, Unknown
  misc_feature (1)..( 8): Result.002 file - promoters60/1534228
ttctgatt

SEQ ID NO: 119044 - DNA, 8 bp, Unknown
  misc_feature (1)..( 8): Result.002 file - promoters60/1534228
atagattc

SEQ ID NO: 119045 - DNA, 8 bp, Unknown
  misc_feature (1)..( 8): Result.002 file - promoters60/1534228
ataggttc

SEQ ID NO: 119046 - DNA, 6 bp, Unknown
  misc_feature (1)..( 6): Result.002 file - promoters60/1534228
tttgta

SEQ ID NO: 119047 - DNA, 6 bp, Unknown
  misc_feature (1)..( 6): Result.002 file - promoters60/1534228
tttgta

SEQ ID NO: 119048 - DNA, 6 bp, Unknown
  misc_feature (1)..( 6): Result.002 file - promoters60/1534228
attatt

SEQ ID NO: 119049 - DNA, 6 bp, Unknown
  misc_feature (1)..( 6): Result.002 file - promoters60/1534228
attatt

SEQ ID NO: 119050 - DNA, 6 bp, Unknown
  misc_feature (1)..( 6): Result.002 file - promoters60/1534228
gtcaaa

SEQ ID NO: 119051 - DNA, 6 bp, Unknown
  misc_feature (1)..( 6): Result.002 file - promoters60/1534228
gtcaaa

SEQ ID NO: 119052 - DNA, 8 bp, Unknown
  misc_feature (1)..( 8): Result.002 file - promoters60/1534228
ttgaactt

SEQ ID NO: 119053 - DNA, 8 bp, Unknown
  misc_feature (1)..( 8): Result.002 file - promoters60/1534228
ttgaactt

SEQ ID NO: 119054 - DNA, 8 bp, Unknown
  misc_feature (1)..( 8): Result.002 file - promoters60/1534228
ttagtaat

SEQ ID NO: 119055 - DNA, 8 bp, Unknown
  misc_feature (1)..( 8): Result.002 file - promoters60/1534228
ttattaat

SEQ ID NO: 119056 - DNA, 7 bp, Unknown
  misc_feature (1)..( 7): Result.002 file - promoters60/1534228
tatataa

SEQ ID NO: 119057 - DNA, 7 bp, Unknown
  misc_feature (1)..( 7): Result.002 file - promoters60/1534228
tatttaa

SEQ ID NO: 119058 - DNA, 6 bp, Unknown
  misc_feature (1)..( 6): Result.002 file - promoters60/1534269
tcaaat

SEQ ID NO: 119059 - DNA, 6 bp, Unknown
  misc_feature (1)..( 6): Result.002 file - promoters60/1534269
tcaaat

SEQ ID NO: 119060 - DNA, 8 bp, Unknown
  misc_feature (1)..( 8): Result.002 file - promoters60/1534269
actagtta

SEQ ID NO: 119061 - DNA, 8 bp, Unknown
  misc_feature (1)..( 8): Result.002 file - promoters60/1534269
actaatta

SEQ ID NO: 119062 - DNA, 6 bp, Unknown
  misc_feature (1)..( 6): Result.002 file - promoters60/1534269
ttctct

SEQ ID NO: 119063 - DNA, 6 bp, Unknown
  misc_feature (1)..( 6): Result.002 file - promoters60/1534269
ttctct

SEQ ID NO: 119064 - DNA, 6 bp, Unknown
  misc_feature (1)..( 6): Result.002 file - promoters60/1534269
tttgtt

SEQ ID NO: 119065 - DNA, 6 bp, Unknown
  misc_feature (1)..( 6): Result.002 file - promoters60/1534269
tttgtt

SEQ ID NO: 119066 - DNA, 6 bp, Unknown
  misc_feature (1)..( 6): Result.002 file - promoters60/1534269
gttgat

SEQ ID NO: 119067 - DNA, 6 bp, Unknown
  misc_feature (1)..( 6): Result.002 file - promoters60/1534269
gttgat

SEQ ID NO: 119068 - DNA, 6 bp, Unknown
  misc_feature (1)..( 6): Result.002 file - promoters60/1534269
ggttgt

SEQ ID NO: 119069 - DNA, 6 bp, Unknown
  misc_feature (1)..( 6): Result.002 file - promoters60/1534269
ggttgt

SEQ ID NO: 119070 - DNA, 8 bp, Unknown
  misc_feature (1)..( 8): Result.002 file - promoters60/1534269
tatcttct

SEQ ID NO: 119071 - DNA, 8 bp, Unknown
  misc_feature (1)..( 8): Result.002 file - promoters60/1534269
tatcttct

SEQ ID NO: 119072 - DNA, 8 bp, Unknown
  misc_feature (1)..( 8): Result.002 file - promoters60/1534269
tattttcg

SEQ ID NO: 119073 - DNA, 6 bp, Unknown
  misc_feature (1)..( 6): Result.002 file - promoters60/1534269
atcttt

SEQ ID NO: 119074 - DNA, 6 bp, Unknown
  misc_feature (1)..( 6): Result.002 file - promoters60/1534269
atcttt

SEQ ID NO: 119075 - DNA, 6 bp, Unknown
  misc_feature (1)..( 6): Result.002 file - promoters60/1534269
aaagtt

SEQ ID NO: 119076 - DNA, 6 bp, Unknown
  misc_feature (1)..( 6): Result.002 file - promoters60/1534269
aaagtt

SEQ ID NO: 119077 - DNA, 7 bp, Unknown
  misc_feature (1)..( 7): Result.002 file - promoters60/1534269
ttagtaa

SEQ ID NO: 119078 - DNA, 7 bp, Unknown
  misc_feature (1)..( 7): Result.002 file - promoters60/1534269
ttattaa

SEQ ID NO: 119079 - DNA, 7 bp, Unknown
  misc_feature (1)..( 7): Result.002 file - promoters60/1534269
tttatcc

SEQ ID NO: 119080 - DNA, 7 bp, Unknown
  misc_feature (1)..( 7): Result.002 file - promoters60/1534269
tttttcc

SEQ ID NO: 119081 - DNA, 6 bp, Unknown
  misc_feature (1)..( 6): Result.002 file - promoters60/1534269
ctcatt

SEQ ID NO: 119082 - DNA, 6 bp, Unknown
  misc_feature (1)..( 6): Result.002 file - promoters60/1534269
ctcatt

SEQ ID NO: 119083 - DNA, 8 bp, Unknown
  misc_feature (1)..( 8): Result.002 file - promoters60/1534269
gattcttg

SEQ ID NO: 119084 - DNA, 8 bp, Unknown
  misc_feature (1)..( 8): Result.002 file - promoters60/1534269
gatttttg

SEQ ID NO: 119085 - DNA, 6 bp, Unknown
  misc_feature (1)..( 6): Result.002 file - promoters60/1534269
gtttac

SEQ ID NO: 119086 - DNA, 6 bp, Unknown
  misc_feature (1)..( 6): Result.002 file - promoters60/1534269
gtttac

SEQ ID NO: 119087 - DNA, 7 bp, Unknown
  misc_feature (1)..( 7): Result.002 file - promoters60/1534269
agacatt

SEQ ID NO: 119088 - DNA, 7 bp, Unknown
  misc_feature (1)..( 7): Result.002 file - promoters60/1534269
agacatt

SEQ ID NO: 119089 - DNA, 8 bp, Unknown
  misc_feature (1)..( 8): Result.002 file - promoters60/1534269
tttagctt

SEQ ID NO: 119090 - DNA, 8 bp, Unknown
  misc_feature (1)..( 8): Result.002 file - promoters60/1534269
tttatctt

SEQ ID NO: 119091 - DNA, 6 bp, Unknown
  misc_feature (1)..( 6): Result.002 file - promoters60/1534269
gaatta

SEQ ID NO: 119092 - DNA, 6 bp, Unknown
  misc_feature (1)..( 6): Result.002 file - promoters60/1534269
gaatta

SEQ ID NO: 119093 - DNA, 6 bp, Unknown
  misc_feature (1)..( 6): Result.002 file - promoters60/1534269
gcggaa

SEQ ID NO: 119094 - DNA, 6 bp, Unknown
  misc_feature (1)..( 6): Result.002 file - promoters60/1534269
gcggaa

SEQ ID NO: 119095 - DNA, 6 bp, Unknown
  misc_feature (1)..( 6): Result.002 file - promoters60/1534269
aaagaa

SEQ ID NO: 119096 - DNA, 6 bp, Unknown
  misc_feature (1)..( 6): Result.002 file - promoters60/1534269
aaagaa

SEQ ID NO: 119097 - DNA, 6 bp, Unknown
  misc_feature (1)..( 6): Result.002 file - promoters60/1534269
tccttg

SEQ ID NO: 119098 - DNA, 6 bp, Unknown
  misc_feature (1)..( 6): Result.002 file - promoters60/1534269
tccttg

SEQ ID NO: 119099 - DNA, 7 bp, Unknown
  misc_feature (1)..( 7): Result.002 file - promoters60/1534269
gatatat

SEQ ID NO: 119100 - DNA, 7 bp, Unknown
  misc_feature (1)..( 7): Result.002 file - promoters60/1534269
gatgtat

SEQ ID NO: 119101 - DNA, 8 bp, Unknown
  misc_feature (1)..( 8): Result.002 file - promoters60/1534338
aatcttat

SEQ ID NO: 119102 - DNA, 8 bp, Unknown
  misc_feature (1)..( 8): Result.002 file - promoters60/1534338
catcatat

SEQ ID NO: 119103 - DNA, 8 bp, Unknown
  misc_feature (1)..( 8): Result.002 file - promoters60/1534338
cattatag

SEQ ID NO: 119104 - DNA, 10 bp, Unknown
  misc_feature (1)..( 10): Result.002 file - promoters60/1534338
attttactcc

SEQ ID NO: 119105 - DNA, 10 bp, Unknown
  misc_feature (1)..( 10): Result.002 file - promoters60/1534338
agttttctcc

SEQ ID NO: 119106 - DNA, 10 bp, Unknown
  misc_feature (1)..( 10): Result.002 file - promoters60/1534338
agtattcgag

SEQ ID NO: 119107 - DNA, 8 bp, Unknown
  misc_feature (1)..( 8): Result.002 file - promoters60/1534338
taacaaca

SEQ ID NO: 119108 - DNA, 8 bp, Unknown
  misc_feature (1)..( 8): Result.002 file - promoters60/1534338
taataaca

SEQ ID NO: 119109 - DNA, 8 bp, Unknown
  misc_feature (1)..( 8): Result.002 file - promoters60/1534338
taacacgt

SEQ ID NO: 119110 - DNA, 9 bp, Unknown
  misc_feature (1)..( 9): Result.002 file - promoters60/1534378
aatggattt

SEQ ID NO: 119111 - DNA, 9 bp, Unknown
  misc_feature (1)..( 9): Result.002 file - promoters60/1534378
aattgatga

SEQ ID NO: 119112 - DNA, 9 bp, Unknown
  misc_feature (1)..( 9): Result.002 file - promoters60/1534378
aatggacag

SEQ ID NO: 119113 - DNA, 9 bp, Unknown
  misc_feature (1)..( 9): Result.002 file - promoters60/1534378
actggattt

SEQ ID NO: 119114 - DNA, 8 bp, Unknown
  misc_feature (1)..( 8): Result.002 file - promoters60/1534435
tttattat

SEQ ID NO: 119115 - DNA, 8 bp, Unknown
  misc_feature (1)..( 8): Result.002 file - promoters60/1534435
ttttttaa

SEQ ID NO: 119116 - DNA, 8 bp, Unknown
  misc_feature (1)..( 8): Result.002 file - promoters60/1534435
tattttaa

SEQ ID NO: 119117 - DNA, 14 bp, Unknown
  misc_feature (1)..( 14): Result.002 file - promoters60/1534435
ttatttcatggcgt

SEQ ID NO: 119118 - DNA, 14 bp, Unknown
  misc_feature (1)..( 14): Result.002 file - promoters60/1534435
ttgtttaatgtttt

SEQ ID NO: 119119 - DNA, 14 bp, Unknown
  misc_feature (1)..( 14): Result.002 file - promoters60/1534435
ttgttcaatatttt

SEQ ID NO: 119120 - DNA, 9 bp, Unknown
  misc_feature (1)..( 9): Result.002 file - promoters60/1534435
atagagttt

SEQ ID NO: 119121 - DNA, 9 bp, Unknown
  misc_feature (1)..( 9): Result.002 file - promoters60/1534435
atatagttt

SEQ ID NO: 119122 - DNA, 8 bp, Unknown
  misc_feature (1)..( 8): Result.002 file - promoters60/1534435
tttggtct

SEQ ID NO: 119123 - DNA, 8 bp, Unknown
  misc_feature (1)..( 8): Result.002 file - promoters60/1534435
tttgttct

SEQ ID NO: 119124 - DNA, 6 bp, Unknown
  misc_feature (1)..( 6): Result.002 file - promoters60/1534435
agaaaa

SEQ ID NO: 119125 - DNA, 6 bp, Unknown
  misc_feature (1)..( 6): Result.002 file - promoters60/1534435
agaaaa

SEQ ID NO: 119126 - DNA, 10 bp, Unknown
  misc_feature (1)..( 10): Result.002 file - promoters60/1534435
tattaaaata

SEQ ID NO: 119127 - DNA, 10 bp, Unknown
  misc_feature (1)..( 10): Result.002 file - promoters60/1534435
tattgaaatt

SEQ ID NO: 119128 - DNA, 10 bp, Unknown
  misc_feature (1)..( 10): Result.002 file - promoters60/1534435
tgttaatata

SEQ ID NO: 119129 - DNA, 7 bp, Unknown
  misc_feature (1)..( 7): Result.002 file - promoters60/1534435
gttgaat

SEQ ID NO: 119130 - DNA, 7 bp, Unknown
  misc_feature (1)..( 7): Result.002 file - promoters60/1534435
gttcaat

SEQ ID NO: 119131 - DNA, 9 bp, Unknown
  misc_feature (1)..( 9): Result.002 file - promoters60/1534435
cttaattac

SEQ ID NO: 119132 - DNA, 9 bp, Unknown
  misc_feature (1)..( 9): Result.002 file - promoters60/1534435
cttaattac

SEQ ID NO: 119133 - DNA, 17 bp, Unknown
  misc_feature (1)..( 17): Result.002 file - promoters60/1534435
tagtagttccaaacgca

SEQ ID NO: 119134 - DNA, 17 bp, Unknown
  misc_feature (1)..( 17): Result.002 file - promoters60/1534435
tagttgttcaatatttt

SEQ ID NO: 119135 - DNA, 17 bp, Unknown
  misc_feature (1)..( 17): Result.002 file - promoters60/1534435
cttttgtttaatgtttt

SEQ ID NO: 119136 - DNA, 7 bp, Unknown
  misc_feature (1)..( 7): Result.002 file - promoters60/1534435
tttggtg

SEQ ID NO: 119137 - DNA, 7 bp, Unknown
  misc_feature (1)..( 7): Result.002 file - promoters60/1534435
ttttgtg

SEQ ID NO: 119138 - DNA, 6 bp, Unknown
  misc_feature (1)..( 6): Result.002 file - promoters60/1534435
tcttta

SEQ ID NO: 119139 - DNA, 6 bp, Unknown
  misc_feature (1)..( 6): Result.002 file - promoters60/1534435
tcttta

SEQ ID NO: 119140 - DNA, 6 bp, Unknown
  misc_feature (1)..( 6): Result.002 file - promoters60/1534435
atcaag

SEQ ID NO: 119141 - DNA, 6 bp, Unknown
  misc_feature (1)..( 6): Result.002 file - promoters60/1534435
atcaag

SEQ ID NO: 119142 - DNA, 6 bp, Unknown
  misc_feature (1)..( 6): Result.002 file - promoters60/1534435
atattt

SEQ ID NO: 119143 - DNA, 6 bp, Unknown
  misc_feature (1)..( 6): Result.002 file - promoters60/1534435
atattt

SEQ ID NO: 119144 - DNA, 6 bp, Unknown
  misc_feature (1)..( 6): Result.002 file - promoters60/1534435
ttctaa

SEQ ID NO: 119145 - DNA, 6 bp, Unknown
  misc_feature (1)..( 6): Result.002 file - promoters60/1534435
ttctaa

SEQ ID NO: 119146 - DNA, 7 bp, Unknown
  misc_feature (1)..( 7): Result.002 file - promoters60/1534435
cagtaag

SEQ ID NO: 119147 - DNA, 7 bp, Unknown
  misc_feature (1)..( 7): Result.002 file - promoters60/1534435
cagcaag

SEQ ID NO: 119148 - DNA, 12 bp, Unknown
  misc_feature (1)..( 12): Result.002 file - promoters60/1534455
tcttattatgat

SEQ ID NO: 119149 - DNA, 12 bp, Unknown
  misc_feature (1)..( 12): Result.002 file - promoters60/1534455
tctttttaggat

SEQ ID NO: 119150 - DNA, 6 bp, Unknown
  misc_feature (1)..( 6): Result.002 file - promoters60/1534455
atttgt

SEQ ID NO: 119151 - DNA, 6 bp, Unknown
  misc_feature (1)..( 6): Result.002 file - promoters60/1534455
atttgt

SEQ ID NO: 119152 - DNA, 8 bp, Unknown
  misc_feature (1)..( 8): Result.002 file - promoters60/1534455
ttagtcat

SEQ ID NO: 119153 - DNA, 8 bp, Unknown
  misc_feature (1)..( 8): Result.002 file - promoters60/1534455
ttagccat

SEQ ID NO: 119154 - DNA, 8 bp, Unknown
  misc_feature (1)..( 8): Result.002 file - promoters60/1534455
aacattag

SEQ ID NO: 119155 - DNA, 8 bp, Unknown
  misc_feature (1)..( 8): Result.002 file - promoters60/1534455
aacattag

SEQ ID NO: 119156 - DNA, 7 bp, Unknown
  misc_feature (1)..( 7): Result.002 file - promoters60/1534455
ttatata

SEQ ID NO: 119157 - DNA, 7 bp, Unknown
  misc_feature (1)..( 7): Result.002 file - promoters60/1534455
ctatata

SEQ ID NO: 119158 - DNA, 8 bp, Unknown
  misc_feature (1)..( 8): Result.002 file - promoters60/1534455
atattata

SEQ ID NO: 119159 - DNA, 7 bp, Unknown
  misc_feature (1)..( 7): Result.002 file - promoters60/1534455
acgattt

SEQ ID NO: 119160 - DNA, 7 bp, Unknown
  misc_feature (1)..( 7): Result.002 file - promoters60/1534455
acgcttt

SEQ ID NO: 119161 - DNA, 9 bp, Unknown
  misc_feature (1)..( 9): Result.002 file - promoters60/1534455
tttttagtg

SEQ ID NO: 119162 - DNA, 9 bp, Unknown
  misc_feature (1)..( 9): Result.002 file - promoters60/1534455
gattttgtg

SEQ ID NO: 119163 - DNA, 9 bp, Unknown
  misc_feature (1)..( 9): Result.002 file - promoters60/1534455
gatgttgat

SEQ ID NO: 119164 - DNA, 7 bp, Unknown
  misc_feature (1)..( 7): Result.002 file - promoters60/1534455
ttagttt

SEQ ID NO: 119165 - DNA, 7 bp, Unknown
  misc_feature (1)..( 7): Result.002 file - promoters60/1534455
ttagttt

SEQ ID NO: 119166 - DNA, 9 bp, Unknown
  misc_feature (1)..( 9): Result.002 file - promoters60/1534455
aatattaaa

SEQ ID NO: 119167 - DNA, 9 bp, Unknown
  misc_feature (1)..( 9): Result.002 file - promoters60/1534455
aatatcaaa

SEQ ID NO: 119168 - DNA, 6 bp, Unknown
  misc_feature (1)..( 6): Result.002 file - promoters60/1534455
atcaaa

SEQ ID NO: 119169 - DNA, 6 bp, Unknown
  misc_feature (1)..( 6): Result.002 file - promoters60/1534455
atcaaa

SEQ ID NO: 119170 - DNA, 9 bp, Unknown
  misc_feature (1)..( 9): Result.002 file - promoters60/1534455
atttttata

SEQ ID NO: 119171 - DNA, 9 bp, Unknown
  misc_feature (1)..( 9): Result.002 file - promoters60/1534455
ttttttata

SEQ ID NO: 119172 - DNA, 10 bp, Unknown
  misc_feature (1)..( 10): Result.002 file - promoters60/1534455
tttatttata

SEQ ID NO: 119173 - DNA, 8 bp, Unknown
  misc_feature (1)..( 8): Result.002 file - promoters60/1534455
aaataata

SEQ ID NO: 119174 - DNA, 8 bp, Unknown
  misc_feature (1)..( 8): Result.002 file - promoters60/1534455
aaataata

SEQ ID NO: 119175 - DNA, 7 bp, Unknown
  misc_feature (1)..( 7): Result.002 file - promoters60/1534455
taacaaa

SEQ ID NO: 119176 - DNA, 7 bp, Unknown
  misc_feature (1)..( 7): Result.002 file - promoters60/1534455
taataaa

SEQ ID NO: 119177 - DNA, 7 bp, Unknown
  misc_feature (1)..( 7): Result.002 file - promoters60/1534455
agaatct

SEQ ID NO: 119178 - DNA, 7 bp, Unknown
  misc_feature (1)..( 7): Result.002 file - promoters60/1534455
agagtct

SEQ ID NO: 119179 - DNA, 6 bp, Unknown
  misc_feature (1)..( 6): Result.002 file - promoters60/1534455
aaacga

SEQ ID NO: 119180 - DNA, 6 bp, Unknown
  misc_feature (1)..( 6): Result.002 file - promoters60/1534455
aaacga

SEQ ID NO: 119181 - DNA, 8 bp, Unknown
  misc_feature (1)..( 8): Result.002 file - promoters60/1534455
ttataaat

SEQ ID NO: 119182 - DNA, 8 bp, Unknown
  misc_feature (1)..( 8): Result.002 file - promoters60/1534455
ttaaaaat

SEQ ID NO: 119183 - DNA, 7 bp, Unknown
  misc_feature (1)..( 7): Result.002 file - promoters60/1534455
atgttga

SEQ ID NO: 119184 - DNA, 7 bp, Unknown
  misc_feature (1)..( 7): Result.002 file - promoters60/1534455
atgatga

SEQ ID NO: 119185 - DNA, 8 bp, Unknown
  misc_feature (1)..( 8): Result.002 file - promoters60/1534455
attgtttt

SEQ ID NO: 119186 - DNA, 8 bp, Unknown
  misc_feature (1)..( 8): Result.002 file - promoters60/1534455
attttttt

SEQ ID NO: 119187 - DNA, 8 bp, Unknown
  misc_feature (1)..( 8): Result.002 file - promoters60/1534455
tgattatt

SEQ ID NO: 119188 - DNA, 8 bp, Unknown
  misc_feature (1)..( 8): Result.002 file - promoters60/1534455
tgagtatt

SEQ ID NO: 119189 - DNA, 8 bp, Unknown
  misc_feature (1)..( 8): Result.002 file - promoters60/1534455
aagatgat

SEQ ID NO: 119190 - DNA, 8 bp, Unknown
  misc_feature (1)..( 8): Result.002 file - promoters60/1534455
aagaggat

SEQ ID NO: 119191 - DNA, 7 bp, Unknown
  misc_feature (1)..( 7): Result.002 file - promoters60/1534455
tcttaaa

SEQ ID NO: 119192 - DNA, 7 bp, Unknown
  misc_feature (1)..( 7): Result.002 file - promoters60/1534455
tctaaaa

SEQ ID NO: 119193 - DNA, 7 bp, Unknown
  misc_feature (1)..( 7): Result.002 file - promoters60/1534501
aaaaaaa

SEQ ID NO: 119194 - DNA, 7 bp, Unknown
  misc_feature (1)..( 7): Result.002 file - promoters60/1534501
aaagaaa

SEQ ID NO: 119195 - DNA, 7 bp, Unknown
  misc_feature (1)..( 7): Result.002 file - promoters60/1534501
aaaaaat

SEQ ID NO: 119196 - DNA, 11 bp, Unknown
  misc_feature (1)..( 11): Result.002 file - promoters60/1534501
cacgttagttg

SEQ ID NO: 119197 - DNA, 11 bp, Unknown
  misc_feature (1)..( 11): Result.002 file - promoters60/1534501
aaaattaattg

SEQ ID NO: 119198 - DNA, 11 bp, Unknown
  misc_feature (1)..( 11): Result.002 file - promoters60/1534501
aaatttaatca

SEQ ID NO: 119199 - DNA, 9 bp, Unknown
  misc_feature (1)..( 9): Result.002 file - promoters60/1534501
tttttttta

SEQ ID NO: 119200 - DNA, 9 bp, Unknown
  misc_feature (1)..( 9): Result.002 file - promoters60/1534501
aatttatta

SEQ ID NO: 119201 - DNA, 9 bp, Unknown
  misc_feature (1)..( 9): Result.002 file - promoters60/1534501
aatttatat

SEQ ID NO: 119202 - DNA, 7 bp, Unknown
  misc_feature (1)..( 7): Result.002 file - promoters60/1534501
agaccaa

SEQ ID NO: 119203 - DNA, 7 bp, Unknown
  misc_feature (1)..( 7): Result.002 file - promoters60/1534501
agatcaa

SEQ ID NO: 119204 - DNA, 7 bp, Unknown
  misc_feature (1)..( 7): Result.002 file - promoters60/1534501
ggatcaa

SEQ ID NO: 119205 - DNA, 7 bp, Unknown
  misc_feature (1)..( 7): Result.002 file - promoters60/1534524
ttttcta

SEQ ID NO: 119206 - DNA, 7 bp, Unknown
  misc_feature (1)..( 7): Result.002 file - promoters60/1534524
tttacta

SEQ ID NO: 119207 - DNA, 8 bp, Unknown
  misc_feature (1)..( 8): Result.002 file - promoters60/1534524
taaactct

SEQ ID NO: 119208 - DNA, 8 bp, Unknown
  misc_feature (1)..( 8): Result.002 file - promoters60/1534524
taatctct

SEQ ID NO: 119209 - DNA, 9 bp, Unknown
  misc_feature (1)..( 9): Result.002 file - promoters60/1534524
attgaacaa

SEQ ID NO: 119210 - DNA, 9 bp, Unknown
  misc_feature (1)..( 9): Result.002 file - promoters60/1534524
attgaccaa

SEQ ID NO: 119211 - DNA, 6 bp, Unknown
  misc_feature (1)..( 6): Result.002 file - promoters60/1534524
ataaga

SEQ ID NO: 119212 - DNA, 6 bp, Unknown
  misc_feature (1)..( 6): Result.002 file - promoters60/1534524
ataaga

SEQ ID NO: 119213 - DNA, 8 bp, Unknown
  misc_feature (1)..( 8): Result.002 file - promoters60/1534524
taataata

SEQ ID NO: 119214 - DNA, 8 bp, Unknown
  misc_feature (1)..( 8): Result.002 file - promoters60/1534524
aaataatt

SEQ ID NO: 119215 - DNA, 8 bp, Unknown
  misc_feature (1)..( 8): Result.002 file - promoters60/1534524
aaattatt

SEQ ID NO: 119216 - DNA, 7 bp, Unknown
  misc_feature (1)..( 7): Result.002 file - promoters60/1534524
tttactt

SEQ ID NO: 119217 - DNA, 7 bp, Unknown
  misc_feature (1)..( 7): Result.002 file - promoters60/1534524
tttactt

SEQ ID NO: 119218 - DNA, 8 bp, Unknown
  misc_feature (1)..( 8): Result.002 file - promoters60/1534524
gaaacttt

SEQ ID NO: 119219 - DNA, 8 bp, Unknown
  misc_feature (1)..( 8): Result.002 file - promoters60/1534524
gaaaattt

SEQ ID NO: 119220 - DNA, 7 bp, Unknown
  misc_feature (1)..( 7): Result.002 file - promoters60/1534524
accgaga

SEQ ID NO: 119221 - DNA, 7 bp, Unknown
  misc_feature (1)..( 7): Result.002 file - promoters60/1534524
acctaga

SEQ ID NO: 119222 - DNA, 18 bp, Unknown
  misc_feature (1)..( 18): Result.002 file - promoters60/1534524
ctcgtgtatataaattca

SEQ ID NO: 119223 - DNA, 18 bp, Unknown
  misc_feature (1)..( 18): Result.002 file - promoters60/1534524
ctcctgtctatatattca

SEQ ID NO: 119224 - DNA, 18 bp, Unknown
  misc_feature (1)..( 18): Result.002 file - promoters60/1534524
aagtttgggatatatcat

SEQ ID NO: 119225 - DNA, 6 bp, Unknown
  misc_feature (1)..( 6): Result.002 file - promoters60/1534524
taaatt

SEQ ID NO: 119226 - DNA, 6 bp, Unknown
  misc_feature (1)..( 6): Result.002 file - promoters60/1534524
taaatt

SEQ ID NO: 119227 - DNA, 6 bp, Unknown
  misc_feature (1)..( 6): Result.002 file - promoters60/1534524
aaatat

SEQ ID NO: 119228 - DNA, 6 bp, Unknown
  misc_feature (1)..( 6): Result.002 file - promoters60/1534524
aaatat

SEQ ID NO: 119229 - DNA, 8 bp, Unknown
  misc_feature (1)..( 8): Result.002 file - promoters60/1534524
tataacaa

SEQ ID NO: 119230 - DNA, 8 bp, Unknown
  misc_feature (1)..( 8): Result.002 file - promoters60/1534524
tatcacaa

SEQ ID NO: 119231 - DNA, 7 bp, Unknown
  misc_feature (1)..( 7): Result.002 file - promoters60/1534524
aagtaat

SEQ ID NO: 119232 - DNA, 7 bp, Unknown
  misc_feature (1)..( 7): Result.002 file - promoters60/1534524
aagaaat

SEQ ID NO: 119233 - DNA, 9 bp, Unknown
  misc_feature (1)..( 9): Result.002 file - promoters60/1534524
ttgtggaaa

SEQ ID NO: 119234 - DNA, 9 bp, Unknown
  misc_feature (1)..( 9): Result.002 file - promoters60/1534524
ttgtagaaa

SEQ ID NO: 119235 - DNA, 7 bp, Unknown
  misc_feature (1)..( 7): Result.002 file - promoters60/1534524
gtctatt

SEQ ID NO: 119236 - DNA, 7 bp, Unknown
  misc_feature (1)..( 7): Result.002 file - promoters60/1534524
gtcaatt

SEQ ID NO: 119237 - DNA, 6 bp, Unknown
  misc_feature (1)..( 6): Result.002 file - promoters60/1534524
aaccaa

SEQ ID NO: 119238 - DNA, 6 bp, Unknown
  misc_feature (1)..( 6): Result.002 file - promoters60/1534524
aaccaa

SEQ ID NO: 119239 - DNA, 8 bp, Unknown
  misc_feature (1)..( 8): Result.002 file - promoters60/1534524
aaattcat

SEQ ID NO: 119240 - DNA, 8 bp, Unknown
  misc_feature (1)..( 8): Result.002 file - promoters60/1534524
aaaatcat

SEQ ID NO: 119241 - DNA, 7 bp, Unknown
  misc_feature (1)..( 7): Result.002 file - promoters60/1534524
ggttatt

SEQ ID NO: 119242 - DNA, 7 bp, Unknown
  misc_feature (1)..( 7): Result.002 file - promoters60/1534524
ggttatt

SEQ ID NO: 119243 - DNA, 9 bp, Unknown
  misc_feature (1)..( 9): Result.002 file - promoters60/1534528
aatgacaac

SEQ ID NO: 119244 - DNA, 9 bp, Unknown
  misc_feature (1)..( 9): Result.002 file - promoters60/1534528
tatgacaac

SEQ ID NO: 119245 - DNA, 9 bp, Unknown
  misc_feature (1)..( 9): Result.002 file - promoters60/1534528
aattacatg

SEQ ID NO: 119246 - DNA, 9 bp, Unknown
  misc_feature (1)..( 9): Result.002 file - promoters60/1534528
tatgtgtgc

SEQ ID NO: 119247 - DNA, 9 bp, Unknown
  misc_feature (1)..( 9): Result.002 file - promoters60/1534528
tatttgtaa

SEQ ID NO: 119248 - DNA, 9 bp, Unknown
  misc_feature (1)..( 9): Result.002 file - promoters60/1534528
gctttgtaa

SEQ ID NO: 119249 - DNA, 8 bp, Unknown
  misc_feature (1)..( 8): Result.002 file - promoters60/1534528
taataagt

SEQ ID NO: 119250 - DNA, 8 bp, Unknown
  misc_feature (1)..( 8): Result.002 file - promoters60/1534528
taataagc

SEQ ID NO: 119251 - DNA, 8 bp, Unknown
  misc_feature (1)..( 8): Result.002 file - promoters60/1534528
caatgagc

SEQ ID NO: 119252 - DNA, 10 bp, Unknown
  misc_feature (1)..( 10): Result.002 file - promoters60/1534528
atatatacga

SEQ ID NO: 119253 - DNA, 10 bp, Unknown
  misc_feature (1)..( 10): Result.002 file - promoters60/1534528
taatatacga

SEQ ID NO: 119254 - DNA, 10 bp, Unknown
  misc_feature (1)..( 10): Result.002 file - promoters60/1534528
gtatataaac

SEQ ID NO: 119255 - DNA, 10 bp, Unknown
  misc_feature (1)..( 10): Result.002 file - promoters60/1534528
gtatatattt

SEQ ID NO: 119256 - DNA, 9 bp, Unknown
  misc_feature (1)..( 9): Result.002 file - promoters60/1534528
tgcaagaaa

SEQ ID NO: 119257 - DNA, 9 bp, Unknown
  misc_feature (1)..( 9): Result.002 file - promoters60/1534528
gaaaagaaa

SEQ ID NO: 119258 - DNA, 10 bp, Unknown
  misc_feature (1)..( 10): Result.002 file - promoters60/1534528
ggaaatgaaa

SEQ ID NO: 119259 - DNA, 11 bp, Unknown
  misc_feature (1)..( 11): Result.002 file - promoters60/1534528
gtttggatttt

SEQ ID NO: 119260 - DNA, 11 bp, Unknown
  misc_feature (1)..( 11): Result.002 file - promoters60/1534528
aattgggtttt

SEQ ID NO: 119261 - DNA, 11 bp, Unknown
  misc_feature (1)..( 11): Result.002 file - promoters60/1534528
aatcgggaaaa

SEQ ID NO: 119262 - DNA, 8 bp, Unknown
  misc_feature (1)..( 8): Result.002 file - promoters60/1534528
acatatat

SEQ ID NO: 119263 - DNA, 8 bp, Unknown
  misc_feature (1)..( 8): Result.002 file - promoters60/1534528
gtatatat

SEQ ID NO: 119264 - DNA, 8 bp, Unknown
  misc_feature (1)..( 8): Result.002 file - promoters60/1534528
ctatataa

SEQ ID NO: 119265 - DNA, 8 bp, Unknown
  misc_feature (1)..( 8): Result.002 file - promoters60/1534528
gtatataa

SEQ ID NO: 119266 - DNA, 7 bp, Unknown
  misc_feature (1)..( 7): Result.002 file - promoters60/1534591
ttcttat

SEQ ID NO: 119267 - DNA, 7 bp, Unknown
  misc_feature (1)..( 7): Result.002 file - promoters60/1534591
ttcttat

SEQ ID NO: 119268 - DNA, 8 bp, Unknown
  misc_feature (1)..( 8): Result.002 file - promoters60/1534591
tatataag

SEQ ID NO: 119269 - DNA, 8 bp, Unknown
  misc_feature (1)..( 8): Result.002 file - promoters60/1534591
tatataat

SEQ ID NO: 119270 - DNA, 8 bp, Unknown
  misc_feature (1)..( 8): Result.002 file - promoters60/1534591
aatacaat

SEQ ID NO: 119271 - DNA, 11 bp, Unknown
  misc_feature (1)..( 11): Result.002 file - promoters60/1534591
attattagaca

SEQ ID NO: 119272 - DNA, 11 bp, Unknown
  misc_feature (1)..( 11): Result.002 file - promoters60/1534591
attcttacaca

SEQ ID NO: 119273 - DNA, 11 bp, Unknown
  misc_feature (1)..( 11): Result.002 file - promoters60/1534591
gttattaatca

SEQ ID NO: 119274 - DNA, 6 bp, Unknown
  misc_feature (1)..( 6): Result.002 file - promoters60/1534591
tatagt

SEQ ID NO: 119275 - DNA, 6 bp, Unknown
  misc_feature (1)..( 6): Result.002 file - promoters60/1534591
tatagt

SEQ ID NO: 119276 - DNA, 7 bp, Unknown
  misc_feature (1)..( 7): Result.002 file - promoters60/1534591
ttaaata

SEQ ID NO: 119277 - DNA, 7 bp, Unknown
  misc_feature (1)..( 7): Result.002 file - promoters60/1534591
ttatata

SEQ ID NO: 119278 - DNA, 6 bp, Unknown
  misc_feature (1)..( 6): Result.002 file - promoters60/1534591
atgaaa

SEQ ID NO: 119279 - DNA, 6 bp, Unknown
  misc_feature (1)..( 6): Result.002 file - promoters60/1534591
atgaaa

SEQ ID NO: 119280 - DNA, 6 bp, Unknown
  misc_feature (1)..( 6): Result.002 file - promoters60/1534591
ttaata

SEQ ID NO: 119281 - DNA, 6 bp, Unknown
  misc_feature (1)..( 6): Result.002 file - promoters60/1534591
ttaata

SEQ ID NO: 119282 - DNA, 7 bp, Unknown
  misc_feature (1)..( 7): Result.002 file - promoters60/1534591
ttaatta

SEQ ID NO: 119283 - DNA, 7 bp, Unknown
  misc_feature (1)..( 7): Result.002 file - promoters60/1534591
ttattta

SEQ ID NO: 119284 - DNA, 8 bp, Unknown
  misc_feature (1)..( 8): Result.002 file - promoters60/1534591
ctctcgta

SEQ ID NO: 119285 - DNA, 8 bp, Unknown
  misc_feature (1)..( 8): Result.002 file - promoters60/1534591
ctctagta

SEQ ID NO: 119286 - DNA, 9 bp, Unknown
  misc_feature (1)..( 9): Result.002 file - promoters60/1534591
aagaaataa

SEQ ID NO: 119287 - DNA, 9 bp, Unknown
  misc_feature (1)..( 9): Result.002 file - promoters60/1534591
aagcaataa

SEQ ID NO: 119288 - DNA, 8 bp, Unknown
  misc_feature (1)..( 8): Result.002 file - promoters60/1534591
atacatta

SEQ ID NO: 119289 - DNA, 8 bp, Unknown
  misc_feature (1)..( 8): Result.002 file - promoters60/1534591
ataaatta

SEQ ID NO: 119290 - DNA, 8 bp, Unknown
  misc_feature (1)..( 8): Result.002 file - promoters60/1534591
aatcgaat

SEQ ID NO: 119291 - DNA, 8 bp, Unknown
  misc_feature (1)..( 8): Result.002 file - promoters60/1534591
aatagaaa

SEQ ID NO: 119292 - DNA, 8 bp, Unknown
  misc_feature (1)..( 8): Result.002 file - promoters60/1534591
gataaaaa

SEQ ID NO: 119293 - DNA, 6 bp, Unknown
  misc_feature (1)..( 6): Result.002 file - promoters60/1534591
agtttt

SEQ ID NO: 119294 - DNA, 6 bp, Unknown
  misc_feature (1)..( 6): Result.002 file - promoters60/1534591
agtttt

SEQ ID NO: 119295 - DNA, 6 bp, Unknown
  misc_feature (1)..( 6): Result.002 file - promoters60/1534591
tttctt

SEQ ID NO: 119296 - DNA, 6 bp, Unknown
  misc_feature (1)..( 6): Result.002 file - promoters60/1534591
tttctt

SEQ ID NO: 119297 - DNA, 6 bp, Unknown
  misc_feature (1)..( 6): Result.002 file - promoters60/1534591
aataaa

SEQ ID NO: 119298 - DNA, 6 bp, Unknown
  misc_feature (1)..( 6): Result.002 file - promoters60/1534591
aataaa

SEQ ID NO: 119299 - DNA, 6 bp, Unknown
  misc_feature (1)..( 6): Result.002 file - promoters60/1534591
attcga

SEQ ID NO: 119300 - DNA, 6 bp, Unknown
  misc_feature (1)..( 6): Result.002 file - promoters60/1534591
attcga

SEQ ID NO: 119301 - DNA, 6 bp, Unknown
  misc_feature (1)..( 6): Result.002 file - promoters60/1534591
cacaaa

SEQ ID NO: 119302 - DNA, 6 bp, Unknown
  misc_feature (1)..( 6): Result.002 file - promoters60/1534591
cacaaa

SEQ ID NO: 119303 - DNA, 7 bp, Unknown
  misc_feature (1)..( 7): Result.002 file - promoters60/1534591
acacttt

SEQ ID NO: 119304 - DNA, 7 bp, Unknown
  misc_feature (1)..( 7): Result.002 file - promoters60/1534591
acaattt

SEQ ID NO: 119305 - DNA, 12 bp, Unknown
  misc_feature (1)..( 12): Result.002 file - promoters60/1534615
tagttataaatc

SEQ ID NO: 119306 - DNA, 12 bp, Unknown
  misc_feature (1)..( 12): Result.002 file - promoters60/1534615
aagttatgaatc

SEQ ID NO: 119307 - DNA, 12 bp, Unknown
  misc_feature (1)..( 12): Result.002 file - promoters60/1534615
cccttataattt

SEQ ID NO: 119308 - DNA, 12 bp, Unknown
  misc_feature (1)..( 12): Result.002 file - promoters60/1534615
aatttatttaat

SEQ ID NO: 119309 - DNA, 12 bp, Unknown
  misc_feature (1)..( 12): Result.002 file - promoters60/1534615
aagttagttctc

SEQ ID NO: 119310 - DNA, 11 bp, Unknown
  misc_feature (1)..( 11): Result.002 file - promoters60/1534615
cttagttataa

SEQ ID NO: 119311 - DNA, 11 bp, Unknown
  misc_feature (1)..( 11): Result.002 file - promoters60/1534615
gttagttctct

SEQ ID NO: 119312 - DNA, 11 bp, Unknown
  misc_feature (1)..( 11): Result.002 file - promoters60/1534615
tttatttaata

SEQ ID NO: 119313 - DNA, 11 bp, Unknown
  misc_feature (1)..( 11): Result.002 file - promoters60/1534615
tttaggtctct

SEQ ID NO: 119314 - DNA, 11 bp, Unknown
  misc_feature (1)..( 11): Result.002 file - promoters60/1534615
ttttggttgaa

SEQ ID NO: 119315 - DNA, 11 bp, Unknown
  misc_feature (1)..( 11): Result.002 file - promoters60/1534615
tttcttttacc

SEQ ID NO: 119316 - DNA, 11 bp, Unknown
  misc_feature (1)..( 11): Result.002 file - promoters60/1534615
aaaagtaagac

SEQ ID NO: 119317 - DNA, 11 bp, Unknown
  misc_feature (1)..( 11): Result.002 file - promoters60/1534615
aaaaataagta

SEQ ID NO: 119318 - DNA, 12 bp, Unknown
  misc_feature (1)..( 12): Result.002 file - promoters60/1534615
aaaattcaaaaa

SEQ ID NO: 119319 - DNA, 12 bp, Unknown
  misc_feature (1)..( 12): Result.002 file - promoters60/1534615
gtaattcattgt

SEQ ID NO: 119320 - DNA, 12 bp, Unknown
  misc_feature (1)..( 12): Result.002 file - promoters60/1534615
aaaatacaactt

SEQ ID NO: 119321 - DNA, 12 bp, Unknown
  misc_feature (1)..( 12): Result.002 file - promoters60/1534615
cgcatttatttg

SEQ ID NO: 119322 - DNA, 12 bp, Unknown
  misc_feature (1)..( 12): Result.002 file - promoters60/1534615
aaaattcaaaaa

SEQ ID NO: 119323 - DNA, 12 bp, Unknown
  misc_feature (1)..( 12): Result.002 file - promoters60/1534615
ctaattcataaa

SEQ ID NO: 119324 - DNA, 12 bp, Unknown
  misc_feature (1)..( 12): Result.002 file - promoters60/1534615
aaaaatcaaaaa

SEQ ID NO: 119325 - DNA, 12 bp, Unknown
  misc_feature (1)..( 12): Result.002 file - promoters60/1534615
gtaattcattgt

SEQ ID NO: 119326 - DNA, 12 bp, Unknown
  misc_feature (1)..( 12): Result.002 file - promoters60/1534615
cgcatttatttg

SEQ ID NO: 119327 - DNA, 12 bp, Unknown
  misc_feature (1)..( 12): Result.002 file - promoters60/1534615
agtgatcaaatc

SEQ ID NO: 119328 - DNA, 9 bp, Unknown
  misc_feature (1)..( 9): Result.002 file - promoters60/1534615
cgaaagaaa

SEQ ID NO: 119329 - DNA, 9 bp, Unknown
  misc_feature (1)..( 9): Result.002 file - promoters60/1534615
ccaaagaat

SEQ ID NO: 119330 - DNA, 9 bp, Unknown
  misc_feature (1)..( 9): Result.002 file - promoters60/1534615
tcaaataaa

SEQ ID NO: 119331 - DNA, 9 bp, Unknown
  misc_feature (1)..( 9): Result.002 file - promoters60/1534615
tcacatata

SEQ ID NO: 119332 - DNA, 9 bp, Unknown
  misc_feature (1)..( 9): Result.002 file - promoters60/1534615
ttcaataaa

SEQ ID NO: 119333 - DNA, 6 bp, Unknown
  misc_feature (1)..( 6): Result.002 file - promoters60/1534629
ttcgtt

SEQ ID NO: 119334 - DNA, 6 bp, Unknown
  misc_feature (1)..( 6): Result.002 file - promoters60/1534629
ttcgtt

SEQ ID NO: 119335 - DNA, 7 bp, Unknown
  misc_feature (1)..( 7): Result.002 file - promoters60/1534629
gatgctc

SEQ ID NO: 119336 - DNA, 7 bp, Unknown
  misc_feature (1)..( 7): Result.002 file - promoters60/1534629
gatgctc

SEQ ID NO: 119337 - DNA, 10 bp, Unknown
  misc_feature (1)..( 10): Result.002 file - promoters60/1534629
ttttatcatc

SEQ ID NO: 119338 - DNA, 10 bp, Unknown
  misc_feature (1)..( 10): Result.002 file - promoters60/1534629
gtttatcagc

SEQ ID NO: 119339 - DNA, 10 bp, Unknown
  misc_feature (1)..( 10): Result.002 file - promoters60/1534629
ttttatttat

SEQ ID NO: 119340 - DNA, 8 bp, Unknown
  misc_feature (1)..( 8): Result.002 file - promoters60/1534629
taaaaaaa

SEQ ID NO: 119341 - DNA, 8 bp, Unknown
  misc_feature (1)..( 8): Result.002 file - promoters60/1534629
taaataaa

SEQ ID NO: 119342 - DNA, 6 bp, Unknown
  misc_feature (1)..( 6): Result.002 file - promoters60/1534629
aaacaa

SEQ ID NO: 119343 - DNA, 6 bp, Unknown
  misc_feature (1)..( 6): Result.002 file - promoters60/1534629
aaacaa

SEQ ID NO: 119344 - DNA, 6 bp, Unknown
  misc_feature (1)..( 6): Result.002 file - promoters60/1534629
agtagt

SEQ ID NO: 119345 - DNA, 6 bp, Unknown
  misc_feature (1)..( 6): Result.002 file - promoters60/1534629
agtagt

SEQ ID NO: 119346 - DNA, 8 bp, Unknown
  misc_feature (1)..( 8): Result.002 file - promoters60/1534629
acaacatt

SEQ ID NO: 119347 - DNA, 8 bp, Unknown
  misc_feature (1)..( 8): Result.002 file - promoters60/1534629
acaagatt

SEQ ID NO: 119348 - DNA, 7 bp, Unknown
  misc_feature (1)..( 7): Result.002 file - promoters60/1534629
tacgtga

SEQ ID NO: 119349 - DNA, 7 bp, Unknown
  misc_feature (1)..( 7): Result.002 file - promoters60/1534629
tacttga

SEQ ID NO: 119350 - DNA, 7 bp, Unknown
  misc_feature (1)..( 7): Result.002 file - promoters60/1534629
aacatgt

SEQ ID NO: 119351 - DNA, 7 bp, Unknown
  misc_feature (1)..( 7): Result.002 file - promoters60/1534629
aacttgt

SEQ ID NO: 119352 - DNA, 7 bp, Unknown
  misc_feature (1)..( 7): Result.002 file - promoters60/1534629
ttttggt

SEQ ID NO: 119353 - DNA, 7 bp, Unknown
  misc_feature (1)..( 7): Result.002 file - promoters60/1534629
tttcggt

SEQ ID NO: 119354 - DNA, 11 bp, Unknown
  misc_feature (1)..( 11): Result.002 file - promoters60/1534629
gtttaactacg

SEQ ID NO: 119355 - DNA, 11 bp, Unknown
  misc_feature (1)..( 11): Result.002 file - promoters60/1534629
gtttaagtacg

SEQ ID NO: 119356 - DNA, 6 bp, Unknown
  misc_feature (1)..( 6): Result.002 file - promoters60/1534629
gtttca

SEQ ID NO: 119357 - DNA, 6 bp, Unknown
  misc_feature (1)..( 6): Result.002 file - promoters60/1534629
gtttca

SEQ ID NO: 119358 - DNA, 9 bp, Unknown
  misc_feature (1)..( 9): Result.002 file - promoters60/1534629
atgatcttg

SEQ ID NO: 119359 - DNA, 9 bp, Unknown
  misc_feature (1)..( 9): Result.002 file - promoters60/1534629
atgatgttg

SEQ ID NO: 119360 - DNA, 8 bp, Unknown
  misc_feature (1)..( 8): Result.002 file - promoters60/1534629
gatgattt

SEQ ID NO: 119361 - DNA, 8 bp, Unknown
  misc_feature (1)..( 8): Result.002 file - promoters60/1534629
gatgattt

SEQ ID NO: 119362 - DNA, 6 bp, Unknown
  misc_feature (1)..( 6): Result.002 file - promoters60/1534629
tctatg

SEQ ID NO: 119363 - DNA, 6 bp, Unknown
  misc_feature (1)..( 6): Result.002 file - promoters60/1534629
tctatg

SEQ ID NO: 119364 - DNA, 6 bp, Unknown
  misc_feature (1)..( 6): Result.002 file - promoters60/1534629
ggaagc

SEQ ID NO: 119365 - DNA, 6 bp, Unknown
  misc_feature (1)..( 6): Result.002 file - promoters60/1534629
ggaagc

SEQ ID NO: 119366 - DNA, 8 bp, Unknown
  misc_feature (1)..( 8): Result.002 file - promoters60/1534629
ttagtagt

SEQ ID NO: 119367 - DNA, 8 bp, Unknown
  misc_feature (1)..( 8): Result.002 file - promoters60/1534629
ttagtagt

SEQ ID NO: 119368 - DNA, 10 bp, Unknown
  misc_feature (1)..( 10): Result.002 file - promoters60/1534629
gttcgaagaa

SEQ ID NO: 119369 - DNA, 10 bp, Unknown
  misc_feature (1)..( 10): Result.002 file - promoters60/1534629
gttagaagaa

SEQ ID NO: 119370 - DNA, 7 bp, Unknown
  misc_feature (1)..( 7): Result.002 file - promoters60/1534629
aataagg

SEQ ID NO: 119371 - DNA, 7 bp, Unknown
  misc_feature (1)..( 7): Result.002 file - promoters60/1534629
aattagg

SEQ ID NO: 119372 - DNA, 12 bp, Unknown
  misc_feature (1)..( 12): Result.002 file - promoters60/1534671
tcttttgagtat

SEQ ID NO: 119373 - DNA, 12 bp, Unknown
  misc_feature (1)..( 12): Result.002 file - promoters60/1534671
tctttagagctt

SEQ ID NO: 119374 - DNA, 12 bp, Unknown
  misc_feature (1)..( 12): Result.002 file - promoters60/1534671
ttattagaactt

SEQ ID NO: 119375 - DNA, 8 bp, Unknown
  misc_feature (1)..( 8): Result.002 file - promoters60/1534671
gaacatga

SEQ ID NO: 119376 - DNA, 8 bp, Unknown
  misc_feature (1)..( 8): Result.002 file - promoters60/1534671
gaagatga

SEQ ID NO: 119377 - DNA, 8 bp, Unknown
  misc_feature (1)..( 8): Result.002 file - promoters60/1534671
caagatga

SEQ ID NO: 119378 - DNA, 8 bp, Unknown
  misc_feature (1)..( 8): Result.002 file - promoters60/1534671
gtaacttt

SEQ ID NO: 119379 - DNA, 8 bp, Unknown
  misc_feature (1)..( 8): Result.002 file - promoters60/1534671
agaacttt

SEQ ID NO: 119380 - DNA, 8 bp, Unknown
  misc_feature (1)..( 8): Result.002 file - promoters60/1534671
agagcttc

SEQ ID NO: 119381 - DNA, 8 bp, Unknown
  misc_feature (1)..( 8): Result.002 file - promoters60/1534671
aacatcat

SEQ ID NO: 119382 - DNA, 8 bp, Unknown
  misc_feature (1)..( 8): Result.002 file - promoters60/1534671
aacatctc

SEQ ID NO: 119383 - DNA, 8 bp, Unknown
  misc_feature (1)..( 8): Result.002 file - promoters60/1534671
gacatctc

SEQ ID NO: 119384 - DNA, 11 bp, Unknown
  misc_feature (1)..( 11): Result.002 file - promoters60/1534671
ggttttaagga

SEQ ID NO: 119385 - DNA, 11 bp, Unknown
  misc_feature (1)..( 11): Result.002 file - promoters60/1534671
aatttaaagct

SEQ ID NO: 119386 - DNA, 11 bp, Unknown
  misc_feature (1)..( 11): Result.002 file - promoters60/1534671
aatttgaagct

SEQ ID NO: 119387 - DNA, 9 bp, Unknown
  misc_feature (1)..( 9): Result.002 file - promoters60/1534671
caaaatgag

SEQ ID NO: 119388 - DNA, 9 bp, Unknown
  misc_feature (1)..( 9): Result.002 file - promoters60/1534671
caagatgag

SEQ ID NO: 119389 - DNA, 9 bp, Unknown
  misc_feature (1)..( 9): Result.002 file - promoters60/1534671
caacatgaa

SEQ ID NO: 119390 - DNA, 9 bp, Unknown
  misc_feature (1)..( 9): Result.002 file - promoters60/1534671
tgttaaaag

SEQ ID NO: 119391 - DNA, 9 bp, Unknown
  misc_feature (1)..( 9): Result.002 file - promoters60/1534671
cgttgaaat

SEQ ID NO: 119392 - DNA, 9 bp, Unknown
  misc_feature (1)..( 9): Result.002 file - promoters60/1534671
ggtttttaa

SEQ ID NO: 119393 - DNA, 7 bp, Unknown
  misc_feature (1)..( 7): Result.002 file - promoters60/1535197
atggaga

SEQ ID NO: 119394 - DNA, 7 bp, Unknown
  misc_feature (1)..( 7): Result.002 file - promoters60/1535197
atgtaga

SEQ ID NO: 119395 - DNA, 7 bp, Unknown
  misc_feature (1)..( 7): Result.002 file - promoters60/1535197
ttttgat

SEQ ID NO: 119396 - DNA, 7 bp, Unknown
  misc_feature (1)..( 7): Result.002 file - promoters60/1535197
tttggat

SEQ ID NO: 119397 - DNA, 8 bp, Unknown
  misc_feature (1)..( 8): Result.002 file - promoters60/1535197
actacctt

SEQ ID NO: 119398 - DNA, 8 bp, Unknown
  misc_feature (1)..( 8): Result.002 file - promoters60/1535197
actaactt

SEQ ID NO: 119399 - DNA, 7 bp, Unknown
  misc_feature (1)..( 7): Result.002 file - promoters60/1535197
gaagatg

SEQ ID NO: 119400 - DNA, 7 bp, Unknown
  misc_feature (1)..( 7): Result.002 file - promoters60/1535197
gaacatg

SEQ ID NO: 119401 - DNA, 7 bp, Unknown
  misc_feature (1)..( 7): Result.002 file - promoters60/1535197
gatgaat

SEQ ID NO: 119402 - DNA, 7 bp, Unknown
  misc_feature (1)..( 7): Result.002 file - promoters60/1535197
gatgaat

SEQ ID NO: 119403 - DNA, 8 bp, Unknown
  misc_feature (1)..( 8): Result.002 file - promoters60/1535197
cacgcaaa

SEQ ID NO: 119404 - DNA, 8 bp, Unknown
  misc_feature (1)..( 8): Result.002 file - promoters60/1535197
cacacaaa

SEQ ID NO: 119405 - DNA, 6 bp, Unknown
  misc_feature (1)..( 6): Result.002 file - promoters60/1535197
gaagtt

SEQ ID NO: 119406 - DNA, 6 bp, Unknown
  misc_feature (1)..( 6): Result.002 file - promoters60/1535197
gaagtt

SEQ ID NO: 119407 - DNA, 7 bp, Unknown
  misc_feature (1)..( 7): Result.002 file - promoters60/1535197
cacaaag

SEQ ID NO: 119408 - DNA, 7 bp, Unknown
  misc_feature (1)..( 7): Result.002 file - promoters60/1535197
caccaag

SEQ ID NO: 119409 - DNA, 6 bp, Unknown
  misc_feature (1)..( 6): Result.002 file - promoters60/1535197
cttttt

SEQ ID NO: 119410 - DNA, 6 bp, Unknown
  misc_feature (1)..( 6): Result.002 file - promoters60/1535197
cttttt

SEQ ID NO: 119411 - DNA, 6 bp, Unknown
  misc_feature (1)..( 6): Result.002 file - promoters60/1535197
tttctt

SEQ ID NO: 119412 - DNA, 6 bp, Unknown
  misc_feature (1)..( 6): Result.002 file - promoters60/1535197
tttctt

SEQ ID NO: 119413 - DNA, 7 bp, Unknown
  misc_feature (1)..( 7): Result.002 file - promoters60/1535197
acacact

SEQ ID NO: 119414 - DNA, 7 bp, Unknown
  misc_feature (1)..( 7): Result.002 file - promoters60/1535197
acaaact

SEQ ID NO: 119415 - DNA, 7 bp, Unknown
  misc_feature (1)..( 7): Result.002 file - promoters60/1535197
ttaaatt

SEQ ID NO: 119416 - DNA, 7 bp, Unknown
  misc_feature (1)..( 7): Result.002 file - promoters60/1535197
ataaatt

SEQ ID NO: 119417 - DNA, 7 bp, Unknown
  misc_feature (1)..( 7): Result.002 file - promoters60/1535197
ataaata

SEQ ID NO: 119418 - DNA, 7 bp, Unknown
  misc_feature (1)..( 7): Result.002 file - promoters60/1535197
tttcgtt

SEQ ID NO: 119419 - DNA, 7 bp, Unknown
  misc_feature (1)..( 7): Result.002 file - promoters60/1535197
tttagtt

SEQ ID NO: 119420 - DNA, 6 bp, Unknown
  misc_feature (1)..( 6): Result.002 file - promoters60/1535197
gaatca

SEQ ID NO: 119421 - DNA, 6 bp, Unknown
  misc_feature (1)..( 6): Result.002 file - promoters60/1535197
gaatca

SEQ ID NO: 119422 - DNA, 7 bp, Unknown
  misc_feature (1)..( 7): Result.002 file - promoters60/1535197
tccggtt

SEQ ID NO: 119423 - DNA, 7 bp, Unknown
  misc_feature (1)..( 7): Result.002 file - promoters60/1535197
tccagtt

SEQ ID NO: 119424 - DNA, 6 bp, Unknown
  misc_feature (1)..( 6): Result.002 file - promoters60/1535197
tttccg

SEQ ID NO: 119425 - DNA, 6 bp, Unknown
  misc_feature (1)..( 6): Result.002 file - promoters60/1535197
tttccg

SEQ ID NO: 119426 - DNA, 6 bp, Unknown
  misc_feature (1)..( 6): Result.002 file - promoters60/1535197
aaccct

SEQ ID NO: 119427 - DNA, 6 bp, Unknown
  misc_feature (1)..( 6): Result.002 file - promoters60/1535197
aaccct

SEQ ID NO: 119428 - DNA, 14 bp, Unknown
  misc_feature (1)..( 14): Result.002 file - promoters60/1537314
ttgtttttttttgt

SEQ ID NO: 119429 - DNA, 14 bp, Unknown
  misc_feature (1)..( 14): Result.002 file - promoters60/1537314
ttgattttgtttgt

SEQ ID NO: 119430 - DNA, 14 bp, Unknown
  misc_feature (1)..( 14): Result.002 file - promoters60/1537314
aaatgtttgttgtt

SEQ ID NO: 119431 - DNA, 14 bp, Unknown
  misc_feature (1)..( 14): Result.002 file - promoters60/1537314
gtgattttaaaaaa

SEQ ID NO: 119432 - DNA, 7 bp, Unknown
  misc_feature (1)..( 7): Result.002 file - promoters60/1537314
aaaatgc

SEQ ID NO: 119433 - DNA, 7 bp, Unknown
  misc_feature (1)..( 7): Result.002 file - promoters60/1537314
aaaatgc

SEQ ID NO: 119434 - DNA, 7 bp, Unknown
  misc_feature (1)..( 7): Result.002 file - promoters60/1537314
aaaatgg

SEQ ID NO: 119435 - DNA, 8 bp, Unknown
  misc_feature (1)..( 8): Result.002 file - promoters60/1537314
aaacatgt

SEQ ID NO: 119436 - DNA, 12 bp, Unknown
  misc_feature (1)..( 12): Result.002 file - promoters60/1537336
atttattctacc

SEQ ID NO: 119437 - DNA, 12 bp, Unknown
  misc_feature (1)..( 12): Result.002 file - promoters60/1537336
attaatttacaa

SEQ ID NO: 119438 - DNA, 12 bp, Unknown
  misc_feature (1)..( 12): Result.002 file - promoters60/1537336
tttttttccgct

SEQ ID NO: 119439 - DNA, 12 bp, Unknown
  misc_feature (1)..( 12): Result.002 file - promoters60/1537336
aattattcatgg

SEQ ID NO: 119440 - DNA, 12 bp, Unknown
  misc_feature (1)..( 12): Result.002 file - promoters60/1537336
acgttttcagct

SEQ ID NO: 119441 - DNA, 12 bp, Unknown
  misc_feature (1)..( 12): Result.002 file - promoters60/1537336
ctttttttaaca

SEQ ID NO: 119442 - DNA, 10 bp, Unknown
  misc_feature (1)..( 10): Result.002 file - promoters60/1537336
acatatatct

SEQ ID NO: 119443 - DNA, 10 bp, Unknown
  misc_feature (1)..( 10): Result.002 file - promoters60/1537336
ttgtatatca

SEQ ID NO: 119444 - DNA, 10 bp, Unknown
  misc_feature (1)..( 10): Result.002 file - promoters60/1537336
gtatatatat

SEQ ID NO: 119445 - DNA, 10 bp, Unknown
  misc_feature (1)..( 10): Result.002 file - promoters60/1537336
ctatatatct

SEQ ID NO: 119446 - DNA, 10 bp, Unknown
  misc_feature (1)..( 10): Result.002 file - promoters60/1537336
caatagatct

SEQ ID NO: 119447 - DNA, 10 bp, Unknown
  misc_feature (1)..( 10): Result.002 file - promoters60/1537336
caaaagaaac

SEQ ID NO: 119448 - DNA, 7 bp, Unknown
  misc_feature (1)..( 7): Result.002 file - promoters60/1537456
aaagttt

SEQ ID NO: 119449 - DNA, 7 bp, Unknown
  misc_feature (1)..( 7): Result.002 file - promoters60/1537456
aaatttt

SEQ ID NO: 119450 - DNA, 7 bp, Unknown
  misc_feature (1)..( 7): Result.002 file - promoters60/1537456
aaaaata

SEQ ID NO: 119451 - DNA, 7 bp, Unknown
  misc_feature (1)..( 7): Result.002 file - promoters60/1537456
aaaaata

SEQ ID NO: 119452 - DNA, 6 bp, Unknown
  misc_feature (1)..( 6): Result.002 file - promoters60/1537456
aaaaat

SEQ ID NO: 119453 - DNA, 6 bp, Unknown
  misc_feature (1)..( 6): Result.002 file - promoters60/1537456
aaaaat

SEQ ID NO: 119454 - DNA, 9 bp, Unknown
  misc_feature (1)..( 9): Result.002 file - promoters60/1537456
ataatttta

SEQ ID NO: 119455 - DNA, 9 bp, Unknown
  misc_feature (1)..( 9): Result.002 file - promoters60/1537456
ataaattta

SEQ ID NO: 119456 - DNA, 6 bp, Unknown
  misc_feature (1)..( 6): Result.002 file - promoters60/1537456
tattta

SEQ ID NO: 119457 - DNA, 6 bp, Unknown
  misc_feature (1)..( 6): Result.002 file - promoters60/1537456
tattta

SEQ ID NO: 119458 - DNA, 7 bp, Unknown
  misc_feature (1)..( 7): Result.002 file - promoters60/1537456
attaatg

SEQ ID NO: 119459 - DNA, 7 bp, Unknown
  misc_feature (1)..( 7): Result.002 file - promoters60/1537456
attaatg

SEQ ID NO: 119460 - DNA, 8 bp, Unknown
  misc_feature (1)..( 8): Result.002 file - promoters60/1537456
cttccttt

SEQ ID NO: 119461 - DNA, 8 bp, Unknown
  misc_feature (1)..( 8): Result.002 file - promoters60/1537456
ctttcttt

SEQ ID NO: 119462 - DNA, 8 bp, Unknown
  misc_feature (1)..( 8): Result.002 file - promoters60/1537456
ctttcttc

SEQ ID NO: 119463 - DNA, 10 bp, Unknown
  misc_feature (1)..( 10): Result.002 file - promoters60/1537456
gttccttctt

SEQ ID NO: 119464 - DNA, 10 bp, Unknown
  misc_feature (1)..( 10): Result.002 file - promoters60/1537456
gttctttctt

SEQ ID NO: 119465 - DNA, 7 bp, Unknown
  misc_feature (1)..( 7): Result.002 file - promoters60/1537456
gttgttc

SEQ ID NO: 119466 - DNA, 7 bp, Unknown
  misc_feature (1)..( 7): Result.002 file - promoters60/1537456
gtttttc

SEQ ID NO: 119467 - DNA, 6 bp, Unknown
  misc_feature (1)..( 6): Result.002 file - promoters60/1537456
gattaa

SEQ ID NO: 119468 - DNA, 6 bp, Unknown
  misc_feature (1)..( 6): Result.002 file - promoters60/1537456
gattaa

SEQ ID NO: 119469 - DNA, 7 bp, Unknown
  misc_feature (1)..( 7): Result.002 file - promoters60/1537456
aaaaaca

SEQ ID NO: 119470 - DNA, 7 bp, Unknown
  misc_feature (1)..( 7): Result.002 file - promoters60/1537456
aaaaaca

SEQ ID NO: 119471 - DNA, 6 bp, Unknown
  misc_feature (1)..( 6): Result.002 file - promoters60/1537456
tccatt

SEQ ID NO: 119472 - DNA, 6 bp, Unknown
  misc_feature (1)..( 6): Result.002 file - promoters60/1537456
tccatt

SEQ ID NO: 119473 - DNA, 7 bp, Unknown
  misc_feature (1)..( 7): Result.002 file - promoters60/1537456
ttttatg

SEQ ID NO: 119474 - DNA, 7 bp, Unknown
  misc_feature (1)..( 7): Result.002 file - promoters60/1537456
ttttatg

SEQ ID NO: 119475 - DNA, 7 bp, Unknown
  misc_feature (1)..( 7): Result.002 file - promoters60/1537456
tttgaaa

SEQ ID NO: 119476 - DNA, 7 bp, Unknown
  misc_feature (1)..( 7): Result.002 file - promoters60/1537456
tttcaaa

SEQ ID NO: 119477 - DNA, 7 bp, Unknown
  misc_feature (1)..( 7): Result.002 file - promoters60/1537456
aaattgt

SEQ ID NO: 119478 - DNA, 7 bp, Unknown
  misc_feature (1)..( 7): Result.002 file - promoters60/1537456
aaaatgt

SEQ ID NO: 119479 - DNA, 6 bp, Unknown
  misc_feature (1)..( 6): Result.002 file - promoters60/1537456
tgaaaa

SEQ ID NO: 119480 - DNA, 6 bp, Unknown
  misc_feature (1)..( 6): Result.002 file - promoters60/1537456
tgaaaa

SEQ ID NO: 119481 - DNA, 7 bp, Unknown
  misc_feature (1)..( 7): Result.002 file - promoters60/1537456
ataagtt

SEQ ID NO: 119482 - DNA, 7 bp, Unknown
  misc_feature (1)..( 7): Result.002 file - promoters60/1537456
atatgtt

SEQ ID NO: 119483 - DNA, 7 bp, Unknown
  misc_feature (1)..( 7): Result.002 file - promoters60/1537456
ctcctct

SEQ ID NO: 119484 - DNA, 7 bp, Unknown
  misc_feature (1)..( 7): Result.002 file - promoters60/1537456
ctcatct

SEQ ID NO: 119485 - DNA, 9 bp, Unknown
  misc_feature (1)..( 9): Result.002 file - promoters60/1537617
tgtatggtg

SEQ ID NO: 119486 - DNA, 9 bp, Unknown
  misc_feature (1)..( 9): Result.002 file - promoters60/1537617
tgtatgcat

SEQ ID NO: 119487 - DNA, 9 bp, Unknown
  misc_feature (1)..( 9): Result.002 file - promoters60/1537617
agtaagcat

SEQ ID NO: 119488 - DNA, 10 bp, Unknown
  misc_feature (1)..( 10): Result.002 file - promoters60/1537617
ttaattttta

SEQ ID NO: 119489 - DNA, 10 bp, Unknown
  misc_feature (1)..( 10): Result.002 file - promoters60/1537617
tcaattttat

SEQ ID NO: 119490 - DNA, 10 bp, Unknown
  misc_feature (1)..( 10): Result.002 file - promoters60/1537617
tcaatcttat

SEQ ID NO: 119491 - DNA, 8 bp, Unknown
  misc_feature (1)..( 8): Result.002 file - promoters60/1537617
gtattaat

SEQ ID NO: 119492 - DNA, 8 bp, Unknown
  misc_feature (1)..( 8): Result.002 file - promoters60/1537617
ttataaat

SEQ ID NO: 119493 - DNA, 8 bp, Unknown
  misc_feature (1)..( 8): Result.002 file - promoters60/1537617
taattaaa

SEQ ID NO: 119494 - DNA, 10 bp, Unknown
  misc_feature (1)..( 10): Result.002 file - promoters60/1537617
taatttttat

SEQ ID NO: 119495 - DNA, 10 bp, Unknown
  misc_feature (1)..( 10): Result.002 file - promoters60/1537617
tcaattttat

SEQ ID NO: 119496 - DNA, 10 bp, Unknown
  misc_feature (1)..( 10): Result.002 file - promoters60/1537617
tcaatcttat

SEQ ID NO: 119497 - DNA, 7 bp, Unknown
  misc_feature (1)..( 7): Result.002 file - promoters60/1537617
attcttt

SEQ ID NO: 119498 - DNA, 7 bp, Unknown
  misc_feature (1)..( 7): Result.002 file - promoters60/1537617
attattt

SEQ ID NO: 119499 - DNA, 7 bp, Unknown
  misc_feature (1)..( 7): Result.002 file - promoters60/1537617
tttattt

SEQ ID NO: 119500 - DNA, 8 bp, Unknown
  misc_feature (1)..( 8): Result.002 file - promoters60/1537617
tatcttaa

SEQ ID NO: 119501 - DNA, 8 bp, Unknown
  misc_feature (1)..( 8): Result.002 file - promoters60/1537617
tctcttaa

SEQ ID NO: 119502 - DNA, 8 bp, Unknown
  misc_feature (1)..( 8): Result.002 file - promoters60/1537617
tattttat

SEQ ID NO: 119503 - DNA, 9 bp, Unknown
  misc_feature (1)..( 9): Result.002 file - promoters60/1537617
aataaatag

SEQ ID NO: 119504 - DNA, 9 bp, Unknown
  misc_feature (1)..( 9): Result.002 file - promoters60/1537617
aatcaatag

SEQ ID NO: 119505 - DNA, 9 bp, Unknown
  misc_feature (1)..( 9): Result.002 file - promoters60/1537617
gatatataa

SEQ ID NO: 119506 - DNA, 8 bp, Unknown
  misc_feature (1)..( 8): Result.002 file - promoters60/1537617
taaaattt

SEQ ID NO: 119507 - DNA, 8 bp, Unknown
  misc_feature (1)..( 8): Result.002 file - promoters60/1537617
taacatta

SEQ ID NO: 119508 - DNA, 8 bp, Unknown
  misc_feature (1)..( 8): Result.002 file - promoters60/1537617
ataaattt

SEQ ID NO: 119509 - DNA, 12 bp, Unknown
  misc_feature (1)..( 12): Result.002 file - promoters60/1538143
ttggcaaatccg

SEQ ID NO: 119510 - DNA, 12 bp, Unknown
  misc_feature (1)..( 12): Result.002 file - promoters60/1538143
ccttcaaaaccg

SEQ ID NO: 119511 - DNA, 12 bp, Unknown
  misc_feature (1)..( 12): Result.002 file - promoters60/1538143
ttttcaaaatat

SEQ ID NO: 119512 - DNA, 12 bp, Unknown
  misc_feature (1)..( 12): Result.002 file - promoters60/1538143
ttttcaatatct

SEQ ID NO: 119513 - DNA, 9 bp, Unknown
  misc_feature (1)..( 9): Result.002 file - promoters60/1538143
tttcttgaa

SEQ ID NO: 119514 - DNA, 9 bp, Unknown
  misc_feature (1)..( 9): Result.002 file - promoters60/1538143
tttcttcat

SEQ ID NO: 119515 - DNA, 9 bp, Unknown
  misc_feature (1)..( 9): Result.002 file - promoters60/1538143
tttattcat

SEQ ID NO: 119516 - DNA, 9 bp, Unknown
  misc_feature (1)..( 9): Result.002 file - promoters60/1538143
gaactacag

SEQ ID NO: 119517 - DNA, 9 bp, Unknown
  misc_feature (1)..( 9): Result.002 file - promoters60/1538143
gaattacaa

SEQ ID NO: 119518 - DNA, 9 bp, Unknown
  misc_feature (1)..( 9): Result.002 file - promoters60/1538143
gatttacaa

SEQ ID NO: 119519 - DNA, 9 bp, Unknown
  misc_feature (1)..( 9): Result.002 file - promoters60/1538143
acgacaaaa

SEQ ID NO: 119520 - DNA, 9 bp, Unknown
  misc_feature (1)..( 9): Result.002 file - promoters60/1538143
acgtcaaac

SEQ ID NO: 119521 - DNA, 9 bp, Unknown
  misc_feature (1)..( 9): Result.002 file - promoters60/1538143
atctcaaac

SEQ ID NO: 119522 - DNA, 8 bp, Unknown
  misc_feature (1)..( 8): Result.002 file - promoters60/1538143
cagagaaa

SEQ ID NO: 119523 - DNA, 8 bp, Unknown
  misc_feature (1)..( 8): Result.002 file - promoters60/1538143
aagaaaaa

SEQ ID NO: 119524 - DNA, 9 bp, Unknown
  misc_feature (1)..( 9): Result.002 file - promoters60/1538143
aagaagaaa

SEQ ID NO: 119525 - DNA, 9 bp, Unknown
  misc_feature (1)..( 9): Result.002 file - promoters60/1538143
ggggaaaaa

SEQ ID NO: 119526 - DNA, 8 bp, Unknown
  misc_feature (1)..( 8): Result.002 file - promoters60/1538143
tttaattc

SEQ ID NO: 119527 - DNA, 8 bp, Unknown
  misc_feature (1)..( 8): Result.002 file - promoters60/1538143
ttttattt

SEQ ID NO: 119528 - DNA, 8 bp, Unknown
  misc_feature (1)..( 8): Result.002 file - promoters60/1538143
gtttatat

SEQ ID NO: 119529 - DNA, 8 bp, Unknown
  misc_feature (1)..( 8): Result.002 file - promoters60/1538143
gcaatctt

SEQ ID NO: 119530 - DNA, 8 bp, Unknown
  misc_feature (1)..( 8): Result.002 file - promoters60/1538143
tcaaactt

SEQ ID NO: 119531 - DNA, 8 bp, Unknown
  misc_feature (1)..( 8): Result.002 file - promoters60/1538143
tcaaacca

SEQ ID NO: 119532 - DNA, 10 bp, Unknown
  misc_feature (1)..( 10): Result.002 file - promoters60/1538641
gaataaataa

SEQ ID NO: 119533 - DNA, 10 bp, Unknown
  misc_feature (1)..( 10): Result.002 file - promoters60/1538641
gaacaaataa

SEQ ID NO: 119534 - DNA, 11 bp, Unknown
  misc_feature (1)..( 11): Result.002 file - promoters60/1538641
actgtcaacat

SEQ ID NO: 119535 - DNA, 11 bp, Unknown
  misc_feature (1)..( 11): Result.002 file - promoters60/1538641
actatcatcat

SEQ ID NO: 119536 - DNA, 6 bp, Unknown
  misc_feature (1)..( 6): Result.002 file - promoters60/1538641
caataa
